United States Patent Application Publication US 2025/0084491 A1 - sequence listing, part 44

SEQ ID NO: 844012 - DNA, 75 bp, synthetic construct
  source 1..75: mol_type = other DNA
agatggagttctggtttgcgatgatcaaaatcgtcgccattgtgtcgctgatagtcgtcggcctggtcatggtgg

SEQ ID NO: 844013 - DNA, 75 bp, synthetic construct
  source 1..75: mol_type = other DNA
atggctgattgggtaacaggcaaagtcactaaagtgcagaactggaccgacgccctgtttagtctcaccgttcac

SEQ ID NO: 844014 - DNA, 75 bp, synthetic construct
  source 1..75: mol_type = other DNA
taccaccaacaatggctggaatcgtgtggtcattggcccggtgaaaggcaaagagaacgcagacagcaccctcaa

SEQ ID NO: 844015 - DNA, 75 bp, synthetic construct
  source 1..75: mol_type = other DNA
atggaaagaggggaaatctggcttgtctcgcttgctcctagcgcaggttatgagcagcagggaacgcggccggtg

SEQ ID NO: 844016 - DNA, 75 bp, synthetic construct
  source 1..75: mol_type = other DNA
acaatcccgatctggagttttacctggtaaccgttcccgatggcaaattaagtccacgactggcggcgctaaaac

SEQ ID NO: 844017 - DNA, 75 bp, synthetic construct
  source 1..75: mol_type = other DNA
aaaaacgctacgaaggcaaactgcgcattcagacggtggtcagtcgggaaacggcagcggggtcgctcaccggac

SEQ ID NO: 844018 - DNA, 75 bp, synthetic construct
  source 1..75: mol_type = other DNA
cgaagcagctggcttctttgtgctggatgaggtccctgactgcgaaacactgtggatgctggcaaccggtacagc

SEQ ID NO: 844019 - DNA, 75 bp, synthetic construct
  source 1..75: mol_type = other DNA
tagaactcgaaggcaatttaagtatgaaagaaaaggtagttgttgataaagcgatttcactctataccgaatcat

SEQ ID NO: 844020 - DNA, 75 bp, synthetic construct
  source 1..75: mol_type = other DNA
cttaatgcattatatattactggtaaaagtttcattgaggtgaagtatgaggatagaagtaaatatcaaacatta

SEQ ID NO: 844021 - DNA, 75 bp, synthetic construct
  source 1..75: mol_type = other DNA
cggttcgttcagaggcgcggaacaggcagagacggtacgtgctcagctggcgttcgaaggctttgactcaaaaat

SEQ ID NO: 844022 - DNA, 75 bp, synthetic construct
  source 1..75: mol_type = other DNA
caggtgtgcgtgcgcctacagaaccttctgccggtggtgaagtgaaaacgccggagcaactaacaccagaacaac

SEQ ID NO: 844023 - DNA, 75 bp, synthetic construct
  source 1..75: mol_type = other DNA
aaagcgccgaccatgcccgacgcgtgctgcaaagcattctggcgctgatcgcgcaggcacgtctcgaagtaccgg

SEQ ID NO: 844024 - DNA, 75 bp, synthetic construct
  source 1..75: mol_type = other DNA
accctgctgctggatgtggtgaatactgtcaacggcggacgcgtacttgccaccggcagtgccgacgttaaagga

SEQ ID NO: 844025 - DNA, 75 bp, synthetic construct
  source 1..75: mol_type = other DNA
ggatagaagtaaatatcaaacattagaaaacgataaaatcatattaatacaatctccgaaaaataatgggtacgc

SEQ ID NO: 844026 - DNA, 75 bp, synthetic construct
  source 1..75: mol_type = other DNA
ataataaagaagcagcatatgaaataagtcatgggtttgtagagtctcaagcaagcttggtaaaaagattgaggt

SEQ ID NO: 844027 - DNA, 75 bp, synthetic construct
  source 1..75: mol_type = other DNA
catctcgcctcctcaatactcaaacagggattgtttcgcagagaatactacagttttttgaaatcagcgacctga

SEQ ID NO: 844028 - DNA, 75 bp, synthetic construct
  source 1..75: mol_type = other DNA
gtgcttaccgccagtctctggtttctgtgtggtgcaattatgaatcagggcgcagcaatggttgttccaatggtt

SEQ ID NO: 844029 - DNA, 75 bp, synthetic construct
  source 1..75: mol_type = other DNA
gcggcagcggggcgtgttacgtcgcactgcgtaaaacagtacaggcgaagctggacaactgggaacgccacgcga

SEQ ID NO: 844030 - DNA, 75 bp, synthetic construct
  source 1..75: mol_type = other DNA
ggatttctcgatatcgtcccgctcaaccagccgctggaatttcgccgggaaggattgcaacatggagtgcttgat

SEQ ID NO: 844031 - DNA, 75 bp, synthetic construct
  source 1..75: mol_type = other DNA
atgatgttcagtttcattcaacaagccatggctgatggtttgcgtaacgtgctgattattcatggcaaaggacgg

SEQ ID NO: 844032 - DNA, 75 bp, synthetic construct
  source 1..75: mol_type = other DNA
aacaggcgagcctgaatcttttgcgccagccggtggaagagtgccgcaaaatgatgttcagtttcattcaacaag

SEQ ID NO: 844033 - DNA, 75 bp, synthetic construct
  source 1..75: mol_type = other DNA
gcggaaatggtcgctggcgatgctcttccagcgggcctgacagtagcggcggttggtaaaatgtctgccagcgag

SEQ ID NO: 844034 - DNA, 75 bp, synthetic construct
  source 1..75: mol_type = other DNA
cgcagctcggtgagatcatgtcattcaaaaatggactgaattttacaaaaacagataatggcgattctgtaaaaa

SEQ ID NO: 844035 - DNA, 75 bp, synthetic construct
  source 1..75: mol_type = other DNA
ttgatagggacagtgttaacggactggataagtttaagttaagggtcggtgactttgttttcggtatgtctggta

SEQ ID NO: 844036 - DNA, 75 bp, synthetic construct
  source 1..75: mol_type = other DNA
atgttctgccatctgtttggcgtgctgggggcggcgtttgcctatttcggcggtcaatgtctggatgtggcgctc

SEQ ID NO: 844037 - DNA, 75 bp, synthetic construct
  source 1..75: mol_type = other DNA
atttcgcaatgttgtctctttttccttttcgctggatatcgtcagtggtgcggtggcgattgtcggcggcattgc

SEQ ID NO: 844038 - DNA, 75 bp, synthetic construct
  source 1..75: mol_type = other DNA
ccgccggaacgccagcgggtttactgggcaaaagtttttacccagaggtgatgcgtttagatccgcgcaccacca

SEQ ID NO: 844039 - DNA, 75 bp, synthetic construct
  source 1..75: mol_type = other DNA
agaaaaaactcgcctgcctgaaagacgagaaaaaagccctgatgcagcaattgttgaccggcaaacgtcgtgtta

SEQ ID NO: 844040 - DNA, 75 bp, synthetic construct
  source 1..75: mol_type = other DNA
aatggagtcgcgccaccaccacaggtaacgtaccagtctgtgccggtgcctaaccgtattcagcgtaaaacattc

SEQ ID NO: 844041 - DNA, 75 bp, synthetic construct
  source 1..75: mol_type = other DNA
tgcttcacagcctgctgtcgggctgggagccactgccgcttacgcggccggtgatgtgctgaaaatgggtatcgg

SEQ ID NO: 844042 - DNA, 75 bp, synthetic construct
  source 1..75: mol_type = other DNA
gcctgagagatgagaaaaaagccctgatgcaacagctactgactggcaaacgtcgtgttaaggtcgatgaggcgg

SEQ ID NO: 844043 - DNA, 75 bp, synthetic construct
  source 1..75: mol_type = other DNA
agaaactctcatcggttgcgtcgataatcgattgcaaacacaggactcctgagtacgttaaatcgggaataccac

SEQ ID NO: 844044 - DNA, 75 bp, synthetic construct
  source 1..75: mol_type = other DNA
cgagaaaaaagccctgatgcagcaattgttgaccggcaaacgtcgtgttaaggtcgatgaggcggttgccgaatg

SEQ ID NO: 844045 - DNA, 75 bp, synthetic construct
  source 1..75: mol_type = other DNA
gtcaatgcaacagttatgtgaaaacatggggttgcggaggttttttgaatgagacgaacatttacagcagaggaa

SEQ ID NO: 844046 - DNA, 75 bp, synthetic construct
  source 1..75: mol_type = other DNA
ctaagcggcgaagcagagccttcagatgagatacttcagaagattatggttcagaacaactggcgcgcaacaaaa

SEQ ID NO: 844047 - DNA, 75 bp, synthetic construct
  source 1..75: mol_type = other DNA
gcaggcaacctgctgcttgacgctcaggacttcagtggtcaggggcaggtggtggccaccggtgatgtcacactg

SEQ ID NO: 844048 - DNA, 75 bp, synthetic construct
  source 1..75: mol_type = other DNA
gcaaacagagataccgcgattcactgacgtcagcctccggcagtatgaaacgcccgaaaagaatgcttgttaccg

SEQ ID NO: 844049 - DNA, 75 bp, synthetic construct
  source 1..75: mol_type = other DNA
aaggcccactacgaaaatgtagaaaaaatgtatgataccattcgtccgttaatgaaaaaactgggtttcccagaa

SEQ ID NO: 844050 - DNA, 75 bp, synthetic construct
  source 1..75: mol_type = other DNA
ctgggattatgctatcaagtcgaaaattgagtttctcacaaaacgcgaggagcaatgtttagattatcaaatgaa

SEQ ID NO: 844051 - DNA, 75 bp, synthetic construct
  source 1..75: mol_type = other DNA
ttaagcggcgaagcagagccttcagatgagatacttgaggagattatgattcagaacaactggcgcgcaactaaa

SEQ ID NO: 844052 - DNA, 75 bp, synthetic construct
  source 1..75: mol_type = other DNA
tacccagtataagagaacaacaaaaaatcgccgccgtcctgtccgctgctgatgctgaaatctccacacttgaga

SEQ ID NO: 844053 - DNA, 75 bp, synthetic construct
  source 1..75: mol_type = other DNA
tggacgggctcatggcttgctaaatgtaaaaccttcagactttttttcattaaaagttccggttcctagctttga

SEQ ID NO: 844054 - DNA, 75 bp, synthetic construct
  source 1..75: mol_type = other DNA
tatatatgttttgaacttactacacccaaaaaatcatgtggtgactattgggagcattattttgagtcagggctt

SEQ ID NO: 844055 - DNA, 75 bp, synthetic construct
  source 1..75: mol_type = other DNA
ggattgctacaactgaaaaatatctgactgaattaggattgaacagttcatccgcaagaatatatccaaaaaact

SEQ ID NO: 844056 - DNA, 75 bp, synthetic construct
  source 1..75: mol_type = other DNA
gtttcagaagatttaaatggtgtagtttgcggttaccacctcgcaataattcgcccgaaaaataaaattgttgtt

SEQ ID NO: 844057 - DNA, 75 bp, synthetic construct
  source 1..75: mol_type = other DNA
atgcagcaattacttaccgggaagaaacgcttgctggatgagaatggggtgaggtttagtgtggagtggaagaga

SEQ ID NO: 844058 - DNA, 75 bp, synthetic construct
  source 1..75: mol_type = other DNA
atgcgacagccacgttacaggccatgcagtcctgtcggcgggagtccgcggcttgactgctatgaccgcctgctg

SEQ ID NO: 844059 - DNA, 75 bp, synthetic construct
  source 1..75: mol_type = other DNA
tgccgacagccgggcattacgcagccactggtttgtgcgcgagaacggcaccctgctggagtccagccgggggtt

SEQ ID NO: 844060 - DNA, 75 bp, synthetic construct
  source 1..75: mol_type = other DNA
ggcgggagtccgcggcgctggagcggcttgactgctatgaccgcctgctggcaccgctgtccccgtcagggtttg

SEQ ID NO: 844061 - DNA, 75 bp, synthetic construct
  source 1..75: mol_type = other DNA
acgttcgtttgccatcggttccgtcttcggtactctggcgattatcggtaccctgcaactcggagacagttctgc

SEQ ID NO: 844062 - DNA, 75 bp, synthetic construct
  source 1..75: mol_type = other DNA
tggcgcaccactggcgatggaagcattaatggccttcttcctcgaatccacctttgtcgggctgttcttcttcgg

SEQ ID NO: 844063 - DNA, 75 bp, synthetic construct
  source 1..75: mol_type = other DNA
agataacgccgccggaaagctgacctttaacattgacggattggcacgggttattgcgccactacgcgacgcctg

SEQ ID NO: 844064 - DNA, 75 bp, synthetic construct
  source 1..75: mol_type = other DNA
cgccagctacggatgctgaaatttcacggtctgggtgtcgatgcctatgacagacaaacctggggccgtgcaccg

SEQ ID NO: 844065 - DNA, 75 bp, synthetic construct
  source 1..75: mol_type = other DNA
gatgatgaaaacctcgcccgccagctacgtatgctgaaatttcatggtctgggcgtcgatgcatatgacagacaa

SEQ ID NO: 844066 - DNA, 75 bp, synthetic construct
  source 1..75: mol_type = other DNA
tgatggaagcgttaaaagaaagaggcattggaaccgggttacatttccgcgccgcccacacgcaaaaatattatc

SEQ ID NO: 844067 - DNA, 75 bp, synthetic construct
  source 1..75: mol_type = other DNA
caccctgctggagtccagccgggggttatccgggattgatgaaattaagcaactgttcggcgcaaaaacgctgac

SEQ ID NO: 844068 - DNA, 75 bp, synthetic construct
  source 1..75: mol_type = other DNA
cagttcgggactaactggtcttactattcccactatgtaggggatatcttcggtgcgccactggcaatcgaaggt

SEQ ID NO: 844069 - DNA, 75 bp, synthetic construct
  source 1..75: mol_type = other DNA
gctgtcagatacggcaaatgcactggctgaaaatgcccggaatgccggagctgggacgatttatgtcggtggccc

SEQ ID NO: 844070 - DNA, 75 bp, synthetic construct
  source 1..75: mol_type = other DNA
cgcaggcgatctcatcttctcaatggtgctgatttgcggcctgtataccctgttcttggtggcagaattgttctt

SEQ ID NO: 844071 - DNA, 75 bp, synthetic construct
  source 1..75: mol_type = other DNA
agcgatacttacacgcaatctgaaatccaggctatagccaatgctctaattgctgagcgtcggcgcactaaggct

SEQ ID NO: 844072 - DNA, 75 bp, synthetic construct
  source 1..75: mol_type = other DNA
ttaaaagtggccagagcgtcatcttcaatgaatctgttgaccacggtcccttccctctggcccagcttaaaaaac

SEQ ID NO: 844073 - DNA, 75 bp, synthetic construct
  source 1..75: mol_type = other DNA
gactcaggtagcgaagctggaaggttatcaggaagatcaagcgaaaaaactggcgaaacagcaagttgaaggtgc

SEQ ID NO: 844074 - DNA, 75 bp, synthetic construct
  source 1..75: mol_type = other DNA
gaaattgtcacaaccagaatcaagaaagctaccgccctacttcttgagatggatgatattgatgaactaaaaatt

SEQ ID NO: 844075 - DNA, 75 bp, synthetic construct
  source 1..75: mol_type = other DNA
ggagtgtcatccgcaaccgcattggcgagaaaaatggctgctgcgcgccgcgctgtacggtattccgctgccgtg

SEQ ID NO: 844076 - DNA, 75 bp, synthetic construct
  source 1..75: mol_type = other DNA
attcccactatgtaggggatatcttcggtgcgccgctggcaatcgaaggtctgatggccttcttcctagaatcca

SEQ ID NO: 844077 - DNA, 75 bp, synthetic construct
  source 1..75: mol_type = other DNA
ggcgctgaaaatggcgctatatgggcgtcttcgcgcctgtctcgccattctgcatcccacgctgaacgagccgat

SEQ ID NO: 844078 - DNA, 75 bp, synthetic construct
  source 1..75: mol_type = other DNA
cgacttcgcgcctgtatcgccattctctctcccacactgaacgatcccattccatcccatctggtagacagcctg

SEQ ID NO: 844079 - DNA, 75 bp, synthetic construct
  source 1..75: mol_type = other DNA
ctcaatacgctatatcgcgtcgacggtaaaactcgactctacctgaagacattgcagaaactggcccgtaaagag

SEQ ID NO: 844080 - DNA, 75 bp, synthetic construct
  source 1..75: mol_type = other DNA
gattcaaaccacgcttgtcaacaacaatgtgagcaagccactgtttgatatggcaaaaggagaaacaccttttga

SEQ ID NO: 844081 - DNA, 75 bp, synthetic construct
  source 1..75: mol_type = other DNA
aaaatgtcgctggaagattttgtcggtatgtttgcgatgccagcacttaccgttccggctgtaccggccatcccg

SEQ ID NO: 844082 - DNA, 75 bp, synthetic construct
  source 1..75: mol_type = other DNA
gtctggttctttgcagcaaaactgaaagcaccacgctggctgcatactgctgatggcgtggtctttatcgaagat

SEQ ID NO: 844083 - DNA, 75 bp, synthetic construct
  source 1..75: mol_type = other DNA
tagagcacctcaacacccgtcggcgcgaaattgcccagcaatatcagcaagcactggcagctctcccctttcagc

SEQ ID NO: 844084 - DNA, 75 bp, synthetic construct
  source 1..75: mol_type = other DNA
gctgcgcgtcgcattaacccggagatgaaagtcggctgtatgctggcgatggtgccgctctatccctactgctgt

SEQ ID NO: 844085 - DNA, 75 bp, synthetic construct
  source 1..75: mol_type = other DNA
ttgcgcacgccgtcccgctatctttttcgcttgccatcgcatgaaattactccttttcgggcaacgctcttttta

SEQ ID NO: 844086 - DNA, 75 bp, synthetic construct
  source 1..75: mol_type = other DNA
ggacagctttctgcagaaagttctatcaaaactaccactaacccaccggcatttggctgcacctttgttgacctt

SEQ ID NO: 844087 - DNA, 75 bp, synthetic construct
  source 1..75: mol_type = other DNA
tgctcgctgtgtgcgctacggtgttgtgtttttcactgatattcagggaacggttatgtgaactgaatattcaca

SEQ ID NO: 844088 - DNA, 75 bp, synthetic construct
  source 1..75: mol_type = other DNA
tcaaaacggatggcggtccgcgtcgtcctggcgtggtactggcagttgaggagtttagtgaaggcacaatgtacc

SEQ ID NO: 844089 - DNA, 75 bp, synthetic construct
  source 1..75: mol_type = other DNA
ggccagtaagatagaagttctggctggtaaacaacgcttgtctaatagtttcgaggttagctcacttccagatgc

SEQ ID NO: 844090 - DNA, 75 bp, synthetic construct
  source 1..75: mol_type = other DNA
gcttcggccctggacccgcagggttacgctaccccggtagcgtatctcaacgggcaaatccctttgtggttcccc

SEQ ID NO: 844091 - DNA, 75 bp, synthetic construct
  source 1..75: mol_type = other DNA
gcaagggtcggatctggcctgtctggtgcgacgtctgaagcatcacataggtgtggataaccaacgattcgcctg

SEQ ID NO: 844092 - DNA, 75 bp, synthetic construct
  source 1..75: mol_type = other DNA
tcagaagcgttgcgtattctgctcccggtaagcagttacagtaatgaccgtgtcgtggaggcttctcttggggcg

SEQ ID NO: 844093 - DNA, 75 bp, synthetic construct
  source 1..75: mol_type = other DNA
agtggcaagaattacccgttatcaccacaccagaagcggcacttgcagaagacgccgctaaaattcacagccgcg

SEQ ID NO: 844094 - DNA, 75 bp, synthetic construct
  source 1..75: mol_type = other DNA
taaacgcgataccgccgatcgcgcactgttaactcgccatgttcgccatcatggtgatgccgttgccatcgtcgt

SEQ ID NO: 844095 - DNA, 75 bp, synthetic construct
  source 1..75: mol_type = other DNA
tattagctgcctgcaagaaaataaaaacctgattgtcagtcgcagttacgcgcatcagggcgctgggtggattat

SEQ ID NO: 844096 - DNA, 75 bp, synthetic construct
  source 1..75: mol_type = other DNA
gtcgctacggcgcaatctcacaaaccgacatattcagcttattgccattggtggggccattggtacggggttgtt

SEQ ID NO: 844097 - DNA, 75 bp, synthetic construct
  source 1..75: mol_type = other DNA
tggaaaggttcgcaatcattgtaaacaatgcaaggggcgtggcgagataccggataaaacagccagcgaagcggc

SEQ ID NO: 844098 - DNA, 75 bp, synthetic construct
  source 1..75: mol_type = other DNA
gctatggcgaaagattacgaatatgtgatggaattaaatgaagaacaacgcaatgatcttattattcttgttgcc

SEQ ID NO: 844099 - DNA, 75 bp, synthetic construct
  source 1..75: mol_type = other DNA
gttttcgcgtttcgggattactgccagagtgcagcgaccgaaaaagtttgccctacgtgctgcggtcacgggcat

SEQ ID NO: 844100 - DNA, 75 bp, synthetic construct
  source 1..75: mol_type = other DNA
gccatcgcagtcagttcagccactgccggaatgcacatcacgctgatggcgctgggggttggtgttgatgatgaa

SEQ ID NO: 844101 - DNA, 75 bp, synthetic construct
  source 1..75: mol_type = other DNA
gtttcccttagccgtgaagagtgtttcctcgcaacccgtccccgccacgcttttaccattgacgggcaaatgggc

SEQ ID NO: 844102 - DNA, 75 bp, synthetic construct
  source 1..75: mol_type = other DNA
gctccatcaaaaccaccactaacccaccggcgtttggctgtacctttgttgatctgacggtcgatattgcgctgt

SEQ ID NO: 844103 - DNA, 75 bp, synthetic construct
  source 1..75: mol_type = other DNA
gtttgataacaaagaatatctctattacaaagcgattgcgccagatatcgccttcattcgcgcggtaatgactcc

SEQ ID NO: 844104 - DNA, 75 bp, synthetic construct
  source 1..75: mol_type = other DNA
taccagccgtatgctgtttggtctggcgcaagaaggtgttgcgccgaaagcgttcgctaaactttctaagcgcgc

SEQ ID NO: 844105 - DNA, 75 bp, synthetic construct
  source 1..75: mol_type = other DNA
tctacgtcttcgcgctgattgtgattatgtctgtgacgccgtggagttcggtggtcgcggagaaaagcccgtttg

SEQ ID NO: 844106 - DNA, 75 bp, synthetic construct
  source 1..75: mol_type = other DNA
gtcagacgaaagcaggggaacatcacctgatgcacttaatacgacggatgcgcttaccgccgctggtatggcgca

SEQ ID NO: 844107 - DNA, 75 bp, synthetic construct
  source 1..75: mol_type = other DNA
cgatgcaaagggcgcggcgagataccggataaagcagccagtgaagcagcggaaatgccagtgttcaaaacgtgc

SEQ ID NO: 844108 - DNA, 75 bp, synthetic construct
  source 1..75: mol_type = other DNA
tacaaagcgattgcgccagatatcgccttcattcgcgctaccacctgcgacagtgaagctacgccacttttgaag

SEQ ID NO: 844109 - DNA, 75 bp, synthetic construct
  source 1..75: mol_type = other DNA
atgaaacaaatgtcactaattgagatggatggttttctgaaaggtaaattcttcccacgagatttaaaggttaac

SEQ ID NO: 844110 - DNA, 75 bp, synthetic construct
  source 1..75: mol_type = other DNA
tatggagcatatgcggtcgagcggttcgttaacatttggagattgctacatatcacttaacgagttcgccgccca

SEQ ID NO: 844111 - DNA, 75 bp, synthetic construct
  source 1..75: mol_type = other DNA
ccagtcggtttgggcagatctggagggattatctcttctgttgtgccataaaccactggcagacgtatttatcga

SEQ ID NO: 844112 - DNA, 75 bp, synthetic construct
  source 1..75: mol_type = other DNA
gctacttaagatatgaaggtgcaggtcttgaaatgatctataacccgaaaacgggacaagttggtcatattcaac

SEQ ID NO: 844113 - DNA, 75 bp, synthetic construct
  source 1..75: mol_type = other DNA
tgaaagctacaatgataaccagtggaagagattattccgtagcaaacgtaagcaagaactcatttctgagaacgt

SEQ ID NO: 844114 - DNA, 75 bp, synthetic construct
  source 1..75: mol_type = other DNA
cgttctgctggaatcacgattgataaccttgaggccaagtgcactgcgctggcagcggagaatgcggggatgaag

SEQ ID NO: 844115 - DNA, 75 bp, synthetic construct
  source 1..75: mol_type = other DNA
cgttctgctggaatcacgattgataaccttgaggccaagtgcgtggcgctggcagcggagagtgcggggatgaag

SEQ ID NO: 844116 - DNA, 75 bp, synthetic construct
  source 1..75: mol_type = other DNA
ctgggttagtgagttcactgaaacaccagccaccgacgccttcctggctgaagtgagggcgcagggtgtggagat

SEQ ID NO: 844117 - DNA, 75 bp, synthetic construct
  source 1..75: mol_type = other DNA
ggtgataactttgatagccagggtaatcatcactacgcaaacaaagatctggttaaatacgttgaagtcggtgcg

SEQ ID NO: 844118 - DNA, 75 bp, synthetic construct
  source 1..75: mol_type = other DNA
acttagagctggatgatgccgcgaatcaggtgctctgctactgctatgaaggtaatctgttggcgctggcacagg

SEQ ID NO: 844119 - DNA, 75 bp, synthetic construct
  source 1..75: mol_type = other DNA
tgtggagatgctggcaaaaaatcatcagagtatcgtcaatgcacttaagggagattctctcttttctgatggtga

SEQ ID NO: 844120 - DNA, 75 bp, synthetic construct
  source 1..75: mol_type = other DNA
agatgtacgcagataacctcgacaacggagcagacgacgcagaacgaggtggttttgattatgccgttaagtttc

SEQ ID NO: 844121 - DNA, 75 bp, synthetic construct
  source 1..75: mol_type = other DNA
taaatttaccggtggtatcgaggcttatgacagctccgtgagtgtgacctcacagaatgctgtttttgatcgtgt

SEQ ID NO: 844122 - DNA, 75 bp, synthetic construct
  source 1..75: mol_type = other DNA
aggcaactttgccggtctgggtacgaagcactacggaacccactcctggtatgccggagcggaaacgggttaccg

SEQ ID NO: 844123 - DNA, 75 bp, synthetic construct
  source 1..75: mol_type = other DNA
aacattttaccgatggcctacaccctgctgatgtattacttcctgcgggtgaaaaaagcgcatccggtgctgtta

SEQ ID NO: 844124 - DNA, 75 bp, synthetic construct
  source 1..75: mol_type = other DNA
tcgggatcacggtaatcggcgggctgatcgcttcgtatgtgcatattaacgtggtgacatcgtttgccatcgaca

SEQ ID NO: 844125 - DNA, 75 bp, synthetic construct
  source 1..75: mol_type = other DNA
atgcctatgcagcgcagatggatacccgaaatttctggatccgtgattatcttgatttggcacagaataaaggtg

SEQ ID NO: 844126 - DNA, 75 bp, synthetic construct
  source 1..75: mol_type = other DNA
ttctgcagaacagtggtgttttcgtgaattccaccctttctgtccgtgacggcggtcatctgacggcacaaaaag

SEQ ID NO: 844127 - DNA, 75 bp, synthetic construct
  source 1..75: mol_type = other DNA
gtatgatggcatcaatattaccggtaatggttttggcttccgccaggacgttcgtgaaggacgctctgcagatga

SEQ ID NO: 844128 - DNA, 75 bp, synthetic construct
  source 1..75: mol_type = other DNA
acgataataagaataaaaaatgggttattcttgggactcttacaggaatagtgtattccaacaattggcagagat

SEQ ID NO: 844129 - DNA, 75 bp, synthetic construct
  source 1..75: mol_type = other DNA
ataaaaataaagatttgaaattccatggtggcgggagcattgagctcaccgataacctgaactcaggaaccggag

SEQ ID NO: 844130 - DNA, 75 bp, synthetic construct
  source 1..75: mol_type = other DNA
catatcttactgatctctttttacagataaaacactcattgtcatttattattcaaaaaggatttaaaatagaat

SEQ ID NO: 844131 - DNA, 75 bp, synthetic construct
  source 1..75: mol_type = other DNA
atatcataattggccgttatcgaaacccataccaagtgaatgaattggttattaaaaaacatttttcaattttct

SEQ ID NO: 844132 - DNA, 75 bp, synthetic construct
  source 1..75: mol_type = other DNA
gtgatgttccggtatttattgataagtatgatggaatcaatattacaggtaatggttttggcttccgccaggatg

SEQ ID NO: 844133 - DNA, 75 bp, synthetic construct
  source 1..75: mol_type = other DNA
gcgacgttccggtgttcattgatatgtatgatggcatcaatatcaccggtaatggttttggcttccgccaggacg

SEQ ID NO: 844134 - DNA, 75 bp, synthetic construct
  source 1..75: mol_type = other DNA
caacgacgatgacttctacgaagcaaacggcatcgctaccgatgatatcgttgctgtgggcttagtctaccagtt

SEQ ID NO: 844135 - DNA, 75 bp, synthetic construct
  source 1..75: mol_type = other DNA
tcaaaatcgaaaatacctttttgagtgaagatcaggttgatcaactggcgttatatgcaccgcaagccacggtaa

SEQ ID NO: 844136 - DNA, 75 bp, synthetic construct
  source 1..75: mol_type = other DNA
ggatgaaacaaacagacagatgtccggcagcgcactgaccgtatcagacagcacctggatcaacccggagccggt

SEQ ID NO: 844137 - DNA, 75 bp, synthetic construct
  source 1..75: mol_type = other DNA
caataatcagatacaactgttccgtctcgatacccggaccttccagctcgccatcctgaatgccgacacctcaat

SEQ ID NO: 844138 - DNA, 75 bp, synthetic construct
  source 1..75: mol_type = other DNA
ttgttgctcagtaccaatttgatttcggcctgcgtccttcaattgcttacctccaatctaaaggtaaggatttag

SEQ ID NO: 844139 - DNA, 75 bp, synthetic construct
  source 1..75: mol_type = other DNA
gtggatttgcccctatatttccagacacctgttatcacttaacccattactggcctgctgccgcagatattcccg

SEQ ID NO: 844140 - DNA, 75 bp, synthetic construct
  source 1..75: mol_type = other DNA
tactctaaaggtaaagatatcaaaggggtacctggacatagatatgttgacgctgaccgtgtgaactacattgaa

SEQ ID NO: 844141 - DNA, 75 bp, synthetic construct
  source 1..75: mol_type = other DNA
tcacggcgaccggtgagcctgtaccgcagatgcctgcctcaccgcccggcccggaaggcgaaccacagccaggaa

SEQ ID NO: 844142 - DNA, 75 bp, synthetic construct
  source 1..75: mol_type = other DNA
acggtatcaagggcgaagtggtgatgcgtaacggcaaaatcctcggctgggcatggggcgcgggatttgttgacg

SEQ ID NO: 844143 - DNA, 75 bp, synthetic construct
  source 1..75: mol_type = other DNA
gctgaagcagctgggcaacctgaatccgcagcagtttatgtccggcagccagggagggggcaacgatggcaaata

SEQ ID NO: 844144 - DNA, 75 bp, synthetic construct
  source 1..75: mol_type = other DNA
tggggattatttctctgagtgctgcggcttgcaacgcagaaccagaagtaaaaacagcagaatggtatatgcagc

SEQ ID NO: 844145 - DNA, 75 bp, synthetic construct
  source 1..75: mol_type = other DNA
gaataccgcagtcaggaactgaaccgcgaagcggctctggcccggctggtggcagtgattaaagatttaacaaca

SEQ ID NO: 844146 - DNA, 75 bp, synthetic construct
  source 1..75: mol_type = other DNA
caacggcgctggtacatgggatgacggttgtaaccagaaatgttggtgattttgaattaaccggagtatcaatta

SEQ ID NO: 844147 - DNA, 75 bp, synthetic construct
  source 1..75: mol_type = other DNA
ctccaatctaaaggtaaggatttaggtggtcaagaaatgtacaacaatggtaattatcattataccaataaagat

SEQ ID NO: 844148 - DNA, 75 bp, synthetic construct
  source 1..75: mol_type = other DNA
taaccccacgcggcgttctgcggtgctctcttccatgcagggcagcttgccgggtggctgcgatgcggtggataa

SEQ ID NO: 844149 - DNA, 75 bp, synthetic construct
  source 1..75: mol_type = other DNA
cgtcttcgcctcttatttgctgggcgagagtgacggaatagcgaaaaacgccgaatgggcggcagagatttgtgg

SEQ ID NO: 844150 - DNA, 75 bp, synthetic construct
  source 1..75: mol_type = other DNA
gcgctggcaggcggttataccgggcatctgggggattattcgaccggcgcggcacaggcgatcatgccgtatgtc

SEQ ID NO: 844151 - DNA, 75 bp, synthetic construct
  source 1..75: mol_type = other DNA
gcgttagaaaacccgggcggcgcataccaacacaacggcatgaatcgccatttcccggatattcgccttatctgg

SEQ ID NO: 844152 - DNA, 75 bp, synthetic construct
  source 1..75: mol_type = other DNA
ctgttcttactgctgcccattgggggccaatggtggttgaaactgacggcgaaacggtcttcagctcacgtggcg

SEQ ID NO: 844153 - DNA, 75 bp, synthetic construct
  source 1..75: mol_type = other DNA
gcctcgacattattacaacgctatatggcgctggcaggcggttataccgggcatctgggggattattcgaccggt

SEQ ID NO: 844154 - DNA, 75 bp, synthetic construct
  source 1..75: mol_type = other DNA
acgtgttgactaaagacctccccagctcgcggctggggaatggctgtgcggggaatacagcgttggcgtggctgg

SEQ ID NO: 844155 - DNA, 75 bp, synthetic construct
  source 1..75: mol_type = other DNA
ttggatgaagatgacagtttctacgcagccaacggcatctctaccgatgatattgtcgctttaggtctggtttat

SEQ ID NO: 844156 - DNA, 75 bp, synthetic construct
  source 1..75: mol_type = other DNA
gggtgctgcatattcaaactctgatcgctcagatcgccaggttggagttggtttaaatgatcgtaaccatagcaa

SEQ ID NO: 844157 - DNA, 75 bp, synthetic construct
  source 1..75: mol_type = other DNA
gcgattacagcaatcaacatctggtgccgatgaagcaagtggtgccaccgcgtggtgaagcgcgtaatgattttg

SEQ ID NO: 844158 - DNA, 75 bp, synthetic construct
  source 1..75: mol_type = other DNA
ccgcactgcgtgacagcgggaaaaagctgatctgcattgatccaatgcgatcggaaaccgtcgatttctttggcg

SEQ ID NO: 844159 - DNA, 75 bp, synthetic construct
  source 1..75: mol_type = other DNA
tggcgcttgcaggcggttataccgggcatctgggggattattcgaccggtgcagcacaggcgatcatgccgtatg

SEQ ID NO: 844160 - DNA, 75 bp, synthetic construct
  source 1..75: mol_type = other DNA
tatgttacccgcttccattacacagacaaggtgtattatcgcattgtgtatgacttccatgaagtggctgtattt

SEQ ID NO: 844161 - DNA, 75 bp, synthetic construct
  source 1..75: mol_type = other DNA
ctggtttgtatatttatcgcatagtgcatgatttccgtgagatcgcggagttttgcgcccgcgaaggcagtaaac

SEQ ID NO: 844162 - DNA, 75 bp, synthetic construct
  source 1..75: mol_type = other DNA
cttattgtgattgccgtaggcattatcattttctttgttctgaatgacaaagaagaggcaccgtccgtcgaggtg

SEQ ID NO: 844163 - DNA, 75 bp, synthetic construct
  source 1..75: mol_type = other DNA
atcttctgataaggatctttcatcagaggaaaaaacaaaagtaataaaactcgttcacggaatggtgaatcagta

SEQ ID NO: 844164 - DNA, 75 bp, synthetic construct
  source 1..75: mol_type = other DNA
gaatctgattcatccgaaagattacagttatttcaacacattaagcaccaagctcggctggtcaaaaaaattatt

SEQ ID NO: 844165 - DNA, 75 bp, synthetic construct
  source 1..75: mol_type = other DNA
tgattgagttcgaagtgtatatcgacgagatctttgcgttttctcagcgatctgatggactaattatttcgacgc

SEQ ID NO: 844166 - DNA, 75 bp, synthetic construct
  source 1..75: mol_type = other DNA
attaaccgtattgcccgggattttaatgttgccattaccacccgttggcccggaagccgggattatcaaccccgg

SEQ ID NO: 844167 - DNA, 75 bp, synthetic construct
  source 1..75: mol_type = other DNA
ttgcgcgtgctgaattcgaggcgcgccagcgagctgcacgtaccgatgaaaccacatacacagtgtggggctggc

SEQ ID NO: 844168 - DNA, 75 bp, synthetic construct
  source 1..75: mol_type = other DNA
ggcggcattggtagcacgcgcgctcatacagctctggtgctgggtaaaaacgttatttcctgcgataccgagaaa

SEQ ID NO: 844169 - DNA, 75 bp, synthetic construct
  source 1..75: mol_type = other DNA
caagaaaaaaatagttgacgaaatgcctcaagtaaagcgtgaaatagttcgaggattaactgttgggactgaatg

SEQ ID NO: 844170 - DNA, 75 bp, synthetic construct
  source 1..75: mol_type = other DNA
tcgcgttctgtagaacttcatgaaaaagtcatcggtgcatacacagccaaagatttttacctcattctgctcttt

SEQ ID NO: 844171 - DNA, 75 bp, synthetic construct
  source 1..75: mol_type = other DNA
aatgaaattcagcaaaagttattatgagaaattatgggagcaaggcagacctgcgccattcgtgcaagcaagaga

SEQ ID NO: 844172 - DNA, 75 bp, synthetic construct
  source 1..75: mol_type = other DNA
gccgcaacgtgcgctggtcagtccggaagcgataggcagcctgattgtcactaaagagggcgatactctggattg

SEQ ID NO: 844173 - DNA, 75 bp, synthetic construct
  source 1..75: mol_type = other DNA
atgtcccgttttgtccttggtaactgcatcgatgttatgacgcgtatccctgataacgccattgatttcatgtcg

SEQ ID NO: 844174 - DNA, 75 bp, synthetic construct
  source 1..75: mol_type = other DNA
tgcagctgccccctaagaaccgtacgtgccagtttcccggcatacggctcaagcctttcaataactccacattag

SEQ ID NO: 844175 - DNA, 75 bp, synthetic construct
  source 1..75: mol_type = other DNA
ctctatgggcattctaaaggtgatgaggtgttatgcgcccttgcccgcactctcgaaagttgcgctcgcaaaggc

SEQ ID NO: 844176 - DNA, 75 bp, synthetic construct
  source 1..75: mol_type = other DNA
gtatcggtcagggaatggagcgtgcctcccagccggctgtcgggctgggtgccactgccgcttacggggccggcg

SEQ ID NO: 844177 - DNA, 75 bp, synthetic construct
  source 1..75: mol_type = other DNA
aacggagtcacgccgccgccacaggtgacgtaccagtctgtgccggtgccgaaccggatacagcgtaaaacgttc

SEQ ID NO: 844178 - DNA, 75 bp, synthetic construct
  source 1..75: mol_type = other DNA
agtatgaggaaatccgtcgtgaactggatgtcctgaacaaacagcgcggtgatgaccagcgtcgtattgaaaagc

SEQ ID NO: 844179 - DNA, 75 bp, synthetic construct
  source 1..75: mol_type = other DNA
agcaggcgcagcaacgggagagctggcagccagagcgattgccggaatgctgtatccgggagtgaagcagtcaga

SEQ ID NO: 844180 - DNA, 75 bp, synthetic construct
  source 1..75: mol_type = other DNA
atggtatgacgatggagcgtgtggatcgcccgacggctgaatgtgctgccgtactggaaaaagcgccgttgccga

SEQ ID NO: 844181 - DNA, 75 bp, synthetic construct
  source 1..75: mol_type = other DNA
cactcatgttgctggctggctgtgccgaagttcaaaactataacaatgtcgtgaaaactcccgcgccagactggc

SEQ ID NO: 844182 - DNA, 75 bp, synthetic construct
  source 1..75: mol_type = other DNA
acggaagctggtgctgagctggtgaagacagaagcagaccttgcgcaggcaaaagagaatatggctggtagggcc

SEQ ID NO: 844183 - DNA, 75 bp, synthetic construct
  source 1..75: mol_type = other DNA
actaacggcttatgactatgccatttatggtggccttgatggagtagtaacactggtaagtccggatactttacg

SEQ ID NO: 844184 - DNA, 75 bp, synthetic construct
  source 1..75: mol_type = other DNA
ggggtggtttctgcaggacaggacataatggaaattattccgctggaagaccagttgctgattgaagcttatata

SEQ ID NO: 844185 - DNA, 75 bp, synthetic construct
  source 1..75: mol_type = other DNA
gcgcagtctgaccgccgatctgattgattgtgctgccgagccgactcaattcaatgggcaatcactcgttcaggt

SEQ ID NO: 844186 - DNA, 75 bp, synthetic construct
  source 1..75: mol_type = other DNA
ggctgcagtctgagcctggcttcgcggccttatgcggagtcagtcccgttcccgtctcatcaggaaaaacaaatc

SEQ ID NO: 844187 - DNA, 75 bp, synthetic construct
  source 1..75: mol_type = other DNA
tgagtctctgcgggtattaaaaacttgccgaaaaacagcaatatcagcccgcagagtcgctctccagattatcca

SEQ ID NO: 844188 - DNA, 75 bp, synthetic construct
  source 1..75: mol_type = other DNA
gctcgccgacaacgcggctattgtgttgtggcaagcgcagactcaacgtgcgtcttattacgcgtcgcgtgaaaa

SEQ ID NO: 844189 - DNA, 75 bp, synthetic construct
  source 1..75: mol_type = other DNA
cacctatggctcaggtctgcttcgctatttgcagaatgccgggttagaagttcttgaagtgaccgcaccagaccg

SEQ ID NO: 844190 - DNA, 75 bp, synthetic construct
  source 1..75: mol_type = other DNA
ttaaacgtaatgctgttggatacgaaagcgcttcgcagttgctgatcacggcaggagacaatccccaacgattaa

SEQ ID NO: 844191 - DNA, 75 bp, synthetic construct
  source 1..75: mol_type = other DNA
cttctggaaaaacgaaccgttaccgacttaatcgtggtggagatcgtgctgcaaatagtgcacttcacatcatcg

SEQ ID NO: 844192 - DNA, 75 bp, synthetic construct
  source 1..75: mol_type = other DNA
gatggaaacattgatacgcacaatgatatctccatacagaattcccagcttcggttacagggtcatgccacaaca

SEQ ID NO: 844193 - DNA, 75 bp, synthetic construct
  source 1..75: mol_type = other DNA
tgtccgggaaaacattccgctggaaagacggtgagatggacctgagtatgaagaacaaggatttcagcccgttga

SEQ ID NO: 844194 - DNA, 75 bp, synthetic construct
  source 1..75: mol_type = other DNA
tggtgcaacagagcatgctgatttcaacttatcagcagcagaagcactagagcgttatggtattgatttcaatgg

SEQ ID NO: 844195 - DNA, 75 bp, synthetic construct
  source 1..75: mol_type = other DNA
cgattcatgtggtgactggaattgaagcggcaatgctggatctgctggggcagcatctgggggttaacgtggcgt

SEQ ID NO: 844196 - DNA, 75 bp, synthetic construct
  source 1..75: mol_type = other DNA
acgctctccctgcaatcagtcgatatcccgctggcagacccgcatttctggacgatgcaaggttcagtgcgagtg

SEQ ID NO: 844197 - DNA, 75 bp, synthetic construct
  source 1..75: mol_type = other DNA
atgaacctgagtggcgcacacgcgccgttcttcacgcgtaatattgtgatcatcaaagataactccggtcacacc

SEQ ID NO: 844198 - DNA, 75 bp, synthetic construct
  source 1..75: mol_type = other DNA
gattgtttatcgacgccagagaataaattgaacgaacataactatgataaatgtgccctgcgcagtaataacaat

SEQ ID NO: 844199 - DNA, 75 bp, synthetic construct
  source 1..75: mol_type = other DNA
aattaggctatcagccagtcatcactctggatgaaggcattgagaaaactgctgcctggctgcgcgaccacggaa

SEQ ID NO: 844200 - DNA, 75 bp, synthetic construct
  source 1..75: mol_type = other DNA
cgtgcgataagttgccttctggtcgtacgtacaacattaccaacggcgaacatcgcactctgcgcagcatcgtac

SEQ ID NO: 844201 - DNA, 75 bp, synthetic construct
  source 1..75: mol_type = other DNA
atttcggtgtggtttctcaatgtgattacttccgtaccgcccaccaccgccagggcgttgattcaggggctgaaa

SEQ ID NO: 844202 - DNA, 75 bp, synthetic construct
  source 1..75: mol_type = other DNA
cgccgtcgggtgttattcctgacgtccagcctgatcacggcgaaacggtgattgaggtgatcaacaaaatactcg

SEQ ID NO: 844203 - DNA, 75 bp, synthetic construct
  source 1..75: mol_type = other DNA
gacagggtaacggtacgctgtggcagcccaaccagcgggtgattgtctttgatccggtctgtggtttcgacaata

SEQ ID NO: 844204 - DNA, 75 bp, synthetic construct
  source 1..75: mol_type = other DNA
tgccactcgccgcctgggcgaatgggctgttgcctggggcgtgcgtaattttattcatatctcttcaccgtccct

SEQ ID NO: 844205 - DNA, 75 bp, synthetic construct
  source 1..75: mol_type = other DNA
aatgaaggttaatttatggacaaaaaacagttacaggctcaatcaatactcccatgcctcaaacgctaacggcat

SEQ ID NO: 844206 - DNA, 75 bp, synthetic construct
  source 1..75: mol_type = other DNA
tttttcactcatcaaagccggtgtgaatccggaaaataccctttcaaaaaaattacttatcaggattggcttcaa

SEQ ID NO: 844207 - DNA, 75 bp, synthetic construct
  source 1..75: mol_type = other DNA
gattgtttatcaacgccagagaataagttgaacgaacataactacgataaatgtgccctgcgtggtaataacaat

SEQ ID NO: 844208 - DNA, 75 bp, synthetic construct
  source 1..75: mol_type = other DNA
atgacgcgaaagtttatgctcgggtatcgttcagacaaattacaggccggattaatgccctccagtgttaatcgt

SEQ ID NO: 844209 - DNA, 75 bp, synthetic construct
  source 1..75: mol_type = other DNA
ctttcacaacgtgaaccctgtgcgcggtatacgcaaactgaaagttcagaacacggaaatggcctttctttctga

SEQ ID NO: 844210 - DNA, 75 bp, synthetic construct
  source 1..75: mol_type = other DNA
gtgcagaggtcttcgaaaaacatattttacagaatttccataacaacccatggctggctaaacccgcagatcgcc

SEQ ID NO: 844211 - DNA, 75 bp, synthetic construct
  source 1..75: mol_type = other DNA
cgaaaccatcgccaacggtccgttcgtgcattatcccaacgaaaaatggttcccactgaccgaaaatgacgatgt

SEQ ID NO: 844212 - DNA, 75 bp, synthetic construct
  source 1..75: mol_type = other DNA
ccagacattctggatgactttaaatctacagtagagaaaaacaaaaaagatatagatttattaaaagacataata

SEQ ID NO: 844213 - DNA, 75 bp, synthetic construct
  source 1..75: mol_type = other DNA
caccactcaggataattgggaaactgcaggggcaattgctggcggggctgcagctgtcgcaggcctgacaatggg

SEQ ID NO: 844214 - DNA, 75 bp, synthetic construct
  source 1..75: mol_type = other DNA
tacaacacaggataactgggaaactgccggggctattgctggcggagcagcggctgtcgccggccttacgatggg

SEQ ID NO: 844215 - DNA, 75 bp, synthetic construct
  source 1..75: mol_type = other DNA
ccaaaacagcaattcgtatccgtaagggcagcgccaatggcgttgagctgagcgggttaaaactggatgaagaca

SEQ ID NO: 844216 - DNA, 75 bp, synthetic construct
  source 1..75: mol_type = other DNA
ccgatttgcctgtttaaattgcgtgaaccggtacaggttgctcactggcagttttcgattgttgagctaccgtgg

SEQ ID NO: 844217 - DNA, 75 bp, synthetic construct
  source 1..75: mol_type = other DNA
aaagagtatggagggatttataccgatactgatattcttcctgcatattcagatgaagtgtcacagataataaat

SEQ ID NO: 844218 - DNA, 75 bp, synthetic construct
  source 1..75: mol_type = other DNA
gaaaccacagtaaatccaggtgacacattgagcgtgggtgttgcttcaactgcaacgacacaatcagtaactttc

SEQ ID NO: 844219 - DNA, 75 bp, synthetic construct
  source 1..75: mol_type = other DNA
cagagtgttcttgctggtgtgaatgtgcgaacttcatatttttctaatgggaaatataatgtgaatggtcgaatg

SEQ ID NO: 844220 - DNA, 75 bp, synthetic construct
  source 1..75: mol_type = other DNA
atggtcaccggaaaagatctgacaggcagcccctttaacgtgggaaaatttccgaattccaagcggccccttcag

SEQ ID NO: 844221 - DNA, 75 bp, synthetic construct
  source 1..75: mol_type = other DNA
tgctcaccgcattgctggcgggctgtgctcacgattcgccctgcgttccggtttatgacgatcagggtcgtctgg

SEQ ID NO: 844222 - DNA, 75 bp, synthetic construct
  source 1..75: mol_type = other DNA
cctacaccctgattttgcatcgtaccgtttatctgttttgtatcatgctgccgttcgcgctggtcgtggacctgc

SEQ ID NO: 844223 - DNA, 75 bp, synthetic construct
  source 1..75: mol_type = other DNA
tctttgctgggcttgtaatatcgcgtcgtggcgcaccgggtaaggtactgaaagttgacgatacgacttatcaaa

SEQ ID NO: 844224 - DNA, 75 bp, synthetic construct
  source 1..75: mol_type = other DNA
tgcaacgcctgaaagaagcggcagaaaaagcgaaaatcgaactgtcttccgctcagcagaccgacgttaacctgc

SEQ ID NO: 844225 - DNA, 75 bp, synthetic construct
  source 1..75: mol_type = other DNA
acggaaagcggttttctcaacatcgatgttcccggctctgccatccatacctgtaaagcactgaatgcaggcgtt

SEQ ID NO: 844226 - DNA, 75 bp, synthetic construct
  source 1..75: mol_type = other DNA
aagcccctttcagggaaaaacgtcacattcaccaccacggccgggcaactgagccggacacagggcaccaccgac

SEQ ID NO: 844227 - DNA, 75 bp, synthetic construct
  source 1..75: mol_type = other DNA
tgtttgaaacccgtccggataccgccattgtggtgaacaaaacctctgccgttgctgacggccaggacagcatta

SEQ ID NO: 844228 - DNA, 75 bp, synthetic construct
  source 1..75: mol_type = other DNA
acctgcaagacggcacgctggtgccctgctttcagcaaccctatgaatggtggctggatctggtggctatcttcc

SEQ ID NO: 844229 - DNA, 75 bp, synthetic construct
  source 1..75: mol_type = other DNA
gacatgatgttgcccatcagccaactgtgggcagaccggctgcaggcgatgggctgcccgacggataaaattacc

SEQ ID NO: 844230 - DNA, 75 bp, synthetic construct
  source 1..75: mol_type = other DNA
gtctttctcttgccttcagtaacgggaagtgacggggatatggaaggtgtgccagtagccctgatggaggcaatg

SEQ ID NO: 844231 - DNA, 75 bp, synthetic construct
  source 1..75: mol_type = other DNA
cggtgacgtttgaaaaccgcctggattccgccattgtggtgaacaaaacctccgccgttgctgacggacaggaca

SEQ ID NO: 844232 - DNA, 75 bp, synthetic construct
  source 1..75: mol_type = other DNA
cagaatggccaactgaccgttcagctgaccagcacccgtgccggacaggcggtggtgaatgcctccatggacagc

SEQ ID NO: 844233 - DNA, 75 bp, synthetic construct
  source 1..75: mol_type = other DNA
gaccagccaggcttccgggcaggcagcagatgcggtcacgcagtggctgaaccagttcggtacggcgaaaacgca

SEQ ID NO: 844234 - DNA, 75 bp, synthetic construct
  source 1..75: mol_type = other DNA
gcaactggtttgcgcagagtgcgacaaaatacgaatggctcaacagcgattacgacggaacagcgatttactcct

SEQ ID NO: 844235 - DNA, 75 bp, synthetic construct
  source 1..75: mol_type = other DNA
ctggcgcagacggcaaaaactttggcaggcgtgtccccaacagcacctggccgggcgcgaaattccgcatcgata

SEQ ID NO: 844236 - DNA, 75 bp, synthetic construct
  source 1..75: mol_type = other DNA
ttccctgaacggtacgaccaccacagtaagtgcgccccgcgtcagcttcacgcagcagttgtatctcaccctgca

SEQ ID NO: 844237 - DNA, 75 bp, synthetic construct
  source 1..75: mol_type = other DNA
cttctgctgctctgcgtatgtgctgaccacccgcaaagatatgtctttcctcggcggtatgctgatggcgggtat

SEQ ID NO: 844238 - DNA, 75 bp, synthetic construct
  source 1..75: mol_type = other DNA
tgagaaacatagagttaaattcatccttctaaaaacatgtggttttattgtgcgtatattaataagatgtgccat

SEQ ID NO: 844239 - DNA, 75 bp, synthetic construct
  source 1..75: mol_type = other DNA
aacccctggcctattatcgctctgtcaccttcttcctgctatccagtggttgccattgacctatgaaataggagg

SEQ ID NO: 844240 - DNA, 75 bp, synthetic construct
  source 1..75: mol_type = other DNA
atagacgctaccggttacggcattcccgtctttattgctacggaaaatgaagagcaagtacctgcaaaatatctg

SEQ ID NO: 844241 - DNA, 75 bp, synthetic construct
  source 1..75: mol_type = other DNA
taacacgttctgacgtggcaaaagaagcagggacatccgtcgctgtcgttagttacgttattaataatggcccgc

SEQ ID NO: 844242 - DNA, 75 bp, synthetic construct
  source 1..75: mol_type = other DNA
aaagcagctctacgagattcaacttacggaaccaaaattgattttggccatgctgcgcgtttagcaaaaatgcat

SEQ ID NO: 844243 - DNA, 75 bp, synthetic construct
  source 1..75: mol_type = other DNA
aaaagcaggcttcaaatacagcgcgaagaaaagtctcaatttgaagtttcacatccagaggttatcgttgctggt

SEQ ID NO: 844244 - DNA, 75 bp, synthetic construct
  source 1..75: mol_type = other DNA
accgcaggtgtgggtggcttcgcgatggcgtcgtctccggcgatcgtcaaatttgtgggaggcccccctgccgat

SEQ ID NO: 844245 - DNA, 75 bp, synthetic construct
  source 1..75: mol_type = other DNA
aagcaatcaccctcggcggtaaccccgcatttacacttccagccctcaattttgcccccaccgcagcagggattg

SEQ ID NO: 844246 - DNA, 75 bp, synthetic construct
  source 1..75: mol_type = other DNA
gcgcgtaacggggtgaattttggtattcggctttccggtactggcgatcgctggttccaggctcctgccaatgcc

SEQ ID NO: 844247 - DNA, 75 bp, synthetic construct
  source 1..75: mol_type = other DNA
gtctacatcgaagaacatgacggtcgcaaacaggtctggtgctatgtcatcaaatcaagcgaaccacaaagcgcc

SEQ ID NO: 844248 - DNA, 75 bp, synthetic construct
  source 1..75: mol_type = other DNA
gacctgtatgcccgtcataacgtgaaacaactgcaaaaagagatgttccgtaaggaacacttccctcgcgtcagc

SEQ ID NO: 844249 - DNA, 75 bp, synthetic construct
  source 1..75: mol_type = other DNA
catgtgttcgaacaggaaagggactctcaaaaattatctgcgatttttggtggagatatgtctgatatgatggtt

SEQ ID NO: 844250 - DNA, 75 bp, synthetic construct
  source 1..75: mol_type = other DNA
ctatccgcgtgaccgtgttcttcggcggttgttcaaactcaacaatgagtttcagcgcaacagaataatccggaa

SEQ ID NO: 844251 - DNA, 75 bp, synthetic construct
  source 1..75: mol_type = other DNA
ggcgcggcattggcaactgccggggtgattatgcaggggctttttcgcaacccaatggctgacccgggcttactc

SEQ ID NO: 844252 - DNA, 75 bp, synthetic construct
  source 1..75: mol_type = other DNA
ggcgtcagtagcggttctgcattaatggttggcgttgctattgtactgcccttttcgttccccgtggtgctggtg

SEQ ID NO: 844253 - DNA, 75 bp, synthetic construct
  source 1..75: mol_type = other DNA
gataagatttgtattcttcattctttatcgaaaaatgacagattctcaagtagtgatgcctcgtttaaagtcttg

SEQ ID NO: 844254 - DNA, 75 bp, synthetic construct
  source 1..75: mol_type = other DNA
tttcttggtgaatgtcccagcgcagacccggaggcagtaaataaaatactatctaagttcggcaaggtcagagga

SEQ ID NO: 844255 - DNA, 75 bp, synthetic construct
  source 1..75: mol_type = other DNA
ttcggcattaatggttggcgtggctattgtgctgcccttttccttcccggtgatgctggtgctctatgagcaaat

SEQ ID NO: 844256 - DNA, 75 bp, synthetic construct
  source 1..75: mol_type = other DNA
cccaatggctgacccaggattacttggcgtcagtagcggttctgcattaatggttggcgttgctattgtgctgcc

SEQ ID NO: 844257 - DNA, 75 bp, synthetic construct
  source 1..75: mol_type = other DNA
acctgcaacagcatcctgaactgccgcagaagttgattgcgatggaacctccattgcctgcggcatctactgatg

SEQ ID NO: 844258 - DNA, 75 bp, synthetic construct
  source 1..75: mol_type = other DNA
gctgaaaaaactgcgcagcgatatgttaagcaccattgagtacgctccggtgtggatcatcatggcggtagcact

SEQ ID NO: 844259 - DNA, 75 bp, synthetic construct
  source 1..75: mol_type = other DNA
gcaagaattttatgctgcttttgcggtagcaaatttaccgattgagtataaaaaagatatatacgaaaatcttat

SEQ ID NO: 844260 - DNA, 75 bp, synthetic construct
  source 1..75: mol_type = other DNA
ctgccagtcattcctagtatactgcatggagatctttgctttagcaatattttgcttaactccagattagataga

SEQ ID NO: 844261 - DNA, 75 bp, synthetic construct
  source 1..75: mol_type = other DNA
ccagcctggatgcggcgcaaacgctgattcgcggcgcggtgcgtcatcttaatagtggcggcgagctgcgaattg

SEQ ID NO: 844262 - DNA, 75 bp, synthetic construct
  source 1..75: mol_type = other DNA
atgtcagcttccctgaagaatcaacaaggctttagcctgccggaggtaatgttggcgatggtgttgatggtgatg

SEQ ID NO: 844263 - DNA, 75 bp, synthetic construct
  source 1..75: mol_type = other DNA
atgaaaattttactggctgcgttgacgtcatcttttatgctggttggttgtacgcctcgcattgaagtcgctgcg

SEQ ID NO: 844264 - DNA, 75 bp, synthetic construct
  source 1..75: mol_type = other DNA
ctccgagctgggtaaacaagcaaaagacattatggatgctggcaaactggttaccgacgaactggtgatcgcgct

SEQ ID NO: 844265 - DNA, 75 bp, synthetic construct
  source 1..75: mol_type = other DNA
ttagggggcatggatatgcccagcaagggtaaagttacccggcattgtcgtgtctcatggccgctggccctggga

SEQ ID NO: 844266 - DNA, 75 bp, synthetic construct
  source 1..75: mol_type = other DNA
tcatcttttatgctggttggctgtacgcctcgcattgaagtcgctgcacctaaggaaccgatcactatcaatatg

SEQ ID NO: 844267 - DNA, 75 bp, synthetic construct
  source 1..75: mol_type = other DNA
cccaaggaaccgatcactatcaatatgaacgttaaaattgagcatgagatcatcatcaaggcagacaaagatgtc

SEQ ID NO: 844268 - DNA, 75 bp, synthetic construct
  source 1..75: mol_type = other DNA
gtcagccgaaatccattaaagagacgctggaaggggtgaaggacgccgaaggtaacgttgtggtgcacggtattt

SEQ ID NO: 844269 - DNA, 75 bp, synthetic construct
  source 1..75: mol_type = other DNA
atttattgatgatatggcggcggcgtatgcgtgggcggatgtcgttgtttgccgctccggtgcgttaacggtgag

SEQ ID NO: 844270 - DNA, 75 bp, synthetic construct
  source 1..75: mol_type = other DNA
aaaaggtataaaagcactgatagctgcgccgctgcgtatcttcaacgcctggcgtcaggcgcgggcgattatgaa

SEQ ID NO: 844271 - DNA, 75 bp, synthetic construct
  source 1..75: mol_type = other DNA
agaaggcaaagacgacgttactggtgaagacctgactacccgtaaagacgatcaggaagaaactgtacgtaaacg

SEQ ID NO: 844272 - DNA, 75 bp, synthetic construct
  source 1..75: mol_type = other DNA
attccgcaaatctccacaggtgatatgctgcgtgccgcagtcaaatctggctccgagctgggtaaacaagcaaaa

SEQ ID NO: 844273 - DNA, 75 bp, synthetic construct
  source 1..75: mol_type = other DNA
caagcactaatccttaacttacccggtcagccgaagtctattaaagagacgctggaaggtgtgaaggacgctgag

SEQ ID NO: 844274 - DNA, 75 bp, synthetic construct
  source 1..75: mol_type = other DNA
ttgccgtcagtatggccttcgattttgaaatctatctgaccgatgaaatcacctccgtaggtgacgcccgcttta

SEQ ID NO: 844275 - DNA, 75 bp, synthetic construct
  source 1..75: mol_type = other DNA
tcaacctcggcttgcgcaaaatggcggatgcgacaaacacccacaccttctgggaattgatccgcattggacggt

SEQ ID NO: 844276 - DNA, 75 bp, synthetic construct
  source 1..75: mol_type = other DNA
tcgcccgcaggacttaaccgtcgaatcggtgatccttaaatccgctaacgccttcgctgcctatggtctggctgg

SEQ ID NO: 844277 - DNA, 75 bp, synthetic construct
  source 1..75: mol_type = other DNA
cgcgttcagccagcatctcctgcagctcacggtaactgatgccgtatttgcagtaccagcgtacggcccacagaa

SEQ ID NO: 844278 - DNA, 75 bp, synthetic construct
  source 1..75: mol_type = other DNA
acccggatgccagcacgaacgttccggttgaactggtgacggcgtcggcaagcgggctggacaataatattaccc

SEQ ID NO: 844279 - DNA, 75 bp, synthetic construct
  source 1..75: mol_type = other DNA
aagaactttataaatgttaccagacctggctgaccgattttacgaagctgacggtcagatcgggtatgtgccacc

SEQ ID NO: 844280 - DNA, 75 bp, synthetic construct
  source 1..75: mol_type = other DNA
agtggtagcgaattgcgtctgaagctggtctggctgtgctggtacgatttgatgctggggaacagtctggatgac

SEQ ID NO: 844281 - DNA, 75 bp, synthetic construct
  source 1..75: mol_type = other DNA
tcaacgagcgcattccggtggcttacctgaccaacaaagcctggttctgcggtcatgaattttacgtcgatgaac

SEQ ID NO: 844282 - DNA, 75 bp, synthetic construct
  source 1..75: mol_type = other DNA
ggacatgttgcgctggtcggtgagccgcttcagcgcggcaaatatctggtacggtcacggcaccgataacccgtg

SEQ ID NO: 844283 - DNA, 75 bp, synthetic construct
  source 1..75: mol_type = other DNA
ctgggtggtatggatacgccaagtaaagggaaggtaacacgtcactgtcgcgtctcatggcctctcgcccttggc

SEQ ID NO: 844284 - DNA, 75 bp, synthetic construct
  source 1..75: mol_type = other DNA
tatcttggcggaagggatcaacctcggcttgcgcaaaatggcggatgcgacaaacacccacaccttctgggaatt

SEQ ID NO: 844285 - DNA, 75 bp, synthetic construct
  source 1..75: mol_type = other DNA
cgccagttcgagcctggctcgaactcttcgtcggccaaccggctgctcgaccggctcgaatatctgcaacgcatc

SEQ ID NO: 844286 - DNA, 75 bp, synthetic construct
  source 1..75: mol_type = other DNA
ataacggcggcgatggtgtgtttatgctcaccaaagagcagctgctggcggcccgtgaacatttcgcgatttata

SEQ ID NO: 844287 - DNA, 75 bp, synthetic construct
  source 1..75: mol_type = other DNA
acaccgcgcgtaccgggggtacggtttttccggtcattaaaaacctgccgccgttgtttaaatcattcccgaacg

SEQ ID NO: 844288 - DNA, 75 bp, synthetic construct
  source 1..75: mol_type = other DNA
ctttattgttaagccttcatttcaagtgtcagcaaggactgcgtacaagaatgttattactccgactggtgacct

SEQ ID NO: 844289 - DNA, 75 bp, synthetic construct
  source 1..75: mol_type = other DNA
ctggtatacctggacgcaggaccttggtagcggaaacgtcatgaccgggataatcgttcaggatactggcgacaa

SEQ ID NO: 844290 - DNA, 75 bp, synthetic construct
  source 1..75: mol_type = other DNA
gaaaaatatattgtctgccgcgttccggtaacacagttcggcatgcttgaacctgatacggttgcattttccgtg

SEQ ID NO: 844291 - DNA, 75 bp, synthetic construct
  source 1..75: mol_type = other DNA
cgtctcgattcagtcattgaaagtccgcaggttgatgtcagtgtcgcggcgtttcgctcccaaaaagcgtatgta

SEQ ID NO: 844292 - DNA, 75 bp, synthetic construct
  source 1..75: mol_type = other DNA
tgaccaaacagggcgatacgataacgggggcgatggtctttttctgcgttattggtgcccccctcattctggtga

SEQ ID NO: 844293 - DNA, 75 bp, synthetic construct
  source 1..75: mol_type = other DNA
gctgcccgcgttgccatatcccgctacgcctgcgtcgccgtcatagtctgcaaaaatgctgggcggcgctgttag

SEQ ID NO: 844294 - DNA, 75 bp, synthetic construct
  source 1..75: mol_type = other DNA
atgctggacagaaacgagcaacttaataattttattgcagattataagcatgagaaacgtggtcgggtcaccatc

SEQ ID NO: 844295 - DNA, 75 bp, synthetic construct
  source 1..75: mol_type = other DNA
atgcttacaatttctccggtgcaagattcatattatatagtaatatataaaattatatataattgggctgttgcg

SEQ ID NO: 844296 - DNA, 75 bp, synthetic construct
  source 1..75: mol_type = other DNA
tggctggatctggtggctatcttccgtaaacgggaataccagccctggcgggtccagtatgtgctggatgaaatg

SEQ ID NO: 844297 - DNA, 75 bp, synthetic construct
  source 1..75: mol_type = other DNA
gaccggggaactgaaaatccgtggtgttaatgcactgaggattttcaacgaagcttttggcctgatttttcgtcg

SEQ ID NO: 844298 - DNA, 75 bp, synthetic construct
  source 1..75: mol_type = other DNA
gcagcgaacagagggagtgcaggatgtaaggtacggttccgaaatgtattacaacccgggaggtaaccagatatc

SEQ ID NO: 844299 - DNA, 75 bp, synthetic construct
  source 1..75: mol_type = other DNA
catcagtggaaaacctgcgcgcccggatacatttgtttttgcatatattccgggacaggatgaatccgcagagat

SEQ ID NO: 844300 - DNA, 75 bp, synthetic construct
  source 1..75: mol_type = other DNA
ataagttctgatttaactgtgatcccatccaggggagcgttagtatctgctaaatttaatgttgttaaaggaagc

SEQ ID NO: 844301 - DNA, 75 bp, synthetic construct
  source 1..75: mol_type = other DNA
gacgccaaagaattagctgaccccgcttttaatgcccaaaaacaggcgctgaaatggggactggctggtttttcc

SEQ ID NO: 844302 - DNA, 75 bp, synthetic construct
  source 1..75: mol_type = other DNA
gatgggtgtcatgtttcttatccctgtccccgacggtatgccaccacaggcatggcattacttcgctgtgtttgt

SEQ ID NO: 844303 - DNA, 75 bp, synthetic construct
  source 1..75: mol_type = other DNA
ggtggaggcggataaatcaggttggctggtggcagagaacgacgctcaggcgcttgcagaccaactccgcgcctt

SEQ ID NO: 844304 - DNA, 75 bp, synthetic construct
  source 1..75: mol_type = other DNA
tggttctggtcttctactttgcacactacctgtttgccagcctctctgcgcataccgcaaccatgctgccggtca

SEQ ID NO: 844305 - DNA, 75 bp, synthetic construct
  source 1..75: mol_type = other DNA
ctatttaatgtggatgatggtcatcagtaccagtctgagttcctccatgtttgtcaccggtgcggcaccgaacgt

SEQ ID NO: 844306 - DNA, 75 bp, synthetic construct
  source 1..75: mol_type = other DNA
gctataacagcgcatggaacacgctggtcaacctggcaacgctggttgttatggcgaatggcctgacccgttctg

SEQ ID NO: 844307 - DNA, 75 bp, synthetic construct
  source 1..75: mol_type = other DNA
ttcagtaataatctgtaatcagaacttagatgccattgttcgggctggcaacgatttgtatttccattacccgac

SEQ ID NO: 844308 - DNA, 75 bp, synthetic construct
  source 1..75: mol_type = other DNA
ttgtttttattttatctcatccagccttctccgcgacagatgatgtggctatgagatttaaccctgaatttctta

SEQ ID NO: 844309 - DNA, 75 bp, synthetic construct
  source 1..75: mol_type = other DNA
gcgatgacacccaatgtaaagcaccttttcatataatgaaagactcatcagaaatacttcgtttatcattaaatt

SEQ ID NO: 844310 - DNA, 75 bp, synthetic construct
  source 1..75: mol_type = other DNA
caggtggtctggccgcgtggtcgttaggcattccggtcgtactgcacgagcaaaacggcatcgcgggcttaacca

SEQ ID NO: 844311 - DNA, 75 bp, synthetic construct
  source 1..75: mol_type = other DNA
aactaacatttagcactgactggactaaatattttaattggaatgaaaatggctggcaaacacggctctcatggt

SEQ ID NO: 844312 - DNA, 75 bp, synthetic construct
  source 1..75: mol_type = other DNA
caggctgatggaattcagcctggaaattatattgttagtgtcgttgttaatgggaaaaattacggacaggaaaac

SEQ ID NO: 844313 - DNA, 75 bp, synthetic construct
  source 1..75: mol_type = other DNA
tgctgctgggtatcggtagttcagtcaccagcccttccaccattactagttttccctttctgggcggcgaattta

SEQ ID NO: 844314 - DNA, 75 bp, synthetic construct
  source 1..75: mol_type = other DNA
gaaagagtacaaacaggttatcgcgccggtaaaaatccacgcgctaaatctgactggcggcgagttgaaagtcga

SEQ ID NO: 844315 - DNA, 75 bp, synthetic construct
  source 1..75: mol_type = other DNA
cgtgccgctgatgaatgagtttggtgaatacccgcatcccaagccgcgcatcatctgcgaatacgctcatgcgat

SEQ ID NO: 844316 - DNA, 75 bp, synthetic construct
  source 1..75: mol_type = other DNA
tattagcatttccattaattgcactggctaacccgcattatcatccggacgtggaggtaaacgtaccgccagaag

SEQ ID NO: 844317 - DNA, 75 bp, synthetic construct
  source 1..75: mol_type = other DNA
gagcttatcctacgtgcgctcggaggtaaagagaacattgagtcgcttgataactgtattacccgcttgcgtctg

SEQ ID NO: 844318 - DNA, 75 bp, synthetic construct
  source 1..75: mol_type = other DNA
agtgaccatcggcaataccgacggcggcattctggatctgctgattttcggcgtgatgcagggaatgtcgaccaa

SEQ ID NO: 844319 - DNA, 75 bp, synthetic construct
  source 1..75: mol_type = other DNA
gacaacctgttaaaagccgacaaacttctcaacgaagcaggctgggtgctgaagggtcagcaacgcgttaatgcc

SEQ ID NO: 844320 - DNA, 75 bp, synthetic construct
  source 1..75: mol_type = other DNA
tcgcctttgaagcgtttaaagcaggtgcttttgatttgcgtatggaaaacgacgctaaaaactgggccacgcgtt

SEQ ID NO: 844321 - DNA, 75 bp, synthetic construct
  source 1..75: mol_type = other DNA
gcgatgttgagttcacttttcaaaagtttatgactgaaggcgtgccgcaatttcgcctggtatacaaaggcacca

SEQ ID NO: 844322 - DNA, 75 bp, synthetic construct
  source 1..75: mol_type = other DNA
atgcaacaactttcctttctgcccggagagatgacgcccggcgagcgcagtctcattctgcgggccctgaaaacc

SEQ ID NO: 844323 - DNA, 75 bp, synthetic construct
  source 1..75: mol_type = other DNA
tccgggtgctgtatctgaacaaccagaatcagttgattgccggtgaaaccctcttcaccggcaccatcaaccgta

SEQ ID NO: 844324 - DNA, 75 bp, synthetic construct
  source 1..75: mol_type = other DNA
cgctcgccacgcctccgcttgccagtggtccgtaccgcattacgtcctggaaaatggggcaaaatattgtctatt

SEQ ID NO: 844325 - DNA, 75 bp, synthetic construct
  source 1..75: mol_type = other DNA
caggaagccaagaaaactcttacatacgacgagttcagaacattaaaactaagagtcacaaactacggaaaggtt

SEQ ID NO: 844326 - DNA, 75 bp, synthetic construct
  source 1..75: mol_type = other DNA
gcagaaccaggaggacgtgaacaaccttcgcaatgcgatgaaaagtgccaaaggaccaggtaacttccgcaatct

SEQ ID NO: 844327 - DNA, 75 bp, synthetic construct
  source 1..75: mol_type = other DNA
caaagatcaacttcttcaagccaatgatcgacaaccacaagcaggagtacgaagggctgtggcaaccgaatcatt

SEQ ID NO: 844328 - DNA, 75 bp, synthetic construct
  source 1..75: mol_type = other DNA
cctgtccagactgaaaggggaagaaaaagagcgtgtccgactggggtatgcggcggatgacctcggttttgtggg

SEQ ID NO: 844329 - DNA, 75 bp, synthetic construct
  source 1..75: mol_type = other DNA
cccgaatatctcagcgcccttaactctgcctggctgaatgagtcggccacgctgttccgccgcaagtattacgaa

SEQ ID NO: 844330 - DNA, 75 bp, synthetic construct
  source 1..75: mol_type = other DNA
tgaccgcagagtttgacatcagcgcgatggttaaaaccggcgacaacctgttgtgtgtgcgcgtgatgcagtggg

SEQ ID NO: 844331 - DNA, 75 bp, synthetic construct
  source 1..75: mol_type = other DNA
caacataatctgacgcaggttctgtttaatcttcctgcgggtaactggcaagagggtgaacggggtattgcatgt

SEQ ID NO: 844332 - DNA, 75 bp, synthetic construct
  source 1..75: mol_type = other DNA
cggtggcaaaggtgatttttttaaccaaaaagttgagctgaccccggctgatattgagtttgtaaaaaaaatcac

SEQ ID NO: 844333 - DNA, 75 bp, synthetic construct
  source 1..75: mol_type = other DNA
tgccggtgtcattgagcacctgaagacggagctgaggacggcaatgttactgagtggtgctcgtacacttaagga

SEQ ID NO: 844334 - DNA, 75 bp, synthetic construct
  source 1..75: mol_type = other DNA
cagggcattcagtgattatcctttgttacctcaccgactcagtggagttgctgcccacagcattgatatccggac

SEQ ID NO: 844335 - DNA, 75 bp, synthetic construct
  source 1..75: mol_type = other DNA
tgagccgatgaagtctatcgacggcatcaagattattcaggtcgatggattaaaccgaggtggtgctgcggggga

SEQ ID NO: 844336 - DNA, 75 bp, synthetic construct
  source 1..75: mol_type = other DNA
gcgcaaagcctggcgtcgtatgagttcggcgcagggttcttttccacgaatttgcacagcgagaataagcaatga

SEQ ID NO: 844337 - DNA, 75 bp, synthetic construct
  source 1..75: mol_type = other DNA
gaaatgattcaataccggaaaaaaaccaaagtagaaacgttactcatcctgttatttttttaagcttagcacgac

SEQ ID NO: 844338 - DNA, 75 bp, synthetic construct
  source 1..75: mol_type = other DNA
tcttttatcttctgtcttcagaggtatcccatcatgaaaattatcacccgtggcgaagccatgcgtattcaccgt

SEQ ID NO: 844339 - DNA, 75 bp, synthetic construct
  source 1..75: mol_type = other DNA
cactgactttgacgaagcctattgcgatgccacgctttcctgtgaagtagtgctggaaaatctcgccgcctcccc

SEQ ID NO: 844340 - DNA, 75 bp, synthetic construct
  source 1..75: mol_type = other DNA
taaacgtgccctgtaccacaatgccgctgccgtgatactggcacacaaccacccgtccggtgaagtcactcccag

SEQ ID NO: 844341 - DNA, 75 bp, synthetic construct
  source 1..75: mol_type = other DNA
gctgccgtggtactggccctggttgacatccgggtgccggaccatctgataatcggtggcagccaggttttctcc

SEQ ID NO: 844342 - DNA, 75 bp, synthetic construct
  source 1..75: mol_type = other DNA
ctggtggatatccgggtgccggaccatctgatagtcggtggcagccaggttttctcctttgccgaacatggtctg

SEQ ID NO: 844343 - DNA, 75 bp, synthetic construct
  source 1..75: mol_type = other DNA
ttctgaacatggcgggactggagcgtgaagagttccgggtactgtatctgaacaaccagaatcagctgattgccg

SEQ ID NO: 844344 - DNA, 75 bp, synthetic construct
  source 1..75: mol_type = other DNA
atgcagcagctttcctttctgcccggcgcgatgacgcccggcgagcgcagtctcattctgcgggccctgaaaacc

SEQ ID NO: 844345 - DNA, 75 bp, synthetic construct
  source 1..75: mol_type = other DNA
atggcgggactggagcgtgaagagttccgggtgctgtatctgaacaaccagaatcagctgattgcgggtgaaacc

SEQ ID NO: 844346 - DNA, 75 bp, synthetic construct
  source 1..75: mol_type = other DNA
cctggtggatatccgggtgccggaccatctgatagtcggtggcaaccaggttttctcctttgccgaacatggtct

SEQ ID NO: 844347 - DNA, 75 bp, synthetic construct
  source 1..75: mol_type = other DNA
atgccgcagccgtggtgctggcacacaatcacccgtccggtgaagtcacacccagcaaggcagaccgccttatca

SEQ ID NO: 844348 - DNA, 75 bp, synthetic construct
  source 1..75: mol_type = other DNA
gagagatgacacccggtgagcgcagcctcattcaacgggccctgaaaaccctggaccgccatcttcatgaacccg

SEQ ID NO: 844349 - DNA, 75 bp, synthetic construct
  source 1..75: mol_type = other DNA
acggaagtccatccccgggaagtgattaaacgcgccctgtatcacaatgccgctgctgtggtgctggcacacaat

SEQ ID NO: 844350 - DNA, 75 bp, synthetic construct
  source 1..75: mol_type = other DNA
taaggctgaccgccttattacggaacgtctggtacaggcactggccctggtggatatccgggtgccggaccatct

SEQ ID NO: 844351 - DNA, 75 bp, synthetic construct
  source 1..75: mol_type = other DNA
gaatcagctgattgccggtgaaaccctcttcaccggcaccatcaaccgtacggaagttcatccccgggaagtgat

SEQ ID NO: 844352 - DNA, 75 bp, synthetic construct
  source 1..75: mol_type = other DNA
acaggcactgggcctggtggatatccgggtgccggaccatctgatagtcggtggcagccaggttttctcctttgc

SEQ ID NO: 844353 - DNA, 75 bp, synthetic construct
  source 1..75: mol_type = other DNA
tctggtacaggcactggccctggtggatatccgggtgccggaccatctgataatcggtggcagccaggttttctc

SEQ ID NO: 844354 - DNA, 75 bp, synthetic construct
  source 1..75: mol_type = other DNA
taaggcagaccggcttatcaccgaacgtctggtacaggcgctggccctggttgacatccgggtgccggaccatct

SEQ ID NO: 844355 - DNA, 75 bp, synthetic construct
  source 1..75: mol_type = other DNA
acccgtccggtgaagtcacacccagcaaggcagaccggcttatcacggaacgtctggtacaggcactgggcctgg

SEQ ID NO: 844356 - DNA, 75 bp, synthetic construct
  source 1..75: mol_type = other DNA
cctcattcagcgggccctgaagaccctggaccgccatcttcatgaacccggtgtggccttcacctccacccgtgc

SEQ ID NO: 844357 - DNA, 75 bp, synthetic construct
  source 1..75: mol_type = other DNA
atgcaacagctttcctttctgcccggagaaatgacaaccagagagcgcagtctcattctgcgggccctgaaaacc

SEQ ID NO: 844358 - DNA, 75 bp, synthetic construct
  source 1..75: mol_type = other DNA
gttgattgccggtgaaacccttttcaccggcaccatcaaccgcacggaagtccatccccgggaagtgattaaacg

SEQ ID NO: 844359 - DNA, 75 bp, synthetic construct
  source 1..75: mol_type = other DNA
cgactgactcaggtacttcaactggtggatatccgtattcctgaccatctgattgttggtggcaggcaaatctat

SEQ ID NO: 844360 - DNA, 75 bp, synthetic construct
  source 1..75: mol_type = other DNA
tggatatccgggtaccggaccatctgatagtcggtggcagccaggttttctcctttgcggaacacggcctgcttt

SEQ ID NO: 844361 - DNA, 75 bp, synthetic construct
  source 1..75: mol_type = other DNA
atgcaacagatttcctttctgcccggagaaatgacaacagccctgaaagccctggaccgccatattcatgaaccc

SEQ ID NO: 844362 - DNA, 75 bp, synthetic construct
  source 1..75: mol_type = other DNA
ctcttcaccggtaccatcaaccgcacggaagtgcatccccgggaggtggttaaacgcgccctgtaccacaatgcc

SEQ ID NO: 844363 - DNA, 75 bp, synthetic construct
  source 1..75: mol_type = other DNA
tccccgggaagtgattaaacgcgccctgtaccacaatgccgctgccgtggtgctggcgcacaatcacccgtccgg

SEQ ID NO: 844364 - DNA, 75 bp, synthetic construct
  source 1..75: mol_type = other DNA
atgatgccagccgcaaagaggctgcgttacctctctgtcgcaaacaaaggcgcagaaacgccttatttactgcaa

SEQ ID NO: 844365 - DNA, 75 bp, synthetic construct
  source 1..75: mol_type = other DNA
aataaagagtcgctgttctacattaatgttcgtgccattccagcaaagaaaaatcagatgatgttaatgctaacg

SEQ ID NO: 844366 - DNA, 75 bp, synthetic construct
  source 1..75: mol_type = other DNA
ccgatctcacaagcaaaattgaatatatcgcgcccggagaacataaacagttaccacttcctgcatctggcggaa

SEQ ID NO: 844367 - DNA, 75 bp, synthetic construct
  source 1..75: mol_type = other DNA
tgttcaggccgtggagcaactgcttcaggagcagggctacgaaccgggcgtgattatctcgtttcgctacatcct

SEQ ID NO: 844368 - DNA, 75 bp, synthetic construct
  source 1..75: mol_type = other DNA
gcaggagatggtcaacttcctgttcgagggtaaagaggtgcatatcgagggctatacgccggaagataaaaaata

SEQ ID NO: 844369 - DNA, 75 bp, synthetic construct
  source 1..75: mol_type = other DNA
gcgtggaaatcactggaatttaaacgtagtgaccattcactcaatatatataacccaactgaatattacgtcgta

SEQ ID NO: 844370 - DNA, 75 bp, synthetic construct
  source 1..75: mol_type = other DNA
tgattgaagctgccggagaaggagatgtcatcttttgcgatccgccgtatgaaccgctcccaaatacagagggat

SEQ ID NO: 844371 - DNA, 75 bp, synthetic construct
  source 1..75: mol_type = other DNA
caagtggtaaagcgggatttagaattaatagtgttagttctgcgcttgcttggggcgttgcggggttgtcacaga

SEQ ID NO: 844372 - DNA, 75 bp, synthetic construct
  source 1..75: mol_type = other DNA
agttaaaccagcggcagaattcgaacggtccatattcaaatgggctggtggaaaatttggtgttctggaacaaat

SEQ ID NO: 844373 - DNA, 75 bp, synthetic construct
  source 1..75: mol_type = other DNA
gtagtgaccattcactcaatatatataacccaactgaatattacgtcgtatttgccggactggcagtcgataaaa

SEQ ID NO: 844374 - DNA, 75 bp, synthetic construct
  source 1..75: mol_type = other DNA
tacggagtgcgtttaacaaacaagtctatgatgatttacatcgcgcagcggcgtttttgttcctgaaccgacatt

SEQ ID NO: 844375 - DNA, 75 bp, synthetic construct
  source 1..75: mol_type = other DNA
aatgttggaaatggcattaaaagcgggagccattgggataaccctgtaaatccgcacccgacacttaaccagtca

SEQ ID NO: 844376 - DNA, 75 bp, synthetic construct
  source 1..75: mol_type = other DNA
ggtggagagaaagttttcatcctgctggagcgcctgatccgtgaacccaaacgttaccaggatctgctggaattt

SEQ ID NO: 844377 - DNA, 75 bp, synthetic construct
  source 1..75: mol_type = other DNA
gtatcggtaagcggcattatcggctttattggcctggtgatcccgcatctgattcgcatgactaccggagcaaat

SEQ ID NO: 844378 - DNA, 75 bp, synthetic construct
  source 1..75: mol_type = other DNA
tgtcgaacgccatccttcggtaaaaatgctggcgctctctttcctgattctggtgggctttaccctgattctgga

SEQ ID NO: 844379 - DNA, 75 bp, synthetic construct
  source 1..75: mol_type = other DNA
gtgacgttctcgccaacatcatcgacaacgcaggacaatgtcgtcgctggcggaaccagataaacgcgctgctgg

SEQ ID NO: 844380 - DNA, 75 bp, synthetic construct
  source 1..75: mol_type = other DNA
acaaattggtgccgggatcaccactgcaccgatggcctgttttgtcgctgctgtacgtgaactggcggagatcgt

SEQ ID NO: 844381 - DNA, 75 bp, synthetic construct
  source 1..75: mol_type = other DNA
cgcatcgccggcacagccttagcagatgataaaataactaggccgatgaattacaatgataattatccatcgata

SEQ ID NO: 844382 - DNA, 75 bp, synthetic construct
  source 1..75: mol_type = other DNA
gtgcgtgaaaatctgccgctgatgccaggcttaacgcagctggtgctcaagctggaaacgctgggctggaaagtg

SEQ ID NO: 844383 - DNA, 75 bp, synthetic construct
  source 1..75: mol_type = other DNA
accgccactcgcggtcagggcgcacagctgaacggctaccgactgcgcggcagcaccgctcgcgatctcgacggt

SEQ ID NO: 844384 - DNA, 75 bp, synthetic construct
  source 1..75: mol_type = other DNA
ctcggtaacggctggtcaaacaagaacgagtggatcaagcagtcattgctggtccatttccacaacgaagcctgg

SEQ ID NO: 844385 - DNA, 75 bp, synthetic construct
  source 1..75: mol_type = other DNA
caccatttaccggatacgacgaaaaaagcctgcgcgactaccatctcgcgcttcatggcaacagcctgaatccga

SEQ ID NO: 844386 - DNA, 75 bp, synthetic construct
  source 1..75: mol_type = other DNA
cattcagactcaggtgccgccactggcacccgcactggcacagcgaccgggcaacctgaaaccgctgacgcctgg

SEQ ID NO: 844387 - DNA, 75 bp, synthetic construct
  source 1..75: mol_type = other DNA
aaacaactacaggggcaaattaacgatgtcacacagcgctggattgatgaaaaaggtaagagccatcccattgag

SEQ ID NO: 844388 - DNA, 75 bp, synthetic construct
  source 1..75: mol_type = other DNA
caggcggagtttgacggatacagaacggcacaggcgaagcgcgaggtggaagcgctacgggcatggtcgcagcgt

SEQ ID NO: 844389 - DNA, 75 bp, synthetic construct
  source 1..75: mol_type = other DNA
gccaaaagtgaatgaaaagacggaagtgaccatccgtcacgccgacctgatgggcgtattctgcatcctctctgg

SEQ ID NO: 844390 - DNA, 75 bp, synthetic construct
  source 1..75: mol_type = other DNA
tatgcgttggaaggtgcggtgtttatggcaggcgcatccattcagtggctgcgcgatgagatgaagttgattaac

SEQ ID NO: 844391 - DNA, 75 bp, synthetic construct
  source 1..75: mol_type = other DNA
agccgatatcagttccgatcaaattgcagctattgggattactaaccagcgagaaaccactatcgtctgggaaaa

SEQ ID NO: 844392 - DNA, 75 bp, synthetic construct
  source 1..75: mol_type = other DNA
ggctgcgccgtatttttgtctggcacggttcagtattattcaagatatcctcgcgcttactactcaattttctct

SEQ ID NO: 844393 - DNA, 75 bp, synthetic construct
  source 1..75: mol_type = other DNA
agaaaccggcaagcctatctataacgccattgtctggcagtgccgtcgtaccgccgagatctgcgagcatctcaa

SEQ ID NO: 844394 - DNA, 75 bp, synthetic construct
  source 1..75: mol_type = other DNA
gttcaacatccatactctggactgggacgacaaaatgctcgacgcgctggatatcccgcgcgagatgctgcctga

SEQ ID NO: 844395 - DNA, 75 bp, synthetic construct
  source 1..75: mol_type = other DNA
cgtatgcgcgcggggcgattttcggtctgactcgtggggtgaacgctaaccacattatccgcgcgacgctggagt

SEQ ID NO: 844396 - DNA, 75 bp, synthetic construct
  source 1..75: mol_type = other DNA
ataactatatactgaccggtaacatcgttgcgggtaacccacgcgtagtaaaagccatgctgtcaaacatgcgtg

SEQ ID NO: 844397 - DNA, 75 bp, synthetic construct
  source 1..75: mol_type = other DNA
atggggaaaacaataactgctctcattactcctgaaaatctcgcattagcattaacaggaaagtcagacctgcca

SEQ ID NO: 844398 - DNA, 75 bp, synthetic construct
  source 1..75: mol_type = other DNA
gctgcgcctgacagccgtggtagccaatgaactggagatcatggacggtaaatttaccggcaatgtgatcggcga

SEQ ID NO: 844399 - DNA, 75 bp, synthetic construct
  source 1..75: mol_type = other DNA
gcattaaattcaccctcgcaccgttcagcattctcggtgtcgccatcgccatttttcttggttttcgtaataatg

SEQ ID NO: 844400 - DNA, 75 bp, synthetic construct
  source 1..75: mol_type = other DNA
cgttgcgggtaacccacgcgtagtaaaagccatgctgtcaaacatgcgtgacgagttaagcgacgcactgaagcg

SEQ ID NO: 844401 - DNA, 75 bp, synthetic construct
  source 1..75: mol_type = other DNA
actattctggcaaccggcttccctttcaaagcgaaacagtacgcaaccacctacatcaatatcgttggcaaactg

SEQ ID NO: 844402 - DNA, 75 bp, synthetic construct
  source 1..75: mol_type = other DNA
cgctcgaccagggcaccaccagctcccgcgcggtcgtaatggatcacgatgccaatatcattagcgtgtcacagc

SEQ ID NO: 844403 - DNA, 75 bp, synthetic construct
  source 1..75: mol_type = other DNA
cgcccttcttccgcgcactggtcgattatgtcaatcagggcaatagcgcttttgactgcccgggtcatcaggggg

SEQ ID NO: 844404 - DNA, 75 bp, synthetic construct
  source 1..75: mol_type = other DNA
atgaatatgatgatctcatatcaggaacttgttcgcaccttccttaatgaaagtcgtaatatcgatgtggcggca

SEQ ID NO: 844405 - DNA, 75 bp, synthetic construct
  source 1..75: mol_type = other DNA
atatctacttacatgcttataacgtcttcggtactaatggtaatgtacttctagatgatctaacttactcattga

SEQ ID NO: 844406 - DNA, 75 bp, synthetic construct
  source 1..75: mol_type = other DNA
atctcgactgttcaattgagaagaaaggccgggaaagttttgtaatcgtccattctcgcaatccaaagctgaaac

SEQ ID NO: 844407 - DNA, 75 bp, synthetic construct
  source 1..75: mol_type = other DNA
gaacgatccgggtattctggttacgcaatctgtgcataaacagcaggctggtttttctcagacttcacaaatcca

SEQ ID NO: 844408 - DNA, 75 bp, synthetic construct
  source 1..75: mol_type = other DNA
ctccgcatgggtcggctatgagcagtttatcccgatgatggcggactgttcaccgctgttactggatctaaatga

SEQ ID NO: 844409 - DNA, 75 bp, synthetic construct
  source 1..75: mol_type = other DNA
gacacaaatcaaccaacgcctggagcgagtacagcaaaacgtggcggccaaaaaagccccggttaaagccatgtt

SEQ ID NO: 844410 - DNA, 75 bp, synthetic construct
  source 1..75: mol_type = other DNA
attgggtgtatggctctccgcgactggaacgctacaacggtctgccgtcaatggagattcagggggaagccgcgc

SEQ ID NO: 844411 - DNA, 75 bp, synthetic construct
  source 1..75: mol_type = other DNA
gaaaccaccgagcgtaattaccgttacgctggctggaaaaaagcggttaaacgcgcgatggcgtgggaagaacac

SEQ ID NO: 844412 - DNA, 75 bp, synthetic construct
  source 1..75: mol_type = other DNA
acgagccgggcgtcattgtttcgttccgctacattctctgcacatttatagacgaagcggcgctaggcaacggct

SEQ ID NO: 844413 - DNA, 75 bp, synthetic construct
  source 1..75: mol_type = other DNA
tgtcgagtgcccgggagcatcccacggagctgtattgtgggaaaagagaagaaatcacgcatccttacaaaaccc

SEQ ID NO: 844414 - DNA, 75 bp, synthetic construct
  source 1..75: mol_type = other DNA
cgagtacagcaaaacgtggcggccaaaaaagccccggttaaagccatgtttattctctccgcaggcggaagtgcg

SEQ ID NO: 844415 - DNA, 75 bp, synthetic construct
  source 1..75: mol_type = other DNA
ttccctggcaggccaacggttcgttgatccgtgaaggtgatacggtgcgcggttcggcattaatcgggcagaatt

SEQ ID NO: 844416 - DNA, 75 bp, synthetic construct
  source 1..75: mol_type = other DNA
tcaacttgaaaaaagcatggcagaagaaagtcaaagtgggcatgggaacggatatcggtgccggaacaactttca

SEQ ID NO: 844417 - DNA, 75 bp, synthetic construct
  source 1..75: mol_type = other DNA
atgtttaccatcagtacggtctgaccggtaaaaactgtgtctttgctcactgcgtccatctcgaagaaaaagagt

SEQ ID NO: 844418 - DNA, 75 bp, synthetic construct
  source 1..75: mol_type = other DNA
ttggatttcgaattatgatagcctgttaactttgagggagttctttcgttgcgcaactcagattgataaaaatag

SEQ ID NO: 844419 - DNA, 75 bp, synthetic construct
  source 1..75: mol_type = other DNA
ccgtattcgccggggagttgcgaatgaaaatacatcatcaccctatcagcaggttgcccgggaagtgaaagctcc

SEQ ID NO: 844420 - DNA, 75 bp, synthetic construct
  source 1..75: mol_type = other DNA
aatgtggattacgtcaccagttttgaactgccttttcgcttgttgcttactcgtacaccacaactgattgccgcg

SEQ ID NO: 844421 - DNA, 75 bp, synthetic construct
  source 1..75: mol_type = other DNA
gggatcgtctcagcgaaactaaatccagcatcgcgttttgtccaacctccaacctttatctcggtagcggcttat

SEQ ID NO: 844422 - DNA, 75 bp, synthetic construct
  source 1..75: mol_type = other DNA
ttgggctggtgcatatgcaggagttcgccaaacgcaaaccacatcagctttccggcggtcagagacagcgtgtgg

SEQ ID NO: 844423 - DNA, 75 bp, synthetic construct
  source 1..75: mol_type = other DNA
gtgcatccactgaaagtcgatgcggatgcttcggttgtcgataacgtgccggtatacgtggcgctgcgcccggaa

SEQ ID NO: 844424 - DNA, 75 bp, synthetic construct
  source 1..75: mol_type = other DNA
ctacaaaggtgaaatcttcgcgctgctgggcgcttccggctgtggcaagtccacgctgctgcgtatgctggcagg

SEQ ID NO: 844425 - DNA, 75 bp, synthetic construct
  source 1..75: mol_type = other DNA
cattcaaacaatttttttaataatattcagcatgcatttaagaaaaaagattgggtttcgaattatgatagcctg

SEQ ID NO: 844426 - DNA, 75 bp, synthetic construct
  source 1..75: mol_type = other DNA
atgttacccaagattagacacaataatttttttggtgcagtggagttatttgtaaagtcatcgcatacaaaaata

SEQ ID NO: 844427 - DNA, 75 bp, synthetic construct
  source 1..75: mol_type = other DNA
tactcaaagagcgtcatgaggatgggcttgtgctttattcgcctgggctggtgcatccactgaaagtcgacgcgg

SEQ ID NO: 844428 - DNA, 75 bp, synthetic construct
  source 1..75: mol_type = other DNA
agaacggttgcgtattgcactgctgaatgtggattacgtcaccagttttgaactgccttttcgcttgttgcttac

SEQ ID NO: 844429 - DNA, 75 bp, synthetic construct
  source 1..75: mol_type = other DNA
tggacggcctgttctggtttggcagtcagcgtattgcggctgatgttctgaggctgagaaaggccggaatgccgg

SEQ ID NO: 844430 - DNA, 75 bp, synthetic construct
  source 1..75: mol_type = other DNA
gctgcgtgtacagcctgaaggccagcctttccggtgtgccggatacataccggtatcatctgtctcatcgtattc

SEQ ID NO: 844431 - DNA, 75 bp, synthetic construct
  source 1..75: mol_type = other DNA
tgccggatacataccggtatcatctgtctcatcgtattcgccgggtgtttgggagtgaaaagacatcatcgccat

SEQ ID NO: 844432 - DNA, 75 bp, synthetic construct
  source 1..75: mol_type = other DNA
atgcgtacacgaattgattatctggcggataaatactgttttacagaacggaacgaatcgccccgtcttcgccgg

SEQ ID NO: 844433 - DNA, 75 bp, synthetic construct
  source 1..75: mol_type = other DNA
aaggccagcctttccggtgtgccggatacataccggtatcatctgtctcatcgtattcgccgggtgattgggaat

SEQ ID NO: 844434 - DNA, 75 bp, synthetic construct
  source 1..75: mol_type = other DNA
acggtttggctgcgtgtacagcctgaaggccagcctttctggtgtgaaccgccccgggtttcctggagagtgttt

SEQ ID NO: 844435 - DNA, 75 bp, synthetic construct
  source 1..75: mol_type = other DNA
tgccggatacataccggtatcatctgtctcatcgtattcgccggatgtttgggaatgaaaagacatcatcgccat

SEQ ID NO: 844436 - DNA, 75 bp, synthetic construct
  source 1..75: mol_type = other DNA
atgatgatgggtgaagtacagtcattaccgtctgccggattgcatcctgcgttacaggacgcgttaacactagcc

SEQ ID NO: 844437 - DNA, 75 bp, synthetic construct
  source 1..75: mol_type = other DNA
gcacggcaggcactgcgcgtcagtgtgaagagttccaccatgaagatgattaccagctttgcagcgccattgaga

SEQ ID NO: 844438 - DNA, 75 bp, synthetic construct
  source 1..75: mol_type = other DNA
tgccggatacataccggtatcatctgtctcatcgtattcgccgggtgattgggattgaaaagacatcatcgccat

SEQ ID NO: 844439 - DNA, 75 bp, synthetic construct
  source 1..75: mol_type = other DNA
tgccggatacataccggtatcatctgtctcatcgtattcgccggctgtttgggactgaaaagacatcatcgccat

SEQ ID NO: 844440 - DNA, 75 bp, synthetic construct
  source 1..75: mol_type = other DNA
tgccggatacataccggtatcatctgtctcatcgtattcgccggatggttgggattgaaaagacatcatcgccat

SEQ ID NO: 844441 - DNA, 75 bp, synthetic construct
  source 1..75: mol_type = other DNA
atgaaggtcggcttcttcttattgaaatttccgctgtcgtcagaaaccttcgttcttaaccaaatcactgcgttt

SEQ ID NO: 844442 - DNA, 75 bp, synthetic construct
  source 1..75: mol_type = other DNA
atcaatatgatgaagctcccgcgacattagaagctttaaaaaaatatattagcggcggtttacttgagtctgtta

SEQ ID NO: 844443 - DNA, 75 bp, synthetic construct
  source 1..75: mol_type = other DNA
actatagcacctgactatccggtttatatgctggggagggctctgattggtgttgtcattggagggttctggtca

SEQ ID NO: 844444 - DNA, 75 bp, synthetic construct
  source 1..75: mol_type = other DNA
accatagcgcctaactatccggtttatatgctggggagggctctgattggcgtcgtcatcggaggattctggtca

SEQ ID NO: 844445 - DNA, 75 bp, synthetic construct
  source 1..75: mol_type = other DNA
taatcttttaaaaaaatctgatgcggttattcatgctggcgatccagatgatgaaggtgaacttctggttcgtga

SEQ ID NO: 844446 - DNA, 75 bp, synthetic construct
  source 1..75: mol_type = other DNA
acgagcaacgattattagtaacctcgaaagtacaggctatttcacgatacagaacgggaagcttattccgactga

SEQ ID NO: 844447 - DNA, 75 bp, synthetic construct
  source 1..75: mol_type = other DNA
gattaaaggctttaaatctaaagctggcaaatcatttgaggcagcgcttgtaatcgacaaagaacaaaaacgggt

SEQ ID NO: 844448 - DNA, 75 bp, synthetic construct
  source 1..75: mol_type = other DNA
gagcggtaaaggtgcgcaacaaactgttgagcaggcttatgcgggggtgggacaaccgcagcataaagtgacgga

SEQ ID NO: 844449 - DNA, 75 bp, synthetic construct
  source 1..75: mol_type = other DNA
ataaatggctggcaaagattgctaccaaagtaatgcaggcgtttccgggcgccttccctgatgcggaagtggtcg

SEQ ID NO: 844450 - DNA, 75 bp, synthetic construct
  source 1..75: mol_type = other DNA
tcatgatcccgttgcttatggcagcgattaccggtgcgctactgctggtcggacaccatatctgggctgttgccg

SEQ ID NO: 844451 - DNA, 75 bp, synthetic construct
  source 1..75: mol_type = other DNA
ttgctgtctctggtgcgctggcggtgcttaccagtctgactatctcccgtattgtcggagacctgaatcgaaaat

SEQ ID NO: 844452 - DNA, 75 bp, synthetic construct
  source 1..75: mol_type = other DNA
tctggccgcgtggtcgttaggcattccggttgtacttcatgaacaaaacggtattgcgggcttaaccaataaatg

SEQ ID NO: 844453 - DNA, 75 bp, synthetic construct
  source 1..75: mol_type = other DNA
gccccgctgcgtatcttcaacgcctggcgtcaggcgcgggcgattatgaaagcgtacaaacctgacgtggtgctc

SEQ ID NO: 844454 - DNA, 75 bp, synthetic construct
  source 1..75: mol_type = other DNA
gtatggatctgctgaaatttaaagaacagatcgaatttatcgacagccatgccgattacttccacatcgatatca

SEQ ID NO: 844455 - DNA, 75 bp, synthetic construct
  source 1..75: mol_type = other DNA
ggtttatcccttctccgtgctcgacgacatcaccgccagcgagctgattaacgatattgaatcactgtttgatta

SEQ ID NO: 844456 - DNA, 75 bp, synthetic construct
  source 1..75: mol_type = other DNA
tcgcctcactgtttggtggtttctatgtgaccttctacgtgattttcgccctgctgattctgtctcttgcacttt

SEQ ID NO: 844457 - DNA, 75 bp, synthetic construct
  source 1..75: mol_type = other DNA
gatgctggcggtaatgttcctgactgcctgcatgagtggcctgtatgttattggggtggcgaaagatatcgcgca

SEQ ID NO: 844458 - DNA, 75 bp, synthetic construct
  source 1..75: mol_type = other DNA
taacttcccggacccggtagaccgtgcagcccaggaagaagagttcagcctcgaactgcgtaaccgtgaccgcga

SEQ ID NO: 844459 - DNA, 75 bp, synthetic construct
  source 1..75: mol_type = other DNA
gacgccaggtgcaaagtcgtggtgtgcaaaccggtggttttcagatcttcgatgttcctcaagcaggtcaggtgc

SEQ ID NO: 844460 - DNA, 75 bp, synthetic construct
  source 1..75: mol_type = other DNA
atccgggccaatggtccgcgcattggcgctatgaagtggaaggatatgcaggcgcagatacaatatggaggtgtc

SEQ ID NO: 844461 - DNA, 75 bp, synthetic construct
  source 1..75: mol_type = other DNA
tgcgttgtctggtgccatcggcagttacgttttgctttccccaaaagctgaacccccaacgtttaccagagctga

SEQ ID NO: 844462 - DNA, 75 bp, synthetic construct
  source 1..75: mol_type = other DNA
ggtactcagcccaaaatcaacgcaaaaagcgtcttatcctggcgagcgtgattggcgctgctattgcgttgtctg

SEQ ID NO: 844463 - DNA, 75 bp, synthetic construct
  source 1..75: mol_type = other DNA
atattgtttactttccccttgaacaaggcctcaatcagtttttacttgatatacgtgaggaaggtgttttccttt

SEQ ID NO: 844464 - DNA, 75 bp, synthetic construct
  source 1..75: mol_type = other DNA
ttacttgctgacgctctctaactgcgtgaagtggttcccggaacgtaaaggtttgatctccgcattcgccattgg

SEQ ID NO: 844465 - DNA, 75 bp, synthetic construct
  source 1..75: mol_type = other DNA
aaatatgttcgccgcgtcagagataacgtcccgtattctgaaggggataaagagctgcttcaggatccaggctca

SEQ ID NO: 844466 - DNA, 75 bp, synthetic construct
  source 1..75: mol_type = other DNA
aaagcgtcttatcctggctagcgtgattggtgctgcgattgcgttgtctggcgccatcggcagttacgttttgct

SEQ ID NO: 844467 - DNA, 75 bp, synthetic construct
  source 1..75: mol_type = other DNA
cagggcttgccgtatcaagattaaaaacagaaggctcttttgctgtgggtggtgttgacggcctatatctccgaa

SEQ ID NO: 844468 - DNA, 75 bp, synthetic construct
  source 1..75: mol_type = other DNA
gtgatcgattacgccaaggccaaagaatactttgaaggtgataatcctgccgcatggaaaggtatgctgaaacct

SEQ ID NO: 844469 - DNA, 75 bp, synthetic construct
  source 1..75: mol_type = other DNA
attggcaaaaaggccgttagtgaaatcaccaaagttgatcttctggcaatactggaacctatctggttaaccaag

SEQ ID NO: 844470 - DNA, 75 bp, synthetic construct
  source 1..75: mol_type = other DNA
caggtcggtctgctggtgggggaaatattgcaacttccggtgattaatgcggtgagtgccattgcgcgtcagggc

SEQ ID NO: 844471 - DNA, 75 bp, synthetic construct
  source 1..75: mol_type = other DNA
agtgagtgctattcagcgtcagggcaatacactggtgattgaacgcacgcttgaagatgatgttgaagttattga

SEQ ID NO: 844472 - DNA, 75 bp, synthetic construct
  source 1..75: mol_type = other DNA
gttaaagccgtgcgcttttatgaacaggtaaagcgtgagaatccaccagtcgaaacaggagcatggaaagatgct

SEQ ID NO: 844473 - DNA, 75 bp, synthetic construct
  source 1..75: mol_type = other DNA
atgaagaaacggaaacgggtgagaaattcgaagataacgcgctgccgtgggatagcatcgatgccgcgacttatg

SEQ ID NO: 844474 - DNA, 75 bp, synthetic construct
  source 1..75: mol_type = other DNA
ttggtaaaggcaccgttcagcaataccgttcattgaaccgtatttacgatcagatgttacgtcctgaatggccag

SEQ ID NO: 844475 - DNA, 75 bp, synthetic construct
  source 1..75: mol_type = other DNA
gttcgcgaaaaagaaaaccgagttaggcgatgaactgcgttcaggcaaactcgacgttttctacgatctctacaa

SEQ ID NO: 844476 - DNA, 75 bp, synthetic construct
  source 1..75: mol_type = other DNA
cgcctgacgcaaactaacagcgaagatgttttctcgctggcaatgacggctttcgcacgcgaaattgatccgcat

SEQ ID NO: 844477 - DNA, 75 bp, synthetic construct
  source 1..75: mol_type = other DNA
gatagcattaacgcggcaacctatgtgaaatcaggagacttaacggtgtttgagccggagttactgaaagaacat

SEQ ID NO: 844478 - DNA, 75 bp, synthetic construct
  source 1..75: mol_type = other DNA
cgttaccagtatgcgttgtctgtactggaaaagccgatggattttaccggcaacgattcctataacctggatcgc

SEQ ID NO: 844479 - DNA, 75 bp, synthetic construct
  source 1..75: mol_type = other DNA
gctccccgtcgataccgcaaaggcactggcagcggcagcagaaaagatcggtttcgatttactgatctttggtga

SEQ ID NO: 844480 - DNA, 75 bp, synthetic construct
  source 1..75: mol_type = other DNA
tgcgcggcggccatgttcctttgcggttggctggcgctgggcaagaaaccgtatcaaggtttattgattggggtg

SEQ ID NO: 844481 - DNA, 75 bp, synthetic construct
  source 1..75: mol_type = other DNA
ccggtatctggccacaacgggcgttcatccactggcgcattcaactggcgaaaagtctgaccgagtataatcggg

SEQ ID NO: 844482 - DNA, 75 bp, synthetic construct
  source 1..75: mol_type = other DNA
tgcacctgccagcaaagaaacccgtattccaaaatcgatttatgaagctatccagaccattaaccgcaatctgat

SEQ ID NO: 844483 - DNA, 75 bp, synthetic construct
  source 1..75: mol_type = other DNA
tgatgaaatgttgaatagctcaaccattaacaacttgaactcagccgtaatgggaagattcaaaatcccattacc

SEQ ID NO: 844484 - DNA, 75 bp, synthetic construct
  source 1..75: mol_type = other DNA
aaatcgagttgcgccagaaacaatacgagtattatcgtgatttactgttcagtttcccgaaacctgaaactgtca

SEQ ID NO: 844485 - DNA, 75 bp, synthetic construct
  source 1..75: mol_type = other DNA
cgcccgaccaacgtcgccgactaccggcacgtcgccttctggcagcgactacgttatttttgccgcctttatctg

SEQ ID NO: 844486 - DNA, 75 bp, synthetic construct
  source 1..75: mol_type = other DNA
tcatcaagcgttggacgtcagggacgagccaactggggcgcatatgcagcgtcgaaatttgccaccgaagggatg

SEQ ID NO: 844487 - DNA, 75 bp, synthetic construct
  source 1..75: mol_type = other DNA
gggagatgttctggtgggcgatgtacggcgcatctgtagtgctgttaccgtccggactggagagcgatccgcgaa

SEQ ID NO: 844488 - DNA, 75 bp, synthetic construct
  source 1..75: mol_type = other DNA
agtcgactatttgtatcgtatcgccggagaatatggggaaaaagccgctgtattgatgggggacgcggcgctgag

SEQ ID NO: 844489 - DNA, 75 bp, synthetic construct
  source 1..75: mol_type = other DNA
atgcaagtactggccgatgaatatcagcagcgtctgcgtgtgaactgcattaacccgggcggtacgcgcactgcc

SEQ ID NO: 844490 - DNA, 75 bp, synthetic construct
  source 1..75: mol_type = other DNA
tccgaagattgccaacaactggcacagcgcattgccgttaattatccacgtctggatggtgttttgcataatgcc

SEQ ID NO: 844491 - DNA, 75 bp, synthetic construct
  source 1..75: mol_type = other DNA
caggtcgcccagaagattgccgatgaaacgcatcgcccggcgcaatggttcattctcgatttactgacctgcact

SEQ ID NO: 844492 - DNA, 75 bp, synthetic construct
  source 1..75: mol_type = other DNA
ggtggtgctggttgaccgcttcagtgcttcggcttcagaaatctttgccgcggcaatgcaggattacggtcgtgc

SEQ ID NO: 844493 - DNA, 75 bp, synthetic construct
  source 1..75: mol_type = other DNA
attccgcagggtggcgaaacccgtggcaatctggctgccggtggtcgtggcgaacctcgtccgctaactgaaagt

SEQ ID NO: 844494 - DNA, 75 bp, synthetic construct
  source 1..75: mol_type = other DNA
gactgggaaattgcccgccgtgttggccctacgctaaaagccaaagggctaatctttgtggggctggatatcatt

SEQ ID NO: 844495 - DNA, 75 bp, synthetic construct
  source 1..75: mol_type = other DNA
tgggagaaacacagcgacatcattcttaagccgctggacggtatgggcggcgcgtcgattttccgcgtgaaagaa

SEQ ID NO: 844496 - DNA, 75 bp, synthetic construct
  source 1..75: mol_type = other DNA
gtatctcgaaattacggcaaccaaatatgattcaccaacaatgtatgtcgccatagggttattattagtttgtat

SEQ ID NO: 844497 - DNA, 75 bp, synthetic construct
  source 1..75: mol_type = other DNA
ctcaatggtccggtatcaacaaccagggccgggaggattacaggaaacgagattttgccccggacagccccgaaa

SEQ ID NO: 844498 - DNA, 75 bp, synthetic construct
  source 1..75: mol_type = other DNA
ggtggaggctgacaaatccggctggctggtgcctgagaacgatgctcgcgcactggcgcaacgcctggcggcatt

SEQ ID NO: 844499 - DNA, 75 bp, synthetic construct
  source 1..75: mol_type = other DNA
tcttctggcttccgtcgcgtttctgaactttgcgctacccagccatgattttggcgccattctcgtgacctatat

SEQ ID NO: 844500 - DNA, 75 bp, synthetic construct
  source 1..75: mol_type = other DNA
agactaagacagaacggaatgccggtagtgacaacgaatgtggaggtgcacgataacctgacaggaacaacccgc

SEQ ID NO: 844501 - DNA, 75 bp, synthetic construct
  source 1..75: mol_type = other DNA
ccgcacgccacagctgattgctgcgcttcgagaagaatgggatatcagccagaaaaatgtggtgttcaacgataa

SEQ ID NO: 844502 - DNA, 75 bp, synthetic construct
  source 1..75: mol_type = other DNA
gaaagaaggtgatccaaacctcggcgtgattgccgaaaccctgactgagcatggcactcgctactgcatggcgca

SEQ ID NO: 844503 - DNA, 75 bp, synthetic construct
  source 1..75: mol_type = other DNA
accccatcgcaaacatcaacatcaagaaagattccagtttcgctatgttgctggaagcacagcgtcgtggttacg

SEQ ID NO: 844504 - DNA, 75 bp, synthetic construct
  source 1..75: mol_type = other DNA
gtgcaacctcaacacattggtttcaactacatcttatccgctctacgggataaacgctgcgatatccgcgatcgc

SEQ ID NO: 844505 - DNA, 75 bp, synthetic construct
  source 1..75: mol_type = other DNA
ttaacactctattactattttatcggcttctttgggattcttgccgctatagctataacgcttgtctggcaaagg

SEQ ID NO: 844506 - DNA, 75 bp, synthetic construct
  source 1..75: mol_type = other DNA
atgtatcagcaatctgaaggctggtatctgctaccgccgtggcactttatgaacatggcacaggcctgtatgttg

SEQ ID NO: 844507 - DNA, 75 bp, synthetic construct
  source 1..75: mol_type = other DNA
aatatatttatcttctgaaataggattaaagaaaaaaacaggggatttatttaagtatgtaataaatgataatgg

SEQ ID NO: 844508 - DNA, 75 bp, synthetic construct
  source 1..75: mol_type = other DNA
cgccaggagaacgccgcgcgtaaggccggtatttcagtgggtcagtataacgccgcaatgcgtatgctcccggcg

SEQ ID NO: 844509 - DNA, 75 bp, synthetic construct
  source 1..75: mol_type = other DNA
ataaagaaattcgtgaaaccctgactcgccgctacaaatttgccattcgtcgtctggcgcaaaccaacagcgaag

SEQ ID NO: 844510 - DNA, 75 bp, synthetic construct
  source 1..75: mol_type = other DNA
caatcaattgattcagtaaaagttatagaaataccggaaccttataatccgattgctatctatggatttgcctgt

SEQ ID NO: 844511 - DNA, 75 bp, synthetic construct
  source 1..75: mol_type = other DNA
gctggtaagatggcaggaacaacgctttttatggttgttaatggctgttgcgatgggcgcgctgattatcctggc

SEQ ID NO: 844512 - DNA, 75 bp, synthetic construct
  source 1..75: mol_type = other DNA
atttttccctggaagcctcaccgattgaatattatgaaaacattctaagtgaacggtataaaaaagcaaatgata

SEQ ID NO: 844513 - DNA, 75 bp, synthetic construct
  source 1..75: mol_type = other DNA
atgtctggaaatataggggcaaatccaaagataaatgccgtcatcgcaggcgtaatatatctatttttactctct

SEQ ID NO: 844514 - DNA, 75 bp, synthetic construct
  source 1..75: mol_type = other DNA
ttattcaatgttgatcctggttctcaccgttttatcattatgatgacgttgacagggttggccctggtaatcatc

SEQ ID NO: 844515 - DNA, 75 bp, synthetic construct
  source 1..75: mol_type = other DNA
gcagcacctttcggtgtcagtgtatatgccccggtgacggtcgagaatgcttccggtaacgcacagcagcaaaac

SEQ ID NO: 844516 - DNA, 75 bp, synthetic construct
  source 1..75: mol_type = other DNA
aaagtgaggtgctttcccgtgcggagctgaatgcgaagctcggcgatcagatagtggcgcaggagcggcttaatc

SEQ ID NO: 844517 - DNA, 75 bp, synthetic construct
  source 1..75: mol_type = other DNA
gataaatgacaccatcagccagcagcgtcaggagctgtggcgtaagcagtcccgttttacggttctggaagaggc

SEQ ID NO: 844518 - DNA, 75 bp, synthetic construct
  source 1..75: mol_type = other DNA
aaattcgaagagggcacggatgcggcattccacggtttctggctgtggccgtgcacgatgctgaacgtcaccccg

SEQ ID NO: 844519 - DNA, 75 bp, synthetic construct
  source 1..75: mol_type = other DNA
tcacccacagcggacaatttactgagctggaccacggccacgacttttatgccccgcagagtttcctgaccccgg

SEQ ID NO: 844520 - DNA, 75 bp, synthetic construct
  source 1..75: mol_type = other DNA
tttaaggtgcaggcgctgtcaagccgtccgtctaacctgcgtggtttgcagggagacgtggtgattgatgaggcg

SEQ ID NO: 844521 - DNA, 75 bp, synthetic construct
  source 1..75: mol_type = other DNA
ccgtatgttcagattaaacgagagtattgatcaggctctacaccatttcttaagtaaagaaggtgataaaaatga

SEQ ID NO: 844522 - DNA, 75 bp, synthetic construct
  source 1..75: mol_type = other DNA
attgatcaagctctgcaccatttcttaagtaaagaaggtgataaaaatgataataaggggattttaaatgttaga

SEQ ID NO: 844523 - DNA, 75 bp, synthetic construct
  source 1..75: mol_type = other DNA
gaggaggtcaaactcccggacgtctccatgaccatgcaggagcataaggcgctggggatggtgggcaaggtggaa

SEQ ID NO: 844524 - DNA, 75 bp, synthetic construct
  source 1..75: mol_type = other DNA
tgagcttcaggaaacgctgaacgcggacgactttgccctgcaactggcagaggtgtgctttaaggcgcgagcact

SEQ ID NO: 844525 - DNA, 75 bp, synthetic construct
  source 1..75: mol_type = other DNA
gggaaatacggtcccaacgccacggaggagcaaatccgcgtactgattgatgcgattgcctccattgcctcggat

SEQ ID NO: 844526 - DNA, 75 bp, synthetic construct
  source 1..75: mol_type = other DNA
tggcaggcattctgcgcaatgccgccgacggcatcacacgtgatttttttatccttgctgaagagatggaagaac

SEQ ID NO: 844527 - DNA, 75 bp, synthetic construct
  source 1..75: mol_type = other DNA
tacacgcaagctgacggtttccgggattgaaccttcagtggaggccgggagcgattccccgcgggatgtggaaat

SEQ ID NO: 844528 - DNA, 75 bp, synthetic construct
  source 1..75: mol_type = other DNA
gaaaggcgcaaaaattctgacgccaacggcgcaaatggctaacccactaccggccatgaaccgtgagcagactgc

SEQ ID NO: 844529 - DNA, 75 bp, synthetic construct
  source 1..75: mol_type = other DNA
ccgcacgccgtctgctgaacccggcaaccggtgaggaagacacgctgaaaaaagaggcgctcaatgaagcacagg

SEQ ID NO: 844530 - DNA, 75 bp, synthetic construct
  source 1..75: mol_type = other DNA
gggctacgaagcgaccgtctcgcgcgattatcctgtaatgtttggtaccttgtatattttcaccctgattggcct

SEQ ID NO: 844531 - DNA, 75 bp, synthetic construct
  source 1..75: mol_type = other DNA
cggagggaataagcagcctgtatatctacagcgacccgggaagttatgaaccgctggcgcggttggataaggcgg

SEQ ID NO: 844532 - DNA, 75 bp, synthetic construct
  source 1..75: mol_type = other DNA
cggttcatggtaacggatccgatagggttagcgggggggaataaacctctaccaatacgcgccgaatccgctctc

SEQ ID NO: 844533 - DNA, 75 bp, synthetic construct
  source 1..75: mol_type = other DNA
gctttcttcaacatcgtgaaaaagaacaagcatggttttttacccaatcacacgaaggacgccaggaaggctttt

SEQ ID NO: 844534 - DNA, 75 bp, synthetic construct
  source 1..75: mol_type = other DNA
acggtgttgggttcgattttaggtcttatcgctctgcaactggagttaatttcgttaccgctgatgttagtctgg

SEQ ID NO: 844535 - DNA, 75 bp, synthetic construct
  source 1..75: mol_type = other DNA
gtcgcgctggcattcctgctcacttttctcattatccgcctgtttactatcccggaaagcacctggccgctggtc

SEQ ID NO: 844536 - DNA, 75 bp, synthetic construct
  source 1..75: mol_type = other DNA
ttggtgaacgactaaatcttccctgtataaatgcggtcagtaaaattactgtttcagattcctgcgttattgtcg

SEQ ID NO: 844537 - DNA, 75 bp, synthetic construct
  source 1..75: mol_type = other DNA
tctacttccccacaaccaaacactaatccctggtatcgcaatattaccaatcccggcattgcggaggctcactga

SEQ ID NO: 844538 - DNA, 75 bp, synthetic construct
  source 1..75: mol_type = other DNA
cggtttccatcaccctcggattgtggagcacgctgattatctatctggtgtcgattccgctgggtattcgcaaag

SEQ ID NO: 844539 - DNA, 75 bp, synthetic construct
  source 1..75: mol_type = other DNA
atgaaggtcggcttctttttactgaaattcccgctgtcgtcagaaaccttcgtccttaaccaaattaccgcgttt

SEQ ID NO: 844540 - DNA, 75 bp, synthetic construct
  source 1..75: mol_type = other DNA
cgatgaggtgattaagcgacttgatgatctcaaagtgcagcgcaatcttcctcgcgcagagctattacgagaagc

SEQ ID NO: 844541 - DNA, 75 bp, synthetic construct
  source 1..75: mol_type = other DNA
gccagcagcgccgcgtgaaagccaatcaccagcgtcgtcttaaaacgtctaaggagaagcccgactacgacgaca

SEQ ID NO: 844542 - DNA, 75 bp, synthetic construct
  source 1..75: mol_type = other DNA
gattgggttaaatcaaactgtgaagttatttatttgcctagaacaccatctatttcaacaacagaaattattgag

SEQ ID NO: 844543 - DNA, 75 bp, synthetic construct
  source 1..75: mol_type = other DNA
tcgcaaaatacagccaacaaccgctggtgaactatatcggccagccggtcgtcaacattgtcgaactcaatctgg

SEQ ID NO: 844544 - DNA, 75 bp, synthetic construct
  source 1..75: mol_type = other DNA
ccctataatccacaggcttctggcgggagcaatctggcggtcagtaatccggcgctgaataaacaaatagctgca

SEQ ID NO: 844545 - DNA, 75 bp, synthetic construct
  source 1..75: mol_type = other DNA
tgttcatcgtgtttcggttgttcggtcgagaatggtcgtttgacctcaaggacaggaccagaacagacaaccaca

SEQ ID NO: 844546 - DNA, 75 bp, synthetic construct
  source 1..75: mol_type = other DNA
ttgtcgataactacatcatccacaaaagccgtgaaacgttgcgctggctgaaagcaaacccgaagttcagggtca

SEQ ID NO: 844547 - DNA, 75 bp, synthetic construct
  source 1..75: mol_type = other DNA
ggtggttacctgcagccggactggtatggcgcagagccgcgccgacactgcgtatccgtgacccacacaaagaag

SEQ ID NO: 844548 - DNA, 75 bp, synthetic construct
  source 1..75: mol_type = other DNA
ccctataatccacaggcttctggcgggagcaatctggcggttagtaacccggagctggataaacaaatcgctgca

SEQ ID NO: 844549 - DNA, 75 bp, synthetic construct
  source 1..75: mol_type = other DNA
tcgcaaaatacagcaaacaaccgctggtgaaatatatcggccagccggtcgtcaacattgtcgaactcaatctgg

SEQ ID NO: 844550 - DNA, 75 bp, synthetic construct
  source 1..75: mol_type = other DNA
caaaactacgggaactgggtgtcattcgcggcaaaattgccaccattttccacggcattgatatttccagtcggg

SEQ ID NO: 844551 - DNA, 75 bp, synthetic construct
  source 1..75: mol_type = other DNA
atgcgtggattacgtccggcattctcgacttttctctttctgttattgattactggcggcgtttacccgctgcta

SEQ ID NO: 844552 - DNA, 75 bp, synthetic construct
  source 1..75: mol_type = other DNA
ttaccggcaacggctattttcatggtcgcccgtcggcaacagcagaaatgccctataatccacaggcttctggcg

SEQ ID NO: 844553 - DNA, 75 bp, synthetic construct
  source 1..75: mol_type = other DNA
agcgggctggacaataacatcaccccgcaagcggcggctggcagatcccacgcgtggcgaaagcgcgtaatctca

SEQ ID NO: 844554 - DNA, 75 bp, synthetic construct
  source 1..75: mol_type = other DNA
gataatgaccacacagcccccgttaaactcccttcaaaaccccctgtacgagatggtataggggtatctttagca

SEQ ID NO: 844555 - DNA, 75 bp, synthetic construct
  source 1..75: mol_type = other DNA
tcctgaccaacgatgtctctgacaactcggggctcggtcagcacaccacgaccgccgctcggctgtatcacttcc

SEQ ID NO: 844556 - DNA, 75 bp, synthetic construct
  source 1..75: mol_type = other DNA
gaagacgtgattaaaagcgagcattgcttcaccgcatacgatggtattggcggagagggcgctatggcgacatac

SEQ ID NO: 844557 - DNA, 75 bp, synthetic construct
  source 1..75: mol_type = other DNA
gaagattgcccggcaaaatgctgtaaacaaaatctggatgctcgaaggttacttgctgaagcagaagctaagcga

SEQ ID NO: 844558 - DNA, 75 bp, synthetic construct
  source 1..75: mol_type = other DNA
agggaaaatcgcggaaacccgtttcgaaaactatcaccgtattctggaaagcatggcgcaggtaaaaacgcgtaa

SEQ ID NO: 844559 - DNA, 75 bp, synthetic construct
  source 1..75: mol_type = other DNA
tggcacctgggagcggaacaagtcactcagggttttgtcgaattccacgactacttaggcttgtgcaaatatcgc

SEQ ID NO: 844560 - DNA, 75 bp, synthetic construct
  source 1..75: mol_type = other DNA
tggcacctggcgccggaacaaatcactcaaggctttgtcgaatttcatgattacttaggcctgtgtaaatatcgc

SEQ ID NO: 844561 - DNA, 75 bp, synthetic construct
  source 1..75: mol_type = other DNA
tgcggactggcaactgcgcggacagcaaaaacgggtggtcacgccgggacagaatgaaaaatattatctggccgg

SEQ ID NO: 844562 - DNA, 75 bp, synthetic construct
  source 1..75: mol_type = other DNA
ggcagttactgaaaaaggtccgccattttatggaaaccgccagcccattccccggaggaaaacatggtcaggcaa

SEQ ID NO: 844563 - DNA, 75 bp, synthetic construct
  source 1..75: mol_type = other DNA
gcatattttgcattgcacacagacctcttcaatcgccctgtaacgagttaaacgacctcttcaggtcaactcata

SEQ ID NO: 844564 - DNA, 75 bp, synthetic construct
  source 1..75: mol_type = other DNA
gctatcaccaaagcaaagaactgattgaacgctggcacaaaaatggtcgtctgttgtatgcgattacgccacgct

SEQ ID NO: 844565 - DNA, 75 bp, synthetic construct
  source 1..75: mol_type = other DNA
cttctgccgcaagaacaagacgggcaatatccgtcccattggcgcgtgagccacagcatattgcagcaggtacgg

SEQ ID NO: 844566 - DNA, 75 bp, synthetic construct
  source 1..75: mol_type = other DNA
aaggagaacccgaagttcagggtcatttatcagccggtttactcgccatgggtgaatcatgttgaacggctatgg

SEQ ID NO: 844567 - DNA, 75 bp, synthetic construct
  source 1..75: mol_type = other DNA
tcccggaagacatgcgcaatgcgcgcctgacctccagcgaaaaacaccgtattgttgagcgcgtaatccgtcgcg

SEQ ID NO: 844568 - DNA, 75 bp, synthetic construct
  source 1..75: mol_type = other DNA
aaacgtatttttccgcactcaccgcgcgtgaatgctgatttatcgtcatcttcatggcaaactagccgccgaaat

SEQ ID NO: 844569 - DNA, 75 bp, synthetic construct
  source 1..75: mol_type = other DNA
tatccggatgttccgttcacctggctggagtttgataacggcggcgatggtgtgtttatgctcaccaaagagcag

SEQ ID NO: 844570 - DNA, 75 bp, synthetic construct
  source 1..75: mol_type = other DNA
cagacggggaccagcaatatgtttggtcaggcggtgtcggcactggccgctgtggctgctgccggagaggatgtg

SEQ ID NO: 844571 - DNA, 75 bp, synthetic construct
  source 1..75: mol_type = other DNA
gatcacggagtccattctcaatacgcccccggataacaagccatcgctggatgcaccgtttatttcagaagggct

SEQ ID NO: 844572 - DNA, 75 bp, synthetic construct
  source 1..75: mol_type = other DNA
tacgacctgatcgtcactaacccgccgtatgtcgatgcggaagatatgtccgacctgccaaatgaataccgccac

SEQ ID NO: 844573 - DNA, 75 bp, synthetic construct
  source 1..75: mol_type = other DNA
gttaggccaggactaccaccagcggaaagctgaattaattcgcctttcgcaacgctggttagcccgccgcatgga

SEQ ID NO: 844574 - DNA, 75 bp, synthetic construct
  source 1..75: mol_type = other DNA
gctgaacgtcaccaacaacatcccgacatctcgttgctggatgcctggcttgattttgctgccgttaaatatcag

SEQ ID NO: 844575 - DNA, 75 bp, synthetic construct
  source 1..75: mol_type = other DNA
atgagttatctgctcttgttaccccatatacgcatcgaaaacgctaacgccgtctccgggttgacctggggattc

SEQ ID NO: 844576 - DNA, 75 bp, synthetic construct
  source 1..75: mol_type = other DNA
ccatcgctctacctgccgctggatatcccggaagatatgcgcaccgcgcgtctgacctccagcgaaaaacaccgt

SEQ ID NO: 844577 - DNA, 75 bp, synthetic construct
  source 1..75: mol_type = other DNA
ccagcggaaagctgaattaattcgcctttcgcaacgctggttagcccgccgcatggaggtgagcagccatgcgta

SEQ ID NO: 844578 - DNA, 75 bp, synthetic construct
  source 1..75: mol_type = other DNA
tacttcatcaaatgcgaggaggagctacacaaggtagcgccagtgcgttccgcagcgttacgccgggaactgaaa

SEQ ID NO: 844579 - DNA, 75 bp, synthetic construct
  source 1..75: mol_type = other DNA
ttggctatgcagatgattcctcctatactcttgttgacagaaataaccactggagagatttccacactcctcgtc

SEQ ID NO: 844580 - DNA, 75 bp, synthetic construct
  source 1..75: mol_type = other DNA
attaccggtggtggatttgatggttgtgtggatcaggttgctggcttcacggaaatcaccacacaccagtgcctg

SEQ ID NO: 844581 - DNA, 75 bp, synthetic construct
  source 1..75: mol_type = other DNA
gaagtcatcccgggctacacgacatccccctctgaaagcggatactacggtggggtgacctcgtcgggtgtggat

SEQ ID NO: 844582 - DNA, 75 bp, synthetic construct
  source 1..75: mol_type = other DNA
tcctgcttctggtcagcggagtcggaatggcgaatgaccatacggagagccgtcagtttatccatgagcagctgc

SEQ ID NO: 844583 - DNA, 75 bp, synthetic construct
  source 1..75: mol_type = other DNA
atggcttcgattaatgatgtcgatatgacggtgatcccgggagaaacactggcagagctgaacgcgctttccgga

SEQ ID NO: 844584 - DNA, 75 bp, synthetic construct
  source 1..75: mol_type = other DNA
gtatatggccccgctacgacaccaatattaactctttcaagttatcaacttaatacggtgtattattcagcaaaa

SEQ ID NO: 844585 - DNA, 75 bp, synthetic construct
  source 1..75: mol_type = other DNA
tctttaatgaaaataaccacagagcaagacgcggtagtattaaaaacattaaacgacattttaaagtcctcatac

SEQ ID NO: 844586 - DNA, 75 bp, synthetic construct
  source 1..75: mol_type = other DNA
cgttaatcagggggctggcacacttacttttgatgatgattatattgtcaagcccgttgatactcagacatggaa

SEQ ID NO: 844587 - DNA, 75 bp, synthetic construct
  source 1..75: mol_type = other DNA
aaatacgatgaaactagatgtcgatacaccggtaaatacaaaacaaggtgaaggagatattcattggtcatatga

SEQ ID NO: 844588 - DNA, 75 bp, synthetic construct
  source 1..75: mol_type = other DNA
cctcatattctgatgggtgatgtaaaagtaactgtttcagcaatgattgcttgcgctgttttattgcacccaaat

SEQ ID NO: 844589 - DNA, 75 bp, synthetic construct
  source 1..75: mol_type = other DNA
ccgccggataacaagccgtcgctggatgcaccatttatttctgaagggctggccatgaaggacaaggccgagacc

SEQ ID NO: 844590 - DNA, 75 bp, synthetic construct
  source 1..75: mol_type = other DNA
ttgacttcagctctaatgactcgactggggttgcaacactggtttcgccacaatatgtcgtcagcgttaagcaca

SEQ ID NO: 844591 - DNA, 75 bp, synthetic construct
  source 1..75: mol_type = other DNA
aacactggtttcgccacagtatgtcgtcagcgttaagcacaatggtggttatcaatatgtgaaatttggctatgc

SEQ ID NO: 844592 - DNA, 75 bp, synthetic construct
  source 1..75: mol_type = other DNA
gccgaatccccggctgaagacaataccgcacaatggacataccagccgaagccaatgcccggtttcctcgtgcca

SEQ ID NO: 844593 - DNA, 75 bp, synthetic construct
  source 1..75: mol_type = other DNA
actcacctgcagattggggcagacagaaaacacacgtttgatggcgccgacctgtttaccggggtgacggcaacg

SEQ ID NO: 844594 - DNA, 75 bp, synthetic construct
  source 1..75: mol_type = other DNA
aacgtcgcggcgggagctactctggcaggaaacattcaggcggataatgtcgccagcatcaattttggcgtaacc

SEQ ID NO: 844595 - DNA, 75 bp, synthetic construct
  source 1..75: mol_type = other DNA
cactttacaggaaacgttgatgtcagcaatgcggcgacgaccagcacacagaatgactttgtcatggatggcggg

SEQ ID NO: 844596 - DNA, 75 bp, synthetic construct
  source 1..75: mol_type = other DNA
tgttagccaatattgggattgatacacgcattaaagacaatacccgtatcggcctgaccattgagaaatcagcat

SEQ ID NO: 844597 - DNA, 75 bp, synthetic construct
  source 1..75: mol_type = other DNA
tttattcctggaacggaaagtcttgagttgtataataactcaggattattagtgactacgttaaataaagctccc

SEQ ID NO: 844598 - DNA, 75 bp, synthetic construct
  source 1..75: mol_type = other DNA
gggatgcacaacaaaacaaatgggttgtcttggctgtactacatgccgcagacaggaaggtcaccggaagaacta

SEQ ID NO: 844599 - DNA, 75 bp, synthetic construct
  source 1..75: mol_type = other DNA
ctacgcctccggcagttcaggccagatggcatccggcgcggtgctggtatctgttgccgtcaccgcgtcaatgta

SEQ ID NO: 844600 - DNA, 75 bp, synthetic construct
  source 1..75: mol_type = other DNA
acctcaggatataaagattatcaggaaatgttacagcgtgatgatattgaggcggtgtttattttcacctcgaca

SEQ ID NO: 844601 - DNA, 75 bp, synthetic construct
  source 1..75: mol_type = other DNA
ggtgatgctgaccttcagaaacggtggttatgcgctaattgataatagtcgtcgggcggtttatggctacgacca

SEQ ID NO: 844602 - DNA, 75 bp, synthetic construct
  source 1..75: mol_type = other DNA
ccttccatcagcttaacggcgcggacgacggcgcaatcctgaccaacagcgggaaacaggcaacggtaaacctgg

SEQ ID NO: 844603 - DNA, 75 bp, synthetic construct
  source 1..75: mol_type = other DNA
tgacatttgatgctaattacactgttagccccagtactaatgaaacctggaaaggcggtggaattattgttaatg

SEQ ID NO: 844604 - DNA, 75 bp, synthetic construct
  source 1..75: mol_type = other DNA
ttctctataactttcctgatctgaccggtcaggatattgggcttgaggtcattacccggctggcccgggaagttc

SEQ ID NO: 844605 - DNA, 75 bp, synthetic construct
  source 1..75: mol_type = other DNA
gctgacttttaatgatgactatgtggtgaaacctctggatgatcagacctggattggggggggtgtcattgtcaa

SEQ ID NO: 844606 - DNA, 75 bp, synthetic construct
  source 1..75: mol_type = other DNA
ccccggaggaacatctactgagttgttttctctgaagacagcaactctcaatattgggttcagcttaattactcc

SEQ ID NO: 844607 - DNA, 75 bp, synthetic construct
  source 1..75: mol_type = other DNA
gaaaggaggtgggattattgttaacagcgctcgtaacgtcgactggcaggtaaatggtgtacagggtgataatct

SEQ ID NO: 844608 - DNA, 75 bp, synthetic construct
  source 1..75: mol_type = other DNA
gtaatacccggatggttatgacttcagatggttattcatcagataaactgaatgtgaaacaatcactgacaggtg

SEQ ID NO: 844609 - DNA, 75 bp, synthetic construct
  source 1..75: mol_type = other DNA
taagggaacattacagcatgcactggctaacagacgagacacccttgcagaaggtttcgttgatgttctcaacaa

SEQ ID NO: 844610 - DNA, 75 bp, synthetic construct
  source 1..75: mol_type = other DNA
catcgaggaggggcgtaagaaaattgaccgtaaaacgtggaaaaggctctttgaagaaacaggtatggaccggta

SEQ ID NO: 844611 - DNA, 75 bp, synthetic construct
  source 1..75: mol_type = other DNA
tgaagttgagtacccgtaccgaacaactcgccagtagtcgtgatgccgctatgcaaaaatttctggacggcatga

SEQ ID NO: 844612 - DNA, 75 bp, synthetic construct
  source 1..75: mol_type = other DNA
acaaggtcaatcaaaagcgacaaaggactcagataaaagtacattttatggaaatgtatctctgaccaataactc

SEQ ID NO: 844613 - DNA, 75 bp, synthetic construct
  source 1..75: mol_type = other DNA
caaatactctcaaaaaactaggagatgactcagtattaacacaaccagtgtcatttacacaggatgattgggaga

SEQ ID NO: 844614 - DNA, 75 bp, synthetic construct
  source 1..75: mol_type = other DNA
gtcgctctattgtaattctttctgatgaaaatcagattaacccagataatatttattggggatatcgtggaggta

SEQ ID NO: 844615 - DNA, 75 bp, synthetic construct
  source 1..75: mol_type = other DNA
aaactcagatctcaatcatgggaaaaatctggcattttctggaggtggcacaattgttttaaaagactcggtgac

SEQ ID NO: 844616 - DNA, 75 bp, synthetic construct
  source 1..75: mol_type = other DNA
gtgctgaagccggttatcgttatcatctgaacgaaagtacctggattgaaccccaggctgaactggtatacggtg

SEQ ID NO: 844617 - DNA, 75 bp, synthetic construct
  source 1..75: mol_type = other DNA
cgtcatgtttgactcaggtgcttatattgacctgatcggtaagtatgttcatcacgataatgagtacaccgccac

SEQ ID NO: 844618 - DNA, 75 bp, synthetic construct
  source 1..75: mol_type = other DNA
atacgcgctggtgcgtaccgaccagccgggattcagcgcctgtacccgatctcagttaataaacagtatcgatat

SEQ ID NO: 844619 - DNA, 75 bp, synthetic construct
  source 1..75: mol_type = other DNA
cgatatcctccgggcccgccgggcgacaggcctgatgacccgcgacaattacagaacggtaaataacattacccg

SEQ ID NO: 844620 - DNA, 75 bp, synthetic construct
  source 1..75: mol_type = other DNA
gcgaccggcctgatgacccgcgacaattacagaacggtaaataatattatcctgggtaagcacccggaggtgaaa

SEQ ID NO: 844621 - DNA, 75 bp, synthetic construct
  source 1..75: mol_type = other DNA
cctccgggctcgcagggcgactggcctgatgaccagcgacaattacagaacggtaaataacattaccctgggtaa

SEQ ID NO: 844622 - DNA, 75 bp, synthetic construct
  source 1..75: mol_type = other DNA
atacgcgctggtgcgtaccgaccagccgggattcagcgcctgtacccggtctcagttaataaacagaattgatat

SEQ ID NO: 844623 - DNA, 75 bp, synthetic construct
  source 1..75: mol_type = other DNA
atacgcgctggtgcgtaccgaccagccgggattcagcgcctgtacccgttctcagttaataaacagaatagatat

SEQ ID NO: 844624 - DNA, 75 bp, synthetic construct
  source 1..75: mol_type = other DNA
agctgttgcacgaaacgccagaggcgtatacctgcatttgcgtgaaatccatcaaatctggaaaagccagcttta

SEQ ID NO: 844625 - DNA, 75 bp, synthetic construct
  source 1..75: mol_type = other DNA
atttcactgtgtgatgcggtgaactttctcgtggaaaaatacgcgctggtgcgtaccgaccagccgggattcagc

SEQ ID NO: 844626 - DNA, 75 bp, synthetic construct
  source 1..75: mol_type = other DNA
cagcatatcgacgcaggtatctcgctgtccgatgccctgaattttattgtagaaaagtatgaactggtccgcact

SEQ ID NO: 844627 - DNA, 75 bp, synthetic construct
  source 1..75: mol_type = other DNA
catattgaggcaggcatttcactgtgtgatgcggtgaactttctcgttgaaaaatacgcactggtgcgtaccgac

SEQ ID NO: 844628 - DNA, 75 bp, synthetic construct
  source 1..75: mol_type = other DNA
aacgccagaggcgtatacctgcatttgcgtgaaatccatcaaatctggacaagccagctttacccaatgcttaag

SEQ ID NO: 844629 - DNA, 75 bp, synthetic construct
  source 1..75: mol_type = other DNA
cagcatattgaggcaggcatttcactgtgtgatgcagtgaactttctcgtggaaaaatacgtactggtacgaact

SEQ ID NO: 844630 - DNA, 75 bp, synthetic construct
  source 1..75: mol_type = other DNA
cctccgggctcgccgggccactggcctgatgaacagcgacaattacagaacggtaaataacattaccctgggtaa

SEQ ID NO: 844631 - DNA, 75 bp, synthetic construct
  source 1..75: mol_type = other DNA
cccactctcagttaataaacagcatcgatatcctccgggctcgccgggcaacaggcctgatgactcgcgacaatt

SEQ ID NO: 844632 - DNA, 75 bp, synthetic construct
  source 1..75: mol_type = other DNA
ctcacccggttactggaccagcactacggcctcacactgaatgacacaccgttagcggatgaacgtgtgattgag

SEQ ID NO: 844633 - DNA, 75 bp, synthetic construct
  source 1..75: mol_type = other DNA
tgatatcctccgggcccgtcgggcggccggcctgatggtccgcgacaattacagaacggtaaataacattaccct

SEQ ID NO: 844634 - DNA, 75 bp, synthetic construct
  source 1..75: mol_type = other DNA
cgccgggcgacaggcctgatgacccgcgacaattacagaacggtaaatgacattacccaggggaagcatccggag

SEQ ID NO: 844635 - DNA, 75 bp, synthetic construct
  source 1..75: mol_type = other DNA
cagcatattgaggctggcatttcactgtgtgatgcggtgaactttctcgtggaaaaatacgcgctggtgcgtacc

SEQ ID NO: 844636 - DNA, 75 bp, synthetic construct
  source 1..75: mol_type = other DNA
acggcctcacactgaatgacacaccgttcgctgatgaacgtgtgattgagcagcatattgaggcagggatttcac

SEQ ID NO: 844637 - DNA, 75 bp, synthetic construct
  source 1..75: mol_type = other DNA
ctgtcacggttgctggaccagcattacggccttacgctggatgacacaccgttcgctgatgaacgtgtgattgag

SEQ ID NO: 844638 - DNA, 75 bp, synthetic construct
  source 1..75: mol_type = other DNA
catatcaggaaaatcttcagtatgaaaacattacctgtattacccgggcaggcggccagttctcgcccgtctcct

SEQ ID NO: 844639 - DNA, 75 bp, synthetic construct
  source 1..75: mol_type = other DNA
cctccgggctcgcggggcaactggcctgatgaccagcgacaattacagaacggtaaataacattaccctgggtaa

SEQ ID NO: 844640 - DNA, 75 bp, synthetic construct
  source 1..75: mol_type = other DNA
ctcacccgactgctggaccagcactacggcctcacgcagaatgacactccgttcgctgatgaacgtgtgattgag

SEQ ID NO: 844641 - DNA, 75 bp, synthetic construct
  source 1..75: mol_type = other DNA
acaggcctgatgacccgcgacaattacagaatggtaaatgacattagccaggggaagtatccggaggcgaaacaa

SEQ ID NO: 844642 - DNA, 75 bp, synthetic construct
  source 1..75: mol_type = other DNA
cgactgctggaccagcactacggcctcacgctaaatgacacaccgttctccgatgaacgtgtgattgagcagcat

SEQ ID NO: 844643 - DNA, 75 bp, synthetic construct
  source 1..75: mol_type = other DNA
tgaccgcatcaacgacgcggcgctactggccagtctcataaatttgtcgctgaacccttcagaggtaagggggcg

SEQ ID NO: 844644 - DNA, 75 bp, synthetic construct
  source 1..75: mol_type = other DNA
tgctgccgagcgcaatccttcgcctgacctgtgcggactggtggaaacgcaaactgtggcttttacgttgcgagt

SEQ ID NO: 844645 - DNA, 75 bp, synthetic construct
  source 1..75: mol_type = other DNA
ttgctgtacctgccgcagcttaacaagcaccagatacagacgctgggcaccatgacggcggcaatgttcagcagc

SEQ ID NO: 844646 - DNA, 75 bp, synthetic construct
  source 1..75: mol_type = other DNA
acaaaacacccacgcggcatggacgaaatacaaccttgccgcaagaacccgttggttacaggacgaacctgcggg

SEQ ID NO: 844647 - DNA, 75 bp, synthetic construct
  source 1..75: mol_type = other DNA
tcattaaaaacaatgatgaagcccaccgtacgccggaaatccactcgatgctggtgatcccgctttgggagaaag

SEQ ID NO: 844648 - DNA, 75 bp, synthetic construct
  source 1..75: mol_type = other DNA
ctggtgatcccattgtgggagaaaggcgttgtgaccggaacgctgaaaatttactactgccacgcgcatcagata

SEQ ID NO: 844649 - DNA, 75 bp, synthetic construct
  source 1..75: mol_type = other DNA
atcgcggtgatgtccggcgggattctgtttggcccgtgggtaggcatcattaccggcgtgattgcgggtattcac

SEQ ID NO: 844650 - DNA, 75 bp, synthetic construct
  source 1..75: mol_type = other DNA
cacaactcaaccgtaatcaaattcagcgccttgccacactaacggcggcggcattttccaccgaactggaacgca

SEQ ID NO: 844651 - DNA, 75 bp, synthetic construct
  source 1..75: mol_type = other DNA
ggtgatttgggtgagtggttaaggtcactgacccccacagagcgaaaacaactcaccaggcagctgaaagatgcg

SEQ ID NO: 844652 - DNA, 75 bp, synthetic construct
  source 1..75: mol_type = other DNA
gagcgtcgggtcagactggaaaaactggcgaagcacaaacgcgagaatccgcccacggtggtatcggaagccatg

SEQ ID NO: 844653 - DNA, 75 bp, synthetic construct
  source 1..75: mol_type = other DNA
cgcaaagactacctgattcgcaccgcctacgacctcgcagatgagctgaacgattacggcgaacagagcgtacag

SEQ ID NO: 844654 - DNA, 75 bp, synthetic construct
  source 1..75: mol_type = other DNA
gcaaaaaacagcagtgatgaaatgcagaactggacacagagccgcaaacagccacggcctttgcctgataaccac

SEQ ID NO: 844655 - DNA, 75 bp, synthetic construct
  source 1..75: mol_type = other DNA
cagaaaagaagcgaaatccgacaacagcacggacgagggttttgacgttgggggcggcttcgccgcaccttggac

SEQ ID NO: 844656 - DNA, 75 bp, synthetic construct
  source 1..75: mol_type = other DNA
gtttcacgcgccgagcagctacgtgaaatggcaaataaggcagagcttcgcgccctgcaaagcaaaattaatccc

SEQ ID NO: 844657 - DNA, 75 bp, synthetic construct
  source 1..75: mol_type = other DNA
cagcatattgaagctggcatttcactgtgtgatgcggtgaactttctcgtggaaaaatacgcactggtgcgtacc

SEQ ID NO: 844658 - DNA, 75 bp, synthetic construct
  source 1..75: mol_type = other DNA
ccgggattggcgtcctgaaattgtcaacggcgatgtatgacgcgccagcgtcttttttatcgtccgcatttgctc

SEQ ID NO: 844659 - DNA, 75 bp, synthetic construct
  source 1..75: mol_type = other DNA
gccgccttgccagccagatggcacgcaacccggaaggcccgcaacggctgaaggatgacgcaatggatgcggttc

SEQ ID NO: 844660 - DNA, 75 bp, synthetic construct
  source 1..75: mol_type = other DNA
gaaacgctgtttaatgcccctaaacatgcggtgacacgcagcctggtttcggctcacctcgctctctacggtatg

SEQ ID NO: 844661 - DNA, 75 bp, synthetic construct
  source 1..75: mol_type = other DNA
gcttaccgctgccatagaagcggtggggttggaaaacgccgcgcgcgtgttgaagctgtacccgttcgagatgag

SEQ ID NO: 844662 - DNA, 75 bp, synthetic construct
  source 1..75: mol_type = other DNA
gggctggaaaacgccgcgcgcgtgctgaagctgtacccgttcgagatgagcggcggcatgttgcagcgcatgatg

SEQ ID NO: 844663 - DNA, 75 bp, synthetic construct
  source 1..75: mol_type = other DNA
aaggtgtaaaaaacaacagcgcatacgtggccgataatttcgttcgccgtggactgcgtgcgcgcctgaaacgta

SEQ ID NO: 844664 - DNA, 75 bp, synthetic construct
  source 1..75: mol_type = other DNA
acgcaacctgtacctgatccgcaccgcatacgaaaccgcagatgaggccaacgactacggcgaattcccgcagcg

SEQ ID NO: 844665 - DNA, 75 bp, synthetic construct
  source 1..75: mol_type = other DNA
cgcaccgcgtactggaatgacagcacccgccgcattgatatcacccccgcaccgaatacggaggcgccacaatga

SEQ ID NO: 844666 - DNA, 75 bp, synthetic construct
  source 1..75: mol_type = other DNA
gcgaaggaggaagcctttttcgcacaatccaccgtgggtaaaaaactcatggcatcccttgaggaagccggacag

SEQ ID NO: 844667 - DNA, 75 bp, synthetic construct
  source 1..75: mol_type = other DNA
cgcgaaaaagttgaacacgattttaaccagcaggtgatcaatcgagaactcgccagcttgctgcaggctttatag

SEQ ID NO: 844668 - DNA, 75 bp, synthetic construct
  source 1..75: mol_type = other DNA
tgacgatattgacgccattatggctgccgcagatgtgggatgttttgccacctacatcatgaaacagggtggtgt

SEQ ID NO: 844669 - DNA, 75 bp, synthetic construct
  source 1..75: mol_type = other DNA
tgatattctccgggctcgcagggcaaccggcctgatggcccgcgacaattacagaacggtaaataacattaccct

SEQ ID NO: 844670 - DNA, 75 bp, synthetic construct
  source 1..75: mol_type = other DNA
tcccgtcaccatctggcagacactgctcacccgactgctggaccagcattacggcctcacgctgaatgacacacc

SEQ ID NO: 844671 - DNA, 75 bp, synthetic construct
  source 1..75: mol_type = other DNA
gttcgctgatgaacgtgtgattgagcagcatattgaagcaggcatttcactgtgcgatgcggtgaactttctcgt

SEQ ID NO: 844672 - DNA, 75 bp, synthetic construct
  source 1..75: mol_type = other DNA
tcaggctgatgcgcgcaaggctggacaatgccaggccggttatcgagattccggcagaatttcagctttttgtga

SEQ ID NO: 844673 - DNA, 75 bp, synthetic construct
  source 1..75: mol_type = other DNA
atgcacagtcagttaaaagaacgtatccggctgatgcgcgcaaggctggataactccgcgccggttgctgaaatc

SEQ ID NO: 844674 - DNA, 75 bp, synthetic construct
  source 1..75: mol_type = other DNA
caggatatccggcatattctgcgggctttttccctgttgcgtccgggtggcgttctggttgccgtctgtctgaac

SEQ ID NO: 844675 - DNA, 75 bp, synthetic construct
  source 1..75: mol_type = other DNA
accggcctgatggcccgcgacaattacagaacggtaaataacattaccctgggtaagcatccgggggcgaaacaa

SEQ ID NO: 844676 - DNA, 75 bp, synthetic construct
  source 1..75: mol_type = other DNA
accggcctgatgacccgcgacaattacagaacggtaaataacattaccctgggtaagcatactgaggtgaaacga

SEQ ID NO: 844677 - DNA, 75 bp, synthetic construct
  source 1..75: mol_type = other DNA
cagcatattgaggccggcatttcactgtgcgatgcggtgaactttctcgtggaaaaatacgcactggtgcgtacc

SEQ ID NO: 844678 - DNA, 75 bp, synthetic construct
  source 1..75: mol_type = other DNA
gtttgccgatgaacgtgtgatcgagcagcatattgaggcaggcatttcactgtgtgatgcggtgaactttctcgt

SEQ ID NO: 844679 - DNA, 75 bp, synthetic construct
  source 1..75: mol_type = other DNA
gttcgctgatgaacgtgtgattgagcaacatattgaggcaggcatttcactgtgcgatgcggtgaactttctcgt

SEQ ID NO: 844680 - DNA, 75 bp, synthetic construct
  source 1..75: mol_type = other DNA
ggaaaaatacgcgctggtgcgtaccgaccagccgggattcagcgcctgtacccgctctcagttaataaacagtat

SEQ ID NO: 844681 - DNA, 75 bp, synthetic construct
  source 1..75: mol_type = other DNA
ttcgggataccgcgccggaggccatgtgtgatgcggtggagagcaacagcgggctggtccggtatctgcgggaaa

SEQ ID NO: 844682 - DNA, 75 bp, synthetic construct
  source 1..75: mol_type = other DNA
ccgctttcactggctgaatgtcgggctattggcaagagcattgcgaaatacacgcacaggaacttcacgccggaa

SEQ ID NO: 844683 - DNA, 75 bp, synthetic construct
  source 1..75: mol_type = other DNA
ttgttgggttggcaggatgcttcagaaagctgagggcgtagtggagggtatgctgatggtgttggatctccgatt

SEQ ID NO: 844684 - DNA, 75 bp, synthetic construct
  source 1..75: mol_type = other DNA
ctgcacgcacgctgaaaccgtgggaggcattagggatcagtcgcgcctggtattaccaactgaaaaaacgaggtc

SEQ ID NO: 844685 - DNA, 75 bp, synthetic construct
  source 1..75: mol_type = other DNA
ttagtggtgaaggctaaggcaatggatatagctgaaggccatgtagacaagcttatagagcaatttcataaggat

SEQ ID NO: 844686 - DNA, 75 bp, synthetic construct
  source 1..75: mol_type = other DNA
atgcacagtcagttaagggagcgtatccggctgatgcgcgcaaggctggacaatgccaggccggttatcgagatt

SEQ ID NO: 844687 - DNA, 75 bp, synthetic construct
  source 1..75: mol_type = other DNA
caggatatccggcatatcctgcgggccttttccctgttgcgtccggggggcgtgctggtcgctgtctgtctgaac

SEQ ID NO: 844688 - DNA, 75 bp, synthetic construct
  source 1..75: mol_type = other DNA
cgatctgttcggcggctctctttccttcattaacgcagatcaaattgtccagctcctccgggctgtcgcagcaaa

SEQ ID NO: 844689 - DNA, 75 bp, synthetic construct
  source 1..75: mol_type = other DNA
attcacacagtgccatttcttcgccgggatcggcgtctggtcttatgctctgcgtctggccggatggccggataa

SEQ ID NO: 844690 - DNA, 75 bp, synthetic construct
  source 1..75: mol_type = other DNA
cacctgccccggtctgcgatcgcctggtgacgctggcggaaatcagcaaccgtgatcacattctggaaccctctg

SEQ ID NO: 844691 - DNA, 75 bp, synthetic construct
  source 1..75: mol_type = other DNA
atccagcgtgtcgaaatgtacaatgcatcgcttcccgttccgctttcactggctgaatgtcgggctattggcaag

SEQ ID NO: 844692 - DNA, 75 bp, synthetic construct
  source 1..75: mol_type = other DNA
accgatatgctgttaggaacaagctctacacctggtgtgatctacaaatacgcaacgaactctggaaccttaacc

SEQ ID NO: 844693 - DNA, 75 bp, synthetic construct
  source 1..75: mol_type = other DNA
gtgttggggaaaacgtttatggcgctggcacgtaagcatggatgctctgatggacatatcggaaagcggctacag

SEQ ID NO: 844694 - DNA, 75 bp, synthetic construct
  source 1..75: mol_type = other DNA
agggcgaccggcctgatgacccgcgacaattacagaacggtaaataatattatcctgggtaagcacccggaggtg

SEQ ID NO: 844695 - DNA, 75 bp, synthetic construct
  source 1..75: mol_type = other DNA
tccgcaaaaaactgaaccgcgatggcctgcgctggtatggcatccgcacggtggagcctcaccatgacggcaccg

SEQ ID NO: 844696 - DNA, 75 bp, synthetic construct
  source 1..75: mol_type = other DNA
gaagaacggccagcaccgtggccgcagcttcctgacggcgttgatgtggatgaatggatgcgctcactgaaacgg

SEQ ID NO: 844697 - DNA, 75 bp, synthetic construct
  source 1..75: mol_type = other DNA
aacgggcaagccacgcgttgaccacgaaaccggaaaatcaatggccgagagcgtggagcgcgccatcggctgggc

SEQ ID NO: 844698 - DNA, 75 bp, synthetic construct
  source 1..75: mol_type = other DNA
atgacggcggcgatgttcagcagcaccttcgaaacactctgcgatggctttggtgccagagatggcgaactgacc

SEQ ID NO: 844699 - DNA, 75 bp, synthetic construct
  source 1..75: mol_type = other DNA
ggcaacagaacaagacccggtggcccgtgcctttgccacactgaaggcgcttcccgtttatctgcgagaacctct

SEQ ID NO: 844700 - DNA, 75 bp, synthetic construct
  source 1..75: mol_type = other DNA
ttgctttacctgccgcagctcaacaagcaccagatacagacgctggccaccatgacggcggcgatgttcagcagc

SEQ ID NO: 844701 - DNA, 75 bp, synthetic construct
  source 1..75: mol_type = other DNA
atgaaccacgaccagccattgatccggccagatttacggagcacaggcaggaaactgaaaccgacctgcaacgcg

SEQ ID NO: 844702 - DNA, 75 bp, synthetic construct
  source 1..75: mol_type = other DNA
agaatggcgggagtctgctgaatctctcggcctgcatatcggtgaacagcagatgcagcacctgttacggggcgg

SEQ ID NO: 844703 - DNA, 75 bp, synthetic construct
  source 1..75: mol_type = other DNA
ggcaacaaccacgccatgcagtcggtcgcgaggggacgggggagcctgtccgtccctcccttctttcttcctggc

SEQ ID NO: 844704 - DNA, 75 bp, synthetic construct
  source 1..75: mol_type = other DNA
gccgatcgtcagaaaggcaaaaagagctggcaggcggaacgctatgcacgcggaaccctgcgcaaaatattcgaa

SEQ ID NO: 844705 - DNA, 75 bp, synthetic construct
  source 1..75: mol_type = other DNA
taacccggtcgccagctatctggaacagctgggggcatcagaccccgaagccgccgcacgtctggcatccacact

SEQ ID NO: 844706 - DNA, 75 bp, synthetic construct
  source 1..75: mol_type = other DNA
cgacggcctgcgctggtatggcatccgcacggtggagcctcaccatgacggcaccgtgcactggcacatgatggt

SEQ ID NO: 844707 - DNA, 75 bp, synthetic construct
  source 1..75: mol_type = other DNA
cgcaaggctactttgctccaaaagagaggcaaacagcactttagtaatcaaaatgatgatgagaaaaaacaatta

SEQ ID NO: 844708 - DNA, 75 bp, synthetic construct
  source 1..75: mol_type = other DNA
cccgccgggcgacaggcctgatgacccgcgacaattacagaatggtaaatgacattagccaggggaagtatccgg

SEQ ID NO: 844709 - DNA, 75 bp, synthetic construct
  source 1..75: mol_type = other DNA
ataaacagtattgatatcctccgggcacgcagggcaaccggcctgatgacccgcagcaactacagcacggtgaac

SEQ ID NO: 844710 - DNA, 75 bp, synthetic construct
  source 1..75: mol_type = other DNA
tcctgttgaaatctggcagatactgctgtcacggttgctgggccagcattacggccttacgctggatgacacacc

SEQ ID NO: 844711 - DNA, 75 bp, synthetic construct
  source 1..75: mol_type = other DNA
cagcatattgaggcagacatttcactgtgtgatgcggtgaactttctcgttgaaaaatacgcactggtacgtacc

SEQ ID NO: 844712 - DNA, 75 bp, synthetic construct
  source 1..75: mol_type = other DNA
cagcatattgaggcaggtgcgtattttcatgaaaggagatcactcaataacttccatcgagatcgggtaataaca

SEQ ID NO: 844713 - DNA, 75 bp, synthetic construct
  source 1..75: mol_type = other DNA
accggcctgatgacacgcgacaactacagaacggtaaataacattacccagggtaaacatccgggggcgaaacaa

SEQ ID NO: 844714 - DNA, 75 bp, synthetic construct
  source 1..75: mol_type = other DNA
gaccagccgggattcagcgcctgtacccgctctcagttaataaacagtattgatattctccgggctcgcagggca

SEQ ID NO: 844715 - DNA, 75 bp, synthetic construct
  source 1..75: mol_type = other DNA
cgccgggcaaccggcctgatggcccgcgacaattacagaacggtaaataacattaccctgggtaaacatccgggg

SEQ ID NO: 844716 - DNA, 75 bp, synthetic construct
  source 1..75: mol_type = other DNA
accggcctgatgatccgcgacaactacagaacggtaaatgacattaccctgggtaagcatccggaggcgaaacaa

SEQ ID NO: 844717 - DNA, 75 bp, synthetic construct
  source 1..75: mol_type = other DNA
tacgggaggtatcgtgctgcccgtctccagtcaccatctggcagacactgctcacccgactgctggaccagcact

SEQ ID NO: 844718 - DNA, 75 bp, synthetic construct
  source 1..75: mol_type = other DNA
ttcactgtgtgacgcggtgaactttctcgttgaaaaatacgcgcaggtacgtaccgaccagccgggattcagcgc

SEQ ID NO: 844719 - DNA, 75 bp, synthetic construct
  source 1..75: mol_type = other DNA
ggcccgccgggcaaccggcctgatgacccgcagccactacagaacggtaaatgacattaccctgggtaaacgcac

SEQ ID NO: 844720 - DNA, 75 bp, synthetic construct
  source 1..75: mol_type = other DNA
gactgggcggcggcagatgcggcgcgtgaccgtcttaacgagatggggatcgtgctggaagatggcccgcaaggg

SEQ ID NO: 844721 - DNA, 75 bp, synthetic construct
  source 1..75: mol_type = other DNA
aagcgcgctttattgaagcgatggacgacgatttcaacaccccggaagcctattccgtgctgtttgatatggcgc

SEQ ID NO: 844722 - DNA, 75 bp, synthetic construct
  source 1..75: mol_type = other DNA
cttatgtggcggacaacggcgacgtgatgttcgacgtaccgaccgatccgacttatggcgtgctgtcgcgtcagg

SEQ ID NO: 844723 - DNA, 75 bp, synthetic construct
  source 1..75: mol_type = other DNA
gcctggaaaacgcagatccgcggcggtgctgctaccgaatccgactggatacgtgccagcggtcgcaacccggat

SEQ ID NO: 844724 - DNA, 75 bp, synthetic construct
  source 1..75: mol_type = other DNA
gaggctgaggcctggaaaattcagattcgtggtggagcggcgacagaatcagactgggtacgtgcaggtggtcgt

SEQ ID NO: 844725 - DNA, 75 bp, synthetic construct
  source 1..75: mol_type = other DNA
ctgggggccagcaaagagtttatatccaggtagtattacccactggatgccactgccagcagcaccgcagcagga

SEQ ID NO: 844726 - DNA, 75 bp, synthetic construct
  source 1..75: mol_type = other DNA
tatcgcagaaattattgaactcactgaacaactgatcgctaaaggtcacgcttatgtggcggacaacggcgacgt

SEQ ID NO: 844727 - DNA, 75 bp, synthetic construct
  source 1..75: mol_type = other DNA
cgcaacccgatggacttcgttctgtggaagatgtcgaaagagggcgaaccgagctggccgtctccgtggggcgcg

SEQ ID NO: 844728 - DNA, 75 bp, synthetic construct
  source 1..75: mol_type = other DNA
acggaacttagctcagatatccttgcccatgaaataactcactggatgccgctaccggagccgccgcaggaggcg

SEQ ID NO: 844729 - DNA, 75 bp, synthetic construct
  source 1..75: mol_type = other DNA
aaacgcgccaatgaaaacggcgaaagctttgtggcactggtggatcgcatgatcgctgaaatgcacaaagatttc

SEQ ID NO: 844730 - DNA, 75 bp, synthetic construct
  source 1..75: mol_type = other DNA
gggtaaccactttgatatccacggcggcggttctgacctgatgttcccacaccacgaaaacgaaatcgcgcagtc

SEQ ID NO: 844731 - DNA, 75 bp, synthetic construct
  source 1..75: mol_type = other DNA
ggcggttcagacctgatgttcccgcaccacgagaacgaaatcgcgcagtccacctgtgcccatgatggtcagtat

SEQ ID NO: 844732 - DNA, 75 bp, synthetic construct
  source 1..75: mol_type = other DNA
gtgccgatgaacagcgatgccgccacccagctcaatcagggcgtttttgtcgataactgggggcgcccgaaaaaa

SEQ ID NO: 844733 - DNA, 75 bp, synthetic construct
  source 1..75: mol_type = other DNA
ccgtcgcgacctggcggtggtggcccgcacggctgtaaatcacatggccgctactgcgcgtcaggagttcgcaca

SEQ ID NO: 844734 - DNA, 75 bp, synthetic construct
  source 1..75: mol_type = other DNA
gcgggtgataagtgctgacggacaatgccgggtggaaaggtgttttcaggctgcccggggtgatacatccggcca

SEQ ID NO: 844735 - DNA, 75 bp, synthetic construct
  source 1..75: mol_type = other DNA
aatcgtgcaaataaccgaaaccgtactttcagagccggtggaaatccggcgttttattcagcaggcggtggatca

SEQ ID NO: 844736 - DNA, 75 bp, synthetic construct
  source 1..75: mol_type = other DNA
gtgctgggcgttacccgcgccatgatgctgcgtgacgggaaaatcactgtgccggaaatgttcaacgatgccggg

SEQ ID NO: 844737 - DNA, 75 bp, synthetic construct
  source 1..75: mol_type = other DNA
gaagggaaacgcacgtttacggaatttatccgtgaaggtgtgggggttcatgcgtttaacggcgaaatctttgtg

SEQ ID NO: 844738 - DNA, 75 bp, synthetic construct
  source 1..75: mol_type = other DNA
gaagggaaacgcacgtttacagaatttatgcgtgaaggtgtgggagttcatgcgtttaacggcgaaatctttgtg

SEQ ID NO: 844739 - DNA, 75 bp, synthetic construct
  source 1..75: mol_type = other DNA
gggtgctgatgcggatcagtgcccttaaggagtatgaggatgcggaactgacagcggcgcgtattgctgcggcgc

SEQ ID NO: 844740 - DNA, 75 bp, synthetic construct
  source 1..75: mol_type = other DNA
gttttttctcccccggctggaaagcggcgcggttacgctcaagggcattaattatggcctatgaggccgtgaaac

SEQ ID NO: 844741 - DNA, 75 bp, synthetic construct
  source 1..75: mol_type = other DNA
acgcgacgtattccggtccggtgatgccgtggatagatccggttaaggaggctgaagcctggcggatacagatcc

SEQ ID NO: 844742 - DNA, 75 bp, synthetic construct
  source 1..75: mol_type = other DNA
cactccattcggcagaaggaatcaacgggcaacagattcatgcattctgtactttcttttatgaacgtattactg

SEQ ID NO: 844743 - DNA, 75 bp, synthetic construct
  source 1..75: mol_type = other DNA
gtgcaaataaccgaagcattattttcagagccgggagacatccggcgttttattcagcaggcggtggaccactgg

SEQ ID NO: 844744 - DNA, 75 bp, synthetic construct
  source 1..75: mol_type = other DNA
ttgtgacaaataaagataatgaccgggagttgcatatcactcccggcattatttatgacgatcttcgtaaggggg

SEQ ID NO: 844745 - DNA, 75 bp, synthetic construct
  source 1..75: mol_type = other DNA
gtgatgaatttttcgaaacacagagtcgcaatgtaaccgactggatgccgctaccggaaccgccgcaggaggtta

SEQ ID NO: 844746 - DNA, 75 bp, synthetic construct
  source 1..75: mol_type = other DNA
ttccacattgcagaacagcaggtcgatggcacaagtgactacatcaaggatggggagtggcctattgataacggg

SEQ ID NO: 844747 - DNA, 75 bp, synthetic construct
  source 1..75: mol_type = other DNA
ttaagggcgttgagtatgcctgccacgctgccatgcttcagggtagccaacctgtaagccaaacttacaagtttc

SEQ ID NO: 844748 - DNA, 75 bp, synthetic construct
  source 1..75: mol_type = other DNA
tgatgggtggataattcctggtgcgtcgtggaaaccgtcacactggatgcctctaccagaaccgcctcaggaggt

SEQ ID NO: 844749 - DNA, 75 bp, synthetic construct
  source 1..75: mol_type = other DNA
tgtaagccaaacttacaacttgccagaattaatcgaagggatggaagtttccattgatgtaagcacttgtgatgc

SEQ ID NO: 844750 - DNA, 75 bp, synthetic construct
  source 1..75: mol_type = other DNA
ctccggatggttggataagctgtagtgagcgaatgccagaaatgggagagcgacaatgctatgtgttagcagctg

SEQ ID NO: 844751 - DNA, 75 bp, synthetic construct
  source 1..75: mol_type = other DNA
cctggttcaggacgcagagccaaacttcgatgtaaatagcaactctccggtaactccggatggttggataagctg

SEQ ID NO: 844752 - DNA, 75 bp, synthetic construct
  source 1..75: mol_type = other DNA
tgaacacaaaatacgggtattacgtgcaatgctggtctgaaggtcaagggtggcttggtgatgatatcagcatcc

SEQ ID NO: 844753 - DNA, 75 bp, synthetic construct
  source 1..75: mol_type = other DNA
cggctggactgagtgcgataccttcgaagggtattacgattggtcgagaaacaaatggtgggcagttactgacga

SEQ ID NO: 844754 - DNA, 75 bp, synthetic construct
  source 1..75: mol_type = other DNA
aatcgatatatcagggctgggtatgttgatggctggaacgcctgccgcgctgccatgcttcagagccaaggtgga

SEQ ID NO: 844755 - DNA, 75 bp, synthetic construct
  source 1..75: mol_type = other DNA
tagcaacgttgtactgccagcagaagaagcagaagaactggcacgaattgcgctggcatcgctggaagcagagcc

SEQ ID NO: 844756 - DNA, 75 bp, synthetic construct
  source 1..75: mol_type = other DNA
agccggggcatacgcttggcattattgatgcactgttggttcataagatggctagggctttattgtcgttggtgg

SEQ ID NO: 844757 - DNA, 75 bp, synthetic construct
  source 1..75: mol_type = other DNA
aacgattaagtcgggtaatggtattgagcaagcaactcactggatgccgctaccggaaccgccgcaggaggtgaa

SEQ ID NO: 844758 - DNA, 75 bp, synthetic construct
  source 1..75: mol_type = other DNA
gtgactggcgaatgaaatgggcgacttacatcccggggcatcctgacgctaatgatgggtggataatacctggtg

SEQ ID NO: 844759 - DNA, 75 bp, synthetic construct
  source 1..75: mol_type = other DNA
attttcgggaaatctcggaaacgtcaaccagctctccgggaactccggctggttggataagctgtggtgagcgaa

SEQ ID NO: 844760 - DNA, 75 bp, synthetic construct
  source 1..75: mol_type = other DNA
cggagattaaatcattcatcactggtttcctgagcgactcggcgcacgataaccaatcttcagacagcctgcttg

SEQ ID NO: 844761 - DNA, 75 bp, synthetic construct
  source 1..75: mol_type = other DNA
tgccttgccagcgccggtagtgccggatgaaatgtattggcaggatgcgccagttgaaggcagcagcaaagcggc

SEQ ID NO: 844762 - DNA, 75 bp, synthetic construct
  source 1..75: mol_type = other DNA
agggtcagaacgtgcttatttcgatgaatatcgatagcgaggctgggccattaatatattccgcacgctatctcg

SEQ ID NO: 844763 - DNA, 75 bp, synthetic construct
  source 1..75: mol_type = other DNA
cgcaatatcgagacggagagtttttcgatattgtccgcaatggtgatgaatttttcgaaacacagagtcgcaatg

SEQ ID NO: 844764 - DNA, 75 bp, synthetic construct
  source 1..75: mol_type = other DNA
aacaccgctttacgcagcgccgtcagcgccggtaattccggatggttggataagctgtagtgagcggatgccaga

SEQ ID NO: 844765 - DNA, 75 bp, synthetic construct
  source 1..75: mol_type = other DNA
tctgccttatcaggctgtgaataccgttgaaggagcgcaacagctgttacccatggggcctgtagcttctcagga

SEQ ID NO: 844766 - DNA, 75 bp, synthetic construct
  source 1..75: mol_type = other DNA
tgcactggcaattctggttaccccgacgctggtgctgatgggcgcggcgttggcgatgatgaccgacgccggacg

SEQ ID NO: 844767 - DNA, 75 bp, synthetic construct
  source 1..75: mol_type = other DNA
ctatacgccactggcagcaatccttaacgctgctaaacgcgcatatgaagaatcagcaagcgccgctggcatcaa

SEQ ID NO: 844768 - DNA, 75 bp, synthetic construct
  source 1..75: mol_type = other DNA
caaatggaactggcacgaattgcactggcatcactgggagcagaacctgtaagccaaacttacaacttgccagaa

SEQ ID NO: 844769 - DNA, 75 bp, synthetic construct
  source 1..75: mol_type = other DNA
gaaaggtgactggcgaatgaaatgggctacttacatccccgggcatcctgacgctaatgatgggtggataattcc

SEQ ID NO: 844770 - DNA, 75 bp, synthetic construct
  source 1..75: mol_type = other DNA
acgttatgggtgctagtccctgtggcgttgttgatcgcactgttttttattcaacaaggtgcgctgcaaaacttt

SEQ ID NO: 844771 - DNA, 75 bp, synthetic construct
  source 1..75: mol_type = other DNA
attcggcagaaggatacatcaacgggcaacagattcaggcattctgtacttccttttatgaacgtattactgagc

SEQ ID NO: 844772 - DNA, 75 bp, synthetic construct
  source 1..75: mol_type = other DNA
ccgcgtctgctggcagtccacttcacactccattcggcagaaggaatcaacgggcaacagattcatgcattctgt

SEQ ID NO: 844773 - DNA, 75 bp, synthetic construct
  source 1..75: mol_type = other DNA
aaggagcacagatacgatgtctgttgctgctcagccagacgagtatttgccatccgcgagtcggcgtcatggctg

SEQ ID NO: 844774 - DNA, 75 bp, synthetic construct
  source 1..75: mol_type = other DNA
cagcgccgggggaaatccggcgttttgttcagcagggggtggaccactggccgcgtctgctggcatttcacttca

SEQ ID NO: 844775 - DNA, 75 bp, synthetic construct
  source 1..75: mol_type = other DNA
cagagccgggagatatctggcgttttgttcagcaggcggtggaccactggccgcgtctgctggcagtccacttca

SEQ ID NO: 844776 - DNA, 75 bp, synthetic construct
  source 1..75: mol_type = other DNA
atccggctggctggtgcctgagaacgatgctcgcgcactggcgcaacgcctggcggcatttagccaactggacac

SEQ ID NO: 844777 - DNA, 75 bp, synthetic construct
  source 1..75: mol_type = other DNA
atctggtgcgcaataacgggatagcggccaatgcggtggccctgcataaggatcatattgtcgggcatatgtttc

SEQ ID NO: 844778 - DNA, 75 bp, synthetic construct
  source 1..75: mol_type = other DNA
tatgaagagagctacggtatcagcaaagaaagccactggcgcgaggcgatcaacgccaaagcgatgggggcgatg

SEQ ID NO: 844779 - DNA, 75 bp, synthetic construct
  source 1..75: mol_type = other DNA
gataatccgcttattaatattctggagaagttctccagctggtatgacacgaataacgtgacactggcggtgtca

SEQ ID NO: 844780 - DNA, 75 bp, synthetic construct
  source 1..75: mol_type = other DNA
gaagggaaacgcacgtttacggaatttatccgtgaaggggtgggcgtgcatgcctttaacggcgaaatctttgtg

SEQ ID NO: 844781 - DNA, 75 bp, synthetic construct
  source 1..75: mol_type = other DNA
attccctgcaggcaacacagcttcagtcggccattgttaaagccatttatgtctatcatctccccgtagttgtcc

SEQ ID NO: 844782 - DNA, 75 bp, synthetic construct
  source 1..75: mol_type = other DNA
cgactggcatcacagatgtttgcctgctggctggaggaagcgcttattcgcggtgtgatccgcccgccgaaatcc

SEQ ID NO: 844783 - DNA, 75 bp, synthetic construct
  source 1..75: mol_type = other DNA
tgttcagcagggggtggaccactggccgcgtctgctggcatttcacttcacgctccattcggcagaaggaaacat

SEQ ID NO: 844784 - DNA, 75 bp, synthetic construct
  source 1..75: mol_type = other DNA
ccagacgagtatttgtcacccgcgagccagtgtcacagttgatgaacaatgttcgcaagtggtggatttactgca

SEQ ID NO: 844785 - DNA, 75 bp, synthetic construct
  source 1..75: mol_type = other DNA
gggtggaaaggtgttttcaggtggaacgtatggatacagcaggtcagtatgacgcattaaaaacagcggcgatgt

SEQ ID NO: 844786 - DNA, 75 bp, synthetic construct
  source 1..75: mol_type = other DNA
aatatacggcggcctctctggatgatcttaaccgggcgatcaatgatgcggagtcagtgctggggacgaacaagc

SEQ ID NO: 844787 - DNA, 75 bp, synthetic construct
  source 1..75: mol_type = other DNA
cctggcgcgcctgagccgcaaacaggagagcgcacgccgggaagggcttaagaataacagcgcatatgcggcgga

SEQ ID NO: 844788 - DNA, 75 bp, synthetic construct
  source 1..75: mol_type = other DNA
gacggtgaactgatcccgggcgaggcattaacccggatgaagggggctgccatgcgcctgaccgggatgttgtac

SEQ ID NO: 844789 - DNA, 75 bp, synthetic construct
  source 1..75: mol_type = other DNA
gttgctgctcagccagacgagcatttgccatccgcgggccagtgtcacggttgatgaaaaatgttcgcagttagt

SEQ ID NO: 844790 - DNA, 75 bp, synthetic construct
  source 1..75: mol_type = other DNA
caatgcgatgcctgttgctgctcagccagacaatcatttgccatccgcgggccagtgccacagttgataaagaat

SEQ ID NO: 844791 - DNA, 75 bp, synthetic construct
  source 1..75: mol_type = other DNA
ccggggtgatacatctggccagtatgttgcgttaaaaacagtcgcattgtctctggggttaccggttgtgaccgc

SEQ ID NO: 844792 - DNA, 75 bp, synthetic construct
  source 1..75: mol_type = other DNA
agttgatgaagaatgttcacaactggtggatttgctacaacagacctggcaggtgataagcgctggcggacaatg

SEQ ID NO: 844793 - DNA, 75 bp, synthetic construct
  source 1..75: mol_type = other DNA
ttatcagctaccgtctgaactggcgttggctggggatgcgggagaccacggcaaaaagttttgtcggggaggtgg

SEQ ID NO: 844794 - DNA, 75 bp, synthetic construct
  source 1..75: mol_type = other DNA
acaacaccccgtggacgtaatcttcacacattattgccgcagcattcaatgaaccgctgcttctggagcccgcct

SEQ ID NO: 844795 - DNA, 75 bp, synthetic construct
  source 1..75: mol_type = other DNA
ttgcgggaacaacatggaggagcaacaatgcgatgcctgttgctgctcagccagacaatcatttgccatccgcgg

SEQ ID NO: 844796 - DNA, 75 bp, synthetic construct
  source 1..75: mol_type = other DNA
agggatgtctggcgagatcgacgtggaagggaaacgcacgtttacggaatttatccgtgaaggtgtgggcgttca

SEQ ID NO: 844797 - DNA, 75 bp, synthetic construct
  source 1..75: mol_type = other DNA
gtatcgcgcatgggcgtagatatgacgcgctttagcccgcgtcccgtgaaagcgcccgcaacaccgctggaaatc

SEQ ID NO: 844798 - DNA, 75 bp, synthetic construct
  source 1..75: mol_type = other DNA
atctgcagacagcacagaatgcggataatggtttctctgaactggaaaaggcgctgttacgttacattgctgccg

SEQ ID NO: 844799 - DNA, 75 bp, synthetic construct
  source 1..75: mol_type = other DNA
aagttttgtcgatgaggtggaggcggcctggtcggaatacgccgaagggatgtctggcgagatcgacgtggaagg

SEQ ID NO: 844800 - DNA, 75 bp, synthetic construct
  source 1..75: mol_type = other DNA
actccctgcaggccacgcagctccagtcggccatagtgaaagccatgtatgcggccacaatcgaaagtgaacttg

SEQ ID NO: 844801 - DNA, 75 bp, synthetic construct
  source 1..75: mol_type = other DNA
ttatcagctaccgcccgaactggcgctggctggggatgcgggagaccgcgacaaaaagttttgtcgatgaggtgg

SEQ ID NO: 844802 - DNA, 75 bp, synthetic construct
  source 1..75: mol_type = other DNA
atgaaacgaacgcctgtcctgattgatgtgaacggcgttccgcttcgggagagtctcagctacaacgggggcggc

SEQ ID NO: 844803 - DNA, 75 bp, synthetic construct
  source 1..75: mol_type = other DNA
tcgagccggtggaggacgggcagacccgtggggcgaatcagttttacagcgtcatggaacggctgaagatgctgg

SEQ ID NO: 844804 - DNA, 75 bp, synthetic construct
  source 1..75: mol_type = other DNA
gtcatggaacggctgaagatgctggattccctgcaggcaacacagcttcagtcggccattgtgaaagccatgtat

SEQ ID NO: 844805 - DNA, 75 bp, synthetic construct
  source 1..75: mol_type = other DNA
aaagcattatgcaaaaacaagcaccgggaatgctgctggttacccatgatatgggcgtggtagcgcgtctggcag

SEQ ID NO: 844806 - DNA, 75 bp, synthetic construct
  source 1..75: mol_type = other DNA
gataatccgcttattaatattctggagaagttcacccgctggtatgacacgaataacgtgacgctgggcggcgtc

SEQ ID NO: 844807 - DNA, 75 bp, synthetic construct
  source 1..75: mol_type = other DNA
ggtgtgtacatatcgctcagtatgccgtggggtgacagcagcaccatcagctataacggcaactacggcagcggt

SEQ ID NO: 844808 - DNA, 75 bp, synthetic construct
  source 1..75: mol_type = other DNA
caatgaaattagcggtaacgggacggttggggtgaacctcggcgcatggcgtcttcgtgccgactggcagactga

SEQ ID NO: 844809 - DNA, 75 bp, synthetic construct
  source 1..75: mol_type = other DNA
gtccgcacgggcaacgacaaagagatgtacaccgccacttataaccagaacttccgcgatgcgggtgtttcggtt

SEQ ID NO: 844810 - DNA, 75 bp, synthetic construct
  source 1..75: mol_type = other DNA
atgtcagggagttatagcagtgtctgggctgaagacgacattcagtttgattcccgttttctggaattaaaaggc

SEQ ID NO: 844811 - DNA, 75 bp, synthetic construct
  source 1..75: mol_type = other DNA
tgaaacctggcgaacatatgagtgtgttctggagtggtgttgcgcattgcgatatcaacctgccggacccgctgc

SEQ ID NO: 844812 - DNA, 75 bp, synthetic construct
  source 1..75: mol_type = other DNA
gcatttccatgaccggataccgctacgagtatgacaaccaggccgataaaggtgtgtacatatcgctcagtatgc

SEQ ID NO: 844813 - DNA, 75 bp, synthetic construct
  source 1..75: mol_type = other DNA
gccctgaaagaatatgaagattctgagctgactgcagcaggatcgccgctgctctggggatgtacatccggaaag

SEQ ID NO: 844814 - DNA, 75 bp, synthetic construct
  source 1..75: mol_type = other DNA
ggttcaactaaataaacagccattggcggaagagtacgatatttactggtatgctggtgaagatgacgcgagcaa

SEQ ID NO: 844815 - DNA, 75 bp, synthetic construct
  source 1..75: mol_type = other DNA
agtttgattcccgttttctggaattaaaaggcgacacaaaaattgatctgaagcgtttttccagccagggatatg

SEQ ID NO: 844816 - DNA, 75 bp, synthetic construct
  source 1..75: mol_type = other DNA
gcgctgatgggcgaggattatcaggacattttccgccagcaggtcagggaatctgctgagcggcaaaaagccgga

SEQ ID NO: 844817 - DNA, 75 bp, synthetic construct
  source 1..75: mol_type = other DNA
gctggaaatcatttccgtcgcacgcttaaccgagaaaaaaggcctgcatgtggcgattgaagcctgccgtcagtt

SEQ ID NO: 844818 - DNA, 75 bp, synthetic construct
  source 1..75: mol_type = other DNA
gactggacttggcattatttcatgacggcattaaagggaagttcgaatttaaggcggatgtatcttatggtgaaa

SEQ ID NO: 844819 - DNA, 75 bp, synthetic construct
  source 1..75: mol_type = other DNA
agatactgcaacctttcggaatacctaataaggtcactttggatgataacttgtctgaaggtgaaataattgcta

SEQ ID NO: 844820 - DNA, 75 bp, synthetic construct
  source 1..75: mol_type = other DNA
agattcgatattatttcatttatatgtgcatattgtaaagtcgagtcattggtcaacagatgtcgtgaatatctc

SEQ ID NO: 844821 - DNA, 75 bp, synthetic construct
  source 1..75: mol_type = other DNA
gatcgccgcactggatacccccccaaaagcgagcaagaaactgttgaaagcagcacaaggttacaaggatgtagt

SEQ ID NO: 844822 - DNA, 75 bp, synthetic construct
  source 1..75: mol_type = other DNA
ttaggtttactacagggttcagctatgagatttcgtcatcaaaacagacgagaacagtaaaagagcggcgtgacg

SEQ ID NO: 844823 - DNA, 75 bp, synthetic construct
  source 1..75: mol_type = other DNA
aagaaaacttctacaccggtatcgctcacggtgagcaggaacgtctgcaactggcgctaaaagtgctgcgcgaag

SEQ ID NO: 844824 - DNA, 75 bp, synthetic construct
  source 1..75: mol_type = other DNA
gaccgtgatgaccggacacagcttccgtcgctaccgtttcaccaaacgtacccaccgtaatcaggatttggggcc

SEQ ID NO: 844825 - DNA, 75 bp, synthetic construct
  source 1..75: mol_type = other DNA
gaatcagttgattgccggtgaaaccctctttaccggcaccatcaaccgcacggaagtccatccccgggaagtgat

SEQ ID NO: 844826 - DNA, 75 bp, synthetic construct
  source 1..75: mol_type = other DNA
gacctgtgtcattttcgtcgcgtctgggcgacagcgcagaaactggcggcagatgaagacgtcgatatgctggtc

SEQ ID NO: 844827 - DNA, 75 bp, synthetic construct
  source 1..75: mol_type = other DNA
gaacctgagctgcaaagcaaaatcgacgtcatcgtgcaggcactggctggtgcgaagaaaccgttgattatctcc

SEQ ID NO: 844828 - DNA, 75 bp, synthetic construct
  source 1..75: mol_type = other DNA
tgctgagtcgagaagtggactggacgcagctcgaccatgtgattgacgccgtcgtggcgaagatcccggaacttg

SEQ ID NO: 844829 - DNA, 75 bp, synthetic construct
  source 1..75: mol_type = other DNA
gcgtattcaccaacagcatcctgcatcccgtctttttccgttctgtaccggcaaataccgctggcacggcagtgc

SEQ ID NO: 844830 - DNA, 75 bp, synthetic construct
  source 1..75: mol_type = other DNA
ggcgtcagaacataatctgtcgcgagtgccggaagagtgaaattatgcaacgcatattgtcgttttatcaggggg

SEQ ID NO: 844831 - DNA, 75 bp, synthetic construct
  source 1..75: mol_type = other DNA
gtggcaaaagtttttacacaagaagagcgggaaaaaattaaagggcaggttgttgaactagtacgccggagtggg

SEQ ID NO: 844832 - DNA, 75 bp, synthetic construct
  source 1..75: mol_type = other DNA
ggcgtatgaacataatctgtcgcgagtgccggaagagcgaagttatgcagcgtgtgctggcattctatcaggggc

SEQ ID NO: 844833 - DNA, 75 bp, synthetic construct
  source 1..75: mol_type = other DNA
gcgtcagcgttgtgccccggtgtcacagttcgccacgctaagtgctcgtttcaacaggcatctttttcagactcg

SEQ ID NO: 844834 - DNA, 75 bp, synthetic construct
  source 1..75: mol_type = other DNA
agcgtaaacgtattcagcatcaggattttgagcggcggctacgtgagatggttgccgaacgcagagcccgcctgg

SEQ ID NO: 844835 - DNA, 75 bp, synthetic construct
  source 1..75: mol_type = other DNA
agctgaagaaaccatctgcggttgatccggaccttatctggtcattacctgatggagaaatacgtcgttacgaca

SEQ ID NO: 844836 - DNA, 75 bp, synthetic construct
  source 1..75: mol_type = other DNA
ggcgtaagacaccggagaaggctgctgacccgacactgattcgaaagttacctgacggagaaatacgtcgttaca

SEQ ID NO: 844837 - DNA, 75 bp, synthetic construct
  source 1..75: mol_type = other DNA
cggagaaatacgccgctacgacaggagccagaacataatctgtcgcgagtgccggaagagtgaggttatgcagcg

SEQ ID NO: 844838 - DNA, 75 bp, synthetic construct
  source 1..75: mol_type = other DNA
ttctctgccttattaattttgttagttggttttgatattccaggtaaaatttataaactatccgtggctaaataa

SEQ ID NO: 844839 - DNA, 75 bp, synthetic construct
  source 1..75: mol_type = other DNA
ttgaaaaaccatcatcaacatcaggacgcggcgcatgacctgtgtcattttcgccgtgtctgggctacggcacag

SEQ ID NO: 844840 - DNA, 75 bp, synthetic construct
  source 1..75: mol_type = other DNA
ctggctacgggttattcccgtctgaacaggctcgtaaggactggcaaaacgcccgcaaaaaactctcgagggcaa

SEQ ID NO: 844841 - DNA, 75 bp, synthetic construct
  source 1..75: mol_type = other DNA
tcctgaccttatctggtcattacctgatggagaaatacgtcgttatgacaggcgcttgaacatgatttgtcacga

SEQ ID NO: 844842 - DNA, 75 bp, synthetic construct
  source 1..75: mol_type = other DNA
aaacggcaaagcgattctctatgacacgggactggcctggcccgaaggggatagtgggcaacaactgattatccc

SEQ ID NO: 844843 - DNA, 75 bp, synthetic construct
  source 1..75: mol_type = other DNA
agtggtcctctattcgtttttacggtgtctggcgaaacagaagcgcggcacaaaaccgctggaaaaaccacttcc

SEQ ID NO: 844844 - DNA, 75 bp, synthetic construct
  source 1..75: mol_type = other DNA
tgatagcaaagcccgggcagcgtatccgtatctcaaatcggcttgttatttattatagatatctgggttttaggg

SEQ ID NO: 844845 - DNA, 75 bp, synthetic construct
  source 1..75: mol_type = other DNA
gaatttgggcgatatctgtctcgggcaactggcgaatcacatttgaattcgtcaatggcgatgcatacatactgg

SEQ ID NO: 844846 - DNA, 75 bp, synthetic construct
  source 1..75: mol_type = other DNA
gaatcagctgattgcgggtgaaaccctcttcgcaggcaccatcaaccgcacagaagtccatccccgggaggtgat

SEQ ID NO: 844847 - DNA, 75 bp, synthetic construct
  source 1..75: mol_type = other DNA
ctcttcaccggcaccatcaaccgcacggaagtccatccccgtgaagtgattaaatgcgccctgtatcacaatgcc

SEQ ID NO: 844848 - DNA, 75 bp, synthetic construct
  source 1..75: mol_type = other DNA
cattttctggaattgccagagagggagtccgagataagcgcagcgcggcgcaaaaccgctggaaaaactacttgc

SEQ ID NO: 844849 - DNA, 75 bp, synthetic construct
  source 1..75: mol_type = other DNA
tcctgcctggacctggcggcgtactgaatctgaagagctgtacatttaaagcggtcaatgatggcgaagtgtatg

SEQ ID NO: 844850 - DNA, 75 bp, synthetic construct
  source 1..75: mol_type = other DNA
atttgagcctggagaattggcgaaggtgttcgctgtgatggcgaatgatgaagagatgcaaaatgtaacgctgat

SEQ ID NO: 844851 - DNA, 75 bp, synthetic construct
  source 1..75: mol_type = other DNA
agggatggttttataaaatttggcacctcaggttctgagattacaagtataattcgcgagcttgtatgtagaggt

SEQ ID NO: 844852 - DNA, 75 bp, synthetic construct
  source 1..75: mol_type = other DNA
agcgcctgttccagcaggcgggtctcgtgcatgcggatgagacgcccgtggcgggcttgggcgcgggcgatgtgg

SEQ ID NO: 844853 - DNA, 75 bp, synthetic construct
  source 1..75: mol_type = other DNA
cgtcctcaaccaaattaccgcgtttattgatatgggatttgaggtggagattgtcgcgctgcaaaaaggcgacac

SEQ ID NO: 844854 - DNA, 75 bp, synthetic construct
  source 1..75: mol_type = other DNA
caatcgccgcaacgcccggctcaggctctgactgtgcgatgggcatcattgatgacaacggctttacgctgaaga

SEQ ID NO: 844855 - DNA, 75 bp, synthetic construct
  source 1..75: mol_type = other DNA
aaataccagctgggaaaacagttggtacagtctcaggatatgctgttatacctggtttatcggggaatggctttt

SEQ ID NO: 844856 - DNA, 75 bp, synthetic construct
  source 1..75: mol_type = other DNA
gaaagagatgctcgacgacgcggatgtcttcctcctgccatcggtaacgggcgcggatggcgatatggaaggtat

SEQ ID NO: 844857 - DNA, 75 bp, synthetic construct
  source 1..75: mol_type = other DNA
caaacgtgctctgcacttcaacgcggcggcggtgatactcgcgtacaaccatccttctggcgagacaacacccag

SEQ ID NO: 844858 - DNA, 75 bp, synthetic construct
  source 1..75: mol_type = other DNA
gatatccgtgtccctgaccatctgattgttggtggcaggcaaatctattcgttcgcagaacacggtctgctttga

SEQ ID NO: 844859 - DNA, 75 bp, synthetic construct
  source 1..75: mol_type = other DNA
tggcaatggtgatagccagaaacggcaaagcgattctctatgacacaggactggcctggcccgaaggggatagtg

SEQ ID NO: 844860 - DNA, 75 bp, synthetic construct
  source 1..75: mol_type = other DNA
caactgattatcccctggctccactggcataatcttgaaccggaaggcgttattctgagtcatgaacatctggat

SEQ ID NO: 844861 - DNA, 75 bp, synthetic construct
  source 1..75: mol_type = other DNA
ttgatatccgggtaccggaccatctgatagtcggtggcagccaggttttctcctttgccgaacacggtctgcttt

SEQ ID NO: 844862 - DNA, 75 bp, synthetic construct
  source 1..75: mol_type = other DNA
aatgcggcagcagtgttatttgcgcacaaccatccctccggtgacatcacacccagccaggcagataagaccatc

SEQ ID NO: 844863 - DNA, 75 bp, synthetic construct
  source 1..75: mol_type = other DNA
cctcattcatcgggccctgaaaaccctggaccgccatcttcatgaacccggcgtggccttcacctccacccgtgc

SEQ ID NO: 844864 - DNA, 75 bp, synthetic construct
  source 1..75: mol_type = other DNA
gtcttcctgttgccatcggttacaggtgcggatggtgatatggaaggtattccggtggcgctaatggaagcgatg

SEQ ID NO: 844865 - DNA, 75 bp, synthetic construct
  source 1..75: mol_type = other DNA
aatgcagcagcagtgatactggcgcataaccacccctccggcgacactactcccagccaggcagataagactata

SEQ ID NO: 844866 - DNA, 75 bp, synthetic construct
  source 1..75: mol_type = other DNA
aggagtttatggtgctttatctcaatcagcagaaccagttgattgcccacgaaaccctgtttgccggttccatta

SEQ ID NO: 844867 - DNA, 75 bp, synthetic construct
  source 1..75: mol_type = other DNA
agctcgttgatatccgcgtacctgaccatctgattgtcggcggcaggcaaatctattcgttcgcagaacacggtc

SEQ ID NO: 844868 - DNA, 75 bp, synthetic construct
  source 1..75: mol_type = other DNA
ggtatggaatagacataaccaaagctacagccgcttgcgcatcacaagaaagctcaactgttatgtttacatcca

SEQ ID NO: 844869 - DNA, 75 bp, synthetic construct
  source 1..75: mol_type = other DNA
cttggtgctattgcagcattgatagtagcggcttttatgatattccctaaagttcaggcttcacagcgtatcgac

SEQ ID NO: 844870 - DNA, 75 bp, synthetic construct
  source 1..75: mol_type = other DNA
acagtggcaaccacggcaaatacaacattatctatgatgctgttccggcgtctgactgttcaaagctgattgcgg

SEQ ID NO: 844871 - DNA, 75 bp, synthetic construct
  source 1..75: mol_type = other DNA
gcggctatcgaacgtgacttcggctccgttgataacttcaaagcagaatttgagaaagcggcagcttcccgcttt

SEQ ID NO: 844872 - DNA, 75 bp, synthetic construct
  source 1..75: mol_type = other DNA
cgccggtttccggtgtgaccattaaaccggaaaccctgaccctagaaaaagggaaggcaggcacacttactgtgg

SEQ ID NO: 844873 - DNA, 75 bp, synthetic construct
  source 1..75: mol_type = other DNA
atattttccctttggcttcttttgcttcaaacgaaaatgtagatcacgtttttataaaggcatttcaggctgcag

SEQ ID NO: 844874 - DNA, 75 bp, synthetic construct
  source 1..75: mol_type = other DNA
tttgacttcgggatgcgctgcacctacatctggcgcatcgctgccgatggccaggttaacgtggcgctttccggc

SEQ ID NO: 844875 - DNA, 75 bp, synthetic construct
  source 1..75: mol_type = other DNA
tcagcgcgcaaatcgcccccttaacaacggaagctaaaatcgtccaggatgcggatcggctggaagccctggggg

SEQ ID NO: 844876 - DNA, 75 bp, synthetic construct
  source 1..75: mol_type = other DNA
atcaaccgcacggaagtccatccccgggaagtgattaaacgcgccctgtaccacaatgccgctgccgtggtactg

SEQ ID NO: 844877 - DNA, 75 bp, synthetic construct
  source 1..75: mol_type = other DNA
tggaaaggcaacgtatcggttgaatacagtggcaaccacggcaaatacaacattatctatgatgctgttccggcg

SEQ ID NO: 844878 - DNA, 75 bp, synthetic construct
  source 1..75: mol_type = other DNA
tttccaacatttagtgaagattttattgaagaaatggaacttggatataatcaactattcaacagaaaagaatga

SEQ ID NO: 844879 - DNA, 75 bp, synthetic construct
  source 1..75: mol_type = other DNA
taaagatcgaagaaatacggatgcataaacatcatgagattcatagggttaagcctcttatgccagctttgtgtc

SEQ ID NO: 844880 - DNA, 75 bp, synthetic construct
  source 1..75: mol_type = other DNA
tccgcagtgggaaaaggtctacgtcgagcgcatcgttcgccatattcacgcgcagaaaaaccatccgtcgatcat

SEQ ID NO: 844881 - DNA, 75 bp, synthetic construct
  source 1..75: mol_type = other DNA
gagcgcagcctcattcaacgggccctgaaaaccctggaccgccatcttcatgaacccggcgtggccttcacctcc

SEQ ID NO: 844882 - DNA, 75 bp, synthetic construct
  source 1..75: mol_type = other DNA
gttgataataatcaaatggtattattccccagcggatacgaattttatattgcgaattatccagaagccggtctt

SEQ ID NO: 844883 - DNA, 75 bp, synthetic construct
  source 1..75: mol_type = other DNA
gggcaattaagccgcgcacaacaggtgctgggaattggctatttgtatgttgaggcgcagttacgacagatttga

SEQ ID NO: 844884 - DNA, 75 bp, synthetic construct
  source 1..75: mol_type = other DNA
gaatcagttgattgccggtgaaaccctcttcaccggcaccattaaccgcacggaagtccatccccgggaagtgat

SEQ ID NO: 844885 - DNA, 75 bp, synthetic construct
  source 1..75: mol_type = other DNA
gcacgggaatggctgattctgaacatggcgggactggagcgtgaagagttccgggtgctgtatctgaacaaccag

SEQ ID NO: 844886 - DNA, 75 bp, synthetic construct
  source 1..75: mol_type = other DNA
ttgacatccgggtgccggaccatctgataatcggtggcagccaggttttctcctttgccgaacatggtctgcttt

SEQ ID NO: 844887 - DNA, 75 bp, synthetic construct
  source 1..75: mol_type = other DNA
gcaggtaaaatggtatattaccgtatcggggataaccgcatcatgacgttattgaataccttatatgatctctac

SEQ ID NO: 844888 - DNA, 75 bp, synthetic construct
  source 1..75: mol_type = other DNA
ttttgatagccgcttctacatgaaaaatgcctctcacgatcccagcgaccaaatcttcctgatgcaatatttcta

SEQ ID NO: 844889 - DNA, 75 bp, synthetic construct
  source 1..75: mol_type = other DNA
ggtgcacagcagcgccattgatcatttggcaattgaaaaactgaccagcgccagctttgcttttactgtcgaaca

SEQ ID NO: 844890 - DNA, 75 bp, synthetic construct
  source 1..75: mol_type = other DNA
tttgtcgggtatgtggtgctgaacagccagaagcaccatggggagatgatggtgagacaccaacatacgatatat

SEQ ID NO: 844891 - DNA, 75 bp, synthetic construct
  source 1..75: mol_type = other DNA
cgccgctttattcaggcgggtatgagcgagcgcgagatagccgctgaactggagtggtttatgcgccagcagggc

SEQ ID NO: 844892 - DNA, 75 bp, synthetic construct
  source 1..75: mol_type = other DNA
gagccagggatttatttgccagggcaagggggcgtgcgcatcgaagatgtcgtgctggtcaccccgcaaggcgca

SEQ ID NO: 844893 - DNA, 75 bp, synthetic construct
  source 1..75: mol_type = other DNA
ctgattgccggtgaaaccctcttcaccggcaccatcaaccgcacggaagtccatccccgggaagtgattaaacgc

SEQ ID NO: 844894 - DNA, 75 bp, synthetic construct
  source 1..75: mol_type = other DNA
gacggagagatacgtcgctatgacagacgtctgaacataatctgtcgcgagtgccggaagagtgaggttatgcag

SEQ ID NO: 844895 - DNA, 75 bp, synthetic construct
  source 1..75: mol_type = other DNA
gatggggaaatacggcgctacgacagacgctacaacacaatttgtcgcgagtgccgtaacagcgaaacgatgcag

SEQ ID NO: 844896 - DNA, 75 bp, synthetic construct
  source 1..75: mol_type = other DNA
tccggaccttatctggtcattacctgatggagaaatacgtcgttacgacaggcatcataatataatttgtactga

SEQ ID NO: 844897 - DNA, 75 bp, synthetic construct
  source 1..75: mol_type = other DNA
gtagacagtggtgttgtatatggttcagggcatggaatattcccttctgagcaggtacgtaaagactggataaaa

SEQ ID NO: 844898 - DNA, 75 bp, synthetic construct
  source 1..75: mol_type = other DNA
gatggagaaatacgccgctacaacaggcgtctgaacataatttgccgtgagtgccggaagagtgaggttatgcag

SEQ ID NO: 844899 - DNA, 75 bp, synthetic construct
  source 1..75: mol_type = other DNA
atgagcattcttgccagagagctggttgccagttgttatgtatacaactccggctacgcgttattcccgtctcaa

SEQ ID NO: 844900 - DNA, 75 bp, synthetic construct
  source 1..75: mol_type = other DNA
cccctggcttctctggagcgggctgtccggctcgccgttgccggagagagcgaattcaccgtggtttatctgtac

SEQ ID NO: 844901 - DNA, 75 bp, synthetic construct
  source 1..75: mol_type = other DNA
gctggcacagcacaacgcgcaatttttagtcgagtttatggcgaagctcagtgccgaactggcgggggagaatga

SEQ ID NO: 844902 - DNA, 75 bp, synthetic construct
  source 1..75: mol_type = other DNA
atgaacttacaacactggcaggcacaatttgaacgttggttgaaaaaccatcatacacaccaggacgcggctcat

SEQ ID NO: 844903 - DNA, 75 bp, synthetic construct
  source 1..75: mol_type = other DNA
agcgagaaaaaattaaaggacaggttgttgaactcgtacgccagagtgggcgtgagacgttacggcaactggaag

SEQ ID NO: 844904 - DNA, 75 bp, synthetic construct
  source 1..75: mol_type = other DNA
gccaccggcgatgaaaaaagcaatcagcagttatcgctgcggcgtgtcgaaatcagtcttgttccgcgttctgac

SEQ ID NO: 844905 - DNA, 75 bp, synthetic construct
  source 1..75: mol_type = other DNA
tctggggttataccccggtgaacaaatccgccagccggtattacgcgccattcgcgactggcgtccgcctgagca

SEQ ID NO: 844906 - DNA, 75 bp, synthetic construct
  source 1..75: mol_type = other DNA
atgagaaacgtttttacacctgaatatcgggagcaactgaaggcgcgtattgtggaactggtacgcagagatggg

SEQ ID NO: 844907 - DNA, 75 bp, synthetic construct
  source 1..75: mol_type = other DNA
agtcgaagaaaccgcttgtcgttgatcccggtcttatccggacattacctaatggggatattcggcgctacgaca

SEQ ID NO: 844908 - DNA, 75 bp, synthetic construct
  source 1..75: mol_type = other DNA
atctgaagaaaccatctgtggttgatcctgaccttatctggccattaccagacggagaaatacgccgctacgaca

SEQ ID NO: 844909 - DNA, 75 bp, synthetic construct
  source 1..75: mol_type = other DNA
gagtgccggaagagtgaggttatgcagcgagtgctggcgttctatcggggtaattttcaggaggtgatggagtga

SEQ ID NO: 844910 - DNA, 75 bp, synthetic construct
  source 1..75: mol_type = other DNA
tcctgaccttatctggccattaccagacggagaaatacgccgctacgacaggcgtcaaaacataatctgtagcga

SEQ ID NO: 844911 - DNA, 75 bp, synthetic construct
  source 1..75: mol_type = other DNA
aactgaaagagggaaatctcttcgccgaacagtgcccgtcgcgcgaggtgctgaaacacgttaccagccgttggg

SEQ ID NO: 844912 - DNA, 75 bp, synthetic construct
  source 1..75: mol_type = other DNA
aggggaagaaaccgtctatggttgatccggaccttatctggtcattacctgacggagaaattcgtcgctacgata

SEQ ID NO: 844913 - DNA, 75 bp, synthetic construct
  source 1..75: mol_type = other DNA
ctggttacgggttattcccatctgaacaggctcgtaaggactggcaaaacgcccgcaaaaaattatcgagggcaa

SEQ ID NO: 844914 - DNA, 75 bp, synthetic construct
  source 1..75: mol_type = other DNA
gttgccagtggtgatgtatatcactctggctatggggtgttcccgtcagaacgggctcgtaaggactggcaaaac

SEQ ID NO: 844915 - DNA, 75 bp, synthetic construct
  source 1..75: mol_type = other DNA
agcgagaaaaaattaaagggcaggttgttgagctggtacgccagagcgggcgcgagacgttacggcaactggaag

SEQ ID NO: 844916 - DNA, 75 bp, synthetic construct
  source 1..75: mol_type = other DNA
ggcgtctgaacataatctgtcgcgagtgccggaagagtgaggttatgcagcgagtgctggcgttttatcagggta

SEQ ID NO: 844917 - DNA, 75 bp, synthetic construct
  source 1..75: mol_type = other DNA
gcccgcaaaaaactctcaagggcaaagctgaagaaaaaaacacctgtggttgatccggaccttatctggtcgtta

SEQ ID NO: 844918 - DNA, 75 bp, synthetic construct
  source 1..75: mol_type = other DNA
agcgagaaaaaattaaagggcgggttgttgaactcgtacgccagagtgggcgtgagacgttacggcaactggaag

SEQ ID NO: 844919 - DNA, 75 bp, synthetic construct
  source 1..75: mol_type = other DNA
gcggaaactgatggtaaagcctttcctcagcctgcatgcgttgcgttaccagtacaggaagctgcaacacaggaa

SEQ ID NO: 844920 - DNA, 75 bp, synthetic construct
  source 1..75: mol_type = other DNA
atggcaatcagcaaaggtcgtctgattcgcgtaaatcagggcggtaaatttcgttactgcataccgggcgataat

SEQ ID NO: 844921 - DNA, 75 bp, synthetic construct
  source 1..75: mol_type = other DNA
caccacggcaactgtagtgaaaatctcagagtgcgatttaaccgcgacgattgaacaacgcggaccacaaacggc

SEQ ID NO: 844922 - DNA, 75 bp, synthetic construct
  source 1..75: mol_type = other DNA
tcactaccatcgcgcactgaaaaacaagcggatgacctggttttaccatcgctgcatatggcaaaccgcgaactg

SEQ ID NO: 844923 - DNA, 75 bp, synthetic construct
  source 1..75: mol_type = other DNA
cggcggcggacattgtgcagtcgctaccaccgtttaccgaaacgcaagcggatgacctggttttatcatcgctgc

SEQ ID NO: 844924 - DNA, 75 bp, synthetic construct
  source 1..75: mol_type = other DNA
taatttaccagcagagccgaaagctgcatcggtaacagaagctgatggtaaatcctttcctctgccatcaggtgt

SEQ ID NO: 844925 - DNA, 75 bp, synthetic construct
  source 1..75: mol_type = other DNA
tgtgggaactgaaaaaggctggtttcgttgataaaagcgtatacacctggcgtgtagctggtgaaggtgaatccg

SEQ ID NO: 844926 - DNA, 75 bp, synthetic construct
  source 1..75: mol_type = other DNA
acctgaagcgccggatgtggtaaccgaagaggtcgctccaaaagttagcgctgacatgatgattgagtttatcgc

SEQ ID NO: 844927 - DNA, 75 bp, synthetic construct
  source 1..75: mol_type = other DNA
ctcagcctgcatgtgttgcgttaccagtacaggacgcggcaacacaggaagaaattaaaacagaaactgtgacgg

SEQ ID NO: 844928 - DNA, 75 bp, synthetic construct
  source 1..75: mol_type = other DNA
cgttgataaaagcgtatacacctggcgtgtggccgataacaacgttcagcaggaacatccagtgccggaagaaca

SEQ ID NO: 844929 - DNA, 75 bp, synthetic construct
  source 1..75: mol_type = other DNA
aagcaatgggaaaagccacatccatagaacttgctgcgcgacttgatatcagccgtgaagaagtgctgaacgaac

SEQ ID NO: 844930 - DNA, 75 bp, synthetic construct
  source 1..75: mol_type = other DNA
gcgatgggtaaagccaattctgttgaactggcggcgcggcttgatatcagccgtgaagaagttctcaacgaactg

SEQ ID NO: 844931 - DNA, 75 bp, synthetic construct
  source 1..75: mol_type = other DNA
atctgaaacacaggatatgctgaccgaagaggtcgctccaaaagttagcgctgacatgatgattgagtttatctc

SEQ ID NO: 844932 - DNA, 75 bp, synthetic construct
  source 1..75: mol_type = other DNA
gcacgcattgaatatgtaaaaaacaagttgcttgggaaagacattccagaaaatattgtcgacgaagatgaaaat

SEQ ID NO: 844933 - DNA, 75 bp, synthetic construct
  source 1..75: mol_type = other DNA
agtcatttagtcctgagcaagaagaaaaactaactgcacaatttcaagatatgtgtgaatttgtcaaaacacatt

SEQ ID NO: 844934 - DNA, 75 bp, synthetic construct
  source 1..75: mol_type = other DNA
ggtcgctgaacataacaggcaattacgtgtcttccggctggatgagattcatctggtaaggccatcgcgggaaac

SEQ ID NO: 844935 - DNA, 75 bp, synthetic construct
  source 1..75: mol_type = other DNA
ctgaatactggcggaaaaaaactaacaacaatggaacaacggcaaggtagccatgatgggccattccttgcattt

SEQ ID NO: 844936 - DNA, 75 bp, synthetic construct
  source 1..75: mol_type = other DNA
ccaatggttttaaatattctgatttcagtactccccgtcgcctacgttttgatagaaaaactattcgaatgattg

SEQ ID NO: 844937 - DNA, 75 bp, synthetic construct
  source 1..75: mol_type = other DNA
cgatattggttcaggtgaaaatgaaggtagacttgaaattgttgacggtagccaacgaataagaaccctacacca

SEQ ID NO: 844938 - DNA, 75 bp, synthetic construct
  source 1..75: mol_type = other DNA
ggctatctcggtgtaagaacccttgacggctttgcccgttacagcaaatcaagccgtcacaaaatgtctgcgggg

SEQ ID NO: 844939 - DNA, 75 bp, synthetic construct
  source 1..75: mol_type = other DNA
acacaggaagatattaaaacagaaactgtggcagacattgtgcagccgcttgagaatcgagtggataatctggtt

SEQ ID NO: 844940 - DNA, 75 bp, synthetic construct
  source 1..75: mol_type = other DNA
cagaagtgggagcgagtctgcgccgcgctgcgggagctgaacaagtgccgggatattctccgggatattaccgcc

SEQ ID NO: 844941 - DNA, 75 bp, synthetic construct
  source 1..75: mol_type = other DNA
ttttaccccgcgaaaacgtctcagccagttaaccacacaggcgggctttattcgggctcttccgcacttcagctg

SEQ ID NO: 844942 - DNA, 75 bp, synthetic construct
  source 1..75: mol_type = other DNA
cggctgatatatctggacctggagtatcgacgggggcaatgccgcctgcgcagtaccggtgggggcgtacagggc

SEQ ID NO: 844943 - DNA, 75 bp, synthetic construct
  source 1..75: mol_type = other DNA
ctgggcggtggttttgggttttgcgtgctgccgaacgtgagcttgcaagaagtgaggggtttcacagttttgttg

SEQ ID NO: 844944 - DNA, 75 bp, synthetic construct
  source 1..75: mol_type = other DNA
aagctgcatccgtagcggaaaccgatggtaaagcctttcctcagccagcaggtgttgcgttaccagtcaaggaaa

SEQ ID NO: 844945 - DNA, 75 bp, synthetic construct
  source 1..75: mol_type = other DNA
aagtggcttcaacgctggcaatggcaatcagcaaaggtcgtctgattcgcgtaaatcagggcggtaaatttcgtt

SEQ ID NO: 844946 - DNA, 75 bp, synthetic construct
  source 1..75: mol_type = other DNA
cccattgctgccggatttaagggggtgatctccggaaaagtaaaatcacgtccgcagtgctgtgacgatgatgcg

SEQ ID NO: 844947 - DNA, 75 bp, synthetic construct
  source 1..75: mol_type = other DNA
tggttcttgagcgatggggggcatgggcagcaaataatcatgaagatgtaacatggccctcgatagctgctggtt

SEQ ID NO: 844948 - DNA, 75 bp, synthetic construct
  source 1..75: mol_type = other DNA
tagccaactggacaccgacgaactggctccggttgtcaaacgtgcgcgcgaaaaagtcgaacacgattttaacca

SEQ ID NO: 844949 - DNA, 75 bp, synthetic construct
  source 1..75: mol_type = other DNA
agtacaggaggctgcaacacaggaagatattaaaacagaaactgtggcggacattgtgcagtcgctgccatcgtt

SEQ ID NO: 844950 - DNA, 75 bp, synthetic construct
  source 1..75: mol_type = other DNA
taacggaaaccgatggtaaagcctttcctcagccggcaggtgttgcgttaccagtccgggaagcggaaacacagg

SEQ ID NO: 844951 - DNA, 75 bp, synthetic construct
  source 1..75: mol_type = other DNA
ggggattgttgaaggcatgctgatgatgctgggagtgaggcttgagatggatcggtatgttgagcgtgaattgcc

SEQ ID NO: 844952 - DNA, 75 bp, synthetic construct
  source 1..75: mol_type = other DNA
acattcgctgcttgttgcccattacctatacggtatctctaaaagaaagctcgccaaggctagtaaaaaggatga

SEQ ID NO: 844953 - DNA, 75 bp, synthetic construct
  source 1..75: mol_type = other DNA
tggttatataggaaagaagctacaaaaagccgagggggtggtggaaggaatgttgatgatgttgggtgtccggtt

SEQ ID NO: 844954 - DNA, 75 bp, synthetic construct
  source 1..75: mol_type = other DNA
tcgcggatggggtaaagatactgatgcgtgatatccggcaggttcttgagtgctggggggcatgggcggcaaata

SEQ ID NO: 844955 - DNA, 75 bp, synthetic construct
  source 1..75: mol_type = other DNA
atggtgatatgcgggtgtatagcccgcctttaccggaacaatcgcgatctgcatgacttgctggttgattattac

SEQ ID NO: 844956 - DNA, 75 bp, synthetic construct
  source 1..75: mol_type = other DNA
ttgcacgtaagcatgggcgatctgattgttgggttggcaggatgcttcagaaagctgagggcgtagtggagggta

SEQ ID NO: 844957 - DNA, 75 bp, synthetic construct
  source 1..75: mol_type = other DNA
aagtggcttcaacgctggcaatggctatcagcaaagggcgtctgattcgcgtcaatcagaatggtaaatttcgct

SEQ ID NO: 844958 - DNA, 75 bp, synthetic construct
  source 1..75: mol_type = other DNA
atggccaaagaagacaatattgaaatgcaaggtaccgttcttgaaacgttgcctaacaccatgttccgcgtagag

SEQ ID NO: 844959 - DNA, 75 bp, synthetic construct
  source 1..75: mol_type = other DNA
gctccggtcgtcaaacgcgcgcgcgaaaaagttgaacacgattttaaccagcaggtgatcaatcgagaactcgcc

SEQ ID NO: 844960 - DNA, 75 bp, synthetic construct
  source 1..75: mol_type = other DNA
gccgcgctgcgtgagttgaacaagcacagggatattgtacgacagattactgattcttcccgccatgttgcatcg

SEQ ID NO: 844961 - DNA, 75 bp, synthetic construct
  source 1..75: mol_type = other DNA
ctgtggcggacattgtgcagtcgttgccatcgtttaccgaaacgcaagcagatgagctgatttttccgtccctgc

SEQ ID NO: 844962 - DNA, 75 bp, synthetic construct
  source 1..75: mol_type = other DNA
cgttgataaaagcgcgtacacctggcgtgtggcttataacaacgttcagcgggaacagccagcgccggcagaact

SEQ ID NO: 844963 - DNA, 75 bp, synthetic construct
  source 1..75: mol_type = other DNA
cttcaacgttcaagaaagcacgggataaaagcggtctaacctgggaagagggaacagctccgactttccatgaac

SEQ ID NO: 844964 - DNA, 75 bp, synthetic construct
  source 1..75: mol_type = other DNA
acgggacgcctggcacgcgtaaatcagaacggtaaatttcgccactgcatgccgggagataatttaccagcagag

SEQ ID NO: 844965 - DNA, 75 bp, synthetic construct
  source 1..75: mol_type = other DNA
cttgtggctgataacaacgttcagcaggaacagccagcgccggcagaactgccggaagaaactaccacggcaaca

SEQ ID NO: 844966 - DNA, 75 bp, synthetic construct
  source 1..75: mol_type = other DNA
gccggaagaaatcgccacagcaacagtgacgaaaatatcggagtgcgatttaaccgcgacgattgaacaacgtgg

SEQ ID NO: 844967 - DNA, 75 bp, synthetic construct
  source 1..75: mol_type = other DNA
ctcagtcagcaggtgttgcgttaccagtacaggaagctgcaacacaggaagatattaaaacagaaactgtggctg

SEQ ID NO: 844968 - DNA, 75 bp, synthetic construct
  source 1..75: mol_type = other DNA
cttctcgcgtggcccgtatggcttccggcgggcgtcatggcctggcgcaatctatctttcaggtcggcggcaact

SEQ ID NO: 844969 - DNA, 75 bp, synthetic construct
  source 1..75: mol_type = other DNA
ttggtagttcgttggggccattgctggcggcggtgatcatcgccccttacggcaaaggcaacgttgcatggtttg

SEQ ID NO: 844970 - DNA, 75 bp, synthetic construct
  source 1..75: mol_type = other DNA
ccgccgcacgcctggcatcgcccccatcagttgcggcggaacgcggtgcgcagccagcacatcatcacgggatgc

SEQ ID NO: 844971 - DNA, 75 bp, synthetic construct
  source 1..75: mol_type = other DNA
gtggcaacggagtacatcagagactggcaacaaccacgccatgcagtcggtggcgagggaacgggggagcctgtc

SEQ ID NO: 844972 - DNA, 75 bp, synthetic construct
  source 1..75: mol_type = other DNA
gcgtaagcagcacggagatccgccataacccggtcgccagctatctggaacagctgggggcatcagaccccgaag

SEQ ID NO: 844973 - DNA, 75 bp, synthetic construct
  source 1..75: mol_type = other DNA
cagtgcctttgttgaaagtgagattgatgaatggattgaacaactgatctattcatcacgtaatacagctgcata

SEQ ID NO: 844974 - DNA, 75 bp, synthetic construct
  source 1..75: mol_type = other DNA
cgcctgatcagcctggggcgcttccctaaaccggtaaaaattggtccccgctccgtggcttttattgaaagtgaa

SEQ ID NO: 844975 - DNA, 75 bp, synthetic construct
  source 1..75: mol_type = other DNA
cgggaatggctgattctgaacatggcgggactggagcgtgaagaattccgggtgctgtatctgaataaccagaat

SEQ ID NO: 844976 - DNA, 75 bp, synthetic construct
  source 1..75: mol_type = other DNA
gactacgtctcagccaaatatggtcaaacaaatggctggaatggttatgttgttggctggacagcagtattacct

SEQ ID NO: 844977 - DNA, 75 bp, synthetic construct
  source 1..75: mol_type = other DNA
cgttatttcgataataagttgggctacgatggttttggcgatcaaatgatttatatgcttggttatgatttctaa

SEQ ID NO: 844978 - DNA, 75 bp, synthetic construct
  source 1..75: mol_type = other DNA
tcggtgcggctaaactgaccggcggtggcactaccacaccgaaagatttccagatccatttacaggattgcgtgt

SEQ ID NO: 844979 - DNA, 75 bp, synthetic construct
  source 1..75: mol_type = other DNA
accacgcaacaacggagaacggtcatccgaaccccaaatggaacggggccaccatgcgcgactccagcgattacc

SEQ ID NO: 844980 - DNA, 75 bp, synthetic construct
  source 1..75: mol_type = other DNA
acgcaatggatgcggtactcgctgccgctgatgccgggtgttttgccacctacattgaaaaacagggtggcgtgc

SEQ ID NO: 844981 - DNA, 75 bp, synthetic construct
  source 1..75: mol_type = other DNA
ttgagccattacgagcggaaacagctcatcagacagcttaaaaatcagccgcccgccacggataccggacaaaat

SEQ ID NO: 844982 - DNA, 75 bp, synthetic construct
  source 1..75: mol_type = other DNA
aacgagtagtgatatcatatccactcatcggacaagacaatgacttcttagaccatttgaaaataccgaaacaac

SEQ ID NO: 844983 - DNA, 75 bp, synthetic construct
  source 1..75: mol_type = other DNA
caaccatacagaagctacaggcaatcttcggcgcaatatgcctgaccccatccctgtcattatacttgcacgcct

SEQ ID NO: 844984 - DNA, 75 bp, synthetic construct
  source 1..75: mol_type = other DNA
aagaagccaaaggtttctatgctcaccatggatttaaggcatcacaaactcatgagaggactctgtttctaaagc

SEQ ID NO: 844985 - DNA, 75 bp, synthetic construct
  source 1..75: mol_type = other DNA
ggcacgggaatggctgattctgaacatggcgggactggagcgtgaagagttccgggtactgtatctgaacaacca

SEQ ID NO: 844986 - DNA, 75 bp, synthetic construct
  source 1..75: mol_type = other DNA
cgaagataaataaacaattagagaaattgttaggggggatagcacgaaaacaaacctcagaaaggaataaaggcg

SEQ ID NO: 844987 - DNA, 75 bp, synthetic construct
  source 1..75: mol_type = other DNA
aaactaacgtagcattatggctacatcttgaaatgtttgctctggtggcattcattaaactgtatacaggaaaag

SEQ ID NO: 844988 - DNA, 75 bp, synthetic construct
  source 1..75: mol_type = other DNA
caacagcagccctttttctttttggttcaattgttggtgtagacaagctaaaaaaagaaacttattttcacatat

SEQ ID NO: 844989 - DNA, 75 bp, synthetic construct
  source 1..75: mol_type = other DNA
ttctccatgttgataactttgattatacaaaccaggaacttctcccggaggttgtaaaggcaatagatgttgccg

SEQ ID NO: 844990 - DNA, 75 bp, synthetic construct
  source 1..75: mol_type = other DNA
taataacgaaacaaaaacacttggcagtgaaattctgaattttgcatgtgaatatgcaaaagccgctgttgaaaa

SEQ ID NO: 844991 - DNA, 75 bp, synthetic construct
  source 1..75: mol_type = other DNA
cacaaatgaagctgaagctattgctattgccactgaagctaacactcgtctggctgagcaaagaacccggcaggt

SEQ ID NO: 844992 - DNA, 75 bp, synthetic construct
  source 1..75: mol_type = other DNA
ttcatatatcaaaagtacgcagctcataataaattatgtctccgacaaaaataaaacaattaatgaaaagacgat

SEQ ID NO: 844993 - DNA, 75 bp, synthetic construct
  source 1..75: mol_type = other DNA
attaactttgccatattatcgccagacggttttattgccggattactgcatctgaatagcattttccccaacctt

SEQ ID NO: 844994 - DNA, 75 bp, synthetic construct
  source 1..75: mol_type = other DNA
atgaaaaagttcgaaaacataactgttctccatgttgataactttgattatacaaacccggaacttctcccggag

SEQ ID NO: 844995 - DNA, 75 bp, synthetic construct
  source 1..75: mol_type = other DNA
tttacggcactattgaagactccccgtgctccatcgttccagacgatcataaactggaagtcgatatgggcgata

SEQ ID NO: 844996 - DNA, 75 bp, synthetic construct
  source 1..75: mol_type = other DNA
caccgtgccggacagcaacgactggccgccgtacagcgggccatgcagcagggggccgcgaatgattactggttt

SEQ ID NO: 844997 - DNA, 75 bp, synthetic construct
  source 1..75: mol_type = other DNA
gagtggccttcacctccacccgtgcagcacgggaatggctgattctgaacatggcgggactggagcgggaagagt

SEQ ID NO: 844998 - DNA, 75 bp, synthetic construct
  source 1..75: mol_type = other DNA
gccggtgaaaccctcttcaccggcaccatcaaccgtacggaagttcatccccgggaagtgattaaacgcgccctg

SEQ ID NO: 844999 - DNA, 75 bp, synthetic construct
  source 1..75: mol_type = other DNA
caccgtgccggacagcaacgcctggccgccgtccaccgggccatgcagcagggggccgcgaatgattactggttt

SEQ ID NO: 845000 - DNA, 75 bp, synthetic construct
  source 1..75: mol_type = other DNA
caccgtgccggacagcaacgtctggccgccgttcaacgggccatgcagcagggggccgcgaatgattactggttt

SEQ ID NO: 845001 - DNA, 75 bp, synthetic construct
  source 1..75: mol_type = other DNA
caccgtgccggacagcaacgactggccgccgtgcaacgggccatgcagcagggggccgcgaatgattactggttt

SEQ ID NO: 845002 - DNA, 75 bp, synthetic construct
  source 1..75: mol_type = other DNA
gtatcacctgaacaattcaatgcatattcatcacgcagtttcaaaataaagcgagcgttagtaagacaagcgcag

SEQ ID NO: 845003 - DNA, 75 bp, synthetic construct
  source 1..75: mol_type = other DNA
ctggtggtgagcctttattgcggggcaattaatcagctactggttatcttccatcacgaccagctgcaaagcatg

SEQ ID NO: 845004 - DNA, 75 bp, synthetic construct
  source 1..75: mol_type = other DNA
agatgcaagaaaacgtcgctctgaatatccagaattggcactacgctactttgcctacactgaagaatatcttga

SEQ ID NO: 845005 - DNA, 75 bp, synthetic construct
  source 1..75: mol_type = other DNA
aaaagtatgattctttttcctgaaccatcagcatttgcattggttttcatacctatcttttcattttgtttatac

SEQ ID NO: 845006 - DNA, 75 bp, synthetic construct
  source 1..75: mol_type = other DNA
acacattcagcaccacagccaataccggcccgcatcaatcgttttgttaccgttcgcattggcttagggggagca

SEQ ID NO: 845007 - DNA, 75 bp, synthetic construct
  source 1..75: mol_type = other DNA
atggggctgactaaagccgaacttgcaccgaaaaactatattgtgcctggtgatccggctattgaatatgtgcag

SEQ ID NO: 845008 - DNA, 75 bp, synthetic construct
  source 1..75: mol_type = other DNA
caccgtgccggacagcaacggctggccgccgtacaacgggccatgcagcagggggccgcgaatgattactggttt

SEQ ID NO: 845009 - DNA, 75 bp, synthetic construct
  source 1..75: mol_type = other DNA
cgggactaccacgccgaaagattttcagattcgtttacaggactgcgtatttgatacccaaacgaacatggaaac

SEQ ID NO: 845010 - DNA, 75 bp, synthetic construct
  source 1..75: mol_type = other DNA
ttgttcttttttatattctttgagggaaatatattcctggactattttgcactgggagtgcttatttttgtattt

SEQ ID NO: 845011 - DNA, 75 bp, synthetic construct
  source 1..75: mol_type = other DNA
ggccatttttgtggatttgggccacgctttaccgcccggagcggggatggggaatgcaaaaccatgactcctccg

SEQ ID NO: 845012 - DNA, 75 bp, synthetic construct
  source 1..75: mol_type = other DNA
atgagtaagtttgccaaaacagccattgctgccgcaatggtcatgggcgcagtcgtctccagttctgcttttgcc

SEQ ID NO: 845013 - DNA, 75 bp, synthetic construct
  source 1..75: mol_type = other DNA
tgaacttcaaagcgtggctggtgggtgaaagcgcaatgccaactttaggcgcatttgaagccaacaccactttcc

SEQ ID NO: 845014 - DNA, 75 bp, synthetic construct
  source 1..75: mol_type = other DNA
ttaataccgatacaggtgctgcgtttaacaatgtaagcctggcgattggtgataagcaaggtacttcctataaaa

SEQ ID NO: 845015 - DNA, 75 bp, synthetic construct
  source 1..75: mol_type = other DNA
ggcacgggaatggctgattctgaacatggtaggactggagcgtgaagaattccgggtgctgtacctgaacaacca

SEQ ID NO: 845016 - DNA, 75 bp, synthetic construct
  source 1..75: mol_type = other DNA
atggggtcggggtcgacagtgaaagcagcgatggcgctgggacgtcgtgcaactggcgttgaactggagactgaa

SEQ ID NO: 845017 - DNA, 75 bp, synthetic construct
  source 1..75: mol_type = other DNA
cagtccggacgccggtatatcggtatcgagctgcttgaacagtatcaccgtgccggacagcaacgtctggctgcc

SEQ ID NO: 845018 - DNA, 75 bp, synthetic construct
  source 1..75: mol_type = other DNA
tggatatccgggtaccggaccatctgatagttggtggcagacaggttttctcctttgcggaacacggtctgcttt

SEQ ID NO: 845019 - DNA, 75 bp, synthetic construct
  source 1..75: mol_type = other DNA
ctttatctgaacgtctgtacaaagaacaggggttagatacacaaaaattacttggtcataaaacacaacaacaaa

SEQ ID NO: 845020 - DNA, 75 bp, synthetic construct
  source 1..75: mol_type = other DNA
gtatatctctgcgggacagccgagaatggcccaagtcgtaaggtctgtattgatcgatgtgtttaaggaagcaca

SEQ ID NO: 845021 - DNA, 75 bp, synthetic construct
  source 1..75: mol_type = other DNA
ataaaacaaagtcatttgttagccatgaactggcaagtaaattaagagtttcagagtatggtgatgtgataattg

SEQ ID NO: 845022 - DNA, 75 bp, synthetic construct
  source 1..75: mol_type = other DNA
gtgaccacctatatacttacaactgatgcggaagccgacctgcgaggtatcatccgctacacgcgtaaacagtgg

SEQ ID NO: 845023 - DNA, 75 bp, synthetic construct
  source 1..75: mol_type = other DNA
actttggcgaacgtattccaaccgatgttcaatggtttgacggttccgatccgcagaaaatgcataaccattatg

SEQ ID NO: 845024 - DNA, 75 bp, synthetic construct
  source 1..75: mol_type = other DNA
tgtgactggtacgggcgaggcgaagaactggacactgtgcttgcgcaatattgtgaaagtaaatggtctgcaagg

SEQ ID NO: 845025 - DNA, 75 bp, synthetic construct
  source 1..75: mol_type = other DNA
ttttcaagaacggttcgagcagtttaagagagtctctccagatattcaagtcattggaacttgtggaaacatgct

SEQ ID NO: 845026 - DNA, 75 bp, synthetic construct
  source 1..75: mol_type = other DNA
gcgttctggtgtattagttgaaaatagtgtagacggtctcttcaacggaatgcgggactttatcttgggaaggtt

SEQ ID NO: 845027 - DNA, 75 bp, synthetic construct
  source 1..75: mol_type = other DNA
gctcggcctccgtcggtgcgcagaaattcccggtacactggggtggcgattgttacgctaactacgaatcaatgg

SEQ ID NO: 845028 - DNA, 75 bp, synthetic construct
  source 1..75: mol_type = other DNA
gtgagcaagattgactatcaggcactgcgaatggcggcagaacgtgcaattccggcaatggaacgcctgttaatg

SEQ ID NO: 845029 - DNA, 75 bp, synthetic construct
  source 1..75: mol_type = other DNA
ttggagtacgacgacgatgagccaattggcggtgtaacccactggatgctgctaccggagccgccgcaggaggtg

SEQ ID NO: 845030 - DNA, 75 bp, synthetic construct
  source 1..75: mol_type = other DNA
gaggagaagcaacgattaagccgggtaatggtattgagcaggcaactcactggatgcctctaccagaaccgcctc

SEQ ID NO: 845031 - DNA, 75 bp, synthetic construct
  source 1..75: mol_type = other DNA
tataccagcagaagtagtaaaaactggggtaaattgggatcgagacactattcctgccttcttgaggaaaagaac

SEQ ID NO: 845032 - DNA, 75 bp, synthetic construct
  source 1..75: mol_type = other DNA
aggccatagacgccgcacaaccgaaggataagccctacaaactcaccgattcacagacacctggcctgtttttgc

SEQ ID NO: 845033 - DNA, 75 bp, synthetic construct
  source 1..75: mol_type = other DNA
gtctgcaatgtggaatggtaatcgctgggatgatggcaccgaatatccggatccgcactcagttacgcactggcg

SEQ ID NO: 845034 - DNA, 75 bp, synthetic construct
  source 1..75: mol_type = other DNA
tttacgacaggaaaatcgtataaggtcattctcgacaaagcgccagataaagaacgtcaggaaaaaagaaatgag

SEQ ID NO: 845035 - DNA, 75 bp, synthetic construct
  source 1..75: mol_type = other DNA
atgaacctgaacttaagcggtgcgtatcgcttaaataatgcatggagctttggtcttggtttcaacgccgtctac

SEQ ID NO: 845036 - DNA, 75 bp, synthetic construct
  source 1..75: mol_type = other DNA
ataaggtttgtgggcgttgcaatggaaaccggtttagtcgtttatcaacgacactggcgcggtgtcatgtccaga

SEQ ID NO: 845037 - DNA, 75 bp, synthetic construct
  source 1..75: mol_type = other DNA
gtgggtgaaggaactatgtcagcattgtcatggtaagggagaagtcagcacagcgtgtagagggtgtaaggggaa

SEQ ID NO: 845038 - DNA, 75 bp, synthetic construct
  source 1..75: mol_type = other DNA
tgccatggtaagggcgaagccagcacagcgtgcagagggtgtaagggtaaagggattgttctggatgaaaaaaga

SEQ ID NO: 845039 - DNA, 75 bp, synthetic construct
  source 1..75: mol_type = other DNA
gtgggagaagaaactatgtcagcattgtaatggcaagggaaaagtcagcacagcgtgcagagggtgtaagggtaa

SEQ ID NO: 845040 - DNA, 75 bp, synthetic construct
  source 1..75: mol_type = other DNA
ttccagcagctgaaagcgacctcaacgagtggcgacacgctgttccagaaacatgaaggctttaaagatgcttac

SEQ ID NO: 845041 - DNA, 75 bp, synthetic construct
  source 1..75: mol_type = other DNA
atgggtgaaggaactatgtcagcattgccatggtaagggcgaagccagcacagcgtgcagagggtgtaagggtaa

SEQ ID NO: 845042 - DNA, 75 bp, synthetic construct
  source 1..75: mol_type = other DNA
ggaactggtaggaagtcgccaagatagtgtgaagagaactatcgaaacactggctaaaaagagtgtgatccaatt

SEQ ID NO: 845043 - DNA, 75 bp, synthetic construct
  source 1..75: mol_type = other DNA
atcgttgaagaaagatgcaatgtaccatttattatcagcaagcaaaattcacatgaggtatataaagccacattt

SEQ ID NO: 845044 - DNA, 75 bp, synthetic construct
  source 1..75: mol_type = other DNA
acactggcgcggcatcatgtccagaagctggtaccagacctgacggattatcagtggtacaaaggatatgcagat

SEQ ID NO: 845045 - DNA, 75 bp, synthetic construct
  source 1..75: mol_type = other DNA
aggtacgggatttcatcatgtattatgtgaagtggtgaaatattccagtggtggggacactgtcatcaaagaaga

SEQ ID NO: 845046 - DNA, 75 bp, synthetic construct
  source 1..75: mol_type = other DNA
tctgctcaattacgcgatggcactggataacccgacattgaacaaattgagtgaagaaatccggttacagattat

SEQ ID NO: 845047 - DNA, 75 bp, synthetic construct
  source 1..75: mol_type = other DNA
ttgattatctccaaggtcaaaaagatggtcttgaatgggctgcgcagcttgcagaagcaaatcacccacaaactg

SEQ ID NO: 845048 - DNA, 75 bp, synthetic construct
  source 1..75: mol_type = other DNA
atgcgagcattttaccccaaaaaccttttatttataagggtcattgcgaattatctgatgcaaagttatgttatg

SEQ ID NO: 845049 - DNA, 75 bp, synthetic construct
  source 1..75: mol_type = other DNA
atggcttgtccgtacggcgcgccacagtacaatgctgaaaaagggcacatgacgaagtgcgatggttgttattcg

SEQ ID NO: 845050 - DNA, 75 bp, synthetic construct
  source 1..75: mol_type = other DNA
cgggcgctggatttcggccctatcgacgagctgcgtaaaaaacatggcgatctggcggccgttgcgccgttgccg

SEQ ID NO: 845051 - DNA, 75 bp, synthetic construct
  source 1..75: mol_type = other DNA
ctaggttatatgtttggtagggttgaggcatcgcatgcggccaacaaagaaagtgtaaaacccatcaacaaggat

SEQ ID NO: 845052 - DNA, 75 bp, synthetic construct
  source 1..75: mol_type = other DNA
gcaatgcaaatggtgtttgatgttaatacgcccggtgaatcgcctcagccatcttttgaaatggtccagcagtgg

SEQ ID NO: 845053 - DNA, 75 bp, synthetic construct
  source 1..75: mol_type = other DNA
tatgatgtgggcgcattatgctgcaggctttagtggttgtgttgtgatttatgaaacgcaggattttaatattaa

SEQ ID NO: 845054 - DNA, 75 bp, synthetic construct
  source 1..75: mol_type = other DNA
gggtttctgatgtcatagaaattgccgacggcagccgtcgccgtaaagccgcaatcctgacggaaagtgattatc

SEQ ID NO: 845055 - DNA, 75 bp, synthetic construct
  source 1..75: mol_type = other DNA
tgagagcgcttcacgcgtatggtcaggcaatgagcgcgatcaggaactacttaccgaagatgctctggatgatct

SEQ ID NO: 845056 - DNA, 75 bp, synthetic construct
  source 1..75: mol_type = other DNA
tcccaaattggtaacgattataggcctattagtgcatacgaaagaggaaagagatacttacgcaagctaaatgac

SEQ ID NO: 845057 - DNA, 75 bp, synthetic construct
  source 1..75: mol_type = other DNA
ttgtggtcgatgaagatgtgtgcattggctgccgctactgccatatggcttgcccgtatggcgcaccgcaatata

SEQ ID NO: 845058 - DNA, 75 bp, synthetic construct
  source 1..75: mol_type = other DNA
catcccttcttttctattgaccggtcagcagacaccggcgttcggtcgaagagtgtctggtgttatagaaattgc

SEQ ID NO: 845059 - DNA, 75 bp, synthetic construct
  source 1..75: mol_type = other DNA
aaattgcctaaatccgttgttgccctgtttgcacatcctggagaactgtctgcccggtcaggtgaagcccttcag

SEQ ID NO: 845060 - DNA, 75 bp, synthetic construct
  source 1..75: mol_type = other DNA
accgccgacggcgttttatcccgggaatggtgtcacgctaccaccacaggtgacgtaccagtctgtgccggtgcc

SEQ ID NO: 845061 - DNA, 75 bp, synthetic construct
  source 1..75: mol_type = other DNA
tttgctgacagcaccggaattgctgttgctggatgaaccgctggcgtcactggatattccgcgtaaacgcgaact

SEQ ID NO: 845062 - DNA, 75 bp, synthetic construct
  source 1..75: mol_type = other DNA
taatgaaacgctgcccgccaatggcatcactgctatctttggcgtctccggtgccggaaaaacttcgctgattaa

SEQ ID NO: 845063 - DNA, 75 bp, synthetic construct
  source 1..75: mol_type = other DNA
atggataaaccaaaggcgcactggtgcctgcttctcccctgctttctttcactttcggcctgtaccgttgacatc

SEQ ID NO: 845064 - DNA, 75 bp, synthetic construct
  source 1..75: mol_type = other DNA
agtccgtgggccagggatgaactggcgatcaaacctggcctgtggctgtatgcgcaaattaaaagtgtgtcgata

SEQ ID NO: 845065 - DNA, 75 bp, synthetic construct
  source 1..75: mol_type = other DNA
gtcgggtactaaatgatgccgaaaaaggtatctgcctgacgccggaaaagcgtcgcgttggctatgtttttcagg

SEQ ID NO: 845066 - DNA, 75 bp, synthetic construct
  source 1..75: mol_type = other DNA
tacaaccgccgcagcaaaccagcattcgtaacgtattgcgggcaaaagttgttaatagttatgacgacaacggcc

SEQ ID NO: 845067 - DNA, 75 bp, synthetic construct
  source 1..75: mol_type = other DNA
taccggaagcacctttcggagaggagatgcaacgattaagccgggtaatggtattgagcaagcaactcactggat

SEQ ID NO: 845068 - DNA, 75 bp, synthetic construct
  source 1..75: mol_type = other DNA
cgtgccgtcctgaataaagtgttcgaactgggcaatggtgatatcgcgcgcggtacagtgctggcttttgaagcg

SEQ ID NO: 845069 - DNA, 75 bp, synthetic construct
  source 1..75: mol_type = other DNA
tcgtgaatacattgcggagcagaacctgatagcagccattgaactggacgaacggattggttatttcggacgaac

SEQ ID NO: 845070 - DNA, 75 bp, synthetic construct
  source 1..75: mol_type = other DNA
tgtctctgcgtttaagccagaaacgcaattagagtatattgggcacttgaagccagggatttatattaaagcggg

SEQ ID NO: 845071 - DNA, 75 bp, synthetic construct
  source 1..75: mol_type = other DNA
cttggggtaacctcattcggtatccgcgtcttcagcacttcctcggtgagtcacgttgccatctatttaggtgat

SEQ ID NO: 845072 - DNA, 75 bp, synthetic construct
  source 1..75: mol_type = other DNA
tcttttaccgaacaatcaataactgaaataactgaatctgacctcaagcccggcgatttgctgttctcctcaagc

SEQ ID NO: 845073 - DNA, 75 bp, synthetic construct
  source 1..75: mol_type = other DNA
ctggtatcacctcgatatgaactatcgtggtctgatcaacatgctgattttctgcggctgtgtcggtcagagcgg

SEQ ID NO: 845074 - DNA, 75 bp, synthetic construct
  source 1..75: mol_type = other DNA
caccgtttatgatctgacgctggcaaactacggtctggaacgtggcctgaacgacgttaactgtgcaaccagcta

SEQ ID NO: 845075 - DNA, 75 bp, synthetic construct
  source 1..75: mol_type = other DNA
gccgaaaccgacgcatatgatcggtggctatgcccatctggcatacggctttaactactacggcaccgtaggttc

SEQ ID NO: 845076 - DNA, 75 bp, synthetic construct
  source 1..75: mol_type = other DNA
gaaaacggtaaaaaccacccgcgtaacttgttcatctggcgttccaacctgctgggttcttccggtaaaggtcat

SEQ ID NO: 845077 - DNA, 75 bp, synthetic construct
  source 1..75: mol_type = other DNA
gctgcgggtcgtatgctgcgcgccgccgatctggttgatgcgctgggtcaggaaaacaacccggaatggaaaacc

SEQ ID NO: 845078 - DNA, 75 bp, synthetic construct
  source 1..75: mol_type = other DNA
tccataactcggtcacccgtatcacgccgaaaccgacgcatatgatcggcggctatgcccatctggcatacggct

SEQ ID NO: 845079 - DNA, 75 bp, synthetic construct
  source 1..75: mol_type = other DNA
cagcaagtgactcaaaccatgaatgcaggcgtcgtttccagtggtgaagttacgtcgacggagccggtgcagtaa

SEQ ID NO: 845080 - DNA, 75 bp, synthetic construct
  source 1..75: mol_type = other DNA
tcgatctgtagaggcgtgcggcattttgcaagggttgggcaattgccatggtgaaagtgccacgaacagtcaaac

SEQ ID NO: 845081 - DNA, 75 bp, synthetic construct
  source 1..75: mol_type = other DNA
cagtactgtcaatttatagtcttttgctatcagcaaaaagcccagcgcaagtaatatttgagcataatgctgact

SEQ ID NO: 845082 - DNA, 75 bp, synthetic construct
  source 1..75: mol_type = other DNA
gtcgcctttaataccaatggcgaaatggttgcgccgaacggttctattggcttccgctggggcgagaagggcaaa

SEQ ID NO: 845083 - DNA, 75 bp, synthetic construct
  source 1..75: mol_type = other DNA
ttcgttcttcctggcaggaagtgaacgaactgatcgccgcatctaacgtttacaccatcaaaaactacggcccgg

SEQ ID NO: 845084 - DNA, 75 bp, synthetic construct
  source 1..75: mol_type = other DNA
gtgcccgtatatgtttctatcctggaaatatgaagcagttgaacaataaatttaatgatttagtattcagggttc

SEQ ID NO: 845085 - DNA, 75 bp, synthetic construct
  source 1..75: mol_type = other DNA
gctggaaaatctacgttaaaaatggtctggtgacctgggaaaaccaccagactgactacccgcgcactcgcccgg

SEQ ID NO: 845086 - DNA, 75 bp, synthetic construct
  source 1..75: mol_type = other DNA
aatgcggctatagcagcacgtcgtactttattaatactttccgccagtattatggcataacaccgcatcagtttg

SEQ ID NO: 845087 - DNA, 75 bp, synthetic construct
  source 1..75: mol_type = other DNA
ctgattccattcctttttaatagtattagtaccattgcaggaaaagttgaacgcattattagctttgatattgcc

SEQ ID NO: 845088 - DNA, 75 bp, synthetic construct
  source 1..75: mol_type = other DNA
cagcgccaccgatgccgctcgtaacggcgatattcgatagttttgctaaagaagatgttatctccacaacattaa

SEQ ID NO: 845089 - DNA, 75 bp, synthetic construct
  source 1..75: mol_type = other DNA
caacagtggggatggcctgaattaccgttgactggcgacggcaatattcagcttaccgccagtggcgatattcag

SEQ ID NO: 845090 - DNA, 75 bp, synthetic construct
  source 1..75: mol_type = other DNA
tgccgcaaagcagcaagtgactcaaaccatgaatgcgggcgtagtttccagtggtgaagttacgtcgacggagtc

SEQ ID NO: 845091 - DNA, 75 bp, synthetic construct
  source 1..75: mol_type = other DNA
cccggttggttaaacagcctgcaactgaagagatttagcgccagccgcaatctgatcattgatatcgaccctgac

SEQ ID NO: 845092 - DNA, 75 bp, synthetic construct
  source 1..75: mol_type = other DNA
acctctatcggcccgctgatggagaaaatcggtaacggtggtaaagggattgcctggaacacccagagcgagatg

SEQ ID NO: 845093 - DNA, 75 bp, synthetic construct
  source 1..75: mol_type = other DNA
gctggaaaatctacgttaaaaacggtctggtgacctgggaaaaccaccagactgactatccgcgcactcgcccgg

SEQ ID NO: 845094 - DNA, 75 bp, synthetic construct
  source 1..75: mol_type = other DNA
gctggaaaatctacgttaaaaacggtctggtgacctgggaaaaccatcagactgactacccgcgcactcgcccgg

SEQ ID NO: 845095 - DNA, 75 bp, synthetic construct
  source 1..75: mol_type = other DNA
aacatcgtacactgtggcattttattccggggttagccctgagtgcagttatcaccggggtcgccctgtggggtg

SEQ ID NO: 845096 - DNA, 75 bp, synthetic construct
  source 1..75: mol_type = other DNA
ttatcaaattagatattgaaaatttttttgatatgacgtctgaacgaaatgtatatgatcagttcaggttaatag

SEQ ID NO: 845097 - DNA, 75 bp, synthetic construct
  source 1..75: mol_type = other DNA
gcatcgggtgcccgctatctctccctgattggcggtacttgcttaagcttctatgactggtactgcgacctgcct

SEQ ID NO: 845098 - DNA, 75 bp, synthetic construct
  source 1..75: mol_type = other DNA
gaaaattgaatatcttagagataacatggaaataagaaaaaaattcggtctacgctcagccgaaattgtaaaaga

SEQ ID NO: 845099 - DNA, 75 bp, synthetic construct
  source 1..75: mol_type = other DNA
atggcaagtaaagacctacatttgaatctgaaaggtgaatactttcacgccatatggactggaaagaaggtggag

SEQ ID NO: 845100 - DNA, 75 bp, synthetic construct
  source 1..75: mol_type = other DNA
cattaaacacagagattcatatattactggcgttagtaactgacaaaattcagcgtaaatacccacctgtcacac

SEQ ID NO: 845101 - DNA, 75 bp, synthetic construct
  source 1..75: mol_type = other DNA
tatcgtcgcatgcgtattcccattgattgctatgtttttgccagatgatgttattgttgtgggccagccaattga

SEQ ID NO: 845102 - DNA, 75 bp, synthetic construct
  source 1..75: mol_type = other DNA
tccataccgaagaggtgatgctggacaaaaattaccggaaaaacgccggtggcggcctatgtttccccggttgtt

SEQ ID NO: 845103 - DNA, 75 bp, synthetic construct
  source 1..75: mol_type = other DNA
gccacatttgcggctggtgggcaatgtgatcagtgtgctggcttgctggttagctgtcagcctttgggttctatg

SEQ ID NO: 845104 - DNA, 75 bp, synthetic construct
  source 1..75: mol_type = other DNA
gtggcacagaaaagggggccagctcccggacgagaaatgtgatgccctgccctgccactgcgggcagaaacactg

SEQ ID NO: 845105 - DNA, 75 bp, synthetic construct
  source 1..75: mol_type = other DNA
acattgaatttttcaattaaccaaaaatgtgttagtctttttatatggttgcttttattcccactatatggtttc

SEQ ID NO: 845106 - DNA, 75 bp, synthetic construct
  source 1..75: mol_type = other DNA
aaaaaacgaacagaaaattttcttacatccattgagttcgattctgagccaagtatcatcgtggatattggttgg

SEQ ID NO: 845107 - DNA, 75 bp, synthetic construct
  source 1..75: mol_type = other DNA
taaggatgtgtataaaaaagtaaaagcactggagagtgatttttttaatcgaaaagaagaatattttattgaaga

SEQ ID NO: 845108 - DNA, 75 bp, synthetic construct
  source 1..75: mol_type = other DNA
acccggcttcatggcgcgcctgtttataagatttgtgggcgttgcaatggaaaccggtttagccgtttaccaacc

SEQ ID NO: 845109 - DNA, 75 bp, synthetic construct
  source 1..75: mol_type = other DNA
tcgagtggtttaacgattacggatgtgatggctgcgcaggggatggtgcagtcgaaagcaccgcttgggtttgcc

SEQ ID NO: 845110 - DNA, 75 bp, synthetic construct
  source 1..75: mol_type = other DNA
gagaaggcaaaagtcagagcctggctctgctgatgatcgacaacgacggcaatgttatggattgctggcataacg

SEQ ID NO: 845111 - DNA, 75 bp, synthetic construct
  source 1..75: mol_type = other DNA
ctgttagttggctattcgtttatgacggatatcagtccacttgtaggcgctgccttcacgctgattgcttccctc

SEQ ID NO: 845112 - DNA, 75 bp, synthetic construct
  source 1..75: mol_type = other DNA
cgtcgttcagcacgatggggctggagcaactggctctgttgcaagcccacggagttgatctttcgcgcgtcaccg

SEQ ID NO: 845113 - DNA, 75 bp, synthetic construct
  source 1..75: mol_type = other DNA
accggacggcccatttccactcatacatcttttagcactatggggttggaacaactggctctactgcaatcccac

SEQ ID NO: 845114 - DNA, 75 bp, synthetic construct
  source 1..75: mol_type = other DNA
tgccgccgcgctggcgcataaccagaccggacgcccgatctccacgcatacgtcgttcagcacgatggggctgga

SEQ ID NO: 845115 - DNA, 75 bp, synthetic construct
  source 1..75: mol_type = other DNA
ggatgaagataaacaaccaggcgaaccgatcccggataatcagccagcccttctgacagaagatcaaaaagagtt

SEQ ID NO: 845116 - DNA, 75 bp, synthetic construct
  source 1..75: mol_type = other DNA
gttcaccaacttggatactgtttggtgacgaggataaaacaccagatccaccagttgcactcaacagcgccttag

SEQ ID NO: 845117 - DNA, 75 bp, synthetic construct
  source 1..75: mol_type = other DNA
acaccattggcaagaacagttactacccggatgagaagcgtattgcgatgcttcacgcgctccgcgaccgtggat

SEQ ID NO: 845118 - DNA, 75 bp, synthetic construct
  source 1..75: mol_type = other DNA
ctggattcacgtcaaaaaagattgttagagttatttgattcattacccgagtcagaaaaagaaaagcaactaatt

SEQ ID NO: 845119 - DNA, 75 bp, synthetic construct
  source 1..75: mol_type = other DNA
ttatgccaaaccgcacgccgtggtatctggtgttcctggcaggcgcgggctatgcagcgatttactacaccgtat

SEQ ID NO: 845120 - DNA, 75 bp, synthetic construct
  source 1..75: mol_type = other DNA
cggacgcacaggctgcgtttacgaaacagcaggggcgagcctctcttgttggcgctggtttgggtgcggtaggtg

SEQ ID NO: 845121 - DNA, 75 bp, synthetic construct
  source 1..75: mol_type = other DNA
accggatgtccgatctccacgcatacctcttttagcacgatggggctggaacaactggcgctactgcaagcccac

SEQ ID NO: 845122 - DNA, 75 bp, synthetic construct
  source 1..75: mol_type = other DNA
gcatcgcctggctgaggtattgcaatgttcaccaacttggatactgtttggtgacgaggataaaacaccagatcc

SEQ ID NO: 845123 - DNA, 75 bp, synthetic construct
  source 1..75: mol_type = other DNA
tgtattttcggtggaaggtggtaaatcaattcgtgcttatcatgaaattactactaccgacgaacaaggggtaat

SEQ ID NO: 845124 - DNA, 75 bp, synthetic construct
  source 1..75: mol_type = other DNA
cgcgatgaattcagaatgaagccagcccccggtgctgagccggttaagtggtataaaaacacttatggtggcagg

SEQ ID NO: 845125 - DNA, 75 bp, synthetic construct
  source 1..75: mol_type = other DNA
ttgacggcagcgatgcgttaatggggccgaaggttcaggccaatgatattaagcaggccgcggagcagtttgagg

SEQ ID NO: 845126 - DNA, 75 bp, synthetic construct
  source 1..75: mol_type = other DNA
cccggaaaaggcataagcaggagaacaacaaaacagacagtaatcagagcagcagaaaaaagaagaacagtagct

SEQ ID NO: 845127 - DNA, 75 bp, synthetic construct
  source 1..75: mol_type = other DNA
ctcgcagaaaagaatgggttagtgggcagcagtacagctacgtacttctcgaaaacgtagaagctatggttgatg

SEQ ID NO: 845128 - DNA, 75 bp, synthetic construct
  source 1..75: mol_type = other DNA
gcagcaaagctgctgcatacgctacaggttggaacgcttgccgcgctgccatgtttaaaggaaaaggaggtgcgt

SEQ ID NO: 845129 - DNA, 75 bp, synthetic construct
  source 1..75: mol_type = other DNA
tggtaatatgtgctattttctctacggatagtgactttagattatttttcagaaaaattatatatgtgattatga

SEQ ID NO: 845130 - DNA, 75 bp, synthetic construct
  source 1..75: mol_type = other DNA
cgggggcttgatgtgctttaccgtgccggagagataaaagaccgtcaggatgtgattcaggcactcacagatgtg

SEQ ID NO: 845131 - DNA, 75 bp, synthetic construct
  source 1..75: mol_type = other DNA
tttaatcaggaacgctatcaacgaccatacaacagccctgaaagaactgctggagaggtatcagaaaacgaccgt

SEQ ID NO: 845132 - DNA, 75 bp, synthetic construct
  source 1..75: mol_type = other DNA
cggctgatacaggagcgcgaacatgtgttatccctggaacgggagcgtcagccggaaatacaggaacgcacgctg

SEQ ID NO: 845133 - DNA, 75 bp, synthetic construct
  source 1..75: mol_type = other DNA
tggatgatactggcggggaaatagcacatgacggagctggaaaaacagttgctgagcgcattagagcagctacag

SEQ ID NO: 845134 - DNA, 75 bp, synthetic construct
  source 1..75: mol_type = other DNA
agaacgcagcgctgtcgaagctgaacgcgaagacctggggcgtgacgtacctggaagacagcaacggacgttttc

SEQ ID NO: 845135 - DNA, 75 bp, synthetic construct
  source 1..75: mol_type = other DNA
gatcgcttgagtcggttatttatcgcgaacaacagctaagggatgaacaggagcgtgcccggtacagacatgagg

SEQ ID NO: 845136 - DNA, 75 bp, synthetic construct
  source 1..75: mol_type = other DNA
cagcgtgtctaccagaccctgcgcaccaaagcattaagcgtgttgcccgccgatttgaatttgcgcgaccaggtt

SEQ ID NO: 845137 - DNA, 75 bp, synthetic construct
  source 1..75: mol_type = other DNA
cccgcacattgggcgccagcgtcgaggaactcgacaatatcaccgaaaatgtgcagccacacgccatcagcagca

SEQ ID NO: 845138 - DNA, 75 bp, synthetic construct
  source 1..75: mol_type = other DNA
ccgggacgcgtatcgtatcgcgttgggtacaacctactattatgataaaaactggaccttccgtaccggtatcgc

SEQ ID NO: 845139 - DNA, 75 bp, synthetic construct
  source 1..75: mol_type = other DNA
aaagttccattaacccaaatctgaacaacattttgggtagcatgggtttaccgtatggcacaatgggtgcaaccc

SEQ ID NO: 845140 - DNA, 75 bp, synthetic construct
  source 1..75: mol_type = other DNA
aataatctgacgctacgcacccgcattaagcggttggctcgtaaaacaatctgcttctcacgctcagttgagatc

SEQ ID NO: 845141 - DNA, 75 bp, synthetic construct
  source 1..75: mol_type = other DNA
tcttgagcatgaacgcaggatcaacgccgtaaatgcccaggtagccgaggtatcggcacaagtgtccagggtcac

SEQ ID NO: 845142 - DNA, 75 bp, synthetic construct
  source 1..75: mol_type = other DNA
gcaactcgacagcattaccgaaaatgtcacgccgcacgccatcacgagtatgtgcacagtgtttgctgaatcaga

SEQ ID NO: 845143 - DNA, 75 bp, synthetic construct
  source 1..75: mol_type = other DNA
ctcttcccggaagtcctgctggctgagccgaacctggcgggtgaaaacagcgtctggctgaacagctcccggcgc

SEQ ID NO: 845144 - DNA, 75 bp, synthetic construct
  source 1..75: mol_type = other DNA
cagcgagctgagcaccttctggcagacctggggacaacagatgaacctggccctgtcagacctgatgctcgtgca

SEQ ID NO: 845145 - DNA, 75 bp, synthetic construct
  source 1..75: mol_type = other DNA
tggcatggatttttctgctggtgtggatctggtggcagggtccaaaatggacgctctatgagcagcactggctgg

SEQ ID NO: 845146 - DNA, 75 bp, synthetic construct
  source 1..75: mol_type = other DNA
gtgtttgtgaaagatctgaacgacttcgcaaccgtaaacgccacttacgaagcgttcttcaccgagcacaatgcc

SEQ ID NO: 845147 - DNA, 75 bp, synthetic construct
  source 1..75: mol_type = other DNA
gcggcggagcaccgcgcagtatcgcgttcagtggaccgtgggcgcagttccgcctgttcggcgcgggccagttga

SEQ ID NO: 845148 - DNA, 75 bp, synthetic construct
  source 1..75: mol_type = other DNA
cagaactggcagtctggcgttaacgtactggcacaagctaaagcctttatggacgtaccaccaccgcagggaacg

SEQ ID NO: 845149 - DNA, 75 bp, synthetic construct
  source 1..75: mol_type = other DNA
gcctccagccgtactacgaccgcgcagacaggcctagaattgatgcctggcagacgctggtgaatcaccattacg

SEQ ID NO: 845150 - DNA, 75 bp, synthetic construct
  source 1..75: mol_type = other DNA
agccagggtcagcgttatctcgagctggcagagcagcgcgcggctaacgagtcattcgcctatggctggattcgg

SEQ ID NO: 845151 - DNA, 75 bp, synthetic construct
  source 1..75: mol_type = other DNA
cgtacaggtgaaatggttccagcgctggctgaacgtattcaacaaccagcagcagttttatcccgacctgatcgc

SEQ ID NO: 845152 - DNA, 75 bp, synthetic construct
  source 1..75: mol_type = other DNA
cacacgcaacggtatacggaacggggccgggcgaagccatacgccgcgcagccgaagggctggaagagctgggaa

SEQ ID NO: 845153 - DNA, 75 bp, synthetic construct
  source 1..75: mol_type = other DNA
tgaattatcgcggtcaggacggcgaacgggtgatgctgaaggctctgaactgtacacagggcgaccgctatctga

SEQ ID NO: 845154 - DNA, 75 bp, synthetic construct
  source 1..75: mol_type = other DNA
atgaagtcctgggcaaagaaggcggttacgtcaatcaccctgacgataagggcggtccgaccaaatggggcatta

SEQ ID NO: 845155 - DNA, 75 bp, synthetic construct
  source 1..75: mol_type = other DNA
ggaagctgtatcccgatttggatgcagatggacgaatcggtccacgtaccattaatgcgctgcgtgcttatcttg

SEQ ID NO: 845156 - DNA, 75 bp, synthetic construct
  source 1..75: mol_type = other DNA
acacgccaggcggcggcactggcccgtaaagctggtgtcggtaaactaatcattacccatgttagttcgcgctat

SEQ ID NO: 845157 - DNA, 75 bp, synthetic construct
  source 1..75: mol_type = other DNA
ttgctatgcagtcgttccatgtcaggcattgtgcaaccattaacaatttatggtccgaaaggtatccgtgaattt

SEQ ID NO: 845158 - DNA, 75 bp, synthetic construct
  source 1..75: mol_type = other DNA
cccggtgttatcaggaggttactctggcagacaaacgcaacaagatgctcacgatgtgggtgacggaagacgaac

SEQ ID NO: 845159 - DNA, 75 bp, synthetic construct
  source 1..75: mol_type = other DNA
agccaattaaagcaccacaaatgctgttcggctctgacaatattaatgattttggaaacagagttaagagctgca

SEQ ID NO: 845160 - DNA, 75 bp, synthetic construct
  source 1..75: mol_type = other DNA
tccagtagagcttaaaaactatattgagcttctacgctaccctgaaatagagaaaggcttatcaatcaataaaaa

SEQ ID NO: 845161 - DNA, 75 bp, synthetic construct
  source 1..75: mol_type = other DNA
cccgaaagcatcagctccgattatctaccaatgcccctctctgaataagatgttagagatttacctcacgcataa

SEQ ID NO: 845162 - DNA, 75 bp, synthetic construct
  source 1..75: mol_type = other DNA
ataccagggcgatatgcgtgatctgacgcgcggacaggcgctggaaatactcgaggcggactactggtatggacc

SEQ ID NO: 845163 - DNA, 75 bp, synthetic construct
  source 1..75: mol_type = other DNA
gctggaaaaacagttgctgagcgcattagagcagctacagcaggactactcgaaaaggctggacgagtgggagaa

SEQ ID NO: 845164 - DNA, 75 bp, synthetic construct
  source 1..75: mol_type = other DNA
gtggcgaacttgagcaggcagttacagcgtttgagccagtagtgcagcggcatgaaatggcggtggccgccgaac

SEQ ID NO: 845165 - DNA, 75 bp, synthetic construct
  source 1..75: mol_type = other DNA
gagaatcagcgccgccatcctcgaccacgaccggaagctgtcctcagccatgagccagcgcacgaaaggcatggt

SEQ ID NO: 845166 - DNA, 75 bp, synthetic construct
  source 1..75: mol_type = other DNA
acgttttctggtgttgcccgaggggatgaaagccgaaacgaactggacgatggaaaacggggaacagaatgccgt

SEQ ID NO: 845167 - DNA, 75 bp, synthetic construct
  source 1..75: mol_type = other DNA
gctgaacgagcgggtcatgcagttgagtcagcaggtgcagcacttgagcgagcagacagaacgcttgagccagtt

SEQ ID NO: 845168 - DNA, 75 bp, synthetic construct
  source 1..75: mol_type = other DNA
acagacgcttgctgagagcattaatcgtgggctggagtctctttatcgtgccggagagataaaaggccgtcagga

SEQ ID NO: 845169 - DNA, 75 bp, synthetic construct
  source 1..75: mol_type = other DNA
attgtgtttaaagatggctccaacggacataaatcgctgtttatggcttatgcgaccccgaaagcattttatgaa

SEQ ID NO: 845170 - DNA, 75 bp, synthetic construct
  source 1..75: mol_type = other DNA
atgaagttgaaagatgaaatttttgacgaagttctgggaaaagagggcggctacgtcaatcatccggacgataaa

SEQ ID NO: 845171 - DNA, 75 bp, synthetic construct
  source 1..75: mol_type = other DNA
gtcagttgcaaccaaaatgctgcaacgctggctgaacgtattcaatcagcaaggtaagttgtacccggatatgga

SEQ ID NO: 845172 - DNA, 75 bp, synthetic construct
  source 1..75: mol_type = other DNA
gtgaagcgcggtttgcgaaacggcgttgcgccttacatcccggcggccttttgccgggatgcagggagcgcaggt

SEQ ID NO: 845173 - DNA, 75 bp, synthetic construct
  source 1..75: mol_type = other DNA
gtgaaattcaaaggcaatgcgtcagtattaccgccagataacacgctggcaacggttacttttaaagttgtcgaa

SEQ ID NO: 845174 - DNA, 75 bp, synthetic construct
  source 1..75: mol_type = other DNA
aatgcggcggcaaaagtggaatacgacggactttcgaacagccaaccgctgcgcgtcgatgccaataaccatacg

SEQ ID NO: 845175 - DNA, 75 bp, synthetic construct
  source 1..75: mol_type = other DNA
atgaggagtaacgctacatggggactgcaacgtgatatcacaccgcgtctgggagcccgtctggtgcaggagggc

SEQ ID NO: 845176 - DNA, 75 bp, synthetic construct
  source 1..75: mol_type = other DNA
atgagtaacatcacatggggcctgcagcgggacattacgccacgcctgggagcccgtctggtgcaggaggggaac

SEQ ID NO: 845177 - DNA, 75 bp, synthetic construct
  source 1..75: mol_type = other DNA
cggctgcactatctggctgaccgggcaagtatcaccggtaagtttagtgatgccgaatgcctgaagttggatgtc

SEQ ID NO: 845178 - DNA, 75 bp, synthetic construct
  source 1..75: mol_type = other DNA
cctgcgaagccgacaccttcggctcctgtggttacgtttatctggctgtttatccgacgcccgaaacgaaaaagt

SEQ ID NO: 845179 - DNA, 75 bp, synthetic construct
  source 1..75: mol_type = other DNA
gtcaccctgtaccacaacggtttcacctgcgaagccgatactcttggcagttgcggctacgtatacatcgccatt

SEQ ID NO: 845180 - DNA, 75 bp, synthetic construct
  source 1..75: mol_type = other DNA
gtcactctgtaccacaacggttttacctgcgaagccgatacctttggcagttgcggctacgtatacatcgccatt

SEQ ID NO: 845181 - DNA, 75 bp, synthetic construct
  source 1..75: mol_type = other DNA
tcctggctgaaatggcgcaaatgcatcttgagcatgaacgccggatcaacgccgtaaatgcccaggtagccgagg

SEQ ID NO: 845182 - DNA, 75 bp, synthetic construct
  source 1..75: mol_type = other DNA
gctgaatattggtggcgatagtcaggtctggacaactgcgcaatttatttcgtggctggagagtcagggggcatt

SEQ ID NO: 845183 - DNA, 75 bp, synthetic construct
  source 1..75: mol_type = other DNA
gttcatggtcatacggcaataataaaattattaccgatactggctgtggaactattcatcttgcaggttgcgtta

SEQ ID NO: 845184 - DNA, 75 bp, synthetic construct
  source 1..75: mol_type = other DNA
cggctcaaactctgccgataacattggtggcatatattacagaccggtgcagaaatacattaacgggacatggta

SEQ ID NO: 845185 - DNA, 75 bp, synthetic construct
  source 1..75: mol_type = other DNA
caatgaccatacgcattaccacaccgagtacatccagcggtgaaggcatccctaatgctcaatttacttatatta

SEQ ID NO: 845186 - DNA, 75 bp, synthetic construct
  source 1..75: mol_type = other DNA
cagaatgcctatatgtctacggccttatgttcaggcaccagaggcggcaaaaaatatctcagaaagtttcgtggt

SEQ ID NO: 845187 - DNA, 75 bp, synthetic construct
  source 1..75: mol_type = other DNA
aacggcaagctgattgcttacccgatcgctgtcgaagcgttatcactgatttataacaaagatctgctaccgaac

SEQ ID NO: 845188 - DNA, 75 bp, synthetic construct
  source 1..75: mol_type = other DNA
gagttctggttggcgagctggatgatgagcagatggctgcattgtccagattgggtaacgattatcgcccaacaa

SEQ ID NO: 845189 - DNA, 75 bp, synthetic construct
  source 1..75: mol_type = other DNA
tatcccttcttttctactgacaggtcagcagacaccagcattcggtcgaagagtgtctggggtcatagaaattgc

SEQ ID NO: 845190 - DNA, 75 bp, synthetic construct
  source 1..75: mol_type = other DNA
tacaaatattatctgactctgttctagttggcgacgaggaaaaaacaaaagacgagaaaaaatatggggaaggga

SEQ ID NO: 845191 - DNA, 75 bp, synthetic construct
  source 1..75: mol_type = other DNA
cactgctgacttcaatactgaaaaaaacgcccactgcccgcgaaaacctgagctcacgccatcagtatgctccgg

SEQ ID NO: 845192 - DNA, 75 bp, synthetic construct
  source 1..75: mol_type = other DNA
aagccgtcgccgtaaggccgcaatcctgacagaaagagattatcgtattctggttggtgaactggatgatgagca

SEQ ID NO: 845193 - DNA, 75 bp, synthetic construct
  source 1..75: mol_type = other DNA
tatcccatcttttttactgaccggtcagcagactccagcttttggccgccgggtttctgatgtcatagaaattgc

SEQ ID NO: 845194 - DNA, 75 bp, synthetic construct
  source 1..75: mol_type = other DNA
aacctgcaagaaccgtacttcacctggccactgattgccgccgacggtggttatgcgttcaagtatgaaaacgat

SEQ ID NO: 845195 - DNA, 75 bp, synthetic construct
  source 1..75: mol_type = other DNA
ttataacaaagacctgctgccgaatccgccaaaaacctgggaagaaatcccggcactggataaagaactgaaagc

SEQ ID NO: 845196 - DNA, 75 bp, synthetic construct
  source 1..75: mol_type = other DNA
atgaaaataaaaacaggtgcacgcatcctcgcattatccgcattatccgcattaacgacgatgatgttttccgcc

SEQ ID NO: 845197 - DNA, 75 bp, synthetic construct
  source 1..75: mol_type = other DNA
gtcagctcgtgctggagattctttgtttaaggtctacaaaaaaaacatggctgccatgagcaatgctgctcatca

SEQ ID NO: 845198 - DNA, 75 bp, synthetic construct
  source 1..75: mol_type = other DNA
tacgccattggctacagttgagaataatcaatcacttagccctaataaatacacaaaagcctatgtcttcgaagg

SEQ ID NO: 845199 - DNA, 75 bp, synthetic construct
  source 1..75: mol_type = other DNA
tgacgggggttatgcgttcaagtatgaaaacggcaagtacgacattaaagacgtgggcgtggataacgctggcgc

SEQ ID NO: 845200 - DNA, 75 bp, synthetic construct
  source 1..75: mol_type = other DNA
gcaaacaggaagcactgtcggaaatgataaagctgttggctggaactggaatagcggggtctataacgcaaatat

SEQ ID NO: 845201 - DNA, 75 bp, synthetic construct
  source 1..75: mol_type = other DNA
cctatacggattaatgcaagacgatttaggtataccctgggaactcgtttagcaaaggaaggtgcatcagttgaa

SEQ ID NO: 845202 - DNA, 75 bp, synthetic construct
  source 1..75: mol_type = other DNA
cgaccgtctacgcaatctcccagaatgccgtgccttgcttgagcctctggatcatcagggcttattggctggagg

SEQ ID NO: 845203 - DNA, 75 bp, synthetic construct
  source 1..75: mol_type = other DNA
gcaacgattgaagtgggccattggttcatcctggatggtcaaacggcttatgtggctgaggaaggtgaagagttc

SEQ ID NO: 845204 - DNA, 75 bp, synthetic construct
  source 1..75: mol_type = other DNA
gaccctaccggatgaactggtggaagccgcgcggatcgacggcgcgtcgccaatgcgcttcttttgcgacatcgt

SEQ ID NO: 845205 - DNA, 75 bp, synthetic construct
  source 1..75: mol_type = other DNA
ggcacgcatctgctggaaaacatccacaacatctgggtaaacggggtaggcacaaatagtgcgccgttctggcgg

SEQ ID NO: 845206 - DNA, 75 bp, synthetic construct
  source 1..75: mol_type = other DNA
atggcggcgatgttgttaacgcttatccctccggtggtgattgttttagtgatgcagcgtgcctttgtgcgcggc

SEQ ID NO: 845207 - DNA, 75 bp, synthetic construct
  source 1..75: mol_type = other DNA
aagaataagcatctgaccggcaaaatattcacccaacgcattgagcgtaataatctgacgctacgcacccgcatt

SEQ ID NO: 845208 - DNA, 75 bp, synthetic construct
  source 1..75: mol_type = other DNA
atgatcatcacctccggtcagatcccggtaaacccaaaaactggcgaagtaccggcagacgtagctgcacaggcg

SEQ ID NO: 845209 - DNA, 75 bp, synthetic construct
  source 1..75: mol_type = other DNA
tgccgatgaaacctgtcgtgaattgctggcactgctcacgccctttaacatcggaatgctgaccactgatgactg

SEQ ID NO: 845210 - DNA, 75 bp, synthetic construct
  source 1..75: mol_type = other DNA
ttgtcatggttattctcgttaactccgtaccaaacgtggttgcaggtttgatccctggcggtggtgctgctgcga

SEQ ID NO: 845211 - DNA, 75 bp, synthetic construct
  source 1..75: mol_type = other DNA
gatcatgcgtcttggttattctggacactggttgttatctcaatggtctggacgttcggcatgatggcattgcgt

SEQ ID NO: 845212 - DNA, 75 bp, synthetic construct
  source 1..75: mol_type = other DNA
ttgggccgttggtggagatataagtggatcacttttcatccgtcgttgacacaacactggctctggtatgcgtac

SEQ ID NO: 845213 - DNA, 75 bp, synthetic construct
  source 1..75: mol_type = other DNA
tgatctggattggctataagactctgtggaaaggcgaaagcctgtcgcagtgcggttacatcatcattggcggca

SEQ ID NO: 845214 - DNA, 75 bp, synthetic construct
  source 1..75: mol_type = other DNA
gcatccgtcagcctgctggccctgctgaatcagaaagacgagcaaatcgccagcctgtcagccagtgcctatgac

SEQ ID NO: 845215 - DNA, 75 bp, synthetic construct
  source 1..75: mol_type = other DNA
cagcctgtcagcaaatgcctatgacccgacgaagcatatccctctgacggcatatgaagaacttcagggacgtta

SEQ ID NO: 845216 - DNA, 75 bp, synthetic construct
  source 1..75: mol_type = other DNA
gcatcgccgacctgtcagcgaaactcgacacgcctgacccggctaagtgggtttcggtggaggtcatgcattcag

SEQ ID NO: 845217 - DNA, 75 bp, synthetic construct
  source 1..75: mol_type = other DNA
aaaaaaaactttgataagatcaacgtaaaccttctatccaaagccacatcatttgctttgaaaaaaggcattcca

SEQ ID NO: 845218 - DNA, 75 bp, synthetic construct
  source 1..75: mol_type = other DNA
gaaacactgtgatcgtaaagctggaacattacctcatgaaattggtacgacaacggtcataaaagcaggcagtac

SEQ ID NO: 845219 - DNA, 75 bp, synthetic construct
  source 1..75: mol_type = other DNA
aaagattacgccggtcgcgatatcaacggctttaagtcctggctggagaacgcaccaaaacttgttgcgctcagt

SEQ ID NO: 845220 - DNA, 75 bp, synthetic construct
  source 1..75: mol_type = other DNA
gttctggtgaatttagaggatcaaatcccaaaggtcatttctaaatcaaccagttggatgatactcgggcaacta

SEQ ID NO: 845221 - DNA, 75 bp, synthetic construct
  source 1..75: mol_type = other DNA
gcattcagaacatccatttgccaacaacctactttttcctcgcaaaatcacgtctcttgtaattgaatctgctgt

SEQ ID NO: 845222 - DNA, 75 bp, synthetic construct
  source 1..75: mol_type = other DNA
catggttgtgcggccatcaccattaccgtagctgtagtctgggtcggttacaaaacactcctgaacgggcaaagc

SEQ ID NO: 845223 - DNA, 75 bp, synthetic construct
  source 1..75: mol_type = other DNA
cgcctgcaggccttccgtcacacccgtcacagggtgctgaagatgatgcgattgacccggccatctgctccatga

SEQ ID NO: 845224 - DNA, 75 bp, synthetic construct
  source 1..75: mol_type = other DNA
tcacccaggaaattaacaccgctactcccggtgtcattcagctctttccggctggtgaattccgcgccagtgatg

SEQ ID NO: 845225 - DNA, 75 bp, synthetic construct
  source 1..75: mol_type = other DNA
tactcctaccatggtgacactaagcggcaaaccgcagttatttacggggtggctgagcccggaaaacctggtgac

SEQ ID NO: 845226 - DNA, 75 bp, synthetic construct
  source 1..75: mol_type = other DNA
gaagccagatgatacttaccgaatatacgttcgaccacaaaaccaataaatcacgttcagtatatttgcttcggc

SEQ ID NO: 845227 - DNA, 75 bp, synthetic construct
  source 1..75: mol_type = other DNA
aaatccacggtgatagtcgtggatcattgatatctttagagtatgccattaatatcccttttgatataaaaagag

SEQ ID NO: 845228 - DNA, 75 bp, synthetic construct
  source 1..75: mol_type = other DNA
gcagatgacttttatgatgaaagtgattacattcgtaattatgctgatttcatccgggagatgactaatgcgtaa

SEQ ID NO: 845229 - DNA, 75 bp, synthetic construct
  source 1..75: mol_type = other DNA
cggcgaaagcgtttgttgaatcggtacgggcagaacaccccgatgcccgccaccattgcgtggcgtgggtggcgg

SEQ ID NO: 845230 - DNA, 75 bp, synthetic construct
  source 1..75: mol_type = other DNA
aggtggctcgtcatcagggcgatgtcacccatttcctgccagagaatgtccatcaggcgctgatggcgaaattag

SEQ ID NO: 845231 - DNA, 75 bp, synthetic construct
  source 1..75: mol_type = other DNA
aagattttttctggtcattaatagagttatcgccactccgcagcaaaaaagttgtctgcgcgttaaaggattatt

SEQ ID NO: 845232 - DNA, 75 bp, synthetic construct
  source 1..75: mol_type = other DNA
cataaacagttaaagcaaattgcaatagccataaccggttcatgtgatttcacgatggataatggaaaggagaga

SEQ ID NO: 845233 - DNA, 75 bp, synthetic construct
  source 1..75: mol_type = other DNA
ctgacaagggcatgactacaaatgaagttccggcctattacaaacaccttaaagatgataatgcacctttctgta

SEQ ID NO: 845234 - DNA, 75 bp, synthetic construct
  source 1..75: mol_type = other DNA
ctgacactgcatcaggatccggtgtatgtcacccgagctgatgcccctgttgcaggaaaagtcgccctgctgtcg

SEQ ID NO: 845235 - DNA, 75 bp, synthetic construct
  source 1..75: mol_type = other DNA
gacactccctctcttcagctatggatacacctgatttaccggagggtctgacaggagaggcgctggactggctga

SEQ ID NO: 845236 - DNA, 75 bp, synthetic construct
  source 1..75: mol_type = other DNA
ttcaaacgcatggtgacgatagaggttcgcttgttgctttagaagaggggtataatataccatttcaaattaaac

SEQ ID NO: 845237 - DNA, 75 bp, synthetic construct
  source 1..75: mol_type = other DNA
gcgcggatgtgtagagcgcgttcaaaatctacgccgcgactttgaagctcacatcagtcattcacaaaaagcggc

SEQ ID NO: 845238 - DNA, 75 bp, synthetic construct
  source 1..75: mol_type = other DNA
gcaaaaaaagctgttgaagatgaagagcttatagttataagcggttttctcgagtctcgtcctgataacaatcca

SEQ ID NO: 845239 - DNA, 75 bp, synthetic construct
  source 1..75: mol_type = other DNA
gacgaaaactccggtgaattttttgttcaggtctggggaaatggagccaacttcgacaacgtgattttacgccgt

SEQ ID NO: 845240 - DNA, 75 bp, synthetic construct
  source 1..75: mol_type = other DNA
gacagcagactcaccgttaaaaatatcagcacagggaaaactgctgcgattgcaggtgtcaacgggtgcacattt

SEQ ID NO: 845241 - DNA, 75 bp, synthetic construct
  source 1..75: mol_type = other DNA
aaacagccagggccagtaacgcaacaagaagtggaaaaggtttgcaccgcatgcggtcagaacggtggcgggcat

SEQ ID NO: 845242 - DNA, 75 bp, synthetic construct
  source 1..75: mol_type = other DNA
ctgccgtcgccctgctggtctgggggactcatattgttcgaaccggcgtaatgcgcgtcttcggcgcgcgtctgc

SEQ ID NO: 845243 - DNA, 75 bp, synthetic construct
  source 1..75: mol_type = other DNA
accaattgggatcgaggttatccccgcacacgtcactgaatatctgaacaaagtactgactgaaactgatcatgc

SEQ ID NO: 845244 - DNA, 75 bp, synthetic construct
  source 1..75: mol_type = other DNA
gaatttgttgaagggattagcgacccgaacgatccgaaatgggttaaggggattgaaaccctcgactctgtgaac

SEQ ID NO: 845245 - DNA, 75 bp, synthetic construct
  source 1..75: mol_type = other DNA
cgtcgtgaatgaccttccaccggaaggcgtgtttgatactgaattctgcaaccgctatgaaaaaggcggtaacga

SEQ ID NO: 845246 - DNA, 75 bp, synthetic construct
  source 1..75: mol_type = other DNA
cgatcgcctgcatcagcaaaacgtgcagagcattgaaaccagttcgctacatttaggcttactgggagatatgca

SEQ ID NO: 845247 - DNA, 75 bp, synthetic construct
  source 1..75: mol_type = other DNA
caacgataaaccgttgctggtgcgttatgacggcagttggtatttcccgttgttgaaaaactacagcgaaagcga

SEQ ID NO: 845248 - DNA, 75 bp, synthetic construct
  source 1..75: mol_type = other DNA
tcattaaatggtggctgaagcaatcacgtgaagcgcagtctgccattatgaccgatgaaatcccgttagatgatg

SEQ ID NO: 845249 - DNA, 75 bp, synthetic construct
  source 1..75: mol_type = other DNA
gacacgccgactcttgctctggcgaatgccgcccgtgaaacactgcgcatcggtgacgcgatggaacagatgatg

SEQ ID NO: 845250 - DNA, 75 bp, synthetic construct
  source 1..75: mol_type = other DNA
gactggcgatattttactggatgcgctaattggcgcgatgttcgcgattatcagttattccagccttgccgctgt

SEQ ID NO: 845251 - DNA, 75 bp, synthetic construct
  source 1..75: mol_type = other DNA
gctgacaaatcgctggcagcgcggcgggcattttcgattgatgggttgaaggaactggatgcgctctatgagcaa

SEQ ID NO: 845252 - DNA, 75 bp, synthetic construct
  source 1..75: mol_type = other DNA
gactggatgaagtgatgattaaaaaaatgtcttcacgcgattttattcagttgtgcgctgtggctgtaaatttta

SEQ ID NO: 845253 - DNA, 75 bp, synthetic construct
  source 1..75: mol_type = other DNA
cgctggcgcgatgacctaccgtgtgcataccgacactgaggataacccattcagcggtgggttattcagccagtt

SEQ ID NO: 845254 - DNA, 75 bp, synthetic construct
  source 1..75: mol_type = other DNA
gatttcgacccatctgttaggttctaacgcctcgagcgtgatccgccatgccaatctgccggtgctggttgtgcg

SEQ ID NO: 845255 - DNA, 75 bp, synthetic construct
  source 1..75: mol_type = other DNA
aagagcatttgcaacatgaggcggaagagcgcctgcagacaatggtgggtcatttcactattgatccctcccgta

SEQ ID NO: 845256 - DNA, 75 bp, synthetic construct
  source 1..75: mol_type = other DNA
ctggatactgcgcagaagattcgcgacatcttcttcagtaaacaaaacggtctgggaacgcagtttgcggtggaa

SEQ ID NO: 845257 - DNA, 75 bp, synthetic construct
  source 1..75: mol_type = other DNA
ttcacccgccgtgcccatgaaaatgatgactggcgaacagagttgaatgctttctggcagacatgggtggatcga

SEQ ID NO: 845258 - DNA, 75 bp, synthetic construct
  source 1..75: mol_type = other DNA
agcggcgaccagcctttgcagcgggcgctgaccgtgctgcgtgacaacacacagccaggcgtcttttctgaaaaa

SEQ ID NO: 845259 - DNA, 75 bp, synthetic construct
  source 1..75: mol_type = other DNA
aagagcatctgcaacatgaagcagaagaacgtctgcaaacgatggtcagccacttcaccatcgatccttcccgca

SEQ ID NO: 845260 - DNA, 75 bp, synthetic construct
  source 1..75: mol_type = other DNA
tcgtcaacgctgaaagctggttatgttccccgttggaggttatcggcacgggacgcgacgacaaagatcagtatc

SEQ ID NO: 845261 - DNA, 75 bp, synthetic construct
  source 1..75: mol_type = other DNA
attgcaagccattgagggcggtaaaactgaccatccagagaaagatccactaaaaccccacattgagagccgcaa

SEQ ID NO: 845262 - DNA, 75 bp, synthetic construct
  source 1..75: mol_type = other DNA
aatttcaacccatctgttaggttctaacgcttccagcgtgatccgccatgctaatctgcctgtattagtcgttcg

SEQ ID NO: 845263 - DNA, 75 bp, synthetic construct
  source 1..75: mol_type = other DNA
ggaataacaccgtggcggatgatgtgccggcaggtgaggatatggctgtcgaacgtggcgtaaaactgacccgac

SEQ ID NO: 845264 - DNA, 75 bp, synthetic construct
  source 1..75: mol_type = other DNA
cgacaaagcggttcgccacgctgaattcctcgcccaggatgacggagttattcatctacttcacgtactaccggg

SEQ ID NO: 845265 - DNA, 75 bp, synthetic construct
  source 1..75: mol_type = other DNA
ggtttacgttgtactgacccgccttgatttattacaaggttttgccgccttgttccagtcattaaacaggcagga

SEQ ID NO: 845266 - DNA, 75 bp, synthetic construct
  source 1..75: mol_type = other DNA
attgaacaggctggatccctgcgtggtctgtcgctgtctgatgtgctgaatctgaaagcggataccatgttgaag

SEQ ID NO: 845267 - DNA, 75 bp, synthetic construct
  source 1..75: mol_type = other DNA
ctgttactgacggtgctgatgcggcggacgtgaccagtgagcgcggcgtgacgctgaaaacgccccttgtgctcg

SEQ ID NO: 845268 - DNA, 75 bp, synthetic construct
  source 1..75: mol_type = other DNA
ggagatcaccggggctattgagcaggctggatccctgcgtggtctgtcgctgtctgatgtgctgaatctgaaagc

SEQ ID NO: 845269 - DNA, 75 bp, synthetic construct
  source 1..75: mol_type = other DNA
attgagcaggctggatccctgcgtggtctgtcgctgtctgatgtgctgaatctgaaagcggataccatgttcagg

SEQ ID NO: 845270 - DNA, 75 bp, synthetic construct
  source 1..75: mol_type = other DNA
attgaccaggctggatccctgcgtggtctgtcgctgtctgatgtgctgaatctgaaagcggataccatgtttatg

SEQ ID NO: 845271 - DNA, 75 bp, synthetic construct
  source 1..75: mol_type = other DNA
attgatcaggctggatccctgcgtggtctgtcgctgtctgatgtgctgaatctgaaagcggataccatgtttacg

SEQ ID NO: 845272 - DNA, 75 bp, synthetic construct
  source 1..75: mol_type = other DNA
aaggaaaagcgcgcacgcagccgctgaacgggattattctgacactcgatttacccgatctgctgaccgcagaca

SEQ ID NO: 845273 - DNA, 75 bp, synthetic construct
  source 1..75: mol_type = other DNA
gcagttccgcctgttcggagccggacagctaaccggagtacaggatggcaactttactgtgcgctttagcgtgga

SEQ ID NO: 845274 - DNA, 75 bp, synthetic construct
  source 1..75: mol_type = other DNA
cgccttgaccagaacagcagcgatccgatattcgccacccgccagatggcaaaaactctgccagcgccactcaat

SEQ ID NO: 845275 - DNA, 75 bp, synthetic construct
  source 1..75: mol_type = other DNA
atgcagagcgtcaggcgggcgacggggacgctatcagccgctggacgccgtatgacaagcccgttgtgtcagcac

SEQ ID NO: 845276 - DNA, 75 bp, synthetic construct
  source 1..75: mol_type = other DNA
tggcaaaaacgctgcctgctccgctcaaccgctgggttggcaggctggctgaccaggcctggcatgtggtgatgg

SEQ ID NO: 845277 - DNA, 75 bp, synthetic construct
  source 1..75: mol_type = other DNA
tatatggcaaaacgctggagcgaaaagttccacggtcagcgcgatatccaggcacaactgatgtcccatcttgac

SEQ ID NO: 845278 - DNA, 75 bp, synthetic construct
  source 1..75: mol_type = other DNA
ttggtcgacaggaatatcgccggacgctacgacagataaacgaagcgctggagacaaacaactggccagcaccga

SEQ ID NO: 845279 - DNA, 75 bp, synthetic construct
  source 1..75: mol_type = other DNA
cccaaatgcgttacaaaacgagccagaaacgaaacagcctgaaccagtggcgcaacaggaagtggaaaaagtttg

SEQ ID NO: 845280 - DNA, 75 bp, synthetic construct
  source 1..75: mol_type = other DNA
aaatcggaacaaaacggccaaaatgcgcgacaaaatgaaccagaagcgcaacaggaaccggaaaaagtctgcgcc

SEQ ID NO: 845281 - DNA, 75 bp, synthetic construct
  source 1..75: mol_type = other DNA
agaatggcgaaaagggaatcgtgtttcacgcatcactcgcacggcttccggtgctaatgctggcggcgggaacct

SEQ ID NO: 845282 - DNA, 75 bp, synthetic construct
  source 1..75: mol_type = other DNA
acaaaagagcaattaaccgaaatcgcacggaaaattcgcccggaactggtgacactggaggactggcaaaaacgc

SEQ ID NO: 845283 - DNA, 75 bp, synthetic construct
  source 1..75: mol_type = other DNA
cccaaatacgcaacaaaacgagccagaaacgaaacagcctgagccagtagtgcaacaactggaaacggagatagt

SEQ ID NO: 845284 - DNA, 75 bp, synthetic construct
  source 1..75: mol_type = other DNA
accaaaaagcggaacaaaacaacccaaatgcgcgacaaaacgagccagaaacgatacagcctgagccagtagtgc

SEQ ID NO: 845285 - DNA, 75 bp, synthetic construct
  source 1..75: mol_type = other DNA
tgctgaacatccgcacaaggagaacgatggcagcgatccgcatcgcgattgcagtgatgaaactggcgaagcagc

SEQ ID NO: 845286 - DNA, 75 bp, synthetic construct
  source 1..75: mol_type = other DNA
gtgcctggcgtttttgctgcaatttgacgttccgctggcgattgcttgtctgctggtgttgctgttaggtgcgct

SEQ ID NO: 845287 - DNA, 75 bp, synthetic construct
  source 1..75: mol_type = other DNA
tggctgcctatcgcggagaatttgttgaagggattagcgacccgaatgatccgaaatgggttaaggggatccaga

SEQ ID NO: 845288 - DNA, 75 bp, synthetic construct
  source 1..75: mol_type = other DNA
caccgatcgaggactgctgacaaaagagtggatgaagggtaatcgtgtttcacgcatcactcgcacggcttccgg

SEQ ID NO: 845289 - DNA, 75 bp, synthetic construct
  source 1..75: mol_type = other DNA
atatcagaaactgcgggcagaactccatgaagcccggaaaaccattccgcccaaaaatcctgtcgatgccgacaa

SEQ ID NO: 845290 - DNA, 75 bp, synthetic construct
  source 1..75: mol_type = other DNA
cttggtcgacaggaatatcgccggacgctacgacagataaacgaagccctggagacaaacaactggccagcaccg

SEQ ID NO: 845291 - DNA, 75 bp, synthetic construct
  source 1..75: mol_type = other DNA
aatcaggcaatacatcagttccatcagcttttattaaaattacataattctcctttaacagacagcaggggggaa

SEQ ID NO: 845292 - DNA, 75 bp, synthetic construct
  source 1..75: mol_type = other DNA
cagacaagctctgggagataaacaactgacagctgtagcatattcatacggtacacagattgcagccttatatgc

SEQ ID NO: 845293 - DNA, 75 bp, synthetic construct
  source 1..75: mol_type = other DNA
ttctctcaggggattgtcagtaatgaaattgaaactgcgctcagtgctccgatagcctcagaagagtcaagcgat

SEQ ID NO: 845294 - DNA, 75 bp, synthetic construct
  source 1..75: mol_type = other DNA
aaccgggaacgggctgcactggctgcgtacacctgggaagtgctggcccgccagctgaaaaaggcgcgtcagcaa

SEQ ID NO: 845295 - DNA, 75 bp, synthetic construct
  source 1..75: mol_type = other DNA
gagccaggtggtgtgttttatccagtcacatctgaacaggcgaagaaaataaaactccatgaagtaataaatgaa

SEQ ID NO: 845296 - DNA, 75 bp, synthetic construct
  source 1..75: mol_type = other DNA
atgaaccaattagaagaaaagcttcaaagaatgatttccttatacaaggaagataactgccaaaaagttcctgaa

SEQ ID NO: 845297 - DNA, 75 bp, synthetic construct
  source 1..75: mol_type = other DNA
tacctgttagtacaactggaaaagtgcctgcggcaggtcgttataatgcactggctatattgcgagtggaatatc

SEQ ID NO: 845298 - DNA, 75 bp, synthetic construct
  source 1..75: mol_type = other DNA
cagtaggcgttccgttcagattggtggaaaaccaggctgcttctgcgcaaactgctgatgttactttcctggctt

SEQ ID NO: 845299 - DNA, 75 bp, synthetic construct
  source 1..75: mol_type = other DNA
aattgcacgtaaacacgtttcctggtatctccaggaacacgctccaaatgaccagtttcggcgcacattcaacgc

SEQ ID NO: 845300 - DNA, 75 bp, synthetic construct
  source 1..75: mol_type = other DNA
ggttatttgtctgttccattaaaatatacagacacaggcggagatagttcttctgtaaaaagacagcaggtaaaa

SEQ ID NO: 845301 - DNA, 75 bp, synthetic construct
  source 1..75: mol_type = other DNA
ccggatggattatttagagtgttgctgcctaatagttccttattgattattggattttatctatcattccaacag

SEQ ID NO: 845302 - DNA, 75 bp, synthetic construct
  source 1..75: mol_type = other DNA
tgattatgaggtttatttttctggtgtttctgggattgatccgtcaggagcgtctagtgatcatcaggggagcga

SEQ ID NO: 845303 - DNA, 75 bp, synthetic construct
  source 1..75: mol_type = other DNA
ctgaaccagtagtgcaacaggaaccggaaaagatctgcaccgcctgcggtcagaccggcggcggcaactgccctg

SEQ ID NO: 845304 - DNA, 75 bp, synthetic construct
  source 1..75: mol_type = other DNA
atcgtgattgcagtgatcaaactggtgaagcgtcagctcctgtagcaactgaaatcatgtggccgtcatatttcg

SEQ ID NO: 845305 - DNA, 75 bp, synthetic construct
  source 1..75: mol_type = other DNA
cctgcattagagaatacaatgcaaacctccctcctctgttgaaaaccagtggaacacgggagcaacttctggagc

SEQ ID NO: 845306 - DNA, 75 bp, synthetic construct
  source 1..75: mol_type = other DNA
cgcgcaggcagacgcccacggggattgccaggattgcgaagtctctgtagccactttgcggttcacacagcgtct

SEQ ID NO: 845307 - DNA, 75 bp, synthetic construct
  source 1..75: mol_type = other DNA
cgcaggaaaaagaacgcccggccggaagtcagagcttgtttcggggtttgatgttgattgagattttgagtaatt

SEQ ID NO: 845308 - DNA, 75 bp, synthetic construct
  source 1..75: mol_type = other DNA
ctgaaaccactgcgtgaaactgcccaggctatctccaatgagctgggatttaccgtccgggagcagggcgtgatc

SEQ ID NO: 845309 - DNA, 75 bp, synthetic construct
  source 1..75: mol_type = other DNA
tgccgtacgccgtgtcgatttcgctttcgacatcacgtctgaaacaggtgggagagaaaaatctcctgaaaccac

SEQ ID NO: 845310 - DNA, 75 bp, synthetic construct
  source 1..75: mol_type = other DNA
atgattaactctttctgtaaatatattcttatagcagtgactgcgcaggctcctctctggagtaataatgcactt

SEQ ID NO: 845311 - DNA, 75 bp, synthetic construct
  source 1..75: mol_type = other DNA
ttatcacacacgaaacccagcccgatgaaaacagcgaaaaaaatacgtactggacgaaaatcggtgcagccttcg

SEQ ID NO: 845312 - DNA, 75 bp, synthetic construct
  source 1..75: mol_type = other DNA
agaaaaacaggatgatgaagaaaaaccgcaaccatcttgcgcaatggcagatgaacaggcaacggctgaaacagt

SEQ ID NO: 845313 - DNA, 75 bp, synthetic construct
  source 1..75: mol_type = other DNA
cgctatattgcgaagcaaaaaatgacaaagtcagaaaacgccttgggattaaaggaggtttttactggactacag

SEQ ID NO: 845314 - DNA, 75 bp, synthetic construct
  source 1..75: mol_type = other DNA
tccgaaatgggttaaggggattgaaacccgcgattctgtgaaccagaaccagcccgaatcggaacaaaacgacca

SEQ ID NO: 845315 - DNA, 75 bp, synthetic construct
  source 1..75: mol_type = other DNA
agtgacgattttgaatcgacctgtgccactctggactatctgctcgttaagtcaggtaaaaaactgagcaactat

SEQ ID NO: 845316 - DNA, 75 bp, synthetic construct
  source 1..75: mol_type = other DNA
gaaatcgtattgggaaagccatcagaatgaaatccagccgctaacccgcaataccattaccgaactgcccgcgat

SEQ ID NO: 845317 - DNA, 75 bp, synthetic construct
  source 1..75: mol_type = other DNA
gaaacagcaaatcccttaattaaagtgaacggtcatcatgaaatctcatccaccagcaggttgtggcaccatctg

SEQ ID NO: 845318 - DNA, 75 bp, synthetic construct
  source 1..75: mol_type = other DNA
ggatcttcgtcaacaaagatgctggctatcactgggtggccgtcgtggaagcctcgcaggaactcctggaacttg

SEQ ID NO: 845319 - DNA, 75 bp, synthetic construct
  source 1..75: mol_type = other DNA
gaacggtggcgggcattgccctgactgtggtccagtaatgggagatgaaacttacgctgaaacttttggagaaaa

SEQ ID NO: 845320 - DNA, 75 bp, synthetic construct
  source 1..75: mol_type = other DNA
acaggaacgactgaaagatcgcctgcaccgtgaaattattgagcgtgattatcacctcagcgcagcaatgtattg

SEQ ID NO: 845321 - DNA, 75 bp, synthetic construct
  source 1..75: mol_type = other DNA
cggaagtttactggtcaaagtatcaccgcgtacagggacaattcctgccgggagttacaccgccagtttgccggt

SEQ ID NO: 845322 - DNA, 75 bp, synthetic construct
  source 1..75: mol_type = other DNA
tgacaaaagagtggatgaaaggaaatcgtgtttcgcgtatcactcgcacggcttccggtgctaatgctggcggcg

SEQ ID NO: 845323 - DNA, 75 bp, synthetic construct
  source 1..75: mol_type = other DNA
aaagcgccggacacgctgaatcatcaatttactgggaagatcctgaaacaggaattttgtgtcggtgccgtccgg

SEQ ID NO: 845324 - DNA, 75 bp, synthetic construct
  source 1..75: mol_type = other DNA
gaaacctcaccgatcgcggcgaaggtttcgtacacgatctgacgtcactggcgcgcgacgtagccactggcgtac

SEQ ID NO: 845325 - DNA, 75 bp, synthetic construct
  source 1..75: mol_type = other DNA
ctgaaaccgctgcgtgaaactgccctggctatttccaatgaactgggatttaccgtccgggacgaccagggggcg

SEQ ID NO: 845326 - DNA, 75 bp, synthetic construct
  source 1..75: mol_type = other DNA
aactgccctgattgtggcgcggcgatgggcgacgcaacataccaggaaacattcaatgaagagaatcaggttgaa

SEQ ID NO: 845327 - DNA, 75 bp, synthetic construct
  source 1..75: mol_type = other DNA
gcaccatctgatgattgaccttgaaacaatgggcaaaaatcctgatgcgccaataaacgctctggccggtaagtt

SEQ ID NO: 845328 - DNA, 75 bp, synthetic construct
  source 1..75: mol_type = other DNA
ggatgcattctacagtgacggttatgaagcacagtttggagtgcagccaactttcgtttttctggttgccagcac

SEQ ID NO: 845329 - DNA, 75 bp, synthetic construct
  source 1..75: mol_type = other DNA
cgcagaaagagactgcggcgattttcgatctctactcgcacttgctttccgatacgcgtctgcgtcgtgaactgt

SEQ ID NO: 845330 - DNA, 75 bp, synthetic construct
  source 1..75: mol_type = other DNA
gctcatggaacaggtatatcaggcgtctacgctggaccctgcgctggaacgcgaacggttgaccggtgctctgga

SEQ ID NO: 845331 - DNA, 75 bp, synthetic construct
  source 1..75: mol_type = other DNA
tgatcgttgatggttatcgcggtgaattgctggtcgacccggagccggtactgctgcaagaatatcagcggctga

SEQ ID NO: 845332 - DNA, 75 bp, synthetic construct
  source 1..75: mol_type = other DNA
cctgctgcggcgcattgattttgccgaagcagaaaatcttgcgcagcgtagtctggaagcgcaactggcgaccga

SEQ ID NO: 845333 - DNA, 75 bp, synthetic construct
  source 1..75: mol_type = other DNA
gaagaagaacaggtggcgcagtatcagggcatgttgcaaatgtttaatgataagcccgtcacgctgcgcacgctg

SEQ ID NO: 845334 - DNA, 75 bp, synthetic construct
  source 1..75: mol_type = other DNA
gccgccattctatcccagtcgcagttgactgcgttgttcgggcaatatcgccagacgagaatccgcgcattaccg

SEQ ID NO: 845335 - DNA, 75 bp, synthetic construct
  source 1..75: mol_type = other DNA
gctgagggaacagtattacgtggggcatctagtaaggctcctatgcctgtggatggagactccagacgaaacctt

SEQ ID NO: 845336 - DNA, 75 bp, synthetic construct
  source 1..75: mol_type = other DNA
ctgatccccttacttttcaatagcatcagcactgtttcaggaaaagttgaacgccttattagctttgatatcgcc

SEQ ID NO: 845337 - DNA, 75 bp, synthetic construct
  source 1..75: mol_type = other DNA
gttttgttcactggatacgcgacggctggatatcgaagagctgacagtttgccattacttacaaaatattcgtca

SEQ ID NO: 845338 - DNA, 75 bp, synthetic construct
  source 1..75: mol_type = other DNA
cttaatggaacaggtgtatcaggcatcaacgctggatccggctctggaacgcgagcgactgaccggggcgctgga

SEQ ID NO: 845339 - DNA, 75 bp, synthetic construct
  source 1..75: mol_type = other DNA
atctctctaacgaagaactggcacagacctttaccgagtggaataacggtgaactgagcagctacctgatcgaca

SEQ ID NO: 845340 - DNA, 75 bp, synthetic construct
  source 1..75: mol_type = other DNA
tagcggaagtggaggttctaaaacgccagacaccggcgctaacgctattcagagtcaggctcagaactggagact

SEQ ID NO: 845341 - DNA, 75 bp, synthetic construct
  source 1..75: mol_type = other DNA
atggatctgttgtaccgggtaaaaacgctttgggccgcgctgcgcggtaatcattacacctggcctgccatcgat

SEQ ID NO: 845342 - DNA, 75 bp, synthetic construct
  source 1..75: mol_type = other DNA
tcgctaacttgctactggctccgtactttaaacaaattgccgatgattatcagcaggcgctgcgtgatgtcgttg

SEQ ID NO: 845343 - DNA, 75 bp, synthetic construct
  source 1..75: mol_type = other DNA
ggcagcctgagttcacagataaaacactctccaggaaacccggggcggttcagaacggtctaaaaacggggctgg

SEQ ID NO: 845344 - DNA, 75 bp, synthetic construct
  source 1..75: mol_type = other DNA
cctgccatggccggttgattctgcagacagatgctcatggggcatggtttgagcatgatttacatgccctgagtg

SEQ ID NO: 845345 - DNA, 75 bp, synthetic construct
  source 1..75: mol_type = other DNA
tgtacgtcgtgggtttggtgctaaccgggatggctccatcatgaccaacggcctgcgaactgtacttcctcgcag

SEQ ID NO: 845346 - DNA, 75 bp, synthetic construct
  source 1..75: mol_type = other DNA
tatctgggcaaaatcgtttcttacgctcagggcttctctcagctacgtgcggcgtctgaagagtacaactgggat

SEQ ID NO: 845347 - DNA, 75 bp, synthetic construct
  source 1..75: mol_type = other DNA
acaaaggtaccggcaaatggaccagccagagctctctggacctgggcgaaccgctgtctctgatcactgaatccg

SEQ ID NO: 845348 - DNA, 75 bp, synthetic construct
  source 1..75: mol_type = other DNA
ctttaagaaaattgccgacgattaccagcaagctctgcgtgatgttgttgcttatgcggtgcagaacggcattcc

SEQ ID NO: 845349 - DNA, 75 bp, synthetic construct
  source 1..75: mol_type = other DNA
tcgttttaatgcggtaatggatgcaaatcaaagcgaccaggtgaccgggcagattgacacgaccacacgggggca

SEQ ID NO: 845350 - DNA, 75 bp, synthetic construct
  source 1..75: mol_type = other DNA
ctgaatgcgccgccgcaaaataatgaaataacactgcccaatacgttcagccagtcactgtacgacgtgctgatg

SEQ ID NO: 845351 - DNA, 75 bp, synthetic construct
  source 1..75: mol_type = other DNA
tcagaaacagtttggtgaagcgcgaagggagctggcgggtaatcttgctcagtccggtgttgacccgtccagtgg

SEQ ID NO: 845352 - DNA, 75 bp, synthetic construct
  source 1..75: mol_type = other DNA
taccgctaatttggctgacctgacacaggttgggcgagatattttggcaaaaagctctgttgctgatgtccttaa

SEQ ID NO: 845353 - DNA, 75 bp, synthetic construct
  source 1..75: mol_type = other DNA
gacaatatcaaagacttaaacgaacgcattggtcatcaaagccgaactgctgaatgggatagtaagaaaaaagag

SEQ ID NO: 845354 - DNA, 75 bp, synthetic construct
  source 1..75: mol_type = other DNA
tttgaagccaaaaaggtggataaaagcatcgccagcgccgaaaaatgggaagtcgcgctcaatcagatgagcgaa

SEQ ID NO: 845355 - DNA, 75 bp, synthetic construct
  source 1..75: mol_type = other DNA
gtgattgagatgaccaaccgttacatggggcgcaatgcgcaatttatgctcgatgtaatgcacgcgacggggatc

SEQ ID NO: 845356 - DNA, 75 bp, synthetic construct
  source 1..75: mol_type = other DNA
agactggcagatgatgtaaaacaattgcgtcaggaggagcgggaaagacgtaaaaatatagaaaagctaattcag

SEQ ID NO: 845357 - DNA, 75 bp, synthetic construct
  source 1..75: mol_type = other DNA
aaaaaatatagaaaagctaattcagattgagcgtaacgcgaaagcgcggatacgcagggtgacaaaatccagaac

SEQ ID NO: 845358 - DNA, 75 bp, synthetic construct
  source 1..75: mol_type = other DNA
atgaaactggaatcatcgctcaaacattttagtccacaaggaatgcacatcagcgacgacgtgaaaggaacctct

SEQ ID NO: 845359 - DNA, 75 bp, synthetic construct
  source 1..75: mol_type = other DNA
tcttcacgatgccattttataaaaatgaaagtggaatcatattttttaattttatatgcttgcttgtttttctgg

SEQ ID NO: 845360 - DNA, 75 bp, synthetic construct
  source 1..75: mol_type = other DNA
cccggacgaaaagcgtattgcgatgcttcatgcgctacgcgaccgtgggttgctgaaccgcgtcatgctgtcgat

SEQ ID NO: 845361 - DNA, 75 bp, synthetic construct
  source 1..75: mol_type = other DNA
atagaaaagctaattcagattgagcgtaacgcaaaagcgcggatgcgcagagcgacaaaatccagaactgaataa

SEQ ID NO: 845362 - DNA, 75 bp, synthetic construct
  source 1..75: mol_type = other DNA
attaagcgcaatggtgacaatacaactgattgctttattactctggcagggggtacacatgctcgctaccgttaa

SEQ ID NO: 845363 - DNA, 75 bp, synthetic construct
  source 1..75: mol_type = other DNA
tcgcttgatgattttcctcgtggtttaagcgaaagagaagcaatgctgaaattagcagaatggctacaaagatta

SEQ ID NO: 845364 - DNA, 75 bp, synthetic construct
  source 1..75: mol_type = other DNA
gttaattttatttatgagccatcggaaagaccatactgccatcacgcctctgtccgggttgatgaaaaagagcgt

SEQ ID NO: 845365 - DNA, 75 bp, synthetic construct
  source 1..75: mol_type = other DNA
gaaaagctaattcagattgagcgtaacgcgaaagcgcggatacgcagggcaacaaaagccagaactgaatattaa

SEQ ID NO: 845366 - DNA, 75 bp, synthetic construct
  source 1..75: mol_type = other DNA
gttaattttctttatgagccatcggaaagaccatattgccatcacgcctctgtccgggttgacgaaaaagagcgt

SEQ ID NO: 845367 - DNA, 75 bp, synthetic construct
  source 1..75: mol_type = other DNA
gtgaccctgttgtttctgcggacttccgtcagtcgggaggcgagggcatgtatcagatggaaaaaatagcaacgg

SEQ ID NO: 845368 - DNA, 75 bp, synthetic construct
  source 1..75: mol_type = other DNA
cttcatggaaaaggtcgatgaccttaacagtgagcagcagtacgaaaatatcgctggcacaacaaatcttggtta

SEQ ID NO: 845369 - DNA, 75 bp, synthetic construct
  source 1..75: mol_type = other DNA
ggatattccggcgctttacggccttatcgataccatgatcccacggggatttaactatcagcgtgataacgatat

SEQ ID NO: 845370 - DNA, 75 bp, synthetic construct
  source 1..75: mol_type = other DNA
gaagatatgctggatttccctgcgctttttggccgtgaagcgccggtgacgcttgagattggttttggcatgggg

SEQ ID NO: 845371 - DNA, 75 bp, synthetic construct
  source 1..75: mol_type = other DNA
gcattgataaaggcattcgcgaacatctggtgcaaaacaagatgctggcgggcgtggtttccatgccgtcgaata

SEQ ID NO: 845372 - DNA, 75 bp, synthetic construct
  source 1..75: mol_type = other DNA
gaagccgcaccattttattcgttacttgtataaccgacaaaacgcagcggactttgccagaacttttgacgacac

SEQ ID NO: 845373 - DNA, 75 bp, synthetic construct
  source 1..75: mol_type = other DNA
cgataaaccgctggcagaaaatctgcgcgatgctgaacggctggtggaactggcggcgcggaaaaaaactgacgt

SEQ ID NO: 845374 - DNA, 75 bp, synthetic construct
  source 1..75: mol_type = other DNA
atggtggtgatggtggcctctttagtgctgtgccatatctccttctccaccggacgtactaacgtgctcaatggc

SEQ ID NO: 845375 - DNA, 75 bp, synthetic construct
  source 1..75: mol_type = other DNA
cggacgtactaacgtgctcaatggcgcagcgcatctggcactgtttgccgcctatttgatgacgatatttgcctg

SEQ ID NO: 845376 - DNA, 75 bp, synthetic construct
  source 1..75: mol_type = other DNA
cggacgtactaacgtactcaacggcgcggcacatctggctctctttgccgcctatttgatgacaatatttgcctg

SEQ ID NO: 845377 - DNA, 75 bp, synthetic construct
  source 1..75: mol_type = other DNA
cggggagtggcgctttaacgtgccggtattgtgggatcagtatccgcatattgtgggttgggagaaaatcccggc

SEQ ID NO: 845378 - DNA, 75 bp, synthetic construct
  source 1..75: mol_type = other DNA
ctgcacaaaaccagcacaataattctcccattgtcctcgtccatggcctgtttggcagcctcgacaatcttggcg

SEQ ID NO: 845379 - DNA, 75 bp, synthetic construct
  source 1..75: mol_type = other DNA
cggacgtactaacgtgctcaacggcgctgcacatctggcactctttgccgcctatttgatgacaatatttgcctg

SEQ ID NO: 845380 - DNA, 75 bp, synthetic construct
  source 1..75: mol_type = other DNA
ctggtcgatggcaaatttgtacaggatttaaaagatccttccctgatctggcgcggtagcagcaaccaggtggtg

SEQ ID NO: 845381 - DNA, 75 bp, synthetic construct
  source 1..75: mol_type = other DNA
acagtatgaaaggaagagcatttcacattcattgaattacgtaccgccacctatacgtggcaggaaaaggctatg

SEQ ID NO: 845382 - DNA, 75 bp, synthetic construct
  source 1..75: mol_type = other DNA
accgaaagctgtatgtgcttttcgtcggatatcaccttaaatattattactcacgtaagcaatactgtaactcgt

SEQ ID NO: 845383 - DNA, 75 bp, synthetic construct
  source 1..75: mol_type = other DNA
ctgacgggttcggcaaagcgcggggcatatcacgccgtaaacgcgccagaatcgccgcagagcgttttaattgcc

SEQ ID NO: 845384 - DNA, 75 bp, synthetic construct
  source 1..75: mol_type = other DNA
tctatcgacgttcctgattcatcgcgccgtcatgccccctgccctgcatgtggtgggaaagaccgtttcagattc

SEQ ID NO: 845385 - DNA, 75 bp, synthetic construct
  source 1..75: mol_type = other DNA
atgaacttccatcaatactaccctgtcgacatcgtcaacggccccggcactcgctgcaccttgtttgtctcaggg

SEQ ID NO: 845386 - DNA, 75 bp, synthetic construct
  source 1..75: mol_type = other DNA
tgtctggattacaggtaaacaggcagagaacaacattaccgcagagattggttatggtcataatttcccctcaaa

SEQ ID NO: 845387 - DNA, 75 bp, synthetic construct
  source 1..75: mol_type = other DNA
ataaagcagaacttacctttgtaagtaatgaggacggtatcatcactgtaccttcccttcatgtcgggcaatggc

SEQ ID NO: 845388 - DNA, 75 bp, synthetic construct
  source 1..75: mol_type = other DNA
tggcgaaagtccaaaataagaaaagttttcaggacaaaagcctgtgtgatgaaactgtcgatgtggcaaccttaa

SEQ ID NO: 845389 - DNA, 75 bp, synthetic construct
  source 1..75: mol_type = other DNA
gtcctgcgacatgaccggtatgcagcacgtaaacaggggcggtttgtggcacgttacagtgagtgctgggtatcg

SEQ ID NO: 845390 - DNA, 75 bp, synthetic construct
  source 1..75: mol_type = other DNA
acgctggcggaggtgtgtcggctgtataccattactgcggtcagtgaagagcagcatgttttgcgacatagtcgg

SEQ ID NO: 845391 - DNA, 75 bp, synthetic construct
  source 1..75: mol_type = other DNA
agatatcccagtccgcaagcgggcggaataccgcagacggaatgcgctgctggactgtatccgtttaggtgtcag

SEQ ID NO: 845392 - DNA, 75 bp, synthetic construct
  source 1..75: mol_type = other DNA
gcaccagacagggaaagaccatgcagacgcattaaaatccgcgtggcagagcaatcacggcgctgccgggcggga

SEQ ID NO: 845393 - DNA, 75 bp, synthetic construct
  source 1..75: mol_type = other DNA
tatgacggcagttggtatttcccgttgttgaaaaactacagcgaaagcgattttggcggcccgctggcaagtcag

SEQ ID NO: 845394 - DNA, 75 bp, synthetic construct
  source 1..75: mol_type = other DNA
cgaagacaaaactcagccaggcgaacgccaccattgctgacatacagcagcgccagcgtgatgttgctgcactcg

SEQ ID NO: 845395 - DNA, 75 bp, synthetic construct
  source 1..75: mol_type = other DNA
gttgtggatcgctgtggctggcaacagaccattaccgtgataacgccatcacctacaaagagcagcgagatgatg

SEQ ID NO: 845396 - DNA, 75 bp, synthetic construct
  source 1..75: mol_type = other DNA
gtggcggcgattgatgccgggaacctgttatatgtcgcccaggtactgcgggataaatttccttcagcacaaatc

SEQ ID NO: 845397 - DNA, 75 bp, synthetic construct
  source 1..75: mol_type = other DNA
atcgccgcagagcgttttaattgccgaggggctggcaaccgctttatcagtccacctgatgcgccctgacgcgct

SEQ ID NO: 845398 - DNA, 75 bp, synthetic construct
  source 1..75: mol_type = other DNA
cagcctgacgccaatcagttgctcgccgcatcacgtggtgaatttgttgcagggattagcgacccgaatgatccg

SEQ ID NO: 845399 - DNA, 75 bp, synthetic construct
  source 1..75: mol_type = other DNA
tcgttgcgggcgattctggccgactggctacagcgaaccggtagcggcaaggaatggcagatcagccacaccaca

SEQ ID NO: 845400 - DNA, 75 bp, synthetic construct
  source 1..75: mol_type = other DNA
tttcggtgtgcatcttttcgaacaatcatcggcaggtaagaccaccacgcagaacatcgcatccagtttgtgggg

SEQ ID NO: 845401 - DNA, 75 bp, synthetic construct
  source 1..75: mol_type = other DNA
agagaccacgccgacgcgctgaaagacgcttaccagaaccatcatggcgctgccgggagggagtggatcagatgg

SEQ ID NO: 845402 - DNA, 75 bp, synthetic construct
  source 1..75: mol_type = other DNA
aaaaactgccgctgttaatggctattccgtggcgggaacagcggagggctggcgcgataccgtggcacggctggc

SEQ ID NO: 845403 - DNA, 75 bp, synthetic construct
  source 1..75: mol_type = other DNA
agaaacgggagaactggcgcgaatatctggagcgtgagcggggagagctggcggaaaagaaaaaggtagttgaac

SEQ ID NO: 845404 - DNA, 75 bp, synthetic construct
  source 1..75: mol_type = other DNA
agcatggctttaacgcctgggtaaaagagttcggcacggggaaccgtgagcataagcagatcattgagcaggcgg

SEQ ID NO: 845405 - DNA, 75 bp, synthetic construct
  source 1..75: mol_type = other DNA
gatggaaaccggtcagccgggagggcagaaatgatgtggcttactgtgagtttgtcactaaatatgcgaaatctt

SEQ ID NO: 845406 - DNA, 75 bp, synthetic construct
  source 1..75: mol_type = other DNA
aagatcgttatgaacactatatatacgtgaaagatattgaaggcaccaggacaaattgcggagtagtcttttatc

SEQ ID NO: 845407 - DNA, 75 bp, synthetic construct
  source 1..75: mol_type = other DNA
taagcatgccatttttatggttgtgctttttatttcatctttcgcactccctaaagttatttttaatatctttgc

SEQ ID NO: 845408 - DNA, 75 bp, synthetic construct
  source 1..75: mol_type = other DNA
cctgtcgtggccggttgattttgcagacagatgctcagggggcgtggtttgagcatgatttacatgccctgagcg

SEQ ID NO: 845409 - DNA, 75 bp, synthetic construct
  source 1..75: mol_type = other DNA
gcgtaacctcatcattacgctgttctgcttttttatcgcctcggcctcagtagaattgctgtttccctggccctg

SEQ ID NO: 845410 - DNA, 75 bp, synthetic construct
  source 1..75: mol_type = other DNA
agggccaggcttgccagcaactgtcacgctgtattttgctacgccagccttatcaacacgatccgcattttgaac

SEQ ID NO: 845411 - DNA, 75 bp, synthetic construct
  source 1..75: mol_type = other DNA
attacttaagtgcaaggcgaataaaggaatgtgttcatatctattgtaaatcaaagcagtcttgtttagaaaagc

SEQ ID NO: 845412 - DNA, 75 bp, synthetic construct
  source 1..75: mol_type = other DNA
tggcggaggcactgggcaacttgatatcacaggtcccattgaaggcactcagctggcataccgcctgacggggga

SEQ ID NO: 845413 - DNA, 75 bp, synthetic construct
  source 1..75: mol_type = other DNA
ctatgacattcataatatgcctggcaataacacgctgacgtttggcggtggcggacatggcgtaagccgtcgttc

SEQ ID NO: 845414 - DNA, 75 bp, synthetic construct
  source 1..75: mol_type = other DNA
ctgtctctgccacgtcctccagttttggtggtggtacagggcaacttgatatcacaggtcccattgaaggcactc

SEQ ID NO: 845415 - DNA, 75 bp, synthetic construct
  source 1..75: mol_type = other DNA
atgccctgaccgcgcaacagaagacggactgcgtggtgctgaatccggaaaaatcccatccttacattgatgata

SEQ ID NO: 845416 - DNA, 75 bp, synthetic construct
  source 1..75: mol_type = other DNA
tatcgccattaccaaccgtgctggagtggcattgtgtgatgtgcgagaggctttttcatgggaagaagttctgtg

SEQ ID NO: 845417 - DNA, 75 bp, synthetic construct
  source 1..75: mol_type = other DNA
atcgccacaaataatctgggcaaccagattggcgatccgcgtgaagtgcaattcacggtgaaaatggaattttga

SEQ ID NO: 845418 - DNA, 75 bp, synthetic construct
  source 1..75: mol_type = other DNA
ttttcgccacagcgacgtgctgttccgttttcagcggctgatgtcgatgcagggccaggcgtgccagcaactgtc

SEQ ID NO: 845419 - DNA, 75 bp, synthetic construct
  source 1..75: mol_type = other DNA
tgaaaaaggcattctggaagccaccgccagtgtttcacaaacgccacaacgtcagacacatatcagcctgaatgg

SEQ ID NO: 845420 - DNA, 75 bp, synthetic construct
  source 1..75: mol_type = other DNA
tagcgactatcatctggccttcggggcgatggatcaccgtttttccgcgccatctcatatcgtgctggagaacgt

SEQ ID NO: 845421 - DNA, 75 bp, synthetic construct
  source 1..75: mol_type = other DNA
ccggtgaattcagtaccagcacctgaatccgcgattatcccatatacctactcgctgattgcccctccgcacagg

SEQ ID NO: 845422 - DNA, 75 bp, synthetic construct
  source 1..75: mol_type = other DNA
gcgatggatcaccgattttccgcgccgtctcatatcgtactgaagaacgtcacgttcggtcgcgacggtcgcccc

SEQ ID NO: 845423 - DNA, 75 bp, synthetic construct
  source 1..75: mol_type = other DNA
acgcggtgttccggtgaatattctgcaacagtggggatggcctgagttacccataactggcgatggcaatattca

SEQ ID NO: 845424 - DNA, 75 bp, synthetic construct
  source 1..75: mol_type = other DNA
catctcatatcgtgctggagaacgtcacgtttggtcgtgatggccagcccgcgaccctggtggccaaaagtgtcg

SEQ ID NO: 845425 - DNA, 75 bp, synthetic construct
  source 1..75: mol_type = other DNA
cgttacctcgcgtaatcgatacgctgattggttgtgccattgcgtgggcggcagtgagctacatctggcctgact

SEQ ID NO: 845426 - DNA, 75 bp, synthetic construct
  source 1..75: mol_type = other DNA
ttgagtgatatctggctgcgtcttagccgtcacttcacgccggaatccgccctcttccgtcatgcggtaagaatg

SEQ ID NO: 845427 - DNA, 75 bp, synthetic construct
  source 1..75: mol_type = other DNA
atcgcccgtcgtgatgctcacaatcgtgatgccgaactggcttctgtggtatcgaatatgtccagtgaaccgaac

SEQ ID NO: 845428 - DNA, 75 bp, synthetic construct
  source 1..75: mol_type = other DNA
tgctatgaacaacttgcgcgatatctggaactcaagtcgcgcatgtttgatccagatattgaagatgaaagccag

SEQ ID NO: 845429 - DNA, 75 bp, synthetic construct
  source 1..75: mol_type = other DNA
gtctgccagccaaactataacgccacgcgccaccgcctgaagttaaggattattggtacgctggtgggtattgcg

SEQ ID NO: 845430 - DNA, 75 bp, synthetic construct
  source 1..75: mol_type = other DNA
gcattactgccagagattggtcgtctgcaacgccagattactcaagttccgcaggaaactcctgtttcggcgtaa

SEQ ID NO: 845431 - DNA, 75 bp, synthetic construct
  source 1..75: mol_type = other DNA
ttcgaacgctgggcgcgtgaagtgccgggcgtgacgcgggcatggtgccgcccggaatggccgcaggcgggcagc

SEQ ID NO: 845432 - DNA, 75 bp, synthetic construct
  source 1..75: mol_type = other DNA
ggtgatcctgtcgccaattatcggtcgttttgcgcataaactggatatgcgtcggctggtaaccttcagctttat

SEQ ID NO: 845433 - DNA, 75 bp, synthetic construct
  source 1..75: mol_type = other DNA
tgaacggctggcggcggcgtcaagtctctccaactttacgcgaacactggcagggtccatcggtacgtccatcac

SEQ ID NO: 845434 - DNA, 75 bp, synthetic construct
  source 1..75: mol_type = other DNA
tgttgttgaagtcggtgaaggcgtaaccagcgtcaaacctggcgaccatgtgatcccgctttacaccgcagagtg

SEQ ID NO: 845435 - DNA, 75 bp, synthetic construct
  source 1..75: mol_type = other DNA
tctccggtcacggaggaaaaaccagcaccggtaagcacagcaccggctgttgtccgaaaagttaaaggctgttac

SEQ ID NO: 845436 - DNA, 75 bp, synthetic construct
  source 1..75: mol_type = other DNA
aaagaacgaattaacagagcctcaaatcagcgaaggcacatggcgaaaagaacggcgagccagctacagccgtga

SEQ ID NO: 845437 - DNA, 75 bp, synthetic construct
  source 1..75: mol_type = other DNA
cagccaaacgctcgatcgcgctggcgttgtggtcgatgacggtgattgtcgcgccaatttgcggcccgatcctcg

SEQ ID NO: 845438 - DNA, 75 bp, synthetic construct
  source 1..75: mol_type = other DNA
gcccaggcgatgtacagtcaactggaagggcttgggatgacgcaacagcaggcatcaggctggattgcccagcag

SEQ ID NO: 845439 - DNA, 75 bp, synthetic construct
  source 1..75: mol_type = other DNA
ggcgcgtcggcctggccacagtttatccagggttttgcggtggcctgcttctttatgccgctgaccaccattacg

SEQ ID NO: 845440 - DNA, 75 bp, synthetic construct
  source 1..75: mol_type = other DNA
tttgccaccggaacgactggcggcggcatcgagcctctctaactttacgcgaacgctggcggggtctatcggcac

SEQ ID NO: 845441 - DNA, 75 bp, synthetic construct
  source 1..75: mol_type = other DNA
tggttattggtatcggcagcctgcagattatgctcgaccggggtaaagagctggactggttctcatcacaggaaa

SEQ ID NO: 845442 - DNA, 75 bp, synthetic construct
  source 1..75: mol_type = other DNA
tgtatcagcctcgcctacatgctctacttcggcgccattgttctgttgccgcaattattgcaggaagtctacggc

SEQ ID NO: 845443 - DNA, 75 bp, synthetic construct
  source 1..75: mol_type = other DNA
ttgcaccagggaagcccctggagattgttgaaattgatgttgcaccacctaaaaaaggcgaggtgctgattaaaa

SEQ ID NO: 845444 - DNA, 75 bp, synthetic construct
  source 1..75: mol_type = other DNA
ggctttgccgagtgtgcctttgaagatgccgcccgctatgccaaccagcgtatcgcttttggtaaacccattggt

SEQ ID NO: 845445 - DNA, 75 bp, synthetic construct
  source 1..75: mol_type = other DNA
cgtgatgtccgttgtgaacgtatcggcggcggtacagacgaaattatgatttacgtagcaggtcggcagatcctg

SEQ ID NO: 845446 - DNA, 75 bp, synthetic construct
  source 1..75: mol_type = other DNA
atttggtggtatccctgcggattacgtcacccaaatgctggcgctgatggaagtgtcaaaatgcggtgctccggc

SEQ ID NO: 845447 - DNA, 75 bp, synthetic construct
  source 1..75: mol_type = other DNA
cagctatgcgcacaacatcaaagtaccagctctctcagtaatcgtggaggacggaaaaatttgggtaaataacgg

SEQ ID NO: 845448 - DNA, 75 bp, synthetic construct
  source 1..75: mol_type = other DNA
tattcacagtatgcgccgtttcggttctgcagagcagctacgtaaaacggcagagagcaccctggaaacgggtga

SEQ ID NO: 845449 - DNA, 75 bp, synthetic construct
  source 1..75: mol_type = other DNA
taccgatgaggcgcgcgtctcccgcttctggcgtgatgtccgttgtgaacgtgatgtccagactcccattttgga

SEQ ID NO: 845450 - DNA, 75 bp, synthetic construct
  source 1..75: mol_type = other DNA
tagcaatgtgcttgaaatgattgctgcatcgcctttacgtaatcgccttatggagttttccgcctacgcgaacgg

SEQ ID NO: 845451 - DNA, 75 bp, synthetic construct
  source 1..75: mol_type = other DNA
ggttttattcttttataaagatttaatgaagataaacccgcgcaagaaaggccgctggacaatattttcttgtga

SEQ ID NO: 845452 - DNA, 75 bp, synthetic construct
  source 1..75: mol_type = other DNA
ctggctgaccagttctctctacataatttctcggtaggtaagcgtactggcaaccctatgggggatggaacggca

SEQ ID NO: 845453 - DNA, 75 bp, synthetic construct
  source 1..75: mol_type = other DNA
tatagaccagggcagcgccccgtctgtatctgtcactggagcccgcaacgacaaggataaagaacgtatccagtc

SEQ ID NO: 845454 - DNA, 75 bp, synthetic construct
  source 1..75: mol_type = other DNA
aactttgtttcctggcttattaaccatcaggattttaaaatcccgctggttgaagatcctatttataaggtggtt

SEQ ID NO: 845455 - DNA, 75 bp, synthetic construct
  source 1..75: mol_type = other DNA
aaatttgtggtccattcgggttgtcggtactgcaaaatgatggatatatgaatgagtccgcgaattttctttcat

SEQ ID NO: 845456 - DNA, 75 bp, synthetic construct
  source 1..75: mol_type = other DNA
ctctccaactttacgcgaacgctggcgggatctatcggcacgtccattacgacgactatgtggaccaaccgcgaa

SEQ ID NO: 845457 - DNA, 75 bp, synthetic construct
  source 1..75: mol_type = other DNA
tctggcgctgtttggctcaatcatcgcgatcaacgcttatatgtatttaatccgtaatgtcagtcctgcactggc

SEQ ID NO: 845458 - DNA, 75 bp, synthetic construct
  source 1..75: mol_type = other DNA
cgattagctgggcgtttggctcggtttatggctcgcgcattaccttacctgtagggatgatggcgggtgcgattg

SEQ ID NO: 845459 - DNA, 75 bp, synthetic construct
  source 1..75: mol_type = other DNA
gccattaacgcttatatgtatttaatccgcaacgtcagtccggctctcgccaccagctacgcctacgttaacccg

SEQ ID NO: 845460 - DNA, 75 bp, synthetic construct
  source 1..75: mol_type = other DNA
tccggtaaaactgtcccagtatgggatcagcctgcccgaagtgaaactgatcttacccagcaatagtggacacgc

SEQ ID NO: 845461 - DNA, 75 bp, synthetic construct
  source 1..75: mol_type = other DNA
ctatagcgcactgtccctgcgcgacgctgaggatgtgagttctgcactgaatgcactgaaaaatctgaacttcta

SEQ ID NO: 845462 - DNA, 75 bp, synthetic construct
  source 1..75: mol_type = other DNA
ctatggcgcactgtccctgcgcgacgctgaggatgtgggttctgcactgaatgcactgaaaaatctgaacttcta

SEQ ID NO: 845463 - DNA, 75 bp, synthetic construct
  source 1..75: mol_type = other DNA
tgcagaagtccttatccttattcactctgctggcttgatgaatttgccgagcctgcgatagcccgcaaaatatat

SEQ ID NO: 845464 - DNA, 75 bp, synthetic construct
  source 1..75: mol_type = other DNA
cgtgaagaaggcgcaatgcagggcaaacacgaagaagctctgcgtattgctcaggagatgctggagagaggttta

SEQ ID NO: 845465 - DNA, 75 bp, synthetic construct
  source 1..75: mol_type = other DNA
gatagaggtttagacagagagttagttatgatggtgacccgactatcgccagacgatcttatagcgcaaagccac

SEQ ID NO: 845466 - DNA, 75 bp, synthetic construct
  source 1..75: mol_type = other DNA
ctgggcattgatttgtggattgaactggggctgccggatgagcggcggattaagaaagcctgcacccaggccgca

SEQ ID NO: 845467 - DNA, 75 bp, synthetic construct
  source 1..75: mol_type = other DNA
tgcctgttggcattgccggggctgtctctcgcccgcaggacttaaccgtcgaaccggtggtccttaaatccgata

SEQ ID NO: 845468 - DNA, 75 bp, synthetic construct
  source 1..75: mol_type = other DNA
tcaggagatgctggatagaggtttagacagagagttagttatgatggtgacccgactttcaccagacgatcttat

SEQ ID NO: 845469 - DNA, 75 bp, synthetic construct
  source 1..75: mol_type = other DNA
cgccgttaccgttttgaggtggaaaccctcaaccccttcatcatccattatggcgcatacgaaggggagtatatc

SEQ ID NO: 845470 - DNA, 75 bp, synthetic construct
  source 1..75: mol_type = other DNA
accgtgcagctttcgataatattctcgactggacgcagaacaatctcgctcagggttctttaaaagaacgtttgc

SEQ ID NO: 845471 - DNA, 75 bp, synthetic construct
  source 1..75: mol_type = other DNA
cgataccaatccggagaaatttgacctggcccgttcatttggtgcaactgactgcattaacccgaaagactacga

SEQ ID NO: 845472 - DNA, 75 bp, synthetic construct
  source 1..75: mol_type = other DNA
ttgctcctggtaagcccctcgagatcgttgaaattgatgtggagccgcctcgtaagggtgaagtactggtaaaaa

SEQ ID NO: 845473 - DNA, 75 bp, synthetic construct
  source 1..75: mol_type = other DNA
atgatgaatgttttgcgtagtggaattgtgacgatgctgctgctggctacctttagtgttcaggcagcctgcagt

SEQ ID NO: 845474 - DNA, 75 bp, synthetic construct
  source 1..75: mol_type = other DNA
gcagggatgatgcctgacagcgatccacaaaaagcacgactgttagcgcgtttcaaaccgatggcgacattaacg

SEQ ID NO: 845475 - DNA, 75 bp, synthetic construct
  source 1..75: mol_type = other DNA
ccgcctggctgtggggcaagaaagagaacagtaagtgggaagtgctggacagcaattcggcctccgatggtgatg

SEQ ID NO: 845476 - DNA, 75 bp, synthetic construct
  source 1..75: mol_type = other DNA
atccatcaacgtatcattgttattgatgtttcggaaaaccgtgacgaacggctggtgttaatcaatccggagctt

SEQ ID NO: 845477 - DNA, 75 bp, synthetic construct
  source 1..75: mol_type = other DNA
tgtcagatataaatttaataatgataatacgctctgggcatcagtctataatgaaagaaaatataatcaacattc

SEQ ID NO: 845478 - DNA, 75 bp, synthetic construct
  source 1..75: mol_type = other DNA
acaacacgcagttgcttatccagataatccggcagtacgggcgaacatgccgccgttatcagtttgaggtgatca

SEQ ID NO: 845479 - DNA, 75 bp, synthetic construct
  source 1..75: mol_type = other DNA
cgctctcaggcgtatcgtatgagacggaaggactggaagacgcgctgtaccaaaacggctgtgacgatgcgctaa

SEQ ID NO: 845480 - DNA, 75 bp, synthetic construct
  source 1..75: mol_type = other DNA
gtcagtactgcgtagtcgcagatgctctgtatagccacggttgcgatgatgcgctcatttgctactacggaaact

SEQ ID NO: 845481 - DNA, 75 bp, synthetic construct
  source 1..75: mol_type = other DNA
accgccgttatctattacccgtgggccaaacgcaccacctgcgttcctgcttatacgatttatcccgagtcttaa

SEQ ID NO: 845482 - DNA, 75 bp, synthetic construct
  source 1..75: mol_type = other DNA
ggcacaaacatccagaacgcagcgaacttctcgcgttttggcattgtttcaaacgtgaagtacatgagtacgaag

SEQ ID NO: 845483 - DNA, 75 bp, synthetic construct
  source 1..75: mol_type = other DNA
ctttgattatcttcctggcgattgctgcagcgttgctgtggcaattggcacgtaatgctgaaggagatgatccga

SEQ ID NO: 845484 - DNA, 75 bp, synthetic construct
  source 1..75: mol_type = other DNA
gtcggcatgaactataaagacgatcgccagaaggcaatcagctggctgaaagagctgggcaatccttacgcgcta

SEQ ID NO: 845485 - DNA, 75 bp, synthetic construct
  source 1..75: mol_type = other DNA
gcatggtgggtgctagcttgcccaaggccgatatcattcttgctaacccgccgttcggtacggcgaaaggcggtg

SEQ ID NO: 845486 - DNA, 75 bp, synthetic construct
  source 1..75: mol_type = other DNA
aaaacgtctggatctatgatctgcgtagtaacatgccaagctttggcaaacgcaccccgtttggtgagcaacatt

SEQ ID NO: 845487 - DNA, 75 bp, synthetic construct
  source 1..75: mol_type = other DNA
gcgaaggaaaggtagcggagattagcgcacatccaggctacgcaggaacagtcgaatacaaaaccgaactggtgg

SEQ ID NO: 845488 - DNA, 75 bp, synthetic construct
  source 1..75: mol_type = other DNA
ttcgcgaaacccagggcaaaggcctgatgccagacggcaccacacgtttttcttacaatgggcaaccgctgtatc

SEQ ID NO: 845489 - DNA, 75 bp, synthetic construct
  source 1..75: mol_type = other DNA
aaaccgattaaagatgtcctgctggatatcaacaaatggggtatcgaccatacctttgaatgcatcggtaacgtc

SEQ ID NO: 845490 - DNA, 75 bp, synthetic construct
  source 1..75: mol_type = other DNA
cggcgagtgtgagttctgtcgttccggcaaaaccaacctctgtgtcgccgttcgcgaaacccagggcaaaggcct

SEQ ID NO: 845491 - DNA, 75 bp, synthetic construct
  source 1..75: mol_type = other DNA
gccaaacgtgccgagcaaaaaagcgaaatagccaaatcttctggcgtaaccagtaacccaggctacacaggcaca

SEQ ID NO: 845492 - DNA, 75 bp, synthetic construct
  source 1..75: mol_type = other DNA
ggtgaaagaactcggaacaaaacgtgggacgccgctcatggttagcgtcaacgtcaatacgccgtttccagagtt

SEQ ID NO: 845493 - DNA, 75 bp, synthetic construct
  source 1..75: mol_type = other DNA
gttgagtacaagacagatctggtcgcagctcacgaactgctaaacgtaacggtggaagaactcggaacaaaacgt

SEQ ID NO: 845494 - DNA, 75 bp, synthetic construct
  source 1..75: mol_type = other DNA
tcgccacgcaaaaatgctcgaaaccgatcaggcgtgggaagtgttcgaaaaactcgaagactgttatttcagcca

SEQ ID NO: 845495 - DNA, 75 bp, synthetic construct
  source 1..75: mol_type = other DNA
ctctttccccaattacacacaaccaaattcccgttatcactaccgagttactggcacagctttacggtacagatt

SEQ ID NO: 845496 - DNA, 75 bp, synthetic construct
  source 1..75: mol_type = other DNA
ctctggaacggtttaaattctatctggagcaacacggctggatcgttgcccgtaaagaacaactagtggaaaggc

SEQ ID NO: 845497 - DNA, 75 bp, synthetic construct
  source 1..75: mol_type = other DNA
tttacactctggggccgctaactaccgatatcgcgccgggctatgaccacttcacgtcagggattggtgcggcga

SEQ ID NO: 845498 - DNA, 75 bp, synthetic construct
  source 1..75: mol_type = other DNA
accttacagcagttttatgttgaggttgagcggcgcatcttggcttacagaatgttgttgagccggaataccata

SEQ ID NO: 845499 - DNA, 75 bp, synthetic construct
  source 1..75: mol_type = other DNA
ccggtaggctaccgctgggatgacctgaaatcccgcatcggccaggagcaattgcagttctaccgtaacctgctg

SEQ ID NO: 845500 - DNA, 75 bp, synthetic construct
  source 1..75: mol_type = other DNA
ccgcccctgaacagactcctgctggatgattaccgcaataagatcctgagaggcgaaattttattcagtggtgat

SEQ ID NO: 845501 - DNA, 75 bp, synthetic construct
  source 1..75: mol_type = other DNA
aaacgaagcgattccggtttatgacacctccggcccatatggcgatccgcaaatcgccattaacgttcagcaagg

SEQ ID NO: 845502 - DNA, 75 bp, synthetic construct
  source 1..75: mol_type = other DNA
aacttaccgtgcgcagttccgattacactaaagcgcgactggcagatgatggcctcgacgagctacgttttagcg

SEQ ID NO: 845503 - DNA, 75 bp, synthetic construct
  source 1..75: mol_type = other DNA
aacttaccgtgcgcagttccgattacactaaagcgcggctggcagatgatggcctcgacgagctgcgttttagcg

SEQ ID NO: 845504 - DNA, 75 bp, synthetic construct
  source 1..75: mol_type = other DNA
ctcggcggtcacctcttccatcgaagaagaagtggaaaagctggtatggtctacgcgctggggggcggatacagt

SEQ ID NO: 845505 - DNA, 75 bp, synthetic construct
  source 1..75: mol_type = other DNA
gcgaacagcgcgcccaggcccaacattttatcgacaccctggaaggcaccgcctttcccaactcaaaacgcattt

SEQ ID NO: 845506 - DNA, 75 bp, synthetic construct
  source 1..75: mol_type = other DNA
gcttattaacgccaaaacgcgccaaagcaggacgccgcgtcacccaactgcactacgcccgccagggcatcatca

SEQ ID NO: 845507 - DNA, 75 bp, synthetic construct
  source 1..75: mol_type = other DNA
tcacaccatgacgctggatgaaattaatgacgcctttgatttaatgcatgaaggcaaatccattcgaactgtgat

SEQ ID NO: 845508 - DNA, 75 bp, synthetic construct
  source 1..75: mol_type = other DNA
tccgcatcagttgatcatgaccgccacgccgatcccccgcacgctggcaatgactgcgtatgccgatctcgatac

SEQ ID NO: 845509 - DNA, 75 bp, synthetic construct
  source 1..75: mol_type = other DNA
gctggtgattatcgacgaacagcatcgttttggcgtgcatcagcgtctggcgttatgggagaaaggccagcagca

SEQ ID NO: 845510 - DNA, 75 bp, synthetic construct
  source 1..75: mol_type = other DNA
cgctttggcgtacatcagcgtctggcattatgggagaaaggccagcaacagggtttccatcctcatcagttgatc

SEQ ID NO: 845511 - DNA, 75 bp, synthetic construct
  source 1..75: mol_type = other DNA
accgctcggtatcaaagtgggctgctcgccggtaagcagaaaggcaaagcgcgactgtctcagcaggaagccatc

SEQ ID NO: 845512 - DNA, 75 bp, synthetic construct
  source 1..75: mol_type = other DNA
tggcgctggatgtgccgatgatgcgtctggtgcagggcgatgtaggttccggtaaaacgctggtcgccgccctcg

SEQ ID NO: 845513 - DNA, 75 bp, synthetic construct
  source 1..75: mol_type = other DNA
cattgtgggagaaaggccagcagcaaggcttccatccgcatcagctgatcatgaccgcgacacccatcccacgca

SEQ ID NO: 845514 - DNA, 75 bp, synthetic construct
  source 1..75: mol_type = other DNA
caccatgcgctttttcaattttaatgcggcgatgaaaaacagcctggcgacaggacggcgcgtgctggcctatgg

SEQ ID NO: 845515 - DNA, 75 bp, synthetic construct
  source 1..75: mol_type = other DNA
gcgtgggacgtggcgcggtggcttctcactgcgtgctgctctacaaaacgccgctctccaaaacggcgcaaattc

SEQ ID NO: 845516 - DNA, 75 bp, synthetic construct
  source 1..75: mol_type = other DNA
cgttacgaatgctgctccagcggctagcagtggtggtgaatcaggtacagatttaccaaaaggtggcactgataa

SEQ ID NO: 845517 - DNA, 75 bp, synthetic construct
  source 1..75: mol_type = other DNA
cgacggttttgtgattgcgcaaaaaagatctggagattcgcggccctggcgaattgttaggcacgcgtcagacgg

SEQ ID NO: 845518 - DNA, 75 bp, synthetic construct
  source 1..75: mol_type = other DNA
gcatccggcgcagcgccggttgattctggaagagttgctggcgcacaacctcagcatgttagcgttacgcgccgg

SEQ ID NO: 845519 - DNA, 75 bp, synthetic construct
  source 1..75: mol_type = other DNA
acctgtgctattgaagagctactgcctcctgaactgtcacaaggcatgatgacgctaccggaagccttacgtacc

SEQ ID NO: 845520 - DNA, 75 bp, synthetic construct
  source 1..75: mol_type = other DNA
gatctggagattcgcggccctggcgaattgttaggtacacgtcagacgggtaatgctgaatttaaagtggcggat

SEQ ID NO: 845521 - DNA, 75 bp, synthetic construct
  source 1..75: mol_type = other DNA
gccatacaggcgttacgtcagaccatcatcaataaatatcagcgccgcatctggttcatcctgactatcgccgcc

SEQ ID NO: 845522 - DNA, 75 bp, synthetic construct
  source 1..75: mol_type = other DNA
attaacggcatcacgtttccgggcgaagtgaaatcgcccaagaaaggcgacgtggttatcacctggcaggacgaa

SEQ ID NO: 845523 - DNA, 75 bp, synthetic construct
  source 1..75: mol_type = other DNA
aacgccagtggctgaaaccgcaggtgtggattggcccggcaattttgtcggccatcatgctggtggtgattgttt

SEQ ID NO: 845524 - DNA, 75 bp, synthetic construct
  source 1..75: mol_type = other DNA
cgttgaaattgacgttgcaccaccgaaaaaaggtgaagtgctgattaaagtcacccataccggcgtttgccatac

SEQ ID NO: 845525 - DNA, 75 bp, synthetic construct
  source 1..75: mol_type = other DNA
cggtcaggaaatttccactcgcccattccagttagtcaccggtcgcgtatggaaaggttccgcatttggcggcgt

SEQ ID NO: 845526 - DNA, 75 bp, synthetic construct
  source 1..75: mol_type = other DNA
gcacaccagacgctgtttgcacgtccactgcgtgaaatgtccacggcggccagtatcaatggcgtgtcatttccg

SEQ ID NO: 845527 - DNA, 75 bp, synthetic construct
  source 1..75: mol_type = other DNA
tctcaagacaatcaagaccgcttaccgtcgactggcccgcaaataccatcctgatgtcagcaaagagccggatgc

SEQ ID NO: 845528 - DNA, 75 bp, synthetic construct
  source 1..75: mol_type = other DNA
agcccgtgggaagcggcgctgggtgctaaagtcaccgttccaacactgaaagaaagcattttgctgactatcccg

SEQ ID NO: 845529 - DNA, 75 bp, synthetic construct
  source 1..75: mol_type = other DNA
cacgactggctcagcaagaagccatcgccagcggtcaggtgcagatgattgttggcacccacgccatcttccagg

SEQ ID NO: 845530 - DNA, 75 bp, synthetic construct
  source 1..75: mol_type = other DNA
gccaggcagtcaggccgggcaacgattacgcgttaaaggcaaaggtctggtcagcaaaaaacagaccggcgacct

SEQ ID NO: 845531 - DNA, 75 bp, synthetic construct
  source 1..75: mol_type = other DNA
gtggctggtgattcatattgcgccgcatccgctgtttgatattgtcggtcaggatctggaaattgtggtgccggt

SEQ ID NO: 845532 - DNA, 75 bp, synthetic construct
  source 1..75: mol_type = other DNA
agattttgacgatatcttctcatcaattttcggtcagcatgcgcgccagagccgtcaacgccccgcaacacgcgg

SEQ ID NO: 845533 - DNA, 75 bp, synthetic construct
  source 1..75: mol_type = other DNA
gctctcgttaaagaggtctggcggggcgaggtcagcagggtcagccgtgacgcggaaaacaccagttttttaacc

SEQ ID NO: 845534 - DNA, 75 bp, synthetic construct
  source 1..75: mol_type = other DNA
gaatccaccacggaaatttatccggacagtgacaggtaacttcaccggcaacgggccgtggtctgaatggaagga

SEQ ID NO: 845535 - DNA, 75 bp, synthetic construct
  source 1..75: mol_type = other DNA
ggccaccgttaatgatggcgggtgtacggtttctgacagccggtattttattgatggcatttttgctactacgcg

SEQ ID NO: 845536 - DNA, 75 bp, synthetic construct
  source 1..75: mol_type = other DNA
aacatcggcgcggatgcatccagcgttgcgctgcatggcccggtctatatgcgagtggccacaccaaccgcctca

SEQ ID NO: 845537 - DNA, 75 bp, synthetic construct
  source 1..75: mol_type = other DNA
tttactcagctcagtagtgaaaccgacagtgatgatgaaacccgggcagccacacccaaagcaataaaagcactt

SEQ ID NO: 845538 - DNA, 75 bp, synthetic construct
  source 1..75: mol_type = other DNA
cggccatgacggcagcagaaaacgccgggcagaaagcacggcaagcactggaggctgcacaggcaaaaacacagc

SEQ ID NO: 845539 - DNA, 75 bp, synthetic construct
  source 1..75: mol_type = other DNA
ttggcggaggcactgacgaaattatggtttatatctccgctcgcgagatcctgaaacagtacgataaacacaggg

SEQ ID NO: 845540 - DNA, 75 bp, synthetic construct
  source 1..75: mol_type = other DNA
aggaattgcttttagcgagcattcgggagctgattacccgcagttttcccgaggaatattttaaaagatgtgatg

SEQ ID NO: 845541 - DNA, 75 bp, synthetic construct
  source 1..75: mol_type = other DNA
gtatagacattatcgttttcggagagcttaccggaatctcaaccaatgagtggactataaaatttgcaaacttct

SEQ ID NO: 845542 - DNA, 75 bp, synthetic construct
  source 1..75: mol_type = other DNA
ttaaacccaaacgaccctaattcttcctattactgggatgcaaaaaatttagtcgaaaggcatggggatggcatc

SEQ ID NO: 845543 - DNA, 75 bp, synthetic construct
  source 1..75: mol_type = other DNA
cggctatcctcgcggcgcgcgcggcgaaagctatcactcttctcgagcctccagtttctgacatcaatgatgttg

SEQ ID NO: 845544 - DNA, 75 bp, synthetic construct
  source 1..75: mol_type = other DNA
ggtctaatcagtgacgcggcctactacatgaatgattttatcagtaggttggcagctatatatcagtccgaacaa

SEQ ID NO: 845545 - DNA, 75 bp, synthetic construct
  source 1..75: mol_type = other DNA
atgggtgaacatatctacgagattaacagcgataagtgtaccgaatgcgtaggtcactacgagacgccaacctgc

SEQ ID NO: 845546 - DNA, 75 bp, synthetic construct
  source 1..75: mol_type = other DNA
tgctgccggtaacgatgaaaaagcaatcgacaaagcgcgtaatgcgccgttccgggcgccgctcatcataacggt

SEQ ID NO: 845547 - DNA, 75 bp, synthetic construct
  source 1..75: mol_type = other DNA
ggtggcgaaatgcgaagaaaatcataaagtcccgcgctgggaacaggaaatgtctgccggttgcgcggtcatggc

SEQ ID NO: 845548 - DNA, 75 bp, synthetic construct
  source 1..75: mol_type = other DNA
gtgcagggaacggcggaagagctggcgcgtgacctcaatatcgacccagctacgctgcgttaccgttgcgcaggt

SEQ ID NO: 845549 - DNA, 75 bp, synthetic construct
  source 1..75: mol_type = other DNA
accggcctgcaaatgaccgataacggctactgggccggattgttaggccttgggatgaacacctcattgggggca

SEQ ID NO: 845550 - DNA, 75 bp, synthetic construct
  source 1..75: mol_type = other DNA
atcgccgtagcgcctcccgcctggctgaacctgcgccaacgggtgaacaactgcaaaacatactgcgagcgggta

SEQ ID NO: 845551 - DNA, 75 bp, synthetic construct
  source 1..75: mol_type = other DNA
aatcacccaacaatccagtagtaataattttctggaaagccttaagtcttctttaacccaccagcgtcagttaag

SEQ ID NO: 845552 - DNA, 75 bp, synthetic construct
  source 1..75: mol_type = other DNA
ctattgtgaaagatccggcgcatatcgagacacaagaacagctgtgggataagtttgtgctgatgcatcacgcgg

SEQ ID NO: 845553 - DNA, 75 bp, synthetic construct
  source 1..75: mol_type = other DNA
caaaaagtgtgtccaatccccaataccattgtaaaagatccgctacatgttgagacggaagaacagttgtgggat

SEQ ID NO: 845554 - DNA, 75 bp, synthetic construct
  source 1..75: mol_type = other DNA
cgaatgcccgaatgaggcgatttcgatgggtgaacatatctacgagattaacagcgataagtgtaccgaatgcgt

SEQ ID NO: 845555 - DNA, 75 bp, synthetic construct
  source 1..75: mol_type = other DNA
aggcaccgaagccgaatattcatggcaatactcgctgccagaatattgtgcgctatgaaatgttcaaaaagctgg

SEQ ID NO: 845556 - DNA, 75 bp, synthetic construct
  source 1..75: mol_type = other DNA
accgtgtttaccacgccgcgatgatggacccgcatactgccgccgtgctgggcattgatgaaatatatgctcttg

SEQ ID NO: 845557 - DNA, 75 bp, synthetic construct
  source 1..75: mol_type = other DNA
gcgaggacatgacggaagtctgccccgatgccaccatgctcaactacgttaacccaatggcgatgaatacctggg

SEQ ID NO: 845558 - DNA, 75 bp, synthetic construct
  source 1..75: mol_type = other DNA
aacaggagtgcgaagcgctgctggttgacttcccggaacaggaaaaagagctacgggagttatcggagtggatag

SEQ ID NO: 845559 - DNA, 75 bp, synthetic construct
  source 1..75: mol_type = other DNA
tggcgcgatatctcacggcgagatcccgttacgttggcggttgctggtgatcctcgggaatcctcctgcgctgaa

SEQ ID NO: 845560 - DNA, 75 bp, synthetic construct
  source 1..75: mol_type = other DNA
ggacctgccttctgaactacagaccatgcttgtgagcgatcaggtgagcatgtacgttgcgctggacgagtatat

SEQ ID NO: 845561 - DNA, 75 bp, synthetic construct
  source 1..75: mol_type = other DNA
aaaatagagacattaatatccaataaaaatggcctaacgcagcaacttttccccttccttggtgaggtttcatca

SEQ ID NO: 845562 - DNA, 75 bp, synthetic construct
  source 1..75: mol_type = other DNA
gccgtcgaagcggctattgcacgcgccaaagcgcgcaagctggaacagcaacaacaggctaatgcggaaccagaa

SEQ ID NO: 845563 - DNA, 75 bp, synthetic construct
  source 1..75: mol_type = other DNA
acaactgggggttagtcgttcatcgctaagagaagcgcttattgttctggagatatctggctggattattattca

SEQ ID NO: 845564 - DNA, 75 bp, synthetic construct
  source 1..75: mol_type = other DNA
gttggcagctatttgctgaaagcggggaaaggggaaacctgtcgggcgcgcgaactggagcagtgcctggaagat

SEQ ID NO: 845565 - DNA, 75 bp, synthetic construct
  source 1..75: mol_type = other DNA
atgcgtaaaaaacaatacaactactatcgcgaccagttgttgagttttaaagagggtgaggttgagtggaagact

SEQ ID NO: 845566 - DNA, 75 bp, synthetic construct
  source 1..75: mol_type = other DNA
tgatgtttttgacattgttgcaggcggcgatgcaccaaaagatgccttatccgaatttgagaccgaggaattcag

SEQ ID NO: 845567 - DNA, 75 bp, synthetic construct
  source 1..75: mol_type = other DNA
gtgaaatcgagttgcgccagaaacaatacgagtactaccgtgatttactgttcagtttcccgaaacctgaagctg

SEQ ID NO: 845568 - DNA, 75 bp, synthetic construct
  source 1..75: mol_type = other DNA
cgcctgaagagatttgtgaagctaaaccccccgaagaaggtgtattcaataatgtctattcttatgacggtgatc

SEQ ID NO: 845569 - DNA, 75 bp, synthetic construct
  source 1..75: mol_type = other DNA
tctgtgctgatataaagcactaccgtccaggccctgataccccatttcctcgccatccccatgactatcgatacc

SEQ ID NO: 845570 - DNA, 75 bp, synthetic construct
  source 1..75: mol_type = other DNA
tcagtgaagggaacacctttaatcaggagcagctgaacggtcgtgcgcaggtcgtggttctcgacagtaatactc

SEQ ID NO: 845571 - DNA, 75 bp, synthetic construct
  source 1..75: mol_type = other DNA
aagcacgcaagctggaacagcaacaggctaatgcggaaccagaagaacaggtcgatccgcgcaaagcggcagttg

SEQ ID NO: 845572 - DNA, 75 bp, synthetic construct
  source 1..75: mol_type = other DNA
agccctcgccgggcgactgcaaggctgtctgtaccgcgcggatatgctgcaacaggagtgcgaagcgctgctggt

SEQ ID NO: 845573 - DNA, 75 bp, synthetic construct
  source 1..75: mol_type = other DNA
ttagccgcctggcaaactatctcaatccggataaaaagaaactggcggcgaaaggcattacctcggtacgttccc

SEQ ID NO: 845574 - DNA, 75 bp, synthetic construct
  source 1..75: mol_type = other DNA
ttgttgcgctgcaaaaaggcgacacccagaacacccacgcggcatggacgaaatacaaccttgccgccagaaccc

SEQ ID NO: 845575 - DNA, 75 bp, synthetic construct
  source 1..75: mol_type = other DNA
ataacaccactaacattttacgcctgatgttgctgctctcactggcaatcggcgtagtgctgacccgcacgctgc

SEQ ID NO: 845576 - DNA, 75 bp, synthetic construct
  source 1..75: mol_type = other DNA
accctggcgcgtcaggtgacgctgaacgttgcaccgctgatgcgtaccgactcaccggatgaaaaacgcattcag

SEQ ID NO: 845577 - DNA, 75 bp, synthetic construct
  source 1..75: mol_type = other DNA
ctgttggttgacttcccggaacaggaaaaagagctacgggagttatcgacgtggatagcgggggcggtgcggtaa

SEQ ID NO: 845578 - DNA, 75 bp, synthetic construct
  source 1..75: mol_type = other DNA
cgttacacgtttttgatgataaatgcagtgtcggatgcggcgcatccgacacagttcaccccttgtgaagtaact

SEQ ID NO: 845579 - DNA, 75 bp, synthetic construct
  source 1..75: mol_type = other DNA
tttaaacaggggcctaccggtgaagagcgtactgtttatggcatctacggcattagtgaatccaacctcgctgag

SEQ ID NO: 845580 - DNA, 75 bp, synthetic construct
  source 1..75: mol_type = other DNA
atgacagtaaaaaccaaaagggcgcgcctactggcgcttacccgcgaaggcgcatcgtgccaatgtttcacagta

SEQ ID NO: 845581 - DNA, 75 bp, synthetic construct
  source 1..75: mol_type = other DNA
tcacatcaatcaaatgatggcacgctattcctgcctgcgggccttacgcactgagagatcccctcataatttccc

SEQ ID NO: 845582 - DNA, 75 bp, synthetic construct
  source 1..75: mol_type = other DNA
atgataaaaaagccgaaacagaaacgccccccccctgccaatagtcaccctgccgcaccagctcctgaagctccc

SEQ ID NO: 845583 - DNA, 75 bp, synthetic construct
  source 1..75: mol_type = other DNA
aattaataacctgatatcgcaagataagtttgatgcagaagcggcaatgaagaaagtgtctgaactggaaacgct

SEQ ID NO: 845584 - DNA, 75 bp, synthetic construct
  source 1..75: mol_type = other DNA
gggcctggcgattattttgattctggcgatggtagtgctgtttgccattgagtggctactgcggcggatcttccg

SEQ ID NO: 845585 - DNA, 75 bp, synthetic construct
  source 1..75: mol_type = other DNA
ataaatccgatagcagagaagaaattcttatttctttgttgttagacctggcaaatacacaggtttctctgacat

SEQ ID NO: 845586 - DNA, 75 bp, synthetic construct
  source 1..75: mol_type = other DNA
tctggcaccctgatccgtcgcgtcatcgttcgcttcgcttacagcggcatcccggcctcggtcctggaggcccaa

SEQ ID NO: 845587 - DNA, 75 bp, synthetic construct
  source 1..75: mol_type = other DNA
tgttgctgattgcggggatcgtggttggcccgatgattgccggtcatcagggttatgtgctgatccagaccgaca

SEQ ID NO: 845588 - DNA, 75 bp, synthetic construct
  source 1..75: mol_type = other DNA
tgaaaaccatgcagcacgccacggcgtggataagttgttggaagtaacgccacgccatccagaagtattacgtct

SEQ ID NO: 845589 - DNA, 75 bp, synthetic construct
  source 1..75: mol_type = other DNA
tgccgacgcgctggacagactgcacaagccggaagaagccgcagcgatgcgtcgcgacggtttgatgttaacgtt

SEQ ID NO: 845590 - DNA, 75 bp, synthetic construct
  source 1..75: mol_type = other DNA
attcgtgacagtcagtcgctgcctgcgtggtgtgcaaactgggcgcaggaggtcgacgcccggctggcgaaagag

SEQ ID NO: 845591 - DNA, 75 bp, synthetic construct
  source 1..75: mol_type = other DNA
cgcaggctatgcgttcgccagtgaccctcgagtacgatctggacgacgccggacgcggacatcgcgatcgggcgc

SEQ ID NO: 845592 - DNA, 75 bp, synthetic construct
  source 1..75: mol_type = other DNA
ccacccgctgaagcgtgcattacgcgcagataaaatgaccctcgcggcgctggaagccacgttgcgtctttattt

SEQ ID NO: 845593 - DNA, 75 bp, synthetic construct
  source 1..75: mol_type = other DNA
atggcacaattaccactcgcgagacgatgccggattttgtgcggcggtccgtgagccgacgtcgactgcttgtgg

SEQ ID NO: 845594 - DNA, 75 bp, synthetic construct
  source 1..75: mol_type = other DNA
ttcgtattcctgacgtaatgcgtcaggcaggctgcaccctgcacgaagtggggacgaccaaccgtacccacgcca

SEQ ID NO: 845595 - DNA, 75 bp, synthetic construct
  source 1..75: mol_type = other DNA
ttgccgacgctgcgtctgcttacccgcagtgcagaggtcattcaaatccaggcccagcgcctgcaagccccgctt

SEQ ID NO: 845596 - DNA, 75 bp, synthetic construct
  source 1..75: mol_type = other DNA
cgacattgatgggcctgatccagacgttcctctacctggatatttcacagaatacgagggaagggattcaaaagg

SEQ ID NO: 845597 - DNA, 75 bp, synthetic construct
  source 1..75: mol_type = other DNA
gggatattagcgccggtcaggttttaaaagacagtatccaggatgagcctaatttatttcaagccagctactact

SEQ ID NO: 845598 - DNA, 75 bp, synthetic construct
  source 1..75: mol_type = other DNA
gtggaaccgctgttctccaactttggcggacgggcgtcgtttggcggacaaataatcacggtaaaatgtttcgag

SEQ ID NO: 845599 - DNA, 75 bp, synthetic construct
  source 1..75: mol_type = other DNA
gccctgcccgttttaatcgtgaacaactggcagcgattgtaaaagcgtactatcaagcaccgaaaggtaaagaga

SEQ ID NO: 845600 - DNA, 75 bp, synthetic construct
  source 1..75: mol_type = other DNA
cgtgcatttattggtgagatagcagaacgcgcaccacaagaaaaggagaaactgatgaccattgctgacagatta

SEQ ID NO: 845601 - DNA, 75 bp, synthetic construct
  source 1..75: mol_type = other DNA
ggattcagatgatgtatatcaccagccggcaacggttctttttgtcgtaaaaccatcggcgtggggacaacctcg

SEQ ID NO: 845602 - DNA, 75 bp, synthetic construct
  source 1..75: mol_type = other DNA
agctggtcagattactgggcctccgggcaaaacagtactaattactctattggttatagcaatagtgcgtcctgg

SEQ ID NO: 845603 - DNA, 75 bp, synthetic construct
  source 1..75: mol_type = other DNA
tttatggccattcctttggtaccaccaccgggacttacgcccagctcggtaccaaaggtgagctgcgcaataacc

SEQ ID NO: 845604 - DNA, 75 bp, synthetic construct
  source 1..75: mol_type = other DNA
ggaaccctcatgaaccagttgcgcattttcgcgctgctcaatcagttccgcactcgggctgaatcaacaggagct

SEQ ID NO: 845605 - DNA, 75 bp, synthetic construct
  source 1..75: mol_type = other DNA
aaaagttggattgtagggaatgtatattccacattagaacacggaaaagaatattctgaacaggaactaagaaaa

SEQ ID NO: 845606 - DNA, 75 bp, synthetic construct
  source 1..75: mol_type = other DNA
aaatccctacataaagttgatttgaaattctttgttcaggttgacggtgaaatggtagaagcaacaggaatttga

SEQ ID NO: 845607 - DNA, 75 bp, synthetic construct
  source 1..75: mol_type = other DNA
ggctgcgggaacggccacggcagggacggcataccgctgttcatcggcctccatggctgccgggctgtgcgggga

SEQ ID NO: 845608 - DNA, 75 bp, synthetic construct
  source 1..75: mol_type = other DNA
acggcgtatcaaaaaaacgatactgctgcggaggtctggatccttccgctggctgatgatgcggattcgatggca

SEQ ID NO: 845609 - DNA, 75 bp, synthetic construct
  source 1..75: mol_type = other DNA
tttttcgacagttctgtttctgctcattgttatctgcagtgtggctggcgttgtgaatgcactggctgtgcggcg

SEQ ID NO: 845610 - DNA, 75 bp, synthetic construct
  source 1..75: mol_type = other DNA
taaagatgacgcaatgtatgtcagcgttagcgtgccttttgagaatattttcggtggcaaacgcaagacttccgg

SEQ ID NO: 845611 - DNA, 75 bp, synthetic construct
  source 1..75: mol_type = other DNA
tccgcaagtctggatcatgcgtaattaccagggctatgttgatccttcactatgggaggatggtataaatgcagc

SEQ ID NO: 845612 - DNA, 75 bp, synthetic construct
  source 1..75: mol_type = other DNA
tttacgtcaataatatttccgccagcagcctgaacatcgaaatgattgatgtgggcaagagaaacgccgaagcct

SEQ ID NO: 845613 - DNA, 75 bp, synthetic construct
  source 1..75: mol_type = other DNA
gctgcttttaatggcggtatgaatttaggagcatggcggttacgcgctaccggtaactacagttggaggaatgat

SEQ ID NO: 845614 - DNA, 75 bp, synthetic construct
  source 1..75: mol_type = other DNA
taatgacagcgtctatggcgcatttaactcaggtataaatttgggtgcctggcacttccgtgcgcgaggtaacta

SEQ ID NO: 845615 - DNA, 75 bp, synthetic construct
  source 1..75: mol_type = other DNA
cagagaaggtgaagaagaggattgtctggatttggcaaagtcatacgaaaaggcggatgtgcgctttgacggcag

SEQ ID NO: 845616 - DNA, 75 bp, synthetic construct
  source 1..75: mol_type = other DNA
acctcggtacgccgcagctgaaagcatctacgtcgattaacgtcccggacccgacgccgtttgtaacttatttct

SEQ ID NO: 845617 - DNA, 75 bp, synthetic construct
  source 1..75: mol_type = other DNA
ctttggcagcagtaccgtggaccgatttggctacggggtaaccagtgcgctttctccgtatcatgaaaacaccgt

SEQ ID NO: 845618 - DNA, 75 bp, synthetic construct
  source 1..75: mol_type = other DNA
tagccgcgaaggtggctttaggacactgaataccagcgtcaacagcgatatgaagggcagttcgcaatacaacgc

SEQ ID NO: 845619 - DNA, 75 bp, synthetic construct
  source 1..75: mol_type = other DNA
caaaacctgtattgcgcagtaccagcaacccaatgtgacatcggagaaaatccagcaaacgattattctcaataa

SEQ ID NO: 845620 - DNA, 75 bp, synthetic construct
  source 1..75: mol_type = other DNA
atagcgtgaacgcgggttatgggatgaataaaaccggcaaagatctcagcaacatcgggggttatgccagctatg

SEQ ID NO: 845621 - DNA, 75 bp, synthetic construct
  source 1..75: mol_type = other DNA
cgctcgcagctcattatgggggaatcctacaccacaggtgaaacgttcgactccgttagtatccgcggcattcgc

SEQ ID NO: 845622 - DNA, 75 bp, synthetic construct
  source 1..75: mol_type = other DNA
aacgacgcactgactttaatcgacgaagtaaaacatccggaacaggacctcgaaccgcaaaccatgcgtaactac

SEQ ID NO: 845623 - DNA, 75 bp, synthetic construct
  source 1..75: mol_type = other DNA
gtgtgggaagatgggacatcagtgcaggtaagatcttaaaagacgatattcaaaatgagcctaatttgttccagg

SEQ ID NO: 845624 - DNA, 75 bp, synthetic construct
  source 1..75: mol_type = other DNA
cgcagcctgtataacacgtaaaaatctggcacaactgcatattaaacaaccagaacacgccattactctgctcgc

SEQ ID NO: 845625 - DNA, 75 bp, synthetic construct
  source 1..75: mol_type = other DNA
atcgcctaccgaaaaaaacacttttggctgcatgttgtgcttttttctatagcggcaacgccgcggcaacagaaa

SEQ ID NO: 845626 - DNA, 75 bp, synthetic construct
  source 1..75: mol_type = other DNA
ttaagcccttaccgcgagaaccgggtagatcttgatatcgactcgatggaagacaacgttgagttaaaaagtacc

SEQ ID NO: 845627 - DNA, 75 bp, synthetic construct
  source 1..75: mol_type = other DNA
atcaacgttcctcaagcctggataatgaagaattaccaaaactatgttgatccgtcattgtgggaaaacggtatt

SEQ ID NO: 845628 - DNA, 75 bp, synthetic construct
  source 1..75: mol_type = other DNA
gcagcaatcaactcagtatcagcagtagtggttatagcaccgaaaaccatatcagttatagcgtcaatacaggct

SEQ ID NO: 845629 - DNA, 75 bp, synthetic construct
  source 1..75: mol_type = other DNA
ttccggacgataaaacctaccaggggcaaagctatcgcctctcatggaacaaattattcgaaaataccaacacat

SEQ ID NO: 845630 - DNA, 75 bp, synthetic construct
  source 1..75: mol_type = other DNA
ccagttattactatggtttaaacaactatctgaccggttataccgggatccagcttactgacaatcattacactg

SEQ ID NO: 845631 - DNA, 75 bp, synthetic construct
  source 1..75: mol_type = other DNA
tgagaagcaggattacggttcattctatctcactggtgattggtcagattactgggcttccgggcaaaatcgcag

SEQ ID NO: 845632 - DNA, 75 bp, synthetic construct
  source 1..75: mol_type = other DNA
tgcacagccagaaacacttggaagtacaaacaccttattattaaacaaccttacctgtaagttggttaaccacta

SEQ ID NO: 845633 - DNA, 75 bp, synthetic construct
  source 1..75: mol_type = other DNA
actttcaggatcgttacttacagcgtgacatcccggcaatacgctcacaagtgatcgtgggtgatgcctatacca

SEQ ID NO: 845634 - DNA, 75 bp, synthetic construct
  source 1..75: mol_type = other DNA
gatgttaaacgttattcacagggtaatccaacgccgcctggcgtttataacgtccgcgtgtttgtcaatcagcaa

SEQ ID NO: 845635 - DNA, 75 bp, synthetic construct
  source 1..75: mol_type = other DNA
aagggcaacccggtgagtggatgtcgctggtcggtcttaatgccgatgattttccgccagccaatgaaccggtaa

SEQ ID NO: 845636 - DNA, 75 bp, synthetic construct
  source 1..75: mol_type = other DNA
acgttgaagtacggtaataagagcgttccattcggtgcaattgtcacacacggagagaataaaaatggcagcatt

SEQ ID NO: 845637 - DNA, 75 bp, synthetic construct
  source 1..75: mol_type = other DNA
ggtgaaactccccggtcttgaggcccgccgttcggcggatgaatggttatgtcgttacgacttgccgaaagtctg

SEQ ID NO: 845638 - DNA, 75 bp, synthetic construct
  source 1..75: mol_type = other DNA
atgccaaaactccccgcaccactgcgtaaaaagctgattgcccttgttctggccggtgccgggacgttcaccatt

SEQ ID NO: 845639 - DNA, 75 bp, synthetic construct
  source 1..75: mol_type = other DNA
gggtcacctggcgagcggattgatattatctcttcctattttgtgccgacgcgtgcaggtgtggcacaactgtta

SEQ ID NO: 845640 - DNA, 75 bp, synthetic construct
  source 1..75: mol_type = other DNA
tctgttacgcgcacagccgataaagattcagctaaaacttttgtgcaggaaactctgaaagatacctgggggtct

SEQ ID NO: 845641 - DNA, 75 bp, synthetic construct
  source 1..75: mol_type = other DNA
atgcgtattgagatctgcatagccaaagagaaaatgaacaaaatgccaaacggtgctgtggatgcgttaaaggaa

SEQ ID NO: 845642 - DNA, 75 bp, synthetic construct
  source 1..75: mol_type = other DNA
aatatttacctggcaaccatgtattcagaaacgcgtaatatgaccccgtttggcgacagcgattatgctgttgca

SEQ ID NO: 845643 - DNA, 75 bp, synthetic construct
  source 1..75: mol_type = other DNA
agaataaaaatggcagcattgtcgcggaaaacggtcaggtttatctgactggacttccacagtcagggaaattac

SEQ ID NO: 845644 - DNA, 75 bp, synthetic construct
  source 1..75: mol_type = other DNA
gtcagggaaattacaggtttcatggggcaatgataaaaactcaaactgtattgtcgattacaagcttcctgcagt

SEQ ID NO: 845645 - DNA, 75 bp, synthetic construct
  source 1..75: mol_type = other DNA
cagtcaggagaacaacataactgacagtaatcagggcagcagtaatcagaatcagaacaggaggaaaaagagaat

SEQ ID NO: 845646 - DNA, 75 bp, synthetic construct
  source 1..75: mol_type = other DNA
ttcaggtcggtaacacccaagggggtaatacatcgtctggcaccagtggttacagttctcttaattatcgtggag

SEQ ID NO: 845647 - DNA, 75 bp, synthetic construct
  source 1..75: mol_type = other DNA
aacatttatctggcaaccatgtattccgaaacgcgtaatatgacaccatttggcaacagcgattacgccgttgcg

SEQ ID NO: 845648 - DNA, 75 bp, synthetic construct
  source 1..75: mol_type = other DNA
cgtattgagctacctgcgtcctggtacaacgacaccgagacacatcgctatttgtgcaaaatggagttaagcccg

SEQ ID NO: 845649 - DNA, 75 bp, synthetic construct
  source 1..75: mol_type = other DNA
aagaaaaattcagcaaaatgccaaaaggctctgtacctgctctacaacaggaaatgtctcgccgtaccagaaaac

SEQ ID NO: 845650 - DNA, 75 bp, synthetic construct
  source 1..75: mol_type = other DNA
gtagaggtgatcgtaaaagccaccagcaacgatggcctttctgttacgcgcaccgccgataaagattcagctaaa

SEQ ID NO: 845651 - DNA, 75 bp, synthetic construct
  source 1..75: mol_type = other DNA
tcagttacccgcatcaccgataaagattctgcaaaaacatttgttcaggagactctgaaagatacctgggagtct

SEQ ID NO: 845652 - DNA, 75 bp, synthetic construct
  source 1..75: mol_type = other DNA
gtgaagaagagtacgcccagcaggtagagtatgtgcgcctgtttttatccggtaaggacgatcaggtgcttactc

SEQ ID NO: 845653 - DNA, 75 bp, synthetic construct
  source 1..75: mol_type = other DNA
gcgatacccatccgcgtctggctatgcatcgcggtgcaaagcacgccaaaggtgaatatttcggcccgttcccaa

SEQ ID NO: 845654 - DNA, 75 bp, synthetic construct
  source 1..75: mol_type = other DNA
tctgttacacgcaccgcagataaggattctgcaaaaacttttgttcaggagactctgaaagatacttgggaatct

SEQ ID NO: 845655 - DNA, 75 bp, synthetic construct
  source 1..75: mol_type = other DNA
gggcttaatagccctgactttatgcagcgcctttatgtcgattcagtacccaacaatcttctcgctgggcattaa

SEQ ID NO: 845656 - DNA, 75 bp, synthetic construct
  source 1..75: mol_type = other DNA
aagagaaaatgactaaaatgccaaacggtgctgtggatgcgttaaaggaagaattaacccgacgcatcagtaaac

SEQ ID NO: 845657 - DNA, 75 bp, synthetic construct
  source 1..75: mol_type = other DNA
cgcatcgatattatttcggcctattttgtgccgacgcgcgcaggcgtggcgcagttactacgaatggtcagaaga

SEQ ID NO: 845658 - DNA, 75 bp, synthetic construct
  source 1..75: mol_type = other DNA
tctgttacacgcatcgcagataaggattctgcaaaaacttttgttcaggagactctgaaagatacctgggaatct

SEQ ID NO: 845659 - DNA, 75 bp, synthetic construct
  source 1..75: mol_type = other DNA
gaactgatccccgcactctgcttcgcagtcatctttatctttgcccgtttccgttctcaaacggcaactaactga

SEQ ID NO: 845660 - DNA, 75 bp, synthetic construct
  source 1..75: mol_type = other DNA
aatcttctcgctgggcattaagaatctcggccaggacaccaaatacggttcgtccttcatcgttatgaccatcat

SEQ ID NO: 845661 - DNA, 75 bp, synthetic construct
  source 1..75: mol_type = other DNA
atcgtgtcgctcttaacgcgaattcccttgcagataatgttgaactggatgaaaccgtagtcactgtcatcccaa

SEQ ID NO: 845662 - DNA, 75 bp, synthetic construct
  source 1..75: mol_type = other DNA
aaagcgcagcattcggcgctggacgatattcctcgtagtttaccggctttaatgcgtgcgcaaaaaatccagaaa

SEQ ID NO: 845663 - DNA, 75 bp, synthetic construct
  source 1..75: mol_type = other DNA
tgctggtttatcgtccgccgatcgacacccgttcggtgaaagaagtgatgggccagaaatccaatggcaacccgg

SEQ ID NO: 845664 - DNA, 75 bp, synthetic construct
  source 1..75: mol_type = other DNA
accggttaaaagagaaacgtaaagcaggagtgctgaccaaaaacacaacgccaatcagtgatgatgaaatggtgg

SEQ ID NO: 845665 - DNA, 75 bp, synthetic construct
  source 1..75: mol_type = other DNA
agagcgtcgccatccgcatgtttttgctgacagttctgccgaaaacagtagtgaagtgcttgcccgttgggagca

SEQ ID NO: 845666 - DNA, 75 bp, synthetic construct
  source 1..75: mol_type = other DNA
taaagtctacgaagagatcgacgaggtgatgtacgaggcgcggcaggctgttatcgaccaggctaaactggagga

SEQ ID NO: 845667 - DNA, 75 bp, synthetic construct
  source 1..75: mol_type = other DNA
cagtctggccgacatgaatgacccaagccttatcgccgttcgtcgtgcgattactgatgacatcgccggcctttc

SEQ ID NO: 845668 - DNA, 75 bp, synthetic construct
  source 1..75: mol_type = other DNA
ctagagcaggcaaatcgtcagcaggaaacgctggccaaacagctggatgaagttcaacaaaaggtcgccactatc

SEQ ID NO: 845669 - DNA, 75 bp, synthetic construct
  source 1..75: mol_type = other DNA
taagccagcaaaatatctcgatggatcttccggaaaccctgcaaagccaggcgatgctggaaaaactgatgcaga

SEQ ID NO: 845670 - DNA, 75 bp, synthetic construct
  source 1..75: mol_type = other DNA
ctgggaagcgaaaagcgactgggaaatctacaaagccatcgcgaagaaattctccgaagtgtgcgttggtcatct

SEQ ID NO: 845671 - DNA, 75 bp, synthetic construct
  source 1..75: mol_type = other DNA
gcggggacaacggaagctaaacctgcacctgcaccgcaagctgatactccggcagccgcgccgcaaggagaataa

SEQ ID NO: 845672 - DNA, 75 bp, synthetic construct
  source 1..75: mol_type = other DNA
accagcagcagaggctaaacctgcacctgcacctgcaccgcaagctgatactccggcagccgcgccgcaaggaga

SEQ ID NO: 845673 - DNA, 75 bp, synthetic construct
  source 1..75: mol_type = other DNA
atgcatgaactggagacactgctgggtcgtcttaaaatggaacatctgggctaccacgttgaaagcctgctggag

SEQ ID NO: 845674 - DNA, 75 bp, synthetic construct
  source 1..75: mol_type = other DNA
atgttccttcaacgccggggcgcgcatggaatatgctggtggcacttcaggcaggaaacatcgtcgcccgttatg

SEQ ID NO: 845675 - DNA, 75 bp, synthetic construct
  source 1..75: mol_type = other DNA
gcagaaatgcctgcccttattatggcggaagtgacgcctgaacgagtgcgtcaggtgcgcgcgcaacttccagta

SEQ ID NO: 845676 - DNA, 75 bp, synthetic construct
  source 1..75: mol_type = other DNA
atgactacgcacaacttcaatactctggacttattaacaagtcctgtctggagcgtttcccctttcgaggaaaaa

SEQ ID NO: 845677 - DNA, 75 bp, synthetic construct
  source 1..75: mol_type = other DNA
cggaagtgacacctgaacgcgtgcgtcaggtacgtgcacaactccccgtcttaaacaaccgacggtttgcgccac

SEQ ID NO: 845678 - DNA, 75 bp, synthetic construct
  source 1..75: mol_type = other DNA
tactggaggtcgaaggcatgaaagttgggctgatgacctgctatgacttacgctttccggagctggcgttggcac

SEQ ID NO: 845679 - DNA, 75 bp, synthetic construct
  source 1..75: mol_type = other DNA
ctgttacatctgtgtgggaaaagaacgctgagatttgtgcctcgttgatggcgcaggcggcggaaaacgaggttt

SEQ ID NO: 845680 - DNA, 75 bp, synthetic construct
  source 1..75: mol_type = other DNA
catcgggtactgttcatgccactggataagctgatcgccacactcatgaaggcaaaacaggaaaaccggctggaa

SEQ ID NO: 845681 - DNA, 75 bp, synthetic construct
  source 1..75: mol_type = other DNA
tcaacatgctgattttctgcggctgtgtcggtcagagcggcggcggctgggcgcactatgtaggtcaggaaaaac

SEQ ID NO: 845682 - DNA, 75 bp, synthetic construct
  source 1..75: mol_type = other DNA
accgcgagttcctgtgcatggcgttgcagcaggaatggaacgggaggcatcagcgcagtatggagtcccggctga

SEQ ID NO: 845683 - DNA, 75 bp, synthetic construct
  source 1..75: mol_type = other DNA
cgggattactcaaccgtcggcagttttatcacataactgaccccggacagatgcagcacctggcaatagctcagg

SEQ ID NO: 845684 - DNA, 75 bp, synthetic construct
  source 1..75: mol_type = other DNA
actggacagactgatcgcgacactgatgaaagcgaaacaggaaaaccggctggagcgtcagctacagcaactgag

SEQ ID NO: 845685 - DNA, 75 bp, synthetic construct
  source 1..75: mol_type = other DNA
cgcaatccacctttcatttgacatatgggttacctgtccactcacctcacctgacgatataaaaaatttcagaaa

SEQ ID NO: 845686 - DNA, 75 bp, synthetic construct
  source 1..75: mol_type = other DNA
agtcctttcagttacctcctcccggagaacgaacatgaatgcatatggacatggaattatttgaagggaaaaaat

SEQ ID NO: 845687 - DNA, 75 bp, synthetic construct
  source 1..75: mol_type = other DNA
tccctggtgcccctggaaaaaatatcctggatcgcgggcagtgaacgtgcatgcttattttcctggtatctgttg

SEQ ID NO: 845688 - DNA, 75 bp, synthetic construct
  source 1..75: mol_type = other DNA
acttggtgcagagaaaaccttcaacaatatctacatggccagtggtgatggcacagtccgactgaatgcagaaaa

SEQ ID NO: 845689 - DNA, 75 bp, synthetic construct
  source 1..75: mol_type = other DNA
ccttttgccgggatgccaggagcgcaggccacggcgcgacagaggcggcgcgaccgttcggtcgctgcaagcccg

SEQ ID NO: 845690 - DNA, 75 bp, synthetic construct
  source 1..75: mol_type = other DNA
ataaagtcaatgtacagttttttcttgacgcagaaaccagggcgcagctcaaagaattatcgagggtcagaagac

SEQ ID NO: 845691 - DNA, 75 bp, synthetic construct
  source 1..75: mol_type = other DNA
gttatgcggaaatcagtcgggaaatgttggcctccggcgactggattgtgccccatctgttagggctacgctatt

SEQ ID NO: 845692 - DNA, 75 bp, synthetic construct
  source 1..75: mol_type = other DNA
atgaaatcggtacgttaccttattggcctcttcgcatttattgcctgttattacctgttaccgatcagcacgcgt

SEQ ID NO: 845693 - DNA, 75 bp, synthetic construct
  source 1..75: mol_type = other DNA
aggaggggattattacactcgtactcacgattgaccgcgataaagatatcaacagccttgccattccgcccgctg

SEQ ID NO: 845694 - DNA, 75 bp, synthetic construct
  source 1..75: mol_type = other DNA
gagacagcgaataacaaaaatacttaatgagtccgatacaaggcgggttgcagaagagattaaattccggattca

SEQ ID NO: 845695 - DNA, 75 bp, synthetic construct
  source 1..75: mol_type = other DNA
attaagtatcggatccgatatattcaggatgataaacaaaaggaagttctgattgagctggtaaatgattttaca

SEQ ID NO: 845696 - DNA, 75 bp, synthetic construct
  source 1..75: mol_type = other DNA
aacggttctcccctgggggctggcgatagcgcagcgggagcctgatttctggcactattttttctgggttgagca

SEQ ID NO: 845697 - DNA, 75 bp, synthetic construct
  source 1..75: mol_type = other DNA
cagaagcagatgctgtaaaacaaagcgggtatacttataaaaccagcaatgaagtctcggatttatctcagcctg

SEQ ID NO: 845698 - DNA, 75 bp, synthetic construct
  source 1..75: mol_type = other DNA
agagcgtcatcctgctgatgaccatcggcgaagaccgagcggcagaggtgttcaggcacctctccccgcgcgaga

SEQ ID NO: 845699 - DNA, 75 bp, synthetic construct
  source 1..75: mol_type = other DNA
ggcgtgccgctggtaaccggtgtaaatcttcttgagcaatatcctcaactaggtattaacggggcgctgctcgtt

SEQ ID NO: 845700 - DNA, 75 bp, synthetic construct
  source 1..75: mol_type = other DNA
gacgtgatggatagcggcggtgctgcgcttctttctggcgtacctctcctgaccggcgtgaacctattacgacaa

SEQ ID NO: 845701 - DNA, 75 bp, synthetic construct
  source 1..75: mol_type = other DNA
tacaccaacgtgacctatcccattacggtcaatccgccgtttgttcccacggagaatccgacgggttgttactcg

SEQ ID NO: 845702 - DNA, 75 bp, synthetic construct
  source 1..75: mol_type = other DNA
ggcgctttgcctggtttccggcaccagaagcggtaccagaaagctggctggagcgcgatcttcctgacgccgata

SEQ ID NO: 845703 - DNA, 75 bp, synthetic construct
  source 1..75: mol_type = other DNA
actgaagtgctcaatggcctgctcgacggacaaaacctcaaacgcagcaaaatgggtggcgtgagaacggcggct

SEQ ID NO: 845704 - DNA, 75 bp, synthetic construct
  source 1..75: mol_type = other DNA
tgactttatgttttacagggatatcccatgcttctgattcagaggaagatttgatcaaaaaaacattacagggcg

SEQ ID NO: 845705 - DNA, 75 bp, synthetic construct
  source 1..75: mol_type = other DNA
atcaaacatgcacggttcagacttaatgctgagttatcaaagctggattatcgggtgatgctgccaacttactga

SEQ ID NO: 845706 - DNA, 75 bp, synthetic construct
  source 1..75: mol_type = other DNA
ggaccagggaatgcatctgtccatgaaggacaaggactacaatccgctgattggccgaactggtgtggatgtggg

SEQ ID NO: 845707 - DNA, 75 bp, synthetic construct
  source 1..75: mol_type = other DNA
tatgacgataatgaccggatgtatgacactgatgaccctgacggatgctgcatcctgccgtcttccccggccctt

SEQ ID NO: 845708 - DNA, 75 bp, synthetic construct
  source 1..75: mol_type = other DNA
atggatgcgggcatttaaatcaaagagtgaaccgccccgggaatcctggagactaaactccctgagaaagaggta

SEQ ID NO: 845709 - DNA, 75 bp, synthetic construct
  source 1..75: mol_type = other DNA
cgctttattaccggactgtgcgggaggctttgcaccttgaacagtccggcgggtacgaccgggcgatgcaggtct

SEQ ID NO: 845710 - DNA, 75 bp, synthetic construct
  source 1..75: mol_type = other DNA
tcgatccgttaattgcgttatggctgatagctggaatgtgcagcttctggttagcaatggaagcgcaaacctgga

SEQ ID NO: 845711 - DNA, 75 bp, synthetic construct
  source 1..75: mol_type = other DNA
atgaaccagctacctcgccgtgcgctttcgcgttatggtctgacttttcatggaaatatcctttcagtaaactgt

SEQ ID NO: 845712 - DNA, 75 bp, synthetic construct
  source 1..75: mol_type = other DNA
ctacgacctctctagggatcaggaagggttctactgccgggaagtggttaaacgaatgttcgaaacgtggtgcca

SEQ ID NO: 845713 - DNA, 75 bp, synthetic construct
  source 1..75: mol_type = other DNA
agcttgccgtagtggggagtcgggcgcattcatggtatggcgagcgatggggacgattattttgcgaaactctgg

SEQ ID NO: 845714 - DNA, 75 bp, synthetic construct
  source 1..75: mol_type = other DNA
ataataactgataaatcaccgggtgcagagtggatagcattttgcaaagacaataatatccagctggtgtggtaa

SEQ ID NO: 845715 - DNA, 75 bp, synthetic construct
  source 1..75: mol_type = other DNA
agaacctatggtggtgctgttttaaatacagcgatgttgacggagaatatccatttttataagcgtgcttcatcg

SEQ ID NO: 845716 - DNA, 75 bp, synthetic construct
  source 1..75: mol_type = other DNA
tctgcgcttatatcgtttccccggttctgttttgaccgattaccgaatactgaagaattacgccaaaaccctgac

SEQ ID NO: 845717 - DNA, 75 bp, synthetic construct
  source 1..75: mol_type = other DNA
ggggaataacgttatcgttatccgcaacaaggtcagcggcgacatcatcacggcacgcagtgttgcgttccagaa

SEQ ID NO: 845718 - DNA, 75 bp, synthetic construct
  source 1..75: mol_type = other DNA
ggggaacaacgtcattgtgatccgtaacaaggtgagcggtgacatcatcacggcgcgcagcgtggcgttccagaa

SEQ ID NO: 845719 - DNA, 75 bp, synthetic construct
  source 1..75: mol_type = other DNA
gttcaccagcgactgaccgcgcttgccagcgtgttgaaattgccggaagtgaagcggatggagtgctttgacatc

SEQ ID NO: 845720 - DNA, 75 bp, synthetic construct
  source 1..75: mol_type = other DNA
gtctgatgagtgtgagtaccttgtacggcgatgatatggttcgtattgctcactggttggtagaacagccgcata

SEQ ID NO: 845721 - DNA, 75 bp, synthetic construct
  source 1..75: mol_type = other DNA
tgacctgacgcgagacgttgacggcttctactgtcgtgaagttgtgaggcgaatgtttgaagtgtggtgccactg

SEQ ID NO: 845722 - DNA, 75 bp, synthetic construct
  source 1..75: mol_type = other DNA
ggtttctactgtcgtgaaattgtgaaacgaatgtttgaagtgtggtgccactgccgtgggctgagtgttgtgtga

SEQ ID NO: 845723 - DNA, 75 bp, synthetic construct
  source 1..75: mol_type = other DNA
tatctgggatatctggcgggttatcagcatattaatgattgtatggaagatgataattatcgccgtgcagcgctt

SEQ ID NO: 845724 - DNA, 75 bp, synthetic construct
  source 1..75: mol_type = other DNA
ccctattttacatggccattaattgcctctgcgggggggtacgtatttaaaaagaccgataacggttacgataca

SEQ ID NO: 845725 - DNA, 75 bp, synthetic construct
  source 1..75: mol_type = other DNA
atgatgtttgagttttatgtgacagaacgtcttcgccaccgctggatgcgcctgcgcttatatcgtttccccggt

SEQ ID NO: 845726 - DNA, 75 bp, synthetic construct
  source 1..75: mol_type = other DNA
aggctacgcttcctgtctatgagcgtaataatttgatacctcgaattgttcatttaggttttggcgcatttcatc

SEQ ID NO: 845727 - DNA, 75 bp, synthetic construct
  source 1..75: mol_type = other DNA
attgactgcgctcctggttagctggtttgcctggcgtttatggcgagataagcgcctggcgcttctcgccatgct

SEQ ID NO: 845728 - DNA, 75 bp, synthetic construct
  source 1..75: mol_type = other DNA
agtctcgccattccgcccgcagatgccatcgatcgtcaggagcgtctggtgctgattcagtatcggcccaaatga

SEQ ID NO: 845729 - DNA, 75 bp, synthetic construct
  source 1..75: mol_type = other DNA
cagcaaaaaataatcctctggcgttgcggattaatggctggattaacatcgcttttggcgtcactggcattattg

SEQ ID NO: 845730 - DNA, 75 bp, synthetic construct
  source 1..75: mol_type = other DNA
catttagggtttggcgcatttcatcgcgcgcatcagggcgtgtatgccgatatcctggctgcccagcatcacagc

SEQ ID NO: 845731 - DNA, 75 bp, synthetic construct
  source 1..75: mol_type = other DNA
gcgtgacgttgtcacttcctacgcgcaagctgttgatgtaaaactggcacaatggatcgaagaaaacgtgacttt

SEQ ID NO: 845732 - DNA, 75 bp, synthetic construct
  source 1..75: mol_type = other DNA
caaaagtgacggaagcgtacttgtctttattagcgcatggcgcgaaagcgaccgtggcgaaatattccgtgaagt

SEQ ID NO: 845733 - DNA, 75 bp, synthetic construct
  source 1..75: mol_type = other DNA
tatttatcgataaaatgacggaagcgtacctggctttattagccgatggggcaaaagcgacggtggcgaaatatt

SEQ ID NO: 845734 - DNA, 75 bp, synthetic construct
  source 1..75: mol_type = other DNA
tccagaatgggaaaaagcgggagccgaactggttagtgatgtgctgccttatggcaagattacgctaaccgatta

SEQ ID NO: 845735 - DNA, 75 bp, synthetic construct
  source 1..75: mol_type = other DNA
gcgtgacgttgtcacttcatacgccagagcagtggatgtaaaactggcgcaatggatagaggaaaacgtgacttt

SEQ ID NO: 845736 - DNA, 75 bp, synthetic construct
  source 1..75: mol_type = other DNA
cgacttggttttttgagtaaacgtgtcctgttacaaaaaaaactagaaaatgaaattaatgcaaaaaaagaagcc

SEQ ID NO: 845737 - DNA, 75 bp, synthetic construct
  source 1..75: mol_type = other DNA
cgcactaaccagcaggctgaattctctaccgcaaaaggcgataaggctgacgcctggactgccggggcaaaatac

SEQ ID NO: 845738 - DNA, 75 bp, synthetic construct
  source 1..75: mol_type = other DNA
ctatatgaccggtcgagccaatggcgtagcaacctatcgtaatactgatttcttcggtctggttgatggtctgaa

SEQ ID NO: 845739 - DNA, 75 bp, synthetic construct
  source 1..75: mol_type = other DNA
cgcgcgagccgtttaatccgtcctgggctgttcgggcactggtcagttatgaccactggctgtggcagcgtgtca

SEQ ID NO: 845740 - DNA, 75 bp, synthetic construct
  source 1..75: mol_type = other DNA
atggcgtttaccctaagcgcctataacggcggtcaggggtgggttaaccgggataaaaaactggctgcatccaaa

SEQ ID NO: 845741 - DNA, 75 bp, synthetic construct
  source 1..75: mol_type = other DNA
aaacttcagcttaggttagtttggcatggtggtaatggtttcgttattaatgatattgcaccttcgaataacatt

SEQ ID NO: 845742 - DNA, 75 bp, synthetic construct
  source 1..75: mol_type = other DNA
taccaacgccagtgcaccagctttagctggcgaagcgttagaaaaactggtgtcggagtacaatgcggcgcagaa

SEQ ID NO: 845743 - DNA, 75 bp, synthetic construct
  source 1..75: mol_type = other DNA
gctggcgaagcgttagagaaactggtatctgagtacaacgcgacgcagaaaatgatcaaccgcatggagcgtcgt

SEQ ID NO: 845744 - DNA, 75 bp, synthetic construct
  source 1..75: mol_type = other DNA
gcgacggcaaagaagaccactttcactatgaaggcggcatcaaggcgttcgttgaatatctgaacaagaacaaaa

SEQ ID NO: 845745 - DNA, 75 bp, synthetic construct
  source 1..75: mol_type = other DNA
tctattacttacaattatgaaggctttggtatcggtgctgcagtttccagctccaaacgtacctgggatcagaac

SEQ ID NO: 845746 - DNA, 75 bp, synthetic construct
  source 1..75: mol_type = other DNA
gcgatggatcagtatcaaatttccatcgcgctggatggcgcaacgttgcacaccaatgccagtgcaccagcgctg

SEQ ID NO: 845747 - DNA, 75 bp, synthetic construct
  source 1..75: mol_type = other DNA
tgggaaactaccatggacccggaaagccgtcgtatgctgcgcgttaccgttaaagatgcgattgctgccgaccag

SEQ ID NO: 845748 - DNA, 75 bp, synthetic construct
  source 1..75: mol_type = other DNA
ggcggtctgggctgggtacaacgggacaaacggctggcttcacagcaggggctggacagccagcgctggtttggt

SEQ ID NO: 845749 - DNA, 75 bp, synthetic construct
  source 1..75: mol_type = other DNA
aagaatatttgcagtcttgtgaaattgccattcagcgttgtcaacagcggctggagtatgacgaaccgggaagct

SEQ ID NO: 845750 - DNA, 75 bp, synthetic construct
  source 1..75: mol_type = other DNA
aggagtatttgcagtcttgtgaaatcgctattcaacgctgtcagcagcgcctggaatatgatgaaccgggtagtt

SEQ ID NO: 845751 - DNA, 75 bp, synthetic construct
  source 1..75: mol_type = other DNA
aggcgctggatttgcaggaacatatttcggtcagtttgcatcagccggaagaggtgcaaaaactggtcgagcgta

SEQ ID NO: 845752 - DNA, 75 bp, synthetic construct
  source 1..75: mol_type = other DNA
aaccgctacgcgagtcactaagcttgctgtaccgtgaactggcggattattgcgaaaccaaatacagcctgctta

SEQ ID NO: 845753 - DNA, 75 bp, synthetic construct
  source 1..75: mol_type = other DNA
caccatgcacaccatttcgtcgatggcgtggcgacagcgaccgcatcacgggatttggttgaaccgcaagttgcg

SEQ ID NO: 845754 - DNA, 75 bp, synthetic construct
  source 1..75: mol_type = other DNA
ctggcagcgaatgcgggtgaatcaggcgcataacaccctgtataactcattgaatcaggcgatgcaggaaccggc

SEQ ID NO: 845755 - DNA, 75 bp, synthetic construct
  source 1..75: mol_type = other DNA
aatgcggccagctggcgggagaaccgtcattatccgcagcgcatcctgcgtgagctggcaccgcgatatctcaca

SEQ ID NO: 845756 - DNA, 75 bp, synthetic construct
  source 1..75: mol_type = other DNA
tggcccgggctgggtgcgtcgtgaccagcggctcgccgcacatctggggctggacagtcagcgctggttcggaca

SEQ ID NO: 845757 - DNA, 75 bp, synthetic construct
  source 1..75: mol_type = other DNA
gcgccgccagcaactgtgagcgtatggccatgacgctgtcgggctataacggcggtctgggctgggtacagcggg

SEQ ID NO: 845758 - DNA, 75 bp, synthetic construct
  source 1..75: mol_type = other DNA
ctggcgatgccaatatcatggatgcgccggagatgcagccgcacgaaggcgcggcaggtacgctggagcagcatt

SEQ ID NO: 845759 - DNA, 75 bp, synthetic construct
  source 1..75: mol_type = other DNA
agagcgggttattgcgtaaaaacgcccatgacgctttagaagcctatcaggaagcgattcgcttgattcttagcg

SEQ ID NO: 845760 - DNA, 75 bp, synthetic construct
  source 1..75: mol_type = other DNA
ttcctggacacgtctgggctttgccggactgaaatatggcaatttcggttcatttgactacggtcgtaattatgg

SEQ ID NO: 845761 - DNA, 75 bp, synthetic construct
  source 1..75: mol_type = other DNA
tctgggcagggcgttcagtatccaggattacatctggtaccagttgcctgatggttcgctttacgtcggcggcgc

SEQ ID NO: 845762 - DNA, 75 bp, synthetic construct
  source 1..75: mol_type = other DNA
aactactctgtaaaaattgctcgcaatgttcgctcactcaccctctggacagaacgcggcgcagcccgccacgct

SEQ ID NO: 845763 - DNA, 75 bp, synthetic construct
  source 1..75: mol_type = other DNA
taatctaatcgttttcatcctggcaatgttgctcccagtaacaacggttttcatttttatgttactgggcggtaa

SEQ ID NO: 845764 - DNA, 75 bp, synthetic construct
  source 1..75: mol_type = other DNA
cagcgtctgttcattcgtgagctggtaggtgtgtttgaaaggatgtggccgtgctcatttcaacatccaacttta

SEQ ID NO: 845765 - DNA, 75 bp, synthetic construct
  source 1..75: mol_type = other DNA
aaccaatgccggggcattcacacagacggcggagaaggccggacagacccgaagtaagtaccagaaaataatcgc

SEQ ID NO: 845766 - DNA, 75 bp, synthetic construct
  source 1..75: mol_type = other DNA
tgccaaaactggccagagtggtggcacccagcgaggctgtgaaaagtggtaattttgccgatccgttccggccgc

SEQ ID NO: 845767 - DNA, 75 bp, synthetic construct
  source 1..75: mol_type = other DNA
cgaaatcgctgtttaagatgatcaaaaacaccttcgaaaccacgccggatcacgttctctctgcttataaagata

SEQ ID NO: 845768 - DNA, 75 bp, synthetic construct
  source 1..75: mol_type = other DNA
ttgtaaggagcagacgtctggcaatatctatggcaaagcattggctgaaaaaggctatctcgttctcgcttatga

SEQ ID NO: 845769 - DNA, 75 bp, synthetic construct
  source 1..75: mol_type = other DNA
ggagccgtggggtaaagaagggcaacccggtgagtggatgtcgctggtcggtcttaatgccgatgattttccgcc

SEQ ID NO: 845770 - DNA, 75 bp, synthetic construct
  source 1..75: mol_type = other DNA
ccttatcattagtgataaaacattttttagaatacctgttgaaatgttagagggttggcagatctggcttgatga

SEQ ID NO: 845771 - DNA, 75 bp, synthetic construct
  source 1..75: mol_type = other DNA
accgacaagcagaagctgcacaaggattacagaataagccctgatgcgaggggacataatgactacagcgaacga

SEQ ID NO: 845772 - DNA, 75 bp, synthetic construct
  source 1..75: mol_type = other DNA
cagaaatacaaggggaagtactgaagaatattttgaaccagctaccagcaattaacgaaaatgatatattcatca

SEQ ID NO: 845773 - DNA, 75 bp, synthetic construct
  source 1..75: mol_type = other DNA
agattgccgcactgcgtaaatcagtggctgctggcggtcagcaggtcatgggggcaactgtccatattggcagtg

SEQ ID NO: 845774 - DNA, 75 bp, synthetic construct
  source 1..75: mol_type = other DNA
caatgccggagcgtttacccggacggcgacaaaggccggacagacccggagcaagtaccagaacatcattgcctg

SEQ ID NO: 845775 - DNA, 75 bp, synthetic construct
  source 1..75: mol_type = other DNA
agaccgatcaaaccatcagtgaaacatcgatggcgcgaaccgtaaaagccgatacggagcagcgcgaactggtca

SEQ ID NO: 845776 - DNA, 75 bp, synthetic construct
  source 1..75: mol_type = other DNA
accgtttatcaggcagacactgccggatggtaccagcctgccggatgttaaacccggtgagcagctgcaacagca

SEQ ID NO: 845777 - DNA, 75 bp, synthetic construct
  source 1..75: mol_type = other DNA
gatggtgatcagagttatgtacgttttggttttaaaggcgaaacacaaattactgatcaactaaccggctatggt

SEQ ID NO: 845778 - DNA, 75 bp, synthetic construct
  source 1..75: mol_type = other DNA
ttttgcgttacagtaccagggcgcgaatgaaaaccaggtcacccatgagcaagaaggtaccgcaaacggtggtga

SEQ ID NO: 845779 - DNA, 75 bp, synthetic construct
  source 1..75: mol_type = other DNA
ggctatcctgatctggtgctgcgctggttcactggttacgtggagcgatcccagccagctgaaaacggctttcag

SEQ ID NO: 845780 - DNA, 75 bp, synthetic construct
  source 1..75: mol_type = other DNA
acgtcagcggcgcactgactgagaaaatcagcggtatccgccgaagtgtggcccaggcgcaacagctgattgccc

SEQ ID NO: 845781 - DNA, 75 bp, synthetic construct
  source 1..75: mol_type = other DNA
gccaggaatcggcaggcggaaattcaatggttgtgccaatgattcagagcctgcgcccgggtgcggaggtaaacg

SEQ ID NO: 845782 - DNA, 75 bp, synthetic construct
  source 1..75: mol_type = other DNA
tgaccggtaaaaatttgaatattgaaaaaccagcacctgttgcttcagctacgccagcaccagccgtgaatgtca

SEQ ID NO: 845783 - DNA, 75 bp, synthetic construct
  source 1..75: mol_type = other DNA
gcagcccccttcagaaaacaccgacacaacgacagattgagagccattatccggaactggcttccgggcttcatc

SEQ ID NO: 845784 - DNA, 75 bp, synthetic construct
  source 1..75: mol_type = other DNA
cataacgttaccggtgatccagacgatacgacccggcgttgagcttaacggtgaacgggtcaccaaagtccatct

SEQ ID NO: 845785 - DNA, 75 bp, synthetic construct
  source 1..75: mol_type = other DNA
aaccaatgccggagcgttcacccagacagcgacaaaggccggacagacccggagcaagtaccagagcatcattgc

SEQ ID NO: 845786 - DNA, 75 bp, synthetic construct
  source 1..75: mol_type = other DNA
ggttcagaggagccgatggatctgttcaaacgcttccgtggtcgtgagccgcagctggatgcgatgctggagcat

SEQ ID NO: 845787 - DNA, 75 bp, synthetic construct
  source 1..75: mol_type = other DNA
acagcacctctacagcatcagcgacgagcagctgcgtccgtacttcccagaaaacaaagcggttaacggcctgtt

SEQ ID NO: 845788 - DNA, 75 bp, synthetic construct
  source 1..75: mol_type = other DNA
caattagagttcggtctgttcgatttccgcctccatgcagagtttcgcccggatcagggagcgaaaatcctcgaa

SEQ ID NO: 845789 - DNA, 75 bp, synthetic construct
  source 1..75: mol_type = other DNA
ccattcaactggatacccctatcaagcgcggtaaaacagaaattaccgaaattgtgctgcgtaaacctcagtctg

SEQ ID NO: 845790 - DNA, 75 bp, synthetic construct
  source 1..75: mol_type = other DNA
ggccattatggatatggatgtcaacgcgatgatgaccgtgatcccccgcatctccagcccggcactgactgcaca

SEQ ID NO: 845791 - DNA, 75 bp, synthetic construct
  source 1..75: mol_type = other DNA
ctgtccaactggatacgccaatcaagcgtggaaaaactgaaattaccgaaattgtactgcgtaaaccgcaatccg

SEQ ID NO: 845792 - DNA, 75 bp, synthetic construct
  source 1..75: mol_type = other DNA
cagaagaaagcggttgataacgccctgcgtgattttgaactctctggcataggtctgccgaaagagaaacagcag

SEQ ID NO: 845793 - DNA, 75 bp, synthetic construct
  source 1..75: mol_type = other DNA
ataaaatgctggcggcgaagaactaccaggcggcgctgtttatcctgcgtcagctggagttcggcctgttcgatt

SEQ ID NO: 845794 - DNA, 75 bp, synthetic construct
  source 1..75: mol_type = other DNA
gaacagctgcgtccgtacttcccggaaaacaaagcggttaacggcctgtttgaagtggtaaaacgtatttacggc

SEQ ID NO: 845795 - DNA, 75 bp, synthetic construct
  source 1..75: mol_type = other DNA
gcgcggcggggcgtggatggatgactgcgtaggccagatgcgtaaagctgacggttctctgcaaaaaccggtcgc

SEQ ID NO: 845796 - DNA, 75 bp, synthetic construct
  source 1..75: mol_type = other DNA
aagcgcgctggctgcggcaaaagcccaggccgaagcgaaagaactggaaggctacctgctgacgctggatatccc

SEQ ID NO: 845797 - DNA, 75 bp, synthetic construct
  source 1..75: mol_type = other DNA
caggccgaagcgaaagaactggaaggctacttgctgacgctggatatcccaagctatttgccggtaatgacctac

SEQ ID NO: 845798 - DNA, 75 bp, synthetic construct
  source 1..75: mol_type = other DNA
ggccattatggatatggatgtgaacgctatgatgaccgtgatcccccgcatctccagtccggcactgactgcaca

SEQ ID NO: 845799 - DNA, 75 bp, synthetic construct
  source 1..75: mol_type = other DNA
ctggcgggacggaacctgttgtcaacacggcgtctggctggcggcagtttgtcagcggttttaacgaggcgctga

SEQ ID NO: 845800 - DNA, 75 bp, synthetic construct
  source 1..75: mol_type = other DNA
gttataacaatgttgatgttgctgccagtgccaatggcgtgagcggcgattattttaatgtctatggcatgacct

SEQ ID NO: 845801 - DNA, 75 bp, synthetic construct
  source 1..75: mol_type = other DNA
cggacgtcagcaaatgacattcccatggatgtaggtgcgggtgctagctatgtcttataccacctcttttttcga

SEQ ID NO: 845802 - DNA, 75 bp, synthetic construct
  source 1..75: mol_type = other DNA
aaacctgcacctgcacctgcacctgcacctgcaccgcaagctgatactccggcagccgcgccgcaaggagaataa

SEQ ID NO: 845803 - DNA, 75 bp, synthetic construct
  source 1..75: mol_type = other DNA
atcatccttaagcttaatcagctttcaaatcaggtagataacctgcgtctggccgataatgacagcgatggttcg

SEQ ID NO: 845804 - DNA, 75 bp, synthetic construct
  source 1..75: mol_type = other DNA
ccccagcctggggtgagcaaattaccggcgtgccgcgccagtatattgaaaccatcgcccgtgaatttgccgata

SEQ ID NO: 845805 - DNA, 75 bp, synthetic construct
  source 1..75: mol_type = other DNA
tattggacgaaacggcacgatgaccggatatgcaggcggagtgcagcgaaaagaatggttattgcgccatgaagg

SEQ ID NO: 845806 - DNA, 75 bp, synthetic construct
  source 1..75: mol_type = other DNA
gcggcaaacggatcgaatcccatcagcattgttgtgccttgtcatcgggtcattggcagaaacggtaccatgacc

SEQ ID NO: 845807 - DNA, 75 bp, synthetic construct
  source 1..75: mol_type = other DNA
gctcccggcgagctgggcggttcgtattgttatcggtctgattgttgtcggttccgcgtcttaccttgttggcct

SEQ ID NO: 845808 - DNA, 75 bp, synthetic construct
  source 1..75: mol_type = other DNA
gcgtaaacagcgactgctgcgcgcccggcaattactgcaacgactggggctggaagagcgcgcagagtattaccc

SEQ ID NO: 845809 - DNA, 75 bp, synthetic construct
  source 1..75: mol_type = other DNA
tatgaatacctcggatatgcatccatttattcatccgctttctgcggcggtcgatccggcgtgggaatcacgcag

SEQ ID NO: 845810 - DNA, 75 bp, synthetic construct
  source 1..75: mol_type = other DNA
gagtggcaaactgcggcgattgaaggcaagctcgacctgctggtgacgctcgacttccgcatgtccagtacctgc

SEQ ID NO: 845811 - DNA, 75 bp, synthetic construct
  source 1..75: mol_type = other DNA
atggttcgctgcaaaaaccggtcgcgtatttgacttgtaacttcaaccgcccggtaaatggtaaaccggcgctgt

SEQ ID NO: 845812 - DNA, 75 bp, synthetic construct
  source 1..75: mol_type = other DNA
ttcaggtttccagagtattgatactcaaataagcagttgtagattcaatctgtcaatgcaacacccctttcaatt

SEQ ID NO: 845813 - DNA, 75 bp, synthetic construct
  source 1..75: mol_type = other DNA
aacccgtaagttgtcttgcgcattatcaacaaagctcagaagcagaaaaaatagcgcaatctattattctgaatg

SEQ ID NO: 845814 - DNA, 75 bp, synthetic construct
  source 1..75: mol_type = other DNA
tcaacggatatcatagtgaaacccctggtcgaaaaaatgacagcatttatgctgcttttaacggtgggatgaatt

SEQ ID NO: 845815 - DNA, 75 bp, synthetic construct
  source 1..75: mol_type = other DNA
atcgctgatcaaaactcttttgggaaaaatcgagtcaacccaaaacgagctacgcacagtaatggacaggatact

SEQ ID NO: 845816 - DNA, 75 bp, synthetic construct
  source 1..75: mol_type = other DNA
ccggacaaaatcgtagcaattactctattggctacagtaacagtacatcctggggcagctacagtgtcagtgccc

SEQ ID NO: 845817 - DNA, 75 bp, synthetic construct
  source 1..75: mol_type = other DNA
ttcgacacagaattaccttggtcttaatgatgcactaaggaaggtgcgaataagcggggaaatacttctcggctg

SEQ ID NO: 845818 - DNA, 75 bp, synthetic construct
  source 1..75: mol_type = other DNA
ttaagcgttgccagcctgatgggcaccgcgctgcatctgccgaagtcgtactggatcctgatgacggtattgctg

SEQ ID NO: 845819 - DNA, 75 bp, synthetic construct
  source 1..75: mol_type = other DNA
aaccgtggtcgggttaatcattgcgggcgttgccctgcactttaaaattcccgaaggttacaccctgacgttgat

SEQ ID NO: 845820 - DNA, 75 bp, synthetic construct
  source 1..75: mol_type = other DNA
catgaccacgctggcacgggaacaccgggcattgccacctgaactggcgcaagaatatttacagtcttgtgaaat

SEQ ID NO: 845821 - DNA, 75 bp, synthetic construct
  source 1..75: mol_type = other DNA
tggttttagtgaaaacaatcgtgtcagttacagcgtgaatactggctatacgatgaataaatccagtaacaattt

SEQ ID NO: 845822 - DNA, 75 bp, synthetic construct
  source 1..75: mol_type = other DNA
ggatttccgggcaaagtcggagcaattactcaataggttacagtaatagtgcatcctggggcagttatagcatca

SEQ ID NO: 845823 - DNA, 75 bp, synthetic construct
  source 1..75: mol_type = other DNA
taaatatcgcggcctaccgctattcaacgcagaattatcttggtcttaatgacgctttaacactcattgatgaag

SEQ ID NO: 845824 - DNA, 75 bp, synthetic construct
  source 1..75: mol_type = other DNA
gtaagcatggcaagcacattcgtgtgccagttctgccagaagaagaagcgatcattaagcgcaacgcagatgccg

SEQ ID NO: 845825 - DNA, 75 bp, synthetic construct
  source 1..75: mol_type = other DNA
atgagtgataagcagactgaaaagaccattcaactggatactcctatcaagcgcggtaaaacggaaatcaccgaa

SEQ ID NO: 845826 - DNA, 75 bp, synthetic construct
  source 1..75: mol_type = other DNA
gcgatgatgacgattattccccgcatctccacgcccgcgctgaccgctcaggaaatggctgaaatggaccccgcc

SEQ ID NO: 845827 - DNA, 75 bp, synthetic construct
  source 1..75: mol_type = other DNA
cgattgaggaattaaaaaaactgggttatgacatgttcttcactctggagtccggactgggaaatacttcccagt

SEQ ID NO: 845828 - DNA, 75 bp, synthetic construct
  source 1..75: mol_type = other DNA
cgctacggtgagattgccactcgtctttccgagctgggcaaccagtacagcaacaacgtcctcgatgcgacgatg

SEQ ID NO: 845829 - DNA, 75 bp, synthetic construct
  source 1..75: mol_type = other DNA
caccatatgctgacccgcattgaaactgccggtgtgtctggtatcagcggggtgccgtgggatgcggtcgaactg

SEQ ID NO: 845830 - DNA, 75 bp, synthetic construct
  source 1..75: mol_type = other DNA
tgtttttgttgattagcattgctatgctttctgcatgttttaatcatcaaaacaatgagtttacgccaccacaaa

SEQ ID NO: 845831 - DNA, 75 bp, synthetic construct
  source 1..75: mol_type = other DNA
gtttgtaaactggctctataaccattcctctgtgctgcatgaacgagcagaaatcattaaatgcgccgaaatgct

SEQ ID NO: 845832 - DNA, 75 bp, synthetic construct
  source 1..75: mol_type = other DNA
agagcgccgccatccgcatgtttttgctgacagttctgccgataacagcagtgaagttcttgcccgttgggagca

SEQ ID NO: 845833 - DNA, 75 bp, synthetic construct
  source 1..75: mol_type = other DNA
atattcctcgtagtttaccggccttaatgcgtgcgcaaaaaatccagaaacgctgcgccaacgttggcttcgact

SEQ ID NO: 845834 - DNA, 75 bp, synthetic construct
  source 1..75: mol_type = other DNA
ttcgtgctggtcttaaaatcatgttggacggcgaaccttacgcggttgaagcaagtgaatttgtgaagccgggta

SEQ ID NO: 845835 - DNA, 75 bp, synthetic construct
  source 1..75: mol_type = other DNA
aatcaaaaccgaagagcgcgcgcagaaagcgcagcattcagcgctggacgatattcctcgtagtttaccggcttt

SEQ ID NO: 845836 - DNA, 75 bp, synthetic construct
  source 1..75: mol_type = other DNA
ttgcgtgaaagaattgatgagacgctttctgaaaaaattgtacagaaatgcagaaatatgaatggtgaatatgtc

SEQ ID NO: 845837 - DNA, 75 bp, synthetic construct
  source 1..75: mol_type = other DNA
gaagcatggaaaaagtatcgggtattgctgaaccgtgttgatacgtcaactgcacaggatattgaatggccagca

SEQ ID NO: 845838 - DNA, 75 bp, synthetic construct
  source 1..75: mol_type = other DNA
tattccggatccgggaagcggaagaaacaaaaaacagcttgatgcaggtagccagtgagcatatagcgccgcttc

SEQ ID NO: 845839 - DNA, 75 bp, synthetic construct
  source 1..75: mol_type = other DNA
ttcttccgccacggttgccaatgcggtaggtgccaaccattcggcatttagccttaagctggcgctggaactgtt

SEQ ID NO: 845840 - DNA, 75 bp, synthetic construct
  source 1..75: mol_type = other DNA
gaaaaagtatcgggtgttgctgaaccgtgttgatacatcaactgcaccggatattgagtggcctgcaacccctgt

SEQ ID NO: 845841 - DNA, 75 bp, synthetic construct
  source 1..75: mol_type = other DNA
tacggaagcagaaaaactgttccggagacgggaggcggaggaaacaaaaaacagcctgatgcaggcagccagtga

SEQ ID NO: 845842 - DNA, 75 bp, synthetic construct
  source 1..75: mol_type = other DNA
tcgttgaagaccatcggggtaaaacggtttatgacgtggcatcaggggactcgttatttatttctgaactcggtc

SEQ ID NO: 845843 - DNA, 75 bp, synthetic construct
  source 1..75: mol_type = other DNA
ttttatctttggcccactgttacaatacaatattatattaggttcgattgttggcggcatttatcttggcttctg

SEQ ID NO: 845844 - DNA, 75 bp, synthetic construct
  source 1..75: mol_type = other DNA
ctgctgtggattattaccggcatgttagtgatgtttgcgccgttctttatttttatcttcgggccactgttacaa

SEQ ID NO: 845845 - DNA, 75 bp, synthetic construct
  source 1..75: mol_type = other DNA
gcctggaaaaagtatcgggtgctgctaaaccgtgtggacacttccgtagcaccagatatcgagtggccagctgca

SEQ ID NO: 845846 - DNA, 75 bp, synthetic construct
  source 1..75: mol_type = other DNA
ttgcaacggaggaagaaatctcgttgctggaagcatggaaaaagtatcgggtattgctgaaccgtgttgatacgt

SEQ ID NO: 845847 - DNA, 75 bp, synthetic construct
  source 1..75: mol_type = other DNA
cctgctggttatgcagccgttttcaatgcagatgaaatgaaatgggagttgatggaagatcatcgcggaaagact

SEQ ID NO: 845848 - DNA, 75 bp, synthetic construct
  source 1..75: mol_type = other DNA
cgttgaagaccatcggggtaaaacggtttatgacgtggcatcaggggatgcgttatttatttctgaacccggtcc

SEQ ID NO: 845849 - DNA, 75 bp, synthetic construct
  source 1..75: mol_type = other DNA
acagtgatgagtcatcgtggcatctcgttgaagatcatcgggataaaacggtttatgacgtggcttccggcgacg

SEQ ID NO: 845850 - DNA, 75 bp, synthetic construct
  source 1..75: mol_type = other DNA
tcggtaccgcaggttcgacagcttcactcatgttaatcaacaactggagcaatggatagccgatgtggctgacaa

SEQ ID NO: 845851 - DNA, 75 bp, synthetic construct
  source 1..75: mol_type = other DNA
ggatctacagtaatgagaaactggtggcctcacatcgcctctgttcagcatcgtctggctggcagacagtgccgg

SEQ ID NO: 845852 - DNA, 75 bp, synthetic construct
  source 1..75: mol_type = other DNA
ttacttcgacatccgccatgtgtcctgggacagctatatcgaggttggtggtaatcgttacagcgttcccgaagc

SEQ ID NO: 845853 - DNA, 75 bp, synthetic construct
  source 1..75: mol_type = other DNA
gtctggctgagaatgtctggaacggcgaggtcatcctcgcggaaatcaaagcgatgggttataccggcggacgct

SEQ ID NO: 845854 - DNA, 75 bp, synthetic construct
  source 1..75: mol_type = other DNA
agagaatgtctggaatagtgaggttatctttacggagattaaggcaatgggttatacgggcggacgttccatgct

SEQ ID NO: 845855 - DNA, 75 bp, synthetic construct
  source 1..75: mol_type = other DNA
gttgccgggcaacggtgcaaagttaactttgcggttaatacgctggggttctcccgccgcttccatgtcttcgcc

SEQ ID NO: 845856 - DNA, 75 bp, synthetic construct
  source 1..75: mol_type = other DNA
aaagcggtatctacattgccagccgatgtccaggccaaaaacccgtgggcgaaaccgctgcgtcaggtacaggcc

SEQ ID NO: 845857 - DNA, 75 bp, synthetic construct
  source 1..75: mol_type = other DNA
ttgctggaagcctggaaaaaatatcgggtgttgctgaaccgtgttaatacaacaactgcaccggatattgaatgg

SEQ ID NO: 845858 - DNA, 75 bp, synthetic construct
  source 1..75: mol_type = other DNA
gtcagacggtacctgaaatacccggaacctccggccagaaaaacacgccacaaaatggccaaactcaagccgttc

SEQ ID NO: 845859 - DNA, 75 bp, synthetic construct
  source 1..75: mol_type = other DNA
aaaatcagcaacagctgaacaatgtggcggtgaactctacgctgccgactgaacccgcgactgtagcgccagttc

SEQ ID NO: 845860 - DNA, 75 bp, synthetic construct
  source 1..75: mol_type = other DNA
ctgaataacgcgctgacacaaccacaaaatcagcagcagttgaacaatgtggcggtcaactccacgctgccgacc

SEQ ID NO: 845861 - DNA, 75 bp, synthetic construct
  source 1..75: mol_type = other DNA
ggaacttcgccagttcaaagaaacaccggaacagcgcttcgcgctggagcaggaacatctgcggccgttaccgga

SEQ ID NO: 845862 - DNA, 75 bp, synthetic construct
  source 1..75: mol_type = other DNA
ctggctggcagaccgtgccggagcatcacgccccgctctggcagcaggtcagtcaggtggaacatcggccactga

SEQ ID NO: 845863 - DNA, 75 bp, synthetic construct
  source 1..75: mol_type = other DNA
gatgctgagcatacctacgaatcactggttcgcgccttccgctacttcggtggttgtgtgaaaacggtgctggtc

SEQ ID NO: 845864 - DNA, 75 bp, synthetic construct
  source 1..75: mol_type = other DNA
ctttgctgccgaactgacggaggcactgcgtgatgaagagcttaaacagcaggtgttggcgcgcatcggtcaacg

SEQ ID NO: 845865 - DNA, 75 bp, synthetic construct
  source 1..75: mol_type = other DNA
tcgccggatggagagtatcagaagtggaacggcacatcctgggtgaaagatgcagaagcagaaaaactgtttcgg

SEQ ID NO: 845866 - DNA, 75 bp, synthetic construct
  source 1..75: mol_type = other DNA
ggaacggtacatcctgggtgaaagatgcagaagcagaaaaactgtttcggagccaggaggcggaagaaacaaaaa

SEQ ID NO: 845867 - DNA, 75 bp, synthetic construct
  source 1..75: mol_type = other DNA
gctgttttacgccataacaccagtacgcaactcaatggcgaaaacagcacgttacgtattaatagcctggcgatg

SEQ ID NO: 845868 - DNA, 75 bp, synthetic construct
  source 1..75: mol_type = other DNA
acgccggaacagcgcttcgcgctggagcaggaacatctgcggccgttaccggatacggacttcgataccagttac

SEQ ID NO: 845869 - DNA, 75 bp, synthetic construct
  source 1..75: mol_type = other DNA
acctcaaggagaacttcttcgttcggtaccgcaggttcgacagcttcactcatgttaatcaacaactggagcaat

SEQ ID NO: 845870 - DNA, 75 bp, synthetic construct
  source 1..75: mol_type = other DNA
cactgcccattatcgccatcatctggaactggcggaaggcgcggaagcgacagtgattgaacattttgtcagcct

SEQ ID NO: 845871 - DNA, 75 bp, synthetic construct
  source 1..75: mol_type = other DNA
actgaaggcagcggatatgacgtgagcataaacgacgaacgccaggggctgcccgatgctattcagccagaagtg

SEQ ID NO: 845872 - DNA, 75 bp, synthetic construct
  source 1..75: mol_type = other DNA
agcgtgacgcatatcgccgtgaagcgcggtcaacggccggcaaagccattgctgttaatgcatatcacccagggc

SEQ ID NO: 845873 - DNA, 75 bp, synthetic construct
  source 1..75: mol_type = other DNA
ttctgtctggtttcttttatcgtgaagaaagcggggaccggctggctggacgtgctgtttccacctgcggcaatg

SEQ ID NO: 845874 - DNA, 75 bp, synthetic construct
  source 1..75: mol_type = other DNA
ccgaagcccagtttgaaggtcaggaaattgtgccaattaccctgacgaagagcgtgcaaacagtgaccggtcagc

SEQ ID NO: 845875 - DNA, 75 bp, synthetic construct
  source 1..75: mol_type = other DNA
gataagtggttttacaaactcatcaaagttgggggctttcctgcccccatcaaaatgctgtctcttgatcagatc

SEQ ID NO: 845876 - DNA, 75 bp, synthetic construct
  source 1..75: mol_type = other DNA
gcgatccgggcctgcatcgttcgatgttcgctaacggtctgtcgaccgtgatctccggtttctttggttccacac

SEQ ID NO: 845877 - DNA, 75 bp, synthetic construct
  source 1..75: mol_type = other DNA
cctttatacaccgcgcttcgagtggtttgctattctgactattctgccagcggcgctggtggtgattgccgaaca

SEQ ID NO: 845878 - DNA, 75 bp, synthetic construct
  source 1..75: mol_type = other DNA
ggcgctggcgaccatcgtcggtatcggcttaagtttgatcttcaaactgattagtgtgctgcgccctgaagaagt

SEQ ID NO: 845879 - DNA, 75 bp, synthetic construct
  source 1..75: mol_type = other DNA
aaatggcctgtgcgaaaactcagacttcgactttacctacacccagcataccgcctggatttccagcaaaggaac

SEQ ID NO: 845880 - DNA, 75 bp, synthetic construct
  source 1..75: mol_type = other DNA
agccggtaacacccaaaaccgtttgttcgacagcggcaagtttctgctgcggtctgaccgagcgcgaactgcgta

SEQ ID NO: 845881 - DNA, 75 bp, synthetic construct
  source 1..75: mol_type = other DNA
taaacacgcataaaggcagcattttttctttagggctactgtgtgcggcaattggccgtttgcttcagctcaacc

SEQ ID NO: 845882 - DNA, 75 bp, synthetic construct
  source 1..75: mol_type = other DNA
caaactgggccgcagctcccgctggctgaaaagtgaagtggaagcctggttgcaggcacgtattacacagtcccg

SEQ ID NO: 845883 - DNA, 75 bp, synthetic construct
  source 1..75: mol_type = other DNA
tcagaacaaggcggtgagtgacacgcctctggatgacagggaaaaaggctttatttccagtaccaccatccccgt

SEQ ID NO: 845884 - DNA, 75 bp, synthetic construct
  source 1..75: mol_type = other DNA
atccagatgatccctctgccggtgatgggcggcgtttcactgctgctttacggcgtgattggtgcttctggtatt

SEQ ID NO: 845885 - DNA, 75 bp, synthetic construct
  source 1..75: mol_type = other DNA
atgcgatgctgctactggagtggttgttcctcaattaatgactccggcagtctggtcaatgcagcgacaaacctt

SEQ ID NO: 845886 - DNA, 75 bp, synthetic construct
  source 1..75: mol_type = other DNA
atctgcgcactatgttccgccgtctgcttatcgcaacagtcgtcggtattctcgcggcctttgccgttgccgggt

SEQ ID NO: 845887 - DNA, 75 bp, synthetic construct
  source 1..75: mol_type = other DNA
tatcaccagtctgctgcaaatgacagataagtggatttataagctcattaaggatggagtctttcccaaacccat

SEQ ID NO: 845888 - DNA, 75 bp, synthetic construct
  source 1..75: mol_type = other DNA
ttacaaaccgatgggcagtttgattacgccaccagtctgattaaatccttcgcttctttgctggtggtgaccagc

SEQ ID NO: 845889 - DNA, 75 bp, synthetic construct
  source 1..75: mol_type = other DNA
tgcgcctaccgattatatggaggcgttacaaaccgatgggcagtttgattacgccaccagtctgattaaatcctt

SEQ ID NO: 845890 - DNA, 75 bp, synthetic construct
  source 1..75: mol_type = other DNA
aactccggcgctcggcggactggcggcgggtttgttgctgatgggctggcagaaatttacccagcaacgccctca

SEQ ID NO: 845891 - DNA, 75 bp, synthetic construct
  source 1..75: mol_type = other DNA
gtacgcaggagtttgcacatttacctgttgaaaaactttctggtgggcagcgccagcgttgctggattgcgatgg

SEQ ID NO: 845892 - DNA, 75 bp, synthetic construct
  source 1..75: mol_type = other DNA
atgatcaactggtggatatgcggttcatcacgaagctaacggggctgacagataaatggttttacaagctgataa

SEQ ID NO: 845893 - DNA, 75 bp, synthetic construct
  source 1..75: mol_type = other DNA
gttcccgaagccaattaagctgggccggtgctcccgctggaagaaaagtgaagtcgaattatggttacagcaacg

SEQ ID NO: 845894 - DNA, 75 bp, synthetic construct
  source 1..75: mol_type = other DNA
atgactacccgcccctcactgaccgaagaccagttcgttgacatggcatttatcaccagtctgctgcaaatgaca

SEQ ID NO: 845895 - DNA, 75 bp, synthetic construct
  source 1..75: mol_type = other DNA
aagatgggggctttcctgcacccatcaaaatggggcgcagctcccgctggctgaaaagtgaagtggaagcctggc

SEQ ID NO: 845896 - DNA, 75 bp, synthetic construct
  source 1..75: mol_type = other DNA
gacattgccggtgagagcaatatttttgctgactgggcggcttcccggcagggatgtaccgttggcgggaaatct

SEQ ID NO: 845897 - DNA, 75 bp, synthetic construct
  source 1..75: mol_type = other DNA
tgcgacggcggcaagtttctgccgcggtctgaccgatcgcgaactacgtaccaataatcaacaactgacggcagg

SEQ ID NO: 845898 - DNA, 75 bp, synthetic construct
  source 1..75: mol_type = other DNA
ctcagcggaatttcaggcatctgtacaggcttttggggcagatgccgtcattaaacgccaccgcgtacataaagc

SEQ ID NO: 845899 - DNA, 75 bp, synthetic construct
  source 1..75: mol_type = other DNA
cctggaagctgtgggaactcatgggggaggtttattcgaaccgctggacccagaagaacggggccgcaccttcga

SEQ ID NO: 845900 - DNA, 75 bp, synthetic construct
  source 1..75: mol_type = other DNA
catggcctcctgacctggctgagtttgtggcgttgctttcggaaagtggggcaaatccatttggcctgacggtgg

SEQ ID NO: 845901 - DNA, 75 bp, synthetic construct
  source 1..75: mol_type = other DNA
gaaaaagtatcgggtattgctgaaccgtgttgatacatcagtaacaccggatattgagtggcctgctgtccctgt

SEQ ID NO: 845902 - DNA, 75 bp, synthetic construct
  source 1..75: mol_type = other DNA
taacaggccgacgtcactctgtgacgtttatgcaagtattctccagtatcacagtcctgaaattattcagtttct

SEQ ID NO: 845903 - DNA, 75 bp, synthetic construct
  source 1..75: mol_type = other DNA
atgagcaaagtacgcgttatttttgaatttgagcatgtttcgcatgacgaaaagctggcaggcaatgactgtgtt

SEQ ID NO: 845904 - DNA, 75 bp, synthetic construct
  source 1..75: mol_type = other DNA
gatgtatcgggtgttgctgaaccgagttgatacatcaactgcccctgatattgagtggcctgtgaaccctgtcag

SEQ ID NO: 845905 - DNA, 75 bp, synthetic construct
  source 1..75: mol_type = other DNA
aagtggaacggcacatcctgggtgaaagatgcagaagcagaaaaactgtttcggataagggaggcggaagaataa

SEQ ID NO: 845906 - DNA, 75 bp, synthetic construct
  source 1..75: mol_type = other DNA
cctggaagctgtgggagctcatgggggaggtgtattcgaaccgctggactcagaagaacggggccgcaccttcga

SEQ ID NO: 845907 - DNA, 75 bp, synthetic construct
  source 1..75: mol_type = other DNA
gttcaaaggggattgagcgccagatgaccgaaggggaattaaaacggcttgcagaacggcagctgacgaaatggg

SEQ ID NO: 845908 - DNA, 75 bp, synthetic construct
  source 1..75: mol_type = other DNA
gatttatttcccgcagcgcccccccgtccgcagggtgaagtttatcgtcgttacgatccacgcattcgcaggatg

SEQ ID NO: 845909 - DNA, 75 bp, synthetic construct
  source 1..75: mol_type = other DNA
tgcactgagcctggcaagacaagaggctgtattttgtagcacccaccccggtttgcctgtcggtccagttgctga

SEQ ID NO: 845910 - DNA, 75 bp, synthetic construct
  source 1..75: mol_type = other DNA
atagaaaacattctcaatcagaacaacagcatcagccaggaagcagaacatttgcttctgaataactgtaacgca

SEQ ID NO: 845911 - DNA, 75 bp, synthetic construct
  source 1..75: mol_type = other DNA
agttaaaaaggcagcgccgggatgctatttttaattcagtatttgctgctgcaaaactaccgctctttcgcctcg

SEQ ID NO: 845912 - DNA, 75 bp, synthetic construct
  source 1..75: mol_type = other DNA
aagcgggctacccgctggttatcaaccgcgccctcccgcactacctcactctgctggatcaggggctggatcctg

SEQ ID NO: 845913 - DNA, 75 bp, synthetic construct
  source 1..75: mol_type = other DNA
tgcgacggcagccagtttctgccgtggtctaaccgatcgcgaactgcgcaccaataatccacaactaacggcagg

SEQ ID NO: 845914 - DNA, 75 bp, synthetic construct
  source 1..75: mol_type = other DNA
gggacatgttgtccgtttatctccccgtcacggcgcagacgcagcatgtgtttggtatacccccgacggctctgg

SEQ ID NO: 845915 - DNA, 75 bp, synthetic construct
  source 1..75: mol_type = other DNA
aatttgagcatgtttcgcatgacgaaaaaccggcaggcaatgacagtgttgaagtgcatgaaaagattggagtgg

SEQ ID NO: 845916 - DNA, 75 bp, synthetic construct
  source 1..75: mol_type = other DNA
gaaatcacggagggtgttactgccactgtaaaaatcgaacgtgatacggagaacagaccgacaggcccatgtgat

SEQ ID NO: 845917 - DNA, 75 bp, synthetic construct
  source 1..75: mol_type = other DNA
atgagcaaagttcgcgttatttttgaatttgaccacgtaatgcatgaagtaaagccagccggtaatgatagtgag

SEQ ID NO: 845918 - DNA, 75 bp, synthetic construct
  source 1..75: mol_type = other DNA
aaattattaagtaagagtgaagtggagttttatcttgccctggatgcgataattcctgattcctttcgggtacta

SEQ ID NO: 845919 - DNA, 75 bp, synthetic construct
  source 1..75: mol_type = other DNA
aagcaaatatttataaagcaatgttttattttttcttcaacaaggaaaaatttattacgcttggtgctatcaata

SEQ ID NO: 845920 - DNA, 75 bp, synthetic construct
  source 1..75: mol_type = other DNA
aaaagcagaatctttataagaccatgtggtatttaatattcagcgcagagagatttgtaactatcgctgccgaaa

SEQ ID NO: 845921 - DNA, 75 bp, synthetic construct
  source 1..75: mol_type = other DNA
cttgggcggtggtttcacacttttttgcgacattactttctccctgagcctttttcactttatataacaccatta

SEQ ID NO: 845922 - DNA, 75 bp, synthetic construct
  source 1..75: mol_type = other DNA
gggcgccacctcgcctgtttgttttaatgcctatagtagcagtaattttgttttcttgcttaagcaattttcgct

SEQ ID NO: 845923 - DNA, 75 bp, synthetic construct
  source 1..75: mol_type = other DNA
gccgggtgctggaagagagtctgcctgcaaatttgaccttaatgatgaccgctacgggtgaatatcgtctggtgg

SEQ ID NO: 845924 - DNA, 75 bp, synthetic construct
  source 1..75: mol_type = other DNA
catgtatgaccagttttaatggttttaagggaggagtgcaattatctactgctccatgtgctttttcacctgaac

SEQ ID NO: 845925 - DNA, 75 bp, synthetic construct
  source 1..75: mol_type = other DNA
atggctaataaccgcatccctatttttatagctggaatcttgattcccattttattaaatggctgctcatcagga

SEQ ID NO: 845926 - DNA, 75 bp, synthetic construct
  source 1..75: mol_type = other DNA
ttgttaagccagaaatacgcccacttccaccactaccaataaaaccagatgggcattcagcaggaggcgaacaat

SEQ ID NO: 845927 - DNA, 75 bp, synthetic construct
  source 1..75: mol_type = other DNA
atggcagagcagacctcacgtcttgcaataattattgatagctctggagcgaaaaataatgctgataatctgacc

SEQ ID NO: 845928 - DNA, 75 bp, synthetic construct
  source 1..75: mol_type = other DNA
aaagcacttatggggatggttgatcagcgggtgcagggcactctgttaaatatgcgacgtgatgggggaatgtta

SEQ ID NO: 845929 - DNA, 75 bp, synthetic construct
  source 1..75: mol_type = other DNA
ctgtatggtatcgaagagagatattataccactcgatttggtaatgaaaaaagattggccaactcgatacaaaaa

SEQ ID NO: 845930 - DNA, 75 bp, synthetic construct
  source 1..75: mol_type = other DNA
aggtggaagagattgaagaggtgcactggacagaactcgggatgccggagtcgctgtgggtctgccgggtcaaag

SEQ ID NO: 845931 - DNA, 75 bp, synthetic construct
  source 1..75: mol_type = other DNA
gactgggtaagtggggcgtcccaaggattcaataactggttggataacactaaggatatcagcgggcagataaaa

SEQ ID NO: 845932 - DNA, 75 bp, synthetic construct
  source 1..75: mol_type = other DNA
tcttggttatcttgagactgcatggaaagctgtcgcagactccgcaaaatgggcatgggattccatgctggatat

SEQ ID NO: 845933 - DNA, 75 bp, synthetic construct
  source 1..75: mol_type = other DNA
ctgtatttactgcagaagactatggcgatggctttgctaacgtgctggcgcggcgttttgcccaacccgttgaac

SEQ ID NO: 845934 - DNA, 75 bp, synthetic construct
  source 1..75: mol_type = other DNA
tcgcccgcttgcagcgcaaagctgagcttaacccacagcgtgctgaaagtttctatggcggcggtgcggaaggct

SEQ ID NO: 845935 - DNA, 75 bp, synthetic construct
  source 1..75: mol_type = other DNA
actggtctgagccagagcctcggtaccgaattcagcaaaatgcgtaacttaacccgtcggttaaaggccgccggt

SEQ ID NO: 845936 - DNA, 75 bp, synthetic construct
  source 1..75: mol_type = other DNA
aaattgatgtttatcagagtcggcgttttgaaaagtctctgagtaaactcccggaagcgcaactgaaagttgtgg

SEQ ID NO: 845937 - DNA, 75 bp, synthetic construct
  source 1..75: mol_type = other DNA
tggggtgccgatcgcattggcattcgtgtttcgccaatcggtactttccagaacacggataatggcccaaatgaa

SEQ ID NO: 845938 - DNA, 75 bp, synthetic construct
  source 1..75: mol_type = other DNA
ttacctgcatatgtccgaaccggactgggcgggaggccaaccgtatactgacgcgttccgcgaaaaagtacgcgc

SEQ ID NO: 845939 - DNA, 75 bp, synthetic construct
  source 1..75: mol_type = other DNA
tcgcccgcttgcagcgcaaaaccgagcttaacccacagcgcgctgaaagtttctatggcggcggcgcggaaggtt

SEQ ID NO: 845940 - DNA, 75 bp, synthetic construct
  source 1..75: mol_type = other DNA
gtgggcgtggtttttatgagtctcattcgttaatcgttaacgataacttgtcgtgcaaaaaactttttgccacag

SEQ ID NO: 845941 - DNA, 75 bp, synthetic construct
  source 1..75: mol_type = other DNA
gtacgacgaaaaaggggatagtacagctcagcagtgcgaccaacagtacgtctgagacgctggcggcaacgccaa

SEQ ID NO: 845942 - DNA, 75 bp, synthetic construct
  source 1..75: mol_type = other DNA
gctcagagcaaaactgctgctgaatccgctgcgacccgtgcggaagctgctgctgatcgtgctgaagagattgcc

SEQ ID NO: 845943 - DNA, 75 bp, synthetic construct
  source 1..75: mol_type = other DNA
attcgtttaacaacgtcacataaagctgactacggtggagttacaaacgcaatcctcgtttatcactaccgtagt

SEQ ID NO: 845944 - DNA, 75 bp, synthetic construct
  source 1..75: mol_type = other DNA
ttaacgttggctccccgcagcaagcaggcatctctgagctggttctgcgtgcaggaaatgggaaccccaaaggta

SEQ ID NO: 845945 - DNA, 75 bp, synthetic construct
  source 1..75: mol_type = other DNA
accgattacaattaataataccagcggtgctgtatcaattggtaatggactaaatgtgactggtggcgtaaatgg

SEQ ID NO: 845946 - DNA, 75 bp, synthetic construct
  source 1..75: mol_type = other DNA
gatgaattgcctaaaaaatatttttcaaagatagcatttattttttcatttcaaagtggtgacttttattttcag

SEQ ID NO: 845947 - DNA, 75 bp, synthetic construct
  source 1..75: mol_type = other DNA
gcggcaacgttgctcagaggtttttcgatatgctattgctaccggaagagcagagtttaatcctgcggcagatct

SEQ ID NO: 845948 - DNA, 75 bp, synthetic construct
  source 1..75: mol_type = other DNA
atgtagggacgaggcctgtaggggaaattaaaccgctagaattgctaaatgtgctgcgtaaaattgagaaacgtg

SEQ ID NO: 845949 - DNA, 75 bp, synthetic construct
  source 1..75: mol_type = other DNA
acaataaccttaccttgtttcctaatgagttaattaataacaaatcatggagtatagtgtatattgagccccatg

SEQ ID NO: 845950 - DNA, 75 bp, synthetic construct
  source 1..75: mol_type = other DNA
agaataatattagaggtacgtataatcatgctcaatatattgataaacgccgtgatatgatgcagtggtattcag

SEQ ID NO: 845951 - DNA, 75 bp, synthetic construct
  source 1..75: mol_type = other DNA
cctttgtcgactcaagcgttagatttgctaaatgaactcaagatgatgacagggaagtatagttatgtttttccg

SEQ ID NO: 845952 - DNA, 75 bp, synthetic construct
  source 1..75: mol_type = other DNA
gcaaggatttaattcaaattggatagaaattcaattagctcatgtagataagaatagtgttcgtgggacatataa

SEQ ID NO: 845953 - DNA, 75 bp, synthetic construct
  source 1..75: mol_type = other DNA
gcgccgctgctcacgaatctggatttgttgcgaaccaattttaatcgtgtggcggatgcgcagcagtatggcggc

SEQ ID NO: 845954 - DNA, 75 bp, synthetic construct
  source 1..75: mol_type = other DNA
tgtcggaccgattgtgaaaaaggtctggcgggaagttgatcaggttgtcagggcgatggggggatgggaacaggc

SEQ ID NO: 845955 - DNA, 75 bp, synthetic construct
  source 1..75: mol_type = other DNA
attgctggcgtgccgggcgtgtcgtttgtggtgttgctggcaacgctgggcagcgtagggatcccgctggaaggt

SEQ ID NO: 845956 - DNA, 75 bp, synthetic construct
  source 1..75: mol_type = other DNA
acatcgcccgtatccgtgagtatttcgggaatgaactggtgtctgttgacacgcatcccggcgactggagcgaca

SEQ ID NO: 845957 - DNA, 75 bp, synthetic construct
  source 1..75: mol_type = other DNA
aggcgatggggggatgggaaactgttctgaaagcgattgccctgtttatggcaaccaaatgggttgctgacgtta

SEQ ID NO: 845958 - DNA, 75 bp, synthetic construct
  source 1..75: mol_type = other DNA
gtgcctaaagaaaaacaggcagctgtgctgaatgccctgttcgggaaagagtctctgggcgcgatagcacctctg

SEQ ID NO: 845959 - DNA, 75 bp, synthetic construct
  source 1..75: mol_type = other DNA
ggacggaatgatccaaacaaacctatgagtgaggcaagtgttaatcaacttatcaaacgcataggctatgcggga

SEQ ID NO: 845960 - DNA, 75 bp, synthetic construct
  source 1..75: mol_type = other DNA
acttactcttctggaccttgtcttacatgagcaccggaagaaattcggcactccctataatcagttgaatgggaa

SEQ ID NO: 845961 - DNA, 75 bp, synthetic construct
  source 1..75: mol_type = other DNA
aagagagaataaaggctcacgatcattttaatggatggatctcaaatgggcttggtatggccacagaaatatgtc

SEQ ID NO: 845962 - DNA, 75 bp, synthetic construct
  source 1..75: mol_type = other DNA
gagtatgccattagtgagcctgtcataacagctctcgattttattgagtcaaaaataaacggggttactgagtta

SEQ ID NO: 845963 - DNA, 75 bp, synthetic construct
  source 1..75: mol_type = other DNA
tgcagaccaggcaatattgaaaaattggggtttgtggttctgggatcagaaaccagataaatttatttactcgat

SEQ ID NO: 845964 - DNA, 75 bp, synthetic construct
  source 1..75: mol_type = other DNA
gcttggtttttgaaaacatatggccatggtggacatatgcctgggttttagttttttctttgttatgtgtgttta

SEQ ID NO: 845965 - DNA, 75 bp, synthetic construct
  source 1..75: mol_type = other DNA
tgaccgttacggctctgcccgccattaccacttatggcgaaccggaagggaacctgctaacagggccgtggcagc

SEQ ID NO: 845966 - DNA, 75 bp, synthetic construct
  source 1..75: mol_type = other DNA
aaccatgctcaatattttagtggaaggaagtctatgatggactggtacagtaatttgatatttgaaagactaaaa

SEQ ID NO: 845967 - DNA, 75 bp, synthetic construct
  source 1..75: mol_type = other DNA
tactcaatgaactcaagataatgacagggaactatcgttatgtttttccgggacggaatgatccaaacaagccta

SEQ ID NO: 845968 - DNA, 75 bp, synthetic construct
  source 1..75: mol_type = other DNA
gaaaagattgctagagagtggcatcggatgaagtcgttaaaatggtctgctgggtacgcctcggatattatggaa

SEQ ID NO: 845969 - DNA, 75 bp, synthetic construct
  source 1..75: mol_type = other DNA
atgccgcgaaaaaagcggctaaccgttttgcggtgccaccacctccccgactggtggtgaataaccagaatgagg

SEQ ID NO: 845970 - DNA, 75 bp, synthetic construct
  source 1..75: mol_type = other DNA
tttggtccggcggtggctcgtatggcaaatctgcttctgcagcgtgaaggtgaaacacgagaggtgaaaggttgt

SEQ ID NO: 845971 - DNA, 75 bp, synthetic construct
  source 1..75: mol_type = other DNA
gccgcgctaagcctgaagataaagcctatacacttggagatgggctagggttgtcattacttatagaacctaatg

SEQ ID NO: 845972 - DNA, 75 bp, synthetic construct
  source 1..75: mol_type = other DNA
tgaaatattgcccgactcgcgagtgggaaattgacttggtgttctttatcaacggtctacccgttgccaccgccg

SEQ ID NO: 845973 - DNA, 75 bp, synthetic construct
  source 1..75: mol_type = other DNA
tgacccagaaggtacagtttatcgttgagcacttcaccaaaaacgtcgcccaccgactggatggcaaggccaagg

SEQ ID NO: 845974 - DNA, 75 bp, synthetic construct
  source 1..75: mol_type = other DNA
gtggcaaccgtcgaactgaagaccgacttcacccagtcctgcgaagcggctatggatcagtaccgcaatgatcgc

SEQ ID NO: 845975 - DNA, 75 bp, synthetic construct
  source 1..75: mol_type = other DNA
aggcgattgatcgcgaaaagagcagcgagtcgaaatcaaaacagctgactgaagcgctattgactggcacgccga

SEQ ID NO: 845976 - DNA, 75 bp, synthetic construct
  source 1..75: mol_type = other DNA
cggtttcaatggcgaagaaaacttcgttcgtggttgtggtggtgattgcgctactgacgatttacggagcgttgg

SEQ ID NO: 845977 - DNA, 75 bp, synthetic construct
  source 1..75: mol_type = other DNA
ctctctggcgcgtgaaccgcatgtcgataaggtggagacgccgaaggcagcggtttccatggcgaagaaaacctc

SEQ ID NO: 845978 - DNA, 75 bp, synthetic construct
  source 1..75: mol_type = other DNA
tttgcgtgcatggcaatactggctggcgcgataccagacgccgcatcatcgtttacagtccggcattgatgccgt

SEQ ID NO: 845979 - DNA, 75 bp, synthetic construct
  source 1..75: mol_type = other DNA
gcgctaccaggccaatatcctgcgcgtggtgccggagctgaagtatcacccggcccgtgaatttgccattgatct

SEQ ID NO: 845980 - DNA, 75 bp, synthetic construct
  source 1..75: mol_type = other DNA
aacgcttctgcccaccagggcatggcggaaatgcataaaaaaatgatgaaaggaaaatcaggagccaccaacgaa

SEQ ID NO: 845981 - DNA, 75 bp, synthetic construct
  source 1..75: mol_type = other DNA
cacattaggaatgaccattatcgcgatgggggcgacctttttactgttgcgcgcgttgcatgggctattgttcaa

SEQ ID NO: 845982 - DNA, 75 bp, synthetic construct
  source 1..75: mol_type = other DNA
gtcaaagccgtacagatgaatttggggggatgacaattctggtcacaaaggataaccactattaccaggatggtg

SEQ ID NO: 845983 - DNA, 75 bp, synthetic construct
  source 1..75: mol_type = other DNA
ggggcaaatccaaagaccatcggggtaaaacggtttatgacgtggcatcaggggactcgttatttatttctgaac

SEQ ID NO: 845984 - DNA, 75 bp, synthetic construct
  source 1..75: mol_type = other DNA
cgttatttatttctgaacttggcccattaccggaaaacgtcacctggttgtcgccggatggggagtttcagaagt

SEQ ID NO: 845985 - DNA, 75 bp, synthetic construct
  source 1..75: mol_type = other DNA
gtctaacagtttcacgcttgacggtgacgaaaaagacgggattatcgttggtataaaagacaagaaaatcatacg

SEQ ID NO: 845986 - DNA, 75 bp, synthetic construct
  source 1..75: mol_type = other DNA
tttattttctttgtgctttacttcagccagataaagaatctgaaaccattgaaggctgtgttcagatccattgat

SEQ ID NO: 845987 - DNA, 75 bp, synthetic construct
  source 1..75: mol_type = other DNA
ttgccctgcctttgcgacaactccggcaggaggcggactacttgcattttatttaatgagttctcgtactggcgg

SEQ ID NO: 845988 - DNA, 75 bp, synthetic construct
  source 1..75: mol_type = other DNA
gctctcagcttgaggaaatctacagttatgcaggcagtaaaacattactggcaagtgcaccctgcaaaatcgttt

SEQ ID NO: 845989 - DNA, 75 bp, synthetic construct
  source 1..75: mol_type = other DNA
tgaaaaaataacaaatattttctttcagcttgctatacaggtgaatcttgaaaagatgccaacggatgatccgga

SEQ ID NO: 845990 - DNA, 75 bp, synthetic construct
  source 1..75: mol_type = other DNA
atccgctgaaaaaagtgcagttcagggggagagcatgaaaatgatggatatgagcggtcacgatcaggccgcaat

SEQ ID NO: 845991 - DNA, 75 bp, synthetic construct
  source 1..75: mol_type = other DNA
ctacgcgcaagatctgactatgttggatatgtgcctgtacgatggctttaacggtaacggtcttagctatgaaat

SEQ ID NO: 845992 - DNA, 75 bp, synthetic construct
  source 1..75: mol_type = other DNA
aattcagcgtgatggataaacagtccgggtactacatgggcaaattgtcagtaatctttacgccttccttgccaa

SEQ ID NO: 845993 - DNA, 75 bp, synthetic construct
  source 1..75: mol_type = other DNA
acgcgatggcaaaaatggaagctctggcaaacaaccttccggcagggacaacctgggcctggagtggcttgtcat

SEQ ID NO: 845994 - DNA, 75 bp, synthetic construct
  source 1..75: mol_type = other DNA
acaggctagtggcagtgttgactgtattatccctgttggctcgatcattaaccgcggggacggataccagtaccg

SEQ ID NO: 845995 - DNA, 75 bp, synthetic construct
  source 1..75: mol_type = other DNA
tgctatacagtaaaggtatggggtgtgctgctatagatactcgtaatggttgctatttactcggaaatgaagatt

SEQ ID NO: 845996 - DNA, 75 bp, synthetic construct
  source 1..75: mol_type = other DNA
agcattaatctgaaacgtgtgcgtccggtcgtgttgccaggcattcgttacgctgtgatgtgtgtacctacacct

SEQ ID NO: 845997 - DNA, 75 bp, synthetic construct
  source 1..75: mol_type = other DNA
tggtggcattgaccttgactcccgccctgtgcggttccgtcctccagcatgttccgccacataaaaaaggctttt

SEQ ID NO: 845998 - DNA, 75 bp, synthetic construct
  source 1..75: mol_type = other DNA
ccgtttccagggtccgattatcggcgcgggcgcatacacggtagaaaaagccgaaacgctgatcggcaaaggatt

SEQ ID NO: 845999 - DNA, 75 bp, synthetic construct
  source 1..75: mol_type = other DNA
gaagccgatgcactgtatctgattgaacaactgggtaaacgcggcattgcttatctgcatatgtcagaaccggat

SEQ ID NO: 846000 - DNA, 75 bp, synthetic construct
  source 1..75: mol_type = other DNA
tggggttgagcttaagcgatatcaccaacacgctggccagcgcgtgggggggaacttatgtgaatgactttattg

SEQ ID NO: 846001 - DNA, 75 bp, synthetic construct
  source 1..75: mol_type = other DNA
caacgatgtttacttccaggtggcgctattaaccaccatcggtttgtcgtcgaaaaatgccattctgattgtgga

SEQ ID NO: 846002 - DNA, 75 bp, synthetic construct
  source 1..75: mol_type = other DNA
atggtttcagttttagcggcagcggacagaacaccgggatggcgtttgtttcgttgaaaaactggtctcaacgta

SEQ ID NO: 846003 - DNA, 75 bp, synthetic construct
  source 1..75: mol_type = other DNA
tgacggccatcctgccggatattaccagtgatgtaacgggtggaggcgcgcgcggtaacgctgatgccgggacca

SEQ ID NO: 846004 - DNA, 75 bp, synthetic construct
  source 1..75: mol_type = other DNA
caataaaatagatataacagaatttactaatttaatggaaaacggatatctggtaaaaaaagaaataataaaatc

SEQ ID NO: 846005 - DNA, 75 bp, synthetic construct
  source 1..75: mol_type = other DNA
ttatttaataacgaatcaataaaaagtgataaaatattggaaataaataacaatcgagaactgctcggtatgttt

SEQ ID NO: 846006 - DNA, 75 bp, synthetic construct
  source 1..75: mol_type = other DNA
tcgaccccaaccatattgacgtgttcttcccggagttcgcccacgccacgccaagggtgcagttagacttgcatc

SEQ ID NO: 846007 - DNA, 75 bp, synthetic construct
  source 1..75: mol_type = other DNA
tcgtggcggaggcgtttgcctccgtggctgaattgccaccaaagcatgcatcgcttatgcgcgaagtcgctacca

SEQ ID NO: 846008 - DNA, 75 bp, synthetic construct
  source 1..75: mol_type = other DNA
tactgaattaccaccaaaacatgcaccgcttatgcgcgaagtcgccaccagactggacgctacgttcgcagcatt

SEQ ID NO: 846009 - DNA, 75 bp, synthetic construct
  source 1..75: mol_type = other DNA
atattgatgctcattgccgccgccttgctggtgcggcggatgcgcttgctggagatgggtgatgataccgcatgt

SEQ ID NO: 846010 - DNA, 75 bp, synthetic construct
  source 1..75: mol_type = other DNA
gcgctgggcgtcagcgtcgagcgttcgcgtctgttaatgatgctggttgcagtggtgcttaccgctgcggcaacg

SEQ ID NO: 846011 - DNA, 75 bp, synthetic construct
  source 1..75: mol_type = other DNA
tcatcacctgtttgctgctggtttccgcctgtgtagttgcaggtatctggggattgcgtagcggtgccgtcatgc

SEQ ID NO: 846012 - DNA, 75 bp, synthetic construct
  source 1..75: mol_type = other DNA
ggcagagatacacgcagtaaaaatggagttcatccagccgggtaagccgacgcagaacgctttcattgagcgttt

SEQ ID NO: 846013 - DNA, 75 bp, synthetic construct
  source 1..75: mol_type = other DNA
gcaaattaccggaacaccggggcgggttttagccaggggctctgtaattaaccgtgcggatggctaccagtacag

SEQ ID NO: 846014 - DNA, 75 bp, synthetic construct
  source 1..75: mol_type = other DNA
tgctgtttggtcaggacctgacggctatcgcgctggcagcaatggtgggcggcattgtcacttcgctgctggtct

SEQ ID NO: 846015 - DNA, 75 bp, synthetic construct
  source 1..75: mol_type = other DNA
cagtcgtcggtattctcgcggcctttgccgttgccgggtttcgtcatgcaatgctgctactggagtggttgttcc

SEQ ID NO: 846016 - DNA, 75 bp, synthetic construct
  source 1..75: mol_type = other DNA
aacgccatgtcattcagtgaccgcagcggggggatctcacgtcgtcgggtgatattcaatttttcggaggttgta

SEQ ID NO: 846017 - DNA, 75 bp, synthetic construct
  source 1..75: mol_type = other DNA
agccagaaattcagattctctacagcgatgaagacaagctcaacggtcgcggcgagcgttttgatccccatttca

SEQ ID NO: 846018 - DNA, 75 bp, synthetic construct
  source 1..75: mol_type = other DNA
ccgaaatggtcagtcagtgcctgcgacctgaaattggttgcgtaggtgccaaactctattacagcaacgacactg

SEQ ID NO: 846019 - DNA, 75 bp, synthetic construct
  source 1..75: mol_type = other DNA
tcagcaagcatgaaggcgctggaagatgcaagggaacgtgcgttagtggttggcttttcgctgattatcatgccg

SEQ ID NO: 846020 - DNA, 75 bp, synthetic construct
  source 1..75: mol_type = other DNA
tattcatggtgctggcgaaccggtacgactggcagttattcattgaggtaacagggccggggggaagtggtaaaa

SEQ ID NO: 846021 - DNA, 75 bp, synthetic construct
  source 1..75: mol_type = other DNA
aggtcgtcattatgtgcgtgtttatcgtgccggaaagattgcagagaaaagtctgacgaaggttgcgacattact

SEQ ID NO: 846022 - DNA, 75 bp, synthetic construct
  source 1..75: mol_type = other DNA
tttgtcaccctcaaaaatgaacatggagagaagacactctgggggaaagaccttgagagagcggttaaagatgct

SEQ ID NO: 846023 - DNA, 75 bp, synthetic construct
  source 1..75: mol_type = other DNA
acaacggcgttgtatgggagccagtacaggataaagaattacagcgagctatggcacagattttcattgatgcgg

SEQ ID NO: 846024 - DNA, 75 bp, synthetic construct
  source 1..75: mol_type = other DNA
tcatgtcgtcggtaatgtgtgatggtctgttagtgggtaatgccgaaattattccgttcagtccgcgcaggtatc

SEQ ID NO: 846025 - DNA, 75 bp, synthetic construct
  source 1..75: mol_type = other DNA
gcccgcgccgttatctgtatcacgcttatctggcttatatgcgggctaacggcctgagcaagccggtgtcgctga

SEQ ID NO: 846026 - DNA, 75 bp, synthetic construct
  source 1..75: mol_type = other DNA
gcggcgaagttctcctggcacattatggcggtgaactggcgattcatgccgactctgacactgttcaccattaca

SEQ ID NO: 846027 - DNA, 75 bp, synthetic construct
  source 1..75: mol_type = other DNA
agaagcagaatgcatctgatactcaaaaggaagataaagctgcaggtgaaccctgggagaaaggcgttatcgtcg

SEQ ID NO: 846028 - DNA, 75 bp, synthetic construct
  source 1..75: mol_type = other DNA
cagaatctttctgatggtctggtgattcagcttcctgttaagaaaaaaacagaagacagcgccgcaccactggcg

SEQ ID NO: 846029 - DNA, 75 bp, synthetic construct
  source 1..75: mol_type = other DNA
atgacagcggccagggacaccctgcggcgtccgctgacaatgccggagcagcaggcagatgcgcacggagccata

SEQ ID NO: 846030 - DNA, 75 bp, synthetic construct
  source 1..75: mol_type = other DNA
aactagccaggctgaggcgtcagcatcagctagtttgctctgtcatcgcagccttgctcatctgtgcaggtatat

SEQ ID NO: 846031 - DNA, 75 bp, synthetic construct
  source 1..75: mol_type = other DNA
gagcatgacaaaaacgactggctgttaattgccagtgaattaccgttcagcccgccagcagagggggaaacgctg

SEQ ID NO: 846032 - DNA, 75 bp, synthetic construct
  source 1..75: mol_type = other DNA
tacagccgtactcaggaaagcgaaatcacccagcagtttccccggctgcccaaccccgacatggtgatgtacctg

SEQ ID NO: 846033 - DNA, 75 bp, synthetic construct
  source 1..75: mol_type = other DNA
ggctgacccgaatacggcggataaccggacggtgacggaagctgcccgcagcgtcctgcgtcgcgggctgacgaa

SEQ ID NO: 846034 - DNA, 75 bp, synthetic construct
  source 1..75: mol_type = other DNA
gcccaatcctgacatggtgatgtatgtttttccgcatctggcttccggtacgtcaccggttccgggggtacagca

SEQ ID NO: 846035 - DNA, 75 bp, synthetic construct
  source 1..75: mol_type = other DNA
tcttggaggggtcgcggggcactcccataaacattatcctcgccaccatccggggtatttcaatcgtttgttgtt

SEQ ID NO: 846036 - DNA, 75 bp, synthetic construct
  source 1..75: mol_type = other DNA
tttcattattgatttggagcagctctcaaatattagcaagggatggtatcaatttaatatctctattaattgcca

SEQ ID NO: 846037 - DNA, 75 bp, synthetic construct
  source 1..75: mol_type = other DNA
atgagcttgaaacagtaacgctgccatataagcgaacagtcagtaccaatcgtttgttctatctggaatcgcccc

SEQ ID NO: 846038 - DNA, 75 bp, synthetic construct
  source 1..75: mol_type = other DNA
tctgatggtctggttattcagcttcctgttaagaaaaaaacagaagacagcgccgcaccactggcgcttaaccag

SEQ ID NO: 846039 - DNA, 75 bp, synthetic construct
  source 1..75: mol_type = other DNA
atgctggcggaaaaaatagaaggtgagctggcggtagtgattcgccatctgcttacacggtttgctgaccaggac

SEQ ID NO: 846040 - DNA, 75 bp, synthetic construct
  source 1..75: mol_type = other DNA
atatttatgaggaagttgccgggttggatgaagagaatctgcatgttgcttttaatgatgtggacttctgtctga

SEQ ID NO: 846041 - DNA, 75 bp, synthetic construct
  source 1..75: mol_type = other DNA
agtgaccgcagcggggggatctcacgtcgtcgggtgatattcaatttttcggaggttgtaccggaaaacgaacgc

SEQ ID NO: 846042 - DNA, 75 bp, synthetic construct
  source 1..75: mol_type = other DNA
gacgaagcagttatcgaacatattaacgacaacatgaatgatgccacccggcagattgcggcgtttcagtcacag

SEQ ID NO: 846043 - DNA, 75 bp, synthetic construct
  source 1..75: mol_type = other DNA
accttgctatgaccgcgatatggcccaggcgctggttaatgtcggcgcacaaatagccgccatgacaccgggcga

SEQ ID NO: 846044 - DNA, 75 bp, synthetic construct
  source 1..75: mol_type = other DNA
ctgccgcccgccggatagtacgccaggttgttgaagaaattatggctcgactggcaaaggaagttcgtcaggctt

SEQ ID NO: 846045 - DNA, 75 bp, synthetic construct
  source 1..75: mol_type = other DNA
atgcgtaacttcgatttatccccactgatgcgtcaatggatcggttttgacaaaatggccaacgcactgcaaaac

SEQ ID NO: 846046 - DNA, 75 bp, synthetic construct
  source 1..75: mol_type = other DNA
gaaaatatggaagtctctggcgcaaccttcgttaatggtttgctgcatattgatttaattcgtaatgagcctgaa

SEQ ID NO: 846047 - DNA, 75 bp, synthetic construct
  source 1..75: mol_type = other DNA
cgcactatatgctgggtaccgcagctggcccgcatccttacccgaccattgtgcgtgagtttcagcggatgattg

SEQ ID NO: 846048 - DNA, 75 bp, synthetic construct
  source 1..75: mol_type = other DNA
aagacgtactgaacgaacagctggcggggctggcaaaagctcatccatcgttgaagctgcatcaggacccggtgt

SEQ ID NO: 846049 - DNA, 75 bp, synthetic construct
  source 1..75: mol_type = other DNA
cctgaaactgatccccataataagcgaagttagcgagatgaatgcgaaaaaaaacgcggagaaattcatgagtag

SEQ ID NO: 846050 - DNA, 75 bp, synthetic construct
  source 1..75: mol_type = other DNA
tggtggaatctgatgacgttgcgccaggtaacgtactgggcattatgcagaagggttatacgctgaacggtcgta

SEQ ID NO: 846051 - DNA, 75 bp, synthetic construct
  source 1..75: mol_type = other DNA
gagtgggactatatcagaacattttctccataccacaatattaaagcagaagagaactatccaccggtgttgttt

SEQ ID NO: 846052 - DNA, 75 bp, synthetic construct
  source 1..75: mol_type = other DNA
taccgcagaagagcggctggctacgccgcccactggccagccccgttaccatgagtaccatttctgctgaggcca

SEQ ID NO: 846053 - DNA, 75 bp, synthetic construct
  source 1..75: mol_type = other DNA
gcgctggttaatgtcggcgcacaaatagccgccatgacgccgggcgagctggcatcatggcttgcggagaatctt

SEQ ID NO: 846054 - DNA, 75 bp, synthetic construct
  source 1..75: mol_type = other DNA
tgatttaattcgtaatgagcctgaacccatcgcagcgcagcgcagcgtatcgctatcagcgaacgtcccgcgtta

SEQ ID NO: 846055 - DNA, 75 bp, synthetic construct
  source 1..75: mol_type = other DNA
ggctggcgttaccaatgctgagtttatcaacgaaaaaggtgagaaagaggactggacgccattaatgaaacgcct

SEQ ID NO: 846056 - DNA, 75 bp, synthetic construct
  source 1..75: mol_type = other DNA
aaggtagccattgaccctaaacacaaagcgccatattcaacccgtatacctgcggtggtgctggccgtcaataac

SEQ ID NO: 846057 - DNA, 75 bp, synthetic construct
  source 1..75: mol_type = other DNA
cttctggaaatggctccgccgctctgtggcggataatgaccgaaaagcagaccgcgtactgtctgcgctgtttat

SEQ ID NO: 846058 - DNA, 75 bp, synthetic construct
  source 1..75: mol_type = other DNA
ccactggcgcttaaccagatgggagcaagccagcgcggcgaagttctcctggcacgttatggcggtgaactggca

SEQ ID NO: 846059 - DNA, 75 bp, synthetic construct
  source 1..75: mol_type = other DNA
tatttttaacttctcagaggtggtaccggaaaacgaacgtgatcctatgcttgccgagaagattgaaggtgagct

SEQ ID NO: 846060 - DNA, 75 bp, synthetic construct
  source 1..75: mol_type = other DNA
aaggtagctatcgaccctaaacacaaagcgccgtattcaacgcgtattccggcagtggtgctggccgtcaataac

SEQ ID NO: 846061 - DNA, 75 bp, synthetic construct
  source 1..75: mol_type = other DNA
gtggattcaagcgaaatttagggggcagcaagtgaattgttccttttgtgaagggtttgttgtccataagatggt

SEQ ID NO: 846062 - DNA, 75 bp, synthetic construct
  source 1..75: mol_type = other DNA
atgcccggcagatagaccacgcgctggagtggctgtatgggcgcgatcctgaacggctccagcgtggtgaacgct

SEQ ID NO: 846063 - DNA, 75 bp, synthetic construct
  source 1..75: mol_type = other DNA
caccacccctgagtggatcaacattattcacacgctgtttccgcaacgggtgatcgagcggctggaaagcgatgc

SEQ ID NO: 846064 - DNA, 75 bp, synthetic construct
  source 1..75: mol_type = other DNA
caaatccgcaatggctctacggcgattgctggaattatggcggaaagtttcctgcgcgaaggaacgcaaaaaatc

SEQ ID NO: 846065 - DNA, 75 bp, synthetic construct
  source 1..75: mol_type = other DNA
gaaagtttcctgcgcgaaggcacgcaaaaaatcgtcagcggaaccccgctcacctatggtcagtcgatcaccgat

SEQ ID NO: 846066 - DNA, 75 bp, synthetic construct
  source 1..75: mol_type = other DNA
gcggtggcgattccgtgaagtacacgaccagaaacagcctttaccgcgtctatctggcgtttatggcatacgcag

SEQ ID NO: 846067 - DNA, 75 bp, synthetic construct
  source 1..75: mol_type = other DNA
tatgagtacatcggttgaaaatgaatggctgtgttctttgcttcttgagcactacgggatccctgtagcaaaaac

SEQ ID NO: 846068 - DNA, 75 bp, synthetic construct
  source 1..75: mol_type = other DNA
tgaatgcgccatgcaagttgatggcggcgaaggtgtactgttgattatcaaaaattacaccggcgatattcttaa

SEQ ID NO: 846069 - DNA, 75 bp, synthetic construct
  source 1..75: mol_type = other DNA
accggtttttccatcaccttactgaaagttgatgacgaaacgctggcgttatgggacgccccggtccacaccccg

SEQ ID NO: 846070 - DNA, 75 bp, synthetic construct
  source 1..75: mol_type = other DNA
gcgccaacctgcaacactggcacccgcaacacggcaagttgtatatcgaatccccccgctttaacagccgcatta

SEQ ID NO: 846071 - DNA, 75 bp, synthetic construct
  source 1..75: mol_type = other DNA
aagttgaacgcttggttatgacacggctagaaggcgattcaacagcaaaaaaatccataaaaacaaccgttaatc

SEQ ID NO: 846072 - DNA, 75 bp, synthetic construct
  source 1..75: mol_type = other DNA
atattcataacctgccgcgcgaccaggggccgggtaataccgtctcgctggaagttgaaagtgaaaatatcacag

SEQ ID NO: 846073 - DNA, 75 bp, synthetic construct
  source 1..75: mol_type = other DNA
gtacgggatctgctgcagttggcggctgaatgtgagggatatgatggcgcagatctgcgacagggaatatttgct

SEQ ID NO: 846074 - DNA, 75 bp, synthetic construct
  source 1..75: mol_type = other DNA
ctggaagagcagttggcaacagatattgagcagctgcatttcgccattcttcatcagacaggtggcaggtgtaat

SEQ ID NO: 846075 - DNA, 75 bp, synthetic construct
  source 1..75: mol_type = other DNA
gagaactgtttcagcggaaggcgctgcggctttagtggcctgtattgccgaacaactggatggcgttgttaagga

SEQ ID NO: 846076 - DNA, 75 bp, synthetic construct
  source 1..75: mol_type = other DNA
cgactcactggatgcctgtgcggaactggggcgtaagctgaataatcaggggcactcaattggtatcgctctcgg

SEQ ID NO: 846077 - DNA, 75 bp, synthetic construct
  source 1..75: mol_type = other DNA
tgcactgtggttatatcggtcaggggatgctttcgggggcctgtccgggcgaaattttcacctcaccgacgcccg

SEQ ID NO: 846078 - DNA, 75 bp, synthetic construct
  source 1..75: mol_type = other DNA
ctggagaaaaatatatcatccagcctggcgagatacggcagcagccgcacggggtggaaagtcgtctgatcctga

SEQ ID NO: 846079 - DNA, 75 bp, synthetic construct
  source 1..75: mol_type = other DNA
tccggtagagttattaatgaaagtacagttgggcggcgggaccaatatcgccagtgccgtggagtatggtcggca

SEQ ID NO: 846080 - DNA, 75 bp, synthetic construct
  source 1..75: mol_type = other DNA
cgcttccttacagtgttaaacaacgcctcagtccgtatggagacacgattgctgattgaatggcagttactaact

SEQ ID NO: 846081 - DNA, 75 bp, synthetic construct
  source 1..75: mol_type = other DNA
atctcactgaacgggtggttctcatgcaatggtggagtgactatgtttcgtctcaaaaatgcaaagttattgccg

SEQ ID NO: 846082 - DNA, 75 bp, synthetic construct
  source 1..75: mol_type = other DNA
gcagacaacctggggcaacggttcagcaagccaaaaaaacagaatatgccagcattacccccttccgaactccct

SEQ ID NO: 846083 - DNA, 75 bp, synthetic construct
  source 1..75: mol_type = other DNA
gttagatgagaagataaaaaccgctgaaataacggaagactatgcaaaagatatatggcgtagtcttgaacggaa

SEQ ID NO: 846084 - DNA, 75 bp, synthetic construct
  source 1..75: mol_type = other DNA
gctttacgtgatgaatatctgtctttgcttgctaatggtattgaccctcaagcccacatcactgaaaaaactaac

SEQ ID NO: 846085 - DNA, 75 bp, synthetic construct
  source 1..75: mol_type = other DNA
gccaagcgtgagcacattgttcctctatcttctcaggcattagaaattctggaagtaatgaaaccaatcagtgct

SEQ ID NO: 846086 - DNA, 75 bp, synthetic construct
  source 1..75: mol_type = other DNA
acgcccggcagatagaccacgcgctggagtggctgtatgggcgcgatcctgaacggctccagcgtggtgaacgtt

SEQ ID NO: 846087 - DNA, 75 bp, synthetic construct
  source 1..75: mol_type = other DNA
gaacggatccagcgtggtgaacgatccggtggattaggtagctcaaatctcaccacgccagaatggatcaatagt

SEQ ID NO: 846088 - DNA, 75 bp, synthetic construct
  source 1..75: mol_type = other DNA
aatttcgatttcaaaagtaccctgcgggccaacctgcagcactgggaccccaaacgcggcaagttgtatatcgaa

SEQ ID NO: 846089 - DNA, 75 bp, synthetic construct
  source 1..75: mol_type = other DNA
acatctggcggagccttgaacgaaatattttccccggtctgggtaatgtgccaatcaatgagattcgtcccaagc

SEQ ID NO: 846090 - DNA, 75 bp, synthetic construct
  source 1..75: mol_type = other DNA
gctgacaaccttgggcaacggttcagtaagcctaaaaaacagaatatgccagcattacccccttccgagttaccc

SEQ ID NO: 846091 - DNA, 75 bp, synthetic construct
  source 1..75: mol_type = other DNA
tgaccaataaaaaatatatacctttgcttgaacttataaataaagaaaaacctgatatacttgttcttcttgaaa

SEQ ID NO: 846092 - DNA, 75 bp, synthetic construct
  source 1..75: mol_type = other DNA
gcaactggccactgatattgaaaatctgcacttcgctattttgcagcaaaatggcgatatctgtgacgtggcggt

SEQ ID NO: 846093 - DNA, 75 bp, synthetic construct
  source 1..75: mol_type = other DNA
cgctacacatcgtatagaaatgaagctgacaaagtatatgcatatatccatgagatactttctaaggaatatggt

SEQ ID NO: 846094 - DNA, 75 bp, synthetic construct
  source 1..75: mol_type = other DNA
ttatctggcaatagcgtttaaaaaatggggcgtcccctgggaggccgttggtgcatacaatgctggattcaggaa

SEQ ID NO: 846095 - DNA, 75 bp, synthetic construct
  source 1..75: mol_type = other DNA
ttatctggcaatagcttttaaaaaatggggcgtcccctgggaggccgttggtgcatacaatgcgggattcaggaa

SEQ ID NO: 846096 - DNA, 75 bp, synthetic construct
  source 1..75: mol_type = other DNA
aaatgtgcggcgcgatgaaaggcgcggtcaccggggcgctggtgttcgaagggctggcgaaagatctcgacgagg

SEQ ID NO: 846097 - DNA, 75 bp, synthetic construct
  source 1..75: mol_type = other DNA
gatatggcagcggacttatgcaggtagactcccagcattttaacgaactggcccgctacggaattaaaccggaac

SEQ ID NO: 846098 - DNA, 75 bp, synthetic construct
  source 1..75: mol_type = other DNA
aaaagcagtaaaggtatccggattccggccacgaagaaatcacttccggaaattaacagcgtgcagaacaattaa

SEQ ID NO: 846099 - DNA, 75 bp, synthetic construct
  source 1..75: mol_type = other DNA
aaacccgcaaaatagtattcagggctgtcagagtcaggtatggattgtaatgcgccagaatgcgcagggaattat

SEQ ID NO: 846100 - DNA, 75 bp, synthetic construct
  source 1..75: mol_type = other DNA
ggcgcgtccggtgccatcggcgctggaaaaagcgccagccaaaaaagaagcgtatcgctggaaggctaccactcc

SEQ ID NO: 846101 - DNA, 75 bp, synthetic construct
  source 1..75: mol_type = other DNA
tggcttcggtcaccgatcgcgttcaggcgcgtccggtgccatcggcgctggaaaaagcgccagccaaaaaagaag

SEQ ID NO: 846102 - DNA, 75 bp, synthetic construct
  source 1..75: mol_type = other DNA
ataaatttgttaatgacaagtggtttacactcaaatcaatcaataatatttttctttattttttaaatttaaaaa

SEQ ID NO: 846103 - DNA, 75 bp, synthetic construct
  source 1..75: mol_type = other DNA
caatagctctaccacgtattttttttctaaatattacctacctatgaaagtaaaagatggaaaaggagatgaata

SEQ ID NO: 846104 - DNA, 75 bp, synthetic construct
  source 1..75: mol_type = other DNA
ctcaccccatctcgttcacaaggtctggaagcgatgattcgtgcaattcgcgccaaagccgctgcacttagctaa

SEQ ID NO: 846105 - DNA, 75 bp, synthetic construct
  source 1..75: mol_type = other DNA
atggcgaagattttgcgtatgggcgctaacgaccagagcgtgattgaccgcctgaactggatgcgtgatgtgcag

SEQ ID NO: 846106 - DNA, 75 bp, synthetic construct
  source 1..75: mol_type = other DNA
gattatatctgctttcccacgcctcaacggctggcagcagccgactcgcaggcgctaaaagcgttggggatgccg

SEQ ID NO: 846107 - DNA, 75 bp, synthetic construct
  source 1..75: mol_type = other DNA
taacgcaggatttaacccaatttctcgccagcttaccggaagaagctcgcattaaagccattaatgagatccgaa

SEQ ID NO: 846108 - DNA, 75 bp, synthetic construct
  source 1..75: mol_type = other DNA
atgggacgatcataaaatcggcaaagagctgggaatggacagcgacgaagtgctgcgcctgaagcaaattaacgg

SEQ ID NO: 846109 - DNA, 75 bp, synthetic construct
  source 1..75: mol_type = other DNA
ttagtgagccgggaattatttcagttgaggatttacctcccggctggggattacttcacgttgttaacggaagag

SEQ ID NO: 846110 - DNA, 75 bp, synthetic construct
  source 1..75: mol_type = other DNA
gacgataagccatttactgggaataagcaggttgaatgcgattacatgttatctgcattaaggcgcatggagttg

SEQ ID NO: 846111 - DNA, 75 bp, synthetic construct
  source 1..75: mol_type = other DNA
atggagttgagagggcaccttaatgaaatatatgacggtgtgattgttaataagaaagaaggaaacgcggcatga

SEQ ID NO: 846112 - DNA, 75 bp, synthetic construct
  source 1..75: mol_type = other DNA
ctcaacgttgtatcacagagcgaatatgctgtcggtaagatgcaaatacactcacaaaatttttcgcatctggct

SEQ ID NO: 846113 - DNA, 75 bp, synthetic construct
  source 1..75: mol_type = other DNA
atgctgcgcgacgcgatgaaaattatcggtgagatcgatctgcgcttaatgctggcgcaggcgctgcatatgggc

SEQ ID NO: 846114 - DNA, 75 bp, synthetic construct
  source 1..75: mol_type = other DNA
gaaaaccccaacgtcaccattccgctgctcggttttatgggcgtgccgtcggcaatcgacatcacccgcgtgggc

SEQ ID NO: 846115 - DNA, 75 bp, synthetic construct
  source 1..75: mol_type = other DNA
gagctgggaatggacagcgacgaagtgttgcgcctgaagcaaattaacggcctgcaagagttgtttgccgaccgt

SEQ ID NO: 846116 - DNA, 75 bp, synthetic construct
  source 1..75: mol_type = other DNA
atgattacaacccaaacaacgtggcaccacccgaaaaaaaaactgctgaaaaaatccattgaaatagatggtttt

SEQ ID NO: 846117 - DNA, 75 bp, synthetic construct
  source 1..75: mol_type = other DNA
taccgggataaaaagcagtaaaggaatccggattccagtcacaaagaaatcacttccggaaattaacagcgtgca

SEQ ID NO: 846118 - DNA, 75 bp, synthetic construct
  source 1..75: mol_type = other DNA
cggagttggtgtttcctgatggggagacgttgcgtgaaattttacatgcaagaaaatttagtaaattaaaccagt

SEQ ID NO: 846119 - DNA, 75 bp, synthetic construct
  source 1..75: mol_type = other DNA
tccgtaaagctgaacgctggggaccgcgcacactcgatcttgatatcatgttgtttggtaatgaaaccattaata

SEQ ID NO: 846120 - DNA, 75 bp, synthetic construct
  source 1..75: mol_type = other DNA
ctgtttggtaatgaagtgataaataccgaacgcctgaccgttccgcactacgatatgaagaatcgtggatttatg

SEQ ID NO: 846121 - DNA, 75 bp, synthetic construct
  source 1..75: mol_type = other DNA
tttcgtggtttcctggcaattatcccgattttaattggtgtgctggtagggtatgcgctctctttcgcaatgggg

SEQ ID NO: 846122 - DNA, 75 bp, synthetic construct
  source 1..75: mol_type = other DNA
atttccggcttctttggctctacgccaaataccacttacggagaaaacattggcgtgatggcgatcacccgtgtt

SEQ ID NO: 846123 - DNA, 75 bp, synthetic construct
  source 1..75: mol_type = other DNA
ttatggccgctgtttgagattgcaccggagctggtttttcctgatggggagacgttggcgacaaggctcaccaat

SEQ ID NO: 846124 - DNA, 75 bp, synthetic construct
  source 1..75: mol_type = other DNA
ttggcaggttgtatgccatccacggtaccaatgccaattttggtattgggctccgggtaagtcagggctgtattc

SEQ ID NO: 846125 - DNA, 75 bp, synthetic construct
  source 1..75: mol_type = other DNA
tgcagatgataataacgcagatctcatcccatgcctgagtacagatcttcttgtcagtcttggcataaaaaaatc

SEQ ID NO: 846126 - DNA, 75 bp, synthetic construct
  source 1..75: mol_type = other DNA
gagcgagacataattccgttacgttcccggctgacgctgggtgctgagagatcccctcataatttccccaaagcg

SEQ ID NO: 846127 - DNA, 75 bp, synthetic construct
  source 1..75: mol_type = other DNA
ctattgataacaatcagattttagtaaatgtaaatacttttaattatagtgttaatccctatccactcaaatgtc

SEQ ID NO: 846128 - DNA, 75 bp, synthetic construct
  source 1..75: mol_type = other DNA
atgcttaaatcgattattaatggcgctacaaccacccctgcccaactggcaaaagagattgtcttttatcacggt

SEQ ID NO: 846129 - DNA, 75 bp, synthetic construct
  source 1..75: mol_type = other DNA
agcctgtgaaatacacaactgaaccggatggttcaaagtggctggaagttcatgaaccgctgtcgcgcaatcggg

SEQ ID NO: 846130 - DNA, 75 bp, synthetic construct
  source 1..75: mol_type = other DNA
gaaaaatggagtgctccttactggcaattggaagatggttttataggatatattggtcatccagggcgaactggg

SEQ ID NO: 846131 - DNA, 75 bp, synthetic construct
  source 1..75: mol_type = other DNA
tgggtattactgtggtacttctttgtcagtgataaaccgtcaaaaagtaaacgtctggcagcggaagaacgtgtc

SEQ ID NO: 846132 - DNA, 75 bp, synthetic construct
  source 1..75: mol_type = other DNA
gccttcgctgggttattacatgaaacagccgatggtatgggcgactactctggcattctttagctacaactatat

SEQ ID NO: 846133 - DNA, 75 bp, synthetic construct
  source 1..75: mol_type = other DNA
atgcagttaattgttgattacccagatcataacatttattcatcttttgtggatgcggatgctgaacttcgagag

SEQ ID NO: 846134 - DNA, 75 bp, synthetic construct
  source 1..75: mol_type = other DNA
gagtttggcgtagtgcaaggtctggtcacgccgctggacgtactggaagccattgccggggagttcccggatgct

SEQ ID NO: 846135 - DNA, 75 bp, synthetic construct
  source 1..75: mol_type = other DNA
tcaggcggcgctaattcagatatcacgacccgcactatcgaagcggtgcgtaaatctaaggaagcgttagacctg

SEQ ID NO: 846136 - DNA, 75 bp, synthetic construct
  source 1..75: mol_type = other DNA
atgtgggagattctgaagaagaacgacatgatgaacggtaacaccgagctgatggagctggtgatgaacgttacc

SEQ ID NO: 846137 - DNA, 75 bp, synthetic construct
  source 1..75: mol_type = other DNA
ggcgcttgtcagcacggaaggggcaacagaatggtgcgcagaatacgatgaatggggcaacctgctgaatgaaga

SEQ ID NO: 846138 - DNA, 75 bp, synthetic construct
  source 1..75: mol_type = other DNA
tgcgcagaatacgatgaatggggcaacctgctgaatgaagagaacccgcaccagctgcagcagctcatccgcctg

SEQ ID NO: 846139 - DNA, 75 bp, synthetic construct
  source 1..75: mol_type = other DNA
aaaagccgccacaaagttattggcagtagtacataaagttattgaggagcatatcacggtcaatccatcatcacc

SEQ ID NO: 846140 - DNA, 75 bp, synthetic construct
  source 1..75: mol_type = other DNA
cgtgctcacaactatctaaatactgaatcagcacactggatatggcataggtataaatataaagcaatacattcc

SEQ ID NO: 846141 - DNA, 75 bp, synthetic construct
  source 1..75: mol_type = other DNA
atcagcacggaaggggcaacagcgtggtgcgcagaatatgatgaatggggcaacctgctgagtgatgagaacccg

SEQ ID NO: 846142 - DNA, 75 bp, synthetic construct
  source 1..75: mol_type = other DNA
tgcagacacagggataactgatcgtgtcaatgacataataaatgacagattctggagtgatgggaaaaaacccga

SEQ ID NO: 846143 - DNA, 75 bp, synthetic construct
  source 1..75: mol_type = other DNA
gcgttgcagacagcggtgccgggcatgaagtcagtgaaggattttatgcagaagctggccagtgaactgaataac

SEQ ID NO: 846144 - DNA, 75 bp, synthetic construct
  source 1..75: mol_type = other DNA
accgaagtgatgattactgctaaggcggtaattcgcggactgtctgcccgcgaaactgatgacggcgttaaccgt

SEQ ID NO: 846145 - DNA, 75 bp, synthetic construct
  source 1..75: mol_type = other DNA
agcgccgatctgcagatcactgatatggcaatcgctcctgtttccggtgatgtagaaaaatcagcggctgaaacc

SEQ ID NO: 846146 - DNA, 75 bp, synthetic construct
  source 1..75: mol_type = other DNA
ctggcaggttatgacgtctattacgaagaccacgacgaaggcacccggcaacgttttgctgaagggctggcgtgg

SEQ ID NO: 846147 - DNA, 75 bp, synthetic construct
  source 1..75: mol_type = other DNA
aagacttcgtgcagaaaatggcaagcgacattaacagtatgaacctcagttcctgccaggctgcacaggggatta

SEQ ID NO: 846148 - DNA, 75 bp, synthetic construct
  source 1..75: mol_type = other DNA
gcccagctcccatgagcgaagcggagttccgttgggagcacaatcaggatgcgatggcggtagaaaaactgtctg

SEQ ID NO: 846149 - DNA, 75 bp, synthetic construct
  source 1..75: mol_type = other DNA
tgcctgcgcctgttgataatcaaagctgaacagcaaaaaatcccgccattttacgctaataacaagtgtaaccag

SEQ ID NO: 846150 - DNA, 75 bp, synthetic construct
  source 1..75: mol_type = other DNA
cgccagtgacgtgcgtagttacctgagcttcctgatgctgggttgggtgttcattgtcagcggtgccagcttcat

SEQ ID NO: 846151 - DNA, 75 bp, synthetic construct
  source 1..75: mol_type = other DNA
aaaaacatcatcaacattccaaacctgatcgaacagtacggtgtagcgcgcgccatcatcgaaacctgggcagct

SEQ ID NO: 846152 - DNA, 75 bp, synthetic construct
  source 1..75: mol_type = other DNA
caaactgggacgaagctcccgctggttacaaagcgaagtcgaagcctggctgcaggcccgtattgatgcatcccg

SEQ ID NO: 846153 - DNA, 75 bp, synthetic construct
  source 1..75: mol_type = other DNA
caactattcgctcaacttctacccgcgaaacggaagatggaatgcagcataacgccagtctgcagatcactgata

SEQ ID NO: 846154 - DNA, 75 bp, synthetic construct
  source 1..75: mol_type = other DNA
gcctttccggctcccatcaagctgggccgcagctcccgctggctgaaaagtgaagtggaagcctggctacaggcg

SEQ ID NO: 846155 - DNA, 75 bp, synthetic construct
  source 1..75: mol_type = other DNA
tgtacttgtttagcgagcgatttatgacctatggcaaggcgtatggcttatgcgaatggttcgaggtagagcagt

SEQ ID NO: 846156 - DNA, 75 bp, synthetic construct
  source 1..75: mol_type = other DNA
atgttgtccaaacaaatcccgcttggcatctatgaaaaagcgctccccgccggggagtgctggctggaacggctg

SEQ ID NO: 846157 - DNA, 75 bp, synthetic construct
  source 1..75: mol_type = other DNA
cgaaacggcggaagacccggcggcagaagtggcgaaagcgcgcgattgggtgaaagcgcgcatggccaaagcagg

SEQ ID NO: 846158 - DNA, 75 bp, synthetic construct
  source 1..75: mol_type = other DNA
cagggggcagatctcttcgtcactcgatttggtaaggatatggttattcaggcgaaaaattattctggttctgta

SEQ ID NO: 846159 - DNA, 75 bp, synthetic construct
  source 1..75: mol_type = other DNA
gtttgagccgacttttggtcagtcggagtcaccagaagacaattacgagctggaactcaaagcggaaatcaccgg

SEQ ID NO: 846160 - DNA, 75 bp, synthetic construct
  source 1..75: mol_type = other DNA
aaccaaatgagattatttcggagtttggatactatccagtagaagttaacattgagactgaacaattttctttgc

SEQ ID NO: 846161 - DNA, 75 bp, synthetic construct
  source 1..75: mol_type = other DNA
tgattgcagggtttatggtggtcatggcggcgctacaaaaaacccggcttatcagcaacgttaaatctgcgatga

SEQ ID NO: 846162 - DNA, 75 bp, synthetic construct
  source 1..75: mol_type = other DNA
aaatgtgcggcgcgatgaaaggcgcggtcaccggagcgctggtgttcgaaggactggcgaaagatctcgacgagg

SEQ ID NO: 846163 - DNA, 75 bp, synthetic construct
  source 1..75: mol_type = other DNA
aaatggctatttttcagaggttggcgagataccgcatctttcaactattcaggacagtggctgtaccttatcctt

SEQ ID NO: 846164 - DNA, 75 bp, synthetic construct
  source 1..75: mol_type = other DNA
aaagcacaaatagcaacctatttcggcctgacccaccgtgagacagaggaggcgatttccgatcttgtacagcgt

SEQ ID NO: 846165 - DNA, 75 bp, synthetic construct
  source 1..75: mol_type = other DNA
atggctgatgcgtcaaaacttagaactaaaagaacccgtagtgggttgggggtacccccgggccccgacgaagtg

SEQ ID NO: 846166 - DNA, 75 bp, synthetic construct
  source 1..75: mol_type = other DNA
gatgcctgcatcggctgggaagataccgatgctctgttacgtcaactggcgaatgcagtaaaagcgcgtcgcggg

SEQ ID NO: 846167 - DNA, 75 bp, synthetic construct
  source 1..75: mol_type = other DNA
aacgaatcgacttaatccgttgtttatcaaagatatgcaagcactggaagaatactcgtcctcaggcagaacgac

SEQ ID NO: 846168 - DNA, 75 bp, synthetic construct
  source 1..75: mol_type = other DNA
cactgaattgatgcccgtcgtgtacgaaagcctgagcaaattactgccttcacttgacgaattgtgccccgtgac

SEQ ID NO: 846169 - DNA, 75 bp, synthetic construct
  source 1..75: mol_type = other DNA
gccatctacggctcgcagggggcaaaagtaccgctggacgatgcgatcctgcgctggggtggtgatgagcaatca

SEQ ID NO: 846170 - DNA, 75 bp, synthetic construct
  source 1..75: mol_type = other DNA
ttagcgccgacgatattcagcgcaaatttggcccttttggcgaaccggtcaccgtgggttttgtgatggggctga

SEQ ID NO: 846171 - DNA, 75 bp, synthetic construct
  source 1..75: mol_type = other DNA
atgttttcagaagtcatgcgttatattctcgacctcggccctacggtgatgctgccgattgtcatcattattttt

SEQ ID NO: 846172 - DNA, 75 bp, synthetic construct
  source 1..75: mol_type = other DNA
gacaaacttccctcactggcagagcgccgtaagaccgtggcggcactggtcagcgaacgcaccgggcttgaaagt

SEQ ID NO: 846173 - DNA, 75 bp, synthetic construct
  source 1..75: mol_type = other DNA
gcgctggggtggtgatgagcaatcagaaccgaaggacccgtttgctgggcttgaggctgcacttactgccgcgac

SEQ ID NO: 846174 - DNA, 75 bp, synthetic construct
  source 1..75: mol_type = other DNA
atgtggattgagtacgacaggcaaagtccggttggcgatatccgtggcgacattcaggcagcccagctcgtctct

SEQ ID NO: 846175 - DNA, 75 bp, synthetic construct
  source 1..75: mol_type = other DNA
ttttggtttggttgttttcggatcaagatgttatggattcgtatgaaagtatttttaggcactatcaacaaaata

SEQ ID NO: 846176 - DNA, 75 bp, synthetic construct
  source 1..75: mol_type = other DNA
acaatgtgcaggttgtacatattggtcatttattccgtaactcgggtcataaggagtggcgtatttttgtttggt

SEQ ID NO: 846177 - DNA, 75 bp, synthetic construct
  source 1..75: mol_type = other DNA
ggcgcgaaaaatccacctgtaccactgcgaccatcgcggcctgccgctggcgctcatcagcaaggaagggacaac

SEQ ID NO: 846178 - DNA, 75 bp, synthetic construct
  source 1..75: mol_type = other DNA
atttatctcaccggtatttttatgacctggcgtcgggcgcgcggtgttattaacaaagataaagctgctgtcgca

SEQ ID NO: 846179 - DNA, 75 bp, synthetic construct
  source 1..75: mol_type = other DNA
atttatctcaccggtattttcatgacctggcgtagagcgcgcggctttaccaaacaagagaaagccgttctcgca

SEQ ID NO: 846180 - DNA, 75 bp, synthetic construct
  source 1..75: mol_type = other DNA
gttattttatggatattacttcgaatatttattactgccgcactttatatactcccattaatatatctttggatt

SEQ ID NO: 846181 - DNA, 75 bp, synthetic construct
  source 1..75: mol_type = other DNA
atgaaacctgttatttccctcattgaagcactgaacgccgttaaaaataaccttgcctccctgaatgagcagaaa

SEQ ID NO: 846182 - DNA, 75 bp, synthetic construct
  source 1..75: mol_type = other DNA
gcgttgcactgtacggtatcgactacctgatgaaagataaactggcacagtttacctctctgcagaccgatctgg

SEQ ID NO: 846183 - DNA, 75 bp, synthetic construct
  source 1..75: mol_type = other DNA
gaaagctggcaagatcaccgaacaagaagcgcaggaaatggttgaccacctagtcatgaaactgcgtatggttcg

SEQ ID NO: 846184 - DNA, 75 bp, synthetic construct
  source 1..75: mol_type = other DNA
catgctgtacgcaatcaacggtggcgttgacgaaaaactgaaaatgcaggttggtccgaagtctgaaccgatcaa

SEQ ID NO: 846185 - DNA, 75 bp, synthetic construct
  source 1..75: mol_type = other DNA
aggtaacgtactgggcattatgcagaagggttatacgctgaatggtcgtacgattcgtgcggcgatggttactgt

SEQ ID NO: 846186 - DNA, 75 bp, synthetic construct
  source 1..75: mol_type = other DNA
gtgacggcattttgcgtgtaaaagccgaaatggaaaacctgcgtcgtcgtactgaactggatattgaaaaagccc

SEQ ID NO: 846187 - DNA, 75 bp, synthetic construct
  source 1..75: mol_type = other DNA
tcgtgcgctggaagtggctgataaagctaacccggatatgtccgcgatggttgaaggcattgagctgacgctgaa

SEQ ID NO: 846188 - DNA, 75 bp, synthetic construct
  source 1..75: mol_type = other DNA
atggttgatttatattcgcctgcccagcttgtgcaggtggctaatgcagaagatgtgcaaaaaaaattaaatgca

SEQ ID NO: 846189 - DNA, 75 bp, synthetic construct
  source 1..75: mol_type = other DNA
ctgtacgatctttcccgtggttcagaatccgccgcagaactggcctgtaaaaacctgggcgaagtggtgagcttt

SEQ ID NO: 846190 - DNA, 75 bp, synthetic construct
  source 1..75: mol_type = other DNA
cgcaaaacatgtactacccgaaaaactggattgaggacggcgatccggcgattgagtacgtgcagacgcacagcg

SEQ ID NO: 846191 - DNA, 75 bp, synthetic construct
  source 1..75: mol_type = other DNA
tctgaaccgatcaaaggcgatctcctgaactacgatgaagtgatggagcgcatggatcacttcatggactggctg

SEQ ID NO: 846192 - DNA, 75 bp, synthetic construct
  source 1..75: mol_type = other DNA
ttatcgtctattccggcaaatacactgacagcgacggcaccgaaaaatatttccttgagcctgatttgctggtcc

SEQ ID NO: 846193 - DNA, 75 bp, synthetic construct
  source 1..75: mol_type = other DNA
tgggcaacaccaacaataaagggctggtggcctatggtgcgataatggatcaggaagcggtaagaacgggcgcaa

SEQ ID NO: 846194 - DNA, 75 bp, synthetic construct
  source 1..75: mol_type = other DNA
taaggatctaatggctataacaacaaaagaccttggtaattggataacatatgggccatctgggcaccccatttc

SEQ ID NO: 846195 - DNA, 75 bp, synthetic construct
  source 1..75: mol_type = other DNA
ttggcagactgaaaacggaaatgtattatgggcgtaaatggtcgggcatcacgccagaaaagttcatgcagcaag

SEQ ID NO: 846196 - DNA, 75 bp, synthetic construct
  source 1..75: mol_type = other DNA
cggtgataaatacgccacgatacgtacgatgctgacagatatctttaacagtaattaccagtgttatggctatcg

SEQ ID NO: 846197 - DNA, 75 bp, synthetic construct
  source 1..75: mol_type = other DNA
acgccagaaaagttcatgcagcaagtggatgcttacatcagatggtataacgagcggcgtataaaattatcgctg

SEQ ID NO: 846198 - DNA, 75 bp, synthetic construct
  source 1..75: mol_type = other DNA
catcacgccagaaaagttcatgcagcaagtggatacttacatcagatggtataacgagcggcgtataaaattatc

SEQ ID NO: 846199 - DNA, 75 bp, synthetic construct
  source 1..75: mol_type = other DNA
gatgttcgcctgataatgctgcatgcgaaggctttttcggcaggctgaaaactgaaatgtataatgggcgtaaat

SEQ ID NO: 846200 - DNA, 75 bp, synthetic construct
  source 1..75: mol_type = other DNA
cgatggaaaagttgtgagctggtctctcagtacacgtcccgacgctgaactggttaacaccatgctggataacgc

SEQ ID NO: 846201 - DNA, 75 bp, synthetic construct
  source 1..75: mol_type = other DNA
tagtgtcgatgaaatccgtgagcagttgctttcttcgccacatagcctgttcccggtatgtcgcggagagctgga

SEQ ID NO: 846202 - DNA, 75 bp, synthetic construct
  source 1..75: mol_type = other DNA
tcattgatgtcggtccattacatatcaccattgtggaagctaacgactatcgtgttgatttggttcgtattgtta

SEQ ID NO: 846203 - DNA, 75 bp, synthetic construct
  source 1..75: mol_type = other DNA
ttccgaaaggttacctgtatgccgcgattggcttctcgatcattatcgaagtatttaaccaaattgcgcgccgta

SEQ ID NO: 846204 - DNA, 75 bp, synthetic construct
  source 1..75: mol_type = other DNA
ctgtcgaaacgttaaatgctggcgaacgaccggtgatacacagtgacagaggtgggcattatcgctggccaggct

SEQ ID NO: 846205 - DNA, 75 bp, synthetic construct
  source 1..75: mol_type = other DNA
tcattggcactgatgagctgaagcttgagctattcaaaattcacttccagtcaggcggcgctaattcagatatca

SEQ ID NO: 846206 - DNA, 75 bp, synthetic construct
  source 1..75: mol_type = other DNA
cgctggatgtgctggaagccattgcgggtgaattcccggacgctgacgaaacgccggaaatcattaccgatggtg

SEQ ID NO: 846207 - DNA, 75 bp, synthetic construct
  source 1..75: mol_type = other DNA
cggcgtgcgtgtgccgtccatgtgcctttctgcccatcgtcgtttcccgttgggcagcgaagatgacgcggtgcg

SEQ ID NO: 846208 - DNA, 75 bp, synthetic construct
  source 1..75: mol_type = other DNA
tggatataaaaatgacgatgatttatgcccacttttcccctgaccacctagaagatgcggtaacaaaaaacccac

SEQ ID NO: 846209 - DNA, 75 bp, synthetic construct
  source 1..75: mol_type = other DNA
cgcaagcaatttgcgacgaaaggcgaagccgtagcattcgaaaacttcaccatggatgaagtaaacaaaaaacca

SEQ ID NO: 846210 - DNA, 75 bp, synthetic construct
  source 1..75: mol_type = other DNA
gaaacgtgcgtgaactgaattttattattgagcgactggcactattatccgccggatttcccaacgcttcgctgt

SEQ ID NO: 846211 - DNA, 75 bp, synthetic construct
  source 1..75: mol_type = other DNA
tttggttgatataaatttataccccgaaagtgatcttatccattctgtagctgatgagattaatatcccaggcgt

SEQ ID NO: 846212 - DNA, 75 bp, synthetic construct
  source 1..75: mol_type = other DNA
ctggcgctcatcagcacggaaggggcaacagcgtggtgcgcagaatatgatgaatggggcaacctgctgagtgat

SEQ ID NO: 846213 - DNA, 75 bp, synthetic construct
  source 1..75: mol_type = other DNA
gtgcttaaagaaattttaggtcatgccgatataaagatgactatgatttatgcacatttttctccagaccatctt

SEQ ID NO: 846214 - DNA, 75 bp, synthetic construct
  source 1..75: mol_type = other DNA
cgatgggttcatagaaactgataatgtaaaaaaaatagatagacttattgttttaatattaacaaaaaagaaaag

SEQ ID NO: 846215 - DNA, 75 bp, synthetic construct
  source 1..75: mol_type = other DNA
ctggcgatggagatcatggattatccgttgatgaactccatcagcaaggcgctgggctacgcgcactatctcaac

SEQ ID NO: 846216 - DNA, 75 bp, synthetic construct
  source 1..75: mol_type = other DNA
ctttctgctcatcgtcgtttcccgctgggtagcgaagatgacgcggtgcgggcgcaggggctggagattatgcgt

SEQ ID NO: 846217 - DNA, 75 bp, synthetic construct
  source 1..75: mol_type = other DNA
tgccaggctgctcagggaattgtgggtggcctgtttcctcgtacccaggtcgctcaacaaaaggtctgccaggac

SEQ ID NO: 846218 - DNA, 75 bp, synthetic construct
  source 1..75: mol_type = other DNA
gattccatgtttgcccttgaggctggtggcgcaacgggtgttgcgttgaagatagaggacgataaaggaacgcag

SEQ ID NO: 846219 - DNA, 75 bp, synthetic construct
  source 1..75: mol_type = other DNA
tcttaaaaattgcccaacaatcattgaactctgatgaaagaaaagaagatgaagatttattaggagagataagta

SEQ ID NO: 846220 - DNA, 75 bp, synthetic construct
  source 1..75: mol_type = other DNA
gcaaactttctgacatcgcgccgaccatgttgtcgctgatgggtatggaaatcccacaagagatgactggtaagc

SEQ ID NO: 846221 - DNA, 75 bp, synthetic construct
  source 1..75: mol_type = other DNA
gtaagaaagtggttaacgtcgatttcgtgatgctgaccgaatacgccgctgacatcaaaactgcggttgcttacc

SEQ ID NO: 846222 - DNA, 75 bp, synthetic construct
  source 1..75: mol_type = other DNA
aacggcgacatggtaggtcacaccggggtgatggaagcagcggttaaagccgttgaagcgctggatcactgcgtg

SEQ ID NO: 846223 - DNA, 75 bp, synthetic construct
  source 1..75: mol_type = other DNA
tattggtgtgggggatgacgggatgcctgcttgggtggatataccaccaccaacacatgaggaacagattgctgc

SEQ ID NO: 846224 - DNA, 75 bp, synthetic construct
  source 1..75: mol_type = other DNA
caaacccatttaacgggctgacaccattaaagagatccagaacagagccagatccgctcacgcgtgacgaattta

SEQ ID NO: 846225 - DNA, 75 bp, synthetic construct
  source 1..75: mol_type = other DNA
catcgattaataaagaaaaattactggaggttcgtaaagagctactgactggataccagatccccaaaagtaact

SEQ ID NO: 846226 - DNA, 75 bp, synthetic construct
  source 1..75: mol_type = other DNA
atgaccacgcgcctgactcgctggctaaccacgctggataactttgaagccaaaatggcgcagttgcctgcggta

SEQ ID NO: 846227 - DNA, 75 bp, synthetic construct
  source 1..75: mol_type = other DNA
ggatctgaaacgaatggaaatctctgcaaatgcattcaatcgctatgaatccgttgcaagaacgatggtttcgaa

SEQ ID NO: 846228 - DNA, 75 bp, synthetic construct
  source 1..75: mol_type = other DNA
gcaacagataatggttatacctcaggaaacccatttaacggtctggcacccttaaaaaagtccaaggtaaaacca

SEQ ID NO: 846229 - DNA, 75 bp, synthetic construct
  source 1..75: mol_type = other DNA
taatggatgtactgtgggccaatcgtccgcataccctgatcgacgcttccggtctggaagtcggtctgcctgacc

SEQ ID NO: 846230 - DNA, 75 bp, synthetic construct
  source 1..75: mol_type = other DNA
agttcgtgaaagcgaccgttattcgtgcagaaggtcagccagacgcggcaatggaagacggcgatgcgctgattt

SEQ ID NO: 846231 - DNA, 75 bp, synthetic construct
  source 1..75: mol_type = other DNA
agattttattgagaatatcctcggtgccgaaggacgtgcacgctccgtggtgattgccgctccggcggatgtttc

SEQ ID NO: 846232 - DNA, 75 bp, synthetic construct
  source 1..75: mol_type = other DNA
aaacttattaatgaagctaacgagcacatgaatagcaggcaatggcctggtaaagccgctattggtcgtctgaaa

SEQ ID NO: 846233 - DNA, 75 bp, synthetic construct
  source 1..75: mol_type = other DNA
agagcctggttgccaaaaaagtgcaaacagatcagacagaagagcttcaacagctcaggaatcagatgatttcca

SEQ ID NO: 846234 - DNA, 75 bp, synthetic construct
  source 1..75: mol_type = other DNA
tacagtcctgaataacgaaaaagttaacctgattaacctgctggagcagcagcgtgaactctccagtaaattaga

SEQ ID NO: 846235 - DNA, 75 bp, synthetic construct
  source 1..75: mol_type = other DNA
ctgaaccaacaactgagtgagcgcaagcaggaactggcctcccagcaggagtaccagaagcaactgaatgatgag

SEQ ID NO: 846236 - DNA, 75 bp, synthetic construct
  source 1..75: mol_type = other DNA
ggcggctgaactgttgcgaatacctcgcttctggggatttattatctatgtggttggcgtcgccagtgtgtatga

SEQ ID NO: 846237 - DNA, 75 bp, synthetic construct
  source 1..75: mol_type = other DNA
aaaaaccaggcctgcagcgaccgttccggtcgcgccgcccctgtcgcgccggaaacggcgctccctgcacacctg

SEQ ID NO: 846238 - DNA, 75 bp, synthetic construct
  source 1..75: mol_type = other DNA
ggctcccggctgcctggcggcatccggtcgtcggcccgactccgacaggcagctgctggcgcacccgccagtctc

SEQ ID NO: 846239 - DNA, 75 bp, synthetic construct
  source 1..75: mol_type = other DNA
cgcgatgcggcgaaaatcgcggcggcaatcggcctgaacgtgccgcaagaaacgcgtttgctgtttgtggaaacc

SEQ ID NO: 846240 - DNA, 75 bp, synthetic construct
  source 1..75: mol_type = other DNA
atgattaagtcggttattgccggtgcggtagctatggcagcggtgtcttttggtgcaaatgctgcaccgactact

SEQ ID NO: 846241 - DNA, 75 bp, synthetic construct
  source 1..75: mol_type = other DNA
tgattgccgaggaagtaggagaaattgcccctcagtttgttcactggcgaccagccaacgaagatgatgcaccgg

SEQ ID NO: 846242 - DNA, 75 bp, synthetic construct
  source 1..75: mol_type = other DNA
aggagttagataccagtggggggacaggtactgcgattgtagttcaggctgcaggcaaaaacgtttctttcaatg

SEQ ID NO: 846243 - DNA, 75 bp, synthetic construct
  source 1..75: mol_type = other DNA
tgctgaaaaatatcgacgagcgcggaaaaggcaccgtcagccgtgactgggttggtcgcgacgcaggcaaaatcg

SEQ ID NO: 846244 - DNA, 75 bp, synthetic construct
  source 1..75: mol_type = other DNA
catacctttaactttaaagacatttgcgcacggctggagcaggcaagcgggctgattaccgtcactgatgccgcg

SEQ ID NO: 846245 - DNA, 75 bp, synthetic construct
  source 1..75: mol_type = other DNA
agcccgcccacagggtgactggcagacgtcagcagcgctgacacgccaacaatacgacgactggcgaaccagata

SEQ ID NO: 846246 - DNA, 75 bp, synthetic construct
  source 1..75: mol_type = other DNA
tgataatcccttctccggccacctgtttatcttccgtggccgacggggtgacaccgttaaaattctttgggctga

SEQ ID NO: 846247 - DNA, 75 bp, synthetic construct
  source 1..75: mol_type = other DNA
catatcagggacttgttcgcaccttccttaggcatcaccattgtggcgggtaatcagacgcttgataaaacatta

SEQ ID NO: 846248 - DNA, 75 bp, synthetic construct
  source 1..75: mol_type = other DNA
atgatggcggcgaaacatccggcaatagatttattaggcatcactattgtagcgggtaatcagacgcttgataaa

SEQ ID NO: 846249 - DNA, 75 bp, synthetic construct
  source 1..75: mol_type = other DNA
atgatctcactcccatcaggtacccgtatctggcccgttgccggcgttactgataggcgtaaatccttcaacgga

SEQ ID NO: 846250 - DNA, 75 bp, synthetic construct
  source 1..75: mol_type = other DNA
gtatctggctggttgccggggtcaccgatatgcgtaagtccttcaatggtctgggcgaactggtccagcatgttc

SEQ ID NO: 846251 - DNA, 75 bp, synthetic construct
  source 1..75: mol_type = other DNA
aggggtttattatcgataagatttcggcggtgatggcaccagtacttatcgttattttcgttggctttatggtcg

SEQ ID NO: 846252 - DNA, 75 bp, synthetic construct
  source 1..75: mol_type = other DNA
gtatctggctcgttgccggcgttactgatatgcgtaaatccttcaacggtctgggtgaacaggtacaacatgtgc

SEQ ID NO: 846253 - DNA, 75 bp, synthetic construct
  source 1..75: mol_type = other DNA
caccaaacgtctggaggaaggccagtttatctggcctgcggtgcgtgaaggggcgaagttctggctcaatgtgct

SEQ ID NO: 846254 - DNA, 75 bp, synthetic construct
  source 1..75: mol_type = other DNA
ctggcaatgctcctcgataagctgtactggcgtcagccaaaaacattccgccttaactcactgacaatgttgtaa

SEQ ID NO: 846255 - DNA, 75 bp, synthetic construct
  source 1..75: mol_type = other DNA
aaaaatccgtgaaattgtactgatgggcggcgcttatggtactggcaacttcacgccatctgccgagttcaacat

SEQ ID NO: 846256 - DNA, 75 bp, synthetic construct
  source 1..75: mol_type = other DNA
atgatctcactcccatccggtacccgtatctggctcgttgccgggattaccgatatgcgtaagtctttcaacggg

SEQ ID NO: 846257 - DNA, 75 bp, synthetic construct
  source 1..75: mol_type = other DNA
gcaaggtatccattacccgctcgcaactggcaatgctcctcgataagctggactggcgtcagccagtccagccgt

SEQ ID NO: 846258 - DNA, 75 bp, synthetic construct
  source 1..75: mol_type = other DNA
cgtcctgggtggtgtcacctggcgaattagcatcatatggcgcgatctttactggattatggacctgcagaatga

SEQ ID NO: 846259 - DNA, 75 bp, synthetic construct
  source 1..75: mol_type = other DNA
agcgctggctgaacacggtatcgtctttggcgaaccgaaaaccgatatcgacaagattcgtacttggaaagagaa

SEQ ID NO: 846260 - DNA, 75 bp, synthetic construct
  source 1..75: mol_type = other DNA
gaaagagaaaggcatcagctatgaaactgccaccttcccgtgggctgcttctggtcgtgcgatcgcttccgactg

SEQ ID NO: 846261 - DNA, 75 bp, synthetic construct
  source 1..75: mol_type = other DNA
acgcggaagacatcgcgctgaccatccacgcgcacccgactctgcatgagtctgtgggtctggcggcagaaatat

SEQ ID NO: 846262 - DNA, 75 bp, synthetic construct
  source 1..75: mol_type = other DNA
cccggataatcccaacagtaacacactgggtttgcgtaatgctctggcaattgctggcgcgaaaaatggtatccg

SEQ ID NO: 846263 - DNA, 75 bp, synthetic construct
  source 1..75: mol_type = other DNA
ttgctggcgcgaaaaatggtatacgggaagcagagcaggatcgccagatgaacatactgacgggggcttctgcac

SEQ ID NO: 846264 - DNA, 75 bp, synthetic construct
  source 1..75: mol_type = other DNA
cggtgtttgcctgaacgtcggctgtatcccttctaaagcactgctgcacgtagcaaaagtcatcgaagaagccaa

SEQ ID NO: 846265 - DNA, 75 bp, synthetic construct
  source 1..75: mol_type = other DNA
tgcccgttggcgtgcccgttccgtggccatcagccacacctccaacggggtggctgaaatgcaatggtgcagcat

SEQ ID NO: 846266 - DNA, 75 bp, synthetic construct
  source 1..75: mol_type = other DNA
gtgagtctgctggcaccgaatacccgcgcacttatcaccgaacccgatccggttaaggtccatatcgataaccgc

SEQ ID NO: 846267 - DNA, 75 bp, synthetic construct
  source 1..75: mol_type = other DNA
accggatctggcgaaaatatgcgtatccagccacttttgaggaagggggacgcgatgccacatcgcagtgtctgc

SEQ ID NO: 846268 - DNA, 75 bp, synthetic construct
  source 1..75: mol_type = other DNA
tggtttcatccgcgttgacaaacagctgcgtaccaacgtaccgcacatctttgctatcggcgatattgtcggtca

SEQ ID NO: 846269 - DNA, 75 bp, synthetic construct
  source 1..75: mol_type = other DNA
agtgatcaatcagctgaccggtggtctggctggtatggcgaaaggccgcaaagtcaaagtggtcaacggtctggg

SEQ ID NO: 846270 - DNA, 75 bp, synthetic construct
  source 1..75: mol_type = other DNA
ctgcgtaccaacgtaccgcacatctttgctatcggtgatatcgtcggtcagccgatgctggcacacaaaggtgtt

SEQ ID NO: 846271 - DNA, 75 bp, synthetic construct
  source 1..75: mol_type = other DNA
cacgctggaaaaatatgcagcaggttaacgactgtgggcggcgagccgtcgcgcattatccgggcatggtgtact

SEQ ID NO: 846272 - DNA, 75 bp, synthetic construct
  source 1..75: mol_type = other DNA
gcgcattatccgggcatggtgtactgggattataactggcgcaagcagggcggctcgtcccgcatgattgaaatc

SEQ ID NO: 846273 - DNA, 75 bp, synthetic construct
  source 1..75: mol_type = other DNA
ccgaacattcatcctcagaaagagtatttgattcgtaagaatgagaatattcgatatgctgaacaacatggtgta

SEQ ID NO: 846274 - DNA, 75 bp, synthetic construct
  source 1..75: mol_type = other DNA
gctaaaaacattatcctggatcaacgcttatttgtgctggataacgaacgttatgattcgtttattacgcaactg

SEQ ID NO: 846275 - DNA, 75 bp, synthetic construct
  source 1..75: mol_type = other DNA
catccgggcaactgatgaggaacgagccgttattgattatgctgcgagcctggtcaataagaaccgtactgattt

SEQ ID NO: 846276 - DNA, 75 bp, synthetic construct
  source 1..75: mol_type = other DNA
tttgtgcactcctgccagatcctacaccagagttagatgatagcaccgagagcgcagatagccccctcttcccat

SEQ ID NO: 846277 - DNA, 75 bp, synthetic construct
  source 1..75: mol_type = other DNA
tgccagccttgttggaagccggtgttttagtcgctcttggcggcgtagtgcttggcggtttactggactatctgg

SEQ ID NO: 846278 - DNA, 75 bp, synthetic construct
  source 1..75: mol_type = other DNA
cgcgggtcaacgacaactttatcccacgtaccgagtatccatctggttatacctttgccatgtggacactggcag

SEQ ID NO: 846279 - DNA, 75 bp, synthetic construct
  source 1..75: mol_type = other DNA
tggcttactggcgaccattgttggcgcattgtacggtgggattttgatgcagcgcctgtcactgttccgggcact

SEQ ID NO: 846280 - DNA, 75 bp, synthetic construct
  source 1..75: mol_type = other DNA
gggattataactggcgcaagcagggcggctcgtcccgtatgattgaaatcagcaagcgcgaaaaattctatcagc

SEQ ID NO: 846281 - DNA, 75 bp, synthetic construct
  source 1..75: mol_type = other DNA
taacgactgtggacggcgagccgtcgcgcattatccgggcatggtgtactgggattataactggcgcaagcaggg

SEQ ID NO: 846282 - DNA, 75 bp, synthetic construct
  source 1..75: mol_type = other DNA
catcgcggcgaatggggagttttctttgtttcccggcatggaaaggatagtgacgttgctggaaggcggcgagat

SEQ ID NO: 846283 - DNA, 75 bp, synthetic construct
  source 1..75: mol_type = other DNA
aaacaccgcgagaacatcagattaacatccgggcaactgatgaggaacgagccgttattgattatgctgcgagct

SEQ ID NO: 846284 - DNA, 75 bp, synthetic construct
  source 1..75: mol_type = other DNA
cgacaccctgccggagccgctgacgcagcttcatgcgcgactggcggcgctagatatcgagcgggaggcgattcg

SEQ ID NO: 846285 - DNA, 75 bp, synthetic construct
  source 1..75: mol_type = other DNA
aacgtcctcaactttctgaaccgctggcagcgcttatccgacaggcgtggctgatagcgtcactggaaggcgacg

SEQ ID NO: 846286 - DNA, 75 bp, synthetic construct
  source 1..75: mol_type = other DNA
gatgggcacaggtccgcagggggctataaagcgtgaactgttttctgataaggaaagtctgtggggatacggcct

SEQ ID NO: 846287 - DNA, 75 bp, synthetic construct
  source 1..75: mol_type = other DNA
tgtaccgacagatattttcagtcaggtggggacacccggtcgttatgatccggaagccataaacgttgatatccg

SEQ ID NO: 846288 - DNA, 75 bp, synthetic construct
  source 1..75: mol_type = other DNA
cagacacggataacctgcatgtgcatgttgcagtaaatcgagttcatcctgaaacaggtctcagaaaccggcttc

SEQ ID NO: 846289 - DNA, 75 bp, synthetic construct
  source 1..75: mol_type = other DNA
tgcatgtcgtgaacttgaacttaagcacggattcgcgcctgataatggctgctttgtgcatgcacccggcaaccg

SEQ ID NO: 846290 - DNA, 75 bp, synthetic construct
  source 1..75: mol_type = other DNA
agtctttcgttgatgccaacaactatccggtagaaatatgcaaggtaactctgactcaggtgatctgccgaaggc

SEQ ID NO: 846291 - DNA, 75 bp, synthetic construct
  source 1..75: mol_type = other DNA
gagcgaatcgagcacaacgaactgcatatgattaaagcggaaattgagaaggaaaagcatattgccagccttcga

SEQ ID NO: 846292 - DNA, 75 bp, synthetic construct
  source 1..75: mol_type = other DNA
tggtcaataagaaccgtaccgatttcatcatggaactggcgtaccaggaagctaaaaacattatcctggatcaac

SEQ ID NO: 846293 - DNA, 75 bp, synthetic construct
  source 1..75: mol_type = other DNA
gccggaaaaagtggcagaaacggagagtctgaaacagtacgcctgccgtcattttgccgaacgcttaccggcaat

SEQ ID NO: 846294 - DNA, 75 bp, synthetic construct
  source 1..75: mol_type = other DNA
gctggcaggcgtgccatgagatgtttgcgcgtaaagggcttatgttgcagaaacagcatcatggtcttgtgattg

SEQ ID NO: 846295 - DNA, 75 bp, synthetic construct
  source 1..75: mol_type = other DNA
tcacatgactggcgagtagactcacaaggacgcaagaaacctggctataaacaatcgatagagcatataaataaa

SEQ ID NO: 846296 - DNA, 75 bp, synthetic construct
  source 1..75: mol_type = other DNA
acgagtaaatgacaactttatctcccgtaccgaatatccggcaggttatgcctttgccatgtggacactggcggc

SEQ ID NO: 846297 - DNA, 75 bp, synthetic construct
  source 1..75: mol_type = other DNA
ttgacccgcgctatttccgtccggcagaagtagaaacgctgctcggcgacccgaccaaagcgcacgaaaaactgg

SEQ ID NO: 846298 - DNA, 75 bp, synthetic construct
  source 1..75: mol_type = other DNA
gtacgctgcgcctgctcgaggcgatccgcttcctcggtctggaaaagaaaactcgtttctatcaggcttccacct

SEQ ID NO: 846299 - DNA, 75 bp, synthetic construct
  source 1..75: mol_type = other DNA
gcgcgtggatcacatttatcaggatccgcacacctgcaacccgaaattccatctgcattatggcgacctgagtga

SEQ ID NO: 846300 - DNA, 75 bp, synthetic construct
  source 1..75: mol_type = other DNA
gcaggagcagccagaagacttcgtgattgcgaccggcgtgcagtactccgtccgtcaattcgtggaaatggctgc

SEQ ID NO: 846301 - DNA, 75 bp, synthetic construct
  source 1..75: mol_type = other DNA
tcgcttcctgggtctggagaagaaaattcgcttctaccaggcttctacctctgaactttacggcctggtacagga

SEQ ID NO: 846302 - DNA, 75 bp, synthetic construct
  source 1..75: mol_type = other DNA
aattccacaaaaagagaccactccgttctatccgcgctcgccgtatgcggtcgccaaactgtatgcctactggat

SEQ ID NO: 846303 - DNA, 75 bp, synthetic construct
  source 1..75: mol_type = other DNA
gcgcaccatacgggcttgaggcggcaatgaaaatattacgcaccgctgtagtccgacaaaccgaagtccgtactc

SEQ ID NO: 846304 - DNA, 75 bp, synthetic construct
  source 1..75: mol_type = other DNA
ggccagggtcgtatgatcccgggctttgaagacggtatcaaaggccacaaagctggcgaagagttcaccatcgac

SEQ ID NO: 846305 - DNA, 75 bp, synthetic construct
  source 1..75: mol_type = other DNA
caggttgaaactctcagagaaaagctagaagtgcttgaatggcagatcagctgtgcggcaaatgatggtctctac

SEQ ID NO: 846306 - DNA, 75 bp, synthetic construct
  source 1..75: mol_type = other DNA
ccattgctgccattcgtgaagcaggcgaaaaacacgccagagatttagcggaacttgccgtcagtgaaaccggca

SEQ ID NO: 846307 - DNA, 75 bp, synthetic construct
  source 1..75: mol_type = other DNA
cattatcgacgaaaccggattaacggtggatgcatcaatgtgcgctgatgcttcagccagtttcaccccggcaca

SEQ ID NO: 846308 - DNA, 75 bp, synthetic construct
  source 1..75: mol_type = other DNA
aggggatcgttgtctctgtgaccggccatgacgcaccgggcgtgaaaccaggtgatgtgattgtgcaggttgacc

SEQ ID NO: 846309 - DNA, 75 bp, synthetic construct
  source 1..75: mol_type = other DNA
tgggcacactggggctggtcactaacgccgtcgtgttatggaacactatttatatgcaggcagccctggatcatc

SEQ ID NO: 846310 - DNA, 75 bp, synthetic construct
  source 1..75: mol_type = other DNA
cggtctggaaccactgatcagatcaaatgttcctgcactgacccgacaccggctgaactggacaaaagcgaacta

SEQ ID NO: 846311 - DNA, 75 bp, synthetic construct
  source 1..75: mol_type = other DNA
aaacacaccaataaacgtctgattgccgcaggcgctggcaacccgccggtagtggtggatgaaaccgccgacctc

SEQ ID NO: 846312 - DNA, 75 bp, synthetic construct
  source 1..75: mol_type = other DNA
tccggactgactcaggcaatcattgaagtggggcgcatcaacaaaacgctgtatctgcttaattatattgatgat

SEQ ID NO: 846313 - DNA, 75 bp, synthetic construct
  source 1..75: mol_type = other DNA
ggcaatcagatccccgaaaaatagtccttcagtgggacgaaatgatccggaccgctggctccctgaagctgggca

SEQ ID NO: 846314 - DNA, 75 bp, synthetic construct
  source 1..75: mol_type = other DNA
tctacgttaccggcagtaaccggtggggagatcctcgtgcaagattactacagggtgctgactggcaggcaaacc

SEQ ID NO: 846315 - DNA, 75 bp, synthetic construct
  source 1..75: mol_type = other DNA
gtacgctgcgtctgctggaggcgatccgcttccttggtctggaaaagaaaacccgtttctatcaggcttccactt

SEQ ID NO: 846316 - DNA, 75 bp, synthetic construct
  source 1..75: mol_type = other DNA
gttacccgcaaaatcacccgcgcaatcgccaacatcgcccaggggctggagtcgtgcctgtacctcggcaatatg

SEQ ID NO: 846317 - DNA, 75 bp, synthetic construct
  source 1..75: mol_type = other DNA
ggagcaagtcggaatcaaactgcgttttgaaggcacgggtgtagatgagaaggggatagtggtttctgttactgg

SEQ ID NO: 846318 - DNA, 75 bp, synthetic construct
  source 1..75: mol_type = other DNA
agtggttctgtggaacacgctctatatgcaggaagtgttgagctggatgcgccgtaatggagaagaaattataga

SEQ ID NO: 846319 - DNA, 75 bp, synthetic construct
  source 1..75: mol_type = other DNA
gccattgccgattttgccgaaaaaggcaaaaccgatccgctgtttaaagagctggcgcggctggttgagaaaacg

SEQ ID NO: 846320 - DNA, 75 bp, synthetic construct
  source 1..75: mol_type = other DNA
cacggcatctggaatgaacaggccgagaaatatctgctggcacaatttggcgttgatattggggaggccgcgcaa

SEQ ID NO: 846321 - DNA, 75 bp, synthetic construct
  source 1..75: mol_type = other DNA
tgggatttaaagttctcttccggggcgaggccttaatggagatgaagaatgttatcatcggagcggcaatcatta

SEQ ID NO: 846322 - DNA, 75 bp, synthetic construct
  source 1..75: mol_type = other DNA
cggttaacgatcagcgatggaacctcatatccccgcttttggagcttcatcgacaaggttgatccggagcaggtt

SEQ ID NO: 846323 - DNA, 75 bp, synthetic construct
  source 1..75: mol_type = other DNA
tgctcctcacgaagttacacattacgcaatcgacaaataccgacgttggctgagacaatataagcgccagccagt

SEQ ID NO: 846324 - DNA, 75 bp, synthetic construct
  source 1..75: mol_type = other DNA
agcagacaagactacaggcacggattgatgagttacggtctgagatggcgtttgcggagaccggggaaaaaccgt

SEQ ID NO: 846325 - DNA, 75 bp, synthetic construct
  source 1..75: mol_type = other DNA
ttaattataaaaatataacatggaagcatcatatcgcgagtacagaatcatatagttgttgggatgaaagggttt

SEQ ID NO: 846326 - DNA, 75 bp, synthetic construct
  source 1..75: mol_type = other DNA
cgaggccttaatggagatgaagaatgttatcatcggagcggcaatcattatcggtattgctgaatttgtcgctat

SEQ ID NO: 846327 - DNA, 75 bp, synthetic construct
  source 1..75: mol_type = other DNA
aaccagttacgcattgctggagctgggcgtgaataatctggcgttattaggtaaggagttaattacccggcctta

SEQ ID NO: 846328 - DNA, 75 bp, synthetic construct
  source 1..75: mol_type = other DNA
cttcaacccaggcgatgcagcgaaaactcggcaaacactggcaacagttgcataatttcgtctatcttgtcgcga

SEQ ID NO: 846329 - DNA, 75 bp, synthetic construct
  source 1..75: mol_type = other DNA
ctggtctgggcgatcaatcacggtggactgggtgccgatccggtgaaagatattcagcattttaccggtcgcact

SEQ ID NO: 846330 - DNA, 75 bp, synthetic construct
  source 1..75: mol_type = other DNA
cgtggttattttatccgtggtgtatacgcagaacatcaaaacgttcgtgggcgtaatattcatcttaaacttatt

SEQ ID NO: 846331 - DNA, 75 bp, synthetic construct
  source 1..75: mol_type = other DNA
ccatcgctgccgttgttgcccccgtgtgggccgccacccagaccgtcacgctgtccgtaccgggcatgacctgct

SEQ ID NO: 846332 - DNA, 75 bp, synthetic construct
  source 1..75: mol_type = other DNA
ggcgtggataatctggcattgttcggtcaggaattcatcactcgcccttatttaatgttggggattgtctgttgg

SEQ ID NO: 846333 - DNA, 75 bp, synthetic construct
  source 1..75: mol_type = other DNA
ctttcaccggaagagttgtgggcgttcatcagcccccgcattgccgacaggatcacagacggggggcgcaactgg

SEQ ID NO: 846334 - DNA, 75 bp, synthetic construct
  source 1..75: mol_type = other DNA
ggtatttatgcatgtaatggtatattgttcaatcatgaatctccacgccgtggagaaacgtttgtaacaaggaaa

SEQ ID NO: 846335 - DNA, 75 bp, synthetic construct
  source 1..75: mol_type = other DNA
cagaattatatggacttgttcaggaaatccctcaaaaagaatccacccctttttatcctcgttccccttatgcag

SEQ ID NO: 846336 - DNA, 75 bp, synthetic construct
  source 1..75: mol_type = other DNA
cagaaagaaaagttacaaagagagcaggctccatcccttagtaaggggaatggtctgagccttacaagaacaata

SEQ ID NO: 846337 - DNA, 75 bp, synthetic construct
  source 1..75: mol_type = other DNA
tcttgggaacatggattctcttcgtgactgggggcatgccaaggactatgtacgtatgcagtggatgatgctcca

SEQ ID NO: 846338 - DNA, 75 bp, synthetic construct
  source 1..75: mol_type = other DNA
atttgcattatggtgatctcacggatacttccaacattacgcgtattctgcaagaagttaaaccggatgaagtct

SEQ ID NO: 846339 - DNA, 75 bp, synthetic construct
  source 1..75: mol_type = other DNA
tatttccgccctgcggaagttgaaacacttcttggtgatccaagtaaagctaaaaaattattgggttgggaacca

SEQ ID NO: 846340 - DNA, 75 bp, synthetic construct
  source 1..75: mol_type = other DNA
aaaatgatccgcaacgcgcatccgaagcgggtaaaaaaggcggtcagcacagcggtggaaataaatcaggaaaat

SEQ ID NO: 846341 - DNA, 75 bp, synthetic construct
  source 1..75: mol_type = other DNA
atgggtgccctggctgaaatggagcgtgaactgattgttgaacgaacaaaagctggactggaagctgctcgcgca

SEQ ID NO: 846342 - DNA, 75 bp, synthetic construct
  source 1..75: mol_type = other DNA
cgcccggtttttgattcaatgaaagaagcgatgcgacaaactgaggctgatgccagcgtgatttatgtgcctgca

SEQ ID NO: 846343 - DNA, 75 bp, synthetic construct
  source 1..75: mol_type = other DNA
cggattcaacggctgctgcgtctgataacaaaccagaatggctggctgaagcggcgcggatcacgctttcatcaa

SEQ ID NO: 846344 - DNA, 75 bp, synthetic construct
  source 1..75: mol_type = other DNA
cccccctcgtcagcagcctgatattaaacctgatcttatcgcagagtcggaagctgtgaatatccaggaacaggt

SEQ ID NO: 846345 - DNA, 75 bp, synthetic construct
  source 1..75: mol_type = other DNA
aacgcaagcttgccacatggacagcaaccgccccgtccggacggattacacggctgctgcgtctgataacacaac

SEQ ID NO: 846346 - DNA, 75 bp, synthetic construct
  source 1..75: mol_type = other DNA
cccacagcagctgcgatggcgtatggcctgcatacccaacaaaatacccgctcgctggtttttgatctcggtggc

SEQ ID NO: 846347 - DNA, 75 bp, synthetic construct
  source 1..75: mol_type = other DNA
cattccggtactgccggtggtgaaaggcatttcagtggcgaagaatcacatcacgctgtacatcatcgcctttgc

SEQ ID NO: 846348 - DNA, 75 bp, synthetic construct
  source 1..75: mol_type = other DNA
tgaattttacagtcgattaattcatgaaggcaaagtgggcattatggcggggcatgtctatggaacggaggggga

SEQ ID NO: 846349 - DNA, 75 bp, synthetic construct
  source 1..75: mol_type = other DNA
tcccactgaccgaaaatgacgatgtgccagaagggctgctcgatgaccgtctgcgcgcattttacgatccggaga

SEQ ID NO: 846350 - DNA, 75 bp, synthetic construct
  source 1..75: mol_type = other DNA
tatcttcagcctgtggcagatgcctcactcttatgccatcgccattttccgctttaaggattatcaggcggcaaa

SEQ ID NO: 846351 - DNA, 75 bp, synthetic construct
  source 1..75: mol_type = other DNA
tactgtgcagtgaccggtgagttcgatagcggcgcggcaatcctgctggcgattttcagcctgtggcaaatgcct

SEQ ID NO: 846352 - DNA, 75 bp, synthetic construct
  source 1..75: mol_type = other DNA
caacctgatctcggtgattgggggattcttgctggcctcaaagggcagcattgattatcccctgtttatctacac

SEQ ID NO: 846353 - DNA, 75 bp, synthetic construct
  source 1..75: mol_type = other DNA
gtttgtggactggaatttctccggcaccacggaagaagagttcgccacgctgatggctatcttcaaaaaggaaga

SEQ ID NO: 846354 - DNA, 75 bp, synthetic construct
  source 1..75: mol_type = other DNA
aaagagtgcgcgttatgttttaccaacggtaaaggtgcgactaaaaaagcagcgctggcttctgctcttggtgaa

SEQ ID NO: 846355 - DNA, 75 bp, synthetic construct
  source 1..75: mol_type = other DNA
atgaactgaccggcagcatgctgattgacctacaatccggtaacgaagatcgtggtatttgcggcctgccgttta

SEQ ID NO: 846356 - DNA, 75 bp, synthetic construct
  source 1..75: mol_type = other DNA
acctgcaagccttcgcatcccatcaatcgctgttgaaagcctacgaaaagttacagcgcgccaaagcagcgttct

SEQ ID NO: 846357 - DNA, 75 bp, synthetic construct
  source 1..75: mol_type = other DNA
tggatgaagaaggttttgatgactttacccgcgtgcgtgagctgttgggtctggcgaccgggtcggataacggtt

SEQ ID NO: 846358 - DNA, 75 bp, synthetic construct
  source 1..75: mol_type = other DNA
ctttgtagactggaatttctccggcactaccgaagaggagttcgccacactgatggctatcttcaatagagaaga

SEQ ID NO: 846359 - DNA, 75 bp, synthetic construct
  source 1..75: mol_type = other DNA
cgccggcgcggcgcagggtgatgataccgatctgcagcagatttataccgaggcgggcattcaggggatctgcag

SEQ ID NO: 846360 - DNA, 75 bp, synthetic construct
  source 1..75: mol_type = other DNA
atgacagcacaaaatactaaaaccattcaataccgcctacgtaatggccagagtgtcgaagtgaccatcaataat

SEQ ID NO: 846361 - DNA, 75 bp, synthetic construct
  source 1..75: mol_type = other DNA
ttcaataccgcctgcgtaatggccagagtgtcgaagtgaccatcaataatgatggtgtacctggcgaaaaggttt

SEQ ID NO: 846362 - DNA, 75 bp, synthetic construct
  source 1..75: mol_type = other DNA
tacggtcatggttaatgcgggaatacggcgacgatacagcgcatgatgtgtcaggcttgaatacctttatccgtt

SEQ ID NO: 846363 - DNA, 75 bp, synthetic construct
  source 1..75: mol_type = other DNA
accgattttgatgcggcgttgcagtcaaacgatatggcccgcgtcgatgaggtcagtcaggcggcgggcgagcgt

SEQ ID NO: 846364 - DNA, 75 bp, synthetic construct
  source 1..75: mol_type = other DNA
gatgccgatctgctctggcaaatagagtttatgatagggaaaagcatcatccgagctgaagaactcgatcagtac

SEQ ID NO: 846365 - DNA, 75 bp, synthetic construct
  source 1..75: mol_type = other DNA
ctatctctgatctggctatcgaaaaaaccatcatgtgccaccttggctttactgaagaagtgagcaaaaagcatg

SEQ ID NO: 846366 - DNA, 75 bp, synthetic construct
  source 1..75: mol_type = other DNA
ccggttcgtgaagcctttattaaactggcggaaaacggtctgattcaaattcgtccgcagcgtggcagctacgtg

SEQ ID NO: 846367 - DNA, 75 bp, synthetic construct
  source 1..75: mol_type = other DNA
ccacaacgaattgtggccggctgaaccagcgacacaagacgatgtaacggatacgggggataaaggttttgtcgc

SEQ ID NO: 846368 - DNA, 75 bp, synthetic construct
  source 1..75: mol_type = other DNA
cctgccgaaaggcttcgatagcctgttaaccgaacggggtacgaatctttccggcgggcagaggcagcgaatagc

SEQ ID NO: 846369 - DNA, 75 bp, synthetic construct
  source 1..75: mol_type = other DNA
gcactcaggcgtccgtggagcgggtgtttgcactgatcgacacccattcacagatggaggacgggacggagtcga

SEQ ID NO: 846370 - DNA, 75 bp, synthetic construct
  source 1..75: mol_type = other DNA
tgccaaaaaatatcttcatgctgcgacggttgctcagcgttatgctgtgccaactattcacgattttattgctga

SEQ ID NO: 846371 - DNA, 75 bp, synthetic construct
  source 1..75: mol_type = other DNA
gcagttattcaacgcgattaaccggaaaatcccgtaccggataaaatatgactttatgggcgggggcaaaaaagc

SEQ ID NO: 846372 - DNA, 75 bp, synthetic construct
  source 1..75: mol_type = other DNA
tggagcaggcattccgacgcgaacatgccagaactggcataaaacttcaggactggtgtcgacagaacaatatca

SEQ ID NO: 846373 - DNA, 75 bp, synthetic construct
  source 1..75: mol_type = other DNA
gaaccgcagttgcaaaacgaaatccgcgagatgatgaaaggttttgattctccgcgtgaattttacgttggtcgt

SEQ ID NO: 846374 - DNA, 75 bp, synthetic construct
  source 1..75: mol_type = other DNA
ggtggtgtttatcacttccgcatggggccttggtgaaatggtcgtgcagggtgcggttaacccggatgagtttta

SEQ ID NO: 846375 - DNA, 75 bp, synthetic construct
  source 1..75: mol_type = other DNA
ccattacccgctcgcagctggcaatgctcctcgataagctggactggcgtcagccaaaaacatcccgtcttaacg

SEQ ID NO: 846376 - DNA, 75 bp, synthetic construct
  source 1..75: mol_type = other DNA
gttgactataaagcgtttctgaacgaggtcaacaacctgaacaaacgtatgggtgacctgcgtgacatcaatggc

SEQ ID NO: 846377 - DNA, 75 bp, synthetic construct
  source 1..75: mol_type = other DNA
tcaacaacctgaacaaacgtatgggggacctgcgtgacatcaacggcgaagccggtgcatgggcacgcatcatga

SEQ ID NO: 846378 - DNA, 75 bp, synthetic construct
  source 1..75: mol_type = other DNA
atggcaaagctggactggaaaaaactggagcaggcattccgacgcgaacatgccgaaacgggaataacattactg

SEQ ID NO: 846379 - DNA, 75 bp, synthetic construct
  source 1..75: mol_type = other DNA
gatgtgaagacatatgaagtttttggggggcatggtagtccaggtgacttatattatgttcctgcatcaaatact

SEQ ID NO: 846380 - DNA, 75 bp, synthetic construct
  source 1..75: mol_type = other DNA
cagacaacagtaaactaactttaaagaaaaatgcaacccttacagttaacactggattggttaataaaggcacta

SEQ ID NO: 846381 - DNA, 75 bp, synthetic construct
  source 1..75: mol_type = other DNA
catgaatgatgtagacagggttgggggcaaaaatgcctccctaggtgaaatgattactaatctttccggaatggg

SEQ ID NO: 846382 - DNA, 75 bp, synthetic construct
  source 1..75: mol_type = other DNA
ttctggaccaaagcggcgtaaaccagcgcatttatgaactgctggataaaacggatattgacgatgttacccagc

SEQ ID NO: 846383 - DNA, 75 bp, synthetic construct
  source 1..75: mol_type = other DNA
acccagcaatgacgcgtgttccggcgatgaaaaatgcgcaaaaaactctgaaaaaaactgcgcaaattcggcaga

SEQ ID NO: 846384 - DNA, 75 bp, synthetic construct
  source 1..75: mol_type = other DNA
gacctcgaagcggcgaaaaaacactctctgctgaaatctcacggctacgacgtggcgatcgcgctggagtcataa

SEQ ID NO: 846385 - DNA, 75 bp, synthetic construct
  source 1..75: mol_type = other DNA
tgatatgcgtaaatccttcaacggtctgggggagcagatacagcatgtgctggatgataaccccttctccggtca

SEQ ID NO: 846386 - DNA, 75 bp, synthetic construct
  source 1..75: mol_type = other DNA
ccagctaacgaagatgatgctcctgaagctatttccagcaatggccttgttgccgaaggtgtaatgtacgaacgt

SEQ ID NO: 846387 - DNA, 75 bp, synthetic construct
  source 1..75: mol_type = other DNA
ctaaagccatatcaagtaagagatggtgcatccgggaggattcgaacctccgaccgctcggttcgtagccgagta

SEQ ID NO: 846388 - DNA, 75 bp, synthetic construct
  source 1..75: mol_type = other DNA
ggtgacactgttaaaatactctgggccgatgctgatggtctgtgcctgttcaccaaacgcctggaggaaggccag

SEQ ID NO: 846389 - DNA, 75 bp, synthetic construct
  source 1..75: mol_type = other DNA
ctgatgctgatggtctgtgcctgttcaccaaacgccttgaggaaggtcagtttatctggcctgcggtgcgtgacg

SEQ ID NO: 846390 - DNA, 75 bp, synthetic construct
  source 1..75: mol_type = other DNA
atggttacgctttggggaaattatgaggggatctctcagagctatgcaggtacactgccgatgctggtttattac

SEQ ID NO: 846391 - DNA, 75 bp, synthetic construct
  source 1..75: mol_type = other DNA
gggcgatgactgggcagggaagtttgatagcttcgcgtatatttgtgaggtggtctatttcccccgcacgccgtc

SEQ ID NO: 846392 - DNA, 75 bp, synthetic construct
  source 1..75: mol_type = other DNA
acccgtttctatcaggcttccacttctgaactgtacggtctggtgcaggaaattccgcagaaagaaaccacgccg

SEQ ID NO: 846393 - DNA, 75 bp, synthetic construct
  source 1..75: mol_type = other DNA
caccgttaactaccgcgaatcctacggcatgtacgcctgtaacggtattctcttcaaccatgaatccccgcgccg

SEQ ID NO: 846394 - DNA, 75 bp, synthetic construct
  source 1..75: mol_type = other DNA
tggtctactttccccgcacgccgtcggtgtcgacgacggggatcattgaggtgattaggtgtaaatcagccacct

SEQ ID NO: 846395 - DNA, 75 bp, synthetic construct
  source 1..75: mol_type = other DNA
gacagcttcgcgtatatttgtgaggtggtgtatttcccccgcacgccgtcggtgtcgacgacggggattattgag

SEQ ID NO: 846396 - DNA, 75 bp, synthetic construct
  source 1..75: mol_type = other DNA
tggtctatttcccccgcacgccgtcggtgtcgacgacggggattattgaggtgattaggagggcgcgcatgacaa

SEQ ID NO: 846397 - DNA, 75 bp, synthetic construct
  source 1..75: mol_type = other DNA
ttacaggatgaccttaaaccaattattgttgcttctccggaggagaatatcttacgctgggaatttgatcgttcg

SEQ ID NO: 846398 - DNA, 75 bp, synthetic construct
  source 1..75: mol_type = other DNA
atgtatgcttgtaatgggattttattcaaccatgaatcaccacgtcgtggtgaaacttttgtgaccagaaaaatt

SEQ ID NO: 846399 - DNA, 75 bp, synthetic construct
  source 1..75: mol_type = other DNA
tgcagccgattatcggtaatgccaaagcacgcgcggcggcattggcgaacagcaacgccagcgtgtttacaatca

SEQ ID NO: 846400 - DNA, 75 bp, synthetic construct
  source 1..75: mol_type = other DNA
aaaccgtggcaacgctcactgcgctggaagatctctttatggcaggggcagaaacacgccccgcactggtcctcg

SEQ ID NO: 846401 - DNA, 75 bp, synthetic construct
  source 1..75: mol_type = other DNA
ctgaactttacggtttagtacaagaaattccgcaaaaagagacaacccctttctatccccgttcaccttacgcag

SEQ ID NO: 846402 - DNA, 75 bp, synthetic construct
  source 1..75: mol_type = other DNA
attacacgtgggctttccaatattgctcaaggtttagaaaaatgtctttatcttggtaatatggactccttacga

SEQ ID NO: 846403 - DNA, 75 bp, synthetic construct
  source 1..75: mol_type = other DNA
gggtaacttagattcattacgtgattggggacacgctaaagattacgtgaaaatgcaatggcttatgcttcaaca

SEQ ID NO: 846404 - DNA, 75 bp, synthetic construct
  source 1..75: mol_type = other DNA
cacaatgaaaatccaaattttttcctgcactacggtgacttaactgactcatcaaacttggtacgtctcattaaa

SEQ ID NO: 846405 - DNA, 75 bp, synthetic construct
  source 1..75: mol_type = other DNA
gtgaatttgtcagtatgtcagctaaagaagttggtctggaattagaattcactggtaaaggtgtagatgaaatag

SEQ ID NO: 846406 - DNA, 75 bp, synthetic construct
  source 1..75: mol_type = other DNA
ccacaccatcgtaatttaaaattacaacttcattatggtgatttaacagatacttctaatttgactcggatatta

SEQ ID NO: 846407 - DNA, 75 bp, synthetic construct
  source 1..75: mol_type = other DNA
cctaccactggaaacatgaccttgagcgcctgcgtaaggctttcccgaaaggtcgccacctcgaccaggatccac

SEQ ID NO: 846408 - DNA, 75 bp, synthetic construct
  source 1..75: mol_type = other DNA
aaaccgtagcgacactcaccacgctggaagatcttttcatggcgggctcagagacacagcccgcgctggtcctcg

SEQ ID NO: 846409 - DNA, 75 bp, synthetic construct
  source 1..75: mol_type = other DNA
actgctgacgtagatgcgatggggactttacgtctgctggaagcgattcgtatttgtgggctagagaaaaaaaca

SEQ ID NO: 846410 - DNA, 75 bp, synthetic construct
  source 1..75: mol_type = other DNA
gctaattcaaacttgataatccttatccttagcaaagtgagcactcagaaaaatggttatattcgccgcgaaata

SEQ ID NO: 846411 - DNA, 75 bp, synthetic construct
  source 1..75: mol_type = other DNA
tgcaaagcaaaacgggtggcttggatattgcacagaataccaggcgagataccgcaacataacactaaaaatatc

SEQ ID NO: 846412 - DNA, 75 bp, synthetic construct
  source 1..75: mol_type = other DNA
cagcaaaggcgcggctccgcaggaagtcgtgagtgcgattcgttctgtctattcagggcagcgttacattgcttc

SEQ ID NO: 846413 - DNA, 75 bp, synthetic construct
  source 1..75: mol_type = other DNA
aaacattcatggcgatgttgagctgactcacctggcaattcgccatggtctgtgtaatgcggagacattaacaag

SEQ ID NO: 846414 - DNA, 75 bp, synthetic construct
  source 1..75: mol_type = other DNA
atgaagctggacatcgatacgaccatcggatggggtgataagacccttgccgcttttgccgtcaaaggttttgac

SEQ ID NO: 846415 - DNA, 75 bp, synthetic construct
  source 1..75: mol_type = other DNA
atgctcaaatcctagatttgtggacgtcaatgaatgatagaaaaaaatgtagtagaagctgtttacaggtcaaat

SEQ ID NO: 846416 - DNA, 75 bp, synthetic construct
  source 1..75: mol_type = other DNA
agagacggggatgtctggcggggcaatggttgccacggatggagcatggaactattcagatgaacagatggagcg

SEQ ID NO: 846417 - DNA, 75 bp, synthetic construct
  source 1..75: mol_type = other DNA
aataaagactacagggaaatagcccgtttaataaaatgcaaagttataagccagaaaaaatatctctttgcagtt

SEQ ID NO: 846418 - DNA, 75 bp, synthetic construct
  source 1..75: mol_type = other DNA
gtaccaacgagtaaggcacgtcttgatcggttcggtaacattgcagggttgaaacgtaatctatcaaatgggcgt

SEQ ID NO: 846419 - DNA, 75 bp, synthetic construct
  source 1..75: mol_type = other DNA
gtctaaagtcagtaaatggctatctaaatcaacaaggaaaactctatggtaatcaactccaagacgagctaatca

SEQ ID NO: 846420 - DNA, 75 bp, synthetic construct
  source 1..75: mol_type = other DNA
accgcttccctgaatggcacgcaagctatccactaaacgcctttgccatgctgatgatccgtgtggatgattcag

SEQ ID NO: 846421 - DNA, 75 bp, synthetic construct
  source 1..75: mol_type = other DNA
gatacctatttgaattatctgctcagattagtaaagactaccaagcaaatgttgcttttctactttctcatacaa

SEQ ID NO: 846422 - DNA, 75 bp, synthetic construct
  source 1..75: mol_type = other DNA
aaatgtctctgggtgttcatggatatagaccatctcaacatattatttctattgagggtcacaccgaaggaccat

SEQ ID NO: 846423 - DNA, 75 bp, synthetic construct
  source 1..75: mol_type = other DNA
gaacccggaggaacgccactctttaataatgttgcaaaacttgaagctcgtcttcagaaaaatggaagtgttcat

SEQ ID NO: 846424 - DNA, 75 bp, synthetic construct
  source 1..75: mol_type = other DNA
gctccgccaatattaatcttccaggtgtaaacactacgggtaatcagaacaccactggtaatgctgcaactgcca

SEQ ID NO: 846425 - DNA, 75 bp, synthetic construct
  source 1..75: mol_type = other DNA
aataggcggcgtatcattcgatggctccgccaatatcaatctgccgggtgtaaacattgctggtaaccagaacac

SEQ ID NO: 846426 - DNA, 75 bp, synthetic construct
  source 1..75: mol_type = other DNA
gtttgatggttctaaaaacattgagttaacggcggaagatttaaatcttgagcaaaccgtagaattagccgtagg

SEQ ID NO: 846427 - DNA, 75 bp, synthetic construct
  source 1..75: mol_type = other DNA
cagcagcgaaaacaggctgaaatggcactgaatcagttgattaatcgttatcagatggagctcgtaggcaaaccg

SEQ ID NO: 846428 - DNA, 75 bp, synthetic construct
  source 1..75: mol_type = other DNA
agctcagcagaacaccctcactgttaaatcatgcgtcagagtggataaccctttccggtcagcagataacgcgac

SEQ ID NO: 846429 - DNA, 75 bp, synthetic construct
  source 1..75: mol_type = other DNA
atggcgggctctgttcggattgtcggcaaagtgcgctttgtttatgccagatgcgacgctgacgcgtcttatctg

SEQ ID NO: 846430 - DNA, 75 bp, synthetic construct
  source 1..75: mol_type = other DNA
gataatggagcatcaataacaacagagcaattagtgactctgctacgagataatggtgcttttaatgcaaaggta

SEQ ID NO: 846431 - DNA, 75 bp, synthetic construct
  source 1..75: mol_type = other DNA
gcctacgatctggcgaaaagtaagtatacggcgcaggatgcaagcacaacgcaaaagggattagttcagctcagt

SEQ ID NO: 846432 - DNA, 75 bp, synthetic construct
  source 1..75: mol_type = other DNA
ctcatcacctgaagctcttgatactctgaatgagcttgcagcagcactgggcaatgacccgaactttgcgacaac

SEQ ID NO: 846433 - DNA, 75 bp, synthetic construct
  source 1..75: mol_type = other DNA
cacaggggacatccgggattcagctgtatgaggcatacaacaatggctacccttccccctatggcaatgtgcttc

SEQ ID NO: 846434 - DNA, 75 bp, synthetic construct
  source 1..75: mol_type = other DNA
tacaggtattcgattaggtacaaaatcgtctgtgcaaacatggaatggtcctggatggaacgataaatctggtta

SEQ ID NO: 846435 - DNA, 75 bp, synthetic construct
  source 1..75: mol_type = other DNA
ccaggatggcgcagagcgtataacactaaaaacaaacctactgcggctgatgtcggagctttaccactatctgga

SEQ ID NO: 846436 - DNA, 75 bp, synthetic construct
  source 1..75: mol_type = other DNA
gaacagcagcaaaaacaggctgaaatggcactgaatcagctgattaatcgttatcaggtggaacacgctggcaaa

SEQ ID NO: 846437 - DNA, 75 bp, synthetic construct
  source 1..75: mol_type = other DNA
tgtatgttgtttctgaaacaaaagcagagagcggaaaagaaaacacacattcccttcagaaatccccgcccacgt

SEQ ID NO: 846438 - DNA, 75 bp, synthetic construct
  source 1..75: mol_type = other DNA
gacaacctgcccctgctgtatcagaccgaaacattcctgaaggcactgagtgacacactggcccggcacgaactt

SEQ ID NO: 846439 - DNA, 75 bp, synthetic construct
  source 1..75: mol_type = other DNA
ggaaatggtggataactggcagaagagtgtaaggagtcgtgcgctcccggaagaggcgatgacgggctggaacga

SEQ ID NO: 846440 - DNA, 75 bp, synthetic construct
  source 1..75: mol_type = other DNA
cagaacaccctcactgttaaatcatgcgtcagagtggataaccctttccggtcagcagataacgcgactgacaga

SEQ ID NO: 846441 - DNA, 75 bp, synthetic construct
  source 1..75: mol_type = other DNA
tcatgcgtcagagtggataaccctttccggtcagcagataacgcgactgacagaacttccgccggcatacaacct

SEQ ID NO: 846442 - DNA, 75 bp, synthetic construct
  source 1..75: mol_type = other DNA
gccggaagccatggtgaagggatatatcacccgtctggagaaccagccgttacagggtgaagaggtatccccggt

SEQ ID NO: 846443 - DNA, 75 bp, synthetic construct
  source 1..75: mol_type = other DNA
aatacatgacggtcagtgaactgaaaacggaggtgtttggcatcatgcaggcttttaaccggcatatcccggcgg

SEQ ID NO: 846444 - DNA, 75 bp, synthetic construct
  source 1..75: mol_type = other DNA
atgacttctgaagtgaaactgaaaaccggtggtgaccccaggtcattaccggattatgctgctctgcgtgatgaa

SEQ ID NO: 846445 - DNA, 75 bp, synthetic construct
  source 1..75: mol_type = other DNA
ctgaatgaagggctggctctgattgtggcgctgacccggcatcactggtcagtgatgtggccgctgaatacacac

SEQ ID NO: 846446 - DNA, 75 bp, synthetic construct
  source 1..75: mol_type = other DNA
atccccgtgttcaggaaatggtggataactggcagaagagcgtaaggagtcgtgcgctcccggaagaggcgatga

SEQ ID NO: 846447 - DNA, 75 bp, synthetic construct
  source 1..75: mol_type = other DNA
tcatgcgtcagactggataacactttcaggtcagcagataacgcgactgacagaactaccgctgacatacaacct

SEQ ID NO: 846448 - DNA, 75 bp, synthetic construct
  source 1..75: mol_type = other DNA
agtgatgtggccgctgaatacacacgcccggctggaaattattaccggtctgttcagccgtctgcaaaaaacgct

SEQ ID NO: 846449 - DNA, 75 bp, synthetic construct
  source 1..75: mol_type = other DNA
tccgtctggctatgccctgatgcaggggcagacttttgacaaatctgcatacccgaaacttgcagccgcttatcc

SEQ ID NO: 846450 - DNA, 75 bp, synthetic construct
  source 1..75: mol_type = other DNA
ttatcgccctgcttctggaagatgcaaagcgcctccagcaggtggaaccaaatgcaggtactgaggcccgcatct

SEQ ID NO: 846451 - DNA, 75 bp, synthetic construct
  source 1..75: mol_type = other DNA
gggtgaagaaaattcgctttccggaacattgcggtatcggcattaagccgtgttctgaagaaggcaccaaacgtc

SEQ ID NO: 846452 - DNA, 75 bp, synthetic construct
  source 1..75: mol_type = other DNA
tgaccgccacggctgacatgcctgatgaagtgcgcgcaaagctgcacaaaatcaccggtctgtttctgcgtgacg

SEQ ID NO: 846453 - DNA, 75 bp, synthetic construct
  source 1..75: mol_type = other DNA
cttcaaaagaaacctgcgaccccggccaatacgatcaaacgctgctgacagctcatttcattgggattgagggcg

SEQ ID NO: 846454 - DNA, 75 bp, synthetic construct
  source 1..75: mol_type = other DNA
ttccgttcgtagttgctccggatggccgcgtcagcaaagggcgtccgaagaacctgaaatcatggttggagagtg

SEQ ID NO: 846455 - DNA, 75 bp, synthetic construct
  source 1..75: mol_type = other DNA
cgcgcagcgggaagccgccccgctgcgacatgcaactgtctatgagcagatgctggttaagctcgccgcagacca

SEQ ID NO: 846456 - DNA, 75 bp, synthetic construct
  source 1..75: mol_type = other DNA
aaacagtgaattagattttgagtatgaagatattgaaaggtacggtgatgttttcacgttgcgtcatgggatcta

SEQ ID NO: 846457 - DNA, 75 bp, synthetic construct
  source 1..75: mol_type = other DNA
tttctgcgtgacgctggtgatgccgcaggtgcgctggcgcacctgcaacgtgcgacacagctcgactgtcaggca

SEQ ID NO: 846458 - DNA, 75 bp, synthetic construct
  source 1..75: mol_type = other DNA
tatccccgctggcgcggggaacacggaccaaatacccgtccctcaatccacgccgtcggtttatccccgctggcg

SEQ ID NO: 846459 - DNA, 75 bp, synthetic construct
  source 1..75: mol_type = other DNA
acgacgctaggtgttccgacgtttagttacctgccgtactgtgtattctgtttctgctcgatgatatttgcgttg

SEQ ID NO: 846460 - DNA, 75 bp, synthetic construct
  source 1..75: mol_type = other DNA
gttggttgaccatagaggaaaccgcaaacaggttaagcacaacactcggtgaaagggtatctgtagccgattgcc

SEQ ID NO: 846461 - DNA, 75 bp, synthetic construct
  source 1..75: mol_type = other DNA
tggagcgggagctgaaaccgagcaggagccgcaacccaaagcggccacccgtgccacgcgtaagacccggagcgt

SEQ ID NO: 846462 - DNA, 75 bp, synthetic construct
  source 1..75: mol_type = other DNA
gaacacagataacggcccgaatgaagaagccgatgcactgtatctgattgaacaactgggtaaacgcggcattgc

SEQ ID NO: 846463 - DNA, 75 bp, synthetic construct
  source 1..75: mol_type = other DNA
gcgtgtttacgccaaaaatatttcggctgaaggactgcaaagcggcaaacagttaccactcggtccggcactgtt

SEQ ID NO: 846464 - DNA, 75 bp, synthetic construct
  source 1..75: mol_type = other DNA
ccgcagctggagggctatttgcaacaaggtatttttgaacgcgcggactgggaagactctcttcaggggctggaa

SEQ ID NO: 846465 - DNA, 75 bp, synthetic construct
  source 1..75: mol_type = other DNA
caaagcggcaagcagttgccgctcggtccggcgttattaggtcgcgttctggacggcagcggtaaaccgctcgat

SEQ ID NO: 846466 - DNA, 75 bp, synthetic construct
  source 1..75: mol_type = other DNA
cgtcgctacgggcgattaacccgcgccaccgggctggtgctggaagctaccggattgcaattgccgctcggcgca

SEQ ID NO: 846467 - DNA, 75 bp, synthetic construct
  source 1..75: mol_type = other DNA
aagtcgaaggtgtcctgcccggcgcgcgtgtttatgccaaaaacatttcggcagaagggctgcaaagcggcaagc

SEQ ID NO: 846468 - DNA, 75 bp, synthetic construct
  source 1..75: mol_type = other DNA
gttctggacggcagcggtaaaccgctcgatggcctcccctcccccgatacgacggaaaccggtgcgctgattacc

SEQ ID NO: 846469 - DNA, 75 bp, synthetic construct
  source 1..75: mol_type = other DNA
ctgatgcattcctgcaacagatcctgctgcgtccggctgaatatgatgttatcgcctgtatgaacctgaacggtg

SEQ ID NO: 846470 - DNA, 75 bp, synthetic construct
  source 1..75: mol_type = other DNA
aaacatattccgttgtacggacgcaagcactacaaagtactgaagcaacaaaagcctaaacccaggactccagcc

SEQ ID NO: 846471 - DNA, 75 bp, synthetic construct
  source 1..75: mol_type = other DNA
cggcgttatctctgcgattatccaccagcagttatctcacctggcatcctgaggggttggcttcaaaaggagatt

SEQ ID NO: 846472 - DNA, 75 bp, synthetic construct
  source 1..75: mol_type = other DNA
gccgatgtcattgtcgtgggtttgattggtgaacgcggacgcgaagtaaaagattttattgagaatatcctcggt

SEQ ID NO: 846473 - DNA, 75 bp, synthetic construct
  source 1..75: mol_type = other DNA
ctggcaacatgatcacctgtggtcagtttgctgtcgattacatcattgttgatgacgaagaagttaaatctcacc

SEQ ID NO: 846474 - DNA, 75 bp, synthetic construct
  source 1..75: mol_type = other DNA
caaaagtcattaccgcgcatgtgccattacctatggctgataaagtcgaccagatggccgccaggctggaacgct

SEQ ID NO: 846475 - DNA, 75 bp, synthetic construct
  source 1..75: mol_type = other DNA
ccgctgagatgatgctgcgccacatgggttggacggaagcggctgacatcattgttaaaggtatggaaggcgcaa

SEQ ID NO: 846476 - DNA, 75 bp, synthetic construct
  source 1..75: mol_type = other DNA
ccgctgagatgatgctgcgccaaatgggttggacggaagcggctgacctgattgttaaaggtatggaaggcgcaa

SEQ ID NO: 846477 - DNA, 75 bp, synthetic construct
  source 1..75: mol_type = other DNA
ttattgcagaatataatgatgaacgttgtagtggtggtaagaatgatcattgttatagtaattacagaagattat

SEQ ID NO: 846478 - DNA, 75 bp, synthetic construct
  source 1..75: mol_type = other DNA
aacctatgacttcgaacgtctgatggatggcgctaatctgctgaaatgttcagagtttggtgaggcgatcatcga

SEQ ID NO: 846479 - DNA, 75 bp, synthetic construct
  source 1..75: mol_type = other DNA
aacctatgacttcgaacgtctgatggaaggcgctaacctgctgaaatgttcagagtttggtgacgcgatcatcga

SEQ ID NO: 846480 - DNA, 75 bp, synthetic construct
  source 1..75: mol_type = other DNA
ccgctgagatgatgctgcgccagatgggttggacggaagcggctgacctaattgttaaaggtatggaaggcgcaa

SEQ ID NO: 846481 - DNA, 75 bp, synthetic construct
  source 1..75: mol_type = other DNA
aattacttaccagacattgattaacgaaggtttgctaccttcaacctacacaggcactaatgctaataaatcctc

SEQ ID NO: 846482 - DNA, 75 bp, synthetic construct
  source 1..75: mol_type = other DNA
tctctttgctggaacttgttttggtgctgggtgtgggtagtatgatggcgtttatgcgctttcaggatatgaaga

SEQ ID NO: 846483 - DNA, 75 bp, synthetic construct
  source 1..75: mol_type = other DNA
aacatgggaggaaataacatatcaaatgccaaggatattacagcgtctggaatgatatcatctggaacattaaaa

SEQ ID NO: 846484 - DNA, 75 bp, synthetic construct
  source 1..75: mol_type = other DNA
cagtttggctatatatctggaacccttattgcagaatataatgatgaacgttgtagtggtggtaagaatgatcat

SEQ ID NO: 846485 - DNA, 75 bp, synthetic construct
  source 1..75: mol_type = other DNA
gtctcgacgtctgcgcttactggctgcgccgtgaagccgagggagatgtggaaataaccgcacttccgaaaaata

SEQ ID NO: 846486 - DNA, 75 bp, synthetic construct
  source 1..75: mol_type = other DNA
atatgaaaaatgaacaggagagtatattggcttctgctgtcgggcaacaaatgaaacaaatcggtgaagcagtta

SEQ ID NO: 846487 - DNA, 75 bp, synthetic construct
  source 1..75: mol_type = other DNA
aacctatgacttcgaacgtctgatggacggcgctaaactgctgaaatgttcagagtttggtgacgcgatcatcga

SEQ ID NO: 846488 - DNA, 75 bp, synthetic construct
  source 1..75: mol_type = other DNA
ccatcagcgccggtggtattacgctggttgcgggaacaacatgaaggagcacagatacgatgtctgttgctgctc

SEQ ID NO: 846489 - DNA, 75 bp, synthetic construct
  source 1..75: mol_type = other DNA
aacaaatttcaggtcacaaaacaatcacacagacagccagatacgatcgaaaagtaaaaatagtgccagtcgttg

SEQ ID NO: 846490 - DNA, 75 bp, synthetic construct
  source 1..75: mol_type = other DNA
aaaggtaaatgttgtcttcgggaaaatgaagccggataacatcaagccagagcacatcagaaaatatatggataa

SEQ ID NO: 846491 - DNA, 75 bp, synthetic construct
  source 1..75: mol_type = other DNA
ccactggcgaaactggtgctgctggtgcatttcgccattctgttcttcgcgctggtcgtgctgggaattgtggcg

SEQ ID NO: 846492 - DNA, 75 bp, synthetic construct
  source 1..75: mol_type = other DNA
atgactcaagtaataattaaaaaatggggtaatagtccgtctgttcgccttccttctgcgattgtgaaagccgct

SEQ ID NO: 846493 - DNA, 75 bp, synthetic construct
  source 1..75: mol_type = other DNA
aatggggtaatagtccttcagttcgccttccttctgctattgtccgtgctgcttcattgaatgttgatgatgtag

SEQ ID NO: 846494 - DNA, 75 bp, synthetic construct
  source 1..75: mol_type = other DNA
cttcgaacgtctgatggaaggcgctaaactgctgaaatgttcagagtttggtgatgcgatcatcaaaaatatgta

SEQ ID NO: 846495 - DNA, 75 bp, synthetic construct
  source 1..75: mol_type = other DNA
aacctatgacttcgaacgtctgatggagggcgctaatctgctgaaatgttcagagtttggtgatgcgatcatcga

SEQ ID NO: 846496 - DNA, 75 bp, synthetic construct
  source 1..75: mol_type = other DNA
aacctatgacttcgaacgtctgatggacggcgctaacctgctgaaatgttcagagtttggtgaagcgatcatcga

SEQ ID NO: 846497 - DNA, 75 bp, synthetic construct
  source 1..75: mol_type = other DNA
cttgaaggtacgttaagtgagaagcaggaaatttcaggtcataaaaacgcctcgcaaacagcgagatataatcga

SEQ ID NO: 846498 - DNA, 75 bp, synthetic construct
  source 1..75: mol_type = other DNA
ggcccgctgaccactccggttggtggcggtattcgttctctcaacgttgccctgcgccaggaactggatctctac

SEQ ID NO: 846499 - DNA, 75 bp, synthetic construct
  source 1..75: mol_type = other DNA
gtcattaaagacgtgatcgctgatgcgttcctgcaacagatcctgctacgtccggctgaatacgacgttatcgcc

SEQ ID NO: 846500 - DNA, 75 bp, synthetic construct
  source 1..75: mol_type = other DNA
gtcgtccatccaccccgatcgatatgctgaaaaatgcgcttgctcacggagagttcagaccttattttcaaccca

SEQ ID NO: 846501 - DNA, 75 bp, synthetic construct
  source 1..75: mol_type = other DNA
aggcgcatagacttgcttggttctatgtatacaaaaaatggcctcctaagtttattgatcatgtaaatgggaaca

SEQ ID NO: 846502 - DNA, 75 bp, synthetic construct
  source 1..75: mol_type = other DNA
aaaaggtgagctgaccgtcgacgatagcgccattattggcattattcgttactacacccgtgaggcgggcgtgcg

SEQ ID NO: 846503 - DNA, 75 bp, synthetic construct
  source 1..75: mol_type = other DNA
atcctttgcctggtagggccgccgggggtaggtaaaacctccctgggtcagtccattgccaaagccaccgggcgt

SEQ ID NO: 846504 - DNA, 75 bp, synthetic construct
  source 1..75: mol_type = other DNA
gaacataaacgggtgccggacgatttagaaaatcacccggcgatcaccgggcatgaatgtgccggagtcattgtt

SEQ ID NO: 846505 - DNA, 75 bp, synthetic construct
  source 1..75: mol_type = other DNA
atggcaagcgggatatccgtctgcgtgaatttgagttacccgaaattactgataatgaactgctggtcagtgtaa

SEQ ID NO: 846506 - DNA, 75 bp, synthetic construct
  source 1..75: mol_type = other DNA
tatatggaacttatgcgagtaaagcacttaattgcgagcatgagcttttatctcaatttaataatgatgaggata

SEQ ID NO: 846507 - DNA, 75 bp, synthetic construct
  source 1..75: mol_type = other DNA
gataactggtgacgataaccccacgtctaagatgattctcacaatcttttcagcagtggctgaagctgaacgtaa

SEQ ID NO: 846508 - DNA, 75 bp, synthetic construct
  source 1..75: mol_type = other DNA
gatggtcgactggttgctatggttgctggtgttaagtttgggcgtaaacctcaccaaaaatcagcaatgatacgg

SEQ ID NO: 846509 - DNA, 75 bp, synthetic construct
  source 1..75: mol_type = other DNA
gtgttcatttccgtcctgtctgacgcgcttcaggctggcgtggccgcagctcaaaacggcaataatatccagttt

SEQ ID NO: 846510 - DNA, 75 bp, synthetic construct
  source 1..75: mol_type = other DNA
tgtgcaccgcgctggtttcttgcctgaccggtaacccggttcgtgccgatgtggcaatgaccggtgagatcactc

SEQ ID NO: 846511 - DNA, 75 bp, synthetic construct
  source 1..75: mol_type = other DNA
tactgctcgataagtcattaaaacatatcgaaattaacggcgataacctgcatgactacctcggtgttcagcgtt

SEQ ID NO: 846512 - DNA, 75 bp, synthetic construct
  source 1..75: mol_type = other DNA
gtttgtcgcgacgtcgaactccatgaacattccggcaccgctgctggatcgtatggaagtgattcgcctctccgg

SEQ ID NO: 846513 - DNA, 75 bp, synthetic construct
  source 1..75: mol_type = other DNA
attaatttgggctgcgtattaccgtatcacggctcttattttgctgcggcgtcgctggcagagcctatgtgctgc

SEQ ID NO: 846514 - DNA, 75 bp, synthetic construct
  source 1..75: mol_type = other DNA
gtataaagtttctatccaccttcccgaaagggaaagtgaaactggttctggaactgacagaacgaaaccagctat

SEQ ID NO: 846515 - DNA, 75 bp, synthetic construct
  source 1..75: mol_type = other DNA
aatcacaggaattgttcatgacagagaaaggaagctgctatctgcagggataccgctatgcacctccactacccg

SEQ ID NO: 846516 - DNA, 75 bp, synthetic construct
  source 1..75: mol_type = other DNA
tttcctgttgccatcttcagtggaatactcacagcctttctgctgtcccgacgtcgtccatcttccccgctcgat

SEQ ID NO: 846517 - DNA, 75 bp, synthetic construct
  source 1..75: mol_type = other DNA
aatgcaacttacctacgcctggaaacaggcctggtatatgtttcctgttgccatcttcggtggaatactcacagc

SEQ ID NO: 846518 - DNA, 75 bp, synthetic construct
  source 1..75: mol_type = other DNA
tgcggttcctgcaatacaattccgtttgggaaacacggtcctgtcagccagcggaaaaaatgtcactctgccccc

SEQ ID NO: 846519 - DNA, 75 bp, synthetic construct
  source 1..75: mol_type = other DNA
ttttaccggatcaatttcatattgggatcaatatttcaccagcgcattttctgtccccggggctggaagatagct

SEQ ID NO: 846520 - DNA, 75 bp, synthetic construct
  source 1..75: mol_type = other DNA
aatataaaaaaggccaacgttttgtattgcaaccggcgatggggctaccaagcgggtattctgcgggatacagct

SEQ ID NO: 846521 - DNA, 75 bp, synthetic construct
  source 1..75: mol_type = other DNA
ctggaaagcggcgttactcggtagcgaacataaacgggtgcccgacgatttagaaaatcatccggtcattaccgg

SEQ ID NO: 846522 - DNA, 75 bp, synthetic construct
  source 1..75: mol_type = other DNA
atcacggctcttattttgctgcggcgtcgctggcggagccgatgtgctgcattattggcgcttatcatgctaatt

SEQ ID NO: 846523 - DNA, 75 bp, synthetic construct
  source 1..75: mol_type = other DNA
tcaacagggagtattgttcgcactggatgattttggtactggctatgcaactcacagctacctgcagtcgtttcc

SEQ ID NO: 846524 - DNA, 75 bp, synthetic construct
  source 1..75: mol_type = other DNA
gcagaaaattcttatccgcattcccaaaaggaaaagtgaaactggttctggaactgacggaacggaaccagctat

SEQ ID NO: 846525 - DNA, 75 bp, synthetic construct
  source 1..75: mol_type = other DNA
ctatatgattattcccgagatcgccattaacctgggctgcgtattaccgtatcacggctcttattttgctgcggc

SEQ ID NO: 846526 - DNA, 75 bp, synthetic construct
  source 1..75: mol_type = other DNA
caccgacgtgtgtgcagccgtggcgcagttgcgtgagtcaggctgtgatggggtgatcgcatttggcggcggctc

SEQ ID NO: 846527 - DNA, 75 bp, synthetic construct
  source 1..75: mol_type = other DNA
atctctacaacgaccgccagattatccgcgcaggcttagaagatcactttatgggcaaactgagcggcatctcta

SEQ ID NO: 846528 - DNA, 75 bp, synthetic construct
  source 1..75: mol_type = other DNA
gattatcaaaaaggccaataccaccatcggtattccaggcactttcagcgcccgtttgcagccaaacgatacccg

SEQ ID NO: 846529 - DNA, 75 bp, synthetic construct
  source 1..75: mol_type = other DNA
cgatccgtcgcggcgcgccgggcgggctgattttccagagtatctgcggcagtgaaaaagggctgaaagagtttg

SEQ ID NO: 846530 - DNA, 75 bp, synthetic construct
  source 1..75: mol_type = other DNA
actgtgcgtcagttactcaacctgcgcccgtcaccagagtttgaacgctggctggaaagcatgggcattatggca

SEQ ID NO: 846531 - DNA, 75 bp, synthetic construct
  source 1..75: mol_type = other DNA
gtacaggtcgcaatgcgaaaatgacaggcgtgactggggtttctatggattgattgccgaggaagtaggagaaat

SEQ ID NO: 846532 - DNA, 75 bp, synthetic construct
  source 1..75: mol_type = other DNA
gtacaggtcgcaatgcgaaaatgacaggcgtgactgggggttctatggattgattgccgaggaagttggagaaat

SEQ ID NO: 846533 - DNA, 75 bp, synthetic construct
  source 1..75: mol_type = other DNA
tggcggtggccattgcggaggcagacggcgaaattgagccggaagagcgcaaggtgctggaagagattgccggtg

SEQ ID NO: 846534 - DNA, 75 bp, synthetic construct
  source 1..75: mol_type = other DNA
gaactgcgttcgggggatgtgctggcgggcgttgcagcggcaagctcacaggagcgcgtggcggcaaagcaggtg

SEQ ID NO: 846535 - DNA, 75 bp, synthetic construct
  source 1..75: mol_type = other DNA
gtacaggtcgcaatgcgaaaatgacaggcgtgactggggattctagggattgattgccgaggaagtcggagaaat

SEQ ID NO: 846536 - DNA, 75 bp, synthetic construct
  source 1..75: mol_type = other DNA
aagtggcgacgaaggacgatttttttaatatcaaaaaagccagcgccgctgacctgctggatgcgcaccgcatcc

SEQ ID NO: 846537 - DNA, 75 bp, synthetic construct
  source 1..75: mol_type = other DNA
taagaacctgtttttctacgcccccggcggaaaaccggacggcatcaaaatcgtgccactgagcgaggtcgccac

SEQ ID NO: 846538 - DNA, 75 bp, synthetic construct
  source 1..75: mol_type = other DNA
aagaaaaagcagcgccaacgggtaaagcctatgttgtgcaactgggtgcgctgaaaaatgccgataaagtgaatg

SEQ ID NO: 846539 - DNA, 75 bp, synthetic construct
  source 1..75: mol_type = other DNA
cgaaaccggtggagccgcctaaaccgaaggttgaagcaccacctgcgccgaagccagaaccgaagccggtcgtgg

SEQ ID NO: 846540 - DNA, 75 bp, synthetic construct
  source 1..75: mol_type = other DNA
ggtactaactacactgtatataatatctataatgatttgagtggtatcagtgaagtttacattagaccatcaaca

SEQ ID NO: 846541 - DNA, 75 bp, synthetic construct
  source 1..75: mol_type = other DNA
gctgctggacgggcagaaaaaacattatcaggatgagttcgcggctatcccgctggtgccgaaagcgggcgatcg

SEQ ID NO: 846542 - DNA, 75 bp, synthetic construct
  source 1..75: mol_type = other DNA
gatgaacctgatatgatgccagccgccacccaggcgctgccgacgcagccgccggaaggcgcagcggaagaggtg

SEQ ID NO: 846543 - DNA, 75 bp, synthetic construct
  source 1..75: mol_type = other DNA
gcttaagtggcgtggtaatggctatacgccgaattaatacggtcttgcctgatgcgacgctggcgcgtcttatca

SEQ ID NO: 846544 - DNA, 75 bp, synthetic construct
  source 1..75: mol_type = other DNA
gcagaaccaggaagatgtgaacaacctccgcaacgcaatgaaaagcgccaaaggccctggcaacttccgcaatct

SEQ ID NO: 846545 - DNA, 75 bp, synthetic construct
  source 1..75: mol_type = other DNA
agttcgcgcctgataccgtgtttcacctgcttgagcccgacattaatcaggaaatttacggcctgcctgaatatc

SEQ ID NO: 846546 - DNA, 75 bp, synthetic construct
  source 1..75: mol_type = other DNA
gtacaggtcgcaatgcgaaaatgacaggcgtgactggggattctacggattgattgccgaggaagtgggagaaat

SEQ ID NO: 846547 - DNA, 75 bp, synthetic construct
  source 1..75: mol_type = other DNA
tactgaagggattgtagaaagtacagaaacatttctatcagtaaagactgatgacctatctacttacagtatcgc

SEQ ID NO: 846548 - DNA, 75 bp, synthetic construct
  source 1..75: mol_type = other DNA
tccgctgctgagccagcaggcgttcagccgctttgtgcaggactatctggtgttcggtaacgcctatctggagaa

SEQ ID NO: 846549 - DNA, 75 bp, synthetic construct
  source 1..75: mol_type = other DNA
tgtcagaagtcgcagcgaaggatgaatttctgaatatcaagaacgtgagccgggacgacatgatggcggcacacc

SEQ ID NO: 846550 - DNA, 75 bp, synthetic construct
  source 1..75: mol_type = other DNA
taatgcgattagcgcaaccattatcggtcagctggataccaattttaaaattggtcgtcgtgccgcgttacgcga

SEQ ID NO: 846551 - DNA, 75 bp, synthetic construct
  source 1..75: mol_type = other DNA
ttccgtaatcaccatgaccgcaatgcgctggcagataaactggatttgattgcacctgtattgtttgagcgtgat

SEQ ID NO: 846552 - DNA, 75 bp, synthetic construct
  source 1..75: mol_type = other DNA
aaaggttaatatattggataatagaagttttcgcacttcagtttggtgatcttaacatatgtgtcaataaattct

SEQ ID NO: 846553 - DNA, 75 bp, synthetic construct
  source 1..75: mol_type = other DNA
tatagttcatactaattcgactaagcctggtattctggctaggattgccgctaaaatggcgggggtaaaaaaaat

SEQ ID NO: 846554 - DNA, 75 bp, synthetic construct
  source 1..75: mol_type = other DNA
agtcagtgggtaaatttctatggcgtaacctgtttccataactgcaattcactggaaacagctgctgaagagatg

SEQ ID NO: 846555 - DNA, 75 bp, synthetic construct
  source 1..75: mol_type = other DNA
atggtatctgcatgtttctatcttttttcaccgggatccgaaaaatatcataaccagactcccgttcgtgctgac

SEQ ID NO: 846556 - DNA, 75 bp, synthetic construct
  source 1..75: mol_type = other DNA
caactcgatggtggctggcagcctgtaccaacagatattttccgccaggttacgccaacagaacgcttccgtggt

SEQ ID NO: 846557 - DNA, 75 bp, synthetic construct
  source 1..75: mol_type = other DNA
ggggaggacgacccggcacaacgcgccatcgaccgggcagaacttccggcagaggccatcgcgcaggggatgaac

SEQ ID NO: 846558 - DNA, 75 bp, synthetic construct
  source 1..75: mol_type = other DNA
ccggatttgacgttatccaggctgagccgcaggctgggccatttgagattgcaggtgcagatatatttgaacggg

SEQ ID NO: 846559 - DNA, 75 bp, synthetic construct
  source 1..75: mol_type = other DNA
atgtctgtacggattacggggatcgggttgtgttttaccatcacaatgatcgaaatgagctggcagagaagcttg

SEQ ID NO: 846560 - DNA, 75 bp, synthetic construct
  source 1..75: mol_type = other DNA
cctggagtcaggaaaaactcagtcgtgcctgccgtgagcttgaactgaagcatggttttgctccggataacggtt

SEQ ID NO: 846561 - DNA, 75 bp, synthetic construct
  source 1..75: mol_type = other DNA
ttttcactacatcctttcctggcagtcacatgaaagcccgcgtccggaacagatttatgacagtgtacgtcatac

SEQ ID NO: 846562 - DNA, 75 bp, synthetic construct
  source 1..75: mol_type = other DNA
ggggaggacgacccggcacagcgcgccatcgaccgggcagagcttccggcagaggccatcgcgcaggggatgaac

SEQ ID NO: 846563 - DNA, 75 bp, synthetic construct
  source 1..75: mol_type = other DNA
cggacacggataacctgcatgtacatgtcgcagtgaatcgtgttcatcctgttagtggtcatattaatcgtcttt

SEQ ID NO: 846564 - DNA, 75 bp, synthetic construct
  source 1..75: mol_type = other DNA
aatcgaagatatcaaaaacgacccgaaagaagcggaggaagtcttcgtcaacatgctgaccattgccgaatctga

SEQ ID NO: 846565 - DNA, 75 bp, synthetic construct
  source 1..75: mol_type = other DNA
cttcgctgcagaactgacggaagcactgcgtgatgaggggcttaaacagcaggtgctggcccgaatcggtcaacg

SEQ ID NO: 846566 - DNA, 75 bp, synthetic construct
  source 1..75: mol_type = other DNA
cgcaggagcatgtggtgaagtgcctggtctttttccatccggaagatgcccacggattgcgtctggagcaggagc

SEQ ID NO: 846567 - DNA, 75 bp, synthetic construct
  source 1..75: mol_type = other DNA
atgaatccgccacgttatttcgtcgtaagtattaccagaacggggcgcacgcggggtatatcatgtatgtcaccg

SEQ ID NO: 846568 - DNA, 75 bp, synthetic construct
  source 1..75: mol_type = other DNA
caaaaagcctgcgcgccgccgttcaccacagctcgccgatttacgtgaagcgtaacattctggcgagcacctaca

SEQ ID NO: 846569 - DNA, 75 bp, synthetic construct
  source 1..75: mol_type = other DNA
atgaaaaagcaactgaagatacccaccacaacgaccgttagcgcaccgcaaaaaatggaggcgttcacctttggc

SEQ ID NO: 846570 - DNA, 75 bp, synthetic construct
  source 1..75: mol_type = other DNA
cgtatccccgctatgaaagtcagcgaatggggccacctgctccgcgcgcttgaaattgagcgggtctgccactga

SEQ ID NO: 846571 - DNA, 75 bp, synthetic construct
  source 1..75: mol_type = other DNA
cggctgaatatgtaaagcgtctgcgtgaagagtgcctgcgggagaataaacccctgcaccgccatacccgcgtca

SEQ ID NO: 846572 - DNA, 75 bp, synthetic construct
  source 1..75: mol_type = other DNA
tgcagacagtgtgtggccgttaatgacgctggattatatgcaggatctggatggtggatggcagcctgtaccgaa

SEQ ID NO: 846573 - DNA, 75 bp, synthetic construct
  source 1..75: mol_type = other DNA
cgagggctgggagcaggcgtgccgctacgccaacgcctgtggggcgctggtggtctcgcgccacggctgtgcacc

SEQ ID NO: 846574 - DNA, 75 bp, synthetic construct
  source 1..75: mol_type = other DNA
cgtggcgtacggcacggcgcggcaggggttgcgttcgtcgatgctggcgcgcgtgggcgacgagcatatgggtcg

SEQ ID NO: 846575 - DNA, 75 bp, synthetic construct
  source 1..75: mol_type = other DNA
aaatgactgctacagccgcgaagtcagccaatccgttgacgacactattgaattggttcgcacctatcttaagta

SEQ ID NO: 846576 - DNA, 75 bp, synthetic construct
  source 1..75: mol_type = other DNA
gccggtttatccccgctggcgcggggaacacgcaaattaccgccgggctaacgtttgatctcacggtttatcccc

SEQ ID NO: 846577 - DNA, 75 bp, synthetic construct
  source 1..75: mol_type = other DNA
tccagcgacgccggtttatccccgctggcgcggggaacacacaaaaacaaaacaccgaaacggctgtacctgcgg

SEQ ID NO: 846578 - DNA, 75 bp, synthetic construct
  source 1..75: mol_type = other DNA
tggcgcggggaacacccgaacggctcggcgctctcatacccccaaatcggtttatccccgctggcgcggggaaca

SEQ ID NO: 846579 - DNA, 75 bp, synthetic construct
  source 1..75: mol_type = other DNA
tttcgtagctcatttttgtagcatttttctccggtttatccccgctggcgcggggaacacactaagcatacataa

SEQ ID NO: 846580 - DNA, 75 bp, synthetic construct
  source 1..75: mol_type = other DNA
acacaggtttatccccgctggcgcggggaacacatatcctccagaacacgcgcctcatttcgactcggtttatcc

SEQ ID NO: 846581 - DNA, 75 bp, synthetic construct
  source 1..75: mol_type = other DNA
cacgcactcaaaatagtaaattaatttatgaattgcggtttatccccgctggcgcggggaacacttcaatggttg

SEQ ID NO: 846582 - DNA, 75 bp, synthetic construct
  source 1..75: mol_type = other DNA
gtggaggccaggattccaccacctgtctggtacaagcattgcagcaatatgatgaagtccattgcgtgacatttg

SEQ ID NO: 846583 - DNA, 75 bp, synthetic construct
  source 1..75: mol_type = other DNA
attttattcctgactctggcagcaatttatgcgtatcaggtgaaggcagaagctgtgattaccggtgtctgcgaa

SEQ ID NO: 846584 - DNA, 75 bp, synthetic construct
  source 1..75: mol_type = other DNA
attacggccagcgccatcgcgcagagatcgacgtggcccgcgaactggcgctaaaactaggggcacgcgcgcata

SEQ ID NO: 846585 - DNA, 75 bp, synthetic construct
  source 1..75: mol_type = other DNA
ggggaacacgggcgcacggaatacaaagccgtgtatctgctcggtttatccccgctggcgcggggaacactggct

SEQ ID NO: 846586 - DNA, 75 bp, synthetic construct
  source 1..75: mol_type = other DNA
tgctggaccatttcaaattcacaatagattcggtttatccccgctggcgcggggaacacagccgggcgaaatttt

SEQ ID NO: 846587 - DNA, 75 bp, synthetic construct
  source 1..75: mol_type = other DNA
gggaactcttttgtgccctggcgttttgctggctctcgcgcggtttatccccgctggcgcggggaacaccgccgc

SEQ ID NO: 846588 - DNA, 75 bp, synthetic construct
  source 1..75: mol_type = other DNA
ccccgctggcgcggggaacacgcggaaacagcttcctggatgctgcgttattgcggtttatccccgctggcgcgg

SEQ ID NO: 846589 - DNA, 75 bp, synthetic construct
  source 1..75: mol_type = other DNA
ccgctggcgcggggaacactgcatatcagatgggcactgctgattggagaacggtttatccccgcgggcgcgggg

SEQ ID NO: 846590 - DNA, 75 bp, synthetic construct
  source 1..75: mol_type = other DNA
acaacaatacgcgcaaaccgacggtttatccccgctggcgcggggaacactgctctgtcgttttcatattaccgg

SEQ ID NO: 846591 - DNA, 75 bp, synthetic construct
  source 1..75: mol_type = other DNA
agctctctgcgattttttgttcgaccaggtttagttccggtttatccccgctggcgcggggagctcggcatagcc

SEQ ID NO: 846592 - DNA, 75 bp, synthetic construct
  source 1..75: mol_type = other DNA
ttgtgccctggcgttttgctggctctcgcgcggtttatccccgctggcgcggggaacaccgttcctcgcattatt

SEQ ID NO: 846593 - DNA, 75 bp, synthetic construct
  source 1..75: mol_type = other DNA
acacggtggacggattttctatattcccaccgtccgcggtttatccccgctggcgcggggaacactcgatcgcaa

SEQ ID NO: 846594 - DNA, 75 bp, synthetic construct
  source 1..75: mol_type = other DNA
gctggcaatctctttcggggtgagtccggtttatccccgctggcgcggggaactctctaaaagtatacatttgtt

SEQ ID NO: 846595 - DNA, 75 bp, synthetic construct
  source 1..75: mol_type = other DNA
ccccgctggcgcggggaacacgtaacgtggcgacgaccggcgattgatttcagcggtttatccccgctggcgcgg

SEQ ID NO: 846596 - DNA, 75 bp, synthetic construct
  source 1..75: mol_type = other DNA
atgttatcccaatatatttcactgtcggtttatccccgctggcgcggggaacacagcccacgcgcgctcttcgcg

SEQ ID NO: 846597 - DNA, 75 bp, synthetic construct
  source 1..75: mol_type = other DNA
tatccccgctggcgcggggaacaccctgtcattctggcggtaaaatcgatctgccacggtttatccccgctggcg

SEQ ID NO: 846598 - DNA, 75 bp, synthetic construct
  source 1..75: mol_type = other DNA
tccggtttatccccgctggcgcggggaacaccgtccggatcggtttcgagaatctctacgctccggtttatcccc

SEQ ID NO: 846599 - DNA, 75 bp, synthetic construct
  source 1..75: mol_type = other DNA
ggaactctagtttccgtatctccggatttataaagctgacggtttatccccgctggcgcggggaactcgcaggcg

SEQ ID NO: 846600 - DNA, 75 bp, synthetic construct
  source 1..75: mol_type = other DNA
ccgctggcgcggggaacacacatgaatgtcggttcagaccgtgtttttacccggtttatccccgctggcgcgggg

SEQ ID NO: 846601 - DNA, 75 bp, synthetic construct
  source 1..75: mol_type = other DNA
ggggaacacatatcagcgttatcaaccgcgatttcagtttccggtttatccccgctggcgcggggaacacaattt

SEQ ID NO: 846602 - DNA, 75 bp, synthetic construct
  source 1..75: mol_type = other DNA
cagttagtcgcaaccccggcagcgcaacctctggctgatgcactggttgtgatcaaggatatgtaccggaagcag

SEQ ID NO: 846603 - DNA, 75 bp, synthetic construct
  source 1..75: mol_type = other DNA
aggtttcaccgctggcagagctggtttacagcatgctaccgcgacctaaaatcacggaaattctcgatgaggtaa

SEQ ID NO: 846604 - DNA, 75 bp, synthetic construct
  source 1..75: mol_type = other DNA
aatgatactgcttcagtcaaaactggaagaggtcaacaaaatggccgcacacggtgaattgccggatgtggaaat

SEQ ID NO: 846605 - DNA, 75 bp, synthetic construct
  source 1..75: mol_type = other DNA
gtgaagaaaaagaacgtttgctggttgtgccggatgatgacatccttcttacacgcatgtgtttttttagtgaac

SEQ ID NO: 846606 - DNA, 75 bp, synthetic construct
  source 1..75: mol_type = other DNA
aacaataatgttattttcccttctgttgaagtgatcgaacggacgcttgccgaagtcgtcacgctcgctaacaga

SEQ ID NO: 846607 - DNA, 75 bp, synthetic construct
  source 1..75: mol_type = other DNA
tagattctctgaagcggaaagggatcccattcaatgaccaactgatttctcatctgtccccgctgggatgggaac

SEQ ID NO: 846608 - DNA, 75 bp, synthetic construct
  source 1..75: mol_type = other DNA
tacggtcaggaacctggggtgcagttttatacgcatatctcagatcaatatagtccgttttataccaaagtaatc

SEQ ID NO: 846609 - DNA, 75 bp, synthetic construct
  source 1..75: mol_type = other DNA
tggagaaacaataagaagctggcaaaagggaagtatcgtcctttgcgagcagttgatgtcagtcagtacaaaaaa

SEQ ID NO: 846610 - DNA, 75 bp, synthetic construct
  source 1..75: mol_type = other DNA
atgatgccagccgccacccaggcgttgccgacgcagccgccggaaggcgcagcggaagaggtgcgggcaggtgat

SEQ ID NO: 846611 - DNA, 75 bp, synthetic construct
  source 1..75: mol_type = other DNA
tttgcagttcttctttgctatctgaaaaatgtcggttttgctcctgataagaaaacgcccccctctgatgcattg

SEQ ID NO: 846612 - DNA, 75 bp, synthetic construct
  source 1..75: mol_type = other DNA
atggcaaggaggcagattctttcgcagtcggaaaaagaatcattactggcattaccagacgatgagttaacacta

SEQ ID NO: 846613 - DNA, 75 bp, synthetic construct
  source 1..75: mol_type = other DNA
tctgagactggcgacctcaataaaacagggaacagtgaccgcttctctgatgctgaaaaaattggccagttatcc

SEQ ID NO: 846614 - DNA, 75 bp, synthetic construct
  source 1..75: mol_type = other DNA
accccggaaggcctcgaccggaaattctacgaaatctgcgccctgtccgagctgaagaacgccctgcgctccggc

SEQ ID NO: 846615 - DNA, 75 bp, synthetic construct
  source 1..75: mol_type = other DNA
tttatccctgaaagctggcgaaaactggtactcacgccttcaggaatcgaccgcaagtactacgagttttgcgta

SEQ ID NO: 846616 - DNA, 75 bp, synthetic construct
  source 1..75: mol_type = other DNA
aacttcagcctgatttatggccggaatatgcatccagagagcaaacccgctgggaacatctgaccgaactttatc

SEQ ID NO: 846617 - DNA, 75 bp, synthetic construct
  source 1..75: mol_type = other DNA
cagccgctcagcgatgcactggatactataagggaaatataccgtaagcagcttcgtaacgttccgcctacagcg

SEQ ID NO: 846618 - DNA, 75 bp, synthetic construct
  source 1..75: mol_type = other DNA
atatgcctcaagagagcaaactcgctgggaacatctgactgaactttatcgctacttgaaattatctccgttcag

SEQ ID NO: 846619 - DNA, 75 bp, synthetic construct
  source 1..75: mol_type = other DNA
tttgctgtattactctgttatctgcgcggacctggatttattccggacaaaagtaatatccctcacagtggcgtc

SEQ ID NO: 846620 - DNA, 75 bp, synthetic construct
  source 1..75: mol_type = other DNA
tcttcatgacaagcggctgtttattcatggaaaggccgaacgctatccggggcttcagtccgtcatatcaacaac

SEQ ID NO: 846621 - DNA, 75 bp, synthetic construct
  source 1..75: mol_type = other DNA
gttccgccatcccttcgccgagcactggggcgacggcaccacctcatcgtcggacggccagaacttccgcaccgg

SEQ ID NO: 846622 - DNA, 75 bp, synthetic construct
  source 1..75: mol_type = other DNA
ctacccgcgccagaacggactggccgtggccctgcgcgagctgggccggatcgagcgcacgctgttcatcctgga

SEQ ID NO: 846623 - DNA, 75 bp, synthetic construct
  source 1..75: mol_type = other DNA
cgctgatgctgcgcaagctcggcagctacccgcgccagaacggactggccgtggccctgcgcgagctgggccgga

SEQ ID NO: 846624 - DNA, 75 bp, synthetic construct
  source 1..75: mol_type = other DNA
ggtagcttgttcagcagggcaaagcgcacacaagccgaacggcttcagaaaacaggaaaactcatccagagcaag

SEQ ID NO: 846625 - DNA, 75 bp, synthetic construct
  source 1..75: mol_type = other DNA
cagtgacagcttctctgatgctgaaaaaattggccagttatccgaaacagaacggccttgctaaggcgttgagag

SEQ ID NO: 846626 - DNA, 75 bp, synthetic construct
  source 1..75: mol_type = other DNA
tacgcggctcaccgccgcgatcaccttgtggaataccgtatatatagaaaacgccattaacctgctgaaaaagaa

SEQ ID NO: 846627 - DNA, 75 bp, synthetic construct
  source 1..75: mol_type = other DNA
aaatacgcaagggatttaatgggcctggtggcgttcacggcttttatcgtgacgtttctgttcaggggctactca

SEQ ID NO: 846628 - DNA, 75 bp, synthetic construct
  source 1..75: mol_type = other DNA
tatgactgtaaatggcgacagcatgtcccctactctagtttccggagatcgactgtttgtcgacatttctgttcg

SEQ ID NO: 846629 - DNA, 75 bp, synthetic construct
  source 1..75: mol_type = other DNA
acgtcttcaaatgcaaggtgacaagctagccgttctttcggataaccctgcctatgagaaatggtacatcgatga

SEQ ID NO: 846630 - DNA, 75 bp, synthetic construct
  source 1..75: mol_type = other DNA
ggttgatgatgacggcaacgtctatctggccggggtaaaagcgggcgaacacatgcgtgtctcatggaatggcga

SEQ ID NO: 846631 - DNA, 75 bp, synthetic construct
  source 1..75: mol_type = other DNA
atcagcgggcagaaagcgatggcggtactgcgcctgagcgacggcagccatccgccgtttggtgcggaagtgaaa

SEQ ID NO: 846632 - DNA, 75 bp, synthetic construct
  source 1..75: mol_type = other DNA
ccacggcagcgtggatggctactacagccgtgacggctcgctggcgaaagtggatttaagcgccaactaccatga

SEQ ID NO: 846633 - DNA, 75 bp, synthetic construct
  source 1..75: mol_type = other DNA
acgttaaacgtctacaaatgcaaggcaacaaactcgccgttctttcggataatccagcctatgagaaatggtaca

SEQ ID NO: 846634 - DNA, 75 bp, synthetic construct
  source 1..75: mol_type = other DNA
ctctgaccggttatcgctacgagtatgacgacagtgctgacaaaggcgtctacatctccttaagtatgccgtggg

SEQ ID NO: 846635 - DNA, 75 bp, synthetic construct
  source 1..75: mol_type = other DNA
actccttatcagcttgccgcaggcttatcttgaatacagcgatgtcgactgggaccctccctcgcgctgggatga

SEQ ID NO: 846636 - DNA, 75 bp, synthetic construct
  source 1..75: mol_type = other DNA
tacgtgctgatttaagccagtccgcgctgctcatcaccttaccgcaggcttatcttgaatacagcgatgtagact

SEQ ID NO: 846637 - DNA, 75 bp, synthetic construct
  source 1..75: mol_type = other DNA
ctgagtatgccgtggggcgacagcagtaccgtcagctataacggcaactacggcagcggctcagactccagccag

SEQ ID NO: 846638 - DNA, 75 bp, synthetic construct
  source 1..75: mol_type = other DNA
gtaaagctgttattgcggacgtcaataactactaccgtaaccaggccactattgacctgactaaactgccagaga

SEQ ID NO: 846639 - DNA, 75 bp, synthetic construct
  source 1..75: mol_type = other DNA
attggctaccgtcaatttgcggtcatcagtgggcaaaaggcgatggctgtcctgcgcatgagtgatggcagttac

SEQ ID NO: 846640 - DNA, 75 bp, synthetic construct
  source 1..75: mol_type = other DNA
tacaggcaaatttaagtcagtcccagcttgaggtgacgatcccccaggcctggctggaatataccgacgcagaat

SEQ ID NO: 846641 - DNA, 75 bp, synthetic construct
  source 1..75: mol_type = other DNA
agtcatatcgtaccccaacggggcgacactatgtgtttaaggatttaaacctcgaaatcccttcaggaaaaagcg

SEQ ID NO: 846642 - DNA, 75 bp, synthetic construct
  source 1..75: mol_type = other DNA
tttttaatggtctcgcatagtctgaattcattaaaagaattttgtgatgtggctattgtgcttaaaaataataat

SEQ ID NO: 846643 - DNA, 75 bp, synthetic construct
  source 1..75: mol_type = other DNA
ggcgattgtgtttaaagacgataatgcggttggtttttatgaggatgttcaggaaggggtggatgagtataaaaa

SEQ ID NO: 846644 - DNA, 75 bp, synthetic construct
  source 1..75: mol_type = other DNA
gggcgtttttctcaaaaagggtatgttgaaccagggaaatacaatttacgtgttcatgtaaataatcacccatta

SEQ ID NO: 846645 - DNA, 75 bp, synthetic construct
  source 1..75: mol_type = other DNA
tcgggaaagcggtggtggcagatgttaatgattactaccgtaaccaggcttatatcgatttgaacaaactaccgg

SEQ ID NO: 846646 - DNA, 75 bp, synthetic construct
  source 1..75: mol_type = other DNA
catccgccatttggggcggaagtgaaaaacgataatcaacaacaagtagggttggttgatgacgaaggtaatgtt

SEQ ID NO: 846647 - DNA, 75 bp, synthetic construct
  source 1..75: mol_type = other DNA
caaccaaattcgcattgatatcaatcaattgcctgaaaatgccgaggcaacgcagtccactgtgcaggccacact

SEQ ID NO: 846648 - DNA, 75 bp, synthetic construct
  source 1..75: mol_type = other DNA
ccgctggtgaagcatcatggggctttgccaatagctggtcgctgtacggcggtgctgtgggtgaagaacattatc

SEQ ID NO: 846649 - DNA, 75 bp, synthetic construct
  source 1..75: mol_type = other DNA
cgaatatcttcgacacctttaactacctcggtgccagcgtacaaaccgatgatcaaatgcttccgccaaacctgc

SEQ ID NO: 846650 - DNA, 75 bp, synthetic construct
  source 1..75: mol_type = other DNA
taaagaaaggcataaagaatctagttttttaatggtttcacatagtttgaattcattgaaagagttttgtgatgt

SEQ ID NO: 846651 - DNA, 75 bp, synthetic construct
  source 1..75: mol_type = other DNA
ccgactatatgcaaaacgcgatgagttaaatgagagggttgattttgttgaagagttttccgaactcggaaaata

SEQ ID NO: 846652 - DNA, 75 bp, synthetic construct
  source 1..75: mol_type = other DNA
agcaggcagtacagcgtcgtctgcctgaggagatactggctccttatcgggaatgtgtcaggttgttttttctgg

SEQ ID NO: 846653 - DNA, 75 bp, synthetic construct
  source 1..75: mol_type = other DNA
actacctcgactccgatatttttgacggttttaactacatcggcggtagcatcagcaccgacgatcaaatgttgc

SEQ ID NO: 846654 - DNA, 75 bp, synthetic construct
  source 1..75: mol_type = other DNA
ctggcatctgctgggtgaaggtacgcacactgttaacggtaaaaccgtgaccgttagcttgcgtgagctgaaaaa

SEQ ID NO: 846655 - DNA, 75 bp, synthetic construct
  source 1..75: mol_type = other DNA
cactgattcagacagacagcaactgatgaactggatgcgatacgtgcaacaggttgagacaactgatacctcggt

SEQ ID NO: 846656 - DNA, 75 bp, synthetic construct
  source 1..75: mol_type = other DNA
caaatcgccgggctgatatttcggggaaatggatgttcaaagatggcgtggtgataaagcgaacttataccgagg

SEQ ID NO: 846657 - DNA, 75 bp, synthetic construct
  source 1..75: mol_type = other DNA
tggactccattcagggtcgtagcccgaacgtggcactgctgccgctgatctcgatcccggaactggaaacctggg

SEQ ID NO: 846658 - DNA, 75 bp, synthetic construct
  source 1..75: mol_type = other DNA
atggcatataccaccttttcacagacgaaaaatgatcagctgaaagaaccgatgttctttggtcagccggttaac

SEQ ID NO: 846659 - DNA, 75 bp, synthetic construct
  source 1..75: mol_type = other DNA
cgcattcgctgaacgtgagctgatggaaggcaacgccaaaattattcgcctgattgcccgtgacgaagccctgca

SEQ ID NO: 846660 - DNA, 75 bp, synthetic construct
  source 1..75: mol_type = other DNA
ccagcgtgcgtttatcaccgactccaaagctgcggaagtgctggtggttgatactcgtgaaggcaatattctggc

SEQ ID NO: 846661 - DNA, 75 bp, synthetic construct
  source 1..75: mol_type = other DNA
ggcaggtaaagtcagtgtgattgacgcgaaaagctataaagtggtgaaaacgttcgatacgccgactcatccaaa

SEQ ID NO: 846662 - DNA, 75 bp, synthetic construct
  source 1..75: mol_type = other DNA
cgaagtacggtaatctgacatggcaaacttttttattcgacgaccgatatttgcatgggtgctggccattattct

SEQ ID NO: 846663 - DNA, 75 bp, synthetic construct
  source 1..75: mol_type = other DNA
gtggttgaagtggcggatattactgctaaccgacgggcggacatttcagggaactggatgtttaaggacggcaaa

SEQ ID NO: 846664 - DNA, 75 bp, synthetic construct
  source 1..75: mol_type = other DNA
gccggttgtaacgataagggagaagagaaagctcacgtcggtgaaccgcaggttaccgttcatattgtgaaaacg

SEQ ID NO: 846665 - DNA, 75 bp, synthetic construct
  source 1..75: mol_type = other DNA
atgaagcctatgtgacacatcgtcaggcaggtaaagtcagtgtgattgacgcgaaaacctacaaggtagtgaaaa

SEQ ID NO: 846666 - DNA, 75 bp, synthetic construct
  source 1..75: mol_type = other DNA
accgtatcgattaccaggcgctgcctgagcacgaaaaacacatctttatcagcaacctgaaatatcagacgctgc

SEQ ID NO: 846667 - DNA, 75 bp, synthetic construct
  source 1..75: mol_type = other DNA
ctgtcggcagcgacacgagctgaaaaggcggcagaccgcgcagaagccgcagcggaagtgactgcagagccctgt

SEQ ID NO: 846668 - DNA, 75 bp, synthetic construct
  source 1..75: mol_type = other DNA
ccgatctttatcaataattacggtatcagtaacacgatgctaatggggcgggtatctcgctgtttggcttgttga

SEQ ID NO: 846669 - DNA, 75 bp, synthetic construct
  source 1..75: mol_type = other DNA
gcgcgggaacgctcgccgggctgttcgttggcacatcgctgtttggctatatctccgataaagtcggacggcgca

SEQ ID NO: 846670 - DNA, 75 bp, synthetic construct
  source 1..75: mol_type = other DNA
tacgggcgcttccctggtgcgttgccatggcaatatctggatgccatatcaatgcctgggccgacgaagatattc

SEQ ID NO: 846671 - DNA, 75 bp, synthetic construct
  source 1..75: mol_type = other DNA
tgcataaagataacgccaccagcaacgtggagctggttatggaaaatggccagagttatcccctgaaaggcacgc

SEQ ID NO: 846672 - DNA, 75 bp, synthetic construct
  source 1..75: mol_type = other DNA
ctgataaacaggggttcaattatgccacggtgacacccacggaaagtatagtgggaacaacaggtggctatactg

SEQ ID NO: 846673 - DNA, 75 bp, synthetic construct
  source 1..75: mol_type = other DNA
cgcattcacctcttacggttctttctggctgacgctggttgcgattctgctgatgccgaaactgggtctgaccga

SEQ ID NO: 846674 - DNA, 75 bp, synthetic construct
  source 1..75: mol_type = other DNA
ctgcacaacgtgggttatttcgctctggacggtattattcttgccatgggcattttctacggcggcatcgcgcaa

SEQ ID NO: 846675 - DNA, 75 bp, synthetic construct
  source 1..75: mol_type = other DNA
ttccgacgagaataaacaaaaattaaccgagtggatgctctatgcgcagaaggtcgaatccacagacacctccag

SEQ ID NO: 846676 - DNA, 75 bp, synthetic construct
  source 1..75: mol_type = other DNA
gataaacaggggttcaattatgccacggtgacacccacggaaagtatagtgggaacaacaggtggctatactgtg

SEQ ID NO: 846677 - DNA, 75 bp, synthetic construct
  source 1..75: mol_type = other DNA
taagcggtaatacatcccttataacagccaaagctgaacaacagggcgagtggacctactatgaggccacttata

SEQ ID NO: 846678 - DNA, 75 bp, synthetic construct
  source 1..75: mol_type = other DNA
attgcactctctttgcatttttattcacagcagtcattcagccgcgaatttaaaaagttattcggctgctctccc

SEQ ID NO: 846679 - DNA, 75 bp, synthetic construct
  source 1..75: mol_type = other DNA
aagtattaccacatcacccgccagtggcaggaacgtggtaataacctgaccgtcagcgcagatctgtataaataa

SEQ ID NO: 846680 - DNA, 75 bp, synthetic construct
  source 1..75: mol_type = other DNA
cggaagtgaacgatgccatcaccaaagcggcaaaagcaaaaggcgcatactcctactacattgttcgccagattg

SEQ ID NO: 846681 - DNA, 75 bp, synthetic construct
  source 1..75: mol_type = other DNA
taataagtgacaaaaagggtaatgtaataactaaactaggtcaaggaatatatgacggtattcgtgggaaatatg

SEQ ID NO: 846682 - DNA, 75 bp, synthetic construct
  source 1..75: mol_type = other DNA
tggtgccgttcgacagcattaagttctcaggtaactacggcaacatgaccgaagtttcctaccaggttgctaaac

SEQ ID NO: 846683 - DNA, 75 bp, synthetic construct
  source 1..75: mol_type = other DNA
cgcatcaccaagttctgaagtcggtcgcttctttgaaacccagtcatcaaaaggcgggcgttacaccgtcacgct

SEQ ID NO: 846684 - DNA, 75 bp, synthetic construct
  source 1..75: mol_type = other DNA
aaggcggacgttacactgtcacgcttcctgacggcactaaagtcgaagaactgaacaaagcgaccgcagcgatga

SEQ ID NO: 846685 - DNA, 75 bp, synthetic construct
  source 1..75: mol_type = other DNA
tcaggtgctggatatgctggaggcgcatagcgacagttccattgttccgttaagcaaaagcacgccggatgtcga

SEQ ID NO: 846686 - DNA, 75 bp, synthetic construct
  source 1..75: mol_type = other DNA
cccgcggaccattcattcctgggatatcgacgggcgagtgctgttgtgcagctcgttcagtaaaagtattgcacc

SEQ ID NO: 846687 - DNA, 75 bp, synthetic construct
  source 1..75: mol_type = other DNA
cagcctgaaaccactctggcgtgagctaagccgggtggtgcagcataatctacaaaccgtgctcggttatgactt

SEQ ID NO: 846688 - DNA, 75 bp, synthetic construct
  source 1..75: mol_type = other DNA
atcacgataagctgccgctggtggtgccgattctgttttatcagggcgaggccacaccttatccgctatcaatgt

SEQ ID NO: 846689 - DNA, 75 bp, synthetic construct
  source 1..75: mol_type = other DNA
ttcgccaagcgtcttttgagtaaagggatgtctcgagacgatgttgcagaaatggcaaatttaccttttgctgag

SEQ ID NO: 846690 - DNA, 75 bp, synthetic construct
  source 1..75: mol_type = other DNA
tacgctgcatcttgagtcggggagttttatcgaagagagcctgaaaggacatagcacggacgtgctctattccgt

SEQ ID NO: 846691 - DNA, 75 bp, synthetic construct
  source 1..75: mol_type = other DNA
gtgccggagacgtttacgccgccggcgcgggtgatgtttgcgtacgaggggtcggttccggctgagggcgaaatg

SEQ ID NO: 846692 - DNA, 75 bp, synthetic construct
  source 1..75: mol_type = other DNA
ctgttgtaatcatctgcttcatatgggcaaagttatctcctgtaagctctaagcatacagctgaactcatgagga

SEQ ID NO: 846693 - DNA, 75 bp, synthetic construct
  source 1..75: mol_type = other DNA
cgtgagctaagccgggtggtgcagcataatctgcaaaccgttctcggttatgacttgttagccggtcagcgagtg

SEQ ID NO: 846694 - DNA, 75 bp, synthetic construct
  source 1..75: mol_type = other DNA
tcagtaaaagcacgccggatgtcgaggcgcccagcctgaaaccgctctggcgggagcttagccgggtggtgcagc

SEQ ID NO: 846695 - DNA, 75 bp, synthetic construct
  source 1..75: mol_type = other DNA
cgccagacaggttattgaatggaaggaaaatgcgcaaatcaagaagctgggcagttggctggctgcccagcagat

SEQ ID NO: 846696 - DNA, 75 bp, synthetic construct
  source 1..75: mol_type = other DNA
agctgccggggactggatcggggcgcgccagacaggttattgaatggaaggaaaatgcgcaaatcaagaagctgg

SEQ ID NO: 846697 - DNA, 75 bp, synthetic construct
  source 1..75: mol_type = other DNA
agaagcatcttatacatgaggcagaatcgataattaaaaagttcaaaggcatgtcatacgacgacatgtcatcag

SEQ ID NO: 846698 - DNA, 75 bp, synthetic construct
  source 1..75: mol_type = other DNA
attgaaagtgctctggacatgatttaccgtagtaaaattaaaaataaaaccattcaaaataatttcagacagata

SEQ ID NO: 846699 - DNA, 75 bp, synthetic construct
  source 1..75: mol_type = other DNA
aagtttaaaagcgcctgggctacccaaaaaaacagaataaaaaacagggttgataaaaagctgcgccccctgaac

SEQ ID NO: 846700 - DNA, 75 bp, synthetic construct
  source 1..75: mol_type = other DNA
atggcgacgcggattgtgattatgaaagacgggattgttcagcaagtaggtgcgccgaaaaccgtttataaccaa

SEQ ID NO: 846701 - DNA, 75 bp, synthetic construct
  source 1..75: mol_type = other DNA
tgacgaacttaacagccgcgtcacctttgcaggctaccgtttctccgaaaagaactttatgactatgagcgagta

SEQ ID NO: 846702 - DNA, 75 bp, synthetic construct
  source 1..75: mol_type = other DNA
attatctcaattccgatattttcgacggctttaactatatcggcagcagcgtcagcaccgatgaccagatgctgc

SEQ ID NO: 846703 - DNA, 75 bp, synthetic construct
  source 1..75: mol_type = other DNA
cgctggcagataaacactatcagtcggcggcgatgggggtggggcgcgacctcgcacagtttggcgcgctggcgt

SEQ ID NO: 846704 - DNA, 75 bp, synthetic construct
  source 1..75: mol_type = other DNA
tgggcgtgaaagtgattaaaatcccaaccgatccagaaacaggcatcagcgttgaagcgctggaactggcgctgg

SEQ ID NO: 846705 - DNA, 75 bp, synthetic construct
  source 1..75: mol_type = other DNA
gtgagaaagcacatcatcaaatatgactatcgagagggagttaaactccctaagcacgagattgagacatggtgc

SEQ ID NO: 846706 - DNA, 75 bp, synthetic construct
  source 1..75: mol_type = other DNA
gacgcgaaaacgtaaaatttgttgcgcggttatatgcaaagcaagaagaactgaaagagaaaattgagtttgtcg

SEQ ID NO: 846707 - DNA, 75 bp, synthetic construct
  source 1..75: mol_type = other DNA
atcgaaatcccttcaggaaaaagcgttgcctttattggtcgtaatggtgcgggtaaatcaacgttactgagaatg

SEQ ID NO: 846708 - DNA, 75 bp, synthetic construct
  source 1..75: mol_type = other DNA
gcgtttcttttgacctgaaggatgcatgggagctgctgaaaagcatcatccatcttgcaatctggatcccttact

SEQ ID NO: 846709 - DNA, 75 bp, synthetic construct
  source 1..75: mol_type = other DNA
ggtaagttatactacttatctgttttttaagaaaaaacgacaacttccacaatactatattgcccttcttctggc

SEQ ID NO: 846710 - DNA, 75 bp, synthetic construct
  source 1..75: mol_type = other DNA
actgttgagcattgagcagggttcatttcaggttccgtgcaagaattgcctggctgcaatcatcaaagcggcgca

SEQ ID NO: 846711 - DNA, 75 bp, synthetic construct
  source 1..75: mol_type = other DNA
ctggcacgctgcatgtccgcattgaagaacaaaacggtcaggtacaggaatatgacgtcagcacggcgtccatgc

SEQ ID NO: 846712 - DNA, 75 bp, synthetic construct
  source 1..75: mol_type = other DNA
tacgagccgactggcagagcgattaccaacatacccgcagtaacgatgacggcgacactgatgatagcggtacgc

SEQ ID NO: 846713 - DNA, 75 bp, synthetic construct
  source 1..75: mol_type = other DNA
gcgttacaaagtgacaatggggcgtccacaaaactgggaccatcaggttgcaggtagcttcttctcgggcggcga

SEQ ID NO: 846714 - DNA, 75 bp, synthetic construct
  source 1..75: mol_type = other DNA
agtcatatcgcacgccaacgggtcgacattatgtgtttaaggatttaaacctcgaaatcccttcaggaaaaagtg

SEQ ID NO: 846715 - DNA, 75 bp, synthetic construct
  source 1..75: mol_type = other DNA
gagacgaaattattcatggatataaacgaagcgataaataagtacgccatagatgaaaacttaagctttgttaaa

SEQ ID NO: 846716 - DNA, 75 bp, synthetic construct
  source 1..75: mol_type = other DNA
tgcgaacgacaccgaccgtgcgcgcacgggtaacgacaaggaaatgtacacggtcacttacaaccagaactttag

SEQ ID NO: 846717 - DNA, 75 bp, synthetic construct
  source 1..75: mol_type = other DNA
cggaaacggctatatctggcataccactggttcaggcaaaacattgacttcgttcaaagcgtccactttgctcaa

SEQ ID NO: 846718 - DNA, 75 bp, synthetic construct
  source 1..75: mol_type = other DNA
ccggcgctcattttgtccgcatggatgattttcttcgctcgtcctctttcggtatttgccggattgctaccgttc

SEQ ID NO: 846719 - DNA, 75 bp, synthetic construct
  source 1..75: mol_type = other DNA
ggaatgatctggacggtggccgagaaagaggataatgaagtgttgaagattggtgttcgggtagcggaggaagaa

SEQ ID NO: 846720 - DNA, 75 bp, synthetic construct
  source 1..75: mol_type = other DNA
gaacgatgcgccagcgccgcgaaaggctgaacctacagcagcgtatcgacttttgcgaacgtaacgcgaggacgt

SEQ ID NO: 846721 - DNA, 75 bp, synthetic construct
  source 1..75: mol_type = other DNA
accaacaatattgggttgttgcgttattgcgtgaactagaagacgaaggtttagtcgagcaggttgaagaaaaag

SEQ ID NO: 846722 - DNA, 75 bp, synthetic construct
  source 1..75: mol_type = other DNA
ccgggacgttatcacgataaactgatgcatatgaaatatgccaccagcagctttaatgtgccgtccacgcaaatg

SEQ ID NO: 846723 - DNA, 75 bp, synthetic construct
  source 1..75: mol_type = other DNA
gtcatggacccgtctggcatttgccggactgaaattttcagattacggttctttcgattacggacgtaattatgg

SEQ ID NO: 846724 - DNA, 75 bp, synthetic construct
  source 1..75: mol_type = other DNA
cgaaggcaagaatcctcccaaacctggtgaaggcgtggccaagcccaaggtcattgaaaccattctcgccaaaca

SEQ ID NO: 846725 - DNA, 75 bp, synthetic construct
  source 1..75: mol_type = other DNA
gaaggtcagcaggccagctaccgaacaaccgacgacctcttccagcgttgcctgcatcaatacaccattactcac

SEQ ID NO: 846726 - DNA, 75 bp, synthetic construct
  source 1..75: mol_type = other DNA
aactcgatctgatcgccaagcttggtgacctcaagtacacctatcgctccgatattcgcgatcgaaccacgctcg

SEQ ID NO: 846727 - DNA, 75 bp, synthetic construct
  source 1..75: mol_type = other DNA
gctgcgtgatatttacccacggctgcttctggcatcatcatcactgctatctgtttaaagtgcctgcgactcgaa

SEQ ID NO: 846728 - DNA, 75 bp, synthetic construct
  source 1..75: mol_type = other DNA
gcatttgtcgatgatattctgcgccgccacattttcgatggcgaacgcctctcggagctgatggccccgctggaa

SEQ ID NO: 846729 - DNA, 75 bp, synthetic construct
  source 1..75: mol_type = other DNA
aacatcctcgacttccgtcagcagcaaaagccggtcgaagaggcgattgcactgttctccggggagaaaatcgac

SEQ ID NO: 846730 - DNA, 75 bp, synthetic construct
  source 1..75: mol_type = other DNA
cgggttcataatggacagcattatggttgtcggtgtttttgtgatgatgctgttatacggaggatatctcacctg

SEQ ID NO: 846731 - DNA, 75 bp, synthetic construct
  source 1..75: mol_type = other DNA
ctgatgccgctcttgcaacacgttacgctgccgagtatttttgtaaaacatggactgctccaggcctgaaccagg

SEQ ID NO: 846732 - DNA, 75 bp, synthetic construct
  source 1..75: mol_type = other DNA
attcgatacgcgatgaagccatcaaagcatttgtggtgctgaatgaaggtgaaacattgagcgaagaggaatttt

SEQ ID NO: 846733 - DNA, 75 bp, synthetic construct
  source 1..75: mol_type = other DNA
agaagatatctcggtcgggaggaaatgagccggtattttacgggcattgcacttgaggtctggcccggaggtgaa

SEQ ID NO: 846734 - DNA, 75 bp, synthetic construct
  source 1..75: mol_type = other DNA
cagtatttacggtattaaaagaacactggcgaaaattttctgtctgtcagttgtaattgaagcaatcaatctggt

SEQ ID NO: 846735 - DNA, 75 bp, synthetic construct
  source 1..75: mol_type = other DNA
tcagtgctctgagtttatcagtagctccgggggaaagtgtggctataactggtgcttccggtgcgggaaaaacca

SEQ ID NO: 846736 - DNA, 75 bp, synthetic construct
  source 1..75: mol_type = other DNA
ggttggttttggctaagccgtattcgcggtacagttcaatttgcagatattggcgctgaaaattggcgtgcagtt

SEQ ID NO: 846737 - DNA, 75 bp, synthetic construct
  source 1..75: mol_type = other DNA
ctttcgggagccaccagaaaaatggcggcgcgttgctgtgaaagatattgatgaattcgttacctgctgtttcac

SEQ ID NO: 846738 - DNA, 75 bp, synthetic construct
  source 1..75: mol_type = other DNA
caccagacaatcttttttttatctattacagcatatttaggaaaagtagatatgctaaatataatttattgctcg

SEQ ID NO: 846739 - DNA, 75 bp, synthetic construct
  source 1..75: mol_type = other DNA
tgcccggttggtttgcttcattaatattatttcttaatactttaataattttttatgttattacatttataaaat

SEQ ID NO: 846740 - DNA, 75 bp, synthetic construct
  source 1..75: mol_type = other DNA
acaattgcgctttgttttataactatgtttttagtaaaaaaaataacatcgtcaactttgtcgctagatatgctc

SEQ ID NO: 846741 - DNA, 75 bp, synthetic construct
  source 1..75: mol_type = other DNA
gagttaaaggaatgtgacggcgaggcagatcatgttcacatgctgattgaatacccaccgttggtgcaactcaca

SEQ ID NO: 846742 - DNA, 75 bp, synthetic construct
  source 1..75: mol_type = other DNA
tcaacgcttctttggtgacttcattctcgaagccagcgccaaatatgctgatgtggcgctgatatatggtctgga

SEQ ID NO: 846743 - DNA, 75 bp, synthetic construct
  source 1..75: mol_type = other DNA
tggtgcgtgggtgcggcgctacgcgatctgcatatgccaaaagagacgcgcattgctgcactgtttcgtgataat

SEQ ID NO: 846744 - DNA, 75 bp, synthetic construct
  source 1..75: mol_type = other DNA
gggatgatctggacggtggccgagaaagaagataatgaagtgttgaagattggtgttcgggtagcggaggaagaa

SEQ ID NO: 846745 - DNA, 75 bp, synthetic construct
  source 1..75: mol_type = other DNA
aaaacgctgtatgtcagtgtgaaacaaaaatccactaaacagcaggaagctatccagccggacgatgtgattcgt

SEQ ID NO: 846746 - DNA, 75 bp, synthetic construct
  source 1..75: mol_type = other DNA
cgcatgacgcattatttaaatcctttctcacgcaccctgacaccgcgcgggattttatggagatccacttaccta

SEQ ID NO: 846747 - DNA, 75 bp, synthetic construct
  source 1..75: mol_type = other DNA
gcgaataatgacaattgcagagcgaattcataatgatggatggctgttgggaagggagagggggaggaaagaagg

SEQ ID NO: 846748 - DNA, 75 bp, synthetic construct
  source 1..75: mol_type = other DNA
tgcggatgatgatattgaagcacgattaatcggatcattatcgccatcaccgttggacggtgtattaagtaaagc

SEQ ID NO: 846749 - DNA, 75 bp, synthetic construct
  source 1..75: mol_type = other DNA
gcagggttgttggaggccgcagatattctgttatgtatgcggcattgcgaagcaagtaatgtgttgcatccctat

SEQ ID NO: 846750 - DNA, 75 bp, synthetic construct
  source 1..75: mol_type = other DNA
aagcagtgacatcccgccgtctgcgaaacgaatttcttgatttgcggggggcatacggaaaagccgtgctctggt

SEQ ID NO: 846751 - DNA, 75 bp, synthetic construct
  source 1..75: mol_type = other DNA
ggcggtattccgttcgataattatccctttgcctatatggtgagtaacctggcgctggcgatcatcctgctcgac

SEQ ID NO: 846752 - DNA, 75 bp, synthetic construct
  source 1..75: mol_type = other DNA
gcagggttgttggaggccgcagacattctgttatgtatgcgtcattgcgaagcaagtaacgtgttgcacccctat

SEQ ID NO: 846753 - DNA, 75 bp, synthetic construct
  source 1..75: mol_type = other DNA
atcgacgctggacattttttatcaggagctgtttctgtcattaaatggcgtgcgtcaggctaccgatcgcctgaa

SEQ ID NO: 846754 - DNA, 75 bp, synthetic construct
  source 1..75: mol_type = other DNA
accctgaacatcaggctgatgatgtactgatacaacatcaggctaataaccggtttcgccctggttcgcatatac

SEQ ID NO: 846755 - DNA, 75 bp, synthetic construct
  source 1..75: mol_type = other DNA
atgcaaattcgtgactacatgacaaagttgtttgacgcatttggtgatgtggaggaagtcacccgagaaatgctt

SEQ ID NO: 846756 - DNA, 75 bp, synthetic construct
  source 1..75: mol_type = other DNA
ctgatacggagctgtacggcattgcacagggggaaggcaccggcacggccacatccggcaccatcacgctttccg

SEQ ID NO: 846757 - DNA, 75 bp, synthetic construct
  source 1..75: mol_type = other DNA
gtgacgccggagatcatgacgctccagctgattgcgctgggggaagaatgggtggatctgggactggtcgaaaat

SEQ ID NO: 846758 - DNA, 75 bp, synthetic construct
  source 1..75: mol_type = other DNA
tcccgaagagatgccgctgtgtcactaccgcctgcaaggctacgttcaggcgctgcgtcgctgcggaattatggt

SEQ ID NO: 846759 - DNA, 75 bp, synthetic construct
  source 1..75: mol_type = other DNA
tcattatggaacggcggcattggccgcgaggggcaacgtgtgcgacccaagaagcggacggggaagttctctact

SEQ ID NO: 846760 - DNA, 75 bp, synthetic construct
  source 1..75: mol_type = other DNA
cgtttcaaccagttcgttcaagagattgaggctgacgacaaggtagaggatcggttgcttcatgcttggtgctgg

SEQ ID NO: 846761 - DNA, 75 bp, synthetic construct
  source 1..75: mol_type = other DNA
gttgaagaacgcactcgtaaactgcagcaatatcgcgaaatgctgatcgctgacggtattgacccgaacgaactg

SEQ ID NO: 846762 - DNA, 75 bp, synthetic construct
  source 1..75: mol_type = other DNA
gacagcctcgatccaggtagttttaccgttaagcgcctggagtcacttctggcgagcgtcagagaggttaaccgc

SEQ ID NO: 846763 - DNA, 75 bp, synthetic construct
  source 1..75: mol_type = other DNA
atgattaactttgattatatcggcgataacaatcgcattccgctggtacagattgaaatcaataattcaatggcc

SEQ ID NO: 846764 - DNA, 75 bp, synthetic construct
  source 1..75: mol_type = other DNA
ataacaatcgcatcccgctggtacagattgaaatcaataactcaatggccgtgaccggcacgccgccacagcgtc

SEQ ID NO: 846765 - DNA, 75 bp, synthetic construct
  source 1..75: mol_type = other DNA
cttgacgtgttatgcacgccggatctggttaaccagtcccgcttcctggcagcacagatccgtttcattttgtga

SEQ ID NO: 846766 - DNA, 75 bp, synthetic construct
  source 1..75: mol_type = other DNA
gaacctgaatctgttacgcactgaattgcaggaacgctggggaccggtcaatcaggctgatggctttgcagtaac

SEQ ID NO: 846767 - DNA, 75 bp, synthetic construct
  source 1..75: mol_type = other DNA
ctgccgcaaccatgaaagacgttgccctgaaagcaaaagtctctacagcgaccgtttcccgagcattgatgaatc

SEQ ID NO: 846768 - DNA, 75 bp, synthetic construct
  source 1..75: mol_type = other DNA
tgggattgggggacaatcagactgtgttcagagttgagttggatggagttatacatgaggcgagtgatgaacatt

SEQ ID NO: 846769 - DNA, 75 bp, synthetic construct
  source 1..75: mol_type = other DNA
aatcgcaaaatccttgggttaagtataggcctttggcagtaggagatttagctagcacctcattcccaaatccct

SEQ ID NO: 846770 - DNA, 75 bp, synthetic construct
  source 1..75: mol_type = other DNA
atagatgtcattcctgtgaactattgtgctgatgcattgttaatgctactggaaagctcgttatctaagggagaa

SEQ ID NO: 846771 - DNA, 75 bp, synthetic construct
  source 1..75: mol_type = other DNA
ctctggcgcacatagccacggaagtagcatcgttattggtgctcccacccatacgctcaataaacaatattctgt

SEQ ID NO: 846772 - DNA, 75 bp, synthetic construct
  source 1..75: mol_type = other DNA
gcagatgaagcaggcatgggataactttaataaaaaaacagaatcaattaactgggaatacgcacaatcccgcca

SEQ ID NO: 846773 - DNA, 75 bp, synthetic construct
  source 1..75: mol_type = other DNA
tcgaaagaatgcattgacgtaattcgtgaagaagtaaagcgatggaatgattcccgcgccgctggcatcaaggag

SEQ ID NO: 846774 - DNA, 75 bp, synthetic construct
  source 1..75: mol_type = other DNA
ataaagcctatatggccatacacaataaaatcgaacagatacttccatatgcgttcagagccggaggcggaatca

SEQ ID NO: 846775 - DNA, 75 bp, synthetic construct
  source 1..75: mol_type = other DNA
ggcgtaacgtcaagcgtaatgaatcccgcaccattctggtgattgtcccggatatctgcgatcccttctttagcg

SEQ ID NO: 846776 - DNA, 75 bp, synthetic construct
  source 1..75: mol_type = other DNA
taatcgggttgaaaaagccgctcgggaagtgggttatttaccacagccaatgggacgtaacgttaagcgtaatga

SEQ ID NO: 846777 - DNA, 75 bp, synthetic construct
  source 1..75: mol_type = other DNA
gactatattaaaacttgtatagaaacgactaaacatctgtcgatcccacaacaaatggtagtggattttaaataa

SEQ ID NO: 846778 - DNA, 75 bp, synthetic construct
  source 1..75: mol_type = other DNA
aatatttttggaccgtgtaatgaacgccttatgttaaaagccgcacgtttgtacggagcgtttagcatgcttaat

SEQ ID NO: 846779 - DNA, 75 bp, synthetic construct
  source 1..75: mol_type = other DNA
cgggtgttgctgaaccgtgttgatacatcaactgcacctgatattgagtggccggaagaaccagacacaatgtaa

SEQ ID NO: 846780 - DNA, 75 bp, synthetic construct
  source 1..75: mol_type = other DNA
tcagtatcagccgcgtatctgcacagtcgcttgaaaccgcgattgctgacgggatgattgacgtactggaggggc

SEQ ID NO: 846781 - DNA, 75 bp, synthetic construct
  source 1..75: mol_type = other DNA
gctaacaggaatatgactgaaggcggtcgcgatttaatgaagagcgtaggtaaagcagaagagaataaatcggac

SEQ ID NO: 846782 - DNA, 75 bp, synthetic construct
  source 1..75: mol_type = other DNA
actgaaggcggtcgcgatctgatgaaaagcgtgggcaaagcagaagagaacaaatcggacagctggtttaattaa

SEQ ID NO: 846783 - DNA, 75 bp, synthetic construct
  source 1..75: mol_type = other DNA
ccatgcggacagcatgaaacatcagaatgacggcattgccctgacgccggaggatttcgggcgattaccggcaat

SEQ ID NO: 846784 - DNA, 75 bp, synthetic construct
  source 1..75: mol_type = other DNA
catctgggcaaaaaacatcatgaagacccggcgaggtggtcacgatatccgcacgctgggctttatgaccgaaag

SEQ ID NO: 846785 - DNA, 75 bp, synthetic construct
  source 1..75: mol_type = other DNA
aaaacaaatcatcgtggatgcagagggaaacgcgaaggaaatcgaactgggcagtccgcgtcgtctggcaaccat

SEQ ID NO: 846786 - DNA, 75 bp, synthetic construct
  source 1..75: mol_type = other DNA
cactgggttggccagggcgcaactatttctgatcgcgttgctgcgctgatcaaagaagtaaacaaagcagcttaa

SEQ ID NO: 846787 - DNA, 75 bp, synthetic construct
  source 1..75: mol_type = other DNA
atggtaactattcgtttagcacgtcacggcgctaaaaagcgtccgttctaccaggttgttgtcgctgacagccgt

SEQ ID NO: 846788 - DNA, 75 bp, synthetic construct
  source 1..75: mol_type = other DNA
tcgtattttcccgccctacaaccggattcattgctccggttgatgcccgctctcattatccagtaagggggcgca

SEQ ID NO: 846789 - DNA, 75 bp, synthetic construct
  source 1..75: mol_type = other DNA
agtgtggacataccttcgtgacccatgagacttttgtgcggtcagtgtgccgcccgcaaaaaatcagcgctgcgc

SEQ ID NO: 846790 - DNA, 75 bp, synthetic construct
  source 1..75: mol_type = other DNA
tgaaacttttgttcgttcgattgctacgccaaaagagtcaaatccggttcagccgcatccaatggaatcaggaca

SEQ ID NO: 846791 - DNA, 75 bp, synthetic construct
  source 1..75: mol_type = other DNA
tgaaacttttgttcgttcgattgcaacgccaaaagagtcaaatccggttcaaccgcatcctcataaatttaaaca

SEQ ID NO: 846792 - DNA, 75 bp, synthetic construct
  source 1..75: mol_type = other DNA
aaagtcagctatggggcatcgtatatgcacacccgcgaagtggatgctggtacagataaggcctcgggagaattg

SEQ ID NO: 846793 - DNA, 75 bp, synthetic construct
  source 1..75: mol_type = other DNA
ataccagctaacgaaacaatttaacatcaaatggctttatacagaggatggggaaaactggtatgaggaacaaaa

SEQ ID NO: 846794 - DNA, 75 bp, synthetic construct
  source 1..75: mol_type = other DNA
agactgaattaccaggccgcaccaatgcttaccgtatagccgaagttcgcccacaggttagcgggatcgtactga

SEQ ID NO: 846795 - DNA, 75 bp, synthetic construct
  source 1..75: mol_type = other DNA
tgacgatccgttctggaatacacactacccgcccaatggctggaactgccgctgccgtgtccggccattgtctca

SEQ ID NO: 846796 - DNA, 75 bp, synthetic construct
  source 1..75: mol_type = other DNA
caggtaatccaaaaacaaaagagcaatatcagctagcaaagaattttgatgttatctggttatggtcagaagatg

SEQ ID NO: 846797 - DNA, 75 bp, synthetic construct
  source 1..75: mol_type = other DNA
ctgaaatctggcgatcaagtcattgtcagcggcctgcaaaaagcgcgtccgggagagcaggttaaagccactacc

SEQ ID NO: 846798 - DNA, 75 bp, synthetic construct
  source 1..75: mol_type = other DNA
cagtgattcagataagcaacaactgatgcgctggatgcggtacgtgcaacaagttgagaccactgataccactga

SEQ ID NO: 846799 - DNA, 75 bp, synthetic construct
  source 1..75: mol_type = other DNA
aatgggtgctggggatgcaggatttgctgcaccgtgtgcacggcggcaatattaccaaatgggtgctaatgggcg

SEQ ID NO: 846800 - DNA, 75 bp, synthetic construct
  source 1..75: mol_type = other DNA
cgtctctgatggcagaaccacaggcggtattgtgggacagaaaaaatcaccagctgctgtacgttgtggcaaccc

SEQ ID NO: 846801 - DNA, 75 bp, synthetic construct
  source 1..75: mol_type = other DNA
gtcgctgccgcgttcgtgcgatatctgcgacccgaatgaaagaactgggattacaggtcagctatggtgcttcat

SEQ ID NO: 846802 - DNA, 75 bp, synthetic construct
  source 1..75: mol_type = other DNA
gctggcaaggccaaaagcggtactgtgggacaaacgccacaacaatctgatgtatatcgtggaaagtaaggatag

SEQ ID NO: 846803 - DNA, 75 bp, synthetic construct
  source 1..75: mol_type = other DNA
agagaaatgccggtgaccacatattcagatggcaccagaaccatgacaccggatgtgggctggtcatataacccc

SEQ ID NO: 846804 - DNA, 75 bp, synthetic construct
  source 1..75: mol_type = other DNA
ccgcaggccgcgcgcctgcgacgcagacaactgattcgccaacttcttgagcgcgataaaaccccgttagccatt

SEQ ID NO: 846805 - DNA, 75 bp, synthetic construct
  source 1..75: mol_type = other DNA
atgaatattaatgaaatgttgaaagctctttctccgaaacgtgaatctctgaccatcggtggatttactttctat

SEQ ID NO: 846806 - DNA, 75 bp, synthetic construct
  source 1..75: mol_type = other DNA
atgaaatggtttaccccggagcacgtcatctcggtatttaaaaaaggtgagcttacacgccatcaagtagtaatg

SEQ ID NO: 846807 - DNA, 75 bp, synthetic construct
  source 1..75: mol_type = other DNA
atgacaggtaagaagcgttctgccagctccagccgctggcttcaggaacactttagcgataaatatgttcaacag

SEQ ID NO: 846808 - DNA, 75 bp, synthetic construct
  source 1..75: mol_type = other DNA
ttgttttatggtgtgctgagagacagggaaacgggaggggagtctatgatgacgctggcgcagtggtttgaagag

SEQ ID NO: 846809 - DNA, 75 bp, synthetic construct
  source 1..75: mol_type = other DNA
tccgcacggtattatccgtttgatggtgatcggatctgctatgatggggaaagtattcctgaatcagaaatctgg

SEQ ID NO: 846810 - DNA, 75 bp, synthetic construct
  source 1..75: mol_type = other DNA
aaggaaggatgggattccgacctgaaaagcccaaatacttcgggagctatgcctccctttattttttatatgtat

SEQ ID NO: 846811 - DNA, 75 bp, synthetic construct
  source 1..75: mol_type = other DNA
tagtggaagcctggaaacgtggtgagatcaaccgctttaaagtaaggatgtatagaaacaccgctcgccgttgtg

SEQ ID NO: 846812 - DNA, 75 bp, synthetic construct
  source 1..75: mol_type = other DNA
ggtcgttgatggcgagaatatcaaactgaaaaccgccatccagaacaccggtaaaatgagtaccggtttagcgct

SEQ ID NO: 846813 - DNA, 75 bp, synthetic construct
  source 1..75: mol_type = other DNA
atgacggttaaaatttctggtgtgctgaaggacggggccggtaagccggtaccgggatgcacgatagagctgaaa

SEQ ID NO: 846814 - DNA, 75 bp, synthetic construct
  source 1..75: mol_type = other DNA
gcactgttttaggcgtggcgctgtttcgcggcgtaccggttggcccgcttattgccgcgggtctggtttcgctga

SEQ ID NO: 846815 - DNA, 75 bp, synthetic construct
  source 1..75: mol_type = other DNA
acaccatgaggtgattactttcccgtcactggatggagcacaaccaacgattcccggcatgaatatagtccctga

SEQ ID NO: 846816 - DNA, 75 bp, synthetic construct
  source 1..75: mol_type = other DNA
atgaaatggtttacacctgagcacgttatccaggcatttaaaaaaggtgagcttacacgccaccaagtagtaatt

SEQ ID NO: 846817 - DNA, 75 bp, synthetic construct
  source 1..75: mol_type = other DNA
ttctgagtaaagggatgtctcgggaagacgttgcagagatggcaaatttacctcttgctgaggttgataagctga

SEQ ID NO: 846818 - DNA, 75 bp, synthetic construct
  source 1..75: mol_type = other DNA
ctcctcgtatttatgcggcagacgctatatttgaccagctcgaaagtaactttaatcttgctaatcctaacgcaa

SEQ ID NO: 846819 - DNA, 75 bp, synthetic construct
  source 1..75: mol_type = other DNA
caactattattgcatcaatgattgccaatactatgagttgggctttttatatctctctcataaatatggtaatga

SEQ ID NO: 846820 - DNA, 75 bp, synthetic construct
  source 1..75: mol_type = other DNA
ttaagatggccacaccgctttacaaaggtgatacaggatacttaacctggaaaacaaaccttgaaggctatttct

SEQ ID NO: 846821 - DNA, 75 bp, synthetic construct
  source 1..75: mol_type = other DNA
gccgattttgttttatcagggcgaggccacgcctggtaatgactccaacttattgatagtgttttatgttcagat

SEQ ID NO: 846822 - DNA, 75 bp, synthetic construct
  source 1..75: mol_type = other DNA
aggtaagacaagaggtaatacaggaagtaacacaggaagtaagtcaggaattcgcccagcgtcttctgagtaaag

SEQ ID NO: 846823 - DNA, 75 bp, synthetic construct
  source 1..75: mol_type = other DNA
agctacgcgaactgtgtgacctcgacacgctgcatcttgagtcggggagttttattgaggaaagcctgaaagggc

SEQ ID NO: 846824 - DNA, 75 bp, synthetic construct
  source 1..75: mol_type = other DNA
gtacgaacaaaagtggacctgtgatgaaggaatcacaaggactgtgacagtaacaaacgaagcaaacacctgcgt

SEQ ID NO: 846825 - DNA, 75 bp, synthetic construct
  source 1..75: mol_type = other DNA
tctatgatgacgctggcgcagtggtttgaagagaggggaagacaggaggaaaggcaggaggtaagacaggaggta

SEQ ID NO: 846826 - DNA, 75 bp, synthetic construct
  source 1..75: mol_type = other DNA
gccatgcaccggcatctggaggcggatcacgataagctgccgctggtggtgccgattctgttttatcagggcgag

SEQ ID NO: 846827 - DNA, 75 bp, synthetic construct
  source 1..75: mol_type = other DNA
acaaagcgactcccggaaagtgtgcttaagatggccacaccgctttacaaaggtgatacaggatacttaacctgg

SEQ ID NO: 846828 - DNA, 75 bp, synthetic construct
  source 1..75: mol_type = other DNA
gccgaactcaaatgaaagtgttatgagtaatgcggtgtccgacgggaaatcgatcggtaaggctgtacaattacc

SEQ ID NO: 846829 - DNA, 75 bp, synthetic construct
  source 1..75: mol_type = other DNA
ggaaaaaatttcagccaagctgacaacctggactggtggtgagtcaggtacgtgggcatcgatgacgaacgctgt

SEQ ID NO: 846830 - DNA, 75 bp, synthetic construct
  source 1..75: mol_type = other DNA
agggtggatggcatcaagcaataaggggaaaaacatctatttcacatattgcggaggaatgacgtttgaatcgcc

SEQ ID NO: 846831 - DNA, 75 bp, synthetic construct
  source 1..75: mol_type = other DNA
agctttgatatcagcatcagcctgatgctgaccgagcgcacgctggtcagtgaggtggacggtgcgctgcatgtg

SEQ ID NO: 846832 - DNA, 75 bp, synthetic construct
  source 1..75: mol_type = other DNA
atgctcaaacccgacagcctgcgcagggcactgactgatgccgtcacggtgctgaaaaccagccccgagatgctg

SEQ ID NO: 846833 - DNA, 75 bp, synthetic construct
  source 1..75: mol_type = other DNA
ggctcaccgagcgcacgctcgtcaaagaggtcgacggcgcgctgcatgtcagctatgcccctgagccgccgctgc

SEQ ID NO: 846834 - DNA, 75 bp, synthetic construct
  source 1..75: mol_type = other DNA
gtgaaagtgaaagacagcctgaaagacagctttgacgattctaacgccaacctgtttaagctcggtgcggagaac

SEQ ID NO: 846835 - DNA, 75 bp, synthetic construct
  source 1..75: mol_type = other DNA
ctaaaggcgcgtctccgctgtctgctggtgatgtgactaacgacctgagccacgtgcgtaaaatcatcgttgcct

SEQ ID NO: 846836 - DNA, 75 bp, synthetic construct
  source 1..75: mol_type = other DNA
cggtggtaagctggtaggcggcgaacgtggcggcgtagtcggtgccatcactaccatgggcgttatcgtcggcgc

SEQ ID NO: 846837 - DNA, 75 bp, synthetic construct
  source 1..75: mol_type = other DNA
ggcggtggtcaccatcatgatcaactccggcgcgtacattgcggaaatcacgcgtggcgcagtgctgtcaatcca

SEQ ID NO: 846838 - DNA, 75 bp, synthetic construct
  source 1..75: mol_type = other DNA
cttgagatctggagcgccgtggcggtgttctatctgattattaccctggtgctgagctttattctgcgtcgtctg

SEQ ID NO: 846839 - DNA, 75 bp, synthetic construct
  source 1..75: mol_type = other DNA
tggttgccacgggggccagctccatgtcatgggagtaccgctatacactgaacgtggtgatagaggatttcagcg

SEQ ID NO: 846840 - DNA, 75 bp, synthetic construct
  source 1..75: mol_type = other DNA
cgttacgggaaaagctattcacctttgatgtggatattttgcgcaacgatgtctgtgatatcagtcttaacctgc

SEQ ID NO: 846841 - DNA, 75 bp, synthetic construct
  source 1..75: mol_type = other DNA
ttgttgattatctggtcacactgcatcaaaacggtggcaaccaacagggcttcggtgggaaggcattgaaacgtt

SEQ ID NO: 846842 - DNA, 75 bp, synthetic construct
  source 1..75: mol_type = other DNA
ggcctgccattccgcttctgattgaaggtgccaaaatgaccctgtggatttcggtcctcggtctggctggcggtc

SEQ ID NO: 846843 - DNA, 75 bp, synthetic construct
  source 1..75: mol_type = other DNA
ttggtcgtggtagcgctaaacagtctgcgggcggtgcggcaatcatccacttcctgggtggtatccacgaaatct

SEQ ID NO: 846844 - DNA, 75 bp, synthetic construct
  source 1..75: mol_type = other DNA
tcatggtgggacagatattcgataaagcacgatatcccctgctggcaaaagcctatccggatggtcgtatcccgg

SEQ ID NO: 846845 - DNA, 75 bp, synthetic construct
  source 1..75: mol_type = other DNA
tgagctgggactttatgacgatgaaggaacactcatcgccgttgccaatatggcagaaagctacaaacccagaat

SEQ ID NO: 846846 - DNA, 75 bp, synthetic construct
  source 1..75: mol_type = other DNA
tttgattcgggctatctggtcgcaaagtccggcaatcagttttttgtcacaaagggggcgggatatgtcgccgga

SEQ ID NO: 846847 - DNA, 75 bp, synthetic construct
  source 1..75: mol_type = other DNA
gtctgtggttctggcaacccgcaaatatgtggatgataaaatatcagagcacgagcagtcacgacgtcacccgga

SEQ ID NO: 846848 - DNA, 75 bp, synthetic construct
  source 1..75: mol_type = other DNA
gacgggttggaggtcaggggggtcattacgcacattgttaccgatgcaagaacaggggagtttcatgaaatgcct

SEQ ID NO: 846849 - DNA, 75 bp, synthetic construct
  source 1..75: mol_type = other DNA
ttgtcacaggaacaggacggcatcaaatcgcacacccacggagggagcgtctcaaatactgaccttggcacaaaa

SEQ ID NO: 846850 - DNA, 75 bp, synthetic construct
  source 1..75: mol_type = other DNA
ctggatgagtttatttttgcaaacgtcccggacctcaacccggaaacaccggtatcccccgacgaaaccctgccg

SEQ ID NO: 846851 - DNA, 75 bp, synthetic construct
  source 1..75: mol_type = other DNA
gatgtggacctcgtcatcactcaccgtgacctgaccgaacgcgctatgcgccaggttccgcaggcacagcatatt

SEQ ID NO: 846852 - DNA, 75 bp, synthetic construct
  source 1..75: mol_type = other DNA
tgacaccaaaaggtgcttacttcgctaacatcgcgggtgtgtgtgcggcgatggctgtctccttcgttgtctctg

SEQ ID NO: 846853 - DNA, 75 bp, synthetic construct
  source 1..75: mol_type = other DNA
agtgtctcaaatactgaccttggcacgaaaacgacctcatcatttgactacggaaccaaaacaacctctacaaac

SEQ ID NO: 846854 - DNA, 75 bp, synthetic construct
  source 1..75: mol_type = other DNA
cacacgatcgcactgggttcacatggtcacggcctgaccattaaccccaccggtaatgccgaaaacaccgttaaa

SEQ ID NO: 846855 - DNA, 75 bp, synthetic construct
  source 1..75: mol_type = other DNA
ttcacggcacgcctggcatccatggacgaacgccagcgccgcgaaaacgtcgatatctacgggaaggcaactttt

SEQ ID NO: 846856 - DNA, 75 bp, synthetic construct
  source 1..75: mol_type = other DNA
ggaggtaatgaatcaaacgcttaataaagaatttaacggcgttgatttattttctgttggcgtggacccctgcgc

SEQ ID NO: 846857 - DNA, 75 bp, synthetic construct
  source 1..75: mol_type = other DNA
ccgctggcctgcggaatatctgccggggattttcaacgcttctctggtggatgaggtgctggatattcatcagcg

SEQ ID NO: 846858 - DNA, 75 bp, synthetic construct
  source 1..75: mol_type = other DNA
tttgtctccagcatgggaacaaccggcactatcaccggcgtttcacgctttatgcgcgaacaatccaaaccggtg

SEQ ID NO: 846859 - DNA, 75 bp, synthetic construct
  source 1..75: mol_type = other DNA
aactgattcttgtcaccaaagagcagggtatggaaggcgcgcgcgatctggcgctggagatggccaatcgtggtg

SEQ ID NO: 846860 - DNA, 75 bp, synthetic construct
  source 1..75: mol_type = other DNA
agagtgttaatcctctgggcatgggctactcatccgataatggaaaaatcacagagcaagtaatagtcagtggag

SEQ ID NO: 846861 - DNA, 75 bp, synthetic construct
  source 1..75: mol_type = other DNA
atgaaaacttttatcaaaactttactcgttgctgtaactgttctgttttctgtcttcgctactgcgaaacaaata

SEQ ID NO: 846862 - DNA, 75 bp, synthetic construct
  source 1..75: mol_type = other DNA
ttatcgataattataatgatttgcttctaactcatgaagtccttaaacgcaacatggaagagttagaacacggta

SEQ ID NO: 846863 - DNA, 75 bp, synthetic construct
  source 1..75: mol_type = other DNA
atatggagccgcgcgcgacgcaccatatcgccgaaattattgaactcactgaacaactgatcgccaaaggtcacg

SEQ ID NO: 846864 - DNA, 75 bp, synthetic construct
  source 1..75: mol_type = other DNA
taaggctaatggctgataactcagaaacaattgaagattttattcagtcggtggagtttaacgagcctcgaatga

SEQ ID NO: 846865 - DNA, 75 bp, synthetic construct
  source 1..75: mol_type = other DNA
aacaaacacagtatttccccagagcaatttttgaaaggtgctgtgacaatcctgtatagtgataatattttggtt

SEQ ID NO: 846866 - DNA, 75 bp, synthetic construct
  source 1..75: mol_type = other DNA
ctggcaatgattgccgcgcttaaaggctatcgcatgaaattgctgatgcccgacaacatgagccaggaacgccgt

SEQ ID NO: 846867 - DNA, 75 bp, synthetic construct
  source 1..75: mol_type = other DNA
cgaactggcagtgcgggaaggaatattctgtggcgtcagctccggcggcgcggttgccggagcactgcgggtggc

SEQ ID NO: 846868 - DNA, 75 bp, synthetic construct
  source 1..75: mol_type = other DNA
acatatggcgtgctgtcgcgtcaggatctcgatcagctgcaggcaggcgcgcgcgttgacgtggtcgatgacaaa

SEQ ID NO: 846869 - DNA, 75 bp, synthetic construct
  source 1..75: mol_type = other DNA
tcctcgagacacaatgcccatccttcgtcgttatcacctatggcctgatggatggaatattcgtgggctcaatgg

SEQ ID NO: 846870 - DNA, 75 bp, synthetic construct
  source 1..75: mol_type = other DNA
cagataaaaaaccacttcaggtataaagatatcgactatgtctttgtccttgaacgaggcggtgcctggtgttac

SEQ ID NO: 846871 - DNA, 75 bp, synthetic construct
  source 1..75: mol_type = other DNA
ggatgaggaaattaaaaatcttataggctgcatcagaagcgcctcagaatacattaaagatgatactgataacga

SEQ ID NO: 846872 - DNA, 75 bp, synthetic construct
  source 1..75: mol_type = other DNA
atgattaagttaattggctttgtcctgctggttggcacctgtggaaatgatgcctgtgatgccattccggtaaca

SEQ ID NO: 846873 - DNA, 75 bp, synthetic construct
  source 1..75: mol_type = other DNA
gtgaaagcactgaaagccaaaccggttgaaaaagccgcgccagcccccgctgccgctgccccaaaaacggctcca

SEQ ID NO: 846874 - DNA, 75 bp, synthetic construct
  source 1..75: mol_type = other DNA
aagagcattatgaagtgatcgcaggcgttaacattccaatgctggtggaaacgttaatggctcgtgatgatgacc

SEQ ID NO: 846875 - DNA, 75 bp, synthetic construct
  source 1..75: mol_type = other DNA
atgaaaacttttatcaaaactttactcgttgctgtaactattctgttttctgtcttcgctactgcgaaacaagta

SEQ ID NO: 846876 - DNA, 75 bp, synthetic construct
  source 1..75: mol_type = other DNA
aaaataaaaaagaacaaaacacatggcaggatctgtccacaaaagaacaaaaattacagcttattaaagcattga

SEQ ID NO: 846877 - DNA, 75 bp, synthetic construct
  source 1..75: mol_type = other DNA
ctgtagacaatataattaacatctatcctgatctacataaaaaaaatgacaatgatctgagtatgtccataaaag

SEQ ID NO: 846878 - DNA, 75 bp, synthetic construct
  source 1..75: mol_type = other DNA
ttaatgatgtcacgcccgcagatgaaagtacctggtgtataggaaaaggccggtgtgttgatgacttcctgttca

SEQ ID NO: 846879 - DNA, 75 bp, synthetic construct
  source 1..75: mol_type = other DNA
tgcctgtgatgccattccggtaacagaaaaaatctggcccacagagcaggcatgtatgcaggtgatggagcgcat

SEQ ID NO: 846880 - DNA, 75 bp, synthetic construct
  source 1..75: mol_type = other DNA
cgtgcaaaaacgttatcccaatgagattttttattgcgaagaggtattaagaaatgaaaatacagagcattactg

SEQ ID NO: 846881 - DNA, 75 bp, synthetic construct
  source 1..75: mol_type = other DNA
tctggaaaactctgtttcttcatgctttttgactgagcaaagtattaataaattacttagtgaggcagaaaaagg

SEQ ID NO: 846882 - DNA, 75 bp, synthetic construct
  source 1..75: mol_type = other DNA
agggactggaaaaatcccccattcaaccatccacgttacatgcccgtcttaaagccaaaggaatagttaaaggtg

SEQ ID NO: 846883 - DNA, 75 bp, synthetic construct
  source 1..75: mol_type = other DNA
aaagccaaaggaatagttaaaggtggcattagtaccctcacctctcgaaaaattatcatcaataattacaggctt

SEQ ID NO: 846884 - DNA, 75 bp, synthetic construct
  source 1..75: mol_type = other DNA
ctggaaggctcgaaagcgtttaccaaggatttcctggcccgccataagatccctacggcggaataccagaacttc

SEQ ID NO: 846885 - DNA, 75 bp, synthetic construct
  source 1..75: mol_type = other DNA
caaacgcaaggtttaactccgcgacaaatcatgatggtctttatggtacagggtgccagcgccggaattattggt

SEQ ID NO: 846886 - DNA, 75 bp, synthetic construct
  source 1..75: mol_type = other DNA
aaactgacctcgagccggggaaatataatgtcatcctcggcgaacaacttgcctcacagctaggcgttaatcgcg

SEQ ID NO: 846887 - DNA, 75 bp, synthetic construct
  source 1..75: mol_type = other DNA
ttgagtatatcgacaacgcaaccccaatcaaagttgaggacatgcttgcagtcgatctcattcgagaacttgctg

SEQ ID NO: 846888 - DNA, 75 bp, synthetic construct
  source 1..75: mol_type = other DNA
cgtaggcgataaagataccgggccaaacaccggcgggatgggcgcttactcccctgcgccagtagtgaccgatga

SEQ ID NO: 846889 - DNA, 75 bp, synthetic construct
  source 1..75: mol_type = other DNA
cccctgcgccagtggtgaccgatgaagttcatcagcgcacgatggaacgtatcatctggccaaccgtgaaaggca

SEQ ID NO: 846890 - DNA, 75 bp, synthetic construct
  source 1..75: mol_type = other DNA
accgatatcccggcgctgctggatttcgcacaaaacgaaaaggtagatctaaccatcgttggcccggaagcgccg

SEQ ID NO: 846891 - DNA, 75 bp, synthetic construct
  source 1..75: mol_type = other DNA
tccgcgccgccgggctgaaaatcttcggcccaaccgcaggtgccgcgcaacttgaaggttcgaaagcgtttacca

SEQ ID NO: 846892 - DNA, 75 bp, synthetic construct
  source 1..75: mol_type = other DNA
atccacggtctgccgctggaagaagtggctgacggtaaggttttccacgcgggcaccaaactcggcgatgacgac

SEQ ID NO: 846893 - DNA, 75 bp, synthetic construct
  source 1..75: mol_type = other DNA
gtcgacggcgagcacgtgctgccaatggcaaccagccaggaccacaaacgcgtgggcaatggcgataccggcccg

SEQ ID NO: 846894 - DNA, 75 bp, synthetic construct
  source 1..75: mol_type = other DNA
tccttggcctgatgccacaggcaattctctcttcggagcatggctcccttaacccgcaacaactcccggagactg

SEQ ID NO: 846895 - DNA, 75 bp, synthetic construct
  source 1..75: mol_type = other DNA
ggcttaggtattccggcaataacccggagtaaaaacattgctgacagttggttatcgaatggctggtatgttcag

SEQ ID NO: 846896 - DNA, 75 bp, synthetic construct
  source 1..75: mol_type = other DNA
tcactggagcagaatgcactatcgggcaactatccggtaactccggatagttggataagctgtagtgagcgaatg

SEQ ID NO: 846897 - DNA, 75 bp, synthetic construct
  source 1..75: mol_type = other DNA
tggcatcgctggaagcagagccggtggcaaagattatagctcattacccattaggagttgacgtaggcaaacaaa

SEQ ID NO: 846898 - DNA, 75 bp, synthetic construct
  source 1..75: mol_type = other DNA
cgcggtcgatgctgttgccgctattgcagaggtgagaggctggaatgcctgccgtgctgccatgcttcatggtag

SEQ ID NO: 846899 - DNA, 75 bp, synthetic construct
  source 1..75: mol_type = other DNA
atggcaaaacggtgggggttgcgcagtacatcaaggggcaatgggacaacggcgaatacaaccttctccagccgc

SEQ ID NO: 846900 - DNA, 75 bp, synthetic construct
  source 1..75: mol_type = other DNA
tgatgggtggataattcctggtgcgtcgtggaaaccgtcacactggatgccgctaccagaaccgccgcaggaggt

SEQ ID NO: 846901 - DNA, 75 bp, synthetic construct
  source 1..75: mol_type = other DNA
tgcctgaaggcagcaaatggcaggactggcgtgaccgtaaaggcgagctgttccaggccgtacgcatggaaaaaa

SEQ ID NO: 846902 - DNA, 75 bp, synthetic construct
  source 1..75: mol_type = other DNA
taatgtcatcctcggtgaacagcttgcctcacagttgggcgtcaatcgcggtgatcaaatccgcgtgatggtgcc

SEQ ID NO: 846903 - DNA, 75 bp, synthetic construct
  source 1..75: mol_type = other DNA
aagccgacctcgaaccggggaaatataatgtcatcctcggtgaacaacttgcctcacagttaggcgtcaatcgcg

SEQ ID NO: 846904 - DNA, 75 bp, synthetic construct
  source 1..75: mol_type = other DNA
gctgcatacgctacaggctggaacgattgccgcgaagccatgcttcagtccggaaactttcgggaaaataaagat

SEQ ID NO: 846905 - DNA, 75 bp, synthetic construct
  source 1..75: mol_type = other DNA
caggaaaggtgactggcgaatgaaatgggcgacttacatcccggggcatcctgacgctaatgatgggtggataat

SEQ ID NO: 846906 - DNA, 75 bp, synthetic construct
  source 1..75: mol_type = other DNA
ttgcctggagagacatcgtcttatgttgcaccgtatcggtatacttccggtagttcaaaaagttgttctggagct

SEQ ID NO: 846907 - DNA, 75 bp, synthetic construct
  source 1..75: mol_type = other DNA
ccctacggcggaataccagaacttcaccgaagtagaacctgcattagcgtatctgcgtgagaaaggcgcaccgat

SEQ ID NO: 846908 - DNA, 75 bp, synthetic construct
  source 1..75: mol_type = other DNA
gaatgcatcatcaagtgccagtagtgcagcttcctcggcaacggcggcaggaaattccgcgaaggcggcaaaaac

SEQ ID NO: 846909 - DNA, 75 bp, synthetic construct
  source 1..75: mol_type = other DNA
cctctgcgggggatgttggtgcatataccaaagcggaatgtaactcaaagtttattacaggtattcgtctgggcg

SEQ ID NO: 846910 - DNA, 75 bp, synthetic construct
  source 1..75: mol_type = other DNA
agggattgttcagctcagtagcgccacgaacagcacgtctgaaacattggcagcgacaccaaaagctgttaaggc

SEQ ID NO: 846911 - DNA, 75 bp, synthetic construct
  source 1..75: mol_type = other DNA
tgctttagggcaaacaggaagcagggttgcaaatgataaagctgttggctggaactggaatagcggtgtttatga

SEQ ID NO: 846912 - DNA, 75 bp, synthetic construct
  source 1..75: mol_type = other DNA
atttatttcgtggctggagagtcagggagcatttaaccatccttactggatgtgcaaaggctcatgggcttatgc

SEQ ID NO: 846913 - DNA, 75 bp, synthetic construct
  source 1..75: mol_type = other DNA
gaaacagcagcgggacagagcgcctcagctgcggcaggttcaaaaacagcggctgcgtcgtctgccagtgccgcg

SEQ ID NO: 846914 - DNA, 75 bp, synthetic construct
  source 1..75: mol_type = other DNA
aaaaacagcaagaaatattaatggcgttaaatttgatggttccagtgatataaatattaatacgttagtatcccg

SEQ ID NO: 846915 - DNA, 75 bp, synthetic construct
  source 1..75: mol_type = other DNA
aaaaggccttgtccagctcagtagtgccaccaacagcacgtctgaaacgctcgccgcaacaccaaaagccgttaa

SEQ ID NO: 846916 - DNA, 75 bp, synthetic construct
  source 1..75: mol_type = other DNA
tctggcgcattacagaaaaaccagaacggcgcagatattccaggaaaagataccttcaccaaaaatattggggcc

SEQ ID NO: 846917 - DNA, 75 bp, synthetic construct
  source 1..75: mol_type = other DNA
gggctgcccgagggaaaaaatcgccgtatcgcgcatgggcgtagatatgacgcgctttagcccgcgtcccgtgaa

SEQ ID NO: 846918 - DNA, 75 bp, synthetic construct
  source 1..75: mol_type = other DNA
aaagaacgaagccagttatcagctgagcctgttcgattcccttctgccatcacaggtcttgtctcactatccgct

SEQ ID NO: 846919 - DNA, 75 bp, synthetic construct
  source 1..75: mol_type = other DNA
aaagttataagccagctcttgccgaaggctcagggcgttcgcagacctgccgtatggtcatcatcgtcagcagtg

SEQ ID NO: 846920 - DNA, 75 bp, synthetic construct
  source 1..75: mol_type = other DNA
atgaattaattgatacaactcaggcaaggccaattcagtattgcattaatggaacgtggtataacgcggggagta

SEQ ID NO: 846921 - DNA, 75 bp, synthetic construct
  source 1..75: mol_type = other DNA
taacgggaaatacactgcacaggatgccaccacagcgcgaaaagggcttgtccagctcagtagcgccaccaacag

SEQ ID NO: 846922 - DNA, 75 bp, synthetic construct
  source 1..75: mol_type = other DNA
cagcgcgaaaaggccttgtccagctcagtagcgccaccaacagtgattctgaaacgcttgcagcaacgccaaagg

SEQ ID NO: 846923 - DNA, 75 bp, synthetic construct
  source 1..75: mol_type = other DNA
caccacaacggtgatggcgacgcaggattacgttgatgacaaaattgcagagcacgaacagtcacgacgtcaccc

SEQ ID NO: 846924 - DNA, 75 bp, synthetic construct
  source 1..75: mol_type = other DNA
caaaaaatattggtgcatgtcgcgcttttcacagtgctattagtacaggggcagggaactggacaacggcacaat

SEQ ID NO: 846925 - DNA, 75 bp, synthetic construct
  source 1..75: mol_type = other DNA
tagcaacggtaaccatgccgcaggcgagttctgttgtttcaattacgttgattggtggcgctggatttaacgtgg

SEQ ID NO: 846926 - DNA, 75 bp, synthetic construct
  source 1..75: mol_type = other DNA
gcctatgacaatgctgagaaacgtcttcagaaagatcagaacggtgcggatattcctgataaaagattattcctg

SEQ ID NO: 846927 - DNA, 75 bp, synthetic construct
  source 1..75: mol_type = other DNA
aacctgcatttgctttagggcaaacaggaagcactgtcggaaatgataaagctgttggctggaactggaatagcg

SEQ ID NO: 846928 - DNA, 75 bp, synthetic construct
  source 1..75: mol_type = other DNA
accaagttgcagacagcatgtactatcaatggcgtctcgtttgatggttctaaaaacattgagctaacggcggaa

SEQ ID NO: 846929 - DNA, 75 bp, synthetic construct
  source 1..75: mol_type = other DNA
taatcctccactttaatatgaatgcggggagttgccctgctgtacagttccgcgtgaattataaaaacggcggta

SEQ ID NO: 846930 - DNA, 75 bp, synthetic construct
  source 1..75: mol_type = other DNA
gctggagtggtacaagcggtgctcatgctccggcatttattcgttcacgacgggatacgaccgacgcaaactggt

SEQ ID NO: 846931 - DNA, 75 bp, synthetic construct
  source 1..75: mol_type = other DNA
gctccggtcgtcaaacgtgcgcgcgaaaaagtcgaacacgattttaaccagcaggtgattaaccgagaactcgcc

SEQ ID NO: 846932 - DNA, 75 bp, synthetic construct
  source 1..75: mol_type = other DNA
cgtcagggcgactcaatgaccggaacgattaatcaggatggcggaagccagaatgcctatatgtctacggcctta

SEQ ID NO: 846933 - DNA, 75 bp, synthetic construct
  source 1..75: mol_type = other DNA
ttatatcgacgtgaagacgccaagcggtaactcagcctggctggttcccgacgaactggataagaagctctatat

SEQ ID NO: 846934 - DNA, 75 bp, synthetic construct
  source 1..75: mol_type = other DNA
ataagattcgccagcttgacgacgcattaaagcgtttcagagtgcgagagaagtttcgcgaggcggcggaacatg

SEQ ID NO: 846935 - DNA, 75 bp, synthetic construct
  source 1..75: mol_type = other DNA
acacttcccgaaaacagtgagggcgtcatcctgacagaaatttcgggtggtcagtatgcggtggcggtagcccgc

SEQ ID NO: 846936 - DNA, 75 bp, synthetic construct
  source 1..75: mol_type = other DNA
aatcgacgcgacgcaaaaaacggtttccgcacttggcgatgcccagaccaacgcacattatcaagagatggttaa

SEQ ID NO: 846937 - DNA, 75 bp, synthetic construct
  source 1..75: mol_type = other DNA
agattcgagtcttctacgactatattcacgccctgcagcaatccatcttcaaagacaacctgaagcgcgttctgg

SEQ ID NO: 846938 - DNA, 75 bp, synthetic construct
  source 1..75: mol_type = other DNA
cctgagagcatagagaaaggcatactggcgatggactcaacgccatacgccgctctgaacgaagcttatatggga

SEQ ID NO: 846939 - DNA, 75 bp, synthetic construct
  source 1..75: mol_type = other DNA
gcacagcaggcggcgcggtttgaacagcagcagagcgcgaagcaggcggcaatcagcgcaaaagcccgcggactc

SEQ ID NO: 846940 - DNA, 75 bp, synthetic construct
  source 1..75: mol_type = other DNA
catgacgccagggtggcgcttgccgaacaggaagccatggaagccacgcgacgtgcggtgacagaagccgggcag

SEQ ID NO: 846941 - DNA, 75 bp, synthetic construct
  source 1..75: mol_type = other DNA
gcgttgtcaccatcagcgttgcagagtgcggtaatcgggtacgcattgcggtgcgagataccgggcacggcatcg

SEQ ID NO: 846942 - DNA, 75 bp, synthetic construct
  source 1..75: mol_type = other DNA
gtaaagaaaggttttgagcagttgatgatgtgggtagatagcaaaaatattgtgccgaaggagtgggttgctgtc

SEQ ID NO: 846943 - DNA, 75 bp, synthetic construct
  source 1..75: mol_type = other DNA
tgatgtgggtagatagcaaaaatattgtgccgaaggagtgggttgctgtctattacgacaatccagatgaaacac

SEQ ID NO: 846944 - DNA, 75 bp, synthetic construct
  source 1..75: mol_type = other DNA
caagccgaacgaaaattatcaggaaaaccagctgacactttgcccggtcacgctgccacgtctggccggaccgac

SEQ ID NO: 846945 - DNA, 75 bp, synthetic construct
  source 1..75: mol_type = other DNA
atcgatagtgtgcagtacggggaacaaattcagcgtctggcgcaagactcaacacaaacgcatgaacaaattgac

SEQ ID NO: 846946 - DNA, 75 bp, synthetic construct
  source 1..75: mol_type = other DNA
cgcgtccggtgttcggggtgatcacctacatcattaacgatgctcgctatggtgagtttgatgactacccgctga

SEQ ID NO: 846947 - DNA, 75 bp, synthetic construct
  source 1..75: mol_type = other DNA
cggcggcggttgcgtagtggatgagttgatgaaagggctgaatctgccggtgaaaaagaaaaatggcctgcgggt

SEQ ID NO: 846948 - DNA, 75 bp, synthetic construct
  source 1..75: mol_type = other DNA
aagatgttgccgctgtccgcaccgatgtgagtgcaatgaaagatgatgtcgcagatgttaaagcaagtgccgatc

SEQ ID NO: 846949 - DNA, 75 bp, synthetic construct
  source 1..75: mol_type = other DNA
caaggtaaagccccagactggtggacagatctggattgtgaagtatccctcccccgagaagaaaagcggatcagt

SEQ ID NO: 846950 - DNA, 75 bp, synthetic construct
  source 1..75: mol_type = other DNA
atggccgggcaatcagattacctgccgcccggcttaccacacaaccgcgccaaatggcctctggaataccaactt

SEQ ID NO: 846951 - DNA, 75 bp, synthetic construct
  source 1..75: mol_type = other DNA
gaaacgtattccgaggggaagcgtgattgagcaaatcggaatgacgccggatacgtaccgggaatttttcagaga

SEQ ID NO: 846952 - DNA, 75 bp, synthetic construct
  source 1..75: mol_type = other DNA
tcgtaaagaagccaatgcgggaactgcatcagccatcgctatcgcctcacaaccacaggtgaaaaccggtgactt

SEQ ID NO: 846953 - DNA, 75 bp, synthetic construct
  source 1..75: mol_type = other DNA
tgccggaacgcatacggtacttaaagccggtatttctgcggatacgcaatctgatttcggcgcaggtgtcggcgt

SEQ ID NO: 846954 - DNA, 75 bp, synthetic construct
  source 1..75: mol_type = other DNA
ctctgatgaacggcgtcaaactctcctctgctgtgacagaaaacaaaaacaatatcgagcagaaccgcagcgata

SEQ ID NO: 846955 - DNA, 75 bp, synthetic construct
  source 1..75: mol_type = other DNA
gcacatgcccagtcaacggctgaccatgccaacgctaacgccaacaccgctctgatcaacggcgtcaaactatcc

SEQ ID NO: 846956 - DNA, 75 bp, synthetic construct
  source 1..75: mol_type = other DNA
gcacatgcccagtcaacggctgaccatgccaacgctaacgccaacaccgctctgataaacggcgtcaaactctcc

SEQ ID NO: 846957 - DNA, 75 bp, synthetic construct
  source 1..75: mol_type = other DNA
cagacgtcaccaacataaaaggcgatgtcgcacatgcccagtcaacggctgaccatgccaacgctaacgccaaca

SEQ ID NO: 846958 - DNA, 75 bp, synthetic construct
  source 1..75: mol_type = other DNA
aaaattgtcggtccaatgattacctatttattgcccgtgatgattggttctaccggcggtcatttggtcggtggt

SEQ ID NO: 846959 - DNA, 75 bp, synthetic construct
  source 1..75: mol_type = other DNA
atttactgcataccgggcaggtatcctgcccttttttggttaaaaaatggctgaacgaagaaaaactcatcactc

SEQ ID NO: 846960 - DNA, 75 bp, synthetic construct
  source 1..75: mol_type = other DNA
atggttattcgcggcatgacgattagtttgccatggtttgcttttatcaatgtcagttttgcattgataattttg

SEQ ID NO: 846961 - DNA, 75 bp, synthetic construct
  source 1..75: mol_type = other DNA
ccagcgaaaccggtaacacgcgaattacttgaaaaagaaattcagatgctatttaacggcgatgccgatattgct

SEQ ID NO: 846962 - DNA, 75 bp, synthetic construct
  source 1..75: mol_type = other DNA
ggacgccgtctggacgatgtgcgttttcaccccgcctggcacctgctgatgcaggcgctatgtaccaatcgggtg

SEQ ID NO: 846963 - DNA, 75 bp, synthetic construct
  source 1..75: mol_type = other DNA
gtgcactggcaaactcacaccgtttttaatcaacctataccattaaataacagcaacttatacctgtctgatggc

SEQ ID NO: 846964 - DNA, 75 bp, synthetic construct
  source 1..75: mol_type = other DNA
ttaatcgccttgatgcattagcacatcgtgatcctttaactgggatagcaaaccgacgtgcaatgaacagtatct

SEQ ID NO: 846965 - DNA, 75 bp, synthetic construct
  source 1..75: mol_type = other DNA
acaattggtttgcagtagtgtgaattctcgaaaagagacatccacaccgccaccattatatacagaagcatcatt

SEQ ID NO: 846966 - DNA, 75 bp, synthetic construct
  source 1..75: mol_type = other DNA
cagagcttgggaagcttattgctcaggttctgggaaacccacagtattttgatgggtatatagtttgcaacaatg

SEQ ID NO: 846967 - DNA, 75 bp, synthetic construct
  source 1..75: mol_type = other DNA
agccatttcgccgctgagcgtatgaaacacgttaagcaatacttagaggaggttttatcaaattatcgcgctggt

SEQ ID NO: 846968 - DNA, 75 bp, synthetic construct
  source 1..75: mol_type = other DNA
tttaatgcaacattgccggaagcagagacggtagcagccagagtgaagcaagaacttaaactggcagctatccca

SEQ ID NO: 846969 - DNA, 75 bp, synthetic construct
  source 1..75: mol_type = other DNA
gttgtaagggacaacaagcgagtgtttctcttgcagagagtgaaattaaaagcaggagaccaccattaccatttt

SEQ ID NO: 846970 - DNA, 75 bp, synthetic construct
  source 1..75: mol_type = other DNA
tgttcaggccgaatttattgatactgatacaataatttcaccgatgcttgttccaccggaagatgcacctgtgga

SEQ ID NO: 846971 - DNA, 75 bp, synthetic construct
  source 1..75: mol_type = other DNA
gtgccgcaaagcgatgcgcatctggtgctggcacagaccgcgggcggtttgtcctgcttttttgtgccgcgcttt

SEQ ID NO: 846972 - DNA, 75 bp, synthetic construct
  source 1..75: mol_type = other DNA
atgaaaatgccaaaaaggcccgcaacagggtcggggcgttctcacgcccaaaacaaccatacacccatttcatca

SEQ ID NO: 846973 - DNA, 75 bp, synthetic construct
  source 1..75: mol_type = other DNA
ggcggtattggctattgcgaagagagcgaactaccgcgactttatcgggaaatgccagtgaacagcatctgggaa

SEQ ID NO: 846974 - DNA, 75 bp, synthetic construct
  source 1..75: mol_type = other DNA
gcgagctgccgcgtctttaccgggagatgccggtaaatagcatctgggaaggctctggcaacatcatgtgtctgg

SEQ ID NO: 846975 - DNA, 75 bp, synthetic construct
  source 1..75: mol_type = other DNA
taatcaatccggagcttttagaaaaaagcggcgaaacaggcattgaagaaggttgcctgtcgatccctgaacaac

SEQ ID NO: 846976 - DNA, 75 bp, synthetic construct
  source 1..75: mol_type = other DNA
ccggagcttttagaaaaaagcggcgaaacaggcattgaagaaggctgcctatcgatccctgaacagcgtgcttta

SEQ ID NO: 846977 - DNA, 75 bp, synthetic construct
  source 1..75: mol_type = other DNA
gccctggaccgcgacggtaaaccatttgaactggaagcagacggtctgttagccatctgtattcagcatgagatg

SEQ ID NO: 846978 - DNA, 75 bp, synthetic construct
  source 1..75: mol_type = other DNA
tggcacctgctgatgcaggcgctatgtaccaatcgggtgcacaatcttgcctgggaagaagacgctcgctccggc

SEQ ID NO: 846979 - DNA, 75 bp, synthetic construct
  source 1..75: mol_type = other DNA
ttggtcagcagttagggacggctgaatcccttgaactggggcggctggcgaatgtgaatccgcctgaattattgc

SEQ ID NO: 846980 - DNA, 75 bp, synthetic construct
  source 1..75: mol_type = other DNA
caggttgaggcagggtcgttatgtccgataacgatgacctttgccgccacgccattgttgttacagatgttaccc

SEQ ID NO: 846981 - DNA, 75 bp, synthetic construct
  source 1..75: mol_type = other DNA
ctttctgcctgatgggcaacggaatgcgattcgcctggagcggctgaaagacaagctgggtaatcgctccaacgc

SEQ ID NO: 846982 - DNA, 75 bp, synthetic construct
  source 1..75: mol_type = other DNA
gaacgtctggatgatggttcttatcgactggtggggcataaatggtttttctcggtgccgcaaagtgatgcgcat

SEQ ID NO: 846983 - DNA, 75 bp, synthetic construct
  source 1..75: mol_type = other DNA
atgtgctgcgcgttctcaataagcaagcgggcgtatacgacttattgtcggaagcatttgtggaagtgaaagggc

SEQ ID NO: 846984 - DNA, 75 bp, synthetic construct
  source 1..75: mol_type = other DNA
atgaaagggctgaatctgccggtgaaaaagaaaaacggcctgcgggtgacgcctgcggatcagatagacattatc

SEQ ID NO: 846985 - DNA, 75 bp, synthetic construct
  source 1..75: mol_type = other DNA
gcctgcggatcagatagacattatcaccggagcgctggcgggaacggcaaataaaaccctgctggcatgggcgaa

SEQ ID NO: 846986 - DNA, 75 bp, synthetic construct
  source 1..75: mol_type = other DNA
atgaatccattaattatcaaactgggcggcgtactgctggatagcgaagaagcgctggaacgtctgtttagtgca

SEQ ID NO: 846987 - DNA, 75 bp, synthetic construct
  source 1..75: mol_type = other DNA
cagcatgctaagcaaggctttcccatcagatttcactacgactatttgggagcgagatggaatgcagcagtaaaa

SEQ ID NO: 846988 - DNA, 75 bp, synthetic construct
  source 1..75: mol_type = other DNA
tatctggtggggctggccgtcaccgatgacccggcaagcctcggcacggaatacctggaattctgccgcacggca

SEQ ID NO: 846989 - DNA, 75 bp, synthetic construct
  source 1..75: mol_type = other DNA
aacgcttaggcgatgtggttgaactgaaagctgaaataattgacgacgattctgcgcttaacggcaaatgggcgc

SEQ ID NO: 846990 - DNA, 75 bp, synthetic construct
  source 1..75: mol_type = other DNA
gcgtgcaacaggcgtcagcaaaggtccggggcagcagaaagccgtcaggatcgctgcgtcggctgaagagctgac

SEQ ID NO: 846991 - DNA, 75 bp, synthetic construct
  source 1..75: mol_type = other DNA
gcgtgcaacaggcgtcagcaaaggtccggggcagcagaaagccgtcaggaacgcggcgtcggctgaagagctgac

SEQ ID NO: 846992 - DNA, 75 bp, synthetic construct
  source 1..75: mol_type = other DNA
gagcaggaaaaatccctgctgacccatgagaaagagacgctggagtacaaacgccagctggctgagctgggagac

SEQ ID NO: 846993 - DNA, 75 bp, synthetic construct
  source 1..75: mol_type = other DNA
gcgtgcaacaggcgtcagcaaaggtccggggcagcaggaagccgtcaggaacgcagcgtcggctgaagagctgac

SEQ ID NO: 846994 - DNA, 75 bp, synthetic construct
  source 1..75: mol_type = other DNA
gcgtgcaacaggcgtcagcaaaggtccggggcagcagcaagccgtcaggaccgccgcgtcggctgaagagctgac

SEQ ID NO: 846995 - DNA, 75 bp, synthetic construct
  source 1..75: mol_type = other DNA
gcgtgcaacaggcgtcagcaaaggtccggggcagcagaaagccgtcaggagcgcagcgtcggctgaagagctgac

SEQ ID NO: 846996 - DNA, 75 bp, synthetic construct
  source 1..75: mol_type = other DNA
tcgtcacaaataccaactggcagtcatacagcggtgaaaccacgttgagctatttcagccagatggcaggcctaa

SEQ ID NO: 846997 - DNA, 75 bp, synthetic construct
  source 1..75: mol_type = other DNA
aacaaatacagtatttccccagagcagtttctgaaaggtgctgtgataatcttgcacagcgataatatttggggg

SEQ ID NO: 846998 - DNA, 75 bp, synthetic construct
  source 1..75: mol_type = other DNA
tggttgatagcgacaccgctctgatggtgcaaagcttcattgatgcaggtgttggcattgactttgataagttgt

SEQ ID NO: 846999 - DNA, 75 bp, synthetic construct
  source 1..75: mol_type = other DNA
atgagagaattaaacttcccactacagatttttattgataccgacaccgccatgatgattcaggctttcactgat

SEQ ID NO: 847000 - DNA, 75 bp, synthetic construct
  source 1..75: mol_type = other DNA
taaagttaatggctgagaactcagaagcaattgaagattttattcaggaaatagaaactggtgaaccgcgtttta

SEQ ID NO: 847001 - DNA, 75 bp, synthetic construct
  source 1..75: mol_type = other DNA
gcaggtgtggcaattgactttgacaggctgttaaaactaatggctgagaactcagaagcaattgaagactttatt

SEQ ID NO: 847002 - DNA, 75 bp, synthetic construct
  source 1..75: mol_type = other DNA
cagagcaatttttgaaaggtgctgtgacaatcctgtacgctgacaatattctggtgacggattctgtgaggattc

SEQ ID NO: 847003 - DNA, 75 bp, synthetic construct
  source 1..75: mol_type = other DNA
aggtgcgttgcaaaactttctgccctatcaggcagtgaataccgttgaaggagcgcaacagctgttaccaatggg

SEQ ID NO: 847004 - DNA, 75 bp, synthetic construct
  source 1..75: mol_type = other DNA
cagcgggattgcggtgatttttgccctcattcgtgcatttacccgccagagcatgagcacactcggcaatgcctg

SEQ ID NO: 847005 - DNA, 75 bp, synthetic construct
  source 1..75: mol_type = other DNA
actaacggcggtggcttttttaatgccaactcgtcgcatccgtttgaaaacccaaccgcactgaccaacttcgtg

SEQ ID NO: 847006 - DNA, 75 bp, synthetic construct
  source 1..75: mol_type = other DNA
gttagcattgactttgacaggctgttaaggctaatggctgataactcagaaacaattgaagattttattcagggg

SEQ ID NO: 847007 - DNA, 75 bp, synthetic construct
  source 1..75: mol_type = other DNA
gtaatgctgtcaatcttgtttatctttggctggcgcggtgtcgtccccgttttatgcgggatgttttgcaccaat

SEQ ID NO: 847008 - DNA, 75 bp, synthetic construct
  source 1..75: mol_type = other DNA
aacctcttacctccaggcaaccgacaaacccacctgttcccgtccggctaccgcaactttccactttgacgcctt

SEQ ID NO: 847009 - DNA, 75 bp, synthetic construct
  source 1..75: mol_type = other DNA
tgcgtgatgcggtatgttatcggggagcgggcgatgaaaacatttcgctggaaagtgaagccggatatggaggtg

SEQ ID NO: 847010 - DNA, 75 bp, synthetic construct
  source 1..75: mol_type = other DNA
ttcgctgacctttaccgatctgctgcgttctaaaatctatcgtggaaacgtgctgatttatgcagcctgttcagc

SEQ ID NO: 847011 - DNA, 75 bp, synthetic construct
  source 1..75: mol_type = other DNA
ccacatgcaaccggacgcgccgcagccttgcagaacactctgcaactgggactgtgcttcctcgcaagcctggtg

SEQ ID NO: 847012 - DNA, 75 bp, synthetic construct
  source 1..75: mol_type = other DNA
tgctgatatacgcggcctgttcagccagtttttttgcatggctgaccggttcaccgttcatccttagtgaaatgg

SEQ ID NO: 847013 - DNA, 75 bp, synthetic construct
  source 1..75: mol_type = other DNA
ttgctgatcggtatcgtgaagaagaacgctatcatgatgatcgacttcgcgctggctgctgagcgcgagcaaggc

SEQ ID NO: 847014 - DNA, 75 bp, synthetic construct
  source 1..75: mol_type = other DNA
catcaatctcgcttataccaaagtgactgcgccaattagcggacgtatcggcaaatcgactgtgaccgaaggcgc

SEQ ID NO: 847015 - DNA, 75 bp, synthetic construct
  source 1..75: mol_type = other DNA
tgactatcctgggcggtggtctggtttctccggcatctccgggttctatccttgctgtactggcgatgacaccaa

SEQ ID NO: 847016 - DNA, 75 bp, synthetic construct
  source 1..75: mol_type = other DNA
agccgccactgttcaccgatgccattgaggctgaaattatcgccctgaaccagcgccagaacgacgaaggcgttc

SEQ ID NO: 847017 - DNA, 75 bp, synthetic construct
  source 1..75: mol_type = other DNA
gcccgtttaccggcgctgatcccggtgttctttgccgggcagctaagcgctgtccgcctttgcgccgtgatggcc

SEQ ID NO: 847018 - DNA, 75 bp, synthetic construct
  source 1..75: mol_type = other DNA
tccccgagaagagaagcgtgtcaatacgttcctctcgacacaaaagaagcgcatcacactccagatgtgcttgtc

SEQ ID NO: 847019 - DNA, 75 bp, synthetic construct
  source 1..75: mol_type = other DNA
aacgatattcaggaaatggcagaatcgtttgaccctcgtgtctacggttgccgcattaaccttgagcatattcgc

SEQ ID NO: 847020 - DNA, 75 bp, synthetic construct
  source 1..75: mol_type = other DNA
cgtatcgaccctatcacggccgcgatggtcaccattattattaactccggcgcgtatattgcggaaattacgcgc

SEQ ID NO: 847021 - DNA, 75 bp, synthetic construct
  source 1..75: mol_type = other DNA
ttcgtccaccgacaaaccagtaaaattaaaatttcatgaatatgcccgtgctacattactgccaaatcgtggaag

SEQ ID NO: 847022 - DNA, 75 bp, synthetic construct
  source 1..75: mol_type = other DNA
tacccagtttgaattgatgatggctatcgcgctggtagtcatgattatctacctgtttttgcgcaatattccggc

SEQ ID NO: 847023 - DNA, 75 bp, synthetic construct
  source 1..75: mol_type = other DNA
cgatgctgaccggtgcagaggcagactggcggggattcacccgttcggtgctgtccatgatgacagaaatcctgc

SEQ ID NO: 847024 - DNA, 75 bp, synthetic construct
  source 1..75: mol_type = other DNA
ggatcagcatggcggatgtcgataacgccctgtacaacgcgtttggtcagcgactgatttccactatttatactc

SEQ ID NO: 847025 - DNA, 75 bp, synthetic construct
  source 1..75: mol_type = other DNA
ctgcttggcgcgctgccgctgatgttaagtaccggggtcggcgcagaactgcgtcgtccgttaggcattggtatg

SEQ ID NO: 847026 - DNA, 75 bp, synthetic construct
  source 1..75: mol_type = other DNA
agcagcagagcgcgaagcaggccgccatcagcgcaaaagcccgtggtctcactgaccgtcaggcgcagcgggagt

SEQ ID NO: 847027 - DNA, 75 bp, synthetic construct
  source 1..75: mol_type = other DNA
gtacggtgataatccggctgcgctggcgaaggccacatctgcactgaagaacacctggtctgcggaggagcagct

SEQ ID NO: 847028 - DNA, 75 bp, synthetic construct
  source 1..75: mol_type = other DNA
ggtcgtggactggcgaaagtgctgaatcatccgtggctgaccttaagcgtggcgctcagcacgctgctgcttagc

SEQ ID NO: 847029 - DNA, 75 bp, synthetic construct
  source 1..75: mol_type = other DNA
tgctgacgctgtttaccacgccggtgatttatctgctgttcgaccgtctggcattgtgggcaaaaagccgctttg

SEQ ID NO: 847030 - DNA, 75 bp, synthetic construct
  source 1..75: mol_type = other DNA
cattcgcctgaccagcagcgacggcggcgtggtgccgctaagctcaattgccaaaattgagcagcgttttgcgcc

SEQ ID NO: 847031 - DNA, 75 bp, synthetic construct
  source 1..75: mol_type = other DNA
gctggctgccgaacgcgagcaaggcatgtcgccgcgcgatgcaatctaccaggcttgtctgctgcgttttcgtcc

SEQ ID NO: 847032 - DNA, 75 bp, synthetic construct
  source 1..75: mol_type = other DNA
caggcaattgccgctctcggcctgaccagcgaaagtgtgcgcaccgccattactggcgcgaacgttaactcagcg

SEQ ID NO: 847033 - DNA, 75 bp, synthetic construct
  source 1..75: mol_type = other DNA
aaaggtagtctcgacggcccctcccgcgcagtcacgctttccgcaaacgatcaaatgcagtctgcggaagagtac

SEQ ID NO: 847034 - DNA, 75 bp, synthetic construct
  source 1..75: mol_type = other DNA
tttaatgcctgggtgaaggagttcggcacgggtaacagggaatttaaacagatggttgaacaggctgaggcgttt

SEQ ID NO: 847035 - DNA, 75 bp, synthetic construct
  source 1..75: mol_type = other DNA
cgtgagcggtggcgcaacctgataccggagagctacggcgaacaggttcaccgtgtgggggagcgatttgccata

SEQ ID NO: 847036 - DNA, 75 bp, synthetic construct
  source 1..75: mol_type = other DNA
ctggacggcgaattatttcgccttgcgtggctggcaggcgaaagatgttttcctgccggatgattatctgattaa

SEQ ID NO: 847037 - DNA, 75 bp, synthetic construct
  source 1..75: mol_type = other DNA
gccggacatcttgagccagtaatgatcaaggcgattggtcagaagctggcggcggcaggcgtacaggatgcaaat

SEQ ID NO: 847038 - DNA, 75 bp, synthetic construct
  source 1..75: mol_type = other DNA
aaggacggcggcaacagggagataaaacactggcgaacggtggcaatcagcaccggagaaatggacgttgagaca

SEQ ID NO: 847039 - DNA, 75 bp, synthetic construct
  source 1..75: mol_type = other DNA
tggaaaacctgcgtattgtggatgatggtcggtcacgcgccatcgtcagacgtgccggaaaactggatgacaaac

SEQ ID NO: 847040 - DNA, 75 bp, synthetic construct
  source 1..75: mol_type = other DNA
ggggacgatcggtaaagagcattaccgcgtgatgcgctggaaaaaaaccgcaaaccatgaagtcatcacaatggc

SEQ ID NO: 847041 - DNA, 75 bp, synthetic construct
  source 1..75: mol_type = other DNA
tgcacgttcagaaggtggagaactggcgcgaatatctggcccgtgagcggcagaatctttctgatggtctggtta

SEQ ID NO: 847042 - DNA, 75 bp, synthetic construct
  source 1..75: mol_type = other DNA
catgtggcgaagggatttaacaaggatgccgtagcaagagcccttcacgaagccggaatgctgaaaaagccagcc

SEQ ID NO: 847043 - DNA, 75 bp, synthetic construct
  source 1..75: mol_type = other DNA
gcaggaacggcggagggctggcgcgataccgttgcgcggctggctggtggtaatccgtccatgatgctgggtgtg

SEQ ID NO: 847044 - DNA, 75 bp, synthetic construct
  source 1..75: mol_type = other DNA
tggaaaacctgcgtattgtggatgatggacggttacgcgccatggtcagacgtgccggaaagctggatgacagac

SEQ ID NO: 847045 - DNA, 75 bp, synthetic construct
  source 1..75: mol_type = other DNA
aacggctgccgttaatggttattccgtagcaggaacgacggagggctggcgcgatacagtggcgcggttggctgg

SEQ ID NO: 847046 - DNA, 75 bp, synthetic construct
  source 1..75: mol_type = other DNA
gtgtggcttgggccaaatcagcttgccgaacttgatgcgctgaaaattgttccggatggaaaaaaacgcgtaagg

SEQ ID NO: 847047 - DNA, 75 bp, synthetic construct
  source 1..75: mol_type = other DNA
atggcgtgaaggtctcagcagcaaaagacattctgatttccaagctatgtagagagtatggtgtcagacctgatg

SEQ ID NO: 847048 - DNA, 75 bp, synthetic construct
  source 1..75: mol_type = other DNA
agcgcaaaagcagccatgatgattcgccgctggtgttctatacgttccccgcaacgtttgagaaggagatagctc

SEQ ID NO: 847049 - DNA, 75 bp, synthetic construct
  source 1..75: mol_type = other DNA
tccgtggcaggaacggcggaaagctggcgcgacagcgtggcgcggctggctggtggcaatccgttcatgatgctg

SEQ ID NO: 847050 - DNA, 75 bp, synthetic construct
  source 1..75: mol_type = other DNA
gagcacgcgccccggcgtatcgacaaatcatcaacgcgatagataatatgacagacattgagcaggaaaaagtcg

SEQ ID NO: 847051 - DNA, 75 bp, synthetic construct
  source 1..75: mol_type = other DNA
ccgctggcgctgaaagcgctagggatgccgttgaaacgggcagaagctctgattcatttagccagtgcggcgctg

SEQ ID NO: 847052 - DNA, 75 bp, synthetic construct
  source 1..75: mol_type = other DNA
aaggttacaaacttttccaggtatcggacgctggacggcaaattatttcgccttacgcggctggcaggcgaaaga

SEQ ID NO: 847053 - DNA, 75 bp, synthetic construct
  source 1..75: mol_type = other DNA
tgaacgtgacaacaaacggcaaatacagggccatcctggcggactggatgcagttaaacggaagccatgaggaat

SEQ ID NO: 847054 - DNA, 75 bp, synthetic construct
  source 1..75: mol_type = other DNA
aatggcagttaagcacaacaacggggtggcattttggtgcgtacatcatgccggatggttcgatcatcggtgaat

SEQ ID NO: 847055 - DNA, 75 bp, synthetic construct
  source 1..75: mol_type = other DNA
cttgcggcctatggcctgagcaggttcgcccctgtcaattatgaccctgccagcctgccgatttcagaactgtac

SEQ ID NO: 847056 - DNA, 75 bp, synthetic construct
  source 1..75: mol_type = other DNA
gattgatccttatactcacgcgccaaccttgaccagtaccgactggtatgatgttggtatggaagatgcgatatc

SEQ ID NO: 847057 - DNA, 75 bp, synthetic construct
  source 1..75: mol_type = other DNA
acagggagatcaaacactggcgaacggtggcaatcagcaccggagaaatggacgttgagacattcctcaaaagtg

SEQ ID NO: 847058 - DNA, 75 bp, synthetic construct
  source 1..75: mol_type = other DNA
gcgcgaatatctggcccgtgagcggcagaatctttctgatggtctggttattgagcttccggtaaagaaaaaaga

SEQ ID NO: 847059 - DNA, 75 bp, synthetic construct
  source 1..75: mol_type = other DNA
cagtaccggagaaatggacgttgaaacattcctcaaaagtgaggggataaaagtcaaggcggggcagcttgtcag

SEQ ID NO: 847060 - DNA, 75 bp, synthetic construct
  source 1..75: mol_type = other DNA
cctggcgaagtctgacgtcagccagattaaagcactgtatagcggtgaggacggggagaggctggcggagggtat

SEQ ID NO: 847061 - DNA, 75 bp, synthetic construct
  source 1..75: mol_type = other DNA
aaattaattattactggaggtgagcctcttctttataaagacttcatttcattatatacattcattcatcagcag

SEQ ID NO: 847062 - DNA, 75 bp, synthetic construct
  source 1..75: mol_type = other DNA
gacaatggcttaggtattccggcaataacgaggagtaaaaacattgctgacagttggttatcaaagagctggtat

SEQ ID NO: 847063 - DNA, 75 bp, synthetic construct
  source 1..75: mol_type = other DNA
ctgattggtgctgcagccttatggatactgataaaagacaacaaacagacagatgatcacagtcataacaacaaa

SEQ ID NO: 847064 - DNA, 75 bp, synthetic construct
  source 1..75: mol_type = other DNA
ttgatggagtccatccgactcaggccactaaaatcagctatggctggatacgtaaaggtcagaaaaaagcagtaa

SEQ ID NO: 847065 - DNA, 75 bp, synthetic construct
  source 1..75: mol_type = other DNA
atagccgcatttatctggctgattttctataaagatccaaaagatgcaaaacgcctctccccagaagaacgttca

SEQ ID NO: 847066 - DNA, 75 bp, synthetic construct
  source 1..75: mol_type = other DNA
cgtggtgcataggcataaccaacgtcgacccaatccgtcacggtcttctgtttgaacgtttcatcaaccctgagc

SEQ ID NO: 847067 - DNA, 75 bp, synthetic construct
  source 1..75: mol_type = other DNA
gcgcaattcgaagaagctgtcgagaaacgtgcctgtaatagtcgagtgcgcgaatcactgcaaaaagtaggggcg

SEQ ID NO: 847068 - DNA, 75 bp, synthetic construct
  source 1..75: mol_type = other DNA
gtggcagccgggcaacgtcgctcttcaacaacaagatcaaaccatccgacctggttggacgcaaagagtatctgc

SEQ ID NO: 847069 - DNA, 75 bp, synthetic construct
  source 1..75: mol_type = other DNA
tcgagatgaaccctaagcgctctgccgaggtgaatgtactgatgactcgcatggcggccgaaatgggtctgggag

SEQ ID NO: 847070 - DNA, 75 bp, synthetic construct
  source 1..75: mol_type = other DNA
tgatggtacgcgatctgatgaatcacagccgtgaaacaggaataccggttgggccaggtcgtggttcctctgccg

SEQ ID NO: 847071 - DNA, 75 bp, synthetic construct
  source 1..75: mol_type = other DNA
tcgaagctactgcttcacggcactgataaagaatgagcaaggttatcgcgacgtgtgcgaactgatgaccttagc

SEQ ID NO: 847072 - DNA, 75 bp, synthetic construct
  source 1..75: mol_type = other DNA
cgccctaactggttcatggttgggattggcatttatgcgcggtatcatgggggtaagtgaagcctcagctatccc

SEQ ID NO: 847073 - DNA, 75 bp, synthetic construct
  source 1..75: mol_type = other DNA
atgggacaagctgacgcgggccgcgtgatgttaaagatggaaaaacagcttgcgctgatcgaagacgaaacccag

SEQ ID NO: 847074 - DNA, 75 bp, synthetic construct
  source 1..75: mol_type = other DNA
attacattttgacactttggacaaaaacaaaaaacttcgctggctttcaggtggaattgctttcggaaatatttg

SEQ ID NO: 847075 - DNA, 75 bp, synthetic construct
  source 1..75: mol_type = other DNA
atggctatcgaagctgtttccgcaactgttccgctaaaagcgggtgaacgtctggctggtctcaactatgtggct

SEQ ID NO: 847076 - DNA, 75 bp, synthetic construct
  source 1..75: mol_type = other DNA
tggaagacacaaaaatcatcgacaaagggcgcaattacgtgcgcgtttatcgtgctggtgaaatatcagagacag

SEQ ID NO: 847077 - DNA, 75 bp, synthetic construct
  source 1..75: mol_type = other DNA
tggacgacgatttttctgatgatttttgccagcatgtgcctcaacagtgttattggcgcattgcgcggccattaa

SEQ ID NO: 847078 - DNA, 75 bp, synthetic construct
  source 1..75: mol_type = other DNA
gcaagctggaacagcaacaggctaatgcggtaccagaagaacaggttgatccgcgcaaagcggcagttgccgcgg

SEQ ID NO: 847079 - DNA, 75 bp, synthetic construct
  source 1..75: mol_type = other DNA
attgccgtattgctgattagtattggcgcgttctcgcatcaatgtctttctactgttgcggcaacactgggcggc

SEQ ID NO: 847080 - DNA, 75 bp, synthetic construct
  source 1..75: mol_type = other DNA
agagaatacgcttcggataatcaacgccactaatcatcagttaccagggctccgtttgggaaacggaaaatattg

SEQ ID NO: 847081 - DNA, 75 bp, synthetic construct
  source 1..75: mol_type = other DNA
actactcttgatgttgcaagtattactgggcaattagaacagatttcgaaagtaaaaggttttgaccgtattggt

SEQ ID NO: 847082 - DNA, 75 bp, synthetic construct
  source 1..75: mol_type = other DNA
ttctactggcattgccgacaccgtactgttcgggccagaacctgaattcttcctgttcgatgacatccgtttcgg

SEQ ID NO: 847083 - DNA, 75 bp, synthetic construct
  source 1..75: mol_type = other DNA
gctatcgacgatatcgaaggcgcatggaactcctccacccaatatgaaggtggtaacaaaggtcaccgtccggca

SEQ ID NO: 847084 - DNA, 75 bp, synthetic construct
  source 1..75: mol_type = other DNA
cgaagaattaccttcactattgcagccgtcattatgatgacgattggtctggtgagtattgtcgaaaatccctac

SEQ ID NO: 847085 - DNA, 75 bp, synthetic construct
  source 1..75: mol_type = other DNA
ttctcacgccgctgttcagaaaaccgtattcagtgctgacgtggtgacctcggcctgtcatgtggtggtggatgc

SEQ ID NO: 847086 - DNA, 75 bp, synthetic construct
  source 1..75: mol_type = other DNA
gtccggtgccacggttcagggctgctcagcctttaaggccgggcaggtcgccactctggattttggcaatccggg

SEQ ID NO: 847087 - DNA, 75 bp, synthetic construct
  source 1..75: mol_type = other DNA
gggcagttccgcttccgtgcgcagccggagtttccgaaagacgtgaaggcaggagaatacagtggtgcgctgacg

SEQ ID NO: 847088 - DNA, 75 bp, synthetic construct
  source 1..75: mol_type = other DNA
gtttgagagctgggccgaacggctgaacgtcgaaccgggtaaactcaacgaagcctttattaatgcgatggcgga

SEQ ID NO: 847089 - DNA, 75 bp, synthetic construct
  source 1..75: mol_type = other DNA
gttatctgagacaaaatatttagatttagggcaacaactagcaattctgaattacactttgtccaatgggttaat

SEQ ID NO: 847090 - DNA, 75 bp, synthetic construct
  source 1..75: mol_type = other DNA
aaaggggatccgcacgtattgttaacaacctctgctggtaatatcgaactggagctggatagccagaaagcgccg

SEQ ID NO: 847091 - DNA, 75 bp, synthetic construct
  source 1..75: mol_type = other DNA
attttaagtgcatcagaagcacaggcatttaaaaatgcagaagccgcacaacatgcccaggcggcaaagaaagcc

SEQ ID NO: 847092 - DNA, 75 bp, synthetic construct
  source 1..75: mol_type = other DNA
catttaaaaatgcagaagccgcacaacacgcccaggcggcaaagaaagccatttataaaggatttggcatgacct

SEQ ID NO: 847093 - DNA, 75 bp, synthetic construct
  source 1..75: mol_type = other DNA
atttataaaggatttggcatgacctttagaatgagcagtaagaactttgcttatctcaatgattcattatgtgca

SEQ ID NO: 847094 - DNA, 75 bp, synthetic construct
  source 1..75: mol_type = other DNA
ataaaaatgttcttggattcaagaggatttagttctgtggaaattaaatcctcatcaattccattcagggggtaa

SEQ ID NO: 847095 - DNA, 75 bp, synthetic construct
  source 1..75: mol_type = other DNA
aaactattttgctcaagtctcttgacatgtatgagaaagggaggttacaaaaagaaaaagggattgataaacatg

SEQ ID NO: 847096 - DNA, 75 bp, synthetic construct
  source 1..75: mol_type = other DNA
cggtttatcagtcgggtctgtataacgtcattgtttatcatcacacaggaaaagtcgccttaatgaaagaaggcc

SEQ ID NO: 847097 - DNA, 75 bp, synthetic construct
  source 1..75: mol_type = other DNA
ttccgaagaagttggcgttgccaaaccgaataagaaaattttcgattatgcgctggaacaggcaggcaatcctga

SEQ ID NO: 847098 - DNA, 75 bp, synthetic construct
  source 1..75: mol_type = other DNA
gatttgcatctggattttgataatatggattttcatcgtactaatcctgcaacagggttacctatgtcaggtatt

SEQ ID NO: 847099 - DNA, 75 bp, synthetic construct
  source 1..75: mol_type = other DNA
aacttaaaaaccaatatgatgggggtgaaaagttagagttcgggttcgttgaatacaccccaactacctactata

SEQ ID NO: 847100 - DNA, 75 bp, synthetic construct
  source 1..75: mol_type = other DNA
tatatggttgttttctcaaatacgaaaaaaacggcatgtgtcggatgagtttaaattcagtaaaggcgtttggta

SEQ ID NO: 847101 - DNA, 75 bp, synthetic construct
  source 1..75: mol_type = other DNA
caaccggttgcggttctttctaataatcgccccgcaggatatctcttaagtgccagcgcattcgaagcgttaatg

SEQ ID NO: 847102 - DNA, 75 bp, synthetic construct
  source 1..75: mol_type = other DNA
tttttatcattggtacactatacgaattaaggcgagttagtggttgcataagcataaaaaaatggggtcaaaatc

SEQ ID NO: 847103 - DNA, 75 bp, synthetic construct
  source 1..75: mol_type = other DNA
attaaggcgagtttgtggctgtgtaagtgtaagagaatggatgcaatctcaggtaaatgaaaaaactaatgaaga

SEQ ID NO: 847104 - DNA, 75 bp, synthetic construct
  source 1..75: mol_type = other DNA
gtgcagctgatggagtctgcccgagcaagcgcacaaccgccagcagatccgattattaataataatccggaaccg

SEQ ID NO: 847105 - DNA, 75 bp, synthetic construct
  source 1..75: mol_type = other DNA
attgaaggagaaatagatgaaagcattaatgttagaaaattacttggtattaaaggcaaaagacagcagaaataa

SEQ ID NO: 847106 - DNA, 75 bp, synthetic construct
  source 1..75: mol_type = other DNA
acagtattgagaaatgcttacactttgattgcttttgaaaattatctgatagaatcaaatataaatcttatcgaa

SEQ ID NO: 847107 - DNA, 75 bp, synthetic construct
  source 1..75: mol_type = other DNA
ggtctatcttatactgattttgactttctggatattcttgatgattctctaacaactaaagaacgtgcggaaaag

SEQ ID NO: 847108 - DNA, 75 bp, synthetic construct
  source 1..75: mol_type = other DNA
cgtccggtccgtcgctttttctccattatttttctcattattctattagtttgcattctttcactgataacaact

SEQ ID NO: 847109 - DNA, 75 bp, synthetic construct
  source 1..75: mol_type = other DNA
gactgcggctcaaaaatcggcgctgaaaaaagcgcgtcgaaaagcccagaccggcgcggcaaaacttgcccgcaa

SEQ ID NO: 847110 - DNA, 75 bp, synthetic construct
  source 1..75: mol_type = other DNA
tgaacctttgctatatggggatgacttccttcacttcattgattttatcatcgagaattcaccagatactgcttt

SEQ ID NO: 847111 - DNA, 75 bp, synthetic construct
  source 1..75: mol_type = other DNA
gcgactggaacgatgtgatttgggcgattaccacccgtatggacccggcgcgggatactgttctggtagaaaata

SEQ ID NO: 847112 - DNA, 75 bp, synthetic construct
  source 1..75: mol_type = other DNA
gcgtctggtcgttcttacgtcagtttatgtacactaaatttgtgatcgtttgcgatgatgacgtcaacgcacgcg

SEQ ID NO: 847113 - DNA, 75 bp, synthetic construct
  source 1..75: mol_type = other DNA
accaagaccgaagtggtgaagtgtatctccaatgaccttgaagtgcccgccagtgcggagattgtgctggaaggg

SEQ ID NO: 847114 - DNA, 75 bp, synthetic construct
  source 1..75: mol_type = other DNA
ataatagaaaacaaaaaacaaaatatcgcctttcttatttttctattacttagctttataggcataataataact

SEQ ID NO: 847115 - DNA, 75 bp, synthetic construct
  source 1..75: mol_type = other DNA
caatcgcattcccattatgacctgctggccggaagatgccgcgccgctgattacctgggggctgacagtgacgcg

SEQ ID NO: 847116 - DNA, 75 bp, synthetic construct
  source 1..75: mol_type = other DNA
cgtggtgcgccgtgtcagcaaaaaattatctccggcgatgacgtcgatcttcaccgtatccccattatgacctgc

SEQ ID NO: 847117 - DNA, 75 bp, synthetic construct
  source 1..75: mol_type = other DNA
ctgggcatttatcgccagcaactgattggtaaaaacaaactgattatgcgctggctgtcgcatcgcggcggcgcg

SEQ ID NO: 847118 - DNA, 75 bp, synthetic construct
  source 1..75: mol_type = other DNA
caaggaagctgtggacagagtgctggatcggttttcattactcactaactctgtttacgtgatattaactctgtc

SEQ ID NO: 847119 - DNA, 75 bp, synthetic construct
  source 1..75: mol_type = other DNA
ttaatggtcctaacagagtcatttattatactatttatttgtttggttttatccatttcctcgggttatactgca

SEQ ID NO: 847120 - DNA, 75 bp, synthetic construct
  source 1..75: mol_type = other DNA
gcgcggcccgcataaagagcggcagaatctgggcatttatcgccagcagctaattggtaaaaacaaactgattat

SEQ ID NO: 847121 - DNA, 75 bp, synthetic construct
  source 1..75: mol_type = other DNA
cggtacgccaaagcgcgtggcgatgggcatggggcaggaagatgtttcggcgctgcgtgaagttggtaaattatt

SEQ ID NO: 847122 - DNA, 75 bp, synthetic construct
  source 1..75: mol_type = other DNA
cattctgcaaaagcagttcccggaaattgtcgatttttacctgccgccggaaggctgctcttatcgcctggcggt

SEQ ID NO: 847123 - DNA, 75 bp, synthetic construct
  source 1..75: mol_type = other DNA
tttagcgatctccatgagatgaaaattgcgcacagggatatcgccgatcacagcctgtggatttcaccttcaaaa

SEQ ID NO: 847124 - DNA, 75 bp, synthetic construct
  source 1..75: mol_type = other DNA
atggatagttatatcgcgcttacactgtttggctgtttttttgtgctggtctttattggtgtgcccatttcgttc

SEQ ID NO: 847125 - DNA, 75 bp, synthetic construct
  source 1..75: mol_type = other DNA
ctgggcggtgtttttaccgcaactgaagcgtcagcgattgccgttgtctacacatttatgctctcggtgctgatt

SEQ ID NO: 847126 - DNA, 75 bp, synthetic construct
  source 1..75: mol_type = other DNA
gggattgtgcgtgctgtattgcgtaacggtagtgatgatgctggtgtttcagcgccaccccgaacaacgctggcg

SEQ ID NO: 847127 - DNA, 75 bp, synthetic construct
  source 1..75: mol_type = other DNA
tcttatggggttagaatctatcggctgggcacgtaaaaactggtcatcaatcttcattgagcatgatagctatag

SEQ ID NO: 847128 - DNA, 75 bp, synthetic construct
  source 1..75: mol_type = other DNA
ctaaagacctggatgaagaactggtgaaagctaaaatgcttgagcgtatgcgcgatattattgatattgctatcc

SEQ ID NO: 847129 - DNA, 75 bp, synthetic construct
  source 1..75: mol_type = other DNA
ccgggttcctggttcacttggtcatgtgaacgtcctggcgaatatgatgtttggttctatttcaggttcagccgt

SEQ ID NO: 847130 - DNA, 75 bp, synthetic construct
  source 1..75: mol_type = other DNA
tttcctcatcgatatccccgatttttcaccgtccggtgacgaacctaaaaaccacagctacagccctgaatacat

SEQ ID NO: 847131 - DNA, 75 bp, synthetic construct
  source 1..75: mol_type = other DNA
ctgaaacaagccgaacctgcgggcaatgcgatccctacatttgatgatactgagcttgatccttatcggcatgct

SEQ ID NO: 847132 - DNA, 75 bp, synthetic construct
  source 1..75: mol_type = other DNA
atggtggtcccggatgatgaaaaaatcgatctcattgataagtttgtcgcttcagttgagcatttacacggtctt

SEQ ID NO: 847133 - DNA, 75 bp, synthetic construct
  source 1..75: mol_type = other DNA
attaggctcagttgtaagttatatggctgaacgaggtcaggaagctggatacaggttcctctccgctcagcaggg

SEQ ID NO: 847134 - DNA, 75 bp, synthetic construct
  source 1..75: mol_type = other DNA
cggttgacagctatcagggcaaggaaaatcgaattatcattttatctctgacgcgttcggataagcaacatagcc

SEQ ID NO: 847135 - DNA, 75 bp, synthetic construct
  source 1..75: mol_type = other DNA
ccaaaagagatcaacgaactgaaagatattgcagtcgaactcaacttttccatccgctccagactgagtcaggag

SEQ ID NO: 847136 - DNA, 75 bp, synthetic construct
  source 1..75: mol_type = other DNA
ggcgactgaagaggcattaacatgcccgattacattatgcatccctgagcatggtgtgattatgagaaatgctgg

SEQ ID NO: 847137 - DNA, 75 bp, synthetic construct
  source 1..75: mol_type = other DNA
atacctgggcttatttaacacttcaaagaatttatcgtgataaacttcaaaaaattaaggccgactcacgcctgg

SEQ ID NO: 847138 - DNA, 75 bp, synthetic construct
  source 1..75: mol_type = other DNA
tttaaccggattgatgaaattatgagtgtgcagtatcctgaatataaagcaggtgaatattttgatgccattgaa

SEQ ID NO: 847139 - DNA, 75 bp, synthetic construct
  source 1..75: mol_type = other DNA
cagccactagtagtaacgctaaatcgtcagctattactcctgctgaggcggcaactgtatgtgcgaagactgatt

SEQ ID NO: 847140 - DNA, 75 bp, synthetic construct
  source 1..75: mol_type = other DNA
ccttgaacttaggtacttcagcgaaaggctacggtgttaatatctctggcgaaaataacattacatcatttggta

SEQ ID NO: 847141 - DNA, 75 bp, synthetic construct
  source 1..75: mol_type = other DNA
atagcgctgatcaggctgctaaatcgactgctattactcctgctgaagcggcaactgcatgtaaaaaacctgatt

SEQ ID NO: 847142 - DNA, 75 bp, synthetic construct
  source 1..75: mol_type = other DNA
tgctatagcttttacttctccggacatgaccctgcaatcgctattcatgagatgactgacttttttcaatattta

SEQ ID NO: 847143 - DNA, 75 bp, synthetic construct
  source 1..75: mol_type = other DNA
atgctgccaatgtccaacgaattattcaagacaatgcagcgctacgcaatacgttagatactatgatggatagat

SEQ ID NO: 847144 - DNA, 75 bp, synthetic construct
  source 1..75: mol_type = other DNA
tctgaccacaatccagacattgctgtcggtgaaatgcccgcattttggatgtatctagaaaatggccacaacgtc

SEQ ID NO: 847145 - DNA, 75 bp, synthetic construct
  source 1..75: mol_type = other DNA
atgtttgtcggttactttgttcatatccacaccattgataaggttaagtgccgcgtgttcatacttacacaactc

SEQ ID NO: 847146 - DNA, 75 bp, synthetic construct
  source 1..75: mol_type = other DNA
attttcaggctgcgatggagcggcaaattgcccgtaacgtgtattactggtctgttcaaccggaatcggaacttc

SEQ ID NO: 847147 - DNA, 75 bp, synthetic construct
  source 1..75: mol_type = other DNA
tgcggagaatattgctgatttgctgcatcttgatcatttgttggtggcagaatgtgaagagattgatggtgtaat

SEQ ID NO: 847148 - DNA, 75 bp, synthetic construct
  source 1..75: mol_type = other DNA
gactgctattactcctgctgaagcggcaactgcatgtaaaaatactgattcaaccaataaagttacatattttat

SEQ ID NO: 847149 - DNA, 75 bp, synthetic construct
  source 1..75: mol_type = other DNA
cagtgataaggatgataaaatcgagaaggaaatcaacgaaatccttcatgacaaagagcttttgctgtctttaga

SEQ ID NO: 847150 - DNA, 75 bp, synthetic construct
  source 1..75: mol_type = other DNA
gaatatgttttggcagaagctaatgaactgttaaaaatagaaaaagatgagttttatagtaactatcttgaaaaa

SEQ ID NO: 847151 - DNA, 75 bp, synthetic construct
  source 1..75: mol_type = other DNA
gctataagaatttagtttatcgacttacagctgtggatgcatttaatgaagaccttgttaaaggtattgatgcgt

SEQ ID NO: 847152 - DNA, 75 bp, synthetic construct
  source 1..75: mol_type = other DNA
cgtaagtgagctgatgccaattgttaataactgcctgatgacatccagattttttaatgtcgatgctactacatc

SEQ ID NO: 847153 - DNA, 75 bp, synthetic construct
  source 1..75: mol_type = other DNA
tacaaaatttagtcattaataaaatgatctttcacgttgtaggtaagaatcttgaagcaccgacacttctcaaag

SEQ ID NO: 847154 - DNA, 75 bp, synthetic construct
  source 1..75: mol_type = other DNA
gatgttggtttgcttgataatcaatttgatacgccatttgctgctcttagtgcggttaaaccattcattatcatt

SEQ ID NO: 847155 - DNA, 75 bp, synthetic construct
  source 1..75: mol_type = other DNA
caggaaatcaacgaaattcttcatgacaaagagcttctattgtcgttagagaatcctcgccgtttcattttctct

SEQ ID NO: 847156 - DNA, 75 bp, synthetic construct
  source 1..75: mol_type = other DNA
gctatcgtgatggtaatgatattgcaggaagcctgaaaactaagttcgaagaatacgttttggcagaagcaaatg

SEQ ID NO: 847157 - DNA, 75 bp, synthetic construct
  source 1..75: mol_type = other DNA
ctcccctgactttgcatatattgtcaaaacaataaaaggtgattatttaaactttattatcgaaacaaaaaatgt

SEQ ID NO: 847158 - DNA, 75 bp, synthetic construct
  source 1..75: mol_type = other DNA
acaggtaagtaaatctgtaaaagtaacttttataactcaattctcaggtgacagaatccatgatctgataaaaaa

SEQ ID NO: 847159 - DNA, 75 bp, synthetic construct
  source 1..75: mol_type = other DNA
cattctcgcgtcaaaaaccgctgagcaccaaagcacgcaaatttgttgcatgcttcaaaatccgtcagggctatc

SEQ ID NO: 847160 - DNA, 75 bp, synthetic construct
  source 1..75: mol_type = other DNA
atgttatttcaggatcgattcatcctacaaagttcactaatgaagaaggaagtcctctaaacgaggttttgtcga

SEQ ID NO: 847161 - DNA, 75 bp, synthetic construct
  source 1..75: mol_type = other DNA
caggctctaaaatttttttatgagtactggtatcaaaaacatgatgttactttctgtttgagcttccatctgtct

SEQ ID NO: 847162 - DNA, 75 bp, synthetic construct
  source 1..75: mol_type = other DNA
ctgattgaaaaccgtgatcgtattcgtcaggccatcagggggattaaagcgatgttccgcgccgatggcttactg

SEQ ID NO: 847163 - DNA, 75 bp, synthetic construct
  source 1..75: mol_type = other DNA
ttacgtcgcgccatttcccgctggtatcaggatcgctacgacgttgaaatcgacccggaatcagaagccatcgtc

SEQ ID NO: 847164 - DNA, 75 bp, synthetic construct
  source 1..75: mol_type = other DNA
cccgctggtatcaggatcgttacgacgtcgagatcgacccggaatcagaggctatcgtcaccattggctcgaaag

SEQ ID NO: 847165 - DNA, 75 bp, synthetic construct
  source 1..75: mol_type = other DNA
gaactcaacactgaccagtaccgccctgaatctgaacaagggagcaaatgctctggccagtcagagttttgtttc

SEQ ID NO: 847166 - DNA, 75 bp, synthetic construct
  source 1..75: mol_type = other DNA
tccaggcagataactccagcgtcacgctgggcgacagccgggtatttatcgacaaaaacgatggccagggaacag

SEQ ID NO: 847167 - DNA, 75 bp, synthetic construct
  source 1..75: mol_type = other DNA
attttgacgggaaaactattgcgttgccgcaggtgcgtaaaaattacccgtatgagggatttgtagagtggcatc

SEQ ID NO: 847168 - DNA, 75 bp, synthetic construct
  source 1..75: mol_type = other DNA
tattagcgggatacctgaatggacatccacgccttttcgattatggctcggaaatctacgaacctctgcacagtt

SEQ ID NO: 847169 - DNA, 75 bp, synthetic construct
  source 1..75: mol_type = other DNA
tctggcaattacacaatgccgagctttgctcaacagcagggagcagccgacaaccgccagtgaaggaactgaacg

SEQ ID NO: 847170 - DNA, 75 bp, synthetic construct
  source 1..75: mol_type = other DNA
tgcacataaatttaagtgcaggtttagaacctgttgccgctgagtgtctggcgaaaatgagccgcctgcttgatc

SEQ ID NO: 847171 - DNA, 75 bp, synthetic construct
  source 1..75: mol_type = other DNA
gtcgaaaagttacaacatggcgggctggcgtatcggctttatggtcggtaacaaaacgctggtcagcgcgttggc

SEQ ID NO: 847172 - DNA, 75 bp, synthetic construct
  source 1..75: mol_type = other DNA
aagttatccgaaaccgaagatgatgatcctcggcttcccgtcgaacccaaccgcgcaatgcgtggaactggaatt

SEQ ID NO: 847173 - DNA, 75 bp, synthetic construct
  source 1..75: mol_type = other DNA
gtgagcgtggcgatggcggcaaaattgaccgccaaagtggtacagctttatggcgaacggctggatgattttccg

SEQ ID NO: 847174 - DNA, 75 bp, synthetic construct
  source 1..75: mol_type = other DNA
aaaaaaccttctaacaaggacacgcttgatattccactggtcagcgcacctgaagcgacagctgataatctgttc

SEQ ID NO: 847175 - DNA, 75 bp, synthetic construct
  source 1..75: mol_type = other DNA
gcagattgaagaatcttactcgatttctgccggactggatttcccgtctgtcggcccacaacacgcttatctcaa

SEQ ID NO: 847176 - DNA, 75 bp, synthetic construct
  source 1..75: mol_type = other DNA
cgccaatgatgcaaaccgaagacgggcagattgaagagtcttactcgatttctgccgggctggatttcccgtccg

SEQ ID NO: 847177 - DNA, 75 bp, synthetic construct
  source 1..75: mol_type = other DNA
tacaagcaattaacaatttaatatataagacagaaatatatagcgttgttgataacctggattcagttgttctcg

SEQ ID NO: 847178 - DNA, 75 bp, synthetic construct
  source 1..75: mol_type = other DNA
aaagtcagttagttgaattcccgctggggccaacaataaacgcgccctctgaagatatgcgttttcgcgcagcag

SEQ ID NO: 847179 - DNA, 75 bp, synthetic construct
  source 1..75: mol_type = other DNA
ctcggcctgaaatgccgtatttatatgggtgccaaagacgttgaacgccagtcgcctaacgttttccggatgcgc

SEQ ID NO: 847180 - DNA, 75 bp, synthetic construct
  source 1..75: mol_type = other DNA
gttcgaatgccatcgggatgtttgctgatttcatcaacgaaaccgacgttggcctgattggggtggaaccaggcg

SEQ ID NO: 847181 - DNA, 75 bp, synthetic construct
  source 1..75: mol_type = other DNA
caacgcgagtgacattagggcgctgcccacacggtctctttagtgattgccgcacaggctgggaaatagccccct

SEQ ID NO: 847182 - DNA, 75 bp, synthetic construct
  source 1..75: mol_type = other DNA
atgtcgctgccgcacatctcccttgctgatgcgcgtaatcttcacctcgccgcgcaaggcctgttaaacaaaccc

SEQ ID NO: 847183 - DNA, 75 bp, synthetic construct
  source 1..75: mol_type = other DNA
aggtaatgaccctagctttaaccgaggggcattccggtaagcgtggtggtgccagaagctggaatgttgtctctg

SEQ ID NO: 847184 - DNA, 75 bp, synthetic construct
  source 1..75: mol_type = other DNA
agcgcgtttatgatttaacccatcgcgtcatgccgcactggaatgacgagcatgacctgctttcgcagcaggaag

SEQ ID NO: 847185 - DNA, 75 bp, synthetic construct
  source 1..75: mol_type = other DNA
atctctctgtggttacaggaaggcattaaaccaacgacaacgctgcaaaaagggttacgtcaggcgattactgat

SEQ ID NO: 847186 - DNA, 75 bp, synthetic construct
  source 1..75: mol_type = other DNA
cttttgatcctgttgtctgggatcgcaaacgcgcagagcagctttttgattttagctaccggctggagtgctata

SEQ ID NO: 847187 - DNA, 75 bp, synthetic construct
  source 1..75: mol_type = other DNA
gctggactggatctcgatttgtggggtgtgcatcgctcagcgcttgctgccgccattggcgcgcataacgcggct

SEQ ID NO: 847188 - DNA, 75 bp, synthetic construct
  source 1..75: mol_type = other DNA
cgaggccgcctatcagcgcggcttaaccagccgcttacaggccaccgaagcccggttgccagtgcttgccgaaga

SEQ ID NO: 847189 - DNA, 75 bp, synthetic construct
  source 1..75: mol_type = other DNA
gagcgcaaacagtttaaatacatgcgagcgcgctacaagcatctgcgttttgcgcaacggctgtatttaaagaag

SEQ ID NO: 847190 - DNA, 75 bp, synthetic construct
  source 1..75: mol_type = other DNA
atgatcaatcgtcaactttcacgcctgctgttgtgcagcacgacgctgatttccggctgtgccctggtacgtaag

SEQ ID NO: 847191 - DNA, 75 bp, synthetic construct
  source 1..75: mol_type = other DNA
tagaacaaactcgcgatgtgattgattacgcggtgaaagcgcaccagagtaaagtggcgcacggtctggaagcgc

SEQ ID NO: 847192 - DNA, 75 bp, synthetic construct
  source 1..75: mol_type = other DNA
gctttattacagtatgcaggccagctaccagatgctcgatctgttagagcaaacccgcagcgtgattgattacgc

SEQ ID NO: 847193 - DNA, 75 bp, synthetic construct
  source 1..75: mol_type = other DNA
aatgcgattcagagcgttttagggaggttctgttagttctcctgcattgcgcccgtagttcgctgacgctcacac

SEQ ID NO: 847194 - DNA, 75 bp, synthetic construct
  source 1..75: mol_type = other DNA
gacgtagaacaagcgatgaaaacgctgcaaacctttccgggtatcgggcgctggactgcaaattattttgctttg

SEQ ID NO: 847195 - DNA, 75 bp, synthetic construct
  source 1..75: mol_type = other DNA
ccctactttccgggtaatgcaggaggacggctgggccgggctgcgcgatcttaacggcaacatcatgcaggaaag

SEQ ID NO: 847196 - DNA, 75 bp, synthetic construct
  source 1..75: mol_type = other DNA
tttgcgcaacggctgtatttaaagaagcatcaggccggatttttattcggcaaaacgaccgtttttctggggcgt

SEQ ID NO: 847197 - DNA, 75 bp, synthetic construct
  source 1..75: mol_type = other DNA
gcacaaatccgccgttatgccgagcgctggaaaccctggcgttcttatgcgctgttgcatatctggtatacggaa

SEQ ID NO: 847198 - DNA, 75 bp, synthetic construct
  source 1..75: mol_type = other DNA
tatttaccttagtctgctgaccgttggtacgattattgcgactttctttgctccagaaacacgcgatcgtgatct

SEQ ID NO: 847199 - DNA, 75 bp, synthetic construct
  source 1..75: mol_type = other DNA
caaactggccgatgattttcatctcgccagctccggctggccacaggcgcagtggtggaaacaactcaatgatcc

SEQ ID NO: 847200 - DNA, 75 bp, synthetic construct
  source 1..75: mol_type = other DNA
ccgggcgatgaaagtcgccagcgcactgaaaatagagccagtagcgttctatcccgcttattacgaatcgatcga

SEQ ID NO: 847201 - DNA, 75 bp, synthetic construct
  source 1..75: mol_type = other DNA
tgaaaactcattatcccgcagagtttttcgctgctgctctcactattcttggcgaagataaacaccaggggctgg

SEQ ID NO: 847202 - DNA, 75 bp, synthetic construct
  source 1..75: mol_type = other DNA
agttcatcgttcaggctcaagctggctggatagacgttgagctggaagatggcactacacagcgcattcaccgtg

SEQ ID NO: 847203 - DNA, 75 bp, synthetic construct
  source 1..75: mol_type = other DNA
atggcagacgacgagcctgcaacgctgatgaaactggctgttgcagggctgcgtaaacgtcttaccacaaaagag

SEQ ID NO: 847204 - DNA, 75 bp, synthetic construct
  source 1..75: mol_type = other DNA
cgcttaaagccttctccgttcgcatggatgtgccggtaacagctgcaatggcctcaacaacgcaggataccatta

SEQ ID NO: 847205 - DNA, 75 bp, synthetic construct
  source 1..75: mol_type = other DNA
gtggtagtcgttcaaccgcactatttaacaataagagtaaaccatcagatctgattggtcgtaaggagtacttcc

SEQ ID NO: 847206 - DNA, 75 bp, synthetic construct
  source 1..75: mol_type = other DNA
gctggcagatactacaggcccgcttcccgacttttcgggtaatgcaggaagactgctgggccgggctgcgcgatc

SEQ ID NO: 847207 - DNA, 75 bp, synthetic construct
  source 1..75: mol_type = other DNA
cccggcttattattgataagctacgccatcaactgtttctgcccgttcccctctgcgaaactttccaccagcgcg

SEQ ID NO: 847208 - DNA, 75 bp, synthetic construct
  source 1..75: mol_type = other DNA
tgacgttcgagagcagcagacagccgttccgccagttcctgtaatacaggctgatgtcgcgcaagcaattgaaaa

SEQ ID NO: 847209 - DNA, 75 bp, synthetic construct
  source 1..75: mol_type = other DNA
aatggtcgccgccatctccttgaggcgcttaaagccttctccgttcgcatggatgtgccggtaacagctgcaatg

SEQ ID NO: 847210 - DNA, 75 bp, synthetic construct
  source 1..75: mol_type = other DNA
agcaagtgtggtgccaggcactttttgctaaaggacttatcagagacttaggcgaggccggcacgtcgtggctgc

SEQ ID NO: 847211 - DNA, 75 bp, synthetic construct
  source 1..75: mol_type = other DNA
gcgcaggcggaaaatattttcacccgtgagcagttgctgcgctatttcccttattacctgctggttaactccact

SEQ ID NO: 847212 - DNA, 75 bp, synthetic construct
  source 1..75: mol_type = other DNA
cgaatatcgcggcgtggtgactgctattccggatatagcccgccatactctgcacataaatttaagtgcaggttt

SEQ ID NO: 847213 - DNA, 75 bp, synthetic construct
  source 1..75: mol_type = other DNA
atcgcctccgacatgaataaacccaacggccagtttgtgattacgccggcagaagtttcggcatttctgcaaacc

SEQ ID NO: 847214 - DNA, 75 bp, synthetic construct
  source 1..75: mol_type = other DNA
tgactctgctcaaacgttttggcaaatttggccgcattttgtgggagcgtagtcagggcattgacgagcgcgatg

SEQ ID NO: 847215 - DNA, 75 bp, synthetic construct
  source 1..75: mol_type = other DNA
cgacagtctgctggaggatgaggggctgaagcgggaagtgcccatcatggtcgccagtttcgagcaggcgctgca

SEQ ID NO: 847216 - DNA, 75 bp, synthetic construct
  source 1..75: mol_type = other DNA
atttgccacaaaatggctatttcatggaacgcagtaatttcttagtggctattatcatgctaattcttaggtccc

SEQ ID NO: 847217 - DNA, 75 bp, synthetic construct
  source 1..75: mol_type = other DNA
tcggtacaatgatgcatatcggtatccactctccgtcggcgcagtatttcgccatcgccatgctgctgatgttta

SEQ ID NO: 847218 - DNA, 75 bp, synthetic construct
  source 1..75: mol_type = other DNA
acggccagtttgtgattacgccggcagaagttccggcatttttacaaaccttaccactggcaaaaatccccggcg

SEQ ID NO: 847219 - DNA, 75 bp, synthetic construct
  source 1..75: mol_type = other DNA
tgcaacttaccgcctctgcgggcattgcgccggtaaagtttcttgccaaaatcgcctctgatatgaataaaccca

SEQ ID NO: 847220 - DNA, 75 bp, synthetic construct
  source 1..75: mol_type = other DNA
ctcgccagggggtgaaattaaagttcgacgattttcagcaaaccactcaggagcacgtctggccgcggctgaata

SEQ ID NO: 847221 - DNA, 75 bp, synthetic construct
  source 1..75: mol_type = other DNA
gttgttgagtgatgataaaaatgatgtccagcatcatttggacgaaaagaatcatatttctgaaatttgtatgaa

SEQ ID NO: 847222 - DNA, 75 bp, synthetic construct
  source 1..75: mol_type = other DNA
ttgatttgcttatcaccggtcgcaatctcacgctgaacagcgccagtgagccggtgttatgcaacaacagggaaa

SEQ ID NO: 847223 - DNA, 75 bp, synthetic construct
  source 1..75: mol_type = other DNA
tcggcaaagtctcggcggcaaaactggaagcgatggggctacggacctgcggcgatgtacaaaagtgtgatctgg

SEQ ID NO: 847224 - DNA, 75 bp, synthetic construct
  source 1..75: mol_type = other DNA
tgcgccggtcaagtttctcgccaaaatcgcctcagacatgaataaacccaacggtcagtttgtgattacgccggc

SEQ ID NO: 847225 - DNA, 75 bp, synthetic construct
  source 1..75: mol_type = other DNA
agtcctggaacctggttatggatgcaatcactaatccgccagcaccgaatgaccggctgaaacgcgccgctaacc

SEQ ID NO: 847226 - DNA, 75 bp, synthetic construct
  source 1..75: mol_type = other DNA
tcaccgacagcgtacattgccacggttctgcgaccctcattgcccaggaaatccgccagacgatttttaacgagt

SEQ ID NO: 847227 - DNA, 75 bp, synthetic construct
  source 1..75: mol_type = other DNA
ctatacctcgcgtattgagccactgtcgctggatgaagcttatcttgacgttaccgacagtgtacattgccacgg

SEQ ID NO: 847228 - DNA, 75 bp, synthetic construct
  source 1..75: mol_type = other DNA
actataaaggtcagccagcggttggaccggaaaccaaagaaatcagtccgtacagcattgttggcctgagcgcga

SEQ ID NO: 847229 - DNA, 75 bp, synthetic construct
  source 1..75: mol_type = other DNA
gagcacgtctggccgcggctgaataaagctgatctaatcgccaccgcgcgtaaaacctgggatgaacgccgcggc

SEQ ID NO: 847230 - DNA, 75 bp, synthetic construct
  source 1..75: mol_type = other DNA
ttaccactggcaaaaatccccggcgtcggcaaagtctcggcggcaaaactggaagcgatggggctgcggacctgc

SEQ ID NO: 847231 - DNA, 75 bp, synthetic construct
  source 1..75: mol_type = other DNA
atcgcttctgacatgaataaacccaacggtcagtttgtgattactccggctgacgttccggcatttctgcaaacc

SEQ ID NO: 847232 - DNA, 75 bp, synthetic construct
  source 1..75: mol_type = other DNA
atcactcgaactggaagcgggttacagccgccagggtaacctgtatgcgggcgatactcagaacaccaactctga

SEQ ID NO: 847233 - DNA, 75 bp, synthetic construct
  source 1..75: mol_type = other DNA
ctacagtaaaggtcagggctgctatgccagcgcgggcggctgctatctgcaaggtaacgatgacctgaaagcaga

SEQ ID NO: 847234 - DNA, 75 bp, synthetic construct
  source 1..75: mol_type = other DNA
tggttgaaggtctggaaggatcgttaaacgtaccggttagcgaaacggtgatgtggaccaataacatcacttata

SEQ ID NO: 847235 - DNA, 75 bp, synthetic construct
  source 1..75: mol_type = other DNA
ttgtcggcaataactggagtccggcactgaacgtgtcgcaaggtttaggcgatgattttaccctcaaaatgggga

SEQ ID NO: 847236 - DNA, 75 bp, synthetic construct
  source 1..75: mol_type = other DNA
atgaacaagaagattcattccctggccttgttggtcaatctggggatttatggggtagcactggcagaagagaca

SEQ ID NO: 847237 - DNA, 75 bp, synthetic construct
  source 1..75: mol_type = other DNA
agaattactcactgacctggaacggtggctgggataacggtgttaccaccagtaactgggtgcagtacgaacaca

SEQ ID NO: 847238 - DNA, 75 bp, synthetic construct
  source 1..75: mol_type = other DNA
tccatggacagccagatgctcaatgggcatgggatatccatgcaacttctggggattgatattgccgaaaggcca

SEQ ID NO: 847239 - DNA, 75 bp, synthetic construct
  source 1..75: mol_type = other DNA
cgcgttcagaagcgcctgggagaaatgctgaacgaccaacaacatcgggagctgacggggttaatgcaggagtag

SEQ ID NO: 847240 - DNA, 75 bp, synthetic construct
  source 1..75: mol_type = other DNA
gatttagtacgtgaaatactcagcgcaagaccaaatgaatttaaggaggataaatttacgattgataaacttgtc

SEQ ID NO: 847241 - DNA, 75 bp, synthetic construct
  source 1..75: mol_type = other DNA
aggtgcagagccatctaccgttgcccattgccgggctgatgagcaccgacacggcgcagtcgctggcggaacaaa

SEQ ID NO: 847242 - DNA, 75 bp, synthetic construct
  source 1..75: mol_type = other DNA
tttcacctggaggaactgcttaataagtcgatccatatcattgatatggccgccttcagcacagcggaccccctg

SEQ ID NO: 847243 - DNA, 75 bp, synthetic construct
  source 1..75: mol_type = other DNA
tttgtgcgctgggatcgccctatcagcgatgctgcggcccttctggccgagcgcatcacctatacccccttctgg

SEQ ID NO: 847244 - DNA, 75 bp, synthetic construct
  source 1..75: mol_type = other DNA
aaagccgaactccacgcggaaagtctggtttatcgctacgactacgaggttgcacactggcagattgcacgtgtt

SEQ ID NO: 847245 - DNA, 75 bp, synthetic construct
  source 1..75: mol_type = other DNA
gcaaaaccagtacttacaggtcagctcttgcgtacccgctctggaaggctgcgatgttaacggtgccagttttac

SEQ ID NO: 847246 - DNA, 75 bp, synthetic construct
  source 1..75: mol_type = other DNA
gccacgaaagttatcagctggaagaaggacgccggaaattacaactcggtatgtcgttgatgatccgcgaagggt

SEQ ID NO: 847247 - DNA, 75 bp, synthetic construct
  source 1..75: mol_type = other DNA
tgaatgcggtccgttacccgatgagccgtttattcagatggcgtttctttctctgccagtgatccccgcgctaaa

SEQ ID NO: 847248 - DNA, 75 bp, synthetic construct
  source 1..75: mol_type = other DNA
ccaggaattgttagccgtttcccgtggcgaagccgttgccgattatattattgataatgtctctattctggatct

SEQ ID NO: 847249 - DNA, 75 bp, synthetic construct
  source 1..75: mol_type = other DNA
aagccggattcgcctggtttgcccgctgtgccgaacaggcaaggcaaaaccagtacttacaggtcagctcttgcg

SEQ ID NO: 847250 - DNA, 75 bp, synthetic construct
  source 1..75: mol_type = other DNA
agtcgctggcggagcaaattgacgccttgaaagccgccgcccgtgaatgcggtccgttacccgatgagccgttta

SEQ ID NO: 847251 - DNA, 75 bp, synthetic construct
  source 1..75: mol_type = other DNA
ctgggcatgggatgcagagtacgagcagcgctacgctagtgtgaactacttggcgcaacaaagtgaaaaattgct

SEQ ID NO: 847252 - DNA, 75 bp, synthetic construct
  source 1..75: mol_type = other DNA
cataaatggtttgagtcggtatggacgggtgattatcttctgttgtggaaaatgtcgccggaaggggagagtacc

SEQ ID NO: 847253 - DNA, 75 bp, synthetic construct
  source 1..75: mol_type = other DNA
cgtcaatgcacatgacttattcttttacacgccagaacagccaggagtaaagttatctaaagaacaagttttgat

SEQ ID NO: 847254 - DNA, 75 bp, synthetic construct
  source 1..75: mol_type = other DNA
tttttgctgtccatcagggcaatggcccgggcttttttctgctcaaaagtcacaggagcacctccgttccatgat

SEQ ID NO: 847255 - DNA, 75 bp, synthetic construct
  source 1..75: mol_type = other DNA
acgctggggagcgatgaacgtagaagtgaaggacggcaagattgtttcttcgacaggcgcgctggcgaaaaccat

SEQ ID NO: 847256 - DNA, 75 bp, synthetic construct
  source 1..75: mol_type = other DNA
gcgcggcggcgtacggttgtcagagcagatccagaatgatttattgctgcgggcgacgggggggagtgtgtgtgt

SEQ ID NO: 847257 - DNA, 75 bp, synthetic construct
  source 1..75: mol_type = other DNA
aaagcttttatcagattgttgaatgatgaagccgtacgttcagtcttaacacaaaagccatcgattgcacaaaat

SEQ ID NO: 847258 - DNA, 75 bp, synthetic construct
  source 1..75: mol_type = other DNA
gataaaggctttattactcacatgcctgaaagtaaggaggatgcagtcagcatcactaatcagattgaggcgaaa

SEQ ID NO: 847259 - DNA, 75 bp, synthetic construct
  source 1..75: mol_type = other DNA
ggggcacattctcaccaacagcccggcgatgatggacatctgcaaagacaccgccaaaattgccctttctcaggc

SEQ ID NO: 847260 - DNA, 75 bp, synthetic construct
  source 1..75: mol_type = other DNA
gccgctatcgctacgccggaactactggcccggcttgcaaactatcgcttacagcaggagtcacttggtgccgcg

SEQ ID NO: 847261 - DNA, 75 bp, synthetic construct
  source 1..75: mol_type = other DNA
gagtcgtgtcatgggcttcaggctggggaatccggtaacgtatgagttgcaggagggggaccatggctggtcagt

SEQ ID NO: 847262 - DNA, 75 bp, synthetic construct
  source 1..75: mol_type = other DNA
gcagccatagtccgggtcaccatcggcgaatacggtggcgatggttttctgaacggcacggtctgtacctgtaca

SEQ ID NO: 847263 - DNA, 75 bp, synthetic construct
  source 1..75: mol_type = other DNA
atataaatagaattaaaagcaccatccagacatggaatggtaagttaacatgggattcattatgtgaatctgtaa

SEQ ID NO: 847264 - DNA, 75 bp, synthetic construct
  source 1..75: mol_type = other DNA
gctcttaacagtcatactcgggagtcttttttttcgtgcatcgaagcgcaactccgcaaaggaggcaaccagtga

SEQ ID NO: 847265 - DNA, 75 bp, synthetic construct
  source 1..75: mol_type = other DNA
ccaacctgtaagccaaacttacaagtttccagttaatacaccttgccaggatgcgccagcccatatctggctgca

SEQ ID NO: 847266 - DNA, 75 bp, synthetic construct
  source 1..75: mol_type = other DNA
ttgaacggtgccgcctggtaagccggggagattttctaatcagtgccggaattagaaaaaacagccctgacggca

SEQ ID NO: 847267 - DNA, 75 bp, synthetic construct
  source 1..75: mol_type = other DNA
atttgcctagaaacttaacatatcgaaggagagacaaagcatattactggcgcaaccctctcacgaaagaagaat

SEQ ID NO: 847268 - DNA, 75 bp, synthetic construct
  source 1..75: mol_type = other DNA
caaagagcttacgcctgagattatgcgcaaccatttagctgtattcgagcgatatggaatagccccaaacgatag

SEQ ID NO: 847269 - DNA, 75 bp, synthetic construct
  source 1..75: mol_type = other DNA
atcgccgtttcagaaaccacctcgcttccaacactgccgctggatttacgtgagtttcagatgcagcaggaaaaa

SEQ ID NO: 847270 - DNA, 75 bp, synthetic construct
  source 1..75: mol_type = other DNA
aaccagaagcgcgcggctgaattgctggggttaacctatcatcagttccgcgcattgcttaaaaagcaccagatt

SEQ ID NO: 847271 - DNA, 75 bp, synthetic construct
  source 1..75: mol_type = other DNA
gttgtcagttgctctgcctgagtggttgccggaaacactctggcatgagtgggttcaattcaggcaggcattgcg

SEQ ID NO: 847272 - DNA, 75 bp, synthetic construct
  source 1..75: mol_type = other DNA
aaaagctcgaaaaaacgggcggttacaaacgagagagttacaaaaatacgcgaactgaagcgaaaaggtaacgct

SEQ ID NO: 847273 - DNA, 75 bp, synthetic construct
  source 1..75: mol_type = other DNA
gaaggccagaaacgtagcgaggagatcaaccgcctgaatcgccagttgcgggtggaaaaaattctgaatcgttca

SEQ ID NO: 847274 - DNA, 75 bp, synthetic construct
  source 1..75: mol_type = other DNA
gacaacaaaaatgtatcttgatgagagagaaaaaacgtactactgctctgattttaacgtaaatggattgttaaa

SEQ ID NO: 847275 - DNA, 75 bp, synthetic construct
  source 1..75: mol_type = other DNA
aaaaactgggagggattttacttacagaaataaccactcgccatattgccgattttcttgattcgtggattgaag

SEQ ID NO: 847276 - DNA, 75 bp, synthetic construct
  source 1..75: mol_type = other DNA
atggctaatgtaccaccaaaaccgcgtaacaccaaaggcgagccgccaagtctggaggatacacaacacggattt

SEQ ID NO: 847277 - DNA, 75 bp, synthetic construct
  source 1..75: mol_type = other DNA
taagcccgacggagagagaaatattgcgctttatgtcgcgtggctactcaatgacacaaattgccgagcagctta

SEQ ID NO: 847278 - DNA, 75 bp, synthetic construct
  source 1..75: mol_type = other DNA
atgggctggagggaaaagtatctactaaaagtatcggagacattcttgatgatgaactgggcggggagcgtgcgt

SEQ ID NO: 847279 - DNA, 75 bp, synthetic construct
  source 1..75: mol_type = other DNA
atgggttggaggggaacgtttctaccaaaagtatcggagacattcttgatgacgaactgagcggagatcgtgtgt

SEQ ID NO: 847280 - DNA, 75 bp, synthetic construct
  source 1..75: mol_type = other DNA
aaatactcctaaaaaatggcggatgtactttttttttaggggagaacgaaaatttattggggattttgaactaga

SEQ ID NO: 847281 - DNA, 75 bp, synthetic construct
  source 1..75: mol_type = other DNA
ttattgctacggagcctatgatgaaacgctgttcgatgttcatcatatcaatctgcaaaagcaggataaccgaat

SEQ ID NO: 847282 - DNA, 75 bp, synthetic construct
  source 1..75: mol_type = other DNA
gctgcgcggacattatgcgccgcaggtggatttatgaccctgaatcaggtttattattcagccgtgaaacgaaag

SEQ ID NO: 847283 - DNA, 75 bp, synthetic construct
  source 1..75: mol_type = other DNA
caagaatattcgcctgatgccgaaagaaaagcaccgccggatacataaaaacgtccgcaaacttattcggctggg

SEQ ID NO: 847284 - DNA, 75 bp, synthetic construct
  source 1..75: mol_type = other DNA
agcggcacgcatgtctaagatcgtagacacagagcaagcgtgggcattctttgaaaaactggaagacagctactt

SEQ ID NO: 847285 - DNA, 75 bp, synthetic construct
  source 1..75: mol_type = other DNA
atcagcctgatgaaattcccgttctggaatggcagggagtacgcgtcgtgacaaccgagactcttgctagagggt

SEQ ID NO: 847286 - DNA, 75 bp, synthetic construct
  source 1..75: mol_type = other DNA
agtcgattttgccgaccgggtatcagtagctaaagggatcctgattgggaattttgcaaaggttgttggacttaa

SEQ ID NO: 847287 - DNA, 75 bp, synthetic construct
  source 1..75: mol_type = other DNA
aagattgatctcggatagaataagatataacaaaaagaaaaatattgttttcaaagaagcgactttaatacgagg

SEQ ID NO: 847288 - DNA, 75 bp, synthetic construct
  source 1..75: mol_type = other DNA
aggtaagattgattttttaatttgtacctcaactttagttgagggcgtaaacatggcttgtaaaaatatttttat

SEQ ID NO: 847289 - DNA, 75 bp, synthetic construct
  source 1..75: mol_type = other DNA
gctgttcgcgctgcgcaacgggatgccgatacactgggcgtcatcttcgcacggtgcagaagttcaaaatgcgca

SEQ ID NO: 847290 - DNA, 75 bp, synthetic construct
  source 1..75: mol_type = other DNA
ccgttacgcgcctggagtcacttctggcgagtgtcagagaggttaaccgcgctgctattaacagcatgtttacca

SEQ ID NO: 847291 - DNA, 75 bp, synthetic construct
  source 1..75: mol_type = other DNA
aactaaaaaacgaccatatggctagttcaaggctcatttctttatgggcgatcatgtatgcgcgggcgcaatgga

SEQ ID NO: 847292 - DNA, 75 bp, synthetic construct
  source 1..75: mol_type = other DNA
ttgaagacctgagcacgattgcggaatacatgcgcgacgatgatcctgatcgtcctgtcgtcgttgatatgaaaa

SEQ ID NO: 847293 - DNA, 75 bp, synthetic construct
  source 1..75: mol_type = other DNA
tcttgagcatgtgtcggtcacggatgcagggcaggccggagttgctgcaatgattatcaacgatgccctgcacca

SEQ ID NO: 847294 - DNA, 75 bp, synthetic construct
  source 1..75: mol_type = other DNA
tatctgtgaggagattgggagagatggcgttctggttattttggaggccatgaaggcaacaggaaatatgccagc

SEQ ID NO: 847295 - DNA, 75 bp, synthetic construct
  source 1..75: mol_type = other DNA
tgcagagcttgagactaatcgcgcggcgctggtggtggagaatgagctggctcgtaaagcagttcaggcattctg

SEQ ID NO: 847296 - DNA, 75 bp, synthetic construct
  source 1..75: mol_type = other DNA
tggcctgacttcgccgttaatattgtccggtatgttgatgttgcttaccgcactgttggttaccgcaaaggtgaa

SEQ ID NO: 847297 - DNA, 75 bp, synthetic construct
  source 1..75: mol_type = other DNA
gtagatggcttaacgctggtactgctgagttttggtctcgccagctttgtcggtacatcgctttcgtcgatcatt

SEQ ID NO: 847298 - DNA, 75 bp, synthetic construct
  source 1..75: mol_type = other DNA
tttcctcgcagtgatatttttctttgggtttaaatataaccatgaccctgaaaagataacgcatcgttcagttac

SEQ ID NO: 847299 - DNA, 75 bp, synthetic construct
  source 1..75: mol_type = other DNA
agctcgcgcctaatttctttgcgggcgatcatgtatgcgcgggcacagtggaaaaatagtaacggtgtatcatga

SEQ ID NO: 847300 - DNA, 75 bp, synthetic construct
  source 1..75: mol_type = other DNA
attataaaagcgcgctgggaaagttggcaggaatacaaagcaaaaaataaggcaaaaagaaataatgcggcaaat

SEQ ID NO: 847301 - DNA, 75 bp, synthetic construct
  source 1..75: mol_type = other DNA
tgatggcttaaccctggtgctgctgagttttggtatcgccagctttgtcgggacatcgctttcgtcgtttattct

SEQ ID NO: 847302 - DNA, 75 bp, synthetic construct
  source 1..75: mol_type = other DNA
gtgccgtattgcagagcttgaaactaatatcgcggcgctggtggcagagaacgccggactgaaacacgcaatggc

SEQ ID NO: 847303 - DNA, 75 bp, synthetic construct
  source 1..75: mol_type = other DNA
cccaattgtcgcgctggatcgcgccctcgatcgtgaacatttcaccagcgtggttggtgccgaccaggatgatgc

SEQ ID NO: 847304 - DNA, 75 bp, synthetic construct
  source 1..75: mol_type = other DNA
gcccagttattcgaaaaatggctggaaacgcatccgatgccgcaggcgctgttcacaacgtcgtttgcgttgttg

SEQ ID NO: 847305 - DNA, 75 bp, synthetic construct
  source 1..75: mol_type = other DNA
tggcgggagtgtcgcggaccactgcaagctatgttattaacggcaaagcgaagcaataccgtgtgagcgacaaaa

SEQ ID NO: 847306 - DNA, 75 bp, synthetic construct
  source 1..75: mol_type = other DNA
ggagcttattgacgctctggtctctgttattaatgccgatgctgatgcgcccttcagtgcttatgcaggtcaggt

SEQ ID NO: 847307 - DNA, 75 bp, synthetic construct
  source 1..75: mol_type = other DNA
actgtatgccattgctcaggggaacggcaccggacaggcaacggctgcggccatgaatctgaccggaacggtcac

SEQ ID NO: 847308 - DNA, 75 bp, synthetic construct
  source 1..75: mol_type = other DNA
ggtgccggtgttctggatgttccggtcaggatcacccgtgcgtctcaggcaacagaactctgggggcgcggttcc

SEQ ID NO: 847309 - DNA, 75 bp, synthetic construct
  source 1..75: mol_type = other DNA
gcaatccaaaaatagaacaacgacaacatatccagaatggtatggagctgttaataaaggtcttgcagcaatcag

SEQ ID NO: 847310 - DNA, 75 bp, synthetic construct
  source 1..75: mol_type = other DNA
cgtgaagttttcgacgttacacgcatgattttgtcagcgaaagaagagttggctaatgaagcgcatccgattgat

SEQ ID NO: 847311 - DNA, 75 bp, synthetic construct
  source 1..75: mol_type = other DNA
ctgcgatgattattaatgatgccctgcaccacagcgaaacgccagctaccgacgctttcctggcggaagtgcggg

SEQ ID NO: 847312 - DNA, 75 bp, synthetic construct
  source 1..75: mol_type = other DNA
ggccaggatgccgctcgtgacctacaaggtgtgggcggcgagcctcctgccgtgaccgcgccgctggagcaggtg

SEQ ID NO: 847313 - DNA, 75 bp, synthetic construct
  source 1..75: mol_type = other DNA
ggacgcgtcgagcgcgttaagtcgaacatccccatgcagcgcggcggacaggcggaagaggtcgcgcaggccatt

SEQ ID NO: 847314 - DNA, 75 bp, synthetic construct
  source 1..75: mol_type = other DNA
atggctatagcacttgtgaccggtggcagtcgcggcatcgggcgggcaactgcattactgttggcgaaagaagag

SEQ ID NO: 847315 - DNA, 75 bp, synthetic construct
  source 1..75: mol_type = other DNA
gcgctgactttgcctaagattccggttgcggagaaaaaatcggccacgtcgcttgccagcaagctgggtctggat

SEQ ID NO: 847316 - DNA, 75 bp, synthetic construct
  source 1..75: mol_type = other DNA
ccgcgaatgatgtggagttgaagccttacaacgtcagcgcccagcggcgggaagtgttgatggagcttgatgacg

SEQ ID NO: 847317 - DNA, 75 bp, synthetic construct
  source 1..75: mol_type = other DNA
accgcctcgatgcccggcgtggcgctgaaaaatggtcgcaaaggcgagatggtgaaagtacgtaacgccagcagt

SEQ ID NO: 847318 - DNA, 75 bp, synthetic construct
  source 1..75: mol_type = other DNA
gcgcaacagcggcgctggcatgactatcgctacacctttaaggtctacattccctcgcagattgcgaccgccgcg

SEQ ID NO: 847319 - DNA, 75 bp, synthetic construct
  source 1..75: mol_type = other DNA
atgaccactattaccagagaacaagctctgaaaattattgaggcagccgatgaggttattagtgcgctggccgga

SEQ ID NO: 847320 - DNA, 75 bp, synthetic construct
  source 1..75: mol_type = other DNA
ctggttgcccgcgatacgccgctcacggcaaatgatgtggagctgaagccctacaacgtcagcgcccagcggcgg

SEQ ID NO: 847321 - DNA, 75 bp, synthetic construct
  source 1..75: mol_type = other DNA
ggtgaaagtacgtaacgtcagcagccagcgggtcattagcgcgagggtggcggaaagcggcgtggtgacaacggt

SEQ ID NO: 847322 - DNA, 75 bp, synthetic construct
  source 1..75: mol_type = other DNA
cgttattgaacgcgccgtcgtgatgaattcaggcccgatcattttttctgaggatcttccgccacagattcgtca

SEQ ID NO: 847323 - DNA, 75 bp, synthetic construct
  source 1..75: mol_type = other DNA
cagcgtcttgattagcggtgaaagcggcaccgggaaagaattgattgccagagcgattcactacaattcgcggcg

SEQ ID NO: 847324 - DNA, 75 bp, synthetic construct
  source 1..75: mol_type = other DNA
ccgtatgctgagcaccgcttttgcactacaaggattcgaaacacattgtgcgaacaacggacgcacagcattaca

SEQ ID NO: 847325 - DNA, 75 bp, synthetic construct
  source 1..75: mol_type = other DNA
cgctgacttcgcctgcggaaatcgcccttaaccggatgaacttcaccgtcagttgcccgcaaagctggcagatga

SEQ ID NO: 847326 - DNA, 75 bp, synthetic construct
  source 1..75: mol_type = other DNA
atgatggcaccgaatatccggatccgcactcagttacgcactggcgtgaaatgccagcagcaccgaagcaggagg

SEQ ID NO: 847327 - DNA, 75 bp, synthetic construct
  source 1..75: mol_type = other DNA
tcaggtgacatttgatggttctcagtggcgtacagtcagcgtgggtgagtatgtgtcgtcaggagcttcggggtt

SEQ ID NO: 847328 - DNA, 75 bp, synthetic construct
  source 1..75: mol_type = other DNA
ccgatagcgttagaggccattgaaaacgcaattgaatatatccgcagtatcgcttttcacatcgatgaagacgat

SEQ ID NO: 847329 - DNA, 75 bp, synthetic construct
  source 1..75: mol_type = other DNA
ggatacgatgttttgggtgatgttaattaatgcgatggcatttatgccgactatcgcattatcgaacagcgtctc

SEQ ID NO: 847330 - DNA, 75 bp, synthetic construct
  source 1..75: mol_type = other DNA
cgatattttaatccaataggtgctcatgagtcaggtaatataggtgaacatccaaatggggttccaaataatctt

SEQ ID NO: 847331 - DNA, 75 bp, synthetic construct
  source 1..75: mol_type = other DNA
gtatggttgtgattacccaacgtctgatggttctggtgttcgagattatattcatgtagttgatcttgctgaagc

SEQ ID NO: 847332 - DNA, 75 bp, synthetic construct
  source 1..75: mol_type = other DNA
tttatgcggcgtcggtgagtgatccggatacgatgttttgggtgatgttaatcaatgcgatggcatttatgccga

SEQ ID NO: 847333 - DNA, 75 bp, synthetic construct
  source 1..75: mol_type = other DNA
attaccaacgtttttggtaatccgttcctacatgatttcgcccgtaacccggagtttgctgacagttttgtggtg

SEQ ID NO: 847334 - DNA, 75 bp, synthetic construct
  source 1..75: mol_type = other DNA
ccattcgcgtttttggtacggtaggatttattgtcgcgatgtgggcggtcagcttactgcatctggaattgagca

SEQ ID NO: 847335 - DNA, 75 bp, synthetic construct
  source 1..75: mol_type = other DNA
tcaccgcaccgccatgcttcagggtaaccaacctgtaagccaaacttacaagtttccacaaacgcagtttgaaga

SEQ ID NO: 847336 - DNA, 75 bp, synthetic construct
  source 1..75: mol_type = other DNA
tttaaataatggcatagtcggttttgatgaaggctggaacgcccgccgcaccgccatgattcatggtgccgtacc

SEQ ID NO: 847337 - DNA, 75 bp, synthetic construct
  source 1..75: mol_type = other DNA
gtctctccggagagctgaacgagctggcaatttatgaggctggttatcagttaagtctgtttgattctctgctac

SEQ ID NO: 847338 - DNA, 75 bp, synthetic construct
  source 1..75: mol_type = other DNA
tagaattaggctatgatcgccgtaaattcaacctcccattagaagggaagtcattaatatttgctaactcagaag

SEQ ID NO: 847339 - DNA, 75 bp, synthetic construct
  source 1..75: mol_type = other DNA
tcgtctaaagaaactggagttcgacgggaaagtaaagcgcgttaacagttcttatataagacaaatttgctggga

SEQ ID NO: 847340 - DNA, 75 bp, synthetic construct
  source 1..75: mol_type = other DNA
atttaccgacaaagaactgattaaagaaatcaaagagcgcataggcagtctggatgtgcgagacaatattgagcg

SEQ ID NO: 847341 - DNA, 75 bp, synthetic construct
  source 1..75: mol_type = other DNA
acgctaatgatgggtggataattcctggtgcgtcgtggaaaccgtcacactggatgcggctaccagaaccgccgc

SEQ ID NO: 847342 - DNA, 75 bp, synthetic construct
  source 1..75: mol_type = other DNA
ctaatcccgacgccagattttgctggcgtgcgaagaatataatcccggatatgtgttgtcgtcaacataccttga

SEQ ID NO: 847343 - DNA, 75 bp, synthetic construct
  source 1..75: mol_type = other DNA
atgaactacattatcgaatactacagtgacgaggttgaagctgagatcctttctcttcctgagaccttacaagcc

SEQ ID NO: 847344 - DNA, 75 bp, synthetic construct
  source 1..75: mol_type = other DNA
ggcatggactagggatagttggtgtggggtgtgaacaatctccagaacttaataatttgtataaaatctcagaaa

SEQ ID NO: 847345 - DNA, 75 bp, synthetic construct
  source 1..75: mol_type = other DNA
acgatacattctggaatggcagtattctcggctattggctgaagtatacccatacccggaaagagttactcctta

SEQ ID NO: 847346 - DNA, 75 bp, synthetic construct
  source 1..75: mol_type = other DNA
gctcaatgaaacatttaaatactatacgacagcgacatttatcgcttcagtcatcgctctggcgggcacattcct

SEQ ID NO: 847347 - DNA, 75 bp, synthetic construct
  source 1..75: mol_type = other DNA
gaattatccgaaaccaaggctgttcgtaaccaatggcggccagatatttgcccaataaccggacgtacatttttc

SEQ ID NO: 847348 - DNA, 75 bp, synthetic construct
  source 1..75: mol_type = other DNA
tgctcgatgccgggctgagtgcggaagaagccagcgcaggcgcacacgcggcaatgatcaactttgccaaatggc

SEQ ID NO: 847349 - DNA, 75 bp, synthetic construct
  source 1..75: mol_type = other DNA
aggcggtacgggaagcggaacccgagatttatcacgacgtgacgcgctggcgttttcgctcaatagaacaagcga

SEQ ID NO: 847350 - DNA, 75 bp, synthetic construct
  source 1..75: mol_type = other DNA
tgcgtgaggcggcagagcaggaaatgcatgacgactggggatttgacgcggaccttttccatgagctggtaacac

SEQ ID NO: 847351 - DNA, 75 bp, synthetic construct
  source 1..75: mol_type = other DNA
gcaatacatcaaaagccgcgatcaggagaacgaggatattgcgctaacggtagggaagctgagagttgagcttga

SEQ ID NO: 847352 - DNA, 75 bp, synthetic construct
  source 1..75: mol_type = other DNA
gaatgtcttgggttatatctgattgatgatagagaacaatgcagggtctacgaactggaggaacgcgttaaggaa

SEQ ID NO: 847353 - DNA, 75 bp, synthetic construct
  source 1..75: mol_type = other DNA
cttaatccgggaacaaaccttgctgcagagccagcagtctgtactgcaagaccaggtaagagaactaaccacact

SEQ ID NO: 847354 - DNA, 75 bp, synthetic construct
  source 1..75: mol_type = other DNA
tagcgaggaagagaagccatttgaattgccggaggggtgggagtgggttgcattacaagaaatatgctcattaga

SEQ ID NO: 847355 - DNA, 75 bp, synthetic construct
  source 1..75: mol_type = other DNA
taacaccttaattccgctagcacccagtatggaagcagcaaaaattattgataatataaaaaaaattgaagatat

SEQ ID NO: 847356 - DNA, 75 bp, synthetic construct
  source 1..75: mol_type = other DNA
tggctttaaattagagcagtccagatggattactgatgaatctattccctcatatacagaagagcgttttttaaa

SEQ ID NO: 847357 - DNA, 75 bp, synthetic construct
  source 1..75: mol_type = other DNA
cgtcatcgcacacctttcctgaactactgccagcaagcgtggcaattgcaaaacggagcgctccagccactatgt

SEQ ID NO: 847358 - DNA, 75 bp, synthetic construct
  source 1..75: mol_type = other DNA
gtggtcatcgcctgcgccatcgcgatgcagccaaagctcttaattcttgatgaagcctttagccgcctgactccg

SEQ ID NO: 847359 - DNA, 75 bp, synthetic construct
  source 1..75: mol_type = other DNA
attgcccgacacactcaacgcatcctccgttctgttatgactttcactatgtcaaaccggggatggtcgccatct

SEQ ID NO: 847360 - DNA, 75 bp, synthetic construct
  source 1..75: mol_type = other DNA
ttccatgggtaaccccaaaagatatgaaaacgaatctaatagtcgattctgaagataaggtgactcctttagccc

SEQ ID NO: 847361 - DNA, 75 bp, synthetic construct
  source 1..75: mol_type = other DNA
agaacgaacctcaaactgggacagggtaaataccgcgcattacgctcagtgaatagtaatatgtacaaaaaacag

SEQ ID NO: 847362 - DNA, 75 bp, synthetic construct
  source 1..75: mol_type = other DNA
tagctgtgagttaaaacaaaaagagcggcaattgaatagagcaaaagaacgcgctcagaatttgaagagaaccgt

SEQ ID NO: 847363 - DNA, 75 bp, synthetic construct
  source 1..75: mol_type = other DNA
tagcgaggaagagaagccgtttgaattgccggagggatgggagtgggtgcgggttgcagatctcatggaggttat

SEQ ID NO: 847364 - DNA, 75 bp, synthetic construct
  source 1..75: mol_type = other DNA
aaattagttgatgctatgtctgaatccttaaagatcgggatccaatctgcccaacaaacccaactgcaccttgca

SEQ ID NO: 847365 - DNA, 75 bp, synthetic construct
  source 1..75: mol_type = other DNA
gtccctatgcgaccaactggaacagcaatccctgaccagtctggacgcacatcagcaactggttgaaaccctgtt

SEQ ID NO: 847366 - DNA, 75 bp, synthetic construct
  source 1..75: mol_type = other DNA
gcatctcggcgctcacctttgacctggatgataccctttacgataaccgtccggtgattttgcgcaccgagcgag

SEQ ID NO: 847367 - DNA, 75 bp, synthetic construct
  source 1..75: mol_type = other DNA
gtgcgtctggaacggacgggcctgcgtgattacttcgatttgctggtgatttccgaagaagttggcgttgccaaa

SEQ ID NO: 847368 - DNA, 75 bp, synthetic construct
  source 1..75: mol_type = other DNA
gttttctggaagcagaagagatggccgggatgacaattaatgggaatgagatcccaacctgggccgcccgaaggg

SEQ ID NO: 847369 - DNA, 75 bp, synthetic construct
  source 1..75: mol_type = other DNA
accagccgtatgactacggcgacgaaccgggaaaaaccacgtttgacgtggcctgtgacctcgaggagcgatacg

SEQ ID NO: 847370 - DNA, 75 bp, synthetic construct
  source 1..75: mol_type = other DNA
caaatacaaaggtgcctctctgtacctgattatcgtcaccggtttgttgctctgtgtttcaccgttcctggcatt

SEQ ID NO: 847371 - DNA, 75 bp, synthetic construct
  source 1..75: mol_type = other DNA
gtgctgtcagacaatccgttttatggactggtactgatttgtattctggtggcgatctcctcacgcggcgagaaa

SEQ ID NO: 847372 - DNA, 75 bp, synthetic construct
  source 1..75: mol_type = other DNA
gtggtatcaatgccgggcttgcgacctgctggctgaatgcgcacaaccgtgagcaaccagaaggtatcgcaccca

SEQ ID NO: 847373 - DNA, 75 bp, synthetic construct
  source 1..75: mol_type = other DNA
cgagttgctggcagaactggcgcaatccagccactggcaagccgttgtgcaattgcatcaggtgttgttgaagga

SEQ ID NO: 847374 - DNA, 75 bp, synthetic construct
  source 1..75: mol_type = other DNA
accgggggacatggttatctggatggtggtgcaatgagccaattaccgatgttgttcgccgtctgaacctgagcg

SEQ ID NO: 847375 - DNA, 75 bp, synthetic construct
  source 1..75: mol_type = other DNA
gtttgaagtggctgacggcaaacgtctggtcgatttgccgggctatggctacgcagaagttccggaagagatgaa

SEQ ID NO: 847376 - DNA, 75 bp, synthetic construct
  source 1..75: mol_type = other DNA
catctgcaaaggcatgatgcaggtcgtcaacgtactggaaacagagtgccatctaccggtgcgcagtgagcaagg

SEQ ID NO: 847377 - DNA, 75 bp, synthetic construct
  source 1..75: mol_type = other DNA
gtggggaacaggaacccagttattaaacgaaaggcatctgatatagaaaccagactcaacctgctttgcgatgca

SEQ ID NO: 847378 - DNA, 75 bp, synthetic construct
  source 1..75: mol_type = other DNA
agtgcgctgatgcgcagtcgtcgcggcgaacagatccagccactggatgacgaattgctggctgaactggcgcaa

SEQ ID NO: 847379 - DNA, 75 bp, synthetic construct
  source 1..75: mol_type = other DNA
ttcgccattttgctggcctggagcgccatcgtactgaacgcaccggtgttgagcttcacctctatctgtagcccg

SEQ ID NO: 847380 - DNA, 75 bp, synthetic construct
  source 1..75: mol_type = other DNA
tgaagacgttatcaaatggaccggctttgatggacaggaaaacgcagagaataacgcgcgttatatcgcagcttt

SEQ ID NO: 847381 - DNA, 75 bp, synthetic construct
  source 1..75: mol_type = other DNA
gcgtgtgacagctcgccgcttaatcaatatcagcgacgctttagccaggatgtcgcgccgcagtatgtcgacatc

SEQ ID NO: 847382 - DNA, 75 bp, synthetic construct
  source 1..75: mol_type = other DNA
atggcagaatacaaagataatttacttggtgaggcgaatagctttctcgaagtgctggaacaggtttcgcatctc

SEQ ID NO: 847383 - DNA, 75 bp, synthetic construct
  source 1..75: mol_type = other DNA
tgtacctggagtacttaagtgtgctgccggacgatcaggcaaaagaaggattactcaacgttgcgccgatcctcg

SEQ ID NO: 847384 - DNA, 75 bp, synthetic construct
  source 1..75: mol_type = other DNA
acgacctggaagcgaccggcattcgcaaaattctgcaaattgaactggcggtgctgccagacagcgatcgccgtg

SEQ ID NO: 847385 - DNA, 75 bp, synthetic construct
  source 1..75: mol_type = other DNA
atgcttcatcgaacagattttcacgatgattaccaaacggtaatggcatacaaagtttctgaagtcatcgctgca

SEQ ID NO: 847386 - DNA, 75 bp, synthetic construct
  source 1..75: mol_type = other DNA
tgctccggtgacgaaagaggttcgcgttgcgtcacctgctatcgtcgaagcgaagccgatcaaaacgattaaaga

SEQ ID NO: 847387 - DNA, 75 bp, synthetic construct
  source 1..75: mol_type = other DNA
gggatgtatcacggtgaagattacgatgtcgcgggtttctgcgttggcgtggtagaaaaatcagaaatcatcgac

SEQ ID NO: 847388 - DNA, 75 bp, synthetic construct
  source 1..75: mol_type = other DNA
agcgacggcgatgtgctgattgcactcggctccagcggcccgcactcgaacggctattcgctggtgcgcaaaatt

SEQ ID NO: 847389 - DNA, 75 bp, synthetic construct
  source 1..75: mol_type = other DNA
agtgctggaacaggtttcgcatctcgcaccgctggacaaaccggtgctcatcatcggcgagcgcggcaccggtaa

SEQ ID NO: 847390 - DNA, 75 bp, synthetic construct
  source 1..75: mol_type = other DNA
aacccaacggcacgcgccgcgttatggcaacagatttgcacatatgaacacgatttcttccctcgaaacgactga

SEQ ID NO: 847391 - DNA, 75 bp, synthetic construct
  source 1..75: mol_type = other DNA
cgacgtggtactggaaaattaccgtccgggtgtgatggaaaaactgggacttggctatgaggatttacgtaaggt

SEQ ID NO: 847392 - DNA, 75 bp, synthetic construct
  source 1..75: mol_type = other DNA
tttattcagaacacgcctgcgttccataacacaccaatgttgatggaagctgaagagagaattgctgaatacgct

SEQ ID NO: 847393 - DNA, 75 bp, synthetic construct
  source 1..75: mol_type = other DNA
tcatgtcctttttacaatattttatctgggggagttggttggttacccttggatcttacatgataaataccttac

SEQ ID NO: 847394 - DNA, 75 bp, synthetic construct
  source 1..75: mol_type = other DNA
aagcgttttggcatcaaaaccgtcatgttgatgagtatggtagcgtggacattacgttttggattctttgctttt

SEQ ID NO: 847395 - DNA, 75 bp, synthetic construct
  source 1..75: mol_type = other DNA
ccatcctgatggcggcgatgctgtccggctgtctgctggccgggacactggatgatatccgtgcacttgaagccg

SEQ ID NO: 847396 - DNA, 75 bp, synthetic construct
  source 1..75: mol_type = other DNA
gaaaggcgaaaaaatcctcctggacaccaccgggccgattgcgcgcacgaataccagttatgacggcacaaaacg

SEQ ID NO: 847397 - DNA, 75 bp, synthetic construct
  source 1..75: mol_type = other DNA
gtttaactcgctgcgtctgcccgtgctgaacagcatcagcggccagaatcccaatgcggaattactcgccggaca

SEQ ID NO: 847398 - DNA, 75 bp, synthetic construct
  source 1..75: mol_type = other DNA
ctgtgattgatgcagctataaaaagtttagagttgtcgtattcgaaaggtaatcaaaataaacattggtataaaa

SEQ ID NO: 847399 - DNA, 75 bp, synthetic construct
  source 1..75: mol_type = other DNA
tctcaagacaatattttgctaacgcaagtaagcaaaccactaatttagcctctattaataaaacccagctcagag

SEQ ID NO: 847400 - DNA, 75 bp, synthetic construct
  source 1..75: mol_type = other DNA
ccccttccagtcacaactaagtgacaaatctacaggcatgaccgcaacaggaataaaagcgtctaagttaaaaga

SEQ ID NO: 847401 - DNA, 75 bp, synthetic construct
  source 1..75: mol_type = other DNA
tatcacaaatggcggaagtcggcttcattctgactattcctttctttctgaagcgttttggcatcaaaaccgtca

SEQ ID NO: 847402 - DNA, 75 bp, synthetic construct
  source 1..75: mol_type = other DNA
ggccttagcggtgatctttgccctgttcttccgttataaacatgaacctgaaaaaatggcacaaaaatcattagc

SEQ ID NO: 847403 - DNA, 75 bp, synthetic construct
  source 1..75: mol_type = other DNA
atgaatatcgcaacgcgtttaaaggtaatgtctttcttacaatattttatctgggggagctggttagttaccctc

SEQ ID NO: 847404 - DNA, 75 bp, synthetic construct
  source 1..75: mol_type = other DNA
atgtgatggtggagtttttccagagcggtgtgccggtggctacaccgaccacctttctgaccaacgttaacacga

SEQ ID NO: 847405 - DNA, 75 bp, synthetic construct
  source 1..75: mol_type = other DNA
atgctgatgcaatgatgtattgcccaccagcaggcgtcacgtacaacgcatgctggcacgacatatggccagact

SEQ ID NO: 847406 - DNA, 75 bp, synthetic construct
  source 1..75: mol_type = other DNA
aagtgtggcaatggtgtgtgagacgccatccaaagaaaggtaaacgctggatcaggaataagtatttcacatatc

SEQ ID NO: 847407 - DNA, 75 bp, synthetic construct
  source 1..75: mol_type = other DNA
agcgcaagcccggccacgaagcggattacatcgagcgcaccgtcagcaaggtcatgggtctgcccagcgtccagc

SEQ ID NO: 847408 - DNA, 75 bp, synthetic construct
  source 1..75: mol_type = other DNA
cgaactgaaacgaaaaggtaacgctggcagcgttacacaaatggatcaaaaagcgttaccagaggaagagaaaga

SEQ ID NO: 847409 - DNA, 75 bp, synthetic construct
  source 1..75: mol_type = other DNA
ggggcgatacgggagctggaaaaattccgccagcagggtttttcacctgagcaggtgattagacacagcattgcc

SEQ ID NO: 847410 - DNA, 75 bp, synthetic construct
  source 1..75: mol_type = other DNA
cagcgtctgaagccggaacggtggccctgctgattaacggtgtctccgttcaggtgagcgtgagcgccggggcta

SEQ ID NO: 847411 - DNA, 75 bp, synthetic construct
  source 1..75: mol_type = other DNA
atcaggacggtattttacgcaccagcgtggctttcccgcaggccaatgcaccgcagcaggcgcaggccgaagaaa

SEQ ID NO: 847412 - DNA, 75 bp, synthetic construct
  source 1..75: mol_type = other DNA
tggctggagcacatcagaaccgacgccagcgaacgcgttatgaatgacgtgacgctgacctcccgcaacatggac

SEQ ID NO: 847413 - DNA, 75 bp, synthetic construct
  source 1..75: mol_type = other DNA
agcaacacaccaccatcaccaggactcagcgaaaagacgtcgcccgtctggtatccgctgagtgacgggcggcgg

SEQ ID NO: 847414 - DNA, 75 bp, synthetic construct
  source 1..75: mol_type = other DNA
gcgcggctttgatggcagcaccgtgttttatccgctgacgcataacctgcatcaggacggtattttgcgcaccag

SEQ ID NO: 847415 - DNA, 75 bp, synthetic construct
  source 1..75: mol_type = other DNA
ctggaagccttaatcccgctgctgccgccggagtatgccagcggcgtgatttgggcgcagagtaagttcagttaa

SEQ ID NO: 847416 - DNA, 75 bp, synthetic construct
  source 1..75: mol_type = other DNA
gctgtctggccagtcgggctggacgctgaaccggcggcggggccttttcaacaaagcgtgattaccgctgagatc

SEQ ID NO: 847417 - DNA, 75 bp, synthetic construct
  source 1..75: mol_type = other DNA
ctggctgaaaactgggcgcgtattagcgagcatttcgacacactatttaccaccgaagccagcgtggatgcatta

SEQ ID NO: 847418 - DNA, 75 bp, synthetic construct
  source 1..75: mol_type = other DNA
caatatcattattccaatccccccatcagatgaacaagttaaaataatagccagagttaagttacttatttccct

SEQ ID NO: 847419 - DNA, 75 bp, synthetic construct
  source 1..75: mol_type = other DNA
aaagtttatagatgtcgatatagaaaaagatagtcatctttttcttaaaaaaggtgacattttaattcaacgggg

SEQ ID NO: 847420 - DNA, 75 bp, synthetic construct
  source 1..75: mol_type = other DNA
gaaagaaggaaaaataaaaaaacaaaaaccgttgccgccaattagcgatgaggaaaaaccgtttgaacttccgga

SEQ ID NO: 847421 - DNA, 75 bp, synthetic construct
  source 1..75: mol_type = other DNA
aatgtctctctgcgaccaactggaacagcaatccctaaccagtctggacgcacatcagcaactggttgaaaccct

SEQ ID NO: 847422 - DNA, 75 bp, synthetic construct
  source 1..75: mol_type = other DNA
taataggggaggatggtgctaatctaatcaatagaagcaccccaattgcctttatggcttatggtcaattttggg

SEQ ID NO: 847423 - DNA, 75 bp, synthetic construct
  source 1..75: mol_type = other DNA
caaagtggtatcactaaaggaagaaatttatcaaatagaactttggtaaaagttccttatttacgtgttgcaaac

SEQ ID NO: 847424 - DNA, 75 bp, synthetic construct
  source 1..75: mol_type = other DNA
tggttcgctgattattctttttgaacgtcatcgcacacctttcctgaactactgccagcaagcgtggcaactgca

SEQ ID NO: 847425 - DNA, 75 bp, synthetic construct
  source 1..75: mol_type = other DNA
atggttacgttagaacagtttcgctattgtcctacgtacttaacgcactctccgttctgttataactttcactat

SEQ ID NO: 847426 - DNA, 75 bp, synthetic construct
  source 1..75: mol_type = other DNA
gtcaaaccggggatggtcgccatctttggtgacaacggcagtggcaaaagtacgctggcgcagctgatggcgggc

SEQ ID NO: 847427 - DNA, 75 bp, synthetic construct
  source 1..75: mol_type = other DNA
tgttggaacaacagaattacatgttgcacgcccttttagcgatataattaatcgaaaatatcttcttttaaactt

SEQ ID NO: 847428 - DNA, 75 bp, synthetic construct
  source 1..75: mol_type = other DNA
aaggcggcgactgggatacagtcgggagaactacagtatggtgtcatgactggtatatagcaaatcaaaaccatg

SEQ ID NO: 847429 - DNA, 75 bp, synthetic construct
  source 1..75: mol_type = other DNA
ttccggaagggtgggagtggtgtttatttgaagatattattgatattcaaagtggtatcactaaaggaagaaatt

SEQ ID NO: 847430 - DNA, 75 bp, synthetic construct
  source 1..75: mol_type = other DNA
ttaaataaagaacagcagcaatcatgcttttgtgatcattttattaaaatgaatttcttatgtaaaaatgcaata

SEQ ID NO: 847431 - DNA, 75 bp, synthetic construct
  source 1..75: mol_type = other DNA
gcgaaaggtgaaatctttagcggcctgccggaaaacggtatcgccattatgaacgccgacaacaacgactggctg

SEQ ID NO: 847432 - DNA, 75 bp, synthetic construct
  source 1..75: mol_type = other DNA
gaagcgtattgctgcggaaaaagcggagctggtgaagcaaggtaaaattaaaaagcaaaaaccactgccggaaat

SEQ ID NO: 847433 - DNA, 75 bp, synthetic construct
  source 1..75: mol_type = other DNA
atttaccaccgaagccagcgtggatgcgttaaaacagaccattctgcaactggccgtaatgggtaaacttgtgcc

SEQ ID NO: 847434 - DNA, 75 bp, synthetic construct
  source 1..75: mol_type = other DNA
tgcggagtgtgcatacacacttgaacatcatgatcacgcattagcttttgccgccgagctacgtgaaggaggcaa

SEQ ID NO: 847435 - DNA, 75 bp, synthetic construct
  source 1..75: mol_type = other DNA
tggcgaatattctcaacggcgaactgaaaggggctgatatcacccttgacgccgtaaccaccgatacccgtaaat

SEQ ID NO: 847436 - DNA, 75 bp, synthetic construct
  source 1..75: mol_type = other DNA
gcgatatggcggaactgggcgctgaaagcgaagcctgccatgtacaggtgggcgaggcggcaaaagctgctggta

SEQ ID NO: 847437 - DNA, 75 bp, synthetic construct
  source 1..75: mol_type = other DNA
aacatagacctcgtaacgatcccactctttatgctgatggcacaatcccattagtacaaacaggtgatgttgcaa

SEQ ID NO: 847438 - DNA, 75 bp, synthetic construct
  source 1..75: mol_type = other DNA
attacataataattttatccatgctcattatattaatgcaataatgagttcatgtttggtcaggtcccaaattga

SEQ ID NO: 847439 - DNA, 75 bp, synthetic construct
  source 1..75: mol_type = other DNA
agcaactggttgaaaccctgttgggaacacttacagacagccaaaacgccgaggaactggctgaaaactggacgc

SEQ ID NO: 847440 - DNA, 75 bp, synthetic construct
  source 1..75: mol_type = other DNA
aggcattaaaagctagcataaaaaccgcccagcaaacccaactgcaccttgcagacgcactgactgacgcggcga

SEQ ID NO: 847441 - DNA, 75 bp, synthetic construct
  source 1..75: mol_type = other DNA
caattagcgatgaggaaaaaccgtttgaactgccggatgggtgggaatacatatatttaaatgatatttgttcgt

SEQ ID NO: 847442 - DNA, 75 bp, synthetic construct
  source 1..75: mol_type = other DNA
tagtgaggaagagaagccgtttgaattgccgcagggatgggagtgggtgcgattgggtgactttaccaatatcat

SEQ ID NO: 847443 - DNA, 75 bp, synthetic construct
  source 1..75: mol_type = other DNA
aacattgtatcagtttattattataaagataatctcctgattaatcaaaaaaaagcacttattccttttgttgaa

SEQ ID NO: 847444 - DNA, 75 bp, synthetic construct
  source 1..75: mol_type = other DNA
tggcgtagtacaagtcgggctttattatcaattgggtggaaacactacggatttctttcctgacttgttaaagtt

SEQ ID NO: 847445 - DNA, 75 bp, synthetic construct
  source 1..75: mol_type = other DNA
ttatcagtgtgtttattgttacgtatgttgcctttaataatacgacgctgcccataatcctttttggagttacag

SEQ ID NO: 847446 - DNA, 75 bp, synthetic construct
  source 1..75: mol_type = other DNA
atgacggtttctgtaattccgcagtacaaacctttaatcgcagaatttaaagacatcgataaactttcctctgcg

SEQ ID NO: 847447 - DNA, 75 bp, synthetic construct
  source 1..75: mol_type = other DNA
cggacctgtacccagcgttgcttgttcagacgccatttgatcacaaaaaggcgcaggggagaaatgtcccggcct

SEQ ID NO: 847448 - DNA, 75 bp, synthetic construct
  source 1..75: mol_type = other DNA
cgcggcgtgtatgagcttcccggtcacggctacagcagcctggtgcatgacggcgataaacgccccttcccccgc

SEQ ID NO: 847449 - DNA, 75 bp, synthetic construct
  source 1..75: mol_type = other DNA
gaatcagactgcttataataagttcatcaacgaaatggcgatggataataaagtggcacctgcacacaattatct

SEQ ID NO: 847450 - DNA, 75 bp, synthetic construct
  source 1..75: mol_type = other DNA
attacctgaactgcgtcaactcggagtctggccgcgtgcgcgtggaagcaaagcgggcgagcgaagaatacgggc

SEQ ID NO: 847451 - DNA, 75 bp, synthetic construct
  source 1..75: mol_type = other DNA
acccggcgagacggtcgagcgtccgcaacgcggggaagtcgtcagcagctccggggttctccccccactggaccc

SEQ ID NO: 847452 - DNA, 75 bp, synthetic construct
  source 1..75: mol_type = other DNA
aagccatcggtgagacaaaagacgacgacaccgcagacatcctgactgccgcttcccgcgacctggataagttcc

SEQ ID NO: 847453 - DNA, 75 bp, synthetic construct
  source 1..75: mol_type = other DNA
tccgatctaaaagcaagtaatgcacatcaacgatatgcttttatatttaattttttgggctttaatgatataaat

SEQ ID NO: 847454 - DNA, 75 bp, synthetic construct
  source 1..75: mol_type = other DNA
cccatgccggacgtaacgtgtttttaattgggcaaagcccgcgcgtggcgctttatagcgcgattccagttaacc

SEQ ID NO: 847455 - DNA, 75 bp, synthetic construct
  source 1..75: mol_type = other DNA
ttgatagaccgggatgagttgcaaaatctgtgggtcattaagcattccgagattggccgtgacattaagccgcga

SEQ ID NO: 847456 - DNA, 75 bp, synthetic construct
  source 1..75: mol_type = other DNA
gcgcacatcgctaatgaggatctgcgtgtcatggggctggcggattccgacagtcgcctcacgagcctactggcc

SEQ ID NO: 847457 - DNA, 75 bp, synthetic construct
  source 1..75: mol_type = other DNA
tggcgcttgctggaacgggatatcgtcctggatcaagcggtcatctcctcccataacctgagtgtactgttctga

SEQ ID NO: 847458 - DNA, 75 bp, synthetic construct
  source 1..75: mol_type = other DNA
aatcccctggtctggtgcctgtgggctgatgttgcagcagagctaaggtcgcttaaacgctactcagtattcact

SEQ ID NO: 847459 - DNA, 75 bp, synthetic construct
  source 1..75: mol_type = other DNA
tcacagcgatgtcgttgctgtcgacctacgcttagtcaattgcgatctggaaaactctaataacggttccggtgg

SEQ ID NO: 847460 - DNA, 75 bp, synthetic construct
  source 1..75: mol_type = other DNA
gtggcaagatttctaaagttgcagtcacctttgatagctcagcgaaaaccaccggcgcagatccgattctcaaca

SEQ ID NO: 847461 - DNA, 75 bp, synthetic construct
  source 1..75: mol_type = other DNA
tttcaggatttcgctgatcagtggtttgctgctgcgctgggcaggccggtagaactgacggtgttcgactcgccg

SEQ ID NO: 847462 - DNA, 75 bp, synthetic construct
  source 1..75: mol_type = other DNA
aaatattctaaacaataattatttataccattttttattgttaaatacagagactatttatatcctcgccggggg

SEQ ID NO: 847463 - DNA, 75 bp, synthetic construct
  source 1..75: mol_type = other DNA
gcatactttactcgaacaaaaatattccatgatcaaataaaaaaacacatatcttcaggaaagatatccgcaatt

SEQ ID NO: 847464 - DNA, 75 bp, synthetic construct
  source 1..75: mol_type = other DNA
cccgcgtgaaatcgagttgcgccagaaacaatacgagtattatcgtgatttactgtttagtttcccgaaacctga

SEQ ID NO: 847465 - DNA, 75 bp, synthetic construct
  source 1..75: mol_type = other DNA
tatcgccgctggtgcgaataatctggtacttggcagcactgggctgtttattaaaggcgcgacgcttgccgacaa

SEQ ID NO: 847466 - DNA, 75 bp, synthetic construct
  source 1..75: mol_type = other DNA
tgattgtgggatcagcgatcacgcatgcagcggatcctgctgatgaagcgaggaagatttcgcaggtgttgttgc

SEQ ID NO: 847467 - DNA, 75 bp, synthetic construct
  source 1..75: mol_type = other DNA
ttgcgccagaaacaatacgagtactatcgtgacttactgttcagtttcccgaaacctgaaactgtcagtaattaa

SEQ ID NO: 847468 - DNA, 75 bp, synthetic construct
  source 1..75: mol_type = other DNA
acagtaatgatgaagaactggctccaatggttgatggtctcagtggtgcattatgtatatttatactcatcacta

SEQ ID NO: 847469 - DNA, 75 bp, synthetic construct
  source 1..75: mol_type = other DNA
ctgtgattcgctactttgaaattcatcatccgaatataaaaattattccttttgaggaaaatagcacagcgatta

SEQ ID NO: 847470 - DNA, 75 bp, synthetic construct
  source 1..75: mol_type = other DNA
tggagttgataatggatgcaacccaaattgatgaaccgatcgttgccctacaaaagctaaaagaaaagatgtcat

SEQ ID NO: 847471 - DNA, 75 bp, synthetic construct
  source 1..75: mol_type = other DNA
attgatcaacttagaacgacctttgaagctccggatcggcaacgattattgatgtcgttcgcgcacaggttgtga

SEQ ID NO: 847472 - DNA, 75 bp, synthetic construct
  source 1..75: mol_type = other DNA
cgtcttgggatgtctacagctaacaatgatgagttcttgcgtttctggcatgaggtttctatacaaaatattggt

SEQ ID NO: 847473 - DNA, 75 bp, synthetic construct
  source 1..75: mol_type = other DNA
ggtttgccgatagtccaaatgacaccatcaaaggcaaaaacacgctgcggatttctgacctgctgcatcacagcg

SEQ ID NO: 847474 - DNA, 75 bp, synthetic construct
  source 1..75: mol_type = other DNA
agaaaagccggtagaaggcagtccactgtttttactacaaatgtgtacggaacaactagtggtgagtggaaaaat

SEQ ID NO: 847475 - DNA, 75 bp, synthetic construct
  source 1..75: mol_type = other DNA
ctgacgacggtacagaccgacaccacgcgtatccagacggtatatcagccggggagcttcgcgccgctcatccgc

SEQ ID NO: 847476 - DNA, 75 bp, synthetic construct
  source 1..75: mol_type = other DNA
tgaaacacctatggattactccatcgattttcactttagaaatttaaaaatcgatatcaacccgattgattatga

SEQ ID NO: 847477 - DNA, 75 bp, synthetic construct
  source 1..75: mol_type = other DNA
ggtgcagcaggaactggccaagttgggtgaaaacctgctatgcagctaccgcataagggtagtggattccgctga

SEQ ID NO: 847478 - DNA, 75 bp, synthetic construct
  source 1..75: mol_type = other DNA
gctattgaaacgctaatcctcctgcgctcgatagcagaaccgggcaaaaccaaagcggcaaaagcagaggttgaa

SEQ ID NO: 847479 - DNA, 75 bp, synthetic construct
  source 1..75: mol_type = other DNA
taaccgaaacgctatctggcgtaacattcccaccggcaggacagatgatgttgcatgaatcactcgctattgaaa

SEQ ID NO: 847480 - DNA, 75 bp, synthetic construct
  source 1..75: mol_type = other DNA
ccagatgatgttgcatgagtctcttgccattgaaacgctgatccttcttcgttcgatagcagaaccgggtaaaac

SEQ ID NO: 847481 - DNA, 75 bp, synthetic construct
  source 1..75: mol_type = other DNA
acctctcgcgtcaaagagtttgtccgcaccgtctggggcgaagagcacctgcaggaaaacctcgaatttatcgcc

SEQ ID NO: 847482 - DNA, 75 bp, synthetic construct
  source 1..75: mol_type = other DNA
tttgtgtttgatcactacagttgggatggcgtaactcaaagattcgaagaggttattcataattggtttgaataa

SEQ ID NO: 847483 - DNA, 75 bp, synthetic construct
  source 1..75: mol_type = other DNA
cctttgaaacctgtcagaagaataaatcggactggatgagcagcaagtcagcactggcgcgggctgaaatggcgc

SEQ ID NO: 847484 - DNA, 75 bp, synthetic construct
  source 1..75: mol_type = other DNA
aggttatagccccttcccggataccaaaatcaccgacagacagaatcaaaaatgatcatcgggacgcaatttctc

SEQ ID NO: 847485 - DNA, 75 bp, synthetic construct
  source 1..75: mol_type = other DNA
agttttaatacttttatgtcatatattgataagttttattacttattactcttcaccactgatacccttggtttt

SEQ ID NO: 847486 - DNA, 75 bp, synthetic construct
  source 1..75: mol_type = other DNA
tgtagaccagtatttcccttctgaggacacacctcaacttagtatgcaggaacggatcgcaatcaaatccaagga

SEQ ID NO: 847487 - DNA, 75 bp, synthetic construct
  source 1..75: mol_type = other DNA
tgtagacaagtatttcccttctgaaaacaccaatccaaataaattaagtattcaggaacggatcgccaataaagt

SEQ ID NO: 847488 - DNA, 75 bp, synthetic construct
  source 1..75: mol_type = other DNA
aacggacaagcaataaaggaaacaggtaaagcctcagtaagatccgaggaattatattttcaaaagatgattggc

SEQ ID NO: 847489 - DNA, 75 bp, synthetic construct
  source 1..75: mol_type = other DNA
ctcgtcgccgaaggtgcgtacaaaaccttcccggctgacagtgacggtatcctgccgctgatggatgacgagtgg

SEQ ID NO: 847490 - DNA, 75 bp, synthetic construct
  source 1..75: mol_type = other DNA
atctaaagcatgcttggttaaattttaaagaatcatctcatattaaaacatacaaattgaaactaattgaagaga

SEQ ID NO: 847491 - DNA, 75 bp, synthetic construct
  source 1..75: mol_type = other DNA
ccgaaggtgcctacaaaaccttcccagccgacagtgacggtatcctgccgctaatggatgacgagtggtttgagg

SEQ ID NO: 847492 - DNA, 75 bp, synthetic construct
  source 1..75: mol_type = other DNA
aatatgtggtgccgctgctggcgcgttatcaggccaatatcgatcgcctgaacgatcaacttgatgaggcgtctg

SEQ ID NO: 847493 - DNA, 75 bp, synthetic construct
  source 1..75: mol_type = other DNA
cgtaccgaatatgtggtaccgctgctggcgcgttatcaggccaatatcgatcgcctgaacgatcaactcgatgaa

SEQ ID NO: 847494 - DNA, 75 bp, synthetic construct
  source 1..75: mol_type = other DNA
tcctgcaaaatttcttgatgcagttgagaaggcaatgcgtcagactccttgtgcatttgatgagcttttttctca

SEQ ID NO: 847495 - DNA, 75 bp, synthetic construct
  source 1..75: mol_type = other DNA
agaagtggaaaacgctggttttcagcgattcgccgttaccttaagagatttagcggttggctatgaccacgaagc

SEQ ID NO: 847496 - DNA, 75 bp, synthetic construct
  source 1..75: mol_type = other DNA
tgggcaaaaacaagcaaagccggtctggagtttcagacattaacacgcgacaaaacagttatgttttgtgcggat

SEQ ID NO: 847497 - DNA, 75 bp, synthetic construct
  source 1..75: mol_type = other DNA
tttcattcaggtcaggatggtagcatctattgcgatcatgtgtggccaggatattcgtgatgataaagtcagaac

SEQ ID NO: 847498 - DNA, 75 bp, synthetic construct
  source 1..75: mol_type = other DNA
aaagaacagattaactgccttattcgctggcagaataccaaatctgccacgtcaggttttcttaccggacttggt

SEQ ID NO: 847499 - DNA, 75 bp, synthetic construct
  source 1..75: mol_type = other DNA
aaagaacagataaatagccttattcgatggcagaataccaagtctgccacatcaggttttcttactggtcttgga

SEQ ID NO: 847500 - DNA, 75 bp, synthetic construct
  source 1..75: mol_type = other DNA
catcgtccggcgctggagttaaagcgcatccctgagttacttgagaaaatagacagctataccggcaggccgcta

SEQ ID NO: 847501 - DNA, 75 bp, synthetic construct
  source 1..75: mol_type = other DNA
gactggatcgaaatccaactggcccacgttccgaaaggcgtgcgcggtgtttataaccaggcggcctatctgaag

SEQ ID NO: 847502 - DNA, 75 bp, synthetic construct
  source 1..75: mol_type = other DNA
aggccgcctacctgaagcaacggcgggtaatgatgcaggactacgcggacgctattgttctgatattggctggtg

SEQ ID NO: 847503 - DNA, 75 bp, synthetic construct
  source 1..75: mol_type = other DNA
ggatattgtgcagggttcagcaggggtgctgataggcgcgccggacgggggttgcctgctcggtgctgatgaact

SEQ ID NO: 847504 - DNA, 75 bp, synthetic construct
  source 1..75: mol_type = other DNA
gtgacgatggtaaacagcgtgagttccagccttacattgaagcgaattggatcaacaacagcaaagtctacgccg

SEQ ID NO: 847505 - DNA, 75 bp, synthetic construct
  source 1..75: mol_type = other DNA
agcgattttgatacgtcaatgtggaccatccctcttgatgggcattgcagtaagctgagggttggactggtattg

SEQ ID NO: 847506 - DNA, 75 bp, synthetic construct
  source 1..75: mol_type = other DNA
ttgatggctttcagagttgccgtcatccgatcccggcgggtctttcgtatcagcatgaacctgccgttgcgatct

SEQ ID NO: 847507 - DNA, 75 bp, synthetic construct
  source 1..75: mol_type = other DNA
aattcatcgttcgtgtccatctatatagatgggcgcgattgttgccagacaggacaattttcacaagacgtcgca

SEQ ID NO: 847508 - DNA, 75 bp, synthetic construct
  source 1..75: mol_type = other DNA
aattaacgcggcaattccagatcctggatgaagaacaaagcaaattacccgccggcccacagaaaacagcattac

SEQ ID NO: 847509 - DNA, 75 bp, synthetic construct
  source 1..75: mol_type = other DNA
atacgactcatctttaacagttccgcctggaaaggtagtatttgaaagctttggtggtaatcgccctgttaatgt

SEQ ID NO: 847510 - DNA, 75 bp, synthetic construct
  source 1..75: mol_type = other DNA
gcgatacctggcaatttaaaattactttgtatgaaatgtaatcctattaaagaggcatttttaatgccatggacc

SEQ ID NO: 847511 - DNA, 75 bp, synthetic construct
  source 1..75: mol_type = other DNA
ggtttttgattgtagtgagaataatattaaagaaattagatggttccccaaaaatttgaaagaagcgtatattga

SEQ ID NO: 847512 - DNA, 75 bp, synthetic construct
  source 1..75: mol_type = other DNA
cacccgagtgcaacctattttgtaaagtccagcggtgactcgatgattgacgccggaattggcgaaggtgattta

SEQ ID NO: 847513 - DNA, 75 bp, synthetic construct
  source 1..75: mol_type = other DNA
acaggagcgttttttacaggagaagttaatcgtgaagggctttctgagggagcgttttatacggcattgagtaat

SEQ ID NO: 847514 - DNA, 75 bp, synthetic construct
  source 1..75: mol_type = other DNA
ttgaagaaagtacctttaactgcacaattaattgcaaaatacaaaatggatgatcaattggaccaacttttggtt

SEQ ID NO: 847515 - DNA, 75 bp, synthetic construct
  source 1..75: mol_type = other DNA
gcatgacggctgaaatgatgctggaacagtcgcggttgatgcacttgttggcgcaggatagccgtttgcgggaag

SEQ ID NO: 847516 - DNA, 75 bp, synthetic construct
  source 1..75: mol_type = other DNA
cttacccgcagcgtgaaatacagtgacgccgaccgcgcggaaatccagcgccagttgaccgagcagtatatcagc

SEQ ID NO: 847517 - DNA, 75 bp, synthetic construct
  source 1..75: mol_type = other DNA
gtttaccagagcctgaaaacgcgggcgctgggcgttcttcctgccgacctcaatctgcgtgaccaggtagggcca

SEQ ID NO: 847518 - DNA, 75 bp, synthetic construct
  source 1..75: mol_type = other DNA
cgatgattgtaccaagagagtcatgttattttgaacatcaatcaggaaacttcagatattttaatggggagatga

SEQ ID NO: 847519 - DNA, 75 bp, synthetic construct
  source 1..75: mol_type = other DNA
agccattatcagccagcgcgatactcaaggcgcttgagcgtatcggatacaagtcaatagccacaggccacggct

SEQ ID NO: 847520 - DNA, 75 bp, synthetic construct
  source 1..75: mol_type = other DNA
ccgttgaaactttaatcatcacccgcgacgcggatcaccactttgccgaagtttttacccttcagcaggccgata

SEQ ID NO: 847521 - DNA, 75 bp, synthetic construct
  source 1..75: mol_type = other DNA
gccgcaagccgatcaagcaagggaaggaagttaaaaacgaactgctctttatccacggcacgcagttgaaacgcg

SEQ ID NO: 847522 - DNA, 75 bp, synthetic construct
  source 1..75: mol_type = other DNA
cggcaccaaagtcgcttacggaattctggtgcaaagcgccttgctgggtcaggatgatgtgctggcgcaattaac

SEQ ID NO: 847523 - DNA, 75 bp, synthetic construct
  source 1..75: mol_type = other DNA
ttattgctcatgctgatggcatcacctttggacagccgctgggcgacacaatggttctggttaaggctcctggcg

SEQ ID NO: 847524 - DNA, 75 bp, synthetic construct
  source 1..75: mol_type = other DNA
tttttccattataaagatgggcagtggcgggttatttcttatttttttggcctccagacgctaaattttaatccg

SEQ ID NO: 847525 - DNA, 75 bp, synthetic construct
  source 1..75: mol_type = other DNA
tttttttgatagtgggtggggcgaaaaatagcatgtctgatatccctgaacatgcttatctgaatgcgagtggtg

SEQ ID NO: 847526 - DNA, 75 bp, synthetic construct
  source 1..75: mol_type = other DNA
gcgcaccacctgagactataacaaaatatgcaaaagcatataaagcagcttatcctaacttttcttttaatttgt

SEQ ID NO: 847527 - DNA, 75 bp, synthetic construct
  source 1..75: mol_type = other DNA
ccaccagccacattaatcagtcacatcacagcgatgccgttgctgtcgacctgcgcttagtcaactgcgatctgg

SEQ ID NO: 847528 - DNA, 75 bp, synthetic construct
  source 1..75: mol_type = other DNA
tctttgcctggatggaacaaattgatcaagcgacaccagtaacggcaggggctgttacagcgaatgcaacctacg

SEQ ID NO: 847529 - DNA, 75 bp, synthetic construct
  source 1..75: mol_type = other DNA
caaaagcgaccaatctgctttatacccgcaacgatgtctccgacagcgagaaaaaagcaacagtagagttgctga

SEQ ID NO: 847530 - DNA, 75 bp, synthetic construct
  source 1..75: mol_type = other DNA
gcagatggtgtatgaaatttacggtatgtggattgatgacatgaacgacgaacagatagccatgttgaatgcgcg

SEQ ID NO: 847531 - DNA, 75 bp, synthetic construct
  source 1..75: mol_type = other DNA
catcatcgcaaaagcgaaatcaccttttatcatcgggagtacggcagaaccgaaaagcaaaaactgcattttgtt

SEQ ID NO: 847532 - DNA, 75 bp, synthetic construct
  source 1..75: mol_type = other DNA
ccaggtatgagtcttaaggttgatataccgacaagaaaaacatccatcattaaatggatattccctttctttaga

SEQ ID NO: 847533 - DNA, 75 bp, synthetic construct
  source 1..75: mol_type = other DNA
taaagccctggagcgtatcgggtacaagtcgatcgccactggtcatggctggcggaccaccttttcaacggcgtt

SEQ ID NO: 847534 - DNA, 75 bp, synthetic construct
  source 1..75: mol_type = other DNA
tttgagaacggcagagcttcgtttaatgcgctgggaatgggtggatctggagtcggcaacaatcaccctacccgc

SEQ ID NO: 847535 - DNA, 75 bp, synthetic construct
  source 1..75: mol_type = other DNA
taatatttcaacactttctgatactactcaaaagttaaagggtaatccagtctgcattagaatactaaaagagat

SEQ ID NO: 847536 - DNA, 75 bp, synthetic construct
  source 1..75: mol_type = other DNA
acgcaaggaaaaagccattgatgcgctcaacatggcggcaggttttaagacggtagcggaggactggctggctac

SEQ ID NO: 847537 - DNA, 75 bp, synthetic construct
  source 1..75: mol_type = other DNA
gagcggttggtcagagtcctacacgaaacaggtcagatcggcactggagaaagacgtttaccccgtgctgggcaa

SEQ ID NO: 847538 - DNA, 75 bp, synthetic construct
  source 1..75: mol_type = other DNA
ttgacccaatggaagaagcgcgcaaggagaaagccattgatgcgctcaacatggcggcaagttttaagacggtag

SEQ ID NO: 847539 - DNA, 75 bp, synthetic construct
  source 1..75: mol_type = other DNA
tcactactgccggagccgcgaagctggcagccgccactgtccccggcgggaaaaaagtaaacctgtctgcaatgg

SEQ ID NO: 847540 - DNA, 75 bp, synthetic construct
  source 1..75: mol_type = other DNA
gggatgttttctggttatcgtgtaccacaaagcagggatattgccccgatagtcacatttcagattgatcgcggt

SEQ ID NO: 847541 - DNA, 75 bp, synthetic construct
  source 1..75: mol_type = other DNA
ttttcgattttattgaatcttatatattcggtaaaaaccggactattattgataagtcgaatataaatgataacc

SEQ ID NO: 847542 - DNA, 75 bp, synthetic construct
  source 1..75: mol_type = other DNA
ggaaaaagccattgatgcgctcaacatggcggcaggatttaagaaggtggcggaagactggtttgctaccagggt

SEQ ID NO: 847543 - DNA, 75 bp, synthetic construct
  source 1..75: mol_type = other DNA
attgcaaccggtcagtaaaaatatctttgatgtggattcttatcctcttgaaagaatcgcaatgaccaccggggg

SEQ ID NO: 847544 - DNA, 75 bp, synthetic construct
  source 1..75: mol_type = other DNA
gtgacgagccgctgcactatatccgtgatgcggtgagtgaaaagctggagtatattcccgctcacttcgtggtga

SEQ ID NO: 847545 - DNA, 75 bp, synthetic construct
  source 1..75: mol_type = other DNA
atgacggcgattcctgttgcccgtatcgtcgatgcgctggaaaatcctggcggcaaatatcagcataacggtaaa

SEQ ID NO: 847546 - DNA, 75 bp, synthetic construct
  source 1..75: mol_type = other DNA
aattcaaggcgggtaaaaaccagaaccagctcagtgaagaaaacatcgaaaaaatcgttaagacctaccgcaatg

SEQ ID NO: 847547 - DNA, 75 bp, synthetic construct
  source 1..75: mol_type = other DNA
ttaatgagaaaactaatctgttgacaacatgcagtaacaaaaaaggcaattccattttaaatggctattgtgaac

SEQ ID NO: 847548 - DNA, 75 bp, synthetic construct
  source 1..75: mol_type = other DNA
ttattagcccgggatttggttctattgcaggggcttatataggtgataaagtacattcatgggcaacgactgcga

SEQ ID NO: 847549 - DNA, 75 bp, synthetic construct
  source 1..75: mol_type = other DNA
ttgatgtgcaccattctgaagaggaactgggttatatcttcagcctacaggcgaagcgcgttctgtctaaaaatc

SEQ ID NO: 847550 - DNA, 75 bp, synthetic construct
  source 1..75: mol_type = other DNA
ctgagtctcagtattgcaagactaaattacacccatcagattgtcagaaacatgatgcattattacaaggacagg

SEQ ID NO: 847551 - DNA, 75 bp, synthetic construct
  source 1..75: mol_type = other DNA
ctggaagaaaagctgtcctctttccgatcaggccctgtacgcgggggaacaattaatctggcaggaccgccggat

SEQ ID NO: 847552 - DNA, 75 bp, synthetic construct
  source 1..75: mol_type = other DNA
gtatcgcctacgctttcataccggcaataagcaacgtatttattcccttttgcatgacgggagcgccgatctcgc

SEQ ID NO: 847553 - DNA, 75 bp, synthetic construct
  source 1..75: mol_type = other DNA
gctggtctgggacacggcctgtttctggctgcggcatccagtaccgcagctcgtcttgctggaccgggtaaagca

SEQ ID NO: 847554 - DNA, 75 bp, synthetic construct
  source 1..75: mol_type = other DNA
tgctgaagtgtttgtctatgcttggcttcataaaatgcttgatggaattaaaggccaatataaagatgtaaatga

SEQ ID NO: 847555 - DNA, 75 bp, synthetic construct
  source 1..75: mol_type = other DNA
gttgagtatattcataagtgcccttcttttggttggacggggggcttttgctgcttctgatgtcactcttactgt

SEQ ID NO: 847556 - DNA, 75 bp, synthetic construct
  source 1..75: mol_type = other DNA
gtgttatggttgtattactgttgttaagtgtggaagtggtaaatgctgcttcctcggttgatcttactgtttctg

SEQ ID NO: 847557 - DNA, 75 bp, synthetic construct
  source 1..75: mol_type = other DNA
taatgagaccgcgcgatccagacctcttttcgaaaggagctgttcagaaagatatctctcattttgaaaatgcta

SEQ ID NO: 847558 - DNA, 75 bp, synthetic construct
  source 1..75: mol_type = other DNA
acaacaccagtgcgataactaaaaatctgcaggtggttaacagtaataaagaggaaatcagtaacattaataaaa

SEQ ID NO: 847559 - DNA, 75 bp, synthetic construct
  source 1..75: mol_type = other DNA
cgcttccggcggagctggcggtgatgctggggaggctggagcgggaactgcgtgcgggagcggtgagtgcggaga

SEQ ID NO: 847560 - DNA, 75 bp, synthetic construct
  source 1..75: mol_type = other DNA
accacagttcgctatcaaatggatcatgcccgaattgctcatttgacaggacaacgtattcaggaatgggaagag

SEQ ID NO: 847561 - DNA, 75 bp, synthetic construct
  source 1..75: mol_type = other DNA
aatgattatctattaggtgcgatgagtctggttgatagtgtgatggatattcagttccccccgcaaaattatatt

SEQ ID NO: 847562 - DNA, 75 bp, synthetic construct
  source 1..75: mol_type = other DNA
ctggaccggcaaacatcgaacctggttagccaatcaatcatttagtcagccatctcaacagattgcttttcaaca

SEQ ID NO: 847563 - DNA, 75 bp, synthetic construct
  source 1..75: mol_type = other DNA
catgaatcgaattgctgtacgtggtcagcgaaaggttgccgacgcgttagggattaatgaatcgcaaatttcgcg

SEQ ID NO: 847564 - DNA, 75 bp, synthetic construct
  source 1..75: mol_type = other DNA
cacaagggcgatgaaaacctcttccacgacccggacaatcttcagtcgctatgcaagcgctgccacgactcagtg

SEQ ID NO: 847565 - DNA, 75 bp, synthetic construct
  source 1..75: mol_type = other DNA
acttaatttccctgtcgcattagtgggtatttttattgccatagagccgatcgttgatatggcaagaacagcgct

SEQ ID NO: 847566 - DNA, 75 bp, synthetic construct
  source 1..75: mol_type = other DNA
caactatccacctatcgtatggatttgggacaaagtagagcaggtgttactggttgagaggaaaaccgctgtttt

SEQ ID NO: 847567 - DNA, 75 bp, synthetic construct
  source 1..75: mol_type = other DNA
gtggactccggctggacgctaacggtcgtcgcggcactcctccagcaagcaggcagcggcgtggtttaccccatc

SEQ ID NO: 847568 - DNA, 75 bp, synthetic construct
  source 1..75: mol_type = other DNA
cgttgtgctgccgcgatctttcaaaagagcagaaaagaagattgtttaagaatgagacaagaatgggatgataaa

SEQ ID NO: 847569 - DNA, 75 bp, synthetic construct
  source 1..75: mol_type = other DNA
gaataaccgcaccactgatgtgataaacaaccatgccgaaaaaataggtaacaaccaggcgatcaccgttaccaa

SEQ ID NO: 847570 - DNA, 75 bp, synthetic construct
  source 1..75: mol_type = other DNA
cctgctcggtggtcacgtcgtaggcctatcaatccaacggatactgcaacctctgtatatttagtttgtcccgta

SEQ ID NO: 847571 - DNA, 75 bp, synthetic construct
  source 1..75: mol_type = other DNA
gtggtggagagttgcctgccagctcctgacgccttgtacaaaatgcccggaaaaatttttttgtttttctgtggc

SEQ ID NO: 847572 - DNA, 75 bp, synthetic construct
  source 1..75: mol_type = other DNA
gaaaattttttgttttttctgtggctggtatgtggtggagagttgcagcaagttacgtgtgataccgctcgccgc

SEQ ID NO: 847573 - DNA, 75 bp, synthetic construct
  source 1..75: mol_type = other DNA
aacctggttagccaatcaatcatttagtcagccatctcaacagattgcttttcaacactattgtcagagtctgga

SEQ ID NO: 847574 - DNA, 75 bp, synthetic construct
  source 1..75: mol_type = other DNA
ttaccgtttagcgatcgtcaggactttgacgatgcccagcgcggatttatcgccccgctgctggatgaaggtatt

SEQ ID NO: 847575 - DNA, 75 bp, synthetic construct
  source 1..75: mol_type = other DNA
tcaatatacttgcttcatccatttgttatatctatagttggtttttgggtttacaaaaacattgcgtcgccgtcc

SEQ ID NO: 847576 - DNA, 75 bp, synthetic construct
  source 1..75: mol_type = other DNA
cagctttcattcagcatggtgataagtatctggcggatatttatcagcttgcccggcagcgtctggcgaacgtgg

SEQ ID NO: 847577 - DNA, 75 bp, synthetic construct
  source 1..75: mol_type = other DNA
aggcggcggagcggtacggcgacgaagtggaacaggtgatgctgtccgtggcgttctaccgcgaaaacatgcccc

SEQ ID NO: 847578 - DNA, 75 bp, synthetic construct
  source 1..75: mol_type = other DNA
cgtcttttatgtgggttcccgtcaggaaatggcgctggaatacattgccgcctgtgccctgtttgcccgcgcctt

SEQ ID NO: 847579 - DNA, 75 bp, synthetic construct
  source 1..75: mol_type = other DNA
tgatgaaatcacccttttagaacacaatatcccaggacgttatgaatggttgggacgtttgactgatgaagagct

SEQ ID NO: 847580 - DNA, 75 bp, synthetic construct
  source 1..75: mol_type = other DNA
aggggcgcacaaaagatgaaggcggtaaaggccgacgacatggcgactttgccgtggcgctctgtatggctgtca

SEQ ID NO: 847581 - DNA, 75 bp, synthetic construct
  source 1..75: mol_type = other DNA
agcggcgtggtggccgtaatgtgttttatgtggggtcaaagcaggagatggcgctggaatatatttctgcctgcg

SEQ ID NO: 847582 - DNA, 75 bp, synthetic construct
  source 1..75: mol_type = other DNA
tctggcagaagccgcgctgctggcctttggcccggacatcatcgactgcgtgatgttgtcgccgaagtggtacgg

SEQ ID NO: 847583 - DNA, 75 bp, synthetic construct
  source 1..75: mol_type = other DNA
gcaggacgaattcaacaaaagcacccgatctgcgaaaggcttcctcagcgatgcgacgaaagacgctaaatcgct

SEQ ID NO: 847584 - DNA, 75 bp, synthetic construct
  source 1..75: mol_type = other DNA
attgatgtctgcactccaatttgggaaaaggtttccatcttactggccgcaaatagaagagtttttaattgcttt

SEQ ID NO: 847585 - DNA, 75 bp, synthetic construct
  source 1..75: mol_type = other DNA
ttatcagagcaaagtcatcggcgttcttgagcgtgcgctgcgtgagcagtccggctcccgggtacggcggatcct

SEQ ID NO: 847586 - DNA, 75 bp, synthetic construct
  source 1..75: mol_type = other DNA
gctgaaatatgcaaaaaaaatatatgttgtatataccaggcttaatgaactagacaagcgtaaggctttagcaaa

SEQ ID NO: 847587 - DNA, 75 bp, synthetic construct
  source 1..75: mol_type = other DNA
atctgggttgtatgaactatacgccactaactatattaaaagtggtaattttatcttcagaccggggattggttt

SEQ ID NO: 847588 - DNA, 75 bp, synthetic construct
  source 1..75: mol_type = other DNA
gccgaaacctattatcaggaagagaaaatgcaggatcagtctggcaacgatatgcagtcgcggcagaaatggttt

SEQ ID NO: 847589 - DNA, 75 bp, synthetic construct
  source 1..75: mol_type = other DNA
tcgcataccttggtttgggagaaggctcagcattacccgttggcgtacctgttccgtggccttcagccacaccgc

SEQ ID NO: 847590 - DNA, 75 bp, synthetic construct
  source 1..75: mol_type = other DNA
ggcgtggctattccatcaaaacgtgctgtttctctatctgttatcgctgtcgaacgcatgggttctgatatcgga

SEQ ID NO: 847591 - DNA, 75 bp, synthetic construct
  source 1..75: mol_type = other DNA
atccactggagatggtcagagcactcagcgttctctggttatttggaggcctcagacgtgatgaaattctacgta

SEQ ID NO: 847592 - DNA, 75 bp, synthetic construct
  source 1..75: mol_type = other DNA
aaccgcctggctgccaccaccggtgcccagcggtttacttctctcgggcttgggacgagtatcggcgcacttgat

SEQ ID NO: 847593 - DNA, 75 bp, synthetic construct
  source 1..75: mol_type = other DNA
tataaagagttttgattatggtttaatgcagataaaccagatgcacattcccatgttaaaaaaacgtggaataat

SEQ ID NO: 847594 - DNA, 75 bp, synthetic construct
  source 1..75: mol_type = other DNA
tgcagatgctcgaccggctggaaagtgaaatcctggctgaccgggtgagtgaggaaagccgccgctggctggcat

SEQ ID NO: 847595 - DNA, 75 bp, synthetic construct
  source 1..75: mol_type = other DNA
cggtatgaccgtcacggcaggctgacagagaaaaccgacctcatcccggaaggggttatccgcacggatgatgag

SEQ ID NO: 847596 - DNA, 75 bp, synthetic construct
  source 1..75: mol_type = other DNA
tatctaccagctgttgcgcagcatcgccgcacaaaatgtggctgtgctgcttatctcctctgatctggaagagat

SEQ ID NO: 847597 - DNA, 75 bp, synthetic construct
  source 1..75: mol_type = other DNA
ccgtggcccgtaatcaaagctttcgtgcagcgggcgatgagttaggcttatcctcgtccgccattagccatagta

SEQ ID NO: 847598 - DNA, 75 bp, synthetic construct
  source 1..75: mol_type = other DNA
atgtcacaaaatagcagcatattaattcaatatggccgattttttattctgttgtttttgttcttttctttcgcg

SEQ ID NO: 847599 - DNA, 75 bp, synthetic construct
  source 1..75: mol_type = other DNA
atggtacatgacagcatagcggaagagctggaggcgaagggcttttaccggagagcggcggcgcgatgggctgaa

SEQ ID NO: 847600 - DNA, 75 bp, synthetic construct
  source 1..75: mol_type = other DNA
aacccccgcacaaattgccggagggatcagcggaaaagaggcaatcgctcaatcccttgaccagagcctgaagaa

SEQ ID NO: 847601 - DNA, 75 bp, synthetic construct
  source 1..75: mol_type = other DNA
ggcgaaattacccactctgcactgaccgggcgcgatattaatgtcgagactattatgcgcgttgccttcggcgat

SEQ ID NO: 847602 - DNA, 75 bp, synthetic construct
  source 1..75: mol_type = other DNA
tggcgcggggaacacactactgtcggtagctgggaggatgaggagatcggtttatccccgctggcgcggggaaca

SEQ ID NO: 847603 - DNA, 75 bp, synthetic construct
  source 1..75: mol_type = other DNA
ctggcgcggggaactcggacttaaagatcgcatcacagtactggagggcggtttatccccgctggcgcggggaac

SEQ ID NO: 847604 - DNA, 75 bp, synthetic construct
  source 1..75: mol_type = other DNA
cccgctggcgcggggaacacggggataacggttatccactggccgccgatctcggtttatccccgctggcgcggg

SEQ ID NO: 847605 - DNA, 75 bp, synthetic construct
  source 1..75: mol_type = other DNA
ttttgcatttacctgggccatattgactacttataaaatgagatcaatatttaatcgcccaataacgggggtatg

SEQ ID NO: 847606 - DNA, 75 bp, synthetic construct
  source 1..75: mol_type = other DNA
taactgccctgactgtggcgcggtgatgggagacgcaacttatcaggaaacttttgacgaaaaaaaaccagatga

SEQ ID NO: 847607 - DNA, 75 bp, synthetic construct
  source 1..75: mol_type = other DNA
cgtactggcccgttcaatggatctggacatctataaccttcatccggcacacgctaaacgcattgaggaaattat

SEQ ID NO: 847608 - DNA, 75 bp, synthetic construct
  source 1..75: mol_type = other DNA
gccataccaaacaggggatacagaccaacctgacgctgaaagaggaaagctacggcgactggctgccaaaatgtg

SEQ ID NO: 847609 - DNA, 75 bp, synthetic construct
  source 1..75: mol_type = other DNA
acaggtcgcgcggatcgcgtggttttactaccacgacgggctgacccagagtgagatcagcgatcgtctcggcct

SEQ ID NO: 847610 - DNA, 75 bp, synthetic construct
  source 1..75: mol_type = other DNA
ggcgtcgatccacagttaattaccgcgattattgccatcgaatcgggcggtaatccgaacgcggtcagtaagtcg

SEQ ID NO: 847611 - DNA, 75 bp, synthetic construct
  source 1..75: mol_type = other DNA
cctgaacggcttggcgaagttcattattatggtacgattaacaacgaagcccaggctgtacgtcgattatttcag

SEQ ID NO: 847612 - DNA, 75 bp, synthetic construct
  source 1..75: mol_type = other DNA
tcgagaatatgcaggaaggagattgttctggtgactttacaatgattaagcgtgtgcctccttacgtcgcagtat

SEQ ID NO: 847613 - DNA, 75 bp, synthetic construct
  source 1..75: mol_type = other DNA
ttggagccgcggccaatggcgtcgaagttcgtggtggtacaaccactatcggtgcagatagccatatttcttccg

SEQ ID NO: 847614 - DNA, 75 bp, synthetic construct
  source 1..75: mol_type = other DNA
aaacgtacagaaaaactctgttgtcgatctcggaacaaacagtaccattaaaaccaatggcgataatgctcacgg

SEQ ID NO: 847615 - DNA, 75 bp, synthetic construct
  source 1..75: mol_type = other DNA
ggcgcagcgattcctgcatgttcagttaccactggcgttaccggtatttctgcgcagcctgcgggtggtgatggt

SEQ ID NO: 847616 - DNA, 75 bp, synthetic construct
  source 1..75: mol_type = other DNA
tgcatatatcagtctagaagaaaaacccacatctgggtcaacttctctcgacacattctatggtcaaggaaactc

SEQ ID NO: 847617 - DNA, 75 bp, synthetic construct
  source 1..75: mol_type = other DNA
cgtattcctggcgataatgggctgccagtttggggagatattccccaaccaacacatgaggaacagactgagatt

SEQ ID NO: 847618 - DNA, 75 bp, synthetic construct
  source 1..75: mol_type = other DNA
atgttgaaacaatagttaaaaagatggactgcgtcgttctaccttccttttatcgagaaggaatccctaaaagtt

SEQ ID NO: 847619 - DNA, 75 bp, synthetic construct
  source 1..75: mol_type = other DNA
tgtcaagtttatgggataccattgcggcgaagaagtattaaccctttggctgaattaaaggttatgttttacttg

SEQ ID NO: 847620 - DNA, 75 bp, synthetic construct
  source 1..75: mol_type = other DNA
tggagtccgctgttcagcgagccgcatccttcccgtgagttttgtgtccagtacggtgagactgattacgatttc

SEQ ID NO: 847621 - DNA, 75 bp, synthetic construct
  source 1..75: mol_type = other DNA
cggggaacactttttgttaattgcgtttgccacggtttgcaacggtttatccccgctggcgcggggaacactgag

SEQ ID NO: 847622 - DNA, 75 bp, synthetic construct
  source 1..75: mol_type = other DNA
aaaatcagcactggatatccgcgataattttcgtggcggggttacgtctgaagacagtcatatcaatgtttcttc

SEQ ID NO: 847623 - DNA, 75 bp, synthetic construct
  source 1..75: mol_type = other DNA
tgaacaatacctggtggcaactgacaggagactcctcacttcgctcgttaaaaaataccggaagcatgacatatt

SEQ ID NO: 847624 - DNA, 75 bp, synthetic construct
  source 1..75: mol_type = other DNA
gtgatttgaatggtcttatttataaaaaattcaattcttctattgaagaagtagcatatagcattattaaagact

SEQ ID NO: 847625 - DNA, 75 bp, synthetic construct
  source 1..75: mol_type = other DNA
gcgaatccctgcgctggagtctgctggttgccctgaacaaaacccgcccttacaccgccagcgagacgctgctgc

SEQ ID NO: 847626 - DNA, 75 bp, synthetic construct
  source 1..75: mol_type = other DNA
cagagccgctggtcgaaagtcgctatctttacgacccgctgggccgcagggtggcaaaacgggtgtggcggcgtg

SEQ ID NO: 847627 - DNA, 75 bp, synthetic construct
  source 1..75: mol_type = other DNA
attgtaaaagcacaacaaacttaactaaagaacatattttcccttcagcaataattaaaagttttaatgttgaac

SEQ ID NO: 847628 - DNA, 75 bp, synthetic construct
  source 1..75: mol_type = other DNA
gcgcttatcagcccggaaggggaaacggcgtggcagggggagtatgacgagtggggaaacctgctgggcgaggaa

SEQ ID NO: 847629 - DNA, 75 bp, synthetic construct
  source 1..75: mol_type = other DNA
cgcaaaaccttccattcggggtgatggattctcgtttgatatttcgtttaaaggttattcgtccctttattaaca

SEQ ID NO: 847630 - DNA, 75 bp, synthetic construct
  source 1..75: mol_type = other DNA
ttgccaattatcgagcgttagccagcggtgttcggccaggtgtggcgaaagcggatgcgatatttatgatcaatt

SEQ ID NO: 847631 - DNA, 75 bp, synthetic construct
  source 1..75: mol_type = other DNA
catgtcggtgtggctgtgggttcaccttgagcaacgggcgcttgaagtcggcttattgtggctattggcaggctt

SEQ ID NO: 847632 - DNA, 75 bp, synthetic construct
  source 1..75: mol_type = other DNA
ccaggaaggtaaccgccttcttacggtggaaaaaggccacaagatcaccggagtactgaaagggtctttatctga

SEQ ID NO: 847633 - DNA, 75 bp, synthetic construct
  source 1..75: mol_type = other DNA
catccgctccaaaacgtacatgggcagcggatttaatgagctgaagtttgatgatgcgacagggagagaacaggt

SEQ ID NO: 847634 - DNA, 75 bp, synthetic construct
  source 1..75: mol_type = other DNA
ctgacccgcctcggtgtcgatctggttgagtacaccgtggaatgcggccccggcatcgcccgcccggaaaagtac

SEQ ID NO: 847635 - DNA, 75 bp, synthetic construct
  source 1..75: mol_type = other DNA
atggagaacgcctgtgtcctgttgatgggggtcctgagcacttttctggtcagttggctgggaaaagatgcgatg

SEQ ID NO: 847636 - DNA, 75 bp, synthetic construct
  source 1..75: mol_type = other DNA
atgaaacaagtctgcaaaactatatatcactaaacaaaacgttcactattggtaacggtttcgacttcagtctgg

SEQ ID NO: 847637 - DNA, 75 bp, synthetic construct
  source 1..75: mol_type = other DNA
attaggttataaatttaacgtagaggctatggtctctgacaagccccataaaccgccagtcagtgaaattttcag

SEQ ID NO: 847638 - DNA, 75 bp, synthetic construct
  source 1..75: mol_type = other DNA
ggaactttgcacaacaaagatgagaatatttgtaggagttatgattatttatgaaaaaacttgtaaactgttgtg

SEQ ID NO: 847639 - DNA, 75 bp, synthetic construct
  source 1..75: mol_type = other DNA
gcgaggcggtgaagttctttctgcgcaatggctacacctcgcggcaggagctggagcaatggcaggccattatcc

SEQ ID NO: 847640 - DNA, 75 bp, synthetic construct
  source 1..75: mol_type = other DNA
ctcaggcgtatggtcaacctgacaacccggtgttatctcgaggaaaggatagcctcgccatacttaccgccgcgc

SEQ ID NO: 847641 - DNA, 75 bp, synthetic construct
  source 1..75: mol_type = other DNA
cacgctggcgctacagtcgggactcagactggaggaggcttgtggattcactgttgatgctctctttcaggcagc

SEQ ID NO: 847642 - DNA, 75 bp, synthetic construct
  source 1..75: mol_type = other DNA
ctgagatacgaaacactgcttaaggataaatttgagatgatggataacatcatgcacctcaccctgaaggagcct

SEQ ID NO: 847643 - DNA, 75 bp, synthetic construct
  source 1..75: mol_type = other DNA
tgcggataagcccctttacctttttcgaaatacagacttattgcctgcaatcaataatggagacctggcgtattc

SEQ ID NO: 847644 - DNA, 75 bp, synthetic construct
  source 1..75: mol_type = other DNA
tgattgcaactgttgccgtgggtgccagcgttagcaacaatttcacttatgcgagtacgacatcttcttctttga

SEQ ID NO: 847645 - DNA, 75 bp, synthetic construct
  source 1..75: mol_type = other DNA
tgattgctactgttgccgtgggtgtaagctttaacagcaattttgcttctgcgagtacaacgtccgcttctttaa

SEQ ID NO: 847646 - DNA, 75 bp, synthetic construct
  source 1..75: mol_type = other DNA
cggttccggtactacgagccggaaaccgggatgtacctggtgagtgatccgctggggttgcagggaggggaacag

SEQ ID NO: 847647 - DNA, 75 bp, synthetic construct
  source 1..75: mol_type = other DNA
ggatcgaatgacctcaaagaaaatgtagatagagcgttggtgagaatgtttaaatgtgttaagcttcacagtaat

SEQ ID NO: 847648 - DNA, 75 bp, synthetic construct
  source 1..75: mol_type = other DNA
tggtaaccatattattttaggtgagacacactctcgcttatctattgaatgccactttagtgatgataaaagaga

SEQ ID NO: 847649 - DNA, 75 bp, synthetic construct
  source 1..75: mol_type = other DNA
ttaccggcatagatgagtctctctatgaaaagcatataatctttatcactcttaaggccattcctccccagaagt

SEQ ID NO: 847650 - DNA, 75 bp, synthetic construct
  source 1..75: mol_type = other DNA
ccacaaaaaacaataaagaaaaataaattatctgtcgttagtttaaatagcaacctcaaaaatgaggttgttttg

SEQ ID NO: 847651 - DNA, 75 bp, synthetic construct
  source 1..75: mol_type = other DNA
cggatatgctgaatctgcagacatatctgacccgggttacacaggttcgtctgcgtctgcaacagattgccggct

SEQ ID NO: 847652 - DNA, 75 bp, synthetic construct
  source 1..75: mol_type = other DNA
tgagattacagctatccctgaacttcttaacatgctggatattaaaggaaaaatcatcacaaccgatgcgatggg

SEQ ID NO: 847653 - DNA, 75 bp, synthetic construct
  source 1..75: mol_type = other DNA
acacactctcgcttatctattgaatgccactttagtgatgataaaagagagtttataaagatggacttatataat

SEQ ID NO: 847654 - DNA, 75 bp, synthetic construct
  source 1..75: mol_type = other DNA
gatattaactttacagattaccggcttgattcatttaccagtaattcgttgcttattctttataaaccggaattt

SEQ ID NO: 847655 - DNA, 75 bp, synthetic construct
  source 1..75: mol_type = other DNA
gacactgcataaaatggctgagtcgggggatgtcgacgcgcaaagcctgttaggctgggaatattatcagccccg

SEQ ID NO: 847656 - DNA, 75 bp, synthetic construct
  source 1..75: mol_type = other DNA
atatcttgataaaggtgtccacatttatggtggcccggaagactttctggctacttgtcgaaaagacatgattga

SEQ ID NO: 847657 - DNA, 75 bp, synthetic construct
  source 1..75: mol_type = other DNA
cagcgttatggctgctgatgataatgctatcacggatggctcagtaacatttaatggtaaagttattgctccagc

SEQ ID NO: 847658 - DNA, 75 bp, synthetic construct
  source 1..75: mol_type = other DNA
ggtaaggagattaaccaaacggttggcttcgcgcctttcggtttaaaccggctgaatattagctttactgattac

SEQ ID NO: 847659 - DNA, 75 bp, synthetic construct
  source 1..75: mol_type = other DNA
ttcgcgtgacattcagcattcgtcgcccatccggtaaggagattaaccttcgcgcctttcggtttaaaccggctg

SEQ ID NO: 847660 - DNA, 75 bp, synthetic construct
  source 1..75: mol_type = other DNA
ctggtgattgacgggcaggaactggagtatttcaaccagaaagaacgctggcagcgtttcaactggccggatgaa

SEQ ID NO: 847661 - DNA, 75 bp, synthetic construct
  source 1..75: mol_type = other DNA
ggcttccttatggcgtcacggtgtatggagggattcaaaacgccactcattttaatgcaatatctacgggtattg

SEQ ID NO: 847662 - DNA, 75 bp, synthetic construct
  source 1..75: mol_type = other DNA
atccgaaatcactggcacttggagaataagctgcactggcgtctggacgtggtaatgaatgaagacgactgcaaa

SEQ ID NO: 847663 - DNA, 75 bp, synthetic construct
  source 1..75: mol_type = other DNA
acactatatgttcgagctgaccttgtgaatggcaactatccggtaactccggatggttggataagctgtagtgag

SEQ ID NO: 847664 - DNA, 75 bp, synthetic construct
  source 1..75: mol_type = other DNA
gggaagctggaggaagggttttcgaatgccgcgatgatgcgcggcactgaacttgagccagtggcacgcgaaatg

SEQ ID NO: 847665 - DNA, 75 bp, synthetic construct
  source 1..75: mol_type = other DNA
attaaaagtaaaaatcagttggctaaacatgcagtatggtcgttggcttgtttccccgactggcgttggtacaat

SEQ ID NO: 847666 - DNA, 75 bp, synthetic construct
  source 1..75: mol_type = other DNA
attgcgaatttatattatgggaataaatatcgtattcgttatagtaaatccattagtgattttggtactcaattg

SEQ ID NO: 847667 - DNA, 75 bp, synthetic construct
  source 1..75: mol_type = other DNA
gcagcagtatgataaggagtcggggctgtactacaaccggaaccggtactacgatccgttgcaggggcggtatat

SEQ ID NO: 847668 - DNA, 75 bp, synthetic construct
  source 1..75: mol_type = other DNA
ccggataatgattgtcaatacttccttgatactgcttcaaaacagagagagatattgtcgtatatcaaaaaaggc

SEQ ID NO: 847669 - DNA, 75 bp, synthetic construct
  source 1..75: mol_type = other DNA
attacaaatcacacgagatttgagcgccttctggaaaggagcgtaccgtgaggtgcaaaaagagatgaaagggcg

SEQ ID NO: 847670 - DNA, 75 bp, synthetic construct
  source 1..75: mol_type = other DNA
atggcaattctccggtaactccggatggttggataagctgtagtgagcgaatgccggacgacaggcaggaggtga

SEQ ID NO: 847671 - DNA, 75 bp, synthetic construct
  source 1..75: mol_type = other DNA
ctgtggctgcatctgctgcagtatccggttctgctattgcgggtgactgggtagaaggtggtagtggcggtagag

SEQ ID NO: 847672 - DNA, 75 bp, synthetic construct
  source 1..75: mol_type = other DNA
agttatcgccactaaactaggtgattttatagtgcttgttataatcaccattaacggaaaaggagtttactctaa

SEQ ID NO: 847673 - DNA, 75 bp, synthetic construct
  source 1..75: mol_type = other DNA
gtggctgctggagaacaggttgttctggcctctgagcttgctgccgccatgaagcacattaaagaactccagcgc

SEQ ID NO: 847674 - DNA, 75 bp, synthetic construct
  source 1..75: mol_type = other DNA
aaaaaagaaaatattatcccctcaatgatggacgtttctattacgaagagaaaggggagcgccactacgtcacgg

SEQ ID NO: 847675 - DNA, 75 bp, synthetic construct
  source 1..75: mol_type = other DNA
ttctctcttcctgcgccggtacgaccaaacaaacctgaatatattccacttcctccagaacctgatgagcatgcc

SEQ ID NO: 847676 - DNA, 75 bp, synthetic construct
  source 1..75: mol_type = other DNA
tcaggaagcgcagttctccgtgctcgacgacatcaccgccagcgagctgattaacgatattgaagcactgtttga

SEQ ID NO: 847677 - DNA, 75 bp, synthetic construct
  source 1..75: mol_type = other DNA
aaaatatttatcagcttttaattaaaccttacctactcgatctttctagccagtctggaaaaaaaatagaattaa

SEQ ID NO: 847678 - DNA, 75 bp, synthetic construct
  source 1..75: mol_type = other DNA
gggacggcggcagtcggcccacgatacaaaccaacaggagccgcatccagacgatttaccagccggggagctcca

SEQ ID NO: 847679 - DNA, 75 bp, synthetic construct
  source 1..75: mol_type = other DNA
gaggaaagccgccgctggctggcatcgtgcggcctgccgctggcgctcatcagcacggaaggggcaacagcgtgg

SEQ ID NO: 847680 - DNA, 75 bp, synthetic construct
  source 1..75: mol_type = other DNA
cgcgctggcggaagatatcttcatcagcctgctgcaccacggtattcgccggatcctggtgattaacggccatga

SEQ ID NO: 847681 - DNA, 75 bp, synthetic construct
  source 1..75: mol_type = other DNA
acggtcagaaccacgaacttattgctgaacagaaggcttttaaaaaagcaatggataagaaagttgaggaaatcg

SEQ ID NO: 847682 - DNA, 75 bp, synthetic construct
  source 1..75: mol_type = other DNA
gtcttatccgacctacagttcagcacgccccgtaggcctgataagccgcgtcagcggcgcatcaggcatcggttg

SEQ ID NO: 847683 - DNA, 75 bp, synthetic construct
  source 1..75: mol_type = other DNA
aattcaacacaggaagcgcagttctccgtactcgatgccatcaccgccagcgagctgattaacgatattgaagcc

SEQ ID NO: 847684 - DNA, 75 bp, synthetic construct
  source 1..75: mol_type = other DNA
accagcaaaacatgcgtggtatcaccaattctcaggcagaatggatgaagtacggcgaacagatgtcgacgggta

SEQ ID NO: 847685 - DNA, 75 bp, synthetic construct
  source 1..75: mol_type = other DNA
caatgtcacacttcgcgcctggcctatcagtattaccggtcaaaaaccgaccgaagggccgtttagcgcgctggg

SEQ ID NO: 847686 - DNA, 75 bp, synthetic construct
  source 1..75: mol_type = other DNA
ggcagcctgagttcacagataaaacactctccaggaaacccggggcggttcaaccctccacgtcatcgttgttaa

SEQ ID NO: 847687 - DNA, 75 bp, synthetic construct
  source 1..75: mol_type = other DNA
ccggcgtcgtccgtcaacatggctgtattgattcacttgaagtacgaaaaaaaccgggaggacattggattattc

SEQ ID NO: 847688 - DNA, 75 bp, synthetic construct
  source 1..75: mol_type = other DNA
aagtgagcgattcatagattatctcaatgagcagggcccaaatagatacttccaaaacactatgtataccgaagg

SEQ ID NO: 847689 - DNA, 75 bp, synthetic construct
  source 1..75: mol_type = other DNA
ctattgtcaaagtctggagctgaaccgccccgggtttcctggagagtgttttatctgtgaactcaggctgccaga

SEQ ID NO: 847690 - DNA, 75 bp, synthetic construct
  source 1..75: mol_type = other DNA
tatctgaagcgtatagttttatggattccatgacatttattcgtaaagactatgctgataacagaatagcactcc

SEQ ID NO: 847691 - DNA, 75 bp, synthetic construct
  source 1..75: mol_type = other DNA
cggcgatgaccggtcacaggaaactacggcgccagccagaaaagaagcctcacgatccgaagccccaacgggcga

SEQ ID NO: 847692 - DNA, 75 bp, synthetic construct
  source 1..75: mol_type = other DNA
ctgataaaaaagagcctccgctatcacacccaattattagcaaactaatatcatctatattcaagaaaccatcat

SEQ ID NO: 847693 - DNA, 75 bp, synthetic construct
  source 1..75: mol_type = other DNA
acaggagacgaaggagagcagtgacagccgtctgaaagccctgcaggccacaaagacagcgctgtctggtgtgca

SEQ ID NO: 847694 - DNA, 75 bp, synthetic construct
  source 1..75: mol_type = other DNA
gtggtggttgacccggggcatgaccgtcgtactgtggacgaaaaatttgagcagaagaaaagcgggctgacggtt

SEQ ID NO: 847695 - DNA, 75 bp, synthetic construct
  source 1..75: mol_type = other DNA
tccccgccatacgacagtcctggatactggcgcagtcaggaaagcccttgaaaaagcgttacttgcagcagaaca

SEQ ID NO: 847696 - DNA, 75 bp, synthetic construct
  source 1..75: mol_type = other DNA
ttattcataaaaacagagacagtttatcaaacagtgaacgtgaatcatttaattcagcagcagaccaccggttag

SEQ ID NO: 847697 - DNA, 75 bp, synthetic construct
  source 1..75: mol_type = other DNA
acagtaaacagaccagcgtggctgccggcggcagttttacctttggctccatgaccggctcaggttacatcgctg

SEQ ID NO: 847698 - DNA, 75 bp, synthetic construct
  source 1..75: mol_type = other DNA
gtctgttgtcgcaaccggtaaaaacaggggcgataaccgcggagatattgtgattgcaggaagccagcttaaggc

SEQ ID NO: 847699 - DNA, 75 bp, synthetic construct
  source 1..75: mol_type = other DNA
gtaatctatggcgagaaaacatttaaaatcgatccagtgatatatcacatcgtgccggatttgaaattttatatt

SEQ ID NO: 847700 - DNA, 75 bp, synthetic construct
  source 1..75: mol_type = other DNA
atgtcttctgggggattaggcggctttttaatttcaagattttctaatctttcagaaacattacgccttgatatt

SEQ ID NO: 847701 - DNA, 75 bp, synthetic construct
  source 1..75: mol_type = other DNA
agcaattatatattgacgatgaaccaattttagcagcaccaattaccgaagatggcaaagtgccgtcatggaaga

SEQ ID NO: 847702 - DNA, 75 bp, synthetic construct
  source 1..75: mol_type = other DNA
cctcaaaaacgccgttgccgttacggttttatactttttgggaaagagggagagaagtttctttttggtgagtaa

SEQ ID NO: 847703 - DNA, 75 bp, synthetic construct
  source 1..75: mol_type = other DNA
gtgagaccgataatccactatctaaagagctgtatgctgcttttcaggttatgtgccatttatacaatggttttg

SEQ ID NO: 847704 - DNA, 75 bp, synthetic construct
  source 1..75: mol_type = other DNA
gccggagcgcgttattttgccgaaactaccgccctgcgcccggattgcgccatcattggcgaaccgacgtcacta

SEQ ID NO: 847705 - DNA, 75 bp, synthetic construct
  source 1..75: mol_type = other DNA
gttatttgcttgatgccgatcagcttgagccaactcagcgcaggctgaaaaggatccagccgaaagtgagccgcc

SEQ ID NO: 847706 - DNA, 75 bp, synthetic construct
  source 1..75: mol_type = other DNA
ttatacacactcacctgcctggcgctgttgaaattcaactggatcagcataccaatatttgtggaactaatgctt

SEQ ID NO: 847707 - DNA, 75 bp, synthetic construct
  source 1..75: mol_type = other DNA
gcatcggatcccgaagatcatttgcagaaggctttttctgccgcttggatccaacatttcggcctcacgctctca

SEQ ID NO: 847708 - DNA, 75 bp, synthetic construct
  source 1..75: mol_type = other DNA
caaaatgcttgcggaatattttgaacaacctgaggctgaagcagccaaacgtgtgagtgatttcgaaaaagaggt

SEQ ID NO: 847709 - DNA, 75 bp, synthetic construct
  source 1..75: mol_type = other DNA
tacatctgttagaattagatgatggttatcaattaatatttggagaatcaaagctctatgccgatcttttagaag

SEQ ID NO: 847710 - DNA, 75 bp, synthetic construct
  source 1..75: mol_type = other DNA
cagagtgaacagcagcaaattgatgagaaggtggaagaactgtcccggcagatagacaaaaaacgtgccgatatg

SEQ ID NO: 847711 - DNA, 75 bp, synthetic construct
  source 1..75: mol_type = other DNA
tcacagctgacgcaggtgatgatttcatctgccccggcgactgctgaaactatggataaggcggaatatctgcgc

SEQ ID NO: 847712 - DNA, 75 bp, synthetic construct
  source 1..75: mol_type = other DNA
tttgaatggaaagggctgaaaaaattatgcgtggcagtctcctttcggtcaataatagcagaacaaaagaaagag

SEQ ID NO: 847713 - DNA, 75 bp, synthetic construct
  source 1..75: mol_type = other DNA
agcgttgcacctcttcctgtttttatcgcaatggaaattgcctatctgtgtgcagcgagggtttccgatgtgtta

SEQ ID NO: 847714 - DNA, 75 bp, synthetic construct
  source 1..75: mol_type = other DNA
atgagacaaactctttgcgacggatatctggtcatttttgcgttagcacaggccgtgattctgctggtgctaacc

SEQ ID NO: 847715 - DNA, 75 bp, synthetic construct
  source 1..75: mol_type = other DNA
aataaaactatttataagcacagcattactgataataattccttgtttaattttatcattcctctctatcacatt

SEQ ID NO: 847716 - DNA, 75 bp, synthetic construct
  source 1..75: mol_type = other DNA
ctggttagcgtgacgcgcgttcatagccgctgggtgtgtatttcttcgggaattatattaatcctgtttggcatg

SEQ ID NO: 847717 - DNA, 75 bp, synthetic construct
  source 1..75: mol_type = other DNA
ctggtggaatcaggctaaacgtgcagccgagcaaaaagccggcgttccgtttggatgcaacttccatgacataaa

SEQ ID NO: 847718 - DNA, 75 bp, synthetic construct
  source 1..75: mol_type = other DNA
accgctctgcggtctgaaaggttacagcctgacgctccccttcccacaagaaatggggatcgcaccgcaaatcag

SEQ ID NO: 847719 - DNA, 75 bp, synthetic construct
  source 1..75: mol_type = other DNA
ttatggacgggtatgcgtccatccacccctgcgggtccgccactattaggacgggcgaagtatcaaaatctatgg

SEQ ID NO: 847720 - DNA, 75 bp, synthetic construct
  source 1..75: mol_type = other DNA
gccaaagcggcaaaaggcattaatccgcattttcaacagactctattacgcgaagagtgcgttcatcttgaaccc

SEQ ID NO: 847721 - DNA, 75 bp, synthetic construct
  source 1..75: mol_type = other DNA
cagaagttcagcggtcacaagactgaatctcaagttcttgtctatgacagaaagatcaagataacccctactctt

SEQ ID NO: 847722 - DNA, 75 bp, synthetic construct
  source 1..75: mol_type = other DNA
aaaaagtacgaagagttgagtacggcacagcagaagcaactgatccgtgactgtgctgccagcccggcaacctgc

SEQ ID NO: 847723 - DNA, 75 bp, synthetic construct
  source 1..75: mol_type = other DNA
cgtctggataaactggacgggatcacggtaccggcggtgacggatgcgaacgacgatggtgtggctgatgacaag

SEQ ID NO: 847724 - DNA, 75 bp, synthetic construct
  source 1..75: mol_type = other DNA
cgcttggcaagcgtatcgcgctccccttgggagaaaatgtgttttcggcccttcttggtggccttgaggaatcac

SEQ ID NO: 847725 - DNA, 75 bp, synthetic construct
  source 1..75: mol_type = other DNA
ggcagcattggtgactggctgggcggagcggtggccaatgcaaaaggcggcgtgtatacctcggcaaacctgagt

SEQ ID NO: 847726 - DNA, 75 bp, synthetic construct
  source 1..75: mol_type = other DNA
gctgggcgtacgcgccgtgggcagtatgaacggcagtgctggtctggtgtattccccggtctaccacatcgccat

SEQ ID NO: 847727 - DNA, 75 bp, synthetic construct
  source 1..75: mol_type = other DNA
gaggagtgccgtaaggtgattctggtacccggtgcacaaagcgcagaggcggcgcagaaggcggtttcaggtctg

SEQ ID NO: 847728 - DNA, 75 bp, synthetic construct
  source 1..75: mol_type = other DNA
gaaagaattaaataatccagagcatgacagttacgcaattagtgaaaagagtcacggcagagaagaaacccgtct

SEQ ID NO: 847729 - DNA, 75 bp, synthetic construct
  source 1..75: mol_type = other DNA
tcgacagacgaggtcagaaaattttctataagctcattaccaaacaaaatcgaatctacaagtagtataggtagt

SEQ ID NO: 847730 - DNA, 75 bp, synthetic construct
  source 1..75: mol_type = other DNA
tgaacggaaataaagtggaatggcgcagctgggcctcatcagtgctgcaggaaatatcaaaagttcttatgaatg

SEQ ID NO: 847731 - DNA, 75 bp, synthetic construct
  source 1..75: mol_type = other DNA
cctgtttggcgacgcctttgataaagggttgacgtttaaaattgggacagacccacgttcacgcatggctgggag

SEQ ID NO: 847732 - DNA, 75 bp, synthetic construct
  source 1..75: mol_type = other DNA
tgaaaccggaaaggacgtaaaaaatttgcaaaaaggcgaccgggtggtaattccgttcgtcattgcttgtggcga

SEQ ID NO: 847733 - DNA, 75 bp, synthetic construct
  source 1..75: mol_type = other DNA
aaactgcggattgttggggatggtcctctattggatgagaacaaaaaattagcccaaaaattgaatctgtccgaa

SEQ ID NO: 847734 - DNA, 75 bp, synthetic construct
  source 1..75: mol_type = other DNA
atgtctggaaatataggggcaaatccagtcattgcttgtggcgactgttttttctgtcgattacagcaatatgcc

SEQ ID NO: 847735 - DNA, 75 bp, synthetic construct
  source 1..75: mol_type = other DNA
acctgtatggcggcgttcctggtgggcaggcggaatatgtccgcgtccctaaagggaatgtggggccgtttaaag

SEQ ID NO: 847736 - DNA, 75 bp, synthetic construct
  source 1..75: mol_type = other DNA
tgaagcgaaaggcagcaccacggaaacggtgctgactaacctgaaactggagggcagcagcggtaaagcgttgcg

SEQ ID NO: 847737 - DNA, 75 bp, synthetic construct
  source 1..75: mol_type = other DNA
tttgggcggtaatgctagctttttcgtgcatggcggcgcgtgctgccgatgtcactatcaccgtaaacggtaagg

SEQ ID NO: 847738 - DNA, 75 bp, synthetic construct
  source 1..75: mol_type = other DNA
cacttttcaaccagacgagttagtaagtaatagttttgacatcttcatcaaaagtgaagcgtatcatgagacaga

SEQ ID NO: 847739 - DNA, 75 bp, synthetic construct
  source 1..75: mol_type = other DNA
acatgccgacagaatcgcacggcttgagctgagattagcgagagccgtttcaatgcaagcaaggcgggatctgcg

SEQ ID NO: 847740 - DNA, 75 bp, synthetic construct
  source 1..75: mol_type = other DNA
aatgcaaagatccccgtaaatgtcggttttatgctgaatatctgaatcacaaataccccaatgaattccctcagt

SEQ ID NO: 847741 - DNA, 75 bp, synthetic construct
  source 1..75: mol_type = other DNA
tttaatctctggatcgtagcgggaagcccactctttctctggttagtgataatttgcttacgaagctggctgtat

SEQ ID NO: 847742 - DNA, 75 bp, synthetic construct
  source 1..75: mol_type = other DNA
gaacgcaacgcctttgccatcgttctgtttatgtatgaatgcctagccaagaagccaggcctgatcattcttgac

SEQ ID NO: 847743 - DNA, 75 bp, synthetic construct
  source 1..75: mol_type = other DNA
atctgctctgccgtaatggctacgagaaactgcaggtgttcaggttgcttcagaccggagtcgaaaacgcagtca

SEQ ID NO: 847744 - DNA, 75 bp, synthetic construct
  source 1..75: mol_type = other DNA
cgactaccgctatcacgttcaggatgcattctacagtgacggttatgaagcacagtttggcgtgctgccaacttt

SEQ ID NO: 847745 - DNA, 75 bp, synthetic construct
  source 1..75: mol_type = other DNA
agattgcacagaaaccaggtgcaattcgcaccatgacttacacattacgtcttgctgccatgaatgcttacggta

SEQ ID NO: 847746 - DNA, 75 bp, synthetic construct
  source 1..75: mol_type = other DNA
tgcggatgcctggcaaattaccggcgaaaacgagcgggaattattacagcagattgcacaaaagccaggtgcgct

SEQ ID NO: 847747 - DNA, 75 bp, synthetic construct
  source 1..75: mol_type = other DNA
actaaactaccctactccaaaatgagtcttgccgagtgcattgattacgatgtccctgaggatgacctgatcgcc

SEQ ID NO: 847748 - DNA, 75 bp, synthetic construct
  source 1..75: mol_type = other DNA
tgagtgaagaaagccagcagtggcttgcacagtgtgggttgacggcggaacagatggcggcgcaactggaggcgg

SEQ ID NO: 847749 - DNA, 75 bp, synthetic construct
  source 1..75: mol_type = other DNA
attttgtgtcggtgccgtccggacaaaattatccctgaatttcactggatcatggacgtgaaaactacggcggat

SEQ ID NO: 847750 - DNA, 75 bp, synthetic construct
  source 1..75: mol_type = other DNA
acctgaaccgggaatggcaggtggtggcaagtgaactgcacggcgaacagccacaggcggtgccaggacggcagg

SEQ ID NO: 847751 - DNA, 75 bp, synthetic construct
  source 1..75: mol_type = other DNA
ataccgtaattgtctgcgcatcaactgcgctttgccgctcagcgaaacctatcgcgaagcactgaagcaaattgg

SEQ ID NO: 847752 - DNA, 75 bp, synthetic construct
  source 1..75: mol_type = other DNA
tccctgcgaaatctgtattacgcgcccgaaaggcggatttttactgtggatagaattgcctgaacaggtcgatat

SEQ ID NO: 847753 - DNA, 75 bp, synthetic construct
  source 1..75: mol_type = other DNA
gtctcaggaacaggacggcattaaatcgcatacccacagcgccagcgcatccagtacggatttggggacgaaaac

SEQ ID NO: 847754 - DNA, 75 bp, synthetic construct
  source 1..75: mol_type = other DNA
gtctgttctaccgttcttcaagagacggttatggttttgaggaaggctgggcagaagtttatacctcgaaaaatc

SEQ ID NO: 847755 - DNA, 75 bp, synthetic construct
  source 1..75: mol_type = other DNA
cgctgactgcgacatcgagcaaatgatgatcgttttaaatgcagcaaaagaaccatttgaaaaactcaaggcaaa

SEQ ID NO: 847756 - DNA, 75 bp, synthetic construct
  source 1..75: mol_type = other DNA
agttcaggaaggtcatcgttgtggggcttgaacctggtgcctattttggtaaagaagaagagcaaatagaaaatc

SEQ ID NO: 847757 - DNA, 75 bp, synthetic construct
  source 1..75: mol_type = other DNA
acccgaaagcggatgtggctaaagggcaatatggcaccgtgggtcaggggcttcacattgccaaaaaactgctgc

SEQ ID NO: 847758 - DNA, 75 bp, synthetic construct
  source 1..75: mol_type = other DNA
aagaaggccgcaaacagtttgcggaatacaccagaggtgcacagccgctggtgaacaacgacaagcccagccagg

SEQ ID NO: 847759 - DNA, 75 bp, synthetic construct
  source 1..75: mol_type = other DNA
aagctccagaattgtcgtcgccgcggataacactatcgccgatgtacgcgcgggacagttctccactaatgctgt

SEQ ID NO: 847760 - DNA, 75 bp, synthetic construct
  source 1..75: mol_type = other DNA
cggagtttctggagtgtgaaagcctggatgaagtgcaaattaaccagagccgcacccagagggtgatgatggtgg

SEQ ID NO: 847761 - DNA, 75 bp, synthetic construct
  source 1..75: mol_type = other DNA
tccctttattgccccactgaatatggcgctcaaagatatttccaacgcgccggaagaaacggaagaacctgagac

SEQ ID NO: 847762 - DNA, 75 bp, synthetic construct
  source 1..75: mol_type = other DNA
tttctcacaatgggcatacttatgagcttcactttggaggatggttaaatcataggtacagtgatgcttctgagg

SEQ ID NO: 847763 - DNA, 75 bp, synthetic construct
  source 1..75: mol_type = other DNA
atggccgcattaccatacatgcaactgtacatagctgattacctggcggacaccatgcatttgtccgcagaggag

SEQ ID NO: 847764 - DNA, 75 bp, synthetic construct
  source 1..75: mol_type = other DNA
cggaaatggatactgtgaagatcggatattcaaaaaatccctgggcaaggcttggagaactacgacgtagctacg

SEQ ID NO: 847765 - DNA, 75 bp, synthetic construct
  source 1..75: mol_type = other DNA
ttactacgacaactacaaatacagatacagatctaaaagaattaaaccccacacataacgcgcacgtgcgcgata

SEQ ID NO: 847766 - DNA, 75 bp, synthetic construct
  source 1..75: mol_type = other DNA
cggagccagtaccggagccgtcatcgatggccttcttaacaggctgatagatttggggatccaacaatttaacga

SEQ ID NO: 847767 - DNA, 75 bp, synthetic construct
  source 1..75: mol_type = other DNA
ttacaaaagcgaatttcgaaatcgtccagcccatgttcaatgaattatcctcgataattcagaacagcgtgacca

SEQ ID NO: 847768 - DNA, 75 bp, synthetic construct
  source 1..75: mol_type = other DNA
tgttaagagcgagtgtattaaatcgttaataacacaaatcgtagaagggaaaataactaccgtagaagctacgaa

SEQ ID NO: 847769 - DNA, 75 bp, synthetic construct
  source 1..75: mol_type = other DNA
tcacactgatgcgcaaaaggctgcgcaatggcttcaggcatgcgacggaaacagggttcaggaatacgtgaagct

SEQ ID NO: 847770 - DNA, 75 bp, synthetic construct
  source 1..75: mol_type = other DNA
atgttattttccggggcgaccccaaaaccgtatagtatgccgacacattgctgcacaatatattaatgatattta

SEQ ID NO: 847771 - DNA, 75 bp, synthetic construct
  source 1..75: mol_type = other DNA
tctttcaggtagttatatggcccgttcagctaaaccccgtaaacgaaaacctgcccctcaaagaagcaaacttcc

SEQ ID NO: 847772 - DNA, 75 bp, synthetic construct
  source 1..75: mol_type = other DNA
tcatcaattcatgcattgctatctgattatcgagttaatggtgaatggtttgttaagagtgagtgtattaaatcg

SEQ ID NO: 847773 - DNA, 75 bp, synthetic construct
  source 1..75: mol_type = other DNA
ggggggcccccgctggtcgagtatacgcgggacaggctgcaccgtgagacggtgcgcagcttcggcagcagggca

SEQ ID NO: 847774 - DNA, 75 bp, synthetic construct
  source 1..75: mol_type = other DNA
tattggatattttgcaggcaataacgataaaggctctaattcttcatactcatccgatacggaagctgcggcacc

SEQ ID NO: 847775 - DNA, 75 bp, synthetic construct
  source 1..75: mol_type = other DNA
gatacagtggccgccattaaacaacttcaggagaacgaacaggtggcgctgaaccgcgcacagacacctgatctg

SEQ ID NO: 847776 - DNA, 75 bp, synthetic construct
  source 1..75: mol_type = other DNA
aaatcacgccgcgcgccaaggtgctggcgttccctgctatcaatgagcagggcgaagcgctggtgcctgaactgc

SEQ ID NO: 847777 - DNA, 75 bp, synthetic construct
  source 1..75: mol_type = other DNA
tcagagctggacacctttctggaggatatggccgccggaaagaggccgatactgattctcggcgcgccgccgcaa

SEQ ID NO: 847778 - DNA, 75 bp, synthetic construct
  source 1..75: mol_type = other DNA
gacgctctggatcagttcctgctggatatgatgaacgggctgcgcccgatactgattctcggtgcgccgccgcag

SEQ ID NO: 847779 - DNA, 75 bp, synthetic construct
  source 1..75: mol_type = other DNA
gattttttaaatggtggtcaagggatttttaatgagtggctattaaatgcttacgagttgtcaattaatgaaata

SEQ ID NO: 847780 - DNA, 75 bp, synthetic construct
  source 1..75: mol_type = other DNA
cattcagtgtactggagccgacagcagatggattcagaaattattactcaaaaagcagaagtcatatatcgccgg

SEQ ID NO: 847781 - DNA, 75 bp, synthetic construct
  source 1..75: mol_type = other DNA
cgatgtttcattgatttatacaatttttttaaaaaggaaaaatttgatatagttcatacaaactcaactaagcca

SEQ ID NO: 847782 - DNA, 75 bp, synthetic construct
  source 1..75: mol_type = other DNA
gaaatacagaaattcacaaagaccctagagattaaaagcggttctttgagcattgatacgcaagtcattcaacaa

SEQ ID NO: 847783 - DNA, 75 bp, synthetic construct
  source 1..75: mol_type = other DNA
caaaatatgggaaagtcaatgaaagaaagatggacattgatttgtgctgtaaaaaaatagaggaagaaggatatt

SEQ ID NO: 847784 - DNA, 75 bp, synthetic construct
  source 1..75: mol_type = other DNA
ttggattgaaatgcttagccttgtttataatgaacttgattcaatacaggttcccgaatcatgcaaagaattaga

SEQ ID NO: 847785 - DNA, 75 bp, synthetic construct
  source 1..75: mol_type = other DNA
agaataagttttttagcgatgttgatgttatttgtcagccatcaaaatgggaagcatttggattggtatttgctg

SEQ ID NO: 847786 - DNA, 75 bp, synthetic construct
  source 1..75: mol_type = other DNA
gaaagccggatggcgcaaattgttgggctgcaagatcgcaaacagatgcgcgtgcgctatgaaccgccccgggtt

SEQ ID NO: 847787 - DNA, 75 bp, synthetic construct
  source 1..75: mol_type = other DNA
tagttgtacagttttactatcgcgataaatatatctccatgttcaggtggtattgcgtatttacatggaagtgtc

SEQ ID NO: 847788 - DNA, 75 bp, synthetic construct
  source 1..75: mol_type = other DNA
tcttatcgctcaccattattcttttagacattcatcctatgaaactgccgcaaagttggtggtgggaactgaagt

SEQ ID NO: 847789 - DNA, 75 bp, synthetic construct
  source 1..75: mol_type = other DNA
cttttctgggactggtaccaggtgaatattccagtggaaacagtattcgtcccagaggaataacaaaagttggaa

SEQ ID NO: 847790 - DNA, 75 bp, synthetic construct
  source 1..75: mol_type = other DNA
atctctgggaacgttgcgctacagtactgtcacgtagggacattgtaagtaagctcagcgaaccatggggaagct

SEQ ID NO: 847791 - DNA, 75 bp, synthetic construct
  source 1..75: mol_type = other DNA
atgggtaatgcagtaagaaaccttttcggtaattcagcaggtagtatgtcgcattctgagcgtgatgtgctttat

SEQ ID NO: 847792 - DNA, 75 bp, synthetic construct
  source 1..75: mol_type = other DNA
ctgcgtgcaacgcaaaccggaaatgatcaggcggtgaaagccgattgtgataaagtctggcaggaaatacgcagt

SEQ ID NO: 847793 - DNA, 75 bp, synthetic construct
  source 1..75: mol_type = other DNA
cttggggcgttcatgcaacagaatggtatggtgttaaccgttgaggctgacagcaacggacgtaaatccgcgtca

SEQ ID NO: 847794 - DNA, 75 bp, synthetic construct
  source 1..75: mol_type = other DNA
ggaggtatatcacccaggatcccattgggctggaggggggatggaatttatacatttatccgttgagtccggtta

SEQ ID NO: 847795 - DNA, 75 bp, synthetic construct
  source 1..75: mol_type = other DNA
caatctacggtaagacgtatttcttcagcgcttagaaaacgcctagaacacctaagctctgacttttgggctttt

SEQ ID NO: 847796 - DNA, 75 bp, synthetic construct
  source 1..75: mol_type = other DNA
gtcagttaaccgacaaaaataatgatatgcatcatgagatgactatcaaacagcaagagttcaatgaatttatca

SEQ ID NO: 847797 - DNA, 75 bp, synthetic construct
  source 1..75: mol_type = other DNA
agaagaactggaaattgcccgagagaagcagcgacgtctggcatcgcatgaggtcaacagcgaaatgcaaagcgc

SEQ ID NO: 847798 - DNA, 75 bp, synthetic construct
  source 1..75: mol_type = other DNA
cgtgcagaagccaaagctgcccgtaaagcacgtgaccatgccctttatcaatcagcggggttactcatcatggcg

SEQ ID NO: 847799 - DNA, 75 bp, synthetic construct
  source 1..75: mol_type = other DNA
attcaggcggagcgggcagcagaaaaagcccaggaagcccgcacaaaggtaatgaatcttattcaagcagagaag

SEQ ID NO: 847800 - DNA, 75 bp, synthetic construct
  source 1..75: mol_type = other DNA
atccagacggtatatcagccggggagcttcgcgccgctcatccgcatcgaaacagacaacggcgagcgggagaaa

SEQ ID NO: 847801 - DNA, 75 bp, synthetic construct
  source 1..75: mol_type = other DNA
tacgacgaatgcgttaggtggaagttcaatcgttttaggagataacgataccgggtttaaacaaaatggcgatgg

SEQ ID NO: 847802 - DNA, 75 bp, synthetic construct
  source 1..75: mol_type = other DNA
cggtaaaatgagcagcggtggagccgccaacggcagttatcgcagcaacgggctgggtggtcacattgaaaccgg

SEQ ID NO: 847803 - DNA, 75 bp, synthetic construct
  source 1..75: mol_type = other DNA
gcaacaataatcgtgaagcaaatgattacaataattttgggtggatctatcatatgcataatatttttaagtgaa

SEQ ID NO: 847804 - DNA, 75 bp, synthetic construct
  source 1..75: mol_type = other DNA
tcagcgggaattcgctgatatgattggaatttcttattctgctctgaccagttatgagtatggtcgtaaccttcc

SEQ ID NO: 847805 - DNA, 75 bp, synthetic construct
  source 1..75: mol_type = other DNA
tagctcttatacgtgattctgaaagactaacaaaacaacaacttgttgatttagttgggctgaattacacgacct

SEQ ID NO: 847806 - DNA, 75 bp, synthetic construct
  source 1..75: mol_type = other DNA
gtacgatattaccgcagcaatacggttcgcccaggctggcggtttgtacacgtataatgccggttttgcgggggc

SEQ ID NO: 847807 - DNA, 75 bp, synthetic construct
  source 1..75: mol_type = other DNA
gttcacatagctatttatgggttcttttccaatcctttatattttattacaaattcatgctccaaagttgggacg

SEQ ID NO: 847808 - DNA, 75 bp, synthetic construct
  source 1..75: mol_type = other DNA
agcaaccttatgtgaaaaatggcgttatttttgcgcaggataaggcgaacagtgcagtctcgcaggctacggagc

SEQ ID NO: 847809 - DNA, 75 bp, synthetic construct
  source 1..75: mol_type = other DNA
ccgctccccgcatgggcagaagagaagggcggtaaaatcctcaccgcgggacgttggggagcgatgaacgtagaa

SEQ ID NO: 847810 - DNA, 75 bp, synthetic construct
  source 1..75: mol_type = other DNA
gacggcgttcactttcttgatactcttttcaacgttaaccattaaaaatagaattaggatattggttttctcttt

SEQ ID NO: 847811 - DNA, 75 bp, synthetic construct
  source 1..75: mol_type = other DNA
agaagctgtatataatattcctctgttgaatttcttctttttgctgttatataaaaaggaattgaggttttcatg

SEQ ID NO: 847812 - DNA, 75 bp, synthetic construct
  source 1..75: mol_type = other DNA
tataataatgggatactagcttcgttaatattgttatactgtaactatatctttctaaaaaagttagacaactct

SEQ ID NO: 847813 - DNA, 75 bp, synthetic construct
  source 1..75: mol_type = other DNA
gtggatgacggcatggaagcgctgacctgttcgtttaagatttatggctatgatgttgccatgctgacgctgctg

SEQ ID NO: 847814 - DNA, 75 bp, synthetic construct
  source 1..75: mol_type = other DNA
gtagcctttctcgtacagcagagtcactacaggtagccaaaagtacgttgtccgataagataaagaaatatgggc

SEQ ID NO: 847815 - DNA, 75 bp, synthetic construct
  source 1..75: mol_type = other DNA
ttttttctacagtgttactccctcaactctataatagaaaaaaagattccagcataaagaaagagtggctcatat

SEQ ID NO: 847816 - DNA, 75 bp, synthetic construct
  source 1..75: mol_type = other DNA
tttaatagtttcaaagaaccatattcagttaatcatgaacatgtgtataacgttatttgtttttgcatttatata

SEQ ID NO: 847817 - DNA, 75 bp, synthetic construct
  source 1..75: mol_type = other DNA
gtcaaaaccattcgctgatcgcagcacagaaagatttcaggaaagcaatggataagaaggtggcggaaattaccg

SEQ ID NO: 847818 - DNA, 75 bp, synthetic construct
  source 1..75: mol_type = other DNA
tcaggtcactgatgaaaaacacagagataatgctgcacgggtaaggaaaatcctcacaactttggaagatctaca

SEQ ID NO: 847819 - DNA, 75 bp, synthetic construct
  source 1..75: mol_type = other DNA
ctgccagaggtggttatcctgcatctgtttttgacagtttgcctcgcttactggagaggccgggaccaacactaa

SEQ ID NO: 847820 - DNA, 75 bp, synthetic construct
  source 1..75: mol_type = other DNA
ggacgatttttcagactgggaagaggtagagctaaaaaaaatagcctctaaggtaaaaagtaaaaatagagataa

SEQ ID NO: 847821 - DNA, 75 bp, synthetic construct
  source 1..75: mol_type = other DNA
ggatgcccccacgccggttgacgacggcatggaggcgctgacctgccagattaaattctatggtctggatacaga

SEQ ID NO: 847822 - DNA, 75 bp, synthetic construct
  source 1..75: mol_type = other DNA
tcaggtggggaagtcaaccagtagtcaggttgaaacactgcaggggatgatcaccagtattacgccggacgcgcg

SEQ ID NO: 847823 - DNA, 75 bp, synthetic construct
  source 1..75: mol_type = other DNA
tagaaatcgatatggatcaagtgatgaaagcccatgagctgtatcagaaacacgggcttggcgcgcgtgacgatg

SEQ ID NO: 847824 - DNA, 75 bp, synthetic construct
  source 1..75: mol_type = other DNA
tgtcccagatggtaaaggggactatacttgtggtggccaagaccaacggggagaatcaaaaggagatggtctatg

SEQ ID NO: 847825 - DNA, 75 bp, synthetic construct
  source 1..75: mol_type = other DNA
cctatggtaagagcaaattcaatgcctccggcaaaaatgcggaagtatgggctgcaggcctgaaatatgatgcga

SEQ ID NO: 847826 - DNA, 75 bp, synthetic construct
  source 1..75: mol_type = other DNA
tggggaacaagcaatttggcatctacatgattaataactcaaggacagccaatggcaccgatggtcaggcgtaca

SEQ ID NO: 847827 - DNA, 75 bp, synthetic construct
  source 1..75: mol_type = other DNA
cattatttgttcactgccgtacaggcagcttagaaaaacgtagtgagcgagtgggcgaggaagcggaagttcact

SEQ ID NO: 847828 - DNA, 75 bp, synthetic construct
  source 1..75: mol_type = other DNA
agtaatattgcccgcctgttccgggcatatcctgatgaacaaaaaaatacaggtgatacttgttataataaattt

SEQ ID NO: 847829 - DNA, 75 bp, synthetic construct
  source 1..75: mol_type = other DNA
gatggacttaatcagcaactggaaagacaggttaccgttaatgtagaagtatattctgtatccacaaatgattcc

SEQ ID NO: 847830 - DNA, 75 bp, synthetic construct
  source 1..75: mol_type = other DNA
acaggcagcttagaaaatgaaaagcgccgcctttatgcgcccgattttgttcactgccgtacaggcagcttagaa

SEQ ID NO: 847831 - DNA, 75 bp, synthetic construct
  source 1..75: mol_type = other DNA
cagcttagaaaagcagccccaatccctaaaagagccattccctgttcactgccgtacaggcagcttagaaattcc

SEQ ID NO: 847832 - DNA, 75 bp, synthetic construct
  source 1..75: mol_type = other DNA
gccgtacaggcagcttagaaatcgaggtactccttatccttcggccgctttccgttcactgccgtacaggcagct

SEQ ID NO: 847833 - DNA, 75 bp, synthetic construct
  source 1..75: mol_type = other DNA
aacaaataaaaaaatgggattggaaagttaagtctgagaactttcggacttttttcgacaaagtaggctttgttg

SEQ ID NO: 847834 - DNA, 75 bp, synthetic construct
  source 1..75: mol_type = other DNA
tcttggatggaagaataataaccagtagcgtttatgatcatttattcctggatgagcaagctataaaattaagaa

SEQ ID NO: 847835 - DNA, 75 bp, synthetic construct
  source 1..75: mol_type = other DNA
ctgatgtcggtgtggttaatgatgcgtttggtgatatgcaaaaagaatggattttgccagttagaagcaaggatg

SEQ ID NO: 847836 - DNA, 75 bp, synthetic construct
  source 1..75: mol_type = other DNA
ggaaagcgccagggtaatcaggaaagagaaattatggttatctgcataactcctcgaattatagatattaaaggt

SEQ ID NO: 847837 - DNA, 75 bp, synthetic construct
  source 1..75: mol_type = other DNA
tttgaaagatgttaatcagattctggatgattcagcattacagatgaaaaaatccagaaatatttctctttttaa

SEQ ID NO: 847838 - DNA, 75 bp, synthetic construct
  source 1..75: mol_type = other DNA
accagacatcaaaccagcattagccagcaaggcgacactttacggagaacagaatgagcaaacagaaccgggaca

SEQ ID NO: 847839 - DNA, 75 bp, synthetic construct
  source 1..75: mol_type = other DNA
agaataacccagaatgacctgagaaaaatgtccggtatcccgtcgaccacttttagccgcagtgtgaaggcacgt

SEQ ID NO: 847840 - DNA, 75 bp, synthetic construct
  source 1..75: mol_type = other DNA
atctcggtttactcgatgatattatagacaacattgcaacttataaaatcccgctcactattgctatgaagaaag

SEQ ID NO: 847841 - DNA, 75 bp, synthetic construct
  source 1..75: mol_type = other DNA
caaccacttttcacgatcttaaacttctttctgaatgcttcataagcctgattgaacgtgcacaggaagaaaacg

SEQ ID NO: 847842 - DNA, 75 bp, synthetic construct
  source 1..75: mol_type = other DNA
caaccacttttcacgatctcaagcttctttcagaatgcttcatagatattatcgaacgagcaaaggaagagaacg

SEQ ID NO: 847843 - DNA, 75 bp, synthetic construct
  source 1..75: mol_type = other DNA
ctcggtttgcaggaaacggtaaacagggttggtaacgccgtgcaaaagaatggcgataccttgtccggtgggctt

SEQ ID NO: 847844 - DNA, 75 bp, synthetic construct
  source 1..75: mol_type = other DNA
gagagttagcccgccgactgcgacgtgactttccccgtcaatctatacctttagcaaagactattgagttcattg

SEQ ID NO: 847845 - DNA, 75 bp, synthetic construct
  source 1..75: mol_type = other DNA
gatcagatccggcggagcctcattgtgttcgcaccaagatcatcagtactcaatattgaagcatcagtttggtct

SEQ ID NO: 847846 - DNA, 75 bp, synthetic construct
  source 1..75: mol_type = other DNA
tcagctgtttgtgggccgatagtgttaatttgctttttgttttccgaacatatattagctctatggttgggcgaa

SEQ ID NO: 847847 - DNA, 75 bp, synthetic construct
  source 1..75: mol_type = other DNA
cagcaactgacgccaccggttcctgatattcgtttatccccttcggaacattccgccgggcgtatcgtctttccg

SEQ ID NO: 847848 - DNA, 75 bp, synthetic construct
  source 1..75: mol_type = other DNA
aggaacttcgggataagatttttgctgggctcaaaatatacgagggtaaacccttcatcgaacggttcggtctgt

SEQ ID NO: 847849 - DNA, 75 bp, synthetic construct
  source 1..75: mol_type = other DNA
ccctaatgctatcgcagcaccagaatgcattgatataaaaggagcgggtacctttaataatcactataaaaaccc

SEQ ID NO: 847850 - DNA, 75 bp, synthetic construct
  source 1..75: mol_type = other DNA
ttgctttatgctatgtatgggttggtggttgggcgtgtgatttcatttttgattagcgcaataatttgtcgaggt

SEQ ID NO: 847851 - DNA, 75 bp, synthetic construct
  source 1..75: mol_type = other DNA
aattgcttggacatcaagaatgatagtagatagcttaattttattttatctttctcaaaaaatacggagtattta

SEQ ID NO: 847852 - DNA, 75 bp, synthetic construct
  source 1..75: mol_type = other DNA
acatatataggcatccatttagaatagttctcgggaataagtcattgtatccatcagaagaacttgtaaaattca

SEQ ID NO: 847853 - DNA, 75 bp, synthetic construct
  source 1..75: mol_type = other DNA
tttatgttgtagcagcaaaaactcacatcgaaaaaataaaactaatcgttccagaagctgttggtatcattgaac

SEQ ID NO: 847854 - DNA, 75 bp, synthetic construct
  source 1..75: mol_type = other DNA
gacgtcagtatgatgctcgctttttcatatcgagggttcagtcgccggaagaacaggctggcttcctctctgttc

SEQ ID NO: 847855 - DNA, 75 bp, synthetic construct
  source 1..75: mol_type = other DNA
caaatagtgcaggaagtcgtcctgaaagactggccggcccattacataaatccccctctgatctggcggaagaat

SEQ ID NO: 847856 - DNA, 75 bp, synthetic construct
  source 1..75: mol_type = other DNA
gtaaaagtcaaatttgacgggcgttacaccctcttttcggagtttcaggaaggcagctatgacttcggttaccgc

SEQ ID NO: 847857 - DNA, 75 bp, synthetic construct
  source 1..75: mol_type = other DNA
agcctctggacctgattacactgtcagagcacctggaacatcagggcaggctggatgtactgggcggttttgctt

SEQ ID NO: 847858 - DNA, 75 bp, synthetic construct
  source 1..75: mol_type = other DNA
gtcaggaaagcccatgctgctttgcacgctgttctggacaagttccagatagaaaatgccgagaaaatcaaaaac

SEQ ID NO: 847859 - DNA, 75 bp, synthetic construct
  source 1..75: mol_type = other DNA
ttatcggtacgcttatcggagcattacccggcgctggagcggatattgctgcgtggataagttacgccatttcaa

SEQ ID NO: 847860 - DNA, 75 bp, synthetic construct
  source 1..75: mol_type = other DNA
gtaatcaaccactgaaaggcatggtgaccttatgtttgggattattactggcgtgtatcggttatgatcaaatat

SEQ ID NO: 847861 - DNA, 75 bp, synthetic construct
  source 1..75: mol_type = other DNA
gaatatcgcaaaagacgctgtaacaaacaatatcgcattgatgagcactttttatgacagtgataatacgtcagg

SEQ ID NO: 847862 - DNA, 75 bp, synthetic construct
  source 1..75: mol_type = other DNA
ggggcggtatatcactcaggatccgattggactgaaggggggatggaatttttatcagtatccgttaaatccggt

SEQ ID NO: 847863 - DNA, 75 bp, synthetic construct
  source 1..75: mol_type = other DNA
aagcgcagactggatttgcccctatatttccagacatctgttatcacttaacccattacaagcccgctgccgcag

SEQ ID NO: 847864 - DNA, 75 bp, synthetic construct
  source 1..75: mol_type = other DNA
agaggttaacggaaactggagggtggttttcaaggtggaagaaccaaacgtcttagacgttgatcttgaagatta

SEQ ID NO: 847865 - DNA, 75 bp, synthetic construct
  source 1..75: mol_type = other DNA
tgtcgctggggcatttctttccgcgcatcagtctgcgcatcaaccacaacgaaaagagcactgtatgacgtttgc

SEQ ID NO: 847866 - DNA, 75 bp, synthetic construct
  source 1..75: mol_type = other DNA
gcagcgggcgagtttgtcactctcgatttcggtgcgctgtatcagggctactgctctgatatgacgcgcaccttg

SEQ ID NO: 847867 - DNA, 75 bp, synthetic construct
  source 1..75: mol_type = other DNA
caaaatatttgagcagggggtcagtacgcgtgctgacgagcccggtgaacatggcattgggttgtacttgattgc

SEQ ID NO: 847868 - DNA, 75 bp, synthetic construct
  source 1..75: mol_type = other DNA
agaagcgatatactcacactgacgggggcatcgactgcaaccggagtcgggctgagaatatacaaaaacactgac

SEQ ID NO: 847869 - DNA, 75 bp, synthetic construct
  source 1..75: mol_type = other DNA
gcattgatgcggaagaagccttaaaattttgggggttagatatggaatatattatccccgaagacctaaaaccag

SEQ ID NO: 847870 - DNA, 75 bp, synthetic construct
  source 1..75: mol_type = other DNA
tagtcattttaatgacgtggcattaataaagcaaaacataagtaatctctatttatcacacactgttgtgaatga

SEQ ID NO: 847871 - DNA, 75 bp, synthetic construct
  source 1..75: mol_type = other DNA
cgctcaggactatgggctacgacacacaaacggaagtatgtgggcatggttttagaacaatggcgcgtggtgctt

SEQ ID NO: 847872 - DNA, 75 bp, synthetic construct
  source 1..75: mol_type = other DNA
ctggtggcatggactctactggcattcttctctcactaatggaggcagttgatgtaagcagaattattgccataa

SEQ ID NO: 847873 - DNA, 75 bp, synthetic construct
  source 1..75: mol_type = other DNA
ccactcattgcgagtatagtttttgggcgtactgaggggaaaacttcattatttaaaaatgtggaatgtattgtt

SEQ ID NO: 847874 - DNA, 75 bp, synthetic construct
  source 1..75: mol_type = other DNA
cgtcaactattaaagctcatctctacggcagggcacggtactagaaaattcgattctgtatccatggaaaagcta

SEQ ID NO: 847875 - DNA, 75 bp, synthetic construct
  source 1..75: mol_type = other DNA
agccagctccagctccagctactgtagagatttgtgtcgctaaagttgttattactaataaatttaaagagatga

SEQ ID NO: 847876 - DNA, 75 bp, synthetic construct
  source 1..75: mol_type = other DNA
ctggaagaccagagtgccaccatacagcagatacagcgggtgcagacagacacaaataacgacctggctgcgctg

SEQ ID NO: 847877 - DNA, 75 bp, synthetic construct
  source 1..75: mol_type = other DNA
aaaactgtctgccaaccagattgaaggcgatattgttaaaaccgtggggaaggctttcccgcgggactcccgcgc

SEQ ID NO: 847878 - DNA, 75 bp, synthetic construct
  source 1..75: mol_type = other DNA
cggctttccgcgagtccattttgcgcagctccaagggattccagtaccttcataccagagacttcgttaccgcac

SEQ ID NO: 847879 - DNA, 75 bp, synthetic construct
  source 1..75: mol_type = other DNA
gcacgcgagcagacgtatttcgtcgataagacgccggaccatagcgaaaacaggctgtggatgatggtcaacatg

SEQ ID NO: 847880 - DNA, 75 bp, synthetic construct
  source 1..75: mol_type = other DNA
gacaaagattacatacaaagaatgcattcctttttatgggggagagtcaaactccaaatgggatataatatcaga

SEQ ID NO: 847881 - DNA, 75 bp, synthetic construct
  source 1..75: mol_type = other DNA
gggctggcctgtcaggatttgtactgtgttcagttaaagaataaacagcgatttcctctggccttatatctgctg

SEQ ID NO: 847882 - DNA, 75 bp, synthetic construct
  source 1..75: mol_type = other DNA
gaagacgagtattgtgtcgatcttgaggagtatgaacgaagggttattatctggcaggctgagtttaaagtatta

SEQ ID NO: 847883 - DNA, 75 bp, synthetic construct
  source 1..75: mol_type = other DNA
tctgccatgtcatatcaggcgatggactttgtacctacgccacatcacaggtgtggctgttgagattatcgtcgt

SEQ ID NO: 847884 - DNA, 75 bp, synthetic construct
  source 1..75: mol_type = other DNA
tacggccagcagggcgaacctgccaccaccacgttccggattaacgcaccggcagcaccggccagcattgaactg

SEQ ID NO: 847885 - DNA, 75 bp, synthetic construct
  source 1..75: mol_type = other DNA
gcaggccagagcagaagcgcaggccgacgcggcgactatattctcatctcatctggataaactgattcaacatat

SEQ ID NO: 847886 - DNA, 75 bp, synthetic construct
  source 1..75: mol_type = other DNA
ctaccgttccaacaccgactgtaggcctgataagatgcgccagcatcgcatcaggcatggtgtgccgattgccgg

SEQ ID NO: 847887 - DNA, 75 bp, synthetic construct
  source 1..75: mol_type = other DNA
cgacaggagccgcatccagacgatttatcagccggggagcttcacgccactcatcagggttgaaaccgccaccgg

SEQ ID NO: 847888 - DNA, 75 bp, synthetic construct
  source 1..75: mol_type = other DNA
atttattacccgttcccacagaagatgtgcacctacatgatattcttgatttcaaggaaagaagaaaacctgaat

SEQ ID NO: 847889 - DNA, 75 bp, synthetic construct
  source 1..75: mol_type = other DNA
catgcgaattacttaaaaccgaggatggaaaaggcatccgtacaggtaaatggattagtcaattagaaataaact

SEQ ID NO: 847890 - DNA, 75 bp, synthetic construct
  source 1..75: mol_type = other DNA
ataacagcgacagcgtgcagctgacggcgacggtgaaagatccgtcgaatcatccggtggcgggaataacggtga

SEQ ID NO: 847891 - DNA, 75 bp, synthetic construct
  source 1..75: mol_type = other DNA
gctgcgtgtggtgttcctgtaataacctcagcattcggaggggctgaagagggggtgattcatggtttgactgga

SEQ ID NO: 847892 - DNA, 75 bp, synthetic construct
  source 1..75: mol_type = other DNA
ttgcgggaagaaaatattcttccggatgaatcattcaactggttaaaaaagaatgtagtagagccacattctggt

SEQ ID NO: 847893 - DNA, 75 bp, synthetic construct
  source 1..75: mol_type = other DNA
atttccctgatatcccatgtcaggacatcgaaatttacaggcatgaattaaacaacgcaattcaccaatatgcac

SEQ ID NO: 847894 - DNA, 75 bp, synthetic construct
  source 1..75: mol_type = other DNA
tgtgcagctggcgtcagatgacaacatgctgccagacagcctgaaagggtttggcctgtggtgcgtggtatcgcc

SEQ ID NO: 847895 - DNA, 75 bp, synthetic construct
  source 1..75: mol_type = other DNA
gcgctacgctctcactgggctgatgtgcagaatgaacaccttgcgcgacacggccaccagtcgcgcgttgatcat

SEQ ID NO: 847896 - DNA, 75 bp, synthetic construct
  source 1..75: mol_type = other DNA
tagcattgttcagggttcagccggggtgcgcattggtgccccaccggcgtggcctgttcggtgtgccccggcgga

SEQ ID NO: 847897 - DNA, 75 bp, synthetic construct
  source 1..75: mol_type = other DNA
actgagccaaacagaagtgaatagccacgacgggatcgccacagctacgctgaccagtttgaaaaatggtgatta

SEQ ID NO: 847898 - DNA, 75 bp, synthetic construct
  source 1..75: mol_type = other DNA
gcaaaaccagtcgaggcggtggcagatgaagtcatgaatgtcagctctaccggcgatctgagtggcgttctggaa

SEQ ID NO: 847899 - DNA, 75 bp, synthetic construct
  source 1..75: mol_type = other DNA
gtaaaaactggtatgaggaagtaaataactttcaggaagacaccataaagattgtttacgacgaaaataatatta

SEQ ID NO: 847900 - DNA, 75 bp, synthetic construct
  source 1..75: mol_type = other DNA
ctgggtgaaaataaatataaccacagaagatattatttacagaatcgtggcgagctctgtccgcaacagatgggg

SEQ ID NO: 847901 - DNA, 75 bp, synthetic construct
  source 1..75: mol_type = other DNA
gtccgttaaactcaggctacctcacaaagcccggcacgctgaatgactttctgattgctcctgatgagggcgacc

SEQ ID NO: 847902 - DNA, 75 bp, synthetic construct
  source 1..75: mol_type = other DNA
ccaccgccgaaaggcatgctgccattctcaaccgactggtttatgacctgggaacaaaacgttcatgcttcgatg

SEQ ID NO: 847903 - DNA, 75 bp, synthetic construct
  source 1..75: mol_type = other DNA
cacttcgttggcgggtccaggcgggactgaataaaggagaagcccgtaacgcgctggcgcgcgcggtattcctgc

SEQ ID NO: 847904 - DNA, 75 bp, synthetic construct
  source 1..75: mol_type = other DNA
gacctctacagatatcttttgattatgaagtaaatataggaggggaaataatcaaagatttttataaggaaataa

SEQ ID NO: 847905 - DNA, 75 bp, synthetic construct
  source 1..75: mol_type = other DNA
acggtgataaagtcatcagacttgtcagggggcagtcatacagaggctcacgactgggaccggtggggatttcag

SEQ ID NO: 847906 - DNA, 75 bp, synthetic construct
  source 1..75: mol_type = other DNA
aaacaaaaaatttaattattgaaaaatccactttactctcagagcttataactaataaagtaattgtaattcata

SEQ ID NO: 847907 - DNA, 75 bp, synthetic construct
  source 1..75: mol_type = other DNA
ttgggggggtttgtttaccaagggaaagtagctctttatcactgcctgaaactattaacggcaaaatcatttcaa

SEQ ID NO: 847908 - DNA, 75 bp, synthetic construct
  source 1..75: mol_type = other DNA
agcaaattgaatcgatatcaaacgttttcagatttatttatagcttgaattataactctgccatacaattgcata

SEQ ID NO: 847909 - DNA, 75 bp, synthetic construct
  source 1..75: mol_type = other DNA
cagtctgctccctttggccgctcgggaaccccaccaggggtaattcaaatttcgaggtaatgcttgagatggtgg

SEQ ID NO: 847910 - DNA, 75 bp, synthetic construct
  source 1..75: mol_type = other DNA
tatggaatggcgcttatttttatatctaagaataaaaacaaatttgtggatgaggcacttttcaataacaataca

SEQ ID NO: 847911 - DNA, 75 bp, synthetic construct
  source 1..75: mol_type = other DNA
gtattacatttgtgaatactggtgaagataattacttggttcaggcatatattctggatacagaaaaaaatgtaa

SEQ ID NO: 847912 - DNA, 75 bp, synthetic construct
  source 1..75: mol_type = other DNA
gacaaaaggccgtctggcgatacccggcgcattcggctttgggcgtgcttttctgtatgaagatgttatccgttt

SEQ ID NO: 847913 - DNA, 75 bp, synthetic construct
  source 1..75: mol_type = other DNA
tcggcaccaattttcagttaatgggttaccgctattcgacacaaggtttttatacccttgatgatgttgcgtatc

SEQ ID NO: 847914 - DNA, 75 bp, synthetic construct
  source 1..75: mol_type = other DNA
attttacatttgcgatgcagcaaaaagtcctgtatttgctattcagatcgaagaaaatagagatgatagcgatgt

SEQ ID NO: 847915 - DNA, 75 bp, synthetic construct
  source 1..75: mol_type = other DNA
aaaacactatcaataagttggagtcattaccaccttgcagatccatcacttgagcaggatgctgtaaataatcgc

SEQ ID NO: 847916 - DNA, 75 bp, synthetic construct
  source 1..75: mol_type = other DNA
ggcgcaactcattggtgagattggtaaccaggtggcagatattgccagaacggaaggacagatagccggtgagaa

SEQ ID NO: 847917 - DNA, 75 bp, synthetic construct
  source 1..75: mol_type = other DNA
acatccagcccgttcggtatcggcatgaccttcgattatacggagtgttgggagttaggtatccgtgacgattgc

SEQ ID NO: 847918 - DNA, 75 bp, synthetic construct
  source 1..75: mol_type = other DNA
cttgcttgagcactactcaccggatgaagtgcatgaagcagtgccagagtatgaaaccagctggcaggacaccag

SEQ ID NO: 847919 - DNA, 75 bp, synthetic construct
  source 1..75: mol_type = other DNA
attaagccagactctggcgactgaatcccgccactggcaacagcaaaaacaaacattgactgaagcccagactca

SEQ ID NO: 847920 - DNA, 75 bp, synthetic construct
  source 1..75: mol_type = other DNA
gcaaacgacccttagcttttgcgagcaacagcgtgacgagagtctggcatgccagcaaaatctgcaaactctgct

SEQ ID NO: 847921 - DNA, 75 bp, synthetic construct
  source 1..75: mol_type = other DNA
ataaaagagctggaaggtaaacttgcacaacacgccgatcaaaatgtcgagctcagccttcagaagcagcaggtt

SEQ ID NO: 847922 - DNA, 75 bp, synthetic construct
  source 1..75: mol_type = other DNA
ataaccattgaaggaagtaaagttaaaaaccaaacaataagaagtttttttggatcacatgtggctataaataat

SEQ ID NO: 847923 - DNA, 75 bp, synthetic construct
  source 1..75: mol_type = other DNA
gttcgtactcttccctgtttcgtgtttcccgcactttccgttttccgctaaagtcggcacttgcaaatagcacta

SEQ ID NO: 847924 - DNA, 75 bp, synthetic construct
  source 1..75: mol_type = other DNA
tcagcaagagtaacagtgcattagtcgaaaattcgcaacaaattacagcattacagcttcagctagaacaagcgc

SEQ ID NO: 847925 - DNA, 75 bp, synthetic construct
  source 1..75: mol_type = other DNA
gtctcaatgtagtggctgcgatatggtgcaaaacgacggtacaacaaattgtcctattcttataaatcgagaatg

SEQ ID NO: 847926 - DNA, 75 bp, synthetic construct
  source 1..75: mol_type = other DNA
aatgccacgtcatttcaggccgtaattacctgacagaaatcgaaagagaagcgcatattactttacgtcgccgca

SEQ ID NO: 847927 - DNA, 75 bp, synthetic construct
  source 1..75: mol_type = other DNA
gaaatcatttaaattttattgtggtgctgcattatttattagcactgtcttacaattcacaatgtggggattttt

SEQ ID NO: 847928 - DNA, 75 bp, synthetic construct
  source 1..75: mol_type = other DNA
cagaaacaatagagtcagcaaataaaataatatctaccatagatacaaacctggctgaaattaataaaaaagcct

SEQ ID NO: 847929 - DNA, 75 bp, synthetic construct
  source 1..75: mol_type = other DNA
ttggttaaagatgctaaaaaatttggtatcgatatcattcctgattatacctttaactttatgggaattgggggt

SEQ ID NO: 847930 - DNA, 75 bp, synthetic construct
  source 1..75: mol_type = other DNA
cagcggaccggatgccagtactcgcagcaccgcgcctgcggcagccagtccaccgcgtagtgctgccagtggatt

SEQ ID NO: 847931 - DNA, 75 bp, synthetic construct
  source 1..75: mol_type = other DNA
agagattaaggggcttcgtccactccctcccgctaagtccgatacagacatcgataacgacccgcttgttatccg

SEQ ID NO: 847932 - DNA, 75 bp, synthetic construct
  source 1..75: mol_type = other DNA
caataatgactgacttaaagatgaattctctttctgcaaccaattcatcttttacatttcgcacaaacggaaaag

SEQ ID NO: 847933 - DNA, 75 bp, synthetic construct
  source 1..75: mol_type = other DNA
gggtcggcgataatttatacactattgtaaacaggaataataatccttctgtagattttcatgccccaagactaa

SEQ ID NO: 847934 - DNA, 75 bp, synthetic construct
  source 1..75: mol_type = other DNA
gcgcaggtgctggacaaaatggcctacctgacgatatggcagggcgatgaagtacagcgccaggtgaaaggcgtg

SEQ ID NO: 847935 - DNA, 75 bp, synthetic construct
  source 1..75: mol_type = other DNA
caaagtcctcatagctataacaaccgctgtaacacttaacgtcttcgccgctttccttggtgtaataagaggact

SEQ ID NO: 847936 - DNA, 75 bp, synthetic construct
  source 1..75: mol_type = other DNA
gcgacgtcgatgtttaccgcgattgtcggtacgcgtgccatcgtaaacctgctatatggcggcaaacgcgtcaaa

SEQ ID NO: 847937 - DNA, 75 bp, synthetic construct
  source 1..75: mol_type = other DNA
attgcatacgataaaaataatgtgattgttaccgtaagcaaagatgtttcaactattaacccggaaggtttaagt

SEQ ID NO: 847938 - DNA, 75 bp, synthetic construct
  source 1..75: mol_type = other DNA
ctactcgttttccaagtgctacagcaagcgttcgctacactggtgacaatgatttttgggtgtttaggggaagag

SEQ ID NO: 847939 - DNA, 75 bp, synthetic construct
  source 1..75: mol_type = other DNA
tatcgcgaaaaataaaggttatggatgcgcggataaaacaagtatcccctgaaattgatgatttagagcaaaaag

SEQ ID NO: 847940 - DNA, 75 bp, synthetic construct
  source 1..75: mol_type = other DNA
gggatgagttagatgcactatctaatgcagtcaatgccgccattcctgatggtgaaaaaacgttattcttagaaa

SEQ ID NO: 847941 - DNA, 75 bp, synthetic construct
  source 1..75: mol_type = other DNA
agcgcaatgcagaaacagcttgacccgaatgaagtcgctgcacggcgtagtgaaccgccccggttttcctggaga

SEQ ID NO: 847942 - DNA, 75 bp, synthetic construct
  source 1..75: mol_type = other DNA
aagaagaaggtgaaaagattattagattccttcgagttatgtctgctgctgttgaatatttcggcagtaaaacaa

SEQ ID NO: 847943 - DNA, 75 bp, synthetic construct
  source 1..75: mol_type = other DNA
cgccagacagcgtgaccctggcagcatatgatccggagacttcccgcgtggctccatttttaaatacaagcggca

SEQ ID NO: 847944 - DNA, 75 bp, synthetic construct
  source 1..75: mol_type = other DNA
gcaaacaccttcattcgcgatatggctgcagctaccggaatcatgccgcgcacgctatcaatcgtatgcgcgcag

SEQ ID NO: 847945 - DNA, 75 bp, synthetic construct
  source 1..75: mol_type = other DNA
tccagtaaatggcttaaagcgtatatttggcttaaaaaccgtaaaagaatttgttaaagcaattctttatattat

SEQ ID NO: 847946 - DNA, 75 bp, synthetic construct
  source 1..75: mol_type = other DNA
aaagtatttgaaatatagtttttcaggaagctgggaggaatacaaactgctcccaacatttttatctgtaagtgt

SEQ ID NO: 847947 - DNA, 75 bp, synthetic construct
  source 1..75: mol_type = other DNA
gaagagtctgctccgaggattggcagctataacataattcttgatggacagaatgtcccgatatgcgtgatccgg

SEQ ID NO: 847948 - DNA, 75 bp, synthetic construct
  source 1..75: mol_type = other DNA
atgttgcgggttgttgttctgcggggccggtttttcgatgacattttctttcctctggtgacaagctatatggcg

SEQ ID NO: 847949 - DNA, 75 bp, synthetic construct
  source 1..75: mol_type = other DNA
cgatttccggccactgattagcccggaaggctggctaccaccggttattgatgaagcacaggacgtagctcatat

SEQ ID NO: 847950 - DNA, 75 bp, synthetic construct
  source 1..75: mol_type = other DNA
cggcatcatcatcgcctacacctcgttttgcttggaaggcgataaaaaagcgccgggcgacaacatcctgctcag

SEQ ID NO: 847951 - DNA, 75 bp, synthetic construct
  source 1..75: mol_type = other DNA
gaccggccagtctgctatgacgccgagtaggcagcctggcggctgcggcttgtcatggcctgaaattaccgttat

SEQ ID NO: 847952 - DNA, 75 bp, synthetic construct
  source 1..75: mol_type = other DNA
cataaagaacaccctacccccaaattatataaagatggacaatatcttgacaaacaaatcgaaggtttattttca

SEQ ID NO: 847953 - DNA, 75 bp, synthetic construct
  source 1..75: mol_type = other DNA
gttctctggtggtactggataaaaacggtgatccattgcctgtcagcccggaaggagatgcaaagcaaaatatca

SEQ ID NO: 847954 - DNA, 75 bp, synthetic construct
  source 1..75: mol_type = other DNA
aagcgatgactattactttagtggcaagctgactgttccgccaataccgcctgcgataaaacaggatgtcgccga

SEQ ID NO: 847955 - DNA, 75 bp, synthetic construct
  source 1..75: mol_type = other DNA
ttttcaatgcttcattccgggttattgttattagaagcaaatttaaattatcccgtcggctccagttttaacacc

SEQ ID NO: 847956 - DNA, 75 bp, synthetic construct
  source 1..75: mol_type = other DNA
cattgttgaattactcgtcatcggttattcccattatttttctgcctggttgtgcagcattctggaacgccgact

SEQ ID NO: 847957 - DNA, 75 bp, synthetic construct
  source 1..75: mol_type = other DNA
tttcaacaattgctgtggcattgtttggttcagccgcgatggcaaatgctgctgatttaacagcaaatacgtccg

SEQ ID NO: 847958 - DNA, 75 bp, synthetic construct
  source 1..75: mol_type = other DNA
tggaaatcatgctggtgatttttcttatcggccttgccagtgcgggcgtggtacagacttttgcgaccgattctg

SEQ ID NO: 847959 - DNA, 75 bp, synthetic construct
  source 1..75: mol_type = other DNA
gcttatccgtcaggcgttattcctgatatgcgtggctggacgattaagggcaagcccggcagtggtcgtgccgta

SEQ ID NO: 847960 - DNA, 75 bp, synthetic construct
  source 1..75: mol_type = other DNA
tcggcgggatcatttcgccggaaatggaaacaccgaagctcctgtggcttaaagaaaatatgcctgaagtcttcg

SEQ ID NO: 847961 - DNA, 75 bp, synthetic construct
  source 1..75: mol_type = other DNA
attttaaaacgctatagcagtgacatggatttgtttaacacacaaatgaaggatcttacaaatctagtatccagt

SEQ ID NO: 847962 - DNA, 75 bp, synthetic construct
  source 1..75: mol_type = other DNA
tccggaccttatctggtcgttaccagacggagaaatacgccgatacgacaggcgtcagaacataatctgtcgcga

SEQ ID NO: 847963 - DNA, 75 bp, synthetic construct
  source 1..75: mol_type = other DNA
tctttgatttagataaaatagaaaaacacgatggcacatttgttttttattcaaatgttgatgtgtctttctcgg

SEQ ID NO: 847964 - DNA, 75 bp, synthetic construct
  source 1..75: mol_type = other DNA
tccgcttgcaaccgttgcatttttcttacgaaaaaggccgcagagtttcactcctgcggcctggtccgggcgcaa

SEQ ID NO: 847965 - DNA, 75 bp, synthetic construct
  source 1..75: mol_type = other DNA
gattaagcccccgcaacattgcgcctcaccggaatccttccggcttgacgctgattctacgactgtttttctgtt

SEQ ID NO: 847966 - DNA, 75 bp, synthetic construct
  source 1..75: mol_type = other DNA
ttccaaataaaaaggcagaacaacactccaacctttataaagaggcacattcattctttgaaaaacatcctgatt

SEQ ID NO: 847967 - DNA, 75 bp, synthetic construct
  source 1..75: mol_type = other DNA
gatgaagaaagcgaaatcgctggcaacaacgacgctgaatatggtgaccatgcttaagggggaactgacaggatt

SEQ ID NO: 847968 - DNA, 75 bp, synthetic construct
  source 1..75: mol_type = other DNA
ctgcatcagttgtcatggccaggatgctgactaatgcgggttttcacgtcaaagagataagcccgtttggaaagc

SEQ ID NO: 847969 - DNA, 75 bp, synthetic construct
  source 1..75: mol_type = other DNA
aacagttatcaaaagtgagcatgtctacacacaatagcaacccagcgggcgttgaaagccaaatcaaagagaaag

SEQ ID NO: 847970 - DNA, 75 bp, synthetic construct
  source 1..75: mol_type = other DNA
ctatcagtaatagagttgaaaaaacaaaaggagtataactgtgttatcttaaacgaacttgagaaaacaggattg

SEQ ID NO: 847971 - DNA, 75 bp, synthetic construct
  source 1..75: mol_type = other DNA
aagccgtgccccatttattataaccccaccgctatttcgtcttgaagccggcgatgactcatcactgcgaaggta

SEQ ID NO: 847972 - DNA, 75 bp, synthetic construct
  source 1..75: mol_type = other DNA
ttttgattgtgtggctagagtagaaaaagaatcggttaaaaaaatatgtgcattatcaaattttaataaacatca

SEQ ID NO: 847973 - DNA, 75 bp, synthetic construct
  source 1..75: mol_type = other DNA
aagtattttctggccgagttgttatttcaaatttaagcgttgatatacaaaataacgattttattatcataacag

SEQ ID NO: 847974 - DNA, 75 bp, synthetic construct
  source 1..75: mol_type = other DNA
atggatatacttcttgaatattataaacaaggcggaactgttgttatggttactcatgacacaaatttaattact

SEQ ID NO: 847975 - DNA, 75 bp, synthetic construct
  source 1..75: mol_type = other DNA
cggctttactatctggtggtgaaaaacaacgagttgcgcttgcaagagctttaataaaaaaacctaaaatactgc

SEQ ID NO: 847976 - DNA, 75 bp, synthetic construct
  source 1..75: mol_type = other DNA
tgctgcatataacgatattaactctgccagcgcgctgattgacgacgccacctgtgcggtgattgtcgagcccat

SEQ ID NO: 847977 - DNA, 75 bp, synthetic construct
  source 1..75: mol_type = other DNA
gctaaatactcaggctaaccgctatgtattgcagctaggcggcgatttggcgcagtggagtagcaacgcgcagga

SEQ ID NO: 847978 - DNA, 75 bp, synthetic construct
  source 1..75: mol_type = other DNA
cgttcgggttgataacattggcggcgtcggtgcacaaacggtcaacggtattgaactcattgaggttggcggtaa

SEQ ID NO: 847979 - DNA, 75 bp, synthetic construct
  source 1..75: mol_type = other DNA
acattaatatccataacagcggtgtgatgtcgggaaatgtcaccactgcaggtgatgtgaacgttatgcctgggg

SEQ ID NO: 847980 - DNA, 75 bp, synthetic construct
  source 1..75: mol_type = other DNA
gtgcaggatcaagactctgtcatcacggtacgcagactctataatggatatttcggtaatggcacagtcaatatt

SEQ ID NO: 847981 - DNA, 75 bp, synthetic construct
  source 1..75: mol_type = other DNA
gtattgcagctaggcggcgatttggcgcagtggagtagcaacgcgcaggatcgctggcatctcggcgtcatggca

SEQ ID NO: 847982 - DNA, 75 bp, synthetic construct
  source 1..75: mol_type = other DNA
ctatggatttatcggaggaaatgcctccggtaaggggatagttaatatttcaacggatagtctctggaatttaaa

SEQ ID NO: 847983 - DNA, 75 bp, synthetic construct
  source 1..75: mol_type = other DNA
acaggccacggcgtacaccctcacagggcagctacagagcaggcacctgaaccttccgcagcttgactgtgacta

SEQ ID NO: 847984 - DNA, 75 bp, synthetic construct
  source 1..75: mol_type = other DNA
gtaagaattggcgcgcccaccggcgtggcctgttcagtgtgcccgggcggagtcacttccggcaacccggtaaac

SEQ ID NO: 847985 - DNA, 75 bp, synthetic construct
  source 1..75: mol_type = other DNA
ttcgggcaacccggtaaatccgctgctgggggcgaaggtgctgcccggcgagacggaccttgcgctgcccggccc

SEQ ID NO: 847986 - DNA, 75 bp, synthetic construct
  source 1..75: mol_type = other DNA
tggcaggtcaaccagaccgcgacggcgtacaacactgcggtgcgggagcataacgcgaccctgcgtgatgacccg

SEQ ID NO: 847987 - DNA, 75 bp, synthetic construct
  source 1..75: mol_type = other DNA
ccctttgtggcgaaagctgtggctaaacataatgccgcaagatgaagccgatttacctttaccaaaaacctttga

SEQ ID NO: 847988 - DNA, 75 bp, synthetic construct
  source 1..75: mol_type = other DNA
aaaaaaacaacttactcataagcaaaaaataattagaaacatcctgttcgtaattattgtgtttattataattaa

SEQ ID NO: 847989 - DNA, 75 bp, synthetic construct
  source 1..75: mol_type = other DNA
cgcggatcatggcttttttgatggggtccagcgaggcgctgaaagatcgctatgattttatgaaattccaggtct

SEQ ID NO: 847990 - DNA, 75 bp, synthetic construct
  source 1..75: mol_type = other DNA
tggtttgaacctgaaatggatgagaaggttttcagctgtatggcacactgttcacgggcaaactgtaatgaagtg

SEQ ID NO: 847991 - DNA, 75 bp, synthetic construct
  source 1..75: mol_type = other DNA
gcgcaatgttaacgtgagccgtttttcgcttggcgttgaaggcaatgaactgctattcacgctgcaactggagat

SEQ ID NO: 847992 - DNA, 75 bp, synthetic construct
  source 1..75: mol_type = other DNA
caatttaggcatccagtgggcgaataagcaggtaggggtaatgcaatttactaacacaggtttacccatcacgac

SEQ ID NO: 847993 - DNA, 75 bp, synthetic construct
  source 1..75: mol_type = other DNA
ggaacacaagccgcctggcggcgacgcgtcttttagccccggtttatccccgctggcgcggggaacaccaacacg

SEQ ID NO: 847994 - DNA, 75 bp, synthetic construct
  source 1..75: mol_type = other DNA
tcgcctctggattttcagttatccggcgcgcaactggtttcctggcatccatccgcgcagggaggcgagttggcg

SEQ ID NO: 847995 - DNA, 75 bp, synthetic construct
  source 1..75: mol_type = other DNA
aaaacgaaaataccagctatagccagattgtcacagagtgtcgtatgcgttacgccgtacagatgttattgatgg

SEQ ID NO: 847996 - DNA, 75 bp, synthetic construct
  source 1..75: mol_type = other DNA
gaaggccaccgtgtcgctgtccactacggctacgacgataagggccgcctgaccggcgaacggcagacggtggag

SEQ ID NO: 847997 - DNA, 75 bp, synthetic construct
  source 1..75: mol_type = other DNA
gcgcctgattggcgaagttggcggtttctatcagaaagacagctacaacaatggcaccagctacaaacaggcggg

SEQ ID NO: 847998 - DNA, 75 bp, synthetic construct
  source 1..75: mol_type = other DNA
tcttaggcaaaagaatcgttccaactacttatgctgagattaaaaagagtatttcttttaaaaatccgtttaacc

SEQ ID NO: 847999 - DNA, 75 bp, synthetic construct
  source 1..75: mol_type = other DNA
aatggatactgatgatatatgtgttcgagatcggtttcggttacaagttgaaagattagaaaaagaccaggaact

SEQ ID NO: 848000 - DNA, 75 bp, synthetic construct
  source 1..75: mol_type = other DNA
ctggatatatatcaagagtgaaatacagctagcacgtttaaaaagtaagttaaatataaccagtttctggaataa

SEQ ID NO: 848001 - DNA, 75 bp, synthetic construct
  source 1..75: mol_type = other DNA
tacgcctgaacgaatggaagcacaagctaaattaccagagctagctaaagagtctggacttaaacccgctttcac

SEQ ID NO: 848002 - DNA, 75 bp, synthetic construct
  source 1..75: mol_type = other DNA
atctgccgatactcttcagaaagttactcaagagttaaataaacaaatcaccgctaaaggtggctggaaagccat

SEQ ID NO: 848003 - DNA, 75 bp, synthetic construct
  source 1..75: mol_type = other DNA
cgaatggaagcacaagctaaattaccagggttagctaaagaatctggacttaaaccagtatttactatgggtgat

SEQ ID NO: 848004 - DNA, 75 bp, synthetic construct
  source 1..75: mol_type = other DNA
gaatataataaaagagatgaaaaaggtctattcaaactagttccgattcatgctccgggaatacgtaacggagaa

SEQ ID NO: 848005 - DNA, 75 bp, synthetic construct
  source 1..75: mol_type = other DNA
aaccgatgagcaaaagaaagtagttgatgctttaggttctggcttgattaatagtttaaaagtcttggctggtgt

SEQ ID NO: 848006 - DNA, 75 bp, synthetic construct
  source 1..75: mol_type = other DNA
atgaggtgccggtccatgcggatatcccaaaacaggaggtgattttcctggatgataccgaccccatatcctccc

SEQ ID NO: 848007 - DNA, 75 bp, synthetic construct
  source 1..75: mol_type = other DNA
cgcgcgtactggatgatcccaaagttgatgtagcgattatcagcaccacttacattcagcagacagggctttctc

SEQ ID NO: 848008 - DNA, 75 bp, synthetic construct
  source 1..75: mol_type = other DNA
aagccagtcaggatcttgaagatatctggtattacgggtaccaccatttcggtgaagagcaggccgacagatata

SEQ ID NO: 848009 - DNA, 75 bp, synthetic construct
  source 1..75: mol_type = other DNA
ggctggaaagctattcaggactctacgcagacaatgctagggaacttgaagaatacttggaacaactcactaacg

SEQ ID NO: 848010 - DNA, 75 bp, synthetic construct
  source 1..75: mol_type = other DNA
cactgttaatcctccaaaacaaccaagacagccacgaattagcggcaacagagcaatcacagcggcttactcagc

SEQ ID NO: 848011 - DNA, 75 bp, synthetic construct
  source 1..75: mol_type = other DNA
gctagagcaaaaaatactaaagttttccgtttcacaagtcaggttaatgacgctattaatcctccaaaacaacca

SEQ ID NO: 848012 - DNA, 75 bp, synthetic construct
  source 1..75: mol_type = other DNA
atcgaaaaggacggaaaagaaaagctctatttcgttgtcgaaaccaaaagcacgctcttctcggtggaacgacgt

SEQ ID NO: 848013 - DNA, 75 bp, synthetic construct
  source 1..75: mol_type = other DNA
acagctccagatgatggcgaaaatgattacagcgtaacgtctacctctgcgggtaccaaaatgcagatgactcaa

SEQ ID NO: 848014 - DNA, 75 bp, synthetic construct
  source 1..75: mol_type = other DNA
ataatcaatatcaagccatcaccaaaccgtcactacttgccggttgcatagcactggcactattcccttctgccg

SEQ ID NO: 848015 - DNA, 75 bp, synthetic construct
  source 1..75: mol_type = other DNA
agcgaaagagatgaacgcctctgaatataaaattaccagcgctcgcatgggcaataccgtcaccatgagtgccga

SEQ ID NO: 848016 - DNA, 75 bp, synthetic construct
  source 1..75: mol_type = other DNA
atcgcattattagatagttctcttttgggtaatggtaaagaaggtattgcatttacaggtgaacgcatggtgtat

SEQ ID NO: 848017 - DNA, 75 bp, synthetic construct
  source 1..75: mol_type = other DNA
cgtctgaacctgagcgcggatggcgaagcggggatcaacttgctggcccgcagcgctgtcacccaggcgcgtcag

SEQ ID NO: 848018 - DNA, 75 bp, synthetic construct
  source 1..75: mol_type = other DNA
ggagcaacaacatcaccacgttgctccacaagctggctgcgaatctcacgaagttcttcaactgaagagccaaac

SEQ ID NO: 848019 - DNA, 75 bp, synthetic construct
  source 1..75: mol_type = other DNA
tgatttcgtgctcatcgttaaaggtactaaatcacaggcagaaaccatcagggaggagtgtcgtagcgtgcccga

SEQ ID NO: 848020 - DNA, 75 bp, synthetic construct
  source 1..75: mol_type = other DNA
agcagcatatgaccttgctaacgggaaatataccgcacaggacgccaccacagcacgaaaaggccttgtccagct

SEQ ID NO: 848021 - DNA, 75 bp, synthetic construct
  source 1..75: mol_type = other DNA
attatcaaaagtcagatgcgcctgtttattgtcgacggcatcaagtaccaaaagattggtgatgatcagttctat

SEQ ID NO: 848022 - DNA, 75 bp, synthetic construct
  source 1..75: mol_type = other DNA
cagacaaagaatttgtttaaatacaaaggcaacagatatgttttcgttgttgagcaaggtggttcctggtgctac

SEQ ID NO: 848023 - DNA, 75 bp, synthetic construct
  source 1..75: mol_type = other DNA
atggtgcaagatgctcagcagaacaagctggtagtgcatccttataccgtgcggtcagataaactgcctgaatac

SEQ ID NO: 848024 - DNA, 75 bp, synthetic construct
  source 1..75: mol_type = other DNA
aggtggcggaatatgcagatggtattggtccggattaccatatgttgattgaggagacatcgcagccgggtaata

SEQ ID NO: 848025 - DNA, 75 bp, synthetic construct
  source 1..75: mol_type = other DNA
cccgacaatttgaaagcgcgatgctcgataagcaaaacaggctcacaaaagcggcctggtgtgtcgcgttctttt

SEQ ID NO: 848026 - DNA, 75 bp, synthetic construct
  source 1..75: mol_type = other DNA
ccagtgcccgcccggttatgcgaccgccattactgttggcttttttggccggggcagtagggttactgatttcta

SEQ ID NO: 848027 - DNA, 75 bp, synthetic construct
  source 1..75: mol_type = other DNA
tgaacgatatcctcatcgcctgtgtggatggcctgaaaggcttcccggatgccatcaacacagtatatccggagg

SEQ ID NO: 848028 - DNA, 75 bp, synthetic construct
  source 1..75: mol_type = other DNA
ctaaaatgttgattaataatattaaggataaaagctataaaatatttcataataacgacactgtatttattttat

SEQ ID NO: 848029 - DNA, 75 bp, synthetic construct
  source 1..75: mol_type = other DNA
atacaataatcagtatcctgaacagaagagacattattttagaaagtcttcagccttatttagttattaataaag

SEQ ID NO: 848030 - DNA, 75 bp, synthetic construct
  source 1..75: mol_type = other DNA
caacgtattgctaagggagaactttaatgagcaacttgatactaatgttaatacaataatcagtatcctgaacag

SEQ ID NO: 848031 - DNA, 75 bp, synthetic construct
  source 1..75: mol_type = other DNA
aaagtaaaggtatatgtgaaaactgtggtaaaaatgctccgttttatttaaatgatggaaacccatatttggaag

SEQ ID NO: 848032 - DNA, 75 bp, synthetic construct
  source 1..75: mol_type = other DNA
gaaccgcaatggttgattgatgcggcagaaacctacacccgcaaaacctacacggccatgatttggccgcaccat

SEQ ID NO: 848033 - DNA, 75 bp, synthetic construct
  source 1..75: mol_type = other DNA
aagccgccccggaagacgaggttaaggccgaagcctttaccgctgcaaaagcgaagctggaagacgcgattaaag

SEQ ID NO: 848034 - DNA, 75 bp, synthetic construct
  source 1..75: mol_type = other DNA
cgactggcgccgtgagcaattctcaatttgcatgttagaaaacttcatttcagatgaggataccgacctaacagg

SEQ ID NO: 848035 - DNA, 75 bp, synthetic construct
  source 1..75: mol_type = other DNA
gcgttaggtaaatatctgaaaatctactcagatactggttacgaagaatttagtgcaggaaaagaagataacgta

SEQ ID NO: 848036 - DNA, 75 bp, synthetic construct
  source 1..75: mol_type = other DNA
tccggatggcgtgccttcaccaataactacggcattgttgatgccctgaaagtcgaaaaatttggtgaaaaggtg

SEQ ID NO: 848037 - DNA, 75 bp, synthetic construct
  source 1..75: mol_type = other DNA
aaaaaattaaattcgtattagctggagaagaaaaggacgccgaacgcggaaaccttgaaacattcagtctgggtg

SEQ ID NO: 848038 - DNA, 75 bp, synthetic construct
  source 1..75: mol_type = other DNA
attggcaaatagaacggttccaacaatctattcaagatgacaaaatatcatttaccatacaaacggatcattcag

SEQ ID NO: 848039 - DNA, 75 bp, synthetic construct
  source 1..75: mol_type = other DNA
tatctggttttttgatcaggacagcgtaatcacttcttcatttgtcgcaagatttctatctactgtccatgaaaa

SEQ ID NO: 848040 - DNA, 75 bp, synthetic construct
  source 1..75: mol_type = other DNA
gataatacgattggagcaataaattatccattctcatgtcatgttattaatttaggtgataatttaggtattgcc

SEQ ID NO: 848041 - DNA, 75 bp, synthetic construct
  source 1..75: mol_type = other DNA
tgggcctgttgagtctggaaagacaacaggactcgcagcctgttaatcaacattctgaacatgaacccgaatctg

SEQ ID NO: 848042 - DNA, 75 bp, synthetic construct
  source 1..75: mol_type = other DNA
caaaagaagcgggcggcgaactggaagtttatgagtacgatcccggtgagctgaagccacaagatgttgaagtac

SEQ ID NO: 848043 - DNA, 75 bp, synthetic construct
  source 1..75: mol_type = other DNA
tgctggcgatggtgcgccaggcataccgggattcccttgatggtaaaagcgtgtcgtttaccggggtaaacgggc

SEQ ID NO: 848044 - DNA, 75 bp, synthetic construct
  source 1..75: mol_type = other DNA
actgaagaagggcaaaaaacaaatgcctacgctaatacagaacgttacactgcgttttatcgggcaggaagtggt

SEQ ID NO: 848045 - DNA, 75 bp, synthetic construct
  source 1..75: mol_type = other DNA
aaatggaattgtgattataagggaaaatgtatcagatggaaatttatctggaatcaatgactcgctcagcagtga

SEQ ID NO: 848046 - DNA, 75 bp, synthetic construct
  source 1..75: mol_type = other DNA
agaagatgaagttctcaacgtattgctaagggagaactttaatgagcaacttgacactaatgttaatacaataat

SEQ ID NO: 848047 - DNA, 75 bp, synthetic construct
  source 1..75: mol_type = other DNA
tattaaattcgaaacaatgataaacccccagttcgctgacagaacctatttctccaattgttcacctgttgatcc

SEQ ID NO: 848048 - DNA, 75 bp, synthetic construct
  source 1..75: mol_type = other DNA
aatggtaacccgtgggacaaagacaatttaccgacgctgctcaaagccgtcgagggcctgaaaaaactgaaccgc

SEQ ID NO: 848049 - DNA, 75 bp, synthetic construct
  source 1..75: mol_type = other DNA
gcacgaggtcctggaagaaaaccggcaaaacaaacagtcagaaattccccaagaagacctgaaagaaaggctgaa

SEQ ID NO: 848050 - DNA, 75 bp, synthetic construct
  source 1..75: mol_type = other DNA
gccttcacggtttacgtcgtagttttggtactttggccgagtgggttgaagttcccactggtattgttgctcaaa

SEQ ID NO: 848051 - DNA, 75 bp, synthetic construct
  source 1..75: mol_type = other DNA
ccaagaagaatacggtttggatgaagttcaggcgggaatagtcgcgagcgctgcggcgtcagcatttgggggaat

SEQ ID NO: 848052 - DNA, 75 bp, synthetic construct
  source 1..75: mol_type = other DNA
tgaccaatacctgactgagcgttctgggcaggttgagcaggaaaacggggaaatgcgcgagattttcaaaccact

SEQ ID NO: 848053 - DNA, 75 bp, synthetic construct
  source 1..75: mol_type = other DNA
acggtgaactaccgatgaagaaaacatgggatgggctgtttacccataacactgagctcgcgaatcttttacagg

SEQ ID NO: 848054 - DNA, 75 bp, synthetic construct
  source 1..75: mol_type = other DNA
aaaccaccttgacgaaatctataaagtttttggcggtttttcggcgtacgaactggaacagttaacccaccagga

SEQ ID NO: 848055 - DNA, 75 bp, synthetic construct
  source 1..75: mol_type = other DNA
gtcatcctgtttacctctttctcagggagtttagtctccaggatttccggggcggttcagattaaggacaaaaga

SEQ ID NO: 848056 - DNA, 75 bp, synthetic construct
  source 1..75: mol_type = other DNA
acacccagaatttgggtgttgacccggtgagtgtgattcatgggggaaatgaacggggaacgtatgtctgcaagg

SEQ ID NO: 848057 - DNA, 75 bp, synthetic construct
  source 1..75: mol_type = other DNA
cgagcgggagaaagcgcagcgccgcagcctggcggagaagctgcagcaggaagggagcgaggacgggcacggcgt

SEQ ID NO: 848058 - DNA, 75 bp, synthetic construct
  source 1..75: mol_type = other DNA
aatatctttcaagtcgctcaaatcctgaacatctttctcctgtcatcaatcgaatgagcggactgaaaaaagata

SEQ ID NO: 848059 - DNA, 75 bp, synthetic construct
  source 1..75: mol_type = other DNA
tagtattttcaatacagaagctgatactgagcgctcctatctattcagtcttgcaagcaatttttcatttaaaac

SEQ ID NO: 848060 - DNA, 75 bp, synthetic construct
  source 1..75: mol_type = other DNA
gttcgtggcagaacgtcctgaccagctgtgggtggctggttttacttacgtcagcacatggcagggcttcgtcta

SEQ ID NO: 848061 - DNA, 75 bp, synthetic construct
  source 1..75: mol_type = other DNA
gtaattgctcaatttagctcagcgatactggcaaatgcgttcttagcacctcacatattgaagttacaattaaaa

SEQ ID NO: 848062 - DNA, 75 bp, synthetic construct
  source 1..75: mol_type = other DNA
ataatcaattgccacgagatatagtaccattaatttataatagtatgtggctattgtttgataaattttcccgat

SEQ ID NO: 848063 - DNA, 75 bp, synthetic construct
  source 1..75: mol_type = other DNA
aaaaatttcttttggagacggcgatgaatttaactatcctccatcaaatgtaaaaagaatgcttgagagggtgga

SEQ ID NO: 848064 - DNA, 75 bp, synthetic construct
  source 1..75: mol_type = other DNA
attgattccttagatgatgcaaaaattaatctcgaaaaggtcatcgattcgatgttggagacttttttaaattgc

SEQ ID NO: 848065 - DNA, 75 bp, synthetic construct
  source 1..75: mol_type = other DNA
tagctcaggcggttaggtctatagggccaaacttagttgttagcttactgctagatggtccccaaattagttcga

SEQ ID NO: 848066 - DNA, 75 bp, synthetic construct
  source 1..75: mol_type = other DNA
ctcaagtttagatcccagtaagaaatggtgggagaatattgcgataggacgccgcaagcttacaacattgcatac

SEQ ID NO: 848067 - DNA, 75 bp, synthetic construct
  source 1..75: mol_type = other DNA
ccatgctggcgattgctatcgtgcgtatcccgttttatgtgcgcctggcgcgggggcaaacattagttgtccgcc

SEQ ID NO: 848068 - DNA, 75 bp, synthetic construct
  source 1..75: mol_type = other DNA
agtatacctatgttcaggcggcgaaaacctttggtgcgtcgcgttggcatctgatcaactggcatattttacgta

SEQ ID NO: 848069 - DNA, 75 bp, synthetic construct
  source 1..75: mol_type = other DNA
attaatgggatcgtaaatgcacctgtaggaaatggtatcgttaaatatactgcagagtttaaactagaaggtgca

SEQ ID NO: 848070 - DNA, 75 bp, synthetic construct
  source 1..75: mol_type = other DNA
catgcagttgtagtctcagccatgcaggggattgatattgactgggcatttcatatgttaacaacaatgaatcta

SEQ ID NO: 848071 - DNA, 75 bp, synthetic construct
  source 1..75: mol_type = other DNA
ctacttattttcatagcgagagcaacagacaaggtgaaacaatcgttatagccagatctggtgcctatgcaggat

SEQ ID NO: 848072 - DNA, 75 bp, synthetic construct
  source 1..75: mol_type = other DNA
aattgctggatggggttgaagttgagtggttgccattggggaaactaggtgaattagttcgtggaaatggattgc

SEQ ID NO: 848073 - DNA, 75 bp, synthetic construct
  source 1..75: mol_type = other DNA
ctgtcaattaaactcacttggcacaactcatgataaagattttatcttaaagaaaagtctagattgcattttcaa

SEQ ID NO: 848074 - DNA, 75 bp, synthetic construct
  source 1..75: mol_type = other DNA
cactcaataattgaatataccgacaaatatagattactcgtctctccgcaacctcatttttcatgggataagata

SEQ ID NO: 848075 - DNA, 75 bp, synthetic construct
  source 1..75: mol_type = other DNA
aaaaacttgaattcccaatcccctgcccggataatccggaaaaatcccttgccatccagtctgaaatcgttcgga

SEQ ID NO: 848076 - DNA, 75 bp, synthetic construct
  source 1..75: mol_type = other DNA
cgttaaaaaattccagatacatcatcgtgttgcaattgaatatggcggcagcgtatacgatattgataatttacg

SEQ ID NO: 848077 - DNA, 75 bp, synthetic construct
  source 1..75: mol_type = other DNA
gaatggatcaatataaacaacaactggctcaaagcacgagtaaactcttatggttatgctgtgattgatccaaag

SEQ ID NO: 848078 - DNA, 75 bp, synthetic construct
  source 1..75: mol_type = other DNA
tcggtgtaattgacagaccaacgcatagcgatgattcgttcgcttttgccaaagatgaaataccagcacatcact

SEQ ID NO: 848079 - DNA, 75 bp, synthetic construct
  source 1..75: mol_type = other DNA
gtcactgatgaacaaatgcaaggagagcaacgtaaaacaattgatgagcttccaataattataggaagtatcgat

SEQ ID NO: 848080 - DNA, 75 bp, synthetic construct
  source 1..75: mol_type = other DNA
aatatttgccattatcgaaatagctgttatagcttttaccacttggtcattttctagagctctttgggtaattac

SEQ ID NO: 848081 - DNA, 75 bp, synthetic construct
  source 1..75: mol_type = other DNA
aataatcacgagttagttagttctggtgagcctgacgtaatatgtttaagcaagcaggtctgggaaaatcttctc

SEQ ID NO: 848082 - DNA, 75 bp, synthetic construct
  source 1..75: mol_type = other DNA
gtgaattacccccttcactatcattttttgctatcgatactaacagcgttatcatcgaaacaataaaattagctg

SEQ ID NO: 848083 - DNA, 75 bp, synthetic construct
  source 1..75: mol_type = other DNA
aaataagctcaacatctgaatcatttaatttaagtgaaaatcaaagatatgaatttgatattaaatctgagggcg

SEQ ID NO: 848084 - DNA, 63 bp, synthetic construct
  source 1..63: mol_type = other DNA
atgggttcgatccggcgcaacttcccaacagtcaggattataaatctcattatcttaattgca

SEQ ID NO: 848085 - DNA, 75 bp, synthetic construct
  source 1..75: mol_type = other DNA
atagacataaaattaaagaaataaataaaattctatcaggtacaggagtagttgtattagcatctgaacactcta

SEQ ID NO: 848086 - DNA, 75 bp, synthetic construct
  source 1..75: mol_type = other DNA
aaacattgaaagagttagatcgcctctttactaaggaaaccgatcctaaaaaacagttgttttattctaagcttg

SEQ ID NO: 848087 - DNA, 75 bp, synthetic construct
  source 1..75: mol_type = other DNA
aatcagcgatggtgctctgacgggttcgagttctgctgtgataacggagagactgcgtgtcacgttcgcgctgga

SEQ ID NO: 848088 - DNA, 75 bp, synthetic construct
  source 1..75: mol_type = other DNA
gctatgattctatcctcagaggaggacgattcctatttaaaatattataatttagataatgcaattaattggctg

SEQ ID NO: 848089 - DNA, 75 bp, synthetic construct
  source 1..75: mol_type = other DNA
gtttttgtagaatcggatgatgagaacattgaaggaattgaaggcatacaaatcagtgaagtagaaaaagattgg

SEQ ID NO: 848090 - DNA, 75 bp, synthetic construct
  source 1..75: mol_type = other DNA
cggaaaatgaaattgccagcattttccgaaacggtatcggtaagcttgaattttataatctcctgggtaatgctg

SEQ ID NO: 848091 - DNA, 75 bp, synthetic construct
  source 1..75: mol_type = other DNA
atgaagttatgatctttcgtgtccaacaaaatttagcgaaattctcatctaggatcataaaacgtcttttcgaca

SEQ ID NO: 848092 - DNA, 75 bp, synthetic construct
  source 1..75: mol_type = other DNA
aatttttgcagtaattgaaatagcagtaatggcatttacgaattggtcattctctcgttatctgtgggtattgag

SEQ ID NO: 848093 - DNA, 75 bp, synthetic construct
  source 1..75: mol_type = other DNA
cggcggcgtatacgatattgataatttacgaattgttacccccagactacacgatgagattcactacaggagata

SEQ ID NO: 848094 - DNA, 75 bp, synthetic construct
  source 1..75: mol_type = other DNA
ctcccgctatgctgaacgggacactggtaatgactccaacttattgatagtgttttatgttcagataatgcccga

SEQ ID NO: 848095 - DNA, 75 bp, synthetic construct
  source 1..75: mol_type = other DNA
gttcaacattttgtcgcggtacagcttaatatccgccgtccagaagttctctcccgctatgctgaacgggacact

SEQ ID NO: 848096 - DNA, 75 bp, synthetic construct
  source 1..75: mol_type = other DNA
taccacagttgttcaatgtcttgaaaggagaaatgagtcttgtggggcctcgtccaatcattactgctgaacttg

SEQ ID NO: 848097 - DNA, 75 bp, synthetic construct
  source 1..75: mol_type = other DNA
tatattcgctatcattgaagttgcaataatcgcttttgcaaaatggtatttttcacgttatgtctggttaatgac

SEQ ID NO: 848098 - DNA, 75 bp, synthetic construct
  source 1..75: mol_type = other DNA
tagtcagtacaagtctagcgttgtctgacttagtcagttttgctatttcggtcggcttagtactaggaatccatg

SEQ ID NO: 848099 - DNA, 75 bp, synthetic construct
  source 1..75: mol_type = other DNA
tgtgcagtgtatttttagctacagcagattttattggttttgtcctctcattatatgcatcagttagtatacttt

SEQ ID NO: 848100 - DNA, 75 bp, synthetic construct
  source 1..75: mol_type = other DNA
catttttgctgtaattgaaattgcaattttggcatttgcaaactggtcattttcaaggtttttgtggggactaac

SEQ ID NO: 848101 - DNA, 75 bp, synthetic construct
  source 1..75: mol_type = other DNA
ttgtcagtattgccctagcaatgtctgatttttttagttttgtcatttcattatatatagcgattggtgtcttat

SEQ ID NO: 848102 - DNA, 75 bp, synthetic construct
  source 1..75: mol_type = other DNA
ggaagtgaatgtcgatctggctgggctgagctacggaaaggtctgcatcgtcacgccgtcgaactgcccgcctga

SEQ ID NO: 848103 - DNA, 75 bp, synthetic construct
  source 1..75: mol_type = other DNA
gcagtttgcgcagaacatcgcgcggggcatgccgcagaaagatgcggcgatatgcgcgggctattcgccttcacg

SEQ ID NO: 848104 - DNA, 75 bp, synthetic construct
  source 1..75: mol_type = other DNA
ttatcccgttggtcggagaaaacgaaaatgcgttatttttcccaaccaaatccatcgaactgcttttcacacaga

SEQ ID NO: 848105 - DNA, 75 bp, synthetic construct
  source 1..75: mol_type = other DNA
ctggcctgatgaaatctacggcagcacggaaaccggcgtcattgcctggcgttaccgcgaacaagagcaacgccg

SEQ ID NO: 848106 - DNA, 75 bp, synthetic construct
  source 1..75: mol_type = other DNA
cattgctgttggtagcaagttccccacaagtcgcgacacaatcattcacctttgccgctatagcgccagacgctt

SEQ ID NO: 848107 - DNA, 75 bp, synthetic construct
  source 1..75: mol_type = other DNA
tgacacgcccattgcgtggctggacgaaagcacctggacgctgggcgatttgcgtcacgatgtctcgcaacttat

SEQ ID NO: 848108 - DNA, 75 bp, synthetic construct
  source 1..75: mol_type = other DNA
catcctgacaatgtctgtcggtgtcggtgagcgcctggtgttacccagtcctccccgtgaaaacctgcggatcat

SEQ ID NO: 848109 - DNA, 75 bp, synthetic construct
  source 1..75: mol_type = other DNA
gagacggtaagtttgttcagctggcgattgatggcgtggagatgaagcgcgtaacgtctatccagttctcccaca

SEQ ID NO: 848110 - DNA, 75 bp, synthetic construct
  source 1..75: mol_type = other DNA
tgcttttttccaccttgctcacctggcgtgaagtggtggtgctgaagatgcctatatctccagccagcgtaatca

SEQ ID NO: 848111 - DNA, 75 bp, synthetic construct
  source 1..75: mol_type = other DNA
cacacatgtggcccgcgccgaagagtggccgattatgccgaccgaatgggtacatactctgctaaaaccatggaa

SEQ ID NO: 848112 - DNA, 75 bp, synthetic construct
  source 1..75: mol_type = other DNA
tgcaaaaaatcggcgcggtggattacctgctggagatggtgcaaaacgcgggcttcggctttgccagcatgaccg

SEQ ID NO: 848113 - DNA, 75 bp, synthetic construct
  source 1..75: mol_type = other DNA
ctacccggaaaagagcatcctctatggtaaggccgtgtcaaccggctctacctggttggatatctttgcgtttgc

SEQ ID NO: 848114 - DNA, 75 bp, synthetic construct
  source 1..75: mol_type = other DNA
ctcttgcagtttagccaggacggtcagttccatctgatggggcgtcgtgggcgcatcgttaagattgaagaaaaa

SEQ ID NO: 848115 - DNA, 75 bp, synthetic construct
  source 1..75: mol_type = other DNA
cttactgaccgggtgagcgaggaaagccgccgctggctggcatcgtgcggcctgacggtggagcagatgcaaaac

SEQ ID NO: 848116 - DNA, 75 bp, synthetic construct
  source 1..75: mol_type = other DNA
atcctattttccttccaaatggtaataaaaggttatatttttttttaaaaggcattaatgacggtttaatgggtc

SEQ ID NO: 848117 - DNA, 75 bp, synthetic construct
  source 1..75: mol_type = other DNA
ccaacctgactgatgaacagatcgctaaattaccttttgcgttatatccaacgcaagtatccaactcatggtcta

SEQ ID NO: 848118 - DNA, 75 bp, synthetic construct
  source 1..75: mol_type = other DNA
tacatgaatctgcgtcaggacattatcgtggataatatagcttttgctatgcccgccggaaaaaatcttcccgga

SEQ ID NO: 848119 - DNA, 75 bp, synthetic construct
  source 1..75: mol_type = other DNA
tagagcttgcgctcctcagatgctgagaaaagaaatattgagacggtacgagataaatttggcgtgcgcttcggt

SEQ ID NO: 848120 - DNA, 75 bp, synthetic construct
  source 1..75: mol_type = other DNA
aaagttaatccagaagccgacaaattaacagatgaacataagtcaggtgtaaatcctggtggtaactgtagtccc

SEQ ID NO: 848121 - DNA, 75 bp, synthetic construct
  source 1..75: mol_type = other DNA
tattattttagcgggcattccagagtttcaaccccttactactgtaggtgacgatgtttggcttggacatggtgt

SEQ ID NO: 848122 - DNA, 75 bp, synthetic construct
  source 1..75: mol_type = other DNA
tcgcgaggcggcggcagttcccgttacgcgcggcgggcgtcagagcataggcgttttgctggtgctggatgacga

SEQ ID NO: 848123 - DNA, 75 bp, synthetic construct
  source 1..75: mol_type = other DNA
gcctcttttcaccgctgatagcggaagataacggcatgttactcgacgatatcttacagtttagcgaagatggtc

SEQ ID NO: 848124 - DNA, 75 bp, synthetic construct
  source 1..75: mol_type = other DNA
gccctcatttgggttgaaaaattgaaaaaattgtatcctgacacaaataccgaactttacatacaaaaaataacg

SEQ ID NO: 848125 - DNA, 75 bp, synthetic construct
  source 1..75: mol_type = other DNA
tttttccgtgttaaagggctaagacaaataatcgcagattataagcgaaatttaaagcctgattccgatgagaag

SEQ ID NO: 848126 - DNA, 75 bp, synthetic construct
  source 1..75: mol_type = other DNA
aaaatttaagagcagtcaaatcatttgattttgagtttcctttaacccgaggggttaatttaatttgtggtagta

SEQ ID NO: 848127 - DNA, 75 bp, synthetic construct
  source 1..75: mol_type = other DNA
aagtcggattcagtgcgataacacaacgccgtgcattactcaatatcacactttccgacggcaaaaaactgccca

SEQ ID NO: 848128 - DNA, 75 bp, synthetic construct
  source 1..75: mol_type = other DNA
aaaatcaccgacagacagaatcaaaaatgatcatcgggacgcaatttctcttgctaggttactgcgggctggtga

SEQ ID NO: 848129 - DNA, 75 bp, synthetic construct
  source 1..75: mol_type = other DNA
tggaaaaacgcggtaaagatggcgaactggtgatgctgacagcactgaactgtacacagggtgagcgttatctgg

SEQ ID NO: 848130 - DNA, 75 bp, synthetic construct
  source 1..75: mol_type = other DNA
aatagaactgggataagtataagtaaaaaacatttctcgcccattgtaagagatagagactattttaatatcaca

SEQ ID NO: 848131 - DNA, 75 bp, synthetic construct
  source 1..75: mol_type = other DNA
tgtgttaaagataatgttgataatcttgaaaggcttaaaaagcgattagtggatactaatgaattaatagatatc

SEQ ID NO: 848132 - DNA, 75 bp, synthetic construct
  source 1..75: mol_type = other DNA
ctctcgataaaaatatgaaagcggattccatacagtatacagaattgaaagatgctcacaattttatttcgctta

SEQ ID NO: 848133 - DNA, 75 bp, synthetic construct
  source 1..75: mol_type = other DNA
gtttgattcttgttggcgttcgtaaaaactacgtcactactttttataaaggtctcaatgttatctacggagact

SEQ ID NO: 848134 - DNA, 75 bp, synthetic construct
  source 1..75: mol_type = other DNA
gtgaatggttgttactatcccctggttatcccgaaagcaatctcgatctggaaagatggggatatgatgactacg

SEQ ID NO: 848135 - DNA, 75 bp, synthetic construct
  source 1..75: mol_type = other DNA
tttctctggcagcatgaccattcccgccctgtaggccagtgtacggtgcgtcgggtcaggaagggctggaaatca

SEQ ID NO: 848136 - DNA, 75 bp, synthetic construct
  source 1..75: mol_type = other DNA
gctgatgaggcctgggctgccattaagaccggctggtcaggggctgtctgtgggcttccggcccatgaatacact

SEQ ID NO: 848137 - DNA, 75 bp, synthetic construct
  source 1..75: mol_type = other DNA
tgaagaaataaatttaaaaaaagatcaatacattagacttaaaaacgattatattaatgacataaagaaaataaa

SEQ ID NO: 848138 - DNA, 75 bp, synthetic construct
  source 1..75: mol_type = other DNA
gattaatccttgttggtgtacgtaagaattacattgtcaagtttgaagatggattaaatattatacatggtgatt

SEQ ID NO: 848139 - DNA, 75 bp, synthetic construct
  source 1..75: mol_type = other DNA
ggaagctcttcaagatgatatttttcatataaagaaaatgttaattgaaagtgtttctgaaccttctattgcagc

SEQ ID NO: 848140 - DNA, 75 bp, synthetic construct
  source 1..75: mol_type = other DNA
tctaaattcaaagaatatgctgaagaaaaagttcttacagcaattcaagtatgtgaggtgttgtttaatgatact

SEQ ID NO: 848141 - DNA, 75 bp, synthetic construct
  source 1..75: mol_type = other DNA
gtttgcccgggcctccagtgttgtgctggttaatgaagccacagttcccgcgttgctggcagacggtctggcaga

SEQ ID NO: 848142 - DNA, 75 bp, synthetic construct
  source 1..75: mol_type = other DNA
atatgttaagacatgcttgcggatttaatcttgcagaacgcggcaatgacacgagattaatacaggattacttag

SEQ ID NO: 848143 - DNA, 75 bp, synthetic construct
  source 1..75: mol_type = other DNA
gtgtattagaaagagccagagaagtttctcgcttagaggacattatcacagaagataatgaagatattgaagctg

SEQ ID NO: 848144 - DNA, 75 bp, synthetic construct
  source 1..75: mol_type = other DNA
cgtcattccatcaatccagccgtggcgaacatcaggagttgagatcgataccgccagcttgccaaaaaatgtcga

SEQ ID NO: 848145 - DNA, 75 bp, synthetic construct
  source 1..75: mol_type = other DNA
tataaaagatgagcagcaatcatgccgtattcaccttacattcccagaagatgcaccaaaagatgtgttctatga

SEQ ID NO: 848146 - DNA, 75 bp, synthetic construct
  source 1..75: mol_type = other DNA
aagttaccgattgatgctgtaccggatattaccaatactcaggtgcagattaacacttcagccaatggctttacg

SEQ ID NO: 848147 - DNA, 75 bp, synthetic construct
  source 1..75: mol_type = other DNA
cggggcaatgtcttttattatggaagatgtaccagataactgtacttatgtcaccaggaaggaatccagagtgat

SEQ ID NO: 848148 - DNA, 75 bp, synthetic construct
  source 1..75: mol_type = other DNA
acgagccatttcctggcgcgatgaaagaactggcaaaggatatcaggagcagaccatgtatcgaggaaagacgca

SEQ ID NO: 848149 - DNA, 75 bp, synthetic construct
  source 1..75: mol_type = other DNA
tactttaaggtgtttagaacatgttctcctcaaaaatttttcgagcgggaatatatgtaatattaattatagcat

SEQ ID NO: 848150 - DNA, 75 bp, synthetic construct
  source 1..75: mol_type = other DNA
cttggcgtggttgccttcagtcgcgtcaggggcatatctccctgaatcactctgctttttcatggctactgttat

SEQ ID NO: 848151 - DNA, 75 bp, synthetic construct
  source 1..75: mol_type = other DNA
tatcgtcattcatggtaatgttgatatcggtgagaatgtcattctacggcagaatacaaccattggtgaaaaggt

SEQ ID NO: 848152 - DNA, 75 bp, synthetic construct
  source 1..75: mol_type = other DNA
ataaagataaaaaatgcacttatggaacggtatggatgtgatatcggcctgggcgcgcggattggtaaaggcctc

SEQ ID NO: 848153 - DNA, 75 bp, synthetic construct
  source 1..75: mol_type = other DNA
attattttttaatgagattattggatgcaatggatattaaaatcgtgttattgtcgcgtgtaatatacaataatc

SEQ ID NO: 848154 - DNA, 75 bp, synthetic construct
  source 1..75: mol_type = other DNA
attcaatggaaaaaagaaagtcagcgcaagaaaacaattttatcaaatgttttatgggcgttaaaaaactctaag

SEQ ID NO: 848155 - DNA, 75 bp, synthetic construct
  source 1..75: mol_type = other DNA
gatgtaatgggaggtgaggaaccattggggctaatatttgatgataactttggtatagaacaattaataaacaag

SEQ ID NO: 848156 - DNA, 75 bp, synthetic construct
  source 1..75: mol_type = other DNA
ggtcgcgaagaacgctacagcttcacctggaatggcaaaagcaaagcccgcatgctggcacaaacaccaagcgct

SEQ ID NO: 848157 - DNA, 75 bp, synthetic construct
  source 1..75: mol_type = other DNA
ggaatgccggtggtgaccacgaccgtggaggtgcacgataacctgacaggaacaacccgcaaagtaccggcatac

SEQ ID NO: 848158 - DNA, 75 bp, synthetic construct
  source 1..75: mol_type = other DNA
gtgaagcgcgtgaatatgcggtgcagcagaatatcaacatcctgcgtaaccgtgtaaaccagcttggtgtcgctg

SEQ ID NO: 848159 - DNA, 75 bp, synthetic construct
  source 1..75: mol_type = other DNA
ttgaagcacgtgaactggttaacgatcaggggaaaccgttactttatgttcctggcgacagtgcgcgtacgcgct

SEQ ID NO: 848160 - DNA, 75 bp, synthetic construct
  source 1..75: mol_type = other DNA
taaaaagtaaaaatttattcaatgaagcggaaatagctcatgccataaaatatgttgagggattgagagaaaaat

SEQ ID NO: 848161 - DNA, 75 bp, synthetic construct
  source 1..75: mol_type = other DNA
gaaaaattctggaaaaatatggtatacacattgattccgcagaaaatggaatatttttgaaacatgtagatccaa

SEQ ID NO: 848162 - DNA, 75 bp, synthetic construct
  source 1..75: mol_type = other DNA
agtgtaccagaacagcatataatggagtgtattatcgtgtgaatacaccaacgcagacggcaacaataaatggca

SEQ ID NO: 848163 - DNA, 75 bp, synthetic construct
  source 1..75: mol_type = other DNA
cgcggatctcactcacgcgtgatacagaacataccttatggccattatatctagttgccaaacaattagtgcagg

SEQ ID NO: 848164 - DNA, 75 bp, synthetic construct
  source 1..75: mol_type = other DNA
ggtcgctgtgcacaatcgccatgaacactgcccatttatccttcgagtgcgtggtgttattagcagaaagattgc

SEQ ID NO: 848165 - DNA, 75 bp, synthetic construct
  source 1..75: mol_type = other DNA
caaagacgccgggtttgccgacgacgtggtaaaaaccaacgcggtacagattctcaagcaggccggaattgaaga

SEQ ID NO: 848166 - DNA, 75 bp, synthetic construct
  source 1..75: mol_type = other DNA
aaactgctggaaagcatcccgggtatcggagagaaaacatctgcggtattgctggcttatatcggtctgaaggac

SEQ ID NO: 848167 - DNA, 75 bp, synthetic construct
  source 1..75: mol_type = other DNA
tattcttatctcatcacgttatatcttttggcggatttcaaccaccttaatatgggataaatatcccgatatttt

SEQ ID NO: 848168 - DNA, 75 bp, synthetic construct
  source 1..75: mol_type = other DNA
ttattacttggttactttcaggtttgcttcccgctgaacagagaaagtatacctttaccagagaataaagaagaa

SEQ ID NO: 848169 - DNA, 75 bp, synthetic construct
  source 1..75: mol_type = other DNA
gcagcaggttttacaggccagcgacccggcattgcctgtacatatccatatcgccgagcagcaaaaagaagtcaa

SEQ ID NO: 848170 - DNA, 75 bp, synthetic construct
  source 1..75: mol_type = other DNA
agtaaagatgtatcaaaaaaatggcgtttgaataacattgccgatgagtttaatatttcagaagtaacagtcaga

SEQ ID NO: 848171 - DNA, 75 bp, synthetic construct
  source 1..75: mol_type = other DNA
atgagaacgaaaagcaaatacatcagatctctaagcttatcggcatatctaatccttcctacttcataaagatgt

SEQ ID NO: 848172 - DNA, 75 bp, synthetic construct
  source 1..75: mol_type = other DNA
cctggtatattacgctaccaacgcttgtagctttacttgcgccagcaaaaggtcgttttaacgttacggccaaag

SEQ ID NO: 848173 - DNA, 75 bp, synthetic construct
  source 1..75: mol_type = other DNA
ttggaatactcatatcatcccgatatctatggtggcgttactcttcttcagtcatcctgaatgaatttccagact

SEQ ID NO: 848174 - DNA, 75 bp, synthetic construct
  source 1..75: mol_type = other DNA
tatcgctagcattgtatggcaaggcggccggaaaaatgactcacgtagattctctgtagtacatgactatatttt

SEQ ID NO: 848175 - DNA, 75 bp, synthetic construct
  source 1..75: mol_type = other DNA
ttggtctgaagattatgccaatgagttatgaacaaagtgttaattatgtaagagcaacgttttctcgtgattcat

SEQ ID NO: 848176 - DNA, 75 bp, synthetic construct
  source 1..75: mol_type = other DNA
acaacaaaatttttctttttgttgctatattgctatgttttgtttttttgtcaattgttgaacagccgctcggtt

SEQ ID NO: 848177 - DNA, 75 bp, synthetic construct
  source 1..75: mol_type = other DNA
caaacaaaatccttttggttgttgttatattgctatgttttgtttttttatcaattgttgagcagccacttggat

SEQ ID NO: 848178 - DNA, 75 bp, synthetic construct
  source 1..75: mol_type = other DNA
ctggggggtgagcagacttaccggtatgtgccgaatccaaatgagtatattgactctctggggttagtaggttgc

SEQ ID NO: 848179 - DNA, 75 bp, synthetic construct
  source 1..75: mol_type = other DNA
acgatggccccagccgcgtatatctgggatcaggcgcagactacgatcaaccggctgattgccgcgcaaaacacg

SEQ ID NO: 848180 - DNA, 75 bp, synthetic construct
  source 1..75: mol_type = other DNA
cgggcctgtattcagggccacagcgctaaagccatcatcgcggcctttaacgtttcgttggcctatgtgctgaga

SEQ ID NO: 848181 - DNA, 75 bp, synthetic construct
  source 1..75: mol_type = other DNA
agagcaggctcaaatacttatgcatcatggtttctctacgtctaccgaaatttattatcatcttaatcaagctaa

SEQ ID NO: 848182 - DNA, 75 bp, synthetic construct
  source 1..75: mol_type = other DNA
ggaattttttttcacaagcatttaagattttagctcagctaattaatgtcgtttatttggcgaaaataattcctc

SEQ ID NO: 848183 - DNA, 75 bp, synthetic construct
  source 1..75: mol_type = other DNA
ttttatggctaaaggtcgtacagatattttattaaagcttggcattattggaatgatcttgcaagtgggagcttt

SEQ ID NO: 848184 - DNA, 75 bp, synthetic construct
  source 1..75: mol_type = other DNA
atcctgttacgagatttaggcacttctgctgcattaatacaaaggaaagatcttactgagtctctaattaatact

SEQ ID NO: 848185 - DNA, 75 bp, synthetic construct
  source 1..75: mol_type = other DNA
gacggcagcgggcgcgtcgcgctgggcggagtagcacataagccctggcgcattgaggctgcggatgctcagcta

SEQ ID NO: 848186 - DNA, 75 bp, synthetic construct
  source 1..75: mol_type = other DNA
ccgcaggtaatctgctccagcgcacgcgctgcccctatttttacgacaccaatcagccctgcaataagcgcctgc

SEQ ID NO: 848187 - DNA, 75 bp, synthetic construct
  source 1..75: mol_type = other DNA
ggctcagtaccggtggcagtgttgccggaaatttcctggggaacatggcaaacaatctgctggtcggtgcaaatc

SEQ ID NO: 848188 - DNA, 75 bp, synthetic construct
  source 1..75: mol_type = other DNA
atttaaatctatgaccttaagtgcaggtgagcaaggctatatagctggcggagtggatacccgggactatgacgt

SEQ ID NO: 848189 - DNA, 75 bp, synthetic construct
  source 1..75: mol_type = other DNA
tggtcgatcagatgttaccgtatgaccaaattttgcagaatctccgcgcccctcgttatgtggctaacccggttt

SEQ ID NO: 848190 - DNA, 75 bp, synthetic construct
  source 1..75: mol_type = other DNA
ctggaactgtttactggcgttctgcatgtttgtcggtcgcttcggggtgattatcccggtgatggcaattgccgg

SEQ ID NO: 848191 - DNA, 75 bp, synthetic construct
  source 1..75: mol_type = other DNA
tggttcatcatcatttattgcgagtctatatcaccaagataaactattttatgtactggtaattctaagcgtggt

SEQ ID NO: 848192 - DNA, 75 bp, synthetic construct
  source 1..75: mol_type = other DNA
atgacagacattataaccaatgttgtaattgggatgccttcgcaactcttcactatggctcgttcttttaaagcc

SEQ ID NO: 848193 - DNA, 75 bp, synthetic construct
  source 1..75: mol_type = other DNA
gtgggcgaagtcaaacatcagaatggaaggcatcaagggatcagcaaagaaacagcgatggcgctttatattgac

SEQ ID NO: 848194 - DNA, 75 bp, synthetic construct
  source 1..75: mol_type = other DNA
tttcacttttgctgcgtgctggtgcgttgatcgcaccgattcagattgttgaagaacgtaccattggcccgaccc

SEQ ID NO: 848195 - DNA, 75 bp, synthetic construct
  source 1..75: mol_type = other DNA
ggtaaaggcgtgttcgacgttacaacaaataaagcactccaagcgcatatatacagatatactaaagctggtgtg

SEQ ID NO: 848196 - DNA, 75 bp, synthetic construct
  source 1..75: mol_type = other DNA
gggctgctgtatcgcagctgagaggctgggattatcgcgatcgccgtaaagataagtcacgcacaacgacaacag

SEQ ID NO: 848197 - DNA, 75 bp, synthetic construct
  source 1..75: mol_type = other DNA
tcaatatgcgcgcctggccagttaatctggtcggtggtgagctggaaacaggaaaatttcagggcacagccacca

SEQ ID NO: 848198 - DNA, 75 bp, synthetic construct
  source 1..75: mol_type = other DNA
aagttggaaaatgggaacgctgttttcaacttatcacatggggaacgagattatggtggagggaaatcctgggat

SEQ ID NO: 848199 - DNA, 75 bp, synthetic construct
  source 1..75: mol_type = other DNA
agtttctggggggtgtcggaacactgaatccggtattcacacgggggatgccctggttcggcgcagaaagcgacc

SEQ ID NO: 848200 - DNA, 75 bp, synthetic construct
  source 1..75: mol_type = other DNA
tataaactatttttccagaaatacagatagcttcatgattggtaaattcatgaatgccacaattcttggtagtta

SEQ ID NO: 848201 - DNA, 75 bp, synthetic construct
  source 1..75: mol_type = other DNA
cctgaccgacggcgagcaggtgaaaattatgctgcacctggccgaaggcactaaaaatgacaccttccgctggtg

SEQ ID NO: 848202 - DNA, 75 bp, synthetic construct
  source 1..75: mol_type = other DNA
gatgacatcagcaaacgctataacaaagacgtcattgtggtggaagcggcctatggctatacgctggagaactgc

SEQ ID NO: 848203 - DNA, 75 bp, synthetic construct
  source 1..75: mol_type = other DNA
ctatgcctataccctagccaactgcgataacgcggaaaatagtttccaggcgaaagaagaaaaggatgggggata

SEQ ID NO: 848204 - DNA, 75 bp, synthetic construct
  source 1..75: mol_type = other DNA
tgagtcattatctgagttagagaaaccagaaagaattgcccaaataaaaaatgattatgagttaagattgagaag

SEQ ID NO: 848205 - DNA, 75 bp, synthetic construct
  source 1..75: mol_type = other DNA
tcattcattaccacgtccagacgccagtgcagcttattctccacgtgccagtggtttcggattgctgtggcgaac

SEQ ID NO: 848206 - DNA, 75 bp, synthetic construct
  source 1..75: mol_type = other DNA
gccgcgtcaccaaaacagatggtgtcagtaagaccgacagtaacgagccgatgaaccaaaaggcatttaatgccc

SEQ ID NO: 848207 - DNA, 75 bp, synthetic construct
  source 1..75: mol_type = other DNA
ttgctcagccgggcacataccagggagctgggcttcgaagaacgcctgtcattactgacagcagaagaactaacc

SEQ ID NO: 848208 - DNA, 75 bp, synthetic construct
  source 1..75: mol_type = other DNA
cttttatgaggccccatccataaagcggacctactatcagtgcaaaaacctggagtgctcatgcacattcaccgc

SEQ ID NO: 848209 - DNA, 75 bp, synthetic construct
  source 1..75: mol_type = other DNA
aatcagacaaagcaaaaataccggaaaaacaacagcaaactctcaatcgctatggctccgcgtcaaagctgtcaa

SEQ ID NO: 848210 - DNA, 75 bp, synthetic construct
  source 1..75: mol_type = other DNA
atgagtacaaagaaaaatataaacacttgctttaccagaaaaaatttctcgatggtgtttttacagcaattaaat

SEQ ID NO: 848211 - DNA, 75 bp, synthetic construct
  source 1..75: mol_type = other DNA
atattgcgcgtagcattctggaacgtgacgtacgcatcaacagcaacgaagaactggcactgccgaaagagaagt

SEQ ID NO: 848212 - DNA, 75 bp, synthetic construct
  source 1..75: mol_type = other DNA
gataaatatgagagtccattttttgatattttaaagtcaatttatttaagtgtgtctctttatgtcgaaaaaaac

SEQ ID NO: 848213 - DNA, 75 bp, synthetic construct
  source 1..75: mol_type = other DNA
cgcattgattcacggttaattttgattgcgcaaacactgagctggtcgcgggccaaaatcttcttttacgtgaaa

SEQ ID NO: 848214 - DNA, 75 bp, synthetic construct
  source 1..75: mol_type = other DNA
aaccggtgtgctgtgtgtggttctgctggcgatcctcgcggatcagtcgacgatcaatagtgaagcactcatcaa

SEQ ID NO: 848215 - DNA, 75 bp, synthetic construct
  source 1..75: mol_type = other DNA
cagtcatcgagcgcggcgggtaagtccagcttaatggatgcggtgctcaacctgatcccgccagaggaacggctg

SEQ ID NO: 848216 - DNA, 75 bp, synthetic construct
  source 1..75: mol_type = other DNA
gtcatggctggaactggcgagagccaatggttggtttgttgttcgcagagataaactggtggaaaggctgatgca

SEQ ID NO: 848217 - DNA, 75 bp, synthetic construct
  source 1..75: mol_type = other DNA
tcaattatatggttgaaacggtagagaaaacgccacagctgaagggcaagctgaccatcagtcacgcctttgcgc

SEQ ID NO: 848218 - DNA, 75 bp, synthetic construct
  source 1..75: mol_type = other DNA
gtggacgcctcctgttccgccgaggcggtggcgcgtatctcgccgagaaccgcaacgttccataaagggcaactg

SEQ ID NO: 848219 - DNA, 75 bp, synthetic construct
  source 1..75: mol_type = other DNA
ttttgaatattctataaaggatatgtctcctgaagaaaaaaatgaagtgagagtgttgatagaaaatataccgat

SEQ ID NO: 848220 - DNA, 75 bp, synthetic construct
  source 1..75: mol_type = other DNA
gtaatatataaaagcgatcaaaaaagtgtcaacgtacgtctggaaaataaagggaataacccgttgcttgtttag

SEQ ID NO: 848221 - DNA, 75 bp, synthetic construct
  source 1..75: mol_type = other DNA
attgttgatttcggttttaacttcactgctacaaaactaatctcaatatataaaaataatgaaaatgagaaaaat

SEQ ID NO: 848222 - DNA, 75 bp, synthetic construct
  source 1..75: mol_type = other DNA
gaggtaatcatcaacctgcgggcgtgtatcgggtggatctctggcgtaatgatgagttcattggttcacaggata

SEQ ID NO: 848223 - DNA, 75 bp, synthetic construct
  source 1..75: mol_type = other DNA
ggtcattgaggcgaactcaattagcgcggttctggagctgattcgccgcacttccctttccacattgttaccagc

SEQ ID NO: 848224 - DNA, 75 bp, synthetic construct
  source 1..75: mol_type = other DNA
cgattgccacacaacatgacgggcttaaagctatttctcttgccccgccactactggagagaacggcggttttgt

SEQ ID NO: 848225 - DNA, 75 bp, synthetic construct
  source 1..75: mol_type = other DNA
ctttacccgtgccgccagtgcgttgcacgtctcccagcctgcgctttcccagcagattcgccagttagaggagag

SEQ ID NO: 848226 - DNA, 75 bp, synthetic construct
  source 1..75: mol_type = other DNA
cattcgccggagctggaggcaattcctttactgacagaaagtttagcgttggtggtggcgcaacatcatccgctg

SEQ ID NO: 848227 - DNA, 75 bp, synthetic construct
  source 1..75: mol_type = other DNA
ataaactacagctggcagactgccgctgcgaaggcatttttgcacatggcgttggaggaatgcgcggatgttggc

SEQ ID NO: 848228 - DNA, 75 bp, synthetic construct
  source 1..75: mol_type = other DNA
atgctctctcgacatatcaattattttcttgccgtggctgaacatggcagcttcacccgtgccgccagtgcgttg

SEQ ID NO: 848229 - DNA, 75 bp, synthetic construct
  source 1..75: mol_type = other DNA
cagggtgacatgacgcagtatggcggtagcattgttcagggttcagccggggtgcgcattggtgcccccaccggc

SEQ ID NO: 848230 - DNA, 75 bp, synthetic construct
  source 1..75: mol_type = other DNA
gtcacggcggcgtactgccgccgctcctggcctccgccattcagaaactgaccggaaccggggcggaactggtac

SEQ ID NO: 848231 - DNA, 75 bp, synthetic construct
  source 1..75: mol_type = other DNA
aaggcagtacctggcggcttgataccatctaccgcaccaatatgacggtggtttacagtgccgggcgctgggccg

SEQ ID NO: 848232 - DNA, 75 bp, synthetic construct
  source 1..75: mol_type = other DNA
gtgacaaagctggatgtactggaagatatccgccgtgcactggagcggtcactggcagagggcaaaaccggcgcg

SEQ ID NO: 848233 - DNA, 75 bp, synthetic construct
  source 1..75: mol_type = other DNA
gagacattatttttcaatctcgataaagaaccctataaaaatagccctgaattacaggagttgatttggaaaaag

SEQ ID NO: 848234 - DNA, 75 bp, synthetic construct
  source 1..75: mol_type = other DNA
gctccgtaataaatcatattaatcttcgcagcgatcagtctaaaatagctgaggcattatttttcaatctcgata

SEQ ID NO: 848235 - DNA, 75 bp, synthetic construct
  source 1..75: mol_type = other DNA
acactgataatatgaaccgccccggttttcctggagagtgttttatctgtgaactcaggctgccagatcatcgtt

SEQ ID NO: 848236 - DNA, 75 bp, synthetic construct
  source 1..75: mol_type = other DNA
ctgacggtaaaaggaattgtgcaacttagtagcgccactaacagcacgtcagaaacgcaggctgccacaccaaag

SEQ ID NO: 848237 - DNA, 75 bp, synthetic construct
  source 1..75: mol_type = other DNA
taagaggccccggaacgttatcgttcacacggaccgtggaggccagtactgttcagcagattatcaggcgcaact

SEQ ID NO: 848238 - DNA, 75 bp, synthetic construct
  source 1..75: mol_type = other DNA
accatcttcccgtggattcgcgctggtgcctgatccacgccacgcatctgacgcctcaggaaacgatgaagatcg

SEQ ID NO: 848239 - DNA, 75 bp, synthetic construct
  source 1..75: mol_type = other DNA
atctgaacttgttcttcgtgcgggaaatggaaatccaaaaggtcttactggtgcgttatggcgacggacatcggt

SEQ ID NO: 848240 - DNA, 75 bp, synthetic construct
  source 1..75: mol_type = other DNA
aggtcttgtccagctcagtagcgccaccaacagcgattctgaaacgcttgcggcaacgccaaaggcggttaagac

SEQ ID NO: 848241 - DNA, 75 bp, synthetic construct
  source 1..75: mol_type = other DNA
acggcaccaggggcgggaatagcgtattcgcatcgttaattgctcctggtggcgaaggtggcgggaaagtgggtg

SEQ ID NO: 848242 - DNA, 75 bp, synthetic construct
  source 1..75: mol_type = other DNA
taatcagatacagacggttggtgtcaaccaggtggaaacggtaggcagcaaccagattgtcaaagtgggttcaaa

SEQ ID NO: 848243 - DNA, 75 bp, synthetic construct
  source 1..75: mol_type = other DNA
gccccagccggtcaggaatactttcagggcggattcagcggacccaaaccggggttatcatcagttgcgcaggcc

SEQ ID NO: 848244 - DNA, 75 bp, synthetic construct
  source 1..75: mol_type = other DNA
atgactcctgttttaaaacaacagaaaagctaaacaaactattttctgcgggggctccaacctctgctgaatatt

SEQ ID NO: 848245 - DNA, 75 bp, synthetic construct
  source 1..75: mol_type = other DNA
ttcaagaaaaatgtgtttcttggtgggtggtattatttattatcaaaaacaaaggaagaaacaacagaaatctct

SEQ ID NO: 848246 - DNA, 75 bp, synthetic construct
  source 1..75: mol_type = other DNA
atttaaatgagacagagtctggttctcttattttttatgctagacctgtagaattgcatggtgcaacagcacatt

SEQ ID NO: 848247 - DNA, 75 bp, synthetic construct
  source 1..75: mol_type = other DNA
cgcgattactaccggtatcggtgtggcgacgtctatgtttaccgcgattgtcggtacgcgtgccatcgtaaacct

SEQ ID NO: 848248 - DNA, 75 bp, synthetic construct
  source 1..75: mol_type = other DNA
ttccgggatgccagtggcacagtgtatgtcgatatagatgacaaacgctggctggggcaaaccgtttcccctgaa

SEQ ID NO: 848249 - DNA, 75 bp, synthetic construct
  source 1..75: mol_type = other DNA
caccttccgtgactctaatgcgcgtgatgaagccattgcgtatctgagcaaacgccatcccgatctggtcattag

SEQ ID NO: 848250 - DNA, 75 bp, synthetic construct
  source 1..75: mol_type = other DNA
ggcaggcaccggctttggcaacctggcgataccgcgtgtgggtcaggaagtcattgtggacttcctcaacggcga

SEQ ID NO: 848251 - DNA, 75 bp, synthetic construct
  source 1..75: mol_type = other DNA
aacaagccgttcgccggagatatggccgggacggcgaattgcgctgacggggcatccgcaggcgaacctgaaccg

SEQ ID NO: 848252 - DNA, 75 bp, synthetic construct
  source 1..75: mol_type = other DNA
caactggtcgtcaacaacaacgccactggtaattttaaaatctttgttcaggataccggcgtcagcccacagtct

SEQ ID NO: 848253 - DNA, 75 bp, synthetic construct
  source 1..75: mol_type = other DNA
tgcttcgtttacgctgggcaataccggcggtttcgttgatcttgggacctatgagtatgtcctgaaaagcgatgg

SEQ ID NO: 848254 - DNA, 75 bp, synthetic construct
  source 1..75: mol_type = other DNA
cgggcatctcggggtggggtatagcaacggtgccggtgtggaatccccgtggaacgcggtggctggtgtgaactg

SEQ ID NO: 848255 - DNA, 75 bp, synthetic construct
  source 1..75: mol_type = other DNA
ttatataatcagcaaaacatcaaaaaattcaataattttcaagatgcctataattggtaagggattcagtttgtc

SEQ ID NO: 848256 - DNA, 75 bp, synthetic construct
  source 1..75: mol_type = other DNA
caaacagttccttgaacaggtcgccgagtggcccgtgcaggcactggagtacaaatcgtttctgcgttttcgggt

SEQ ID NO: 848257 - DNA, 75 bp, synthetic construct
  source 1..75: mol_type = other DNA
ggtggcgcatctgattggtcgctcaaatttcgacgccatgagcggtcagtattacgcgcgttttgtggtgaaaaa

SEQ ID NO: 848258 - DNA, 75 bp, synthetic construct
  source 1..75: mol_type = other DNA
cgtccagccaaaagacttcgaagaaggcgtgtggttgagcgagctttcggacgccattgaaaccagcaaaggcat

SEQ ID NO: 848259 - DNA, 75 bp, synthetic construct
  source 1..75: mol_type = other DNA
ggttcttgtggcgattccaaaaaaagtggcgggtggtcacgttgcggtatatataaggacaatggtgctggcgcc

SEQ ID NO: 848260 - DNA, 75 bp, synthetic construct
  source 1..75: mol_type = other DNA
ttctttccgctctgtactacgtgaagctgcgtatgatatagaagcagaaagtgatccatataagagacaactaat

SEQ ID NO: 848261 - DNA, 75 bp, synthetic construct
  source 1..75: mol_type = other DNA
aattctgtacaggagtctcggctaaatgtttacatggcgggaaatcgtaatattgaaaggtataagagtggactg

SEQ ID NO: 848262 - DNA, 75 bp, synthetic construct
  source 1..75: mol_type = other DNA
catcacatgcgtatgacagcgcgtaatcgcctgcatagcctgttagatgaaggaagccttgtggagctgggtagc

SEQ ID NO: 848263 - DNA, 75 bp, synthetic construct
  source 1..75: mol_type = other DNA
aaaaaagtgcaggggaggctatcatgatcgtgtttggggtcagaagatggaagaagttggtttgatgccgtctaa

SEQ ID NO: 848264 - DNA, 75 bp, synthetic construct
  source 1..75: mol_type = other DNA
ggtgaatccagcgtatcggagctggcaatgaaccctgattattttggtggccgtagcctggctgatacgttgtca

SEQ ID NO: 848265 - DNA, 75 bp, synthetic construct
  source 1..75: mol_type = other DNA
ggtgtgtggaaatatcagatgctattgcatcagctaataaaattaccccttcgccactgataggaagtgttgtta

SEQ ID NO: 848266 - DNA, 75 bp, synthetic construct
  source 1..75: mol_type = other DNA
agtgcggtttgaaagcgtgggcgaaacctagcgctaacctgatgtgcggtgattgtgaagttgatttgattgttg

SEQ ID NO: 848267 - DNA, 75 bp, synthetic construct
  source 1..75: mol_type = other DNA
gcaggaagcgctaatgtcgctgatgcagatggcgaaaacctctgctgcgctggcgaaaatgcaggagcgcggtct

SEQ ID NO: 848268 - DNA, 75 bp, synthetic construct
  source 1..75: mol_type = other DNA
actggaatgaaatgcttagagatgagctcgaaaagatagaatctgatgaatacaaaacggccctaaaacatgcat

SEQ ID NO: 848269 - DNA, 75 bp, synthetic construct
  source 1..75: mol_type = other DNA
cagccagccgcgcagcaggtggtcagttaagcgagaaaaagattgtcttcctcggcgccggttcagcgggatgcg

SEQ ID NO: 848270 - DNA, 75 bp, synthetic construct
  source 1..75: mol_type = other DNA
agcaataaaaataatttccttcaagtgtgatattaatgaggattcggcaagaaaaattttaatgcaaaccatatt

SEQ ID NO: 848271 - DNA, 75 bp, synthetic construct
  source 1..75: mol_type = other DNA
aaattgggaccctattatgttctggcgccgggattggcgatgcctcatgcacgaccggaagaaggggctaaaggg

SEQ ID NO: 848272 - DNA, 75 bp, synthetic construct
  source 1..75: mol_type = other DNA
taacccgacgtcacgcgtggaagccacaccgcaggacattatcgcctggactgaaggtaacgcgctggtcgccac

SEQ ID NO: 848273 - DNA, 75 bp, synthetic construct
  source 1..75: mol_type = other DNA
gccgaaccataatattaaagtgattgtggtgactgacggtgaacgtattctagggcttggtgaccagggcatcgg

SEQ ID NO: 848274 - DNA, 75 bp, synthetic construct
  source 1..75: mol_type = other DNA
cctgttatttataccccaaccgtcggcgcagcctgtgagcgtttttctgagatctaccgccgttcacgcggcgtg

SEQ ID NO: 848275 - DNA, 75 bp, synthetic construct
  source 1..75: mol_type = other DNA
gtttgctgaccatctgttgtgcccagaccttgatgacactatccgtgactttgctgcccagcttcgcaaaggagg

SEQ ID NO: 848276 - DNA, 75 bp, synthetic construct
  source 1..75: mol_type = other DNA
tgattagctcactgctattttctggtgtttctcatgcaattgatgccacagagagaatgaatgacattcaacaat

SEQ ID NO: 848277 - DNA, 75 bp, synthetic construct
  source 1..75: mol_type = other DNA
actggaatgaaatgctccgagatgagctcgaaaagatagagtctgatgaattcaaaacagcgctaaaacatgcat

SEQ ID NO: 848278 - DNA, 75 bp, synthetic construct
  source 1..75: mol_type = other DNA
actggctgagttattctccagtgagaaggatttacaggaattgcatcaggctcgcaacctggaggaaataaaaac

SEQ ID NO: 848279 - DNA, 75 bp, synthetic construct
  source 1..75: mol_type = other DNA
agcagtggcaatccatcgttgaagccaataaccagcgccctcccatgtggctgcgcgtcaaccgcacacacaatt

SEQ ID NO: 848280 - DNA, 75 bp, synthetic construct
  source 1..75: mol_type = other DNA
tgcataccatcctgacctgcgtcgcacccgggcagccagccagtcgattattccggtcgatactaaactggccgc

SEQ ID NO: 848281 - DNA, 75 bp, synthetic construct
  source 1..75: mol_type = other DNA
cacccattcacgcgctctgtgatatgaaaaccctcaagctggagtcgagcagctttattgatgacgatctgcgtg

SEQ ID NO: 848282 - DNA, 75 bp, synthetic construct
  source 1..75: mol_type = other DNA
ccatcgctgatggtgcagaaaggtattgccggaacctactgtaaaactccattctctgattcttatgcgttcatc

SEQ ID NO: 848283 - DNA, 75 bp, synthetic construct
  source 1..75: mol_type = other DNA
aagaaatactcaacagcagcggatatcttcgctcattcccgggcattgccaaacgctccgatgtaaacggtgtat

SEQ ID NO: 848284 - DNA, 75 bp, synthetic construct
  source 1..75: mol_type = other DNA
agcgcacaatatcgtgccgagtctcagccggacggcatcatcggtatcgggacatggcgagacttcatcgtctgc

SEQ ID NO: 848285 - DNA, 75 bp, synthetic construct
  source 1..75: mol_type = other DNA
gcgcaggcaaatctgccgctggaaaatcgcagtataaccctgcaatacgccgacgcgggagaactggcgaaagcg

SEQ ID NO: 848286 - DNA, 75 bp, synthetic construct
  source 1..75: mol_type = other DNA
ggtggatgacgttccggtagctcaggtgttgcaggcgctggctgaacaggagaagttgaacctggtcgtgtcgcc

SEQ ID NO: 848287 - DNA, 75 bp, synthetic construct
  source 1..75: mol_type = other DNA
tcgggcaattatttcgtcatgacggaaaagaagatgaacgacgcgagttagtggtatttatcacgccacggttgg

SEQ ID NO: 848288 - DNA, 75 bp, synthetic construct
  source 1..75: mol_type = other DNA
ggtggcaagctctacaaaggcgaaagcgaagtcggtgacgtcgccggaagtggtcgcgtatcaatggcgcatggt

SEQ ID NO: 848289 - DNA, 75 bp, synthetic construct
  source 1..75: mol_type = other DNA
tcaaagcggataacgccagagttttcgaccttgaagttgaatcttcaactggcgttgcgcagtatgctgaccgcc

SEQ ID NO: 848290 - DNA, 75 bp, synthetic construct
  source 1..75: mol_type = other DNA
tctccctgactggtgcaaccaccgttggtgccgctttgtatgtcgcacagccatcgctgatggtgcagaaaggta

SEQ ID NO: 848291 - DNA, 75 bp, synthetic construct
  source 1..75: mol_type = other DNA
atgccgattcagcaacttccgcttatgaaaggtgtcggcaaagatttccgaaacgccgactatatcgactatctg

SEQ ID NO: 848292 - DNA, 75 bp, synthetic construct
  source 1..75: mol_type = other DNA
cttcatttacgaaggcaatcagataacgtgcggcgataaactggagtccgtgaccgggaaattgcaattcgacat

SEQ ID NO: 848293 - DNA, 75 bp, synthetic construct
  source 1..75: mol_type = other DNA
catgagctgctgattatccatcttccgcgccatgtcctcgtatacgacgcatcttcaagcgccaatggtccgcaa

SEQ ID NO: 848294 - DNA, 75 bp, synthetic construct
  source 1..75: mol_type = other DNA
ccacggtgttacaaaaaggtcgcatccggctgaaattacacatcagccagaacgttccggggcaggtgctacagc

SEQ ID NO: 848295 - DNA, 75 bp, synthetic construct
  source 1..75: mol_type = other DNA
tgtcgggcgcatcaggaaaaatgtcggcttcaaacttcgcgttatcacgaagtcacctgtaactctgtctggcgc

SEQ ID NO: 848296 - DNA, 75 bp, synthetic construct
  source 1..75: mol_type = other DNA
ccatcgctgatggtgcagaaaggtattgccgggacttactgcaaaacgccattcgctgattcttatgcgttcatc

SEQ ID NO: 848297 - DNA, 75 bp, synthetic construct
  source 1..75: mol_type = other DNA
ttggttcatcgacgattgaatatttctccctgactggcgcaaccaccgttggtgccgctttgtatgtcgcacagc

SEQ ID NO: 848298 - DNA, 75 bp, synthetic construct
  source 1..75: mol_type = other DNA
aaagcacctcaaacaaactgatcgcatttcgcatgatgcgctacgccattgccgcaatgcaaaatcacctggatg

SEQ ID NO: 848299 - DNA, 75 bp, synthetic construct
  source 1..75: mol_type = other DNA
cttcatttacgaaggcaatcagataacgtgcggcgataagctggaatcggttaccgggaaattgcagttcgatat

SEQ ID NO: 848300 - DNA, 75 bp, synthetic construct
  source 1..75: mol_type = other DNA
tttggttcatcgactattgaatatttctcccttactggcgcaaccaccgttggtgctgctttgtatgtcgcacag

SEQ ID NO: 848301 - DNA, 75 bp, synthetic construct
  source 1..75: mol_type = other DNA
gagttcgtttgttacttgatattcaggatggcaatcaatcgactaaccaaagcaatgctcaggatgccagcagca

SEQ ID NO: 848302 - DNA, 75 bp, synthetic construct
  source 1..75: mol_type = other DNA
tattgactcactgctaaaatatctgagcgatacaatctcagtaaacaaaaactcttgcaatgtgagaaaaatcac

SEQ ID NO: 848303 - DNA, 75 bp, synthetic construct
  source 1..75: mol_type = other DNA
ttgcctggcagaatgacaatatcgcccgccaggaggcggagcaggcgcgggcgcaggcaaatctgccgctggaaa

SEQ ID NO: 848304 - DNA, 75 bp, synthetic construct
  source 1..75: mol_type = other DNA
gcagaatgctgtttatcgcgtgtgtggcggcaagctgtacaaaggagaaagtgaagtcggtgatgttgccggaag

SEQ ID NO: 848305 - DNA, 75 bp, synthetic construct
  source 1..75: mol_type = other DNA
tcaaagcggataacgccagagtgttcgaccttgaggttgaatcgtcaactggcgttgcgcagtacgccgaccgcc

SEQ ID NO: 848306 - DNA, 75 bp, synthetic construct
  source 1..75: mol_type = other DNA
cgatctggaggtggaatcatccactggcgtagctcagtatgccgaccgcctgttcctctctgcaaccactgacgg

SEQ ID NO: 848307 - DNA, 75 bp, synthetic construct
  source 1..75: mol_type = other DNA
atgattgatgcaaaagtgcttgaaggggttaaaaactggctgagtatttacgggcgtctgacctgcggcattctg

SEQ ID NO: 848308 - DNA, 75 bp, synthetic construct
  source 1..75: mol_type = other DNA
tgtgtcttcaggaaaagttatttacaaagccattaacgattatggtggcaatattgatggctccacatcgcttta

SEQ ID NO: 848309 - DNA, 75 bp, synthetic construct
  source 1..75: mol_type = other DNA
tgggatcagtagcaaagtgagttctgcaaaagttcacttctttgccattaatgattttggcggcgcaattgaagg

SEQ ID NO: 848310 - DNA, 75 bp, synthetic construct
  source 1..75: mol_type = other DNA
tgacctgtgaaaccgtttatgtggtggctgaagttgatgagcaggccatgaaagaaggtgtgccccagtttgtta

SEQ ID NO: 848311 - DNA, 75 bp, synthetic construct
  source 1..75: mol_type = other DNA
ctgaagcgcgtgaacatggcgatctgaaagagaacgccgaataccacgcagctcgtgagcagcagggcttctgcg

SEQ ID NO: 848312 - DNA, 75 bp, synthetic construct
  source 1..75: mol_type = other DNA
tgcagcccggagcctgtgtggcgcagatcgcccgtgaaaacggaatcaacgataacctgctcttcaactggcgcc

SEQ ID NO: 848313 - DNA, 75 bp, synthetic construct
  source 1..75: mol_type = other DNA
cacggcacggggatcggtatcggtctgttcctgctgctcattgccgctaatggtgtcggtctggtgattaaaaac

SEQ ID NO: 848314 - DNA, 75 bp, synthetic construct
  source 1..75: mol_type = other DNA
cagtcagtcacgatgttagttatcttggcagtgttctggatgcagccaaacctatatacggaattaattacacat

SEQ ID NO: 848315 - DNA, 75 bp, synthetic construct
  source 1..75: mol_type = other DNA
ctttgcaggacgcaattaaaaacgctgcgggcatcatcaaagaaatcgaagagggtgatgctgccaacttactga

SEQ ID NO: 848316 - DNA, 75 bp, synthetic construct
  source 1..75: mol_type = other DNA
aacaatcaagctgatgtataccggcagttctgctttacccaaagatcgggaaagtgtgttttggttcaatgtcct

SEQ ID NO: 848317 - DNA, 75 bp, synthetic construct
  source 1..75: mol_type = other DNA
tacaactggcatttcgcacacgtataaaactgttctatcgcccggaaggattgagtggaatttcatctgatgcac

SEQ ID NO: 848318 - DNA, 75 bp, synthetic construct
  source 1..75: mol_type = other DNA
tgcaatttcgatcatcggcttaatctttgacccagcggtgaagtaccacggtctggtggcaatgccaagcctgac

SEQ ID NO: 848319 - DNA, 75 bp, synthetic construct
  source 1..75: mol_type = other DNA
cctcgatggtttattttctgcgtgatgcggtcgatgccggggtgctgacggaatgtaacggtttttatgatattc

SEQ ID NO: 848320 - DNA, 75 bp, synthetic construct
  source 1..75: mol_type = other DNA
cgctggagattgttaagggaactgaattccttaatgcttttttccgcagtggccttaactgcaccgtgctggcgc

SEQ ID NO: 848321 - DNA, 75 bp, synthetic construct
  source 1..75: mol_type = other DNA
gtgatcgaaatcttacatgaatactggaaaccgctgctgtggactgacggttatcgctttactggcgtggcgatc

SEQ ID NO: 848322 - DNA, 75 bp, synthetic construct
  source 1..75: mol_type = other DNA
agtaataaatacatccagtttccaatctggttatttacgtatatttttcgcggtacgccgctgtatgttcagttg

SEQ ID NO: 848323 - DNA, 75 bp, synthetic construct
  source 1..75: mol_type = other DNA
cctgtcgaggctgtttcatttggtcagatgatgcttaatctgaatacccattctgttaatgttcgctatcaagaa

SEQ ID NO: 848324 - DNA, 75 bp, synthetic construct
  source 1..75: mol_type = other DNA
ccacgtcagggcagaaacccgcgttatgaggaaatcaagagttccattcgggcacgcggactggacagtgtccct

SEQ ID NO: 848325 - DNA, 75 bp, synthetic construct
  source 1..75: mol_type = other DNA
taacgccgccacatatcaaccttttaccgccttcggcattgccgcggtgctctatttaatcatctcttatgtcct

SEQ ID NO: 848326 - DNA, 75 bp, synthetic construct
  source 1..75: mol_type = other DNA
agaaacgcaaagcgaactcaaaaagtataaagatgaagagaagaaaaagtatacgccagcgacggtgaatcgtag

SEQ ID NO: 848327 - DNA, 75 bp, synthetic construct
  source 1..75: mol_type = other DNA
gctggcgcaagtccatttaccacctttaatggtcgttattatggtgatcacaccggcggaacagcagttcgtctg

SEQ ID NO: 848328 - DNA, 75 bp, synthetic construct
  source 1..75: mol_type = other DNA
gaccaatataaccagacaggtgttgaactgggtaatgactccaacttactgatagtgttttatgttcagataatg

SEQ ID NO: 848329 - DNA, 75 bp, synthetic construct
  source 1..75: mol_type = other DNA
tgataatacaattcgctatactgattatataatatcaaaattaattgacaagcttatcgaatataaagatgagta

SEQ ID NO: 848330 - DNA, 75 bp, synthetic construct
  source 1..75: mol_type = other DNA
cctccatggtttattttctgcgggatgcggtcgatgccggtgtgctgacggactgtaacggtttttatgatattc

SEQ ID NO: 848331 - DNA, 75 bp, synthetic construct
  source 1..75: mol_type = other DNA
tggaatatcaccgaccatgtactgcgttatctcattcttgattgttctccggctcccgtagcggtgcaggaggtg

SEQ ID NO: 848332 - DNA, 75 bp, synthetic construct
  source 1..75: mol_type = other DNA
atgagtaagaaactgattgccttatgtgcctgcccgatgggcctggctcacacctttatggccgctcaggcgctg

SEQ ID NO: 848333 - DNA, 75 bp, synthetic construct
  source 1..75: mol_type = other DNA
atgaacgaatatcagtttgtgcttccatacccgccgtcggtgaatacctactggcgaagacggggaagccaatat

SEQ ID NO: 848334 - DNA, 75 bp, synthetic construct
  source 1..75: mol_type = other DNA
atgaacgaatatcagtttgtgcttccatacccaccgtcggtgaatacctactggcgaagacgaggaagccaatat

SEQ ID NO: 848335 - DNA, 75 bp, synthetic construct
  source 1..75: mol_type = other DNA
atggcagaatacagattcacacttccgtacccaccgtcgctgaatacctactggcgaagacggggaagccaatac

SEQ ID NO: 848336 - DNA, 75 bp, synthetic construct
  source 1..75: mol_type = other DNA
gctgctgctgtggttgtgttatttcttcactctgctggtggtctacatgttgatcaactggctaccgctactttt

SEQ ID NO: 848337 - DNA, 75 bp, synthetic construct
  source 1..75: mol_type = other DNA
cagagggaattatcgctaccggatgcgataaattaggttgttatatcgggcagcgttcacgccttggcgtacaag

SEQ ID NO: 848338 - DNA, 75 bp, synthetic construct
  source 1..75: mol_type = other DNA
agtgaaatcagtaatggtgtgaatcccacccaggcttactcggcggtataccaggcaagacgcattcgcctcgcc

SEQ ID NO: 848339 - DNA, 75 bp, synthetic construct
  source 1..75: mol_type = other DNA
atgaacgaatatcagtttgtgcttccatacccgccatcggtgaattcctactggcgaagacggggaagccaatac

SEQ ID NO: 848340 - DNA, 75 bp, synthetic construct
  source 1..75: mol_type = other DNA
actgaaaacaccgttatgtccgaagtcccggtggtaaaaaaacgcccccggcggcctaatgccagtcagttaagc

SEQ ID NO: 848341 - DNA, 75 bp, synthetic construct
  source 1..75: mol_type = other DNA
tggaaagataaaatctaccctatcgcccagtgtaacaacgcctttattttcccgggcatcgggctgggcgttatt

SEQ ID NO: 848342 - DNA, 75 bp, synthetic construct
  source 1..75: mol_type = other DNA
ttgcccgcaggcatgtcggagcaggaacttgatgcctgcctttacggacaattttccacgataccagtcgtacgt

SEQ ID NO: 848343 - DNA, 75 bp, synthetic construct
  source 1..75: mol_type = other DNA
cgatgcaggagcagctccgcccgatgctgcgcctgattctcgacaacgaaagcaaggtaaagcagttattacaga

SEQ ID NO: 848344 - DNA, 75 bp, synthetic construct
  source 1..75: mol_type = other DNA
acttactgaaagtaccgttatgcccgaagtccccggggtaaaaaagcgtccccggcgccccaacttcccttatga

SEQ ID NO: 848345 - DNA, 75 bp, synthetic construct
  source 1..75: mol_type = other DNA
taccgtttttgtcctgctaacgggagcaagtctgtgggtttactattttctcacgccacaaccagaaatggtatt

SEQ ID NO: 848346 - DNA, 75 bp, synthetic construct
  source 1..75: mol_type = other DNA
gctgcgcggcgtcggtgtaatgtcgctggcggtgtttaccatgtgggtcttttctcgctttgcaccggatgacag

SEQ ID NO: 848347 - DNA, 75 bp, synthetic construct
  source 1..75: mol_type = other DNA
ccgtctcaacggcatggggaaactcattgactttcagaagcagaaaaagctggcgagactggcagaacgattagg

SEQ ID NO: 848348 - DNA, 75 bp, synthetic construct
  source 1..75: mol_type = other DNA
ggggcgaaacacacagtgaagccgaggttcgcgagctgctggaacagaacccgtctttcgtttctttaaaccgca

SEQ ID NO: 848349 - DNA, 75 bp, synthetic construct
  source 1..75: mol_type = other DNA
gccgttttgcgtatcagcaccacctggtattgcagcatggtgatttttggcgtcttcaccatctacgccattctg

SEQ ID NO: 848350 - DNA, 75 bp, synthetic construct
  source 1..75: mol_type = other DNA
ttgctggcgttaactgccctgctcgtcacgaactctaacccgcaatcggtcgcgatggggattggcctgatttta

SEQ ID NO: 848351 - DNA, 75 bp, synthetic construct
  source 1..75: mol_type = other DNA
gcccccgcaatggctagcagcaagtaagccaggaaaattacaggagaaaaatcatgtcgaaaaaatacatcatag

SEQ ID NO: 848352 - DNA, 75 bp, synthetic construct
  source 1..75: mol_type = other DNA
tattttttaataccagttgttttgactaaagtcagtcttgtgcttagtgctgcgctgggaaaagatgagtttaaa

SEQ ID NO: 848353 - DNA, 75 bp, synthetic construct
  source 1..75: mol_type = other DNA
attgactctttatttttaaaaaagttaaataatgcgcgaaatcaaaataaatttccaatcgatgtaaaagaaacg

SEQ ID NO: 848354 - DNA, 75 bp, synthetic construct
  source 1..75: mol_type = other DNA
tattgaagtcggcatggtgaactatttatggcccagcctgacgatacttttcgccattttgtttaataaccagaa

SEQ ID NO: 848355 - DNA, 75 bp, synthetic construct
  source 1..75: mol_type = other DNA
ggttggtacaaccactatggacgtgtctgggtgctgaaaacggctccgggcgcaggtaacgtctttagcggctga

SEQ ID NO: 848356 - DNA, 75 bp, synthetic construct
  source 1..75: mol_type = other DNA
ggccggaagccggacatcgcgcaggttggtacaaccactatggacgtgtctgggtgctgaaaaccgccccgggcg

SEQ ID NO: 848357 - DNA, 75 bp, synthetic construct
  source 1..75: mol_type = other DNA
aatcttttgcaccggtgaaaggggcaagtgcggtgccgctggttggccgtgcttctgttgcctccgatcgttcaa

SEQ ID NO: 848358 - DNA, 75 bp, synthetic construct
  source 1..75: mol_type = other DNA
taattaaaacgctcgatgtttgtaattatgactcagaaacgaaagttttaaccagtcatcacggaataataagaa

SEQ ID NO: 848359 - DNA, 75 bp, synthetic construct
  source 1..75: mol_type = other DNA
caacacggcttattttggcgatacagatggaagagtaggcgctgtactttatgcattgctcgtttcagggcatat

SEQ ID NO: 848360 - DNA, 75 bp, synthetic construct
  source 1..75: mol_type = other DNA
gctgactggcgttgggatgtctctaaagagacgtttcctaaggataagtttgatagctatgttaaatctgtgttt

SEQ ID NO: 848361 - DNA, 75 bp, synthetic construct
  source 1..75: mol_type = other DNA
agcacatctcttcaaaccatcaagataagcattcagataaagttaacagtcatcaacaccatggcaaggttgata

SEQ ID NO: 848362 - DNA, 75 bp, synthetic construct
  source 1..75: mol_type = other DNA
gtgataacagatgtctggaaatataggggcaaatccacaagctatcaagataagcattcagataaagttaacagt

SEQ ID NO: 848363 - DNA, 75 bp, synthetic construct
  source 1..75: mol_type = other DNA
catgtttttttaaaagacgatgcgattaccccttgtatcttccttggggatcatacaggcgatagatttagtact

SEQ ID NO: 848364 - DNA, 75 bp, synthetic construct
  source 1..75: mol_type = other DNA
gtattattgctttgtatcatcgtaaatatgtctttcagacatgcatcacttatttttactacaaacaattcaaat

SEQ ID NO: 848365 - DNA, 75 bp, synthetic construct
  source 1..75: mol_type = other DNA
gtctaaattcccggaaggaagtacgtgataaaaataataaaataatttattcatcagggcttagttgttttcaat

SEQ ID NO: 848366 - DNA, 75 bp, synthetic construct
  source 1..75: mol_type = other DNA
gatggcggtatggtttcggtaaaatcacttctggaacagatgaagtttaagcttagtgaagctatagaaagaaat

SEQ ID NO: 848367 - DNA, 75 bp, synthetic construct
  source 1..75: mol_type = other DNA
tttctatcatacctgaaaatttctttactcttcttagcggtaattttaaagctgactggcgttgggatgtctcta

SEQ ID NO: 848368 - DNA, 75 bp, synthetic construct
  source 1..75: mol_type = other DNA
catttaatcagatgaaaaatcctactgatcctgaggaattagccaatatttttaataaaaacataaagaacacat

SEQ ID NO: 848369 - DNA, 75 bp, synthetic construct
  source 1..75: mol_type = other DNA
accatggggctaaattcctggaagatagcacctaacgaacgtggtgataaaaaaggtgtcccagggcttagttgt

SEQ ID NO: 848370 - DNA, 75 bp, synthetic construct
  source 1..75: mol_type = other DNA
tattgtctaggtgctttgggtaatgactccaacttattgatagtgttttatgttcagataatgcccgatgacttt

SEQ ID NO: 848371 - DNA, 75 bp, synthetic construct
  source 1..75: mol_type = other DNA
ccggttcggtgacattacgggcaattttccccaatccacaacagcagttattaccgggaatgtttgttcgcgctc

SEQ ID NO: 848372 - DNA, 75 bp, synthetic construct
  source 1..75: mol_type = other DNA
ttaaaacgcaaaaaaggcaagccaaatgtccagcgttttaaaggtctcggggaaatgaacccgatgcaattgcgt

SEQ ID NO: 848373 - DNA, 75 bp, synthetic construct
  source 1..75: mol_type = other DNA
gatcggtatcgatcctgacagcgacgatcttagccagttgcgttacggcaagatctgtattctggcggatgcgga

SEQ ID NO: 848374 - DNA, 75 bp, synthetic construct
  source 1..75: mol_type = other DNA
gtgaaaatcctcatatagcttctgcaaaactacatggattaaaggactgctacaaaatcaaacttcgtgcatcag

SEQ ID NO: 848375 - DNA, 75 bp, synthetic construct
  source 1..75: mol_type = other DNA
tgatgacatgctaattattgcggttgtcgcggtaggtaaacgtgaacatagtaacgtttataatctcgccagtga

SEQ ID NO: 848376 - DNA, 75 bp, synthetic construct
  source 1..75: mol_type = other DNA
gtgttgtgagctggttctgccggccggaactctcaggcttaaaggtaaactgacgccggcgttattacagacact

SEQ ID NO: 848377 - DNA, 75 bp, synthetic construct
  source 1..75: mol_type = other DNA
accgcagaaggcgcgccgcagaagattatcgctgcttgctgtgagcgtttcggaacagttgatattctggttaac

SEQ ID NO: 848378 - DNA, 75 bp, synthetic construct
  source 1..75: mol_type = other DNA
gttagtctgatgtctaacattcgtgttgatttgatggcttacctgttcggtgatttgctggcagtgacgccagaa

SEQ ID NO: 848379 - DNA, 75 bp, synthetic construct
  source 1..75: mol_type = other DNA
gccttccggaaaaaatatgccggcactgcttcccgtgacgttaacgccggagccggataataaaaatcccggccc

SEQ ID NO: 848380 - DNA, 75 bp, synthetic construct
  source 1..75: mol_type = other DNA
cggaagatatctgggatcgctgcgcctatgttctgtcggtgaaaatgcaggatccgcagtttgccgggcagacca

SEQ ID NO: 848381 - DNA, 75 bp, synthetic construct
  source 1..75: mol_type = other DNA
gtagaagtcaacgtgcgccgcgatggccagatttataacatcgcgtttgaaaatggcgaaaaggtacaggatttg

SEQ ID NO: 848382 - DNA, 75 bp, synthetic construct
  source 1..75: mol_type = other DNA
cattcgagttaagctatgaagctgcaaaaattatgatcccgcagaaaagcggcaaaattattaatatctgttcat

SEQ ID NO: 848383 - DNA, 75 bp, synthetic construct
  source 1..75: mol_type = other DNA
aagaaagcagacagccttattcgcattaataaaatgaagaataaaataaacaagataaggaccgagaagggaaaa

SEQ ID NO: 848384 - DNA, 75 bp, synthetic construct
  source 1..75: mol_type = other DNA
atgggtgtgatcgagtttctgtttacattggcgcaggatatgatcctcgccgccattccagcggtcggctttgcg

SEQ ID NO: 848385 - DNA, 75 bp, synthetic construct
  source 1..75: mol_type = other DNA
ccattatgaaagagctgaactcctcatacacgagcaagctgtatgacattgcgtttgagaccatctacatggtga

SEQ ID NO: 848386 - DNA, 75 bp, synthetic construct
  source 1..75: mol_type = other DNA
tgcagttacgccatcaaccgaactctaccgcattactggttggggggcgctggaagggcataaagttttctatca

SEQ ID NO: 848387 - DNA, 75 bp, synthetic construct
  source 1..75: mol_type = other DNA
aatgcaaattcacgatatccccgcatcggttccgtcatacggtggcaacgcacatgatgaaatcaccggagcgta

SEQ ID NO: 848388 - DNA, 75 bp, synthetic construct
  source 1..75: mol_type = other DNA
taactgaacactacttttacagcaaatcattacgaccagcgactgagtggagttaccagaaagtggttcgctcgt

SEQ ID NO: 848389 - DNA, 75 bp, synthetic construct
  source 1..75: mol_type = other DNA
tctgcttatacagcaatgatttcagctgtaaaaatcagtcagttaggttacagcgagccgttgatgattaccctg

SEQ ID NO: 848390 - DNA, 75 bp, synthetic construct
  source 1..75: mol_type = other DNA
gcccgagacctgttctgcaatgagcgtaatgcgcgggaagatcgcctgtttggcgatgcgtttgcgtttatctaa

SEQ ID NO: 848391 - DNA, 75 bp, synthetic construct
  source 1..75: mol_type = other DNA
gaaaccgatcaggcgtgggaagtgttcgaaaaactggaagactgctatttcagccagggaaaaacaacacaaacc

SEQ ID NO: 848392 - DNA, 75 bp, synthetic construct
  source 1..75: mol_type = other DNA
agctttaaactactcacaaaatttgcgggttactttaagtaactcacaaaatttgcaaccatctttaagaggttt

SEQ ID NO: 848393 - DNA, 75 bp, synthetic construct
  source 1..75: mol_type = other DNA
ttcccgagacgctcgcgccactgattgcagtgacatcatcaactgaactctatcgcatcaccggctgggggggcg

SEQ ID NO: 848394 - DNA, 75 bp, synthetic construct
  source 1..75: mol_type = other DNA
cgcggtcgtactggcacagtgttaaccgcggtgttgcaggatcacggtacgctggcggagcatgatatttatatc

SEQ ID NO: 848395 - DNA, 75 bp, synthetic construct
  source 1..75: mol_type = other DNA
ttgcccgcgatctgttttgcagtgagcgtaatgcgcgggaagatcgcctgtttggcgatgcgtttgcatttatct

SEQ ID NO: 848396 - DNA, 75 bp, synthetic construct
  source 1..75: mol_type = other DNA
agtaccgaaaacgatacgctttgctggattatatccatgaaactactatccgctctttggatgcatatcctgtac

SEQ ID NO: 848397 - DNA, 75 bp, synthetic construct
  source 1..75: mol_type = other DNA
gaaaactgaactgcactggtggcgcactagcgtggaaggcaagcaagagcactatttcaccacccgcctgacaga

SEQ ID NO: 848398 - DNA, 75 bp, synthetic construct
  source 1..75: mol_type = other DNA
ccaaccgatccacaatccggtcagcctgctggtcagcgtgctcacaaaccgttcatctttactgtggcgctgaac

SEQ ID NO: 848399 - DNA, 75 bp, synthetic construct
  source 1..75: mol_type = other DNA
ttacaggtcagactcaggggaatattactgctggtgcatttaccgcagattctgtcggtaatatctatgtgcagg

SEQ ID NO: 848400 - DNA, 75 bp, synthetic construct
  source 1..75: mol_type = other DNA
gatgttactattgaccaattgtctgacgggcagcgtgtatttctgtcgttggtggctgatcttgcgcgaagaatg

SEQ ID NO: 848401 - DNA, 75 bp, synthetic construct
  source 1..75: mol_type = other DNA
taccactgaactgcactggtggcgtacctctgtggaaggcaaacaggaacattacttcactacccgcctgacaga

SEQ ID NO: 848402 - DNA, 75 bp, synthetic construct
  source 1..75: mol_type = other DNA
cgaaacgtgagtttacccagttgctcgaggtttcactggcctaccgcaaaattgagtgggaacacgtcaaatcag

SEQ ID NO: 848403 - DNA, 75 bp, synthetic construct
  source 1..75: mol_type = other DNA
cattgaaaaaagataagaaaagaagaattgatttgatcaatcaattggaacaaatgaatattccatttgttatta

SEQ ID NO: 848404 - DNA, 75 bp, synthetic construct
  source 1..75: mol_type = other DNA
aagctatgtcgctggaaaaccacctgcaactcaacgacgaaactgaagagaatcagccagatagcggagaggaag

SEQ ID NO: 848405 - DNA, 75 bp, synthetic construct
  source 1..75: mol_type = other DNA
caggaatatctggaagagttttacgcgcgttataacgttgagcttattcgcgcgccggaaggtttcttctattta

SEQ ID NO: 848406 - DNA, 75 bp, synthetic construct
  source 1..75: mol_type = other DNA
gcaatcaccagccgcagcagctatcggtgatgcttgacgccttgctgcaccagcaactgggcttgagttaccgca

SEQ ID NO: 848407 - DNA, 75 bp, synthetic construct
  source 1..75: mol_type = other DNA
gatttaaccctggcaactgaggatgattgcgcacggctggtagaaggctgcgatgctgtctggcactgtgcggcg

SEQ ID NO: 848408 - DNA, 75 bp, synthetic construct
  source 1..75: mol_type = other DNA
caagcatttttaaaagacttgagttagataaaagatttttttttgctaaaacaattaatagtgaaaagtatattt

SEQ ID NO: 848409 - DNA, 75 bp, synthetic construct
  source 1..75: mol_type = other DNA
cgagaagtcattcgcccacaacaggaagtgacgccggaagcacagtcacagcctgaaaatgcggaggatggtaac

SEQ ID NO: 848410 - DNA, 75 bp, synthetic construct
  source 1..75: mol_type = other DNA
cggatgcggcggtgaaatcgctgaatggtattgatataccggagcagcaggtgcccttcctggggaaaatttcag

SEQ ID NO: 848411 - DNA, 75 bp, synthetic construct
  source 1..75: mol_type = other DNA
gaccggatgacagaggttgcgcagtatcacgcagagctgaagagtctgaccggtgcagaaagaacggcgttcatt

SEQ ID NO: 848412 - DNA, 75 bp, synthetic construct
  source 1..75: mol_type = other DNA
aaatggacctggcaaaagagcgcgtggcggatgaggtgcgcgcgcagctggcaaccgatccggaattgctggctg

SEQ ID NO: 848413 - DNA, 75 bp, synthetic construct
  source 1..75: mol_type = other DNA
ctgccagcgcacaggggcagagtgcaatggcagcagctgatgctgttcttaacgctgattattctgagctggcga

SEQ ID NO: 848414 - DNA, 75 bp, synthetic construct
  source 1..75: mol_type = other DNA
aagtgacgccggaagcacagtcacagcctgaaaatgcggaggatggtaacgggagcatttacccgacggtgcggt

SEQ ID NO: 848415 - DNA, 75 bp, synthetic construct
  source 1..75: mol_type = other DNA
tttgtcaattgatgcagatccgcagcacgcgcagcttactgaccgccagaaaatggacctggcaaaagagcgtgt

SEQ ID NO: 848416 - DNA, 75 bp, synthetic construct
  source 1..75: mol_type = other DNA
gatggaaaaaatgcggttactgatactgtcggtaaaggtctgaaggtcacaggcaaggcagtcagtggcggcgct

SEQ ID NO: 848417 - DNA, 75 bp, synthetic construct
  source 1..75: mol_type = other DNA
agtcgggcacatcaggaaaaatgtcggcttcaaattgcgcgttatcactaaatcacctgtcactctctcaggctg

SEQ ID NO: 848418 - DNA, 75 bp, synthetic construct
  source 1..75: mol_type = other DNA
tgacgccggaagagacaatcgcatcgcgttttgttcgccagatgcaggataaattccaggtgctgaaggctgtgc

SEQ ID NO: 848419 - DNA, 75 bp, synthetic construct
  source 1..75: mol_type = other DNA
tggttgggaagagccatgcgctccaaacgttcatctgatattcagattgtgctaggacgcacacctcctgtattg

SEQ ID NO: 848420 - DNA, 75 bp, synthetic construct
  source 1..75: mol_type = other DNA
aaatgccgctggtcgccagggggaaatactggagggcgaaacagttcgtcgtggtctgccgtcaccggatgagca

SEQ ID NO: 848421 - DNA, 75 bp, synthetic construct
  source 1..75: mol_type = other DNA
atggagcatgtagtcacgccagcggaatatcagacgattattaagaccgtactgaaaacccgtgacagtgataac

SEQ ID NO: 848422 - DNA, 75 bp, synthetic construct
  source 1..75: mol_type = other DNA
gcagaatgctgtttatcgcgtatgtggtggcaagctgtataagggcgaaagtgaagtcggtgatgttgccggaag

SEQ ID NO: 848423 - DNA, 75 bp, synthetic construct
  source 1..75: mol_type = other DNA
gctactgggaatggatgtctatggctggcaagtgatggcgctgacgctgctgctgggaaccccaacactgggctt

SEQ ID NO: 848424 - DNA, 75 bp, synthetic construct
  source 1..75: mol_type = other DNA
gattaacgctttaccggaagaaaaaattaaaccctgatggttctctgtacagagggcttcaattgcccaaagatg

SEQ ID NO: 848425 - DNA, 75 bp, synthetic construct
  source 1..75: mol_type = other DNA
atcttcaagcgccaatggtccgcaatggtgtgtgttgaaaacaggcctgtatgacgatgtgtaccgcgctatcga

SEQ ID NO: 848426 - DNA, 75 bp, synthetic construct
  source 1..75: mol_type = other DNA
atgacgatgtgtaccgcgctatcgacttcatttacgaaggcaaccaaattacgtgcggcgataagctggaatcgg

SEQ ID NO: 848427 - DNA, 75 bp, synthetic construct
  source 1..75: mol_type = other DNA
agtagggcgcatcaggaaaaatgtcggtttcaaattgcgcgttatcacgaagtcacctgtcactctgtctggttg

SEQ ID NO: 848428 - DNA, 75 bp, synthetic construct
  source 1..75: mol_type = other DNA
agcagggaaggagcgacggtaaactgaaagggctggataacttatccgccctggctgtggtgaaagacagccgtt

SEQ ID NO: 848429 - DNA, 75 bp, synthetic construct
  source 1..75: mol_type = other DNA
taagtcagccagtgatgcgcgtaagtacattgattcacatcgtgatgagcttgttcgtcatgtgaaggagatgcg

SEQ ID NO: 848430 - DNA, 75 bp, synthetic construct
  source 1..75: mol_type = other DNA
gagacaatcgcacctgaatctgaaacaactgtctctactgacagggaagctaccgtgcgcggaggtgaagtcagg

SEQ ID NO: 848431 - DNA, 75 bp, synthetic construct
  source 1..75: mol_type = other DNA
cgtttaccggaatacccgcagtggcgatatttttatcgcttacggcaaaaacaaaatgcgggtgagaggtggctt

SEQ ID NO: 848432 - DNA, 75 bp, synthetic construct
  source 1..75: mol_type = other DNA
ggcaccattcggtgcggttgccggatatcgtggcagacgtcaggcggcagatgaagccgccatgcgtgaggctga

SEQ ID NO: 848433 - DNA, 75 bp, synthetic construct
  source 1..75: mol_type = other DNA
gtgcagcccttggtgctgcgatgggggcaccattcggtgcggttgccggatatcgtggcagacgtcaggcggcag

SEQ ID NO: 848434 - DNA, 75 bp, synthetic construct
  source 1..75: mol_type = other DNA
tcaaagctgagaacgccagatgttttgatctggaagttgaatcatcgactggtgtcgctcagtacgctgaccgcc

SEQ ID NO: 848435 - DNA, 75 bp, synthetic construct
  source 1..75: mol_type = other DNA
aacaggatgctgatgatgctcagtctacctgtgcacaagataaagccagtgtagaggcgaaaaaagccgcactgg

SEQ ID NO: 848436 - DNA, 75 bp, synthetic construct
  source 1..75: mol_type = other DNA
cggcgaccgactgattgttgaaggttctgccaaagtcacttcagggcagaccgtcaaggctgttgaagttcaggc

SEQ ID NO: 848437 - DNA, 75 bp, synthetic construct
  source 1..75: mol_type = other DNA
ctgcgctggtggtgaataaagacaataaagtagagcagcgagcgctcgaaacgggagaaacgtatggtgataaat

SEQ ID NO: 848438 - DNA, 75 bp, synthetic construct
  source 1..75: mol_type = other DNA
caatacggtgattggttgcggtgaaccgattccctttccacagggtgaaaaggtactgagcggtgcgactgttgc

SEQ ID NO: 848439 - DNA, 75 bp, synthetic construct
  source 1..75: mol_type = other DNA
tgcatggcaggaagcgttccagcaatccccctacaaagccccgcctaaaactgcggtctggtttattaaaccgcg

SEQ ID NO: 848440 - DNA, 75 bp, synthetic construct
  source 1..75: mol_type = other DNA
atgacttatacggtcaaattcagggatgatgccctcagggaatggctgaaactggataaatccattcaacagcag

SEQ ID NO: 848441 - DNA, 75 bp, synthetic construct
  source 1..75: mol_type = other DNA
agtgagacaggctcgatttattcttccatgactctgaaagatttcagtaaatttgtgaaagatgaaatcggcttt

SEQ ID NO: 848442 - DNA, 75 bp, synthetic construct
  source 1..75: mol_type = other DNA
atgatgcgctgaaagaatggctgaagctggataaagtcattcaacagcaatttgcgaaaaagctaaagaagtgca

SEQ ID NO: 848443 - DNA, 75 bp, synthetic construct
  source 1..75: mol_type = other DNA
aacttgatgcccgtctttacgggagtgcctccacagtacctgtcgtacttactgaaaacactgttatgtccgaag

SEQ ID NO: 848444 - DNA, 75 bp, synthetic construct
  source 1..75: mol_type = other DNA
gacgataaatttgcttaatgcccttgtttggctggcgatcaatctggttaatcgatttaagagaaagactcgtta

SEQ ID NO: 848445 - DNA, 75 bp, synthetic construct
  source 1..75: mol_type = other DNA
atttcactctctatatcatcttttccattgcatttatgctgatcaccctcctggtcatccttattgcaaaaccca

SEQ ID NO: 848446 - DNA, 75 bp, synthetic construct
  source 1..75: mol_type = other DNA
ccttaatggtgagcggtcgttatgtctcagcaaatgaaagcgcatcggaaaaagataatcaggataataacgggt

SEQ ID NO: 848447 - DNA, 75 bp, synthetic construct
  source 1..75: mol_type = other DNA
agtacatcgccggatatgcgctggctaacgacgtcagcctgccggaagagagcttttaccgcccggcaatcaaag

SEQ ID NO: 848448 - DNA, 75 bp, synthetic construct
  source 1..75: mol_type = other DNA
actgctgatgaactggctgatggcgtgatggaatcgttgcggtttgatgctcatgagttgctgattatccacctt

SEQ ID NO: 848449 - DNA, 75 bp, synthetic construct
  source 1..75: mol_type = other DNA
attgccggaacctactgcaaaacgccgtttgctgattcgtatgcgttcatcagcaatccggcaacaggtgcgccg

SEQ ID NO: 848450 - DNA, 75 bp, synthetic construct
  source 1..75: mol_type = other DNA
tgacgcatgtgctgaaagccaaagcggtattgtgccctggcgttgagatcacttttaaagatgagatcaacaata

SEQ ID NO: 848451 - DNA, 75 bp, synthetic construct
  source 1..75: mol_type = other DNA
ctcgcggcgtcgagtacaacatggcgcagagtgctgtttatcgcgtgtgtggcggcaagctctacaaaggcgaaa

SEQ ID NO: 848452 - DNA, 75 bp, synthetic construct
  source 1..75: mol_type = other DNA
ccggcccccgcacaggaaccagagcagataaatacaccgtccgacagtctgtgttgtgagctggttctgccggcc

SEQ ID NO: 848453 - DNA, 75 bp, synthetic construct
  source 1..75: mol_type = other DNA
atggtgtgtgctgaaaacaggcttgtatgacgatgtgtaccgcgctatcgacttcatttacgaaggcaatcagat

SEQ ID NO: 848454 - DNA, 75 bp, synthetic construct
  source 1..75: mol_type = other DNA
gtgcgtcagcatgccaccacagagatgcaggtgacggcagcgcagatgcagaagcagtatgaggaaatccgtcgt

SEQ ID NO: 848455 - DNA, 75 bp, synthetic construct
  source 1..75: mol_type = other DNA
ccgagatcaacgggcgtcctgccgatcactggaacaccgccgatttacaacgtaacgccgcacagttgctgagtg

SEQ ID NO: 848456 - DNA, 75 bp, synthetic construct
  source 1..75: mol_type = other DNA
agccgatgccatggattatgtcgcgggctacaccgtgtgtaacgactacgccattcgcgactatctggaaaacta

SEQ ID NO: 848457 - DNA, 75 bp, synthetic construct
  source 1..75: mol_type = other DNA
gtgtcgcgccggtatgggccgttcatcgctgattatggtggcgcagggctggtccctgcgccgtacccggccggt

SEQ ID NO: 848458 - DNA, 75 bp, synthetic construct
  source 1..75: mol_type = other DNA
cattttacatggcaacgtcaccattatggcagtaggttcgtattttacgcccgtactttcgtcggcgcttgctgc

SEQ ID NO: 848459 - DNA, 75 bp, synthetic construct
  source 1..75: mol_type = other DNA
ctgttattcgtcagctatgaaatctgtctggcgctttccttaggatatgcggcgacccgtcatcaggcgattgaa

SEQ ID NO: 848460 - DNA, 75 bp, synthetic construct
  source 1..75: mol_type = other DNA
ctctggcatcgctggaagagaatccggtggcatggctgcattcagacaatggcttaggtattccggcaataacga

SEQ ID NO: 848461 - DNA, 75 bp, synthetic construct
  source 1..75: mol_type = other DNA
atggaaaatgtggtaacggcgttgcagagcattacgcagaaaacggtcagacagccacaaacgctggcgatggaa

SEQ ID NO: 848462 - DNA, 75 bp, synthetic construct
  source 1..75: mol_type = other DNA
tatctgaattaaaggagctcgatggccgttcgctaaggaaggtgcgaataagcaggtcatttcttcccaagctga

SEQ ID NO: 848463 - DNA, 75 bp, synthetic construct
  source 1..75: mol_type = other DNA
ccatcagggtgatctaccagcactctatgtcaactcagaaggaaatgcagaaaacccggttctgagtccaaaaat

SEQ ID NO: 848464 - DNA, 75 bp, synthetic construct
  source 1..75: mol_type = other DNA
tatcaaacgcacatctggaggctgctggctggggtatggatgccttcaaccactccaacccatttgagagccatg

SEQ ID NO: 848465 - DNA, 75 bp, synthetic construct
  source 1..75: mol_type = other DNA
agctgccgcttcaccttacctccgacatgctggcttcggtgatcgctgagttcgtatcgaaggcagcaaaaggga

SEQ ID NO: 848466 - DNA, 75 bp, synthetic construct
  source 1..75: mol_type = other DNA
gttttatgcgcgacggcgaaggccgggaaattgacttccgcaacaccgttattctgatgaccgccaatctgggca

SEQ ID NO: 848467 - DNA, 75 bp, synthetic construct
  source 1..75: mol_type = other DNA
cgagcgtactggcgctggtgatgactgctgttttcgatgctaccggaaccatccgtgcggtagccggtcaggcga

SEQ ID NO: 848468 - DNA, 75 bp, synthetic construct
  source 1..75: mol_type = other DNA
atccgtgccgtcgccggtcaggcgaacctgctggataaagatgggcagatcatcgacggcgggaaagcactgacc

SEQ ID NO: 848469 - DNA, 75 bp, synthetic construct
  source 1..75: mol_type = other DNA
aaattactcagataccaacaatcaggatgcaatgaaaggtctgaagcaattctttattagccaattaaacatgga

SEQ ID NO: 848470 - DNA, 75 bp, synthetic construct
  source 1..75: mol_type = other DNA
atgaaaaaatttgctttactggcggggctgtttgtttttgcaccaatgacctgggcgcaggactacaatattaaa

SEQ ID NO: 848471 - DNA, 75 bp, synthetic construct
  source 1..75: mol_type = other DNA
gtctgtttgttttcgcaccaatgacctgggcgcaggactacaatattaaaaacggtttgccgtcagaaacctata

SEQ ID NO: 848472 - DNA, 75 bp, synthetic construct
  source 1..75: mol_type = other DNA
tggtcgtctggtttccggcgaatggcgtaagttgaacatcggtacggtcgtcatcgccgtggcactggtggcctt

SEQ ID NO: 848473 - DNA, 75 bp, synthetic construct
  source 1..75: mol_type = other DNA
ccctgcggcatctgcggattctgcctgtgaggggcgttttgtaaacccgatcacggatatctgctggagctgtat

SEQ ID NO: 848474 - DNA, 75 bp, synthetic construct
  source 1..75: mol_type = other DNA
ttggttatctgtcggaacttgaccccatgtgggacagcagttctctcagcatgattatccagccggaagcgattc

SEQ ID NO: 848475 - DNA, 75 bp, synthetic construct
  source 1..75: mol_type = other DNA
ccctgcagcgtctgcggattctgcctgtgaggggcgttttgtaaacccgatcacggatatctgctggagctgtat

SEQ ID NO: 848476 - DNA, 75 bp, synthetic construct
  source 1..75: mol_type = other DNA
atgaaaaagatattacttatgttgagtctgctattttttactaccgcgggctttagtgaagtttcggatacgtta

SEQ ID NO: 848477 - DNA, 75 bp, synthetic construct
  source 1..75: mol_type = other DNA
attgccaggcctttaatatgcctctcgatgttctgttctggtgtgccggttcgcagggcagtatgtacccgttca

SEQ ID NO: 848478 - DNA, 75 bp, synthetic construct
  source 1..75: mol_type = other DNA
tggttttgctgctgactggccatgttcccgtagcgtcagcggacgctgcctgtgaagggcggtttgttaacccga

SEQ ID NO: 848479 - DNA, 75 bp, synthetic construct
  source 1..75: mol_type = other DNA
ggacagcggacagtgccatccgttcgggcgcagtgtgatgcgctgggagacgggaaaaaatccgcccaacacaaa

SEQ ID NO: 848480 - DNA, 75 bp, synthetic construct
  source 1..75: mol_type = other DNA
aaagtcagtcaggggaaggtccccgacacggcgaacccgtcgatgcccattcagatttgtccggcaccgccgccg

SEQ ID NO: 848481 - DNA, 75 bp, synthetic construct
  source 1..75: mol_type = other DNA
attgccagtgcctttaacaaacccctggatattctgttctggtgtgccggttcgcagggcagcatgtatccgttc

SEQ ID NO: 848482 - DNA, 75 bp, synthetic construct
  source 1..75: mol_type = other DNA
ccgctcccggatcaccgctcttgaaatggagaggcaggcactacaggaagacatggctgtcggtagtcaaaacta

SEQ ID NO: 848483 - DNA, 75 bp, synthetic construct
  source 1..75: mol_type = other DNA
gacggacgtcacccgatcaccgggatgcatggttaacctgggcttcagcctgccggcttttggtaaaacggcaca

SEQ ID NO: 848484 - DNA, 75 bp, synthetic construct
  source 1..75: mol_type = other DNA
gacgggtggtcggacaggacgtggcactggaatccattgcacagcgtctgcgtgcggcgaaaacgggtctgacat

SEQ ID NO: 848485 - DNA, 75 bp, synthetic construct
  source 1..75: mol_type = other DNA
aaattcacccgggacatcacggccagtgcgagagagggtaaaattgacccggtatcgggacgcgatacggaaatc

SEQ ID NO: 848486 - DNA, 75 bp, synthetic construct
  source 1..75: mol_type = other DNA
gagacattaaaagcttgcgctgagagagcgaattcatactcaaaaggaaagaaaggggctgactggagctttcat

SEQ ID NO: 848487 - DNA, 75 bp, synthetic construct
  source 1..75: mol_type = other DNA
agttctactaaaaaaaaactatttgcctgaagcaaaattttatgaatttttgaacaactgtaaattacaggttaa

SEQ ID NO: 848488 - DNA, 75 bp, synthetic construct
  source 1..75: mol_type = other DNA
gtaccttcagcaacgtttgactcataccacaacaacggaaatggatgctctctgttataacgttggcgacagggt

SEQ ID NO: 848489 - DNA, 75 bp, synthetic construct
  source 1..75: mol_type = other DNA
ctggcatctgtagcaagggaaggtgtgaaaacgtggactggaataatcagcccacaggagatgactgatccgctt

SEQ ID NO: 848490 - DNA, 75 bp, synthetic construct
  source 1..75: mol_type = other DNA
agatggtggaggagctgcagagcggatttaccgtaccgtccgacgatgattttgatggcgtcgacgtgacataca

SEQ ID NO: 848491 - DNA, 75 bp, synthetic construct
  source 1..75: mol_type = other DNA
tagttgaaattaaggcgccgacaaattatctgatctccacctcttctggttacagtgtctttgccagctcgttgc

SEQ ID NO: 848492 - DNA, 75 bp, synthetic construct
  source 1..75: mol_type = other DNA
ttcgggctggaggccgccacaatcgcgtggatcggcgtcggtatctccgttgccgctgcagcctattcgcttttt

SEQ ID NO: 848493 - DNA, 75 bp, synthetic construct
  source 1..75: mol_type = other DNA
tatgagatccggatgcgccgcaccgaaccggttaagggtggcagcactcgcgaccaggtgttctggcaggcgctg

SEQ ID NO: 848494 - DNA, 75 bp, synthetic construct
  source 1..75: mol_type = other DNA
cgggcgttccggcggtacccggggttggcggcagtgccgcgaccttaaccgccagcgccgcgccgacgacttatg

SEQ ID NO: 848495 - DNA, 75 bp, synthetic construct
  source 1..75: mol_type = other DNA
ggtgtcatccggcggttacagcgtcatttatggcgggatagaggaacttgcaccttatgtcggcatgccggtgac

SEQ ID NO: 848496 - DNA, 75 bp, synthetic construct
  source 1..75: mol_type = other DNA
tgaaaacgtggacgggaataatcagcccacaggagatgactgatccgcttcagacggctttcgttgctccttcag

SEQ ID NO: 848497 - DNA, 75 bp, synthetic construct
  source 1..75: mol_type = other DNA
aaacaggatcgtacaatctccaaaacatcaacggacttggattcaccgaaagaatcacgctggatacgcctgcgc

SEQ ID NO: 848498 - DNA, 75 bp, synthetic construct
  source 1..75: mol_type = other DNA
tccggaccaacaataacatttaatgggctgagcacggatgatggagatgaaacaacaaatgatcttccagataca

SEQ ID NO: 848499 - DNA, 75 bp, synthetic construct
  source 1..75: mol_type = other DNA
tggcgtggcggttccattacgtcatcattcctgcctgcgtcagtatttggcgacagcccggtatttacagctggt

SEQ ID NO: 848500 - DNA, 75 bp, synthetic construct
  source 1..75: mol_type = other DNA
atgcgtaaaattaaagggttacgttggtatatgatcgcactggtgacgctcggcaccgtgcttggttacctgacg

SEQ ID NO: 848501 - DNA, 75 bp, synthetic construct
  source 1..75: mol_type = other DNA
tatgtcgcaattatgctgctgtgtatcggtggttttgcccaccaggcactgtctggcgcgctgattacgctctct

SEQ ID NO: 848502 - DNA, 75 bp, synthetic construct
  source 1..75: mol_type = other DNA
ccgctgttcatgtttaaagtttacggctttaacctgaaagagatcgcgatgttcgcctggatgccgatgctgttt

SEQ ID NO: 848503 - DNA, 75 bp, synthetic construct
  source 1..75: mol_type = other DNA
tacattattaatggtcaggaagcccagcaccaggttggcacggcgaagaaaatgtccgttggtcagatcctgcgt

SEQ ID NO: 848504 - DNA, 75 bp, synthetic construct
  source 1..75: mol_type = other DNA
ccgccgctggtggtatgggcaatcgtgatgcacagctggcagatggcatttatcatctccggtgcattgagcttt

SEQ ID NO: 848505 - DNA, 75 bp, synthetic construct
  source 1..75: mol_type = other DNA
gacctgctgggtgcgctggttatctggacggtattgcagaacaaaccggcgattgaggttgtggaagaagcgcat

SEQ ID NO: 848506 - DNA, 75 bp, synthetic construct
  source 1..75: mol_type = other DNA
tttgcttcagacgataaaaaaaatctggatcatattatttccgctaaagaaattcatgatgatccggggagaatt

SEQ ID NO: 848507 - DNA, 75 bp, synthetic construct
  source 1..75: mol_type = other DNA
tccgcgaagtgttcggtcggtaccggatttatccggactatgtggtacaaccggtaacccggttcgacaaagacg

SEQ ID NO: 848508 - DNA, 75 bp, synthetic construct
  source 1..75: mol_type = other DNA
ggagcaacaacgcgagagacaacatgttctggcaggcgctcagaggtcgtttgctttcccgtccgacctcctacg

SEQ ID NO: 848509 - DNA, 75 bp, synthetic construct
  source 1..75: mol_type = other DNA
gcttttgcgacagcagcaagcgctgcggcaattggtgtaggcgttgctggttataacctgctgaaaaccacttcc

SEQ ID NO: 848510 - DNA, 75 bp, synthetic construct
  source 1..75: mol_type = other DNA
accatcgttgaagcgggtgatgaggtattctttattgccgcatcgcaacatatccgcgcggtgatgagtgaatta

SEQ ID NO: 848511 - DNA, 75 bp, synthetic construct
  source 1..75: mol_type = other DNA
attcactcatgagtcgctcaataaatcaaagagagctgactccatggatgcgtttatttgcacactgcagaaaaa

SEQ ID NO: 848512 - DNA, 75 bp, synthetic construct
  source 1..75: mol_type = other DNA
cagtagccggacaggcgaatctgctggataaagacaaccagatcatcaacggcggtaaagccctgaccagtgact

SEQ ID NO: 848513 - DNA, 75 bp, synthetic construct
  source 1..75: mol_type = other DNA
cgtttacctctttcccggtgctgatgagcttgctgggattagcggtgattttcggcctggagaagtgccgcgtac

SEQ ID NO: 848514 - DNA, 75 bp, synthetic construct
  source 1..75: mol_type = other DNA
cacagcccctgcactgatgtacgttggtctactgatgttaagcaacgtttcgaagctggatttcaacgactttat

SEQ ID NO: 848515 - DNA, 75 bp, synthetic construct
  source 1..75: mol_type = other DNA
aaacggagtctgattcggttaaccgctttttgctggttgagccgggcggcacggtacatttttatgataagcgtc

SEQ ID NO: 848516 - DNA, 75 bp, synthetic construct
  source 1..75: mol_type = other DNA
gtggttcccggcatgttaggaaaagcggggtttcctccggccgcagtttttgtcgccacctgtctggttgcgggc

SEQ ID NO: 848517 - DNA, 75 bp, synthetic construct
  source 1..75: mol_type = other DNA
cggacgcaccaaagccgcaaggcgcgctggacaattattttaaaattaccgctcgtgggagtaccgtgcgccagg

SEQ ID NO: 848518 - DNA, 75 bp, synthetic construct
  source 1..75: mol_type = other DNA
atcaggcgtatgtggcgggatgcaatcgcgtcggcagcgatggcaacggctgccattatcgcggtgacagccggg

SEQ ID NO: 848519 - DNA, 75 bp, synthetic construct
  source 1..75: mol_type = other DNA
cgacttacgttttcctgtgtggtcgcgcaatctcaacgattatgacctcgccctgtacgtcgccaactggcctgc

SEQ ID NO: 848520 - DNA, 75 bp, synthetic construct
  source 1..75: mol_type = other DNA
tcatcctgtcgaactattgccggttatcggcacgattgtcagtacctgggcgctgttccgctgtaaagggctgac

SEQ ID NO: 848521 - DNA, 75 bp, synthetic construct
  source 1..75: mol_type = other DNA
cggcctgtttctgctgctgattgctgctaacggtgtgggtatggttatcaaaaacccgattgaaggcttgccagt

SEQ ID NO: 848522 - DNA, 75 bp, synthetic construct
  source 1..75: mol_type = other DNA
aagcgtcagaaatctgtgcttggtgtggcaccgtcgattcatgttattgcccggcaactgatggataaggcactt

SEQ ID NO: 848523 - DNA, 75 bp, synthetic construct
  source 1..75: mol_type = other DNA
aacagtttcttcgagcataaactcaaaaaacatctacatgaaccgccccgggtttcctggagagtgttttatctg

SEQ ID NO: 848524 - DNA, 75 bp, synthetic construct
  source 1..75: mol_type = other DNA
cgtaaaaaatcaggaattggagtagcgccaactctacatgaaattgcacgagggttaatagataaggcgctggca

SEQ ID NO: 848525 - DNA, 75 bp, synthetic construct
  source 1..75: mol_type = other DNA
tcatcaagctatcctagcggatggactcagtaacgatcctacaaaaggatcaactctagagattcttggtgccta

SEQ ID NO: 848526 - DNA, 75 bp, synthetic construct
  source 1..75: mol_type = other DNA
atgactcttttggtaacggctgagtgtgttgacgatctgataaacgatgttcatcaagctatcctagcggatgga

SEQ ID NO: 848527 - DNA, 75 bp, synthetic construct
  source 1..75: mol_type = other DNA
ccataatggcgaaccgtatgttcctatgaaacccattgttgaggggatggggctggcctgggctccacaatttac

SEQ ID NO: 848528 - DNA, 75 bp, synthetic construct
  source 1..75: mol_type = other DNA
tctggaaaatccgtcagcgggtgcttgaaggtaatttcagacaggcgataaaaaaaagatgttcaggtaaagatg

SEQ ID NO: 848529 - DNA, 75 bp, synthetic construct
  source 1..75: mol_type = other DNA
atcccgacagaattgatcggtaacgtggtcctggcaacggtatcgttgacctgtcagtcactggtcgatgttata

SEQ ID NO: 848530 - DNA, 75 bp, synthetic construct
  source 1..75: mol_type = other DNA
tgtgcgaaggtgatgctggaactacaattacaaatcgatcatataattatataaaaagtacgctttttggattta

SEQ ID NO: 848531 - DNA, 75 bp, synthetic construct
  source 1..75: mol_type = other DNA
tggaaattttacgcaaggtttttcctgaaattaatgatatcaagatcgaggttttcacactttttgcttttggta

SEQ ID NO: 848532 - DNA, 75 bp, synthetic construct
  source 1..75: mol_type = other DNA
actataacggaaatcgttatggttgctgaggatgggaaacgacgcaatatggtgtccctgccacttcgaaaactt

SEQ ID NO: 848533 - DNA, 75 bp, synthetic construct
  source 1..75: mol_type = other DNA
gaactcaatcaggcttgcgctgacatgaaacgggataaaaacattgccagtgtgtttgctaccgggctgaatgag

SEQ ID NO: 848534 - DNA, 75 bp, synthetic construct
  source 1..75: mol_type = other DNA
tcgttaatccccgtcgaatgagtgtgatggaagaactcaatcaggcctgcgctgacatgaaacgggataaaaaca

SEQ ID NO: 848535 - DNA, 75 bp, synthetic construct
  source 1..75: mol_type = other DNA
tgcatcatcgaaatgatgattcagctccccggtgatactcagcgtcgtctggttatctgtcttgctttacgtaaa

SEQ ID NO: 848536 - DNA, 75 bp, synthetic construct
  source 1..75: mol_type = other DNA
atatgaaaagggacaaagagattgccagcttgtttggtaccggactgaatgagtggaaatctgtaaaagctgccc

SEQ ID NO: 848537 - DNA, 75 bp, synthetic construct
  source 1..75: mol_type = other DNA
tctggcggatgcagaaaaggggaattgatccgtttaaagtagagaaaacccctcccgccgtagtaatgccgatca

SEQ ID NO: 848538 - DNA, 75 bp, synthetic construct
  source 1..75: mol_type = other DNA
acggtttcacagaattttgtcggctggaatatgatgctgggttatacccgcacacaaaataacactgatgatagt

SEQ ID NO: 848539 - DNA, 75 bp, synthetic construct
  source 1..75: mol_type = other DNA
tacacttgagattagcggtagtgaaaaagatctgtatctgctttccggacagcatttccttaagtgtccactgag

SEQ ID NO: 848540 - DNA, 75 bp, synthetic construct
  source 1..75: mol_type = other DNA
tgtttgatctgattaaaacgcacttcgccgccctgatggagagccgcctgctggcgctgtcgtttgagattgaag

SEQ ID NO: 848541 - DNA, 75 bp, synthetic construct
  source 1..75: mol_type = other DNA
aggcggtctgacagatggaaatgtgcaatggtttttacaggcaggtaaaaccacatcacaggtttctgatgatga

SEQ ID NO: 848542 - DNA, 75 bp, synthetic construct
  source 1..75: mol_type = other DNA
ggcggcaaaggtgatatgcagcaggttaactggagtaattcgggatggccgacgctaggcttttatcgtaccaac

SEQ ID NO: 848543 - DNA, 75 bp, synthetic construct
  source 1..75: mol_type = other DNA
actggcgcgtcatggtgaactggcttgtggttttgcgcagaccgattcaggatgtggctttctcaataccgattc

SEQ ID NO: 848544 - DNA, 75 bp, synthetic construct
  source 1..75: mol_type = other DNA
caggtgaacggggcgttctatcacgttcactggtacaaatacccgctgacgtactggctgaacatcatcacgtcg

SEQ ID NO: 848545 - DNA, 75 bp, synthetic construct
  source 1..75: mol_type = other DNA
ccagttctgtcctgcgccaccgcctgtatttaaacgtatcgggctggctattggttactgggagccgatggcact

SEQ ID NO: 848546 - DNA, 75 bp, synthetic construct
  source 1..75: mol_type = other DNA
tgtgaagggcggtttgttaacccgatcacggatatctgctggaactgcatttttccactgtcgctgggcagcaca

SEQ ID NO: 848547 - DNA, 75 bp, synthetic construct
  source 1..75: mol_type = other DNA
aatccggcgctggcggccacggggatttttccgctggcgggtattcgcagccgcgtgcattgggtcgatacctgg

SEQ ID NO: 848548 - DNA, 75 bp, synthetic construct
  source 1..75: mol_type = other DNA
gctcgccagatatatgcctgctggaggcgcatccggagaaattatttacgcatgttttatatgctgactggcggg

SEQ ID NO: 848549 - DNA, 75 bp, synthetic construct
  source 1..75: mol_type = other DNA
aatggctgggtgagcaatgaatccagcccgctgcagtcctccctgctggtcagtgagcggatggcatttaagctc

SEQ ID NO: 848550 - DNA, 75 bp, synthetic construct
  source 1..75: mol_type = other DNA
gcttggtcaaagcgacagtgtgttgttcccttatcctggatttcagtctggttttgttgaggttaacgacagtag

SEQ ID NO: 848551 - DNA, 75 bp, synthetic construct
  source 1..75: mol_type = other DNA
aatatttattgagcactataatgttctggagcaggatttatccccttccggacccttaagcccgtttcggggaca

SEQ ID NO: 848552 - DNA, 75 bp, synthetic construct
  source 1..75: mol_type = other DNA
caatgaagaacgtgtcatcgcctatccaacggaagccgttttcggcgtcgggtgcgatcctgatagcgaaacagc

SEQ ID NO: 848553 - DNA, 75 bp, synthetic construct
  source 1..75: mol_type = other DNA
agtggattgccgccttgtcgaacagtagacgaagttcgcgcacaatttggcgcagcgttcccggttgtgcctggt

SEQ ID NO: 848554 - DNA, 75 bp, synthetic construct
  source 1..75: mol_type = other DNA
atgaatggcctgaatatcattcgtttctggcggatgcagagaaggggaattgatccgtttaaagtagagaaaacc

SEQ ID NO: 848555 - DNA, 75 bp, synthetic construct
  source 1..75: mol_type = other DNA
ctgtattgtctgtggacagaaagaatgaactcgaacagatgattgaaaatgccagaatgacgttatccctcatgg

SEQ ID NO: 848556 - DNA, 75 bp, synthetic construct
  source 1..75: mol_type = other DNA
atgtcagatgaagccggtattatatttgatggatataccctgtctgagttgccttttattaacaaaatgtgggat

SEQ ID NO: 848557 - DNA, 75 bp, synthetic construct
  source 1..75: mol_type = other DNA
accgacgatcaaaaaatcgcacgtacagtgaaagaaaaactatcgcaaccgttagctcgccatggtgaactggct

SEQ ID NO: 848558 - DNA, 75 bp, synthetic construct
  source 1..75: mol_type = other DNA
gactggatcttgagtacttcggttggtgttttccatcgtaatgacaacggtggcgatggatttgcccctatattt

SEQ ID NO: 848559 - DNA, 75 bp, synthetic construct
  source 1..75: mol_type = other DNA
ttttgcagggaaaagtctcggtaaatattatgcgatggttaatcttgataccgtaacctttcttgattcatcaag

SEQ ID NO: 848560 - DNA, 75 bp, synthetic construct
  source 1..75: mol_type = other DNA
gtgtcattatccgctactcatcgaaaagaaaaccgcgcagggtgtaaaacacttttgccagtaaacaatgtggaa

SEQ ID NO: 848561 - DNA, 75 bp, synthetic construct
  source 1..75: mol_type = other DNA
tggcgtaaccgtcggtggcctgaacaccgataccataaacagtgcggttaatggtcgttgggaagggcagtacgg

SEQ ID NO: 848562 - DNA, 75 bp, synthetic construct
  source 1..75: mol_type = other DNA
cgccagcgtgttccgtaacgatgatggtggcaaaggtgatatgcaacaggctaactggagtcaatcgggatggcc

SEQ ID NO: 848563 - DNA, 75 bp, synthetic construct
  source 1..75: mol_type = other DNA
gatgcacgctccgaaaggggtggcggtcgccagcggcgagcacctgcaactggccgcggtgaaaaacctccagat

SEQ ID NO: 848564 - DNA, 75 bp, synthetic construct
  source 1..75: mol_type = other DNA
ctcgtcacgcgacgaagcccgttacgaagtgcgtcttgaaccccgtatggcgctgctggcccgcagccgtcagaa

SEQ ID NO: 848565 - DNA, 75 bp, synthetic construct
  source 1..75: mol_type = other DNA
gccggggctggaaatcagggttcagggcgacgacgcgccagcggtgttccgcaagggtgtgctgattaccggcgt

SEQ ID NO: 848566 - DNA, 75 bp, synthetic construct
  source 1..75: mol_type = other DNA
tggccgcagtgaaaaacctccagataaatgcgggaaacaacgccgatatcggcgtagtgaagaatatgtttatcg

SEQ ID NO: 848567 - DNA, 75 bp, synthetic construct
  source 1..75: mol_type = other DNA
gatgcacgcgccgaaaggggtggcggtcgccagcggcgagcacctgcaactggccgctgtgaaaaacctccagat

SEQ ID NO: 848568 - DNA, 75 bp, synthetic construct
  source 1..75: mol_type = other DNA
gatgcacgccccgaaaggtgtggcggtcgccagcggcgagcacctgcaactggccgccgtgaaaaacctccagat

SEQ ID NO: 848569 - DNA, 75 bp, synthetic construct
  source 1..75: mol_type = other DNA
gggtcaccagcacggtgaagaacgatatctatgcccatatcgacaaggacgggcgctaccgggtcaaccttgact

SEQ ID NO: 848570 - DNA, 75 bp, synthetic construct
  source 1..75: mol_type = other DNA
ccgggagaatataacgttaaggcgggatattacgggcgtaagccgaaggcgaagctgacgccggagctgatggca

SEQ ID NO: 848571 - DNA, 75 bp, synthetic construct
  source 1..75: mol_type = other DNA
gcgccggagtcggtgctgatgcaggatggcgcattcagcctgacggcaccgccggtacaggggatgccggtacag

SEQ ID NO: 848572 - DNA, 75 bp, synthetic construct
  source 1..75: mol_type = other DNA
atattgcaggcgtaaaacacgactcggcacacactgaccatgtgaccattcagaactacaagcgcaacgtgctac

SEQ ID NO: 848573 - DNA, 75 bp, synthetic construct
  source 1..75: mol_type = other DNA
ggcgacgacgcgccagcagtgttccgcaagggtgtgctgattaccggcgtgacggccagcgcggcgcgtgactgc

SEQ ID NO: 848574 - DNA, 75 bp, synthetic construct
  source 1..75: mol_type = other DNA
tttcagacggtgatttaccgtccgctgacacagtctgccatgcgcaccattgtggagatgaagcttgcacaggtc

SEQ ID NO: 848575 - DNA, 75 bp, synthetic construct
  source 1..75: mol_type = other DNA
cgccatctaccagaatcagacggtgccgcaaatcgtcgaaaaaatcctgcgcgagcggcatcacatgcgcggtca

SEQ ID NO: 848576 - DNA, 75 bp, synthetic construct
  source 1..75: mol_type = other DNA
cctcggccatctggtggatgccggaaaacagcagcgcggggaaggttttgaactgcgtaccgatctgtggggtgc

SEQ ID NO: 848577 - DNA, 75 bp, synthetic construct
  source 1..75: mol_type = other DNA
accagttcactgctgatgccggggctggaaatcagggttcagggcgacgacgcgcctgcggtattccgcaagggc

SEQ ID NO: 848578 - DNA, 75 bp, synthetic construct
  source 1..75: mol_type = other DNA
tactcagaacgctatggctaccgcccggcgcttatcccacgtcccgtaatggccggcacgctcccggcacgggtc

SEQ ID NO: 848579 - DNA, 75 bp, synthetic construct
  source 1..75: mol_type = other DNA
cttcacgaagccgggaagatgctgaccgatggcctcgaagcaatgatgccaggtctgcgggttgacgtaactctc

SEQ ID NO: 848580 - DNA, 75 bp, synthetic construct
  source 1..75: mol_type = other DNA
taaacatctctcctcgtcacaggatgaagcccgttacgaagtacggctggagccgcgtatggcgctgctggcccg

SEQ ID NO: 848581 - DNA, 75 bp, synthetic construct
  source 1..75: mol_type = other DNA
gaagcctaccactacgctgacaacttcctgcaaaaaggcgacaaggaggcagcggaaagcggcgcgttttatgcc

SEQ ID NO: 848582 - DNA, 75 bp, synthetic construct
  source 1..75: mol_type = other DNA
aacgctacctgaatgaacaggccattctcaaaggccagagcaccagttcactgctgatgccggggctggagataa

SEQ ID NO: 848583 - DNA, 75 bp, synthetic construct
  source 1..75: mol_type = other DNA
gccgacgcacaggacaaggcgcagggtcaggtcagagagatggccgacattatcagcgaactgaacggtctgagc

SEQ ID NO: 848584 - DNA, 75 bp, synthetic construct
  source 1..75: mol_type = other DNA
cgccatctaccagaaccagacggtgccgcaaatcgtcgaaaaaatcctgcgcgagcggcatcatatgcgcggtca

SEQ ID NO: 848585 - DNA, 75 bp, synthetic construct
  source 1..75: mol_type = other DNA
gcgaacaacaaaatccgcctcgatgatgagcgcggcaaagagcatatcaaggtcagtaccgagtacggcggcaag

SEQ ID NO: 848586 - DNA, 75 bp, synthetic construct
  source 1..75: mol_type = other DNA
ggaagtcagtatcgcgtttgaggaaggcaacccggaccgaccttatattgcaggcgtaaaacacgactcggcaca

SEQ ID NO: 848587 - DNA, 75 bp, synthetic construct
  source 1..75: mol_type = other DNA
agcgcggcaaagagcatatcaaggtcagtaccgagtacggcggcaagagccagctcaacctcggtcatctggtgg

SEQ ID NO: 848588 - DNA, 75 bp, synthetic construct
  source 1..75: mol_type = other DNA
ggtgggagaccccggtgtggggaaaacggctctggtggaagggctcgccctgcgtattgcggaaggtaacgtacc

SEQ ID NO: 848589 - DNA, 75 bp, synthetic construct
  source 1..75: mol_type = other DNA
gaactgaagaaggagccatttttgatgtgctactagatggggaccagtatgtggctccggatgaatatgtatttt

SEQ ID NO: 848590 - DNA, 75 bp, synthetic construct
  source 1..75: mol_type = other DNA
tcagtagcacattaataatagctttatcaggagtgtcacaagctgcggagctggcgctttatccccaacacaata

SEQ ID NO: 848591 - DNA, 75 bp, synthetic construct
  source 1..75: mol_type = other DNA
ctacaggaattttgtataaggttgatggcgaatatgtttattacttccacaaccaggcgcgggagtggcgattgt

SEQ ID NO: 848592 - DNA, 75 bp, synthetic construct
  source 1..75: mol_type = other DNA
aaacatattgtctagagacatcatagaaaatagtggggatgttccttatctttgtgctagccgtgagaataactc

SEQ ID NO: 848593 - DNA, 75 bp, synthetic construct
  source 1..75: mol_type = other DNA
ttttcataaacgttggtttgggagaagcggcaaaacggaatgtaggtaacgggcaaaaccaaattccggatatgg

SEQ ID NO: 848594 - DNA, 75 bp, synthetic construct
  source 1..75: mol_type = other DNA
aataagtaaacaatttagatcttttagagtatcaattaatgaggctattactggaagtgatagtgagggttttta

SEQ ID NO: 848595 - DNA, 75 bp, synthetic construct
  source 1..75: mol_type = other DNA
aaagctgttttaatggctaatgcctggcttaatggcttcaacctgaaaattaacccatcccgtattccggaagag

SEQ ID NO: 848596 - DNA, 75 bp, synthetic construct
  source 1..75: mol_type = other DNA
actgcattgcttgagcccgatttacagcttgcaatagcactgctgaaaccgtacgggcttagtcgctcacaagtc

SEQ ID NO: 848597 - DNA, 75 bp, synthetic construct
  source 1..75: mol_type = other DNA
gaactctcaggctgaaaggtgaactgacaccggcgttattacagacacttatccgcgaaatgaaagggagcagcc

SEQ ID NO: 848598 - DNA, 75 bp, synthetic construct
  source 1..75: mol_type = other DNA
gtcacgctcactttcagcacgaaatagaaaatcaccctgaatattttatcaaagttgacaatgtagctgtggcgt

SEQ ID NO: 848599 - DNA, 75 bp, synthetic construct
  source 1..75: mol_type = other DNA
tgatgaagttgaacccaaggccgggcaggttgtaccggctctcgcacacattgggcaaggcgaagcggaatcatc

SEQ ID NO: 848600 - DNA, 75 bp, synthetic construct
  source 1..75: mol_type = other DNA
agtgccttcctcttttatatgctcgatcagcgtcatcacatgctgtttgcgaccatgtggaacaccggcatccgt

SEQ ID NO: 848601 - DNA, 75 bp, synthetic construct
  source 1..75: mol_type = other DNA
aggatgcactcagccagattgttgttgctctggaagccgcgcagtttatagcgctcgacccggagaacaccgatt

SEQ ID NO: 848602 - DNA, 75 bp, synthetic construct
  source 1..75: mol_type = other DNA
agcccatacccttatcggggccggtaatcaggccggcggcgcggatgcggccaacctgctgaagcctgcgctggc

SEQ ID NO: 848603 - DNA, 75 bp, synthetic construct
  source 1..75: mol_type = other DNA
gtactgatctgtggggtgcggtgcgggcaaagaaaggcatctttatcagcgccgatacgcaggacaaggcgcagg

SEQ ID NO: 848604 - DNA, 75 bp, synthetic construct
  source 1..75: mol_type = other DNA
tttcagaccgtgatttaccgtccgctgacacagtctgccatgcgcaccattgtgcagatgaagcttgcacaggtc

SEQ ID NO: 848605 - DNA, 75 bp, synthetic construct
  source 1..75: mol_type = other DNA
ggcacacactgaccatgtgaccattcagaactacaagcgcaacgtgctgcgcaccccggcgaacaacaaaatccg

SEQ ID NO: 848606 - DNA, 75 bp, synthetic construct
  source 1..75: mol_type = other DNA
ggcgtaaaacacgactcggcacacactgaccatgtgaccatccagaactacaagcgcaacgttctgcgcacccct

SEQ ID NO: 848607 - DNA, 75 bp, synthetic construct
  source 1..75: mol_type = other DNA
cgccagtcgcgcccgtatgcgggagacacctacggcctgcacctgccgctgctggcgggaacggaagtcagtatc

SEQ ID NO: 848608 - DNA, 75 bp, synthetic construct
  source 1..75: mol_type = other DNA
gcgaaatttggctgattaatccttttaacggtgaatcgttaagcgaacatatgctggatgtatggttaaagggaa

SEQ ID NO: 848609 - DNA, 75 bp, synthetic construct
  source 1..75: mol_type = other DNA
ttatgaagaccttgatgaagctgataacattgaggtaatccgcaaattgctggatacactcaaagcctcgttgat

SEQ ID NO: 848610 - DNA, 75 bp, synthetic construct
  source 1..75: mol_type = other DNA
tcttacgaaaaaggccgcagagtttcactcctgcggcctggtccgggcgcaaattgccattacggcagcctgacg

SEQ ID NO: 848611 - DNA, 75 bp, synthetic construct
  source 1..75: mol_type = other DNA
atttaccagtaccgataaagccatcacgccggagtcggtactgatgcaggacggcgcgttcagcctgacggcacc

SEQ ID NO: 848612 - DNA, 75 bp, synthetic construct
  source 1..75: mol_type = other DNA
atgccagaaggccatgcccagttctgcgagcgtcatatagccgcctgtgtgtgttgtaatgacaacgtttcgcgg

SEQ ID NO: 848613 - DNA, 75 bp, synthetic construct
  source 1..75: mol_type = other DNA
gaacaggcagggcagtgcggtatcgttaggtgccattttgttgtgggtcgctaatcgtctcgatttgccgctact

SEQ ID NO: 848614 - DNA, 75 bp, synthetic construct
  source 1..75: mol_type = other DNA
aaacagcagcgcggggaaggctttgaactgcgtactgatctgtggggtgcggtgcgggcaaagaaaggcatcttt

SEQ ID NO: 848615 - DNA, 75 bp, synthetic construct
  source 1..75: mol_type = other DNA
cacagaacgatctgatggaactgttggcacagaaatcgatagagatcaccagtacggaagatgagatcaagatca

SEQ ID NO: 848616 - DNA, 75 bp, synthetic construct
  source 1..75: mol_type = other DNA
agcggcgagcacctgcaactggcggcgtcgaagaatgtgatagcgaacgcaggcaacaacgcagatatcggcgta

SEQ ID NO: 848617 - DNA, 75 bp, synthetic construct
  source 1..75: mol_type = other DNA
gattctgccgggtgctgtgaaagaattttcacggaagaagctgataacctaaacgtacttcttggtattaaggcg

SEQ ID NO: 848618 - DNA, 75 bp, synthetic construct
  source 1..75: mol_type = other DNA
actgatgatgagggatgcaccgaaacattttttagtgataaagaagaagaaattgaaattgagattttacttggt

SEQ ID NO: 848619 - DNA, 75 bp, synthetic construct
  source 1..75: mol_type = other DNA
caggtcagagagatggccgacattatcagcgaactgaacggtctgagcgataaaatccagaaactgtccgatgac

SEQ ID NO: 848620 - DNA, 75 bp, synthetic construct
  source 1..75: mol_type = other DNA
gacttctgatgcggtggctgttccgaagttcgctaaaggctctaacgtctatcagaacattttcggcgctccttc

SEQ ID NO: 848621 - DNA, 75 bp, synthetic construct
  source 1..75: mol_type = other DNA
gcagttgctggacgaacaaccggaagccactgaggccagcctgcacgaactgctgcgcccgatactgcgcgacca

SEQ ID NO: 848622 - DNA, 75 bp, synthetic construct
  source 1..75: mol_type = other DNA
atcttgctccactgttcgaattaaacgactcacgcaattacctactgtctaccctggattttactgatcctgtgc

SEQ ID NO: 848623 - DNA, 75 bp, synthetic construct
  source 1..75: mol_type = other DNA
gtgttctgtaaacctgaagccttctctgcaattcgattctctgcgggtatggcaaacgcattccagtatgtaagc

SEQ ID NO: 848624 - DNA, 75 bp, synthetic construct
  source 1..75: mol_type = other DNA
accagagcatctacggggcagcttccagcacctttgaactgattaatgccgctcctgctgaggtgtatagctata

SEQ ID NO: 848625 - DNA, 75 bp, synthetic construct
  source 1..75: mol_type = other DNA
attttgagcgcgacgccgcgctggaacgccgcttccagatggtgaaagtcgacgagccggatgatgacaccgcct

SEQ ID NO: 848626 - DNA, 75 bp, synthetic construct
  source 1..75: mol_type = other DNA
gcggcaagagccagctaaacctcggtcatcttgttgatgcggggaaacagcagcgcggggaaggctttgaactgc

SEQ ID NO: 848627 - DNA, 75 bp, synthetic construct
  source 1..75: mol_type = other DNA
accaggcattggcaggtacgggaaccctgaatacaggcacctctggcaaccatgcccatacagtcggtatcggtg

SEQ ID NO: 848628 - DNA, 75 bp, synthetic construct
  source 1..75: mol_type = other DNA
tggtctgtacgatgataccggtgcgttaattgccgtggcgaacatggccgaaagttataagcctgcccttgccga

SEQ ID NO: 848629 - DNA, 75 bp, synthetic construct
  source 1..75: mol_type = other DNA
ctttatggcagcgcacatcgacagggtttacaaattttgcctgggtcaatacatctggtgatacttacgatattt

SEQ ID NO: 848630 - DNA, 75 bp, synthetic construct
  source 1..75: mol_type = other DNA
tctgggttgccgtcagcgtagctgtcgcctctgctgcgtacagcatctacatgatgagtacaatgtcacaggcgg

SEQ ID NO: 848631 - DNA, 75 bp, synthetic construct
  source 1..75: mol_type = other DNA
tgccaataagaaagatatcaatcgggaggatgtaaatcacttactctacctgctgcagaaagatacgtactcctt

SEQ ID NO: 848632 - DNA, 75 bp, synthetic construct
  source 1..75: mol_type = other DNA
gggctcggggcgtgcgcagacctgtcgcatggtgattattgtcagcagtatcgcctcggtggagctgtccattga

SEQ ID NO: 848633 - DNA, 75 bp, synthetic construct
  source 1..75: mol_type = other DNA
tacctatgatgtttatgttgaaataggtaattacgccacaggtgttaatattcagtgggattataccagtaacgc

SEQ ID NO: 848634 - DNA, 75 bp, synthetic construct
  source 1..75: mol_type = other DNA
ccgcacaggacgccaccacagcacgaaaaggccttgtccagctcagtagcgccaccaacagcacgtctgaaacgc

SEQ ID NO: 848635 - DNA, 75 bp, synthetic construct
  source 1..75: mol_type = other DNA
tcaacctcggccatctggtggatgccggaaaacagcagcgcggggaaggttttgaactgcgtaccgatctgtggg

SEQ ID NO: 848636 - DNA, 75 bp, synthetic construct
  source 1..75: mol_type = other DNA
gactaacagcgcatctgaaacgcttgctgcgacatcgaaagcagtgaaagcagctaatgacaatgcgaatggtcg

SEQ ID NO: 848637 - DNA, 75 bp, synthetic construct
  source 1..75: mol_type = other DNA
atacgtcaccagcatattctgctaataagccggaagggttaacggacggtacagtttattctctctatacgccat

SEQ ID NO: 848638 - DNA, 75 bp, synthetic construct
  source 1..75: mol_type = other DNA
tcgacaccgtcgagctgtctatcgatacgacactggttatggcgacgcaggattatgttgacgaaaaactcgcag

SEQ ID NO: 848639 - DNA, 75 bp, synthetic construct
  source 1..75: mol_type = other DNA
ggctgcggaacccgtagcagcaccgcagcctgagcctgtggctgaaccggtgcctgtcatggataagccgaagcg

SEQ ID NO: 848640 - DNA, 75 bp, synthetic construct
  source 1..75: mol_type = other DNA
atggatctgcgtgatagctatacccggcaggtcaaactgttgatggccgctctgccgcatgtggcgaaggagtcc

SEQ ID NO: 848641 - DNA, 75 bp, synthetic construct
  source 1..75: mol_type = other DNA
acttactgttcaaagtggtgcaaatattcgctaaagcagatttatacccggagcacgttaccaaccatgacatgg

SEQ ID NO: 848642 - DNA, 75 bp, synthetic construct
  source 1..75: mol_type = other DNA
attacatgctctctaacccacctttcggcgtggactggaaaaagatcgaaggcgacatcaacgacgagcacaaac

SEQ ID NO: 848643 - DNA, 75 bp, synthetic construct
  source 1..75: mol_type = other DNA
gcgtttacgtggtgccatgttcagtcctgaactgaccgttaccggagcggtaccaaacacatgccccgacacacc

SEQ ID NO: 848644 - DNA, 75 bp, synthetic construct
  source 1..75: mol_type = other DNA
aaatccgggctgtatttccagtgggggcagaaaaaggctgagagtatcactccggtgacgaacaccattcccggt

SEQ ID NO: 848645 - DNA, 75 bp, synthetic construct
  source 1..75: mol_type = other DNA
accgctaccggtttgcaggtaaacaccagcgaactgcatggcgtaccgggttgccctcactgcggtaatgccagt

SEQ ID NO: 848646 - DNA, 75 bp, synthetic construct
  source 1..75: mol_type = other DNA
acccaccgtttggcgttgactggaaaaagattgataccattatccacaaagaacataaaaagggctacgatggac

SEQ ID NO: 848647 - DNA, 75 bp, synthetic construct
  source 1..75: mol_type = other DNA
aaacagatgagagcgctgatgtttgtaagactaaaggcaagcctgaagctgatactaatttgcgtgattatgaaa

SEQ ID NO: 848648 - DNA, 75 bp, synthetic construct
  source 1..75: mol_type = other DNA
atctgagcgcatggtctgaagtgtttcaaaagtttggtgctaaacctaaacgtaccccttgctcagctgatgctt

SEQ ID NO: 848649 - DNA, 75 bp, synthetic construct
  source 1..75: mol_type = other DNA
ctttaatcagttccagttgacgctgaaagaggcgctcagaaccgcaggcgtgaagctggatgcgaaagagaacaa

SEQ ID NO: 848650 - DNA, 75 bp, synthetic construct
  source 1..75: mol_type = other DNA
accgccggggagcactttaccccgcgtgatatcgtcaatctgaccacctcgctggtgtttttcgatgatgatgat

SEQ ID NO: 848651 - DNA, 75 bp, synthetic construct
  source 1..75: mol_type = other DNA
ttgcagccttcctgtggtctgtcgccgacctgttacgcggcgattttaaacaatcacaatatggacgaattattc

SEQ ID NO: 848652 - DNA, 75 bp, synthetic construct
  source 1..75: mol_type = other DNA
cgggctttaactggctgaagatgctgcgattgattctgctttccctgattgtcctgtggggggccggtacactgc

SEQ ID NO: 848653 - DNA, 75 bp, synthetic construct
  source 1..75: mol_type = other DNA
atgtggtctatagcattgacggcggctttgaagcctggcagcgtcagtttcctgcagaggtggcgtacggcgcgt

SEQ ID NO: 848654 - DNA, 75 bp, synthetic construct
  source 1..75: mol_type = other DNA
gtttctcttctgagcataacgtgactaagcgtgaacaaggtaaagaatggctgattgaaatcccgtactttttaa

SEQ ID NO: 848655 - DNA, 75 bp, synthetic construct
  source 1..75: mol_type = other DNA
actgattttcaggaaacactcactgatatatatgctgactatgttgctaaacaccacgtagcgtatcagcgtaca

SEQ ID NO: 848656 - DNA, 75 bp, synthetic construct
  source 1..75: mol_type = other DNA
aatcgctttactggtacatggtttctggcccagccgtaaagaacgatcttctatgttccgcgatcggccactaaa

SEQ ID NO: 848657 - DNA, 75 bp, synthetic construct
  source 1..75: mol_type = other DNA
atggcctggcgtacctggaattttgagccggacggtgcgtactggctcaaccgttatatcgcggactacggtatc

SEQ ID NO: 848658 - DNA, 75 bp, synthetic construct
  source 1..75: mol_type = other DNA
agtccctgcccgatggttcatttactcgtgaacaggcagaagcagtggcggcacagtatcagaatgtgacgattg

SEQ ID NO: 848659 - DNA, 75 bp, synthetic construct
  source 1..75: mol_type = other DNA
ataccattaccactattcccacctggtctctggtttctgactcctttaaaaactggagcgggatgtcagcatctg

SEQ ID NO: 848660 - DNA, 75 bp, synthetic construct
  source 1..75: mol_type = other DNA
cggcaatagcagcaaaggggcggcgcagtatctgctgcaacagggctacgatgtggtctacagcattgatggcgg

SEQ ID NO: 848661 - DNA, 75 bp, synthetic construct
  source 1..75: mol_type = other DNA
tctgcgccgggtattcttgttgctggattagcggtgtttattttgatgagtcgaaaatcacgaatgcagccgtgc

SEQ ID NO: 848662 - DNA, 75 bp, synthetic construct
  source 1..75: mol_type = other DNA
aaggttcgacggagtcggtattaaacctgcggcggatgaccaatattgggacgtttcgcgcctatctgaatgaat

SEQ ID NO: 848663 - DNA, 75 bp, synthetic construct
  source 1..75: mol_type = other DNA
gaaattaatgagtggaatcgccagcaaggttctacggagtcggtattaaacctgcgccgaatgaccaatattgga

SEQ ID NO: 848664 - DNA, 75 bp, synthetic construct
  source 1..75: mol_type = other DNA
aagatccgattcttggtctggtggcaggtattcagctttccgcgaacgatatgttgaaactgggcgactggctgg

SEQ ID NO: 848665 - DNA, 75 bp, synthetic construct
  source 1..75: mol_type = other DNA
ccagatgctttggcgtttggctaacgcaattcaagaggatgcacctatcaatttagatagagtgcttggtgcaag

SEQ ID NO: 848666 - DNA, 75 bp, synthetic construct
  source 1..75: mol_type = other DNA
agttattgagagtttacttgctcatacgcctcaattttattggtgtaaactcgaccgcttagaggttattaacac

SEQ ID NO: 848667 - DNA, 75 bp, synthetic construct
  source 1..75: mol_type = other DNA
gggtggacaagcatttgttcgtggtattgagcagcagggaaatatcagcattaaatggctcgaacaaagtaaacc

SEQ ID NO: 848668 - DNA, 75 bp, synthetic construct
  source 1..75: mol_type = other DNA
ggaaagcgtcgctgccgtggaactggcgaatcagtttgtgccggagtgctaccacttgccgatcacttgtaacga

SEQ ID NO: 848669 - DNA, 75 bp, synthetic construct
  source 1..75: mol_type = other DNA
gtaatgaacactcagaaaaacattaaaaaaggtcacaagcaccttatttatagaccaaatgacccacatgaaaat

SEQ ID NO: 848670 - DNA, 75 bp, synthetic construct
  source 1..75: mol_type = other DNA
tagatacttgggtagcagccaatgatcgtagcttacaatataatggtaaagctatagcgcaaatggacggtgtaa

SEQ ID NO: 848671 - DNA, 75 bp, synthetic construct
  source 1..75: mol_type = other DNA
acagcatctgaatttaaaccattgtatcacacatggagtcttgctgtagaagaacagtattatcttgtagcccct

SEQ ID NO: 848672 - DNA, 75 bp, synthetic construct
  source 1..75: mol_type = other DNA
acaaaaaagtctatgtcggaattgtcaacgcattaggagagccaaatgaaaaagacggcccaaaccagcaaattt

SEQ ID NO: 848673 - DNA, 75 bp, synthetic construct
  source 1..75: mol_type = other DNA
attgctttgaaggagtaagtttaactaaaggtcaaaaccaaatagttaagcaaataaatgagtttctaaccgata

SEQ ID NO: 848674 - DNA, 75 bp, synthetic construct
  source 1..75: mol_type = other DNA
actatcgatcgatggggttatggtgtcaccagcgctctttctccttatcatgaaaaccgtatcgcgctggatatc

SEQ ID NO: 848675 - DNA, 75 bp, synthetic construct
  source 1..75: mol_type = other DNA
ggaacgcaaacacatttccgaaagcgaaacccgttttcggaacgccatggaatattccgccatcggcatggcatt

SEQ ID NO: 848676 - DNA, 75 bp, synthetic construct
  source 1..75: mol_type = other DNA
tgataccaatcacttaactaaatatggggcaagttacttaggtgatattttatcaaaaaaaacagatttgtttca

SEQ ID NO: 848677 - DNA, 75 bp, synthetic construct
  source 1..75: mol_type = other DNA
ttgctgcaaagtcgcaatgatcatttgcgccaaacggcattacgcaacgcacataccccggcgtcgttgttaacg

SEQ ID NO: 848678 - DNA, 75 bp, synthetic construct
  source 1..75: mol_type = other DNA
tgcagctcaacgggtcagggataaatatgaagatactgggccttggagcgactttgaatgggggatgctcaatgg

SEQ ID NO: 848679 - DNA, 75 bp, synthetic construct
  source 1..75: mol_type = other DNA
atgcatctaataatgctcgatacatgtgtttggcttgatatttcgtctcaaaaagctgaattgccgatgcttact

SEQ ID NO: 848680 - DNA, 75 bp, synthetic construct
  source 1..75: mol_type = other DNA
attccgcccaaaaatcctgtcgatgcagacaaattactggctgccttgagtagccttgaggtgtactggcaatag

SEQ ID NO: 848681 - DNA, 75 bp, synthetic construct
  source 1..75: mol_type = other DNA
ctgatgttctctctgtttaagaacggtaaaccggtgatgaatataatgctaaaaacgccatcttcaccgtttcgg

SEQ ID NO: 848682 - DNA, 75 bp, synthetic construct
  source 1..75: mol_type = other DNA
gagccttcattgtcagcgaaaaatcaccttgaaaaaaatcaaggtattattaattctaaactaaggaaggtgcga

SEQ ID NO: 848683 - DNA, 75 bp, synthetic construct
  source 1..75: mol_type = other DNA
atggtgagtttaaaatccttcctgcactatttctccccagcgcgtccggcacagccattaagcgaggcggaaaaa

SEQ ID NO: 848684 - DNA, 75 bp, synthetic construct
  source 1..75: mol_type = other DNA
gatggacgacatggagaatctggtggtgggtgtgctgacgctgccctccgcgattactgaatggactgaccgttt

SEQ ID NO: 848685 - DNA, 75 bp, synthetic construct
  source 1..75: mol_type = other DNA
acacgcagcaggaagtgctgacgggtattgatgcggtaaaagccgccattgacgatggcgactggttcggcgcac

SEQ ID NO: 848686 - DNA, 75 bp, synthetic construct
  source 1..75: mol_type = other DNA
acattgactgagcctcaggatcggtcgctggctattaataatccacagctggctgccgatgtgaaaacggagtgg

SEQ ID NO: 848687 - DNA, 75 bp, synthetic construct
  source 1..75: mol_type = other DNA
ggagccttacatgtcactgtgttaaccccaggcgaggttgcctatggggtatacaatactaccgggtatataggc

SEQ ID NO: 848688 - DNA, 75 bp, synthetic construct
  source 1..75: mol_type = other DNA
caagtctgatattacttgctctcagtttaggaaccccaaagagctatgctggtgataagctctacagctcaagct

SEQ ID NO: 848689 - DNA, 75 bp, synthetic construct
  source 1..75: mol_type = other DNA
tattattttgcctgggcgaattatttccccgaacacgcaacttggcccgcgcgtgattgtagaacgtaatttacc

SEQ ID NO: 848690 - DNA, 75 bp, synthetic construct
  source 1..75: mol_type = other DNA
tagagaacttgaggatgctgatactagtatcatctttccactaaaagaaatttcgcaagtttcttggtttgatat

SEQ ID NO: 848691 - DNA, 75 bp, synthetic construct
  source 1..75: mol_type = other DNA
gtgaagtttgacccgctgacaattctcgttcctgagtggcttgattctgtgtcctggggtgagtgggtttcctat

SEQ ID NO: 848692 - DNA, 75 bp, synthetic construct
  source 1..75: mol_type = other DNA
aaaacggggataaccatccccaaaaacagggagaggtatccctgaaaacagggaacaccaaagacattcttccaa

SEQ ID NO: 848693 - DNA, 75 bp, synthetic construct
  source 1..75: mol_type = other DNA
tagtcgatttgcttttatggctttgttctcatctttagctgttcctttaactcagatgtttcttaggaatttcat

SEQ ID NO: 848694 - DNA, 75 bp, synthetic construct
  source 1..75: mol_type = other DNA
tgtcaccagccagacggcgggagtcagtgcagtcactgcaaccatcaacagcagtagtcagagtcagaacgtgac

SEQ ID NO: 848695 - DNA, 75 bp, synthetic construct
  source 1..75: mol_type = other DNA
actgccagcatcaacagcagcagccagagccggaacgtgacgtttgtcgccgatgtcaggacggcgaagatcgct

SEQ ID NO: 848696 - DNA, 75 bp, synthetic construct
  source 1..75: mol_type = other DNA
gccggaatcagtgcggtcactgcaaccatcaacaacagcaccgcgagccagaacgtgatgtttatcgccgatgtc

SEQ ID NO: 848697 - DNA, 75 bp, synthetic construct
  source 1..75: mol_type = other DNA
tggttagcgatgatcagttatttcattgccgccgtagtgattgtctacctgatttttgacagctggcggcatcgt

SEQ ID NO: 848698 - DNA, 75 bp, synthetic construct
  source 1..75: mol_type = other DNA
gtgagtatcgtaaaaagcggcccggcaagtcctcgcgcaaagtccggtccccaaaataactgtgacgcgtgcagt

SEQ ID NO: 848699 - DNA, 75 bp, synthetic construct
  source 1..75: mol_type = other DNA
ttgcgctgacgccggatggcattcagctacaggtcggggaatcaacggtaatcaggctgtcgaaggatggcatca

SEQ ID NO: 848700 - DNA, 75 bp, synthetic construct
  source 1..75: mol_type = other DNA
gatgtcgctgtcgcgtaaaccggaggagacatggtacgggtgggacggcgacaggctgacgacggtgcagactga

SEQ ID NO: 848701 - DNA, 75 bp, synthetic construct
  source 1..75: mol_type = other DNA
cgcctggtgttctacacgcggatacagcatgaggagccactggtcgagagccgctacctctacgacccgctggga

SEQ ID NO: 848702 - DNA, 75 bp, synthetic construct
  source 1..75: mol_type = other DNA
ggtgcgcccgtatgtctctgccgcgctgccgcacgcggtgcgccgttttgagtttatggttatgccgggggaaac

SEQ ID NO: 848703 - DNA, 75 bp, synthetic construct
  source 1..75: mol_type = other DNA
gtgaacggcgaaccggcagagcagtggcggtataacgaccacggctggctgacagaaatcagccatctcagcgaa

SEQ ID NO: 848704 - DNA, 75 bp, synthetic construct
  source 1..75: mol_type = other DNA
ccaagctttcgcccagtgtaaatagcgacacagcgattccaccgcgagatatatttacagctctaccgagcaaag

SEQ ID NO: 848705 - DNA, 75 bp, synthetic construct
  source 1..75: mol_type = other DNA
attaaacgcgctggtggttgcgaatactggtctttcggcttgtatttttgtaaatcgatatatacttatcttgtg

SEQ ID NO: 848706 - DNA, 75 bp, synthetic construct
  source 1..75: mol_type = other DNA
acaggaataaccaacccaatacggaaaatattgagcgtaagaaagcaaacttccggaaaaaaattacattaaatg

SEQ ID NO: 848707 - DNA, 75 bp, synthetic construct
  source 1..75: mol_type = other DNA
gctcagatattgcttcagtctgcatcaaacgataactatcgggtattaaaaccactaatcggcgtaacatataat

SEQ ID NO: 848708 - DNA, 75 bp, synthetic construct
  source 1..75: mol_type = other DNA
tgtaaacttatatgacaaatctgaagctcagatattgcttcagtctgcatcaaacgataactatcgggtattaaa

SEQ ID NO: 848709 - DNA, 75 bp, synthetic construct
  source 1..75: mol_type = other DNA
cttacttggcaaagcattaaatggcgctgttttccttggctcctccttagaaaggttttctccagcaacgaaagc

SEQ ID NO: 848710 - DNA, 75 bp, synthetic construct
  source 1..75: mol_type = other DNA
ataacccagcagtcactttctatttctgcaaatgagattttccgtatggcggctattgcttttatcttacttacg

SEQ ID NO: 848711 - DNA, 75 bp, synthetic construct
  source 1..75: mol_type = other DNA
gtgttcctgccggttcagttatcaggactaacactttcacatcggtcctccggtaagggacgtctcacaggcgag

SEQ ID NO: 848712 - DNA, 75 bp, synthetic construct
  source 1..75: mol_type = other DNA
cgcatcgagacagagaacggcgaactggataaagcgcagcggcgcagcctggtggagaagttacagcaggaaggg

SEQ ID NO: 848713 - DNA, 75 bp, synthetic construct
  source 1..75: mol_type = other DNA
atcttcttcaatacaaattttttggttgctctgtcggaggtgagcttttttttgaaaagttagatagtttagatg

SEQ ID NO: 848714 - DNA, 75 bp, synthetic construct
  source 1..75: mol_type = other DNA
ttcaaataatagggacgactataaaattaagaagaagccgaagacctacgtttcacgacatcactgtaatgattt

SEQ ID NO: 848715 - DNA, 75 bp, synthetic construct
  source 1..75: mol_type = other DNA
ttatcgatacgaatgtactgtctgatttttacgaaggtaaatgcttagatattatctggcaaatttacccgggtg

SEQ ID NO: 848716 - DNA, 75 bp, synthetic construct
  source 1..75: mol_type = other DNA
cagcaaagccgaaagaaaaaccataccgccttctcgatggtaatggcctgtacctttatgtccctgtgtcaggga

SEQ ID NO: 848717 - DNA, 75 bp, synthetic construct
  source 1..75: mol_type = other DNA
cgtacattggaaataataaaagccattgttccaagagaaaaactatgcatacttaaaaatgcaacagatagaaat

SEQ ID NO: 848718 - DNA, 75 bp, synthetic construct
  source 1..75: mol_type = other DNA
ggcaccgcgactattacggctaccactgctgacggtaatttcgccgacacctgtgcagttaccgttactgccgcg

SEQ ID NO: 848719 - DNA, 75 bp, synthetic construct
  source 1..75: mol_type = other DNA
tatgttaaatctgtgttttctaaaatagacttttataaacaatgtggtgtgattaacccacaaaatgccaacacg

SEQ ID NO: 848720 - DNA, 75 bp, synthetic construct
  source 1..75: mol_type = other DNA
atgccggattatcactttaatgaaggacagcttacgttaccggcttcagggcgggactgtaccacacatgttttg

SEQ ID NO: 848721 - DNA, 75 bp, synthetic construct
  source 1..75: mol_type = other DNA
tcgcccaatgcgggcggggatataaggcgaaaagcccgcagggctttaaagatcaatcaggtgttgactgactct

SEQ ID NO: 848722 - DNA, 75 bp, synthetic construct
  source 1..75: mol_type = other DNA
gagcagttaaaacaggtagcatagtaagaactataggtaggggagtgagttatgctgatataccattggccttag

SEQ ID NO: 848723 - DNA, 75 bp, synthetic construct
  source 1..75: mol_type = other DNA
aaccttccatgcgcccctgattgcgggcacgcccgggctggaactggcggtaatctccagcagtgatgaaacaaa

SEQ ID NO: 848724 - DNA, 75 bp, synthetic construct
  source 1..75: mol_type = other DNA
cttggaaacaaatgaaattgatttgcataaggacatgcaaccccagggaatgcttgaacggtacatgtttaagct

SEQ ID NO: 848725 - DNA, 75 bp, synthetic construct
  source 1..75: mol_type = other DNA
aatcgcaacagattggtactatttcgcttactggttataacggaactcctgctgtagctgatctgaatctgagcg

SEQ ID NO: 848726 - DNA, 75 bp, synthetic construct
  source 1..75: mol_type = other DNA
acttagccaggcaaagttcgcggattcaataggtattgcggttggtacagttaagcaatatgagactggtattag

SEQ ID NO: 848727 - DNA, 75 bp, synthetic construct
  source 1..75: mol_type = other DNA
gcttagtcaggcaaagttcgcggattcaataggtattgcggttggtacggttaagcaatacgagactggtattcg

SEQ ID NO: 848728 - DNA, 75 bp, synthetic construct
  source 1..75: mol_type = other DNA
gctcgtttcagggcatataggcatcagggaaaagggttggagtttattatgtgaattattaaaacacgaaaacat

SEQ ID NO: 848729 - DNA, 75 bp, synthetic construct
  source 1..75: mol_type = other DNA
atattgaacccacttgttcagaaatgatgagtttcgaaaaatatgaaaatcgttttaccgaattaagtgaaacta

SEQ ID NO: 848730 - DNA, 75 bp, synthetic construct
  source 1..75: mol_type = other DNA
gtgcgcggtaaaagtgtcatgtttcgctacactgctactctcgatcacgaagaaaacaaagtgatgaatgcggcc

SEQ ID NO: 848731 - DNA, 75 bp, synthetic construct
  source 1..75: mol_type = other DNA
cagaagctgaacaagctacttattcatctcgaaagtaaaagcactggtggtgagcttacaaagacagagatcttc

SEQ ID NO: 848732 - DNA, 75 bp, synthetic construct
  source 1..75: mol_type = other DNA
tagtgagcatgccttcgcaactctttactatggcccgctcttttaaagccgtagctaatggtaaaatttatatcg

SEQ ID NO: 848733 - DNA, 75 bp, synthetic construct
  source 1..75: mol_type = other DNA
ttattggctttgatgcagagggaaacaccatctctacggatggagctggagaagctgcgctgttccattttgaga

SEQ ID NO: 848734 - DNA, 75 bp, synthetic construct
  source 1..75: mol_type = other DNA
atcgcttatctttttcaagatgctaatggcatttcggtatatgaatacaaagggaaggtagaaaacgttttagat

SEQ ID NO: 848735 - DNA, 75 bp, synthetic construct
  source 1..75: mol_type = other DNA
gagaatggcgaggatttaccgacgatttgcttctgcgtgaacgtggctcatgcgaactttgttacccgtgagttt

SEQ ID NO: 848736 - DNA, 75 bp, synthetic construct
  source 1..75: mol_type = other DNA
tgataaggttttatgggattcacggcgcagcatatgctactctcattactgaattattatcatttacattattga

SEQ ID NO: 848737 - DNA, 75 bp, synthetic construct
  source 1..75: mol_type = other DNA
ggcaacggcatcactacgaagtttaatatattttgtttctacttttccgatattaatttattttttcattaaaga

SEQ ID NO: 848738 - DNA, 75 bp, synthetic construct
  source 1..75: mol_type = other DNA
ttgttatcgctggccttggttttctttatacgatattccgtgacagttcttctgatactgaagatttactcacgc

SEQ ID NO: 848739 - DNA, 75 bp, synthetic construct
  source 1..75: mol_type = other DNA
ataaataaatctggcactgaaatttttgaaaaaaatattgtcgtttattatgctcaaaacctgctgaattttgtt

SEQ ID NO: 848740 - DNA, 75 bp, synthetic construct
  source 1..75: mol_type = other DNA
acctcggttgaagtgcacaatttcatcaggtcaaagatcattgcctatgccaaagggcgcaagaaagccatgacc

SEQ ID NO: 848741 - DNA, 75 bp, synthetic construct
  source 1..75: mol_type = other DNA
ttcttacgggcgtttacccagcttaagttgcagcatattcagtttaacgtggtgaacgccgacacgttgcgggaa

SEQ ID NO: 848742 - DNA, 75 bp, synthetic construct
  source 1..75: mol_type = other DNA
aggcacaggatgcactggttaaagcgactgcagaatttaaagagaaaaattgcgtcggactcagtgcttctgcat

SEQ ID NO: 848743 - DNA, 75 bp, synthetic construct
  source 1..75: mol_type = other DNA
aaaatgaggaacgacgccttcaggattcccctgacgggctggtggttgccgcgtcaaaaaacagggcgttcgccg

SEQ ID NO: 848744 - DNA, 75 bp, synthetic construct
  source 1..75: mol_type = other DNA
ttgcgctacgcagtcagcaacgtacggcaaaagcgcaatcctcaggcattctggctgaggagattgttccggttg

SEQ ID NO: 848745 - DNA, 75 bp, synthetic construct
  source 1..75: mol_type = other DNA
gaacttccgaaaagtgcgtgaagctgagcaggctgtgcgcccacttattggcgatgtcgttgcaatggactccgc

SEQ ID NO: 848746 - DNA, 75 bp, synthetic construct
  source 1..75: mol_type = other DNA
gaggccgaaaaggaagacgaaaaagaaaacaaaaccgccgacgatgaagacgacgacgagaaggacaagaaaaaa

SEQ ID NO: 848747 - DNA, 75 bp, synthetic construct
  source 1..75: mol_type = other DNA
atgaaccccacagagtgcttagctttcgatcgcgcctctgtgcgcaccatcgacgcaaatggccgccttcagatt

SEQ ID NO: 848748 - DNA, 75 bp, synthetic construct
  source 1..75: mol_type = other DNA
ctgcaaccaccggcacatggactgaagaagagatccgccatcagcctcgcgcatggatccgttcgctcaccaaca

SEQ ID NO: 848749 - DNA, 75 bp, synthetic construct
  source 1..75: mol_type = other DNA
aggcaacgaaagtaagctgacgctcatcggcaccagcggcaacgcgccgcgcagtatcagcttcagcgggccgtg

SEQ ID NO: 848750 - DNA, 75 bp, synthetic construct
  source 1..75: mol_type = other DNA
tccttgaaccactcggcgcagccacaggatttctgttctgtcagtgggttgcacgtaaggggctgcttgtatgga

SEQ ID NO: 848751 - DNA, 75 bp, synthetic construct
  source 1..75: mol_type = other DNA
ccagctcatccgctgctgttgatctccttcggtcgatccggcaacagcccggaaagcgtcgccgccgtggaactg

SEQ ID NO: 848752 - DNA, 75 bp, synthetic construct
  source 1..75: mol_type = other DNA
gaggggatgttacagcgtttgcaagttccaggcgtcccaggtcagttcggcataaatcataaccttatctcagag

SEQ ID NO: 848753 - DNA, 75 bp, synthetic construct
  source 1..75: mol_type = other DNA
aaaccagtggcgataatgcacacggcctctggagctttggccaggttagcgcgaatgcactcactgttgatgtaa

SEQ ID NO: 848754 - DNA, 75 bp, synthetic construct
  source 1..75: mol_type = other DNA
ggtttctgatatataagaattttgcaaaatacagaaataaaatagttcatgaaaatgtcattgaacctgaaaaat

SEQ ID NO: 848755 - DNA, 75 bp, synthetic construct
  source 1..75: mol_type = other DNA
agtcaatatttattcatggaatgaaaatcagtttacagcagcgtattccaggagtgagtattcagggggtcaggc

SEQ ID NO: 848756 - DNA, 75 bp, synthetic construct
  source 1..75: mol_type = other DNA
ttaaatctgatatcttcggattacgccaagacaggattgacttccggtgcatcaacagcaaatcctgttggtaca

SEQ ID NO: 848757 - DNA, 75 bp, synthetic construct
  source 1..75: mol_type = other DNA
attgcatcgcctccggggcaaccgggaacaatgcaacacctgaatccaggggtgacacagacatatgcaggtatt

SEQ ID NO: 848758 - DNA, 75 bp, synthetic construct
  source 1..75: mol_type = other DNA
aaagccgatgcctgaccgcaccggctttaagaaagtggattatgcgcagtggtgtggcacatattccacagttga

SEQ ID NO: 848759 - DNA, 75 bp, synthetic construct
  source 1..75: mol_type = other DNA
cgtgaaaacctggattaaaaggctcaataaaatggatgatggtaaatcacgtgagttcagcccatttgtggaggt

SEQ ID NO: 848760 - DNA, 75 bp, synthetic construct
  source 1..75: mol_type = other DNA
acgcaccggataccattcaaaaggcagcgtaaatggttacagtaccgggctgtatgctacctggtatgctgatga

SEQ ID NO: 848761 - DNA, 75 bp, synthetic construct
  source 1..75: mol_type = other DNA
tgggcatacatcgaaaaataaccacagggcgcaggcgagctttatctgtaccgcgtgcggctatacggcaaacgc

SEQ ID NO: 848762 - DNA, 75 bp, synthetic construct
  source 1..75: mol_type = other DNA
tagtggacgcttatgggttgctacattttttcattttgggttgaatttgtgccacctgttattttttacctatcc

SEQ ID NO: 848763 - DNA, 75 bp, synthetic construct
  source 1..75: mol_type = other DNA
agacattatgatttcattgataaactcgttatagagaaagatagtggagtttatgacgcaatgaataaaggtata

SEQ ID NO: 848764 - DNA, 75 bp, synthetic construct
  source 1..75: mol_type = other DNA
cgcagaaacgcacgatcgcggctttgcgatgaccagcagcattaccaccatgatggccagctgcctcgcggtttt

SEQ ID NO: 848765 - DNA, 75 bp, synthetic construct
  source 1..75: mol_type = other DNA
cgttcctatctgaagctcaaatgggccgacccctgcgtaacatctctaaggatgaatgggaaaacctccatgcat

SEQ ID NO: 848766 - DNA, 75 bp, synthetic construct
  source 1..75: mol_type = other DNA
gctatggaggggaagatgagcagaaaagtcatgtagagtatttattacctttttttaatgatgagcgctatatta

SEQ ID NO: 848767 - DNA, 75 bp, synthetic construct
  source 1..75: mol_type = other DNA
tcaagtatatttaatggatgtaatatggaaaattattttgatgcaaaaaatgtgatttttaatgaagatttactt

SEQ ID NO: 848768 - DNA, 75 bp, synthetic construct
  source 1..75: mol_type = other DNA
tattcataatgaggataaaccttccttaggttttggtccaacatccaataattggttaagccaatcctttacaac

SEQ ID NO: 848769 - DNA, 75 bp, synthetic construct
  source 1..75: mol_type = other DNA
aaccagctaacatcgctggatgtttctcaacaagaatctctgattgagttaagtgcttgtcacaatatgatcaat

SEQ ID NO: 848770 - DNA, 75 bp, synthetic construct
  source 1..75: mol_type = other DNA
aactcactagtaatccatttaattgggtgctgtcacaggattcagacgatgctccttctgatggtcagtatgatt

SEQ ID NO: 848771 - DNA, 75 bp, synthetic construct
  source 1..75: mol_type = other DNA
tgtatcagtccttcaaaatttcacgagtgttttattaactggatgcgagattgccatacttcagatgataaagac

SEQ ID NO: 848772 - DNA, 75 bp, synthetic construct
  source 1..75: mol_type = other DNA
ttttcagggatacggcacattgctattaatattttgacgaatgataaggtattcaaggcagggttaagacgtaag

SEQ ID NO: 848773 - DNA, 75 bp, synthetic construct
  source 1..75: mol_type = other DNA
gaggaattcgaagcgaaagccgtgaacctctatattgaccgaattttcagcggaaaaccgtttcttattacagag

SEQ ID NO: 848774 - DNA, 75 bp, synthetic construct
  source 1..75: mol_type = other DNA
gataattttaactgtgataaagagcaggaaatagaggtcaggttactacatcagagcattgatatggttgagggt

SEQ ID NO: 848775 - DNA, 75 bp, synthetic construct
  source 1..75: mol_type = other DNA
ttaatgctaagttcctttttactgatgatgatggtctaccttatgccaacacaaaatatattgcatgtttttctg

SEQ ID NO: 848776 - DNA, 75 bp, synthetic construct
  source 1..75: mol_type = other DNA
tattcataatgaggataaaccttccttaggttatggtccaacagccaataattggttaagccaatccttttctac

SEQ ID NO: 848777 - DNA, 75 bp, synthetic construct
  source 1..75: mol_type = other DNA
aaccagtgcgctggatgaaagtaataaacataacgtcaatgagatgatccatcgttatgtgcgcgagcaaaatat

SEQ ID NO: 848778 - DNA, 75 bp, synthetic construct
  source 1..75: mol_type = other DNA
tgcctgatgaattcacacgaacggtcatgttcgaaattgacctggcaagtggtacagatgaagaaatcgcagagt

SEQ ID NO: 848779 - DNA, 75 bp, synthetic construct
  source 1..75: mol_type = other DNA
gtgggaaagaggttaaggagcatcgttatatttctccgtactcctcttacgaatatgaaattccttctggtgcat

SEQ ID NO: 848780 - DNA, 75 bp, synthetic construct
  source 1..75: mol_type = other DNA
gacaaagattaaaagagctttaatgccatatgttaacaaatatgctcctgtcggttcgccaagaagaaataagct

SEQ ID NO: 848781 - DNA, 75 bp, synthetic construct
  source 1..75: mol_type = other DNA
ggttaacagcatgtcgtcgggcaggaattgaaaatttccgttttcatgacctccgccatacctgggccagttggt

SEQ ID NO: 848782 - DNA, 75 bp, synthetic construct
  source 1..75: mol_type = other DNA
tggcgaaagagaacgaatatacagcataactaacgacagcattgtaacggaatcgctcgacagaacgatcattgc

SEQ ID NO: 848783 - DNA, 75 bp, synthetic construct
  source 1..75: mol_type = other DNA
tggtacagtacacagctttgctttaaaccaggtcattattccatattcccgatgcataccgggtttactgccgaa

SEQ ID NO: 848784 - DNA, 75 bp, synthetic construct
  source 1..75: mol_type = other DNA
gcaatgcgagaagccagaagattgttttatgttggtgtaactcgcccccggaaagaattgcatttggtttacgaa

SEQ ID NO: 848785 - DNA, 75 bp, synthetic construct
  source 1..75: mol_type = other DNA
gatgaataactacaacgctcaagaaaaacgagttataggacacattgctgagcgtttattcaatatctatatcat

SEQ ID NO: 848786 - DNA, 75 bp, synthetic construct
  source 1..75: mol_type = other DNA
ggtcagtttccgttgcgtaagtctattgggttgaagtcctgtggctggttgttaagcgatctactttgctggatt

SEQ ID NO: 848787 - DNA, 75 bp, synthetic construct
  source 1..75: mol_type = other DNA
gttaagcaaaatatattcagaaggaacattctatttcgatggcaaaccagtcctcaattggcagtcgaaagttta

SEQ ID NO: 848788 - DNA, 75 bp, synthetic construct
  source 1..75: mol_type = other DNA
cgacgtgtcagtaaacgttatgacgatgtagaagtgatcatcaaatccaccagcaacgatggccttgaaccgccc

SEQ ID NO: 848789 - DNA, 75 bp, synthetic construct
  source 1..75: mol_type = other DNA
gttccatagcattcatgactgaaaaaagggaaatggaaaattatttacatcctgatgctattcaggcggtgtttg

SEQ ID NO: 848790 - DNA, 75 bp, synthetic construct
  source 1..75: mol_type = other DNA
aagcttaaagaaatcttcgttaaattaaatgctgaggagggcaaggttatttgtgaaaaaatatatgacaaactc

SEQ ID NO: 848791 - DNA, 75 bp, synthetic construct
  source 1..75: mol_type = other DNA
gcgcaacatggcgcgccgaaacatttaaccgatctttctgcattgccgtgcctggtcattaaagtgcgcgatcat

SEQ ID NO: 848792 - DNA, 75 bp, synthetic construct
  source 1..75: mol_type = other DNA
acagtgaggccagcgttactgacatcgcctatcattgcggattcagcgacagtaaccacttttcgacgctttttc

SEQ ID NO: 848793 - DNA, 75 bp, synthetic construct
  source 1..75: mol_type = other DNA
tccaagattatactttgtatgctgcctgttctatgtattggtttggtgaagttattcgctatttgttctcaattg

SEQ ID NO: 848794 - DNA, 75 bp, synthetic construct
  source 1..75: mol_type = other DNA
caatgacgcaacatttgcaggaaatcagcgaatccgtgcgccagatccgtcaggaaaacagcgactggtttagcg

SEQ ID NO: 848795 - DNA, 75 bp, synthetic construct
  source 1..75: mol_type = other DNA
tacagcatttaaatcccgtttgctaagggccagaaagcacctgaaagagacgatgaaagaactctgccagattca

SEQ ID NO: 848796 - DNA, 75 bp, synthetic construct
  source 1..75: mol_type = other DNA
gtcgctgctgagcttgatattaaaaataacgagaaaaatattcacctggcagtaatttcgcaaaatggatgttgc

SEQ ID NO: 848797 - DNA, 75 bp, synthetic construct
  source 1..75: mol_type = other DNA
gcatcgccagctgcgccggcatcaggaacactttgccatcgcgggtcgacggccaggcgaagcggccacgctcca

SEQ ID NO: 848798 - DNA, 75 bp, synthetic construct
  source 1..75: mol_type = other DNA
ccatgaaagagtgcactgaagcgcatcaggcgaagttacttggtcagccgatacaacgccttgagaaagaggtga

SEQ ID NO: 848799 - DNA, 75 bp, synthetic construct
  source 1..75: mol_type = other DNA
tcccagatttttttccgcacgtagcggtggatatatcaatatacacaaatgtagaagatgattattttttcttat

SEQ ID NO: 848800 - DNA, 75 bp, synthetic construct
  source 1..75: mol_type = other DNA
gaaagcagcacatcagcttacatggcaacaagcgccgaaatcatcaggaccgctaaatgattctgacctggatca

SEQ ID NO: 848801 - DNA, 75 bp, synthetic construct
  source 1..75: mol_type = other DNA
tgacccgttcgcccaggaggaagcacggcaggccattattgatgccgttgacctgctacttgcccatccagaggc

SEQ ID NO: 848802 - DNA, 75 bp, synthetic construct
  source 1..75: mol_type = other DNA
atgagtgatgtaacggcattcaacaactgcatgagcgtgttctggcggcaacatgaagccgaactctctcgcttt

SEQ ID NO: 848803 - DNA, 75 bp, synthetic construct
  source 1..75: mol_type = other DNA
ggatcatcgtgaaaccgtaaatcagaaccgtgcagcaagatacatccgcaaaatctgcgaaatgatggttactgg

SEQ ID NO: 848804 - DNA, 75 bp, synthetic construct
  source 1..75: mol_type = other DNA
gagccgtaagcgtattgaagaaacctgctgggaactgctgatgaacggttatctcaattgcgaagatttaatcga

SEQ ID NO: 848805 - DNA, 75 bp, synthetic construct
  source 1..75: mol_type = other DNA
tcaggggcagggattattaatgtaacatggaatggaaaagtctgttcatttcctttttcagaaaaagatatatct

SEQ ID NO: 848806 - DNA, 75 bp, synthetic construct
  source 1..75: mol_type = other DNA
gcacaggcactttatggttcgaccacccgctcccctatcgccgttggttatgccattgagtccgccatttccttt

SEQ ID NO: 848807 - DNA, 75 bp, synthetic construct
  source 1..75: mol_type = other DNA
atgtcagcaattgatgggaatttcgtttatcaaaagacattatcctgtgggcgaattgaggtaagcagcgaggtc

SEQ ID NO: 848808 - DNA, 75 bp, synthetic construct
  source 1..75: mol_type = other DNA
gccgccggtgaattcagcggcgaaatcaccggcgtgacggatggtgccgggcgtcacttccggctggtgcaaaat

SEQ ID NO: 848809 - DNA, 75 bp, synthetic construct
  source 1..75: mol_type = other DNA
aaatttaaagaattatatatcatcagatttaatatatgatcatgagcatggagcaactatttctaaatataacaa

SEQ ID NO: 848810 - DNA, 75 bp, synthetic construct
  source 1..75: mol_type = other DNA
atgaaaacgggatctgagtttcatgtcggtatcgttggcttagggtcaatgggaatgggagcagcactgtcatgt

SEQ ID NO: 848811 - DNA, 75 bp, synthetic construct
  source 1..75: mol_type = other DNA
gcctgctctctgacattgcgcaaagttttcacatgcaaaccgctcaggtcggcatcatgttgaccatttacgcat

SEQ ID NO: 848812 - DNA, 75 bp, synthetic construct
  source 1..75: mol_type = other DNA
actgatgagttcggcacaatcattcaaacattacgtgaacacaatgtaagtttcgaaaaaacccccaatctactt

SEQ ID NO: 848813 - DNA, 75 bp, synthetic construct
  source 1..75: mol_type = other DNA
gtattatcactggagtttcaagcactggacctttatcgattcatatcgtgaacaacaggagaaaattaatggcaa

SEQ ID NO: 848814 - DNA, 75 bp, synthetic construct
  source 1..75: mol_type = other DNA
aatatgattacttatgggaaaagattttgaagaaaaaaatcaataaaacacaatatcctggagcatttgtagact

SEQ ID NO: 848815 - DNA, 75 bp, synthetic construct
  source 1..75: mol_type = other DNA
atgataaaaaatcgcatggctcaattgtttacccaattggatgcttctgtgcgcaacaaatatcgcccggctttt

SEQ ID NO: 848816 - DNA, 75 bp, synthetic construct
  source 1..75: mol_type = other DNA
cggcgttatctgctcaatatcacaggacgcctcggcgctgtatcctgcgggattttccgtggttgagacagacga

SEQ ID NO: 848817 - DNA, 75 bp, synthetic construct
  source 1..75: mol_type = other DNA
taaaaaaaacagcgttatccggagatgaagaaagcattgagttactgcataatattgcgttaggttatgataaat

SEQ ID NO: 848818 - DNA, 75 bp, synthetic construct
  source 1..75: mol_type = other DNA
acaaacagatgaccgttcaccacttaatgaggaaaccaccagcaatgtgcagatggaagaaactgtcagtgatga

SEQ ID NO: 848819 - DNA, 75 bp, synthetic construct
  source 1..75: mol_type = other DNA
tctggaagtccgcgttcgtccagaccttgagatcgacctggacggagtgcgcatcggtgccgacctgaaaaccat

SEQ ID NO: 848820 - DNA, 75 bp, synthetic construct
  source 1..75: mol_type = other DNA
tcgctaccggctttgacactggcgaatggccagcgcccatcacagctgattataccgacgaactgaacgacttcg

SEQ ID NO: 848821 - DNA, 75 bp, synthetic construct
  source 1..75: mol_type = other DNA
actgaaagtgtccggtaccaaagcagacatgatccaggccgtgaaggcagtcaaaccagatgccgtatttgccga

SEQ ID NO: 848822 - DNA, 75 bp, synthetic construct
  source 1..75: mol_type = other DNA
aaaacgacgatgggttaacacgctatccggtctgcaaaatgccattccgcaaacagctgcttgcccagttgacgg

SEQ ID NO: 848823 - DNA, 75 bp, synthetic construct
  source 1..75: mol_type = other DNA
tcgccatcatcgaggcatccgctgaactactggagctgggtatgctcgagtaccgcaaagcgatgcgcaatatcg

SEQ ID NO: 848824 - DNA, 75 bp, synthetic construct
  source 1..75: mol_type = other DNA
cagataaccgttcaccacttaatgaggaaaccaccagcaatgtgcagatggaagaaactgtcagtgatgaagaac

SEQ ID NO: 848825 - DNA, 75 bp, synthetic construct
  source 1..75: mol_type = other DNA
tgctgctggctgctgagaatgtggaagcattcaaaaaagccattgagcacgatattcataaagtcgtgaatgctg

SEQ ID NO: 848826 - DNA, 75 bp, synthetic construct
  source 1..75: mol_type = other DNA
gacgccccctacacacctactccgaccgtaatcgttgaagatgcgactgcgtccgaaattgtcccggttgaaaac

SEQ ID NO: 848827 - DNA, 75 bp, synthetic construct
  source 1..75: mol_type = other DNA
aaggcgcgttcaccacgacggcaacaatccgcgcgtttatcgatgagtacaacgcaggtctgccagagcaattga

SEQ ID NO: 848828 - DNA, 75 bp, synthetic construct
  source 1..75: mol_type = other DNA
gcagccagagcagcttgatgaagagttcagcgttgaaccgatgatcccggaaggcgcgttcaccacgacggcaac

SEQ ID NO: 848829 - DNA, 75 bp, synthetic construct
  source 1..75: mol_type = other DNA
caacaccgagcatatcgatcgcggcattctcgttcgcgaatgggctgccggaaaccgaattagcagcgtgcagcg

SEQ ID NO: 848830 - DNA, 75 bp, synthetic construct
  source 1..75: mol_type = other DNA
ggtcgagacagagaacggcgagcgggaaaaagcgcagcggcgcagcctggcagagacgctccagcaggaagggag

SEQ ID NO: 848831 - DNA, 75 bp, synthetic construct
  source 1..75: mol_type = other DNA
ggtgatccggggcactacagtgaatgcctgtacaacatcgaagaaattatgcgatggatcgaaaaccagaaacaa

SEQ ID NO: 848832 - DNA, 75 bp, synthetic construct
  source 1..75: mol_type = other DNA
ggaggccgggctcccgataaagaagcaagcatagatcaactaaaaaagacaactcgtagcataggaatatatcca

SEQ ID NO: 848833 - DNA, 75 bp, synthetic construct
  source 1..75: mol_type = other DNA
aagccagaagtttaccgggcgtactggcgatttttacctgggaagatgtgcctgatattccattcgctacagctg

SEQ ID NO: 848834 - DNA, 75 bp, synthetic construct
  source 1..75: mol_type = other DNA
tgactaccccggacgtttcaagggcgcccacgggcagaactttgcccgctggcagatggagggctggcgaaacaa

SEQ ID NO: 848835 - DNA, 75 bp, synthetic construct
  source 1..75: mol_type = other DNA
gccgatcattatggggcgcacctaccaccaggaaaaccgcacccccggcagcctgccggggacaaagacgcagat

SEQ ID NO: 848836 - DNA, 75 bp, synthetic construct
  source 1..75: mol_type = other DNA
acggtcacgatccaggaaggtaaccgccttcttacggtggaaaaaggccacaagatcaccggagtactgaaaggg

SEQ ID NO: 848837 - DNA, 75 bp, synthetic construct
  source 1..75: mol_type = other DNA
tatatcgacagaattgggcgacggaaagggctgatggttaccctggcgattatgggctgcggcacgatgctcatc

SEQ ID NO: 848838 - DNA, 75 bp, synthetic construct
  source 1..75: mol_type = other DNA
acgctgggacacgatgaaatctccgaatggggttggcgaatcccgttcttcattggctgcatgattattccgctg

SEQ ID NO: 848839 - DNA, 75 bp, synthetic construct
  source 1..75: mol_type = other DNA
tggctcatgtgcgcggcgctatgcggactcgccgcaacggcaatgctgtttgttcgtctcagccgtggctatcag

SEQ ID NO: 848840 - DNA, 75 bp, synthetic construct
  source 1..75: mol_type = other DNA
tgtacgttgccctatcgcacatggttatgccgtaagtattaatgatgaacaagccagaagtttgccgggcgtact

SEQ ID NO: 848841 - DNA, 75 bp, synthetic construct
  source 1..75: mol_type = other DNA
catatcagttgcccgcctgcttaaactgcgtgggcagcatcagagccagtcagtatcaccggtaggctgccagaa

SEQ ID NO: 848842 - DNA, 75 bp, synthetic construct
  source 1..75: mol_type = other DNA
tttcccgcacatgcggtcgcagatcatcaactctgcggatgacatagacctctctgacgtggtggtgtcgagctc

SEQ ID NO: 848843 - DNA, 75 bp, synthetic construct
  source 1..75: mol_type = other DNA
ggacacccgcgccggtgggggtgtttggtcccggctggaaagcccccttcgatatccgcttacagatacgcgatg

SEQ ID NO: 848844 - DNA, 75 bp, synthetic construct
  source 1..75: mol_type = other DNA
cgatgccattcaggtgatcattggtctgcatgtatcccagctgcgtgaacagctcgatagcttaattaattctca

SEQ ID NO: 848845 - DNA, 75 bp, synthetic construct
  source 1..75: mol_type = other DNA
tagtgtttttatcaatgacaataaattatgtagtgataaaaaaagacggctggttttgaaaggcattaaggagaa

SEQ ID NO: 848846 - DNA, 75 bp, synthetic construct
  source 1..75: mol_type = other DNA
aaaatagatgctcatattattacatttgtagcaaaaatgccgtatattgattcaataaaattgcttgaagcaggt

SEQ ID NO: 848847 - DNA, 75 bp, synthetic construct
  source 1..75: mol_type = other DNA
gtaccattgtgaatagtgatgggctgcaggatgtttacggaggcggcagtacgacaagtactaccattaactctg

SEQ ID NO: 848848 - DNA, 75 bp, synthetic construct
  source 1..75: mol_type = other DNA
acttgattgggatcatatggataaggcaggcactgtagatggcaactatgtaaactatagtggttttgtcggtga

SEQ ID NO: 848849 - DNA, 75 bp, synthetic construct
  source 1..75: mol_type = other DNA
gattcccgcaaccttaaccgccatgctggtgggaattaccgaaccgctggaatttaccttcctgttcatttcacc

SEQ ID NO: 848850 - DNA, 75 bp, synthetic construct
  source 1..75: mol_type = other DNA
ctggagtgtactgcggatgagcttgctagtgcgaaatttcttcactattcatgtgaaatcgaagcactcaaagcg

SEQ ID NO: 848851 - DNA, 75 bp, synthetic construct
  source 1..75: mol_type = other DNA
aaaagaactgcacatggtttatgaaaagggtaaacattcaccttggattgcggaactgtatcatcgcagccagca

SEQ ID NO: 848852 - DNA, 75 bp, synthetic construct
  source 1..75: mol_type = other DNA
aggctctgaatgagctattgccgaacagagagcaatacgctgcggccacataccccggccactgcgtagttattg

SEQ ID NO: 848853 - DNA, 75 bp, synthetic construct
  source 1..75: mol_type = other DNA
aacacgcatatcgtattgagttcgacggagtgttaagccttttcaatgagcaattaatccagatattcaaagagg

SEQ ID NO: 848854 - DNA, 75 bp, synthetic construct
  source 1..75: mol_type = other DNA
ccaattgatcaattagtatggaccaaactaagttatattttcggagattaccatccatacgatacatctttcgat

SEQ ID NO: 848855 - DNA, 75 bp, synthetic construct
  source 1..75: mol_type = other DNA
gtgatggctggcgcgtgctcgcgcaggcgcagcagtcaacatcgccctggcagcgtttggccctcgggatgctct

SEQ ID NO: 848856 - DNA, 75 bp, synthetic construct
  source 1..75: mol_type = other DNA
tttttgttctgttgtattttacatctaaagttacgtggccctttagtggaaaaaatgcacatccaattaactttg

SEQ ID NO: 848857 - DNA, 75 bp, synthetic construct
  source 1..75: mol_type = other DNA
ttaagacgtaagatgcaaaaagcagccatggagagaaactatctggcgtcagtccttgcggggaacgggctttcg

SEQ ID NO: 848858 - DNA, 75 bp, synthetic construct
  source 1..75: mol_type = other DNA
gcaattgttgatatcccggaatacggtgctgagcgttgtggcatgaccgttcattttctgccatgcaatcagata

SEQ ID NO: 848859 - DNA, 75 bp, synthetic construct
  source 1..75: mol_type = other DNA
tttttgtgatggtgactgaagcaatttggctacttttgcaatgtgacaagttatggcacggctggctggtggcga

SEQ ID NO: 848860 - DNA, 75 bp, synthetic construct
  source 1..75: mol_type = other DNA
agggctaccactgagcgcaatgtggcatcagggaaataataatatttatgtcagatccctgctggatatgctttc

SEQ ID NO: 848861 - DNA, 75 bp, synthetic construct
  source 1..75: mol_type = other DNA
atgattttttttggcctcaatgatgtagcagaaggcgatctgtttgaaattgcattgatggatgatgcaacaaac

SEQ ID NO: 848862 - DNA, 75 bp, synthetic construct
  source 1..75: mol_type = other DNA
tgtaccagctactttggtcattccagcgatacaccggaaaagaatccgcagtggcttcagctacgcacgcagatt

SEQ ID NO: 848863 - DNA, 75 bp, synthetic construct
  source 1..75: mol_type = other DNA
gattattggctcattttggctttattgggcttataccggaaaagcaaaaatgatagtagtaggtgggatattcag

SEQ ID NO: 848864 - DNA, 75 bp, synthetic construct
  source 1..75: mol_type = other DNA
ttatgattcaaactataccatttgcaaacaatttgactgacttattatatggtagatttatttttggttttttag

SEQ ID NO: 848865 - DNA, 75 bp, synthetic construct
  source 1..75: mol_type = other DNA
aattttcggtgactatagttccattatctcatctttagtagtatttattaatgtgtttgttgtatgtgtgctatc

SEQ ID NO: 848866 - DNA, 75 bp, synthetic construct
  source 1..75: mol_type = other DNA
gcggtatggcttacagccgtgtgtcgactttctccggggattatctccgcgtaactgacaacaaggggaaaacgc

SEQ ID NO: 848867 - DNA, 75 bp, synthetic construct
  source 1..75: mol_type = other DNA
cattcgcagcttggtctctgtctctattgtattgggttttatctaatattgaaaatcctaattattcaatgaaca

SEQ ID NO: 848868 - DNA, 75 bp, synthetic construct
  source 1..75: mol_type = other DNA
caacacaaaacgccacaatctcctgggattatttactaaaaataacgcctgttttaataagcattagcgatatgt

SEQ ID NO: 848869 - DNA, 75 bp, synthetic construct
  source 1..75: mol_type = other DNA
attaccaccatgatggccagctgcctcgcggttttcgcacctgagacgatcaacagccaaaccttccgcgacgtg

SEQ ID NO: 848870 - DNA, 75 bp, synthetic construct
  source 1..75: mol_type = other DNA
cacgtatcgcttcctccttcattggtacgaacatcttgtctgtgattacaatcagaccattcctggcgcaaaaat

SEQ ID NO: 848871 - DNA, 75 bp, synthetic construct
  source 1..75: mol_type = other DNA
gccatggaacaacaggcgcgggcggaacattctttgctggaatgcgtgcgtaccgtgctggtggcgcaggcaggc

SEQ ID NO: 848872 - DNA, 75 bp, synthetic construct
  source 1..75: mol_type = other DNA
ttgccttacccactaggaatgctgggtggatattgctttgatatcctgagcaaaattacgggcaaaaaatacgct

SEQ ID NO: 848873 - DNA, 75 bp, synthetic construct
  source 1..75: mol_type = other DNA
cgccacagcgatccgaaatcactggcacgtggagaataagctgcactggcgtctggacgtggtaatgaatgaaga

SEQ ID NO: 848874 - DNA, 75 bp, synthetic construct
  source 1..75: mol_type = other DNA
ggcgatgtgcgtatatacaatgccaaaacagaaacgttcgaagatgtgttaggtgagtacgggatggggaaagaa

SEQ ID NO: 848875 - DNA, 75 bp, synthetic construct
  source 1..75: mol_type = other DNA
cgggcttctggacgaaaacaaaaatacgatcgctggtaggatagctctgcgtgaatatagttttgttgaagacgg

SEQ ID NO: 848876 - DNA, 75 bp, synthetic construct
  source 1..75: mol_type = other DNA
gcgaactgccgatgcggataaaccgctttatcgaggtattgccgccatcgccggcaacgctgtacagcatttatc

SEQ ID NO: 848877 - DNA, 75 bp, synthetic construct
  source 1..75: mol_type = other DNA
ttcccgccaatcaagctgttcgggtacgacaaagcggccaacagcctgctggaaaaaattgaggtcttctacgag

SEQ ID NO: 848878 - DNA, 75 bp, synthetic construct
  source 1..75: mol_type = other DNA
cattcacggatcgtaaattccggccaccgctgcgaatgccgaaagactgcgaaatgttcgacgacaccctgacca

SEQ ID NO: 848879 - DNA, 75 bp, synthetic construct
  source 1..75: mol_type = other DNA
ttactgcttatttatcgtaagggtattaaagatgatctgtctccccaggaaaaagcaatgctccggttgttaaat

SEQ ID NO: 848880 - DNA, 75 bp, synthetic construct
  source 1..75: mol_type = other DNA
gtgcggagattaaaaaattgagtcatttacccgccagcattttccagatttcacgtagcgacgcctggaatttaa

SEQ ID NO: 848881 - DNA, 75 bp, synthetic construct
  source 1..75: mol_type = other DNA
tcataattgctggcacgtccaaaaaaacaggtgcggagattaaaaaattgagtcatttacccgccagcattttcc

SEQ ID NO: 848882 - DNA, 75 bp, synthetic construct
  source 1..75: mol_type = other DNA
ctgctgatttaaccgcagagaagttcgccacagcgttccgaaatcactggcacgtggagaataaactgcactggc

SEQ ID NO: 848883 - DNA, 75 bp, synthetic construct
  source 1..75: mol_type = other DNA
ctgaccgataaggggttacggtatgcagggtatggtgttgccgtaaatcacgatgcagacagccacatatcacct

SEQ ID NO: 848884 - DNA, 75 bp, synthetic construct
  source 1..75: mol_type = other DNA
tgaggcaccgctttttgctgccgtcaacacaccagaaaaacagccggatcatctgttccgctcgctgggttttaa

SEQ ID NO: 848885 - DNA, 75 bp, synthetic construct
  source 1..75: mol_type = other DNA
tccaccactgcaacgtgtttattcctctgcgacctttgagcaactgctgacgcaggtttgccagacatggccgca

SEQ ID NO: 848886 - DNA, 75 bp, synthetic construct
  source 1..75: mol_type = other DNA
agaggaattgcgccggaaggagcaggaggaaacagaacgtcgtcgggcggagcagctcaggagaaatgacaatgc

SEQ ID NO: 848887 - DNA, 75 bp, synthetic construct
  source 1..75: mol_type = other DNA
cgaactctggaatgccgttgagaaggccgaacgccggaagaactcacaacttgcgcgggaaattgaactcgctat

SEQ ID NO: 848888 - DNA, 75 bp, synthetic construct
  source 1..75: mol_type = other DNA
ggagcgcagttaccaggaacatatcatgtagacatcatattaaatgattcaatagtcgaatcgcgtgaaatgttt

SEQ ID NO: 848889 - DNA, 75 bp, synthetic construct
  source 1..75: mol_type = other DNA
atgataccttatgatcagcgtggatttgctcctgtaattagaggtattgcacgtactcaagcccggattgaaata

SEQ ID NO: 848890 - DNA, 75 bp, synthetic construct
  source 1..75: mol_type = other DNA
agcatacgtcgctgggacaggccacacttatgtatggtctgccgtgggggctgacagtattcggtggtgttcagg

SEQ ID NO: 848891 - DNA, 75 bp, synthetic construct
  source 1..75: mol_type = other DNA
cacctgaagatgagacaaatcgtaataccagtcgtctgaacctgacgtggtacgggacatacggggaagctacgg

SEQ ID NO: 848892 - DNA, 75 bp, synthetic construct
  source 1..75: mol_type = other DNA
tgaaggcgcagtgggggacaaacagtcagtgctatgcggactacaaactgccactaaaaaagggaatgtcaggaa

SEQ ID NO: 848893 - DNA, 75 bp, synthetic construct
  source 1..75: mol_type = other DNA
aatgtatagttacaatcgtaacacacgccagatgaacgttgggacgtctggaagcatggctatacatagtggagg

SEQ ID NO: 848894 - DNA, 75 bp, synthetic construct
  source 1..75: mol_type = other DNA
tggtgaccatggcctttttccgcaatgagccaattaccgatgtggttcgccgtctgaacctgagcgcggatggcg

SEQ ID NO: 848895 - DNA, 75 bp, synthetic construct
  source 1..75: mol_type = other DNA
caaaacgctggctaagcttgccaatcatgcggcaaaaaaatggcagcggcagacggggggtgcccctattaagtt

SEQ ID NO: 848896 - DNA, 75 bp, synthetic construct
  source 1..75: mol_type = other DNA
cagtaatactgaggtctacagtattgatgaagttttcctttcgtttgaaggaatgcagaaaaattataattttga

SEQ ID NO: 848897 - DNA, 75 bp, synthetic construct
  source 1..75: mol_type = other DNA
taattgcttattatttggttgctgataattcaatatcccctcgtgatgcatgggatgctgctgtcgctgaggtta

SEQ ID NO: 848898 - DNA, 75 bp, synthetic construct
  source 1..75: mol_type = other DNA
tcgcattgatgatgaggatatgcttcagtatgtcagggaagctgttaattcgtcttctccaaaagtgattttcat

SEQ ID NO: 848899 - DNA, 75 bp, synthetic construct
  source 1..75: mol_type = other DNA
gaatgttatttcagcaacgtgtgtctgtatctttcttttgttaagtgcattctatgctccggttgggatgattta

SEQ ID NO: 848900 - DNA, 75 bp, synthetic construct
  source 1..75: mol_type = other DNA
taatattgttacgcttgccagaaaagccggatatgagacgtggtggatatcaaatcagggctctttagggcgaca

SEQ ID NO: 848901 - DNA, 75 bp, synthetic construct
  source 1..75: mol_type = other DNA
aaagcggtgggaaaaaccgcactgtatttaagccagatggccggtttttgtgtgcccgccagtaccagagtactg

SEQ ID NO: 848902 - DNA, 75 bp, synthetic construct
  source 1..75: mol_type = other DNA
tcacaaaggctacctttacgtgaatgattataaaacggggtttgtcgccaatgatgacgcctgtaaattactgga

SEQ ID NO: 848903 - DNA, 75 bp, synthetic construct
  source 1..75: mol_type = other DNA
aaacccgatgataccaaacccggtgattatcgcttttgataagcgtgtgcgttttgaaccgcttacagataatgg

SEQ ID NO: 848904 - DNA, 75 bp, synthetic construct
  source 1..75: mol_type = other DNA
tagctcaatgcctcctcgtgatgcatgggatgcagctgtcgcagaggttacagaaagcgaatcgtcaagaaagaa

SEQ ID NO: 848905 - DNA, 75 bp, synthetic construct
  source 1..75: mol_type = other DNA
tgttattttctgtaattatttcatggtgttgtggatatacagagaagaatgcatttggtaatattattctgttgt

SEQ ID NO: 848906 - DNA, 75 bp, synthetic construct
  source 1..75: mol_type = other DNA
gattcaccatgcgtttttttatttacaaactcttcgccagacaaacaaccattaactggctgaattgtgaggtat

SEQ ID NO: 848907 - DNA, 75 bp, synthetic construct
  source 1..75: mol_type = other DNA
gccaaagaatccacattggacgtgtgatggaacactaacgaatgaacaaactggagccttaaaaaaagtgacagt

SEQ ID NO: 848908 - DNA, 75 bp, synthetic construct
  source 1..75: mol_type = other DNA
tggggcatgttgctggcttacaacctgatacggcgtgaggcaacaaaagcggctgagaaacacaaaaaagcggcg

SEQ ID NO: 848909 - DNA, 75 bp, synthetic construct
  source 1..75: mol_type = other DNA
gaccgctacaaagcaaaagaggtagcggaactttaccattcacgatggcacgatgggaaatcgaagtcgggttca

SEQ ID NO: 848910 - DNA, 75 bp, synthetic construct
  source 1..75: mol_type = other DNA
ccagctggttcgtgtggacaacattatttcccgtctggaagaaagtaaaaaaataacgctagataccctggaaaa

SEQ ID NO: 848911 - DNA, 75 bp, synthetic construct
  source 1..75: mol_type = other DNA
acaacgtctgcaatacacagatgcgtttcgtcgctcatcagatattatacagcgtgcagaggaagggataaaaat

SEQ ID NO: 848912 - DNA, 75 bp, synthetic construct
  source 1..75: mol_type = other DNA
tgtttatctgattgacatcagtaaaagtacacgtagtggtattgtcactgataatcatcggcgggatatagaaaa

SEQ ID NO: 848913 - DNA, 75 bp, synthetic construct
  source 1..75: mol_type = other DNA
agccatcgcaatatcacgccctgaagcaccaccagaaacagaatctaattcatttagagtcagagttctcatatg

SEQ ID NO: 848914 - DNA, 75 bp, synthetic construct
  source 1..75: mol_type = other DNA
acgtcgcagtggaaagagcaacagtcttagtcgattacaactggatagtataacccctattgaacaggagaagga

SEQ ID NO: 848915 - DNA, 75 bp, synthetic construct
  source 1..75: mol_type = other DNA
aggggcgaccggagaatagaagagcttcagtttataccttatgttcaacgaactcaccctgaggtattaactttt

SEQ ID NO: 848916 - DNA, 75 bp, synthetic construct
  source 1..75: mol_type = other DNA
atggagatggactttaaaatgcacaatgatctgggtctcggtttcatttgtaaaaatgcaagaacatcgtcaaag

SEQ ID NO: 848917 - DNA, 75 bp, synthetic construct
  source 1..75: mol_type = other DNA
ccgtgatgctggcaccgaagtccacgcagacggtgaaatccggaacatacagcacgccgtacctgagctacatca

SEQ ID NO: 848918 - DNA, 75 bp, synthetic construct
  source 1..75: mol_type = other DNA
gttcttccatatgggaatgggattccgtcgccgcgttcgtatgttttctgtagatccagcaacacatctggcgcg

SEQ ID NO: 848919 - DNA, 75 bp, synthetic construct
  source 1..75: mol_type = other DNA
tatgttcagagtattgtctgaatatccactttttggcatcgggttaggtaatcttgacgtctttagaagtgataa

SEQ ID NO: 848920 - DNA, 75 bp, synthetic construct
  source 1..75: mol_type = other DNA
gtaagcctgatccgttcaaagtgccggaaggtgagggcgagcgttatcgtgatgaccttgccagaatgatgaagt

SEQ ID NO: 848921 - DNA, 75 bp, synthetic construct
  source 1..75: mol_type = other DNA
ctttaccggaaggagaaattaagccgcgataaccctcagtacagtgggctccaattgcccaaagaggagcgttct

SEQ ID NO: 848922 - DNA, 75 bp, synthetic construct
  source 1..75: mol_type = other DNA
ccggtcccgcaggttgaagcggttgcccgtggcgtgatgagtggcattaaggacagtgacctgaaggtccgcgtg

SEQ ID NO: 848923 - DNA, 75 bp, synthetic construct
  source 1..75: mol_type = other DNA
gcggaaaaatagatgacagcaataacgcctatatggctgaagaactcttccacgggaaggcggaaaacgacctga

SEQ ID NO: 848924 - DNA, 75 bp, synthetic construct
  source 1..75: mol_type = other DNA
cggatgcaatttaccgttccgcgacagaaagaaatgcggttgtgatgctgcttgatgccatggataaaaatggtg

SEQ ID NO: 848925 - DNA, 75 bp, synthetic construct
  source 1..75: mol_type = other DNA
agacggcggtgatgaacctgaaggcggagcagggaaggagcgacggcaaactgaaagggctggataacttatccg

SEQ ID NO: 848926 - DNA, 75 bp, synthetic construct
  source 1..75: mol_type = other DNA
ggatatgatgattcagcggtctgggtagcgaaaggggttaacctgattggtgcgcttgtaccggatatggttgca

SEQ ID NO: 848927 - DNA, 75 bp, synthetic construct
  source 1..75: mol_type = other DNA
agttttttctcttctagaaaaaaataaaaatgattacaaatttatattatgttctgcgtcattagatataatagt

SEQ ID NO: 848928 - DNA, 75 bp, synthetic construct
  source 1..75: mol_type = other DNA
tccagaaaagaaacagcataatgtaattttattacaaaaggcgacaattagcttgaaaaacgccgttattgggtg

SEQ ID NO: 848929 - DNA, 75 bp, synthetic construct
  source 1..75: mol_type = other DNA
gggctggataacttatccgcactggctgtggtgaaagacagccgttctgctatgtcagccgtatacgccagtctg

SEQ ID NO: 848930 - DNA, 75 bp, synthetic construct
  source 1..75: mol_type = other DNA
ggcgtggctgacgcaacgatcgaaggtgcagcccttggtgctgcaatgggggcaccattcggtgcggctgccgga

SEQ ID NO: 848931 - DNA, 75 bp, synthetic construct
  source 1..75: mol_type = other DNA
cagccagtgcacaggggcagagtgcaatggcggcagcagatgctgttcttaatgcggattactctgagctggcgc

SEQ ID NO: 848932 - DNA, 75 bp, synthetic construct
  source 1..75: mol_type = other DNA
gaatcttgccatgaacgaaaacttcatgggggcgcagatttaccaggagaacatgccgtttggtacaccaaaacc

SEQ ID NO: 848933 - DNA, 75 bp, synthetic construct
  source 1..75: mol_type = other DNA
cggggggcagggccggagagtactggagtattcctctgccttacgggtacaacgttttcttcctgctcgggcata

SEQ ID NO: 848934 - DNA, 75 bp, synthetic construct
  source 1..75: mol_type = other DNA
gccggtattgcgtcaccttggcgcaccagatttgccgctggttatctcccgcgacactgtgcgtaaggccaccaa

SEQ ID NO: 848935 - DNA, 75 bp, synthetic construct
  source 1..75: mol_type = other DNA
aggagatgcgtgagatttcccgtgaggagcagcgtaacgccaccaaccgcgatcgtaccgggccagaacgccgca

SEQ ID NO: 848936 - DNA, 75 bp, synthetic construct
  source 1..75: mol_type = other DNA
caaccatctttaagaggtttacaaatttccccgaaagcccgctccctcatcctctggacagaacgaggcgcagcc

SEQ ID NO: 848937 - DNA, 75 bp, synthetic construct
  source 1..75: mol_type = other DNA
gaataaattcgtggcggcatgggagcgtgttgttgccctggtcaaaggggtactgcgtcgtacggggttactgaa

SEQ ID NO: 848938 - DNA, 75 bp, synthetic construct
  source 1..75: mol_type = other DNA
gccggattacaatcggtttccagaagggaaatgctcagagttggggatacgcctcgtgttttgcgcgcattgggg

SEQ ID NO: 848939 - DNA, 75 bp, synthetic construct
  source 1..75: mol_type = other DNA
tacaaggcgtttgcatcctggctgaatgcgttctcaggtggcagccagtaccgtcccggcgcggtggatatcaca

SEQ ID NO: 848940 - DNA, 75 bp, synthetic construct
  source 1..75: mol_type = other DNA
gagtattcctctgccttacgggtacaacgttttcttcctgcttggtcacacagccgaaggggtggcagcgggcga

SEQ ID NO: 848941 - DNA, 75 bp, synthetic construct
  source 1..75: mol_type = other DNA
gtggaaagagtttgttgaggacggaggtaaaaccggctggtttaacatgggtgaccttgaaggccagcagaagga

SEQ ID NO: 848942 - DNA, 75 bp, synthetic construct
  source 1..75: mol_type = other DNA
cctggctgacggagagcgtattgctgatgctgaaccgatggagcagcccgcgttcatgcgtgacccgcgattccg

SEQ ID NO: 848943 - DNA, 75 bp, synthetic construct
  source 1..75: mol_type = other DNA
cctgctcgggcataccgctgaaggtgtggcggcgggtgacctgacggcgtcccgtgctgccggtaatgttgttgg

SEQ ID NO: 848944 - DNA, 75 bp, synthetic construct
  source 1..75: mol_type = other DNA
gaaggcgaagccgcgccctgaactgcttgaggaataccgaaaactcagcctgaaggaagggcgtactgatactga

SEQ ID NO: 848945 - DNA, 75 bp, synthetic construct
  source 1..75: mol_type = other DNA
aaacgcttgctcagtattcgccgctggtcctgaacggcgaaggtctggtactaccggaactgaaagatattcaga

SEQ ID NO: 848946 - DNA, 75 bp, synthetic construct
  source 1..75: mol_type = other DNA
aactgggcgggagccgcgctgctgctggccctggcgctgtgctggcttccggcgctgttgcgggcttttcgacag

SEQ ID NO: 848947 - DNA, 75 bp, synthetic construct
  source 1..75: mol_type = other DNA
cggcggtgatgctgtctgaggatgacagcgccgggcagtatcagacgcggctgaccaacgccctgcgccgcgtgg

SEQ ID NO: 848948 - DNA, 75 bp, synthetic construct
  source 1..75: mol_type = other DNA
aactatcaggtgttattgcaggcggtgaacggtcaggcgcgaatatccagccagacggtgagaaatttattgggg

SEQ ID NO: 848949 - DNA, 75 bp, synthetic construct
  source 1..75: mol_type = other DNA
ctagcggtaagttgactctacgttaccgaggtcttcccactgtcacgaacggtgcaatagtgatccacacccaac

SEQ ID NO: 848950 - DNA, 75 bp, synthetic construct
  source 1..75: mol_type = other DNA
atgagacgaacatttacagcagaggaaaaagcctctgtttttgaactatggaagcgtgtcacgaacggtgcaata

SEQ ID NO: 848951 - DNA, 75 bp, synthetic construct
  source 1..75: mol_type = other DNA
ttcatctgaaaacccgtgaggcaccgctttttgctgccgtcaacacaccagaaaaacagccggatcatctgttcc

SEQ ID NO: 848952 - DNA, 75 bp, synthetic construct
  source 1..75: mol_type = other DNA
tttctggaagctgcttcacttgttggtgcgttgtcgattggattatcggtccccggtttgtggatatatcataaa

SEQ ID NO: 848953 - DNA, 75 bp, synthetic construct
  source 1..75: mol_type = other DNA
tggcaggctggccgctgtcgctggtcatcgaacgctacggctggtcgggaatgttcagtttactctcggtcgccg

SEQ ID NO: 848954 - DNA, 75 bp, synthetic construct
  source 1..75: mol_type = other DNA
gttgatggtgtcagtcgccgcactgtggctggcaccggttcatcactatgaaccgccccgggaatcctggagact

SEQ ID NO: 848955 - DNA, 75 bp, synthetic construct
  source 1..75: mol_type = other DNA
agcagcgcgcgcagatggcggtgcagcaggaaaaggcgcggcagttgatcgacggcatgtcgcgcttcccgcaaa

SEQ ID NO: 848956 - DNA, 75 bp, synthetic construct
  source 1..75: mol_type = other DNA
cgggtgacctttcactcaccagatctggcaaatctggtacacaattccacgccgggaacgcgtatgttcagcgtc

SEQ ID NO: 848957 - DNA, 75 bp, synthetic construct
  source 1..75: mol_type = other DNA
gcagccagtgttgcaaggggaagcgcgagtgagctttcactcgccggatctggtgaatctggtacacaatcccac

SEQ ID NO: 848958 - DNA, 75 bp, synthetic construct
  source 1..75: mol_type = other DNA
ttaatgatgacattcagggaacagcggcagtgaccctggggacgctgcaggctgcctgtcgacataaaaagcagg

SEQ ID NO: 848959 - DNA, 75 bp, synthetic construct
  source 1..75: mol_type = other DNA
acaccagctcattaaaactccgtccgggtgaaagctgcttgcgctcagacagctaccatcatgggggcgaagagg

SEQ ID NO: 848960 - DNA, 75 bp, synthetic construct
  source 1..75: mol_type = other DNA
gtgaagagaaaagaagagcgagatcatcaggccataaatgaaaaagagtatatatcacgacattatcacgcaaat

SEQ ID NO: 848961 - DNA, 75 bp, synthetic construct
  source 1..75: mol_type = other DNA
atgaaacgtgttgcaatgccagcgctggtattgcggaaatcagccctgtccctggtgctggcgacattaccgttc

SEQ ID NO: 848962 - DNA, 75 bp, synthetic construct
  source 1..75: mol_type = other DNA
gcgcagcctgtgagcgtttttctgagatctaccgccgttcacgcggtgtgtttatctcttaccagaaccgccaca

SEQ ID NO: 848963 - DNA, 75 bp, synthetic construct
  source 1..75: mol_type = other DNA
cggaagacagaccggcgctgtttgccgcccagtttgcactgtcacattcatgctggctggtgacttatccgctgg

SEQ ID NO: 848964 - DNA, 75 bp, synthetic construct
  source 1..75: mol_type = other DNA
aaatggcacttgataacccatgccggacagatggaacggaaatactcgatgccagatgggaacacggacctgatt

SEQ ID NO: 848965 - DNA, 75 bp, synthetic construct
  source 1..75: mol_type = other DNA
atgatctgggcatttgtaaaagcataccgtaaacagttacttatcgtggcgatgcttgctgttctggtcatatca

SEQ ID NO: 848966 - DNA, 75 bp, synthetic construct
  source 1..75: mol_type = other DNA
ctttccccactggcacgccagccagcaaggtcatcggtgtgctcgccgacatgcttgaagaaagcaaccgagttt

SEQ ID NO: 848967 - DNA, 75 bp, synthetic construct
  source 1..75: mol_type = other DNA
acaacgcaacagcagctgaggctgaaaagtataggattgcaggagaatcctgtgaacggcaatatgactcactga

SEQ ID NO: 848968 - DNA, 75 bp, synthetic construct
  source 1..75: mol_type = other DNA
tacagattttaaaaaaatcggggatgaggcaaaaaaagttgcgtcctcattcaaaggtaacgtaggtaataaaaa

SEQ ID NO: 848969 - DNA, 75 bp, synthetic construct
  source 1..75: mol_type = other DNA
atgcttgaagaaagcaaccgagtttacaacgcaacagcagttgaggctgaaaagtatcgtatcgcaggggaattc

SEQ ID NO: 848970 - DNA, 75 bp, synthetic construct
  source 1..75: mol_type = other DNA
cggcttcttgacggcatttctctcatcagtgatgaacaatatgccgacggtgctgattggtgcgctgtcgattga

SEQ ID NO: 848971 - DNA, 75 bp, synthetic construct
  source 1..75: mol_type = other DNA
atggataattttatacccttgataagcttgttgagctcagaactagaaaaaaacagaataaatatgataaacgat

SEQ ID NO: 848972 - DNA, 75 bp, synthetic construct
  source 1..75: mol_type = other DNA
aattcaacggggatctcagggaagaaactttcaagattttgtttcttgaaatagtccccggttttaaatacgaca

SEQ ID NO: 848973 - DNA, 75 bp, synthetic construct
  source 1..75: mol_type = other DNA
attgcctcagttttttaatgttctttttgggcaaatgtctgttgtcggacccagacctcatgcagtatgtcataa

SEQ ID NO: 848974 - DNA, 75 bp, synthetic construct
  source 1..75: mol_type = other DNA
caggcattcttcgtaaacttggttataatacccgaagagtggctgttgttggatctttacccgcaggcgttgatt

SEQ ID NO: 848975 - DNA, 75 bp, synthetic construct
  source 1..75: mol_type = other DNA
aacgccggtctgacagattatctctctgacgtgctgaacgaactggcagataaaggactgtgggccgccacgctg

SEQ ID NO: 848976 - DNA, 75 bp, synthetic construct
  source 1..75: mol_type = other DNA
tgcgcgcctggcgggggcatcctggcgaagagaaagtgtggcacacgcgcgacgcgatccttttatgcatcggcc

SEQ ID NO: 848977 - DNA, 75 bp, synthetic construct
  source 1..75: mol_type = other DNA
ttgacctcttccaatcctgaccatccaacagggaatatttttgatcctcgtgaactggccttgctggcgcaggca

SEQ ID NO: 848978 - DNA, 75 bp, synthetic construct
  source 1..75: mol_type = other DNA
atgacacctgccatgtatgagcgcgtgcgtaactatttcgttgatgccgggcttaccactggtttcatcgttcag

SEQ ID NO: 848979 - DNA, 75 bp, synthetic construct
  source 1..75: mol_type = other DNA
ggcactgttagcaggcaatgatgtgatggcagacgagtttgtcgccggccatgttattttcggcgttggtatgat

SEQ ID NO: 848980 - DNA, 75 bp, synthetic construct
  source 1..75: mol_type = other DNA
ggggacgtattcagctgactgatgccattgccgaactggcgaaaaaacagtccgttgatgccatgctgatgactg

SEQ ID NO: 848981 - DNA, 75 bp, synthetic construct
  source 1..75: mol_type = other DNA
taggtttgggccactccattttatgtgcacgacctgccattggtgacaatccatttgtcgtggtgctgccagacg

SEQ ID NO: 848982 - DNA, 75 bp, synthetic construct
  source 1..75: mol_type = other DNA
gctttttccactgagtatattttaatttttaaaaactggactcttagtttattaattgctttaggacttttatct

SEQ ID NO: 848983 - DNA, 75 bp, synthetic construct
  source 1..75: mol_type = other DNA
aaaagaggtgctggctaaagccaacgaactgcgttcgggggatgtgctggcgggcgtcgcagcggcaagctcaca

SEQ ID NO: 848984 - DNA, 75 bp, synthetic construct
  source 1..75: mol_type = other DNA
cggtatgcgtgacccttttaaatcgccggaagatctatatgccggattagcgaacttagccagtggcgctatcag

SEQ ID NO: 848985 - DNA, 75 bp, synthetic construct
  source 1..75: mol_type = other DNA
cggcctgtattacaaccgccaccgctattatgacccgctgcaggggcgatatatcactcaggatccgattggact

SEQ ID NO: 848986 - DNA, 75 bp, synthetic construct
  source 1..75: mol_type = other DNA
aaagtggggaactttctgcgccgcacctcgctggatgaactgccgcagtttatcaatgtgctgaccggggggatg

SEQ ID NO: 848987 - DNA, 75 bp, synthetic construct
  source 1..75: mol_type = other DNA
gggcgggcaatctgcaacagctggtcgaggatgcgaaagcgggcaagattcataacgtctatatcgcgatgcaaa

SEQ ID NO: 848988 - DNA, 75 bp, synthetic construct
  source 1..75: mol_type = other DNA
taattatcgcaggtggccaggaaagcatgagcaacgcgccctattttattgatggcgcgcgggcaggtttacgcc

SEQ ID NO: 848989 - DNA, 75 bp, synthetic construct
  source 1..75: mol_type = other DNA
tatttctgcattgcgaaaaaatattgcatttatcggcgaagaagatattgatacgcctagttgtggtattttggg

SEQ ID NO: 848990 - DNA, 75 bp, synthetic construct
  source 1..75: mol_type = other DNA
atcggtctaacggctcttgttgtatttcaaatgattggcggaattactgatttctatcgctcatggagaggtgtg

SEQ ID NO: 848991 - DNA, 75 bp, synthetic construct
  source 1..75: mol_type = other DNA
ttgatacgcggttttctttttattgaatggtacttgttagttgatgttggtttatttatctgccgctcagttatc

SEQ ID NO: 848992 - DNA, 75 bp, synthetic construct
  source 1..75: mol_type = other DNA
gcgcacacagacgttccaccgtgaggctggcggcgaaatcaccggcgtgacggatggtgccgggcgtcacttccg

SEQ ID NO: 848993 - DNA, 75 bp, synthetic construct
  source 1..75: mol_type = other DNA
gggtaaacccaaactcacgctgcgtcgcattggtgcggggatcctcgatgcgctgatcagcaccatgtcaccgct

SEQ ID NO: 848994 - DNA, 75 bp, synthetic construct
  source 1..75: mol_type = other DNA
gctatacatcattgggctaaaagttggaagctttcttttttagagagaattaaaagaaaaattatcatgcgatat

SEQ ID NO: 848995 - DNA, 75 bp, synthetic construct
  source 1..75: mol_type = other DNA
tgcgcaacatgtttggcgatgccgggctgacgactggcttcacggtacagcagttgatgtacgacgacccgaaag

SEQ ID NO: 848996 - DNA, 75 bp, synthetic construct
  source 1..75: mol_type = other DNA
tctgctgggtaaaggcagcagcatttcagcaaccggcagtcagggaggaggtgaagtttatgtcggcggaggctg

SEQ ID NO: 848997 - DNA, 75 bp, synthetic construct
  source 1..75: mol_type = other DNA
agcctgttgtcgggtatgataatgatggcccatccggtgatggccgccgggctgccgacgggcggtcagattgtg

SEQ ID NO: 848998 - DNA, 75 bp, synthetic construct
  source 1..75: mol_type = other DNA
ttggtgctaaaccaagcaaaaaggtacgtgatttaggaaatggtgataatataattgttcatggttttatagatg

SEQ ID NO: 848999 - DNA, 75 bp, synthetic construct
  source 1..75: mol_type = other DNA
atgccatttattgccattatcgccattgttgtcatcgtcatcattctgaacaaaaccgcggtgtccgacagcctc

SEQ ID NO: 849000 - DNA, 75 bp, synthetic construct
  source 1..75: mol_type = other DNA
ggcaacagcagcctgatcaacaccaccgtcatcggtgccagtgtgaacggcagcggtgtgaacatcagtggcaac

SEQ ID NO: 849001 - DNA, 75 bp, synthetic construct
  source 1..75: mol_type = other DNA
attattaccgaaaatgctgagattaacgggacaagcaaaggtagtaggagtggcgttcaaattgccggtaattta

SEQ ID NO: 849002 - DNA, 75 bp, synthetic construct
  source 1..75: mol_type = other DNA
caccggcactacgatccgttgcaggggcggtatatcaccccggacccgattgggttgagaggtggatggaatatg

SEQ ID NO: 849003 - DNA, 75 bp, synthetic construct
  source 1..75: mol_type = other DNA
cgggcatgcattcaacgctgattatcgcccgagctatcatgccgaatctgcgaaagatggctggcagcgtatgct

SEQ ID NO: 849004 - DNA, 75 bp, synthetic construct
  source 1..75: mol_type = other DNA
agcttcttgccgtaggcgattacagtaacggaaaagagcaacgtccgctgtccgaacgggacaaggttgatatca

SEQ ID NO: 849005 - DNA, 75 bp, synthetic construct
  source 1..75: mol_type = other DNA
aagtgatggggttgtgaatttgtcattttggggtaatatgagttattatcccaatgttagagcggctcaatattt

SEQ ID NO: 849006 - DNA, 75 bp, synthetic construct
  source 1..75: mol_type = other DNA
gttgtagacgaaattcaacaactgggtggtcaggcatttgcctgccgttgtgatattacttccgaacaggaactc

SEQ ID NO: 849007 - DNA, 75 bp, synthetic construct
  source 1..75: mol_type = other DNA
tgcgattgagaatatgacatcaggtggactaatttatgccgtatctggtgtacgtggattgattgctgcaaacag

SEQ ID NO: 849008 - DNA, 75 bp, synthetic construct
  source 1..75: mol_type = other DNA
ggtggtcaggtggagacctcttcgcaaggtaacctgcaggcatttggtacggtcagtgcatccgcgaagaaaggc

SEQ ID NO: 849009 - DNA, 75 bp, synthetic construct
  source 1..75: mol_type = other DNA
aaataaaagaatttattttcatattttctttcttgtctattatttttatgttattacatgaaaaaaatggaatac

SEQ ID NO: 849010 - DNA, 75 bp, synthetic construct
  source 1..75: mol_type = other DNA
tgacagtttcaaaagcatcaatgacaaatgggggcatcatatgggtgatcaagtcatagtaatggttaccagaat

SEQ ID NO: 849011 - DNA, 75 bp, synthetic construct
  source 1..75: mol_type = other DNA
tcagtattttggcttgtattacttatcagctcatgcatcagcatacgtaattactcaaaaatatggttgtgtata

SEQ ID NO: 849012 - DNA, 75 bp, synthetic construct
  source 1..75: mol_type = other DNA
ctgactttaatcaggtttcaggaggggttaaaatagcagttggaaatacgataaagcttctcttccgacctgaag

SEQ ID NO: 849013 - DNA, 75 bp, synthetic construct
  source 1..75: mol_type = other DNA
aatcgaaaggcgagcaggacaaggtcaatgttgacctcgcagcctccggcgtcgcgtacaaagagcggcttaacc

SEQ ID NO: 849014 - DNA, 75 bp, synthetic construct
  source 1..75: mol_type = other DNA
attctttcgttcgcgtttttgagcaacacgtattatttattagaagttgctattatttctttatctccgataggt

SEQ ID NO: 849015 - DNA, 75 bp, synthetic construct
  source 1..75: mol_type = other DNA
gcagcagtatcgtggacagatgaatgtacctgcccggggcaaagtcgccgctgcacgagcatatcgcaaccagaa

SEQ ID NO: 849016 - DNA, 75 bp, synthetic construct
  source 1..75: mol_type = other DNA
cggggtggtggaagccagcggtatgcaccgtcaggacggtaacattgtactggacggtggcgacagtggtgtggt

SEQ ID NO: 849017 - DNA, 75 bp, synthetic construct
  source 1..75: mol_type = other DNA
ttctgtttgctggcaacaacacgctgacggccagtaacattactcttaccgggaacagtgaggtgtactggcaat

SEQ ID NO: 849018 - DNA, 75 bp, synthetic construct
  source 1..75: mol_type = other DNA
taaccagttaatcatcaatcttaaaaaggggtatgaacgtcgggcattccctgattaccactataaaaaggctgc

SEQ ID NO: 849019 - DNA, 75 bp, synthetic construct
  source 1..75: mol_type = other DNA
tgccagccaggcggatgacgtcgatccaggcaaaaaaaatgcaaaatccacattgctgtctgcgctgtcagcaaa

SEQ ID NO: 849020 - DNA, 75 bp, synthetic construct
  source 1..75: mol_type = other DNA
caaagacagcccgtacctgcgacggatctatggttcgcctacgccgcagcctaacgataactggctgcttggtca

SEQ ID NO: 849021 - DNA, 75 bp, synthetic construct
  source 1..75: mol_type = other DNA
tgcagtcgctgcgtgtggtcttttctgcgctatttcgtctacgacaacagttcgaccctacgctgaggctaaata

SEQ ID NO: 849022 - DNA, 75 bp, synthetic construct
  source 1..75: mol_type = other DNA
ggctaagcgcagggtagtgggaaacgtcattcacaagtgggtattgcgggatgcggctgctatggtgagaaaagg

SEQ ID NO: 849023 - DNA, 75 bp, synthetic construct
  source 1..75: mol_type = other DNA
taataaaaacgtctggaatttaattaaaaacagccaggagtgccctgcaaacacaggaaatatcacagataagtg

SEQ ID NO: 849024 - DNA, 75 bp, synthetic construct
  source 1..75: mol_type = other DNA
acgggcagatgtggctgagcgcagtcgctctgttgtgtagcctggcctgtggcgtacaggctgcgccgtctgcac

SEQ ID NO: 849025 - DNA, 75 bp, synthetic construct
  source 1..75: mol_type = other DNA
cgtgggcagaaacactgcttcccggtgccagcgcggaagtctgggtgacggtggggcaggaggaggtgaacggtg

SEQ ID NO: 849026 - DNA, 75 bp, synthetic construct
  source 1..75: mol_type = other DNA
gatgagcgggtgatccgccccatcgtgagcgccacccaacggctggccaaagaaatacagcatctgcaaagcggc

SEQ ID NO: 849027 - DNA, 75 bp, synthetic construct
  source 1..75: mol_type = other DNA
cctgtctggcagctcagtgagcgggtcagtctctatggcatggccgggatggcgtacacccgctggtctgacagt

SEQ ID NO: 849028 - DNA, 75 bp, synthetic construct
  source 1..75: mol_type = other DNA
gctggtggatcacgctgacctcccgacggttgagcgtcaccctgacaacgagccgaggacggaacgccggcgcgc

SEQ ID NO: 849029 - DNA, 75 bp, synthetic construct
  source 1..75: mol_type = other DNA
aattgtcgctggctgaattatcctggtgggcggtctgcaatcaggtggcggacgcgcttccggaggcagtattac

SEQ ID NO: 849030 - DNA, 75 bp, synthetic construct
  source 1..75: mol_type = other DNA
tgatcatgaggaagttctgtcggttatgtacagggaagactacgatccgaaaacaacattcagcgactatgaagc

SEQ ID NO: 849031 - DNA, 75 bp, synthetic construct
  source 1..75: mol_type = other DNA
ttccaggctcgctatattgctgttgatggacaagccactgctggtacagccaacgccgacgccacctttaaagtt

SEQ ID NO: 849032 - DNA, 75 bp, synthetic construct
  source 1..75: mol_type = other DNA
catgagaaactagttgatgtgatcgtcctgattgctggcgatgctgatttcgttcctgccgctaaacatgcccgt

SEQ ID NO: 849033 - DNA, 75 bp, synthetic construct
  source 1..75: mol_type = other DNA
gctgtataacccgattctggaacttatggatagcctgcaggcgtatcaggggttgctcgaatacacacaacctct

SEQ ID NO: 849034 - DNA, 75 bp, synthetic construct
  source 1..75: mol_type = other DNA
cgccattaagccaggctattgcgtagaccatattaaccgtaatggcctggataatcgtctggctaatcttcgcat

SEQ ID NO: 849035 - DNA, 75 bp, synthetic construct
  source 1..75: mol_type = other DNA
ggcggcgggcgcaaatataagcgttacaataaacaacgctattatcgggtaggagtaaccgccaacggtaaaagt

SEQ ID NO: 849036 - DNA, 75 bp, synthetic construct
  source 1..75: mol_type = other DNA
aaaggtcgcaaatataaacgtcacaataaagcacgctattacagggtaagcgtgacagttaacggtaaagagaaa

SEQ ID NO: 849037 - DNA, 75 bp, synthetic construct
  source 1..75: mol_type = other DNA
cgatttcgcgtattcgtcgcggagaagagagtttggttggttatcagcgtccagaagtacgtaaccatattcgcg

SEQ ID NO: 849038 - DNA, 75 bp, synthetic construct
  source 1..75: mol_type = other DNA
aacttatcttaacactgacagatgagtattggcggcagaataattccacacgaacatttactttaccggcccctt

SEQ ID NO: 849039 - DNA, 75 bp, synthetic construct
  source 1..75: mol_type = other DNA
actcaataatatttgtgagataatgagtcctcttctttcccattttggaaatgtaaattatccatatgctaaggt

SEQ ID NO: 849040 - DNA, 75 bp, synthetic construct
  source 1..75: mol_type = other DNA
aatggggctggcacaatctactcacctgaaatatatgctttataacggttgggccattgtcattgccaatatcat

SEQ ID NO: 849041 - DNA, 75 bp, synthetic construct
  source 1..75: mol_type = other DNA
atgagtgactcaatgctcgctggtggtccactaaccagacgaaatatcaccaaaaagaatgtcattattggcttg

SEQ ID NO: 849042 - DNA, 75 bp, synthetic construct
  source 1..75: mol_type = other DNA
cgctgttgctcagatgacctttacgcacaaaatatttggtccgatgttgatggctgcgggagtgccgccacaggg

SEQ ID NO: 849043 - DNA, 75 bp, synthetic construct
  source 1..75: mol_type = other DNA
aaagtgaaggagtgtctaatcccaatcccctgcccggacaatccggaaaaatcccttgccatccagtccgaaatt

SEQ ID NO: 849044 - DNA, 75 bp, synthetic construct
  source 1..75: mol_type = other DNA
gcgctgtataaagggtgtggcagattggtgtggatgtttctgctttactggctgtataaccctattctggaactt

SEQ ID NO: 849045 - DNA, 75 bp, synthetic construct
  source 1..75: mol_type = other DNA
tgttgcggtgattattcctgtcgcggcggcagttcggctgacaccgcctacggtggctgcactgatgatgacggc

SEQ ID NO: 849046 - DNA, 75 bp, synthetic construct
  source 1..75: mol_type = other DNA
caattatcgttccagtgtgggggactggttttatatttgcgattacaggaaacctgtccattatgcctgacattt

SEQ ID NO: 849047 - DNA, 75 bp, synthetic construct
  source 1..75: mol_type = other DNA
aaagatatcgctaaagtaaccaaagaggaattactgaagctatatggtgatgcgtctataaaagtattggctgga

SEQ ID NO: 849048 - DNA, 75 bp, synthetic construct
  source 1..75: mol_type = other DNA
gatccgactcataacaaaaaaaattacgtaactgttaaggatgcaatatttggccttccatcattaaatgctgga

SEQ ID NO: 849049 - DNA, 75 bp, synthetic construct
  source 1..75: mol_type = other DNA
agcaagaatgataggaaatgcagtgccggtaaggttaggcgagatcattgggcaaagtattctcaagcacctttc

SEQ ID NO: 849050 - DNA, 75 bp, synthetic construct
  source 1..75: mol_type = other DNA
accccctgtcagatgctcatcaatcaaacaatgtctgtagaaaacataccattagccaaacagagtacgccggtc

SEQ ID NO: 849051 - DNA, 75 bp, synthetic construct
  source 1..75: mol_type = other DNA
tttctccacgcacagaggtttcatgcctatgttattcaaatgtatcaattcggttgcacttaaagtcgggtatat

SEQ ID NO: 849052 - DNA, 75 bp, synthetic construct
  source 1..75: mol_type = other DNA
aatacctggaaagtaccgacaggctccggtactccgatactccgcttcctgtccccttcattaaaacatccttca

SEQ ID NO: 849053 - DNA, 75 bp, synthetic construct
  source 1..75: mol_type = other DNA
tgctgctgatccctgatgtctttactttcaacattctccattcccgtatcgaagagatgaacggcgtaccggtgg

SEQ ID NO: 849054 - DNA, 75 bp, synthetic construct
  source 1..75: mol_type = other DNA
tgccgctgtacgacacgccgctttccggggttaaccgcctgctcaaacgtgcggaagacattgtgctggcgacgc

SEQ ID NO: 849055 - DNA, 75 bp, synthetic construct
  source 1..75: mol_type = other DNA
aaagtggggaactttctgcgccgcacctcgctggacgaattgccgcagtttatcaatgtgctgaccggggggatg

SEQ ID NO: 849056 - DNA, 75 bp, synthetic construct
  source 1..75: mol_type = other DNA
aagccattctacgatcagctcatcacaaagtttgacatcgaagaggcctgggctgatgcgcagctgaagcagata

SEQ ID NO: 849057 - DNA, 75 bp, synthetic construct
  source 1..75: mol_type = other DNA
gcctttctcggaaagatgggcatcagcaacaacgatcgggagagagcgatcgagctgctggcccagtatgcgctg

SEQ ID NO: 849058 - DNA, 75 bp, synthetic construct
  source 1..75: mol_type = other DNA
ctttgtacgcagccagcattgctcttggcgaggattttcaggagttcgcaggacgtttctggggatttgtcgaaa

SEQ ID NO: 849059 - DNA, 75 bp, synthetic construct
  source 1..75: mol_type = other DNA
atgctcgaccggctggaaagtgaaatcctggctgaccgggtgagtgaggaaagccgacgctggctggcatcgtgc

SEQ ID NO: 849060 - DNA, 75 bp, synthetic construct
  source 1..75: mol_type = other DNA
gcttaatccgcgcttaccggtgtggcgcatcatcacggaaccgctctggattgctaagcgtagtagtgaacaaca

SEQ ID NO: 849061 - DNA, 75 bp, synthetic construct
  source 1..75: mol_type = other DNA
tgagcgatcgggtggcggtgatgtatctcgggcagattgtggaactaggggaagcgcaacaggtgttgactgctc

SEQ ID NO: 849062 - DNA, 75 bp, synthetic construct
  source 1..75: mol_type = other DNA
gcgacgtccatatcaatttcccggcccgaaaaaactggcttggtaaaactacggaacatgttcatgccatcaatg

SEQ ID NO: 849063 - DNA, 63 bp, synthetic construct
  source 1..63: mol_type = other DNA
tggcagaatgtctggagaaaaaaggactgtaccggagagcagctgaacgatgggcaaaagtga

SEQ ID NO: 849064 - DNA, 75 bp, synthetic construct
  source 1..75: mol_type = other DNA
ttggcgggtgatgtgggacgtatgcaccgcgatgcgccgcgcgtctttgcaatttatcggcgtggcataaggagt

SEQ ID NO: 849065 - DNA, 75 bp, synthetic construct
  source 1..75: mol_type = other DNA
aaaccgctggaggaagaatgggcattacgtaaaacggaactgccaggaaaccgcacgttgccacaaggctgtttt

SEQ ID NO: 849066 - DNA, 75 bp, synthetic construct
  source 1..75: mol_type = other DNA
agcttgttcctaaagaagctgccggagccgcatcagggctgtcaggcacattttcctatatcttcggctcaattg

SEQ ID NO: 849067 - DNA, 75 bp, synthetic construct
  source 1..75: mol_type = other DNA
gtttcctgggctcctaagtttttaagtgacagtctggatgtcggtggtaaggatatgggaaaactggcatcaatg

SEQ ID NO: 849068 - DNA, 75 bp, synthetic construct
  source 1..75: mol_type = other DNA
gttaagcccgcatctttacctggcgaccaacagcgcacaggggctgtggtggatactgggtggtcagagcgggtg

SEQ ID NO: 849069 - DNA, 75 bp, synthetic construct
  source 1..75: mol_type = other DNA
gatctgccgggaaaccgcacgttgccgcaaggctgttttttctacgaacgttgcccgctggcaacccacggatgt

SEQ ID NO: 849070 - DNA, 75 bp, synthetic construct
  source 1..75: mol_type = other DNA
attgatttacagatccgccgtggtgaaaccttagggatcgtcggcgagtcaggctgcggcaaaagcaccctcgca

SEQ ID NO: 849071 - DNA, 75 bp, synthetic construct
  source 1..75: mol_type = other DNA
ggcagcggcaacgtatcgccattgccagagcactctcttcgcagcctgacgtgattgtgcttgatgagccaacct

SEQ ID NO: 849072 - DNA, 75 bp, synthetic construct
  source 1..75: mol_type = other DNA
atctttatcactcccccctcgctgtcagcgctattcgcaaatcaaccttttgttcatgaggaaaaagcgaatcag

SEQ ID NO: 849073 - DNA, 75 bp, synthetic construct
  source 1..75: mol_type = other DNA
aataaaaaaggtaatacatccctttacgatcgtagtgataatactgcagaacataataataacggggctggaatt

SEQ ID NO: 849074 - DNA, 75 bp, synthetic construct
  source 1..75: mol_type = other DNA
cagcatgaacggtataaagatgaattgcgacagaaaatgggaaaacccgacgttacagattcaaatttgaaaaat

SEQ ID NO: 849075 - DNA, 75 bp, synthetic construct
  source 1..75: mol_type = other DNA
atgctggcatttatagatgccaggcatgtggttatgaagatttaattaatcgccaatgtaacaaacttccaccat

SEQ ID NO: 849076 - DNA, 75 bp, synthetic construct
  source 1..75: mol_type = other DNA
aaagctggcttaccgcgcgttatggcgaacaacccctgtttttacacggcggcttaagccgcaaaaagcgcgatg

SEQ ID NO: 849077 - DNA, 75 bp, synthetic construct
  source 1..75: mol_type = other DNA
aacggaccagcccgcgccagtgatgctggcggatattctgtggcaaaaatgctacgaaaatacacggatggccgt

SEQ ID NO: 849078 - DNA, 75 bp, synthetic construct
  source 1..75: mol_type = other DNA
acgtgttctcagaactgccgctggaatttgccgttgaagcacaaaaactcctcgccatcagtcttgaacacagcg

SEQ ID NO: 849079 - DNA, 75 bp, synthetic construct
  source 1..75: mol_type = other DNA
atgatccacatcggtaaaaacaccaaatcgaccattatctcgaaagggatctctgccggacatagtcagaacagt

SEQ ID NO: 849080 - DNA, 75 bp, synthetic construct
  source 1..75: mol_type = other DNA
gctccctggtttcctgtgtcgatatattcaaggttttgattaaacaatattatgattatcctggtgatgctgcca

SEQ ID NO: 849081 - DNA, 75 bp, synthetic construct
  source 1..75: mol_type = other DNA
aaggacgaaagccgaattcgattctttattggggatgttcgtgataaagatcgtttgtatcgtgcgttggatggt

SEQ ID NO: 849082 - DNA, 75 bp, synthetic construct
  source 1..75: mol_type = other DNA
gaacccgcatcacctgtaccagccgtaccgtttgccggggcagcagtatgatgaggagtcgggactgtattacaa

SEQ ID NO: 849083 - DNA, 75 bp, synthetic construct
  source 1..75: mol_type = other DNA
ataccctgcaatagcaatttatcattttacagggcgtgacaaaccatggtttaaacattgcatcaaccagtatca

SEQ ID NO: 849084 - DNA, 75 bp, synthetic construct
  source 1..75: mol_type = other DNA
tggtgaataaaatgaattttcaggggcgtctggcaaccagtgcaatccaaattgcaagttttccagaatttcttc

SEQ ID NO: 849085 - DNA, 75 bp, synthetic construct
  source 1..75: mol_type = other DNA
cttctgcagatgctctggaccgtactctgcgtatcctttcagaggccggatgctttgaagggcgtgaggatatcg

SEQ ID NO: 849086 - DNA, 75 bp, synthetic construct
  source 1..75: mol_type = other DNA
atggtgctgatccagcgcagtggtttaagcaaactgctggagccattgttgtttgccgctaccagcgacagctag

SEQ ID NO: 849087 - DNA, 75 bp, synthetic construct
  source 1..75: mol_type = other DNA
agatttcgctcagttctgcacctctttcaacttatacaaagcctacgaattttgtagaaaaggagtttgattcac

SEQ ID NO: 849088 - DNA, 75 bp, synthetic construct
  source 1..75: mol_type = other DNA
ctggtgttttttacgtcagacatatgatatccgtaacgtggaaaactcatggttccggtaattatgtggatgaga

SEQ ID NO: 849089 - DNA, 75 bp, synthetic construct
  source 1..75: mol_type = other DNA
ttatggtgatgatgttgagattaacagcatcgacaatttaccagttaaagttgaatttgtgctagaaagtaaagt

SEQ ID NO: 849090 - DNA, 75 bp, synthetic construct
  source 1..75: mol_type = other DNA
caacatgcagatatgatagtttcgccataatcaatagaagtcaattaagttggcccgttaattttataattggta

SEQ ID NO: 849091 - DNA, 75 bp, synthetic construct
  source 1..75: mol_type = other DNA
ctctgaacatttttctggctttgagaaaattgagttaggtagcaagggggaagtaaaaatagtagcaaaagatct

SEQ ID NO: 849092 - DNA, 75 bp, synthetic construct
  source 1..75: mol_type = other DNA
aagggtaacctgcaggatcgcgtggatgcgctgacgccggctcaggtaccggacgtgacggatgcgaacggtaac

SEQ ID NO: 849093 - DNA, 75 bp, synthetic construct
  source 1..75: mol_type = other DNA
tcttccagctctgccggggcgtggtattcccctcgcatctgcgctctgaggcgtttggcattacgttattggaag

SEQ ID NO: 849094 - DNA, 75 bp, synthetic construct
  source 1..75: mol_type = other DNA
ttactacttattcgtaccctattcaaagagcattaaaaattaatgagaataacgaaataaccatgtttgatccga

SEQ ID NO: 849095 - DNA, 75 bp, synthetic construct
  source 1..75: mol_type = other DNA
ttactcggtacccttatccgatccaacgcgcactcaaaatagggcatgaaaaccagattagtatgttttctcctg

SEQ ID NO: 849096 - DNA, 75 bp, synthetic construct
  source 1..75: mol_type = other DNA
acctggaacgagggcgatataacttacactagttatactcatgaatcggcacctggtatcagtgtgttaattgaa

SEQ ID NO: 849097 - DNA, 75 bp, synthetic construct
  source 1..75: mol_type = other DNA
tgggacggcgacaggctgacgacggtacagaccgacaccacgcgtatccagacggtataccagccggggagcttc

SEQ ID NO: 849098 - DNA, 75 bp, synthetic construct
  source 1..75: mol_type = other DNA
aatgttatttgctgtgggattgtattttgatgatgtcgtgctgaagaataaattggttttgctgttgtgtataag

SEQ ID NO: 849099 - DNA, 75 bp, synthetic construct
  source 1..75: mol_type = other DNA
ttgtcctgggctacaacgacaggttttccggatgtgtcgatgactcctaccgtcggtacgccatttttgatttcg

SEQ ID NO: 849100 - DNA, 75 bp, synthetic construct
  source 1..75: mol_type = other DNA
gcgtcaaaaaaaacaaaaagcagtctgtgcgtgagatggaacttgatatgttcaggcccgccgcacgcaattatg

SEQ ID NO: 849101 - DNA, 75 bp, synthetic construct
  source 1..75: mol_type = other DNA
attatatcgaatgtgattacattcgctggcggcggcacagttggtgtggcggtctcaatccggaacaatttgaaa

SEQ ID NO: 849102 - DNA, 75 bp, synthetic construct
  source 1..75: mol_type = other DNA
attatatcgaatgtgattacattcggtggcggcggcacagttggtgtggcggtctcaatcgggaacaatttgaaa

SEQ ID NO: 849103 - DNA, 75 bp, synthetic construct
  source 1..75: mol_type = other DNA
ggagtgccagcggcaatacaaaacttatcgagaagggaaccacggcaacaggaatataccagacgggaattacgc

SEQ ID NO: 849104 - DNA, 75 bp, synthetic construct
  source 1..75: mol_type = other DNA
tatgacccgctgcaggggcggtatatcactcaggatccgattgggctgaaggggggatggaacctgtatacatat

SEQ ID NO: 849105 - DNA, 75 bp, synthetic construct
  source 1..75: mol_type = other DNA
cgtttaacccgacaaaaatgtttacagctagtttaaatactgctaattcagcaaggctgtatgcaagtggcatga

SEQ ID NO: 849106 - DNA, 75 bp, synthetic construct
  source 1..75: mol_type = other DNA
tgggatcatgaacatggactgttcgtggtttccctgaacgatgttcatcagcgtcaccggcacgcaagacaggag

SEQ ID NO: 849107 - DNA, 75 bp, synthetic construct
  source 1..75: mol_type = other DNA
ctctgcggacggcttcacgcctgcctggcgctgctgcaacccacgctgcacgaccccatcccgccgcatcttgtt

SEQ ID NO: 849108 - DNA, 75 bp, synthetic construct
  source 1..75: mol_type = other DNA
tgtgaactggtctggtatttcatggaaggactcaaagccccgcgctggctgcgcaccgccgacggcgtaaaattt

SEQ ID NO: 849109 - DNA, 75 bp, synthetic construct
  source 1..75: mol_type = other DNA
ttcttattttttttgttggaaaagcttctgctgatactacatcacctttaatgattcagcctaaaaatggagaaa

SEQ ID NO: 849110 - DNA, 75 bp, synthetic construct
  source 1..75: mol_type = other DNA
gcaccattcgatgatattttatttatggatgatgactttgatgatagttcttctgaggatgatcccgttgagaat

SEQ ID NO: 849111 - DNA, 75 bp, synthetic construct
  source 1..75: mol_type = other DNA
ctcatttgccctaattatgctggatgtcgatttttttaaacgctacaacgacacttacggacacccggcgggcga

SEQ ID NO: 849112 - DNA, 75 bp, synthetic construct
  source 1..75: mol_type = other DNA
gtgatttaatttcgctatatgataaaagatatggtaaagaatacattactgaaaatatgcacagtgagatccgtg

SEQ ID NO: 849113 - DNA, 75 bp, synthetic construct
  source 1..75: mol_type = other DNA
tttctggacagaacttcagtaactatgatattcaatatgtgaactggggaacgtcattgtttgatgttgatactc

SEQ ID NO: 849114 - DNA, 75 bp, synthetic construct
  source 1..75: mol_type = other DNA
atagtattataaaattaatttgtaaagaagctgcctcagggacgtataacggtgctcttgaaattttacaaaaaa

SEQ ID NO: 849115 - DNA, 75 bp, synthetic construct
  source 1..75: mol_type = other DNA
acgtagtatttttaaaaaaaacggtgtgggaagaccttctcgttaaactaaagctggagaacaaagaaaatgcgg

SEQ ID NO: 849116 - DNA, 75 bp, synthetic construct
  source 1..75: mol_type = other DNA
aattcgaatgccggcatgaaaacttaagcctttacatgccattaattccaataataccgccagcaggagaagctc

SEQ ID NO: 849117 - DNA, 75 bp, synthetic construct
  source 1..75: mol_type = other DNA
acgatggagtcgtacaacccaaacgatgatttcttcatttgtggtatttcatattggcatgttgatcgtgccgaa

SEQ ID NO: 849118 - DNA, 75 bp, synthetic construct
  source 1..75: mol_type = other DNA
cgaatcacctaagtttcttatgtgtttcagttctaactctccgattgacgtatgggataccgccgatttatttat

SEQ ID NO: 849119 - DNA, 75 bp, synthetic construct
  source 1..75: mol_type = other DNA
gggacacgattcacactgcagaatttttcaaagaagataaattatgtctggcaaccggatgtctttggattcccc

SEQ ID NO: 849120 - DNA, 75 bp, synthetic construct
  source 1..75: mol_type = other DNA
atggctactggtcatgcccatttagatatagcgtggatgtggcctttaagagaaggacgcagaaaagcaataaga

SEQ ID NO: 849121 - DNA, 75 bp, synthetic construct
  source 1..75: mol_type = other DNA
gtccctgtcaaaccacacccgggtgaactacccccttcactatcatttttgctatcgatactaacagcgttatca

SEQ ID NO: 849122 - DNA, 75 bp, synthetic construct
  source 1..75: mol_type = other DNA
gtcagagtagcggcgcggcgctggtggcgctgatgctaaatcagtttggagataatggtacacacgtctcgctga

SEQ ID NO: 849123 - DNA, 75 bp, synthetic construct
  source 1..75: mol_type = other DNA
caggtagaaatcgatcgtgtcgccccgcttgtcgactgcccggtacaggtaggtccactggcactgttgcaaagt

SEQ ID NO: 849124 - DNA, 75 bp, synthetic construct
  source 1..75: mol_type = other DNA
ttattaatctcaaataatttggcttatgcggttatttataatacaaaaatttgtgatttaatttatccagaggag

SEQ ID NO: 849125 - DNA, 75 bp, synthetic construct
  source 1..75: mol_type = other DNA
ttttcgccgcaacgacagtctgtgcagtctggttaaagacccggtgtttattcaggccttaccccattttcgctt

SEQ ID NO: 849126 - DNA, 75 bp, synthetic construct
  source 1..75: mol_type = other DNA
accggccacctcactggtgttctaccgtctcgtcagtgctattaccgcctgccaacgggtactgctgctggctga

SEQ ID NO: 849127 - DNA, 75 bp, synthetic construct
  source 1..75: mol_type = other DNA
atgcgggaagtggtgacatcacttaaaaacccgaaactggtactcagcctgtttgtcactacgttaatcatccag

SEQ ID NO: 849128 - DNA, 75 bp, synthetic construct
  source 1..75: mol_type = other DNA
cggtcgaaattaaaggtgagaacccgcttaaatttacgcgtagtttgaatgatatgcgtcagcagtttatttcaa

SEQ ID NO: 849129 - DNA, 75 bp, synthetic construct
  source 1..75: mol_type = other DNA
tctctgggcaaatggaacgagttaagtctggttcaacaggcaatggttgatgttggcgtggtgcagtctggttat

SEQ ID NO: 849130 - DNA, 75 bp, synthetic construct
  source 1..75: mol_type = other DNA
agcctcggccccggctggaaaatgcctgcggatatccgcttacagctgcgcgataacacactgatactcagtgat

SEQ ID NO: 849131 - DNA, 75 bp, synthetic construct
  source 1..75: mol_type = other DNA
ttaaaaatggctgatcattttgagtacgaggaagattttgaaacagatgactttgatatcaaaaaaagcgaaatc

SEQ ID NO: 849132 - DNA, 75 bp, synthetic construct
  source 1..75: mol_type = other DNA
acgaggaagattttgaaacagatgattttgatatcaaaaaaacgagagtgagatttatgatgaaaatgacgatca

SEQ ID NO: 849133 - DNA, 75 bp, synthetic construct
  source 1..75: mol_type = other DNA
aatgatatgcgtcagcagttttcaccattccgtaagggtagcccttctcactcctgcaaggttatttcttcagat

SEQ ID NO: 849134 - DNA, 75 bp, synthetic construct
  source 1..75: mol_type = other DNA
ctgggaggaacaatcattcttgcgccatcctcacactttccatccgggttgagggcaaggataatcctgccggtt

SEQ ID NO: 849135 - DNA, 75 bp, synthetic construct
  source 1..75: mol_type = other DNA
ctgcaggggcggtatatcactcaggatccgattggactgaaggggggatggaatttttatcagtatccgttaaat

SEQ ID NO: 849136 - DNA, 75 bp, synthetic construct
  source 1..75: mol_type = other DNA
gacccggcgggcaaccgcctgcccgacccggagctgcacccggacagcaccctcagcatgtggccggataaccgt

SEQ ID NO: 849137 - DNA, 75 bp, synthetic construct
  source 1..75: mol_type = other DNA
ccgcatccagacgatttatcagccggggagcttcacgccactcatcaggttgaaaccgccaccggtgagctggcg

SEQ ID NO: 849138 - DNA, 75 bp, synthetic construct
  source 1..75: mol_type = other DNA
accggtatgaccgtcacggcaggctgacggagaaaaccgacctcatcccggaaggggttatccgcacggatgatg

SEQ ID NO: 849139 - DNA, 75 bp, synthetic construct
  source 1..75: mol_type = other DNA
aaaccaaatctgacttgtacgccacaggatgattcccagtatccagggatggatacaaagacagcaagtgattac

SEQ ID NO: 849140 - DNA, 75 bp, synthetic construct
  source 1..75: mol_type = other DNA
tgctgaatgaagagaacccgcatcagctgcagcagcttatccgcctgccggggcagcagtatgatgaggagtccg

SEQ ID NO: 849141 - DNA, 75 bp, synthetic construct
  source 1..75: mol_type = other DNA
atgacgacgacgatgacagttattatctgaatttgcgtaatggtattaatttaggcgcatggcgttttcgtaatt

SEQ ID NO: 849142 - DNA, 75 bp, synthetic construct
  source 1..75: mol_type = other DNA
tcgttacgatggttcccacgcgtggtgcagtggttaaagcggagtttgtgactcatgtgggttatcgcgttctct

SEQ ID NO: 849143 - DNA, 75 bp, synthetic construct
  source 1..75: mol_type = other DNA
agatcaccgatctcaacaccgccagtacaggtggcgatttggacgtaaccatcaaagaagaagacggtagcgaac

SEQ ID NO: 849144 - DNA, 75 bp, synthetic construct
  source 1..75: mol_type = other DNA
gagccgttacggtcagttgctgagcttcactgactgttccggttatgtaacccgctatgaccatgaccgttttgg

SEQ ID NO: 849145 - DNA, 75 bp, synthetic construct
  source 1..75: mol_type = other DNA
caggaagggagcgaggacgggcacggcgtggtatttccggctgaactggtgcggctgctggacaggctggaggaa

SEQ ID NO: 849146 - DNA, 75 bp, synthetic construct
  source 1..75: mol_type = other DNA
ccctcaccgacttaaacacgaccagtagcggcggcgatctcgatgtcactatcaaagaagaagatggcagcgagc

SEQ ID NO: 849147 - DNA, 75 bp, synthetic construct
  source 1..75: mol_type = other DNA
aggattggaccgtattaacctatggtgaaatatttgattttttatctacatccaccaatgcccgtgctgacctca

SEQ ID NO: 849148 - DNA, 75 bp, synthetic construct
  source 1..75: mol_type = other DNA
attatatcgaatgtgattacattcgttggcggcggcacagttggtgtggcggtctcattcgggaacaatttgaaa

SEQ ID NO: 849149 - DNA, 75 bp, synthetic construct
  source 1..75: mol_type = other DNA
tgggctgcaagcacgggaggttacgataaagcgacagtgcaggatgtgatgttaggagcgatagaaacgctttgg

SEQ ID NO: 849150 - DNA, 75 bp, synthetic construct
  source 1..75: mol_type = other DNA
atgatattttatttatggatgatgactttgatgatagttcttctgaggatgatcccgttgagaatagtcctgttg

SEQ ID NO: 849151 - DNA, 75 bp, synthetic construct
  source 1..75: mol_type = other DNA
tggtggtatgccggggtcatatcgtgcactgtcaggcgatgaactcgggtctgccgggtcagccagtgtcatgat

SEQ ID NO: 849152 - DNA, 75 bp, synthetic construct
  source 1..75: mol_type = other DNA
tcttgagacggcggcggtcattctgcaggagtgccgtcagcgccatcccgacagctggctgaaggctgccggttg

SEQ ID NO: 849153 - DNA, 75 bp, synthetic construct
  source 1..75: mol_type = other DNA
atgacgccacagcagacagccatgctggcaccggctgcggattatatctggacagagccccggaggcgtgaatga

SEQ ID NO: 849154 - DNA, 75 bp, synthetic construct
  source 1..75: mol_type = other DNA
atggaatcacgtaattcatatgaaaacaaaatagatgagatttcatctttgtcagagtcaaaggaacaccccata

SEQ ID NO: 849155 - DNA, 75 bp, synthetic construct
  source 1..75: mol_type = other DNA
aataatgaagtgttagttactgatggtgagcctgacgtagtatgtttaagcaagcaggtctgggaaaatcttctc

SEQ ID NO: 849156 - DNA, 75 bp, synthetic construct
  source 1..75: mol_type = other DNA
tagaataaaaaggatgcaattctcgagagcatttaaagttttgaaagttattttcattgactcgtggaaaatttt

SEQ ID NO: 849157 - DNA, 75 bp, synthetic construct
  source 1..75: mol_type = other DNA
gcgaaaacggtttaagtggagtcttgtctgatcgtaataataaaataaaactcatcacgggcgtggcaccattcg

SEQ ID NO: 849158 - DNA, 75 bp, synthetic construct
  source 1..75: mol_type = other DNA
atttgataaaaatggaaggtcttcagagtttctatttaatttttatgagtgttgctataagtttttaccaagagc

SEQ ID NO: 849159 - DNA, 75 bp, synthetic construct
  source 1..75: mol_type = other DNA
gtgttattttagaaacgcaaccaaatgtctctatggaaccacataatttatatgacaaccaaatagataaggttt

SEQ ID NO: 849160 - DNA, 75 bp, synthetic construct
  source 1..75: mol_type = other DNA
ttgctgatggcgctggtcgtcctatgtccggtcatcatattattctgaaagcccgacagaatacatccgcagtgg

SEQ ID NO: 849161 - DNA, 75 bp, synthetic construct
  source 1..75: mol_type = other DNA
ctgtggctgcctctgctgcagtatccggttctgcgatggcgtggactgcaaacggcactggtggttctgttgacc

SEQ ID NO: 849162 - DNA, 75 bp, synthetic construct
  source 1..75: mol_type = other DNA
ccctctccccaaacggggcgaggggactgaccgagtccttttttgatgttgtcatcagtctggaagccgcacgtt

SEQ ID NO: 849163 - DNA, 75 bp, synthetic construct
  source 1..75: mol_type = other DNA
gaaactatccagatctcccttgatactcctgttgtcggagatgcacaaattcagtggaaagcatccctgcctgtt

SEQ ID NO: 849164 - DNA, 75 bp, synthetic construct
  source 1..75: mol_type = other DNA
attatatcgaatgtgattacattcgatggcggcggcacagttggtgtggcggtctcagtcgggaacaatttgaaa

SEQ ID NO: 849165 - DNA, 75 bp, synthetic construct
  source 1..75: mol_type = other DNA
attccaacgagcttgataaagaagcaactttactaattgtctttgggttctcgtttgctgatgagcacattgaaa

SEQ ID NO: 849166 - DNA, 75 bp, synthetic construct
  source 1..75: mol_type = other DNA
atgatttgttcattgaggatgcagcggttaaaaataacaacgtcattctgaatgatggattccgtcagcgcgccg

SEQ ID NO: 849167 - DNA, 75 bp, synthetic construct
  source 1..75: mol_type = other DNA
caggccagggatgagattgataccgcattatcagcgacactcaaaacggctaaccacctgtcagaaattgcggca

SEQ ID NO: 849168 - DNA, 75 bp, synthetic construct
  source 1..75: mol_type = other DNA
gatgctgaagctgccagaaaggccgcatctgatgcggagcaggccagggatgagattgataccgcattatcagcg

SEQ ID NO: 849169 - DNA, 75 bp, synthetic construct
  source 1..75: mol_type = other DNA
atttatgtgtcacggcacgaccggtagcggggttggatataacggcagcgtttccgtatatgtgcggggttctgg

SEQ ID NO: 849170 - DNA, 75 bp, synthetic construct
  source 1..75: mol_type = other DNA
accgcatctgcttcacaacataagcaattgaaagaatttttcccttcggttgatgtacccagaattcaggttctg

SEQ ID NO: 849171 - DNA, 75 bp, synthetic construct
  source 1..75: mol_type = other DNA
gccgttcattctctcccgcacctacagcagctaccggacgaagacgcctgcgccggtgggaatttttggccccgg

SEQ ID NO: 849172 - DNA, 75 bp, synthetic construct
  source 1..75: mol_type = other DNA
attatatcgaatgtgattacattcgttggcggcggcacagttggtgtggcggtctcaatctggaacaatttgaaa

SEQ ID NO: 849173 - DNA, 75 bp, synthetic construct
  source 1..75: mol_type = other DNA
gaaggccgtagtgaagaagatttgctcacagagttaatgctaaagcgtggcattgacctgagtgttaacattgaa

SEQ ID NO: 849174 - DNA, 75 bp, synthetic construct
  source 1..75: mol_type = other DNA
attatttaaatcagagattagaaataccattgtaaagaatgggcctaaaaacccaccaagtaagataacgctacc

SEQ ID NO: 849175 - DNA, 75 bp, synthetic construct
  source 1..75: mol_type = other DNA
aaaaaactaacttctgatatgacagaactacaatcaatgaatatcactgaagataatatctgtaagctcaaatca

SEQ ID NO: 849176 - DNA, 75 bp, synthetic construct
  source 1..75: mol_type = other DNA
ctgacaacttccaagataatatgaaaaattatcttgaaattactggacagacagaagacggagcacgtttaagca

SEQ ID NO: 849177 - DNA, 75 bp, synthetic construct
  source 1..75: mol_type = other DNA
taaacaaatccctgcatcttcagtagaagaactgaccaaggggatcatcgactggcataagagtttaaaagttgg

SEQ ID NO: 849178 - DNA, 75 bp, synthetic construct
  source 1..75: mol_type = other DNA
cctccgccgcgcgggtaaaaaggttcgtgaagacaatccagagtggaaaggtgacgttggttttcgtgttttcaa

SEQ ID NO: 849179 - DNA, 75 bp, synthetic construct
  source 1..75: mol_type = other DNA
aggggcgctgaataattcgatgtcggttgaaaagatggttgcaggtcagcgttcaccacgtaatatgattatcat

SEQ ID NO: 849180 - DNA, 75 bp, synthetic construct
  source 1..75: mol_type = other DNA
atgaaatcattaaccacagtgcgtaaaaaaagccctaattatcccgttgagttcaaaatcaaaatggttgaactc

SEQ ID NO: 849181 - DNA, 75 bp, synthetic construct
  source 1..75: mol_type = other DNA
tatcgaaaccgtagtctgaagacgctctcctgtcagaagaagaaactttacaataaacttggaattatgagtgtt

SEQ ID NO: 849182 - DNA, 75 bp, synthetic construct
  source 1..75: mol_type = other DNA
tcgtcgggaagctggatgccgccgccagtgcgtgcagtgcagggaaagatcatcagaagtacactttttgtacta

SEQ ID NO: 849183 - DNA, 75 bp, synthetic construct
  source 1..75: mol_type = other DNA
tatggccgggacaacggcatccgtctgtctgccgtgtggctgacgcacgacccggaatacccggagaatttacct

SEQ ID NO: 849184 - DNA, 75 bp, synthetic construct
  source 1..75: mol_type = other DNA
atgcagttcacttttaatgaaggtcatattcagctgccatcgcaatggcaggatcagtcgatgcaggtcctggtg

SEQ ID NO: 849185 - DNA, 75 bp, synthetic construct
  source 1..75: mol_type = other DNA
aaaaccagttccagttccttcaagaggatgggtttatccaaatgaattgagattctgggaggagtacaataaagg

SEQ ID NO: 849186 - DNA, 75 bp, synthetic construct
  source 1..75: mol_type = other DNA
acggcgtacaccctcacagggcagctacagagcaggcacctgaaccttccgcagcttgactgtgactatacgtgg

SEQ ID NO: 849187 - DNA, 75 bp, synthetic construct
  source 1..75: mol_type = other DNA
acagtcccttgatcctgaaggtaaaacaaatttgtatttactggaggccgcggtggcgcagggcatgctatggtc

SEQ ID NO: 849188 - DNA, 75 bp, synthetic construct
  source 1..75: mol_type = other DNA
tttatcgtattctacgaagaacgaaatgcaagttttcgcatttaaggtacagagtaaagcaagtacattattccg

SEQ ID NO: 849189 - DNA, 75 bp, synthetic construct
  source 1..75: mol_type = other DNA
catcagagtgattataatgatttttatgatattggcagaaaaaatagcctttctgccaatattatgcaaccttta

SEQ ID NO: 849190 - DNA, 75 bp, synthetic construct
  source 1..75: mol_type = other DNA
tcgcggaagatgcgcactatgtctaccgctacgatgaatacggcaggctggcggagaagacggaccgcatcccgg

SEQ ID NO: 849191 - DNA, 75 bp, synthetic construct
  source 1..75: mol_type = other DNA
gccgggagtatgatgagaagggaaggctgacggcggagacctcgcgcagcggtgagacaacgcggtacagctatg

SEQ ID NO: 849192 - DNA, 75 bp, synthetic construct
  source 1..75: mol_type = other DNA
tgcgacatttgatcttgccataatgcgaactctcccaaggcttaaaggaatttcagctaacctacgcaaacaact

SEQ ID NO: 849193 - DNA, 75 bp, synthetic construct
  source 1..75: mol_type = other DNA
tcttttatttttggatgcactatagaaattaactttccgaatcggtcaccatttatagagttttcaactagtatc

SEQ ID NO: 849194 - DNA, 75 bp, synthetic construct
  source 1..75: mol_type = other DNA
cacttgctgcgttgactgctggcaagcgcctgttctctgcgaaggttcctgctggtgttcagcgttatctgcgcg

SEQ ID NO: 849195 - DNA, 75 bp, synthetic construct
  source 1..75: mol_type = other DNA
gaatctgtataattacccactgaatccgataataaggatggatcctttgggtttgtataatttatatcaattatt

SEQ ID NO: 849196 - DNA, 75 bp, synthetic construct
  source 1..75: mol_type = other DNA
aacggtgagcgggagaaagcgcagcgccgcagcctggcggagaagctgcagcaggaagggagcgaggacgggcac

SEQ ID NO: 849197 - DNA, 75 bp, synthetic construct
  source 1..75: mol_type = other DNA
attgattacagtcaaaatatcaacggtgattacaaagccaccattacaggcggcggagagggtatcgcaacgctg

SEQ ID NO: 849198 - DNA, 75 bp, synthetic construct
  source 1..75: mol_type = other DNA
ggagcctttttatattgataataagtgcatggaaagtctttatgaatggtggggttaccaaagaagcagggcgca

SEQ ID NO: 849199 - DNA, 75 bp, synthetic construct
  source 1..75: mol_type = other DNA
aagcgttgctctggttaaataaagccaaagcccaaggtcaatttactgataaacagatcaacgccattatttcaa

SEQ ID NO: 849200 - DNA, 75 bp, synthetic construct
  source 1..75: mol_type = other DNA
cacagataaactgtgccaatatctatcagtttggtccagagaagttccatgatatcgataaagcaaaatcctggc

SEQ ID NO: 849201 - DNA, 75 bp, synthetic construct
  source 1..75: mol_type = other DNA
gatatctgccttgatatatgccccgcctgggatgacggccttcactcctgatgttattggtgtggtaaacgatga

SEQ ID NO: 849202 - DNA, 75 bp, synthetic construct
  source 1..75: mol_type = other DNA
acctgcgttaccagggacagtacctcgacagggaaacgggactgcactacaatctgcacaggtactatgatccgg

SEQ ID NO: 849203 - DNA, 75 bp, synthetic construct
  source 1..75: mol_type = other DNA
atggcgataagtggaagcttcaaaaggaaggaaatgagcggcctagcaagactgcaacaactaaggctgagatca

SEQ ID NO: 849204 - DNA, 75 bp, synthetic construct
  source 1..75: mol_type = other DNA
catccgcatgagctggaaagcaaacttagcgaggcgctggaacaggtgcgcaataatcgcctggtgtttgttgat

SEQ ID NO: 849205 - DNA, 75 bp, synthetic construct
  source 1..75: mol_type = other DNA
acactcatcttgcagcaaaaattgagtattgcctgggcggggatattccatgtattccggtagaaaaagaggatg

SEQ ID NO: 849206 - DNA, 75 bp, synthetic construct
  source 1..75: mol_type = other DNA
tgcatttcggtggaaaaaacggatgaagcctacatcaccacgctggcgggtgacacagttcgttgtatctgtcgt

SEQ ID NO: 849207 - DNA, 75 bp, synthetic construct
  source 1..75: mol_type = other DNA
tgctggtgggatttttcgtcctggaaccgctcggcattccggtgagcgccattgcagctgtgggcgcgctgatat

SEQ ID NO: 849208 - DNA, 75 bp, synthetic construct
  source 1..75: mol_type = other DNA
cgtcaattatttgtcgggcagacgtggaatataccaggcaggtattaaagcctcattcagcagtacgttaagcgg

SEQ ID NO: 849209 - DNA, 75 bp, synthetic construct
  source 1..75: mol_type = other DNA
agggcgacgcgggtcacaggaacacgcgcggatggcgtcgcgttcagcatcgagcagggtgcggcgaacaatatc

SEQ ID NO: 849210 - DNA, 75 bp, synthetic construct
  source 1..75: mol_type = other DNA
tcgcaataatttatggttcggatagcataaaaaaatatgaacacggacagatggagcttacaaaaaatatcaaca

SEQ ID NO: 849211 - DNA, 75 bp, synthetic construct
  source 1..75: mol_type = other DNA
cagtcaattcatgacgggggtatttccacaggtacgacaatcgagagtggcaatcaggacgtttataaagggggt

SEQ ID NO: 849212 - DNA, 75 bp, synthetic construct
  source 1..75: mol_type = other DNA
cgacaagccgctggtcaaaatcaactgcgctgccatccccgccagtcttctggaaagtgagttattcggtcatga

SEQ ID NO: 849213 - DNA, 75 bp, synthetic construct
  source 1..75: mol_type = other DNA
gtggttgcactgtctttattatcattcagtagcgtcgccaaaacgattactgccgtcggttcaaccattaacagc

SEQ ID NO: 849214 - DNA, 75 bp, synthetic construct
  source 1..75: mol_type = other DNA
tgggcaccgttgtgctgattaagatgaagcgcacccaatacatctgggtaactgttgttccggctgtatggctgc

SEQ ID NO: 849215 - DNA, 75 bp, synthetic construct
  source 1..75: mol_type = other DNA
ttgaaacgtcggggaaaaagacgccgctggtttttgagtatacagaatctgttgtcatggaaaacagaggcgaac

SEQ ID NO: 849216 - DNA, 75 bp, synthetic construct
  source 1..75: mol_type = other DNA
aaacaaaagaaagtctaaaacagccgtcctgcaccagaagttttattttcttcgcgattttgtggaaagaaggaa

SEQ ID NO: 849217 - DNA, 75 bp, synthetic construct
  source 1..75: mol_type = other DNA
cgccgctacgcgaccgtccggaagatatccctcttttagcaaagcatttcacgcaaaaaatggcgcgccatatga

SEQ ID NO: 849218 - DNA, 75 bp, synthetic construct
  source 1..75: mol_type = other DNA
agcaacaatccggcggcgcattaattgcttccacgacctccggaacacttatcgaaggaaccaacagttatggtg

SEQ ID NO: 849219 - DNA, 75 bp, synthetic construct
  source 1..75: mol_type = other DNA
gaaaaatactaccattgatactggcggtaagctgattgtccagaaggaggctaaaacagatagcaccagacttaa

SEQ ID NO: 849220 - DNA, 75 bp, synthetic construct
  source 1..75: mol_type = other DNA
caaccataaatggtggtcgacagtatgttgaacagagcacagtagaaacaacaaccattaaaaatggcggtgagc

SEQ ID NO: 849221 - DNA, 75 bp, synthetic construct
  source 1..75: mol_type = other DNA
ggataaagataccggaaaacaaaaatcggcagatggacaggaaaccacacgtgctgaaggttttacaacccgtaa

SEQ ID NO: 849222 - DNA, 75 bp, synthetic construct
  source 1..75: mol_type = other DNA
tagtggtcaggatggctaataatgaaagtggagagtcaatgagaaatgctctcagaccatattttggtgagtttt

SEQ ID NO: 849223 - DNA, 75 bp, synthetic construct
  source 1..75: mol_type = other DNA
agtacgttaagcgggcatctcggggtggggtatagcaacggtgccgatgtggaatccccgtggaacgcagtggct

SEQ ID NO: 849224 - DNA, 75 bp, synthetic construct
  source 1..75: mol_type = other DNA
tttgtcgatattgttgaaggtcgttttgatgccgggatccggctgggtgaaagtgtggataaggatatgattgca

SEQ ID NO: 849225 - DNA, 75 bp, synthetic construct
  source 1..75: mol_type = other DNA
ttaggtacttttagtttcacaatgacaggattcattgctgcaattggtgcttatatcatatcagtgtctgataaa

SEQ ID NO: 849226 - DNA, 75 bp, synthetic construct
  source 1..75: mol_type = other DNA
ggtaaaaaggtccgtacgaccatcagccggaaagccgttgccgcaggcgaccgcgtcgtcagttcgtggcagaac

SEQ ID NO: 849227 - DNA, 75 bp, synthetic construct
  source 1..75: mol_type = other DNA
aaccccgagtgcgggtgttgagccttaatggtggtggggccagaggaatgtttacgatcagtatcctcgcagaga

SEQ ID NO: 849228 - DNA, 75 bp, synthetic construct
  source 1..75: mol_type = other DNA
ttaagccgcaagaatccgtttggcgatatcaaatcggatggcactgtgcaaacggctctcgaaaaccttggtttg

SEQ ID NO: 849229 - DNA, 75 bp, synthetic construct
  source 1..75: mol_type = other DNA
tttatggatttcacggtatagataaacgggctgccttacgtattcttctacaaaaagacaactttatacatagta

SEQ ID NO: 849230 - DNA, 75 bp, synthetic construct
  source 1..75: mol_type = other DNA
tggtaacagacaaacggcgtcaacattacgccagcggaacaggcaacaaaacccgcgtttatggaggcatcgtca

SEQ ID NO: 849231 - DNA, 75 bp, synthetic construct
  source 1..75: mol_type = other DNA
aacatccaaacaacatagtagaatccacaaatatcaagccgacgatcctatgcgcggtatttatttgtgtgatag

SEQ ID NO: 849232 - DNA, 75 bp, synthetic construct
  source 1..75: mol_type = other DNA
atattaaacgactctggtatctggaagatggcgtaattaaaacccgtcacggtaacagagctatcaagtttaaac

SEQ ID NO: 849233 - DNA, 75 bp, synthetic construct
  source 1..75: mol_type = other DNA
tcttcaatgcgttgcaacatctcatcttaccggcattaacgctggcgtttgttcacctggggattgtcgcccgcc

SEQ ID NO: 849234 - DNA, 75 bp, synthetic construct
  source 1..75: mol_type = other DNA
tgttcttaggtatcatctgacaccaatcggtaaaattcagacttactattatcattttaataaacttgttaatga

SEQ ID NO: 849235 - DNA, 75 bp, synthetic construct
  source 1..75: mol_type = other DNA
gtttctgaacgtaccgcctaccgctggacaaccggcgataacccttgtgtaccaatcgaaccacgcaccatccgt

SEQ ID NO: 849236 - DNA, 75 bp, synthetic construct
  source 1..75: mol_type = other DNA
tgatgttagccacaaagatgtgtacatactcaatatcggtaccgtcggagaagattattctcttagcccaagcct

SEQ ID NO: 849237 - DNA, 75 bp, synthetic construct
  source 1..75: mol_type = other DNA
aatcaccggcgtgacggacggtgccgggcgggagttccgtctggtgctgaccacacaggcgcagcgggcggaaga

SEQ ID NO: 849238 - DNA, 75 bp, synthetic construct
  source 1..75: mol_type = other DNA
ttttattctgcaaacagataagccgcttactcacgaacattataaacgcgtcgtctttgaaggcattccaccgaa

SEQ ID NO: 849239 - DNA, 75 bp, synthetic construct
  source 1..75: mol_type = other DNA
accgtaagggacgtctcacaggcgagcgccagacggtacataacccggagacgggggaactgctctggcagcatg

SEQ ID NO: 849240 - DNA, 75 bp, synthetic construct
  source 1..75: mol_type = other DNA
atccgcatcgaaacagacaacggtgaacgggagaaagcgcagtgccgcagcctggcggagaagttacagcaggaa

SEQ ID NO: 849241 - DNA, 75 bp, synthetic construct
  source 1..75: mol_type = other DNA
ggatgtcgctgtcgcgtaaaccggaggtaacgtggtacggatgggacggcgaccggctgacgacggtacagaccg

SEQ ID NO: 849242 - DNA, 75 bp, synthetic construct
  source 1..75: mol_type = other DNA
ccctcgcaccggacctggacatccgcatcccgtatgcgaccgacccggcgggaaaccggctgccggacccggagc

SEQ ID NO: 849243 - DNA, 75 bp, synthetic construct
  source 1..75: mol_type = other DNA
ggcggactcagcgcggcgggccgacctggctggctatatggttcactgactaatcaggaggtgaaggattacgtg

SEQ ID NO: 849244 - DNA, 75 bp, synthetic construct
  source 1..75: mol_type = other DNA
ataatagtggtgtgagtgttgactggcaaggtaatgcggtcgttccttatctgagcatctaccgtgaaaatgatg

SEQ ID NO: 849245 - DNA, 75 bp, synthetic construct
  source 1..75: mol_type = other DNA
aaaggcacagaaccctcttttaaaatggcttgccttatatcaaataaagagcacgtgagtttaaattggttagcg

SEQ ID NO: 849246 - DNA, 75 bp, synthetic construct
  source 1..75: mol_type = other DNA
cagttcaaatgccgaattctattgtggctattcggttgataaaatcgagcaactggaaaatggtattaagacatt

SEQ ID NO: 849247 - DNA, 75 bp, synthetic construct
  source 1..75: mol_type = other DNA
ggatatgacacaaaaaatgaaatctgcggccacggatttcgggcaatggcctgtagtgccctcatggagtcgggc

SEQ ID NO: 849248 - DNA, 75 bp, synthetic construct
  source 1..75: mol_type = other DNA
agttagccagtcacgatcttagactactgttagttaaaatgagggatttttacatccaaaataatatgactaacg

SEQ ID NO: 849249 - DNA, 75 bp, synthetic construct
  source 1..75: mol_type = other DNA
gcaagttccacggcatcaacgaagcgatggccttccgggatgagattgagcgcccgcgccgccaggaacttcgcg

SEQ ID NO: 849250 - DNA, 75 bp, synthetic construct
  source 1..75: mol_type = other DNA
gttgcactctattttgtaccggacattcatccgctggcgcttgctggtatcggttcggcgctgggtattctgggg

SEQ ID NO: 849251 - DNA, 75 bp, synthetic construct
  source 1..75: mol_type = other DNA
ttgcgctgattgtcatgggggcattaattgccctgggcaagatgctgaacagcgatgagccgatcacgttacgtc

SEQ ID NO: 849252 - DNA, 75 bp, synthetic construct
  source 1..75: mol_type = other DNA
cggttcggcgctgggtattctggggcttaacggagtggaagcctggctgcgcaaaaaggggattagttttctggg

SEQ ID NO: 849253 - DNA, 75 bp, synthetic construct
  source 1..75: mol_type = other DNA
atttgaactacacaccatctgcgctggtggcgaccttcggaaagaggatcacacagcagcaggctgatgcgcttg

SEQ ID NO: 849254 - DNA, 75 bp, synthetic construct
  source 1..75: mol_type = other DNA
accctgggctgaatggactcatcctcgcagcttaccagggaaatgctgacaatgacgcgtatatcactcttacga

SEQ ID NO: 849255 - DNA, 75 bp, synthetic construct
  source 1..75: mol_type = other DNA
cagctggcctcgcaggttgagggtactgccgaagaagtcaggcaggatgccgaagcggcaaaaaaggccgcatcc

SEQ ID NO: 849256 - DNA, 75 bp, synthetic construct
  source 1..75: mol_type = other DNA
caccgctattatgacccgctgcaggggcggtatatcactcaggatccgattgggctgaaggggggatggaacctg

SEQ ID NO: 849257 - DNA, 75 bp, synthetic construct
  source 1..75: mol_type = other DNA
cataattggtataatgatcatcgaaatgatcaccgtggagatcatcgacacgatcacggcggcgatcatcgtcca

SEQ ID NO: 849258 - DNA, 75 bp, synthetic construct
  source 1..75: mol_type = other DNA
aaatagattaactcctgaagagtttgaaaaggcgcgaatcctttcaaaagaatatattgagaaatataaaaacta

SEQ ID NO: 849259 - DNA, 75 bp, synthetic construct
  source 1..75: mol_type = other DNA
ctgaaaactgtggttctgggagactggtgggggctgtcgttacactttctcactttttgacgaactctacaccga

SEQ ID NO: 849260 - DNA, 75 bp, synthetic construct
  source 1..75: mol_type = other DNA
tgttagcagggttgatgtgggggcttatatttgtcgggccattgatcgtgccggaatacccggcgatgttacagt

SEQ ID NO: 849261 - DNA, 75 bp, synthetic construct
  source 1..75: mol_type = other DNA
ctggcacccacacggaccgccgccaccgccgcgccaccataagaaagctcatcatgatcatcacggcggtcatgg

SEQ ID NO: 849262 - DNA, 75 bp, synthetic construct
  source 1..75: mol_type = other DNA
gcggcaatgaaagagtttggcattacagcagttaatgatcaggccatgttcattgcacaagtcgggcatgagtct

SEQ ID NO: 849263 - DNA, 75 bp, synthetic construct
  source 1..75: mol_type = other DNA
ttattatattgccaggacgaattatttccccgaacacacaacttggcccgcgtgtgattgtagaacgtaatttac

SEQ ID NO: 849264 - DNA, 75 bp, synthetic construct
  source 1..75: mol_type = other DNA
catttgccacggtgtggttattcaaggcccggtagtgattggtgcaaactgcctgataggtaattatgcgtttat

SEQ ID NO: 849265 - DNA, 75 bp, synthetic construct
  source 1..75: mol_type = other DNA
ctgtttaaagcatgtcgctcccgcgaatggacaaagtctaaacctgaattagtgctcttcttctacgaccgataa

SEQ ID NO: 849266 - DNA, 75 bp, synthetic construct
  source 1..75: mol_type = other DNA
attaacgccaaagcaacacaaccggattcatcaataccagtgcgacgacccaatgcgcggtatttatttggagca

SEQ ID NO: 849267 - DNA, 75 bp, synthetic construct
  source 1..75: mol_type = other DNA
gcagctttcacggcatcaatgacgctatgacattcagagccaccattgaagagccgcgccgccaggagttacgcg

SEQ ID NO: 849268 - DNA, 75 bp, synthetic construct
  source 1..75: mol_type = other DNA
tgttattgcgtttttatttatgaagctattttcatacttcaccacaaccgcccaatcgctgaaggtaaggagatt

SEQ ID NO: 849269 - DNA, 75 bp, synthetic construct
  source 1..75: mol_type = other DNA
agcaagtggagagattcatgatatcaccacctaatgatatttcagataaaacgcataatcaaatatgtgcatcaa

SEQ ID NO: 849270 - DNA, 75 bp, synthetic construct
  source 1..75: mol_type = other DNA
tttagtcagtaatcctgagttgctggaaaaggatatcaacgcggcacgttcagctgcatggttctacgccaccag

SEQ ID NO: 849271 - DNA, 75 bp, synthetic construct
  source 1..75: mol_type = other DNA
tcaggaagctatcgcgaacctggtatacagcaaccgcctgggtaataaagctgctggtgatggctggaaataccg

SEQ ID NO: 849272 - DNA, 75 bp, synthetic construct
  source 1..75: mol_type = other DNA
ctcttctttgtttgttatttcttttatcaactggctgcgatagagcagaaaaacagaaaattgccgcacagctgc

SEQ ID NO: 849273 - DNA, 75 bp, synthetic construct
  source 1..75: mol_type = other DNA
tctccgagaagcaggcggttacagcttctgctgcttctacggatgtgattgaccttggacctatcgacggcaccc

SEQ ID NO: 849274 - DNA, 75 bp, synthetic construct
  source 1..75: mol_type = other DNA
cttgaccaacgccgcctgatgctccagtggtgggctgattttcttgatgcgaatcgggatgggatggtcaggccg

SEQ ID NO: 849275 - DNA, 75 bp, synthetic construct
  source 1..75: mol_type = other DNA
ctgtgggctttattcaattctattttttggtattgatgctcttgttaaaaatgaatatttttttaacgttaatag

SEQ ID NO: 849276 - DNA, 75 bp, synthetic construct
  source 1..75: mol_type = other DNA
tattattttgcagaacgaagggcagggtaaaaaagatgatatgtatggcactcacggttgggaaactttcgttga

SEQ ID NO: 849277 - DNA, 75 bp, synthetic construct
  source 1..75: mol_type = other DNA
tggccatgaatggcgtcggatgccgcgcaacagcacgcattatgggcgttggcctcaacacggttttacgtcact

SEQ ID NO: 849278 - DNA, 75 bp, synthetic construct
  source 1..75: mol_type = other DNA
aatgcgtgaagaggatgccgtatatggcggcgaaatgagtgcgcatcattattttaaagattttgcatactgcga

SEQ ID NO: 849279 - DNA, 75 bp, synthetic construct
  source 1..75: mol_type = other DNA
ggtgtgtttctgtttatactggcgttcgccctggtgagttgtgtgcacttggatgggaggacatagatctgaaaa

SEQ ID NO: 849280 - DNA, 75 bp, synthetic construct
  source 1..75: mol_type = other DNA
aatgagaaatcagattctggaacaggcaaaaatatattcagatgatattagtatgttttctgatgttatgactaa

SEQ ID NO: 849281 - DNA, 75 bp, synthetic construct
  source 1..75: mol_type = other DNA
agaggaggagtttaaaaaacgagtagatatagctaaagaaaatccggtagaaatgcctgtattgttcgatgagga

SEQ ID NO: 849282 - DNA, 75 bp, synthetic construct
  source 1..75: mol_type = other DNA
atcgctttatggcacagcatgctgccagtgcggtttccggtggcggaactgccgggcgcggtgaggaagacctgc

SEQ ID NO: 849283 - DNA, 75 bp, synthetic construct
  source 1..75: mol_type = other DNA
ggcgaaaatgctactggtagcggcaccggcaaccggtacggcaagtaccggcgatcaaattattgcgttgccgga

SEQ ID NO: 849284 - DNA, 75 bp, synthetic construct
  source 1..75: mol_type = other DNA
aatggcatcgccattcttccggtgagcggcacgctggtgcataaactgggtaccctgcggccttactccggcatg

SEQ ID NO: 849285 - DNA, 75 bp, synthetic construct
  source 1..75: mol_type = other DNA
gaaatatgagaataaagaagaggcaagggttattacaataattgaatcgcgtgcggcgaaaactttaggtgagtg

SEQ ID NO: 849286 - DNA, 75 bp, synthetic construct
  source 1..75: mol_type = other DNA
atgagcctgcgccaacagtttcggttcacctgcgatgccgctgtccataaggcattctttgaggcaaagcagcga

SEQ ID NO: 849287 - DNA, 75 bp, synthetic construct
  source 1..75: mol_type = other DNA
tactgttcagcagattatcaggcgcaactgaagcggcataatctgcgtggaagtatgagcgcaaaaggttgctgc

SEQ ID NO: 849288 - DNA, 75 bp, synthetic construct
  source 1..75: mol_type = other DNA
agcaatgcattcagtcggtatcaatccgtagtgagaaacatgcttcctcgcataggggaaaaacgtcttgcttcg

SEQ ID NO: 849289 - DNA, 75 bp, synthetic construct
  source 1..75: mol_type = other DNA
aaataggtgattttacgctaccaaagaccgacgcaggcactaaccgggttatacatcttctggcaccagcaattg

SEQ ID NO: 849290 - DNA, 75 bp, synthetic construct
  source 1..75: mol_type = other DNA
tgttgctgccgggttatgtgaaggggacgagctgttgccacaaacgcgccctgttcagaggcgcggtataccata

SEQ ID NO: 849291 - DNA, 75 bp, synthetic construct
  source 1..75: mol_type = other DNA
tgagcttaagaaaatggaaataacagcaaatgccatggtcagatacaaatcagctatccgaaattgccttgactg

SEQ ID NO: 849292 - DNA, 75 bp, synthetic construct
  source 1..75: mol_type = other DNA
ggtcgctgatcctctatctgtttgccagtctggcttcgctgtttttactcggtctggacagactggctattaagc

SEQ ID NO: 849293 - DNA, 75 bp, synthetic construct
  source 1..75: mol_type = other DNA
attaaaaaaattatatccagttgaagcagatgagtttagagcacggttaagacaaataggtccaacaaagaatga

SEQ ID NO: 849294 - DNA, 75 bp, synthetic construct
  source 1..75: mol_type = other DNA
tttttaaagaattattcagattttcagatgaagtttccaatatattaacaactttaacaacatatgagggtttcg

SEQ ID NO: 849295 - DNA, 75 bp, synthetic construct
  source 1..75: mol_type = other DNA
tgttgctgccgggttatgtgaaggggacgagctgttgccagaaacgcgcccctgttcagaggcgcggtataccat

SEQ ID NO: 849296 - DNA, 75 bp, synthetic construct
  source 1..75: mol_type = other DNA
cctatcagtctaggcatacttatgcctgctgggcattatcggcaggagcgaatccaagcttcatagcaaaccaaa

SEQ ID NO: 849297 - DNA, 75 bp, synthetic construct
  source 1..75: mol_type = other DNA
gatgaaagataacaatatcgggcaaatagaactgctcaataagcagttaacagagtgtgtcccatacatgcccca

SEQ ID NO: 849298 - DNA, 75 bp, synthetic construct
  source 1..75: mol_type = other DNA
aaccagagtttaaacgccgcgtggatatcgcccgtaataatccagttgagatcccactcctgttcaaagataaaa

SEQ ID NO: 849299 - DNA, 75 bp, synthetic construct
  source 1..75: mol_type = other DNA
atttcgactacgctgcgcagttccctgagtctccaaatctgaaacacttcggtctggggaaaagggagataacca

SEQ ID NO: 849300 - DNA, 75 bp, synthetic construct
  source 1..75: mol_type = other DNA
gagttttatgaggcagcagccagaatgagcgtccggcaagtcttcctggaagtagcagaaaaattgtcagaaaaa

SEQ ID NO: 849301 - DNA, 75 bp, synthetic construct
  source 1..75: mol_type = other DNA
aggagtatctaaaatcactcgttgacagtggtattgataagaagaaaattgccgattatctcaagaaattgaact

SEQ ID NO: 849302 - DNA, 75 bp, synthetic construct
  source 1..75: mol_type = other DNA
cagggcttggaacaaaacgtaatggataaaatcgttgcggctgctccagtactgaacgttgctactgcgggttct

SEQ ID NO: 849303 - DNA, 75 bp, synthetic construct
  source 1..75: mol_type = other DNA
ttgtatctcgcagtagtcatcgacctgtggtcacgcgccgtcattggctggtcgatgtcaccgcgaatgacagca

SEQ ID NO: 849304 - DNA, 75 bp, synthetic construct
  source 1..75: mol_type = other DNA
aaagcgtcattgttcatacggaccgtggtggtcaatactgttcaggggattatcaggcgctgctgaagctgacac

SEQ ID NO: 849305 - DNA, 75 bp, synthetic construct
  source 1..75: mol_type = other DNA
gagtttggtccgggagaagatacaaaatataaaagcggggaagatgttttatttctgtttaaatatcttgaacaa

SEQ ID NO: 849306 - DNA, 75 bp, synthetic construct
  source 1..75: mol_type = other DNA
aagaattatatcccctggcaaatacacatagttttactttagaatattgcaatcctatttataactcatatgttt

SEQ ID NO: 849307 - DNA, 75 bp, synthetic construct
  source 1..75: mol_type = other DNA
attaccaatgtgcagagcgcaattgcaaaggccggtaaaaaaggcacgctggcggcatcgttgcaggccatcgct

SEQ ID NO: 849308 - DNA, 75 bp, synthetic construct
  source 1..75: mol_type = other DNA
gttacccggcattcgtacccatctggtcgcttttgacaccagtgtggttgatctcacggcagacgttgccgatcc

SEQ ID NO: 849309 - DNA, 75 bp, synthetic construct
  source 1..75: mol_type = other DNA
tcgataaatttagcgtgatggataaacaggcagggtattacatggggaaactatcggtaatttttactccatctc

SEQ ID NO: 849310 - DNA, 75 bp, synthetic construct
  source 1..75: mol_type = other DNA
gctgggttcagggcgttcgtcaggtggtgatgccattcagtgtgacagaagaggaaagccggctgatgcgcctct

SEQ ID NO: 849311 - DNA, 75 bp, synthetic construct
  source 1..75: mol_type = other DNA
cagttccccagccttgacgacattctgtcgcagctggaaaaccaggtctgcgacgcggtcgtggacaaggtgaat

SEQ ID NO: 849312 - DNA, 75 bp, synthetic construct
  source 1..75: mol_type = other DNA
tttctaattatcgaatggactcaattatccccaaaaaatacagtacgctttttatttctggtccggatgccatta

SEQ ID NO: 849313 - DNA, 75 bp, synthetic construct
  source 1..75: mol_type = other DNA
ttaccgggctatgtccatgatgtgatgggctttagcgccttctgggcaggattggttatcagcctgcaatatttc

SEQ ID NO: 849314 - DNA, 75 bp, synthetic construct
  source 1..75: mol_type = other DNA
gacaagaccttctgattattctaaacacttgctatatgcatatggacagggagttttatttcgaaaattattgct

SEQ ID NO: 849315 - DNA, 75 bp, synthetic construct
  source 1..75: mol_type = other DNA
aagagcggtactgaattatcagtaacgcctgcggctaatcctgccattcctgcagggacaaaatttagcattctg

SEQ ID NO: 849316 - DNA, 75 bp, synthetic construct
  source 1..75: mol_type = other DNA
ctttatttcccttacaatgctgtaaatggcgttttttatatgcgccaatacgtcctacagttttctgaaactggc

SEQ ID NO: 849317 - DNA, 75 bp, synthetic construct
  source 1..75: mol_type = other DNA
attctggtttttattaccagggaataaactcaaatgccactaatgagcgcggttatcctgtatcaagtgctggag

SEQ ID NO: 849318 - DNA, 75 bp, synthetic construct
  source 1..75: mol_type = other DNA
atggcaagaccagcaaaaagtaaagataatgaaaaagtaagtaactttcttcaaggtaaaaacttcaaccgccta

SEQ ID NO: 849319 - DNA, 75 bp, synthetic construct
  source 1..75: mol_type = other DNA
gctttatttgtggggtgcagcaagccgtccgactgtacttgagtacaagataaaagatccagacacaaacgcgtc

SEQ ID NO: 849320 - DNA, 75 bp, synthetic construct
  source 1..75: mol_type = other DNA
taacttatggtggttttcatgttggatttagcggtagccacgcaactcaattcgccggacgtaattcaaaattct

SEQ ID NO: 849321 - DNA, 75 bp, synthetic construct
  source 1..75: mol_type = other DNA
cgccgaagtcgcgggttattctctacgtgaatttttattacgtttctcatttattggtattttttctgttttaat

SEQ ID NO: 849322 - DNA, 75 bp, synthetic construct
  source 1..75: mol_type = other DNA
agagcgacgcgctcctgagcctgatgacgaccaaaaattacggtgcgaattatgccatgtggcagcatcccttaa

SEQ ID NO: 849323 - DNA, 75 bp, synthetic construct
  source 1..75: mol_type = other DNA
ttatgagggcgaacagctgtatcttaatgagttaggatatgtttatggtaatgaagaaaaacaaatgaaattgta

SEQ ID NO: 849324 - DNA, 75 bp, synthetic construct
  source 1..75: mol_type = other DNA
agcaacagcaaaacggcggcggccaccagtgaaaccaatgcggcaaaatcagcagccgatgcgctaaactatcgc

SEQ ID NO: 849325 - DNA, 75 bp, synthetic construct
  source 1..75: mol_type = other DNA
ccgccaacgctcaaaaaacagaatcagacaaaaacgcggcggctgcatcaaagacggcggcagcaaactcagcca

SEQ ID NO: 849326 - DNA, 75 bp, synthetic construct
  source 1..75: mol_type = other DNA
gagaatgccagcctacgagctaacattgccgttatggatgaacggatcacaaaacttgaagagcttgtccggcag

SEQ ID NO: 849327 - DNA, 75 bp, synthetic construct
  source 1..75: mol_type = other DNA
agtgccgacgttaaaggaaccacgctgaataataccggtacgcttcagggtgcggacctgctggtgaattaccac

SEQ ID NO: 849328 - DNA, 75 bp, synthetic construct
  source 1..75: mol_type = other DNA
gttgtaaacgaactcaaaggggaaagactgagagaacctaacgaagcttttaatccttcaaatctagcaagagga

SEQ ID NO: 849329 - DNA, 75 bp, synthetic construct
  source 1..75: mol_type = other DNA
atgatcttcagcgcaataaaagaaatatatgatgaagatccaagttttatcttcgataaaatatcacacaaactc

SEQ ID NO: 849330 - DNA, 75 bp, synthetic construct
  source 1..75: mol_type = other DNA
gtgtgaggcatttactgctttctcttttcagatacaactgtaaaaatatatactttacctatggctataaatctc

SEQ ID NO: 849331 - DNA, 75 bp, synthetic construct
  source 1..75: mol_type = other DNA
atgcagggaagcactggaccggcaaacatcgaacctggttagctaatcaatcatttagtcagccatctcagcaga

SEQ ID NO: 849332 - DNA, 75 bp, synthetic construct
  source 1..75: mol_type = other DNA
gggcatcttctgaaccagcgggagggattttctgccacaacaacaacccggactaacccctcatccattcagtga

SEQ ID NO: 849333 - DNA, 75 bp, synthetic construct
  source 1..75: mol_type = other DNA
tatttataccaaaaattcgagaatgacgatgatctaatacgtgtgttatttttagcattgccagataacttatag

SEQ ID NO: 849334 - DNA, 75 bp, synthetic construct
  source 1..75: mol_type = other DNA
tgatacgttcggaagactgggactttttagagagtgcattaattagttgggataatttacccgctgttgttctca

SEQ ID NO: 849335 - DNA, 75 bp, synthetic construct
  source 1..75: mol_type = other DNA
agtaaaatatcggatttgactgaatttggccgtgttgtccatgctgaaatggacgcattgttatcttgtagtcgt

SEQ ID NO: 849336 - DNA, 75 bp, synthetic construct
  source 1..75: mol_type = other DNA
gtccgtaataacgggatagcttcagcgactgaagcagaatacgggacagcctttgcgaaggtggtggatttttta

SEQ ID NO: 849337 - DNA, 75 bp, synthetic construct
  source 1..75: mol_type = other DNA
gatatttgggcgaagttttttctgaggcaggaaaacagctcccgtgcgcaggttgatgaagcattacgtgtttat

SEQ ID NO: 849338 - DNA, 75 bp, synthetic construct
  source 1..75: mol_type = other DNA
atgacataattgcacctgttgttgcgtcttcgacaaatagtgaattcatggtccgtgcgagtgacaaaaatgaca

SEQ ID NO: 849339 - DNA, 75 bp, synthetic construct
  source 1..75: mol_type = other DNA
cacacatcaatggtggcacgcaaaccgttcagaattatggtaaggcaatcaataccgatatcgtctctggcctac

SEQ ID NO: 849340 - DNA, 75 bp, synthetic construct
  source 1..75: mol_type = other DNA
tattaaagtgatgatgacattaatggatgattgcggattttcaggtgagcatccttttattggtcgacaaaaaga

SEQ ID NO: 849341 - DNA, 75 bp, synthetic construct
  source 1..75: mol_type = other DNA
tgggaaccacaactgtgagtattgtgggattggttgggtttgttgttagtggtttgttcaaaagcaacaataaac

SEQ ID NO: 849342 - DNA, 75 bp, synthetic construct
  source 1..75: mol_type = other DNA
ttccattgccggaaatttagcgaccaatatgttgctggaaaatggcggtaatttattggtattagcaggtaccga

SEQ ID NO: 849343 - DNA, 75 bp, synthetic construct
  source 1..75: mol_type = other DNA
cgctcgtgaagggtatatttcatctaagcgcagggaccgctatacccagccaatagataaaattatcagggctgc

SEQ ID NO: 849344 - DNA, 75 bp, synthetic construct
  source 1..75: mol_type = other DNA
tatcaatacttccattgttaccaagtttttctcatggtgaatcggcggaatgttcccttgaaaactcagacagta

SEQ ID NO: 849345 - DNA, 75 bp, synthetic construct
  source 1..75: mol_type = other DNA
caattatccagcagctacaggcactggatcgcccactgttttgcaccgaatggcttgcacgacacttggggagta

SEQ ID NO: 849346 - DNA, 75 bp, synthetic construct
  source 1..75: mol_type = other DNA
atgcgatttaccgatggtaactggaacctgaaccgccccgggtttcctggagagtgttttatctgtgaactcagg

SEQ ID NO: 849347 - DNA, 75 bp, synthetic construct
  source 1..75: mol_type = other DNA
ttacgatttgacggtgagcggtacgaatagtgaaggggcattctccatccacaataacgtggcagacaatgtgtt

SEQ ID NO: 849348 - DNA, 75 bp, synthetic construct
  source 1..75: mol_type = other DNA
ggaagtcttattgaatctggtggatatcaagatgtaggaaggcataacaattatgtggggcagtctaataataca

SEQ ID NO: 849349 - DNA, 75 bp, synthetic construct
  source 1..75: mol_type = other DNA
tacgataatcgagagtggcaatcaggacgtttatacaggtggtatcagcaatggaacgacaattaagggtggtaa

SEQ ID NO: 849350 - DNA, 75 bp, synthetic construct
  source 1..75: mol_type = other DNA
gtgggacgcaaattgttgatagcaggagcacctcgaatgttattgaaatatattccggtggcgtgcttgatgtta

SEQ ID NO: 849351 - DNA, 75 bp, synthetic construct
  source 1..75: mol_type = other DNA
taaccaccattaaaaatggaggaatgcagacgctgcaaaacacgtcaacggcgcacactaccacgatctattctg

SEQ ID NO: 849352 - DNA, 75 bp, synthetic construct
  source 1..75: mol_type = other DNA
ccgagatacacaaataattgcaactggcgctaatgatgtacctaaatctggtgggggcctttactgggctgaagt

SEQ ID NO: 849353 - DNA, 75 bp, synthetic construct
  source 1..75: mol_type = other DNA
ttcgctaacaaagttgacgttgaccatcctgaaaataaatacaaagactttaaggatctcgaagataacgttgaa

SEQ ID NO: 849354 - DNA, 75 bp, synthetic construct
  source 1..75: mol_type = other DNA
tttcaagtggacgatgcaaaatttagacgcgataatgtaaaagaaataatttctactttagtcgataacgaagtt

SEQ ID NO: 849355 - DNA, 75 bp, synthetic construct
  source 1..75: mol_type = other DNA
aattgagaagacacatgatgatataaataatgctgagtttactgatggtattattgttagtggtattgatgatcg

SEQ ID NO: 849356 - DNA, 75 bp, synthetic construct
  source 1..75: mol_type = other DNA
gataggaacacgcccggacgcgacgctggtgaatacgatgctcgatgacgcactcgatacgctcagcgaacatga

SEQ ID NO: 849357 - DNA, 75 bp, synthetic construct
  source 1..75: mol_type = other DNA
gttgctgaaaagcgaaccgccgctcactgcggcggtgaatgatctggaaaacagtattgccacgctggtaatgac

SEQ ID NO: 849358 - DNA, 75 bp, synthetic construct
  source 1..75: mol_type = other DNA
tcagcgcattaaaagaaatatatgatggagatcctggttttatcttcgataagatatcacacaaactcagacata

SEQ ID NO: 849359 - DNA, 75 bp, synthetic construct
  source 1..75: mol_type = other DNA
atcccggtgctgcttaacgacgacggcagcatattcaacgaagggctggcggaaaagcttgcgaaagaacggaag

SEQ ID NO: 849360 - DNA, 75 bp, synthetic construct
  source 1..75: mol_type = other DNA
ggggctgaataccggcctactgtggttgtcagcgctaaaaccaacgacgcgaacctggcatgccagccgccacgg

SEQ ID NO: 849361 - DNA, 75 bp, synthetic construct
  source 1..75: mol_type = other DNA
aatcctcgtgagacggccagcgtcatcagcaagcgcctcgatgtgtcgatgtcgaaggccaagaccatcgctcag

SEQ ID NO: 849362 - DNA, 75 bp, synthetic construct
  source 1..75: mol_type = other DNA
atactggtattatttatacccggcgggggggatttattgatcttgcacatgtgcgggatactgctgattatactt

SEQ ID NO: 849363 - DNA, 75 bp, synthetic construct
  source 1..75: mol_type = other DNA
aactgactgggctgctgaccggctggggctgaataccggccttctgtggctgtcagcgctcaagccgacaactcg

SEQ ID NO: 849364 - DNA, 75 bp, synthetic construct
  source 1..75: mol_type = other DNA
cggcgagaacaaccagtgggcgatggattacgtcgtcgctgagacgcagcgcggtacgctggaggcgtttaataa

SEQ ID NO: 849365 - DNA, 75 bp, synthetic construct
  source 1..75: mol_type = other DNA
ccccgcagaaccgcgaatcaatacgttctatcgtcagatctctgcggagcaccttcggtattacaggtctgatgt

SEQ ID NO: 849366 - DNA, 75 bp, synthetic construct
  source 1..75: mol_type = other DNA
ccgacacaactgctttccggtacggcgctggctgcggggattggttttgtaaacctgcttggtgcagtgggcggg

SEQ ID NO: 849367 - DNA, 75 bp, synthetic construct
  source 1..75: mol_type = other DNA
actatgccgacacaactgctttccggtacggcgctggctgcggggattggttttgtaaacctgtttggcgcggtg

SEQ ID NO: 849368 - DNA, 75 bp, synthetic construct
  source 1..75: mol_type = other DNA
ccccccccgccccgggggggggggggggggcccccccgccagtctccgccgaacccgctggcgcggtttcgggct

SEQ ID NO: 849369 - DNA, 75 bp, synthetic construct
  source 1..75: mol_type = other DNA
agttgttgagccagatcgatgaaaacgaaattaaggccttaaatcagtcctcagaaggatgggctgaagagaaaa

SEQ ID NO: 849370 - DNA, 75 bp, synthetic construct
  source 1..75: mol_type = other DNA
gcaactggcgattatctacctgaccattcaggtggcggtttacggattaattttcttcctgccgacccaggttgc

SEQ ID NO: 849371 - DNA, 75 bp, synthetic construct
  source 1..75: mol_type = other DNA
acgatgccgacacaactgctttccggtacggcgctggctgcggggattggttttgtaaacctgtttggtgcagtg

SEQ ID NO: 849372 - DNA, 75 bp, synthetic construct
  source 1..75: mol_type = other DNA
ttaaagggataactaattacggggataagattactgttactgtgaagccggaaggtgactggcaagcgtcgctgt

SEQ ID NO: 849373 - DNA, 75 bp, synthetic construct
  source 1..75: mol_type = other DNA
gctcagcttgatattcccgaactacaacgcagggggctacagcttctggcttctgaaagcaaagacttcaggcta

SEQ ID NO: 849374 - DNA, 75 bp, synthetic construct
  source 1..75: mol_type = other DNA
tcatgccaatgttctgaaaggtatgagtgctgaaaatgtagctgaggcatgcggagtatcattagtggccgcacg

SEQ ID NO: 849375 - DNA, 75 bp, synthetic construct
  source 1..75: mol_type = other DNA
acgcgctcttcgtcgttgcagcgggcccctgctcattgcctgccgggtgccacacacccgtatgagtccctgtcg

SEQ ID NO: 849376 - DNA, 75 bp, synthetic construct
  source 1..75: mol_type = other DNA
cggtttcgggctgtcgctacggtccgatgcgtgaaaacccccggcttgcagcgaccgttccggtcgcgccgcctc

SEQ ID NO: 849377 - DNA, 75 bp, synthetic construct
  source 1..75: mol_type = other DNA
acagtttcccgaaactcgtggcaaagtcatgttattcggccagtggcttaataaaaccgagatcccagatccgca

SEQ ID NO: 849378 - DNA, 75 bp, synthetic construct
  source 1..75: mol_type = other DNA
actttgaagaaacacaaagcgaagttgaaagttacttttatgcagcagaaaagattttcgagcgtaatcaacatc

SEQ ID NO: 849379 - DNA, 75 bp, synthetic construct
  source 1..75: mol_type = other DNA
cataaggggtttgctaatggagtgaaattacctacgacttttgatgtagttgctagagcacaagttattctttct

SEQ ID NO: 849380 - DNA, 75 bp, synthetic construct
  source 1..75: mol_type = other DNA
atgttcggtttggctacagagatgatagttcttatattcttgtcgatcgtaataatagttctgtagatttccata

SEQ ID NO: 849381 - DNA, 75 bp, synthetic construct
  source 1..75: mol_type = other DNA
ctgatggatattttaaagaaataaaacgactatccgaagcattgttaccgctacaagcattgcctacctctaagt

SEQ ID NO: 849382 - DNA, 75 bp, synthetic construct
  source 1..75: mol_type = other DNA
catgctgtccaaccgcattgccggattggggctatcgattatggcggtgggcggtatgcccgctacatggagcgc

SEQ ID NO: 849383 - DNA, 75 bp, synthetic construct
  source 1..75: mol_type = other DNA
gtcggcaacttacgtcatcggccaaatcatggcgcagtttattaccagcgcctccggtctgggtatgttgctgat

SEQ ID NO: 849384 - DNA, 75 bp, synthetic construct
  source 1..75: mol_type = other DNA
ctggatacaaaacgttgccgatggtggtgctattgttgttttaccacggtattgaaagcccctatctctattcgc

SEQ ID NO: 849385 - DNA, 75 bp, synthetic construct
  source 1..75: mol_type = other DNA
acgtaccgttccgctggcaaccatgctgggtactggtttagcaggtattgtttatatcgctgcgactcaggtgct

SEQ ID NO: 849386 - DNA, 75 bp, synthetic construct
  source 1..75: mol_type = other DNA
gcgcaaaattcttatggagctggctaaagatggaacagtatccaaagatacccatgccagccggattggtcaggc

SEQ ID NO: 849387 - DNA, 75 bp, synthetic construct
  source 1..75: mol_type = other DNA
ctttgtctgtagcaccggaggggcaacgattgaaacgctcagagcctacgttcagagtcagtcaacacctgattg

SEQ ID NO: 849388 - DNA, 75 bp, synthetic construct
  source 1..75: mol_type = other DNA
atcacgtttgctacgccagcagaacgcgcatttacgtatgcagagtaaaacggggcttttgtggtcgagatcgta

SEQ ID NO: 849389 - DNA, 75 bp, synthetic construct
  source 1..75: mol_type = other DNA
aagaggattcttggcctgactttttcccggttggagtaccgccgaaatcagccgtccctgctgagggcgagtttt

SEQ ID NO: 849390 - DNA, 75 bp, synthetic construct
  source 1..75: mol_type = other DNA
agagccgacaagaacgccgacaccaaaagtgaagcgtgagcgtcttttgctcgagcagtttgagataataaggga

SEQ ID NO: 849391 - DNA, 75 bp, synthetic construct
  source 1..75: mol_type = other DNA
tatggtatgctttctggttacatggcgggtattctgcaatctgcagatcaaactttggctgcgattaacgctttg

SEQ ID NO: 849392 - DNA, 75 bp, synthetic construct
  source 1..75: mol_type = other DNA
ggaactattatatttacaatctttgttggtcaagctgggtagcttcaatcttgatgatgaaggcaaaaaatatca

SEQ ID NO: 849393 - DNA, 75 bp, synthetic construct
  source 1..75: mol_type = other DNA
ggcggctggatccgtaaaatcaacggcaaactgcagccgcgcatgggtaaccgtgccatgctgctgggtaaaatc

SEQ ID NO: 849394 - DNA, 75 bp, synthetic construct
  source 1..75: mol_type = other DNA
gctggcagaaaatgcccgcaaggtgtttgcttcaaacctggcagataagtttgcggtgtattcgcgtgagaagat

SEQ ID NO: 849395 - DNA, 75 bp, synthetic construct
  source 1..75: mol_type = other DNA
atcgaccacatgagatttcgtccacattaccagaacaagtcgtgaaaaatttgacctggcgacgtagcggacagc

SEQ ID NO: 849396 - DNA, 75 bp, synthetic construct
  source 1..75: mol_type = other DNA
acgctaaagtgaaaaaacaaaagaaggctccgcaggttcgtgaatcaggacgaaattcattgtttgtcgtgctgc

SEQ ID NO: 849397 - DNA, 75 bp, synthetic construct
  source 1..75: mol_type = other DNA
aacaagagcaccgaaaatagtagttacaagagaacgactgaaactaaagacatacaactgcatcagggaggcagc

SEQ ID NO: 849398 - DNA, 75 bp, synthetic construct
  source 1..75: mol_type = other DNA
gggagattatctaatcagtgccgggattagaaaaaacagccctgacggcagcattcacccggatggcctgacaaa

SEQ ID NO: 849399 - DNA, 75 bp, synthetic construct
  source 1..75: mol_type = other DNA
gactctgctgatttggtattgcaggatgttatcgaccgttgtcgtaaaaacaacccgtcagacttcatgctttat

SEQ ID NO: 849400 - DNA, 75 bp, synthetic construct
  source 1..75: mol_type = other DNA
attatatcgaatgtgattacattcgatggcggcggcacagttggtgtggcggtctcattctggaacaatttgaaa

SEQ ID NO: 849401 - DNA, 75 bp, synthetic construct
  source 1..75: mol_type = other DNA
tcttgcccaatcggatttaaaaatggtaccgacggtaatgttgccatcgctattgatgccattcgatctgctcgc

SEQ ID NO: 849402 - DNA, 75 bp, synthetic construct
  source 1..75: mol_type = other DNA
aaaaccacgtacggtggtgggatggaagggattgatttccgatccggcgttggatggtagttaccaagtgaaccg

SEQ ID NO: 849403 - DNA, 75 bp, synthetic construct
  source 1..75: mol_type = other DNA
gcgtcgttactcactacgtttacactaggtggcgtggccagtttgtgtggtttgattattgtggttgcctggctt

SEQ ID NO: 849404 - DNA, 75 bp, synthetic construct
  source 1..75: mol_type = other DNA
agtattaaaaaaagagtctatcgatattgatatttcagaatttacggatcatgaaaaatatttttggtatagata

SEQ ID NO: 849405 - DNA, 75 bp, synthetic construct
  source 1..75: mol_type = other DNA
cacgccggcgcgaaaaattcacctgtaccactgcgaccatcgcggcctgccgctggcccttatcagcacggaagg

SEQ ID NO: 849406 - DNA, 75 bp, synthetic construct
  source 1..75: mol_type = other DNA
aaacgatacgttacatgatgcgtataaagcttccgatgagcgtttatatgtcaataagcagaacaaaaacagccg

SEQ ID NO: 849407 - DNA, 75 bp, synthetic construct
  source 1..75: mol_type = other DNA
gctattcttgaagagtttttacatggtacacaagagaaactaggaatagctgaaaaattaggacgttatggacta

SEQ ID NO: 849408 - DNA, 75 bp, synthetic construct
  source 1..75: mol_type = other DNA
atgcgggaagcgctccgtcgtatcgggacactgtacgctttcgaggctgagatccgcggcagtccggcagaagag

SEQ ID NO: 849409 - DNA, 75 bp, synthetic construct
  source 1..75: mol_type = other DNA
tgagatccgcggcagtccggcagaagagcgactggcggtcagaaaagccagaacggtaccgctaatgcagtcgtt

SEQ ID NO: 849410 - DNA, 75 bp, synthetic construct
  source 1..75: mol_type = other DNA
taactacacttccatcagacgcccctcaacagcgaaactggatgtgaacggatgggagcgggatgaggcaacagg

SEQ ID NO: 849411 - DNA, 75 bp, synthetic construct
  source 1..75: mol_type = other DNA
gcgggtccggcagggaagtctgccagcctggatgatattgccgacaaggaggcgtttattcgtaagcttggggtg

SEQ ID NO: 849412 - DNA, 75 bp, synthetic construct
  source 1..75: mol_type = other DNA
aattcctatactatctatatatgcaactccgacacagttaggtgcgtatgcagcaattgaaaggataataaaatc

SEQ ID NO: 849413 - DNA, 75 bp, synthetic construct
  source 1..75: mol_type = other DNA
caagttgtccggccaaccagtgacggagacacacataccatctatttcccgatagcttttccgtcagcggcgctg

SEQ ID NO: 849414 - DNA, 75 bp, synthetic construct
  source 1..75: mol_type = other DNA
tttaggggcagccagtgtcaccgctgtcacttacggcttccttcaggttcatgatggcagccagtgggttacggt

SEQ ID NO: 849415 - DNA, 75 bp, synthetic construct
  source 1..75: mol_type = other DNA
tggccgcggaaatcctgaaacgtgcggaagcgtcagcggcgagtgcagaggaagcgaagaaacgggcagagaatg

SEQ ID NO: 849416 - DNA, 75 bp, synthetic construct
  source 1..75: mol_type = other DNA
aaggttttaagagctttgataatgtagggcaaactataaatataaattcattcaccagcttaattggagggaatg

SEQ ID NO: 849417 - DNA, 75 bp, synthetic construct
  source 1..75: mol_type = other DNA
ttcataccgacaggcacatattatatatgtggagcaatcctagctattgcaatatatatattaattcaccttttg

SEQ ID NO: 849418 - DNA, 75 bp, synthetic construct
  source 1..75: mol_type = other DNA
atacgccgccagaagttgagaaggcgatggaggctaaccaccgccgcccggcaagtgcttataaggatcccgcat

SEQ ID NO: 849419 - DNA, 75 bp, synthetic construct
  source 1..75: mol_type = other DNA
atgaatattcgccgtaaaaaccgcttgtggattgcctgtgctgttctggcagggttggcactgactatcggtctg

SEQ ID NO: 849420 - DNA, 75 bp, synthetic construct
  source 1..75: mol_type = other DNA
attatatcgaatgtgattacattcgatggcggcggcacagttggtgtggcggtctcactccggaacaatttgaaa

SEQ ID NO: 849421 - DNA, 75 bp, synthetic construct
  source 1..75: mol_type = other DNA
tactggcggcatctttctgcctggtacagccgcttgttgcaaatgagcagtttaaccagggaatgaatctgagta

SEQ ID NO: 849422 - DNA, 75 bp, synthetic construct
  source 1..75: mol_type = other DNA
gatgtcgaaactacgctaaaggcccaggagaggattataatgagactcaagcagattttataaacgaactacaca

SEQ ID NO: 849423 - DNA, 75 bp, synthetic construct
  source 1..75: mol_type = other DNA
atcctccaaacttaacaataatattaattgaagagccagaaaaccatctctcaccacaatatttaggacgaattg

SEQ ID NO: 849424 - DNA, 75 bp, synthetic construct
  source 1..75: mol_type = other DNA
acaattaatttctattggtgcggataaaaatgaattattaagagtcacttcaggaactttaagcgatgaagaact

SEQ ID NO: 849425 - DNA, 75 bp, synthetic construct
  source 1..75: mol_type = other DNA
aagtaaatggtatagagcttgacacttcattgataacatttgctccattaggagggcgatatgttaatcattttt

SEQ ID NO: 849426 - DNA, 75 bp, synthetic construct
  source 1..75: mol_type = other DNA
tgtctcttacgaaggcattttgccggatctgttccgtgaagggcagggcgttgtggtgcagggcgagctggaaaa

SEQ ID NO: 849427 - DNA, 75 bp, synthetic construct
  source 1..75: mol_type = other DNA
cttaatgagaactgcgatcccaccgtacgccacgacatggagcgtttttttcctccgcaccgttcccgacaacgg

SEQ ID NO: 849428 - DNA, 75 bp, synthetic construct
  source 1..75: mol_type = other DNA
aagaccgcttgatcgtcgaagcggcaggcgttcccgtccttgcacttggtggcccaaaaaccggcattgatggtt

SEQ ID NO: 849429 - DNA, 75 bp, synthetic construct
  source 1..75: mol_type = other DNA
acattgaccgtttagagcgatttcattctttgctggcgggtcagtactggacgtccactgacagcatccctgaag

SEQ ID NO: 849430 - DNA, 75 bp, synthetic construct
  source 1..75: mol_type = other DNA
atgccccacatgttaaccccaacggaggcgctatcgccttaggccatccgttgggaatgagtggtgcccgcctgg

SEQ ID NO: 849431 - DNA, 75 bp, synthetic construct
  source 1..75: mol_type = other DNA
atgtttaaagataaaactgtcgcagcggaaattagtgcattaatgcttgagattggtgcgaaattagataattcc

SEQ ID NO: 849432 - DNA, 75 bp, synthetic construct
  source 1..75: mol_type = other DNA
cagagggatgccgttatattatgaagaggacatcccttttttaggaaataactcctgtaaaaaatggaattatgt

SEQ ID NO: 849433 - DNA, 75 bp, synthetic construct
  source 1..75: mol_type = other DNA
ggtaaatattgtagtttacagagagcgtcgcaagtcattgtttgtacacaagtaattgagcaaagcgtggatatt

SEQ ID NO: 849434 - DNA, 75 bp, synthetic construct
  source 1..75: mol_type = other DNA
agcctttcactttttcatagccgctttgcttttagcgatcgccagcgaattgaaacggagacactggcacgcttt

SEQ ID NO: 849435 - DNA, 75 bp, synthetic construct
  source 1..75: mol_type = other DNA
ttgaatgcgtttcaccaaagctatgcggcgggattaaggcgcattggcttagagccaaacaaatcggaagggttc

SEQ ID NO: 849436 - DNA, 75 bp, synthetic construct
  source 1..75: mol_type = other DNA
ctttcttaagagagagtacagtacaagagtagattatatatctatttatcaagtgaccgagcctgtttaccattc

SEQ ID NO: 849437 - DNA, 75 bp, synthetic construct
  source 1..75: mol_type = other DNA
aatataaaaaaggccagcgttttgtattgcaaccggcgatggggttaccaagcggatattcagcaggctacagct

SEQ ID NO: 849438 - DNA, 75 bp, synthetic construct
  source 1..75: mol_type = other DNA
tcgctaatgggattggagctggctaacggatattttgtgcgcaattggcttgcctctgcgagcaaagttgcagaa

SEQ ID NO: 849439 - DNA, 75 bp, synthetic construct
  source 1..75: mol_type = other DNA
acagttatgacggtggtgaacatacggacagtgacccgcaggccgaatggccgggcagggaaacacttcctcagc

SEQ ID NO: 849440 - DNA, 75 bp, synthetic construct
  source 1..75: mol_type = other DNA
gtaagtatgaagatgcagtagttattagcttaagaaatagtctttttagtggtaatgagttagcgttagatttta

SEQ ID NO: 849441 - DNA, 75 bp, synthetic construct
  source 1..75: mol_type = other DNA
ggactggaagcaatgtgtatggctgatgctttgctgtctgggggggggggcagtgccgtcagtgccgaaagaaat

SEQ ID NO: 849442 - DNA, 75 bp, synthetic construct
  source 1..75: mol_type = other DNA
actggctgaagagagagatacagcgcgtatacgatgaaaatcatcaggtgtacggtgtgcgtaaagtctggcgcc

SEQ ID NO: 849443 - DNA, 75 bp, synthetic construct
  source 1..75: mol_type = other DNA
actggctgatgccatggagatgttgcgtcggcaggtggccattacgcctgctccccaatgggttcgcgtggttgg

SEQ ID NO: 849444 - DNA, 75 bp, synthetic construct
  source 1..75: mol_type = other DNA
acggggcttggttcacagttccatggtataacattttgtaaattaattgataaaagcactccggtaatgactcca

SEQ ID NO: 849445 - DNA, 75 bp, synthetic construct
  source 1..75: mol_type = other DNA
gtgggtggctgattttacttacgtcagcacatggcagggcttcgtctatgtggcgttcatcattgatgtgtttgc

SEQ ID NO: 849446 - DNA, 75 bp, synthetic construct
  source 1..75: mol_type = other DNA
atcacgtacttacgtacagatgaaggctggctgtatctggcagtggtcattgacctgtggtcacgtgccgttatt

SEQ ID NO: 849447 - DNA, 75 bp, synthetic construct
  source 1..75: mol_type = other DNA
gcgtaaagtctggcgccagttgttacgcgaaggtatcagggtggccagatgtacagtggctcgactcatggcggt

SEQ ID NO: 849448 - DNA, 75 bp, synthetic construct
  source 1..75: mol_type = other DNA
atggaagaatacgagcaacgttcaagcacgctggcgcagttagccgatgaagcgaaagaactgaatgatgattca

SEQ ID NO: 849449 - DNA, 75 bp, synthetic construct
  source 1..75: mol_type = other DNA
ggtcacgttgccgctgaagttatcgccggtaagaaacactacttcgatccgaaagttatcccgtccatcgcctat

SEQ ID NO: 849450 - DNA, 75 bp, synthetic construct
  source 1..75: mol_type = other DNA
gtatccgccgctgggaagttgagttcaaaggcctttgtgattcgaaggtgagtccgtggtggaataagcgcgatc

SEQ ID NO: 849451 - DNA, 75 bp, synthetic construct
  source 1..75: mol_type = other DNA
caggacgctttggttgcaaccaccagggcgacgcgggtcacaggaacacgcgcggatggcgtcgcgttcagcatc

SEQ ID NO: 849452 - DNA, 75 bp, synthetic construct
  source 1..75: mol_type = other DNA
gatgccgcagaaagcaaagaagggcgctttattggtatcaatgcgccgcgttctggcgcttatgacaacggcttc

SEQ ID NO: 849453 - DNA, 75 bp, synthetic construct
  source 1..75: mol_type = other DNA
cacttacgcttgatggttgcacgcctgacgacctgaaaggaattgaggagcgagccagtgaagccgctagcgatt

SEQ ID NO: 849454 - DNA, 75 bp, synthetic construct
  source 1..75: mol_type = other DNA
attatatcgaatgtgattacattcgatggcggcggcacagttggtgtggcggtctcaatcaggaacaatttgaaa

SEQ ID NO: 849455 - DNA, 75 bp, synthetic construct
  source 1..75: mol_type = other DNA
ttcaatcaacatgaaaatgtaattctggcgtctgatgagcctaagggaagcaagagaattgcagtaaagctggag

SEQ ID NO: 849456 - DNA, 75 bp, synthetic construct
  source 1..75: mol_type = other DNA
acagagcaagaagaccttatctctcatgaatctgcagggaatatgggctatgtgatcctcgcccaacccgcaacc

SEQ ID NO: 849457 - DNA, 75 bp, synthetic construct
  source 1..75: mol_type = other DNA
attaacggcgcggcgctctgttttggtaacgccgtgcgtcgcggcaatatcggtattgttggcgcatccggcacc

SEQ ID NO: 849458 - DNA, 75 bp, synthetic construct
  source 1..75: mol_type = other DNA
ctaggaccaccaccgacgagggagaacgcattgattaccgggtcaaaatgtacaacccggaaaccggtgggcaaa

SEQ ID NO: 849459 - DNA, 75 bp, synthetic construct
  source 1..75: mol_type = other DNA
actaaagagcttttttgacgtatgtatcatctctcttaaagggtattacaatatgattttttatattctgcggac

SEQ ID NO: 849460 - DNA, 75 bp, synthetic construct
  source 1..75: mol_type = other DNA
tgaatcaggggatggcagtcagtgccggtgcacaggaagagggggcatccgtaccggtcgggatgtcgctggtca

SEQ ID NO: 849461 - DNA, 75 bp, synthetic construct
  source 1..75: mol_type = other DNA
aagcggcgggcaatgctcaatccggcactgagccgaggccagggttaactgacagaattgtcaggggggcgtcag

SEQ ID NO: 849462 - DNA, 75 bp, synthetic construct
  source 1..75: mol_type = other DNA
ttattgggttccaatctggaagaacttgaacgcatgacgtcgatagttaacgacatgctgttcctgtcccatgct

SEQ ID NO: 849463 - DNA, 75 bp, synthetic construct
  source 1..75: mol_type = other DNA
ataaagcggcagacaatgctcaatccggtactgagccgggacccgggttagctgacagaattgtcaggggggcgt

SEQ ID NO: 849464 - DNA, 75 bp, synthetic construct
  source 1..75: mol_type = other DNA
attaacggcgcggcgctctgttttggcaacgccgtgcgtcgtggcaacatcggtattgttggcgcatctggcacc

SEQ ID NO: 849465 - DNA, 75 bp, synthetic construct
  source 1..75: mol_type = other DNA
gcccgaaccggttttacccgcgaattcagccacgtcagtgaatcaggtgctcgggcgcaggatctccaggtcagt

SEQ ID NO: 849466 - DNA, 75 bp, synthetic construct
  source 1..75: mol_type = other DNA
aaaatcgcacagttgaagaaaggtttttctgatggtgaggaaaaggcatctccaaatatcaaacctgagtgcatt

SEQ ID NO: 849467 - DNA, 75 bp, synthetic construct
  source 1..75: mol_type = other DNA
taccgggcgggtggtggagcagctgaacccggcaggcctgagttaccgctaccagtatgagcaggaccgcatcac

SEQ ID NO: 849468 - DNA, 75 bp, synthetic construct
  source 1..75: mol_type = other DNA
ttttcatgcccgctctgctgatgaaaatgtgctggatgctgatgcctatggtccggaagagcacgggcgtgcggg

SEQ ID NO: 849469 - DNA, 75 bp, synthetic construct
  source 1..75: mol_type = other DNA
ggccggaaacacattcacaggaagggcgtgtatttctttatgtgttatcacgaaccggaaacggtacggcatcac

SEQ ID NO: 849470 - DNA, 75 bp, synthetic construct
  source 1..75: mol_type = other DNA
gcaggtcaatgatgctgtccggggtgtattgcttgcgagtgcccggaggaacgacctggatcagattggtgcgaa

SEQ ID NO: 849471 - DNA, 75 bp, synthetic construct
  source 1..75: mol_type = other DNA
gttcaggaagatgactggcccggttacggtgtcagcaactggacgcggattgcggcgacgctgccctccgggcga

SEQ ID NO: 849472 - DNA, 75 bp, synthetic construct
  source 1..75: mol_type = other DNA
tctccggtagcagatctggaagcggaaccgggtaaagcgccctggtgtaccgccattaatgtcacccgcacggag

SEQ ID NO: 849473 - DNA, 75 bp, synthetic construct
  source 1..75: mol_type = other DNA
gacggtccggatgccggtgaagtgctggaaaatgcgaaaaacacgctgatgtcttatacccggctggcaaaccgg

SEQ ID NO: 849474 - DNA, 75 bp, synthetic construct
  source 1..75: mol_type = other DNA
gtcgcgccatgagtctgagtccggctttaatacaaactgttcagaagacggctgttgaggcaggatgtgcaagca

SEQ ID NO: 849475 - DNA, 75 bp, synthetic construct
  source 1..75: mol_type = other DNA
gtcgcgccatgaatctgagtccagcttttatacagtctactcagtcgcaagctgttaaggcaggatgtgcatgta

SEQ ID NO: 849476 - DNA, 75 bp, synthetic construct
  source 1..75: mol_type = other DNA
ctggtgcgcatcagcggcccgcgacagacgcgggaatacggctacagcgccacgggcaggctggagagcgtgcgc

SEQ ID NO: 849477 - DNA, 75 bp, synthetic construct
  source 1..75: mol_type = other DNA
ttggcaacgtctcaggccattattgatttgtccgcgatacctgtaccggatgtagtggatgtgccggacaccgct

SEQ ID NO: 849478 - DNA, 75 bp, synthetic construct
  source 1..75: mol_type = other DNA
catgcgaactcacctgcgaacgatgaaaacaaaaaagtcggccaaaccatcatcaatgatgatgtagtagagaat

SEQ ID NO: 849479 - DNA, 75 bp, synthetic construct
  source 1..75: mol_type = other DNA
cggaaatgattacttatctctcggttactacgatcaggacgactaccacattcaaagaggaattcgtattaatgg

SEQ ID NO: 849480 - DNA, 75 bp, synthetic construct
  source 1..75: mol_type = other DNA
tctttattcatggaaaacggatatgaccttcagacaggtgtatggttttgtcttatttctacccatctatatggc

SEQ ID NO: 849481 - DNA, 75 bp, synthetic construct
  source 1..75: mol_type = other DNA
gcagaaaaacagccgctgcatattccgtttgccatcgaactgtatgacaacgaaggcaaagtgatcccgttgcag

SEQ ID NO: 849482 - DNA, 75 bp, synthetic construct
  source 1..75: mol_type = other DNA
gaagagataaaattactgctatctcatgagttaatcgatatggactctgaacaaaaagacaccgaaaggtttgtg

SEQ ID NO: 849483 - DNA, 75 bp, synthetic construct
  source 1..75: mol_type = other DNA
aaatgttttattatttctgacatgctggctgaactcagaagacaaaataatgatggtgctgaaatttctgattct

SEQ ID NO: 849484 - DNA, 75 bp, synthetic construct
  source 1..75: mol_type = other DNA
ttactgtaaatacgactgatccaaaaaataataaagaattcctctggcttagttacagtataaataatttaagtt

SEQ ID NO: 849485 - DNA, 75 bp, synthetic construct
  source 1..75: mol_type = other DNA
ggttatattaccatatctaagttaaaaacgattgcttatgatatgaaaaatactttccttgagcatgaaactccg

SEQ ID NO: 849486 - DNA, 75 bp, synthetic construct
  source 1..75: mol_type = other DNA
ggtgttgcaaccgctattggaagcctggcttcttttgcctgtgttagctttggctttccagtaattcttgtcgga

SEQ ID NO: 849487 - DNA, 75 bp, synthetic construct
  source 1..75: mol_type = other DNA
atgagttcagagcgagatctggttaattttcttggcgatttttcaatggatgtggccaaagcagttatagccggt

SEQ ID NO: 849488 - DNA, 75 bp, synthetic construct
  source 1..75: mol_type = other DNA
gctgttgccttcttaggtacggcaattgatgctacgcatactgatgtactggctctgcagagttcagctgcgggt

SEQ ID NO: 849489 - DNA, 75 bp, synthetic construct
  source 1..75: mol_type = other DNA
atcaatagcgcacctgcttcaggacaaccaaaggcatggacatgcaatattccaggtgggccaggaacctattct

SEQ ID NO: 849490 - DNA, 75 bp, synthetic construct
  source 1..75: mol_type = other DNA
aacaacacagtgaactccatcggatacgttggtagttatgacccggcgacacaaaaccctgacactgcgcattta

SEQ ID NO: 849491 - DNA, 75 bp, synthetic construct
  source 1..75: mol_type = other DNA
agacggcaatacggcgtggcgcggggagtatgatgaatggggcaaccagcttaatgaggagaacccgcatcacct

SEQ ID NO: 849492 - DNA, 75 bp, synthetic construct
  source 1..75: mol_type = other DNA
aaatttccttttctcagtgagtcaggtaagcatgtggctaataatatcccagggaaaaataacagtcattatgtg

SEQ ID NO: 849493 - DNA, 75 bp, synthetic construct
  source 1..75: mol_type = other DNA
tataagttaatgcaggcccccccaaatatacctgagaaagacatttttaaagcatactatcttccctaccaaaag

SEQ ID NO: 849494 - DNA, 75 bp, synthetic construct
  source 1..75: mol_type = other DNA
tggtaatgaatgaagacgactgcaaaataagaagaggaaatgcagcagaattattttcagggatacggcacatcg

SEQ ID NO: 849495 - DNA, 75 bp, synthetic construct
  source 1..75: mol_type = other DNA
tacgcgtttgagtggcaggatcacgacgaaggcgacagcgataaattccattatgcaggtgtcggcgtaaattac

SEQ ID NO: 849496 - DNA, 75 bp, synthetic construct
  source 1..75: mol_type = other DNA
gaaaatcatatccgttacgggaattactgtggtgaatacagaaaatgttcatctcttttctgattcatctgaaaa

SEQ ID NO: 849497 - DNA, 75 bp, synthetic construct
  source 1..75: mol_type = other DNA
tggtgaaaatgctatgttttataaaacattctttttcggatacagagagagtctctccggaagctggtgtttttt

SEQ ID NO: 849498 - DNA, 75 bp, synthetic construct
  source 1..75: mol_type = other DNA
gtatctccggtggatggtgttttttgcgtcagacatatgatatccgcaacattgaaaactcatggttcacgtata

SEQ ID NO: 849499 - DNA, 75 bp, synthetic construct
  source 1..75: mol_type = other DNA
atcgtatttgtctttatataatgcaatagatacagtgagcgatgtttttaaatattacaatacaatagattctcc

SEQ ID NO: 849500 - DNA, 75 bp, synthetic construct
  source 1..75: mol_type = other DNA
atggaaaatataaccatttacgattatgtgattgtaaataacggtctatttaataaagatgctgtaatcgttttt

SEQ ID NO: 849501 - DNA, 75 bp, synthetic construct
  source 1..75: mol_type = other DNA
atacatctgatcaaacagattcatggactcgccttagaaaaaaaatggatggttttgaagaaactctaaatacaa

SEQ ID NO: 849502 - DNA, 75 bp, synthetic construct
  source 1..75: mol_type = other DNA
accatcaccgttaacgctgctggtaacgcggaaaacactgtcaaaaacatcgcatttaactatattgtgaggctt

SEQ ID NO: 849503 - DNA, 75 bp, synthetic construct
  source 1..75: mol_type = other DNA
tggataaagccggcgcactcgataccattaagggctacgcaggctggaacacaacgtgtaattcgttaggtacgg

SEQ ID NO: 849504 - DNA, 75 bp, synthetic construct
  source 1..75: mol_type = other DNA
attgcgtggcttgataagaggtaaacgtagtattctaataatcgtgctaacaatatgtgcgctagtattttcagc

SEQ ID NO: 849505 - DNA, 75 bp, synthetic construct
  source 1..75: mol_type = other DNA
acactatttccccggaacctgaactcaccgcacaggcgttctacataaaacgcttacgcttcattgttgactcga

SEQ ID NO: 849506 - DNA, 75 bp, synthetic construct
  source 1..75: mol_type = other DNA
ggagactgccccggacaccatgtcccggaccgcaggaactggtgtcagaagtggtggaggccgggaagcccgctc

SEQ ID NO: 849507 - DNA, 75 bp, synthetic construct
  source 1..75: mol_type = other DNA
tggttgcgtacaccaacgataaaaaatacgtccgctacccgctggttccgcttcagagcgtgccggtgcagtatc

SEQ ID NO: 849508 - DNA, 75 bp, synthetic construct
  source 1..75: mol_type = other DNA
tcgcccgattgatacccagaagtacgacgggatgcagctcaaatggcagatggacaacgacgagcaggtttacat

SEQ ID NO: 849509 - DNA, 75 bp, synthetic construct
  source 1..75: mol_type = other DNA
actgattcagagatgaccctatttggggaatttattgatgatggttccaagactctccgggcctttgatcaaaac

SEQ ID NO: 849510 - DNA, 75 bp, synthetic construct
  source 1..75: mol_type = other DNA
tgccaacattacagggattgattaacgcccactctccagagtctaaggccaacgcagcgaaagcagcagcgcaag

SEQ ID NO: 849511 - DNA, 75 bp, synthetic construct
  source 1..75: mol_type = other DNA
gaacgtcgcgtgaaccggattgcgccattgtttgctgatgaatttatcaggcgtgaactggatgctcgcccggca

SEQ ID NO: 849512 - DNA, 75 bp, synthetic construct
  source 1..75: mol_type = other DNA
tttattgtttgacgttggtgtggctgatgcactttccaaacgcctggtcagtagcgtacttaacgccgcagtggt

SEQ ID NO: 849513 - DNA, 75 bp, synthetic construct
  source 1..75: mol_type = other DNA
gcagatggtgaatgcgaggcatccgagaaagcgaagatcgaacaggtcttacgtaatcagcctgcgttgtctgcg

SEQ ID NO: 849514 - DNA, 75 bp, synthetic construct
  source 1..75: mol_type = other DNA
atcgactatcgccgccaccaacagtgatttaagtaccttaaaggcaacggttgaggatggcagtggtaacctgat

SEQ ID NO: 849515 - DNA, 75 bp, synthetic construct
  source 1..75: mol_type = other DNA
ctcatttccgccgttggtacagccagtccggcacgccgattgtgactgttaaagacgactacgatccagaaactg

SEQ ID NO: 849516 - DNA, 75 bp, synthetic construct
  source 1..75: mol_type = other DNA
tggctaagatgtcgggatttcgccataagacggtcgccgttcctgagtgggaaggcgtcaaagtggttctccgtg

SEQ ID NO: 849517 - DNA, 75 bp, synthetic construct
  source 1..75: mol_type = other DNA
gctacctgtttgcgctggtggcaggcgactttgatgtactgcgcgacaccttcaccacgcgttctggtcgcgaag

SEQ ID NO: 849518 - DNA, 75 bp, synthetic construct
  source 1..75: mol_type = other DNA
gcccatgccttcaaatggttaacctcgctactgcctgatctaaatcaggataatacacccgccgagaaagcggag

SEQ ID NO: 849519 - DNA, 75 bp, synthetic construct
  source 1..75: mol_type = other DNA
attctgagaacggagctgcatgaagagttaagaaaaactcgaaaaacaccaattgtatttattttaaaattaata

SEQ ID NO: 849520 - DNA, 75 bp, synthetic construct
  source 1..75: mol_type = other DNA
tcccgtgcatcccttaaacgtcaggttacatgcatacctgagcattgtgatctgagtatcgcagatggacgctat

SEQ ID NO: 849521 - DNA, 75 bp, synthetic construct
  source 1..75: mol_type = other DNA
ggtggacgacgatggtcctggcgttagcccggaagatcgcgaacagattttccgtccgttctatcggaccgatga

SEQ ID NO: 849522 - DNA, 75 bp, synthetic construct
  source 1..75: mol_type = other DNA
gcgacggcggaagaagcactgaaactaatcggcgaactgtacgccattgagcacgaaatacgcgggttgccggtg

SEQ ID NO: 849523 - DNA, 75 bp, synthetic construct
  source 1..75: mol_type = other DNA
ggttcgtcatctcctccggcggtctggttcgcgtactcgccgaaccggcaggggaaacacccggagcaacacctc

SEQ ID NO: 849524 - DNA, 75 bp, synthetic construct
  source 1..75: mol_type = other DNA
catcgtcctatgcaggcaaaacctgtacgctgcgcataaaactggcacccgatggtatgttactggatatcaaac

SEQ ID NO: 849525 - DNA, 75 bp, synthetic construct
  source 1..75: mol_type = other DNA
cggggaagtgttgttcaggtggaccacatgctctacaccacacctgcctgcgcctataaaaatatcgtcatcgac

SEQ ID NO: 849526 - DNA, 75 bp, synthetic construct
  source 1..75: mol_type = other DNA
ttcccgtccggtgttccacctgaatgagttttaccaagcctcgcgcaatctaaaaaagcatgattactatgttat

SEQ ID NO: 849527 - DNA, 75 bp, synthetic construct
  source 1..75: mol_type = other DNA
gcgatctcggtggtgctcttcatcattattttcgctgtcattctgctgaccaggaaacgggtgaacctcaatggc

SEQ ID NO: 849528 - DNA, 75 bp, synthetic construct
  source 1..75: mol_type = other DNA
gtgctggataacgcggcgttcgaagccgagcagatgggcaagtcgttgacggttaacttcccgcctgggccgtgg

SEQ ID NO: 849529 - DNA, 75 bp, synthetic construct
  source 1..75: mol_type = other DNA
tgttgtcattgtcggctctggcgctgcatgcacgtctgcagactaatccagctatgtcgagcgtggtcgatacca

SEQ ID NO: 849530 - DNA, 75 bp, synthetic construct
  source 1..75: mol_type = other DNA
cagtgcaggtcgtcgtgatgctatcagcagcattaactctgtaacacgactgatggcgttggctgctgtttcatt

SEQ ID NO: 849531 - DNA, 75 bp, synthetic construct
  source 1..75: mol_type = other DNA
atggctacttggcaaggaacaaacggcggattgttggctggtatcggtggcgtcaactcaaacgctcctaacgta

SEQ ID NO: 849532 - DNA, 75 bp, synthetic construct
  source 1..75: mol_type = other DNA
gtgcaagtagtgccgcatctgcagctaacgcgattgcagtaggccgtaacagtgctgctgctggcgtagacagcc

SEQ ID NO: 849533 - DNA, 75 bp, synthetic construct
  source 1..75: mol_type = other DNA
aactttgttgatttttcaagcttcctaaatttttttgggtttggatttttgggcacagaaatcttcattggctct

SEQ ID NO: 849534 - DNA, 75 bp, synthetic construct
  source 1..75: mol_type = other DNA
gctggatgttgacctttgttattggcctggcgctggtctttgctctgacctctaatgacatcatcagctacatta

SEQ ID NO: 849535 - DNA, 75 bp, synthetic construct
  source 1..75: mol_type = other DNA
cagttgcgtgatgaacggggacgttttgcaccggccacacgccgaagacaggcgagggagattcgttttaaacct

SEQ ID NO: 849536 - DNA, 75 bp, synthetic construct
  source 1..75: mol_type = other DNA
tacagttgatcctgtctctcgcagtgtgtcggcattaaatcgcacaatcgaaaattcccggccagactttgtggc

SEQ ID NO: 849537 - DNA, 75 bp, synthetic construct
  source 1..75: mol_type = other DNA
tgcccttcagcagtccggcggcgaagacggtggcagtgtggtgttcccgccggtgctggtgcagatgctcgaccg

SEQ ID NO: 849538 - DNA, 75 bp, synthetic construct
  source 1..75: mol_type = other DNA
catcccggaaggggttatccgcacggatgatgagcgcacccatcggtaccattacgacagtcagcaccggctggt

SEQ ID NO: 849539 - DNA, 75 bp, synthetic construct
  source 1..75: mol_type = other DNA
cgttacggtcagttgctgagcttcaccgactgttccggttatgtaacccgttatgaccatgaccgcttcgggcag

SEQ ID NO: 849540 - DNA, 75 bp, synthetic construct
  source 1..75: mol_type = other DNA
gtggagtggttgatataaatcttaattttttcaatgatattctttatagcgtgcgattaaaaaacattagtaaac

SEQ ID NO: 849541 - DNA, 75 bp, synthetic construct
  source 1..75: mol_type = other DNA
ggcactgggatgcgacatcgttattgctgcccgttcagcaaaattcgtcatggcgtttagtaagttaggcttagt

SEQ ID NO: 849542 - DNA, 75 bp, synthetic construct
  source 1..75: mol_type = other DNA
attcaatggggctggcatctaaatatggacacttaaataatggcggatatggagcgaaacccagcaaaccgccta

SEQ ID NO: 849543 - DNA, 75 bp, synthetic construct
  source 1..75: mol_type = other DNA
ggtcgcttctggctacgctttaactggcagggcgcgctggcggcgttagtgagcggtatggtgatgtcaattgtg

SEQ ID NO: 849544 - DNA, 75 bp, synthetic construct
  source 1..75: mol_type = other DNA
gaaaacccaaacatttgcagggcaatttagcaaagtatttaatgctgaagcccccgactggaagttgccgtatga

SEQ ID NO: 849545 - DNA, 75 bp, synthetic construct
  source 1..75: mol_type = other DNA
ctaagttttcattcattattgctcttagcttgttcttatcattctttatttataaatatattgaaactccattca

SEQ ID NO: 849546 - DNA, 75 bp, synthetic construct
  source 1..75: mol_type = other DNA
gtatttttcatttgcacaatcttattctttttattgaacccagtcttcaccgaaagtgaattattgcgttcattg

SEQ ID NO: 849547 - DNA, 75 bp, synthetic construct
  source 1..75: mol_type = other DNA
caacccgcgagacgctcagccttaatctgcgcgactggagcatggattttaaccagcagcagaccaccttacaga

SEQ ID NO: 849548 - DNA, 75 bp, synthetic construct
  source 1..75: mol_type = other DNA
ctcgccgtttattcgtctggtcgatatcttcctgaaagtcagggcaagtctggcactcacaggcggggcaagtaa

SEQ ID NO: 849549 - DNA, 75 bp, synthetic construct
  source 1..75: mol_type = other DNA
aaccgctatatgccggagatcgccaaagccgccaccgccacgcgcgacagcgccgaaacatgggcgaaagccgcg

SEQ ID NO: 849550 - DNA, 75 bp, synthetic construct
  source 1..75: mol_type = other DNA
gaatgcggagcttaaacagtcggagaaggaatttaataacttctgtcgtcaggagtactacggttgggaggacaa

SEQ ID NO: 849551 - DNA, 75 bp, synthetic construct
  source 1..75: mol_type = other DNA
tggttaatgaagcgcatccgattgatggcctgtccggtgaatatgcggagaaatcccttgaagaatgggcggaac

SEQ ID NO: 849552 - DNA, 75 bp, synthetic construct
  source 1..75: mol_type = other DNA
aaaggctactgacaggggaatttatttgccgtatcaacgatccggatgcttatcgtcatttacaggatgagagta

SEQ ID NO: 849553 - DNA, 75 bp, synthetic construct
  source 1..75: mol_type = other DNA
ttctcagctgaaaaccaccaacgataacgtagcgaccaatactgccaatatcaccaccaacactaacagtatcaa

SEQ ID NO: 849554 - DNA, 75 bp, synthetic construct
  source 1..75: mol_type = other DNA
tgcgtgaagcggcagaagcaataaaaatagcagccacaccacaaaaattgctggcatttcgtatgaaagtcacac

SEQ ID NO: 849555 - DNA, 75 bp, synthetic construct
  source 1..75: mol_type = other DNA
ttgctagtttactttcaatttcagcaaataaggtatctaggttaacgtctaagagtaaatcctcaagaaggcaag

SEQ ID NO: 849556 - DNA, 75 bp, synthetic construct
  source 1..75: mol_type = other DNA
cacgctcagtccatcaagatgatttcctggcaggcatggctagagtcaagagcggtaattgcgaaagctatcaat

SEQ ID NO: 849557 - DNA, 75 bp, synthetic construct
  source 1..75: mol_type = other DNA
gagcatctggcctggattgcgcgtcagatcatcccgaccgaagccgatgaagccgaactgctgaaacactgtgca

SEQ ID NO: 849558 - DNA, 75 bp, synthetic construct
  source 1..75: mol_type = other DNA
tgtcaccacatcggcagcgacaaccattcctgccggtacacgctggcagcgtgctgatggtgtggtttacagcct

SEQ ID NO: 849559 - DNA, 75 bp, synthetic construct
  source 1..75: mol_type = other DNA
aaccaataattataatgttgttaatatattgctcgccaatataaaagcccggatgtttaaaaatgaaataaataa

SEQ ID NO: 849560 - DNA, 75 bp, synthetic construct
  source 1..75: mol_type = other DNA
gaaagtgtcaaggtattgttcttggcgatagatgaatttgagaaagagtttggggtaaataaaaatgaaatactt

SEQ ID NO: 849561 - DNA, 75 bp, synthetic construct
  source 1..75: mol_type = other DNA
gcaacatattccatacgagcttgatcagcaatttgaaaatctaataaacaatccaccacccggtacattcgtcgt

SEQ ID NO: 849562 - DNA, 75 bp, synthetic construct
  source 1..75: mol_type = other DNA
ggctgataacctggacggtgacctgaaatcactgaacagcgcatgggaaggactgcgtatccgtgtcgctgacct

SEQ ID NO: 849563 - DNA, 75 bp, synthetic construct
  source 1..75: mol_type = other DNA
ccttcagcgctgttgacaggctgacccgtcccaccgaaaacgcccgtcgcatgatgggccagcttggcgactcca

SEQ ID NO: 849564 - DNA, 75 bp, synthetic construct
  source 1..75: mol_type = other DNA
tatgcacggcaatctcagcaacgacgcccgcgacattgcacggatggtggctgatgcagttggggcggaactaaa

SEQ ID NO: 849565 - DNA, 75 bp, synthetic construct
  source 1..75: mol_type = other DNA
acctttgacctggatgctgaaaagacggtggttaccgctgtcagccaggctgtccgtcatggcgcatctgatgct

SEQ ID NO: 849566 - DNA, 75 bp, synthetic construct
  source 1..75: mol_type = other DNA
gagccggcaccatggggattaactggcgaactgcatattcacctgcatgatgttcacacgcaaaacccgcgcgaa

SEQ ID NO: 849567 - DNA, 75 bp, synthetic construct
  source 1..75: mol_type = other DNA
tgactcacgatgtcatgccgacgttctccccgctaatgacaccagtgatggcggcaacatcccgtccggtggttg

SEQ ID NO: 849568 - DNA, 75 bp, synthetic construct
  source 1..75: mol_type = other DNA
atggttgataacgtaactgttggcagtgtatgtgcacaatctccttctttcatgcctgatttggatggaggaaaa

SEQ ID NO: 849569 - DNA, 75 bp, synthetic construct
  source 1..75: mol_type = other DNA
gatctggaaatcattgatgccttgctgacatcgatgaacaagatcacagctgccgatgatgctaagctgcagcac

SEQ ID NO: 849570 - DNA, 75 bp, synthetic construct
  source 1..75: mol_type = other DNA
agatactgatgaacaaggtcatcaaggagggcgtgaaaaccaaagtgctgatgctttcggccaccccggtgaaca

SEQ ID NO: 849571 - DNA, 75 bp, synthetic construct
  source 1..75: mol_type = other DNA
atgaggttggcggtaatatgtccctgacctatgatggctcttatggcacggtgaacggcagctataactacagcc

SEQ ID NO: 849572 - DNA, 75 bp, synthetic construct
  source 1..75: mol_type = other DNA
tattggctcggcgaataaatgtattcagttagttaactactggcctgatatatcgctggatgagtacatcaactt

SEQ ID NO: 849573 - DNA, 75 bp, synthetic construct
  source 1..75: mol_type = other DNA
atggcgaattgagcaacgtgccaagcgggatgcacgccgtagtgtctgctaagccggagatgggcctgcgccctg

SEQ ID NO: 849574 - DNA, 75 bp, synthetic construct
  source 1..75: mol_type = other DNA
aatgcacgctgaagaagagctatgacttccaggaactgctcactcttttctcgccgcactcgaaggagaaagcca

SEQ ID NO: 849575 - DNA, 75 bp, synthetic construct
  source 1..75: mol_type = other DNA
aacgcagttgccctcggtgtaggatctgtcgcagcgcaagacaataccgtttcggtagggaacagcacaacacaa

SEQ ID NO: 849576 - DNA, 75 bp, synthetic construct
  source 1..75: mol_type = other DNA
attttggagcagtttacccgtgactttgatgggaagtcattctctcatgtggtaactaacgaggatgatatacat

SEQ ID NO: 849577 - DNA, 75 bp, synthetic construct
  source 1..75: mol_type = other DNA
ttttatcggtggtggacttattattattgtctcaacatctgagcaagaccctgaaagtatgattgtaactgtggg

SEQ ID NO: 849578 - DNA, 75 bp, synthetic construct
  source 1..75: mol_type = other DNA
acactgaaaatgtcaaaaaagcgctgatgataataaatcctgatgcatattattggggcctaataaatgatgaag

SEQ ID NO: 849579 - DNA, 75 bp, synthetic construct
  source 1..75: mol_type = other DNA
tccctttttacgtacgttacgtcaggacaggtaataatgttacagcgggcactgctaattcactggcaactttca

SEQ ID NO: 849580 - DNA, 75 bp, synthetic construct
  source 1..75: mol_type = other DNA
cctgttgaaagtgcagcaaaacaggttaaaacgattctcgagcttatcagacgtggagacgtgactgaaattgtt

SEQ ID NO: 849581 - DNA, 75 bp, synthetic construct
  source 1..75: mol_type = other DNA
aacgtcgtcggcaataccggcaacggctcgcgcgatatcacgatcgacgccaatctgcctggcctgcgggtcgat

SEQ ID NO: 849582 - DNA, 75 bp, synthetic construct
  source 1..75: mol_type = other DNA
atgtggtgatcgacactaccgcgccagatcccgcggtgaaaaccatcgccatcagcgcgatcaccaccgatacag

SEQ ID NO: 849583 - DNA, 75 bp, synthetic construct
  source 1..75: mol_type = other DNA
aacatcaacggcaataacgcccaggcggatcgtacatacagcgtcgatgccaccgcgccacttgtgaccatcaac

SEQ ID NO: 849584 - DNA, 75 bp, synthetic construct
  source 1..75: mol_type = other DNA
ctctgccagacggcgcggcgaacgtgcaggccagcgtgagcagcgcgagcggcaataacgcctcggcaacccatg

SEQ ID NO: 849585 - DNA, 75 bp, synthetic construct
  source 1..75: mol_type = other DNA
ccacagaacatgctcaggcgcagattatcagcggctcggcaacgggcgcgacgaccggtaacacggtttccgtga

SEQ ID NO: 849586 - DNA, 75 bp, synthetic construct
  source 1..75: mol_type = other DNA
acagcattgagcacactcaggcgctggtggtcaccggtagcagtagcggactggcagcaggcgcggcgttgacgg

SEQ ID NO: 849587 - DNA, 75 bp, synthetic construct
  source 1..75: mol_type = other DNA
ctcggtgaagccacttacacggtgaccgccgccgctactgactctgatggcaacagcggttccgccagccataac

SEQ ID NO: 849588 - DNA, 75 bp, synthetic construct
  source 1..75: mol_type = other DNA
tggcgggcgatgacatcatcaacgccactgaacacggacaggcgcagattatcagcggctcggcaacgggcgcga

SEQ ID NO: 849589 - DNA, 75 bp, synthetic construct
  source 1..75: mol_type = other DNA
acgaccgacgcctccggcaactggagcgtcaccgttccggcatcggcggtaaccgcactgggccaggccaactac

SEQ ID NO: 849590 - DNA, 75 bp, synthetic construct
  source 1..75: mol_type = other DNA
tgcgcgtggatacggtggcgggcgatgatatcgtcaacagcattgaacacgggcaggcgctggtgatcaccggcg

SEQ ID NO: 849591 - DNA, 75 bp, synthetic construct
  source 1..75: mol_type = other DNA
ggcaactggagcaccacggtgccagcctccgctgtcggtgcgctgggcgaagccagctacacggtgacggcgaac

SEQ ID NO: 849592 - DNA, 75 bp, synthetic construct
  source 1..75: mol_type = other DNA
cgatggcagccacaccctgaccgcgacggtcaatgacaaagcgggcaacccggcgagcaccacgcataatctggc

SEQ ID NO: 849593 - DNA, 75 bp, synthetic construct
  source 1..75: mol_type = other DNA
ttaacgccagcgaagccgatgcgggcgtgacggtgagcggcagcaccaccgccgaagcggggcagattgttacga

SEQ ID NO: 849594 - DNA, 75 bp, synthetic construct
  source 1..75: mol_type = other DNA
acgcttacagcgtcgatgccagcgcgccaacggtgaccattaacaccattgcgggcgacgacattcttaacgccg

SEQ ID NO: 849595 - DNA, 75 bp, synthetic construct
  source 1..75: mol_type = other DNA
ataacgtgcaggttaataccgcgctgccgggcgtcaccattaacgtggtggcgagcgacgatattattaacgctg

SEQ ID NO: 849596 - DNA, 75 bp, synthetic construct
  source 1..75: mol_type = other DNA
agctacggcacttcgctgcacctgcgcattaccgatcccaacggtattaacgtctattacggtaacaccgtgaag

SEQ ID NO: 849597 - DNA, 75 bp, synthetic construct
  source 1..75: mol_type = other DNA
ctatcacccatccagtcaccgtcgatctggcagcggtggcgatctccattaacaccgtttccggcgacgatgtga

SEQ ID NO: 849598 - DNA, 75 bp, synthetic construct
  source 1..75: mol_type = other DNA
cgatggtcgcacactgactgacggcacctggaactacacggtgcgggtggtggatctggcggggaacgttgggca

SEQ ID NO: 849599 - DNA, 75 bp, synthetic construct
  source 1..75: mol_type = other DNA
cgaccgccgatgcacaggcgttaggcgaagggaatcaggcggtgctggtcagtgggaaagacgccacaggcaata

SEQ ID NO: 849600 - DNA, 75 bp, synthetic construct
  source 1..75: mol_type = other DNA
gcgagcaaaaccatcaccattgcgggcattagcgatgacaccggtttaagcagcagcgattttgttacccgcgac

SEQ ID NO: 849601 - DNA, 75 bp, synthetic construct
  source 1..75: mol_type = other DNA
aaaaaggcactggcctgaccctttccggcagcaccagcgggattgaaagcgggcaaaccgtcaccgtcacttttg

SEQ ID NO: 849602 - DNA, 75 bp, synthetic construct
  source 1..75: mol_type = other DNA
caacaccttcgcgggtgatgatgtggtgaatgcggcggaacacggctcatcgctggtgataagcggcaccaccac

SEQ ID NO: 849603 - DNA, 75 bp, synthetic construct
  source 1..75: mol_type = other DNA
ggttcaacacaccttcaacctgaataacttctacaccctttcatcgctcatcagccagggcaacggcacgtttgt

SEQ ID NO: 849604 - DNA, 75 bp, synthetic construct
  source 1..75: mol_type = other DNA
gcacgctgacgtggtatggctcgattgtggcgtttgataaagagggcgacggctatctcgatttctggattggcg

SEQ ID NO: 849605 - DNA, 75 bp, synthetic construct
  source 1..75: mol_type = other DNA
tcacctcctccagtgattttgttctgacggttgatacttctattccgaccacgctggcgcaaatcaccaaccaaa

SEQ ID NO: 849606 - DNA, 75 bp, synthetic construct
  source 1..75: mol_type = other DNA
gaccgatggcaactacaactatcaggtgcgggttatcgacaccgccggaaatatcggcgcgaccgccagccagat

SEQ ID NO: 849607 - DNA, 75 bp, synthetic construct
  source 1..75: mol_type = other DNA
gattagcatcaacaccatcgcgggcgatgatgtgatcaacgcgacggaaaaaggatctgatctggcgctttccgg

SEQ ID NO: 849608 - DNA, 75 bp, synthetic construct
  source 1..75: mol_type = other DNA
cgctaccgtggcgattaccatcaacacactttccactgacgatgtaattaatgccgccgaaaaaggcagcgattt

SEQ ID NO: 849609 - DNA, 75 bp, synthetic construct
  source 1..75: mol_type = other DNA
tctcactccggcggctatcaccatcaacactatcgccacggacgatgtgattaacgccgcagaaaaaggcgctaa

SEQ ID NO: 849610 - DNA, 75 bp, synthetic construct
  source 1..75: mol_type = other DNA
gcagcagcaccttcaccacggtgctggatgccagcggtaactggagcgtcggcgttccggcaagcgtcgtctcgg

SEQ ID NO: 849611 - DNA, 75 bp, synthetic construct
  source 1..75: mol_type = other DNA
atccggtgactgtcgatctctcggcgattgccgtcagcatcaacgccattaccgccgatgatgtgattaacgctg

SEQ ID NO: 849612 - DNA, 75 bp, synthetic construct
  source 1..75: mol_type = other DNA
tagccaaccttaccgtcagcccctatacggtgagcgcggcggtcagcgacaaagccggaaatccggcttcggcga

SEQ ID NO: 849613 - DNA, 75 bp, synthetic construct
  source 1..75: mol_type = other DNA
agccagctacgtggtgacagcgaacgtcaccgacagcgcgggcaacagcaattccgccagccataacgtacaggt

SEQ ID NO: 849614 - DNA, 75 bp, synthetic construct
  source 1..75: mol_type = other DNA
gttggcaacaccggcagcggcacgcgcgatatcaccatcgatgccagtctgcctggcctgcgggtggataccgtc

SEQ ID NO: 849615 - DNA, 75 bp, synthetic construct
  source 1..75: mol_type = other DNA
gatcaacctgctaataccgccatcaccgtgacgctgaacgggcaaaattatgcggcgacgaccgacgcctccggc

SEQ ID NO: 849616 - DNA, 75 bp, synthetic construct
  source 1..75: mol_type = other DNA
gaccattacctttaacgccatcagcggcgataacgtcctgaacgccgatgaaaaaggccagccgttgaccatcag

SEQ ID NO: 849617 - DNA, 75 bp, synthetic construct
  source 1..75: mol_type = other DNA
accacgcgctggcggtggacgttaccgcgccggatctcaccattaataccgtcgcgggtgatgacatcatcaatg

SEQ ID NO: 849618 - DNA, 75 bp, synthetic construct
  source 1..75: mol_type = other DNA
cttgcggtgggaacgccactgacagtggaaatcaacagcgtcacctacggcgcaacggtcctcgccgatggcacc

SEQ ID NO: 849619 - DNA, 75 bp, synthetic construct
  source 1..75: mol_type = other DNA
tctcaccattaacaccgtggcaggcgatgacatcatcaacgatgctgaacacgcccaggcgctggtgatttccgg

SEQ ID NO: 849620 - DNA, 75 bp, synthetic construct
  source 1..75: mol_type = other DNA
ggcagctggagcgtcggcgttccggcggcagatgtcacaaactggcctgcggggacggtcaatattgccgtctct

SEQ ID NO: 849621 - DNA, 75 bp, synthetic construct
  source 1..75: mol_type = other DNA
cagcggcgtggcggcaatggactacgactgggacggcgcggtggatgtgctggtgaccaaacagtcgggcagcgt

SEQ ID NO: 849622 - DNA, 75 bp, synthetic construct
  source 1..75: mol_type = other DNA
gcctgcgggtacggtgaatatcacggtttcaggtgctactagcgcaggaaacccggtcaccatcacccatccagt

SEQ ID NO: 849623 - DNA, 75 bp, synthetic construct
  source 1..75: mol_type = other DNA
taagcgccctgaccgccagcaactacaccgttagcgcggcggtgagcgacaaagccggaaacccggcctcggtta

SEQ ID NO: 849624 - DNA, 75 bp, synthetic construct
  source 1..75: mol_type = other DNA
aacaccatcgccgtcgacgacatcatcaacgccacggagaaaggtgcagatctggcgatttccggcagcagtaac

SEQ ID NO: 849625 - DNA, 75 bp, synthetic construct
  source 1..75: mol_type = other DNA
gcgccttcccgtggggttggctggcgggggcggcggtaggtggtggcgcgcttggtgcactgctggcaagcggtg

SEQ ID NO: 849626 - DNA, 75 bp, synthetic construct
  source 1..75: mol_type = other DNA
ttatcgagcacgatcaggcgctggtgattaccggcagcagctccgatctggcagcgggcagcaacgtcacgctga

SEQ ID NO: 849627 - DNA, 75 bp, synthetic construct
  source 1..75: mol_type = other DNA
tcaccagcgtcagcccggtggtggtcaacggctcgctcaccgccgcgcttgccagtaacgagacggcgcaaatca

SEQ ID NO: 849628 - DNA, 75 bp, synthetic construct
  source 1..75: mol_type = other DNA
acctgggggctgacaatcccagccgccgatctcgcaaccttgccagacggcgcagcaaacgtccaggccagcgtc

SEQ ID NO: 849629 - DNA, 75 bp, synthetic construct
  source 1..75: mol_type = other DNA
gcgataacattgtcaacaacgccgaagcggcggcagatcaaactctgagcggcgttgtcgtgggcgccgcgcagg

SEQ ID NO: 849630 - DNA, 75 bp, synthetic construct
  source 1..75: mol_type = other DNA
tccgcaaataacactggcaccacaacgcacgccatcgtgatagacgccaatctgcctggtctgcgggtcgatacg

SEQ ID NO: 849631 - DNA, 75 bp, synthetic construct
  source 1..75: mol_type = other DNA
attaacggtaacagcgcccaggccgatcgcgcgtacagcgtcgatgccaccgcgccgcttgtgaccatcaacacc

SEQ ID NO: 849632 - DNA, 75 bp, synthetic construct
  source 1..75: mol_type = other DNA
tggagatcagtgtcaccagtcagaccgccggaatcagtgcggtcaccgtcagcatcaacaacagcaccctgagcc

SEQ ID NO: 849633 - DNA, 75 bp, synthetic construct
  source 1..75: mol_type = other DNA
ggttcagaggcggacggttcgacggcgaacacgctgcgggcgagggtgaccgatgcgttcggtaatacgcttgcc

SEQ ID NO: 849634 - DNA, 75 bp, synthetic construct
  source 1..75: mol_type = other DNA
ggcggacaacggcgcaacgactgccccgacggtcatcacagggccggacggcacggtggagatctcagtcaccag

SEQ ID NO: 849635 - DNA, 75 bp, synthetic construct
  source 1..75: mol_type = other DNA
ccgccagcatcaacaacagcagccagagccagaacgtgacgtttatcgccgatgtcaggacggcgcagatcgcgg

SEQ ID NO: 849636 - DNA, 75 bp, synthetic construct
  source 1..75: mol_type = other DNA
ggcacggtggagatcagtgtcaccagccagacggcgggcaccagtactgtcactgccagcatcaacagcagcagc

SEQ ID NO: 849637 - DNA, 75 bp, synthetic construct
  source 1..75: mol_type = other DNA
caggacggcgcagatcgcggatctggtggtcacccgggataactcggtggctgacggttcgacggcgaatacgct

SEQ ID NO: 849638 - DNA, 75 bp, synthetic construct
  source 1..75: mol_type = other DNA
aaaaaggaaatgttatcctttttgttggtgctggtgtgtcaatgaacttaggtttgccatcatggagtcaattgg

SEQ ID NO: 849639 - DNA, 75 bp, synthetic construct
  source 1..75: mol_type = other DNA
ttttaccctgaaaaccgggctgctaacgcatggttactctttcttcctaccgatatcctcggcgtactggcgata

SEQ ID NO: 849640 - DNA, 75 bp, synthetic construct
  source 1..75: mol_type = other DNA
agcgtcatgatggtagcgcagcgacctgtgacgactttgtgcaggcgatggaagatgcgtcgaatgtcgatcttt

SEQ ID NO: 849641 - DNA, 75 bp, synthetic construct
  source 1..75: mol_type = other DNA
gtggaggtaattaaggatggttcagaggcggacggttcgacggcgaacacgctgcgggtgaaggtcaccgatgcg

SEQ ID NO: 849642 - DNA, 75 bp, synthetic construct
  source 1..75: mol_type = other DNA
cggtggaaatcagtgtcaccagtcagacggcgggagtcagtgcagtcactgtcagcatcaacagcagcagccaga

SEQ ID NO: 849643 - DNA, 75 bp, synthetic construct
  source 1..75: mol_type = other DNA
aaatagataataataagacgcaaataatcaagtttcatggagactttgatgacgatagttcaattgtattagatg

SEQ ID NO: 849644 - DNA, 75 bp, synthetic construct
  source 1..75: mol_type = other DNA
aaaggagaaggtgaaagccgctgctaagcgcatcaaggagcagaaggacgccgagaaggccggtcgcaaacgccg

SEQ ID NO: 849645 - DNA, 75 bp, synthetic construct
  source 1..75: mol_type = other DNA
cggtaagcgcagtcacgaccgctggtggaatgcaaacagtagatataacgctggtggcaggcccggcagacgcct

SEQ ID NO: 849646 - DNA, 75 bp, synthetic construct
  source 1..75: mol_type = other DNA
gctaccgtctggcagagctggtcctgatgcatgagccgctggccggatgcggtggtgcggctgagagccgcagag

SEQ ID NO: 849647 - DNA, 75 bp, synthetic construct
  source 1..75: mol_type = other DNA
tagatgattatttccaggcagacataacctgtcctgaccagcaaaagataccaccagtcataagcgcgtcaccac

SEQ ID NO: 849648 - DNA, 75 bp, synthetic construct
  source 1..75: mol_type = other DNA
gaaggcgtgccccccagtaataacgctatatatactaccaaccacgacggcaatttttacgcaagctttaccgct

SEQ ID NO: 849649 - DNA, 75 bp, synthetic construct
  source 1..75: mol_type = other DNA
acgcctgtcccagacagcataatcgccggtaccccgcagaacagctccggcagcgtcatcaccgccacagtcgtt

SEQ ID NO: 849650 - DNA, 75 bp, synthetic construct
  source 1..75: mol_type = other DNA
ggtaataacaataccagtgattcgcagccggtaacgtttgtggcggacaaaacctcggctcaggttgtcctgcag

SEQ ID NO: 849651 - DNA, 75 bp, synthetic construct
  source 1..75: mol_type = other DNA
aaaatcagtgcggagtcacttgaaaagctgatgctggattcaggtagtaaagggaactggagcaaagagctaaat

SEQ ID NO: 849652 - DNA, 75 bp, synthetic construct
  source 1..75: mol_type = other DNA
cacggccagaatcggagaatatgaaacattcgcccgcgttccgtttaatctgtatgcaaatcgttactacctgga

SEQ ID NO: 849653 - DNA, 75 bp, synthetic construct
  source 1..75: mol_type = other DNA
tggatactggggtggtcagagcgggtgccgggtgctgaggacgtactgccagcgccgctgccgccgtaccgggtg

SEQ ID NO: 849654 - DNA, 75 bp, synthetic construct
  source 1..75: mol_type = other DNA
gccataaagtcgattacttctcccgtttgcatgacaatgtcagccgggaagagtttctgaagtattaccgtgaac

SEQ ID NO: 849655 - DNA, 75 bp, synthetic construct
  source 1..75: mol_type = other DNA
ctggagctaaaggacctggcgttgcaggtgaagtcgtcaaaacggtagcaacgaaaggggcatctaaagggaaag

SEQ ID NO: 849656 - DNA, 75 bp, synthetic construct
  source 1..75: mol_type = other DNA
tggtgctggttctgatgggctggctgatcaacaacgcgctgtggacgattattaccaccacgggcattttcgcta

SEQ ID NO: 849657 - DNA, 75 bp, synthetic construct
  source 1..75: mol_type = other DNA
aaaaataataaaaaaagaggtctcgcctccctttgtattggtggaggaatggggacagctgttattatcgaattg

SEQ ID NO: 849658 - DNA, 75 bp, synthetic construct
  source 1..75: mol_type = other DNA
ttttccgctccttttgtggtttaggatgtatatcccgtttatccgtagaagagcaaaatatcacggattatcacc

SEQ ID NO: 849659 - DNA, 75 bp, synthetic construct
  source 1..75: mol_type = other DNA
cgcacattaatggaccgctttaatgaatcactctggtctggtgatttagtcgggtcagaagaaccggatgagtgt

SEQ ID NO: 849660 - DNA, 75 bp, synthetic construct
  source 1..75: mol_type = other DNA
cagttgacggttgcctgtctggctgagcatttgttaaaaaaatcctgcatgatgaatccccctgagcggaggggc

SEQ ID NO: 849661 - DNA, 75 bp, synthetic construct
  source 1..75: mol_type = other DNA
atgccctgggacaccttcgccgccagcgtcaccgaagcgcaaacattggcgcggcctgccgactttgatttcctg

SEQ ID NO: 849662 - DNA, 75 bp, synthetic construct
  source 1..75: mol_type = other DNA
tcgatgccatcgacatgctgcgcggcatgaacagcgacagcgcgcgcaaggtgcccgccgatgcgccaaccgcat

SEQ ID NO: 849663 - DNA, 75 bp, synthetic construct
  source 1..75: mol_type = other DNA
tgagctacgctctctgccagaactccctccgtccttaactgtacttaaagccagcgataacagactgagcaggct

SEQ ID NO: 849664 - DNA, 75 bp, synthetic construct
  source 1..75: mol_type = other DNA
tgaaaatgcttggtcagcccggtactcctgaatatgcgaaatatagtgaactaagtgcatcgatttttaatgaat

SEQ ID NO: 849665 - DNA, 75 bp, synthetic construct
  source 1..75: mol_type = other DNA
attacatctcggcaatgccattattaaaccttcccgttatgtacagaacaaccagttttccccgctgaaaaaata

SEQ ID NO: 849666 - DNA, 75 bp, synthetic construct
  source 1..75: mol_type = other DNA
cccggtggcaaccgacgatattattaacgccgccgaagcgggcgtcgcgcaaaccatcagcgggcaggttactgg

SEQ ID NO: 849667 - DNA, 75 bp, synthetic construct
  source 1..75: mol_type = other DNA
tcaaactggcggcggcggtcgtcatattgtctgcgccgatcgtcgctcacttcacgctgccagccgtcgtcgcgc

SEQ ID NO: 849668 - DNA, 75 bp, synthetic construct
  source 1..75: mol_type = other DNA
tagtcactgcgttttaccagcagaatgcgaatctggtaatgacactgacgacagagcacaccgaaacgttggtta

SEQ ID NO: 849669 - DNA, 75 bp, synthetic construct
  source 1..75: mol_type = other DNA
ttaatggtcgtcgggtacccggttgtcagaccctttgccagccagacatgcagattgaaaggagcggatatgcag

SEQ ID NO: 849670 - DNA, 75 bp, synthetic construct
  source 1..75: mol_type = other DNA
ctgcaggatattacacaaaaaacacgggcacaggtcgctgtattaatagtgccatccaccggaggcgattctatt

SEQ ID NO: 849671 - DNA, 75 bp, synthetic construct
  source 1..75: mol_type = other DNA
gcacgcgagcaaacgtatttcgtcgacaatacggcggatcatagagaaaaccggctgtggatgatggccaacatg

SEQ ID NO: 849672 - DNA, 75 bp, synthetic construct
  source 1..75: mol_type = other DNA
gcacgcgagcaaacgtatttcgtcgacaatacggccgatcatagagaaaaccgcctgtggatgatggccaacatg

SEQ ID NO: 849673 - DNA, 75 bp, synthetic construct
  source 1..75: mol_type = other DNA
gcacgcgagcaaacgtatttcgtcgacaatacggcagatcatagagaaaaccgactgtggatgatggccaacatg

SEQ ID NO: 849674 - DNA, 75 bp, synthetic construct
  source 1..75: mol_type = other DNA
gttattgtcgggaatgttttgtctgctggacaaggaatggggccaggtagacaagctgctgttaaagccggtata

SEQ ID NO: 849675 - DNA, 75 bp, synthetic construct
  source 1..75: mol_type = other DNA
gcacgcgagcaaacgtatttcgtcgacaagacggcggatcatagagaaaaccgtctgtggatgatggccaacatg

SEQ ID NO: 849676 - DNA, 75 bp, synthetic construct
  source 1..75: mol_type = other DNA
gcacgcgagcaaacgtatttcgtcgacaacacggccgatcatagagaaaaccgtctgtggatgatggccaacatg

SEQ ID NO: 849677 - DNA, 75 bp, synthetic construct
  source 1..75: mol_type = other DNA
catactggcatgtcacaaactgaggataatattaatgcagtcgctatgaagattactgcagatattatgcaatac

SEQ ID NO: 849678 - DNA, 75 bp, synthetic construct
  source 1..75: mol_type = other DNA
aaatggcaaatcacgttcagttcctatcggtaaggaactggaaatggagttaatgcagaggattgaagtacacga

SEQ ID NO: 849679 - DNA, 75 bp, synthetic construct
  source 1..75: mol_type = other DNA
tgctacgggcatggaacaaagagcttaaaaatccagaatgggacatgggcaatcgtaaacaccgcaaagcttgtg

SEQ ID NO: 849680 - DNA, 75 bp, synthetic construct
  source 1..75: mol_type = other DNA
gcacgcgagcaaacgtatttcgtcgacaaaacggcagatcatagagaaaaccgtctgtggatgatggccaacatg

SEQ ID NO: 849681 - DNA, 75 bp, synthetic construct
  source 1..75: mol_type = other DNA
tttaatctgcgtaaaactaagcaacgcctgggctggtttaaccaggatgaagttgatatggtcgcccgggaactg

SEQ ID NO: 849682 - DNA, 75 bp, synthetic construct
  source 1..75: mol_type = other DNA
atcaaaactcaacgagcagcgtgagtattacgagggcgttatctcggatggaagtaagcgcatagccgctcttct

SEQ ID NO: 849683 - DNA, 75 bp, synthetic construct
  source 1..75: mol_type = other DNA
ccaccggcagaagaaaagcccgaaccaccacagacagtaccagaaacaccgccccgaattctggactgcgcccgc

SEQ ID NO: 849684 - DNA, 75 bp, synthetic construct
  source 1..75: mol_type = other DNA
ccaccggcagaagaaaagcccgaaccgccgcagacagtaccagaaacaccgccccgaattctggactgcgcccgg

SEQ ID NO: 849685 - DNA, 75 bp, synthetic construct
  source 1..75: mol_type = other DNA
attcagcgcatactcgcaccagccggtatgtgagtgacaatgtcaaagaaagttatctgcagtgccagaatattt

SEQ ID NO: 849686 - DNA, 75 bp, synthetic construct
  source 1..75: mol_type = other DNA
tattcatgggcgctgggcagttataaaacgcaaaaggaagtttacgacgaattcattaaaatggttgataaacaa

SEQ ID NO: 849687 - DNA, 75 bp, synthetic construct
  source 1..75: mol_type = other DNA
agccgagtttgacggtaagataaaaacacccgggatcctgctcctggctctgctctcctgtctgctgttgcccgc

SEQ ID NO: 849688 - DNA, 75 bp, synthetic construct
  source 1..75: mol_type = other DNA
gtacccgacagcgagtatcagcgatctgctggttgtcgtgatgaagaagtccacggcgggtatcagtatttcgtg

SEQ ID NO: 849689 - DNA, 75 bp, synthetic construct
  source 1..75: mol_type = other DNA
tatcagtatttgaatcgcgattatcgttaattattacggagagacaagttaattcactgccattatttccagaat

SEQ ID NO: 849690 - DNA, 75 bp, synthetic construct
  source 1..75: mol_type = other DNA
tcatggcaagttttatcttaaaataccacgaatcaagcaaggtcaaaattttcgccaagattttaaatctgtcga

SEQ ID NO: 849691 - DNA, 75 bp, synthetic construct
  source 1..75: mol_type = other DNA
gttaacctgcaagtgggcagccaaaagttggggaatgctatggcggcacccagagttagttcacaaattccctta

SEQ ID NO: 849692 - DNA, 75 bp, synthetic construct
  source 1..75: mol_type = other DNA
ttgataccacgagaattagctggaaccgcagtttgctcaatgactttaataaattaaagaatcattcctttgaca

SEQ ID NO: 849693 - DNA, 75 bp, synthetic construct
  source 1..75: mol_type = other DNA
cgtgattttttctcaagctggacgagatttagccttttggcatttgaattttgaagaagtcgagccatacaaagc

SEQ ID NO: 849694 - DNA, 75 bp, synthetic construct
  source 1..75: mol_type = other DNA
tgagagcgtaggtgtattcacggttgaaatggaacatgtacctcaattcagcgcaagaaaaataccggaggccgc

SEQ ID NO: 849695 - DNA, 75 bp, synthetic construct
  source 1..75: mol_type = other DNA
catgattattcatgggcgctggtcagttataagatgcaaaaggaagtttacaacgaattcattaaaatggttgat

SEQ ID NO: 849696 - DNA, 75 bp, synthetic construct
  source 1..75: mol_type = other DNA
gaggaatagcatcattacttgttgttttattccacttcagattcttgctaaatgagcactactctcagaaagatt

SEQ ID NO: 849697 - DNA, 75 bp, synthetic construct
  source 1..75: mol_type = other DNA
aaggctaacggcaagccaatcgatgatacgcacactcatggcggtgttcagcgcggtggaagcagtaccgacggg

SEQ ID NO: 849698 - DNA, 75 bp, synthetic construct
  source 1..75: mol_type = other DNA
aaatagatgaactttctaaaaatttattcaacactataaaccaaaccattaaggataattttgatgatatttttc

SEQ ID NO: 849699 - DNA, 75 bp, synthetic construct
  source 1..75: mol_type = other DNA
agaagtctgagcagaatactcgtctgctagttgacgagtcctttaagcagacaacaactatggtcggcgaaaagt

SEQ ID NO: 849700 - DNA, 75 bp, synthetic construct
  source 1..75: mol_type = other DNA
atgaatatggacttcaccaatttcaacaaatatgttttctcactcaaaccagataattatgaacctccattaaaa

SEQ ID NO: 849701 - DNA, 75 bp, synthetic construct
  source 1..75: mol_type = other DNA
atatcatattctttatatctaattcacgccgtgatacttgctttgttcttctattataaggcagaccttgctgaa

SEQ ID NO: 849702 - DNA, 75 bp, synthetic construct
  source 1..75: mol_type = other DNA
aaacacttattcaggggattcaggaggcattacctatactatacaatattttcaagaaagagagcttgttaatat

SEQ ID NO: 849703 - DNA, 75 bp, synthetic construct
  source 1..75: mol_type = other DNA
tcattatttattgttaatagtaatgtggcatcaatctccttgggaaatgaatccttttcaacagatgaagatctt

SEQ ID NO: 849704 - DNA, 75 bp, synthetic construct
  source 1..75: mol_type = other DNA
ggtgtgttttattcggttgtataaagaaatcagacgtcaacaagctgaagactacattccatgcctggaatgcga

SEQ ID NO: 849705 - DNA, 75 bp, synthetic construct
  source 1..75: mol_type = other DNA
accaggcttgcaggcgctccagcctcagcagcgcgatatattcagtaaaatggcgaccagaaaaatcaacaccac

SEQ ID NO: 849706 - DNA, 75 bp, synthetic construct
  source 1..75: mol_type = other DNA
ggttataaaacacgttgattattcatgggcgcttggcagtcaaaagacgcaaaaagaagtatacgacgaatttat

SEQ ID NO: 849707 - DNA, 75 bp, synthetic construct
  source 1..75: mol_type = other DNA
tatgattcagttactggtattgatttgtctggtatatcttttattcagagtgaaattaatcaagcacataaatta

SEQ ID NO: 849708 - DNA, 75 bp, synthetic construct
  source 1..75: mol_type = other DNA
atggctccggaggtctgctgattgataatggttggttacgcatagcaggatctggtcacccccggttgccacgag

SEQ ID NO: 849709 - DNA, 75 bp, synthetic construct
  source 1..75: mol_type = other DNA
agccatcggcgtttttattgtcaccaacgcgctaatagtcctctgcggcataacgggactctttgctcgtctgat

SEQ ID NO: 849710 - DNA, 75 bp, synthetic construct
  source 1..75: mol_type = other DNA
gtctgacagtgttcctgctggctatgccgtcatgcagggacaaacttttgataaagccgcgtatccgctgcttgc

SEQ ID NO: 849711 - DNA, 75 bp, synthetic construct
  source 1..75: mol_type = other DNA
cggaggatttagaaacccttaaaacgccgggtatttactttcagccagcgaattctaatacctcagccgccagac

SEQ ID NO: 849712 - DNA, 75 bp, synthetic construct
  source 1..75: mol_type = other DNA
cattgaaaacacacctttgggcataaatgatttagtaaaatactcgggttatagccgaagatatttgcagttaat

SEQ ID NO: 849713 - DNA, 75 bp, synthetic construct
  source 1..75: mol_type = other DNA
gcgcagattagccttgatagcggcgcgacctggacaacgctcaccaccaacggtacacagtggacttacaccgac

SEQ ID NO: 849714 - DNA, 75 bp, synthetic construct
  source 1..75: mol_type = other DNA
cgcaggtgctcaccatcgccagcatcagcaccgacacggggagttcggcaactgactttatcaccagcgacacca

SEQ ID NO: 849715 - DNA, 75 bp, synthetic construct
  source 1..75: mol_type = other DNA
agccggacggcacggtggagatcagtatcaccagccagacagccggaaccagtacaggcactgccagcatcaaca

SEQ ID NO: 849716 - DNA, 75 bp, synthetic construct
  source 1..75: mol_type = other DNA
taatggtgaatataccattgtctggacagcatggggtgccgaggaaaatctggttgccagtctgaaattaaaaac

SEQ ID NO: 849717 - DNA, 75 bp, synthetic construct
  source 1..75: mol_type = other DNA
cgctgtcgcgtaaaccggaggtgacgtggtacgggtgggacggcgacaggctgacgacggtacagaccgacacca

SEQ ID NO: 849718 - DNA, 75 bp, synthetic construct
  source 1..75: mol_type = other DNA
acaacacgaaggctgatgctgttagtgcctggacggaagaaagtgagggaatttacaaagcaagctatacggccc

SEQ ID NO: 849719 - DNA, 75 bp, synthetic construct
  source 1..75: mol_type = other DNA
tcaccagccagacggcgggagtcagtgcagtcactgcaaccatcaacagcagtactcagagtcagaacgtgacat

SEQ ID NO: 849720 - DNA, 75 bp, synthetic construct
  source 1..75: mol_type = other DNA
tacctgtcagtgctttattagttgatgattttggaaatccggtggataacggtctggatttgctggatgatgcag

SEQ ID NO: 849721 - DNA, 75 bp, synthetic construct
  source 1..75: mol_type = other DNA
actggacattctgtcaatcccacaagggtaaaaaaaataatatattgcttcacttacctcaaatttgttgtgtta

SEQ ID NO: 849722 - DNA, 75 bp, synthetic construct
  source 1..75: mol_type = other DNA
attcagaaatgcaatgctccgaatggcaaacaccccacgcggatcaacagcgtttgagaaagccatgcagcaggc

SEQ ID NO: 849723 - DNA, 75 bp, synthetic construct
  source 1..75: mol_type = other DNA
ccttctcgctgaaaacgcagttggatcacttgctgcaaacagtgtgaaagatgatgcggaagcactagccaccga

SEQ ID NO: 849724 - DNA, 75 bp, synthetic construct
  source 1..75: mol_type = other DNA
taatttctagtacttacactcctattcaaggtatacaggtattttataataaggattttgataaagcctttgagg

SEQ ID NO: 849725 - DNA, 75 bp, synthetic construct
  source 1..75: mol_type = other DNA
tcgaatactatgacggtgcaggggccgggcgtgtccgccttcctgttcggttttgtcgagcggctgctgattccg

SEQ ID NO: 849726 - DNA, 75 bp, synthetic construct
  source 1..75: mol_type = other DNA
agcgtgttggccgattgttgggtacccgagccctgatgagttccgcacctgataatcctaaaaacatcatcggct

SEQ ID NO: 849727 - DNA, 75 bp, synthetic construct
  source 1..75: mol_type = other DNA
gctgcaaaagcggcagtaacaacaccaacagggcagcaaaccatcccgttcattatcgggtatgggacggcaatg

SEQ ID NO: 849728 - DNA, 75 bp, synthetic construct
  source 1..75: mol_type = other DNA
tgactcacgattaacagatagtaagaaacgaatgctcgttcttaagaaacaaggattcaatcagaggcaaattgc

SEQ ID NO: 849729 - DNA, 75 bp, synthetic construct
  source 1..75: mol_type = other DNA
cttattattattgaaaatgctcacctgaatcaccgccgcatacttgatgatctccaacgcgcgatatctcttatt

SEQ ID NO: 849730 - DNA, 75 bp, synthetic construct
  source 1..75: mol_type = other DNA
actggacattctgccaatcccacaaggataaaaaaggtaatctatcgcttcacttacctcaaatttgttgtatta

SEQ ID NO: 849731 - DNA, 75 bp, synthetic construct
  source 1..75: mol_type = other DNA
atggatggattaaagaaagtccctatggatttggatactcttgctaagatgataaataatttattaatggatgca

SEQ ID NO: 849732 - DNA, 75 bp, synthetic construct
  source 1..75: mol_type = other DNA
atgcatatgggggtacatttagggtatgtgctgttcgttcttatggagatgcccccagtgaaacttaacgcccgt

SEQ ID NO: 849733 - DNA, 75 bp, synthetic construct
  source 1..75: mol_type = other DNA
agtgctcttgattcagagagtgaacatttcgtgaatgttgccataaaaaacatgaatatcaccagggtaattatt

SEQ ID NO: 849734 - DNA, 75 bp, synthetic construct
  source 1..75: mol_type = other DNA
tacgctggcgtggcgacggcgatcctgatctttaccaaaggcggtcagacggacgaggtctggttctacgatctg

SEQ ID NO: 849735 - DNA, 75 bp, synthetic construct
  source 1..75: mol_type = other DNA
atggcagataaaaaaacggcgccactactgcttaacgtagacgccagcgaggtacttactcagttcggggagctt

SEQ ID NO: 849736 - DNA, 75 bp, synthetic construct
  source 1..75: mol_type = other DNA
tcaaacagaaagcgaagcagcttacaccattgcaagaaacaataacctggttcgataaaataacgggaaaattga

SEQ ID NO: 849737 - DNA, 75 bp, synthetic construct
  source 1..75: mol_type = other DNA
taaacgaaatgggctatcgacctgatgctattgaggcccaacttgcgcacgctgataccaacaatgttcgtcgca

SEQ ID NO: 849738 - DNA, 75 bp, synthetic construct
  source 1..75: mol_type = other DNA
gagttaatgctacatattgcttactgcgcaatttttttcatgtcttttgtttttgctgctattctaaattatttt

SEQ ID NO: 849739 - DNA, 75 bp, synthetic construct
  source 1..75: mol_type = other DNA
ctgatgaaatgggcctgcgcgtcccgcaggatgtttcgctgatcggttatgataacgtgcgcaacgcgcgctatt

SEQ ID NO: 849740 - DNA, 75 bp, synthetic construct
  source 1..75: mol_type = other DNA
ctttaggtactgccggtgcgggctatatgcacttcccggatgatcgtgacctcggatatttcaaccagctactgg

SEQ ID NO: 849741 - DNA, 75 bp, synthetic construct
  source 1..75: mol_type = other DNA
aatctatgacaggaaggttaaagtttcaccgacacttgatgtcccgttacctgaaaatattccaagtaattccac

SEQ ID NO: 849742 - DNA, 75 bp, synthetic construct
  source 1..75: mol_type = other DNA
ttaaagccggtcaggcgtatctggggtgggatgatgtcctttatcgccagacgctggcccgcctgaccggtaaaa

SEQ ID NO: 849743 - DNA, 75 bp, synthetic construct
  source 1..75: mol_type = other DNA
aatgtcagaacaggcattaagttttatcttgtagaaggagcttttagcgtaattggtaaaggttatgccaagggc

SEQ ID NO: 849744 - DNA, 75 bp, synthetic construct
  source 1..75: mol_type = other DNA
aaagaacgcatcagcccgttggttcgcgtaacgcctgtcttgcgtaacattatcggtgactcaaagcagaagagt

SEQ ID NO: 849745 - DNA, 75 bp, synthetic construct
  source 1..75: mol_type = other DNA
tgtacgcgcctgttcgccgacggtggaggatgagagccgcattgctgacagctacgccgactccgatcagcgccg

SEQ ID NO: 849746 - DNA, 75 bp, synthetic construct
  source 1..75: mol_type = other DNA
aaaagtgcatttgaaattttgacaattaaggatctcaataagcttggttttgttataaataaagaagatatttca

SEQ ID NO: 849747 - DNA, 75 bp, synthetic construct
  source 1..75: mol_type = other DNA
cggtacgggcaaaatgctgccgatggcacccagcatggtgaaaaaggcgtacctttttatcgcgatatccagttg

SEQ ID NO: 849748 - DNA, 75 bp, synthetic construct
  source 1..75: mol_type = other DNA
cgccaccggttcgaagcatcacgcggccatcgcgctgaccgacggcctgctgcgtagcctcacgccccgcgagtt

SEQ ID NO: 849749 - DNA, 75 bp, synthetic construct
  source 1..75: mol_type = other DNA
gcacgccccctgtacccggatgaagcgcccgatctttgggctgtgttgcgcgaactggcggcgcgggccgggctg

SEQ ID NO: 849750 - DNA, 75 bp, synthetic construct
  source 1..75: mol_type = other DNA
ttatccggtttcccggcacacaaggcgctgcaatatgcaaatgccagtggcgcgctcgccgtaatgcggcaaggt

SEQ ID NO: 849751 - DNA, 75 bp, synthetic construct
  source 1..75: mol_type = other DNA
tggcgcaccattatgcggggaggccggagagctgctaccggtatgatgataccggtcgggtgacggagcaggtca

SEQ ID NO: 849752 - DNA, 75 bp, synthetic construct
  source 1..75: mol_type = other DNA
atgggactgagtatggaaaaaatcaccacgtttatcgcctactggctagccgtgggtctggcgtatttcggggca

SEQ ID NO: 849753 - DNA, 75 bp, synthetic construct
  source 1..75: mol_type = other DNA
atccagacatcgcaattaatttagctcagtggctatctccaaaatttgcagtgcaagtatcgagatgggtgcgtg

SEQ ID NO: 849754 - DNA, 75 bp, synthetic construct
  source 1..75: mol_type = other DNA
gagacatcacgtacttacgtacagatgaaggctggctgtatatggcagtggtcattgacctgtggtcaagtgccg

SEQ ID NO: 849755 - DNA, 75 bp, synthetic construct
  source 1..75: mol_type = other DNA
aagaggcttatgaataaaaatattatagaatttgccaaagcttatatatggaataaatttttttatgatttgcct

SEQ ID NO: 849756 - DNA, 75 bp, synthetic construct
  source 1..75: mol_type = other DNA
ctccagttcggcttgaccaacatccttcacagtacgaccctataaaccaccctgcacatcatttacatattggtt

SEQ ID NO: 849757 - DNA, 75 bp, synthetic construct
  source 1..75: mol_type = other DNA
tcagggatacggcacattgctattaatattttgacgaatgataaggtattcaaggcagggttaagacgtaagatg

SEQ ID NO: 849758 - DNA, 75 bp, synthetic construct
  source 1..75: mol_type = other DNA
ttcaaggcagggttaagacgtaagatgcgaaaagcagccatggacagaaactacctggcgtcagttcttgtgggg

SEQ ID NO: 849759 - DNA, 75 bp, synthetic construct
  source 1..75: mol_type = other DNA
cctgcgaaaagtgataagtgggtcagcttcaaagcccttagtgatgccacggcaaaattttcagattcctgctca

SEQ ID NO: 849760 - DNA, 75 bp, synthetic construct
  source 1..75: mol_type = other DNA
ggcaacggtcgttaaagccccggtaagcgcgccgcgcgccgtgaaaaccacggcaccggctaaacgtggccgacc

SEQ ID NO: 849761 - DNA, 75 bp, synthetic construct
  source 1..75: mol_type = other DNA
aaagagctgaaagccacgaaaaagcgcgagctgctgccgttctatctgccgtgggtcagtggcgtgctggaacag

SEQ ID NO: 849762 - DNA, 75 bp, synthetic construct
  source 1..75: mol_type = other DNA
gcagctcgaccgcaatgccggtgtgcgcaaagagattgagcgactggagcgcgcattgaagccaaagccagaggc

SEQ ID NO: 849763 - DNA, 75 bp, synthetic construct
  source 1..75: mol_type = other DNA
tagggaacatgttattccccttccttcccaagccgtcaacatgctcaaaacactacaaggattaaccgggcatag

SEQ ID NO: 849764 - DNA, 75 bp, synthetic construct
  source 1..75: mol_type = other DNA
taccgcggcttctactgacgtaatcgatctcggtccaattgatggaaaccatcgcgatatcggcgtgggttaccc

SEQ ID NO: 849765 - DNA, 75 bp, synthetic construct
  source 1..75: mol_type = other DNA
ccgggctggaactacaatcccggcataaaccgcgagcaggcgctggcacgccagctggcgacaaaacaggcccgt

SEQ ID NO: 849766 - DNA, 75 bp, synthetic construct
  source 1..75: mol_type = other DNA
atggtagtattaatgttaatgttttggtcaaaaattgcattaagttgattaaccggcctgaatcactggataata

SEQ ID NO: 849767 - DNA, 75 bp, synthetic construct
  source 1..75: mol_type = other DNA
agtgagttttttaaagccattgataaaaatcataacaaacttaaattagcgttatatgccatgtcaattatagcc

SEQ ID NO: 849768 - DNA, 75 bp, synthetic construct
  source 1..75: mol_type = other DNA
aaattacgcacgtaccggagggcaggtgactgcagggaatgtgcaatcgattattggcgtgacttttgtttatca

SEQ ID NO: 849769 - DNA, 75 bp, synthetic construct
  source 1..75: mol_type = other DNA
ccacctcaaagcctcataacgttgccgaaacagatccagcgactcactaattgcttgcgtaaaaaaaatcgctac

SEQ ID NO: 849770 - DNA, 75 bp, synthetic construct
  source 1..75: mol_type = other DNA
ttctggtcgaaacaaagataatggatgagagttctgaaaaaacgacatcaaaatatattgccacgccacctttgt

SEQ ID NO: 849771 - DNA, 75 bp, synthetic construct
  source 1..75: mol_type = other DNA
taatgttatttcctattgttgttaatgcaacagagctcaatacaataacaaggagttatagcattgtattaggtg

SEQ ID NO: 849772 - DNA, 75 bp, synthetic construct
  source 1..75: mol_type = other DNA
ctttactgtggcaaaaatgacgcagcttgatttgctggcggacgttcgccagctcgtggaggacgcgctggagaa

SEQ ID NO: 849773 - DNA, 75 bp, synthetic construct
  source 1..75: mol_type = other DNA
agattcctttgcggagagtaacatcaggtatttttgttggtaatattacagaagactctactttaagtaatggtg

SEQ ID NO: 849774 - DNA, 75 bp, synthetic construct
  source 1..75: mol_type = other DNA
ctcgacatcatgctaccaggcaaggatggcatgaccatttgtcgtgatttacgcgcaaagtggtctggaccgatt

SEQ ID NO: 849775 - DNA, 75 bp, synthetic construct
  source 1..75: mol_type = other DNA
atggaaatcaacttaatgaccgaaaaagaagtttctgagttgttacaaaaaaggcgcacagctttgtataatttg

SEQ ID NO: 849776 - DNA, 75 bp, synthetic construct
  source 1..75: mol_type = other DNA
cgtgaaattaacccagcgcgtgctaagaaattctatgaatatctggttaatgctcacgaaaataaagagcccttc

SEQ ID NO: 849777 - DNA, 75 bp, synthetic construct
  source 1..75: mol_type = other DNA
tcccaatgatgctgacacaccaactgccgctcaaaacgcgccagcagttcttttccgacatcaacaacaacgtat

SEQ ID NO: 849778 - DNA, 75 bp, synthetic construct
  source 1..75: mol_type = other DNA
actagacttattcatgagaataatggtcttacagtagatccaacttttatacctccatttttgagcgtttttcaa

SEQ ID NO: 849779 - DNA, 75 bp, synthetic construct
  source 1..75: mol_type = other DNA
tggaaatttcttcctatttatcaagatatggtaaagaaaaaccgctaagtgactttacccagcagccattggagc

SEQ ID NO: 849780 - DNA, 75 bp, synthetic construct
  source 1..75: mol_type = other DNA
cgccagcgcggttaaattcacccacaacaactatgttgctctcaacgatggtgtaatgaacatcagcggcaacaa

SEQ ID NO: 849781 - DNA, 75 bp, synthetic construct
  source 1..75: mol_type = other DNA
gttgagggatatccttgaaaagcccctgcctaaagaaaccgaagctgtgtttaataccattcgcaatcaccgaaa

SEQ ID NO: 849782 - DNA, 75 bp, synthetic construct
  source 1..75: mol_type = other DNA
atgaaactgctgctattcacaatgttggcgtttatattgatagcagtcaacaacacttctactgcatccagagct

SEQ ID NO: 849783 - DNA, 75 bp, synthetic construct
  source 1..75: mol_type = other DNA
aatcttgataacgccctatggactattccggcagcgcgaatgaaagcccgcagagaacacgttattcccctaccc

SEQ ID NO: 849784 - DNA, 75 bp, synthetic construct
  source 1..75: mol_type = other DNA
tttttagtgaagatggcctctacactgcgcgcgttgagaatggcgctattgtcagtcactgccgtattaaatgtt

SEQ ID NO: 849785 - DNA, 75 bp, synthetic construct
  source 1..75: mol_type = other DNA
attacgagatccgcgtactggtgacggttaaaaacggtcaggttacagagcgccgccttcgtccggacgaaatcg

SEQ ID NO: 849786 - DNA, 75 bp, synthetic construct
  source 1..75: mol_type = other DNA
gccgggcatatgtggggatttatgcatttcttaaacccggatgcaactatatatgatgaaaataattacattatt

SEQ ID NO: 849787 - DNA, 75 bp, synthetic construct
  source 1..75: mol_type = other DNA
gcacagtgacatcgttccttggcgctatccggccagacgggaactgcaattcggggagtggcagcgcaaagacat

SEQ ID NO: 849788 - DNA, 75 bp, synthetic construct
  source 1..75: mol_type = other DNA
ttaaagctaaagcagatactgcgggttttactacgagtactggatttgcagtggctgctggtggtgatcagaaag

SEQ ID NO: 849789 - DNA, 75 bp, synthetic construct
  source 1..75: mol_type = other DNA
tttaaatttgccgctatgtatatggtagcaatagcgaagtctcacgcttttaacgatgccaacaagcgaacagct

SEQ ID NO: 849790 - DNA, 75 bp, synthetic construct
  source 1..75: mol_type = other DNA
tctcttaaaatatatttatatgataagacgaaggagaaaagatagagcatttttagttttaatgattattttggg

SEQ ID NO: 849791 - DNA, 75 bp, synthetic construct
  source 1..75: mol_type = other DNA
tagtctgcagtttcttaattttaccgttgtattctaaagcaacacctaaaaatattgatgaactatgtaaagagt

SEQ ID NO: 849792 - DNA, 75 bp, synthetic construct
  source 1..75: mol_type = other DNA
cactgccagatattgctttaccggagcctgaaacgccgcctgccgcaacggttgtcgcccaggagggcgaagatg

SEQ ID NO: 849793 - DNA, 75 bp, synthetic construct
  source 1..75: mol_type = other DNA
aggatttttgtcggcaacttattcatgctgtaaaaatacgcggtatggatggtgtaaatattctctccctagccg

SEQ ID NO: 849794 - DNA, 75 bp, synthetic construct
  source 1..75: mol_type = other DNA
ggaggtttcagcttcccctggccaaaacaaggcactccgcgccttggaagtgaccatcgtcgtgcacagtgacat

SEQ ID NO: 849795 - DNA, 75 bp, synthetic construct
  source 1..75: mol_type = other DNA
agtaacgcgctggataccgtcagagagatgtatcgaaaacagctccgaaaagtcccgctatcggcaccgaccggg

SEQ ID NO: 849796 - DNA, 75 bp, synthetic construct
  source 1..75: mol_type = other DNA
tacgttaagagctgcttatttcacaggaatgaaaattaataaaatatgcgcatggtctaataagacgccacattc

SEQ ID NO: 849797 - DNA, 75 bp, synthetic construct
  source 1..75: mol_type = other DNA
aacatgtctcgtgcacagatcctgcaacaggcgggtacttctgttctggcacaagcaaaccagacaacccagaac

SEQ ID NO: 849798 - DNA, 75 bp, synthetic construct
  source 1..75: mol_type = other DNA
gtagtgataccaccagcaaaatcactaatgttgctaaaggtacggtttctgcaaccagcaccgatgtagtaaacg

SEQ ID NO: 849799 - DNA, 75 bp, synthetic construct
  source 1..75: mol_type = other DNA
agcgttaccaggtgaaacgcatcacagtgaatccgggtgaaggaatgtcggtgcagatgcaccatcaccgtgccg

SEQ ID NO: 849800 - DNA, 75 bp, synthetic construct
  source 1..75: mol_type = other DNA
tagccgatttactcactgagcagattaaagatggaaccctgacaccaggcgcgatgatgccaactgaggccgagc

SEQ ID NO: 849801 - DNA, 75 bp, synthetic construct
  source 1..75: mol_type = other DNA
aactccaccgcttaaaaattataatgagcggttacacaatactaatttatttaacccaaaatatcaaaaaaaagc

SEQ ID NO: 849802 - DNA, 75 bp, synthetic construct
  source 1..75: mol_type = other DNA
aggcggaactctaaatatcaacattcctgggcgtagcgctcttcttttagggaaaacaggagaactgccgaacta

SEQ ID NO: 849803 - DNA, 75 bp, synthetic construct
  source 1..75: mol_type = other DNA
ccctggctattggcaaggtcaggtcttgattccctttattatagatccattaacaaaagaacgtgaccaaatcca

SEQ ID NO: 849804 - DNA, 75 bp, synthetic construct
  source 1..75: mol_type = other DNA
tccccggtgtcggggcgttttatgctggggagaatggcagctcaacgaccggggatgccatctacatgcgcggcg

SEQ ID NO: 849805 - DNA, 75 bp, synthetic construct
  source 1..75: mol_type = other DNA
atagcgcgctgttgttgggaaccagtgtgctggtggtggcgctggccggcatgatgtttgtgacccgtaatatcg

SEQ ID NO: 849806 - DNA, 75 bp, synthetic construct
  source 1..75: mol_type = other DNA
cttccgcacgtagtcgtatcgaagatgctgactatgcgacagaagtgtctaacatgtctcgtgcacagatcctgc

SEQ ID NO: 849807 - DNA, 75 bp, synthetic construct
  source 1..75: mol_type = other DNA
tggcaggcttaggcctgctttttctatttcctgtttttatcattgtgtcaatgttaattgttgctgattctaaag

SEQ ID NO: 849808 - DNA, 75 bp, synthetic construct
  source 1..75: mol_type = other DNA
gtacgtattggtgcccccaccggcgtggcctgttcggtgtgccccggcggagtgacgtctggccatccggtcaat

SEQ ID NO: 849809 - DNA, 75 bp, synthetic construct
  source 1..75: mol_type = other DNA
tctatcctgtggatggagtattgtaccctgcgggcacatatgaagctaatttcactgtagctaccttcgccgggt

SEQ ID NO: 849810 - DNA, 75 bp, synthetic construct
  source 1..75: mol_type = other DNA
caccgttgcggctgctgttgggggaatcgttaaatgcattgatcatccaagaggggcaacggcgtctggctggca

SEQ ID NO: 849811 - DNA, 75 bp, synthetic construct
  source 1..75: mol_type = other DNA
cggctccgctgctgtccctgttcattattcctgccgcctacaaattaatctggctgcgcagacataaaaaaagcg

SEQ ID NO: 849812 - DNA, 75 bp, synthetic construct
  source 1..75: mol_type = other DNA
gtaattattttatgtgatggcgcattcgttctttatgcgcaatatcgagacggtgagttttttgatgtagtccgt

SEQ ID NO: 849813 - DNA, 75 bp, synthetic construct
  source 1..75: mol_type = other DNA
gcagtttgatggactatattggcgatggtcgtcgtgttagtgggcatacgggtttcctggatggggttcgtttat

SEQ ID NO: 849814 - DNA, 75 bp, synthetic construct
  source 1..75: mol_type = other DNA
ccggcgatattgtctttaagaacctgccccgcgcacttgctgttcgtggggagtggcaggagcggaagattgcgc

SEQ ID NO: 849815 - DNA, 75 bp, synthetic construct
  source 1..75: mol_type = other DNA
tctaaaatagatggtggtgctggttttgatacattaataattagcaatggcactatatccagtgagtctttcact

SEQ ID NO: 849816 - DNA, 75 bp, synthetic construct
  source 1..75: mol_type = other DNA
ggcatgatcaccgcacctttgctgtcgctgtttattatcccggcggcgtataagctgatgtggctgcaccgacat

SEQ ID NO: 849817 - DNA, 75 bp, synthetic construct
  source 1..75: mol_type = other DNA
aacgccgccggagaactgacggaggttatcctgccgggggatgagacgctgacgttcagccgtgatgaggcggga

SEQ ID NO: 849818 - DNA, 75 bp, synthetic construct
  source 1..75: mol_type = other DNA
gatttgccggtggcgcgaacggacggtgaaggccaccgctggcagtaccgctacgataaagacacgctgcaactg

SEQ ID NO: 849819 - DNA, 75 bp, synthetic construct
  source 1..75: mol_type = other DNA
ataaactgagcggcattgaacgtgctggaaccggcgcggaaggatttcgctatgaccgccacggcaacctgctgg

SEQ ID NO: 849820 - DNA, 75 bp, synthetic construct
  source 1..75: mol_type = other DNA
ggaaaccggaatgtacctggtgagtgatccgctggggttgctgggcggggagcagacttaccggtatgtgccgaa

SEQ ID NO: 849821 - DNA, 75 bp, synthetic construct
  source 1..75: mol_type = other DNA
gacaccggctacccggacccgcgcggggaactggacccggaagccgaccccggcctgctgtatgcaggacagtgg

SEQ ID NO: 849822 - DNA, 75 bp, synthetic construct
  source 1..75: mol_type = other DNA
aataccgccacgacgccagcggcagacgaacagagaaacgctgcgaccggaagaaaatccgcttcacgtatctgt

SEQ ID NO: 849823 - DNA, 75 bp, synthetic construct
  source 1..75: mol_type = other DNA
gcaaaaatgctgctggatacgctggcgtggatacttgaaaaacttggcgtccttccggatgaagcggaaagggcg

SEQ ID NO: 849824 - DNA, 75 bp, synthetic construct
  source 1..75: mol_type = other DNA
atagtttctccaccataaatgatgttctttcccgttacaccggagaattcattggctataatctgtcgtttaagc

SEQ ID NO: 849825 - DNA, 75 bp, synthetic construct
  source 1..75: mol_type = other DNA
ccaaaggatttaacaccagaaaaatacaataaaatttatctgccaggggatggttctgtgatcttacccagcaat

SEQ ID NO: 849826 - DNA, 75 bp, synthetic construct
  source 1..75: mol_type = other DNA
aatgagaactgatcctataccctctactaaagaaaatggttggcttgaagaatataaaaaattggttgagcttaa

SEQ ID NO: 849827 - DNA, 75 bp, synthetic construct
  source 1..75: mol_type = other DNA
agaggatgtgccggaaaaggatgctaggcagattgtcgaaaccaatctgctggggtcgttgtgggttattcagtc

SEQ ID NO: 849828 - DNA, 75 bp, synthetic construct
  source 1..75: mol_type = other DNA
ttgcctgtgaaggtgaatgtgtgtgatcgagcatctgttgcggctgcggtggaaaccggcttccaggctttcggg

SEQ ID NO: 849829 - DNA, 75 bp, synthetic construct
  source 1..75: mol_type = other DNA
aagaagaaattcaaacttttttgcatataaattccagaataaaacagtacctcgtattgaaaatatgaaagaaat

SEQ ID NO: 849830 - DNA, 75 bp, synthetic construct
  source 1..75: mol_type = other DNA
gtttttctctcctgaccgaatcaatgaatgttgtcagggttctgcctgcattatggggaatggtgacgggttccg

SEQ ID NO: 849831 - DNA, 75 bp, synthetic construct
  source 1..75: mol_type = other DNA
gggcgtgctgagcatggcaacggctggcggtatggatctcggcgagacggcggatattggctcaaatatcctgac

SEQ ID NO: 849832 - DNA, 75 bp, synthetic construct
  source 1..75: mol_type = other DNA
ggcccgctggcaaaactgcgtcttggtttttccctcctgaccggatcaatgaatgctgtcaggctcctgccagca

SEQ ID NO: 849833 - DNA, 75 bp, synthetic construct
  source 1..75: mol_type = other DNA
attctttgacatataataaaaaattagcacccgtcatattaaactatgattttagcacaggcattaataaaacaa

SEQ ID NO: 849834 - DNA, 75 bp, synthetic construct
  source 1..75: mol_type = other DNA
gaccgataacaccgcgttgccgaaagcagtagaaatgcaatatctgccgggcagggtctgcaatcttaccagttg

SEQ ID NO: 849835 - DNA, 75 bp, synthetic construct
  source 1..75: mol_type = other DNA
atactttagccattagccatggaactctcactactacagatttctcaggatttgaggtaattgaacttggtgata

SEQ ID NO: 849836 - DNA, 75 bp, synthetic construct
  source 1..75: mol_type = other DNA
gaagttactattactgggaaacccaagaatggtaaagggaatgatgttgtatttaaattcaagattaaaaaatgg

SEQ ID NO: 849837 - DNA, 75 bp, synthetic construct
  source 1..75: mol_type = other DNA
gggtaccagtacagtcactgccagcattaacagcagcagccagagccggaacgtgacgtttatcgccgatgtcag

SEQ ID NO: 849838 - DNA, 75 bp, synthetic construct
  source 1..75: mol_type = other DNA
ctgatctggtggtcattaaggacggctcagtggcagacggttcgacggcgaacatgctgcgggtgagggtgacgg

SEQ ID NO: 849839 - DNA, 75 bp, synthetic construct
  source 1..75: mol_type = other DNA
gaaatccggtggataacggtctggatttgctggatgatacagtgtacttacaaaatgtagaaaaaaaagaagggg

SEQ ID NO: 849840 - DNA, 75 bp, synthetic construct
  source 1..75: mol_type = other DNA
aatttaacttcatttatggagattaaaggttggcgtatatacggacaaccatcctataccatccttccttttgtg

SEQ ID NO: 849841 - DNA, 75 bp, synthetic construct
  source 1..75: mol_type = other DNA
cgcttgccggacagacggtcagcgtgttggcaggcaacagcgcaacggtcactccgacggtgaccaccaagccgg

SEQ ID NO: 849842 - DNA, 75 bp, synthetic construct
  source 1..75: mol_type = other DNA
actgctacatggtcggcgcaaatggcgggagactctcaccacgcgacgctgaagttgtttgaatggggcagcagt

SEQ ID NO: 849843 - DNA, 75 bp, synthetic construct
  source 1..75: mol_type = other DNA
gcagacttggagtgatggcgtaacgtcagatcgctatgacatacagtccggttctccggcgcaagccacatcaac

SEQ ID NO: 849844 - DNA, 75 bp, synthetic construct
  source 1..75: mol_type = other DNA
gttggcggacaacggcgcaacggtcgccccgacggtcaccacgcagccggacggtacggtggagatctctgttac

SEQ ID NO: 849845 - DNA, 75 bp, synthetic construct
  source 1..75: mol_type = other DNA
ttgtatcgatgccttcgcaactcttcactatggcgcgttcttttaaagccgtagccaatggcaaaatttatatcg

SEQ ID NO: 849846 - DNA, 75 bp, synthetic construct
  source 1..75: mol_type = other DNA
ggtaacagcattagcttctctggggatatattcctggcaccagaaggtagtgtagatgctatgtatctggattgc

SEQ ID NO: 849847 - DNA, 75 bp, synthetic construct
  source 1..75: mol_type = other DNA
ttgatagtttcgcggtaggcggcgcaactcccgattctatgcggtgggtcgagcagaataatggtgaatatacca

SEQ ID NO: 849848 - DNA, 75 bp, synthetic construct
  source 1..75: mol_type = other DNA
tgcaggtaaaggttaccgacgcgttcggtaatgcgcttgctgggcagacggtcagcgtgacggcaggcaacagcg

SEQ ID NO: 849849 - DNA, 75 bp, synthetic construct
  source 1..75: mol_type = other DNA
atagatcgcaacaatgaaattgctatccaaatggcagcaaatgatgctcgagcatgggcatcatcttgtaaacaa

SEQ ID NO: 849850 - DNA, 75 bp, synthetic construct
  source 1..75: mol_type = other DNA
tctataatccttacaaaaagataaaaaaagactctcgaattgaatttaattctgggattttggataaaaatttcc

SEQ ID NO: 849851 - DNA, 75 bp, synthetic construct
  source 1..75: mol_type = other DNA
tacctgggcggtggtttttccaaatattgtcttgttcctggtgaaattctcaaaattcatcgtcatgcgttgtgg

SEQ ID NO: 849852 - DNA, 75 bp, synthetic construct
  source 1..75: mol_type = other DNA
gcggtatatcaccccggacccgattgggttgagaggtggatggaatatgtatcagtatccgttgaatcccataca

SEQ ID NO: 849853 - DNA, 75 bp, synthetic construct
  source 1..75: mol_type = other DNA
accagcaaaacatgcgcggcatcaccaattctcaggcagaatggatgaagtacggcgagcagatgtcgacgggta

SEQ ID NO: 849854 - DNA, 75 bp, synthetic construct
  source 1..75: mol_type = other DNA
ctttcatctagaattgagttactaggagacattctttatgatcaaatcaagccccaacaaacacagatgatatac

SEQ ID NO: 849855 - DNA, 75 bp, synthetic construct
  source 1..75: mol_type = other DNA
ctgcaattgcagacgtggagtgatggtgtaacgtcagatcgctatgacatacagtccggttctccggcgcaagcc

SEQ ID NO: 849856 - DNA, 75 bp, synthetic construct
  source 1..75: mol_type = other DNA
catgggagtacacgagaaatttaatcctgaaactggtatatcagagcttggaacaggaaagtcctctggcttgtg

SEQ ID NO: 849857 - DNA, 75 bp, synthetic construct
  source 1..75: mol_type = other DNA
tggtcaaatgccgtcatctttagaattagcgcagcggccaagcggtggggtagtaccgcgaaaagtaggtacgtt

SEQ ID NO: 849858 - DNA, 75 bp, synthetic construct
  source 1..75: mol_type = other DNA
agatcgcagagctggtggtcattaaggacgactcagtggcagacggtgcaatggcgaatatgctgcgggcgagag

SEQ ID NO: 849859 - DNA, 75 bp, synthetic construct
  source 1..75: mol_type = other DNA
atccttccttttgtggaagtcgagttactgagtgttaatggtgtaaaattcagggcgacagatggttttccagaa

SEQ ID NO: 849860 - DNA, 75 bp, synthetic construct
  source 1..75: mol_type = other DNA
gtgttggcaggcaacggtgccacgactgctccgacggtcaccacgcagccggacggcacggtggagatcagtgtc

SEQ ID NO: 849861 - DNA, 75 bp, synthetic construct
  source 1..75: mol_type = other DNA
gctgtcaactatggcaaggtaggtagtattggtaaattccagacaaaagagttcgataatgaagaacagtgtctg

SEQ ID NO: 849862 - DNA, 75 bp, synthetic construct
  source 1..75: mol_type = other DNA
atccgttgtccggcactgggtgaaggtttacaaagacactagtgaagcaggacttctgaacataaaaccaggccg

SEQ ID NO: 849863 - DNA, 75 bp, synthetic construct
  source 1..75: mol_type = other DNA
taacaaatattgttctttttcttatcttaattttttcaaaaaagataaataagtcagtgggtaggctctttaaac

SEQ ID NO: 849864 - DNA, 75 bp, synthetic construct
  source 1..75: mol_type = other DNA
ctttggtccggtgtatcccgccggggtggaaatcgtgttgcctgactggacatatgaaccggaaatgaaggagac

SEQ ID NO: 849865 - DNA, 75 bp, synthetic construct
  source 1..75: mol_type = other DNA
aaaattactacggattacaggatcatattttcttgaaagattcgaaccgggtaattctgttaatagtgaaataat

SEQ ID NO: 849866 - DNA, 75 bp, synthetic construct
  source 1..75: mol_type = other DNA
tgtgtctttgttttgtgtctgtgttggggtacgcaaagactaataaatctgacagtcaaattaaacaagaaataa

SEQ ID NO: 849867 - DNA, 75 bp, synthetic construct
  source 1..75: mol_type = other DNA
cgaattactcacccccgtcgacggttatcgcacctttcgctcccgtggtggcgaatattctaaaaaactggatga

SEQ ID NO: 849868 - DNA, 75 bp, synthetic construct
  source 1..75: mol_type = other DNA
aaattatatcaacttttcacgcagaaaaaatcattaatgatctgttaaaaaacgattataaaatttccctttttc

SEQ ID NO: 849869 - DNA, 75 bp, synthetic construct
  source 1..75: mol_type = other DNA
accccaccgcttaaaaattataatgagcggttgcacaatacaaatttatttaatccaaaatatcaaaaaaagctg

SEQ ID NO: 849870 - DNA, 75 bp, synthetic construct
  source 1..75: mol_type = other DNA
cccgaaaaattatcccccctggtaaagcatttacgcttagaggcggaactctaaatatcaatattcctgggcgta

SEQ ID NO: 849871 - DNA, 75 bp, synthetic construct
  source 1..75: mol_type = other DNA
ccttggtccggtctatccgtcgggagtggaaatcgtgttgccggactgggtatatgaaccggaagtgaaggagac

SEQ ID NO: 849872 - DNA, 75 bp, synthetic construct
  source 1..75: mol_type = other DNA
tgtatgaccgtgactacgggtggaatgacaacggcgacctggtgcgcatcagcggcccgcgacagacgcgggaat

SEQ ID NO: 849873 - DNA, 75 bp, synthetic construct
  source 1..75: mol_type = other DNA
ctaaatatgaacatacctgggcgtagcgctcttcttttagggaaaacaggagaactgccgaactatctatgtttg

SEQ ID NO: 849874 - DNA, 75 bp, synthetic construct
  source 1..75: mol_type = other DNA
tctgcctttgtttagtatcttttagtggatatgcagcaacaggaaagtctgatgctcagatcaaaaaagaaataa

SEQ ID NO: 849875 - DNA, 75 bp, synthetic construct
  source 1..75: mol_type = other DNA
taagcagaagtgtttaggtgttaataagcaatgttattttgtattatatctttgggattcactgaaaaacaaacc

SEQ ID NO: 849876 - DNA, 75 bp, synthetic construct
  source 1..75: mol_type = other DNA
atattaaggggctctctcgatccggaatatcaagctctgagttaaacttaagtgtgatccgggtcagtaatggag

SEQ ID NO: 849877 - DNA, 75 bp, synthetic construct
  source 1..75: mol_type = other DNA
agtaaacgaagacgagatccgcgaagcacagatggcactgcatgacgctatctatgacaccaactacagcgccta

SEQ ID NO: 849878 - DNA, 75 bp, synthetic construct
  source 1..75: mol_type = other DNA
cagcttaccgcaaaaattcttcaatggggtgacggtcaggactcaccaatacttcaaaaaatgattgatgacctt

SEQ ID NO: 849879 - DNA, 75 bp, synthetic construct
  source 1..75: mol_type = other DNA
ggagattacacagagaatactcatgagattactcatgagactaaaaacactattggcgcatccgctgacgcgtct

SEQ ID NO: 849880 - DNA, 75 bp, synthetic construct
  source 1..75: mol_type = other DNA
tcatttttaccactgcgaccaccggggcctgccgctggcgctcatcagcgaagacggcaatacggcgtggcgcgg

SEQ ID NO: 849881 - DNA, 75 bp, synthetic construct
  source 1..75: mol_type = other DNA
aatcagtactgaaagttattaatgatattagtcctgttaccgaacgtaaaactgtaggcgtaggtagtagtattt

SEQ ID NO: 849882 - DNA, 75 bp, synthetic construct
  source 1..75: mol_type = other DNA
tctggaccttcttccggcaggggatccgtattcagggggcgcatgaatttacgccgccgtctctggctattgtca

SEQ ID NO: 849883 - DNA, 75 bp, synthetic construct
  source 1..75: mol_type = other DNA
cctggacgttatttcgtcaggggatccgcattcagggcgcacacgaattcaccccaccgacgctctccattgtga

SEQ ID NO: 849884 - DNA, 75 bp, synthetic construct
  source 1..75: mol_type = other DNA
atgaaaaattctaagcgcatcaccttcaacctgttcattaaatccaacggcaaactgaacattaccgttatggaa

SEQ ID NO: 849885 - DNA, 75 bp, synthetic construct
  source 1..75: mol_type = other DNA
ggatcgggatatgtttctgcgaaatatcgagcaaaacgggtattacgtgctggccggtgacctgaaagaccagtc

SEQ ID NO: 849886 - DNA, 75 bp, synthetic construct
  source 1..75: mol_type = other DNA
ctggaagttgatccgactaacccggcatgggcggtaacactcgccagccagagtaatttccgcatgctctacagc

SEQ ID NO: 849887 - DNA, 75 bp, synthetic construct
  source 1..75: mol_type = other DNA
gtgtcaccggtaccgaaagtgacagcgcaaatgctgactgaggcgattgaacaacatggcccacaaacggcggat

SEQ ID NO: 849888 - DNA, 75 bp, synthetic construct
  source 1..75: mol_type = other DNA
gacgaggaacgcacacgactggaggcatgggaacgctacagtgttctggtcagccgtgtggatacggcaaatcct

SEQ ID NO: 849889 - DNA, 75 bp, synthetic construct
  source 1..75: mol_type = other DNA
atgaatttatagaatcactaatagaattaggtgattattgtacccagagtgacgttatcctcgaatcacttcgtc

SEQ ID NO: 849890 - DNA, 75 bp, synthetic construct
  source 1..75: mol_type = other DNA
accccacctttaccgccagtgccggacggcccgcgccactggtcgctactcaacactatgacgctcaattatctg

SEQ ID NO: 849891 - DNA, 75 bp, synthetic construct
  source 1..75: mol_type = other DNA
aattgtggccggaccgtaccatcaacctggcgctggcaatccacggtcaggttgatccggtgaccggcgtgtcgc

SEQ ID NO: 849892 - DNA, 75 bp, synthetic construct
  source 1..75: mol_type = other DNA
tctgccgcaggtaaaagcatactacccgcaggacgaattcgtggagtggcataggagggaggtgttcaggagagg

SEQ ID NO: 849893 - DNA, 75 bp, synthetic construct
  source 1..75: mol_type = other DNA
actctggctggcgcggggcggagtagcggcgcagcacagttcgcagccgctaagcgcgctctggcaggtgctgcc

SEQ ID NO: 849894 - DNA, 75 bp, synthetic construct
  source 1..75: mol_type = other DNA
gaaatcgtcaactcaagctctcgaaaaagattggactgctactattaatgaagaaactcccaacctaataactac

SEQ ID NO: 849895 - DNA, 75 bp, synthetic construct
  source 1..75: mol_type = other DNA
tctgggcaggtgacgcgattacccgcgtgttatggcgaactgggcaagctgttgagggtgtgatcgcctggttca

SEQ ID NO: 849896 - DNA, 75 bp, synthetic construct
  source 1..75: mol_type = other DNA
gcaaggttttgctcgactggatggggccattgttcaataagctggagtctctttatcagctgcctgctggcttgt

SEQ ID NO: 849897 - DNA, 75 bp, synthetic construct
  source 1..75: mol_type = other DNA
tccctgatgtgctgtacttttttaatctccgcgacgtagtggtgccggatggcgtgctgaccggcagttttactc

SEQ ID NO: 849898 - DNA, 75 bp, synthetic construct
  source 1..75: mol_type = other DNA
atggtcttctggtttgttcgtgttgatgacgaaggctatccggaaattgcccgctgtacggagtgggtgtttgcg

SEQ ID NO: 849899 - DNA, 75 bp, synthetic construct
  source 1..75: mol_type = other DNA
cgttggcttgccaaataaaagttcattcaacttgattgatctatataaaccagagttgaactattatctgtccga

SEQ ID NO: 849900 - DNA, 75 bp, synthetic construct
  source 1..75: mol_type = other DNA
aaagcttactctggcagcctcaaaattgcgggtgcggtagctccggctctgctgactaatgcaatctgcgcttac

SEQ ID NO: 849901 - DNA, 75 bp, synthetic construct
  source 1..75: mol_type = other DNA
aagcactgaaaagagcatcgtcacatgaagttgcagcacgtcttgaaataacacgggatgaggcagttaacgagc

SEQ ID NO: 849902 - DNA, 75 bp, synthetic construct
  source 1..75: mol_type = other DNA
actgctgcggatcacctcgttgtcatatagcgagagcggggagtttttgaattattcagtgatgttcagaaatgc

SEQ ID NO: 849903 - DNA, 75 bp, synthetic construct
  source 1..75: mol_type = other DNA
agtttgcggtatcgcggatgaccatccgtaaagccattgacctgctggtggcgtgggggctggtggtccgccgcc

SEQ ID NO: 849904 - DNA, 75 bp, synthetic construct
  source 1..75: mol_type = other DNA
tgattttacaggttcttctactgttcctcattctgaaaaaatagagatgaacggcgatactacaaaggaaatata

SEQ ID NO: 849905 - DNA, 75 bp, synthetic construct
  source 1..75: mol_type = other DNA
caccgtagcaccagcaatgtttcttatgcgcacgaccctggtaaaaagtaatggttggggtgtggacaatttgcc

SEQ ID NO: 849906 - DNA, 75 bp, synthetic construct
  source 1..75: mol_type = other DNA
tctcagctctcgcctgggctatcgcgatggtcattatgattaacgtgatgctctggaccaacagcaacgccgggt

SEQ ID NO: 849907 - DNA, 75 bp, synthetic construct
  source 1..75: mol_type = other DNA
atttacggcagtgaaaatactgtcacatcagagtcaaacagtctggttgtgggtaacagtaattccgtggaggga

SEQ ID NO: 849908 - DNA, 75 bp, synthetic construct
  source 1..75: mol_type = other DNA
tagctccaaatctcatggtaaatatgcgcttttcccaatttttactgcgagttggcgagctcatcgtataatgaa

SEQ ID NO: 849909 - DNA, 75 bp, synthetic construct
  source 1..75: mol_type = other DNA
ctgatgaagataacaagttcgatgattttatgcgtcaacatcgattcagtgaggtgaatttcgatacccaacaga

SEQ ID NO: 849910 - DNA, 75 bp, synthetic construct
  source 1..75: mol_type = other DNA
atcgcgaagtgtctgccagctttaactacaactatatcggtcgtttattactgccggcagcggtgaaaaaattcc

SEQ ID NO: 849911 - DNA, 75 bp, synthetic construct
  source 1..75: mol_type = other DNA
tctggatattggttcggttgagtatgacgcatttatcaaagctgatggaaaatacgattatgtcctgaatttgtc

SEQ ID NO: 849912 - DNA, 75 bp, synthetic construct
  source 1..75: mol_type = other DNA
gggtaactatcagaacgctaatgctgtggccgcaggcattcagtataaaacatcacgtaataccaatatacgcct

SEQ ID NO: 849913 - DNA, 75 bp, synthetic construct
  source 1..75: mol_type = other DNA
gcgtctgataataacaacacaactgcgtatatcagggctgtatcgcaacgactgggagtggatccccgggctgcc

SEQ ID NO: 849914 - DNA, 75 bp, synthetic construct
  source 1..75: mol_type = other DNA
aaatcagtctgatgaaaaatattgcagttttagatttctttagaaatacaaccggtctccctgcttctaatgaaa

SEQ ID NO: 849915 - DNA, 75 bp, synthetic construct
  source 1..75: mol_type = other DNA
aaagatatacatttctatcaagatttagctgaagcagcctcaagaagcaatggaaaactaattgttattggtatt

SEQ ID NO: 849916 - DNA, 75 bp, synthetic construct
  source 1..75: mol_type = other DNA
gtgcacagttagtagagtctttaattaaatgttggccattacatccaacaatggcgactatcttaggacctgcat

SEQ ID NO: 849917 - DNA, 75 bp, synthetic construct
  source 1..75: mol_type = other DNA
tccatcatgatggtggcgttttatcgccatgccgggcgcatgtggccggggattgcgctgagctgctcgctggga

SEQ ID NO: 849918 - DNA, 75 bp, synthetic construct
  source 1..75: mol_type = other DNA
aaactggatgtttctggatggtaaagtagtaaagcgggaatatacagaacaggcactgcaacagcaggcagagtt

SEQ ID NO: 849919 - DNA, 75 bp, synthetic construct
  source 1..75: mol_type = other DNA
cagtcaggaagagctgcgcggactcacctttcagcaactgacctggccggaggatctcaataaagatctccaaca

SEQ ID NO: 849920 - DNA, 75 bp, synthetic construct
  source 1..75: mol_type = other DNA
agataaagttatttttctctatggtggaaatataggtaaggcacaggatatggggaatttaatccgtcttgcgat

SEQ ID NO: 849921 - DNA, 75 bp, synthetic construct
  source 1..75: mol_type = other DNA
aaagaactttttttaaatatgcatccaaacattcagagtgttgaagtcttatataactggtgtgatactaaggaa

SEQ ID NO: 849922 - DNA, 75 bp, synthetic construct
  source 1..75: mol_type = other DNA
taaagtcatttttttctatggcggtaatattgggcatgctcaggatatggcaaacttaatgcgccttgcgcgtaa

SEQ ID NO: 849923 - DNA, 75 bp, synthetic construct
  source 1..75: mol_type = other DNA
gtgcaatgcaaaagatgtgtgaccaaaaaatgccacttaatactcttgagagaaaatggcaaatcgcaaatattc

SEQ ID NO: 849924 - DNA, 75 bp, synthetic construct
  source 1..75: mol_type = other DNA
tggttaattcattagtgaaacaatggaaattagaaaatctaacttatctacctccattaactcagtcagagttta

SEQ ID NO: 849925 - DNA, 75 bp, synthetic construct
  source 1..75: mol_type = other DNA
atttttatatggcggtaatattggccatgctcaagatatgggaaatttattgcgactggtcaggaacatgcttcc

SEQ ID NO: 849926 - DNA, 75 bp, synthetic construct
  source 1..75: mol_type = other DNA
agagtgaactgaatatcatcaggaattttattgatcgagtaggcagcctggcggctgcggcttgtcatggtctga

SEQ ID NO: 849927 - DNA, 75 bp, synthetic construct
  source 1..75: mol_type = other DNA
gcggaaagcgttattcagccactggagcgcgctgtcaggctgaatatggcgacggatgaggagcgtagccgactg

SEQ ID NO: 849928 - DNA, 75 bp, synthetic construct
  source 1..75: mol_type = other DNA
cgggctaaccagtatgcgcagatgctgggcattgacgaaaataccctgatggccatgcgtcgtggtgtggggcag

SEQ ID NO: 849929 - DNA, 75 bp, synthetic construct
  source 1..75: mol_type = other DNA
gcaatcccaataccgtgtatggcgcgaatattcagtcagatattccaggcgctgaaccggagcaatacgcccagt

SEQ ID NO: 849930 - DNA, 75 bp, synthetic construct
  source 1..75: mol_type = other DNA
cttcagactgattgaggggacatcaggccttatcacctggtggcaatcgctggataagcaaacgcgggagttgat

SEQ ID NO: 849931 - DNA, 75 bp, synthetic construct
  source 1..75: mol_type = other DNA
gcgcgatggcaggcatggcccgtgacaaaatcggctctaatcttgcgggtgggcttgcgggttcgctagacaccc

SEQ ID NO: 849932 - DNA, 75 bp, synthetic construct
  source 1..75: mol_type = other DNA
ggacgctgcgcgatcttctctggaaaacctctcccggtttattcgtaataatcctggggcggagggatttctgaa

SEQ ID NO: 849933 - DNA, 75 bp, synthetic construct
  source 1..75: mol_type = other DNA
cctgttttccggtggagccgctttccggacagacaatgcgaattatgtatacgggagaaaaacttccggcagaca

SEQ ID NO: 849934 - DNA, 75 bp, synthetic construct
  source 1..75: mol_type = other DNA
gcagtggaaatattagattgtcgtcttcaaaattaaaccccttatataaagcactatatgaaatcaagaaaggta

SEQ ID NO: 849935 - DNA, 75 bp, synthetic construct
  source 1..75: mol_type = other DNA
accagctcgctgtttatcgctgaacaggaaagcacggatcttcccctgcttacggaagttaactacgaggaaact

SEQ ID NO: 849936 - DNA, 75 bp, synthetic construct
  source 1..75: mol_type = other DNA
caaggttttgctcgactggatggggccattgttcaataagctggagtctctttatcagctgcctgctggcctgtt

SEQ ID NO: 849937 - DNA, 75 bp, synthetic construct
  source 1..75: mol_type = other DNA
aaaaaagaattttcaaatcagatgttttatcaagacgagattgaacaggaagagaaatataatggacgaagtcaa

SEQ ID NO: 849938 - DNA, 75 bp, synthetic construct
  source 1..75: mol_type = other DNA
ttagatatgaaggagttgcgcggcgaagttgtatttcgcaaggatatattttactcgttacgtaaagttgccgtc

SEQ ID NO: 849939 - DNA, 75 bp, synthetic construct
  source 1..75: mol_type = other DNA
ccgcctgccgggtcagcagtatgatgaggagtccggcctgtattacaaccgccaccgctattatgacccgctgca

SEQ ID NO: 849940 - DNA, 75 bp, synthetic construct
  source 1..75: mol_type = other DNA
gtgcagacgttcgaccagctggaaagtaaaatcattgctgaccgagtgagtgaggaaagccgccgctggctggca

SEQ ID NO: 849941 - DNA, 75 bp, synthetic construct
  source 1..75: mol_type = other DNA
agttcaatcgtcgccattttaggctatcaggcgggcagtaatggccaggttgtcgttgaaaagggtggcgagtga

SEQ ID NO: 849942 - DNA, 75 bp, synthetic construct
  source 1..75: mol_type = other DNA
ttgtagacaatagacaaataaaaacggagtttactgatggttctttcattataaagaactggaggcctacagata

SEQ ID NO: 849943 - DNA, 75 bp, synthetic construct
  source 1..75: mol_type = other DNA
aggaatgaagagaggccgggggtcctggcagattgagtttaactacaaggtaatgccattccttgttggcttaac

SEQ ID NO: 849944 - DNA, 75 bp, synthetic construct
  source 1..75: mol_type = other DNA
aaaaatcagtcaacattagtcaatccaatgaactgacagaagcagcttactacttgccgttgcaagccaagaggg

SEQ ID NO: 849945 - DNA, 75 bp, synthetic construct
  source 1..75: mol_type = other DNA
atcccgtatgcctccgacccggcgggaaaccgcctgccggacccggagctgcacccggacagcaccctcacggcg

SEQ ID NO: 849946 - DNA, 75 bp, synthetic construct
  source 1..75: mol_type = other DNA
cgcagctttggcagcatggcaggcagtaatgccgcatacgaactgaccagcacatacacccccgcaggccagtta

SEQ ID NO: 849947 - DNA, 75 bp, synthetic construct
  source 1..75: mol_type = other DNA
cagtgaattaccctctgcaactgaagatgcgacgggtagccgcaagcagatgacgtggagccgctacgggcagtt

SEQ ID NO: 849948 - DNA, 75 bp, synthetic construct
  source 1..75: mol_type = other DNA
gaaaccgcctgccggacccggagctgcacccggacagtacactcacggcgtggccggataaccgaatcaccgaag

SEQ ID NO: 849949 - DNA, 75 bp, synthetic construct
  source 1..75: mol_type = other DNA
ccggcgaaaccgatttcgcgctacccggcccgttaccgttcattctttcccgcacctacagcagctaccggacga

SEQ ID NO: 849950 - DNA, 75 bp, synthetic construct
  source 1..75: mol_type = other DNA
accagtgagcgccagacggtgaagaacccggagacgggggaactgctgtggcagcatgagacgaaacaggcatac

SEQ ID NO: 849951 - DNA, 75 bp, synthetic construct
  source 1..75: mol_type = other DNA
ttcggcgactctggaaatattgccattaaaggtaatttttcaccaattgttgataacagcaaatctcttggtgca

SEQ ID NO: 849952 - DNA, 75 bp, synthetic construct
  source 1..75: mol_type = other DNA
gcccaagatcaccttatgacaggtatgctttgccgtgaacttgtgacagaattgatagaggtttataaaaagatg

SEQ ID NO: 849953 - DNA, 75 bp, synthetic construct
  source 1..75: mol_type = other DNA
catctggtgcaaacgcagctcattgaagccgatgaaggcgaaggaaaaaccaaaatgacgctggtaatggttcac

SEQ ID NO: 849954 - DNA, 75 bp, synthetic construct
  source 1..75: mol_type = other DNA
atattgtttgcgatgtccctgatgaacttattgatttcacgtttgaatggaaaggactgaaaattcacaatgtgt

SEQ ID NO: 849955 - DNA, 75 bp, synthetic construct
  source 1..75: mol_type = other DNA
aatgatgcagtggtatagtgattttattattaatttaaatggtgaaaatgatgagtgccagtttggaagacgtta

SEQ ID NO: 849956 - DNA, 75 bp, synthetic construct
  source 1..75: mol_type = other DNA
gtgggccgagaatctgaactgttccgctacaccgtgaagcacagtctgatttttgccagcgttatcggcgttatc

SEQ ID NO: 849957 - DNA, 75 bp, synthetic construct
  source 1..75: mol_type = other DNA
gaattaatagatttcagcacagacggtttggacgcaaatgataaagaaataatcaggggaatgattgatgagttg

SEQ ID NO: 849958 - DNA, 75 bp, synthetic construct
  source 1..75: mol_type = other DNA
aattcctgtgcaggcaccagcaactgcgaatatagagtaaacagtttactcctcaacgacggtgatgtttattta

SEQ ID NO: 849959 - DNA, 75 bp, synthetic construct
  source 1..75: mol_type = other DNA
gggatacttcgtttacgctgggtaataccggcggtttcgttgatcttgggacctatgagtatgtcctgaaaagcg

SEQ ID NO: 849960 - DNA, 75 bp, synthetic construct
  source 1..75: mol_type = other DNA
agtcagaggtgttatcgaaaaagacctatcaagaaaatggactttggctataattgcagatgtatttaatgtatc

SEQ ID NO: 849961 - DNA, 75 bp, synthetic construct
  source 1..75: mol_type = other DNA
gaccgcgaagtcaatcaacaaaggcgatattataaacattgaggtgggaacttacgatctttctggaactcttca

SEQ ID NO: 849962 - DNA, 75 bp, synthetic construct
  source 1..75: mol_type = other DNA
ctcttgtatatcttctaatgtatgtattaacacttggaattgcattgcatacaccaatgcattcagatgattatg

SEQ ID NO: 849963 - DNA, 75 bp, synthetic construct
  source 1..75: mol_type = other DNA
agttattctctggggggctatgccagctgggaacatgaaagtggtttctatctggacggtatcgtgaagctgaac

SEQ ID NO: 849964 - DNA, 75 bp, synthetic construct
  source 1..75: mol_type = other DNA
gattccattggccgccttcagtcacagacggatgcggcaggccggacgacagaatacagtccgaatgtggtgacg

SEQ ID NO: 849965 - DNA, 75 bp, synthetic construct
  source 1..75: mol_type = other DNA
gacagcggcaatcgcgttatggaacacggtatacatagaaagagccattgagtccctgaaacgaaaaaagctcct

SEQ ID NO: 849966 - DNA, 75 bp, synthetic construct
  source 1..75: mol_type = other DNA
atggatattttcacattgtaaaggtttatggattaagcctataagtggtaagaccccaggtctcgatgactttaa

SEQ ID NO: 849967 - DNA, 75 bp, synthetic construct
  source 1..75: mol_type = other DNA
aattaccggcgtcattaaaggaaaagcctactttaaatcatggtcgccaaatgtaaaattcgaagggaagtgtgt

SEQ ID NO: 849968 - DNA, 75 bp, synthetic construct
  source 1..75: mol_type = other DNA
ccgctgctgggggcgaaggtgctgcccggcgagacggactttgcgctgcccggcccgctgccgttcattctctcc

SEQ ID NO: 849969 - DNA, 75 bp, synthetic construct
  source 1..75: mol_type = other DNA
cgcttttgcggtggtttcctttcatctgaaccagtcactctcttcgctcttttccctcgatctctccctggtcag

SEQ ID NO: 849970 - DNA, 75 bp, synthetic construct
  source 1..75: mol_type = other DNA
cgggcgtctacaagcgtgatccgcagtcggccacgccgtggggactgctcatcagcggcggcactgccctcccgc

SEQ ID NO: 849971 - DNA, 75 bp, synthetic construct
  source 1..75: mol_type = other DNA
aaagaatcgacagatcttgctaatgtggttgcagcaaaaagcacccaattaaacgcgctaacaacgcaatgggaa

SEQ ID NO: 849972 - DNA, 75 bp, synthetic construct
  source 1..75: mol_type = other DNA
gttgatgctgttggtaatgcgcaggaactggcgcactggacggagaagctgaaacagtggacagagaccgtacag

SEQ ID NO: 849973 - DNA, 75 bp, synthetic construct
  source 1..75: mol_type = other DNA
gttcaacattatcagtcgcagatgaacgcttataaacaacagctggcaacggccaccggtattcgggacgtccag

SEQ ID NO: 849974 - DNA, 75 bp, synthetic construct
  source 1..75: mol_type = other DNA
tccttcctgccgccagaaaaaatttaccctgttagtgcagctgcgagaaaggctttgggaatgaaaaattcctga

SEQ ID NO: 849975 - DNA, 75 bp, synthetic construct
  source 1..75: mol_type = other DNA
aaagaggcccaagacttagcaaacagtattcagttaaaatctgtgatgctaaatacgctcacgacccaatgggaa

SEQ ID NO: 849976 - DNA, 75 bp, synthetic construct
  source 1..75: mol_type = other DNA
ggatgaaatggggcgcacacgcgtaacgctcgggcgaggacgggggacgtcgttaccgtccatcgaatggagtaa

SEQ ID NO: 849977 - DNA, 75 bp, synthetic construct
  source 1..75: mol_type = other DNA
ggcgacatgacgcagtatggcggtagcattgtccagggttcagccggggtgcgcatcggtgcccccaccggcgtg

SEQ ID NO: 849978 - DNA, 75 bp, synthetic construct
  source 1..75: mol_type = other DNA
cgccagacgctattagcagtcaaaaacaatactctctcgccgcgcactggcttgcggcagctcagtgaatttatc

SEQ ID NO: 849979 - DNA, 75 bp, synthetic construct
  source 1..75: mol_type = other DNA
cacgtcatctggaactaagcactcagttgctcgacgccatcatgccgttttgtggtaatgccctgcgactgggcg

SEQ ID NO: 849980 - DNA, 75 bp, synthetic construct
  source 1..75: mol_type = other DNA
acaacattcggcgcttacgtcagggtgagcgtgccacgctcgcccaggcgatgacgctggtagaaagccgtcatc

SEQ ID NO: 849981 - DNA, 75 bp, synthetic construct
  source 1..75: mol_type = other DNA
attcacttccggtaacccggtgaatccgctgctcggtgcaaaagtacagcccggcgaaaccgatttcgcgctgcc

SEQ ID NO: 849982 - DNA, 75 bp, synthetic construct
  source 1..75: mol_type = other DNA
gggcagaccgcgtgagtgacgaaagccgggcgtggcttgcgcagtgcgggctgacggtggagcggctggcggcac

SEQ ID NO: 849983 - DNA, 75 bp, synthetic construct
  source 1..75: mol_type = other DNA
caccagacattgttagcggtcaaaaacaatacgctttcgccacgcaccggcctgcgacagctcagtgaatttatt

SEQ ID NO: 849984 - DNA, 75 bp, synthetic construct
  source 1..75: mol_type = other DNA
gccgtgtggctgacgcacgacccggaatacccggagaatttacctgccgcgccgctggtgcgctatggctggacg

SEQ ID NO: 849985 - DNA, 75 bp, synthetic construct
  source 1..75: mol_type = other DNA
actgctctggcagcatgagaccagacatgcgtacaacgcgcaggggctggcgaaccgctgtataccggacagcct

SEQ ID NO: 849986 - DNA, 75 bp, synthetic construct
  source 1..75: mol_type = other DNA
ggtgctggtgcagatgctcgaccggctggaaagtgaaatcctggctgcccgggtgagtgaggaaagccgccgctg

SEQ ID NO: 849987 - DNA, 75 bp, synthetic construct
  source 1..75: mol_type = other DNA
cgaagcggcgggttatgacgtggtgatcgttgaaaccgtcggcgtcggacagtcggaaacggaagtagcccgcat

SEQ ID NO: 849988 - DNA, 75 bp, synthetic construct
  source 1..75: mol_type = other DNA
aagttcacccatctgaaaccacgatcggaacaacactgacatcctccggtaaaaagaattaccttccggtgtatt

SEQ ID NO: 849989 - DNA, 75 bp, synthetic construct
  source 1..75: mol_type = other DNA
gcgcagctttacttacgatgataaataccggggccggatggtggcgcaccgccgcgcgggccggccggaaatccg

SEQ ID NO: 849990 - DNA, 75 bp, synthetic construct
  source 1..75: mol_type = other DNA
acaaaaggccgcgttactttccgaagcggaaagcgttattcagccactggaacgcgctgtcaggctgaatatggc

SEQ ID NO: 849991 - DNA, 75 bp, synthetic construct
  source 1..75: mol_type = other DNA
ttcttatcgaacagttgccaaatgtttgtatgaaaatcgaacgtgaatttcacacgatcagctatattgaccagc

SEQ ID NO: 849992 - DNA, 75 bp, synthetic construct
  source 1..75: mol_type = other DNA
tctgttcacctcagaggtgtataaaagcgaaggctttgacaatgttcgcctgaataagaacggcgtcgctgctcc

SEQ ID NO: 849993 - DNA, 75 bp, synthetic construct
  source 1..75: mol_type = other DNA
ctgcgtgaacttcctcaagcagaacgccgccgactcgcctgatacaacctttaacaacgtgttcccggaggatga

SEQ ID NO: 849994 - DNA, 75 bp, synthetic construct
  source 1..75: mol_type = other DNA
accgctttacccacgatttaaccttaaaatataccggctccagccgtgattataataccagcaccttcccgcagt

SEQ ID NO: 849995 - DNA, 75 bp, synthetic construct
  source 1..75: mol_type = other DNA
ggtaaccagcattctgatggcctgggtgtttaccctcccggctgcagtgctgctctccggcgggttgtactggat

SEQ ID NO: 849996 - DNA, 75 bp, synthetic construct
  source 1..75: mol_type = other DNA
agtagacttctattttcataatgatggttcgaatcaaagccactcgaaaaaaataaatattacgattccggcaac

SEQ ID NO: 849997 - DNA, 75 bp, synthetic construct
  source 1..75: mol_type = other DNA
atgcagcatttaaaaaatattaagtcaggaaatccaaaaacaaaagagcaatatcagctaacaaagaattttgat

SEQ ID NO: 849998 - DNA, 75 bp, synthetic construct
  source 1..75: mol_type = other DNA
tgcgatagcaatgcagcgctgattaatttcttttcaatggttaaacgtaataccgaggagcttttaactgcttcc

SEQ ID NO: 849999 - DNA, 75 bp, synthetic construct
  source 1..75: mol_type = other DNA
ataatttttggagttcattatcacttcatccagaaatggaatggcagaaattagttgttgcagagcaggagctga

SEQ ID NO: 850000 - DNA, 75 bp, synthetic construct
  source 1..75: mol_type = other DNA
tgaagacgtgaaaaaccggattcaggatattgcacaatcatttgatttgattatcgatgatggttctcataattc

SEQ ID NO: 850001 - DNA, 75 bp, synthetic construct
  source 1..75: mol_type = other DNA
cctaccagacctctcactcttcctcattcgcacattcgaaattttgatgagcaatatgaagagttgtcttcaatt

SEQ ID NO: 850002 - DNA, 75 bp, synthetic construct
  source 1..75: mol_type = other DNA
gctgatagcgtttattgctggtggcatcattatgcttttggaaattaaactgcttgccagaatcgctatctggct

SEQ ID NO: 850003 - DNA, 75 bp, synthetic construct
  source 1..75: mol_type = other DNA
ttgcgcaggctgctgacgctgacccgttcaatactgcaaacgcagatgtacagcaaatgattgctgacgggattg

SEQ ID NO: 850004 - DNA, 75 bp, synthetic construct
  source 1..75: mol_type = other DNA
gcgtttaataccgaaaccaaagagttttactttaacgctgacgattctgttatgtcgttccgtgaatggaaagag

SEQ ID NO: 850005 - DNA, 75 bp, synthetic construct
  source 1..75: mol_type = other DNA
aacgtcattgtgacttttgttcccgaagacctgcccgatttggtgcaaatggttggccgcgccggacgtgacggg

SEQ ID NO: 850006 - DNA, 75 bp, synthetic construct
  source 1..75: mol_type = other DNA
tcgtcaggttattcagcccggtgatgcaactcactgccgacgcgctgagattgagcagtggctggacaagaagcc

SEQ ID NO: 850007 - DNA, 75 bp, synthetic construct
  source 1..75: mol_type = other DNA
ggcggagcctatggcgcaacggccgatatgtcggcaaaaatcggtggtgaaggggatctggcaatcaatacggtg

SEQ ID NO: 850008 - DNA, 75 bp, synthetic construct
  source 1..75: mol_type = other DNA
ggacgtagccgccgctgtatttgcccgtgaccgcgatatgttggccgtgctgcctaccgggtacggcaagacggc

SEQ ID NO: 850009 - DNA, 75 bp, synthetic construct
  source 1..75: mol_type = other DNA
gacgtcaccatcgacgagcgcgatggcaatcagcagaattacacaattccgtattcaacagtgccaattttataa

SEQ ID NO: 850010 - DNA, 75 bp, synthetic construct
  source 1..75: mol_type = other DNA
ttgaaaccgataatagttgtgtggagaactgtttaaaagggaagtttaaagaggtaaggccgcgttattctgtat

SEQ ID NO: 850011 - DNA, 75 bp, synthetic construct
  source 1..75: mol_type = other DNA
gcatgatgcccgtggattttatgagtaaccttagccgagttggggatcccgttgtagtttgtttttcgcttttcc

SEQ ID NO: 850012 - DNA, 75 bp, synthetic construct
  source 1..75: mol_type = other DNA
taaatatgaggattatcccattattgggaataatgttattatttatgcgggagcaattataataggtaaagtaat

SEQ ID NO: 850013 - DNA, 75 bp, synthetic construct
  source 1..75: mol_type = other DNA
aagataccaattgctaatcatctcacgattggcttaaaaaaattaggagagaaaaatactatttttcctcatcct

SEQ ID NO: 850014 - DNA, 75 bp, synthetic construct
  source 1..75: mol_type = other DNA
cagcagctattatttaagcatcaagtacataactttgatgatttttcaaagaaccttataaaaatactagatgat

SEQ ID NO: 850015 - DNA, 75 bp, synthetic construct
  source 1..75: mol_type = other DNA
gaatttttggtggctgatgatacagttaatgacacagcgatgatcttgtgtcagaagttggctgagcataatcca

SEQ ID NO: 850016 - DNA, 75 bp, synthetic construct
  source 1..75: mol_type = other DNA
aatgcacttattattttaagagcttgcggggaaagtcatcatgaagtaagcaaagcatatggtggcatagcctgt

SEQ ID NO: 850017 - DNA, 75 bp, synthetic construct
  source 1..75: mol_type = other DNA
ccagcctcgtgctggttttggtgttgtttggcctgttacagctggcgtcagggggacttttctttaactctttga

SEQ ID NO: 850018 - DNA, 75 bp, synthetic construct
  source 1..75: mol_type = other DNA
taatgttattgatcaaaacaatgttcgtaatcttaaagatgcgttagaagccctttccagatcacttatagctag

SEQ ID NO: 850019 - DNA, 75 bp, synthetic construct
  source 1..75: mol_type = other DNA
agatagtattgaacctgataataaattaacaaaaaaatgtattatgcaaaattatctgatgttgttgataggcta

SEQ ID NO: 850020 - DNA, 75 bp, synthetic construct
  source 1..75: mol_type = other DNA
agcgaaatgctgggtgacaagcgcggatgatagctctcttgcaaatgaatatataaacaactccggaactttgca

SEQ ID NO: 850021 - DNA, 75 bp, synthetic construct
  source 1..75: mol_type = other DNA
gctactaaaaaaatggcagctgctaccgacgctgttattgatgaagcccgccaaaacctgatccctctgagcaag

SEQ ID NO: 850022 - DNA, 75 bp, synthetic construct
  source 1..75: mol_type = other DNA
gtatggcgcaggattatctcgcctgggatgtattcgataacgtggtgatttgtgctgcctatcgggcaattccgg

SEQ ID NO: 850023 - DNA, 75 bp, synthetic construct
  source 1..75: mol_type = other DNA
cgggtggtttcgacgccacatcttcgtgttaattcggggcaggagtcgactctctctaacggtgaacaggtgccc

SEQ ID NO: 850024 - DNA, 75 bp, synthetic construct
  source 1..75: mol_type = other DNA
aaatcaccaatcccacaggcggttgatctgtttgctgggaaaccacagcaggaggttgtgttggctgcgctggaa

SEQ ID NO: 850025 - DNA, 75 bp, synthetic construct
  source 1..75: mol_type = other DNA
tttggccgagtgcaatgccatagcttagcaaagtttgatgaaataataagagcatacgatagcgcaccgatgatt

SEQ ID NO: 850026 - DNA, 75 bp, synthetic construct
  source 1..75: mol_type = other DNA
gcctcctcgtgctgagcttacattagtaggatttccaaacactgaaagaaggagttcggatcctataaaatatta

SEQ ID NO: 850027 - DNA, 75 bp, synthetic construct
  source 1..75: mol_type = other DNA
tgatgctgctgcaagtgtcttgcctccgaactttcgacttaaaaacgtaataagtaatatagcggtagtgccaaa

SEQ ID NO: 850028 - DNA, 75 bp, synthetic construct
  source 1..75: mol_type = other DNA
gcggtgaaaagatccccctgttgagtacggctaacacatggagtgcgcgccagactttcaacggcgggatcaccg

SEQ ID NO: 850029 - DNA, 75 bp, synthetic construct
  source 1..75: mol_type = other DNA
tttactgggctttggcgtttctttaatgattggtttccgcgtagttaaatccctcttcagaatggcatcttcctg

SEQ ID NO: 850030 - DNA, 75 bp, synthetic construct
  source 1..75: mol_type = other DNA
tcggattgctcattttcatactacttgttgtttttttaagcgatcagataaaagggcgctgaaaaaaacattctc

SEQ ID NO: 850031 - DNA, 75 bp, synthetic construct
  source 1..75: mol_type = other DNA
gcgatgaaaaggagatatttgctcagtgagactgactgggacgtttccgccagcatcatcggcttcagcccagta

SEQ ID NO: 850032 - DNA, 75 bp, synthetic construct
  source 1..75: mol_type = other DNA
atccctggatactcatacactaatacacaggatataagtaatagcatagatagtagaatgtttaattataatttt

SEQ ID NO: 850033 - DNA, 75 bp, synthetic construct
  source 1..75: mol_type = other DNA
tatttagttggcagttacactctgatgccagttatagcaaacctgatgatatgaaaggcaaaaggcaaatggcaa

SEQ ID NO: 850034 - DNA, 75 bp, synthetic construct
  source 1..75: mol_type = other DNA
cgttcgtaaaaaaacctctggtcactgcatcttccctgatgctggcgtccggtcctgttctggctgaaggggtga

SEQ ID NO: 850035 - DNA, 75 bp, synthetic construct
  source 1..75: mol_type = other DNA
ataaacataggtggtgtatcctttgatggttcagccgatatagatttgcctggtgtgaatacaaaaggtaatcaa

SEQ ID NO: 850036 - DNA, 75 bp, synthetic construct
  source 1..75: mol_type = other DNA
gaataattgtgaatttaatgggtttgttatgcctggcggttggtctgatcgcggttcatatgcggctggtttttt

SEQ ID NO: 850037 - DNA, 75 bp, synthetic construct
  source 1..75: mol_type = other DNA
ttcaaagtaataaaaccataaatattacggggcgtgttaatccctcggattacggtaactttgattcccgctatg

SEQ ID NO: 850038 - DNA, 75 bp, synthetic construct
  source 1..75: mol_type = other DNA
atcggcaaaagagagcttaaaagtggaaggtatgaagttggattaatcgtccaaaattcaaaaggtgtacattat

SEQ ID NO: 850039 - DNA, 75 bp, synthetic construct
  source 1..75: mol_type = other DNA
gagtaagtcgtaacttctttgacccattgagtgtcatgcttacttccttgcttgaaaataatcaatcacataaaa

SEQ ID NO: 850040 - DNA, 75 bp, synthetic construct
  source 1..75: mol_type = other DNA
gtcactaaacgtgagcgccgcgaagagttatcccctgattttatccctgccggtgtttttcctgcctcgcattac

SEQ ID NO: 850041 - DNA, 75 bp, synthetic construct
  source 1..75: mol_type = other DNA
tcttttagagagaattacattttatgcgaaaaaaatagagatgagcttgataaatctcctgcaaatggtgttgtg

SEQ ID NO: 850042 - DNA, 75 bp, synthetic construct
  source 1..75: mol_type = other DNA
cgcaaaaaaaatactttactgcccaacatggcgtaattatgccactacgattttttttccatttcctgattttga

SEQ ID NO: 850043 - DNA, 75 bp, synthetic construct
  source 1..75: mol_type = other DNA
attgatttttaacgcaaaaacatggatttgttcaacaatagaaacacctgttacaagtttctttaaaaaaaagaa

SEQ ID NO: 850044 - DNA, 75 bp, synthetic construct
  source 1..75: mol_type = other DNA
tctaatgttagggtaaatatctgtgcgagcgaagcatatactcctaatcacgtatgggcaattgaattagcagcg

SEQ ID NO: 850045 - DNA, 75 bp, synthetic construct
  source 1..75: mol_type = other DNA
gggtgattatggattccgcctcacgaccgcacctggtgatggtttgtatgttaactatgggctgaaagcgctgaa

SEQ ID NO: 850046 - DNA, 75 bp, synthetic construct
  source 1..75: mol_type = other DNA
cgtaatagcataagcgggaagggtatcgtgagcgcaaccgccaggacagacgtagagctggatggcgataatagc

SEQ ID NO: 850047 - DNA, 75 bp, synthetic construct
  source 1..75: mol_type = other DNA
gaagcaaatttggtcgtgtcgggggtgaagcatgccgctaataaaaagaaaaataaagaggttattaaagactta

SEQ ID NO: 850048 - DNA, 75 bp, synthetic construct
  source 1..75: mol_type = other DNA
ctcttgcgcttttaacatccatttttagtgtttcgctttttgcattaaacaggttggatttgattcaatgcgtcc

SEQ ID NO: 850049 - DNA, 75 bp, synthetic construct
  source 1..75: mol_type = other DNA
atgactaaagaacaagatgagaatatacgatgttattttgtagttaatgatgattgcaaaagaaagttgcttctt

SEQ ID NO: 850050 - DNA, 75 bp, synthetic construct
  source 1..75: mol_type = other DNA
aatttgctactcgaaggaggttgccttatggctacgaccctcaccccgtcacaccctcagtttgtctttgtgttt

SEQ ID NO: 850051 - DNA, 75 bp, synthetic construct
  source 1..75: mol_type = other DNA
gaatcatgggaacgctacagcgttctcgtcagccgtgtggatacggcaaagcccgaatggccacaaaaaccagaa

SEQ ID NO: 850052 - DNA, 75 bp, synthetic construct
  source 1..75: mol_type = other DNA
tagagaagtagacaagctgtctcattcctatgaggtttacattaaacctcgtcataaaaccctccatccttcgcg

SEQ ID NO: 850053 - DNA, 75 bp, synthetic construct
  source 1..75: mol_type = other DNA
gttattgttatttttttgtaagataattggtattaaaactatctggtgggggcatggatggagtgctggatcacg

SEQ ID NO: 850054 - DNA, 75 bp, synthetic construct
  source 1..75: mol_type = other DNA
ttatctgtggagttgtaaaattatttattggttattctgaagatagtaattttatagtttatttaaatagaaatg

SEQ ID NO: 850055 - DNA, 75 bp, synthetic construct
  source 1..75: mol_type = other DNA
cctcaaaaacaccatcatacactaaatcagtaagttggcagcatcaccctattttcgctaagggtactatttttt

SEQ ID NO: 850056 - DNA, 75 bp, synthetic construct
  source 1..75: mol_type = other DNA
gactatcctcgtatatggtggcatgcaagagaaggtgccatttttcccaataaagaagatattgcccgtgcaaca

SEQ ID NO: 850057 - DNA, 75 bp, synthetic construct
  source 1..75: mol_type = other DNA
gttaaaggcagagatttaaaagaagtatgtaatgagcatgatataacaccatcatatgtcactagtttattgcgt

SEQ ID NO: 850058 - DNA, 75 bp, synthetic construct
  source 1..75: mol_type = other DNA
taatcgtgaggccatcattcgcgaggtatctacaccgctggagcgatattgcctgctgaatgattgcgagccgtg

SEQ ID NO: 850059 - DNA, 75 bp, synthetic construct
  source 1..75: mol_type = other DNA
ccattatttaataaaagataaatcagaaattaaaaatgaaattattaccattgttgagaaagcgtgtcaagaatt

SEQ ID NO: 850060 - DNA, 75 bp, synthetic construct
  source 1..75: mol_type = other DNA
taaaagtcaatgattcggaatcaagtggctattttttcaaagcaagctccaaggatgattcttttgtaatttcat

SEQ ID NO: 850061 - DNA, 75 bp, synthetic construct
  source 1..75: mol_type = other DNA
ggtcaaaacagcgttacggtgccccacgcctgacggatgaactgcgtgctcagggttacccctttaacgtaaaac

SEQ ID NO: 850062 - DNA, 75 bp, synthetic construct
  source 1..75: mol_type = other DNA
ctgaaaagctgacgttaaccaaatcccccctttacctgcctgataccgcaaaagaagagttagagaagaagaaaa

SEQ ID NO: 850063 - DNA, 75 bp, synthetic construct
  source 1..75: mol_type = other DNA
gtataattaacgctttaaaaaaacgtaatatacgagtgccacaagatgtgtccgtaatgagtattgatgggttta

SEQ ID NO: 850064 - DNA, 75 bp, synthetic construct
  source 1..75: mol_type = other DNA
aaaattcaataattgagaggtcttttcttaatcaaaaatttacagatgcacaatgcgaaattttatatgagattt

SEQ ID NO: 850065 - DNA, 75 bp, synthetic construct
  source 1..75: mol_type = other DNA
atattcggtattgcagtttgctctcctatactatcctatacaaaatatagaccagtatttttctataccgacgca

SEQ ID NO: 850066 - DNA, 75 bp, synthetic construct
  source 1..75: mol_type = other DNA
aaaatgcaaaagagaaactggatcggtggttgaaagatggcatcaccacgccgggtggaaaactcctttcagaaa

SEQ ID NO: 850067 - DNA, 75 bp, synthetic construct
  source 1..75: mol_type = other DNA
actgggcgtcagttctgatgcagggttgttggaggccgcagatattctgttatgtatgcggcattgcgaagcaag

SEQ ID NO: 850068 - DNA, 75 bp, synthetic construct
  source 1..75: mol_type = other DNA
cacataaatttaatgtgatgtcgaaactgggcgtcagttctgatgcagggttgttggaggccgcagatattctgt

SEQ ID NO: 850069 - DNA, 75 bp, synthetic construct
  source 1..75: mol_type = other DNA
agcgacgatttcacgcgtagcatgctgaaggccgtaaacagtatgatgttggatatgcttgcagcaatcgccaga

SEQ ID NO: 850070 - DNA, 75 bp, synthetic construct
  source 1..75: mol_type = other DNA
aacgcttaatcctgaaggttttagcgttgttgaggttcctgatattactgccaaccggcgtgctgatgactcagg

SEQ ID NO: 850071 - DNA, 75 bp, synthetic construct
  source 1..75: mol_type = other DNA
catcacagccagtgaacagaacagatatattgaccttaagcagtgaatccactgcaaaaggatttggcatcaggc

SEQ ID NO: 850072 - DNA, 75 bp, synthetic construct
  source 1..75: mol_type = other DNA
cttattatataaccatcatcaaatatccgataataaatatggtgaagaatatcatattgcgctgccataatggaa

SEQ ID NO: 850073 - DNA, 75 bp, synthetic construct
  source 1..75: mol_type = other DNA
gggtgctgatgttcctgatatccgtaacgttgtcgtgacatacgtccccgatgatttgcctgatctcgttcagat

SEQ ID NO: 850074 - DNA, 75 bp, synthetic construct
  source 1..75: mol_type = other DNA
cagtcagacagtgccgcgaacgtttccgagcggctattggtctggtcgaggctctgccgaaagaagagaagacgc

SEQ ID NO: 850075 - DNA, 75 bp, synthetic construct
  source 1..75: mol_type = other DNA
gaggcttttcgtttatgtttataatgtcagtgacattttatctgatatcgacaaatttcaaatttggaaatacta

SEQ ID NO: 850076 - DNA, 75 bp, synthetic construct
  source 1..75: mol_type = other DNA
agtattaatacaaaaacattccaagcgtgtattttatattttgacttcttaggggattttggtcgggtggttgaa

SEQ ID NO: 850077 - DNA, 75 bp, synthetic construct
  source 1..75: mol_type = other DNA
tgaagatgaatggtcaaaccgtaggccgtgaaggtgcgcgtaatctcggtgaagtacgtaccggggttgaggcga

SEQ ID NO: 850078 - DNA, 75 bp, synthetic construct
  source 1..75: mol_type = other DNA
gaatatcggcaaatttttctatccgctggggcgtaacaatgtgcgtaccagctccagtctgtcgtttatcagcta

SEQ ID NO: 850079 - DNA, 75 bp, synthetic construct
  source 1..75: mol_type = other DNA
ccaggcacaattctccgggcccggaaagaatgctggatggtaggaagtgaagtggtcaacaaaaactggccaccg

SEQ ID NO: 850080 - DNA, 75 bp, synthetic construct
  source 1..75: mol_type = other DNA
tcggtactgctgtttcaggatctggcggtgatcccggcactggcgttagtgccgttgttggcgggttcggcagac

SEQ ID NO: 850081 - DNA, 75 bp, synthetic construct
  source 1..75: mol_type = other DNA
cccatttctcatggcaggcggcggtggtcggtggcattggccttgcgatgtcttcaactgcaatggcgttgcaat

SEQ ID NO: 850082 - DNA, 75 bp, synthetic construct
  source 1..75: mol_type = other DNA
ggaacttacagaattatgcgaaacagtcgataaaacaatagaacaattagtttgtagtgttaataatcgttttgg

SEQ ID NO: 850083 - DNA, 75 bp, synthetic construct
  source 1..75: mol_type = other DNA
ccgacgaggaatacaacgttgctcatgttaatgctatttcaaatggcgttaatagtgtaaatgcttttgcaaaga

SEQ ID NO: 850084 - DNA, 75 bp, synthetic construct
  source 1..75: mol_type = other DNA
ccagtgactgggtgacagaagacctgcttgtgaagatgacagggctacgcccgggaacgatagcgcgggcccgta

SEQ ID NO: 850085 - DNA, 75 bp, synthetic construct
  source 1..75: mol_type = other DNA
accgtcaggcggcaaatcctttaccgtcaatttcgctaaacctggcaactacaatctgacgttacgcgataaaga

SEQ ID NO: 850086 - DNA, 75 bp, synthetic construct
  source 1..75: mol_type = other DNA
cgatgcgctgtatctcgatgaaattacgcttaccagcgagcaggatgcagttctgcgctatggtcaggtggaagt

SEQ ID NO: 850087 - DNA, 75 bp, synthetic construct
  source 1..75: mol_type = other DNA
ccgttattgcatcgggcgctggtgctggcgtgggcacaggagatgaatctgccgtgcaaaacgttgttgaaaggg

SEQ ID NO: 850088 - DNA, 75 bp, synthetic construct
  source 1..75: mol_type = other DNA
aacgacattcgtcagatgattcaggataaccgtctacggctgatgcaactggcggggcctggtgcgcgctttacc

SEQ ID NO: 850089 - DNA, 75 bp, synthetic construct
  source 1..75: mol_type = other DNA
gttgttttgcctgcgcctgcgggcgcatgggccaaacataagttaactggagggggcgaatactggcgttgggtt

SEQ ID NO: 850090 - DNA, 75 bp, synthetic construct
  source 1..75: mol_type = other DNA
ggctacaaagtagtgaaacgccgcaggagattttccgcaacaatcttgatgcgttagtcgatgaaccgtggggtg

SEQ ID NO: 850091 - DNA, 75 bp, synthetic construct
  source 1..75: mol_type = other DNA
tgccttccacgacggggttttattctgtggcggatttttcccgtctggccgctatggctgaaagagcggacatgt

SEQ ID NO: 850092 - DNA, 75 bp, synthetic construct
  source 1..75: mol_type = other DNA
cggtgttgaattttggtaccgggcccgcctggttgaccgcattggtaatcagagtgattggaccgactgggttcg

SEQ ID NO: 850093 - DNA, 75 bp, synthetic construct
  source 1..75: mol_type = other DNA
gcctgaccggtaccgaggacgatgcaatgctgctggccgatgtgccttacccgcagcgcaaatatcagcagatgg

SEQ ID NO: 850094 - DNA, 75 bp, synthetic construct
  source 1..75: mol_type = other DNA
atgctgaccgttgtgaacacagaaagccaggagacatggaaatggacggaaagaatcgggcagcatcctcttatc

SEQ ID NO: 850095 - DNA, 75 bp, synthetic construct
  source 1..75: mol_type = other DNA
catcaataattttgatgacaacatgttaaacgttgctgccatgagcgatgaagaaaaaaaactatttcttgccac

SEQ ID NO: 850096 - DNA, 75 bp, synthetic construct
  source 1..75: mol_type = other DNA
ggacagatgcagtaaatgcatgcgcgggtgtgaactgcgcaggaatgtcggcaactttggcggtttcctttccat

SEQ ID NO: 850097 - DNA, 75 bp, synthetic construct
  source 1..75: mol_type = other DNA
ccgcaccacggcagtgatgtttccggaactggtaaggcagttcaagtttaagcagacacaaatcactgcgatcgg

SEQ ID NO: 850098 - DNA, 75 bp, synthetic construct
  source 1..75: mol_type = other DNA
aggatggcgcagagcgtataacactaaaaacaagcctactgcggctgatgtcggagctttaccactatctggagg

SEQ ID NO: 850099 - DNA, 75 bp, synthetic construct
  source 1..75: mol_type = other DNA
caacggcaatgaatatttcaaatggagaagcaaacaaagtaccacaacaaaagacctgatgaatcttaaatggga

SEQ ID NO: 850100 - DNA, 75 bp, synthetic construct
  source 1..75: mol_type = other DNA
ctctcgctgcccttgcgactggtgcaaacaaactgccttatttcactgctaaggatacggtagctcagactgatt

SEQ ID NO: 850101 - DNA, 75 bp, synthetic construct
  source 1..75: mol_type = other DNA
tgaatatgtcaacgccacgatatttgaccgttatggggatgcggacgatttcctggactcatcaggagatgaaac

SEQ ID NO: 850102 - DNA, 75 bp, synthetic construct
  source 1..75: mol_type = other DNA
ccagaaaatgtctattggcgttcagcacaaatagcaacgccagaacaacataaagtaatcatgcagcgacaatcc

SEQ ID NO: 850103 - DNA, 75 bp, synthetic construct
  source 1..75: mol_type = other DNA
gaagcctgggaacgctacagcattctggtcagccgtgtggatacagcaaagcccgaatggccacaaaagcctgag

SEQ ID NO: 850104 - DNA, 75 bp, synthetic construct
  source 1..75: mol_type = other DNA
gcaacatgttaaacgcttctaccatgagtgatgaagaaaagaaactatttatcgccaccatgaaatttattatga

SEQ ID NO: 850105 - DNA, 75 bp, synthetic construct
  source 1..75: mol_type = other DNA
gcgccaggctttacgccacgcttgctaatggtcgcgtgtcgctgatcgatttctttgccgcccctgttttattgg

SEQ ID NO: 850106 - DNA, 75 bp, synthetic construct
  source 1..75: mol_type = other DNA
tataaacagaaagaaaataataatgaagaattctacttcatcatcgaaactctagatggcattccttgtggaact

SEQ ID NO: 850107 - DNA, 75 bp, synthetic construct
  source 1..75: mol_type = other DNA
gaagatgtatgcctgcgtgataaaagcttaaatattcaccgaatgaagaatgggtttagcacaattcatccactt

SEQ ID NO: 850108 - DNA, 75 bp, synthetic construct
  source 1..75: mol_type = other DNA
atgtcacaaactgaggataatcttcatgcagtcgctatgaagattactgcagatattatgcaagatgcagattga

SEQ ID NO: 850109 - DNA, 75 bp, synthetic construct
  source 1..75: mol_type = other DNA
aattgtattctcgatgactcaaatttcgctcagataaaaatggccgacggaactctaaatgcatgctccgctatg

SEQ ID NO: 850110 - DNA, 75 bp, synthetic construct
  source 1..75: mol_type = other DNA
gttaattgacaataaagccctctctcttttcaaaatggatgatcatgaaaaagtgataggcttgattcagaaaat

SEQ ID NO: 850111 - DNA, 75 bp, synthetic construct
  source 1..75: mol_type = other DNA
atcaacttcagctcgaccgagctctcaataaactcatccataacctagtcgaagaaagtcagctcacgctcggag

SEQ ID NO: 850112 - DNA, 75 bp, synthetic construct
  source 1..75: mol_type = other DNA
atgacacaagaagaaaaaataatgtttcttatgcgcctggctgtggaaacctttaacgcccattgccaggtgtcc

SEQ ID NO: 850113 - DNA, 75 bp, synthetic construct
  source 1..75: mol_type = other DNA
atgttatttcagaaaaattatagcaaacaaaggcactataaattgaaaaataaagaaaccctaaaacagatttat

SEQ ID NO: 850114 - DNA, 75 bp, synthetic construct
  source 1..75: mol_type = other DNA
aaagtgaggtggagctaatgcttactgaagcaaaacatggacaattctcagagaggaattattgcttgctttatc

SEQ ID NO: 850115 - DNA, 75 bp, synthetic construct
  source 1..75: mol_type = other DNA
ttgatgaagcaaccagtgctctggattatgagtcggagcatgtcatcatgcgcaatatgcacaaaatatgtaagg

SEQ ID NO: 850116 - DNA, 75 bp, synthetic construct
  source 1..75: mol_type = other DNA
agagccgctacctctacgacccgctgggacggcgaatggcaaaacgggtctggcggcgggagcgtgacctgacgg

SEQ ID NO: 850117 - DNA, 75 bp, synthetic construct
  source 1..75: mol_type = other DNA
ttaaggcagctataactgcacttatcaacggtgcgcctggcacactggatacgctgaaagaaatagcggctgcga

SEQ ID NO: 850118 - DNA, 75 bp, synthetic construct
  source 1..75: mol_type = other DNA
aaagctcgcctgcctgaaagacgagaagaaagccttgatgcagcaactgctgaccgggaaacgtcgggtgaaagt

SEQ ID NO: 850119 - DNA, 75 bp, synthetic construct
  source 1..75: mol_type = other DNA
cgcttgcctgagagatgagaaaaaagccctgatgcaacagctactgactggcaaacgtcgtgttaaggtcgatga

SEQ ID NO: 850120 - DNA, 75 bp, synthetic construct
  source 1..75: mol_type = other DNA
cgcctgcctgaaagacgagaagaaagccttgatgcagcaactgctgaccgggaaacgtcgggtgaaagtggatga

SEQ ID NO: 850121 - DNA, 75 bp, synthetic construct
  source 1..75: mol_type = other DNA
taaagggaacgccggtagatgttgcaggaaatttaagatgggtggagacaggcaacaaacttaaggtggagaacc

SEQ ID NO: 850122 - DNA, 75 bp, synthetic construct
  source 1..75: mol_type = other DNA
ggtggctgcggtgccgctggcatcgcggctgggtattggcgctgtgttgggatatttgctggcaggaattgcaat

SEQ ID NO: 850123 - DNA, 75 bp, synthetic construct
  source 1..75: mol_type = other DNA
ggaaagtctgcgccatataaaccaaatgatgctgactatacagtaggtgcattttgcgcactttttcgaccactg

SEQ ID NO: 850124 - DNA, 75 bp, synthetic construct
  source 1..75: mol_type = other DNA
tatgatactggtatcgttagcccgatttatgtagtttttcgtgcatcgcctactaaagttgacaactcatatttg

SEQ ID NO: 850125 - DNA, 75 bp, synthetic construct
  source 1..75: mol_type = other DNA
tggggtccgaaataatggtttattaaatatcaaaccgacagagtttatgcaaacaaaagtccctgttccatgttt

SEQ ID NO: 850126 - DNA, 75 bp, synthetic construct
  source 1..75: mol_type = other DNA
gaagcaggactggtaccccatgtctatgtttgctttagattaaaaaatgggctcagtcaccgttattttaaatat

SEQ ID NO: 850127 - DNA, 75 bp, synthetic construct
  source 1..75: mol_type = other DNA
gtgatgacttatctggctaccggttgatccatcgtggttgttttggttttccgtctaaccatatagaagaaggct

SEQ ID NO: 850128 - DNA, 75 bp, synthetic construct
  source 1..75: mol_type = other DNA
gtgacggaaaagcttctcaccaacagtcagcagcagaaaaaagccctgatgcagcaattgcttaccgggaaaaaa

SEQ ID NO: 850129 - DNA, 75 bp, synthetic construct
  source 1..75: mol_type = other DNA
caacctaaacgccggaatggttaaagagtttgaactagacttacccagtataagagaacaacaaaaaatcgccgc

SEQ ID NO: 850130 - DNA, 75 bp, synthetic construct
  source 1..75: mol_type = other DNA
gatgaactgaagttgcagttacagtatgaaacaatgttaaaaaacccacaatcattattttgctttcactcttgt

SEQ ID NO: 850131 - DNA, 75 bp, synthetic construct
  source 1..75: mol_type = other DNA
caggcacttaaaatacaaataaacaatctattcgatgatttcgattactacaaaaaagtgaatggaacagaaaaa

SEQ ID NO: 850132 - DNA, 75 bp, synthetic construct
  source 1..75: mol_type = other DNA
aaagctgcgcgttatcagcaagcgttacactcagcgcattgagcgacataacctgaatctgagacaacatctggc

SEQ ID NO: 850133 - DNA, 75 bp, synthetic construct
  source 1..75: mol_type = other DNA
aatgtaaagaaccctcagaactatcctattctagttcaatcaaaaatatataatgacgatgacagtgtagatagt

SEQ ID NO: 850134 - DNA, 75 bp, synthetic construct
  source 1..75: mol_type = other DNA
ctcgtcatgaagtgggacagatattgcttgcagcagacagagggatccattttgagcgcgattattgcctcattc

SEQ ID NO: 850135 - DNA, 75 bp, synthetic construct
  source 1..75: mol_type = other DNA
cgccgccaacatgaacaccgcgcgactggtcatcactccggccacggacaccacggaggccgtcatggaaagcga

SEQ ID NO: 850136 - DNA, 75 bp, synthetic construct
  source 1..75: mol_type = other DNA
gatggcgggatcagcaaaacacgagaaattaaagaggccatccgccgctcagccaactatcctgtcttctggaag

SEQ ID NO: 850137 - DNA, 75 bp, synthetic construct
  source 1..75: mol_type = other DNA
ggacgggtcatccgcctgaccagtgaaaacggcagccacaccaccttccgttacgatgtactcgaccggctgata

SEQ ID NO: 850138 - DNA, 75 bp, synthetic construct
  source 1..75: mol_type = other DNA
agttgctgagcttcaccgactgttccggttatgtaacccgctatgaccatgaccgttttggtcaggtgacggcgg

SEQ ID NO: 850139 - DNA, 75 bp, synthetic construct
  source 1..75: mol_type = other DNA
ctgtgggcgatttatttcttgaattatacggtatgaaaaatggaggaggtgtatatattccgcgacctatgtgcg

SEQ ID NO: 850140 - DNA, 75 bp, synthetic construct
  source 1..75: mol_type = other DNA
taaagataattgcaactgagttcggtgataataaaattgatgatattttatcgaacaaagaagatgcagataaaa

SEQ ID NO: 850141 - DNA, 75 bp, synthetic construct
  source 1..75: mol_type = other DNA
tctcaaacatggcggaacttatgttggaacatgatttcgccataggtgcattgggagggactacttgggagcgtt

SEQ ID NO: 850142 - DNA, 75 bp, synthetic construct
  source 1..75: mol_type = other DNA
acagtcgcgcagaatctttcaaagtcaggtgcaatagttttatattcagacaaatttaaaaagagtgagtttagt

SEQ ID NO: 850143 - DNA, 75 bp, synthetic construct
  source 1..75: mol_type = other DNA
gaataattatttagtttgtaaccacagtagaccaaaagattgctatgctgaatgtgcgcatcttttgccatctcc

SEQ ID NO: 850144 - DNA, 75 bp, synthetic construct
  source 1..75: mol_type = other DNA
caactactgatgcggctattgcaactggtgctacaattggcgtagggtatgttatatatagagtgattcgattta

SEQ ID NO: 850145 - DNA, 75 bp, synthetic construct
  source 1..75: mol_type = other DNA
catcgtggcggacaaaacggctgaaattaaaagaggtcttctcgccggaataaaaggcgaaaaaattaccaccgt

SEQ ID NO: 850146 - DNA, 75 bp, synthetic construct
  source 1..75: mol_type = other DNA
agcggctggcgacacagatagagccggtttatttacctgagcgaaaaattcatctttaccactgtgaccaccggg

SEQ ID NO: 850147 - DNA, 75 bp, synthetic construct
  source 1..75: mol_type = other DNA
gaatctgttggtatcggtgcaggtgttgacgcttcagttatgactctggcttgtagaacgtggcaagaatgctgg

SEQ ID NO: 850148 - DNA, 75 bp, synthetic construct
  source 1..75: mol_type = other DNA
gggaaaccgcctgccggacccggagctgcacccggacagtaccctcacggcgtggccggataaccgcatcgcaga

SEQ ID NO: 850149 - DNA, 75 bp, synthetic construct
  source 1..75: mol_type = other DNA
atggtgaattactgtcttatatcattggcgctgacaacattaccggcagcactggcctgacgaccgggctgcata

SEQ ID NO: 850150 - DNA, 75 bp, synthetic construct
  source 1..75: mol_type = other DNA
tcaggcaacgcgcattgatgccgagctgtcgatggcggtgttaagggaatatcgcgataagtttccggcatggcg

SEQ ID NO: 850151 - DNA, 75 bp, synthetic construct
  source 1..75: mol_type = other DNA
ctgttgttacaatagtaattttatctggtcagcaatcgcataagttggaactaattgctgtgcatttcagtacaa

SEQ ID NO: 850152 - DNA, 75 bp, synthetic construct
  source 1..75: mol_type = other DNA
attaaaagaggtcttctcgccggaataaaaggcgaaaaaattaccaccgtggagaaaaaaagaggacgtagatgt

SEQ ID NO: 850153 - DNA, 75 bp, synthetic construct
  source 1..75: mol_type = other DNA
ttttggccacctggcgataccgcgtgtgggtcaggaggtgattgtagacttcctcaacggcgatccggaccagcc

SEQ ID NO: 850154 - DNA, 75 bp, synthetic construct
  source 1..75: mol_type = other DNA
atgaacaagcggatattttttccactagatggtacccgttcaggcttattatcaatatgttttattgtggtggtg

SEQ ID NO: 850155 - DNA, 75 bp, synthetic construct
  source 1..75: mol_type = other DNA
cgctcacggcgtggccggataaccgcatcgcagaggatgcgccccatgtttaccactctgatgaatacggcagac

SEQ ID NO: 850156 - DNA, 75 bp, synthetic construct
  source 1..75: mol_type = other DNA
tgcctgctcaagaaacaatgcttccagaaactgccaccccgtagatggtagtaatgcttctgcaccatcggataa

SEQ ID NO: 850157 - DNA, 75 bp, synthetic construct
  source 1..75: mol_type = other DNA
tcatccgcagcgaggatgaggggcaggtcacgcagtggtactacgatgaagcagaccgcatcacgcaccggacgg

SEQ ID NO: 850158 - DNA, 75 bp, synthetic construct
  source 1..75: mol_type = other DNA
cagagacgctccagcaggaagggagtgagaacggccacggcgtggtgttcccggctgaactggtgcggctgctgg

SEQ ID NO: 850159 - DNA, 75 bp, synthetic construct
  source 1..75: mol_type = other DNA
gtcaccctctggcactacgacgaatcggaccgcctcactcaccgcacggtgaacggcgaaccggcagagcagtgg

SEQ ID NO: 850160 - DNA, 75 bp, synthetic construct
  source 1..75: mol_type = other DNA
tggatgtcgctgtcgcgtaaaccggaggtgacgtggtacggatgggacggcgactggctgacgacggtacagacc

SEQ ID NO: 850161 - DNA, 75 bp, synthetic construct
  source 1..75: mol_type = other DNA
gcacagtgaattaccggccacgacaacagatgcgacgggcagcacccggcagatgacgtggagccgctacgggca

SEQ ID NO: 850162 - DNA, 75 bp, synthetic construct
  source 1..75: mol_type = other DNA
actaccactacgacagccagcaccgtctggtgttcaacacgcggatacagcaaggggagccacgggtcgagagcc

SEQ ID NO: 850163 - DNA, 75 bp, synthetic construct
  source 1..75: mol_type = other DNA
ctggaatgacaatggcgacctggtgcgcatcagcggcccgcgacagacgcgggaatatggctacagcgccacggg

SEQ ID NO: 850164 - DNA, 75 bp, synthetic construct
  source 1..75: mol_type = other DNA
gcgtaaaccggagatgacgtggtacgggtgggacggcgaccggctgacgacggtacagaccgacaccacgcgtat

SEQ ID NO: 850165 - DNA, 75 bp, synthetic construct
  source 1..75: mol_type = other DNA
ggcccgcaggagagccgggagtaccgttacagcggcacgggaaggctgacgggcgtccacaccacggcagcgaac

SEQ ID NO: 850166 - DNA, 75 bp, synthetic construct
  source 1..75: mol_type = other DNA
actaccactacgacagccagcaccgtctggtgttcgacacgcggatacagcaaggggagccacaggtcgagagcc

SEQ ID NO: 850167 - DNA, 75 bp, synthetic construct
  source 1..75: mol_type = other DNA
actaccactacgacagccagcaccgtctggtgttctacacgcggatacagcaaggggagccactggtcgagagcc

SEQ ID NO: 850168 - DNA, 75 bp, synthetic construct
  source 1..75: mol_type = other DNA
attatctttcaaggcgcttaacagtcgatatgttttgcgggatatcaatgaatagtcgaatcctggaaacgtcag

SEQ ID NO: 850169 - DNA, 75 bp, synthetic construct
  source 1..75: mol_type = other DNA
gtcgggttatacctgctttacctgacatatggcacgcacgaatctatgtaatactgctgtgcctggtgctactgg

SEQ ID NO: 850170 - DNA, 75 bp, synthetic construct
  source 1..75: mol_type = other DNA
ctgccgccgcgatagctgcggaagcgggtgtcgatgattttctcgccgaagcgacaccggaggccaagctggcat

SEQ ID NO: 850171 - DNA, 75 bp, synthetic construct
  source 1..75: mol_type = other DNA
ccgatgaaacaatgattccggggcgtcttagaaataacactccggttattcggggaatagctagaactcccgcat

SEQ ID NO: 850172 - DNA, 75 bp, synthetic construct
  source 1..75: mol_type = other DNA
gtagcgttagatcgtgcttcacttcaaataaaaaaaattctatttgttggtgaagcgcttaacggcccgagagcc

SEQ ID NO: 850173 - DNA, 75 bp, synthetic construct
  source 1..75: mol_type = other DNA
ggagtggtttatgcgccagcagggcgcagaaaaagcctctttcgataccattgtcgccagcggctggcgtggggc

SEQ ID NO: 850174 - DNA, 75 bp, synthetic construct
  source 1..75: mol_type = other DNA
atgacattactcgcctcgctgcgcgactggcttacagagcaacaactggatgcgatggttctctcctcacggcag

SEQ ID NO: 850175 - DNA, 75 bp, synthetic construct
  source 1..75: mol_type = other DNA
cactggagcacctcaaaaacaccatcatacactaaatcagtaagttggcagcatcacctagcttcacatgcaaat

SEQ ID NO: 850176 - DNA, 75 bp, synthetic construct
  source 1..75: mol_type = other DNA
cttgattattcaaatttttatatggcatacatggctgaggtaaatctttataaagtaatagcgccatatgttaat

SEQ ID NO: 850177 - DNA, 75 bp, synthetic construct
  source 1..75: mol_type = other DNA
aataaatgtgacgatagaattacgagaagagtttaccttaataaagataaggaagtgtcaattaaggtggtatat

SEQ ID NO: 850178 - DNA, 75 bp, synthetic construct
  source 1..75: mol_type = other DNA
ttgtaacaattaaaggaaacaatagtatagcaggaatagtcggggataatggagaagtattccttactggacttt

SEQ ID NO: 850179 - DNA, 75 bp, synthetic construct
  source 1..75: mol_type = other DNA
gaagttataataatgcaggtattgttggagataatggtgaagtattcttaactggcctgccagaatcgggcattc

SEQ ID NO: 850180 - DNA, 75 bp, synthetic construct
  source 1..75: mol_type = other DNA
atgcagttcacttttaatgaaggtcatattcaactgccatcgcaatggcaggatcagtcgatgcaggtcctggta

SEQ ID NO: 850181 - DNA, 75 bp, synthetic construct
  source 1..75: mol_type = other DNA
atgtcaacaacattaacgcattaaataattaccgtgagaaacattcagataataacttacatggccccctccttt

SEQ ID NO: 850182 - DNA, 75 bp, synthetic construct
  source 1..75: mol_type = other DNA
ctgctgattttatctggcggcagaacgcagtttgccagggtaatgggtagggcattaatcactggtgatggtgaa

SEQ ID NO: 850183 - DNA, 75 bp, synthetic construct
  source 1..75: mol_type = other DNA
ccgtctgccgcttaaagagggtggagatttttactcagttaaaccacaacctggtggtttaatctggcgcgactg

SEQ ID NO: 850184 - DNA, 75 bp, synthetic construct
  source 1..75: mol_type = other DNA
tgaccgcacgcaagaaatattttacaacatcagcggagaagcaaaatgctaacgccgccagggagaaaaagcagg

SEQ ID NO: 850185 - DNA, 75 bp, synthetic construct
  source 1..75: mol_type = other DNA
gcgatagaaggcccggcactggaagaggtagaggtgatggggcgggtgacgttcttcatcaaccgtgcgagggat

SEQ ID NO: 850186 - DNA, 75 bp, synthetic construct
  source 1..75: mol_type = other DNA
ttgctgatcctgtgcgaagggcatacgcagttcgccaagttgatgggtaaggcgttaatcacggacgatggcgag

SEQ ID NO: 850187 - DNA, 75 bp, synthetic construct
  source 1..75: mol_type = other DNA
atttccgtcgccagcagcagactatgtagaagtacgactgaccgtcgataaactctgcggtaccggcccaaatac

SEQ ID NO: 850188 - DNA, 75 bp, synthetic construct
  source 1..75: mol_type = other DNA
ttgggcgcggcgagattatcttggaaacgtcaattggttcgatgttccggcgccttccggaactccagtcggtct

SEQ ID NO: 850189 - DNA, 75 bp, synthetic construct
  source 1..75: mol_type = other DNA
caacgccacacccggacaggtacgcgacggagagtggctagtcggccacggcgtcgcggcgggctttcgcaataa

SEQ ID NO: 850190 - DNA, 75 bp, synthetic construct
  source 1..75: mol_type = other DNA
agcgcttggtattgaaccatatgcaattgcatggtcaaatctgaatcggtttgatgttgattgcggatcaccaga

SEQ ID NO: 850191 - DNA, 75 bp, synthetic construct
  source 1..75: mol_type = other DNA
ttaaacaaaaaagaagacctaatacctaagttgcgtctggcagcgcaagcggcatcacacattctaagcttgtta

SEQ ID NO: 850192 - DNA, 75 bp, synthetic construct
  source 1..75: mol_type = other DNA
taaggatattgtagccagaacaaaagcggccttaagtaaaaacaaaaagaatgtatttcttggtgttgtctggat

SEQ ID NO: 850193 - DNA, 75 bp, synthetic construct
  source 1..75: mol_type = other DNA
agtacgcgcctgtttgcgtggtcgatccatccgtcggcgtattaatcatcccgatcgcttgaattacccaatgaa

SEQ ID NO: 850194 - DNA, 75 bp, synthetic construct
  source 1..75: mol_type = other DNA
ggagtaccagttgtaccgggagtgtctgcagtaaattcagtaatgctgaagaggcagcaaaggcggtagtgaagg

SEQ ID NO: 850195 - DNA, 75 bp, synthetic construct
  source 1..75: mol_type = other DNA
tgttgggaacaatccgatgattcagcagacggataatgctgacagccggatgcatacgctggaggcccctgatga

SEQ ID NO: 850196 - DNA, 75 bp, synthetic construct
  source 1..75: mol_type = other DNA
gagctggcccgcaacagcgtgctgaccattattgaacgggagaatgaacgtgttgggaacaatccgatgattcag

SEQ ID NO: 850197 - DNA, 75 bp, synthetic construct
  source 1..75: mol_type = other DNA
cgtaaagggctgaagatcaacgagcaactgctgtcgcatttgtcgccgttgggctgggagcatatcaatctgaca

SEQ ID NO: 850198 - DNA, 75 bp, synthetic construct
  source 1..75: mol_type = other DNA
gggggatgtgatacagggggcgacgggggcggtggccagcctgccggcgatggtcatccagcgggcgaatccggg

SEQ ID NO: 850199 - DNA, 75 bp, synthetic construct
  source 1..75: mol_type = other DNA
agcggggatgaagaccaacagccgggagtggcagttgccggaacagggttcacgccgatgctggaagaagcggtg

SEQ ID NO: 850200 - DNA, 75 bp, synthetic construct
  source 1..75: mol_type = other DNA
cctgccgctggcccttatcagcacggaagggacaacagcgtggtacgcagaatacgatgaatggggtaacctgct

SEQ ID NO: 850201 - DNA, 75 bp, synthetic construct
  source 1..75: mol_type = other DNA
cgatggagtgaagatcatcgatcgcgcgttcttcgctatcttgagctttatattttccctcatatcggttcgtcc

SEQ ID NO: 850202 - DNA, 75 bp, synthetic construct
  source 1..75: mol_type = other DNA
ctcgcctttagtagggaaaatgcccgagttatactgctattataattctattatccttgcatgcgtaggaacagt

SEQ ID NO: 850203 - DNA, 75 bp, synthetic construct
  source 1..75: mol_type = other DNA
ccgacacatgatctgacagctgccggtttcaatatgatgaacagtctgccttcgaccagtacatccagtgtcagt

SEQ ID NO: 850204 - DNA, 75 bp, synthetic construct
  source 1..75: mol_type = other DNA
caaatcttctacttttgtccgatcagagaagccaaacttacgcaaaacatccgttcggaacatcccgcatgcacc

SEQ ID NO: 850205 - DNA, 75 bp, synthetic construct
  source 1..75: mol_type = other DNA
cgataatagttgtgtggagaactgtttaaaagggaagtttaaagaggtaaggccgcgttattctgtattgcctga

SEQ ID NO: 850206 - DNA, 75 bp, synthetic construct
  source 1..75: mol_type = other DNA
aattgcaaattcttaacgccatcttccttggtattctctgtggtatcggcatgctttattttcaggacctgatgc

SEQ ID NO: 850207 - DNA, 75 bp, synthetic construct
  source 1..75: mol_type = other DNA
tatcaaactgaaatgttgcttcgatggaactatcctgccgcctcagacctgctcaggatgtatatccttaaagag

SEQ ID NO: 850208 - DNA, 75 bp, synthetic construct
  source 1..75: mol_type = other DNA
gtgatgagcttaaaacaaaatatgcaaatgaaattctagagataaaaagaataatgggagaatacaatcttttac

SEQ ID NO: 850209 - DNA, 75 bp, synthetic construct
  source 1..75: mol_type = other DNA
aatgatttcttgagagaaaagattgaagcagtaaaaaacaaaatgaattctcacgaactttattttgaaaaataa

SEQ ID NO: 850210 - DNA, 75 bp, synthetic construct
  source 1..75: mol_type = other DNA
actatcagtttacgaagcaaaaaacgcgtttgtgtcgcgtatagcaaggcagtctggctatattgttacgggtgc

SEQ ID NO: 850211 - DNA, 75 bp, synthetic construct
  source 1..75: mol_type = other DNA
atcacataaaggtagtgaagtgattgatgctgttatcgcaggccagaatcaggcttacagggaactaagaagaat

SEQ ID NO: 850212 - DNA, 75 bp, synthetic construct
  source 1..75: mol_type = other DNA
atggtatatgaccacaacgacgttattatttgtattgaaaaggatgtttcagcaattaatccagaaggcgcaagc

SEQ ID NO: 850213 - DNA, 75 bp, synthetic construct
  source 1..75: mol_type = other DNA
ccgcggtgctagaacaccaacggctttcaggtgcaaaaacggaaggtaattgcggagaacagtatgtcaaatacc

SEQ ID NO: 850214 - DNA, 75 bp, synthetic construct
  source 1..75: mol_type = other DNA
atgatgcatctgaaaaacattaagtcagaaaatccaaaaactaaagagcaatatcagctaacaaagaattttgat

SEQ ID NO: 850215 - DNA, 75 bp, synthetic construct
  source 1..75: mol_type = other DNA
tacttactatctttgggttgatgaaaaagcatttggagccgcgaaatttaccagtgtcttaaaacaaattgcatt

SEQ ID NO: 850216 - DNA, 75 bp, synthetic construct
  source 1..75: mol_type = other DNA
aacaccagaaaattttgttcagaaaatttcacttagtgatgagcttaaaacaaaatatgcaaatgaaattataga

SEQ ID NO: 850217 - DNA, 75 bp, synthetic construct
  source 1..75: mol_type = other DNA
atggtcatgagttttatgcaggttgtcttttatataacgccgatattattttctggaacaatgttggctaaatat

SEQ ID NO: 850218 - DNA, 75 bp, synthetic construct
  source 1..75: mol_type = other DNA
agagatctataccgtgaccagtatggggaactaggagaaaatcttgtcaatgctcaggcaagcgaaccactgact

SEQ ID NO: 850219 - DNA, 75 bp, synthetic construct
  source 1..75: mol_type = other DNA
atcagcgcaatggcgtcttttatatccgcctcaggatgaagtccaccgatcgcctgaccgtttcacatccttctc

SEQ ID NO: 850220 - DNA, 75 bp, synthetic construct
  source 1..75: mol_type = other DNA
gagaaaaactatttgaaagtgatagtaaagataaacctatcgtcgatgatatgtctaatcatgacgtggagagcg

SEQ ID NO: 850221 - DNA, 75 bp, synthetic construct
  source 1..75: mol_type = other DNA
attgaccagcatcgctacatcaatgaggctcttaatgtactcaaggcttgcatgaagcgcatcgaagcgggagat

SEQ ID NO: 850222 - DNA, 75 bp, synthetic construct
  source 1..75: mol_type = other DNA
ctgaggcagggaccgtttatattcatatcaatgaagacgacagtagcttacccggcaagagcatcaagaatgctt

SEQ ID NO: 850223 - DNA, 75 bp, synthetic construct
  source 1..75: mol_type = other DNA
caaagcatctcatgctgcgttaattgaaatttttgactatctgggactcaatgttgatgccaatgcgataacacg

SEQ ID NO: 850224 - DNA, 75 bp, synthetic construct
  source 1..75: mol_type = other DNA
taaagttaaagatatcgtcgatgatatgtctaatcatgacgtggagagcgaaaaagatatatttgtaatcggggg

SEQ ID NO: 850225 - DNA, 75 bp, synthetic construct
  source 1..75: mol_type = other DNA
tgtttttattccttatgtaaatacatttcccgacctcaaaaataaaatactcaggatgaaaattgaactgactga

SEQ ID NO: 850226 - DNA, 75 bp, synthetic construct
  source 1..75: mol_type = other DNA
agaaaataaaatggttgttatttttgttgttatggtgttgtcaggcgcaggccgtacttccgcttcctttatggc

SEQ ID NO: 850227 - DNA, 75 bp, synthetic construct
  source 1..75: mol_type = other DNA
caataatcaaccgacagaacttaattcatcattttcctctttgatgaacgattcagatcaatggcaacagcatac

SEQ ID NO: 850228 - DNA, 75 bp, synthetic construct
  source 1..75: mol_type = other DNA
cagaggttaagaaaaagactatctggaataattactctatttatccatctttgcaggatacccatgaagttgtca

SEQ ID NO: 850229 - DNA, 75 bp, synthetic construct
  source 1..75: mol_type = other DNA
ctgataacatacaaacagtaaaagatctgttaacgcaattaactgatggcatggaactcttcgcgctgcgggaca

SEQ ID NO: 850230 - DNA, 75 bp, synthetic construct
  source 1..75: mol_type = other DNA
aaccgttgcttccctctttgagcagtacgagcaggaaaacgcccaaaactggaagccagcaactttacgagaaaa

SEQ ID NO: 850231 - DNA, 75 bp, synthetic construct
  source 1..75: mol_type = other DNA
ctgtatctgctcgtcaatccgggtggttcacgcatctggtatctcaaatatcgtttcaacggaaaagaatccaga

SEQ ID NO: 850232 - DNA, 75 bp, synthetic construct
  source 1..75: mol_type = other DNA
tccgacgctcgtgatgcgttcagtcctgagcaggtaaggcaactactggtcgcagctaaagcgtactcgcagaag

SEQ ID NO: 850233 - DNA, 75 bp, synthetic construct
  source 1..75: mol_type = other DNA
ccagcttcaggtcaaagacgtcagggctactgaggccgggaccgtatatatccatatcaacgaagacgatagcag

SEQ ID NO: 850234 - DNA, 75 bp, synthetic construct
  source 1..75: mol_type = other DNA
caccagccgtaccggctgccggggcagcagtatgataaggagtcggggctgtactataaccgtcaccggtactac

SEQ ID NO: 850235 - DNA, 75 bp, synthetic construct
  source 1..75: mol_type = other DNA
tgatgctcaaaaagtaagagggatcggttcgcaggatgccgccggtattagaaaaaaacataagatggaacaatt

SEQ ID NO: 850236 - DNA, 75 bp, synthetic construct
  source 1..75: mol_type = other DNA
cccggagacgttcacggaccggcagtacagctacagcggcgaggatgaactgctgaagacgcggcacagccggcg

SEQ ID NO: 850237 - DNA, 75 bp, synthetic construct
  source 1..75: mol_type = other DNA
ccattgttgagtgggaacttagtgtcagccgtgatgacctgaacgacccgaagtcctaccagctttacgttgacc

SEQ ID NO: 850238 - DNA, 75 bp, synthetic construct
  source 1..75: mol_type = other DNA
tctcactggcagaagccaggcagcagcgcgacggtatccgtaagttactggcgcagaatatcaacccggcgcaac

SEQ ID NO: 850239 - DNA, 75 bp, synthetic construct
  source 1..75: mol_type = other DNA
gagggacacctatcgggaccagtacggtgaacttggtgagaaccttaccgatgctctggctagtgaaccgctgag

SEQ ID NO: 850240 - DNA, 75 bp, synthetic construct
  source 1..75: mol_type = other DNA
tgaccgtagcggcttagcttttcactcgtttagacatacagttgcgacccagttaaaacaacatggggtcgagtt

SEQ ID NO: 850241 - DNA, 75 bp, synthetic construct
  source 1..75: mol_type = other DNA
agcatatgctcaggcgattatgggccattcgagcgggtccataacttacgaccgttacgcgaaagaggttgaggt

SEQ ID NO: 850242 - DNA, 75 bp, synthetic construct
  source 1..75: mol_type = other DNA
tgagcagtacgagcaggagaacgcccagaactggaagccagcgaccctaagcgagaaccgagcgtcacactctac

SEQ ID NO: 850243 - DNA, 75 bp, synthetic construct
  source 1..75: mol_type = other DNA
agacactctgcgctaccacatcgaggcaacacgacgaacgttaaacgctatggtaaatgatgggatcctgtatcg

SEQ ID NO: 850244 - DNA, 75 bp, synthetic construct
  source 1..75: mol_type = other DNA
agatacttagctactttgaaccggataacctcgaatgggtgatcggtgagattggtgcgccgccgttcgatgtgt

SEQ ID NO: 850245 - DNA, 75 bp, synthetic construct
  source 1..75: mol_type = other DNA
atgtttttactggtgcgtctactggatgcaattaccgatccgattatgggggcaatcgccgatgcaacctcatct

SEQ ID NO: 850246 - DNA, 75 bp, synthetic construct
  source 1..75: mol_type = other DNA
tagaatcagacgctcacatccagggggatgcgttctggttgttggtcgagggggaatccatgactgccccggtcg

SEQ ID NO: 850247 - DNA, 75 bp, synthetic construct
  source 1..75: mol_type = other DNA
ttaatacgcctgctaacaatgagagttatgaaaaatcattaaagcctgtgagcgaaaacggtttaaatggagatc

SEQ ID NO: 850248 - DNA, 75 bp, synthetic construct
  source 1..75: mol_type = other DNA
atgagactgacgcaatacaaaaaagagatcctcagttacttcactcccgacaatctggcgtgggtcagaggtgaa

SEQ ID NO: 850249 - DNA, 75 bp, synthetic construct
  source 1..75: mol_type = other DNA
gttggttttttcaatagctggtatacctgctatatttcaactattaaactatttgcacttttctctcgtaatttg

SEQ ID NO: 850250 - DNA, 75 bp, synthetic construct
  source 1..75: mol_type = other DNA
gcgtgtttaacttcgccggtggtctgggcggcatcaccgttccgctggtggtggggtacctggcgcagggttacg

SEQ ID NO: 850251 - DNA, 75 bp, synthetic construct
  source 1..75: mol_type = other DNA
tgcaggcagggcaggtaatcagcggtgcaattctgattgtgacgactgagcgactgacgcagggacagactggcc

SEQ ID NO: 850252 - DNA, 75 bp, synthetic construct
  source 1..75: mol_type = other DNA
ggatccgattgggctgaaggggggatggaatttttatcagtatccgttgaatccgatctcaaatatagatccatt

SEQ ID NO: 850253 - DNA, 75 bp, synthetic construct
  source 1..75: mol_type = other DNA
ctacgccgcatggatgaaatcatggaggctcttgataatcgttcgtcgatggattggtgtgttgctgttcatgat

SEQ ID NO: 850254 - DNA, 75 bp, synthetic construct
  source 1..75: mol_type = other DNA
cgataaaagcatttacctgtatgacctacgccgcatggatgaaatcatggaggctcttgataatcgttcgtcgat

SEQ ID NO: 850255 - DNA, 75 bp, synthetic construct
  source 1..75: mol_type = other DNA
aatttacatcttaatgtccgacaaagccgtttactgccgacgctaaatgaagattcagcgcttcgcagttcaatg

SEQ ID NO: 850256 - DNA, 75 bp, synthetic construct
  source 1..75: mol_type = other DNA
caaaccgacagagtttatgcaaacaaaagtccctgttccatgttttgaagagcaggaaagcatcgctgatatgtt

SEQ ID NO: 850257 - DNA, 75 bp, synthetic construct
  source 1..75: mol_type = other DNA
gggctcagtcaccgttattttaaatatttatttgaggctgattatctcaagccacagttaggggcgttagttaat

SEQ ID NO: 850258 - DNA, 75 bp, synthetic construct
  source 1..75: mol_type = other DNA
ggctgttcgcgatgtccagaaacgtgatattgcctttattcgtgcgtatgggtttgaaaatattgatccacatgc

SEQ ID NO: 850259 - DNA, 75 bp, synthetic construct
  source 1..75: mol_type = other DNA
acaaatcagctacgaagatttctcttttttgaaacttccttatcctgagattgaagaacaacaaaaaatcgccga

SEQ ID NO: 850260 - DNA, 75 bp, synthetic construct
  source 1..75: mol_type = other DNA
accggaaattgaagaacaacaaaaaatcgccgccgtcctctccgctgccgatgcagaaatctccacactggagaa

SEQ ID NO: 850261 - DNA, 75 bp, synthetic construct
  source 1..75: mol_type = other DNA
aaaattatatcctgcttaaaaaaggtgagtttgcatataacaaaggaaactcaaaaacatacgagttcggatgta

SEQ ID NO: 850262 - DNA, 75 bp, synthetic construct
  source 1..75: mol_type = other DNA
cacgctacaggaatatattttcatgagtatgaggttatgcttggtggaagttcacagtttggcgtttggatattc

SEQ ID NO: 850263 - DNA, 75 bp, synthetic construct
  source 1..75: mol_type = other DNA
actaatgctattaaaaattcaaggaaatacaatgctgatgcaattattcataaatggatatcactacttggaata

SEQ ID NO: 850264 - DNA, 75 bp, synthetic construct
  source 1..75: mol_type = other DNA
ttttctgagcacagtctccggcggcaggcttcaatgacccaggctgagaaattcccggaccctttttgctcaaga

SEQ ID NO: 850265 - DNA, 75 bp, synthetic construct
  source 1..75: mol_type = other DNA
aaacggtttgctttgaaggtgtgctcaccattaacgatgcgccagcgttaatagatcttttacagcaaggtattg

SEQ ID NO: 850266 - DNA, 75 bp, synthetic construct
  source 1..75: mol_type = other DNA
ggaaatcttgcaggtacgccacgaatcagcatgacggaaccatacatcattgagcgagtaagatctgaagtgggt

SEQ ID NO: 850267 - DNA, 75 bp, synthetic construct
  source 1..75: mol_type = other DNA
ccgcttaattcacgcattttgcttgctgatggttcatggacaacatttcgtgacgtatgtgttggagattcccta

SEQ ID NO: 850268 - DNA, 75 bp, synthetic construct
  source 1..75: mol_type = other DNA
gatctagacaacaagctattaaaaaacataaacattcgtattgatgctttatctgacgccgaatcgaaagctcaa

SEQ ID NO: 850269 - DNA, 75 bp, synthetic construct
  source 1..75: mol_type = other DNA
gtatgataatactacctgtaatatcatatctgattagccatcaatacttcttcccggatataactgatactgctt

SEQ ID NO: 850270 - DNA, 75 bp, synthetic construct
  source 1..75: mol_type = other DNA
atgaaaaaggaatatctctacagtatttctgctgttattttctgtatcttactcggattttgtcttattattatc

SEQ ID NO: 850271 - DNA, 75 bp, synthetic construct
  source 1..75: mol_type = other DNA
gtacacatatacggaagccggtgaactgctggcggtatatgaccgcagcaatacgcaggtgcgcgctttcacgta

SEQ ID NO: 850272 - DNA, 75 bp, synthetic construct
  source 1..75: mol_type = other DNA
acgatgaagcgcgactacatcagtatcatgccaaaacctgacgggttaacagcggcaaagaaccttgcggaggcc

SEQ ID NO: 850273 - DNA, 75 bp, synthetic construct
  source 1..75: mol_type = other DNA
caggatcgtcggtgcaagcgcaagcctgatgatactgaagcgctggctcgtatccataccgttatcgacgatctg

SEQ ID NO: 850274 - DNA, 75 bp, synthetic construct
  source 1..75: mol_type = other DNA
atggcccgtcggtcgaaggactggcaggatcgtcggtgcaagcgcaagcctgatgatactgacgcgctggcccgt

SEQ ID NO: 850275 - DNA, 75 bp, synthetic construct
  source 1..75: mol_type = other DNA
ctgcattttctgcgctgggagctgatggaggtgtctgccgtcaccgtgcccgcgaatgcggaatgcaccatccgg

SEQ ID NO: 850276 - DNA, 75 bp, synthetic construct
  source 1..75: mol_type = other DNA
actatcagattgtcaaacggtcgccggatctctatggcctatcaacgcgccgtctggttatggtgttatggcgtt

SEQ ID NO: 850277 - DNA, 75 bp, synthetic construct
  source 1..75: mol_type = other DNA
tgcacagcaaattaaatcagctactgagccttatcagagaatccatcgaactaacaggcaattacccacaattct

SEQ ID NO: 850278 - DNA, 75 bp, synthetic construct
  source 1..75: mol_type = other DNA
atatatttgaaataacaaaaaaaagaattatcaaagcaggagaaaagttaaaaaaagaaaatccagactataatg

SEQ ID NO: 850279 - DNA, 75 bp, synthetic construct
  source 1..75: mol_type = other DNA
tttagtgaccaggcggggggcgatccgaaggagatcggtactgctggcagtgatacttacaccattgccgcagca

SEQ ID NO: 850280 - DNA, 75 bp, synthetic construct
  source 1..75: mol_type = other DNA
tcgtcagtatccggatgacagccgtctgcatcatgtcctgaaatcgggcggtgggggcagggaccaccacggacc

SEQ ID NO: 850281 - DNA, 75 bp, synthetic construct
  source 1..75: mol_type = other DNA
gagatagctaatggaacataccagtggtttgatctgagtaagccaggtaatgagaacaaaaactgggactggaaa

SEQ ID NO: 850282 - DNA, 75 bp, synthetic construct
  source 1..75: mol_type = other DNA
ctggaaacaccattaaaattgacctttacagaagatattcaacctcgtaaagaaaatggtccaacatatttttac

SEQ ID NO: 850283 - DNA, 75 bp, synthetic construct
  source 1..75: mol_type = other DNA
gtgtcgcatgagcagttgcacatcattctcagacgaagtgatgactggaaggatggccgccgcagtcttcacact

SEQ ID NO: 850284 - DNA, 75 bp, synthetic construct
  source 1..75: mol_type = other DNA
atgttatctggttatatacagaagacggtaaaaactggtaatgaggaagtaaatagctttcaggaagacaccata

SEQ ID NO: 850285 - DNA, 75 bp, synthetic construct
  source 1..75: mol_type = other DNA
atatagacaaacctggtttcgataatagtctggaaaaaccttattatctcaccccttcagaagcatctcagcagt

SEQ ID NO: 850286 - DNA, 75 bp, synthetic construct
  source 1..75: mol_type = other DNA
atgttcaagatgcactaggtcaactagcagcagctaacgttcgtatcgaacaagtagttgccgtggtccatccat

SEQ ID NO: 850287 - DNA, 75 bp, synthetic construct
  source 1..75: mol_type = other DNA
aatcgtacaaacatgactcagattgcatcttataaacgcaataattttaatatgacacttgagaatttaaaggct

SEQ ID NO: 850288 - DNA, 75 bp, synthetic construct
  source 1..75: mol_type = other DNA
ttttcttagaattaagttggttatgggcttaggggttaaatatgctaagaaatacgaaagtattctagttaagtt

SEQ ID NO: 850289 - DNA, 75 bp, synthetic construct
  source 1..75: mol_type = other DNA
ttcgaattttgctctggtaataaatttaaaacccttgaggctagggttattctgcttgatgaatatctggatgat

SEQ ID NO: 850290 - DNA, 75 bp, synthetic construct
  source 1..75: mol_type = other DNA
tggtgctgtctctgagtttaccaatggaattatcaaggatttcaataatcctcaagctcctgaaaaaaaggaaaa

SEQ ID NO: 850291 - DNA, 75 bp, synthetic construct
  source 1..75: mol_type = other DNA
agcgttatcagcgggaacaacgtgcaacttgcgggcggcaatatcaccaacagcggcggcagcatcaacgcacag

SEQ ID NO: 850292 - DNA, 75 bp, synthetic construct
  source 1..75: mol_type = other DNA
cactcattcctcgcgttgagagcggcgatctcgatttggccctggtctcccgggagcaacccaaccagggcgcgt

SEQ ID NO: 850293 - DNA, 75 bp, synthetic construct
  source 1..75: mol_type = other DNA
agcattagcccaaatgcggaagtcagcctcgataatactcaggggttaggcagaggaaatattgccaatgacggt

SEQ ID NO: 850294 - DNA, 75 bp, synthetic construct
  source 1..75: mol_type = other DNA
ggtacacgacgcggtatgagtatgaccggtacggtcaacaaatcgccgttcaccgggaagaaggcctcagcactt

SEQ ID NO: 850295 - DNA, 75 bp, synthetic construct
  source 1..75: mol_type = other DNA
tacgcgctggttttatgactccccccgcagtagcctgcccggcgcggtggaagacggaaccggggtgatgcggag

SEQ ID NO: 850296 - DNA, 75 bp, synthetic construct
  source 1..75: mol_type = other DNA
aaaacgaatacctatgttaatcccacatacagctttgctgattgcgatacagacaccgttattgcttcggtgcaa

SEQ ID NO: 850297 - DNA, 75 bp, synthetic construct
  source 1..75: mol_type = other DNA
tcaacaaatcgccgttcaccgggaagaaggcatcagcacttacagcagttataacccgcgtggccaactggtcag

SEQ ID NO: 850298 - DNA, 75 bp, synthetic construct
  source 1..75: mol_type = other DNA
cacggacccggcgggcaaccggctgccggacccggagctgcacccggacagtaccctcacagtgtggccggataa

SEQ ID NO: 850299 - DNA, 75 bp, synthetic construct
  source 1..75: mol_type = other DNA
tatcaccctctggcattacgatgcgtcggaccgcatcacgcaccggacggtgaacggcgacccggcggagcagtg

SEQ ID NO: 850300 - DNA, 75 bp, synthetic construct
  source 1..75: mol_type = other DNA
ggcgcgatggccggtccagctttctgcagctgatcagctatctgatttgccgggtggacaagaagcccggtgaat

SEQ ID NO: 850301 - DNA, 75 bp, synthetic construct
  source 1..75: mol_type = other DNA
ggtcacacctggaaaaaccttcatttttacgcccgtaaggtgatgagcatgtggcgttaccggataacacggtta

SEQ ID NO: 850302 - DNA, 66 bp, synthetic construct
  source 1..66: mol_type = other DNA
gtccctgatgaacttattgatttcacgtttgaatggaaaggactgaaaattcacaatgtgtgttaa

SEQ ID NO: 850303 - DNA, 75 bp, synthetic construct
  source 1..75: mol_type = other DNA
tgcgctctataaaaccttcgttgactatgtatatgaacaccccaagcaagatgctcaggtttcagcggcattcat

SEQ ID NO: 850304 - DNA, 75 bp, synthetic construct
  source 1..75: mol_type = other DNA
catccagtgcacgcagggaggaacgggcagatgcaagggaggcgctgaaagcccgttataacgcgtaccgtgccg

SEQ ID NO: 850305 - DNA, 75 bp, synthetic construct
  source 1..75: mol_type = other DNA
gaatcatgtgctgtcacggagtgatgacgggcgtcagcaggtgctctgtggtgaggttctgtgtgaaacaaactg

SEQ ID NO: 850306 - DNA, 75 bp, synthetic construct
  source 1..75: mol_type = other DNA
acggtacagacagacaccacgcgaatccagacggtctaccagccggggagcttcacgccgctcatccgcatcgaa

SEQ ID NO: 850307 - DNA, 75 bp, synthetic construct
  source 1..75: mol_type = other DNA
caggccacggcgtacaccctcacagggcagctacagagcaggcacctgaaccttccgcagcttgaccgtgactat

SEQ ID NO: 850308 - DNA, 75 bp, synthetic construct
  source 1..75: mol_type = other DNA
gtaaaccggaggtgacctggtacgggtgggacggtgacaggctgaccaccgtacagacccaacagagccggatcc

SEQ ID NO: 850309 - DNA, 75 bp, synthetic construct
  source 1..75: mol_type = other DNA
gggcgggagacgcggctggagtacagtgccgcaggcgacctcaccgctatcaccgccccggacggcagccgcagt

SEQ ID NO: 850310 - DNA, 75 bp, synthetic construct
  source 1..75: mol_type = other DNA
acaggaagcagctcctggagatgatccctctttcaacgcgcacaatttataacctagagcaacggggcgagttcc

SEQ ID NO: 850311 - DNA, 75 bp, synthetic construct
  source 1..75: mol_type = other DNA
cgcaactggtgacgcctgccgtgtttgtggatgtacccggctgggacaaggctcagtttgccgacgggcagacac

SEQ ID NO: 850312 - DNA, 75 bp, synthetic construct
  source 1..75: mol_type = other DNA
tggatatcgatatcccgtatgcaacagacccggcaggaaaccggctgccggacccggaactgcacccggacagca

SEQ ID NO: 850313 - DNA, 75 bp, synthetic construct
  source 1..75: mol_type = other DNA
ccggtgaacccggtgctgggtgcgaaggtgctgccgggcgagacggaccttgcgctgcccggcccgctgccgttt

SEQ ID NO: 850314 - DNA, 75 bp, synthetic construct
  source 1..75: mol_type = other DNA
atgaacattgatccgatggggctatctgttatggctccagcattgtcaatgcaaaacttatccgcattacttaaa

SEQ ID NO: 850315 - DNA, 75 bp, synthetic construct
  source 1..75: mol_type = other DNA
tggcgcagtgcggactgacggtggagcaactggccagacaggtggagccggaatacacaccggcgcgaaaagttc

SEQ ID NO: 850316 - DNA, 75 bp, synthetic construct
  source 1..75: mol_type = other DNA
ccggatgcacgacgagcggacccaccactaccattacgacagccagcaccgtctggtgttctacacgcggataca

SEQ ID NO: 850317 - DNA, 75 bp, synthetic construct
  source 1..75: mol_type = other DNA
ggagtatgacctcgccggacgcatcaccacgctgaccaacgagaacggcagccggagtgagtttacctacgatgc

SEQ ID NO: 850318 - DNA, 75 bp, synthetic construct
  source 1..75: mol_type = other DNA
gctggcaaaccgcgtcacgccggacagcctgccgccggtggagtggctgacgtatggcagcggctatctggcggg

SEQ ID NO: 850319 - DNA, 75 bp, synthetic construct
  source 1..75: mol_type = other DNA
atttttatctaaaccatgatataaattataaatacctttctcaattagggacaatgtcctacgggatttatctta

SEQ ID NO: 850320 - DNA, 75 bp, synthetic construct
  source 1..75: mol_type = other DNA
gtgttagccgatcagcgaaagggctgggttatgaaaaagagattagagattacgggttaaatatgttcggtatgt

SEQ ID NO: 850321 - DNA, 75 bp, synthetic construct
  source 1..75: mol_type = other DNA
aatgtggtgtcaggcgatatcacggacatcaccacaccggacgggcgggagacgaaattttactataacgacggg

SEQ ID NO: 850322 - DNA, 75 bp, synthetic construct
  source 1..75: mol_type = other DNA
cacgcagagtgaagatgaggggcttgtcaccctctggcactacgacgaatcggaccgtatcactcaccgcacggt

SEQ ID NO: 850323 - DNA, 75 bp, synthetic construct
  source 1..75: mol_type = other DNA
gctgaatccagtgcaacacgttgatccattaggccttagtactatgataataggtaatggccccgttcctgataa

SEQ ID NO: 850324 - DNA, 75 bp, synthetic construct
  source 1..75: mol_type = other DNA
cagcaacgctcaatggaacaacagtttacttttataatgatccccggaatggtaattgtcctgctcacgaatata

SEQ ID NO: 850325 - DNA, 75 bp, synthetic construct
  source 1..75: mol_type = other DNA
ttactcccccgcccggacttgcggatatgaaagccagcattggcgctgcctgctcaagaaacaatgcttccagaa

SEQ ID NO: 850326 - DNA, 75 bp, synthetic construct
  source 1..75: mol_type = other DNA
gtgcattgaacgtgcagcacgccgtcgccgcctgattgctcagggcctctatatcgacgaaatggagtccatcct

SEQ ID NO: 850327 - DNA, 75 bp, synthetic construct
  source 1..75: mol_type = other DNA
atgggggagcatcacctcccccatgaactgagtcaattatacacttgtgaagtatttactatgcgaataaatact

SEQ ID NO: 850328 - DNA, 75 bp, synthetic construct
  source 1..75: mol_type = other DNA
acctctatgacccgctgggccgccggacgggaaaacgggtgtggcggcgggagcgtgacctgacggggtggatgt

SEQ ID NO: 850329 - DNA, 75 bp, synthetic construct
  source 1..75: mol_type = other DNA
gatgaggagtcggggctggattataaccgtcaccggtactacgatccgttgcaggggcggtatatcacccaggac

SEQ ID NO: 850330 - DNA, 75 bp, synthetic construct
  source 1..75: mol_type = other DNA
tgtcgaaagatgaacaccccatactgcacagcgatcaaggttggcaatatcagatgtcccggtggcaacgatggt

SEQ ID NO: 850331 - DNA, 75 bp, synthetic construct
  source 1..75: mol_type = other DNA
atgaaacgcacacccttctaccgcaggcccgggcgcaccgggcaattctccggccttcgtgagcgtgttatctgg

SEQ ID NO: 850332 - DNA, 75 bp, synthetic construct
  source 1..75: mol_type = other DNA
acggtatacgagccgggaagcttcacgccgctcatccgggtcgagacagagaacggcgagcgggaaaaagcgcag

SEQ ID NO: 850333 - DNA, 75 bp, synthetic construct
  source 1..75: mol_type = other DNA
gggcgggatattctgtttgcggtggatgaggcacatattgtgacggtgaatccgttgctgtccccgtacatgacc

SEQ ID NO: 850334 - DNA, 75 bp, synthetic construct
  source 1..75: mol_type = other DNA
ggacagtcagcgaaatgaactccggcggacgaaagcggcagagatggcggaagcgctggggatgttcactcagcc

SEQ ID NO: 850335 - DNA, 75 bp, synthetic construct
  source 1..75: mol_type = other DNA
tgatgaccgactttgcagaaagtctctggttcacgccgccagtgtcggatccggaaaacggcgtgtggtggctgg

SEQ ID NO: 850336 - DNA, 75 bp, synthetic construct
  source 1..75: mol_type = other DNA
gagataataattactaccgaccctgatctggtagtaacattcagagaattaacagcacaagaacctgaaggtgat

SEQ ID NO: 850337 - DNA, 75 bp, synthetic construct
  source 1..75: mol_type = other DNA
ctggaggcggcaaaacgcgtcgcgcagaatctggaccgtctgcgcggtctgacggagaaacaacaggagcctgcc

SEQ ID NO: 850338 - DNA, 75 bp, synthetic construct
  source 1..75: mol_type = other DNA
gctcaaccaggtgtgcgaccgggtcgttaatgccctgggcggggcggggatccgctgcacccggcagaacggcct

SEQ ID NO: 850339 - DNA, 75 bp, synthetic construct
  source 1..75: mol_type = other DNA
cgcagctacctgaaggacggccataagctctaccgcagcacgctggcgttttacctgcatgcgcccgacaccgat

SEQ ID NO: 850340 - DNA, 75 bp, synthetic construct
  source 1..75: mol_type = other DNA
ggccagatgtggccggaggcggatatcaccctagtggatctcgccacctttgcccgcgaaggctatgaagcgcag

SEQ ID NO: 850341 - DNA, 75 bp, synthetic construct
  source 1..75: mol_type = other DNA
atgctttggagattaaatcattaccacttaaacatgatcaactagttgattttgcaataacacgctgcccatttg

SEQ ID NO: 850342 - DNA, 75 bp, synthetic construct
  source 1..75: mol_type = other DNA
tgtttatcatcgaggcaggcaactcgttcgggctgatggccgattacgcccgcgaacatggcctgacggtgaata

SEQ ID NO: 850343 - DNA, 75 bp, synthetic construct
  source 1..75: mol_type = other DNA
gatgtcctgacgtttgatcccctgaacaaactggatcgtacccagaatgcccatctgttgctgttcgggcccacg

SEQ ID NO: 850344 - DNA, 75 bp, synthetic construct
  source 1..75: mol_type = other DNA
accggatgaacggtctgcaggttcacagctggttactccggttatttaatccggcaccgtcctggattagccggg

SEQ ID NO: 850345 - DNA, 75 bp, synthetic construct
  source 1..75: mol_type = other DNA
agcgccacaatgcgctggatgacgctcgttaccaggcaaaatacgtttcagctatctggcaaaaactgatcccga

SEQ ID NO: 850346 - DNA, 75 bp, synthetic construct
  source 1..75: mol_type = other DNA
ccacaaagacaaaaacgctcgatttaggaaccgctttccactgccgtgtacttgaaccggaagaattcagtaacc

SEQ ID NO: 850347 - DNA, 75 bp, synthetic construct
  source 1..75: mol_type = other DNA
tggtatttattacggaatttcgaatgagaattaccacgcgggtcccggtgtcagtaagtctcagctcgacgacat

SEQ ID NO: 850348 - DNA, 75 bp, synthetic construct
  source 1..75: mol_type = other DNA
accgtgtgactgaagtggtgaatgcgctgggggattcgcctgtgacggcggctgtcagcaccctgaatgcaggag

SEQ ID NO: 850349 - DNA, 75 bp, synthetic construct
  source 1..75: mol_type = other DNA
gacaatcacactgggcacagatgaacatggtgagacgaatgccacagcgtcacgtgtgaaggaggttgtgaatgc

SEQ ID NO: 850350 - DNA, 75 bp, synthetic construct
  source 1..75: mol_type = other DNA
acggccaacctgctgaacatggaaaacatctccaccattatccggcatgacggttttaaacactggggtaaccgc

SEQ ID NO: 850351 - DNA, 75 bp, synthetic construct
  source 1..75: mol_type = other DNA
tctgttgatgcgaaatatcaggaactgcgggcagaactccatgaagcccggaaaaacattccatcaaaaaatcct

SEQ ID NO: 850352 - DNA, 75 bp, synthetic construct
  source 1..75: mol_type = other DNA
atgatgcacttaaagaacattaaagcggataacgctaaaacacttgagcagtacgaattaacaaagaaacacgga

SEQ ID NO: 850353 - DNA, 75 bp, synthetic construct
  source 1..75: mol_type = other DNA
ttgtggtcagaagatgggaaaaactggtacgaggaattaaagaactttcaggaagacacaataaaaattctttat

SEQ ID NO: 850354 - DNA, 75 bp, synthetic construct
  source 1..75: mol_type = other DNA
cgttgttgatggcctcccgccagaaggcgtatttgatacggaattctgcaaccgatacgaaaaaggcggggaaga

SEQ ID NO: 850355 - DNA, 75 bp, synthetic construct
  source 1..75: mol_type = other DNA
ggcggcacattgccggaactattccgaacgaggaaagtgatgcactgctgcgtgggcggatcattcacagctatg

SEQ ID NO: 850356 - DNA, 75 bp, synthetic construct
  source 1..75: mol_type = other DNA
aagcagcacgatgctgaaggatgcccgtatcagcctgatgtattaccacgggcggcacattgccggaactattcc

SEQ ID NO: 850357 - DNA, 75 bp, synthetic construct
  source 1..75: mol_type = other DNA
gcagtggcgaggggctgttggcaacgttcagtgtaaagctggaagggggcgaagatgagccttttccgttaaata

SEQ ID NO: 850358 - DNA, 75 bp, synthetic construct
  source 1..75: mol_type = other DNA
cgcttaaaaactgattcggctattaatcgcgatgattttattaagaagttatcagatcttggaattggttgttct

SEQ ID NO: 850359 - DNA, 75 bp, synthetic construct
  source 1..75: mol_type = other DNA
acgtttggacaatgttattgtgctatgtatgttgaaatgtcaacgggaagcaatcaagatgaggctgatataatg

SEQ ID NO: 850360 - DNA, 75 bp, synthetic construct
  source 1..75: mol_type = other DNA
cagagtataacaataatgggtagagaaagtagaataattgcagagaaaaagtttaatgaaatagaagccgcgaat

SEQ ID NO: 850361 - DNA, 75 bp, synthetic construct
  source 1..75: mol_type = other DNA
atgagactttgtagtagatataaaagtcttacatgcaatagttgctcaatgcattgccaaataatgccagaaaag

SEQ ID NO: 850362 - DNA, 75 bp, synthetic construct
  source 1..75: mol_type = other DNA
agataagacagttgtttattggtcggtacttatcatttactaaaggcaatacattgacccagatggaatttacta

SEQ ID NO: 850363 - DNA, 75 bp, synthetic construct
  source 1..75: mol_type = other DNA
cgcttttgaccggtaccagtctaaaactccttcttggttttatgaggttgtagctccagggtttaaatacaatat

SEQ ID NO: 850364 - DNA, 75 bp, synthetic construct
  source 1..75: mol_type = other DNA
actatgactttggtccgaaatcgccgactgaacttatcagcctgcgcgtccgggtgaacaataactatgcgcttg

SEQ ID NO: 850365 - DNA, 75 bp, synthetic construct
  source 1..75: mol_type = other DNA
ggtacgctgaaacaggcactgacagacattaacgatcagcgtaatgcgctgacggtggtggtgcgtgtggcagat

SEQ ID NO: 850366 - DNA, 75 bp, synthetic construct
  source 1..75: mol_type = other DNA
gttcatttccacctggatgaaaactgactaccttgatcagggcctgctgacaaaagaatggcagaacggaaatta

SEQ ID NO: 850367 - DNA, 75 bp, synthetic construct
  source 1..75: mol_type = other DNA
tctctgttttcgttttgccatcttaccgagaaggcgtaccaagaagtactcaagaagcgatggctattgggcttc

SEQ ID NO: 850368 - DNA, 75 bp, synthetic construct
  source 1..75: mol_type = other DNA
tattaaaatgtatacaaacaatgctatacagaattagcttgccattatgtaataaagtttttttcttaaacaagg

SEQ ID NO: 850369 - DNA, 75 bp, synthetic construct
  source 1..75: mol_type = other DNA
ccattgaattaacgtccggtacggttgccgttaccacgattgagacggcaattatcggactggtaggcaccgcgc

SEQ ID NO: 850370 - DNA, 75 bp, synthetic construct
  source 1..75: mol_type = other DNA
tggacatctcgctggaccgtgttgaaggtgccgcgctggagttttatgaggcagcagccagaaggagcatcagac

SEQ ID NO: 850371 - DNA, 75 bp, synthetic construct
  source 1..75: mol_type = other DNA
ggagcgagacccaacaaaccgcctacgcccgatccaagtaaattgccggacatagcgaaacaattaagactgcca

SEQ ID NO: 850372 - DNA, 75 bp, synthetic construct
  source 1..75: mol_type = other DNA
attcacctgtaccactgcgaccatcgcggcctgccgctggcccttatcagcacggaagggacaacagcgtggtac

SEQ ID NO: 850373 - DNA, 75 bp, synthetic construct
  source 1..75: mol_type = other DNA
ctgatatattcacacctataaatttagggctatttaaaaactgccaagactggtctaatgattctttagaaacat

SEQ ID NO: 850374 - DNA, 75 bp, synthetic construct
  source 1..75: mol_type = other DNA
gattttttctttgtatcaaaggttattcctgttaggttttcttctaataaatatgttaaggctttatgttttcat

SEQ ID NO: 850375 - DNA, 75 bp, synthetic construct
  source 1..75: mol_type = other DNA
acctgcaaaaacgcaggaaacagtcctgtctgccctgctggcgcagacggcggaagtgagcgtgccgctgcctca

SEQ ID NO: 850376 - DNA, 75 bp, synthetic construct
  source 1..75: mol_type = other DNA
ggatggaatttttatcagtatccgctgaatccggttcagtatatagattcaatgggactggcatcaaaatatgga

SEQ ID NO: 850377 - DNA, 75 bp, synthetic construct
  source 1..75: mol_type = other DNA
tcagatgaagaaaaatttaaaacgttggatgatttttcaagtatgcgtggagtgtataatccattagacgattat

SEQ ID NO: 850378 - DNA, 75 bp, synthetic construct
  source 1..75: mol_type = other DNA
gggacagcagtatgatgaggagtcggggctgtattacaaccgtcaccggtactatgacccgttgcagggacggta

SEQ ID NO: 850379 - DNA, 75 bp, synthetic construct
  source 1..75: mol_type = other DNA
accgccacgatgaatacggcaggctggcggagaagacggaccgcatcccggaaggggtgatacggatgcacgacg

SEQ ID NO: 850380 - DNA, 75 bp, synthetic construct
  source 1..75: mol_type = other DNA
gattgtggtgatattagtgctaaagatgcaaaaagcacacagaaagcctggaattgtcgtcactccagacagtca

SEQ ID NO: 850381 - DNA, 75 bp, synthetic construct
  source 1..75: mol_type = other DNA
cgcaaaaaaaagaaaatgaaatatcatatgatgattgttttttgtcgtgtaatgcagaaaaattgaaaatcaaaa

SEQ ID NO: 850382 - DNA, 75 bp, synthetic construct
  source 1..75: mol_type = other DNA
cgacacgctgcccgccggtacagaatacggtgccgataacggtatccggctggaggcggtgtggctgacacacga

SEQ ID NO: 850383 - DNA, 75 bp, synthetic construct
  source 1..75: mol_type = other DNA
actacggcaaaacgccggaagaaaaagcggtgctggaacgcctgggctgggcgccattccgcgcttccagcgacc

SEQ ID NO: 850384 - DNA, 75 bp, synthetic construct
  source 1..75: mol_type = other DNA
aaaatagcaatggacaatttttagattgcagtaatgattttctgcgcgttttttgttccctgaatgatgtaagtc

SEQ ID NO: 850385 - DNA, 75 bp, synthetic construct
  source 1..75: mol_type = other DNA
gtgtatgaaatttacggtatgtggattgatgacatgaacgacgaacaggtagccatgttgaatgcgcggttatcg

SEQ ID NO: 850386 - DNA, 75 bp, synthetic construct
  source 1..75: mol_type = other DNA
ggagcgagatggaatgcagcagtaaaacgtgctggtattcgccgccgtaatccgtaccatacgcgacatactttt

SEQ ID NO: 850387 - DNA, 75 bp, synthetic construct
  source 1..75: mol_type = other DNA
ccacatgtggtcagaccgatggcggcaactgccctgattgtggagcggtaatgggtgacgcaacctaccaagaga

SEQ ID NO: 850388 - DNA, 75 bp, synthetic construct
  source 1..75: mol_type = other DNA
aacattcgatgaagagaatcaggttgaagttcaggaaaatgatccgaaggaaatggaaggcgctgaacatccaca

SEQ ID NO: 850389 - DNA, 75 bp, synthetic construct
  source 1..75: mol_type = other DNA
gccatctcaaataaagcagtgcaactcgaaccgctggagcttcgggatttgtacaaactggtgcgagacactgac

SEQ ID NO: 850390 - DNA, 75 bp, synthetic construct
  source 1..75: mol_type = other DNA
gcgttcacaccaccgcagcgaatctggatatccgcatcccgtatgccacagacccggcaggtaaccgcctgcccg

SEQ ID NO: 850391 - DNA, 75 bp, synthetic construct
  source 1..75: mol_type = other DNA
gaatccggttcagtatatagattcaatgggactggcatcaaaatatggacacttaaataatggcggatatggagc

SEQ ID NO: 850392 - DNA, 75 bp, synthetic construct
  source 1..75: mol_type = other DNA
gataaacgcaggggggacctccactggcacaggctctccgggaggggtaacgaatactggaatttccttaaccgc

SEQ ID NO: 850393 - DNA, 75 bp, synthetic construct
  source 1..75: mol_type = other DNA
gcaaaacgggtgtggcggcgtgaacgggacctgacgggctggatgtcgctgtcacggaaaccgcaagtgacctgg

SEQ ID NO: 850394 - DNA, 75 bp, synthetic construct
  source 1..75: mol_type = other DNA
atgatgagcgcacccaccggtaccattacgaacagtcagcaccggctggtgcactacacgcggacacaatatgca

SEQ ID NO: 850395 - DNA, 75 bp, synthetic construct
  source 1..75: mol_type = other DNA
gataaccgtatcgcccgtgacgcgcactatctttaccggtatgaccgtcacggcaggctgacggagaaaaccgac

SEQ ID NO: 850396 - DNA, 75 bp, synthetic construct
  source 1..75: mol_type = other DNA
acccaaatcgccattgggttgtgctttaccctgctgtacttcgtggttttccgcaccctgattctgcagttcaac

SEQ ID NO: 850397 - DNA, 75 bp, synthetic construct
  source 1..75: mol_type = other DNA
tttaccttcctgttcatttcaccgttgctgtttgcggtacacgccgtgctggcggcctcaatgtcgaccgtaatg

SEQ ID NO: 850398 - DNA, 75 bp, synthetic construct
  source 1..75: mol_type = other DNA
tcacgctcgatgaattggctgcgtacttgaaagtcggcaagcggacgctttatcggctcgccgcacacggggaaa

SEQ ID NO: 850399 - DNA, 75 bp, synthetic construct
  source 1..75: mol_type = other DNA
caggtgctggaaacactgggcggcgaaacagctgtacagcaagttctgatgtcgttgccagccggtaaattgttc

SEQ ID NO: 850400 - DNA, 75 bp, synthetic construct
  source 1..75: mol_type = other DNA
ggagcatcagacaggtcttcctggatgttgctgccgggttatgtgaaggggatgagcagtcgccggaaagcgccc

SEQ ID NO: 850401 - DNA, 75 bp, synthetic construct
  source 1..75: mol_type = other DNA
tgaccgggctggtggaccgcttcgggcgcacacagacgtaccggcgtgaggccgccggtgacctgaccggggaaa

SEQ ID NO: 850402 - DNA, 75 bp, synthetic construct
  source 1..75: mol_type = other DNA
agaaagctgttgcccggagtgtggcggtgagctggattatctgggggcagtcagcgcagaacaactggaactggt

SEQ ID NO: 850403 - DNA, 75 bp, synthetic construct
  source 1..75: mol_type = other DNA
gtgagcacgggcgtggtcgactcaattattctcgggccagggggaagcgccgcactggcatatcatgacggcgaa

SEQ ID NO: 850404 - DNA, 75 bp, synthetic construct
  source 1..75: mol_type = other DNA
gtagcggcccgtcagcctgaaatgctggaacctcagaatcagaaattgctggagaacgggtatgcgaattttctc

SEQ ID NO: 850405 - DNA, 75 bp, synthetic construct
  source 1..75: mol_type = other DNA
ccttcccagccaggtgacatggtgatcatgcaggtacagtccgcagtcccaaaccacgcgggtattttgcttgag

SEQ ID NO: 850406 - DNA, 75 bp, synthetic construct
  source 1..75: mol_type = other DNA
aagaacctggtccgtggataaccgaactgaaaaaacgtcgtccagccagtgtggctatcgtcgccatggcaaaca

SEQ ID NO: 850407 - DNA, 75 bp, synthetic construct
  source 1..75: mol_type = other DNA
gtgaacttctttgccgccagcgtaattgggatacctgttcccgttatcttctcgctaattgtcgcgctcatcctt

SEQ ID NO: 850408 - DNA, 75 bp, synthetic construct
  source 1..75: mol_type = other DNA
gtgacgatcctgaccgtgggctgcgtcttttctggtgcgtggtgatcactctgatcccgctttccatcttgttta

SEQ ID NO: 850409 - DNA, 75 bp, synthetic construct
  source 1..75: mol_type = other DNA
ttcctttaaatgatgcccaaatcaaattttatagtgaaatggaaaaagttcctcatcaaggcaaaagtgaatcca

SEQ ID NO: 850410 - DNA, 75 bp, synthetic construct
  source 1..75: mol_type = other DNA
gggagcatcttcatcaaatgatggcgatgtggctttagggagtgaggcaaaaacagccgctgtgactgcaacaac

SEQ ID NO: 850411 - DNA, 75 bp, synthetic construct
  source 1..75: mol_type = other DNA
catgcaatactgatgggctgggcatctgaacttcctgtcttagttaaaatgaaaaatttgacgaaagagcagcaa

SEQ ID NO: 850412 - DNA, 75 bp, synthetic construct
  source 1..75: mol_type = other DNA
cgggcagcacccggcagatgacctggagccgctacgggcagttgctggcgttcaccgactgctcgggctaccaga

SEQ ID NO: 850413 - DNA, 75 bp, synthetic construct
  source 1..75: mol_type = other DNA
ctggcgcttatcagcgaagacggcaatacggcgtggagcgcggaatatgatgaatggggcaaccagcttaatgag

SEQ ID NO: 850414 - DNA, 75 bp, synthetic construct
  source 1..75: mol_type = other DNA
gttaaaaattagcaaaacgacgttttatctggtaaattcaacgcaaaattttggtgattttgggcaacatcagaa

SEQ ID NO: 850415 - DNA, 75 bp, synthetic construct
  source 1..75: mol_type = other DNA
cgattcagcgcagtgatgatttaccttttttgaaacaaattcgcacagaaattaatgctgaacgttatttgtcca

SEQ ID NO: 850416 - DNA, 75 bp, synthetic construct
  source 1..75: mol_type = other DNA
cgtgaagcgtgaaatagtgagttatgacaacgctttgaaaaatgagcgtgaacgggaaagaaacagggataacac

SEQ ID NO: 850417 - DNA, 75 bp, synthetic construct
  source 1..75: mol_type = other DNA
atataattacgcaaatagttgctgtgttcgatcgcgtttagaccctacatctgccggatgcggcataaataacga

SEQ ID NO: 850418 - DNA, 75 bp, synthetic construct
  source 1..75: mol_type = other DNA
gtattgattcttctacaacattggagtcaataaaaaaagttttcgaacataatcatttacattcaaacttcgaac

SEQ ID NO: 850419 - DNA, 75 bp, synthetic construct
  source 1..75: mol_type = other DNA
tacaatctctataagatgttttctaaaaaatatgaatgagatagttaaatatattaagtttgctgtaataaaaag

SEQ ID NO: 850420 - DNA, 75 bp, synthetic construct
  source 1..75: mol_type = other DNA
gagttggcaatcgaaatatgaatgccagtgattttttaactaaacatctgaatcttgaatgggatgaggcaaaag

SEQ ID NO: 850421 - DNA, 75 bp, synthetic construct
  source 1..75: mol_type = other DNA
tcataaaaattacccagaaaaaatattaatatccttcagcggcaatcaattcgatgctagatataataagttctt

SEQ ID NO: 850422 - DNA, 75 bp, synthetic construct
  source 1..75: mol_type = other DNA
gtggaggcctccggtgccaacctggagaaagggcggcatgaccagctgcttaccgcacttcgtgcgctgctgtta

SEQ ID NO: 850423 - DNA, 75 bp, synthetic construct
  source 1..75: mol_type = other DNA
atctgatctgagtaataccagttttgcattcattaacaaagcctggtctggcgttccgggggtaggttctcagga

SEQ ID NO: 850424 - DNA, 75 bp, synthetic construct
  source 1..75: mol_type = other DNA
ttgttattcggcgggctatattcagcgattgttattacgggtattcatcatagcttccacgcaattgaagcagga

SEQ ID NO: 850425 - DNA, 75 bp, synthetic construct
  source 1..75: mol_type = other DNA
gccattgcttctggagtatcggcctatttgcggcgggctcgataggcggccatcttgttgaacaatttggctttt

SEQ ID NO: 850426 - DNA, 75 bp, synthetic construct
  source 1..75: mol_type = other DNA
gggctgtcactatgctattttttatcaatggcttcgtcaccggaggttgggctgtgcaaattgcacagcttgtac

SEQ ID NO: 850427 - DNA, 75 bp, synthetic construct
  source 1..75: mol_type = other DNA
tgatgtgaatcatcctgtttatataaaacaggggatttgtaataattgctgggaaaaaattgctttgcctgaagg

SEQ ID NO: 850428 - DNA, 75 bp, synthetic construct
  source 1..75: mol_type = other DNA
tggaactattttcgcggaaatggatatcattcagaatagtggaataatattggcacctgggtacagcgcgccatt

SEQ ID NO: 850429 - DNA, 75 bp, synthetic construct
  source 1..75: mol_type = other DNA
gtggcgtttacgcaacaatggttcctggaactattttcgcggaaatggatatcattcagaatagtggaataatat

SEQ ID NO: 850430 - DNA, 75 bp, synthetic construct
  source 1..75: mol_type = other DNA
cacgacgaaaataatttaatgaaggagggtaatgactccaacttattgatagtgttttatgttcagataatgccc

SEQ ID NO: 850431 - DNA, 75 bp, synthetic construct
  source 1..75: mol_type = other DNA
aaggattggactgaaaacgataaacaggaatttagtcaaatatttggtgtttctggtgatgtaattattaccagt

SEQ ID NO: 850432 - DNA, 75 bp, synthetic construct
  source 1..75: mol_type = other DNA
cgacgcgtttacgtattgcactgcatgacatgtcacaaacgctggatgacgaagtctttaaaaagctgggagcgc

SEQ ID NO: 850433 - DNA, 75 bp, synthetic construct
  source 1..75: mol_type = other DNA
ccgctggaatttaccttcctgttcatttcaccgttgctgtttgcggtacatgctgtgctggcagcttcaatgtcg

SEQ ID NO: 850434 - DNA, 75 bp, synthetic construct
  source 1..75: mol_type = other DNA
atcgctccggccatttttaaagacatacagacggttaaatccaccagcagacagaccacccggttgcctcgttct

SEQ ID NO: 850435 - DNA, 75 bp, synthetic construct
  source 1..75: mol_type = other DNA
gcgctctttctttctacagcggtacaattaaacagtgtacaactaaaacctgtatacgattggttttattacaaa

SEQ ID NO: 850436 - DNA, 75 bp, synthetic construct
  source 1..75: mol_type = other DNA
tatggccctaatgctgccggaaaatcaaacattattaacgctattacaactatggctgaacttattgtccggtct

SEQ ID NO: 850437 - DNA, 75 bp, synthetic construct
  source 1..75: mol_type = other DNA
ggtgggttaaattgtagttgcagtataggtgttgccagcacagatgagtgcatgaataacattgaacggttgaaa

SEQ ID NO: 850438 - DNA, 75 bp, synthetic construct
  source 1..75: mol_type = other DNA
aaggtcctgagtgatattacagatatacgtgcagtctctgactacccgattgtgatatgcgacatcaaaggtata

SEQ ID NO: 850439 - DNA, 75 bp, synthetic construct
  source 1..75: mol_type = other DNA
cactctgattggcctgatctttaccatggtgtacgcctcacgagtgaaaaagaatcctcttctgtcacgcgtgca

SEQ ID NO: 850440 - DNA, 75 bp, synthetic construct
  source 1..75: mol_type = other DNA
ccatcaaggaactagtgattaagaatatgcaaggcaaggaagaatatgtcattaaaacacttcataataatgagg

SEQ ID NO: 850441 - DNA, 75 bp, synthetic construct
  source 1..75: mol_type = other DNA
ggcattcgcccagtacctggcgggtatggcatttaacagtgctggtctgggccttgttcatgcacttgcgcatca

SEQ ID NO: 850442 - DNA, 75 bp, synthetic construct
  source 1..75: mol_type = other DNA
ttacaggtggagcagtactgcacacgaactgccgtatggagctgcaggggagtaccacatgggaaacccggacgc

SEQ ID NO: 850443 - DNA, 75 bp, synthetic construct
  source 1..75: mol_type = other DNA
tgatccgcaaccgcttcggcgcaatattaattatacgaatctccagcttactggcaggcgctagcctattgttga

SEQ ID NO: 850444 - DNA, 75 bp, synthetic construct
  source 1..75: mol_type = other DNA
gataatgacgtgattaatgttttttctacggaaatgggaaaggctattgatcgcgctatcaggctggccacgaag

SEQ ID NO: 850445 - DNA, 75 bp, synthetic construct
  source 1..75: mol_type = other DNA
cgcctatggtatgggcgacgtcggttcgaatttaatgctctgcactgatgaatcccctaatgattttggtaaaaa

SEQ ID NO: 850446 - DNA, 75 bp, synthetic construct
  source 1..75: mol_type = other DNA
ctttcaaaaaataaaaatgttattaatgctaagcatcttttggttcactacgcctatggaaaattaaaagttaag

SEQ ID NO: 850447 - DNA, 75 bp, synthetic construct
  source 1..75: mol_type = other DNA
cagttcagcaacttattgttggttgaacaaccaaacggcaattttgccgacaccattgcacgccagtatttcatc

SEQ ID NO: 850448 - DNA, 75 bp, synthetic construct
  source 1..75: mol_type = other DNA
acacaggcgcagcgggcggaagccttccgtaaacagcgcgtcacgtctttatcctcccctgccggtccccgttct

SEQ ID NO: 850449 - DNA, 75 bp, synthetic construct
  source 1..75: mol_type = other DNA
tatgacatcaggtggactaatttatgccgtatctggtgtacctggattgattgctgcaaacagcattactaacag

SEQ ID NO: 850450 - DNA, 75 bp, synthetic construct
  source 1..75: mol_type = other DNA
gcaaagcctcttgataataatgactcaatcgaaaatcacctgaaggcaagaaaaatccagcgtgaaaccagactg

SEQ ID NO: 850451 - DNA, 75 bp, synthetic construct
  source 1..75: mol_type = other DNA
ttatttttcaatgtgctttgtttaaaaatctcgagagggaggtgttcatgacgcatgggtatgttggtgatgctg

SEQ ID NO: 850452 - DNA, 75 bp, synthetic construct
  source 1..75: mol_type = other DNA
actttacgcgcagcgtgggaagccgaagtttttgccgggatcaacgaagccacattgaacgtaccgcaagagcag

SEQ ID NO: 850453 - DNA, 75 bp, synthetic construct
  source 1..75: mol_type = other DNA
cgcggttaacgatatcaacaaccgtggcaacattgtcagtgacgctgacctgaacgtgacgaccaaaggcaacct

SEQ ID NO: 850454 - DNA, 75 bp, synthetic construct
  source 1..75: mol_type = other DNA
gctggcactgacgggcaactacgacagctttaagggctcgctgacctctgaaacgggcgacgtgactctgacggc

SEQ ID NO: 850455 - DNA, 75 bp, synthetic construct
  source 1..75: mol_type = other DNA
aagcacgatcaacctgacaacaaatggtactctggataacaccaccggtacggtgacatctgtaggcactatctc

SEQ ID NO: 850456 - DNA, 75 bp, synthetic construct
  source 1..75: mol_type = other DNA
aaaaaaggacagtccgaactatggcagcccggtgaacccgctactcggtgcgaaggttctgcctgttgaaaccga

SEQ ID NO: 850457 - DNA, 75 bp, synthetic construct
  source 1..75: mol_type = other DNA
ttactgcggttggattaatttctgaactgggtgatctgacccgttttgaacatccacgacaactgatgtcatggt

SEQ ID NO: 850458 - DNA, 75 bp, synthetic construct
  source 1..75: mol_type = other DNA
cacgctttctgctcagaatgtcaacaacaataacagcagcatcatcgctgaaaatggtccgcttaatctgctgtc

SEQ ID NO: 850459 - DNA, 75 bp, synthetic construct
  source 1..75: mol_type = other DNA
ttacatacgacaaagttaagactggcgcggaaaaagacatccaagagatgaaagaagagattattcgatcaaaga

SEQ ID NO: 850460 - DNA, 75 bp, synthetic construct
  source 1..75: mol_type = other DNA
ttgccgttgtcgccagcgaagtacggacactcgcaagccgcagcgcccaggcggcgaaagagattgaaggcttga

SEQ ID NO: 850461 - DNA, 75 bp, synthetic construct
  source 1..75: mol_type = other DNA
ctacaggacacagaaaacggtaacgaggcattcagggaactggctatcaaattcgtcgatgcacaaaccaaaggc

SEQ ID NO: 850462 - DNA, 75 bp, synthetic construct
  source 1..75: mol_type = other DNA
aaagcgttgcagcagacgattgagaatacagcgatgcggttgatgcagagagaatcaaccaggcccggcggaatg

SEQ ID NO: 850463 - DNA, 75 bp, synthetic construct
  source 1..75: mol_type = other DNA
ggtcctgcgcgaacgtctggtgttgctcaatcgccagttacgctcccgacgccagcgtctgatggcgatgcgtcg

SEQ ID NO: 850464 - DNA, 75 bp, synthetic construct
  source 1..75: mol_type = other DNA
atgaggcagcagccagaaggagcatcagacaggtcttcctggatgttgctgccgggttatgtgaaggggatgagc

SEQ ID NO: 850465 - DNA, 75 bp, synthetic construct
  source 1..75: mol_type = other DNA
atattattgatgaaccatcagttgttcgtcatcaatggcatgctgcagataattatacgattgtccgtcagtatt

SEQ ID NO: 850466 - DNA, 75 bp, synthetic construct
  source 1..75: mol_type = other DNA
aataaaccgcaaacaccatcccgtcctgccagtgagcaaccaccggcacagccacgactgcgaattgctgaacaa

SEQ ID NO: 850467 - DNA, 75 bp, synthetic construct
  source 1..75: mol_type = other DNA
gtcactcgcgtgactgacattatgggcgagattgcatcagcatcggatgaacagagtcgtggcatcgatcaagtc

SEQ ID NO: 850468 - DNA, 75 bp, synthetic construct
  source 1..75: mol_type = other DNA
tttgtagatactatttcatttgggagaaagaccctctggtacgtttttcattaacaagcgacgccgttttttgtg

SEQ ID NO: 850469 - DNA, 75 bp, synthetic construct
  source 1..75: mol_type = other DNA
gagcagaccgtgaagccattgcgctatccaaacgccaggccgcagaagctgcccgtaaagcaaaacaggaagagg

SEQ ID NO: 850470 - DNA, 75 bp, synthetic construct
  source 1..75: mol_type = other DNA
gcaatgctggaagatcaactaaaccgactaaaaggcgctatttctgacgctgcggaagaggcacgaaacgccaac

SEQ ID NO: 850471 - DNA, 75 bp, synthetic construct
  source 1..75: mol_type = other DNA
ttcggtactatgggcgctgtagcgggcgcggtgctggctatcgctggcgctatgggtggaagcctatcgcaaggc

SEQ ID NO: 850472 - DNA, 75 bp, synthetic construct
  source 1..75: mol_type = other DNA
tcttttcctgtagcttctcaagcggcgggattagtcataaaaaatggaacggtatataacgccaatggtgtgcca

SEQ ID NO: 850473 - DNA, 75 bp, synthetic construct
  source 1..75: mol_type = other DNA
attgagaaaagtatggagatgcagggtgaagccgaattattaaatgcacaaagtcaaatggaattctggcgagat

SEQ ID NO: 850474 - DNA, 75 bp, synthetic construct
  source 1..75: mol_type = other DNA
gtgagacggcccgcagcttcggcggggcgggcagtacagcggggtacgaacaggccacggcgtacaccctcacag

SEQ ID NO: 850475 - DNA, 75 bp, synthetic construct
  source 1..75: mol_type = other DNA
caccctctggcattacgatgcgtcggaccgcatcacgcaccggacggtgaacggcgacccggcggagcagtggca

SEQ ID NO: 850476 - DNA, 75 bp, synthetic construct
  source 1..75: mol_type = other DNA
cggaagatgcgcactatgtctaccgccacgatgaatacggcaggctggcggagaagacggaccgcatcccggaag

SEQ ID NO: 850477 - DNA, 75 bp, synthetic construct
  source 1..75: mol_type = other DNA
ggcatcagcacttacagcagttataacccgcgcggtcaactggtcagtcagagggatgcgcaggggcgggagacc

SEQ ID NO: 850478 - DNA, 75 bp, synthetic construct
  source 1..75: mol_type = other DNA
cgctgcccgccggtacagaatacggtgccgataacggtatccggctggaggcggtgtggctgacacacgacccgg

SEQ ID NO: 850479 - DNA, 75 bp, synthetic construct
  source 1..75: mol_type = other DNA
agcaccgatgatgcggcattcgaagcattaaaaaaaacaaatggacattcaatatgccaaggtgttgaacatgca

SEQ ID NO: 850480 - DNA, 75 bp, synthetic construct
  source 1..75: mol_type = other DNA
ccgtaagggacgtctcacaggcgagcgccagacggtacatcacccggagacgggggaactgctctggcagcatga

SEQ ID NO: 850481 - DNA, 75 bp, synthetic construct
  source 1..75: mol_type = other DNA
ccggtcgggtgacggagcaggtcaacccggaggggctggactaccgctttgagtacggagagcgccgggtaatca

SEQ ID NO: 850482 - DNA, 75 bp, synthetic construct
  source 1..75: mol_type = other DNA
gggctgaagcgggtggtgaaaaaggaacacgcggacggcagcgtcacgcagagtcagtttgacgccgtgggcagg

SEQ ID NO: 850483 - DNA, 75 bp, synthetic construct
  source 1..75: mol_type = other DNA
acggcagcagaaacgggacacagtacgatgcgtggggaaaggccatccgtaccacgcagggcggtctgacgcgca

SEQ ID NO: 850484 - DNA, 75 bp, synthetic construct
  source 1..75: mol_type = other DNA
acagggaaatgtgaatacatcttatccttttgaaagtccatgtcctaatggaacagaaacagttgctatgtacca

SEQ ID NO: 850485 - DNA, 75 bp, synthetic construct
  source 1..75: mol_type = other DNA
ctggagcgggaactgcggcagggcagcgtgagtgaagaaagccagcagtggcttgcgcagtgcgggctgacggcg

SEQ ID NO: 850486 - DNA, 75 bp, synthetic construct
  source 1..75: mol_type = other DNA
atggtactgagaaagtatcagcttatcatactcatggtgcagatagtcatggagaatattgggacgaaatatttt

SEQ ID NO: 850487 - DNA, 75 bp, synthetic construct
  source 1..75: mol_type = other DNA
gatgcccttcagcagtccggcggcgaagacggtggcagtgtggtgttcccgccggtgctggtgcagatgctcgac

SEQ ID NO: 850488 - DNA, 75 bp, synthetic construct
  source 1..75: mol_type = other DNA
gttacgatgtactcgaccggctgatacaggaaaccggttttgacggccgcacacagcgttatcaccacgacctga

SEQ ID NO: 850489 - DNA, 75 bp, synthetic construct
  source 1..75: mol_type = other DNA
cccgcgaccgcctgcaccgggaaacgctgcgcagcttcggccgttatgaactcaccaccgcttacacccctgccg

SEQ ID NO: 850490 - DNA, 75 bp, synthetic construct
  source 1..75: mol_type = other DNA
ttacgatgataaataccggggccggatggtggcgcaccgtcacacgggccgaccggaaatccgttaccgttacga

SEQ ID NO: 850491 - DNA, 75 bp, synthetic construct
  source 1..75: mol_type = other DNA
gaatttaaatcaaaaaatatagatgatattggaatatttgcattggcaatgtgtaatggagaatcaattaacgag

SEQ ID NO: 850492 - DNA, 75 bp, synthetic construct
  source 1..75: mol_type = other DNA
ccgtctggtgttctacacgcggatacagcacggtgagccgcaggtggagagccgctatctttacgacccgctggg

SEQ ID NO: 850493 - DNA, 75 bp, synthetic construct
  source 1..75: mol_type = other DNA
agcgagacacagtacgatgcgtggggaaaggcggtcagcaccacgcagggcgggctgacgcgcagcatggaatac

SEQ ID NO: 850494 - DNA, 75 bp, synthetic construct
  source 1..75: mol_type = other DNA
tgctggccttcacggactgctcggggtacacgacgcggtatgagtacgaccggtacggtcaacaaatcgccgttc

SEQ ID NO: 850495 - DNA, 75 bp, synthetic construct
  source 1..75: mol_type = other DNA
acacagcgttatcaccacgacctgaccggcaaacttatccgcagcgaggatgaggggctggtcacccactggcac

SEQ ID NO: 850496 - DNA, 75 bp, synthetic construct
  source 1..75: mol_type = other DNA
ccacgccggatggcagggcatcggcgttttactataaccaccacagccagttaacgtcagccaccgggccagacg

SEQ ID NO: 850497 - DNA, 75 bp, synthetic construct
  source 1..75: mol_type = other DNA
tggatgtcgctgtcgcggaaaccggaggtgacgtggtacgggtgggacggcgaccggctgacgacggtacagacc

SEQ ID NO: 850498 - DNA, 75 bp, synthetic construct
  source 1..75: mol_type = other DNA
cagacaactatttattggtcgttatttatcatttaccagaggtaacacattaactcagatggaattcaccataat

SEQ ID NO: 850499 - DNA, 75 bp, synthetic construct
  source 1..75: mol_type = other DNA
cccaatcctgaaatcataagtaatgagcaattctgggaagtgaaagcaaatctctacaagactaaagaagagttt

SEQ ID NO: 850500 - DNA, 75 bp, synthetic construct
  source 1..75: mol_type = other DNA
atgatgatgacgataaaatcacaaaaatgcgcttttttccgcgccgcccgccccgtgttcaggccaccccaccag

SEQ ID NO: 850501 - DNA, 75 bp, synthetic construct
  source 1..75: mol_type = other DNA
atgagcggaaaaccggcagcgcgtcagggcgacatgacgcagtatggcagtagcattgtccagggttcagccggg

SEQ ID NO: 850502 - DNA, 75 bp, synthetic construct
  source 1..75: mol_type = other DNA
tgctggcgggggcgcagtcgatggcgctaaccggcgatatcgtggtggatgatggtgcggtgctttcgctggaag

SEQ ID NO: 850503 - DNA, 75 bp, synthetic construct
  source 1..75: mol_type = other DNA
tggtagcgatgcgcttgatgacacacaacctgcgaagtactatcatattttgagggatagttggattttgatacc

SEQ ID NO: 850504 - DNA, 75 bp, synthetic construct
  source 1..75: mol_type = other DNA
agcaattctgggaagtgaaagcaaatctctacaagactaaagaagagtttgaccattttgtgtcctcatatctgc

SEQ ID NO: 850505 - DNA, 75 bp, synthetic construct
  source 1..75: mol_type = other DNA
tgatggctgacgatgatgaaagatggcgtgcatggtcgacagcccttggtgttacggaagggattaaaaactggg

SEQ ID NO: 850506 - DNA, 75 bp, synthetic construct
  source 1..75: mol_type = other DNA
gctgagattgaggataatatgctcctgccgatttccggtcaggaactgcccattcgctggctggcgcaacacggc

SEQ ID NO: 850507 - DNA, 75 bp, synthetic construct
  source 1..75: mol_type = other DNA
agacggtaaaacgatggtgtatacccgcgccgcagaagcagtggctgacagggaagaaaccaactcagccagtaa

SEQ ID NO: 850508 - DNA, 75 bp, synthetic construct
  source 1..75: mol_type = other DNA
cgttgctggatattttgcgtcagcagcaggtaatgctggaagaaatccgctcaacgcaggctcgttttacagggg

SEQ ID NO: 850509 - DNA, 75 bp, synthetic construct
  source 1..75: mol_type = other DNA
caggactctgcctgtgatacgagccaggagtcggaaaaagcaaaccagaatgtggagactgccaaccattccgaa

SEQ ID NO: 850510 - DNA, 75 bp, synthetic construct
  source 1..75: mol_type = other DNA
gacgaaagcaaagcgacgtcatctgctgaaataccggatgcagataaattactggccgcttcccgtggtgagcat

SEQ ID NO: 850511 - DNA, 75 bp, synthetic construct
  source 1..75: mol_type = other DNA
caaaataagaagaggaaatgcagcagaattattttcagggatacggcacatcgctattaatattttgacgaatga

SEQ ID NO: 850512 - DNA, 75 bp, synthetic construct
  source 1..75: mol_type = other DNA
ctggtgaacgggcaggataaacccacggcagagaatctggcaaaactgaagaccggcagtctggcggtatctgcc

SEQ ID NO: 850513 - DNA, 75 bp, synthetic construct
  source 1..75: mol_type = other DNA
agcggtcggtaaggctgagtatggccacggaagaagagcgaacccggctgtcggcatgggagcgttacagcgtcc

SEQ ID NO: 850514 - DNA, 75 bp, synthetic construct
  source 1..75: mol_type = other DNA
cgctcaggtctggcgttaccagcgtaccggaagccgggctgtcagcctggaggtcaggggattctggaaggaggc

SEQ ID NO: 850515 - DNA, 75 bp, synthetic construct
  source 1..75: mol_type = other DNA
ctgcaaacggaaatggaagtgcgtaaatccattgccaataacgcgatgctgacggtgattgagcgtgatcagcaa

SEQ ID NO: 850516 - DNA, 75 bp, synthetic construct
  source 1..75: mol_type = other DNA
acaacagcgaggaggtgccggacaacccgctattaagcctacgcatgacctggcagcagctgggttcaatatgat

SEQ ID NO: 850517 - DNA, 75 bp, synthetic construct
  source 1..75: mol_type = other DNA
ctgaagaatgaaatggacctgaagcgagaactggcgcggaactcggtactgaccattatcgagcgggacaacgaa

SEQ ID NO: 850518 - DNA, 75 bp, synthetic construct
  source 1..75: mol_type = other DNA
tccgctttatgataaagaattgctagaactaatagcccaaaaaaaagggataaaaggcagtgacagagttgccca

SEQ ID NO: 850519 - DNA, 75 bp, synthetic construct
  source 1..75: mol_type = other DNA
tgaagcactgagagagggctctaacaggtctcatgaagcaagaacccctacagggatacgttgtaatgataataa

SEQ ID NO: 850520 - DNA, 75 bp, synthetic construct
  source 1..75: mol_type = other DNA
aacactttcccaagacgaacaagattttggaggtgtttgtggatatcaccatgatttgatgaataaagatgattg

SEQ ID NO: 850521 - DNA, 75 bp, synthetic construct
  source 1..75: mol_type = other DNA
aaagaaaggctcggcgtaataatgaattcaaacgagttagtaaagcacgagctcaaatgaagaaaattctcatcg

SEQ ID NO: 850522 - DNA, 75 bp, synthetic construct
  source 1..75: mol_type = other DNA
gatggtggtggtaatggtggtgctaatgcgtttcatggatgttgtgtactctgtaatttttatctgtctgtgcgc

SEQ ID NO: 850523 - DNA, 75 bp, synthetic construct
  source 1..75: mol_type = other DNA
tttttgcatttaaaagagaaaggcgttaaccgctttgctttttatggtcttccggaatcaagcggcaaacgttga

SEQ ID NO: 850524 - DNA, 75 bp, synthetic construct
  source 1..75: mol_type = other DNA
aaaaaaccgtatccctttgacagtgatacggctttcttactctatgagatgtctaaaaacaccccaggaattgta

SEQ ID NO: 850525 - DNA, 75 bp, synthetic construct
  source 1..75: mol_type = other DNA
ttccgtggaaaacgtattcctgtttcaagcctgaagaagctcgagaaagggtgttatttcccggcctcggtgttt

SEQ ID NO: 850526 - DNA, 75 bp, synthetic construct
  source 1..75: mol_type = other DNA
caggaagaagtcgaaggcaacgggctggaacaggaaggcttacccttcccgattcgccagagcgatgccctgggt

SEQ ID NO: 850527 - DNA, 75 bp, synthetic construct
  source 1..75: mol_type = other DNA
caaccgccctgcgcgcccggcaccgatgaccgcaatacacaaagccaggtttactccgttgataacctcaaccac

SEQ ID NO: 850528 - DNA, 75 bp, synthetic construct
  source 1..75: mol_type = other DNA
cctttgaacgcccaaaactgattaatgaagtcagtggtgaaaccagtcaactggctgaaaataacgaaacctggg

SEQ ID NO: 850529 - DNA, 75 bp, synthetic construct
  source 1..75: mol_type = other DNA
attattgaaatctgtgataacgactatgccgggaccatgaccggcggacgtatcctgtccatcgatgccgccagc

SEQ ID NO: 850530 - DNA, 75 bp, synthetic construct
  source 1..75: mol_type = other DNA
ggcgaagattcgccgctgctgaaaaaaatgctcgccggaatgatcgatctgatgccgtcatcaatggcgttgctg

SEQ ID NO: 850531 - DNA, 75 bp, synthetic construct
  source 1..75: mol_type = other DNA
gtattgattcattaggtctgtcaataaataagataaatattgataatataccttttaaggggaatgttgctattg

SEQ ID NO: 850532 - DNA, 75 bp, synthetic construct
  source 1..75: mol_type = other DNA
attcaatggcggtcagactccttacgctgatgaatctttatctgtaacaggtattgattcattaggtctgtcaat

SEQ ID NO: 850533 - DNA, 75 bp, synthetic construct
  source 1..75: mol_type = other DNA
ttactttattatgttatggatgtctcatctgttatctacagatattaaaataagatccgtgatgatttttttatc

SEQ ID NO: 850534 - DNA, 75 bp, synthetic construct
  source 1..75: mol_type = other DNA
taccagagcactgcatgcatgtctacgatgtgacgagcgttgtccacccgcgccaaacccgaaagattcaaaagc

SEQ ID NO: 850535 - DNA, 75 bp, synthetic construct
  source 1..75: mol_type = other DNA
caaacaaaaatggatggttcaatacatcaaattcttatcatttgctaaatgaaaatcttttttttgttcagaaaa

SEQ ID NO: 850536 - DNA, 75 bp, synthetic construct
  source 1..75: mol_type = other DNA
tctttgtgaagtaatcaggtatactcttgcacaagtatatcctcagggggattttaactcgctgggtgatgattt

SEQ ID NO: 850537 - DNA, 75 bp, synthetic construct
  source 1..75: mol_type = other DNA
aatacgctaagcgccatcttcaccgtgctgaccagcccggatacgccgcaggccaacttctggggccgtatgccg

SEQ ID NO: 850538 - DNA, 75 bp, synthetic construct
  source 1..75: mol_type = other DNA
ttacagaaaatgaaggtggcagaaggagcgcacctcctatcggtagatattatcccgtctccaggtttccagagg

SEQ ID NO: 850539 - DNA, 75 bp, synthetic construct
  source 1..75: mol_type = other DNA
ttgcctgtctgctttttgcactgataatttacgctatccacgctttcggtttattcgatctggtcgccgatttac

SEQ ID NO: 850540 - DNA, 75 bp, synthetic construct
  source 1..75: mol_type = other DNA
aaaactgacgatggtgattacctcacccatacgatgcgcatcgatgccatctactccatccgtgaccggtctgaa

SEQ ID NO: 850541 - DNA, 75 bp, synthetic construct
  source 1..75: mol_type = other DNA
ttctttatttcatggggagacatcgtatcattattcatttattattgttaaaacagggcttattctgttcaatgc

SEQ ID NO: 850542 - DNA, 75 bp, synthetic construct
  source 1..75: mol_type = other DNA
tgtgccgtaacgatggtggtcagaggtgaacgtctgctcaagcgtgaggaccgattggccgctgaagtaatcatg

SEQ ID NO: 850543 - DNA, 75 bp, synthetic construct
  source 1..75: mol_type = other DNA
gcattgggattccggcatgttgctggcgaagtggacttttctgcggtaatggaaagagtccagcaggtggtgcag

SEQ ID NO: 850544 - DNA, 75 bp, synthetic construct
  source 1..75: mol_type = other DNA
tgaagcataagcagagcgcggcgtgggtcgtcaattctatgtcggacggtgagcttgacgaagggtccacctggg

SEQ ID NO: 850545 - DNA, 75 bp, synthetic construct
  source 1..75: mol_type = other DNA
tacaattgagcgacgggaccagctacagtctggcatccacggagttggggtatctgacctgccagacaacggcaa

SEQ ID NO: 850546 - DNA, 75 bp, synthetic construct
  source 1..75: mol_type = other DNA
ttgggattgcgcacggaaacatggtgaatcgttcggggagctattcggtgcaggcgcgtgacgccaaattctcca

SEQ ID NO: 850547 - DNA, 75 bp, synthetic construct
  source 1..75: mol_type = other DNA
ccatccagctatttcagaacaacgactacctcgcgaaagtcgctttccagaaccagaccagcacacagaacgcaa

SEQ ID NO: 850548 - DNA, 75 bp, synthetic construct
  source 1..75: mol_type = other DNA
ttgcagtggggcggaccgtggggaacgacatggtatggtggtggacaatatgctgaatattaccgtgccgccatg

SEQ ID NO: 850549 - DNA, 75 bp, synthetic construct
  source 1..75: mol_type = other DNA
gctggtgaaggcgtttgacaacgccaaacgctatccagaaaaccagccgcgcgtcattttgtgcgacaccctgat

SEQ ID NO: 850550 - DNA, 75 bp, synthetic construct
  source 1..75: mol_type = other DNA
cagcattactggaatctgcgaattgtcgccagttcgctatgtttaagccccagcctgctcaaaaagaaattaaaa

SEQ ID NO: 850551 - DNA, 75 bp, synthetic construct
  source 1..75: mol_type = other DNA
ttgtagccatcactaaagatgcctccacacttaatcctgaaggctttagcgttgttgaagtccccgatataacag

SEQ ID NO: 850552 - DNA, 75 bp, synthetic construct
  source 1..75: mol_type = other DNA
gggaaccatatcagtctggtggaggggaaacacagcctggtggtgaagggggacctggcgaggaaggtgagtggc

SEQ ID NO: 850553 - DNA, 75 bp, synthetic construct
  source 1..75: mol_type = other DNA
acagaaacatttacatgtcagactggcttgaaagtaggatctatttttacatacaaggtgaacgacaaaaataca

SEQ ID NO: 850554 - DNA, 75 bp, synthetic construct
  source 1..75: mol_type = other DNA
tttaggcttaaatcatacgaataaaaaaattgttaaaattacgcatggaagaaggcagcctgtaagtgtaaaaac

SEQ ID NO: 850555 - DNA, 75 bp, synthetic construct
  source 1..75: mol_type = other DNA
catgggggatagtgtatatatcttcttattttttcgatatggcttttcaaagcaaatctcacactataaaaaaaa

SEQ ID NO: 850556 - DNA, 75 bp, synthetic construct
  source 1..75: mol_type = other DNA
aggacgggcgcgtcacgcaatggcaagttgcatctaatagcattccttatctgacgcgtaaagggcagattcgct

SEQ ID NO: 850557 - DNA, 75 bp, synthetic construct
  source 1..75: mol_type = other DNA
cgacaaaaaaccaaaagatccgctcactagcgccgaaactgaacagctcgtccatatcagcccggcagaatttga

SEQ ID NO: 850558 - DNA, 75 bp, synthetic construct
  source 1..75: mol_type = other DNA
tagaaatgaatatagaatactacaagatttgagcaatttagagtccctagagggagaggagcgaaagaaagcagt

SEQ ID NO: 850559 - DNA, 75 bp, synthetic construct
  source 1..75: mol_type = other DNA
tacataaaatatacaatccagtgtatggacttgataatatcgtattacttgcacaagagtgtcagtctacagatc

SEQ ID NO: 850560 - DNA, 75 bp, synthetic construct
  source 1..75: mol_type = other DNA
attatgtatcgttcaaccacttgcttgaagagtcgtaaagattcaaatggaggtatagtaaaagaaccaggatat

SEQ ID NO: 850561 - DNA, 75 bp, synthetic construct
  source 1..75: mol_type = other DNA
ccgccgtaaacattaccatgtattactgctactgaataaagacttctaccatggtgccgggaactataactccga

SEQ ID NO: 850562 - DNA, 75 bp, synthetic construct
  source 1..75: mol_type = other DNA
ttgatgacgctgcaactttttaacgctgtatttatcggcattgttgcgggtattgggatgctatggtttcaggat

SEQ ID NO: 850563 - DNA, 75 bp, synthetic construct
  source 1..75: mol_type = other DNA
gcattagtgccattgagagtatggatattatcgctgatataaattcgataaaagaactaatagatgatgtaaaat

SEQ ID NO: 850564 - DNA, 75 bp, synthetic construct
  source 1..75: mol_type = other DNA
aaacggtaaagtccgcattgttcccatttcaaatgaagttgttcgcgaaatcaaaacaaaagattcgggggggtt

SEQ ID NO: 850565 - DNA, 75 bp, synthetic construct
  source 1..75: mol_type = other DNA
atgacgttgttatgacttacgacggtgacagcggagaacaaataatttgggtttgggagagtttaaataaatttc

SEQ ID NO: 850566 - DNA, 75 bp, synthetic construct
  source 1..75: mol_type = other DNA
gggcttttacgcccaaagatcagaaagctgtgaaggcagcggcgcaaaccatgcgggccaatccggcatttgata

SEQ ID NO: 850567 - DNA, 75 bp, synthetic construct
  source 1..75: mol_type = other DNA
attatcggtgcaatttatctgaccggtattttcatgacctggcgtagagcgcgtggctttattaaacaagagaaa

SEQ ID NO: 850568 - DNA, 75 bp, synthetic construct
  source 1..75: mol_type = other DNA
aggagaggcatgttgctaaagaaaagataaaacttttgcagtttggaagaattgatgattataaaaacataaaag

SEQ ID NO: 850569 - DNA, 75 bp, synthetic construct
  source 1..75: mol_type = other DNA
aacaacagattgagaaagaagcaaaattgaactactacaattcagttaatgcatgggataaatatattaatgaat

SEQ ID NO: 850570 - DNA, 75 bp, synthetic construct
  source 1..75: mol_type = other DNA
atgccttatcagcccttgcctctggcgcagttgatcacgcagacacagcaggatatcagccagcgcctgcccggt

SEQ ID NO: 850571 - DNA, 75 bp, synthetic construct
  source 1..75: mol_type = other DNA
ggattacctactggcggtttgctttctagggggattggtgcattaagaaatatcaccgatggcatccagagctag

SEQ ID NO: 850572 - DNA, 75 bp, synthetic construct
  source 1..75: mol_type = other DNA
ctcagcagtgtcggattttgaactgcggttaccggcagagggcacgcctgcagcatggcaggcagggctgaatgt

SEQ ID NO: 850573 - DNA, 75 bp, synthetic construct
  source 1..75: mol_type = other DNA
ggtagcggacatcttagtaaaaaagaaaaattggatattgctaacagcaaaaatataactttgattaatcaatat

SEQ ID NO: 850574 - DNA, 75 bp, synthetic construct
  source 1..75: mol_type = other DNA
gcgccgtgcggttgcccgttcagaacggttttccgccaccgtgcgtggctggttccgggatgatggccggttatg

SEQ ID NO: 850575 - DNA, 75 bp, synthetic construct
  source 1..75: mol_type = other DNA
taagtatacatctcctgatgtaactaaagcttattgtcaaataatgaaggtgatgaatttaattttaattgtatc

SEQ ID NO: 850576 - DNA, 75 bp, synthetic construct
  source 1..75: mol_type = other DNA
gttacaggcggtgcgcatggtgttgagaacattggtgacaacggcacggttaacaacaaaggagatattgttgtt

SEQ ID NO: 850577 - DNA, 75 bp, synthetic construct
  source 1..75: mol_type = other DNA
gttgttgaagtccccgatataacagccaatcgtcgggccgatgattccggtaagtggatgtttaaggacggagct

SEQ ID NO: 850578 - DNA, 75 bp, synthetic construct
  source 1..75: mol_type = other DNA
tagatatggccgagcaatggtggattaatgcggatggtacacgtgatgccggttggcgtgatcgctctcggctac

SEQ ID NO: 850579 - DNA, 75 bp, synthetic construct
  source 1..75: mol_type = other DNA
ccaccaaaagtgcatgcagatcatcaggcggcggcactctggctacgccaagtgaatattgtctccgaggatgct

SEQ ID NO: 850580 - DNA, 75 bp, synthetic construct
  source 1..75: mol_type = other DNA
gtgaatgcccctgcgcaatatgtttttcaggctgaaggctcactcaaagacggcgaagaaaacgcgccaacacaa

SEQ ID NO: 850581 - DNA, 75 bp, synthetic construct
  source 1..75: mol_type = other DNA
gtagtctggaagcttctggaaatatgtcatttggcaacaatgtaaaagtggaagctattataaataactgggcgc

SEQ ID NO: 850582 - DNA, 75 bp, synthetic construct
  source 1..75: mol_type = other DNA
gtgcaaagcctgatggattcattaggttctaacaaacatgtactacccgaagtctgcatctgctttttatccctt

SEQ ID NO: 850583 - DNA, 75 bp, synthetic construct
  source 1..75: mol_type = other DNA
ccggaaagccagacttctagcagatgctgaatccgtgattttgccgctggatcgcgctgtcagactgaacatggc

SEQ ID NO: 850584 - DNA, 75 bp, synthetic construct
  source 1..75: mol_type = other DNA
ctggcacaatatcaactgggccaagtgccgtcgcgaggtcagaaggctgcaggcgcgtatcgtgaaggcaacaca

SEQ ID NO: 850585 - DNA, 75 bp, synthetic construct
  source 1..75: mol_type = other DNA
ttccatcaacaaggtgcccgaaactggtctttctccgtggctaccggagaactccttgccaacggtaagcctcag

SEQ ID NO: 850586 - DNA, 75 bp, synthetic construct
  source 1..75: mol_type = other DNA
tgagcaatcttcccgaacatctcttctctacccggctgggtagcgaggcgtcctcatcgctactgccatcaagtc

SEQ ID NO: 850587 - DNA, 75 bp, synthetic construct
  source 1..75: mol_type = other DNA
ctgattgttcgtctggcaataagcgcctggggaacactggcgacgattctcggtacgggtacggcggtactggca

SEQ ID NO: 850588 - DNA, 75 bp, synthetic construct
  source 1..75: mol_type = other DNA
aggtgcacatagccattctctgagcggcgcacatacccattctgtaggggcgcatagccatagtgtgagtgcata

SEQ ID NO: 850589 - DNA, 75 bp, synthetic construct
  source 1..75: mol_type = other DNA
taccactgcgaccaccggggactgccgctggcgcttatcagcgaagacggcaatacggcgtggagcgcggaatat

SEQ ID NO: 850590 - DNA, 75 bp, synthetic construct
  source 1..75: mol_type = other DNA
cattcaatagcccttgccctaatggtactgagaaagtatcagcttatcatactcatggtgcagatagtcatggag

SEQ ID NO: 850591 - DNA, 75 bp, synthetic construct
  source 1..75: mol_type = other DNA
aaatatctacaatcaataatattagtattcagtttaatggatttgacaacgttgaagatgaggttgatttactca

SEQ ID NO: 850592 - DNA, 75 bp, synthetic construct
  source 1..75: mol_type = other DNA
atttcaaggaaaatatgaaagccgctttcatattttaaagcatacagatctttttgaagttgaacgttcccgaat

SEQ ID NO: 850593 - DNA, 75 bp, synthetic construct
  source 1..75: mol_type = other DNA
cttgaccaagagacaatttttaaactaacacacgaaaacaacgttgttactagtaacttagcagatcttaccgaa

SEQ ID NO: 850594 - DNA, 75 bp, synthetic construct
  source 1..75: mol_type = other DNA
ttagtatatagatttagtgatatcagcaactgggatatggctcactcaacaccagtgccaggtgttaatactctg

SEQ ID NO: 850595 - DNA, 75 bp, synthetic construct
  source 1..75: mol_type = other DNA
tcttattttgaaggggcgtttattattggcctcgcatcaagaccggatacacgctggagtatcacttcatggaaa

SEQ ID NO: 850596 - DNA, 75 bp, synthetic construct
  source 1..75: mol_type = other DNA
cagtgaggtcacagatccggtctatacgcctgagatggtgaagaaagctgaaagtagcatgttggcagcaggtgc

SEQ ID NO: 850597 - DNA, 75 bp, synthetic construct
  source 1..75: mol_type = other DNA
ttgacctgccagccagttcggaagtattacaggcttctgcatcccggccctgcgtcggcgtagcctataaacttg

SEQ ID NO: 850598 - DNA, 75 bp, synthetic construct
  source 1..75: mol_type = other DNA
cattcttatgacaagagtcgccgcaggggagcgattcatgtcattagtgcgttctcaacaatgcacattctggtc

SEQ ID NO: 850599 - DNA, 75 bp, synthetic construct
  source 1..75: mol_type = other DNA
cgttctcaacaatgcacattctggtcctggggcagatcaggacggatgagaaatctaatgagatcacagctatcc

SEQ ID NO: 850600 - DNA, 75 bp, synthetic construct
  source 1..75: mol_type = other DNA
acttgccgatgtactggataacttgaaaaaaataaacggtaaaaacgaaaagttactcggagggaagacagccag

SEQ ID NO: 850601 - DNA, 75 bp, synthetic construct
  source 1..75: mol_type = other DNA
ggcggccgcgacaccacggcgccgaacgcgatgtggaaaaagcgcccatacggacagctggcgaaatgcgcagaa

SEQ ID NO: 850602 - DNA, 75 bp, synthetic construct
  source 1..75: mol_type = other DNA
attgtttacgatgaaaataatattattgtcgctatcaccagagatgcttcaacgcttaaccctgaaggttttagc

SEQ ID NO: 850603 - DNA, 75 bp, synthetic construct
  source 1..75: mol_type = other DNA
ttccttttgtgggaattatcgcagtcgtcacattggggatttatttcggcaaacaacctaagccaacctatcgag

SEQ ID NO: 850604 - DNA, 75 bp, synthetic construct
  source 1..75: mol_type = other DNA
tcaaccaatatgaactgcaatgaagtgatttgtaatcttgctgcagaaaaacttggtagcgttaaaggggattac

SEQ ID NO: 850605 - DNA, 75 bp, synthetic construct
  source 1..75: mol_type = other DNA
gtgattaaacgaatttatacggcagaggaattgcagcagcaggcagaaaatcggaaagccagacttcttgcagat

SEQ ID NO: 850606 - DNA, 75 bp, synthetic construct
  source 1..75: mol_type = other DNA
cgaagatccgatactgtaaacagatctccccgaaataagctgtcagaagcggaaagattgcagatactggagttg

SEQ ID NO: 850607 - DNA, 75 bp, synthetic construct
  source 1..75: mol_type = other DNA
tatcggaactaacaccagagaacattgccgcatggctaagtacagagagacaaaatcggcctaccgtcactgctc

SEQ ID NO: 850608 - DNA, 75 bp, synthetic construct
  source 1..75: mol_type = other DNA
gtacacccgaaagcgttgttcacggattttgaaatcataatagacccgtcagtaggtgaaactcatcgggcagcg

SEQ ID NO: 850609 - DNA, 75 bp, synthetic construct
  source 1..75: mol_type = other DNA
aacgtgctcattcatgcgcccaacgggggcaaagaaggggtgcaaattttgccgttccagcagatcaccgcaaag

SEQ ID NO: 850610 - DNA, 75 bp, synthetic construct
  source 1..75: mol_type = other DNA
gatgctttagcatatatacaagatttaatatcgccatacatttcatcaattattgttcttgataactgtgaaaat

SEQ ID NO: 850611 - DNA, 75 bp, synthetic construct
  source 1..75: mol_type = other DNA
gccgttcacgttcgaatggaacggccgcccctggaatgctggccccgactcactggcccgtctttatccggtagt

SEQ ID NO: 850612 - DNA, 75 bp, synthetic construct
  source 1..75: mol_type = other DNA
gcccaatcctttaagtgattacgtaataatagaccgtgagtctattcaatttctgatagttctgagtagtcatta

SEQ ID NO: 850613 - DNA, 75 bp, synthetic construct
  source 1..75: mol_type = other DNA
gataccatttattctcgaggacaacaaaaggatatgattatgaaacaggacaaacttggcgtattcgttacgaca

SEQ ID NO: 850614 - DNA, 75 bp, synthetic construct
  source 1..75: mol_type = other DNA
gtgcactggggttaggattgtcgctggggaatttcggtgctatgtcactagataccatttattctcgaggacaac

SEQ ID NO: 850615 - DNA, 75 bp, synthetic construct
  source 1..75: mol_type = other DNA
gtttacagtaagcaaattcatataggcgattatggagcatgtcagccgataggctgtaccagtcgacaagccatt

SEQ ID NO: 850616 - DNA, 75 bp, synthetic construct
  source 1..75: mol_type = other DNA
tcataatctacaaatggaaagtagattatgtattagtaatgttgctaatgtagtgactttattattgatgatccc

SEQ ID NO: 850617 - DNA, 75 bp, synthetic construct
  source 1..75: mol_type = other DNA
ttatctgtcttatttttgtgccgtttatttatgctatccacgctttcgatttattcgatctggtcactgatttac

SEQ ID NO: 850618 - DNA, 75 bp, synthetic construct
  source 1..75: mol_type = other DNA
caatgacagccaatagcagtcttaatattaacatgtattactcatctcttagcggaggtatcaattcacagcaac

SEQ ID NO: 850619 - DNA, 75 bp, synthetic construct
  source 1..75: mol_type = other DNA
cgtggcggaacgatcgtcgttataaagcggaatacgattattgtgcagccgatcttcagcagatactgcagccga

SEQ ID NO: 850620 - DNA, 75 bp, synthetic construct
  source 1..75: mol_type = other DNA
atgcagattagcgaactggcacaaggtgtcgctgcgaaacttgaacaaagccgcattgtgttttggtacgaccca

SEQ ID NO: 850621 - DNA, 75 bp, synthetic construct
  source 1..75: mol_type = other DNA
acgcctaacaagatatccagcgtaattcccttcattcttgatagtaacgcacaacagaatgttaccatccgggta

SEQ ID NO: 850622 - DNA, 75 bp, synthetic construct
  source 1..75: mol_type = other DNA
attggcgctaacttcaaccgtcgcaatgagtactggttgatactggaagacgcacaaacggaaacggggtatcag

SEQ ID NO: 850623 - DNA, 75 bp, synthetic construct
  source 1..75: mol_type = other DNA
ggaagagagcaccacgctcgatcgggaagcctttaaaaaattgctctctgaacgccagagcaaatactggtgcca

SEQ ID NO: 850624 - DNA, 75 bp, synthetic construct
  source 1..75: mol_type = other DNA
tctggtcgtggagcaactgcgctgcattactaacggccaaagtacggacgcggcatttttactacgtgttaaaga

SEQ ID NO: 850625 - DNA, 75 bp, synthetic construct
  source 1..75: mol_type = other DNA
gaccagaagggtttctcctggcaggatcaagaaccttggctaacacctttggatgttcatcgcgcacagttcaat

SEQ ID NO: 850626 - DNA, 75 bp, synthetic construct
  source 1..75: mol_type = other DNA
gggtaaaggcatcgtcgttccggcagcgtggggcatgtttaccttccgcttaccgccgatgacctcgcgcgtagc

SEQ ID NO: 850627 - DNA, 75 bp, synthetic construct
  source 1..75: mol_type = other DNA
tgggaagatcctgaaacaggaattttgtgtcggtgccgtccggacaaaattatccctgaatttcactggatcatg

SEQ ID NO: 850628 - DNA, 75 bp, synthetic construct
  source 1..75: mol_type = other DNA
ggcacaattggcgctacgccacgccgatgatgcgatcttggcctctcgcgaggcgcgtctctctggacacgtcag

SEQ ID NO: 850629 - DNA, 75 bp, synthetic construct
  source 1..75: mol_type = other DNA
cgaaaatgacaccttataacaatatgaatcctatcgccgaagctgataaccgaaaatggagtcaccaggagttaa

SEQ ID NO: 850630 - DNA, 75 bp, synthetic construct
  source 1..75: mol_type = other DNA
tcacacctgttgcgacgctgactgccgtttggctaggggctagatttacactgcgtaatgaattgcgaaaaaaaa

SEQ ID NO: 850631 - DNA, 75 bp, synthetic construct
  source 1..75: mol_type = other DNA
tggtcggcgaaatggtcagggcagaaatggaacggcgcgcccgtgccaggcgtggcagtttttacgataaagatt

SEQ ID NO: 850632 - DNA, 75 bp, synthetic construct
  source 1..75: mol_type = other DNA
aatattcataccgctgtcatcatggcgggggaatttctgtctgctaatgaatggattcgccgcaaaaaccagctt

SEQ ID NO: 850633 - DNA, 75 bp, synthetic construct
  source 1..75: mol_type = other DNA
aaatatggggatcgtcctggtaagtgacagaaatatgcaatctttagctaattactggcgcaaacatactcccgc

SEQ ID NO: 850634 - DNA, 75 bp, synthetic construct
  source 1..75: mol_type = other DNA
tttaaagctgttgccacgaattttcctgtcgttaatgacctgccccctgaaggtgagatcgattttacctggagt

SEQ ID NO: 850635 - DNA, 75 bp, synthetic construct
  source 1..75: mol_type = other DNA
ctgcgctggagcgccaggccagttctcgaagagcagctttttctgactggcacacatgatctgctgacggatatt

SEQ ID NO: 850636 - DNA, 75 bp, synthetic construct
  source 1..75: mol_type = other DNA
ttgactattgatgtttgtgagccagaccaaaatagttgccttattgttcagggtatccctgttgtaaaaggggcg

SEQ ID NO: 850637 - DNA, 75 bp, synthetic construct
  source 1..75: mol_type = other DNA
accgcataacacaataatatatatgtggtcaaaagccgggttaatggctgctatactgagttgttggttcatttt

SEQ ID NO: 850638 - DNA, 75 bp, synthetic construct
  source 1..75: mol_type = other DNA
acgctgctgaaccgctccgctcgcggcgtggcgctgactgaaagtggccaacgttgttacgaacatgcgttggaa

SEQ ID NO: 850639 - DNA, 75 bp, synthetic construct
  source 1..75: mol_type = other DNA
cttttatctcttatagctagttccttccatttcacagcattaacgttttttatattttcgttgtttttctatatt

SEQ ID NO: 850640 - DNA, 75 bp, synthetic construct
  source 1..75: mol_type = other DNA
ggctcttatctgcgccagcacggtgaggaaaaagggcgccagatagcctgtgccctgctggaagatttaatggaa

SEQ ID NO: 850641 - DNA, 75 bp, synthetic construct
  source 1..75: mol_type = other DNA
aattaaccccgccgccgggtaatagcagtgacaaccttgagcaacagatagccagtacttcacagcaaatcgggt

SEQ ID NO: 850642 - DNA, 75 bp, synthetic construct
  source 1..75: mol_type = other DNA
ttcttcttttagaactcgtgaacgcttaattgacttgattttgaacaaaatttattattctgaacatgggcgatt

SEQ ID NO: 850643 - DNA, 75 bp, synthetic construct
  source 1..75: mol_type = other DNA
gcctcttaatgttggtgctactggcggttttggtaatatctttgtatcgtggaaagaaagtaccgaacgcgatta

SEQ ID NO: 850644 - DNA, 75 bp, synthetic construct
  source 1..75: mol_type = other DNA
ctgatgcgcgccgttggcagcggactcggtgcaacattacaacccggagcagccatttcgcatcttgagggtgaa

SEQ ID NO: 850645 - DNA, 75 bp, synthetic construct
  source 1..75: mol_type = other DNA
gcgtggcgctgactgaaagtggccaacgttgttacgaacatgcgctggaaatcctcacccaatatcagcgactgg

SEQ ID NO: 850646 - DNA, 75 bp, synthetic construct
  source 1..75: mol_type = other DNA
gaaagaattacttcctcgcatatcgcaagccgtcatgaccgtagtaccaggtacagggcatttgtccatgttgga

SEQ ID NO: 850647 - DNA, 75 bp, synthetic construct
  source 1..75: mol_type = other DNA
tagtagtcttaatatggatggtactgtttctggtaatccagatagtgacgcatgggaatactggaaaagtttttt

SEQ ID NO: 850648 - DNA, 75 bp, synthetic construct
  source 1..75: mol_type = other DNA
acccttatttcggcactcacgaccctgcccggtattgttatttataccgtgatggcaagcgatctcgccaatgaa

SEQ ID NO: 850649 - DNA, 75 bp, synthetic construct
  source 1..75: mol_type = other DNA
ttacgaaaccgacgaacagtacaatcgtcgcattaatactgatatctcgctgatcaccaataagattaaatcggt

SEQ ID NO: 850650 - DNA, 75 bp, synthetic construct
  source 1..75: mol_type = other DNA
cgtgcagcaaattctggacgctcatgacggtaaaattgtgttgccggaaaaagcggtcttactcacctttgacga

SEQ ID NO: 850651 - DNA, 75 bp, synthetic construct
  source 1..75: mol_type = other DNA
ttgactcattggggctggatgaaaacaacacgccagtgattatcgaatataaacgtcagagtaacgagaacgtta

SEQ ID NO: 850652 - DNA, 75 bp, synthetic construct
  source 1..75: mol_type = other DNA
ttgacgaaagtaaaactcgagccggaggatgaagatgtcgatgagccaacacctgaaaaccatgaagaaaaaaat

SEQ ID NO: 850653 - DNA, 75 bp, synthetic construct
  source 1..75: mol_type = other DNA
atgctggcccgtcttaatacaaggctggaaggcggagatgctcatccattagaggccattatcacccggatgctg

SEQ ID NO: 850654 - DNA, 75 bp, synthetic construct
  source 1..75: mol_type = other DNA
agagaatggaatataactaaagagaatgaacacagattctatatctatggaaaggttttaataagccagtctcag

SEQ ID NO: 850655 - DNA, 75 bp, synthetic construct
  source 1..75: mol_type = other DNA
tagggacactactctcattaattgccgccacgctggcctcctcgtgctcattcctgctggcgcgctggctgggac

SEQ ID NO: 850656 - DNA, 75 bp, synthetic construct
  source 1..75: mol_type = other DNA
gaaaatggaagccttcactgcagagtggaccttccagttggcgctgaatgttgcaacgccgtttgtgctggtagg

SEQ ID NO: 850657 - DNA, 75 bp, synthetic construct
  source 1..75: mol_type = other DNA
aaatctaatcccggaagctctgcaatctcgcgccgaattgcgtcaaaaagtacgtaatagtacagatttcaaacc

SEQ ID NO: 850658 - DNA, 75 bp, synthetic construct
  source 1..75: mol_type = other DNA
acgtcaaaaagtacgtaatagtgcagattttaaaccgcttccggtggaaatccgctcacttttcccaagtgaatt

SEQ ID NO: 850659 - DNA, 75 bp, synthetic construct
  source 1..75: mol_type = other DNA
aaatttttgattataattctttaggaagtacatcttctattgcaacagcaataaactctaaaataataagaaaaa

SEQ ID NO: 850660 - DNA, 75 bp, synthetic construct
  source 1..75: mol_type = other DNA
cagcgactagtatcatgtctgcaaaaccaagagacgaacctggacttgtctgaattaggcctgacaacattacct

SEQ ID NO: 850661 - DNA, 75 bp, synthetic construct
  source 1..75: mol_type = other DNA
gggtgacgagcgagaagagattggccgggtgatcaccgattttgatgcggcgttgcagtcaaacgatatggcccg

SEQ ID NO: 850662 - DNA, 75 bp, synthetic construct
  source 1..75: mol_type = other DNA
aaccacaaagttaaaaacaacattctggtggaatccttcgatgtgccgttgaagaaaaccggggcttatcagtcg

SEQ ID NO: 850663 - DNA, 75 bp, synthetic construct
  source 1..75: mol_type = other DNA
atgactcagatgcataaaggattcttgctcatcggcgtctttctgtatgcggcgtttttggccccgaagctttac

SEQ ID NO: 850664 - DNA, 75 bp, synthetic construct
  source 1..75: mol_type = other DNA
gaagaactaaaaacctatggtgataatatcatctccattaatatttacaaacaaaaaaatatcaatgaagttgtg

SEQ ID NO: 850665 - DNA, 75 bp, synthetic construct
  source 1..75: mol_type = other DNA
ctatgttcgaatatattttttggaaaattgtttttcagaataaaccctatatatttaattaaaggtcgccagcaa

SEQ ID NO: 850666 - DNA, 75 bp, synthetic construct
  source 1..75: mol_type = other DNA
gaagagctcaaaacttatggtgacaatgttatttctattgacatctataatcaaaaaaacattaatgaggtaatg

SEQ ID NO: 850667 - DNA, 75 bp, synthetic construct
  source 1..75: mol_type = other DNA
agaaatcatcactcagaggaaaccgagatatttttccggtgccgcgagaatcgcatcacacacattccggaaaat

SEQ ID NO: 850668 - DNA, 75 bp, synthetic construct
  source 1..75: mol_type = other DNA
agtgacagcaaatgacctccgcactgccgaagccacggtcagaagccgtgaagagaatgaatttacggactggtt

SEQ ID NO: 850669 - DNA, 75 bp, synthetic construct
  source 1..75: mol_type = other DNA
tacccatactccccatatctttgaaggaacttcatatctcaaataatcaattatgctctcttcctgttttaccag

SEQ ID NO: 850670 - DNA, 75 bp, synthetic construct
  source 1..75: mol_type = other DNA
ccacctgtaccactgcgaccatcgcggcctgccgctggcgcttgtcagcacggaaggggcaacagaatggtgcgc

SEQ ID NO: 850671 - DNA, 75 bp, synthetic construct
  source 1..75: mol_type = other DNA
caaaggtaacgcgactgcaaataccagcggtggtggtgacgcggctgctcgcgcgctggctgatcgtgtgaagca

SEQ ID NO: 850672 - DNA, 75 bp, synthetic construct
  source 1..75: mol_type = other DNA
atacgtcacgcagatgtcggaaaaaaccgatgcattgcgtgatagtgcaggtctcagcagtcggcaaacgcagcg

SEQ ID NO: 850673 - DNA, 75 bp, synthetic construct
  source 1..75: mol_type = other DNA
actttatcgtatttcctctctactggtaatgccatcaaaaacagaagttcccagaaatgctataatagaagcggc

SEQ ID NO: 850674 - DNA, 75 bp, synthetic construct
  source 1..75: mol_type = other DNA
tggtgatcgagtaactgttaatacaaaaacaaataaagtaatggatggtaattctcgtgtatacgagttgaaaaa

SEQ ID NO: 850675 - DNA, 75 bp, synthetic construct
  source 1..75: mol_type = other DNA
aggcgcggcaccggagcctggcggaggtgttgcaggaggacacgggggtgacgcttccggcggagctggcggtga

SEQ ID NO: 850676 - DNA, 75 bp, synthetic construct
  source 1..75: mol_type = other DNA
gatttaattcgaataatatggcgatatattggaatagtagagcactgagagatcccctcataatttccccaaagc

SEQ ID NO: 850677 - DNA, 75 bp, synthetic construct
  source 1..75: mol_type = other DNA
caggtgcgcgggtttacttatgatgcggagcacgccgggcggatggtggcgcaccattatgcggggaggccggag

SEQ ID NO: 850678 - DNA, 75 bp, synthetic construct
  source 1..75: mol_type = other DNA
gaaaactcacgcagagtgaagacgaggggcttatcaccctctggcactacgatgcgtcggaccgcatcacgcacc

SEQ ID NO: 850679 - DNA, 75 bp, synthetic construct
  source 1..75: mol_type = other DNA
gccgccagtggcttgcgcagtgcgggctggacggtggagcggctggcggcacagatagagccggtttatttgcct

SEQ ID NO: 850680 - DNA, 75 bp, synthetic construct
  source 1..75: mol_type = other DNA
gagtaatgctcactggaacgttactgtgacaaaacttaatcctggtgttgatggttacacttttgttcggtgggc

SEQ ID NO: 850681 - DNA, 75 bp, synthetic construct
  source 1..75: mol_type = other DNA
tctacaatctgatacttcaaggggatttactctaacgttagcaattgatacagcaggtgaaacactattctgtac

SEQ ID NO: 850682 - DNA, 75 bp, synthetic construct
  source 1..75: mol_type = other DNA
gcggcctgccgctggcccttatcagcacggaagggacaacagcgtggtacgcagaatacgatgaatggggtaacc

SEQ ID NO: 850683 - DNA, 75 bp, synthetic construct
  source 1..75: mol_type = other DNA
caccgggaagaaggcatcagcacttacagcagttataacccgcgtgggcaactggtcagtcagaaggatgcgcag

SEQ ID NO: 850684 - DNA, 75 bp, synthetic construct
  source 1..75: mol_type = other DNA
aaccggtactatgatccgttgcaggggagatatatcacccaggacccgatagggctgagaggtgaatggaatctg

SEQ ID NO: 850685 - DNA, 75 bp, synthetic construct
  source 1..75: mol_type = other DNA
ggggacactgcgcaggccggcgcttctacggcctcacaacttctcgacgaacaagaagccattaccgttttcgat

SEQ ID NO: 850686 - DNA, 75 bp, synthetic construct
  source 1..75: mol_type = other DNA
gttatcttgcggggatgaagctgggcggaacgccgctggtcgagtacacgcgggaccggctgcaccgcgagacgg

SEQ ID NO: 850687 - DNA, 75 bp, synthetic construct
  source 1..75: mol_type = other DNA
tgaaaacggacaaaacccattaccagcctggtgaactggtcaatgtcgaattaacctcgtcgctgaaaggtaaac

SEQ ID NO: 850688 - DNA, 75 bp, synthetic construct
  source 1..75: mol_type = other DNA
cgctacggtcaggtggaagtaccgctcccgccgggagccgacgttgagcgcacaacatggggcatttcggtcaat

SEQ ID NO: 850689 - DNA, 75 bp, synthetic construct
  source 1..75: mol_type = other DNA
ctttagggcagggagttaagttttacccagcgtctcgacgtatcaccaccagtacaggcaatgtaattaatctgt

SEQ ID NO: 850690 - DNA, 75 bp, synthetic construct
  source 1..75: mol_type = other DNA
ctgccacagcgatctggacagcaacattaccgcgctgactcgagcattcctgcgcggaccagacagatacttttg

SEQ ID NO: 850691 - DNA, 75 bp, synthetic construct
  source 1..75: mol_type = other DNA
tgaaatgggcgaactggcctatatggtgccggtgaaagaactgacgggaacggtcactttccgccatttgctgcg

SEQ ID NO: 850692 - DNA, 75 bp, synthetic construct
  source 1..75: mol_type = other DNA
ccgactggcaggccagccaggcgctcggcgtaacgcaacaaccggaatactggcagcatatgctcgacagttatg

SEQ ID NO: 850693 - DNA, 75 bp, synthetic construct
  source 1..75: mol_type = other DNA
gttaattggtgcagtattgtttatttacttaataatatgacagtaaatgataatgctaatgatgttgcagttact

SEQ ID NO: 850694 - DNA, 75 bp, synthetic construct
  source 1..75: mol_type = other DNA
ccagcatcgtattaatgaattaatagcgctagaaaaacaacttcaagaacttaatgatgtttgcaatgcagaccg

SEQ ID NO: 850695 - DNA, 75 bp, synthetic construct
  source 1..75: mol_type = other DNA
gccggtgggggtgtttggtcccggctggaaagcgcccttcgatatccgcttacagatacgcgatgaaggcctgat

SEQ ID NO: 850696 - DNA, 75 bp, synthetic construct
  source 1..75: mol_type = other DNA
ccagcaacatgctcattgaatctatctgttgtggtcaggatggctatgtttatatcggtgcgcaaagcggtactg

SEQ ID NO: 850697 - DNA, 75 bp, synthetic construct
  source 1..75: mol_type = other DNA
aatgaatttgcatcatcagaaaatatctacgcatcatcgaatttaggattcaatttatccggatggcgtttgcgt

SEQ ID NO: 850698 - DNA, 75 bp, synthetic construct
  source 1..75: mol_type = other DNA
tggtaaacatgatgtcgacttaaccaccatcgtttattcaccaccgctgaaggataactggcgcggttttgctgg

SEQ ID NO: 850699 - DNA, 75 bp, synthetic construct
  source 1..75: mol_type = other DNA
taccagatagttgggttgttgagggagtagactggccccctgaatctccagacaaccagtatcacttaaataagt

SEQ ID NO: 850700 - DNA, 75 bp, synthetic construct
  source 1..75: mol_type = other DNA
attgccccggagcgccgcgccaatccagcctgggcgcagaacaccgtcgatggcgacgagatcaacctgttcgat

SEQ ID NO: 850701 - DNA, 75 bp, synthetic construct
  source 1..75: mol_type = other DNA
agtctcttaccgcaccaaaccgatttttgaatcgctgtacctcggcatgccgtggaccgaaatcgactatttgat

SEQ ID NO: 850702 - DNA, 75 bp, synthetic construct
  source 1..75: mol_type = other DNA
aacaggcgcttcaggtaacaccgaaacattgggaagcttggctggcgcttaaaaaacggtgtgaatcagaggatt

SEQ ID NO: 850703 - DNA, 75 bp, synthetic construct
  source 1..75: mol_type = other DNA
aataagaaacatagtggagtgatctcgacagatcctataaccattgaatggatgaaggagcgaaccgggcttaca

SEQ ID NO: 850704 - DNA, 75 bp, synthetic construct
  source 1..75: mol_type = other DNA
cggttaaaaaacagatcgatgagtttatccgccgctgggacaacttcccgatagccccggaacgccgagccaatc

SEQ ID NO: 850705 - DNA, 75 bp, synthetic construct
  source 1..75: mol_type = other DNA
cctgccgcaggtgatgtgggcgctctcgtcgaaagtgaacccggcaggcgatctggtgcaactgccgaatatgtc

SEQ ID NO: 850706 - DNA, 75 bp, synthetic construct
  source 1..75: mol_type = other DNA
gcggatagtgaagaggaaagccgtataggtaaggcggcaggcgcaggtttgcttggtggattaatctttggtggt

SEQ ID NO: 850707 - DNA, 75 bp, synthetic construct
  source 1..75: mol_type = other DNA
atgaatgcgttattactccttgcggcactttccagtcagataacctttaatacgacccagcaaggggatatgtac

SEQ ID NO: 850708 - DNA, 75 bp, synthetic construct
  source 1..75: mol_type = other DNA
ctggcgctcaggatggggcgcacattgtcagagttacgccgggaaatgtccgcatcagaaatcatgatgtgggca

SEQ ID NO: 850709 - DNA, 75 bp, synthetic construct
  source 1..75: mol_type = other DNA
gtctcggcgggatgattctggataaattcctttccagtccctttacctgcgaagaatattcggcagcgattgaat

SEQ ID NO: 850710 - DNA, 75 bp, synthetic construct
  source 1..75: mol_type = other DNA
gttctatgctgtgacggattatcgcaaagagatcatctacccctctggaaagggggcgtccagtatgatcgcatc

SEQ ID NO: 850711 - DNA, 75 bp, synthetic construct
  source 1..75: mol_type = other DNA
aaaacagcggactactttatcttcgctagtagcagttcaaagcatcaggcgttctatgctgtgacggattatcgc

SEQ ID NO: 850712 - DNA, 75 bp, synthetic construct
  source 1..75: mol_type = other DNA
cgaatttacacaaatgaatcttgaacatatggtgaaactggatacaccattttcatttcgactttattcgtggtt

SEQ ID NO: 850713 - DNA, 75 bp, synthetic construct
  source 1..75: mol_type = other DNA
tacccgccaaccgttattgacagcattaacgccaaagtcacggcaaaccagaaaaccctgcaacgcgagcaggaa

SEQ ID NO: 850714 - DNA, 75 bp, synthetic construct
  source 1..75: mol_type = other DNA
gcgtggcgcaggcgtttgttgattacatggcgacgcagggtgttatcctcacgattcaacaacataaccaaagcg

SEQ ID NO: 850715 - DNA, 75 bp, synthetic construct
  source 1..75: mol_type = other DNA
cctctcatatgtgggtaagccggagtacccgtcaaccgttatcgacagcattaatgccaaagtcacggcgaacca

SEQ ID NO: 850716 - DNA, 75 bp, synthetic construct
  source 1..75: mol_type = other DNA
gtggtcgctgggcgtggtggcggaagtcattatctttgcgctgagtaataaacttttccgccgttgtagtgcacg

SEQ ID NO: 850717 - DNA, 75 bp, synthetic construct
  source 1..75: mol_type = other DNA
ggtcgccagaactggcgctttctggcctgcgtttgtttattgcagggggcacatgcggcctattacggttttagc

SEQ ID NO: 850718 - DNA, 75 bp, synthetic construct
  source 1..75: mol_type = other DNA
ggtaatgttggcatcaaggtaaataaactgggcgacgacaaaggcgtcggtgaggtggtcggtgttggtcgctac

SEQ ID NO: 850719 - DNA, 75 bp, synthetic construct
  source 1..75: mol_type = other DNA
aatcgaagggccgttcggtgagtttaccgggcactactccggcgggcgtaatatgaccgtcgtgcgcattgataa

SEQ ID NO: 850720 - DNA, 75 bp, synthetic construct
  source 1..75: mol_type = other DNA
agccaaccggtggtggatttaccggaaaccaaagcctgggctgaaaaactgaccactatgctggctgcacgtaaa

SEQ ID NO: 850721 - DNA, 75 bp, synthetic construct
  source 1..75: mol_type = other DNA
ttatacaggagttacgtattgcagcattgttacacgatgttgggcatggcccacttgcccaccaattcgatagtt

SEQ ID NO: 850722 - DNA, 75 bp, synthetic construct
  source 1..75: mol_type = other DNA
atgattaaaacaacgttactattttttgctactgcgctgtgtgaaattattggatgctttctgccctggctgtgg

SEQ ID NO: 850723 - DNA, 75 bp, synthetic construct
  source 1..75: mol_type = other DNA
gattgcgctttgcggcatgttgatcattgttgcgggctggggcgcacgtaggaacataaatccattttatcaata

SEQ ID NO: 850724 - DNA, 75 bp, synthetic construct
  source 1..75: mol_type = other DNA
tgtgtgcttctattgcggcggcatttggagctaacgctgcaaatcagtacagtccagcaggggtaacgacagcaa

SEQ ID NO: 850725 - DNA, 75 bp, synthetic construct
  source 1..75: mol_type = other DNA
actgaatgatgcgcttcttcagtgggagaaggagcagacagaaggcgtatcagatccatttgccggactggaaaa

SEQ ID NO: 850726 - DNA, 75 bp, synthetic construct
  source 1..75: mol_type = other DNA
tactgatgaagtacatgcccgtccggcgatggtgggattcttctttaccggcagcgctgtcattgggattctggt

SEQ ID NO: 850727 - DNA, 75 bp, synthetic construct
  source 1..75: mol_type = other DNA
agaagtggacccgtaagggacgcctgtcagacttcaaaacagcgtatcgcgtggggatgggcggttttggttctc

SEQ ID NO: 850728 - DNA, 75 bp, synthetic construct
  source 1..75: mol_type = other DNA
tatgcgcatcatcagcgccaaagatcacggtgactctttccgcaccctggaaagcggtcgtgccgttgcctttat

SEQ ID NO: 850729 - DNA, 75 bp, synthetic construct
  source 1..75: mol_type = other DNA
taccctggaaagcggtcgtgccgttgcctttatgatggatgacgctctgctggccggtgaacgtgcgaaagcgaa

SEQ ID NO: 850730 - DNA, 75 bp, synthetic construct
  source 1..75: mol_type = other DNA
atgcaattacgtaaacctgccacagcaatcctggccctggcgctttctgctggactggcacaggcagaagacgct

SEQ ID NO: 850731 - DNA, 75 bp, synthetic construct
  source 1..75: mol_type = other DNA
atcttattgcgaaggatatggacatggtggggcttgatgaagcccgtaagctgatgcgcctccaggaagacgcta

SEQ ID NO: 850732 - DNA, 75 bp, synthetic construct
  source 1..75: mol_type = other DNA
tgaattgtttggcacgttcaatggaagatataacgacctggctataagttgtcttgctgattcaggctgtagcgt

SEQ ID NO: 850733 - DNA, 75 bp, synthetic construct
  source 1..75: mol_type = other DNA
cgtgttgaatctatccgtctgcaagccggtaaagcaatggggttaggagatgtcagtaatatggtaattcctaaa

SEQ ID NO: 850734 - DNA, 75 bp, synthetic construct
  source 1..75: mol_type = other DNA
aaaggggcggatgcaaacgccggtgtcattaaccctatccagaactttgctgaggtgattgcagaagcgcgtctt

SEQ ID NO: 850735 - DNA, 75 bp, synthetic construct
  source 1..75: mol_type = other DNA
tctgccgcacatcgcgccattctgtcatcgtcatcactctttccgattgatggtggaggcactatcaatcagaac

SEQ ID NO: 850736 - DNA, 75 bp, synthetic construct
  source 1..75: mol_type = other DNA
atccgcgttatctggcggccagctggcaggcgggccataccggcagtggcctgcattatcgccgttatcctttct

SEQ ID NO: 850737 - DNA, 75 bp, synthetic construct
  source 1..75: mol_type = other DNA
gcctttatgatggatgacgccctgctggccggtgaacgtgcgaaagcgaagaagcctgataactgggaaatcgtc

SEQ ID NO: 850738 - DNA, 75 bp, synthetic construct
  source 1..75: mol_type = other DNA
cgaactggaagagcaggtgcgcaaaccaatgagcgaaatcgaaatggttgccgcgatggctcttgaagccgttcg

SEQ ID NO: 850739 - DNA, 75 bp, synthetic construct
  source 1..75: mol_type = other DNA
acaggccgtcctttggggtattacgttttcgaaggtgagcaggggaagcgggacagtataatcgttgttgcccgg

SEQ ID NO: 850740 - DNA, 75 bp, synthetic construct
  source 1..75: mol_type = other DNA
atgatcgttgatttttatcgccattttgatgatgtcgaacttcttgtctttcaggaagtgttcaacggtgtctgg

SEQ ID NO: 850741 - DNA, 75 bp, synthetic construct
  source 1..75: mol_type = other DNA
ttatggaggaagcagaaccgcgagggactcgctggtatcacccgagaatggggttatttcaggttattggttggc

SEQ ID NO: 850742 - DNA, 75 bp, synthetic construct
  source 1..75: mol_type = other DNA
gtatgtcagatgcgaaatgtcgcaatctggtgaacgcatatcagatccctaccgatacccatgaatttatgacgc

SEQ ID NO: 850743 - DNA, 75 bp, synthetic construct
  source 1..75: mol_type = other DNA
tcatgacgccggacggattgttgtcacgtcgagcaattgttgctgtggaaccgtttatggctgctttttatcggg

SEQ ID NO: 850744 - DNA, 75 bp, synthetic construct
  source 1..75: mol_type = other DNA
agcgggtgcgtcggcagtttattctgaccagcgcattgtgtggtctggtggtggtcagcctgattgcattgatga

SEQ ID NO: 850745 - DNA, 75 bp, synthetic construct
  source 1..75: mol_type = other DNA
tacacttgctggtcaaccgtaaggcgattaagaatctgcatatcagcgtgctgccgcctgatggcaaagtccgcg

SEQ ID NO: 850746 - DNA, 75 bp, synthetic construct
  source 1..75: mol_type = other DNA
ttctccgacactattttcgtggtcggtacgcgcctgctgacaaaaaaaggcggcgatattaaagattttgccgat

SEQ ID NO: 850747 - DNA, 75 bp, synthetic construct
  source 1..75: mol_type = other DNA
cggcgtcatcgtgatgtggaactgaccgctgccggggcgtggtttctcaaagaagggcgctctgttgtcaaaaaa

SEQ ID NO: 850748 - DNA, 75 bp, synthetic construct
  source 1..75: mol_type = other DNA
ttttgatgacgtcgaacttctggtttttcaggaggtgtttaacggtgtctgggatgcgctttccgacggacgtgt

SEQ ID NO: 850749 - DNA, 75 bp, synthetic construct
  source 1..75: mol_type = other DNA
acgttgccgaaacagttgagcaaatcaaaaagggcaccattcgtgagggctatgccggatatcgccaactgaaag

SEQ ID NO: 850750 - DNA, 75 bp, synthetic construct
  source 1..75: mol_type = other DNA
cagcaccaaaatatcgcgcattagacatgacagagcacgccttaaaggtggcaatcagaacgatagaccgccatg

SEQ ID NO: 850751 - DNA, 75 bp, synthetic construct
  source 1..75: mol_type = other DNA
cgcagagacagaacagagccaaaatataaagcgttagacatgacagagcacgccttaaaggtggcaatcagaacg

SEQ ID NO: 850752 - DNA, 75 bp, synthetic construct
  source 1..75: mol_type = other DNA
cggctgcaaactttgccacgctgacagaacgggagacagccgaggcagaacaggtaacaaccatcaacgttaaaa

SEQ ID NO: 850753 - DNA, 75 bp, synthetic construct
  source 1..75: mol_type = other DNA
atgacgatgtttaatccccctcatcccggagaaattattgctgatattctggaaggtcagaatattgggagcaga

SEQ ID NO: 850754 - DNA, 75 bp, synthetic construct
  source 1..75: mol_type = other DNA
atatctgatattgagcaatccattgaaattattgagaataatattaacagattaaaaaaagaagatattcatgaa

SEQ ID NO: 850755 - DNA, 75 bp, synthetic construct
  source 1..75: mol_type = other DNA
atcaatgacaatatcaaggatttgaaatcttggattaggaatgtaggacaaatcgccacatcaacacgagataag

SEQ ID NO: 850756 - DNA, 75 bp, synthetic construct
  source 1..75: mol_type = other DNA
ttgccactctgaccgaacgggagattgctgaagcggaggaagtgacaaccatcaatattaagtccggagagcagg

SEQ ID NO: 850757 - DNA, 75 bp, synthetic construct
  source 1..75: mol_type = other DNA
ttgccacgctgacagaacgggagattgccgaagcggaacaggtgacaaccatcaacgttaaaaccggagagcaga

SEQ ID NO: 850758 - DNA, 75 bp, synthetic construct
  source 1..75: mol_type = other DNA
cacgctgacagagcgggagattgccgaagcggaacaggtaacaaccatcaacgttaaaaccggagaggtggaatc

SEQ ID NO: 850759 - DNA, 75 bp, synthetic construct
  source 1..75: mol_type = other DNA
aactccccacctgtaacgaggtggggaagtgtaaaaagtggggcgcaaaagtggggagtgatggggaaatgacca

SEQ ID NO: 850760 - DNA, 75 bp, synthetic construct
  source 1..75: mol_type = other DNA
aacatataaagccacattaccgcgcccttgatatggctgaacactggctaagggtggcgattaaggcaatagacc

SEQ ID NO: 850761 - DNA, 75 bp, synthetic construct
  source 1..75: mol_type = other DNA
ttgccacgctgacagaacgggagattgccgaagcggaacaggtaacaaccatcaacgtaaaaaccggagagtcag

SEQ ID NO: 850762 - DNA, 75 bp, synthetic construct
  source 1..75: mol_type = other DNA
ggtgatgcaggctggcatagcgtcatcacaacgctggagtacaaagctgcgggaagaggcattcacctagtaaaa

SEQ ID NO: 850763 - DNA, 75 bp, synthetic construct
  source 1..75: mol_type = other DNA
tatttatactcgtgccatgcaaccacaacttgctgtggtgatggcggcattttttaacttttttggcgtgttatt

SEQ ID NO: 850764 - DNA, 75 bp, synthetic construct
  source 1..75: mol_type = other DNA
cgaaatgccgtgcggcgattgcagaacaggccaaagaagaacagtccgatgaagtcgcggcagatgtggaagcag

SEQ ID NO: 850765 - DNA, 75 bp, synthetic construct
  source 1..75: mol_type = other DNA
tacaaaatacatggttgtgtaaccgactcagacaacataattataacaagagacgactataataacttcaataat

SEQ ID NO: 850766 - DNA, 75 bp, synthetic construct
  source 1..75: mol_type = other DNA
gtcccattcgcgatccgcaggttatacgtgttctggaacgtatgaataatgaacgcaaacatcctccgcaggaac

SEQ ID NO: 850767 - DNA, 75 bp, synthetic construct
  source 1..75: mol_type = other DNA
gggagctgcaggcatccattgagcaggatattaaccagcccgtccgccaggaaatcgatgcctttttctgcgcat

SEQ ID NO: 850768 - DNA, 75 bp, synthetic construct
  source 1..75: mol_type = other DNA
tgttcaactttttgggtgttttgctgggtggtctgagtgttgcctatgccattgtgcatatgctgccgacggatc

SEQ ID NO: 850769 - DNA, 75 bp, synthetic construct
  source 1..75: mol_type = other DNA
ccgcttgcaaactatcagaagctggctccggtcaccgacaccttcctgttcgatatcaaacagatcgatagcaat

SEQ ID NO: 850770 - DNA, 75 bp, synthetic construct
  source 1..75: mol_type = other DNA
agactgcattggttgtcgcaagtgtgaagaaatttgcacccaaaatgcactggatatcatgggtaaagatgtcac

SEQ ID NO: 850771 - DNA, 75 bp, synthetic construct
  source 1..75: mol_type = other DNA
ggcgagggcattctgacgaccatctatggcattctggtgtttttaccgtggtgggcggttcagttccgtcgcctg

SEQ ID NO: 850772 - DNA, 75 bp, synthetic construct
  source 1..75: mol_type = other DNA
aagaggtgatgacccgcactgtgaaaatcagcggtgtgggacgtccgtatctggcagaggaaggcaccgggcttg

SEQ ID NO: 850773 - DNA, 75 bp, synthetic construct
  source 1..75: mol_type = other DNA
agtccagatcaaattgactttaatgatgaaattaaccatgaaaatattaatcaaaaggttgatgggttagatact

SEQ ID NO: 850774 - DNA, 75 bp, synthetic construct
  source 1..75: mol_type = other DNA
ctatttcagtacaacatgttgatttaaatgtaaagtgttgggtcgttagacctgggattaagtatagatattttg

SEQ ID NO: 850775 - DNA, 75 bp, synthetic construct
  source 1..75: mol_type = other DNA
ggcgaaggcgatgcctggatccctccgcataccggactgcctgcgcactcaacggacattgccccgcctgacatt

SEQ ID NO: 850776 - DNA, 75 bp, synthetic construct
  source 1..75: mol_type = other DNA
gctacgccactttaaggatacctccacgctgtatctggaaattgtggattatcccggcgaatggttgctcgacct

SEQ ID NO: 850777 - DNA, 75 bp, synthetic construct
  source 1..75: mol_type = other DNA
cccgcgctgcaattcttcccgtggccggatgtcgatgcctggggcgagtccaaactggcgcaggccgataagcac

SEQ ID NO: 850778 - DNA, 75 bp, synthetic construct
  source 1..75: mol_type = other DNA
cggtgaatgcctcccgttaaaaaaagtatcgctgtacctgaataacgaaacaccggctgggataacccgccagcc

SEQ ID NO: 850779 - DNA, 75 bp, synthetic construct
  source 1..75: mol_type = other DNA
attgttaaacgcatacagctctcagccgaccatggcgatttgcagttaagcggtgcatcgatttatttcaaagcc

SEQ ID NO: 850780 - DNA, 75 bp, synthetic construct
  source 1..75: mol_type = other DNA
ggactggcctcagtacaggcgaccaccagcggcatcatcgacgtcaacggtgagaaaatcccggctctgcgcggt

SEQ ID NO: 850781 - DNA, 75 bp, synthetic construct
  source 1..75: mol_type = other DNA
caacagtggtccgcaggcttttaacgatatgcgcctggcgctgacgcaactgatgcagagttttcattatgggca

SEQ ID NO: 850782 - DNA, 75 bp, synthetic construct
  source 1..75: mol_type = other DNA
cggacaggctgatgccattcgcacaaaagcccaggctgaagccgacgccattcgtttgcgcggtgaagctctgcg

SEQ ID NO: 850783 - DNA, 75 bp, synthetic construct
  source 1..75: mol_type = other DNA
ggtaatgtgggcatcaaagtaaacaaactgggcgacgataaaggcgtcggtgaagtggtcggtgttgggcgctac

SEQ ID NO: 850784 - DNA, 75 bp, synthetic construct
  source 1..75: mol_type = other DNA
tgggcaagctgaagaaaagtgttcgcggactggtggttgtgcacccaatgaccgcgctgggccgcgaaatgggcc

SEQ ID NO: 850785 - DNA, 75 bp, synthetic construct
  source 1..75: mol_type = other DNA
tgacataagtatacctgttggtcatggaggagtttctgccggatggcgtgctgaactttcggcagcagccacgca

SEQ ID NO: 850786 - DNA, 75 bp, synthetic construct
  source 1..75: mol_type = other DNA
ttatcccgctttttgccgccatcctgctggttggttgcgatcgcgttgagccaggtaatgtgggcatcaaagtca

SEQ ID NO: 850787 - DNA, 75 bp, synthetic construct
  source 1..75: mol_type = other DNA
gaagcaatcaacaaatggaacggcacgctgccgcaatacatgaccagcaataccgctgttccgtttgttccggtg

SEQ ID NO: 850788 - DNA, 75 bp, synthetic construct
  source 1..75: mol_type = other DNA
acccccgagtggcgcaggcgtttgttgattacatggcgacgcagggtgttatcctcacgattcaacaacataacc

SEQ ID NO: 850789 - DNA, 75 bp, synthetic construct
  source 1..75: mol_type = other DNA
cgccaagagcgtgaaatttaaatatccgcgtcagcgtaaaacggtcgtcgccgatggtgtgggtcagggttataa

SEQ ID NO: 850790 - DNA, 75 bp, synthetic construct
  source 1..75: mol_type = other DNA
ccatgcaaatgcttggtggcaagcaaggaggcaatgaacagtcttcacctcagcgaaataacggccagcaacaaa

SEQ ID NO: 850791 - DNA, 75 bp, synthetic construct
  source 1..75: mol_type = other DNA
tcattatcggtagattaggccaagatcctgaggtgcgctattcaccatcaggaacggcatttgcaaaccttacag

SEQ ID NO: 850792 - DNA, 75 bp, synthetic construct
  source 1..75: mol_type = other DNA
caaaattattattaccgggcataccgatgcgatggcctacaaaaacaatatctacaacaactggaacctttcggg

SEQ ID NO: 850793 - DNA, 75 bp, synthetic construct
  source 1..75: mol_type = other DNA
agcgaatctggagatggagattgtcccgcagggattacgcgtgctgattaaagacgaccagaatcgcaatatgtt

SEQ ID NO: 850794 - DNA, 75 bp, synthetic construct
  source 1..75: mol_type = other DNA
agacgccggaatgccggaagataaagtgatgcaggtaagcgcgatggcggaccagatgctgctggacgccaaaaa

SEQ ID NO: 850795 - DNA, 75 bp, synthetic construct
  source 1..75: mol_type = other DNA
gcaaaaagtgatggatctcaattcacccagggtcaaccggacacagttggttgagtcgattaatatggcaaaact

SEQ ID NO: 850796 - DNA, 75 bp, synthetic construct
  source 1..75: mol_type = other DNA
tatgccagcaaagaatcctgcctccaggcaagagacgagcaaaaaatttctggtgaatgcctcccggtaaaaaaa

SEQ ID NO: 850797 - DNA, 75 bp, synthetic construct
  source 1..75: mol_type = other DNA
gcggagcgcaaatcgtcaccgtcgcgatgggatcgccaaagcaggagatcttcatgcgcgactgccgtctggtgc

SEQ ID NO: 850798 - DNA, 75 bp, synthetic construct
  source 1..75: mol_type = other DNA
aggcaaaagacgagcaaaaaatttccggtgaatgtctcccgttaaacaaagtatcgctgtacctgaataacgaaa

SEQ ID NO: 850799 - DNA, 75 bp, synthetic construct
  source 1..75: mol_type = other DNA
gctgctggcataccgccaggcgttacgactgcgcggcgaaaatgctgaattatacgcggcgttggcaacggtgct

SEQ ID NO: 850800 - DNA, 75 bp, synthetic construct
  source 1..75: mol_type = other DNA
aaatgctgacaacactcacgattttgatggtatttctctgtatcggcggttatctgctaagtccgaaatgggcgg

SEQ ID NO: 850801 - DNA, 75 bp, synthetic construct
  source 1..75: mol_type = other DNA
tactttcgagcatagatgatgctttcactcctaacaaacaagtgaatcatataaatgtagttgaagaacatagaa

SEQ ID NO: 850802 - DNA, 75 bp, synthetic construct
  source 1..75: mol_type = other DNA
atttgaattgttgcaggcgcgtcaggtaattgagagcaatattacaggctttgcggcccgtcagatcagttttaa

SEQ ID NO: 850803 - DNA, 75 bp, synthetic construct
  source 1..75: mol_type = other DNA
tctgatcaaggctggcggcgtagatccggaacgcgggagctacgttgatattgtggtcaagcgcggcaaccgcgt

SEQ ID NO: 850804 - DNA, 75 bp, synthetic construct
  source 1..75: mol_type = other DNA
ttgaagcagtgtatgagtcagtcaacgttgccactgcccgctgggtagaatgcgcggacgcaaagaaattcgaag

SEQ ID NO: 850805 - DNA, 75 bp, synthetic construct
  source 1..75: mol_type = other DNA
gaaaaaggcatgaagctgcgccaggtgcgcaccgcgaaagatgtggtgatctccgacgcgctgacctttatggcg

SEQ ID NO: 850806 - DNA, 75 bp, synthetic construct
  source 1..75: mol_type = other DNA
caggaagtccgcattgttaaagggctgaataacccggatctcgacgctgcggttggtgaagatctggcacagcag

SEQ ID NO: 850807 - DNA, 75 bp, synthetic construct
  source 1..75: mol_type = other DNA
gagttctgggtgcttattcctctggtgttaagtggatggggactctcgtggggatattacacaacattatttact

SEQ ID NO: 850808 - DNA, 75 bp, synthetic construct
  source 1..75: mol_type = other DNA
gtgtgttcggcacattatatatgcaaaaaatttatgagttcttcgaagagccaaaacttttctctgtgtctaatg

SEQ ID NO: 850809 - DNA, 75 bp, synthetic construct
  source 1..75: mol_type = other DNA
ccctgctgctctccaccgcggcggcgattatcgtcacccgcgtcagcgataacggtgatatcgcccatgacgtgc

SEQ ID NO: 850810 - DNA, 75 bp, synthetic construct
  source 1..75: mol_type = other DNA
aagtgatcctcaacgaatccaatattgattctgttctgcttgaagatggcgacgtcatcaatattccggagaaaa

SEQ ID NO: 850811 - DNA, 75 bp, synthetic construct
  source 1..75: mol_type = other DNA
actttcagcgttcagggcgatgtctttaacagctacgactttgagttccgcgaaagcagcattcccgtaacagaa

SEQ ID NO: 850812 - DNA, 75 bp, synthetic construct
  source 1..75: mol_type = other DNA
gaatactgtgtcagagttctggttacttattcctctggtattaagtgggtggggtatctcatggggatattacac

SEQ ID NO: 850813 - DNA, 75 bp, synthetic construct
  source 1..75: mol_type = other DNA
ctgcacaaccacggcaccattcagatcggcgacacctttacccagggtgagatgatgaagttcaccggtattccg

SEQ ID NO: 850814 - DNA, 75 bp, synthetic construct
  source 1..75: mol_type = other DNA
atgagtaatgacctgttaccacccagcgccagccgaatggagcgcgtcgccgcgcgcgtctgtgcgtcgttgggt

SEQ ID NO: 850815 - DNA, 75 bp, synthetic construct
  source 1..75: mol_type = other DNA
atttcaatcggttattcgttagcaatattcttatggggcgtcagcactaactggcagcaggtattaagtaatggt

SEQ ID NO: 850816 - DNA, 75 bp, synthetic construct
  source 1..75: mol_type = other DNA
ttctctctgttagcgatggcgatttaccagaactattgcagccgcatggcgagtcagcctgagttaactttagat

SEQ ID NO: 850817 - DNA, 75 bp, synthetic construct
  source 1..75: mol_type = other DNA
gccgctcggctatctgattgaagtgagggagtggtggcagctcaacgaggagccggggacgttccgtatcgttgt

SEQ ID NO: 850818 - DNA, 75 bp, synthetic construct
  source 1..75: mol_type = other DNA
taggtgcaatccggcgtgtggtggagccgctgggctatctcatcaacgtgacggagtggtgggaaaacagtgacc

SEQ ID NO: 850819 - DNA, 75 bp, synthetic construct
  source 1..75: mol_type = other DNA
cgccaggcaccttccggcttgatattggtgtactggaaagcggcatcacggaggcaatgtatcaggaaatggaac

SEQ ID NO: 850820 - DNA, 75 bp, synthetic construct
  source 1..75: mol_type = other DNA
cgcggcggcggataccgtgcgtaaactgcgttttctcgataaactgcggagcagtgccgaacaactcgaagaaaa

SEQ ID NO: 850821 - DNA, 75 bp, synthetic construct
  source 1..75: mol_type = other DNA
cggaagagctggcccgtgaagcattcaagctggcagcagcgaaactgccgattaaaaccacctttgtaactaaga

SEQ ID NO: 850822 - DNA, 75 bp, synthetic construct
  source 1..75: mol_type = other DNA
gctgctgttcggacaggccattcagaccgccggtacagtaaaaggccgtggctctaaccagcacgctaagtcgga

SEQ ID NO: 850823 - DNA, 75 bp, synthetic construct
  source 1..75: mol_type = other DNA
agaacgacctcgtaaaaaagtagatcgctgtgatgtttgtactgaaggggctcgcggtgggtgtggaacgtgtat

SEQ ID NO: 850824 - DNA, 75 bp, synthetic construct
  source 1..75: mol_type = other DNA
atgttaatcaataagaggatcgattatgaaggtgggggtaaaagaaataagcacgcagaggacttcagaaaaata

SEQ ID NO: 850825 - DNA, 75 bp, synthetic construct
  source 1..75: mol_type = other DNA
aagacgtcttttattcttacagtggtgggtgttgttatttcatatctttcttcagataagtttatgcccgttaag

SEQ ID NO: 850826 - DNA, 75 bp, synthetic construct
  source 1..75: mol_type = other DNA
ccttccctgctgctctccaccgcagcggcgattatcgtcacccgcgtcagcgataatggcgatattgcccatgac

SEQ ID NO: 850827 - DNA, 75 bp, synthetic construct
  source 1..75: mol_type = other DNA
gaatggtctctgcaacgttgctggcaatcttcttcgtgccagtgttctttgtggtgatccgtcgatgctttaaag

SEQ ID NO: 850828 - DNA, 75 bp, synthetic construct
  source 1..75: mol_type = other DNA
ctgcgcgtgaacagcgacggttcagtggttcgcctgaaagatgtcgcccgtgttgagcttggtggtgaaaactat

SEQ ID NO: 850829 - DNA, 75 bp, synthetic construct
  source 1..75: mol_type = other DNA
accgcaggctcaggcaatggcggcacagcatctgatacgacaccaacgccgggatcgctattcggtggttccagt

SEQ ID NO: 850830 - DNA, 75 bp, synthetic construct
  source 1..75: mol_type = other DNA
tcggtgtactgctggctgcaacactctttaatcagaaaaatgacgtttattttatggtgggcttgttaacgacaa

SEQ ID NO: 850831 - DNA, 75 bp, synthetic construct
  source 1..75: mol_type = other DNA
atcgggtaaccaggctcctgccctggtagcaatctccttcctggtggttttcctgtgccttgcggcgctctatga

SEQ ID NO: 850832 - DNA, 75 bp, synthetic construct
  source 1..75: mol_type = other DNA
ctgacagcttagtcagtgtacgtcccaatggtctggaagataccgcgcagttcaaacttgaagttgaccaggaaa

SEQ ID NO: 850833 - DNA, 75 bp, synthetic construct
  source 1..75: mol_type = other DNA
tggagatgccaaaaaggcgaatgctgaactcggtctgctggtggattcacatgctgctgtggtttcgaaaatggg

SEQ ID NO: 850834 - DNA, 75 bp, synthetic construct
  source 1..75: mol_type = other DNA
tacagccatactttaaaaatgttattgatattagtaagttcgattactttgtttctttcgattatcgtgatggtg

SEQ ID NO: 850835 - DNA, 75 bp, synthetic construct
  source 1..75: mol_type = other DNA
acgcagctccaccttggacattccgcgacaaagcaaccgatggtcaacgcggtgcaagttttaaatatccggtca

SEQ ID NO: 850836 - DNA, 75 bp, synthetic construct
  source 1..75: mol_type = other DNA
aacttcagcttaaccagtgaaaaatcaggcgttacctcactactggattcggtagcgagtcagttgcatcgggat

SEQ ID NO: 850837 - DNA, 75 bp, synthetic construct
  source 1..75: mol_type = other DNA
tacagccacactttaaaaatgtaatcgatattagtaaatttgattactttgtatcctttgtttaccgggatggta

SEQ ID NO: 850838 - DNA, 75 bp, synthetic construct
  source 1..75: mol_type = other DNA
gcgcgaagaatggctggcatcgttaccagtggcagagcaagctacagcacgtctttcaggtcgccagccaccgat

SEQ ID NO: 850839 - DNA, 75 bp, synthetic construct
  source 1..75: mol_type = other DNA
tcagacgcggttaaaaaatccggaagaattcggcaaagtgaccctgcgcgtaaacagtgacggctcggtggtacg

SEQ ID NO: 850840 - DNA, 75 bp, synthetic construct
  source 1..75: mol_type = other DNA
cggctctacgctggtgggcgacatcgtacagaactggctggagaatggtcgggatttacctaccatcgctttctg

SEQ ID NO: 850841 - DNA, 75 bp, synthetic construct
  source 1..75: mol_type = other DNA
tcgccgggatgatgattctggcgatcaacctgatcggcggcgtctgtattgggatcttcaaatacaacctgagcg

SEQ ID NO: 850842 - DNA, 75 bp, synthetic construct
  source 1..75: mol_type = other DNA
cggcgtctgtatcgggatcttcaaatacaacctgagcgccgacgccgccttccagcagtatgtgctgatgaccat

SEQ ID NO: 850843 - DNA, 75 bp, synthetic construct
  source 1..75: mol_type = other DNA
cgtggcgaactgagcaattacgaattttatgcgcccacgaaaccggatctggaaggtgtaaaaacgaaagtctca

SEQ ID NO: 850844 - DNA, 75 bp, synthetic construct
  source 1..75: mol_type = other DNA
gggtgaccgttgaagtcatgacggcaagcacaccccatgaagaacgtcagttaacgatccgtcgcttcgagcagg

SEQ ID NO: 850845 - DNA, 75 bp, synthetic construct
  source 1..75: mol_type = other DNA
ggtgtgctcacactttccgggaaaagttcggtgagtggcctgacggactgagtaactttccgatggaaattaccc

SEQ ID NO: 850846 - DNA, 75 bp, synthetic construct
  source 1..75: mol_type = other DNA
gctgacccgcaccatcactgaaaccagcgagcaacaggtcagttgggaaaccattccgctcattgagcctatcag

SEQ ID NO: 850847 - DNA, 75 bp, synthetic construct
  source 1..75: mol_type = other DNA
gggttgatcaatcaggcgcaggcacaaacccgacgtaaagatgttgccagcgaggccgatttctacggcgagata

SEQ ID NO: 850848 - DNA, 75 bp, synthetic construct
  source 1..75: mol_type = other DNA
ttgatggaaaaagaaggcaaaggcatcatcgaagcgacactgatgtcagtacgaatgcgtctgcgccctatactg

SEQ ID NO: 850849 - DNA, 75 bp, synthetic construct
  source 1..75: mol_type = other DNA
tcgcgctgctgcgcggcggcaatcttggcgtgccgctggtgatcctgtgtattctggcgatggttattttgccgc

SEQ ID NO: 850850 - DNA, 75 bp, synthetic construct
  source 1..75: mol_type = other DNA
aacggcgatatcgcccatgacgtgcgccaccagctgctggcaagcccgtcggtgctctacaccgccaccgggatc

SEQ ID NO: 850851 - DNA, 75 bp, synthetic construct
  source 1..75: mol_type = other DNA
tctggcgatcaacctgatcggcggcgtctatatcgggatcttcaaatacaacctgagcgccgatgccgccttcca

SEQ ID NO: 850852 - DNA, 75 bp, synthetic construct
  source 1..75: mol_type = other DNA
gttgaagtgatggggctctgtgcgcagttcacctcgggggcacagtgtggcagcgaagttcagggggtttttgac

SEQ ID NO: 850853 - DNA, 75 bp, synthetic construct
  source 1..75: mol_type = other DNA
atgcgtgattttcagaatgccttcgatgctgcccttgccggggtggacagcacgattgttgaagtgatgggcatc

SEQ ID NO: 850854 - DNA, 75 bp, synthetic construct
  source 1..75: mol_type = other DNA
tcggcggtatgctgctgccacttccgctgatgttgttaattattggcgctggcctggcgctgctgtggtttagcc

SEQ ID NO: 850855 - DNA, 75 bp, synthetic construct
  source 1..75: mol_type = other DNA
gaatattaaactgattgatacttcgaaaacaaagtctaatcctgactatgaagttgaggtcggagagtttactgt

SEQ ID NO: 850856 - DNA, 75 bp, synthetic construct
  source 1..75: mol_type = other DNA
tcaggatggaaaattacaaataattgaaataaaaaagccacatcattatatttccaatgatgaaatggatcgtat

SEQ ID NO: 850857 - DNA, 75 bp, synthetic construct
  source 1..75: mol_type = other DNA
tatgccttgcaacatggtgaagatttacaggggatgtttaaggatgaaaaatatgaatatatgtcctgttttgtt

SEQ ID NO: 850858 - DNA, 75 bp, synthetic construct
  source 1..75: mol_type = other DNA
gttgaagtgatgggcatcagtgcgcagttcacctccggtgcacagcgtggcggcgaggttcatggcgtttttgac

SEQ ID NO: 850859 - DNA, 75 bp, synthetic construct
  source 1..75: mol_type = other DNA
atgaacagtatttccgtttccaccccggcaccagctgctccggtgcttccggctccggctcagcaggaacgcttc

SEQ ID NO: 850860 - DNA, 75 bp, synthetic construct
  source 1..75: mol_type = other DNA
atgacaactaacaaccacccggcgcacggtcctgtatcactcgatcgcctgcaccagatacgtgaaatactcagc

SEQ ID NO: 850861 - DNA, 75 bp, synthetic construct
  source 1..75: mol_type = other DNA
ggcctggcgctgctgtggtttagccgttttcaaaaaaccgggaagatttttattagcattgggtggctggcactc

SEQ ID NO: 850862 - DNA, 75 bp, synthetic construct
  source 1..75: mol_type = other DNA
attgaaggaagctgcccgtcattatttgtacggacggatacggttcgtgctgtgcggcgtggtgacacgctgacc

SEQ ID NO: 850863 - DNA, 75 bp, synthetic construct
  source 1..75: mol_type = other DNA
atgcgtgattttcagaatgcctttgatgctgccctcgccggggtagacagtacgatcgttgaagtgatgggactc

SEQ ID NO: 850864 - DNA, 75 bp, synthetic construct
  source 1..75: mol_type = other DNA
tgcaggggcgcttacaagcggctccagcacatataagtacggccacagcaagcgcggctcctcgaatttcagcta

SEQ ID NO: 850865 - DNA, 75 bp, synthetic construct
  source 1..75: mol_type = other DNA
tgttgtcttttttagttccgtcagcgtggggatgctcgctcggtgaacctgatcataatgtttaccagaaacagg

SEQ ID NO: 850866 - DNA, 75 bp, synthetic construct
  source 1..75: mol_type = other DNA
gtgaaatcgtccgccaggatgcgcggcgcattgcggcggcgctggcgccgtctgctggaaaagcgcatcgggaac

SEQ ID NO: 850867 - DNA, 75 bp, synthetic construct
  source 1..75: mol_type = other DNA
gttactggagcagcgcatcagcgaactggaagcgcgcaataatccgatagcagaacttcaatctcctccggctat

SEQ ID NO: 850868 - DNA, 75 bp, synthetic construct
  source 1..75: mol_type = other DNA
gtacgaaggtagcgccagaattgacggcgtgccaggaactgccgcaccggtcgcgctcactttcctgaatgccgc

SEQ ID NO: 850869 - DNA, 75 bp, synthetic construct
  source 1..75: mol_type = other DNA
taccacgcctaactgcggcaatatgctgtctggtgttggggcattcgccattgaaaatggtttgattgcagcgac

SEQ ID NO: 850870 - DNA, 75 bp, synthetic construct
  source 1..75: mol_type = other DNA
ccgatcaagacaaatatattatctggctgaagcaggctgaatcattctgttctgccgctggtttggattacatag

SEQ ID NO: 850871 - DNA, 75 bp, synthetic construct
  source 1..75: mol_type = other DNA
gttactggaacaacgcctcagtgaactggaagcacgcagcatcccggtagcagaagcacagactccaccggttga

SEQ ID NO: 850872 - DNA, 75 bp, synthetic construct
  source 1..75: mol_type = other DNA
acacatatcgcaaatccaggaaccgctcgctaccagcagttcgatgataatccggttaagcaggtagcgcaaaac

SEQ ID NO: 850873 - DNA, 75 bp, synthetic construct
  source 1..75: mol_type = other DNA
tgccgcgcagcaagctgcaataaaagaggctgagcaaagcgccgccgccgcgaaagccttggcccagcaagaagt

SEQ ID NO: 850874 - DNA, 75 bp, synthetic construct
  source 1..75: mol_type = other DNA
gttactggaacaacgcatcagcgaactggaagcgcgcaataatccggtagcagaacttcaatctcctccagctat

SEQ ID NO: 850875 - DNA, 75 bp, synthetic construct
  source 1..75: mol_type = other DNA
tgcccggtcctgctcaccctggttaacgagcgggaggaaactatcaggagcgcaggggttatcgctgatcagctg

SEQ ID NO: 850876 - DNA, 75 bp, synthetic construct
  source 1..75: mol_type = other DNA
gtggaaatcctcacgcttacggaacagctttgtcagccgctgacgtatggccgggcagcgttgttgctcgccagc

SEQ ID NO: 850877 - DNA, 75 bp, synthetic construct
  source 1..75: mol_type = other DNA
ttcccgaagcagatcccgcttgggggtaaaaatgtggcctgggcacagtctgaggtcaacgcatggatgtcggac

SEQ ID NO: 850878 - DNA, 75 bp, synthetic construct
  source 1..75: mol_type = other DNA
caaccagtgagaatcctagcagttcatcggtcagtggcgaaacaaatataacattacaatttacggaaaaaagaa

SEQ ID NO: 850879 - DNA, 75 bp, synthetic construct
  source 1..75: mol_type = other DNA
atgagcttgcgcgaaattgccacgcaaattgtcgcgccaagagccgttacgattggtcttttgtatgcgcttaaa

SEQ ID NO: 850880 - DNA, 75 bp, synthetic construct
  source 1..75: mol_type = other DNA
gcgctggccagactgtcagggtttcgtcataaaacggtgaaggtgccggaatggggtaatgtcagcgtggtgctg

SEQ ID NO: 850881 - DNA, 75 bp, synthetic construct
  source 1..75: mol_type = other DNA
caggatgtgcaggagctgcgcgctgcaaccctgggcgatgcgcgtaccgttgatatggtgtttgggctgtaccgg

SEQ ID NO: 850882 - DNA, 75 bp, synthetic construct
  source 1..75: mol_type = other DNA
atgaaaatgacacggctttatcctctggccttggggggattattgctccccgccattgctaatgcccagacttca

SEQ ID NO: 850883 - DNA, 75 bp, synthetic construct
  source 1..75: mol_type = other DNA
gcaagtttatatttatatattcctgctggcgaactaaaaaatttaccttttggtggtatctgggatgctactctg

SEQ ID NO: 850884 - DNA, 75 bp, synthetic construct
  source 1..75: mol_type = other DNA
cacgtaccggcaactggccgctgtgggtgctgacggcactgtttggttttgctgctgtgctgatgagcctgcgtc

SEQ ID NO: 850885 - DNA, 75 bp, synthetic construct
  source 1..75: mol_type = other DNA
ctgcgtccgttagcaccgttctttgatttgccgatgtcttcattcagccgcggaccatatattcagccaccgctg

SEQ ID NO: 850886 - DNA, 75 bp, synthetic construct
  source 1..75: mol_type = other DNA
gttacatccaatggtttaccccgcaaccggagaaaaccattcaggtttcgatggttcagggcgatattccgcaat

SEQ ID NO: 850887 - DNA, 75 bp, synthetic construct
  source 1..75: mol_type = other DNA
cagcacagcacgcccaatcaacaaaaaccattaattccaaagcggctggtcgtcttctcgcagctggcgggcttt

SEQ ID NO: 850888 - DNA, 75 bp, synthetic construct
  source 1..75: mol_type = other DNA
tatgtcagtatcgcgacctttggcggaatgcctggcccagttaatgtcttcctggtggtactgctggccgcatat

SEQ ID NO: 850889 - DNA, 75 bp, synthetic construct
  source 1..75: mol_type = other DNA
tgggccatatatccagccaccgctgtcggtaaatggtattgagcttactgcggctatttgctacgagatcattct

SEQ ID NO: 850890 - DNA, 75 bp, synthetic construct
  source 1..75: mol_type = other DNA
aaggactatgttgcaggatacacaacatcacatacgagttataatggaattagctttctttgtcagtcctccaat

SEQ ID NO: 850891 - DNA, 75 bp, synthetic construct
  source 1..75: mol_type = other DNA
cactattgaagtagtcagtaagttaaccgttatggtaatatttatgtgccatatattcagtgcgctacgagtaac

SEQ ID NO: 850892 - DNA, 75 bp, synthetic construct
  source 1..75: mol_type = other DNA
aatatttatgtgccatattttcagtgcactacgagtaacaaagaacattgcccatcgcgatccattaactaatat

SEQ ID NO: 850893 - DNA, 75 bp, synthetic construct
  source 1..75: mol_type = other DNA
taccataatgattttcatgtggttaaccttgctttcggttaatctatactttaatggtttacgctgtgatatctg

SEQ ID NO: 850894 - DNA, 75 bp, synthetic construct
  source 1..75: mol_type = other DNA
tatgtgccatatattcagtgcgctacgagtaacaaagaacattgcacatcgcgatcccttaaccaatatatttaa

SEQ ID NO: 850895 - DNA, 75 bp, synthetic construct
  source 1..75: mol_type = other DNA
atggaaaaagactatttgggaattagtagtactgtattagtgagcttattgtttgggcttgctttggttttggtg

SEQ ID NO: 850896 - DNA, 75 bp, synthetic construct
  source 1..75: mol_type = other DNA
tgagaaaatcccggcgctgcgcggtaatcgactcagtgatggcgcaccgctcactgtttatcctggcgaagttcc

SEQ ID NO: 850897 - DNA, 75 bp, synthetic construct
  source 1..75: mol_type = other DNA
tacgttttaaatcgaacgattcgctgctacgccactttaaggacacctccacgctgtatctggagattgtggatt

SEQ ID NO: 850898 - DNA, 75 bp, synthetic construct
  source 1..75: mol_type = other DNA
gcgcagcggataacctggaggcggcgatcaaaggtaagccactgacggatgtctggtttgccttcccgcagttaa

SEQ ID NO: 850899 - DNA, 75 bp, synthetic construct
  source 1..75: mol_type = other DNA
gcactttacgaggcgaaagagaccgggcgtaataaggtggttgtgagggatgtggtgaatttttgtgagtcacca

SEQ ID NO: 850900 - DNA, 75 bp, synthetic construct
  source 1..75: mol_type = other DNA
gttttaattattactgcgagaaggtggtgaaaggattctataaaaatcacttcctgcgttttgaccgccagattg

SEQ ID NO: 850901 - DNA, 75 bp, synthetic construct
  source 1..75: mol_type = other DNA
tcactgtttatcctggcgaagttcccgcacgtttgcctggtcaggcgttctgggataagcaaggcttccagtttg

SEQ ID NO: 850902 - DNA, 75 bp, synthetic construct
  source 1..75: mol_type = other DNA
gttaaaacacttaacgaaggcgtcaaaaaaatgtgcctggtgcatatcggaaagaatctgcccgcagaaaaaaaa

SEQ ID NO: 850903 - DNA, 75 bp, synthetic construct
  source 1..75: mol_type = other DNA
atgagaaagaaaaaccaacgaaataaatggcaaacacttccgggtatggttgcattgctgtgcggtctggctggt

SEQ ID NO: 850904 - DNA, 75 bp, synthetic construct
  source 1..75: mol_type = other DNA
cccgtgcagaaaccctgttacccggagcgaccaccgatgtctgggtgatggtcggacagacggaggcgcgggatg

SEQ ID NO: 850905 - DNA, 75 bp, synthetic construct
  source 1..75: mol_type = other DNA
ctgacgttccgggggatgcgtgttctggtgccatcaccactggcgacagccatgatacagcacggaacggctgat

SEQ ID NO: 850906 - DNA, 75 bp, synthetic construct
  source 1..75: mol_type = other DNA
aaatgaaatgcacaagatataaagtgcgtgaggatgttatggatcagatcgtccaggaaggcggtctggaatatg

SEQ ID NO: 850907 - DNA, 75 bp, synthetic construct
  source 1..75: mol_type = other DNA
atgagacactttatctatcaggatgaaaaatcacataaattctggacggtggagcaacagggaaacgagttgcat

SEQ ID NO: 850908 - DNA, 75 bp, synthetic construct
  source 1..75: mol_type = other DNA
agtgcctgcaagtgatggggtattgcccggagacaggtcgtcccgttgagctggcgttacggggtatgcgtgttc

SEQ ID NO: 850909 - DNA, 75 bp, synthetic construct
  source 1..75: mol_type = other DNA
atgcccccgtgtcttttttcacagggggctgagatggcaacaaaagaagaaaatctgaatcgtcttcgtcaactg

SEQ ID NO: 850910 - DNA, 75 bp, synthetic construct
  source 1..75: mol_type = other DNA
gttgaacaacacggatgctccggatgatgttaaagccgtccgtgtgcgcaagtgcctgcatgtgatggggtattg

SEQ ID NO: 850911 - DNA, 75 bp, synthetic construct
  source 1..75: mol_type = other DNA
gttgtggctgacgccgttgatttctgccatcggcgtggtggcgctggtggtgttaattcgccacccgttgatgcc

SEQ ID NO: 850912 - DNA, 75 bp, synthetic construct
  source 1..75: mol_type = other DNA
gcttcgggatgatgtaaatgccctcactgttgcattttcatatctggccttctcaattcccagagaacaaatgca

SEQ ID NO: 850913 - DNA, 75 bp, synthetic construct
  source 1..75: mol_type = other DNA
caaaatcacacagacgatggtgagcagttgcacaacactgatgctacggatgatgttaaagcggtccgtgtgcgg

SEQ ID NO: 850914 - DNA, 75 bp, synthetic construct
  source 1..75: mol_type = other DNA
atggcaacaaaagaagaaaatctgaatcgccttcgtgaactgtctggcctgctggggcgagaggcggatatgtcg

SEQ ID NO: 850915 - DNA, 75 bp, synthetic construct
  source 1..75: mol_type = other DNA
ggtggaggccgcctgtcagcccgcgcgaaaacccctggcaggctgacgcctgccggaagggaagcgggccacgct

SEQ ID NO: 850916 - DNA, 75 bp, synthetic construct
  source 1..75: mol_type = other DNA
cgctcacgcgtaaacaatgcgctgtggtcgcgggaatctttgctgttagcgaacaacgttttgctggtcgccgcg

SEQ ID NO: 850917 - DNA, 75 bp, synthetic construct
  source 1..75: mol_type = other DNA
gccgtgcgtctttactacaaaccgtttgttcgctggatttgggcgggcgggctgatgatggcgttgggcggactg

SEQ ID NO: 850918 - DNA, 75 bp, synthetic construct
  source 1..75: mol_type = other DNA
ccgtttgcgctactgcttggtgtcggtcctctggtgcgctggggcgggatcgcccgcgtaagatccgcaatttat

SEQ ID NO: 850919 - DNA, 75 bp, synthetic construct
  source 1..75: mol_type = other DNA
tgctgtgtctggcgctaggaattgcgctgctgctgtccgtgtatccgctatggggcgtggcgcgcggagatgcgc

SEQ ID NO: 850920 - DNA, 75 bp, synthetic construct
  source 1..75: mol_type = other DNA
gcggtatgtttatcctcgcctttatggtgctggtgattggcggttcgctgctgctgtttgccgcgcgtggacaca

SEQ ID NO: 850921 - DNA, 75 bp, synthetic construct
  source 1..75: mol_type = other DNA
ccgtcatcccggtggttttcacctgataaatgcagctgctgaaaggcgctggatgacgccgtcaggtaaggctaa

SEQ ID NO: 850922 - DNA, 75 bp, synthetic construct
  source 1..75: mol_type = other DNA
cacatttgacttcagcgcctgttctttagaatggcaaaacaccgtcgcccaggcgatcagtcagatcgacggcct

SEQ ID NO: 850923 - DNA, 75 bp, synthetic construct
  source 1..75: mol_type = other DNA
ttcgcgcacgcgcttcacgtcgttgcggctggtccctgctcattgcctgcctggtgccacacacccgtatgagtc

SEQ ID NO: 850924 - DNA, 75 bp, synthetic construct
  source 1..75: mol_type = other DNA
taaggttgaagaagaaagtgcgggaaccggtcgtcgtgtggaaacacatgaatacccgaaccgcgacaaacccta

SEQ ID NO: 850925 - DNA, 75 bp, synthetic construct
  source 1..75: mol_type = other DNA
ctttatggtactggtgattggtggttcgctgctgctgtttgccgcgcgtggacacaaagttcgctcacgcgtaaa

SEQ ID NO: 850926 - DNA, 75 bp, synthetic construct
  source 1..75: mol_type = other DNA
ttgagcgtgacgtacgcatgaagtctggcgatagcgtcgatattcatgagtatcgtttcacattccgcgacgtaa

SEQ ID NO: 850927 - DNA, 75 bp, synthetic construct
  source 1..75: mol_type = other DNA
tacagactgccataatatccgtgattataaaaagggcgttgttccggttcttggggagctttatcaggaagatgt

SEQ ID NO: 850928 - DNA, 75 bp, synthetic construct
  source 1..75: mol_type = other DNA
cagcggtgtttttgtgggttggcggctggctgtgttggcggttatggcgcagcggcaaggtaactgatcgtttaa

SEQ ID NO: 850929 - DNA, 75 bp, synthetic construct
  source 1..75: mol_type = other DNA
ctggcaatatcggtaatgaagaacgcattcgcatggtggttgactgtgcgcgcgataaaaacattccgattcgta

SEQ ID NO: 850930 - DNA, 75 bp, synthetic construct
  source 1..75: mol_type = other DNA
tggaaacgcgtgtggggcagaaaatccctaacccaacctggacgcctacggcaggcattcgtcaacgttcgctgg

SEQ ID NO: 850931 - DNA, 75 bp, synthetic construct
  source 1..75: mol_type = other DNA
caaagccattgtggtcgatggctgccattgtgtatgtggctgtcaggttctctccagtgccccggattgtgtaac

SEQ ID NO: 850932 - DNA, 75 bp, synthetic construct
  source 1..75: mol_type = other DNA
ttaacgcactggagcaacgtctggaagatatcattaccccgatggacgtttcgattattggctgcgtggtgaatg

SEQ ID NO: 850933 - DNA, 75 bp, synthetic construct
  source 1..75: mol_type = other DNA
ttcaaagtcagcgtgaaagcgtctgacgtcttcctcgctgttgagtcttatcgtttgctggcaaaacagatcgat

SEQ ID NO: 850934 - DNA, 75 bp, synthetic construct
  source 1..75: mol_type = other DNA
gtagaaaatcaactcgcatttacgttgggaatgtgccgattggcgatggcgcccccatcgctgtacagtctatga

SEQ ID NO: 850935 - DNA, 75 bp, synthetic construct
  source 1..75: mol_type = other DNA
aaccgaccattcgtgacggcatgttattcgggcgcggtgcggcagatatgaaaggctcgctggcggcaatggtgg

SEQ ID NO: 850936 - DNA, 75 bp, synthetic construct
  source 1..75: mol_type = other DNA
ggaagcgattaacgagtcgctccatccaccgatggataatcgggtacgcgaggcttgtcagtacatcagcgatca

SEQ ID NO: 850937 - DNA, 75 bp, synthetic construct
  source 1..75: mol_type = other DNA
ttgggcaaatcatcaatgccgggcaaggggaaggtcgttattcagaattactggcgataaaccttcttgagcaat

SEQ ID NO: 850938 - DNA, 75 bp, synthetic construct
  source 1..75: mol_type = other DNA
tagcggcagaacgttttgtcgcacaacatcccaaccatacggggcgactggcatttctgatcacctctgatgaag

SEQ ID NO: 850939 - DNA, 75 bp, synthetic construct
  source 1..75: mol_type = other DNA
atgtcgtgtccggttattgagctgacacagcagcttattcgccgcccatccttaagtcctgatgacgcaggatgt

SEQ ID NO: 850940 - DNA, 75 bp, synthetic construct
  source 1..75: mol_type = other DNA
cccagcagcttattcgctgtccatccttaagccctgatgatgcgggatgtcaggcaatcatgatagaacgtctgc

SEQ ID NO: 850941 - DNA, 75 bp, synthetic construct
  source 1..75: mol_type = other DNA
tgggaatgtgccgattggcgatggtgctcccatcgccgtacagtccatgaccaatacgcgcacgacagatgtcga

SEQ ID NO: 850942 - DNA, 75 bp, synthetic construct
  source 1..75: mol_type = other DNA
tggccgccgttttacttcctgccggggattctggcgggcgcggcgattgatattcctgccgggatgcagagcggt

SEQ ID NO: 850943 - DNA, 75 bp, synthetic construct
  source 1..75: mol_type = other DNA
ctgcgcaagaaaaatacgacacgctgtttggcgaagtggtatcagcagcggcagacgctcgtgtttttgtcgaag

SEQ ID NO: 850944 - DNA, 75 bp, synthetic construct
  source 1..75: mol_type = other DNA
ccgcagcagagcggtacgacacgttatttggtgaagtagtgtctgcggccgcagatgcaagagtatttgtcgaag

SEQ ID NO: 850945 - DNA, 75 bp, synthetic construct
  source 1..75: mol_type = other DNA
tggcagggatcgtcggttgcctgctgggcgactggatctccttctggctgggctggcgttttaaaaagccgttgc

SEQ ID NO: 850946 - DNA, 75 bp, synthetic construct
  source 1..75: mol_type = other DNA
ctggctgtgctggcggttatggcgcagtggtaaagcgactgaccgtttgagtcattatttgtcgcgcggccgttt

SEQ ID NO: 850947 - DNA, 75 bp, synthetic construct
  source 1..75: mol_type = other DNA
agtggtaaagcgactgaccgtttgagtcattatttgtcccgcggtcgtttgttgtggctgacgccgttgatttct

SEQ ID NO: 850948 - DNA, 75 bp, synthetic construct
  source 1..75: mol_type = other DNA
aagtcagatgcaggtgtgagtgttccggcaggggggatcgagcaggagctgaaaatgaaaccggaagaagagatg

SEQ ID NO: 850949 - DNA, 75 bp, synthetic construct
  source 1..75: mol_type = other DNA
ctccggagtttattccgcgtgacatcaacccggaaatggagaaccgtctgagtgccgtacttgccgcaagggaag

SEQ ID NO: 850950 - DNA, 75 bp, synthetic construct
  source 1..75: mol_type = other DNA
ccggtgtctcctgccatcaacgataagaagtcagattcaggtgtgaatgttccggcaggggggatcgagcaggag

SEQ ID NO: 850951 - DNA, 75 bp, synthetic construct
  source 1..75: mol_type = other DNA
ctgcgcaagaagaatacgacacgctgtttggcgaagtagtatcagcaacgggtatttgtcgaaggccgctggcag

SEQ ID NO: 850952 - DNA, 75 bp, synthetic construct
  source 1..75: mol_type = other DNA
attccagctaatgccagcattctggatatcggcgttggtgcgaactgtatttatccgctgattggcgtacatgaa

SEQ ID NO: 850953 - DNA, 75 bp, synthetic construct
  source 1..75: mol_type = other DNA
cgtcggcaaaaagagagtggggcgatttttaacggcatcatccataaaaacgagcaatacgacgcgaccttgtgt

SEQ ID NO: 850954 - DNA, 75 bp, synthetic construct
  source 1..75: mol_type = other DNA
aagaccggaacaaaatcaaaacaaagattaatgcacaaaaggtggatttagcatcgactgaaggcgaatcttcac

SEQ ID NO: 850955 - DNA, 75 bp, synthetic construct
  source 1..75: mol_type = other DNA
tggacgatggtattaaccgaatgcgggaattgttatctttatgtagagagatgctgggggattttggtgtttctg

SEQ ID NO: 850956 - DNA, 75 bp, synthetic construct
  source 1..75: mol_type = other DNA
atggcgaaaacaactaaatcgttcctcgcgctgctgcgcggcggcaatctcggcgtgccgctggtcattctatgc

SEQ ID NO: 850957 - DNA, 75 bp, synthetic construct
  source 1..75: mol_type = other DNA
aaagatgaagggattgagatatcattcaatcctgagattgaccctaaactaaagcaatatagtgaggaagcaata

SEQ ID NO: 850958 - DNA, 75 bp, synthetic construct
  source 1..75: mol_type = other DNA
ttaatcaaggtataacctggctttcaggaatattgtcggttaataaaaagttatgggaaaataaattggaaaatg

SEQ ID NO: 850959 - DNA, 75 bp, synthetic construct
  source 1..75: mol_type = other DNA
atccggtttgggcatctctcccggaatatgttctacaattggcagatctgttctggtatcggccacttaaagaaa

SEQ ID NO: 850960 - DNA, 75 bp, synthetic construct
  source 1..75: mol_type = other DNA
ttaagcgcggcgctcaattacagccagttgctgaaagtgtatcgcgcgctgctgaccgaaggcgtttccctgcgc

SEQ ID NO: 850961 - DNA, 75 bp, synthetic construct
  source 1..75: mol_type = other DNA
gttgggaaaccattccgctgatcgagcctatcagtttaaacctcggctacaaactggtggcgcttgtcgataaag

SEQ ID NO: 850962 - DNA, 75 bp, synthetic construct
  source 1..75: mol_type = other DNA
catctgccgtttttgctgttcagcgccctgcttggttttaccggctggcggatgagcaaacgcccgcaggcggcg

SEQ ID NO: 850963 - DNA, 75 bp, synthetic construct
  source 1..75: mol_type = other DNA
cgacaacggcgatatcgcccatgacgtgcgtaaccagttgctggcaagcccgtcggtgctctacaccgctaccgg

SEQ ID NO: 850964 - DNA, 75 bp, synthetic construct
  source 1..75: mol_type = other DNA
catcaccgaaaccagcgagcaacaggtcagttgggaaaccattccgctgatcgagcccatcagtttaagcctcgg

SEQ ID NO: 850965 - DNA, 75 bp, synthetic construct
  source 1..75: mol_type = other DNA
agttccagagtacgatgccgcaggtgaaggagcagatgaaagcggcggggaaagaccctgtgctgctggtgccgc

SEQ ID NO: 850966 - DNA, 75 bp, synthetic construct
  source 1..75: mol_type = other DNA
aaggatttcttccattatgatatggctagatttgttttagatgaatcacacaagactgcattaatctcattaagg

SEQ ID NO: 850967 - DNA, 75 bp, synthetic construct
  source 1..75: mol_type = other DNA
ggtcgtgtaggcagcctgctgggggagaaattgctcgcctctgatattccgctggtggtgattgagacgtcacga

SEQ ID NO: 850968 - DNA, 75 bp, synthetic construct
  source 1..75: mol_type = other DNA
gcactcggtgcgttctttgccgggatggtactgaacgagtctgaactgagtcaccgtgccgcccacgatacgctg

SEQ ID NO: 850969 - DNA, 75 bp, synthetic construct
  source 1..75: mol_type = other DNA
tgtgcgtctgtgcaaagccaaacgctatcgctacgccaacaacaatatgcaggagctggaagcgtgcctgaaaga

SEQ ID NO: 850970 - DNA, 75 bp, synthetic construct
  source 1..75: mol_type = other DNA
ttgctgggtatggctctttctgccgtgatcggctggtcgttaatgactggcatcgtgttcggtttgtgtctttct

SEQ ID NO: 850971 - DNA, 75 bp, synthetic construct
  source 1..75: mol_type = other DNA
gaacaaggcgatgttggctttgccacgctggcggttgatatggggatcaccatcggcaaggtggtcgcatttatc

SEQ ID NO: 850972 - DNA, 75 bp, synthetic construct
  source 1..75: mol_type = other DNA
gtggggtccgcgcagtattgggcaatgcggcgaacgaagaaattatgcaactggcgcatctggaatgtgcaaaat

SEQ ID NO: 850973 - DNA, 75 bp, synthetic construct
  source 1..75: mol_type = other DNA
atttctctgctattaccaggtttatggtcgataaacaagaaatctctattaattcaaagttacctttcatctatg

SEQ ID NO: 850974 - DNA, 75 bp, synthetic construct
  source 1..75: mol_type = other DNA
tcaaataatccatggcttgataaagctgctcagcgaacaattttaaaaatttacactgtccgtccgctattgcat

SEQ ID NO: 850975 - DNA, 75 bp, synthetic construct
  source 1..75: mol_type = other DNA
atgtcctggatcgttttattaattgcaggtttgctcgaagttgtctgggcgattggcctgaaatacacccacggt

SEQ ID NO: 850976 - DNA, 75 bp, synthetic construct
  source 1..75: mol_type = other DNA
gccattattccggtcatgcttggtgatgctgtagtggcacagaaatttgctcgtgagctgcaaaaagagggcatt

SEQ ID NO: 850977 - DNA, 75 bp, synthetic construct
  source 1..75: mol_type = other DNA
gccattattccggtcatgcttggtgatgcggtagtggcgcagaaatttgcccgtgagctgcaaaaagagggcatt

SEQ ID NO: 850978 - DNA, 75 bp, synthetic construct
  source 1..75: mol_type = other DNA
gaagacgccattatctccgacgcactgaaccacgcgtctattattgatggtgtgcgtctgtgtaaagctaaacgc

SEQ ID NO: 850979 - DNA, 75 bp, synthetic construct
  source 1..75: mol_type = other DNA
agatcatattctgctggcggccgatgtgcgcctggcactgcggcgcagcattacccatccgttcgttcgcaagca

SEQ ID NO: 850980 - DNA, 75 bp, synthetic construct
  source 1..75: mol_type = other DNA
caggctggcgcgcgggtggtgcgcgtggcgacccactgcaccgaagctgatgtttccgcccagcatattcagtat

SEQ ID NO: 850981 - DNA, 75 bp, synthetic construct
  source 1..75: mol_type = other DNA
gcgcgacctgtatttatgtggtcgattccggcggcgcaatgaacatgagcgatattcgcgcccgcttccgcgcac

SEQ ID NO: 850982 - DNA, 75 bp, synthetic construct
  source 1..75: mol_type = other DNA
gtgctggtgtgattcacggcgtgggctttcgtccgcagaaggttctctggcaagggattttttgcccattgcttg

SEQ ID NO: 850983 - DNA, 75 bp, synthetic construct
  source 1..75: mol_type = other DNA
cgctcttctcggttggtgttacatcatgctccgcgccgggatgtggctgtcccttgtattcctgaaaacatggaa

SEQ ID NO: 850984 - DNA, 75 bp, synthetic construct
  source 1..75: mol_type = other DNA
taaacgccgtaagcaggatcaacgccagaaggcaatggatgcatttttcgaagccttcgggattgacggcatgga

SEQ ID NO: 850985 - DNA, 75 bp, synthetic construct
  source 1..75: mol_type = other DNA
ggaatgggcgcgggcgcaggtaacgcgccgctggaagtatttattgccgccgcggataaactgggctggcagcat

SEQ ID NO: 850986 - DNA, 75 bp, synthetic construct
  source 1..75: mol_type = other DNA
tcgcttcaccttccgtgatgtcaaagaggtgactggcccgaactggcgtggcggtgtggcgactatcggcgtaac

SEQ ID NO: 850987 - DNA, 75 bp, synthetic construct
  source 1..75: mol_type = other DNA
acgcgtgacggcaaaccggaaacggtgctgtatgcggaaaaacgttattacaacaccgctggttcgatgatgact

SEQ ID NO: 850988 - DNA, 75 bp, synthetic construct
  source 1..75: mol_type = other DNA
ctgctctatatggggtatgtcggtttctccgtggcatttgcctttgcgattgcttctttgctgagtggtcgtctg

SEQ ID NO: 850989 - DNA, 75 bp, synthetic construct
  source 1..75: mol_type = other DNA
accaggcacaacagccagaatagcgacaaaaggcgacctgatgatagtgatgttcagacaggagaaaaccaaatg

SEQ ID NO: 850990 - DNA, 75 bp, synthetic construct
  source 1..75: mol_type = other DNA
tttgccgcacaacttgtaacgaatataaatttaccacggggccggatggccccatcaaacggagtttaattatgg

SEQ ID NO: 850991 - DNA, 75 bp, synthetic construct
  source 1..75: mol_type = other DNA
cgtgggcgtttttatgaactggcatacaatgatggaatggaaaatacatattttgatgaatctatccctatgtgg

SEQ ID NO: 850992 - DNA, 75 bp, synthetic construct
  source 1..75: mol_type = other DNA
gaagatcacccgccttgccgccagtgaagatgaaaacggtcaacggggccgccgtcagtcgcacttacaggcgct

SEQ ID NO: 850993 - DNA, 75 bp, synthetic construct
  source 1..75: mol_type = other DNA
gttcagcgccctgcttggttttaccggctggcggatgagcaaacgcccgcaggcggcggaggcggaagagaaaag

SEQ ID NO: 850994 - DNA, 75 bp, synthetic construct
  source 1..75: mol_type = other DNA
ctcgcctttctgaggatgaagaggacaacaagaagctactttccgatgattcattcactcagctaagtgaaggtg

SEQ ID NO: 850995 - DNA, 75 bp, synthetic construct
  source 1..75: mol_type = other DNA
gggatcgtgtcgacattctttacgacaaagaagaaaaccagtggatgattaagaaaattagtgaaggtggctttg

SEQ ID NO: 850996 - DNA, 75 bp, synthetic construct
  source 1..75: mol_type = other DNA
ggctggcggatgagcaaacagccgcaggcggcggaggcggaagagaaaagcctcgaaacgctgacccgcaccatc

SEQ ID NO: 850997 - DNA, 75 bp, synthetic construct
  source 1..75: mol_type = other DNA
acctgagcgccgacgccgccttccagcaatatgtgctgatgaccatcggcgatgggctggtggcgcagatccctt

SEQ ID NO: 850998 - DNA, 75 bp, synthetic construct
  source 1..75: mol_type = other DNA
accgtttgtcgtcgatggcaccgcgcctggcagaagacttaagcgcggcgctgaattacagccagttgctgaaag

SEQ ID NO: 850999 - DNA, 75 bp, synthetic construct
  source 1..75: mol_type = other DNA
atgcggtaatggacaagcgccccctgcgggcgctttccttcgtgatggcgcttctgttagcaggatgtatgtttt

SEQ ID NO: 851000 - DNA, 75 bp, synthetic construct
  source 1..75: mol_type = other DNA
acggactccaactattccagataatgtaaaagcagactatgtgcgtactgctcaaaaattgggattcaatgtcaa

SEQ ID NO: 851001 - DNA, 75 bp, synthetic construct
  source 1..75: mol_type = other DNA
cgtcgtgacggcgcttagtctgtccgttgaggcgttggtttgcctgcggactgttttgtgcggtggtgagcgtgt

SEQ ID NO: 851002 - DNA, 75 bp, synthetic construct
  source 1..75: mol_type = other DNA
ggcctggttattgtgcttgttcagtcagcaatttcaaaaattattaagtatgctgttcatgaaaatgcactgcat

SEQ ID NO: 851003 - DNA, 75 bp, synthetic construct
  source 1..75: mol_type = other DNA
agcgtcattagtgattattttatctggcctggttattgtgcttgttcagtcagcaatttcaaaaattattaagta

SEQ ID NO: 851004 - DNA, 75 bp, synthetic construct
  source 1..75: mol_type = other DNA
tgctggggccggggctggttaacggcgcactggcgctggcattaaccacctggcctgcttatgcgcgtcaggcac

SEQ ID NO: 851005 - DNA, 75 bp, synthetic construct
  source 1..75: mol_type = other DNA
gcgacggcaatgtcattattcatgtggcaaacggaatcacgcatatcggtccggcacggcaacaggatggcgatt

SEQ ID NO: 851006 - DNA, 75 bp, synthetic construct
  source 1..75: mol_type = other DNA
tcttaaacgagattccgcacagagagccgctaagtttgtacttggtgataaagcatctgaggctgaaacatttat

SEQ ID NO: 851007 - DNA, 75 bp, synthetic construct
  source 1..75: mol_type = other DNA
cggacacgctgtatcaatattttggtcagcatggggataaagtggtgcagccgctggtgcaaaaactggataagc

SEQ ID NO: 851008 - DNA, 75 bp, synthetic construct
  source 1..75: mol_type = other DNA
attaggtcaggtcgctgatactacagcggataacgtgaatagaaagaacgggaaaccatcaaggtttaatcttgg

SEQ ID NO: 851009 - DNA, 75 bp, synthetic construct
  source 1..75: mol_type = other DNA
tggccttcaacgtgcatcatcggaaagaagtattgatttcgtattcggtgaccaaagtacacaggttaaaaagtt

SEQ ID NO: 851010 - DNA, 75 bp, synthetic construct
  source 1..75: mol_type = other DNA
ggttattgatgaaagaaccacatctcatattaatcgtatgcaggaagataccttgattagctcagcttacccaga

SEQ ID NO: 851011 - DNA, 75 bp, synthetic construct
  source 1..75: mol_type = other DNA
aaaagagaatacttcatctgcccgtaaaaaagatttacttcgatcagatcaaatctggagaaaaaccagatgaat

SEQ ID NO: 851012 - DNA, 75 bp, synthetic construct
  source 1..75: mol_type = other DNA
cgtgctgtgtggaggcaggctggtataccgccggtccatcgcggggctgaatgtggacggactgaagaaaaacgc

SEQ ID NO: 851013 - DNA, 75 bp, synthetic construct
  source 1..75: mol_type = other DNA
acgtggcaaaagcagttcccgcttgattacggcaaagtgcgactgtggggctcggtggcgtttgtcattggctcg

SEQ ID NO: 851014 - DNA, 75 bp, synthetic construct
  source 1..75: mol_type = other DNA
ttaaatatggtcactcgtctcctaagctggcggacctgtcatccggccttcatatacaggaaataattgaggcat

SEQ ID NO: 851015 - DNA, 75 bp, synthetic construct
  source 1..75: mol_type = other DNA
atgaaaatcgcctgctcctgattctatttaatgatacgaatacggaaacaattggcttcgacgctctgaaacgct

SEQ ID NO: 851016 - DNA, 75 bp, synthetic construct
  source 1..75: mol_type = other DNA
aatgggcagttcagaaaagggagcttatttcagagttcatgccagtaaatcggaaacagatcataatttgggact

SEQ ID NO: 851017 - DNA, 75 bp, synthetic construct
  source 1..75: mol_type = other DNA
atcgctgaactgcaatcacagtttgctggttttggtgcttcagctaaagagtctatgggtattcagggttctgaa

SEQ ID NO: 851018 - DNA, 75 bp, synthetic construct
  source 1..75: mol_type = other DNA
gttggcaaagccacagacgcgcgtaacgaggtaaaaaatgccaaagaattgaggtgtactggcaatagcggacac

SEQ ID NO: 851019 - DNA, 75 bp, synthetic construct
  source 1..75: mol_type = other DNA
ggtgctttccagttatttgccagaagccttgggatgactaccgagcaattagatgcagctatgaagaacggtaaa

SEQ ID NO: 851020 - DNA, 75 bp, synthetic construct
  source 1..75: mol_type = other DNA
gagaagttagctcagctaaatgcttcagtcagagaagcaatcactaaagccagaggtcatacatccaccagcaaa

SEQ ID NO: 851021 - DNA, 75 bp, synthetic construct
  source 1..75: mol_type = other DNA
aagggaaagtccgggatctgtccggcagctggagcgctggatggtacccaacaagctgacagcgcggagtcaggt

SEQ ID NO: 851022 - DNA, 75 bp, synthetic construct
  source 1..75: mol_type = other DNA
aaaagaaagcccggaatctgtccggcaactggagcgctggatggtacccaacaagctgacgcaccggagccgggt

SEQ ID NO: 851023 - DNA, 75 bp, synthetic construct
  source 1..75: mol_type = other DNA
aacgttacgatgccaaacgtcaggagaaaatgcgcgcggcgctggagcagttgaaagggctggaaaatctctctg

SEQ ID NO: 851024 - DNA, 75 bp, synthetic construct
  source 1..75: mol_type = other DNA
gaatatgagcaagcttcgtgactttaatcctatgcttgagaagtattttagaagccagtattacagcttaagcag

SEQ ID NO: 851025 - DNA, 75 bp, synthetic construct
  source 1..75: mol_type = other DNA
tatggttttagccgttggttcagaacgaactgttaaatatgaattccaaaccaaaactgaaatgattcaaaatta

SEQ ID NO: 851026 - DNA, 75 bp, synthetic construct
  source 1..75: mol_type = other DNA
gcattatcacagatggctagtaagggcaagattcaggctgaagagcttaaggggcaactggctgaagctgttcct

SEQ ID NO: 851027 - DNA, 75 bp, synthetic construct
  source 1..75: mol_type = other DNA
aaaagaagcatcacaacgagcggcacaattcgttttaggtgatgaaggtgctaaacgagctacagaatttgttaa

SEQ ID NO: 851028 - DNA, 75 bp, synthetic construct
  source 1..75: mol_type = other DNA
attatctgtagctgatgcaattaccagagtaatgattgtcggtatgacaactgatgtgattaatgccattgtcaa

SEQ ID NO: 851029 - DNA, 75 bp, synthetic construct
  source 1..75: mol_type = other DNA
agacagccacgaattagcggcaacagagcaatcacagcagcgcatagcgtgaatatgagcaagcttcgtgacttt

SEQ ID NO: 851030 - DNA, 75 bp, synthetic construct
  source 1..75: mol_type = other DNA
cgatatgttgttgatctcagcgatttgcggagtggcgcgttggagcattatgggggcaaccactgagttaccgtg

SEQ ID NO: 851031 - DNA, 75 bp, synthetic construct
  source 1..75: mol_type = other DNA
ctgcccacgcgcacgttggtcacggcgtcaacgccgggcgcagatatgacgcccggcaaaatggattacacctcg

SEQ ID NO: 851032 - DNA, 75 bp, synthetic construct
  source 1..75: mol_type = other DNA
actgcaggcagatccaaccttgcgtgtgatgtcggggttctggaaggcagtaacgtcaatgccgttgcggcaatg

SEQ ID NO: 851033 - DNA, 75 bp, synthetic construct
  source 1..75: mol_type = other DNA
ctgccgacgcgcacgctggtgacggcctctacgccgggagcagatatgacgcccggcaagatggattacacctcg

SEQ ID NO: 851034 - DNA, 75 bp, synthetic construct
  source 1..75: mol_type = other DNA
tctgccggcatccccgtatgtcagtgataccgatgccttacatgcacaggctcaactgagcggtgccattaaccc

SEQ ID NO: 851035 - DNA, 75 bp, synthetic construct
  source 1..75: mol_type = other DNA
gggcagtgaagtgcagcgcggcgatgacggcatttttcgtttgactgctgaaagtcaggccacacgtggagcgga

SEQ ID NO: 851036 - DNA, 75 bp, synthetic construct
  source 1..75: mol_type = other DNA
tgcagtgccggtagagggactttcgctgcctacacgcacgctggtgacggcatctacgccaggggcagacatgac

SEQ ID NO: 851037 - DNA, 75 bp, synthetic construct
  source 1..75: mol_type = other DNA
attggctacgtgattaaaacagaaaataaagaaaccccattcactgtggttgatatcgacggtccatcaggcaac

SEQ ID NO: 851038 - DNA, 75 bp, synthetic construct
  source 1..75: mol_type = other DNA
gttaaaacacttaacgatggtgttaaaaaaatgtgtctggtgcacacaggaaagaatctgcccgcagaaaaaaag

SEQ ID NO: 851039 - DNA, 75 bp, synthetic construct
  source 1..75: mol_type = other DNA
aaataatctaccagcagaaaaaaaagctgagtttctggcaactctgattgcaatgaaattaaaagatgaaattta

SEQ ID NO: 851040 - DNA, 75 bp, synthetic construct
  source 1..75: mol_type = other DNA
aatctcggcgctgaatccgggcgatccggcaaatacggttgcgccagtggggcgtctgaagctggtgaaagccac

SEQ ID NO: 851041 - DNA, 75 bp, synthetic construct
  source 1..75: mol_type = other DNA
cgtaatggcagcattcaggttgatcccaccgggcaactgacaattcaggggcatccggtgataggcgaagcgggg

SEQ ID NO: 851042 - DNA, 75 bp, synthetic construct
  source 1..75: mol_type = other DNA
caaaaatgagtctggttcacatcggaaagaatctgcccgtagaaaaaaaagccggatttctggcaactctgattg

SEQ ID NO: 851043 - DNA, 75 bp, synthetic construct
  source 1..75: mol_type = other DNA
tcagaccaggatattgttactgacgctcatgtgtttggggcttttgagatccgtcagcatctgggtctaacgaac

SEQ ID NO: 851044 - DNA, 75 bp, synthetic construct
  source 1..75: mol_type = other DNA
gcaggaaactcgtttcctttatctatgcagataatgaatctcgcaaaaatgatattttcaaagctgtagtagacg

SEQ ID NO: 851045 - DNA, 75 bp, synthetic construct
  source 1..75: mol_type = other DNA
gacaacgatgaaaaatatctgtcctttgcattagttctcgctatcacgattatggacaacttagtaaagctcatc

SEQ ID NO: 851046 - DNA, 75 bp, synthetic construct
  source 1..75: mol_type = other DNA
ccggcaacgagtcgtcgtggacgcagaatctttcctccggcaatgtgctcacagggattatcgttcaggatacag

SEQ ID NO: 851047 - DNA, 75 bp, synthetic construct
  source 1..75: mol_type = other DNA
gttgatagtggtgcaaattctgcattgcggcacctttaccgtgtgccacctggccgccatgcgctacattgctgc

SEQ ID NO: 851048 - DNA, 75 bp, synthetic construct
  source 1..75: mol_type = other DNA
ccgcctgatttccgccttgcgcgtgctggcactgctgacacttctctttgctgtcgccttctgggcgggggcgca

SEQ ID NO: 851049 - DNA, 75 bp, synthetic construct
  source 1..75: mol_type = other DNA
gtgatcatctttgcgctgagtaataaacttttccgtcgctgcagtgctcgcgatatgttgttgatctcggcgatt

SEQ ID NO: 851050 - DNA, 75 bp, synthetic construct
  source 1..75: mol_type = other DNA
tcagaccaggatattgttactgacgctcatgtatttgaggcttttgagatccgtcagcatctgggtctaacgaac

SEQ ID NO: 851051 - DNA, 75 bp, synthetic construct
  source 1..75: mol_type = other DNA
tgcaaaatgaaacagcccgcgaggagtacatccgccgcaggctggggctatcagaccaggatattgttactgacg

SEQ ID NO: 851052 - DNA, 75 bp, synthetic construct
  source 1..75: mol_type = other DNA
ttcttacggatgctcagatggctgaggcttttgatattcatcagaatcttggtctaacaaacggatggtatcagt

SEQ ID NO: 851053 - DNA, 75 bp, synthetic construct
  source 1..75: mol_type = other DNA
gtgaagaaaatatctgatatcacaccgtatgttgatgaaaacgacgagttcactgacggcgcgcctgccacaggg

SEQ ID NO: 851054 - DNA, 75 bp, synthetic construct
  source 1..75: mol_type = other DNA
actacttagtgatgattatttagagtctccgctcacaaaaatactctatgactcattagctaaagatgaactaaa

SEQ ID NO: 851055 - DNA, 75 bp, synthetic construct
  source 1..75: mol_type = other DNA
atgaaagagattatattgaatagttatgaggaaacaaaaaacgaacttgttgctaacatcttacaaggatactgt

SEQ ID NO: 851056 - DNA, 75 bp, synthetic construct
  source 1..75: mol_type = other DNA
acgcgtctgtactccaggtgaaaggtgtcatgtcgccagtaatggcgatctggtacaaattgccagctttggcgc

SEQ ID NO: 851057 - DNA, 75 bp, synthetic construct
  source 1..75: mol_type = other DNA
gggctcggtggactcaattattctcggaccgggcggcagtgcagcgctggcatatcatgacggggaaagagttcg

SEQ ID NO: 851058 - DNA, 75 bp, synthetic construct
  source 1..75: mol_type = other DNA
aaccacaacctaaaccaagtgagcctgaggtctctttcctagataactatgagcaagagattatggctagagtac

SEQ ID NO: 851059 - DNA, 75 bp, synthetic construct
  source 1..75: mol_type = other DNA
gtggttacggtgacaagcgtctctcgccaaaagagagtgaagttctgcgcctgtttgcggaaggcttcctggtga

SEQ ID NO: 851060 - DNA, 75 bp, synthetic construct
  source 1..75: mol_type = other DNA
gaaggctctcgccgcgctgcagataagggaagaaatttaccccggaaagcgtttctcgcctgttggaaaaaatca

SEQ ID NO: 851061 - DNA, 75 bp, synthetic construct
  source 1..75: mol_type = other DNA
atgatcattacacaagcagacctgcgagaatggcgtatcggagcggtgatgtatcgctggttcctgcgccatttc

SEQ ID NO: 851062 - DNA, 75 bp, synthetic construct
  source 1..75: mol_type = other DNA
tggcctggatgtctgtcgtgagtatccggtgccagagcgtggtgacggctgcggagggcggattgatatcgtcgt

SEQ ID NO: 851063 - DNA, 75 bp, synthetic construct
  source 1..75: mol_type = other DNA
tcgcaaggcacaccgagcagggaattctggttatcggtggggctgttcgccagaaaaaatttgacccgttgtcag

SEQ ID NO: 851064 - DNA, 75 bp, synthetic construct
  source 1..75: mol_type = other DNA
gaacggcaacacctatgagaacatcgaattttggcattgaacccagcgatttgctccttgatcctaaagatgtag

SEQ ID NO: 851065 - DNA, 75 bp, synthetic construct
  source 1..75: mol_type = other DNA
cgaatggatgcatcttcggattgaggaagatctggcatctgtcagagaaaaattaaccaaaaaatcagccgcagg

SEQ ID NO: 851066 - DNA, 75 bp, synthetic construct
  source 1..75: mol_type = other DNA
tatcggtggggctgttcgccagaaaaaatttgacccgttgtctgttgatctgcccgactggttgccagaaacact

SEQ ID NO: 851067 - DNA, 75 bp, synthetic construct
  source 1..75: mol_type = other DNA
aatgcagattgtaacgctcgcggcgttacaaaaagtgcaatagatcgcatcacttttatggctggttttgctgat

SEQ ID NO: 851068 - DNA, 75 bp, synthetic construct
  source 1..75: mol_type = other DNA
gctgggtgtcgagaacgatatcgccctgctgaattatctctcttctgtgaccttaagtccggcagataaagacta

SEQ ID NO: 851069 - DNA, 75 bp, synthetic construct
  source 1..75: mol_type = other DNA
aggattcctcgggatcgtcaccaaaaccggggccattgacgccgaaatcgagcgcgtcaccacccgactacgtgg

SEQ ID NO: 851070 - DNA, 75 bp, synthetic construct
  source 1..75: mol_type = other DNA
catataccattctcttttttctgattgccatcgttgccgtcctgacgtggatcattccagccgggcagtatcaca

SEQ ID NO: 851071 - DNA, 75 bp, synthetic construct
  source 1..75: mol_type = other DNA
ttgagtcattatttgtcccgcggtcgtttgttgtggctgacgccgttgatttctgccatcggcgtggtggcgctg

SEQ ID NO: 851072 - DNA, 75 bp, synthetic construct
  source 1..75: mol_type = other DNA
atcgaggggagttttgattggatttctgatggcaaacaggtcgtcgtgaatggctgcaggtgtgaatgtggctgt

SEQ ID NO: 851073 - DNA, 75 bp, synthetic construct
  source 1..75: mol_type = other DNA
gggttctatcccggaattttactgctcgcatccatttattttcctaacaaggttcgcggatcggtcgtgggaata

SEQ ID NO: 851074 - DNA, 75 bp, synthetic construct
  source 1..75: mol_type = other DNA
tcgcgaagagtggatgatcccgatccttatggcgctgtttgctgctggcggtacaatttacggcatggccgaaga

SEQ ID NO: 851075 - DNA, 75 bp, synthetic construct
  source 1..75: mol_type = other DNA
tggccaccgttttacttcctgccggggattctggcgggtgcggcgatcgatattccagccggaatgcagagcggc

SEQ ID NO: 851076 - DNA, 60 bp, synthetic construct
  source 1..60: mol_type = other DNA
atgagactcgaaagcgtagctaaatttcattcgccaaaaagcccgatgatgagcgactca

SEQ ID NO: 851077 - DNA, 75 bp, synthetic construct
  source 1..75: mol_type = other DNA
gaaccgtaaatgtatcattgacgatggcgaatttgctgttgcagttattttgatattatctggtgtagcagggta

SEQ ID NO: 851078 - DNA, 75 bp, synthetic construct
  source 1..75: mol_type = other DNA
ggtatggaaaagaaggggtatctcacctcacgacatgttcaggccggtcgacgaagtcggcgagtatatgaaatc

SEQ ID NO: 851079 - DNA, 75 bp, synthetic construct
  source 1..75: mol_type = other DNA
taccgccaacaatatttttgggacaaaagaaacataacaaacatccggcatggataaatgaaatgaataaaaata

SEQ ID NO: 851080 - DNA, 75 bp, synthetic construct
  source 1..75: mol_type = other DNA
ctggagtcgctggcgctggtcggtttgattctacccggtacggtgctgatggcgggactgggggcgctgattggc

SEQ ID NO: 851081 - DNA, 75 bp, synthetic construct
  source 1..75: mol_type = other DNA
aaatgttgcaattgcatctaaaaaatatttaactgaaagttcaggtatgcttgttaatttcacgtcaagttcata

SEQ ID NO: 851082 - DNA, 75 bp, synthetic construct
  source 1..75: mol_type = other DNA
gcaaactcttttacccggtgcctgtgtcgcacaaatagctcgtgagaacggaatcaacgataacctgctctttaa

SEQ ID NO: 851083 - DNA, 75 bp, synthetic construct
  source 1..75: mol_type = other DNA
ggaaagcggacccggaattaaataattttcgttatatgtggaatatcctgatgtatgccattccgtatacgttat

SEQ ID NO: 851084 - DNA, 75 bp, synthetic construct
  source 1..75: mol_type = other DNA
tggttttctttgctgccggattgattgtaaggaacgttatgcatgattttttcagtgccggtattgattcgtgga

SEQ ID NO: 851085 - DNA, 75 bp, synthetic construct
  source 1..75: mol_type = other DNA
ttctgcggcggttgctgcacagctgccttgccgtgacgcgctgatgcaggagtacgacgacaagtggcatcagga

SEQ ID NO: 851086 - DNA, 75 bp, synthetic construct
  source 1..75: mol_type = other DNA
agctttaaagatgccgggctggttgttgaaatcgcaccctttggcggtgaatgttcgcaaaatgaaatcgatcgt

SEQ ID NO: 851087 - DNA, 75 bp, synthetic construct
  source 1..75: mol_type = other DNA
ccgccggaaccaattttcaccggagtttaaatggagacttgttcagcaaactcttttacccggtgcctgtgtcgc

SEQ ID NO: 851088 - DNA, 75 bp, synthetic construct
  source 1..75: mol_type = other DNA
atgttgaccgtagacgtagccgccgacattgtcgccagcggcataaaagtggtgattttgctggtttcggtactg

SEQ ID NO: 851089 - DNA, 75 bp, synthetic construct
  source 1..75: mol_type = other DNA
ccgacattgtcgccagcggcataaaagtggtgattttgctggtttcggtgctggtagtgccgagcctgctggtcg

SEQ ID NO: 851090 - DNA, 75 bp, synthetic construct
  source 1..75: mol_type = other DNA
aaaaattagaaacacagagcattaataagaagcgtaacaaatgtattaacctagactgcaaagcaaaaaaattct

SEQ ID NO: 851091 - DNA, 75 bp, synthetic construct
  source 1..75: mol_type = other DNA
cctgtatttatcaggaaaaacttcaatgtggttctggagagaacggtccgggaactcaccggagaaagctgtatt

SEQ ID NO: 851092 - DNA, 75 bp, synthetic construct
  source 1..75: mol_type = other DNA
ggcaaatggatgattatccagttgcatgatctctgcattcatctgtttacccaggccgccctgctggtgcattaa

SEQ ID NO: 851093 - DNA, 75 bp, synthetic construct
  source 1..75: mol_type = other DNA
cgctggtggtgctgggcgtgtgcggtaaatggatgattatccagttgcatgatctgtgcattcatctgtttaccc

SEQ ID NO: 851094 - DNA, 75 bp, synthetic construct
  source 1..75: mol_type = other DNA
cactctgcttggcgaagaaaatttccagaaagggatgcagctctatttcgagcgtcatgatggtagcgcagcgac

SEQ ID NO: 851095 - DNA, 75 bp, synthetic construct
  source 1..75: mol_type = other DNA
aacaactgtcggatcgtaaacctgcggattgcgtcgtgaccacagatgtggggcagcaccagatgtgggccgcgc

SEQ ID NO: 851096 - DNA, 75 bp, synthetic construct
  source 1..75: mol_type = other DNA
gaaaacgaagtgactttcccacatgccgaagtcgagcaagcgcgccagatgctggcaaaagcgcaaaaaccgatg

SEQ ID NO: 851097 - DNA, 75 bp, synthetic construct
  source 1..75: mol_type = other DNA
atgtgcaagagctgggcaccgtaaaacgcaagctgttaccgttgaaaatcgtcttactcgataaccaacggttag

SEQ ID NO: 851098 - DNA, 75 bp, synthetic construct
  source 1..75: mol_type = other DNA
gacgaacttgagaacgtctggccgctggtgccgcctggtgccagtaattctgaaatgttggagaaattatcatga

SEQ ID NO: 851099 - DNA, 75 bp, synthetic construct
  source 1..75: mol_type = other DNA
tatggatatcgatccggcagaaatgaacaagctgcgtcaggcacatgtggcattacagggtgatttaaatgctct

SEQ ID NO: 851100 - DNA, 75 bp, synthetic construct
  source 1..75: mol_type = other DNA
ggcaccatgggtttcggtttaccagcggcggttggcgcacaagtcgcacgaccgaacgatactgtcgtctgtatc

SEQ ID NO: 851101 - DNA, 75 bp, synthetic construct
  source 1..75: mol_type = other DNA
aacaagctgcgtcaggcacatgtggcattacaaggtgatttaaatgctctgttaccagcattacagcagccgtta

SEQ ID NO: 851102 - DNA, 75 bp, synthetic construct
  source 1..75: mol_type = other DNA
tctcaggcttaaaggtaaactgacgccggcgttattacagacacttatccgcgaaatgaaagggagcagccacta

SEQ ID NO: 851103 - DNA, 75 bp, synthetic construct
  source 1..75: mol_type = other DNA
atgacacaacattttaaatatcatgttgtgtcatatttaatgattcttatatttattgcatttataaaattatat

SEQ ID NO: 851104 - DNA, 75 bp, synthetic construct
  source 1..75: mol_type = other DNA
tgttgccatcaccggtcaggtgtccgctcccttcatcggcaccgacgcatttcaggaggtggatattctgggatt

SEQ ID NO: 851105 - DNA, 75 bp, synthetic construct
  source 1..75: mol_type = other DNA
gtcttactcgataaccaacggttagggatggttcgacaatggcagcaactgtttttccaggaacgatatagcgaa

SEQ ID NO: 851106 - DNA, 75 bp, synthetic construct
  source 1..75: mol_type = other DNA
cggcggttggcgcgcaagtcgcgcgaccgaacgataccgtcgtctgtatctccggtgacggctctttcatgatga

SEQ ID NO: 851107 - DNA, 75 bp, synthetic construct
  source 1..75: mol_type = other DNA
actgctggaagatttaatggaagccggaccactcaaagccgccccgtcgctgtcttttctcgggctgtccgtgat

SEQ ID NO: 851108 - DNA, 75 bp, synthetic construct
  source 1..75: mol_type = other DNA
actgctggaagatttaatggaagccggaccactcaaagccgcgccgtcgctgtcctttctcgggctggccgtgat

SEQ ID NO: 851109 - DNA, 75 bp, synthetic construct
  source 1..75: mol_type = other DNA
cattcattgatggacggaaagctacgctacagtattgttttcactctggcgacggttggcattatgtttggtgcg

SEQ ID NO: 851110 - DNA, 75 bp, synthetic construct
  source 1..75: mol_type = other DNA
ttctggataacgagaataagcccatcgcaattatttgtgttcaggaagactcgctgtatgtgggaaaaacatata

SEQ ID NO: 851111 - DNA, 75 bp, synthetic construct
  source 1..75: mol_type = other DNA
cgcatctcacccttgagtcactggaggcggccatcgccgctgagctggaaggtttttatctgcgccagcacggtg

SEQ ID NO: 851112 - DNA, 75 bp, synthetic construct
  source 1..75: mol_type = other DNA
tacgcgccgcgctgtatcgtcgcgccgtggcctgtgcatggctgaccctgtgcgaacgccagcaccgctacccgc

SEQ ID NO: 851113 - DNA, 75 bp, synthetic construct
  source 1..75: mol_type = other DNA
ccggaccgtgggttttgcaggaatcgaaactgaatcagtacgatgtcttcgtccgtaacgaaaactactggggcg

SEQ ID NO: 851114 - DNA, 75 bp, synthetic construct
  source 1..75: mol_type = other DNA
accagatgttcgcccagagcatggtttatgaaccgctggtgaaataccaggcagatggttcggtgatcccgtggc

SEQ ID NO: 851115 - DNA, 75 bp, synthetic construct
  source 1..75: mol_type = other DNA
aagtgctggcgacccatgacgaaacgcaacgtcaggcgctgtatcgcgacattctgacccgtctgcatgacgagg

SEQ ID NO: 851116 - DNA, 75 bp, synthetic construct
  source 1..75: mol_type = other DNA
cattcattgatggacggaaagctacgctacagtattgttttcaccctggtgacagtcggcattatgtttggcgca

SEQ ID NO: 851117 - DNA, 75 bp, synthetic construct
  source 1..75: mol_type = other DNA
cattcattgatggacggaaagctacgctacagtattgttttcaccctggtgactgtcggcattatgtttggtgcg

SEQ ID NO: 851118 - DNA, 75 bp, synthetic construct
  source 1..75: mol_type = other DNA
gaagagcaccaacgagctttccgcaaaagaagcaaacagccttgtatggctatgggattatgccaaccgctcaca

SEQ ID NO: 851119 - DNA, 75 bp, synthetic construct
  source 1..75: mol_type = other DNA
cgccattatttgtgtccaggaagactcgctgtatgtgggcaaaacatataccgcagttatggccataaactcgac

SEQ ID NO: 851120 - DNA, 75 bp, synthetic construct
  source 1..75: mol_type = other DNA
aagcctatgatccccgatggcgctgtcattatgagtggtgccgatctgatgggtacccgcgcctttggcgttatc

SEQ ID NO: 851121 - DNA, 75 bp, synthetic construct
  source 1..75: mol_type = other DNA
ccactcagggatatgtctatctgcagtactcatttacaaatgacgaaatttgtcaggcagaaattgaaggggcga

SEQ ID NO: 851122 - DNA, 75 bp, synthetic construct
  source 1..75: mol_type = other DNA
ttgacggttggcctgcgtgtaccggaagaacaggaacgtgaagggctggacgtcaacagccacggcgaaaatgcc

SEQ ID NO: 851123 - DNA, 75 bp, synthetic construct
  source 1..75: mol_type = other DNA
aatggggcttgtcagtcgcgatcttaaaggcagtcaggatcgcattcgtgagctggaagaccagaaccagttact

SEQ ID NO: 851124 - DNA, 75 bp, synthetic construct
  source 1..75: mol_type = other DNA
aatgggaattatcgggcgtgatctgaaaggctctcaggagcgtatccgtgagctggaagatgaaaataaactcct

SEQ ID NO: 851125 - DNA, 75 bp, synthetic construct
  source 1..75: mol_type = other DNA
gtcgtcgtcagctcgctctgtttatcgcgcttgtgctgggtattggtgcgggtggggcaggaacctggatggtat

SEQ ID NO: 851126 - DNA, 75 bp, synthetic construct
  source 1..75: mol_type = other DNA
cgtcatcaatcgtcagtgggatgatgagcgcgagatgtcggtggtaatggactcgtaccgcctcttcaacgttgg

SEQ ID NO: 851127 - DNA, 75 bp, synthetic construct
  source 1..75: mol_type = other DNA
gctcacgctaaattctacgacgaagcgcacaccatccagttaatcaaagcgactgattttgtaccgccgccgaca

SEQ ID NO: 851128 - DNA, 75 bp, synthetic construct
  source 1..75: mol_type = other DNA
tcaaagtcagttgcaggaagggaaaaactacccattcaacactctggttgttctggataacgagaataagccaat

SEQ ID NO: 851129 - DNA, 75 bp, synthetic construct
  source 1..75: mol_type = other DNA
atttattggctacaaactggcggatctgacggttggcctgcgtgtgccggaagaacaagagcgagaagggctgga

SEQ ID NO: 851130 - DNA, 75 bp, synthetic construct
  source 1..75: mol_type = other DNA
gcttcggcaaagaggcgtttaaaccgcacaacctgccgatggtcttcaccggtactgccattctctatattggtt

SEQ ID NO: 851131 - DNA, 75 bp, synthetic construct
  source 1..75: mol_type = other DNA
cgtcatcaatcgccagtgggatgatgaacgcgaaatgacgatggtgatggactcatatcgtctgttcaacgttgg

SEQ ID NO: 851132 - DNA, 75 bp, synthetic construct
  source 1..75: mol_type = other DNA
tctattattgtcgataaaagctatgccccaggcaccatcatggttgcattgattgtgattcataactgtgcggtg

SEQ ID NO: 851133 - DNA, 75 bp, synthetic construct
  source 1..75: mol_type = other DNA
gatggcagcagcgtcaagtttggtcgtttcgacggcgcagagccgcattgcgtgggcttgactgatcttgtgacc

SEQ ID NO: 851134 - DNA, 75 bp, synthetic construct
  source 1..75: mol_type = other DNA
cagcgtgaaattcctgtatgtcgcctggccggctaactggcaatccctaagaaagatttcatcaccgaagcatgg

SEQ ID NO: 851135 - DNA, 75 bp, synthetic construct
  source 1..75: mol_type = other DNA
acgtgatggcaccggcgtggtgccgtccgttattgtcgcggatgccggaagttaacgaagctatccctatgcccc

SEQ ID NO: 851136 - DNA, 75 bp, synthetic construct
  source 1..75: mol_type = other DNA
ggagaacgcattcttcccgtggaccctgaactacgacgaaatcgacatggtgctggaaggggagctgcatgttcg

SEQ ID NO: 851137 - DNA, 75 bp, synthetic construct
  source 1..75: mol_type = other DNA
aaacagtcgctggagcagggcgcaatgcagccgagcttcaaatcggtgaccggtgaccggcaaaggcggcatcaa

SEQ ID NO: 851138 - DNA, 75 bp, synthetic construct
  source 1..75: mol_type = other DNA
gtgaaaaaactcatcacagcgaatgatattcgtgaagcacacgcgcgcggcgaactggcaatgtccgtggttctg

SEQ ID NO: 851139 - DNA, 75 bp, synthetic construct
  source 1..75: mol_type = other DNA
cagtcatgacgccgcatttacccggcgtcatttctctcgtgtggtgcgactggaagatggtctaatgaacgttaa

SEQ ID NO: 851140 - DNA, 75 bp, synthetic construct
  source 1..75: mol_type = other DNA
aggaagcggaaaatcagctttttcacagcaccgttgctgacgaaatcgcatttggtttgatactgcaaaaatgcc

SEQ ID NO: 851141 - DNA, 75 bp, synthetic construct
  source 1..75: mol_type = other DNA
atcgacgctgttacgagtaatggcaggtcttcttacgcccacaaccggtacggttatgctgcaacaacaggcgat

SEQ ID NO: 851142 - DNA, 75 bp, synthetic construct
  source 1..75: mol_type = other DNA
gcaaagtctctatcgcacgctccaggcgcgctatccccaggcaataatcgacgtgatggcaccggcgtggtgccg

SEQ ID NO: 851143 - DNA, 75 bp, synthetic construct
  source 1..75: mol_type = other DNA
gttatggccgcaattgcaggtgagcgaaggtgaaaaatcatatacctgtaatcaattttcgctttcatcagaacg

SEQ ID NO: 851144 - DNA, 75 bp, synthetic construct
  source 1..75: mol_type = other DNA
tttggtttgaaactgcaaaaatgcccaactgatgaaattgctcaacgcaccgacgctgtcctgcaatgctgtcag

SEQ ID NO: 851145 - DNA, 75 bp, synthetic construct
  source 1..75: mol_type = other DNA
ggagacgacggcagcagcatggccgctggttttatgcagtgggagaacgcattcttcccgtggaccctgaactac

SEQ ID NO: 851146 - DNA, 75 bp, synthetic construct
  source 1..75: mol_type = other DNA
catattcagtgattggtttaatctctgcgctgaaaatgccagaagtgaaagaccgtgatttaagtgcgctggaag

SEQ ID NO: 851147 - DNA, 75 bp, synthetic construct
  source 1..75: mol_type = other DNA
ggactaactgcggaaccttgagcgcaacggcaatctgggcctttatgttcttcattctcagtaaagaggaactgc

SEQ ID NO: 851148 - DNA, 75 bp, synthetic construct
  source 1..75: mol_type = other DNA
gtggtggcggcaataacagcggcccgaattcagagctgaatatttatcagtacggtggcggtaactctgctgttg

SEQ ID NO: 851149 - DNA, 75 bp, synthetic construct
  source 1..75: mol_type = other DNA
gctatctggttgcgaatgaacctgaaagaaagcccggtttttgagaaggttaacgacagcaaccaacctacagca

SEQ ID NO: 851150 - DNA, 75 bp, synthetic construct
  source 1..75: mol_type = other DNA
tccgataaaattggtcgccggatcccgtatattattatgaatacctccgcgattgtgctggcatggccaatgctt

SEQ ID NO: 851151 - DNA, 75 bp, synthetic construct
  source 1..75: mol_type = other DNA
gtgaaagaccgtgatttaagtgcgctggaagacgctgcggaagatcaaccgcgtgttgtaagagctgcgcaacct

SEQ ID NO: 851152 - DNA, 75 bp, synthetic construct
  source 1..75: mol_type = other DNA
cctccggcgtggcggaacccagtcgggccgacagacttattacaacgaatattgttaagacactggatttggtga

SEQ ID NO: 851153 - DNA, 75 bp, synthetic construct
  source 1..75: mol_type = other DNA
catccagcgagcattacgtctgctggagaaataccagcgtcaaccgagtgagtcatttacctctaccagccttac

SEQ ID NO: 851154 - DNA, 75 bp, synthetic construct
  source 1..75: mol_type = other DNA
ccctcatctaagcgagaaatttaaagctgagcttattgctgatcgggaagaaactgttagaaagattgttaacat

SEQ ID NO: 851155 - DNA, 75 bp, synthetic construct
  source 1..75: mol_type = other DNA
gaattcagagctgaatatttatcagtacggtggtggtaactctgcacttgctctgcaagctgatgctcgtaactc

SEQ ID NO: 851156 - DNA, 75 bp, synthetic construct
  source 1..75: mol_type = other DNA
ttgaagaatgatattcaatgtattgtaacaaaaaaaataaataaatatgttgatagcaaactaaaagcattaaca

SEQ ID NO: 851157 - DNA, 75 bp, synthetic construct
  source 1..75: mol_type = other DNA
cccccgcctcgatatgctggtggaaggaaatgccgcgctaactccgggtacgacgctgaaaattgtcgtgcataa

SEQ ID NO: 851158 - DNA, 75 bp, synthetic construct
  source 1..75: mol_type = other DNA
taatggaaaaggcaaaatcatcgacggtaatctcatttgccgcgagctcggctttgagtatcagtatcctgaccc

SEQ ID NO: 851159 - DNA, 75 bp, synthetic construct
  source 1..75: mol_type = other DNA
tctgcaacgtgtggcacaggagatttcggggatacttgtgcgtgtgccgttgacattacagcgtaaatattcgga

SEQ ID NO: 851160 - DNA, 75 bp, synthetic construct
  source 1..75: mol_type = other DNA
gcacaaagagaaaaggatattgaaaacgaaaaactccgcaaagaagtggcggatttgcgtgccgccaccgaatct

SEQ ID NO: 851161 - DNA, 75 bp, synthetic construct
  source 1..75: mol_type = other DNA
ttagaacagtcgcatctaccagatgcgcagcgttatgccgcttatcagccacgacgtgaaacgttccgtcgcctc

SEQ ID NO: 851162 - DNA, 75 bp, synthetic construct
  source 1..75: mol_type = other DNA
cagcagtttctgggcggtgcaccgtttattatcagcggtgcctgcgggatgttccgtactgatgtattgcgtaag

SEQ ID NO: 851163 - DNA, 75 bp, synthetic construct
  source 1..75: mol_type = other DNA
tttgaagcactgtttattcttacggcggtggatgcgggtacgcgtgctgcgcgctttatgttgcaggatctgctg

SEQ ID NO: 851164 - DNA, 75 bp, synthetic construct
  source 1..75: mol_type = other DNA
aaatcagcaacagaaatcatcgctgtttccgggccgcgctgctgggtaggatttgatccttcgcgtggcgtggat

SEQ ID NO: 851165 - DNA, 75 bp, synthetic construct
  source 1..75: mol_type = other DNA
cgttcgctgtatcgcaattttactcaccactatatcaaggtaaaacgcagcatcggcgtagcagctggtgagagt

SEQ ID NO: 851166 - DNA, 75 bp, synthetic construct
  source 1..75: mol_type = other DNA
aacataaggcaggagtttaattactcaactgaaattactgatttcatgagagcggtatatttcctgtatctcaat

SEQ ID NO: 851167 - DNA, 75 bp, synthetic construct
  source 1..75: mol_type = other DNA
gcaggggcatcatattcaggaaaattcgacgtcttttttcagaaatggcggcaggccgtccggggtgattgagat

SEQ ID NO: 851168 - DNA, 75 bp, synthetic construct
  source 1..75: mol_type = other DNA
caggggcatcatattcaggcaaattcaacgtcttttttcagaaatggcggcaggccgtccggggtgattgagatc

SEQ ID NO: 851169 - DNA, 75 bp, synthetic construct
  source 1..75: mol_type = other DNA
gttggcatttaatgtctgtaatgctgagtgcggcgtcgtgtctggattgggccgcgaaattaaccggcctgagca

SEQ ID NO: 851170 - DNA, 75 bp, synthetic construct
  source 1..75: mol_type = other DNA
tcgaaggggctggcattagcgctaacggcataatgagcgcagtaatcggactcattctaatagcagcgaccgtag

SEQ ID NO: 851171 - DNA, 75 bp, synthetic construct
  source 1..75: mol_type = other DNA
acaaagcgccagcagtagcggcaatgcaggggctggcggttcaggtctgacaggaaaggcgcgtggtagccgggg

SEQ ID NO: 851172 - DNA, 75 bp, synthetic construct
  source 1..75: mol_type = other DNA
ggctcccgcgctgaggtgggggatcgggtactgtcgtatcacgaactggctaagatttggcttgctattgaaaga

SEQ ID NO: 851173 - DNA, 75 bp, synthetic construct
  source 1..75: mol_type = other DNA
gcttcacctgccggatgattttgccgggatactgtctgcccctaataaagtcggtgcaagtggcgtaccggcgat

SEQ ID NO: 851174 - DNA, 75 bp, synthetic construct
  source 1..75: mol_type = other DNA
tcgatgtttaatccgggggcaggcgacagcctaagctcgctgattaaagagtatctatctatagcccttatcctg

SEQ ID NO: 851175 - DNA, 75 bp, synthetic construct
  source 1..75: mol_type = other DNA
ttttcgcaaaagtagacggggcgattacgtcaatggtgagcgccaacgttgccaccattatctctgacgttacgc

SEQ ID NO: 851176 - DNA, 75 bp, synthetic construct
  source 1..75: mol_type = other DNA
ctgacatcgaagacaggtgatagcgaaaaagcagcagacccggagaagacgaaggtgattatcgtgacgcttgcc

SEQ ID NO: 851177 - DNA, 75 bp, synthetic construct
  source 1..75: mol_type = other DNA
ttagcggtcagcaactgaattaccgcacggggggggatgtggggccagcattaggcgcagcaagactggcacaga

SEQ ID NO: 851178 - DNA, 75 bp, synthetic construct
  source 1..75: mol_type = other DNA
tatgtctgatgcggctggcaccatgtggttggatgtcgcaaagcgagattggagtgatgtcatgctggaggcttg

SEQ ID NO: 851179 - DNA, 75 bp, synthetic construct
  source 1..75: mol_type = other DNA
gtgatctccagcggaatttctctgatctcgctctggcatacctacgccgacgagcattaccgggtgatctggccg

SEQ ID NO: 851180 - DNA, 75 bp, synthetic construct
  source 1..75: mol_type = other DNA
tcctcgcaacccgtacccgccacgcttttaccattgacgggcaaatgggcgtgaaccgcgacggaacattgaaag

SEQ ID NO: 851181 - DNA, 75 bp, synthetic construct
  source 1..75: mol_type = other DNA
atggcgttattgctattgacggtgatgacgtgcgcccactgtaaaaagtgggtagtaaaagtggggagtgtgggg

SEQ ID NO: 851182 - DNA, 75 bp, synthetic construct
  source 1..75: mol_type = other DNA
atgagcaccatcctgaaatgggcgggaaataaaaccgccgtaatgtccgaactgaaaaaacatcttccagctggc

SEQ ID NO: 851183 - DNA, 75 bp, synthetic construct
  source 1..75: mol_type = other DNA
taccgtggtgtccgcggtgatttacacctttgtctggcctgaaagtgaagcgcgcacgctgccgcaaaaactggc

SEQ ID NO: 851184 - DNA, 75 bp, synthetic construct
  source 1..75: mol_type = other DNA
gtcgcgatcttgtttgtggttgccacggtgctggagatcggcagcctgtttttgatctacaaatggtcatatggc

SEQ ID NO: 851185 - DNA, 75 bp, synthetic construct
  source 1..75: mol_type = other DNA
gtcgcgatcttgtttgtggtcgccacgatgctggagatcggcagcctgtttttgatctacaaatggtcatacggc

SEQ ID NO: 851186 - DNA, 75 bp, synthetic construct
  source 1..75: mol_type = other DNA
ctatagcggcgtggactgggaaggcattcacacctgtatgttgacctgcgtgatcgtcgctaacccaaatgttgg

SEQ ID NO: 851187 - DNA, 75 bp, synthetic construct
  source 1..75: mol_type = other DNA
ttttcgcccgcttgccagactggacagccccggcattaacgcccgccaaggaacaggtacaaggagccacgcaat

SEQ ID NO: 851188 - DNA, 75 bp, synthetic construct
  source 1..75: mol_type = other DNA
gagcaggtcagtttgccgacgcctggagaaatacgctgccggtctggcaaccgcactcagccgttctcctcaaat

SEQ ID NO: 851189 - DNA, 75 bp, synthetic construct
  source 1..75: mol_type = other DNA
tgattgtttcccctatcgtcggcctggtcattgcgggtggtctgattttcctgctgcgccgtttctggagtggga

SEQ ID NO: 851190 - DNA, 75 bp, synthetic construct
  source 1..75: mol_type = other DNA
ttaatgaaggttttacagatgaaaaactttatataccaataattcgaaatggtgttgagtaccatgcttatccag

SEQ ID NO: 851191 - DNA, 75 bp, synthetic construct
  source 1..75: mol_type = other DNA
ccggtataccatccggccgccacacagcacgcattcgagcgggtcacgactcaggaactgtttcaccatttgtgc

SEQ ID NO: 851192 - DNA, 75 bp, synthetic construct
  source 1..75: mol_type = other DNA
ccgggccgatcctgatgggctgtatgtttttgatgcgcacccatcggctgggactggtctttttcgctgtcgcca

SEQ ID NO: 851193 - DNA, 75 bp, synthetic construct
  source 1..75: mol_type = other DNA
tgcaactctgggtaggctgcctgctggtgattctgatctcgatgacttttgagatcccttttgtggcgttatcgc

SEQ ID NO: 851194 - DNA, 75 bp, synthetic construct
  source 1..75: mol_type = other DNA
cattatgctgtgcatctctgatacctccgcgaagctggcgaaactgccaggcgtcagtaaagaagaccagaacct

SEQ ID NO: 851195 - DNA, 75 bp, synthetic construct
  source 1..75: mol_type = other DNA
tcttatatcggaacgcagatggtggtgaccttcgcgctcgccacactcgaaaacgtttttggtccggtgtatgac

SEQ ID NO: 851196 - DNA, 75 bp, synthetic construct
  source 1..75: mol_type = other DNA
cgtcattgctctggtttcttcattagagaggaaagaaacacgcatggggcgaagtagctacgtagtcaccagcaa

SEQ ID NO: 851197 - DNA, 75 bp, synthetic construct
  source 1..75: mol_type = other DNA
actgatttcatgaaagcggtatattttctgtatctcaatcgtcacggttaccgtggtttatgtcgctataacaag

SEQ ID NO: 851198 - DNA, 75 bp, synthetic construct
  source 1..75: mol_type = other DNA
gaaataaaaccgccattatgttcgaactgaaaaaacatcttcctgctggtccgcgactggttgaacctttcgcgg

SEQ ID NO: 851199 - DNA, 75 bp, synthetic construct
  source 1..75: mol_type = other DNA
actgatttcatgaaagcagtatatttcctatatctcaatcgccatggttatcgtgggctgtgccgctacaacttg

SEQ ID NO: 851200 - DNA, 75 bp, synthetic construct
  source 1..75: mol_type = other DNA
atccgttcgctgtatcgcaattttactcaccactatatcaaggtaaaacgcagcatcggcgtagcagctggtgag

SEQ ID NO: 851201 - DNA, 75 bp, synthetic construct
  source 1..75: mol_type = other DNA
tgtttctaacaatgacacatccctgattcgttcgctgtatcgcaattttactcaccactatatcaaggcaaaacg

SEQ ID NO: 851202 - DNA, 75 bp, synthetic construct
  source 1..75: mol_type = other DNA
gttgtgctgcaagaaatcccggaaggtaacttcttcggcaaaatcattgattacattaagttaatgttccatcac

SEQ ID NO: 851203 - DNA, 75 bp, synthetic construct
  source 1..75: mol_type = other DNA
gaaagcgtattcctgcacttcactaatctcacaccgtggcatgcatcgctgccaaaaggcgtgactgagcatcct

SEQ ID NO: 851204 - DNA, 75 bp, synthetic construct
  source 1..75: mol_type = other DNA
gggctcgatgctcaaagcgatccttgcctttggctttgatggcccctggacatccagcggcggttcatttcgcct

SEQ ID NO: 851205 - DNA, 75 bp, synthetic construct
  source 1..75: mol_type = other DNA
taaaattggcgaacgtcagggtcaggaactgtataaagagatgcagaaacgtggctgggatgtcaaagaaagcgc

SEQ ID NO: 851206 - DNA, 75 bp, synthetic construct
  source 1..75: mol_type = other DNA
ctgaaacaggacgatgtaatatacactgcggtattatcgttcgtgatggtaatgatatcttccagctggctgaat

SEQ ID NO: 851207 - DNA, 75 bp, synthetic construct
  source 1..75: mol_type = other DNA
tgattactggcaggtaaaaacagaaggcgatattatttcccctggcagacatattattgatacgccattaatggg

SEQ ID NO: 851208 - DNA, 75 bp, synthetic construct
  source 1..75: mol_type = other DNA
tgatttggtcggaatagctggcgtgatgttaggcgctgcttcctgcggtttacccgtgttgctggatggatttct

SEQ ID NO: 851209 - DNA, 75 bp, synthetic construct
  source 1..75: mol_type = other DNA
atacccatcatcgaagctgcttgcgcgatatacaacaacatgggcgaacttgctgccagcaacattattctaccg

SEQ ID NO: 851210 - DNA, 75 bp, synthetic construct
  source 1..75: mol_type = other DNA
tgatttggtcggaatggctggcgtgatctcaggagccgcttcctgtggtttacccgtgttgttggatggctttct

SEQ ID NO: 851211 - DNA, 75 bp, synthetic construct
  source 1..75: mol_type = other DNA
taaaagcaattttaaagagggaaaggcctcgatggatttcattaaatagatttaatgagcaatactatagagatg

SEQ ID NO: 851212 - DNA, 75 bp, synthetic construct
  source 1..75: mol_type = other DNA
taaacttgaacaaattgaattaatcaaaaattgcattgctgtaatacaaccaaccttatttgaaggcgggcctgg

SEQ ID NO: 851213 - DNA, 75 bp, synthetic construct
  source 1..75: mol_type = other DNA
tcatcgaagctgcctgtgcgatatacaacaacatgggcgaacttgctgccagtaatattgttctaccggggaata

SEQ ID NO: 851214 - DNA, 75 bp, synthetic construct
  source 1..75: mol_type = other DNA
atacgcgggagctggcaacaaacggtgtcacgttgtttggcgtaggtgaactggggatggcaaacacgacaccgg

SEQ ID NO: 851215 - DNA, 75 bp, synthetic construct
  source 1..75: mol_type = other DNA
atacgcgtgaactggcgaaaaatggcgtcacgttgtttggtgtgggtgagctgggaatggcaaacacgacgccgg

SEQ ID NO: 851216 - DNA, 75 bp, synthetic construct
  source 1..75: mol_type = other DNA
ttgaatcaaccaaatccgcaggatggcgttgatgtcctggcaaaagtgggtggatttgatttggtcggaatggct

SEQ ID NO: 851217 - DNA, 75 bp, synthetic construct
  source 1..75: mol_type = other DNA
actggaattccggtgtattggcagaccctgataatcacctgacccacgaagagcgctctgttttgcagaaaaaag

SEQ ID NO: 851218 - DNA, 75 bp, synthetic construct
  source 1..75: mol_type = other DNA
cttcgcccaaaaaatacctcgacatgtactcacaatatatgagcgcgtatcagaagcagcatcctgatttatttt

SEQ ID NO: 851219 - DNA, 75 bp, synthetic construct
  source 1..75: mol_type = other DNA
gttataagcttgggtaatcagtgtataagcctccggcgaaatgatatttctcaaactatccagcaaagttcaccg

SEQ ID NO: 851220 - DNA, 75 bp, synthetic construct
  source 1..75: mol_type = other DNA
ggtcggtaaagatgcctgggcgacgggaaatccggcactgcgtggttcatcggtaatgttcctcaaaccgggcga

SEQ ID NO: 851221 - DNA, 75 bp, synthetic construct
  source 1..75: mol_type = other DNA
atgagctggagagaaacaatcaaggtaagtagtattatttcacaaaataccgggcactttctggtgccgcatcgt

SEQ ID NO: 851222 - DNA, 75 bp, synthetic construct
  source 1..75: mol_type = other DNA
ccgggccgtgggttttacaggaatcgaaactgaatcagtacgatgtcttcgtccgtaacgaaaactactggggcg

SEQ ID NO: 851223 - DNA, 75 bp, synthetic construct
  source 1..75: mol_type = other DNA
atatgtctcaatatcctatgataacctatcaacctggttatatgagaggaaatgctgaattttttggatataatg

SEQ ID NO: 851224 - DNA, 75 bp, synthetic construct
  source 1..75: mol_type = other DNA
ttcgctgtataccgaattgcagactgtgttccgatgcgtgagaaacgcccactgacgagtaaacaacagctggct

SEQ ID NO: 851225 - DNA, 75 bp, synthetic construct
  source 1..75: mol_type = other DNA
ttaatgcccggttcgacatccgcattctgaaacagactgcggccgcacatagcgatccggctgactggctggaag

SEQ ID NO: 851226 - DNA, 75 bp, synthetic construct
  source 1..75: mol_type = other DNA
attcgccatgctggcacatacctggttaacgctggaccccgtcttcctcgataccgaaacgaccggacttgatgc

SEQ ID NO: 851227 - DNA, 75 bp, synthetic construct
  source 1..75: mol_type = other DNA
ttttctggtttaccttattgccgattatggcgggaatttgctcatcatttgccagccagggaaacctgctggggc

SEQ ID NO: 851228 - DNA, 75 bp, synthetic construct
  source 1..75: mol_type = other DNA
tcggcaaccatcctcgggatcacggtaatcggcgggctgatcgcttcgtatgtgcatattaacgtggtgacgtcg

SEQ ID NO: 851229 - DNA, 75 bp, synthetic construct
  source 1..75: mol_type = other DNA
tggtattcggcattggcctgatgctggtactgacaaagaccgcaggttcagacacattcgctgcattagcaatgc

SEQ ID NO: 851230 - DNA, 75 bp, synthetic construct
  source 1..75: mol_type = other DNA
cttggcgcacgggtcaacatcgaaatcgatccgcaaacccaggcggtggtggatacggtggaacgtgtactggcg

SEQ ID NO: 851231 - DNA, 75 bp, synthetic construct
  source 1..75: mol_type = other DNA
ctgttggcgcagaatttagtcgtgtattcgcagagttaatatttcaagatatagataactgcattattaaaaaga

SEQ ID NO: 851232 - DNA, 75 bp, synthetic construct
  source 1..75: mol_type = other DNA
acttacaaggttttggtttgtaaaatggaaccagcttaacaatctaagccttttagaaagaaaggagttgaggac

SEQ ID NO: 851233 - DNA, 75 bp, synthetic construct
  source 1..75: mol_type = other DNA
tatgtggatgattatttcatttttgcaataaacgagagtgttgcggaaagagttcatgacatcattagtgacgag

SEQ ID NO: 851234 - DNA, 75 bp, synthetic construct
  source 1..75: mol_type = other DNA
tacttatccgcgaagccgtccgctacagcggtgaacaagaaacgctgccgcttagcccgcagtggatcctccgcc

SEQ ID NO: 851235 - DNA, 75 bp, synthetic construct
  source 1..75: mol_type = other DNA
acatttgagcagtcatatagcgaagtggatggcgatagtgcctcaatggctgaactctgcgccctgataagcgcc

SEQ ID NO: 851236 - DNA, 75 bp, synthetic construct
  source 1..75: mol_type = other DNA
catacgcgagcatcctcctcttttatgctggcgaaggccccggaagagtctgagtatctgaatcttattgccaat

SEQ ID NO: 851237 - DNA, 75 bp, synthetic construct
  source 1..75: mol_type = other DNA
tatgtggatgattatttcatatttgctgtaaatcaagatatagctcagcatgtatatggtgtcattagtgatgag

SEQ ID NO: 851238 - DNA, 75 bp, synthetic construct
  source 1..75: mol_type = other DNA
aatgtaaataattataactatttcttcattataagtttgctgtattattataaggatcacaacgtatatgaagaa

SEQ ID NO: 851239 - DNA, 75 bp, synthetic construct
  source 1..75: mol_type = other DNA
cgcgtccagtcattgctggcgattaaggcaatctttggtgatgatttgccagacgatagcttgtttactgcaaaa

SEQ ID NO: 851240 - DNA, 75 bp, synthetic construct
  source 1..75: mol_type = other DNA
ttcatcgtcaaacagattagctacatcaatagctattgtgcagaaattctttatcaaagagtcagagatatttct

SEQ ID NO: 851241 - DNA, 75 bp, synthetic construct
  source 1..75: mol_type = other DNA
agcaggatgagattgaaagtgatttatcttaccttttaactaagtattggtttgttaaatgggagcagaataaca

SEQ ID NO: 851242 - DNA, 75 bp, synthetic construct
  source 1..75: mol_type = other DNA
tgatctggagaaagactccgagctggttcacttatttttggactgcatgagctgtaagtatatttccctgcattt

SEQ ID NO: 851243 - DNA, 75 bp, synthetic construct
  source 1..75: mol_type = other DNA
gtgagtgcagatgataattttgcgactttaacgcaagttgtcgctgccgactgggtagaagcagagcaactcttt

SEQ ID NO: 851244 - DNA, 75 bp, synthetic construct
  source 1..75: mol_type = other DNA
tcgatccacaaactcaggcagtggtagatacggtagaacgtgtgctggcggcacgagaaaatgccatgaatcaac

SEQ ID NO: 851245 - DNA, 75 bp, synthetic construct
  source 1..75: mol_type = other DNA
ccgcaaaactggtgtcgattgacgagaaaccaaattttcgtacgcatgtggtggagttacccgaccacatgctgg

SEQ ID NO: 851246 - DNA, 75 bp, synthetic construct
  source 1..75: mol_type = other DNA
cgtttttgcgcgaaattggcgatacagcgacggcaggcttgcttactgccgatgggcgtcccacgaaacagctta

SEQ ID NO: 851247 - DNA, 75 bp, synthetic construct
  source 1..75: mol_type = other DNA
tcgatccacaaactcaggcagtggtagatacggtagaacgtgtgctggcgatgcgggaaaaggcgttgaatcaat

SEQ ID NO: 851248 - DNA, 75 bp, synthetic construct
  source 1..75: mol_type = other DNA
gtaacggaaattaatggcaaccgcatcagttttgatctgatgaaagaaacgttgcggattaccaatcttggtgat

SEQ ID NO: 851249 - DNA, 75 bp, synthetic construct
  source 1..75: mol_type = other DNA
tgaaattggcggacacttaatgtcaggtcatattatgaccactgctgaagtggcgaaaaatattaacctcagaaa

SEQ ID NO: 851250 - DNA, 75 bp, synthetic construct
  source 1..75: mol_type = other DNA
gtgtgtccttgcaactctgtatcgggctgcagctacacatcctaaaattaaattattacaatttaaattaatacc

SEQ ID NO: 851251 - DNA, 75 bp, synthetic construct
  source 1..75: mol_type = other DNA
ccctctctgatggctgattttactggtgaactgcatagactcatttctgaatatttgcagtgtaagcgacgtaga

SEQ ID NO: 851252 - DNA, 75 bp, synthetic construct
  source 1..75: mol_type = other DNA
atttgagtcttcacagcgaactggtgaaggcggttgaggaaggcaaattcacaatctgggcagtggacgatgtca

SEQ ID NO: 851253 - DNA, 75 bp, synthetic construct
  source 1..75: mol_type = other DNA
attggtattgcagcgtttgtttccggtatgttttcccgctggctggcaaaaaccatcactctctcgccacatact

SEQ ID NO: 851254 - DNA, 75 bp, synthetic construct
  source 1..75: mol_type = other DNA
atgtctggtgtaagagtcgtgaggtggtggttctcagaaatctgattgagcaggcgtggggaaaagtattgggtg

SEQ ID NO: 851255 - DNA, 75 bp, synthetic construct
  source 1..75: mol_type = other DNA
tgtggctaacgataccactccttatcttatggtactgctacttaataacgatgtctggtgtaagagtcgtgaggt

SEQ ID NO: 851256 - DNA, 75 bp, synthetic construct
  source 1..75: mol_type = other DNA
ccctaacccaacctggacgcctacggcgggcattcgtcagcgttcgctggagcgtggcattaaattaccgcccgt

SEQ ID NO: 851257 - DNA, 75 bp, synthetic construct
  source 1..75: mol_type = other DNA
tatctcctttccggcccgacgattatgatgccagggcacggtcacgggcatatggaacacagcaactggcggatg

SEQ ID NO: 851258 - DNA, 75 bp, synthetic construct
  source 1..75: mol_type = other DNA
cagccagaaggagctggaagatgtgctctactctaatctcgaagaactgacgcgaatggcgaaaatggtcagcga

SEQ ID NO: 851259 - DNA, 75 bp, synthetic construct
  source 1..75: mol_type = other DNA
aggagaagaagtagctgatttcagccaccgggaaaatgacatcaaaaatgctattaatctgacgttctggggaat

SEQ ID NO: 851260 - DNA, 75 bp, synthetic construct
  source 1..75: mol_type = other DNA
tgcgccgcgtcagggaattattgttaaccttgctgagctgcgactttattattatccgccgggagaaaatatcgt

SEQ ID NO: 851261 - DNA, 75 bp, synthetic construct
  source 1..75: mol_type = other DNA
acgggaacgccggtgaaagtgatcaacgaaccggtgaaatattccgtggagcctaacgggatgcgttatgttgaa

SEQ ID NO: 851262 - DNA, 75 bp, synthetic construct
  source 1..75: mol_type = other DNA
aactgcgatttgttggcgacaagtgtcaggtcgcgggcgatccgttgatgttgcgtcgggcgttaagcaacctgc

SEQ ID NO: 851263 - DNA, 75 bp, synthetic construct
  source 1..75: mol_type = other DNA
atgccgaaatccgtgattattcccacaggcagcagcgcgccgctggcaccgttcgttcccggcacactggctgat

SEQ ID NO: 851264 - DNA, 75 bp, synthetic construct
  source 1..75: mol_type = other DNA
catggccagcgtcacggcctccgtcaccggggaggaagtggccgatctcagccaccgggaaaatgacatcaaaaa

SEQ ID NO: 851265 - DNA, 75 bp, synthetic construct
  source 1..75: mol_type = other DNA
cggaaatcgccctcagccagtcgcgcagccagaaggagctggaagatgtgctctactctaatctcgaagaactga

SEQ ID NO: 851266 - DNA, 75 bp, synthetic construct
  source 1..75: mol_type = other DNA
atagtgaaatcgattgttgtcgcgcataaaggcactgttgcagtaacgtcagatgtgcgggggacaaggtttgtt

SEQ ID NO: 851267 - DNA, 75 bp, synthetic construct
  source 1..75: mol_type = other DNA
atcgtgctgttggcggtacataaaggtcacgcgccgatccgcagcgtcagccgtcaaatccagaatatcacctcg

SEQ ID NO: 851268 - DNA, 75 bp, synthetic construct
  source 1..75: mol_type = other DNA
catatgatcgagcgtattgaggatgtctttacccgccagtccaatttctcagcggatatcgctcacgaaattcgc

SEQ ID NO: 851269 - DNA, 75 bp, synthetic construct
  source 1..75: mol_type = other DNA
gaataacaccagtgcgcaactcaccgccggatctttaatgacgccctggcataaaggctcgtcaacagtgattaa

SEQ ID NO: 851270 - DNA, 75 bp, synthetic construct
  source 1..75: mol_type = other DNA
atgaagccaggatttgcctcttatatacgagcattattgaccataatatttcttagctggggcgtcattcctgcg

SEQ ID NO: 851271 - DNA, 75 bp, synthetic construct
  source 1..75: mol_type = other DNA
gctgctgttgaccagactgcatctaactccagcgttaacgtcactcaggttggctttggtaacaacgcgaccgct

SEQ ID NO: 851272 - DNA, 75 bp, synthetic construct
  source 1..75: mol_type = other DNA
gagaagtaccgcgctcagtaccttaagcgctatccgctgtgcgttgagtgtcagaagctgggcctctacgttcct

SEQ ID NO: 851273 - DNA, 75 bp, synthetic construct
  source 1..75: mol_type = other DNA
gcagggctgtaccgagagcaggaagagcgtgcagcccatcgcaatgactggatgtatgagggcagaaatgaatga

SEQ ID NO: 851274 - DNA, 75 bp, synthetic construct
  source 1..75: mol_type = other DNA
ccattgtgccaggcgtgccacaaccgtaagacgaagcgggttgatccggcaacaaaaggcaaccgtgacgcgggc

SEQ ID NO: 851275 - DNA, 75 bp, synthetic construct
  source 1..75: mol_type = other DNA
ttttctgcgtttacaacagcacgctgccgtctggagtttgatcagtgccactgcaatgctcgccgttcagggcgg

SEQ ID NO: 851276 - DNA, 75 bp, synthetic construct
  source 1..75: mol_type = other DNA
gtcacgcgccgatccgcagcgtcagccgtcaaatccagaatattacctcgaaagatctcgacgttcgccttgacc

SEQ ID NO: 851277 - DNA, 75 bp, synthetic construct
  source 1..75: mol_type = other DNA
cgcaaacggaaatcgccctcagccagtctcgcagccagaaggagctggaagatgtgctctactctaatctcgaag

SEQ ID NO: 851278 - DNA, 75 bp, synthetic construct
  source 1..75: mol_type = other DNA
aacacaaagccaatggtaatcggtatgacagggagttaattcttgatgccatttccagaggtcaatcacaaagtt

SEQ ID NO: 851279 - DNA, 75 bp, synthetic construct
  source 1..75: mol_type = other DNA
agtctggctttggcagattgttcttgccctcgttacgctaaccgttgcgttcatgcaaccggggaatatgtcgcg

SEQ ID NO: 851280 - DNA, 75 bp, synthetic construct
  source 1..75: mol_type = other DNA
cacacttgcgacgtactgggggcagcttttattacttaaagtcatactggtaatggttatggtggccatcgcgct

SEQ ID NO: 851281 - DNA, 75 bp, synthetic construct
  source 1..75: mol_type = other DNA
aacaaccagttaatccccgaaaagaaaatgctcaacctggcggatgaagtcggcaaagtgttcgattttttcgag

SEQ ID NO: 851282 - DNA, 75 bp, synthetic construct
  source 1..75: mol_type = other DNA
tttggacctacaccctgattaccgccctgacgccaggaccgaacaatattctcgctcttagctcagccactacgc

SEQ ID NO: 851283 - DNA, 75 bp, synthetic construct
  source 1..75: mol_type = other DNA
acggcactgtcgacgtttgtcctgccgcaaacgcaggcgttaagctgggtagttggcgtcagcgttttgctggcg

SEQ ID NO: 851284 - DNA, 75 bp, synthetic construct
  source 1..75: mol_type = other DNA
aattggggaaatgctgccggatttagtttttatccgggtaaaaatcttggggccataggtgatgcgggggctatt

SEQ ID NO: 851285 - DNA, 75 bp, synthetic construct
  source 1..75: mol_type = other DNA
ttatatcaaggtgttaatagccgactggatgaaattcaagcagcaatgctaaatgtaaaattaaaatatcttgat

SEQ ID NO: 851286 - DNA, 75 bp, synthetic construct
  source 1..75: mol_type = other DNA
cgttggcgtaagtgtcttgctggcgatgattggcacgtttggtaatgtctgctgggcattggcggggcatctgtt

SEQ ID NO: 851287 - DNA, 75 bp, synthetic construct
  source 1..75: mol_type = other DNA
tttggacctacaccctgattaccgctctgacgcccggaccaaataacattctggcgcttagctccgccacatcgc

SEQ ID NO: 851288 - DNA, 75 bp, synthetic construct
  source 1..75: mol_type = other DNA
gtttggtacggtctgggggatcatgcacgcctttatcgccctcggggcggtaaaacaagcaacactgcaaatggt

SEQ ID NO: 851289 - DNA, 75 bp, synthetic construct
  source 1..75: mol_type = other DNA
tggctcaaaaataaaatacaaacatgagtttaaaggtgtaaatagtcgattggatgaaattcaggcagctttcct

SEQ ID NO: 851290 - DNA, 75 bp, synthetic construct
  source 1..75: mol_type = other DNA
ctaaaagaaacggaagatgatatggctggtagtgattatattctgtttacaggtatgcgtgatactgatagtccg

SEQ ID NO: 851291 - DNA, 75 bp, synthetic construct
  source 1..75: mol_type = other DNA
aaactggaactgaattacgataactttatggaagagtttactgcgattctgcaccgccaggcgtttaccgttagc

SEQ ID NO: 851292 - DNA, 75 bp, synthetic construct
  source 1..75: mol_type = other DNA
ccgctatcccggcagttatggcctacaaccgcctcaaccagcgcgtaaacaaactggaactgaattacgacaact

SEQ ID NO: 851293 - DNA, 75 bp, synthetic construct
  source 1..75: mol_type = other DNA
aaactggaactgaattacgacaactttatggaagagtttaccgcgattctgcaccgccaggcgtttaccgttagc

SEQ ID NO: 851294 - DNA, 75 bp, synthetic construct
  source 1..75: mol_type = other DNA
ttgatgaaatacaggccgcaatgttacgtgtaaaactcaaaatgttgagtgaagatattaaacttagacaatgta

SEQ ID NO: 851295 - DNA, 75 bp, synthetic construct
  source 1..75: mol_type = other DNA
ccaacagtaaatctcaatggtagtgcatttttttcgcaatctccttctgacgctattttttgtcgccatctgtca

SEQ ID NO: 851296 - DNA, 75 bp, synthetic construct
  source 1..75: mol_type = other DNA
caacagtaaatctcaatgatagtgcatttttttgcaatctccttctgacactattttttgtcgccatctgtcatt

SEQ ID NO: 851297 - DNA, 75 bp, synthetic construct
  source 1..75: mol_type = other DNA
atgagtcaaaacgacattattatcagaactcattataagtctcctcatagaatgcacatcgatagcgacatacca

SEQ ID NO: 851298 - DNA, 75 bp, synthetic construct
  source 1..75: mol_type = other DNA
gcgttagcggaagatcgcggcgtagcactacggtttgttggcgacaaatgtcaggttgcgggcgatccgctgatg

SEQ ID NO: 851299 - DNA, 75 bp, synthetic construct
  source 1..75: mol_type = other DNA
ctacattgcgctttcgatcgattttcatcttcattacataaatgatttgatgaataaacttattatgaccgcatc

SEQ ID NO: 851300 - DNA, 75 bp, synthetic construct
  source 1..75: mol_type = other DNA
tatggaacacagcaactggcggatgattagcttgccggttggcccactggtggacggcaaaccgatttatacgct

SEQ ID NO: 851301 - DNA, 75 bp, synthetic construct
  source 1..75: mol_type = other DNA
gattatttaaataaaaataatatcgacacgttgattcattatccaattccaccacataaacaaaaagcatataac

SEQ ID NO: 851302 - DNA, 75 bp, synthetic construct
  source 1..75: mol_type = other DNA
gggtggggagatgcgggggcttttagtttttatccaggtaaaaatttgggggcccttggtgattctggggctatt

SEQ ID NO: 851303 - DNA, 75 bp, synthetic construct
  source 1..75: mol_type = other DNA
ttcatttgtatggacgaatttgtcctatggaagaaatattatcattggcgaaaaaatataatcttcttgtgttag

SEQ ID NO: 851304 - DNA, 75 bp, synthetic construct
  source 1..75: mol_type = other DNA
acttgatacctctgatttaagttcgatgctgtcatactgtgttactcaggaatttaccgcaagctgtcgaaaaat

SEQ ID NO: 851305 - DNA, 75 bp, synthetic construct
  source 1..75: mol_type = other DNA
atcacaaaattgttattccactgccctttttaccattaactttgccacttcacccatccatgcagaaaatatact

SEQ ID NO: 851306 - DNA, 75 bp, synthetic construct
  source 1..75: mol_type = other DNA
tcgggattgatatgccattccaggatgatccaaccgatgaatgggcgatccgtgatggtgactggaagatgatta

SEQ ID NO: 851307 - DNA, 75 bp, synthetic construct
  source 1..75: mol_type = other DNA
gccgttacgctttgttttggcccgattgcaatcttctgcctgctgtggggagcgacaaaaaacatctttgctcgc

SEQ ID NO: 851308 - DNA, 75 bp, synthetic construct
  source 1..75: mol_type = other DNA
cggccagggtaaccttacagcagcattacaattttgtaatgaaccaggctgtttctataacatatgatttatggc

SEQ ID NO: 851309 - DNA, 75 bp, synthetic construct
  source 1..75: mol_type = other DNA
tcttgggcaggcgttgaataaaatgcatcatgctttagtcaaagattttgaacgcctaagtcaatttgctgacga

SEQ ID NO: 851310 - DNA, 75 bp, synthetic construct
  source 1..75: mol_type = other DNA
agcaatgttttggtgaaactggattcgctctctcttaacaaggaaattgggaatttgttagactatctggaatac

SEQ ID NO: 851311 - DNA, 75 bp, synthetic construct
  source 1..75: mol_type = other DNA
taatagcccctttgttgccattgcatattgtttttgatggcgtctcgtttcggcttagtgctgtattccctgaag

SEQ ID NO: 851312 - DNA, 75 bp, synthetic construct
  source 1..75: mol_type = other DNA
ggaaggggagggttattttcacctttgccgggctaaagacaaatacccggtgcgtatcgatcacgtgattcacta

SEQ ID NO: 851313 - DNA, 75 bp, synthetic construct
  source 1..75: mol_type = other DNA
agacatcaatcatctgctctccaatgactagtctaaaaactagtattaagactatcacttatttaagtgatattg

SEQ ID NO: 851314 - DNA, 75 bp, synthetic construct
  source 1..75: mol_type = other DNA
ggaagcgcacggtcgaactaaatttaacgacaccgtacagagagaccaatttcgccgtgcgctttcgctttatgc

SEQ ID NO: 851315 - DNA, 75 bp, synthetic construct
  source 1..75: mol_type = other DNA
ggaagcgcacggtcgacgaaaatttaacgacaggctatctatgaaccagcaacctcgccgtgcgctttcgcgtta

SEQ ID NO: 851316 - DNA, 75 bp, synthetic construct
  source 1..75: mol_type = other DNA
gggaattactggagaaaagccggcgcatccagcttctggaagaaatgctgaaactggttcgtcaacagcgcttcg

SEQ ID NO: 851317 - DNA, 75 bp, synthetic construct
  source 1..75: mol_type = other DNA
catggaggaagtgctacgtatcactatctcaataagcataacgtgttccgaattacgttaccgcaaagaaattaa

SEQ ID NO: 851318 - DNA, 75 bp, synthetic construct
  source 1..75: mol_type = other DNA
tcttgggcaagcgctgaataagatgcatcaggcgttagtaaaagattttgaacgacttagtcaatttgctgacga

SEQ ID NO: 851319 - DNA, 75 bp, synthetic construct
  source 1..75: mol_type = other DNA
tcagacgggggacgaagaaaaaacaacaacacgacctgttcgtaagcccttgccttcgcatcttccccgtgcgga

SEQ ID NO: 851320 - DNA, 75 bp, synthetic construct
  source 1..75: mol_type = other DNA
tggcagaaatactaaattgcttgtctacggatgtttcggttgaaccgccccggaaatcctggagactaaactccc

SEQ ID NO: 851321 - DNA, 75 bp, synthetic construct
  source 1..75: mol_type = other DNA
atctgtcggtatttctgcattatttcagtttctacgtaaaaaattgatggacatgcctaaaattaacaaagaaaa

SEQ ID NO: 851322 - DNA, 75 bp, synthetic construct
  source 1..75: mol_type = other DNA
atgctggtgcgcaggaaatgttggatagcgcacttactcgcctacaagaacgtttatctgaaggtgaaaatatca

SEQ ID NO: 851323 - DNA, 75 bp, synthetic construct
  source 1..75: mol_type = other DNA
tgggagatatctggaggcggatcacggaaggggagggttattttcacctgtgccgggctaaagacaaatacccgg

SEQ ID NO: 851324 - DNA, 75 bp, synthetic construct
  source 1..75: mol_type = other DNA
tacttattacttattacttattacttattacttattacttattacttattacttattacttattacttattactt

SEQ ID NO: 851325 - DNA, 75 bp, synthetic construct
  source 1..75: mol_type = other DNA
tacttattacttattacttatttattgttttcgcgttgtggttggtttttaaatgagattaatgcaaaaaaataa

SEQ ID NO: 851326 - DNA, 75 bp, synthetic construct
  source 1..75: mol_type = other DNA
taaggatatattcttttgtttttattttaataaaaatgagttttacttattacttattacttattacttattact

SEQ ID NO: 851327 - DNA, 75 bp, synthetic construct
  source 1..75: mol_type = other DNA
tgccgggctaaagacaaatacccggtgcgtatcgatcacgtgattcactatagtgataaatctgcggtagacgac

SEQ ID NO: 851328 - DNA, 75 bp, synthetic construct
  source 1..75: mol_type = other DNA
aagctacttgctgattttgatacggttatagcgccgctattgccattgcatatcgtgtttgatggtgtttctttc

SEQ ID NO: 851329 - DNA, 75 bp, synthetic construct
  source 1..75: mol_type = other DNA
tgacaatcgacacaaacggtcagatggtcatgaaaagcaaacagcaattgaaagaggattttggtatctcagcaa

SEQ ID NO: 851330 - DNA, 75 bp, synthetic construct
  source 1..75: mol_type = other DNA
ccaaacgatgctggcgggatattactgggtaatggaatatacgtcaaacaagggacttcatattcattttatcgg

SEQ ID NO: 851331 - DNA, 75 bp, synthetic construct
  source 1..75: mol_type = other DNA
aagggcttcatattcattttatcggctatctggatgggcaacgtcacaagaactcttatcagatatccaggcaac

SEQ ID NO: 851332 - DNA, 75 bp, synthetic construct
  source 1..75: mol_type = other DNA
tgggtaatggaatatacaccagacaaaggactccatattcattttatcggctacctggatgggcaacgttacaag

SEQ ID NO: 851333 - DNA, 75 bp, synthetic construct
  source 1..75: mol_type = other DNA
ggcgcgcggatgccgctgttcttcacctgtacgggaaacacctgccaggtggatgaaaagcaaaacagccagggc

SEQ ID NO: 851334 - DNA, 75 bp, synthetic construct
  source 1..75: mol_type = other DNA
ctgggcgacaaagacagcctgttaaaaagcattgtggccgctgcggccaataacgccggtcagaactggtttgct

SEQ ID NO: 851335 - DNA, 75 bp, synthetic construct
  source 1..75: mol_type = other DNA
gagcctgaaaatcaacggcacggtattccctggcctttgcatgtcaccgcacgacggcgacgtaaaaatctcatg

SEQ ID NO: 851336 - DNA, 75 bp, synthetic construct
  source 1..75: mol_type = other DNA
ctgtttgtgggcaatgcacaaaacaacaaaggtaaggttctgccggttaatgccaacagcgatctggatgaactg

SEQ ID NO: 851337 - DNA, 75 bp, synthetic construct
  source 1..75: mol_type = other DNA
atcagtacaacacctacagcagcacgccggaggggattgaaaacacgctgttgttcgtgggaaaggcaaagaaaa

SEQ ID NO: 851338 - DNA, 75 bp, synthetic construct
  source 1..75: mol_type = other DNA
atgtggggaaaacgctggcggtgaatgcccagagtgattttgattcactgctgggcgaggaagccagcccgctca

SEQ ID NO: 851339 - DNA, 75 bp, synthetic construct
  source 1..75: mol_type = other DNA
aaggcggtgattaccagtcgattgaaacattgcgtgtcgcggataaagccgcacgtcgtgtgcgtctgctggcca

SEQ ID NO: 851340 - DNA, 75 bp, synthetic construct
  source 1..75: mol_type = other DNA
cactgcgtgaaatgtccacagcggccagtatcaatggcgtgtcatttccgggggaagtgaagccgccgcaggacg

SEQ ID NO: 851341 - DNA, 75 bp, synthetic construct
  source 1..75: mol_type = other DNA
ctgggcgacaaagacagcccgttaaaaaatatggtggccgcagcagccaataacgccggtcagaactggtttgct

SEQ ID NO: 851342 - DNA, 75 bp, synthetic construct
  source 1..75: mol_type = other DNA
gggcgtcaataaaattaagcgcgacgggaacggtactgcgtaaatccggtacgctggtggtaactaaaattgccg

SEQ ID NO: 851343 - DNA, 75 bp, synthetic construct
  source 1..75: mol_type = other DNA
agaacttccttcagtctgcactgaccaatgccggacagaatgcctttttctatgttgccgttctgccggaagccg

SEQ ID NO: 851344 - DNA, 75 bp, synthetic construct
  source 1..75: mol_type = other DNA
tgcccgccttgcggatcgcgcgctcaacagcacaccgggcagcattgccgccagccagacatatttcagccgcac

SEQ ID NO: 851345 - DNA, 75 bp, synthetic construct
  source 1..75: mol_type = other DNA
gggaatgcaggacgaagaagcccaggcggattatcaggtacgcatggccacccttcaggatggcattgcagaaaa

SEQ ID NO: 851346 - DNA, 75 bp, synthetic construct
  source 1..75: mol_type = other DNA
cgaaatggcaacgctgggtgcacgtttatctttcagttcagggtgtgttgaaaacggaatcctgggccgattatc

SEQ ID NO: 851347 - DNA, 75 bp, synthetic construct
  source 1..75: mol_type = other DNA
ggaatttaccgtcaataacccgacgccgtattacgtcattttcagtaatgccagcgcggagaaaaacggtaatcc

SEQ ID NO: 851348 - DNA, 75 bp, synthetic construct
  source 1..75: mol_type = other DNA
ggcgctcggatgccgctctttttcacttgcaacggtaacagttgccaggtcgatgaagagcagagccgcaaaggc

SEQ ID NO: 851349 - DNA, 75 bp, synthetic construct
  source 1..75: mol_type = other DNA
aatccatccccaccgatcgccttcgctcaaccggtgtattaaccggtccggactggctgcggatgggactttctt

SEQ ID NO: 851350 - DNA, 75 bp, synthetic construct
  source 1..75: mol_type = other DNA
aaaaatccacaatgttgctggcattgctactaaccactgccagcctgtcagcacaggcctctgtcacgccagacc

SEQ ID NO: 851351 - DNA, 75 bp, synthetic construct
  source 1..75: mol_type = other DNA
atgtctgatttattttgctctgccaaattgggtgctacgacgctggcgctactgcttagcgctgccagtttgtct

SEQ ID NO: 851352 - DNA, 75 bp, synthetic construct
  source 1..75: mol_type = other DNA
gcacggatgccgctctttttcacctgcaacggtaacagttgccaggttgatgaagagcagagccgcaaaggctga

SEQ ID NO: 851353 - DNA, 75 bp, synthetic construct
  source 1..75: mol_type = other DNA
ggcgcagtgcaatgctgactggtgttttcgtgataccggggaaacctggcaatctattcccaccgatcgccttcg

SEQ ID NO: 851354 - DNA, 75 bp, synthetic construct
  source 1..75: mol_type = other DNA
agaaattatgccgacaaaattacgatttatccggaatttcatcagcaaataacttacgaagcattgcgcgtttgc

SEQ ID NO: 851355 - DNA, 75 bp, synthetic construct
  source 1..75: mol_type = other DNA
atgatgaacagcaccaataaacttagtgttattattccgttatataatgcgggcgatgatttccgcacttgtatg

SEQ ID NO: 851356 - DNA, 75 bp, synthetic construct
  source 1..75: mol_type = other DNA
attatcaacgccactatattaagattacccgactgttggaaaagttaaatcgcgattacgcagacagaatagtga

SEQ ID NO: 851357 - DNA, 75 bp, synthetic construct
  source 1..75: mol_type = other DNA
cccgccgttggactcacgttgtctggatgggggtttatcgccgcgatgttattgttaaaaataacattaaattta

SEQ ID NO: 851358 - DNA, 75 bp, synthetic construct
  source 1..75: mol_type = other DNA
actatccgcacgttcgtttgttgcatcaggcgaatgctggcgcatcggtggcgcgtaatcgtgggatcgaggtgg

SEQ ID NO: 851359 - DNA, 75 bp, synthetic construct
  source 1..75: mol_type = other DNA
agctttccatttccgagaggccgatgggggtgactccgctgtatgggttgatacagggttttgacaccgaattcg

SEQ ID NO: 851360 - DNA, 75 bp, synthetic construct
  source 1..75: mol_type = other DNA
gccgatttgcgctatgacatacggctctttacctccgagcctgactcgccagttttgggtgaggcgcttgaatcc

SEQ ID NO: 851361 - DNA, 75 bp, synthetic construct
  source 1..75: mol_type = other DNA
cgaatgccgctcttggtgagttgacctccgataagatgagtcgtctcggtaccggcgaagcctatgtatggtcga

SEQ ID NO: 851362 - DNA, 75 bp, synthetic construct
  source 1..75: mol_type = other DNA
caaccctgaaagtctcgcgctatatgttcagagcattggcgttattgctctggctgttgattgctttttcatcag

SEQ ID NO: 851363 - DNA, 75 bp, synthetic construct
  source 1..75: mol_type = other DNA
gccaccctcatcgctaagcatcgtgtattcggtgccggttgataaggtgctggaacgcattcgcatgttgatcct

SEQ ID NO: 851364 - DNA, 75 bp, synthetic construct
  source 1..75: mol_type = other DNA
aacgtctggtaaaaattaaatcattgcgtgaaacctacggagccggaagcaaagtaatgctaccagttgaagaag

SEQ ID NO: 851365 - DNA, 75 bp, synthetic construct
  source 1..75: mol_type = other DNA
cccaacagatggactaccttgtgaaaataagtgtatgtcgaatgaatcactggcggtgaacaatgatattcactc

SEQ ID NO: 851366 - DNA, 75 bp, synthetic construct
  source 1..75: mol_type = other DNA
gcaggttaatgtattagccgaaccgctaaagaaaaatgcttatggtcagtatttgttgaaaatgattaaaggtta

SEQ ID NO: 851367 - DNA, 75 bp, synthetic construct
  source 1..75: mol_type = other DNA
atctgcccgtggcgaagtcgaaatcacagatattaaccgtatttatatggaacaggggcgtttgtctgtagccat

SEQ ID NO: 851368 - DNA, 75 bp, synthetic construct
  source 1..75: mol_type = other DNA
tcagaagcaacctaccaaggaagagccttcaataagttggtggttttcgatgaagctcacaaatatatcgagaac

SEQ ID NO: 851369 - DNA, 75 bp, synthetic construct
  source 1..75: mol_type = other DNA
tccggctttgacgacacgccgccgccggtggccgccgcgcagccaagccgtatgttcggcgcgcagctgtttacc

SEQ ID NO: 851370 - DNA, 75 bp, synthetic construct
  source 1..75: mol_type = other DNA
aagggttctgcaactttgtgagattatggcgtgggaggttaccccccacgaactccgacctgatatttatcctaa

SEQ ID NO: 851371 - DNA, 75 bp, synthetic construct
  source 1..75: mol_type = other DNA
caacatacgaagggcaggaaccgactcccgaagatgtgttaattactgacgaggtagtgagtaaaaaatggcagg

SEQ ID NO: 851372 - DNA, 75 bp, synthetic construct
  source 1..75: mol_type = other DNA
cgcgctggagtatggtaacaatcagctaccagacaagaatatgtggcacgttttataatccggagacgcaacaga

SEQ ID NO: 851373 - DNA, 75 bp, synthetic construct
  source 1..75: mol_type = other DNA
cgcggtatgaccaatttttcagggctgatggttcaaagaaaccctggtggacaggtaatctaagcgcaattaatc

SEQ ID NO: 851374 - DNA, 75 bp, synthetic construct
  source 1..75: mol_type = other DNA
cagcactgaagcaggccatgcagggacaggacgttgtgtatgccaaccttacgggggaagatttagatattcagg

SEQ ID NO: 851375 - DNA, 75 bp, synthetic construct
  source 1..75: mol_type = other DNA
tttctcgataaactgcgaagcagtgccgaacaactcgaagaaaaactgctcgattttttaatttctggaagctaa

SEQ ID NO: 851376 - DNA, 75 bp, synthetic construct
  source 1..75: mol_type = other DNA
cgcggcggcggataccgtgcgtaagctgcgttttctcgataaactgcgaagcagtgccgaacaactcgaagaaaa

SEQ ID NO: 851377 - DNA, 75 bp, synthetic construct
  source 1..75: mol_type = other DNA
gtctggatttttatgcagcctattagttttgtctattttcaaaggatgtttgctggatttaaagacatgattgta

SEQ ID NO: 851378 - DNA, 75 bp, synthetic construct
  source 1..75: mol_type = other DNA
ggtggggactggggttcaacgtaacttccagggcaccgggctggggctggcaatttgtgaaaaattaatcagcat

SEQ ID NO: 851379 - DNA, 75 bp, synthetic construct
  source 1..75: mol_type = other DNA
gttgttgaagattatcagcgatattctcgatttttcgaagattgaatcggaacagttgaaaattgaaccgcgaga

SEQ ID NO: 851380 - DNA, 75 bp, synthetic construct
  source 1..75: mol_type = other DNA
cgggatggatagctgtctgtcgaagccagtgacgctggatgtcataaaacagacgctgacaatgtatgccgagag

SEQ ID NO: 851381 - DNA, 75 bp, synthetic construct
  source 1..75: mol_type = other DNA
gctgagctgacaggcaaggagcaccgaaatgtcctgcgtgatattcgcaatatggctgaggagcttaacgcgctc

SEQ ID NO: 851382 - DNA, 75 bp, synthetic construct
  source 1..75: mol_type = other DNA
ccgaaaggcgttgaccgtctggtgacggcaatgaacaactcttccagtctgctgttgaaaattatcagcgacatt

SEQ ID NO: 851383 - DNA, 75 bp, synthetic construct
  source 1..75: mol_type = other DNA
tggcgcaggcagcagaacaggcgagtcagtcgaaatcgatgttccttgctaccgtcagccacgagttgcgaacgc

SEQ ID NO: 851384 - DNA, 75 bp, synthetic construct
  source 1..75: mol_type = other DNA
atctgcccgtggtgaactggaaattaccgatattaatcgtatctatatggaacaggggcgtttgtctgtggccat

SEQ ID NO: 851385 - DNA, 75 bp, synthetic construct
  source 1..75: mol_type = other DNA
gaccaggtgcgcaagttagctgcgccgctggcgaagaatgcttacgggcaatatctgctgaaaatgctcaagtag

SEQ ID NO: 851386 - DNA, 75 bp, synthetic construct
  source 1..75: mol_type = other DNA
atgagtaatccctatcgcacagatcatcaccttgaaaaactccctccttatgctggaagagaaggattgaccccg

SEQ ID NO: 851387 - DNA, 75 bp, synthetic construct
  source 1..75: mol_type = other DNA
gaataatgggtattttactgtaagcctgaatagattaaataaaatacaccagtgtattgtgcagttaaagaaata

SEQ ID NO: 851388 - DNA, 75 bp, synthetic construct
  source 1..75: mol_type = other DNA
atcgtaaaggatttattgatgcagagcaggtgaagatattggccgagccgctaaagaaaaatgcttatggtcagt

SEQ ID NO: 851389 - DNA, 75 bp, synthetic construct
  source 1..75: mol_type = other DNA
ctctatttctacgacaacagcgttgtggaagttgccaagggtctcaagccatcgccgcgtggtgagttggaaatc

SEQ ID NO: 851390 - DNA, 75 bp, synthetic construct
  source 1..75: mol_type = other DNA
ctctacttctatgacaaccgcgtggttgagattgccaaaagcctgaaaccgtcgccgcgcggcgagctggaaatc

SEQ ID NO: 851391 - DNA, 75 bp, synthetic construct
  source 1..75: mol_type = other DNA
aagtaatggatatttaacagtgagtttgaatcgattgaacaaaatacatcaaaatatatgtcgcttaagtgaata

SEQ ID NO: 851392 - DNA, 75 bp, synthetic construct
  source 1..75: mol_type = other DNA
aaaaaaacacaaggtcgtctagcgaaagcatgttaacggcaggttgtttagatgaagaacatttcttattattga

SEQ ID NO: 851393 - DNA, 75 bp, synthetic construct
  source 1..75: mol_type = other DNA
gtttctgggattgatccgtcaggagcgtctggtgatcatcaggggagcgatatatttattcctttgactcatgaa

SEQ ID NO: 851394 - DNA, 75 bp, synthetic construct
  source 1..75: mol_type = other DNA
taacaatgggtacttgacagtaagtttgaatcgattgaataagattcatcaatgcttgtttttgttgaagaagta

SEQ ID NO: 851395 - DNA, 75 bp, synthetic construct
  source 1..75: mol_type = other DNA
actgtaattctcttgatgattatgaagtttatttttcaggtatttcaggaatagatccttcaggtgcttcaggta

SEQ ID NO: 851396 - DNA, 75 bp, synthetic construct
  source 1..75: mol_type = other DNA
gttctttccctcggtatttatgatgaagttccaggaaaatttggcgaatggaataatgcagttattggtgaaccc

SEQ ID NO: 851397 - DNA, 75 bp, synthetic construct
  source 1..75: mol_type = other DNA
aaaaagtaattatgcggtaaccgggctttatttctatgataacgacgttgtcgaaatggcgaaaaatcttaagcc

SEQ ID NO: 851398 - DNA, 75 bp, synthetic construct
  source 1..75: mol_type = other DNA
cagtctgattaagacggattcgcggtttaatgtggtcagtaatccgcgtcttacggtgctttccggcagtcagtc

SEQ ID NO: 851399 - DNA, 75 bp, synthetic construct
  source 1..75: mol_type = other DNA
cggaacgccagcgggttacagattattgcagacctctttaaaaatcgtcttggcgtttcgctgggagcccgttct

SEQ ID NO: 851400 - DNA, 75 bp, synthetic construct
  source 1..75: mol_type = other DNA
aagttctggtatacagcggaacggtcgcggatattcgccgcgttcgtgacttactgccccgcatagatattccgg

SEQ ID NO: 851401 - DNA, 75 bp, synthetic construct
  source 1..75: mol_type = other DNA
aaccctgatgctggcgggtattcgtgatattttgattattagtacgccacaagacacaccacgttttgagcaatt

SEQ ID NO: 851402 - DNA, 75 bp, synthetic construct
  source 1..75: mol_type = other DNA
gcctggaagaaaaaccgttacaaccaaaaagtaattatgcggtaaccgggctttatttctatgataacgacgttg

SEQ ID NO: 851403 - DNA, 75 bp, synthetic construct
  source 1..75: mol_type = other DNA
ctgaatgttggagggctgaatgcgttttacagtctgatcaaagaggattcacgctttaatgtcgtgagtaatccg

SEQ ID NO: 851404 - DNA, 75 bp, synthetic construct
  source 1..75: mol_type = other DNA
gcaggtgaaagtattagctgaacctctgaaaaaaaatgcttatggtcagtacttaatcaaattgacacagggata

SEQ ID NO: 851405 - DNA, 75 bp, synthetic construct
  source 1..75: mol_type = other DNA
atttatcatcggtgaagagtttatcggtggtgatgattgtgctctggttctcggtgataatatcttctacggtca

SEQ ID NO: 851406 - DNA, 75 bp, synthetic construct
  source 1..75: mol_type = other DNA
gtttattatcggtgaagagtttattggtggtgatgattgtgctttggttcttggtgataatatcttctacggtca

SEQ ID NO: 851407 - DNA, 75 bp, synthetic construct
  source 1..75: mol_type = other DNA
cacacaatcaggttctttctcaaatcatgtacagacggtggattattctggttctgcagcgtcttctgcatcgtc

SEQ ID NO: 851408 - DNA, 75 bp, synthetic construct
  source 1..75: mol_type = other DNA
aatttattgataaaacgcagttaataaaattagctaagcctttggagaaaaattcatacggaaaatatttaataa

SEQ ID NO: 851409 - DNA, 75 bp, synthetic construct
  source 1..75: mol_type = other DNA
gttcaggaactcgtttatatccagtcacaatggctgtaagtaaacaattgttgccagtttatgataaaccaatga

SEQ ID NO: 851410 - DNA, 75 bp, synthetic construct
  source 1..75: mol_type = other DNA
ggtgcgaacgatggtcagaaaggcattggtctggttatgctggtgctgattggcgtcgcaccagcgggcttcgtg

SEQ ID NO: 851411 - DNA, 75 bp, synthetic construct
  source 1..75: mol_type = other DNA
aacgccgaaggtggacgcaacgcaacccgttgagttccactgccatccagcgaataccattaacgcacttaatcg

SEQ ID NO: 851412 - DNA, 75 bp, synthetic construct
  source 1..75: mol_type = other DNA
taaaacagtaaccagcattctgatggcgtgggtgtttaccctcccggctgcgatactgctctccggcgggctgta

SEQ ID NO: 851413 - DNA, 75 bp, synthetic construct
  source 1..75: mol_type = other DNA
tgagaagaaacgcactatcgtgatctgcggtgaaaccgggtcggggaaaacggtactcacgcgcgcgctgttaaa

SEQ ID NO: 851414 - DNA, 75 bp, synthetic construct
  source 1..75: mol_type = other DNA
ttattgcagatgaatttgtgaccggtctggtgggtgacagagtaagccagagctttgcaaaagaaaatattactg

SEQ ID NO: 851415 - DNA, 75 bp, synthetic construct
  source 1..75: mol_type = other DNA
gacactcagcaaaaacagttctacgaatcggctttcaacatgatcgagcgttgttgtttctgcgatgccgacgag

SEQ ID NO: 851416 - DNA, 75 bp, synthetic construct
  source 1..75: mol_type = other DNA
acaccaactccgacgcttggggcttcggtttgaaagccggttacgacttcaaactgggtgatgctggttacgtga

SEQ ID NO: 851417 - DNA, 75 bp, synthetic construct
  source 1..75: mol_type = other DNA
gatggtcttttccatgctgctggcggcgattatctggaatctgggaacgtggttctttggtttaccggcctccag

SEQ ID NO: 851418 - DNA, 75 bp, synthetic construct
  source 1..75: mol_type = other DNA
tatttatactcgtgccatgcagccgcatcttgcggtagtaatggcggcgttttttaacttttttggtgtgttgct

SEQ ID NO: 851419 - DNA, 75 bp, synthetic construct
  source 1..75: mol_type = other DNA
cctgaaaggtatgttgaccaccgatgtggaaagctacgacaagctgtcgcttgatcaacgtagccagatgcgccg

SEQ ID NO: 851420 - DNA, 75 bp, synthetic construct
  source 1..75: mol_type = other DNA
tacgaagccatcaatggtttccatgacacagccaacgccgtggcaaccgttatctatacccgcgcgatgcgttct

SEQ ID NO: 851421 - DNA, 75 bp, synthetic construct
  source 1..75: mol_type = other DNA
agtgagatactctccctcgctgaacgaatcgtcatccagttttctggtagagatattcttaatgtccccgccctc

SEQ ID NO: 851422 - DNA, 75 bp, synthetic construct
  source 1..75: mol_type = other DNA
aatactggacgggcagagggcgtaaacctaaagctattgaggaagctatagcagcaggaaagaaactggatgatt

SEQ ID NO: 851423 - DNA, 75 bp, synthetic construct
  source 1..75: mol_type = other DNA
cgctcagtacccgcagaaaaaaggcgtggaagggttgagtggtaaacgctgctggctggcggtccgcaatgcgtc

SEQ ID NO: 851424 - DNA, 75 bp, synthetic construct
  source 1..75: mol_type = other DNA
ataccgtgactgatacggctgatctggtcacggttgtggcactggtgacgctgcatactgatgcacttcacgcca

SEQ ID NO: 851425 - DNA, 75 bp, synthetic construct
  source 1..75: mol_type = other DNA
tgtttctccggatgacgggggtagctgttatctctggctcaaccgtgggcaaccacccgcagttaaccggcgacg

SEQ ID NO: 851426 - DNA, 75 bp, synthetic construct
  source 1..75: mol_type = other DNA
ttggtcaacgtttaaatcgcaaaggctgggttggtctggtcttgctgttggctggaatgattatggtgaaactcg

SEQ ID NO: 851427 - DNA, 75 bp, synthetic construct
  source 1..75: mol_type = other DNA
tagtgcagccattactagcaaggaaagtgaggttgtttcaccattattaatggatgttaattcttcactaacaat

SEQ ID NO: 851428 - DNA, 75 bp, synthetic construct
  source 1..75: mol_type = other DNA
taacgcgattttactgaatgtgcttgccggagccgcgttgtttactctcgcacggatgtacgagcggcgtatatt

SEQ ID NO: 851429 - DNA, 75 bp, synthetic construct
  source 1..75: mol_type = other DNA
tgtttctccggatgacgggggcagctgttatctctggctcaaccgtggtcaaccacccgccgttaaccggcgacg

SEQ ID NO: 851430 - DNA, 75 bp, synthetic construct
  source 1..75: mol_type = other DNA
cctgtgatgataattctctatctcaggagtttcagttgctgccatctacaaatggtaacgtactaataagaagca

SEQ ID NO: 851431 - DNA, 75 bp, synthetic construct
  source 1..75: mol_type = other DNA
tgtgtactcttataataactggttgttcaaatggaataggggattcaccttctccgcccggaaagaatgtggaat

SEQ ID NO: 851432 - DNA, 75 bp, synthetic construct
  source 1..75: mol_type = other DNA
atggtgagacattctgggtggatcgtgtttctccggatgacgggggcagctgttatctctggctcaaccgtgggc

SEQ ID NO: 851433 - DNA, 75 bp, synthetic construct
  source 1..75: mol_type = other DNA
attccattattaaacaaacacttaaatttaaacatccgttcaaatagaaaactcagagagactaaattatattta

SEQ ID NO: 851434 - DNA, 75 bp, synthetic construct
  source 1..75: mol_type = other DNA
ggcaaaggcgttcgtcaggaagtactggaggctgctaaagacagccctgagttcgaagaactgatggatgcctat

SEQ ID NO: 851435 - DNA, 75 bp, synthetic construct
  source 1..75: mol_type = other DNA
gcccgtctccacaacacacgtcctctcgtctgcagttgcagggacgatggtggtggacggcggtgggttacagcg

SEQ ID NO: 851436 - DNA, 75 bp, synthetic construct
  source 1..75: mol_type = other DNA
aagttcttataggccacttcagaactttaaaaaatgctgacactaataagatcagtttatgggatatatttacat

SEQ ID NO: 851437 - DNA, 75 bp, synthetic construct
  source 1..75: mol_type = other DNA
atgcaccactaaccccacgccggatcggtacgttgagcacacgaacaacacatccatattttattgccagcatcc

SEQ ID NO: 851438 - DNA, 75 bp, synthetic construct
  source 1..75: mol_type = other DNA
tagttttccatcataaacatcaccatttgccgccagcaagtgagaaagtgttacctgttcagctatatggattaa

SEQ ID NO: 851439 - DNA, 75 bp, synthetic construct
  source 1..75: mol_type = other DNA
gaattcagttgtcagatggtgtatttaagatcaccaagcagagcaataaagcctggtccctgacgcgcccggtgg

SEQ ID NO: 851440 - DNA, 75 bp, synthetic construct
  source 1..75: mol_type = other DNA
ccagaagaagatgccgatgatttatctgtcgggtatctggggtcatcatggaggacagaattaagctggacaacg

SEQ ID NO: 851441 - DNA, 75 bp, synthetic construct
  source 1..75: mol_type = other DNA
aatttgatcttatgtcagaacattatcaggaacagccccgcttgtttaacgatatggtggatgctttcagggacg

SEQ ID NO: 851442 - DNA, 75 bp, synthetic construct
  source 1..75: mol_type = other DNA
aaccacgctaatagggtacacacagtggtgctgttcatctccggactgttgccacacaaaaaaggtctgcttccg

SEQ ID NO: 851443 - DNA, 75 bp, synthetic construct
  source 1..75: mol_type = other DNA
gtcaaagcgattgccgaattgcatgggggaagcgccacatatcactatataaatgaaaataatgtatttcgaatc

SEQ ID NO: 851444 - DNA, 75 bp, synthetic construct
  source 1..75: mol_type = other DNA
tgattattcatggtgatggcatcaataaaattgttaaccgaacaaatgtcagtgatgacatgttaaataacatac

SEQ ID NO: 851445 - DNA, 75 bp, synthetic construct
  source 1..75: mol_type = other DNA
atgaaaagattatctataaccgtccgtttaaccttgctttttatatttctgctgtctgttgctggcgctggaatt

SEQ ID NO: 851446 - DNA, 75 bp, synthetic construct
  source 1..75: mol_type = other DNA
ggtaagcaaagcaactggctttccgggcaacacggagaagaaggcggttctatgcgcggcgcagcaaacgatctg

SEQ ID NO: 851447 - DNA, 75 bp, synthetic construct
  source 1..75: mol_type = other DNA
gtgtaaaagggggccgcttggaaaagggaaattttcccacgctaagagaattgagttgaacgagtggttacatcc

SEQ ID NO: 851448 - DNA, 75 bp, synthetic construct
  source 1..75: mol_type = other DNA
actggttctggggattatgtttgcggtgattggttacgcaatgtatgcgggagtatggcaaagcccggtgccgga

SEQ ID NO: 851449 - DNA, 75 bp, synthetic construct
  source 1..75: mol_type = other DNA
cgctcgttgagagcgattttctggccacagtgcgcgacatgatgaaagatcgcgataaggctttcagtctctacg

SEQ ID NO: 851450 - DNA, 75 bp, synthetic construct
  source 1..75: mol_type = other DNA
attattggcaatgcccataacgttgtcataaccagcagcgataaaattgctcagggaattattaccaggctacaa

SEQ ID NO: 851451 - DNA, 75 bp, synthetic construct
  source 1..75: mol_type = other DNA
tcataagctgaaaggttattcaacgaaagggcagagttataacaactacctgttcgcgatgtaccaggataacca

SEQ ID NO: 851452 - DNA, 75 bp, synthetic construct
  source 1..75: mol_type = other DNA
tgcgcaaggcatggcggcacaaatgacggcggcagtgtctatcggccttgccagttatattgggatgcccgtctc

SEQ ID NO: 851453 - DNA, 75 bp, synthetic construct
  source 1..75: mol_type = other DNA
tgttgctcaatatgggctcggcccatggcctggcgatggtcttttccatgctgttagcagcgattatctggaacc

SEQ ID NO: 851454 - DNA, 75 bp, synthetic construct
  source 1..75: mol_type = other DNA
ccaacgcgctgttaaatggttcgtcggtgatggatgcgttaaacctgcgcgaagtcaccaagattttctcttcac

SEQ ID NO: 851455 - DNA, 75 bp, synthetic construct
  source 1..75: mol_type = other DNA
tgattggcaaaatctggccgggatttttaactctcggtggcgatttcacgctgttagggctttctctaccgggct

SEQ ID NO: 851456 - DNA, 75 bp, synthetic construct
  source 1..75: mol_type = other DNA
agaaaggttttgaaaaaggtgctcttgaagtggcgcgggaaatagcctgccggctttggaatatgggctggccgc

SEQ ID NO: 851457 - DNA, 75 bp, synthetic construct
  source 1..75: mol_type = other DNA
agaaaggtttcgacgaaggttttaaagaaagctttaacgaaggggcgcttgaagtggcgcgggaaatagcctgcc

SEQ ID NO: 851458 - DNA, 75 bp, synthetic construct
  source 1..75: mol_type = other DNA
cgttgtaccaatgcgccgggtaaagtgaaagggtactcacagtttagttctgtcaaagaatcggtgagcgcctat

SEQ ID NO: 851459 - DNA, 75 bp, synthetic construct
  source 1..75: mol_type = other DNA
ggcttactcttcgttccgtaaatcgcgtgcgcagctgcgtaaagcggatcaggaagtgactgccacagcgatgat

SEQ ID NO: 851460 - DNA, 75 bp, synthetic construct
  source 1..75: mol_type = other DNA
atgcgggatataacattacgattcgataacagagaacagtttaacgcaattgtatatgacagtggcctgttcagt

SEQ ID NO: 851461 - DNA, 75 bp, synthetic construct
  source 1..75: mol_type = other DNA
cgccggcttgaattgcagttgcgtatgctgctggagcaggttgaacagtttgaaaatattgttggcttcttctgg

SEQ ID NO: 851462 - DNA, 75 bp, synthetic construct
  source 1..75: mol_type = other DNA
atgatcgcctgcgtggtggtgtttatcgctatgcaaattatcggcgatcaagaagtgatgttatggctggcctgg

SEQ ID NO: 851463 - DNA, 75 bp, synthetic construct
  source 1..75: mol_type = other DNA
atatctgatggttatgattgctttgtttgttattgatataatagcattcatttttatgcagttatatttcattta

SEQ ID NO: 851464 - DNA, 75 bp, synthetic construct
  source 1..75: mol_type = other DNA
gaatggacggctgatcatggttttcatgcgcatgcggttttctggatcgatcgtcagagggttaaaaaaatatat

SEQ ID NO: 851465 - DNA, 75 bp, synthetic construct
  source 1..75: mol_type = other DNA
actgacgtatgtcaacgactacggtggacgactgcctctctatttccagtgcagcggcgcagagtgccatgtcga

SEQ ID NO: 851466 - DNA, 75 bp, synthetic construct
  source 1..75: mol_type = other DNA
gatcgatcgtcagagggttaaaaaaatatatcccagtgcggagcggattacggaatgctggcggtctattacgca

SEQ ID NO: 851467 - DNA, 75 bp, synthetic construct
  source 1..75: mol_type = other DNA
gatcaccaggggcgttatagctttgataatcaacctgccgtcgcgttgtggaatttacagcgtctggcgcagaca

SEQ ID NO: 851468 - DNA, 75 bp, synthetic construct
  source 1..75: mol_type = other DNA
gatgaataccgacaacatgtcgctgctggggctgacgcttgattacgggccgtttggttttcttgatgattacga

SEQ ID NO: 851469 - DNA, 75 bp, synthetic construct
  source 1..75: mol_type = other DNA
atccgacattactggtcacatcttcaggatgatgaggataaataccgtctctggtttaccgatgttgtcgcacgt

SEQ ID NO: 851470 - DNA, 75 bp, synthetic construct
  source 1..75: mol_type = other DNA
tatgtgccatgtattcagtgcgttacgcgtgataaaggatattgcacatcgcgatccattaaccaatatttttaa

SEQ ID NO: 851471 - DNA, 75 bp, synthetic construct
  source 1..75: mol_type = other DNA
tggcacaggctgaacgccggaggatcctagaacgcacgaatgagggccgacaggaagcaaagctgaaaggaatca

SEQ ID NO: 851472 - DNA, 75 bp, synthetic construct
  source 1..75: mol_type = other DNA
ggcgattgaagcggcagaaaagggtgatatgacggaattgcaccgcctgcatgaggcgttgcgaaatcctttcag

SEQ ID NO: 851473 - DNA, 75 bp, synthetic construct
  source 1..75: mol_type = other DNA
cggaatgctggcggtctattacgcataacagcggttcggtgcatcgctgtacatatcagccgcattatacataca

SEQ ID NO: 851474 - DNA, 75 bp, synthetic construct
  source 1..75: mol_type = other DNA
ttgaggaagttgttccacgatcaacctatctgatggttatgattgctttattttttatcgatactgttgcattta

SEQ ID NO: 851475 - DNA, 75 bp, synthetic construct
  source 1..75: mol_type = other DNA
atgttgattccgtggcaagacctctcccccgaaacgctggaaaatttaattgaaagctttgtgttacgtgaaggc

SEQ ID NO: 851476 - DNA, 75 bp, synthetic construct
  source 1..75: mol_type = other DNA
tgataaatcaatcagcgtcacgctgcgcaataacgacccgaaaatgccgtatctggcacaaagctggatggaaga

SEQ ID NO: 851477 - DNA, 75 bp, synthetic construct
  source 1..75: mol_type = other DNA
ttgacaagcagtgttgttcaaaatgacattgcaatttattatttgtttcgtcagatgagtttgtgcgtattaata

SEQ ID NO: 851478 - DNA, 75 bp, synthetic construct
  source 1..75: mol_type = other DNA
aaagtgacgattagtattggcgctgttgtaacgcagaaaaatgagttaaaccctaaggagatctatcaactggct

SEQ ID NO: 851479 - DNA, 75 bp, synthetic construct
  source 1..75: mol_type = other DNA
ttaatatttctggcattggtaaataaagttagtgaaaacacaaaacagcgcaatttattttccaaaaaagtgact

SEQ ID NO: 851480 - DNA, 75 bp, synthetic construct
  source 1..75: mol_type = other DNA
atgccgccgaaaacgtcacaaccgttaaaggcaaaaatgaacagcgctccggtgctgacctacatcaacgactac

SEQ ID NO: 851481 - DNA, 75 bp, synthetic construct
  source 1..75: mol_type = other DNA
gtgacgctcaaaaatgacagccaaaccctgccctatttagcgcagacgtgggttgaaaacgaaaaaggcgagaaa

SEQ ID NO: 851482 - DNA, 75 bp, synthetic construct
  source 1..75: mol_type = other DNA
aagaagagcaaaaagacgggctgtgtgcctacggctgcagtgaagttcctgagcgtcctgcttcagggcgcccgc

SEQ ID NO: 851483 - DNA, 75 bp, synthetic construct
  source 1..75: mol_type = other DNA
atgtttacattgactcgctctgcaaaaagagttgccccggcgctgacgttgctggcggcggccgccagttttaca

SEQ ID NO: 851484 - DNA, 75 bp, synthetic construct
  source 1..75: mol_type = other DNA
cgcggtgccctgcattatctggcgaaagaagagcaaaaggacgggctgtgtgcctacggttgtagtgaagttcct

SEQ ID NO: 851485 - DNA, 75 bp, synthetic construct
  source 1..75: mol_type = other DNA
aggtcacactcacgcgcagcggccaggactataccgtcaataacccaacgccgtattatgtcattatcagcgatg

SEQ ID NO: 851486 - DNA, 75 bp, synthetic construct
  source 1..75: mol_type = other DNA
gcagttgctattcgacaaggtaacattgatataaaaagttctattacaacaaatggcactaaagcccccattgca

SEQ ID NO: 851487 - DNA, 75 bp, synthetic construct
  source 1..75: mol_type = other DNA
gtgattggttacgcaatgtatgcgggagtatggcaaagcccggtaccggatgaattgtaccgacgcttaattcca

SEQ ID NO: 851488 - DNA, 75 bp, synthetic construct
  source 1..75: mol_type = other DNA
tggtactgggtgcgctattacgaaacagcaggtaatacggcatttgtcgccaggccgggaggcatcgaaggctgg

SEQ ID NO: 851489 - DNA, 75 bp, synthetic construct
  source 1..75: mol_type = other DNA
gcacgacatttgtcgccagaccgggaggtatcgaaggctggctaccgattgccggtctgatgaatctgaaatata

SEQ ID NO: 851490 - DNA, 75 bp, synthetic construct
  source 1..75: mol_type = other DNA
atgcacatgtttaatccaccccatccgggtgacgtccttcgcgattatctggacggcgtgagcatcacgcaggcc

SEQ ID NO: 851491 - DNA, 75 bp, synthetic construct
  source 1..75: mol_type = other DNA
ggtttcgccggatgatggcggaagctgtcatctctggcttgggcgtggcgtgccgcctgccgttaaccgtcgtcg

SEQ ID NO: 851492 - DNA, 75 bp, synthetic construct
  source 1..75: mol_type = other DNA
tatccgctggcatctggataacggtctggtggtgatcccgaaatcggtcacgccttcacgcattgccgaaaactt

SEQ ID NO: 851493 - DNA, 75 bp, synthetic construct
  source 1..75: mol_type = other DNA
ctggtggtgatcccaaaatcggtcacaccttcacgcattgccgaaaactttgatgtctgggatttccgtctcgac

SEQ ID NO: 851494 - DNA, 75 bp, synthetic construct
  source 1..75: mol_type = other DNA
ttggtcaacggttaaatcgtaaaggctggattggcctggtgctgctgttggctggattggcctggtgctgctgtt

SEQ ID NO: 851495 - DNA, 75 bp, synthetic construct
  source 1..75: mol_type = other DNA
atctagggaaaaaactgtttggtcgacaattcgcccctccccgctggctggatattcctctacgcacggtgaaat

SEQ ID NO: 851496 - DNA, 75 bp, synthetic construct
  source 1..75: mol_type = other DNA
ggaacagcgacgttaatcagcgtgatcgttttactgattgccagcctgtttattcgccatgcctggtgtcgttat

SEQ ID NO: 851497 - DNA, 75 bp, synthetic construct
  source 1..75: mol_type = other DNA
aaagacgaacttggtgaaatcgcaaaactcgatcaaggtaaacgtctcggtcccgatcccgaccagttcggcggc

SEQ ID NO: 851498 - DNA, 75 bp, synthetic construct
  source 1..75: mol_type = other DNA
catagacgacgggatcagcaccgacggtgaaatggggaaaatggttgtgaccattctttcagctgtagcccaggc

SEQ ID NO: 851499 - DNA, 75 bp, synthetic construct
  source 1..75: mol_type = other DNA
cggcagacccgcgttacctggcggccagttggcaatccggtcatactggcagcgggctgcattatcgccgttttc

SEQ ID NO: 851500 - DNA, 75 bp, synthetic construct
  source 1..75: mol_type = other DNA
gatgtcactttcagcgcgaggctggcaggtcaccgggagtaaaaccacacaagatggcgtcgaagcggcccgaat

SEQ ID NO: 851501 - DNA, 75 bp, synthetic construct
  source 1..75: mol_type = other DNA
gcccatcgtattccccgaattatttttaccagttcaacgtctgtctatggcgacgcgcaaggcacggtgaaagaa

SEQ ID NO: 851502 - DNA, 75 bp, synthetic construct
  source 1..75: mol_type = other DNA
gatggaagttatgcagttgctattcgacaaggtaacattgatataaaaaagttctattacaacaaatggcactaa

SEQ ID NO: 851503 - DNA, 75 bp, synthetic construct
  source 1..75: mol_type = other DNA
tgcagctccatcagcaaaaggggatgataagtttatcaccaccgactatttgcaacagtgccgccgatatgatcc

SEQ ID NO: 851504 - DNA, 75 bp, synthetic construct
  source 1..75: mol_type = other DNA
catgggacaagatagcgcgtcggaaatggataatcttacggtatgcacgagcgataaccgaaggcttttcaatct

SEQ ID NO: 851505 - DNA, 75 bp, synthetic construct
  source 1..75: mol_type = other DNA
acagtggacgagtattagaagaactcgaagactggctgcacaatttacccggtacttcggtcgatattctgcgtc

SEQ ID NO: 851506 - DNA, 75 bp, synthetic construct
  source 1..75: mol_type = other DNA
aaaaggggatgataagtttatcaccaccgactatttgcaacagtgccggtgatgtcattctggtgaagaagctcg

SEQ ID NO: 851507 - DNA, 75 bp, synthetic construct
  source 1..75: mol_type = other DNA
tgcctgacggcgcatctgacggtaataaggcaatcagtgaaacagagcatggtgcgttgaaagcgatgttgaggg

SEQ ID NO: 851508 - DNA, 75 bp, synthetic construct
  source 1..75: mol_type = other DNA
cacctaaaggcggacacatctataatatatgtgcgccagctcaccctgcgcgtaatgttttctatccgcagatgg

SEQ ID NO: 851509 - DNA, 75 bp, synthetic construct
  source 1..75: mol_type = other DNA
ttgcggggctggtcggaccgggacgtcatcccggacgcttctttgccggaaaaaccgcccctgatggtgaacatg

SEQ ID NO: 851510 - DNA, 75 bp, synthetic construct
  source 1..75: mol_type = other DNA
cttccggcacgtcgtagcggccccggcgatgagttctatttacaagcggtacaagagttagtggatagcgcgctg

SEQ ID NO: 851511 - DNA, 75 bp, synthetic construct
  source 1..75: mol_type = other DNA
cgctggcggttgatatggggatcaccatcggcaaggtggtggcatttatcgccattatgatgttagtgggtcgcc

SEQ ID NO: 851512 - DNA, 75 bp, synthetic construct
  source 1..75: mol_type = other DNA
cattggcgcatctgacacgccacaatcccgtttgccgggaaatgcctcatcactgtctgaactgaatgcctccgg

SEQ ID NO: 851513 - DNA, 75 bp, synthetic construct
  source 1..75: mol_type = other DNA
ggatcaatccccgtccggtcatggataaaaacaccggcaaaaccgttcccggctgccccattgtcattcataccc

SEQ ID NO: 851514 - DNA, 75 bp, synthetic construct
  source 1..75: mol_type = other DNA
aaaacagccagaaacattaatggcgtcaggttcgatggttcggctgacattaatatcaatactctggtatcacgc

SEQ ID NO: 851515 - DNA, 75 bp, synthetic construct
  source 1..75: mol_type = other DNA
tggcgaccggcagttagcaggcagtgccccggaactggccgcgtatgagatcgtcagtggcgttccttcgttgat

SEQ ID NO: 851516 - DNA, 75 bp, synthetic construct
  source 1..75: mol_type = other DNA
gtaaagcgcttgcacgttatcctggattgattgatatcctgcggcaaaggtacgaagggcgggggatgagtaaac

SEQ ID NO: 851517 - DNA, 75 bp, synthetic construct
  source 1..75: mol_type = other DNA
taccgctgcatgaagtcaatcccgcacgagtggtcgtggcgcaggatggtacgccgctctggcgcttcgccgatg

SEQ ID NO: 851518 - DNA, 75 bp, synthetic construct
  source 1..75: mol_type = other DNA
gcggagtgtcatttgatggcagcgccaatatcgacctgcctggcgtgaataaaacaggtaatcagagcactaccg

SEQ ID NO: 851519 - DNA, 75 bp, synthetic construct
  source 1..75: mol_type = other DNA
gcccggttgcacggtgtggaatttgccggcacattgccgctgtggtcagaggatgtcacgctgtcactgaattac

SEQ ID NO: 851520 - DNA, 75 bp, synthetic construct
  source 1..75: mol_type = other DNA
cggtggtggatgcaggtctgtcgtggaagatgacggatgccctgacgctgaatgctgcggtgaataacctgctca

SEQ ID NO: 851521 - DNA, 75 bp, synthetic construct
  source 1..75: mol_type = other DNA
aactcggtaccagcggtgaaaagatccccctgttgagcacggctaacacatggagtgcgcgccagactttcaacg

SEQ ID NO: 851522 - DNA, 75 bp, synthetic construct
  source 1..75: mol_type = other DNA
cgggttcagttaatggaaaccgtgatgaattaattgatacaacacaggcaaggccaattcagtattgtattaatg

SEQ ID NO: 851523 - DNA, 75 bp, synthetic construct
  source 1..75: mol_type = other DNA
tccagtgctttggatagtgacgaagaatataaagctgcaaccccccttgctatcagcacgttaaataaacttaaa

SEQ ID NO: 851524 - DNA, 75 bp, synthetic construct
  source 1..75: mol_type = other DNA
gtcccggaactggtcgcgtatgagatcgcttgtggcgttccttcgttgatctcgttcgaacatgccgatgctctg

SEQ ID NO: 851525 - DNA, 75 bp, synthetic construct
  source 1..75: mol_type = other DNA
ggtatagagaaaaaagttattgcttttttacgcagaaacagcttgaattcctgtaagcttcgcaaagctgtatcg

SEQ ID NO: 851526 - DNA, 75 bp, synthetic construct
  source 1..75: mol_type = other DNA
cgctgggactgagcctcggcagcacattcaccggtgctgccagcgatgccatcaccggcggtgtatccattgtgg

SEQ ID NO: 851527 - DNA, 75 bp, synthetic construct
  source 1..75: mol_type = other DNA
cttcctgaaagcattgtcttcccagggggatgtcagtgtggtgacccagaactctgccgtcaccaaaaacctgac

SEQ ID NO: 851528 - DNA, 75 bp, synthetic construct
  source 1..75: mol_type = other DNA
ttttgccgtgcagtatcagggcgaaaacggcggcgtgagcggtgaaaatacgacaaataacgggcgtggtgcatt

SEQ ID NO: 851529 - DNA, 75 bp, synthetic construct
  source 1..75: mol_type = other DNA
atgcacacaccttacccttttaattccagatacacgatgaactggtttctactgtctctactcaataaccacctg

SEQ ID NO: 851530 - DNA, 75 bp, synthetic construct
  source 1..75: mol_type = other DNA
atgttcaatcagttgttggcatccaaaaaattgacgaaaacagccatcaatgaagccctgcgcagaatgaaaaaa

SEQ ID NO: 851531 - DNA, 75 bp, synthetic construct
  source 1..75: mol_type = other DNA
cactgtctgaactgaatgcctccggcctgacgtccctgctgaatgcagtctcttcccgtctcggtatatcctggc

SEQ ID NO: 851532 - DNA, 75 bp, synthetic construct
  source 1..75: mol_type = other DNA
atgaataaaaaaattcttgtcattatgatttccgccgccctgttacagggctgtgccagtttcagacagcttgag

SEQ ID NO: 851533 - DNA, 75 bp, synthetic construct
  source 1..75: mol_type = other DNA
cgggatggtttgtcacctttgagcaatccgtaacgtttgtcacgctgtatacctctggcctcaccgtcgatgtaa

SEQ ID NO: 851534 - DNA, 75 bp, synthetic construct
  source 1..75: mol_type = other DNA
cgagcggcatggttccccttgccgccattggcgcatccgacacgccaccatcccgtttgccgggaaataccgcag

SEQ ID NO: 851535 - DNA, 75 bp, synthetic construct
  source 1..75: mol_type = other DNA
gccagcgtgtaatgatcgctatggcaattgcctgtcggccaaaactgctgattgccgatgaaccgaccaccgcgc

SEQ ID NO: 851536 - DNA, 75 bp, synthetic construct
  source 1..75: mol_type = other DNA
ggtgcatcaggggggtaacaaaagcacccgccgtcagcgagcgattgacctgttgaatctggtcggcatccccga

SEQ ID NO: 851537 - DNA, 75 bp, synthetic construct
  source 1..75: mol_type = other DNA
gcagggaaaaacaaatctacttggtaaccccgacctgaagccggaagagagcgtcagttatgaggctggggtgta

SEQ ID NO: 851538 - DNA, 75 bp, synthetic construct
  source 1..75: mol_type = other DNA
atgggtaagacctatcagcaaccgaagctggtcatgtaccgtggaatgacgcgcaccggctgcggggcgggccag

SEQ ID NO: 851539 - DNA, 75 bp, synthetic construct
  source 1..75: mol_type = other DNA
gggcagtttgatatttcgttacggtgcaccattgaaaatgccacagatgcattaaatgccataaagaaagcgaat

SEQ ID NO: 851540 - DNA, 75 bp, synthetic construct
  source 1..75: mol_type = other DNA
aatctgacctggcagatcaaagacggttactacctctaccgtaaacagatccgcattacgccggaacacgcgaaa

SEQ ID NO: 851541 - DNA, 75 bp, synthetic construct
  source 1..75: mol_type = other DNA
tttttgcatcattcggggcggttgtggaattttggtggcctgctgttgccatgggtgttctggtatggctgtatt

SEQ ID NO: 851542 - DNA, 75 bp, synthetic construct
  source 1..75: mol_type = other DNA
cgatgggcaagaaatggaaatatttatcctgcacctgagctacacgggaggagttacagggtggactctgaagca

SEQ ID NO: 851543 - DNA, 75 bp, synthetic construct
  source 1..75: mol_type = other DNA
tcgttccgttttataagcaatatgattttatatctgctgaccccggtaacccttcacgtttagaaatgtggctac

SEQ ID NO: 851544 - DNA, 75 bp, synthetic construct
  source 1..75: mol_type = other DNA
gtctttaccttgctggcgatgtcaatgtttggcttgtttactctgcaactcccctcttcgctgcaaacacgtctc

SEQ ID NO: 851545 - DNA, 75 bp, synthetic construct
  source 1..75: mol_type = other DNA
ccaccgcgcaattgcccttttccgcgctctgggcgttgttgatcggtattggtatcgcctttacgccatgcgtgc

SEQ ID NO: 851546 - DNA, 75 bp, synthetic construct
  source 1..75: mol_type = other DNA
tgttcaccgtgcactaccgcgccactcagcgcgattctgctgtatatcgcccaaagtgggaacatgtggctgggc

SEQ ID NO: 851547 - DNA, 75 bp, synthetic construct
  source 1..75: mol_type = other DNA
ccgccgcgcaactgcccttttctgcactctgggcgctgttgatcggtatcggcatcgccttcacaccatgcgtgc

SEQ ID NO: 851548 - DNA, 75 bp, synthetic construct
  source 1..75: mol_type = other DNA
gcaaactcaggcgcatctcaactttacccaaatcaaaacggtagatgagttaaatcaggcacttgctgaagccaa

SEQ ID NO: 851549 - DNA, 75 bp, synthetic construct
  source 1..75: mol_type = other DNA
atcaggcttttgcttttgattttcagcaaaaccaacatgatcttaatctgacctggcagatcaaagacggttatt

SEQ ID NO: 851550 - DNA, 75 bp, synthetic construct
  source 1..75: mol_type = other DNA
cattatcagtaatatgtgatgaagaacaaaaaaacttacccaacacaatcataatgcattatgtcactcaaaata

SEQ ID NO: 851551 - DNA, 75 bp, synthetic construct
  source 1..75: mol_type = other DNA
ttccggcagaccgatgacagccgttatgtgggactgactttgccacagtctctggggcgtatcccatatggcatg

SEQ ID NO: 851552 - DNA, 75 bp, synthetic construct
  source 1..75: mol_type = other DNA
cgttttttgctgttcagtcggtgaacaaaccgcggctatataatactgatcaggctaatgcaaatgcaaaattat

SEQ ID NO: 851553 - DNA, 75 bp, synthetic construct
  source 1..75: mol_type = other DNA
caatgtccgactgaggttgctatctcagaccggagggaaaaagaactatcagaactcggatttattccactagtt

SEQ ID NO: 851554 - DNA, 75 bp, synthetic construct
  source 1..75: mol_type = other DNA
atattaaagcaaattgcactagaaacagtaattacaatggagttaattgcattatcgcatcacagccaagtgaca

SEQ ID NO: 851555 - DNA, 75 bp, synthetic construct
  source 1..75: mol_type = other DNA
aagtttaactcaatttatcatattatcactatatattatagttaaaaattggaaaaatattaaacaaatccttgt

SEQ ID NO: 851556 - DNA, 75 bp, synthetic construct
  source 1..75: mol_type = other DNA
cagaccccggcattgacgatgcggtcgccattgccgccgcgatttttgcccccgaactcgacctgcaactgatga

SEQ ID NO: 851557 - DNA, 75 bp, synthetic construct
  source 1..75: mol_type = other DNA
tgcgcgtaataaagtgctcaaacggatggcagtgcaaggtgtatggtcccgtgagcaggtaaaagagtcaatcga

SEQ ID NO: 851558 - DNA, 75 bp, synthetic construct
  source 1..75: mol_type = other DNA
gcccgttgttggtcagtttggctttgccagcgccgtaccattgttgaatcaggtcaataatatcttactgtcgcg

SEQ ID NO: 851559 - DNA, 75 bp, synthetic construct
  source 1..75: mol_type = other DNA
ctggatgccggtcttcagcggcgtctggaagaactggcgcaaaactggaaaggacgattgccaccgcgcagttca

SEQ ID NO: 851560 - DNA, 75 bp, synthetic construct
  source 1..75: mol_type = other DNA
gattaaacctcattttcagcttgagggattaagtatgtcattacgtcttgttgctgacttgccatcaagtgtaag

SEQ ID NO: 851561 - DNA, 75 bp, synthetic construct
  source 1..75: mol_type = other DNA
catatttcccatgtggctgccagcgctcatgctccgtttttgagttctattgctcctgggatgctatccatgaat

SEQ ID NO: 851562 - DNA, 75 bp, synthetic construct
  source 1..75: mol_type = other DNA
tgaatgaaactcagtatgctacagatgattgtcttgaagagattataaataataccagagctgtgagacaggatt

SEQ ID NO: 851563 - DNA, 75 bp, synthetic construct
  source 1..75: mol_type = other DNA
cgtgctctacaccgagccggtgtgttttgtcgcccgtcctgagcatccactggcgaaatacgccaccctcagctg

SEQ ID NO: 851564 - DNA, 75 bp, synthetic construct
  source 1..75: mol_type = other DNA
acccatgtagcgcggatgatgaatatcacccagcctgcgctgtcgaaatggctgtcacaactcgaagatgagatc

SEQ ID NO: 851565 - DNA, 75 bp, synthetic construct
  source 1..75: mol_type = other DNA
ctgcaacagcagcaggcctcgacacaatggaatgaagcactcaaaacccgcgcacaaagtagcccgcagttacgt

SEQ ID NO: 851566 - DNA, 75 bp, synthetic construct
  source 1..75: mol_type = other DNA
ttcgtttgccacgaagcctggtcgccgttctgatcggcgcaagcctggcgctcgcgggcacgctgctgcaaaccc

SEQ ID NO: 851567 - DNA, 75 bp, synthetic construct
  source 1..75: mol_type = other DNA
aacaatagaaagaaaagcaggattagccaaaagcagaagagatttactcaattcaatagggcataaaatagcata

SEQ ID NO: 851568 - DNA, 75 bp, synthetic construct
  source 1..75: mol_type = other DNA
ggctaaaggtggcagaatttattttgtacaaaccaatggttatggcttttggtatagataaaaaagttattgctt

SEQ ID NO: 851569 - DNA, 75 bp, synthetic construct
  source 1..75: mol_type = other DNA
atggataatcaaaatactcctgtttttgatgtatgtggttggtactgtgtaccagttaaagatcataattcagtt

SEQ ID NO: 851570 - DNA, 75 bp, synthetic construct
  source 1..75: mol_type = other DNA
atattactataacttggcaaatggaatgagcgcagttcttgattttaatcctaatgacaatgcagatattgatag

SEQ ID NO: 851571 - DNA, 75 bp, synthetic construct
  source 1..75: mol_type = other DNA
aatgcgttggctccagtatcgagcacactacctcaagggcgaagctaaagttcagataaccttcgcagatgctgt

SEQ ID NO: 851572 - DNA, 75 bp, synthetic construct
  source 1..75: mol_type = other DNA
gcgcagggcgctgcgacagtctggctggcgtcgcctgaactggaaaactatgagcgcaggctacagcaactcctt

SEQ ID NO: 851573 - DNA, 75 bp, synthetic construct
  source 1..75: mol_type = other DNA
gtttatcgcagggatcgcctgttcagtggctgtcgcctcagcattgtggtggtggcaggtctatccggtgcagca

SEQ ID NO: 851574 - DNA, 75 bp, synthetic construct
  source 1..75: mol_type = other DNA
gatttatgccccggaaaacggtattacgccagcaaccgaaacggtgatgccgccgctgcctgaactgccggagat

SEQ ID NO: 851575 - DNA, 75 bp, synthetic construct
  source 1..75: mol_type = other DNA
acctgacgaggctacgtttggtcatcaatatgttagtgctgcttctggttggtgcgtgcgtcagcgtggcaggtc

SEQ ID NO: 851576 - DNA, 75 bp, synthetic construct
  source 1..75: mol_type = other DNA
gcaatttgcaagatgtgaaactgaagaagcacaagatattcttaccgaagcatatgataaaaaattaataaaaag

SEQ ID NO: 851577 - DNA, 75 bp, synthetic construct
  source 1..75: mol_type = other DNA
agttaccgccatcgttaacgccactggagggcagatcaaggcttacgaaattcgcccagatttaccacacctgtt

SEQ ID NO: 851578 - DNA, 75 bp, synthetic construct
  source 1..75: mol_type = other DNA
atgaatttagtaattcaacgagccttgaaaattgtcggtagccaaaagcgccttgccgacaagtgtggtgtaacg

SEQ ID NO: 851579 - DNA, 75 bp, synthetic construct
  source 1..75: mol_type = other DNA
ttgcaattcaatgaaaacggtcagttccacctgatcggacgacgtggtcgagtggtaaaaatagaggagaagcgg

SEQ ID NO: 851580 - DNA, 75 bp, synthetic construct
  source 1..75: mol_type = other DNA
gaatatacctggacactggggcatctgcggcatgatgtagcgcttttgatcgaccatttacgcgaccagccaggc

SEQ ID NO: 851581 - DNA, 75 bp, synthetic construct
  source 1..75: mol_type = other DNA
tttgccgccatagcgccagaggcttttatcgagctgtttacctccggttccacgggacagccgaagcgggtgatt

SEQ ID NO: 851582 - DNA, 75 bp, synthetic construct
  source 1..75: mol_type = other DNA
tgcccgcagtggtggtaaacccggcggtgcgcccgtttgaattgctaacagactatctcggtcagaacgagaacc

SEQ ID NO: 851583 - DNA, 75 bp, synthetic construct
  source 1..75: mol_type = other DNA
gagcgtgcaagtgagcatttacccgttccgcatgaccgacgctaatatgaagcgccacaaatattccaactttaa

SEQ ID NO: 851584 - DNA, 75 bp, synthetic construct
  source 1..75: mol_type = other DNA
atgcgtaaaatcgcattaattcttgcgatgttgttgatcccgtgcgtttcgtttgccggtttgctgggcagcagt

SEQ ID NO: 851585 - DNA, 75 bp, synthetic construct
  source 1..75: mol_type = other DNA
gtttatttttatatggatggtaaatggtatttcggcagcaggccggatcactattatcaagaaatatgcttgcct

SEQ ID NO: 851586 - DNA, 75 bp, synthetic construct
  source 1..75: mol_type = other DNA
ggaaaatcccagaagcagcaacaaaggcagcgcccggaaacttttcgggcgtttacttttatatggaaggcaaat

SEQ ID NO: 851587 - DNA, 75 bp, synthetic construct
  source 1..75: mol_type = other DNA
atgtctacgcttctttatttacacggtttcaacagctcgccgcgctctgcaaaagcgagtttgttaaaaaactgg

SEQ ID NO: 851588 - DNA, 75 bp, synthetic construct
  source 1..75: mol_type = other DNA
ccaatgcgttagttgaggccagttataagctcaccttacaagaacaacgtttcttgttgctttgtatcagtcgat

SEQ ID NO: 851589 - DNA, 75 bp, synthetic construct
  source 1..75: mol_type = other DNA
tagccgataccgatccgttctttcttctccgtttcttccaccataccgttctgattgaagaaggaacaacgctgg

SEQ ID NO: 851590 - DNA, 75 bp, synthetic construct
  source 1..75: mol_type = other DNA
gactacatcgacacctatgtaggaaagccacgcaccaaaactgttttggagcaactccagcgcaaagaagaaaac

SEQ ID NO: 851591 - DNA, 75 bp, synthetic construct
  source 1..75: mol_type = other DNA
agcccaagagcgacaaggtgtttgtctacggatattcctacgtcaaaggggcttcttctaacgaagagcgtagcg

SEQ ID NO: 851592 - DNA, 75 bp, synthetic construct
  source 1..75: mol_type = other DNA
ccacagagtgaattccagcacgctaccattgctaagcgcgtgaaagaaacaccaaacgcaacctggccggtacat

SEQ ID NO: 851593 - DNA, 75 bp, synthetic construct
  source 1..75: mol_type = other DNA
tattaagaacctgtgccaacgagaaggtgagctgcccatacgtattggtggtattaaaatggctgagccaccaga

SEQ ID NO: 851594 - DNA, 75 bp, synthetic construct
  source 1..75: mol_type = other DNA
tttatcgcgcttacaagcgtcaggatatggaagaaggggaagatttttcgacctattttaatcgtgagcggttcc

SEQ ID NO: 851595 - DNA, 75 bp, synthetic construct
  source 1..75: mol_type = other DNA
aggtgatgttagatacgcgcggcggcgtacggttgtcagagcagatccagaatgatttattgctgcgggcgacgg

SEQ ID NO: 851596 - DNA, 75 bp, synthetic construct
  source 1..75: mol_type = other DNA
gcaggcggtaaaacgcaaactgcaccagttgcaaccccgcaagaactggccgattacgacgccattatttttggt

SEQ ID NO: 851597 - DNA, 75 bp, synthetic construct
  source 1..75: mol_type = other DNA
cggtgacggttcacgccaacccagccaggaagagttgtctatcgcacgttatcagggggaatatgtcgctggtct

SEQ ID NO: 851598 - DNA, 75 bp, synthetic construct
  source 1..75: mol_type = other DNA
gctcagctccttggcaatgtgacacccggaaccgtggactttgtgaaggagcggctcaccccgctactctccccg

SEQ ID NO: 851599 - DNA, 75 bp, synthetic construct
  source 1..75: mol_type = other DNA
caaacccactgcatgggatcttgagtggattggcattgatcgccgaagctctgtttaccgcgcatatcagcatca

SEQ ID NO: 851600 - DNA, 75 bp, synthetic construct
  source 1..75: mol_type = other DNA
taccgtgaagattctacactgataactagatttatggagtcactaaagtctcagattaaacaaacacagaagcgt

SEQ ID NO: 851601 - DNA, 75 bp, synthetic construct
  source 1..75: mol_type = other DNA
aagcactgtttaaatatgttcgtgaaggtaaatatactttctgtactcctggtcacatgggcggtactgcattcc

SEQ ID NO: 851602 - DNA, 75 bp, synthetic construct
  source 1..75: mol_type = other DNA
gcaaagctgtatcgcgaggttaaccagaaacgtgaacttaaaaacccgccactggcgggtttttttattcctgaa

SEQ ID NO: 851603 - DNA, 75 bp, synthetic construct
  source 1..75: mol_type = other DNA
ttaaacggtgagcgtggctctaatgtgttgggaaccatctatgaatggccgcccagaaccagcagtgcgctggat

SEQ ID NO: 851604 - DNA, 75 bp, synthetic construct
  source 1..75: mol_type = other DNA
caggaggggggaaatgtcgaaacccgcgctttgccggaagtgaaggcgggtgattatctggtgctgcatgatacg

SEQ ID NO: 851605 - DNA, 75 bp, synthetic construct
  source 1..75: mol_type = other DNA
tataacgggcagaaagcatttgttgactcgatttgcgatttcaaaaacaaaacaaactcccacgtcattctcgtt

SEQ ID NO: 851606 - DNA, 75 bp, synthetic construct
  source 1..75: mol_type = other DNA
ggtcgtatattggcggcggtaagacggggaatatgtttaaccagttgctggcatccaaaaaattgacgaaaacag

SEQ ID NO: 851607 - DNA, 75 bp, synthetic construct
  source 1..75: mol_type = other DNA
gagaggggaaagcacaaatcactttttctgacgcggtaatgccttatctgacacagttgaaggggcaattcacca

SEQ ID NO: 851608 - DNA, 75 bp, synthetic construct
  source 1..75: mol_type = other DNA
gctgcgtttgcccgctgaatttggctgcccggtgtgggtctacgatgcgcaaattattcgtcggcagattgcagc

SEQ ID NO: 851609 - DNA, 75 bp, synthetic construct
  source 1..75: mol_type = other DNA
tgcggcgtctgtactggcgtacacgctctggcttcggtttacgccatcgaggatgccattggtattaaagtgccg

SEQ ID NO: 851610 - DNA, 75 bp, synthetic construct
  source 1..75: mol_type = other DNA
atgaaatctgatatttccatttcagtatctgaactgggttctctgctggatcatagtggtccacacaaagaagca

SEQ ID NO: 851611 - DNA, 75 bp, synthetic construct
  source 1..75: mol_type = other DNA
atgccacattcactgttcagcactgataccgatctcaccgccgaaaatctgctgcgtttgcccgcagaatttggc

SEQ ID NO: 851612 - DNA, 75 bp, synthetic construct
  source 1..75: mol_type = other DNA
tgcccggtttgggtctacgatgcacaaatcattcgtcggcagattgcggctctgaagcagtttgatgtggtgcgc

SEQ ID NO: 851613 - DNA, 75 bp, synthetic construct
  source 1..75: mol_type = other DNA
aactggtcggcattcatatgcacatcggttccggcgtcgattatgcgcatctggaacaggtgtgtggcgcgatgg

SEQ ID NO: 851614 - DNA, 75 bp, synthetic construct
  source 1..75: mol_type = other DNA
tcgtgaaattggcctcacccgtgaacgtgttcgccagattcaggttgaaggcctgcgccgtttgcgcgaaatcct

SEQ ID NO: 851615 - DNA, 75 bp, synthetic construct
  source 1..75: mol_type = other DNA
aacgtttacctgcgaaccgcacgtgagttgtcccataagctggaccatgaaccaagtgcggaagagatcgcagag

SEQ ID NO: 851616 - DNA, 75 bp, synthetic construct
  source 1..75: mol_type = other DNA
gaggctggccttttctgtgcacaataaaaggtccgatgcccatcggacctttttattaaggtcaaattaccgccc

SEQ ID NO: 851617 - DNA, 75 bp, synthetic construct
  source 1..75: mol_type = other DNA
cagaaaggccagtctcaagcgaggctggcctttttcttttgtttgggaagtcggtgtgttttgtcgcctggataa

SEQ ID NO: 851618 - DNA, 75 bp, synthetic construct
  source 1..75: mol_type = other DNA
aacctggtggattcgccagacgattgaacgggcgattatgaaccaaacccgtactattcgtttgccgattcacat

SEQ ID NO: 851619 - DNA, 75 bp, synthetic construct
  source 1..75: mol_type = other DNA
cttatcgaagagggcaacctggggctgatccgcgcggtagagaagtttgacccggaacgtggtttccgcttctca

SEQ ID NO: 851620 - DNA, 75 bp, synthetic construct
  source 1..75: mol_type = other DNA
ctgctgccgtcttcggcctgggatgctactgcataccactggcggtctccgcagtgaccgtgaatgtgaattcaa

SEQ ID NO: 851621 - DNA, 75 bp, synthetic construct
  source 1..75: mol_type = other DNA
tcgaaactgagctggatctcatcggtaaaatcggtctacaaaattacctgcaatcacaaataaaagttaaagatt

SEQ ID NO: 851622 - DNA, 75 bp, synthetic construct
  source 1..75: mol_type = other DNA
gatgaagaaggccatatcgactggctggaaacggaacttgatctgattcagaagatgggactgcaaaattatctg

SEQ ID NO: 851623 - DNA, 75 bp, synthetic construct
  source 1..75: mol_type = other DNA
ataacaatgataatgaatataaatctgttataaacggtggaacaatcgaggatgaaacacattcaagattgtttc

SEQ ID NO: 851624 - DNA, 75 bp, synthetic construct
  source 1..75: mol_type = other DNA
tacaggaaatgcagggggataacctgctccgtgaactggtaagaatcactgcgcaaatgaactggcagctgaacg

SEQ ID NO: 851625 - DNA, 75 bp, synthetic construct
  source 1..75: mol_type = other DNA
tacctgaaaaacacggccagaccttctgccgggcgaacgctgaaaaaaggggatgccgtcacgactactggcatg

SEQ ID NO: 851626 - DNA, 75 bp, synthetic construct
  source 1..75: mol_type = other DNA
gaagcggcaacactggaagatgtaggtcgtgaaattggcctcacccgtgaacgtgttcgccagattcaggtttaa

SEQ ID NO: 851627 - DNA, 75 bp, synthetic construct
  source 1..75: mol_type = other DNA
aagcccaactccggctggatgaggatttcgatactgatgaccgccatctgcaactgctggcctgtgcggcacaaa

SEQ ID NO: 851628 - DNA, 75 bp, synthetic construct
  source 1..75: mol_type = other DNA
ccgctgcaaggttcatggaaaggttatcgcgatgctcatgtcgaaccggactggatcctgatttacaaacttacc

SEQ ID NO: 851629 - DNA, 75 bp, synthetic construct
  source 1..75: mol_type = other DNA
gatgaagaaggtcacatcgattggctcgaaactgaactggatctgataagtaaaattgggctgcaaaattatcta

SEQ ID NO: 851630 - DNA, 75 bp, synthetic construct
  source 1..75: mol_type = other DNA
ccagcgcagtgatggccagcattttcattgcgccagccgcgtttgcttttaaagagtacccggcaggcgagcctg

SEQ ID NO: 851631 - DNA, 75 bp, synthetic construct
  source 1..75: mol_type = other DNA
gacaaactgggcgcggatggtgatttcgctcagggatacgttatcgcccatgaagtcggtcatcatgtgcagaaa

SEQ ID NO: 851632 - DNA, 75 bp, synthetic construct
  source 1..75: mol_type = other DNA
cggcggatggtacggtctatatcgatctttccttctatgatgacatgaaaaataaattgggtgcggatggcgatt

SEQ ID NO: 851633 - DNA, 75 bp, synthetic construct
  source 1..75: mol_type = other DNA
ccacgaattcatgaataacggtcagtccggcccacatcaggccatggccgaagcgcaccgccgtatgagcaatgc

SEQ ID NO: 851634 - DNA, 75 bp, synthetic construct
  source 1..75: mol_type = other DNA
ccggtgatgattctgcaacggacaaactggtcgtcaggggaaatacaagtggtaaaaccagggtcaccgtaaacc

SEQ ID NO: 851635 - DNA, 75 bp, synthetic construct
  source 1..75: mol_type = other DNA
atgaggggatctctcagcacacagcgtgtattggacgcgactcagctttaccttggtgagattggttattcacca

SEQ ID NO: 851636 - DNA, 75 bp, synthetic construct
  source 1..75: mol_type = other DNA
aagagatgctgcaatccgacctgcgattagagctggaaggtgcgaaggatctgcgtgaggctatcgcgtatgccg

SEQ ID NO: 851637 - DNA, 75 bp, synthetic construct
  source 1..75: mol_type = other DNA
tggaccagcatgaacaggccattattgcccatgaaaccatgacgaacgggtcggcggatgcgcaccagaaaatgg

SEQ ID NO: 851638 - DNA, 75 bp, synthetic construct
  source 1..75: mol_type = other DNA
aactggcaccgttaacgcttcccgtccggcgacttcgtttgcggcgatgaatgaacatgaaagagcagctgttgc

SEQ ID NO: 851639 - DNA, 75 bp, synthetic construct
  source 1..75: mol_type = other DNA
acttgagctggatggcgcgaagaatttgcgtgaggcaattggttatgccgatagtgttcatgattacgtcagccg

SEQ ID NO: 851640 - DNA, 75 bp, synthetic construct
  source 1..75: mol_type = other DNA
gatattgatataaaatcattaatacaatcttatagcaaacttctcgagtttaaaggaaaagaaatacctctgata

SEQ ID NO: 851641 - DNA, 75 bp, synthetic construct
  source 1..75: mol_type = other DNA
ataatagcgaaatagatattcgcgaaaagatgtgggcagcaatcagagacttatgtggcgcggaatttgaaatac

SEQ ID NO: 851642 - DNA, 75 bp, synthetic construct
  source 1..75: mol_type = other DNA
tcaaacacactgatgatgaaataaaggaattaagaaataaaacatccaatatcgacacaacaatctcctcgataa

SEQ ID NO: 851643 - DNA, 75 bp, synthetic construct
  source 1..75: mol_type = other DNA
ctgcgcggcggatttccgcgatcgcttaggcgtaggccgaaagctggcaattcagattctggaatattttgaccg

SEQ ID NO: 851644 - DNA, 75 bp, synthetic construct
  source 1..75: mol_type = other DNA
tcgctggcagcgtaaaattctcgacacattagcggcttatcatgaacagcatcgcgacgaaccaggaccgggacg

SEQ ID NO: 851645 - DNA, 75 bp, synthetic construct
  source 1..75: mol_type = other DNA
caagggcggcagaattgtgcaatctgctatcgtgcgccatcgggatctccggtggcacggtgtttctcagcgacg

SEQ ID NO: 851646 - DNA, 75 bp, synthetic construct
  source 1..75: mol_type = other DNA
gatttgtggggagggcaggggtattattttttaaataaaaacatgagcaaccattgtgaaatggtttccaattat

SEQ ID NO: 851647 - DNA, 75 bp, synthetic construct
  source 1..75: mol_type = other DNA
gattcaccgtcctgcaaagaaaaacagcagtgttcgctgaccgaagccaaagacgcctttagggaaggtgcgaat

SEQ ID NO: 851648 - DNA, 75 bp, synthetic construct
  source 1..75: mol_type = other DNA
aagaaattgctgaaattttacagcggtcaaaagaaggtatgtctaataaggagctatgtgaacactatcaattta

SEQ ID NO: 851649 - DNA, 75 bp, synthetic construct
  source 1..75: mol_type = other DNA
agaaccaatcagaaactctgtactaaaaaccttaatgaaaggtaaagttggctataaaagacctttttttgagat

SEQ ID NO: 851650 - DNA, 75 bp, synthetic construct
  source 1..75: mol_type = other DNA
tggagcaactaaaaaccatttttcgtatgactggtgatgaaaaacattatttgaaaatgatggacgaagaggaag

SEQ ID NO: 851651 - DNA, 75 bp, synthetic construct
  source 1..75: mol_type = other DNA
tttgtggggaggacagggatattattttttaaatacaaacatgcccccccattgtgaatggtttccaattcttta

SEQ ID NO: 851652 - DNA, 75 bp, synthetic construct
  source 1..75: mol_type = other DNA
gaggataatctggcagagctggtattcgacacgccgttatggctggcggataacgatcgcttagtgttgcgcgat

SEQ ID NO: 851653 - DNA, 75 bp, synthetic construct
  source 1..75: mol_type = other DNA
tgtgagggtgtctttgatgccatcagccttaaccagaatggcattgcggccgtttctgtcatgtctgccgtgaac

SEQ ID NO: 851654 - DNA, 75 bp, synthetic construct
  source 1..75: mol_type = other DNA
ttgccaaaaatcacgcgcaacttatcgcgctggtcagggcgctgaaatgcgttatcgatatcccggatgaatggc

SEQ ID NO: 851655 - DNA, 75 bp, synthetic construct
  source 1..75: mol_type = other DNA
cttcctggacggcataacaaaatacggcgtaaaccactacggcaagggatgccgcgaagggattgctatcagcat

SEQ ID NO: 851656 - DNA, 75 bp, synthetic construct
  source 1..75: mol_type = other DNA
tcaaatatctgcattctgtagatggcgctcctatatttgatgttaaaaaaggtgatacatcttatcccctgatta

SEQ ID NO: 851657 - DNA, 75 bp, synthetic construct
  source 1..75: mol_type = other DNA
atgaaaaagattatcgcgggtgttgttcttgctctgggtttggttggtgctgcgaatgctaatacctatacctat

SEQ ID NO: 851658 - DNA, 75 bp, synthetic construct
  source 1..75: mol_type = other DNA
gggaacattaaggccatcaaaggcggtaagatgatgcgtaacatcgaaaatggcaacttcatcaaggtagagaac

SEQ ID NO: 851659 - DNA, 75 bp, synthetic construct
  source 1..75: mol_type = other DNA
gtgagcgccataatcgtggtaaaggggatatgcaacggatgccggaaacattccgctgctggatatttaatagag

SEQ ID NO: 851660 - DNA, 75 bp, synthetic construct
  source 1..75: mol_type = other DNA
gctggatctgaatccgaagctgaacgagtttactacgggttgggtagacgatatctggacggcatttggtgaaaa

SEQ ID NO: 851661 - DNA, 75 bp, synthetic construct
  source 1..75: mol_type = other DNA
tgaacacgccagccaacatagcttccgcctcgctatcgaccgtgcttttaccgtaaaaggtgccgggctggtcgt

SEQ ID NO: 851662 - DNA, 75 bp, synthetic construct
  source 1..75: mol_type = other DNA
gatgtgaaaagataccgttattacggtgatttattgctggcgaaatctccaagagataaggcactaataatgttt

SEQ ID NO: 851663 - DNA, 75 bp, synthetic construct
  source 1..75: mol_type = other DNA
ggaagtatcaggctttattcatcgggcggtcagccgcgaacgggcaattatggaaatgtttctggcgatctcaga

SEQ ID NO: 851664 - DNA, 75 bp, synthetic construct
  source 1..75: mol_type = other DNA
cttgacgcattaataaaaaatgaccttcccgcaataaaaagtgttatcggtcaagattttgtcggatataacaaa

SEQ ID NO: 851665 - DNA, 75 bp, synthetic construct
  source 1..75: mol_type = other DNA
gtggcgcttgcatggcacaaaaccaacaaaaaatggtcgcctgattatgccgcgcgcatcctcgccagcatggaa

SEQ ID NO: 851666 - DNA, 75 bp, synthetic construct
  source 1..75: mol_type = other DNA
gccctggtggagtcggatctgtggtcacgcgatacggtggagcggcaaatgagccaccaggagcgcaacagcgtg

SEQ ID NO: 851667 - DNA, 75 bp, synthetic construct
  source 1..75: mol_type = other DNA
atgtctttaaacgattcaaaaatccgtaacttaaaaccctcttcaaaacccgtcaaactgtctgattcacacggt

SEQ ID NO: 851668 - DNA, 75 bp, synthetic construct
  source 1..75: mol_type = other DNA
actgcgtttcgcccgctggagtgagattgatttcaggcacaaaatctggaccatccccgcaacccgcgaggccat

SEQ ID NO: 851669 - DNA, 75 bp, synthetic construct
  source 1..75: mol_type = other DNA
atgtctttaaacgattctaaaatccgcaagttaaaaccctcttcccgtccggtaaaactcttcgactctcatagt

SEQ ID NO: 851670 - DNA, 75 bp, synthetic construct
  source 1..75: mol_type = other DNA
ccatccccgccacaagggaagcgattgagaaagtccgtttctctggccgtggcgcaaaaatgcgtactccatata

SEQ ID NO: 851671 - DNA, 75 bp, synthetic construct
  source 1..75: mol_type = other DNA
atgtcccttaccgacgcaaaaatccgcaccctcaagccttctgataaaccctttaaagtctccgattctcacggt

SEQ ID NO: 851672 - DNA, 75 bp, synthetic construct
  source 1..75: mol_type = other DNA
gacgcagcggacggcgcacaagccgcagcgcagcttgccgtgctgcgccagttggtcgagcggcggcgcgcggcg

SEQ ID NO: 851673 - DNA, 75 bp, synthetic construct
  source 1..75: mol_type = other DNA
ctgatctacaagaacggttagtgatcggggattatagcatttcaatatttacttatgacattaaaggtgatgctg

SEQ ID NO: 851674 - DNA, 75 bp, synthetic construct
  source 1..75: mol_type = other DNA
tccacctgtttatccgctccagcgagctgcgctttgcccgctggggtgagatagatttcagaaacaaaatctgga

SEQ ID NO: 851675 - DNA, 75 bp, synthetic construct
  source 1..75: mol_type = other DNA
acatgtgagagacgtattgcaggttggttagccgtggctgaacacatgctttatgtacctatgtacgattcattt

SEQ ID NO: 851676 - DNA, 75 bp, synthetic construct
  source 1..75: mol_type = other DNA
atacgaaccctgcagcaaaccttggcggcgtgaccacacctcctgtcagacggcactatcctgccctgccgctgg

SEQ ID NO: 851677 - DNA, 75 bp, synthetic construct
  source 1..75: mol_type = other DNA
tgaacttgctttggaaattatgaatgcagagcgagcgcgtaacaaaaactttcttaatcaacggcaagaagacgc

SEQ ID NO: 851678 - DNA, 75 bp, synthetic construct
  source 1..75: mol_type = other DNA
atgctgacgaaatatgcccttgtggcagtcatagtgctgtgtttcacggttctgggatttacgcttctggtcgga

SEQ ID NO: 851679 - DNA, 75 bp, synthetic construct
  source 1..75: mol_type = other DNA
atgctgacgaaatatgcccttgtggcagtcatagtgctgtgtttcacggtactgggatttacgcttctggtcggt

SEQ ID NO: 851680 - DNA, 75 bp, synthetic construct
  source 1..75: mol_type = other DNA
atgctgacgaaatatgcccttgtggcagtcatagtgctgtgttttacggtgctgggatttacgcttctggtcggg

SEQ ID NO: 851681 - DNA, 75 bp, synthetic construct
  source 1..75: mol_type = other DNA
gcaaactcagacgcatctcaactttacacaaatcaaaacggtagatgagttaaatcaggcgctcgttgaagccaa

SEQ ID NO: 851682 - DNA, 75 bp, synthetic construct
  source 1..75: mol_type = other DNA
catcgtgttgggcggtaaacagcgattatcgaccgccagagcattggcgctggcctttatttatgttcaagggat

SEQ ID NO: 851683 - DNA, 75 bp, synthetic construct
  source 1..75: mol_type = other DNA
gactcgttgtgtgagttgagtatcagagaacgtggtatggggtttaaggcagttctcgcttacgaatcgaagaag

SEQ ID NO: 851684 - DNA, 75 bp, synthetic construct
  source 1..75: mol_type = other DNA
catctgcctgggttccgacatattcaaccccagcaagccactcttcaggctcagcgtatgcctttgcttgagatt

SEQ ID NO: 851685 - DNA, 75 bp, synthetic construct
  source 1..75: mol_type = other DNA
taaagcatggactcaaagattgctttaagcttcgcccagacttgctgattcaatctcggcaaccgattcaaacca

SEQ ID NO: 851686 - DNA, 75 bp, synthetic construct
  source 1..75: mol_type = other DNA
ggagaaaacagggctttctgaggataaattaattgaactaatggatcaggaaacatggctaaatgcagaagaggc

SEQ ID NO: 851687 - DNA, 75 bp, synthetic construct
  source 1..75: mol_type = other DNA
tgtatcttaaccgtgccccgtttggcggtacgttgcaggggattggtgcggcaagctgggcttatctcgggaagt

SEQ ID NO: 851688 - DNA, 75 bp, synthetic construct
  source 1..75: mol_type = other DNA
aaatcactctatggactggcacaagctgacttctatcaaatgtttgcctacggacaaaaatatcttggtgggaat

SEQ ID NO: 851689 - DNA, 75 bp, synthetic construct
  source 1..75: mol_type = other DNA
aaatggtgatggatacaaaatggaagctggtgaatagcagccagcagacaaaatcactctatggactggcacaag

SEQ ID NO: 851690 - DNA, 75 bp, synthetic construct
  source 1..75: mol_type = other DNA
gtttttctggaatgatttatccacatatccaggggttcgatccagtaaacagatccatgaatgatcaacaaagga

SEQ ID NO: 851691 - DNA, 75 bp, synthetic construct
  source 1..75: mol_type = other DNA
ttgacgcagcaggcgctaactacgctctacggcgcggatattacagtattaagcgatcccgctaatcattcgcca

SEQ ID NO: 851692 - DNA, 75 bp, synthetic construct
  source 1..75: mol_type = other DNA
ttgacacagcaggcgctgaccatgctttacggcgcggatattaccgtacttaaagatcctgccagccattcaccc

SEQ ID NO: 851693 - DNA, 75 bp, synthetic construct
  source 1..75: mol_type = other DNA
ccggtcaaatgcgtaccttcctcgaccagacgggcggcctgtgggcttccggcgcactatacggaaaactggcga

SEQ ID NO: 851694 - DNA, 75 bp, synthetic construct
  source 1..75: mol_type = other DNA
ttatgctggtcataccgccagtgatgaagtgtttgaaaaactgaccggcattaaaggtgcgttccgtacccgtat

SEQ ID NO: 851695 - DNA, 75 bp, synthetic construct
  source 1..75: mol_type = other DNA
tgcgctgggcattgacgctgtggttgtcggccaggtcactccgaatccggacggctcttacaatgttgcttatca

SEQ ID NO: 851696 - DNA, 75 bp, synthetic construct
  source 1..75: mol_type = other DNA
gaaaaatggcagaatgtttaaatcgtactcacccggaatggtgcttcagcacatgtgagagacgtattgcaggtt

SEQ ID NO: 851697 - DNA, 75 bp, synthetic construct
  source 1..75: mol_type = other DNA
agctaatcaagggttagacaccagactaatacaagattatttagggcacagaaatatacatcatacggtattata

SEQ ID NO: 851698 - DNA, 75 bp, synthetic construct
  source 1..75: mol_type = other DNA
tgaccgagcggacgcgggaaattggcattcgcatggctgtaggtgcgcgagcaagcgatgttttgcaacagtttc

SEQ ID NO: 851699 - DNA, 75 bp, synthetic construct
  source 1..75: mol_type = other DNA
gacagcgaaacaggcgtaggccgctggtggaaaccgtttgatgtgagctacgagtttaaatatgtcggtctgaac

SEQ ID NO: 851700 - DNA, 75 bp, synthetic construct
  source 1..75: mol_type = other DNA
atggctgatttcgataatctctttgatgaggccatgtcgcgagctgatggcactatccgcagtgtgatgggcaca

SEQ ID NO: 851701 - DNA, 75 bp, synthetic construct
  source 1..75: mol_type = other DNA
tttgacgtgaaacaccttgatgatacaaatcacgttaagcattttgtttttgcatctgtggtgcttaatccttgc

SEQ ID NO: 851702 - DNA, 75 bp, synthetic construct
  source 1..75: mol_type = other DNA
gctaatatggaagtggaattgcttggcgctgaactggcggcagaatacaaagtgactgaaggcgaaaacggaggg

SEQ ID NO: 851703 - DNA, 75 bp, synthetic construct
  source 1..75: mol_type = other DNA
cgtccgcaggtttataaagtgaatatcaacggcggtgcgccacaacgtattacctgggaaggttcgcagaaccag

SEQ ID NO: 851704 - DNA, 75 bp, synthetic construct
  source 1..75: mol_type = other DNA
cagcccggaaaccgtactgatacggcggcacagaccacggtccggacgctggtctatgcgccggaaagcacggct

SEQ ID NO: 851705 - DNA, 75 bp, synthetic construct
  source 1..75: mol_type = other DNA
gaaggtccggtgaaatatgttcgcccggatgtcagccattttgaggcgaagaagttacgccgtggcgattattca

SEQ ID NO: 851706 - DNA, 75 bp, synthetic construct
  source 1..75: mol_type = other DNA
taccgaaggcccggttaaatatgtccgcccggatgtcagtcattttgaggcgaagaaactgcgacgcggtgatta

SEQ ID NO: 851707 - DNA, 75 bp, synthetic construct
  source 1..75: mol_type = other DNA
tgagaatctccaggaatgccaggccgttccggtggcaatcactgaaactcacgaccccatcaaaccggtgatcaa

SEQ ID NO: 851708 - DNA, 75 bp, synthetic construct
  source 1..75: mol_type = other DNA
atggaaaacaatgaaacatcgtattcgtggctggggacatttaccactgtgaagcaggaatgtccgacctgcggt

SEQ ID NO: 851709 - DNA, 75 bp, synthetic construct
  source 1..75: mol_type = other DNA
ggacgggctgttaagccgctggctgctgctgaaaaataccggacaggatatggcaacggataacagaaccgaacc

SEQ ID NO: 851710 - DNA, 75 bp, synthetic construct
  source 1..75: mol_type = other DNA
taccgaaggtccggtgaaatatgtccgtccggatgtcagccactttgaagcgaagaaactgcgccgcggcgatta

SEQ ID NO: 851711 - DNA, 75 bp, synthetic construct
  source 1..75: mol_type = other DNA
gcctttcgaccgcgctatcgatatgcatatctccaacctgcgtcgtaaattgccagatcgtaaagacggtcatcc

SEQ ID NO: 851712 - DNA, 75 bp, synthetic construct
  source 1..75: mol_type = other DNA
cgcgaaacgcgggggggactggggctactaattgtacgccgaatgctggaattgcatggaggcggcatccacctg

SEQ ID NO: 851713 - DNA, 75 bp, synthetic construct
  source 1..75: mol_type = other DNA
aggaggaccaggcgctgtttcgccagttgatggcggggactcgcaagattaagcaggacacgattgtccaccgac

SEQ ID NO: 851714 - DNA, 75 bp, synthetic construct
  source 1..75: mol_type = other DNA
cgaaagagtacggcggtgatgcagctttattagtgttgattgaagtggaagagtggttgccgcctgagttgccct

SEQ ID NO: 851715 - DNA, 75 bp, synthetic construct
  source 1..75: mol_type = other DNA
cgaagaaactgcgccgcggcgattattcgccggagttgtttttggatttacacggtttgacgcagttgcaagcta

SEQ ID NO: 851716 - DNA, 75 bp, synthetic construct
  source 1..75: mol_type = other DNA
atggcccgcacatcaccaaccagatcatccgtgaagcactgcatccctattctgacgacctgacgattgtcacca

SEQ ID NO: 851717 - DNA, 75 bp, synthetic construct
  source 1..75: mol_type = other DNA
agtcgtgcgcgccgcaaaggtcatgcacggcaaaacttcaccgattacgcataacggccagggggtatttcgcgg

SEQ ID NO: 851718 - DNA, 75 bp, synthetic construct
  source 1..75: mol_type = other DNA
gtgctggttaagcgcaacgatgcgttgacgctggcggatatcgacgcccttaaaccacaaaaaattgtcatctca

SEQ ID NO: 851719 - DNA, 75 bp, synthetic construct
  source 1..75: mol_type = other DNA
accgagtgtgaaatggtcaacggttttatcgacccgccggatgaaccaccgcattttacacgcggctatgggctg

SEQ ID NO: 851720 - DNA, 75 bp, synthetic construct
  source 1..75: mol_type = other DNA
ggataccgagcctacgcaccgtaaagcgtggcgcgaagtattagggcactacggtcttcagtacgatgttcaggc

SEQ ID NO: 851721 - DNA, 75 bp, synthetic construct
  source 1..75: mol_type = other DNA
gtgaaacccaacagacccctgatcgtaattctgagcactgtcgcgctcgacgctgtcggcatcggcctgattatg

SEQ ID NO: 851722 - DNA, 75 bp, synthetic construct
  source 1..75: mol_type = other DNA
tcagtaagggaacgctgcatggccgcgatgcgctggaactgatatttgaagacggcagcgatgcgccgttcgtga

SEQ ID NO: 851723 - DNA, 75 bp, synthetic construct
  source 1..75: mol_type = other DNA
ctcccgcactacgtcgatttccaggccgaactggagctactcaaacgtctgcaacaggagcagaaccatggctaa

SEQ ID NO: 851724 - DNA, 75 bp, synthetic construct
  source 1..75: mol_type = other DNA
tgaagaggatagcggcgcacagccggatgacatcacccgcacgccgccggtttacccctgctcacgctcctcccg

SEQ ID NO: 851725 - DNA, 75 bp, synthetic construct
  source 1..75: mol_type = other DNA
ttgtgccggaagagctgggatttgcggtaaacgtcggcgaactgttgatgaccgagtgtgaaatggtcaacggtt

SEQ ID NO: 851726 - DNA, 75 bp, synthetic construct
  source 1..75: mol_type = other DNA
gaaggctatttgctggcgctggcctactccacccagcgcggttacgggcgcaaccacccgttcgcgggcgagatc

SEQ ID NO: 851727 - DNA, 75 bp, synthetic construct
  source 1..75: mol_type = other DNA
ctcgaacggcgtatttcagcggtttataaagatattcccggcggccagctgcttggcccaacctacgactacacc

SEQ ID NO: 851728 - DNA, 75 bp, synthetic construct
  source 1..75: mol_type = other DNA
gaaggctatttgctggcgctggcctactccacccagcgtggttacggacgcaatcacccgttcgcaggcgaaatc

SEQ ID NO: 851729 - DNA, 75 bp, synthetic construct
  source 1..75: mol_type = other DNA
tgccagtggcgatgtggctggcgcggctgctggggctggtgccgggaagaacgttgttgagaataatttacttgg

SEQ ID NO: 851730 - DNA, 75 bp, synthetic construct
  source 1..75: mol_type = other DNA
ggcggttacggtgcgtatggtacaggcgtggccagttcaggatataacccttatcagataaaacagggaacggcg

SEQ ID NO: 851731 - DNA, 75 bp, synthetic construct
  source 1..75: mol_type = other DNA
tggtcgccgctggggatagtgattaataactgggagccgattgttaagtggtttcaggatatgtgggacaggctg

SEQ ID NO: 851732 - DNA, 75 bp, synthetic construct
  source 1..75: mol_type = other DNA
atgcaggatgctaccggaacggcgtcagaagacatgatggggctgttcgacactatccagaaggcgttttatctg

SEQ ID NO: 851733 - DNA, 75 bp, synthetic construct
  source 1..75: mol_type = other DNA
gactacttcgcggcagtggaagataaaaaccactccgagaacgtatctcgcgtactgtatccggatgactccacc

SEQ ID NO: 851734 - DNA, 75 bp, synthetic construct
  source 1..75: mol_type = other DNA
tggtggtcgcattcagcaggaaggtaaaaaaacgcgctggattgaaaccgaagagattctgggagtcgcttacga

SEQ ID NO: 851735 - DNA, 75 bp, synthetic construct
  source 1..75: mol_type = other DNA
cgcctccgggtatgcgggttatggaaacgcgatccagtggcattgatattaatcacgatgttgggtacaccagat

SEQ ID NO: 851736 - DNA, 75 bp, synthetic construct
  source 1..75: mol_type = other DNA
agacttcatttttagtctcgacgttcattctattgagtcgatttattatcatcctagaatgattaagtttgtcat

SEQ ID NO: 851737 - DNA, 75 bp, synthetic construct
  source 1..75: mol_type = other DNA
ttcttagatgagcctgagcgacatatgcacagaagcattgtgtctccgctgctttcatctttaatgaaatatcgt

SEQ ID NO: 851738 - DNA, 75 bp, synthetic construct
  source 1..75: mol_type = other DNA
gaaaggcgggcactcatgctcggaatgattgccgacggcacaggctacatcctgcttgccttcgcgacacgggga

SEQ ID NO: 851739 - DNA, 75 bp, synthetic construct
  source 1..75: mol_type = other DNA
gcccgaatcccttcatgattaacaaagcttctgcgccaaaagttgatggtgagatcaaggtatcttttgtgaatt

SEQ ID NO: 851740 - DNA, 75 bp, synthetic construct
  source 1..75: mol_type = other DNA
aaaatatatcttacctaatgcagaagcagatactagaaatatagataaagcttcattagtgcagttattttttag

SEQ ID NO: 851741 - DNA, 75 bp, synthetic construct
  source 1..75: mol_type = other DNA
aaagaataacagtgataataaaacaagaattgtttcaccgcaaattgacagccacggtaatttaagtgaatggcc

SEQ ID NO: 851742 - DNA, 75 bp, synthetic construct
  source 1..75: mol_type = other DNA
tggcgcgtcaggggctggcgaagtttgaagaggatagcggcgcacagccggatgacatcacccgcacgccgccgg

SEQ ID NO: 851743 - DNA, 75 bp, synthetic construct
  source 1..75: mol_type = other DNA
atgaatgaccaaaaaaacatcaaaatagatcgcgatcgttttgggaaaattacgtcaaaatctcttcaggaaatt

SEQ ID NO: 851744 - DNA, 75 bp, synthetic construct
  source 1..75: mol_type = other DNA
tgttgggtttaggcgcagcacacttcatttacgagcgaatcattttgccgtccatccgacttcattatagaaacc

SEQ ID NO: 851745 - DNA, 75 bp, synthetic construct
  source 1..75: mol_type = other DNA
aaacgcagacgcaattacaacagcagcatttagaaaatcagattaatagcaactctcagcgggtattgcagtcgc

SEQ ID NO: 851746 - DNA, 75 bp, synthetic construct
  source 1..75: mol_type = other DNA
acaaaacatggaaaagagtttccagagtatcagaatgcgaagcaatatgttgatgctgcacataattttatgaca

SEQ ID NO: 851747 - DNA, 75 bp, synthetic construct
  source 1..75: mol_type = other DNA
caattaatcatccagatatagacatcgcatgtatagcgaacatcgctcataacgaattaggcgaggcgaaaagca

SEQ ID NO: 851748 - DNA, 75 bp, synthetic construct
  source 1..75: mol_type = other DNA
ttgtctatatagtaacaactcaaccgaaaaccacttaaattcgcttcgttttgattccctcgaggccgctcgtga

SEQ ID NO: 851749 - DNA, 75 bp, synthetic construct
  source 1..75: mol_type = other DNA
tgacctacatcaatccgtctcacgggcgttttcaccgtctggataaaatgttgtcctttgatgatgatcagcagg

SEQ ID NO: 851750 - DNA, 75 bp, synthetic construct
  source 1..75: mol_type = other DNA
aatctgctcagccaccagtacctgccgctggcagaaccccgttatgatgccattttcgtcgatgaagttcaggat

SEQ ID NO: 851751 - DNA, 75 bp, synthetic construct
  source 1..75: mol_type = other DNA
cgtttgaatcgggtggcggttattgtgatgcatccggaacagaaagcacaggcacggtgctggttcagtacaccg

SEQ ID NO: 851752 - DNA, 75 bp, synthetic construct
  source 1..75: mol_type = other DNA
gcacatcattaccgcagaggaagcccggcagtggaaagaacagatcctcgcaggcacggccagtaaagccacaca

SEQ ID NO: 851753 - DNA, 75 bp, synthetic construct
  source 1..75: mol_type = other DNA
caccaaaacctcacgttcgaatcgggtggcggtcattgtgatgcatccggaacagaaagtacaggcacgttgctg

SEQ ID NO: 851754 - DNA, 75 bp, synthetic construct
  source 1..75: mol_type = other DNA
atgcgctgtaccgggaagattttaagcccgcagggcagcccagggcgaagagtctgcagttgctggagcagaagt

SEQ ID NO: 851755 - DNA, 75 bp, synthetic construct
  source 1..75: mol_type = other DNA
tcacagccagaggccagagttgttgttgagctaaaaggcgctcaacctggaacaacagtgacagagtcgaaatcc

SEQ ID NO: 851756 - DNA, 75 bp, synthetic construct
  source 1..75: mol_type = other DNA
tcgattccagccgctgtacaggctgtaaaacctgcgaactggcgtgcaaagattttaaagatcttggcccggaag

SEQ ID NO: 851757 - DNA, 75 bp, synthetic construct
  source 1..75: mol_type = other DNA
tgagcggtccaatacttgctgccgcaattctgcgggcagcccgcgttacatttaataccacaccatttgccatca

SEQ ID NO: 851758 - DNA, 75 bp, synthetic construct
  source 1..75: mol_type = other DNA
gcatggcacctttttccgtggtcaacacgttttcttgacgtttttatcgaaaaagcagaacaccctttctaccgt

SEQ ID NO: 851759 - DNA, 75 bp, synthetic construct
  source 1..75: mol_type = other DNA
gcgcggtgacgaaggctatttgttggcgctggcctactccacccaacgcggttacgggcgcaatcacccgttcgc

SEQ ID NO: 851760 - DNA, 75 bp, synthetic construct
  source 1..75: mol_type = other DNA
gcggcgcattttctggtgacgccaaaaatatcacgcagtggctggggggagttgggggagaaattcacgaagttt

SEQ ID NO: 851761 - DNA, 75 bp, synthetic construct
  source 1..75: mol_type = other DNA
gtgatttgatgttaggaatcattactgaagcagcagagaatatcaaacaaaaaaaggtaaatgatcctcattcac

SEQ ID NO: 851762 - DNA, 75 bp, synthetic construct
  source 1..75: mol_type = other DNA
tacagatcatcactcacttactgagatatgccaaaaatttaatattctacctgaacatgttgtgatcgagcagat

SEQ ID NO: 851763 - DNA, 75 bp, synthetic construct
  source 1..75: mol_type = other DNA
gctcgaatcccttcatgattaataaagctaccgcgccaaaagttgatggtgagatcaaggtatcatttataaata

SEQ ID NO: 851764 - DNA, 75 bp, synthetic construct
  source 1..75: mol_type = other DNA
gggggacagataagattacgaatgctgtaggaaaatgggtgacaaatggctgggatcctaagtacgatccaacat

SEQ ID NO: 851765 - DNA, 75 bp, synthetic construct
  source 1..75: mol_type = other DNA
aattctgcgtgcagcccgcgttacatttaataccacaccatttgccatcattagcattctggcgctgatcgcttg

SEQ ID NO: 851766 - DNA, 75 bp, synthetic construct
  source 1..75: mol_type = other DNA
cgcccaggcctggcagcgtttgtttgtcggcccgtgggcactgccgtctccgccgtggggatcggtctggctgga

SEQ ID NO: 851767 - DNA, 75 bp, synthetic construct
  source 1..75: mol_type = other DNA
tgtgggctggaatgcggcaggtggtgcgctgggtaactggatcgacaacaaagatcctctgtctggtgcaatttc

SEQ ID NO: 851768 - DNA, 75 bp, synthetic construct
  source 1..75: mol_type = other DNA
ccaggcaatcagaatacggtcggctttcgtacctataaatccgtttttgacttaggtccggcggcagagaaatac

SEQ ID NO: 851769 - DNA, 75 bp, synthetic construct
  source 1..75: mol_type = other DNA
cagttccaaacaatggcccggtaaagccgctattggtcgtctgaaaggtgatgaactggcacaatataatttgtg

SEQ ID NO: 851770 - DNA, 75 bp, synthetic construct
  source 1..75: mol_type = other DNA
tgacctgggggttaggcatcgtaggggcaaaacactctggcaaagtgatgtcatggaatggaatggcgatttacg

SEQ ID NO: 851771 - DNA, 75 bp, synthetic construct
  source 1..75: mol_type = other DNA
acacgtgaaacgttgcagcgtctggggttggaagatattgccaccgatctggctgcacacaatctgcttccggcg

SEQ ID NO: 851772 - DNA, 75 bp, synthetic construct
  source 1..75: mol_type = other DNA
ctggcgcttgaagccaaattcttcaaagcgatcactggcgaagagatgactcaggaaaaattagatttagctgca

SEQ ID NO: 851773 - DNA, 75 bp, synthetic construct
  source 1..75: mol_type = other DNA
aagcagatttcttatgggggaaagggacgcgggctaccacggaggaaatttgtcgtttaaccagccaggaaacct

SEQ ID NO: 851774 - DNA, 75 bp, synthetic construct
  source 1..75: mol_type = other DNA
cgtgccggaatacgggcaaaaaggtgagttgcgccgcgacgaacgcaatctgatgtggaacgtcgatccctattt

SEQ ID NO: 851775 - DNA, 75 bp, synthetic construct
  source 1..75: mol_type = other DNA
cgggctgaccctgctcagtatggtggtgttgctggccgtggctcagctggggctgagttattacggtgaggcgga

SEQ ID NO: 851776 - DNA, 75 bp, synthetic construct
  source 1..75: mol_type = other DNA
gtgggtggtttacggcaccaccgatattgaacaggcgatgacgcagatacagcggtaccggaaacaacaggaagg

SEQ ID NO: 851777 - DNA, 75 bp, synthetic construct
  source 1..75: mol_type = other DNA
tggcctggggcagcccgaaccgtcgctgtttggcgaactgtataagctgctcggcatgagccccggagcggcccc

SEQ ID NO: 851778 - DNA, 75 bp, synthetic construct
  source 1..75: mol_type = other DNA
tctcatcatttacgcctcacggaagaaatgaaggagatgctaaacgaaacaattcgccaactggaggccatgcat

SEQ ID NO: 851779 - DNA, 75 bp, synthetic construct
  source 1..75: mol_type = other DNA
ttaaaaaagcattagaggaagaattagatataatcaaatggcatccaacaaatgaacaattggaggagatgttca

SEQ ID NO: 851780 - DNA, 75 bp, synthetic construct
  source 1..75: mol_type = other DNA
gtctttgctaccggcccattaactggatctggtgccccctgtagttctcgcgtaaatatcacctcactttctact

SEQ ID NO: 851781 - DNA, 75 bp, synthetic construct
  source 1..75: mol_type = other DNA
gatatcgataccattgatggtaactggcaggtcgatgaaggacgtcgttactgggctaatgtaagaatatccttc

SEQ ID NO: 851782 - DNA, 75 bp, synthetic construct
  source 1..75: mol_type = other DNA
gccgctattggtcgtctgaaaggcgaggatctggcgcaatataatctgtggctggattatctggacgcactggaa

SEQ ID NO: 851783 - DNA, 75 bp, synthetic construct
  source 1..75: mol_type = other DNA
ggcataatgcttttttccctgtggatatgattgataaatataaatcagagggatgggatttatcagatgctaaag

SEQ ID NO: 851784 - DNA, 75 bp, synthetic construct
  source 1..75: mol_type = other DNA
ttaaggaaagtgagtttataagatatatagaaactcatccagttttttcagagtctttatgtaagaagcatgggg

SEQ ID NO: 851785 - DNA, 75 bp, synthetic construct
  source 1..75: mol_type = other DNA
aaagaatatcaagactattgtattttgttgacgctttgctgctatcattggatagctgatgtatttactgtctat

SEQ ID NO: 851786 - DNA, 75 bp, synthetic construct
  source 1..75: mol_type = other DNA
atgaataaaactaaaactaaaacaaaaaacttgaaggaaaatgagtttataagacatatagaaaacaatcctgtt

SEQ ID NO: 851787 - DNA, 75 bp, synthetic construct
  source 1..75: mol_type = other DNA
tccacccacgcatgaagagcttattgaaattactgaatcagaaagacagctactaattaaccaggccaacgaata

SEQ ID NO: 851788 - DNA, 75 bp, synthetic construct
  source 1..75: mol_type = other DNA
gaaattactgaatcagaaagacagctactaattaaccaggccaacgaatacatgaacagtaaacaatggcccggt

SEQ ID NO: 851789 - DNA, 75 bp, synthetic construct
  source 1..75: mol_type = other DNA
gcactggaactggttgattcctccagtgcgccagatattgaatggcctgcgcctccggcagttcaggccagatga

SEQ ID NO: 851790 - DNA, 75 bp, synthetic construct
  source 1..75: mol_type = other DNA
catcaatacccatcagtggcctggcaaagctgctattggtcgtctgaaaggtaacgagctggagcaatataattt

SEQ ID NO: 851791 - DNA, 75 bp, synthetic construct
  source 1..75: mol_type = other DNA
ctgctgctggatgtggtgaatactgtcaacggcggacgcgtacttgccaccggcagtgccgacgttaaaggaacc

SEQ ID NO: 851792 - DNA, 75 bp, synthetic construct
  source 1..75: mol_type = other DNA
acagtggtcgggatacggtactgaacggtgctcaggtcaacggcaacaggattatcgccgatgtgggccacgacc

SEQ ID NO: 851793 - DNA, 75 bp, synthetic construct
  source 1..75: mol_type = other DNA
tatttgatatgttatcaatttacattatttacaaactgattgtttcaaataatacatggatgattatgcggaaat

SEQ ID NO: 851794 - DNA, 75 bp, synthetic construct
  source 1..75: mol_type = other DNA
atgtacgagcgttatgcaggtttaatttttgatatggatggcacaatcctggatacggagcctacgcaccgtaaa

SEQ ID NO: 851795 - DNA, 75 bp, synthetic construct
  source 1..75: mol_type = other DNA
taagaaggtgggttttaaggttacgggacgctctgaggtggacgatttggggaaaccgtatccattgctgaatct

SEQ ID NO: 851796 - DNA, 75 bp, synthetic construct
  source 1..75: mol_type = other DNA
gcaggccacaaagacagcgctgtctggtgtgcaggccggacaggctgcggcaatggcctccgcaaccggtgaccc

SEQ ID NO: 851797 - DNA, 75 bp, synthetic construct
  source 1..75: mol_type = other DNA
gtccaggcgattatcggcgtctggctggtgactgcgctggcactgcatctggcggaagttggtttgattggtttg

SEQ ID NO: 851798 - DNA, 75 bp, synthetic construct
  source 1..75: mol_type = other DNA
gtaacatgaagtttgcgcttaacggcgcgctgactatcggtacgttggacggtgcgaatgtcgagatgctggatc

SEQ ID NO: 851799 - DNA, 75 bp, synthetic construct
  source 1..75: mol_type = other DNA
gtttgccgactttgcgaaaatcttcccgggtcgtttcaccaacgtcaccaacggtgtgacgccgcgtcgctggct

SEQ ID NO: 851800 - DNA, 75 bp, synthetic construct
  source 1..75: mol_type = other DNA
ggcaggagtacttcctggtttcatcaaccgttcaggatattttaagtcgccattatcagttgcatagaacatacg

SEQ ID NO: 851801 - DNA, 75 bp, synthetic construct
  source 1..75: mol_type = other DNA
atggttattagtattcgccgctcacggcatgaggaaggggaggaactcgttgcgatttggtgtcgttctgtcgat

SEQ ID NO: 851802 - DNA, 75 bp, synthetic construct
  source 1..75: mol_type = other DNA
acatcgttaacggcagtcagaaagagtctccggactactggctggagtacggcaatccgtgggaatttaaacgcc

SEQ ID NO: 851803 - DNA, 75 bp, synthetic construct
  source 1..75: mol_type = other DNA
ggatcaggctggtgtcaacggcattatgcgacaattctgtattcgtttactggcacaatcctcttatcaggttgt

SEQ ID NO: 851804 - DNA, 75 bp, synthetic construct
  source 1..75: mol_type = other DNA
cagaatatgcagcgttccttgcaacgacttaatgatgcctgctgcggcacagcccatagcagcgtttattgctcg

SEQ ID NO: 851805 - DNA, 75 bp, synthetic construct
  source 1..75: mol_type = other DNA
ttagccttgagtcgatccgcgaattactgtcgatccgtatcgatcctgaacatcatacttgtcaggaatcgaaag

SEQ ID NO: 851806 - DNA, 75 bp, synthetic construct
  source 1..75: mol_type = other DNA
tattcgttattatgaaaagcaacagatgatggatcatgaagtacgtaccgaaggtggttttcgtctttatactga

SEQ ID NO: 851807 - DNA, 75 bp, synthetic construct
  source 1..75: mol_type = other DNA
gaacggctttatttacgggatcggcggtgccggactgtgcgccaccatctgggcggtcattattcccgcagtgct

SEQ ID NO: 851808 - DNA, 75 bp, synthetic construct
  source 1..75: mol_type = other DNA
gatgtcctgtacggtaagctgcgtccatatttgcgaaaagccatcatttcagagatggcagggtgctgctcaaca

SEQ ID NO: 851809 - DNA, 75 bp, synthetic construct
  source 1..75: mol_type = other DNA
cgcgggcggtagcctggacctgagcgccatcggggatatcagcaatatcagctcagtcatcagcggtaaaaccgt

SEQ ID NO: 851810 - DNA, 75 bp, synthetic construct
  source 1..75: mol_type = other DNA
atgtatcgcattggtgagctggcaaaattggcggaagtgacgcctgacactattcgttattatgaaaagcagcag

SEQ ID NO: 851811 - DNA, 75 bp, synthetic construct
  source 1..75: mol_type = other DNA
tttgtaatgcgttaatgccagtgatgcccgtacgtgcctgtggcgatgtctcctttcgtcagcaacgttatatga

SEQ ID NO: 851812 - DNA, 75 bp, synthetic construct
  source 1..75: mol_type = other DNA
ggatcaggctggagttaacggcattatgcgacaattctgtatccgtttactggcacaatcttcttatcaggttgt

SEQ ID NO: 851813 - DNA, 75 bp, synthetic construct
  source 1..75: mol_type = other DNA
atgtatcgcattggtgagttggcaaaaatggcagaagtgacgcctgacactattcgttattatgaaaagcaacag

SEQ ID NO: 851814 - DNA, 75 bp, synthetic construct
  source 1..75: mol_type = other DNA
gcattgtgcaggaaagattgcaggaagtcgaagcacggataacggccatcaccttgtttcacggtcgccttcata

SEQ ID NO: 851815 - DNA, 75 bp, synthetic construct
  source 1..75: mol_type = other DNA
atgtatcgcattggtgagttggcaaaactggcagaagttacgcccgacacgattcgttattacgaaaagcagcag

SEQ ID NO: 851816 - DNA, 75 bp, synthetic construct
  source 1..75: mol_type = other DNA
tgggctatgttcatgcgatggcgcaccagttaggcggtttctacaacctgccgcacggggtatgtaatgctgttc

SEQ ID NO: 851817 - DNA, 75 bp, synthetic construct
  source 1..75: mol_type = other DNA
ttaacgtgacaggcaaaaatgacgcggaaggcgcagaagcgtgtatcaatgccatccgtgaactggcgaagaaag

SEQ ID NO: 851818 - DNA, 75 bp, synthetic construct
  source 1..75: mol_type = other DNA
ccagttaggcggtttctacaatctgccgcacggtgtatgtaacgccgttctgctgccgcacgttcaggtattcaa

SEQ ID NO: 851819 - DNA, 75 bp, synthetic construct
  source 1..75: mol_type = other DNA
aagctgttgctcagtaccagttcgacttcggtctgcgcccgtctgtagcatacctgcagtctaaaggtaaaaacc

SEQ ID NO: 851820 - DNA, 75 bp, synthetic construct
  source 1..75: mol_type = other DNA
cgcagcaaacgctgctgaagtttacaacaaagacggcaacaaattagatctgtacggtaaagtagacggcctgca

SEQ ID NO: 851821 - DNA, 75 bp, synthetic construct
  source 1..75: mol_type = other DNA
gaaggcgatgaccatgattgtggaaaacctgccgttagccgtcgaagatggcagtaacgctagagcacgtgaagc

SEQ ID NO: 851822 - DNA, 75 bp, synthetic construct
  source 1..75: mol_type = other DNA
acaaagcccgtacgttgaagtctcgcgtggctgggtgcgcttgcgtctgttgaacgcgtcgaactctcgtcgcta

SEQ ID NO: 851823 - DNA, 75 bp, synthetic construct
  source 1..75: mol_type = other DNA
taaggcgcgatttattgcgtcaatgatggatgatacgtatgagaccaaagaaggttcaggaacagataaccagat

SEQ ID NO: 851824 - DNA, 75 bp, synthetic construct
  source 1..75: mol_type = other DNA
acagcctgccgatgcgcctgctgccgaccgaaataatggctggttcgccgattcgcagccgtgatataagcctgg

SEQ ID NO: 851825 - DNA, 75 bp, synthetic construct
  source 1..75: mol_type = other DNA
cgccgatcaccgacgcttgcgcactgaaagccgtgaccatgattgccgaaaacctgccgttagccgtacaagatg

SEQ ID NO: 851826 - DNA, 75 bp, synthetic construct
  source 1..75: mol_type = other DNA
atgaacagaacgattcttgtccctatcgatatttccgattcagaattaactcaacgcgtgattagtcacgttgaa

SEQ ID NO: 851827 - DNA, 75 bp, synthetic construct
  source 1..75: mol_type = other DNA
tctgccctgcgtaataccggcaagcttcaacatattgaacaggttatcgccgtaacgctgaccgactggagtggc

SEQ ID NO: 851828 - DNA, 75 bp, synthetic construct
  source 1..75: mol_type = other DNA
gtcgtaactacgacgacgaagatatcctgaaatatgttgatgttggtgctacctactacttcaacaaaaacatgt

SEQ ID NO: 851829 - DNA, 75 bp, synthetic construct
  source 1..75: mol_type = other DNA
gtagaagagctgaacatcatcacctgccacctgggcaacggtggttccgtttctgctatccgcaacggtaaatgc

SEQ ID NO: 851830 - DNA, 75 bp, synthetic construct
  source 1..75: mol_type = other DNA
gcgactgccgctatgttgaagacaactacgcgacgaaagaagacgcgaagcgcgcaatggacgtttactgccacc

SEQ ID NO: 851831 - DNA, 75 bp, synthetic construct
  source 1..75: mol_type = other DNA
ttattcagggtatcaaagatgcagcttcttttgcaccgctgcacaacccggctcacctgatcggtatcgaagaag

SEQ ID NO: 851832 - DNA, 75 bp, synthetic construct
  source 1..75: mol_type = other DNA
gatatcgggaaaataacaatattaattatcgcaacagatatcgaaacacaacagcgattagagtttaataatatg

SEQ ID NO: 851833 - DNA, 75 bp, synthetic construct
  source 1..75: mol_type = other DNA
acatgggacagaggaatggaactggccagacatctagggaaggtgcgaataagcaggtcatttcttcccaagttg

SEQ ID NO: 851834 - DNA, 75 bp, synthetic construct
  source 1..75: mol_type = other DNA
caggcgccgctcacagcgaagcgctcaactttatcgttaatactattctggcacaaaaaccagaactttctgcgc

SEQ ID NO: 851835 - DNA, 75 bp, synthetic construct
  source 1..75: mol_type = other DNA
gtaactacgacgacgaagatatcctgaaatatgttgatgttggtgcgacctactacttcaacaaaaacatgtcca

SEQ ID NO: 851836 - DNA, 75 bp, synthetic construct
  source 1..75: mol_type = other DNA
gtctggttgacggcctgaactttgctgttcagtaccagggccagaatggcagcgtaagcggtgaaaatgatccgg

SEQ ID NO: 851837 - DNA, 75 bp, synthetic construct
  source 1..75: mol_type = other DNA
aacaaagacggcaacaaattagatctgtacggtaaagtagacggcctgcactatttctctgacaacaagtcagaa

SEQ ID NO: 851838 - DNA, 75 bp, synthetic construct
  source 1..75: mol_type = other DNA
tggtggtctgaaatacgacgctaacaatgtatacctggctgctcagtacacccagacttacaacgcaactctggc

SEQ ID NO: 851839 - DNA, 75 bp, synthetic construct
  source 1..75: mol_type = other DNA
gtaacttcctggaccgacgtactgccagaattcggtggcgacacctacggttctgacaacttcatgcagcagcgt

SEQ ID NO: 851840 - DNA, 75 bp, synthetic construct
  source 1..75: mol_type = other DNA
gtctggttgacggcctgaactttgctgttcagtaccagggtaccaacggcagcgtaagcggtgaagaccagacca

SEQ ID NO: 851841 - DNA, 75 bp, synthetic construct
  source 1..75: mol_type = other DNA
ttcaggcatcggggattgcactgtgtgcaggtgctgtccccctgaaggcaagcgcagccggtcaacagcaaccac

SEQ ID NO: 851842 - DNA, 75 bp, synthetic construct
  source 1..75: mol_type = other DNA
tttgccgagaaatattacggcccggcaagccaggtggtgccagagtttgttgaaaagttgctgaagggattataa

SEQ ID NO: 851843 - DNA, 75 bp, synthetic construct
  source 1..75: mol_type = other DNA
actgtacaacgtgcgcactggtcatttacgccagggacacgcgcatcggtctggggaatcaatggtcgttacctg

SEQ ID NO: 851844 - DNA, 75 bp, synthetic construct
  source 1..75: mol_type = other DNA
ttgagccatccagcattctggtttctacgctggtgctaacgctgcgcccaaccggccttctgccgctggtcacag

SEQ ID NO: 851845 - DNA, 75 bp, synthetic construct
  source 1..75: mol_type = other DNA
gcaacaatgcactatggtcaaaaatgctagtggaagaggatcccgggttttttgagaaactggcacaagcgcaaa

SEQ ID NO: 851846 - DNA, 75 bp, synthetic construct
  source 1..75: mol_type = other DNA
gccataaccccggaagggaaaattctgactctcttccgggcaatggaaacaccgataaagcgccatataaaaatc

SEQ ID NO: 851847 - DNA, 75 bp, synthetic construct
  source 1..75: mol_type = other DNA
ctggtgacgcagaatatcgataacctgcatgaacgcgcgggcaataccaatgtgattcatatgcatggggaattg

SEQ ID NO: 851848 - DNA, 75 bp, synthetic construct
  source 1..75: mol_type = other DNA
ctcaagccaaattatgcgctggcgactcaggtagagtttaccgacccggaaattgttgctgagtacatcacgtat

SEQ ID NO: 851849 - DNA, 75 bp, synthetic construct
  source 1..75: mol_type = other DNA
aatacaacattgcacaccgtgctgatgacgcattaattgataccttggctcgcgatggtattgcgtacgtgccgt

SEQ ID NO: 851850 - DNA, 75 bp, synthetic construct
  source 1..75: mol_type = other DNA
cgcctcctggttgccggcattctctccagcagaactgaaaaaagcggtgcacgataacctgcgaaatctgggggt

SEQ ID NO: 851851 - DNA, 75 bp, synthetic construct
  source 1..75: mol_type = other DNA
attcgaagtcgtgatatcagtctgggtgatgacccggggattaatgggcagttgtgggacgtcaaccgtattgat

SEQ ID NO: 851852 - DNA, 75 bp, synthetic construct
  source 1..75: mol_type = other DNA
ccacacggtgtatgtaatgccgttctgctgccacacgttcaggtgttcaacagcaaagtcgctgctgcgcgtctg

SEQ ID NO: 851853 - DNA, 75 bp, synthetic construct
  source 1..75: mol_type = other DNA
atggtgaatgatttgttgcttttctctgttagtgtattagtttttttagtgataatcctgatgttacatttgacc

SEQ ID NO: 851854 - DNA, 75 bp, synthetic construct
  source 1..75: mol_type = other DNA
aaccgcgaaacccttgagcaacgttaccgtcacgggatttccaacctcaagctgaaacacgccaaccacaaataa

SEQ ID NO: 851855 - DNA, 75 bp, synthetic construct
  source 1..75: mol_type = other DNA
taacgaatgatatgaatgatttgattgctaagaaagagtttcctgatgaagactatggattctattaccctcaat

SEQ ID NO: 851856 - DNA, 75 bp, synthetic construct
  source 1..75: mol_type = other DNA
gaagtcttgtcatcacctttcatgattatcaaacatggcgctgttcataaatataatagagctaaaggtatagag

SEQ ID NO: 851857 - DNA, 75 bp, synthetic construct
  source 1..75: mol_type = other DNA
tcaactacagatgagcgatggtcgcccgttacatgtgatttctggcgatcagggattcctgcccgctcctgtatc

SEQ ID NO: 851858 - DNA, 75 bp, synthetic construct
  source 1..75: mol_type = other DNA
acgtatgatgtcgccaaacgctgactgggcgcctgtgctaccaattcgccagaatgctgcgactttgtggtatca

SEQ ID NO: 851859 - DNA, 75 bp, synthetic construct
  source 1..75: mol_type = other DNA
cctaagtcgattagctatatgttatctataatcgcagatatgaatgaattaatcagagataatcaattcccgaga

SEQ ID NO: 851860 - DNA, 75 bp, synthetic construct
  source 1..75: mol_type = other DNA
ttgtgtattacaacaaaaaaggtaatagcgacaatgaattcttttatttgttggatattttgtcaaattatcaaa

SEQ ID NO: 851861 - DNA, 75 bp, synthetic construct
  source 1..75: mol_type = other DNA
cacgacctctgaagttagcatcgcattgactctcgacactacgggttcaacgtcaacgggagatacgttgctgac

SEQ ID NO: 851862 - DNA, 75 bp, synthetic construct
  source 1..75: mol_type = other DNA
tccgtgaagagattgaacgtttgttggagaacattaccgttctggccgaagcggcggcgctggcaacatctccgg

SEQ ID NO: 851863 - DNA, 75 bp, synthetic construct
  source 1..75: mol_type = other DNA
actgatgggacgtctgcgcaaaaaaattcaggcacaatatccgcaagaagtcattaccaccgttcgcggccaggg

SEQ ID NO: 851864 - DNA, 75 bp, synthetic construct
  source 1..75: mol_type = other DNA
gccctggccctgcgccgtaaacaaacgctattaaccctacatagcctgaatatgctgcattcccgcggcttcctc

SEQ ID NO: 851865 - DNA, 75 bp, synthetic construct
  source 1..75: mol_type = other DNA
atgttcaggcacagtggtttgatgtgcgtaaagtgatgcgtaccaatgaccgatttggccgtgcggagccggatg

SEQ ID NO: 851866 - DNA, 75 bp, synthetic construct
  source 1..75: mol_type = other DNA
gttgcatctgactccacggctcagtgaaggtttagtcatcacccagggctttattggtagcgaaagtaaagggcg

SEQ ID NO: 851867 - DNA, 75 bp, synthetic construct
  source 1..75: mol_type = other DNA
gtcagccagcgtttaacgccgggcaactgggacgatgaaccgcagccgtttattggtgggctgatttctgaacag

SEQ ID NO: 851868 - DNA, 75 bp, synthetic construct
  source 1..75: mol_type = other DNA
cgcacggcgtactggcagtgtttggaccgtataatttccctggtcatctgccgaacggacatattgttccggcat

SEQ ID NO: 851869 - DNA, 75 bp, synthetic construct
  source 1..75: mol_type = other DNA
gggtaacgggccagggggcgctgcgcgtgaagcgaaatcctgtatcgggcgaggtgttatggcagggcaatgatg

SEQ ID NO: 851870 - DNA, 75 bp, synthetic construct
  source 1..75: mol_type = other DNA
cgtgaaacgggtcaggcgctgagtgcgctggaggatctcgacggcttgctgtttaccggtagcgccaataccggc

SEQ ID NO: 851871 - DNA, 75 bp, synthetic construct
  source 1..75: mol_type = other DNA
gtcagccagcggttaacgccgggccgttgggatgacgaaccgcagccgtttattggcgggctgatatcagatcag

SEQ ID NO: 851872 - DNA, 75 bp, synthetic construct
  source 1..75: mol_type = other DNA
ggcgttacgacaccttcgatgaggcgattacgatggcaaataacactcgctttggcctctcctgcggtctggttt

SEQ ID NO: 851873 - DNA, 75 bp, synthetic construct
  source 1..75: mol_type = other DNA
tgagatgggcggtaataatccgctaattatcgatgaggtggcggatatcgacgcggctgtccatctgaccattca

SEQ ID NO: 851874 - DNA, 75 bp, synthetic construct
  source 1..75: mol_type = other DNA
cgtcattctctgtagcagtaaaacttcagcggaaatgctgtacttgcaaaaaacgttggggctacaagggttacc

SEQ ID NO: 851875 - DNA, 75 bp, synthetic construct
  source 1..75: mol_type = other DNA
atgaaatgtaagcgttatctctatgctaatatggaagttaacggacaacgattttcttatggaattactggtggg

SEQ ID NO: 851876 - DNA, 75 bp, synthetic construct
  source 1..75: mol_type = other DNA
gacggcttgctgtttaccggcagcgccaataccggctaccagctgcatcgccagctctccggtcagccggagaaa

SEQ ID NO: 851877 - DNA, 75 bp, synthetic construct
  source 1..75: mol_type = other DNA
ccagagaaaccggcaagccgcgctgggaagcagcaaccgaagtgacggcgatgatcaataagatcgctatatcaa

SEQ ID NO: 851878 - DNA, 75 bp, synthetic construct
  source 1..75: mol_type = other DNA
ttgctcgtctggttgccgtcagccagcgattaacgccgggcaactgggatgacgaaccgcagccgtttattggcg

SEQ ID NO: 851879 - DNA, 75 bp, synthetic construct
  source 1..75: mol_type = other DNA
ccggtgctgccagtaccgcacccttcggcggcgttggcgcttccggcaaccatcgccccagcgcctggtatgccg

SEQ ID NO: 851880 - DNA, 75 bp, synthetic construct
  source 1..75: mol_type = other DNA
taataccctgggcaacaaaaccacatgcaaggtttgtcataaatattttatccttatcctctcagttatgaacaa

SEQ ID NO: 851881 - DNA, 75 bp, synthetic construct
  source 1..75: mol_type = other DNA
ctacagaagatctatacggtagccaaagcaagcgccgatgaacagcttgagcgcgagcgtgaactgctacgacag

SEQ ID NO: 851882 - DNA, 75 bp, synthetic construct
  source 1..75: mol_type = other DNA
aatattttagtaaagttatatgtcgttggtgatgttgtcgatcttcaatattatgaagaactgaaacaaattgtg

SEQ ID NO: 851883 - DNA, 75 bp, synthetic construct
  source 1..75: mol_type = other DNA
atctgcaggacatgtctccggaattcgtggagattctgggggggaggaaggatttttacaaacacagtgaggagg

SEQ ID NO: 851884 - DNA, 75 bp, synthetic construct
  source 1..75: mol_type = other DNA
cactgtacgaacacccgctaccgctggtgattgttggctcggcgggaagtggtaagacggcgctggtactggaaa

SEQ ID NO: 851885 - DNA, 75 bp, synthetic construct
  source 1..75: mol_type = other DNA
tgaatcctgacacgatcccgggttataaaaaatttgcacaggctattgccaccgataactttgttcaggctgatg

SEQ ID NO: 851886 - DNA, 75 bp, synthetic construct
  source 1..75: mol_type = other DNA
tcgtgatgatatgattcacatcggcatctgtgcctggcgtagcgggcaggataccgaacaggtgatggaacatgc

SEQ ID NO: 851887 - DNA, 75 bp, synthetic construct
  source 1..75: mol_type = other DNA
cgccctgatggcaatcgacgcgggactggagcggctgcggcatgcggtgctggaaaaaggggggaatgatgatcg

SEQ ID NO: 851888 - DNA, 75 bp, synthetic construct
  source 1..75: mol_type = other DNA
gtttaccggcagcgccaataccggctaccagctacatcgccagctttccggtcagccggagaaaattctcgccct

SEQ ID NO: 851889 - DNA, 75 bp, synthetic construct
  source 1..75: mol_type = other DNA
gctggaaacccgcgccacacgtattttaaatggcgagcgtggctcgaatgtgttgggaaccatctatgaatggcc

SEQ ID NO: 851890 - DNA, 75 bp, synthetic construct
  source 1..75: mol_type = other DNA
gccacaaattaccgaattaatgatgtcggcagatatcgttcgtgtagacctgctccatggtgataaacaggttta

SEQ ID NO: 851891 - DNA, 75 bp, synthetic construct
  source 1..75: mol_type = other DNA
tcaggcggtggcgacggcgatcgatactcacctcgtgtcgaatgatttcagtacgttgagaccacaaattaccga

SEQ ID NO: 851892 - DNA, 75 bp, synthetic construct
  source 1..75: mol_type = other DNA
gggcatacgctggatcgatcgcagcgtgagcttaaccgtcgtcgtgcgacagctttcgcagactatgttgtgaat

SEQ ID NO: 851893 - DNA, 75 bp, synthetic construct
  source 1..75: mol_type = other DNA
acattgcaacaattcgcatgacggaagatttaatgcttaaactcgctgactttattcgcgatcagcatgatagag

SEQ ID NO: 851894 - DNA, 75 bp, synthetic construct
  source 1..75: mol_type = other DNA
aatgacactgaaaacgtaaagtacaacattgcaacaattcgcatgacggaagatttaatgcttaaactcgctgac

SEQ ID NO: 851895 - DNA, 75 bp, synthetic construct
  source 1..75: mol_type = other DNA
aatcaaataactgtgtagatgcatatgctgatgcatttggatattcatcttttggggaagatgacgatcgcttag

SEQ ID NO: 851896 - DNA, 75 bp, synthetic construct
  source 1..75: mol_type = other DNA
atgctagtagtagattatttgataaatgttttatggtcacaaatgaacgtgagtaaatatgtcgctatcttttcc

SEQ ID NO: 851897 - DNA, 75 bp, synthetic construct
  source 1..75: mol_type = other DNA
tcgtggaacaaatgggaaccgattgccggatacggatgggaaagtacctggcgaccgctggcggatgaaaatttt

SEQ ID NO: 851898 - DNA, 75 bp, synthetic construct
  source 1..75: mol_type = other DNA
ttattcagttaatcagcgttggtaaagtttttgctaacgcagatgagtggatgacaacgtttagagaaaatattg

SEQ ID NO: 851899 - DNA, 75 bp, synthetic construct
  source 1..75: mol_type = other DNA
tggcatttattcgagattttgaacggcaattcacatcaacaacactgacggtagatcttgaggtatacaacggct

SEQ ID NO: 851900 - DNA, 75 bp, synthetic construct
  source 1..75: mol_type = other DNA
aaacctttatccggggttgaccacatttgtcagtctatcgttgatattttaacgaccccgctgggaacccgtgta

SEQ ID NO: 851901 - DNA, 75 bp, synthetic construct
  source 1..75: mol_type = other DNA
atgcccggacggggaaacacaacaaccgaaccaaccaatggcgtaaatatgcttggaatggaccgtaacactggt

SEQ ID NO: 851902 - DNA, 75 bp, synthetic construct
  source 1..75: mol_type = other DNA
tagaagcgaatgttgaggatataaaaacaaatctcgcagagatgagagctgacattcgtgatttgcgaaacgctc

SEQ ID NO: 851903 - DNA, 75 bp, synthetic construct
  source 1..75: mol_type = other DNA
aaaacgtcggtattggttatattccacatcatctggcattgccgttattgaacagcggtaaattgcttaaaaagc

SEQ ID NO: 851904 - DNA, 75 bp, synthetic construct
  source 1..75: mol_type = other DNA
cacccactggcagcgaagcggcatccattagaaaacagtgaattgcgtcattatccagcggtttgtatccgcgat

SEQ ID NO: 851905 - DNA, 75 bp, synthetic construct
  source 1..75: mol_type = other DNA
ttgcgaggcctcttcccgttttctcatccagccgtagcctcttccagtagtgaatgttacccttatcacctgatc

SEQ ID NO: 851906 - DNA, 75 bp, synthetic construct
  source 1..75: mol_type = other DNA
ttatgttaattgtaatactatcaattaacttcggttacctcttaagcggcgcaattctcatgtgcggaggcaaac

SEQ ID NO: 851907 - DNA, 75 bp, synthetic construct
  source 1..75: mol_type = other DNA
atggttaactctgatttttctgttttacggctcacagaatggtccttgacgggatctaattatgattactgtttg

SEQ ID NO: 851908 - DNA, 75 bp, synthetic construct
  source 1..75: mol_type = other DNA
gctgtcgacgggtttgtgttaccgaaatttaccctaagttcgttagctgaatggtgggatatcatgggcggaact

SEQ ID NO: 851909 - DNA, 75 bp, synthetic construct
  source 1..75: mol_type = other DNA
aaggcgtttctgcatcgttttgccgccgcgggtgctgccattcgttatcaggccgttcattctgacgaggttgag

SEQ ID NO: 851910 - DNA, 75 bp, synthetic construct
  source 1..75: mol_type = other DNA
gatcgtcattatcagcacgctgcggctggacagtctgcatgtgctggatgagggtaagcaggtgctggcttatcc

SEQ ID NO: 851911 - DNA, 75 bp, synthetic construct
  source 1..75: mol_type = other DNA
ttttcttaatcataacactatcagttaactttggggttttattgggccttgcggttgtcatgcaggggtataaac

SEQ ID NO: 851912 - DNA, 75 bp, synthetic construct
  source 1..75: mol_type = other DNA
gtgagattgctgttaaaagggctcgtcggaatggcgctggcctggcttgttattggtttcgggatggagttactt

SEQ ID NO: 851913 - DNA, 75 bp, synthetic construct
  source 1..75: mol_type = other DNA
gctgtacagtgcaggcaacctgctgcttgacgctcaggacttcagtggtcagggccaggtggtggccaccggtga

SEQ ID NO: 851914 - DNA, 75 bp, synthetic construct
  source 1..75: mol_type = other DNA
gcagcagttgcccgattactgggggcttgcggggatcagcagttcaaaggtaccgggtgttgcggggatcggacc

SEQ ID NO: 851915 - DNA, 75 bp, synthetic construct
  source 1..75: mol_type = other DNA
catcaaaatgctcgtttcggtcttcggcccgcgtgattttgccctgaccgcgcccgtatgtgagcatattgacga

SEQ ID NO: 851916 - DNA, 75 bp, synthetic construct
  source 1..75: mol_type = other DNA
tattggtttcgggatggagttactttttctcgccgatcgggttcatccggcattaagagtaatcgttgtcctggg

SEQ ID NO: 851917 - DNA, 75 bp, synthetic construct
  source 1..75: mol_type = other DNA
tttctcgccgatcgggttcatccggcattaagagtaattgttgtcctggggatgttattcctgctgataagagcc

SEQ ID NO: 851918 - DNA, 75 bp, synthetic construct
  source 1..75: mol_type = other DNA
ttacggtgacagcacgacaaaacctacggtgacagcaaaaccacggaagaagaaagcgacattcgacacgcgcaa

SEQ ID NO: 851919 - DNA, 75 bp, synthetic construct
  source 1..75: mol_type = other DNA
tagaagccgcaattgctcgagctaaagcacgcaagctggaacaacaacctgctaacgaatcgccgcaggaacagg

SEQ ID NO: 851920 - DNA, 75 bp, synthetic construct
  source 1..75: mol_type = other DNA
cagcaacaacaggctaatgcggaaccagaagaacaggttgatccacgcaaagccgccgtcgaagcggctattgcc

SEQ ID NO: 851921 - DNA, 75 bp, synthetic construct
  source 1..75: mol_type = other DNA
agcaaaaataatgcttgaatccggagtccctcttgcggacatcatgcgttttaccggggtgtcagaagaagagtt

SEQ ID NO: 851922 - DNA, 75 bp, synthetic construct
  source 1..75: mol_type = other DNA
ctcagtatgcattagcagcgaagatgacgcgcacaccgctaacggtgtttgtgatccctgatgttgagaaggaaa

SEQ ID NO: 851923 - DNA, 75 bp, synthetic construct
  source 1..75: mol_type = other DNA
ggctttattttattgatcataacggttttaccgcgttgtaccggaaggggcactggttttaccagaagtttcact

SEQ ID NO: 851924 - DNA, 75 bp, synthetic construct
  source 1..75: mol_type = other DNA
tggttgggacgattatttatcaaacatcacctaaatgctgtaaaaaaggatgatatcattatatttaatgacagt

SEQ ID NO: 851925 - DNA, 75 bp, synthetic construct
  source 1..75: mol_type = other DNA
tgattttgaacatagatttatagggaatgaaaagaccaaagcaatagaacaattttttcctatagggatggagga

SEQ ID NO: 851926 - DNA, 75 bp, synthetic construct
  source 1..75: mol_type = other DNA
ttaaaccaatggattatgatagtttatataaattcagtccagataaaatgatgtcaacgattgtttctgatttta

SEQ ID NO: 851927 - DNA, 75 bp, synthetic construct
  source 1..75: mol_type = other DNA
atgccgagccagaacaacaggtcgatccgcgcaaaagccgccgtcgaagccgctatttgcccgtgccaaagcacg

SEQ ID NO: 851928 - DNA, 75 bp, synthetic construct
  source 1..75: mol_type = other DNA
tttctaaatcaccagtgcgggtttcattttgtccgttctgtggtgaaagtctgaaaacgtgggagaacagaaatg

SEQ ID NO: 851929 - DNA, 75 bp, synthetic construct
  source 1..75: mol_type = other DNA
tttttcttggtcgtgataaaggacgtcttcaaataattaatgaattagccgatagattaacaacactaggatgta

SEQ ID NO: 851930 - DNA, 75 bp, synthetic construct
  source 1..75: mol_type = other DNA
atgaaaaataaaatattcttgctccgggaatataaagagaaaaatggcttgctgcaaatgatagtttccagaaaa

SEQ ID NO: 851931 - DNA, 75 bp, synthetic construct
  source 1..75: mol_type = other DNA
gaatggttgttacacggtcaggaacagacgatgcaggtattttccgctatccgtgccgcaaatcgtgccgcacgg

SEQ ID NO: 851932 - DNA, 75 bp, synthetic construct
  source 1..75: mol_type = other DNA
ggatgttttaacatcatctaaatatatcgggaagattattactgaaaacaaagccgaatgttcagactttaataa

SEQ ID NO: 851933 - DNA, 75 bp, synthetic construct
  source 1..75: mol_type = other DNA
atgctttatttttgggttgtattatttacacttatgatatccatacttgactactctgtgcatatggatgagttt

SEQ ID NO: 851934 - DNA, 75 bp, synthetic construct
  source 1..75: mol_type = other DNA
agatcagttggatccgatggcgaaggccgggcaacacatctttatattgatggtaatccgtcaaaatttcttcag

SEQ ID NO: 851935 - DNA, 75 bp, synthetic construct
  source 1..75: mol_type = other DNA
cacggtcgcgcctgtggtaaaggtggcactgtttacttagggaaaaactcccgtcgttggagcctgaaattttat

SEQ ID NO: 851936 - DNA, 75 bp, synthetic construct
  source 1..75: mol_type = other DNA
atcgggaagattattgctgaacacaaaggcaaatgttcagacattaatacgacgtgcactgaattattgcaaagt

SEQ ID NO: 851937 - DNA, 75 bp, synthetic construct
  source 1..75: mol_type = other DNA
agccagtacggggccgtgtcgttacgtgagcaggcccgttaccttgataacaaccacgatctggttattggtgta

SEQ ID NO: 851938 - DNA, 75 bp, synthetic construct
  source 1..75: mol_type = other DNA
agaagtggatgcagagcgaatgctgcatcttaaatttgttcgccgtctgcaccagatgcgcgggacgtctttatt

SEQ ID NO: 851939 - DNA, 75 bp, synthetic construct
  source 1..75: mol_type = other DNA
agcttcagttctttattctattgcggaatatacgagtcaggaaaaacagcggaaaagtaaagtctatagctacct

SEQ ID NO: 851940 - DNA, 75 bp, synthetic construct
  source 1..75: mol_type = other DNA
tatttatgacgagattggtttctggggagttaccgcgaagcagtttgtcagcgaactgaatgcactgggtgatat

SEQ ID NO: 851941 - DNA, 75 bp, synthetic construct
  source 1..75: mol_type = other DNA
cattaccggtgacaattgcagcactcgtcctgtgcctgccgttgctgctgacaggttgcgggagctcgaaaaacg

SEQ ID NO: 851942 - DNA, 75 bp, synthetic construct
  source 1..75: mol_type = other DNA
tgatgacttgtcagttatagtcgaaatggattacttccctgaaaccacaaaatcaatgatgtatcgtaatggtcg

SEQ ID NO: 851943 - DNA, 75 bp, synthetic construct
  source 1..75: mol_type = other DNA
gttggcgaagattttattcttgataacgcgaattatttcgatattatatatgattttgagcatagatttataggg

SEQ ID NO: 851944 - DNA, 75 bp, synthetic construct
  source 1..75: mol_type = other DNA
aatcaggaaaaccgggtacagcacaaatcccggtgacgttacccacctgggatgaagtcattggccgggatgtga

SEQ ID NO: 851945 - DNA, 75 bp, synthetic construct
  source 1..75: mol_type = other DNA
accggtaacctgctccgcagccgctggctggcgtgccgaccagcaggtgatcgaagcaaaagaagcgttccattt

SEQ ID NO: 851946 - DNA, 75 bp, synthetic construct
  source 1..75: mol_type = other DNA
gtacactggaagagattatcggtcaaccagtaatctgttctgccgctgctggctggcgtgccgaccaacaggtgg

SEQ ID NO: 851947 - DNA, 75 bp, synthetic construct
  source 1..75: mol_type = other DNA
atctcaagccgtggcgtaactggctcgaagaacgggatggacggattgtgttcaacaggaaatggcattgttttc

SEQ ID NO: 851948 - DNA, 75 bp, synthetic construct
  source 1..75: mol_type = other DNA
atgaatcaataccctaagaccggctggctattgctgtgtatctatattgcactcggtgtagttcgtcacagagta

SEQ ID NO: 851949 - DNA, 75 bp, synthetic construct
  source 1..75: mol_type = other DNA
ctcgtttaagtgctaatctcactcaggaaaagttaggtgtactggcaggtattgaagaagcgacggcccgttccc

SEQ ID NO: 851950 - DNA, 75 bp, synthetic construct
  source 1..75: mol_type = other DNA
gcaacagggaagaagcacccgtccgggttgaagtcacgaaagaagagatcgcccgcatcgttcaggaagtagaag

SEQ ID NO: 851951 - DNA, 75 bp, synthetic construct
  source 1..75: mol_type = other DNA
gaacgcgtcacacaggagatcgttggcaacaaggaagaagcgccagtccaggttgaagtcacgaaagaagagatc

SEQ ID NO: 851952 - DNA, 75 bp, synthetic construct
  source 1..75: mol_type = other DNA
accgaagaaaaggcgttagaaatctgtgaactggtggcggacggtcagagcgttaacaaaatttcgaagatgcct

SEQ ID NO: 851953 - DNA, 75 bp, synthetic construct
  source 1..75: mol_type = other DNA
ggacaatatgggccgccatctctggcgactggtgaagccacagtttttgtggaagatgctgcgctcaaatgcggc

SEQ ID NO: 851954 - DNA, 75 bp, synthetic construct
  source 1..75: mol_type = other DNA
gcaggccaatgctgaattcatcgccgcagccagtccagctaccgtcttagcgctgctgggcgagctggaaacagc

SEQ ID NO: 851955 - DNA, 75 bp, synthetic construct
  source 1..75: mol_type = other DNA
accgaagaaaaggcattagagatctgtgagctggtggcggacggtcagagtattaacaaaatctcgaagatgcct

SEQ ID NO: 851956 - DNA, 75 bp, synthetic construct
  source 1..75: mol_type = other DNA
attggacgtaccggagtgttatttttatacggttaatgatgattttgctgaaatgattctggcgctttatttaac

SEQ ID NO: 851957 - DNA, 75 bp, synthetic construct
  source 1..75: mol_type = other DNA
gtgagtgaatcaaaatgccaggttaatggcaacaagatagaaccatgtgcagcactggcaaagtcccttgagcgt

SEQ ID NO: 851958 - DNA, 75 bp, synthetic construct
  source 1..75: mol_type = other DNA
gtgagtgaatcaaaatgccaggttaatggcaatcagatagaaccatgtgcggcactggcaaaagcccttgagcat

SEQ ID NO: 851959 - DNA, 75 bp, synthetic construct
  source 1..75: mol_type = other DNA
ggcactggcaaaatcccttgagcatgatgctgaatacacgacgcgaaaaggtctgctgatatacaaaatctggaa

SEQ ID NO: 851960 - DNA, 75 bp, synthetic construct
  source 1..75: mol_type = other DNA
atggcaatcagatagaaccgtgtacggcactggcaaaatcccttgagcatgatgctgaatacacgacgcgaaaag

SEQ ID NO: 851961 - DNA, 75 bp, synthetic construct
  source 1..75: mol_type = other DNA
atggcaatcagatagaaccatgtgcggtactggcaaaagcccttgagcatgatgctgaatacacgaagcgaaaag

SEQ ID NO: 851962 - DNA, 75 bp, synthetic construct
  source 1..75: mol_type = other DNA
atgagtcaaggtaacggtgacggagctgcaaagtgcagaatctccacttgtttgattaatgacagaaaaatagaa

SEQ ID NO: 851963 - DNA, 75 bp, synthetic construct
  source 1..75: mol_type = other DNA
gcgcccccatctgcaacatttacaaattctttgcacttccctgcactatccgacactgtcaccatccataattca

SEQ ID NO: 851964 - DNA, 75 bp, synthetic construct
  source 1..75: mol_type = other DNA
gccaataaaggtgtcggcagagccaaacggtgcacgtctggttgaagtgcatcagccactttcagagaagattga

SEQ ID NO: 851965 - DNA, 75 bp, synthetic construct
  source 1..75: mol_type = other DNA
gggcaaaaattcagtgaccgtgtaccccatcggcattggtcagttggggggtgacacgctgacgccgacaatggt

SEQ ID NO: 851966 - DNA, 75 bp, synthetic construct
  source 1..75: mol_type = other DNA
gtttcttcttccgacatgccaggttcccatttacgggttgtatgggtatcaccgaccgataaatatccttcatcc

SEQ ID NO: 851967 - DNA, 75 bp, synthetic construct
  source 1..75: mol_type = other DNA
ttccctttttaagccaaagaaacgtgtttcttcttccgacatgccaggttcccatttacgggttgtatgggtatc

SEQ ID NO: 851968 - DNA, 75 bp, synthetic construct
  source 1..75: mol_type = other DNA
cgaagtaatgcagcatgtgatggatgtacgttcaggaatgccggtggatgtacgtcgtcatcaagtaaaccaaca

SEQ ID NO: 851969 - DNA, 75 bp, synthetic construct
  source 1..75: mol_type = other DNA
aaatccgcaggccagaatcaaggttaaccggggggatttgcccgtaataaagctgggtaacgcgcggattgtcct

SEQ ID NO: 851970 - DNA, 75 bp, synthetic construct
  source 1..75: mol_type = other DNA
tccgcgcaaagccgccgtcgaagccgctattgcccgtgccaaagcacgcaagctggaacagcaacaggctaatgc

SEQ ID NO: 851971 - DNA, 75 bp, synthetic construct
  source 1..75: mol_type = other DNA
gattgatctggccaggcaagaaagaaaaagcgtgtcacctggcgctaataacttgcctaccttcgcatgacacca

SEQ ID NO: 851972 - DNA, 75 bp, synthetic construct
  source 1..75: mol_type = other DNA
atatgtcaacgctattcaggacgggtcactttggtgtaaaaagcttcccatacagaggctctcagcggattactt

SEQ ID NO: 851973 - DNA, 75 bp, synthetic construct
  source 1..75: mol_type = other DNA
cattattgcgtgttccctactcctttatggtgcctatattcggtggacgccgatggacggtttttagtactgcaa

SEQ ID NO: 851974 - DNA, 75 bp, synthetic construct
  source 1..75: mol_type = other DNA
cagcaactggcgaatggtcgctggcatgtgatgcgacgtattgatggcaaaaatcgttaccccattgatgtggtg

SEQ ID NO: 851975 - DNA, 75 bp, synthetic construct
  source 1..75: mol_type = other DNA
atgacacggatcgcggtcgagctttccttactgacctttgtgcgctctagtgaactacgttttgcgcgctgggat

SEQ ID NO: 851976 - DNA, 75 bp, synthetic construct
  source 1..75: mol_type = other DNA
gagttcgacttcgataaatctctctggcgagtacctgcaaaacgagaagaaattaaaggtgtgcgttactcgtac

SEQ ID NO: 851977 - DNA, 75 bp, synthetic construct
  source 1..75: mol_type = other DNA
aaccaggtgaaggggggccccctgaaactggtgcgtcagcgcgtccgggtatttaaagccagtccggcaggaaaa

SEQ ID NO: 851978 - DNA, 75 bp, synthetic construct
  source 1..75: mol_type = other DNA
atatcttttccgggatgcgtttattcagcaactggcgaatggtcgctggcatgtgatgcggcgtattgatggcaa

SEQ ID NO: 851979 - DNA, 75 bp, synthetic construct
  source 1..75: mol_type = other DNA
ggggacagcccgggtcagactggcccggcgtggtggaaaactgcagtaccgtggcagcgtgctgaaggtgggtaa

SEQ ID NO: 851980 - DNA, 75 bp, synthetic construct
  source 1..75: mol_type = other DNA
atggcactgcaaaatgagaaaaatagtcgttatcttttacgcgactggaaaccagaaaatccggccttctgggaa

SEQ ID NO: 851981 - DNA, 75 bp, synthetic construct
  source 1..75: mol_type = other DNA
ctgtcgaatggcgtgatcctggccgatgaagtgggactggggaaaactattgaggccagcctgattttggcgcaa

SEQ ID NO: 851982 - DNA, 75 bp, synthetic construct
  source 1..75: mol_type = other DNA
tcaaatgctcaaagatggatgtgcgaatccatttgatattgaaaatgcgaccggagagacagcaatatgcatttg

SEQ ID NO: 851983 - DNA, 75 bp, synthetic construct
  source 1..75: mol_type = other DNA
gttcaaggcccgttattcccgacagaatattgacgatgcagaactggcattattaagggttcgtctgaataaaat

SEQ ID NO: 851984 - DNA, 75 bp, synthetic construct
  source 1..75: mol_type = other DNA
aaaggcaaccgggccgatcagcgtgtgtttgaactattgagccagaagttccagctttttgaaggcgtgtttggt

SEQ ID NO: 851985 - DNA, 75 bp, synthetic construct
  source 1..75: mol_type = other DNA
ggaaatgtttctgagcgacgagagcgattttcaacgttctgagacgggttttcgttccagaggaaagtattttga

SEQ ID NO: 851986 - DNA, 75 bp, synthetic construct
  source 1..75: mol_type = other DNA
gaagactttcgtccgactgaagacgaagaagcactctataaacaggtttcctcttatttgcagcgggacgatctg

SEQ ID NO: 851987 - DNA, 75 bp, synthetic construct
  source 1..75: mol_type = other DNA
ggctcagtgcgcagtccgctttccgacagaacggaacggctgtggccagtatcgccatgcgggccagaaacagaa

SEQ ID NO: 851988 - DNA, 75 bp, synthetic construct
  source 1..75: mol_type = other DNA
tgtgttatcagtggttgtctttaccctttctaatctccttgtatcttccggcgcgcatctgatctaccgggtgtt

SEQ ID NO: 851989 - DNA, 75 bp, synthetic construct
  source 1..75: mol_type = other DNA
tcaggatgtatgtcgtttatgttattgcgtttattatcctctttttattgttcttctgttctgcaataaagaaat

SEQ ID NO: 851990 - DNA, 75 bp, synthetic construct
  source 1..75: mol_type = other DNA
tggcccagagataaagccgtgtttaaaccgctggatacagaagaagtctgctacgataattccattcattatacc

SEQ ID NO: 851991 - DNA, 75 bp, synthetic construct
  source 1..75: mol_type = other DNA
actgctcccacacctggctgaagcactgaacagtaatccggggagcaggaaactgattgttctgcatctgacggg

SEQ ID NO: 851992 - DNA, 75 bp, synthetic construct
  source 1..75: mol_type = other DNA
cagagattaatgacgattgcggataccatacctcgctacgatctgatgattactgataacaacactgacgtattt

SEQ ID NO: 851993 - DNA, 75 bp, synthetic construct
  source 1..75: mol_type = other DNA
atacaaaatggccgatggcggcggtttgtatcttgaggtttcggccaagggttccaaatactggcgcatgaaata

SEQ ID NO: 851994 - DNA, 75 bp, synthetic construct
  source 1..75: mol_type = other DNA
gattatttagatataagtaagcattctcaagtcactccatatgagtttgcaaatatgcttaaagttaaaaagtaa

SEQ ID NO: 851995 - DNA, 75 bp, synthetic construct
  source 1..75: mol_type = other DNA
tcttgctgcatatcgtggccgcataatgacacggatcgcggtcgagctttccttactgacctttgtgcgctctag

SEQ ID NO: 851996 - DNA, 75 bp, synthetic construct
  source 1..75: mol_type = other DNA
agcaaagcgtgacgaagctaaaaagctgttagtgcagggcattgacccaaaagccgaacagaaggaagctaaggc

SEQ ID NO: 851997 - DNA, 75 bp, synthetic construct
  source 1..75: mol_type = other DNA
caatcaaaatggccgagcgtgggcatcaggtcattttatgcgatctttctgcgcagatgatcgaccgcgcaaaac

SEQ ID NO: 851998 - DNA, 75 bp, synthetic construct
  source 1..75: mol_type = other DNA
cggtgcgttatctacaaccaaagcacgacactatccagctttaccctctagccgcttctctgagtttcttgcacg

SEQ ID NO: 851999 - DNA, 75 bp, synthetic construct
  source 1..75: mol_type = other DNA
cagaacatttagaagaacgacgcctaatgattcaatggtgggctgattatcttgatatgaataaaacaactttca

SEQ ID NO: 852000 - DNA, 75 bp, synthetic construct
  source 1..75: mol_type = other DNA
gcctatgagtgagaacacggtgaacaaagctttgcgagtgatgggctatgatacaaaaacggaagtatgtgggca

SEQ ID NO: 852001 - DNA, 75 bp, synthetic construct
  source 1..75: mol_type = other DNA
tgcggttgctacggcgaaaagaaagcaccgtgcggctctggatcttgaacgtattcctgaattacttcaccgcat

SEQ ID NO: 852002 - DNA, 75 bp, synthetic construct
  source 1..75: mol_type = other DNA
gtaggcgcttatggcagggaaataaaagggtgtattcctgaagaatgccaggaaattaaacattctgaatatgtg

SEQ ID NO: 852003 - DNA, 75 bp, synthetic construct
  source 1..75: mol_type = other DNA
attggcgctgaaggtgagttgtgcgttagcgtcggcgataaagtactgcgcggccagccgcttacccgtggtcgc

SEQ ID NO: 852004 - DNA, 75 bp, synthetic construct
  source 1..75: mol_type = other DNA
ttgtatctcgaggtttcggccaagggttctaaatactggcgcatgaaataccgacgcccctctgacaaaaaagag

SEQ ID NO: 852005 - DNA, 75 bp, synthetic construct
  source 1..75: mol_type = other DNA
cggaacacttggatgagcgtcgcttgatggtacagtggtgggctgattatcttgatgcttgtcgctacggttcca

SEQ ID NO: 852006 - DNA, 75 bp, synthetic construct
  source 1..75: mol_type = other DNA
gaagcattacttgaattagaaacgcgttattgccgtcaggaaccgtatattaccctggggcgttatattcatgtc

SEQ ID NO: 852007 - DNA, 75 bp, synthetic construct
  source 1..75: mol_type = other DNA
taggtcaaatcgatgccagaacgttgagaaccagccagcttctcaatccaatcaaagctgtcgatacggcgggta

SEQ ID NO: 852008 - DNA, 75 bp, synthetic construct
  source 1..75: mol_type = other DNA
ggaatgatgatgccattgaaagacagttaagccacgttgaacgaaaaaatgtgaaaggttcatatatgcatactt

SEQ ID NO: 852009 - DNA, 75 bp, synthetic construct
  source 1..75: mol_type = other DNA
gaaaccattgctcgtgaatggcatgctagtaacaagcgatggagtgaagaccatcgattgcgcgttcttcgctat

SEQ ID NO: 852010 - DNA, 75 bp, synthetic construct
  source 1..75: mol_type = other DNA
tatgccgtacagaacgattacatcgactcaaatccagccagcgatatggccggtgcgctatcgacaaccaaagcg

SEQ ID NO: 852011 - DNA, 75 bp, synthetic construct
  source 1..75: mol_type = other DNA
gcggtgctggcggattcccacgatatttctctgcgggtgattccaaccaaatatccttccggcggcgccaaacag

SEQ ID NO: 852012 - DNA, 75 bp, synthetic construct
  source 1..75: mol_type = other DNA
gtaccggtagttaaaatcaccaactgcctgttagctccgtccgccagtgaactgggcgaaccgcaggaagaacaa

SEQ ID NO: 852013 - DNA, 75 bp, synthetic construct
  source 1..75: mol_type = other DNA
tttgtcgaaactgttgccgcgctggcgcaccgtgaaggaatgggcgcgcgcgtcaccgccagccacaccaccgca

SEQ ID NO: 852014 - DNA, 75 bp, synthetic construct
  source 1..75: mol_type = other DNA
cggtagccatgctggtgcaggcgcggcaagttgttatttttggcattggcgcttcgggtattctggcggactata

SEQ ID NO: 852015 - DNA, 75 bp, synthetic construct
  source 1..75: mol_type = other DNA
ccctgtggtcagtgttgcgtccaggcggtgtgttgtcgttaatgttctacaatgcgcatggtttgttgatgcata

SEQ ID NO: 852016 - DNA, 75 bp, synthetic construct
  source 1..75: mol_type = other DNA
cagacgcccctcagacaaaaaagaggatcgcctcgcttttggtgtttggcctactgtgacgcttgctcaggcaag

SEQ ID NO: 852017 - DNA, 75 bp, synthetic construct
  source 1..75: mol_type = other DNA
tgagttacgttttgctcgttggaatgaattcgacttcgataaatctctttggcgcgtacctgcaaaacgagagga

SEQ ID NO: 852018 - DNA, 75 bp, synthetic construct
  source 1..75: mol_type = other DNA
ggcggtaaggtgattgccagcacccaaccagcacaaaccaccgtatatctggagcagccagaagccatcgattac

SEQ ID NO: 852019 - DNA, 75 bp, synthetic construct
  source 1..75: mol_type = other DNA
cggtgcgtccgtctactttcctccgtttttcaaagccttcgcgtttggattcgtcatctggcttgtcatacaccg

SEQ ID NO: 852020 - DNA, 75 bp, synthetic construct
  source 1..75: mol_type = other DNA
aacccgtccggcaggatctggcgcgaggaagaaatacgccaggtgtccgatctctgtcaacgctacggcacgatt

SEQ ID NO: 852021 - DNA, 75 bp, synthetic construct
  source 1..75: mol_type = other DNA
gacaaaatcgttgccagcgataaacgctttcaggagttgcaaaagaaactggcctccgcccgggataaaggtgag

SEQ ID NO: 852022 - DNA, 75 bp, synthetic construct
  source 1..75: mol_type = other DNA
ctggaacagcaacaggccaatgcggagccagaacaacaggtcgatccgcgcaaagctgccgtcgaagcggctatt

SEQ ID NO: 852023 - DNA, 75 bp, synthetic construct
  source 1..75: mol_type = other DNA
ctaatgcggaaccagaagaacaggttgatccacgcaaagccgccgtcgaagctgctattgcccgtgccaaagcac

SEQ ID NO: 852024 - DNA, 75 bp, synthetic construct
  source 1..75: mol_type = other DNA
ggtgacatctggcatcccttgttaatggatttatcgctgtttgcgatttgcgtttgccttgctctggcaatactg

SEQ ID NO: 852025 - DNA, 75 bp, synthetic construct
  source 1..75: mol_type = other DNA
ttcaccacacaactggtgctcgatggtcaggtcgtggcggaagcagtgaataaatacaaccttcaggacggtaac

SEQ ID NO: 852026 - DNA, 75 bp, synthetic construct
  source 1..75: mol_type = other DNA
gaggttgtcggtgatgtcattgaaaacacggtcaaaaaaggcaaaggatttaaattccccggcattgccggtggc

SEQ ID NO: 852027 - DNA, 75 bp, synthetic construct
  source 1..75: mol_type = other DNA
aacagccagtaagtggctgcctgaactgatgaaatacgccacggcttccggtgcatcagcgacagacctggctaa

SEQ ID NO: 852028 - DNA, 75 bp, synthetic construct
  source 1..75: mol_type = other DNA
tgaccctgactgcgaaggacgaagcctcgcaggtcctggaaaagggacaaaaacaggttatcaaagccaccgaag

SEQ ID NO: 852029 - DNA, 75 bp, synthetic construct
  source 1..75: mol_type = other DNA
ttcaccacacaactggtgctcgatggtcagattgtggcggaagcagtgaacaaatacaaccttcaggacggtaac

SEQ ID NO: 852030 - DNA, 75 bp, synthetic construct
  source 1..75: mol_type = other DNA
aaagcagcatccgtaacgcggtgacctatggcggcggtacgaaagaagacgcagccgaaacgctggatgccctgc

SEQ ID NO: 852031 - DNA, 75 bp, synthetic construct
  source 1..75: mol_type = other DNA
cgccattgccgccgcgatttttgcacccgaactcgacctgcaactgatgaccaccgtcgcgggtaatgtctcggt

SEQ ID NO: 852032 - DNA, 75 bp, synthetic construct
  source 1..75: mol_type = other DNA
agggtgaatttacctcaggcacgacggttgttgatatcgacggttgcctgggcaaaccagccaatgtacaggtgg

SEQ ID NO: 852033 - DNA, 75 bp, synthetic construct
  source 1..75: mol_type = other DNA
atattccgcttgcccagggcgctgccgtaccactggttcgtgcgccgcgcgatgcggcatctgtacacggtgaat

SEQ ID NO: 852034 - DNA, 75 bp, synthetic construct
  source 1..75: mol_type = other DNA
tgttacgctggtagccatcggcccgttaaccaatattgcgctgttactttcacaatgcccggaatgcaaaccgca

SEQ ID NO: 852035 - DNA, 75 bp, synthetic construct
  source 1..75: mol_type = other DNA
ccacaacgcctactttgaagcgggcgcggatatcatcgaaaccaaccccttcaactccacgaccattgcgatggc

SEQ ID NO: 852036 - DNA, 75 bp, synthetic construct
  source 1..75: mol_type = other DNA
taaccaatattgcgctgttactttcacaatgcccggaatgtaagccgtatattcgtcgtctggtgatcatgggcg

SEQ ID NO: 852037 - DNA, 75 bp, synthetic construct
  source 1..75: mol_type = other DNA
actcaaggcgaatttacctcaggcacgacggtggttgatatcgacggttgcctgggcaaaccagccaatgtacag

SEQ ID NO: 852038 - DNA, 75 bp, synthetic construct
  source 1..75: mol_type = other DNA
atgcgcttgccgatttttttggatactgaccctggtatcgacgatgccgcagcgattgctgccgcgatctttgcc

SEQ ID NO: 852039 - DNA, 75 bp, synthetic construct
  source 1..75: mol_type = other DNA
ggttctgctggtcgcggcaactgtacaccaaacgccgagtttaatatcgctgccgatccagaagcggctgcctgt

SEQ ID NO: 852040 - DNA, 75 bp, synthetic construct
  source 1..75: mol_type = other DNA
ccgcgtaatgccgctgctgtccacggcgagtcgggaatggatggttacgattttgttgagcataaccgaaagccg

SEQ ID NO: 852041 - DNA, 75 bp, synthetic construct
  source 1..75: mol_type = other DNA
gataaaccggcaaatgttcaggttgcgctggatctggacgtgaaaggtttccagcagtgggtggcggaggtgctg

SEQ ID NO: 852042 - DNA, 75 bp, synthetic construct
  source 1..75: mol_type = other DNA
gattgatcctgaagcggcggctcaggtcttccagagcggactggagattgtgatgtgtggcctggacgtcaccaa

SEQ ID NO: 852043 - DNA, 75 bp, synthetic construct
  source 1..75: mol_type = other DNA
tattgcgctgttactttcacaatgcccggaatgcaaaccgcatattcgccgtctggtgatcatgggcggttccgc

SEQ ID NO: 852044 - DNA, 75 bp, synthetic construct
  source 1..75: mol_type = other DNA
ggcagcaacaaaagacaaaggccagcaggacaaaatcctagagtctatggcgaaaattcttgaggggttcggtgt

SEQ ID NO: 852045 - DNA, 75 bp, synthetic construct
  source 1..75: mol_type = other DNA
gatggggcatgaggatgggaaggacaaaacggtaattgcagtgatgaaagccatccgcgctgctggagtcaaagt

SEQ ID NO: 852046 - DNA, 75 bp, synthetic construct
  source 1..75: mol_type = other DNA
tggggcatgaggatgggaaggacaaaacggtaattgcagtgatgaaagccatcatagccgctgaagtcaaagtga

SEQ ID NO: 852047 - DNA, 75 bp, synthetic construct
  source 1..75: mol_type = other DNA
agagagcgtgaggcattttctaccgatttcgaggatggggtcacatttggttataacgacgcaattagtgaatgc

SEQ ID NO: 852048 - DNA, 75 bp, synthetic construct
  source 1..75: mol_type = other DNA
ctacggcgcaatcgaggatatggtcgttggtctggaagcggtgctggcagatggcaccgtcacacgcattaaaaa

SEQ ID NO: 852049 - DNA, 75 bp, synthetic construct
  source 1..75: mol_type = other DNA
ctggaaggactgaaaaagcagttcgatcctaacggcattatgaacacgggtactatctatccgattgaaaaataa

SEQ ID NO: 852050 - DNA, 75 bp, synthetic construct
  source 1..75: mol_type = other DNA
atggacgaatcaagaaagcagtttgaagaaagttggttgcgacgtggaggcgaatcctcagaccttatccgttac

SEQ ID NO: 852051 - DNA, 75 bp, synthetic construct
  source 1..75: mol_type = other DNA
ttactgggttttattattacagcaattgcgctactcgcatcgttgcttgataaaccgttacttaaaaatatgcaa

SEQ ID NO: 852052 - DNA, 75 bp, synthetic construct
  source 1..75: mol_type = other DNA
gagcgcgccgacggttttaatgatattggtatcaatatggtctggttgccgcccgcctataaaggcgcatcgggc

SEQ ID NO: 852053 - DNA, 75 bp, synthetic construct
  source 1..75: mol_type = other DNA
aaggcgtcagcctgcgtaaaaatgagttcgatctttcatcagtcacgataggtcttggctgggacatcaatgaag

SEQ ID NO: 852054 - DNA, 75 bp, synthetic construct
  source 1..75: mol_type = other DNA
gtgtcgaataacgctttacaaacaattattaacgcccggttacccggcaaagaggggctgtggcagattcatctt

SEQ ID NO: 852055 - DNA, 75 bp, synthetic construct
  source 1..75: mol_type = other DNA
aatgtcatcctggtcacgatgtcctgcgcattgatcgggatgatgatactaagtctggcactctggctgacatcg

SEQ ID NO: 852056 - DNA, 75 bp, synthetic construct
  source 1..75: mol_type = other DNA
gacatgaataagaacacagaaacattaaaatattgtccagcttattttcaatcgtatacaaaaaaagaattcgag

SEQ ID NO: 852057 - DNA, 75 bp, synthetic construct
  source 1..75: mol_type = other DNA
taaccgtattcgtaccgagttcccgcacgccgacgacatcaccatgctgggcggtcactcctctcacagctacca

SEQ ID NO: 852058 - DNA, 75 bp, synthetic construct
  source 1..75: mol_type = other DNA
tgccaagcatccgtgctgcagatatccgttccgacgaagagacatcaacaacggaaactgataccacagcaacgc

SEQ ID NO: 852059 - DNA, 75 bp, synthetic construct
  source 1..75: mol_type = other DNA
aaacagcagagtatcagatgatcatgacggtgaatgcgaccgtgttgatccccggccgtgatatctacccgatta

SEQ ID NO: 852060 - DNA, 75 bp, synthetic construct
  source 1..75: mol_type = other DNA
taacgggtggcgcggcacagatagaaggtcttgccgcctgtgctcagcgcgtgtttcatacgcaggtacgtatcg

SEQ ID NO: 852061 - DNA, 75 bp, synthetic construct
  source 1..75: mol_type = other DNA
gtaaacctgctggccaaacttttcagtagtgaatcagcaacaagggcgaaaagcatcacgattgatggcaaaggt

SEQ ID NO: 852062 - DNA, 75 bp, synthetic construct
  source 1..75: mol_type = other DNA
gtgtcgagttgcttgataaagaaaccacgcgtaaggacgttccatccctgcgtttgggtgctgtatcaatctcac

SEQ ID NO: 852063 - DNA, 75 bp, synthetic construct
  source 1..75: mol_type = other DNA
ccgttccgacgaagagacatcaacaacggaaactgataccacagcaacgcctgcgcgcgtctccaccacactggg

SEQ ID NO: 852064 - DNA, 75 bp, synthetic construct
  source 1..75: mol_type = other DNA
ggccacggcgcaatgtggtgttccgctggaagtgctggaaaacgcgttgcgtgaaaaaggttacaccacggggca

SEQ ID NO: 852065 - DNA, 75 bp, synthetic construct
  source 1..75: mol_type = other DNA
cggtaaacatcgcgttcactggagcaaactggaacacgggcagcgcgtgggcgttgctggaagggctgaaaaagc

SEQ ID NO: 852066 - DNA, 75 bp, synthetic construct
  source 1..75: mol_type = other DNA
aagctggaacacggcagcgcgtggacgttgctggaaggtctgaaaaaacagttcgatcctaacggcattatgaat

SEQ ID NO: 852067 - DNA, 75 bp, synthetic construct
  source 1..75: mol_type = other DNA
atgatcaaggcgacggacagaaaactggtagtaggactggagatcggcaccgcgaaggttgccgctttagtaggg

SEQ ID NO: 852068 - DNA, 75 bp, synthetic construct
  source 1..75: mol_type = other DNA
ttcgccacggttgtgcgctgggttccatcgttggaaaagatgagagcgtggaagtgccgagcgtaggcggtcgtc

SEQ ID NO: 852069 - DNA, 75 bp, synthetic construct
  source 1..75: mol_type = other DNA
tatcgccgtttataccggtggggcattgcgccacactaaggtaattccttatgctggcaatgtcgtgaccagtga

SEQ ID NO: 852070 - DNA, 75 bp, synthetic construct
  source 1..75: mol_type = other DNA
ttgttggcccgtgcagagaaagacgacgtaatcatctgtacaaaaatggaccgactggggcgtaacactgctgac

SEQ ID NO: 852071 - DNA, 75 bp, synthetic construct
  source 1..75: mol_type = other DNA
agatattagcagctgttgccgaggcggaacgtgaaaggatcttggagcgaactaacgatgggcggcaggcagcta

SEQ ID NO: 852072 - DNA, 75 bp, synthetic construct
  source 1..75: mol_type = other DNA
tattgttgttagtaaatatccgttatcctgagacatggataaagggtattatatatcgtttaatatcaatgtttg

SEQ ID NO: 852073 - DNA, 75 bp, synthetic construct
  source 1..75: mol_type = other DNA
ccggtggtagatgaaaacggcaaactcaccggcgcaattaacctgcaggatttctatcaggccgggattatttaa

SEQ ID NO: 852074 - DNA, 75 bp, synthetic construct
  source 1..75: mol_type = other DNA
tgtttatctcttactccggtggcgcgaaggaactggatctgattattccgcgtctggaagataaatctatcgcgc

SEQ ID NO: 852075 - DNA, 75 bp, synthetic construct
  source 1..75: mol_type = other DNA
cttggagaacggtctcagtacagaagggacaatgggcaaaatggttatccaaatccttgctgctgtagctgaagc

SEQ ID NO: 852076 - DNA, 75 bp, synthetic construct
  source 1..75: mol_type = other DNA
ttgaactgatggcgcaaaccgtcggcgtctggtctggctggcatcgccgccagcagggcaaaaacagtattcagt

SEQ ID NO: 852077 - DNA, 75 bp, synthetic construct
  source 1..75: mol_type = other DNA
aatatattgaaacaattattaagttgctcatttcgttatcacgaaccgagttcataacacctaccatatatatag

SEQ ID NO: 852078 - DNA, 75 bp, synthetic construct
  source 1..75: mol_type = other DNA
cattctttaaaatacttttacagatggatttgtcatatcgtttttaaccagctagacgtcaataatgaaaaccct

SEQ ID NO: 852079 - DNA, 75 bp, synthetic construct
  source 1..75: mol_type = other DNA
atgattaaaaaaatcagtattaattttcttttcttgatgttaatgatagatgttgtttttgccacattgttcaat

SEQ ID NO: 852080 - DNA, 75 bp, synthetic construct
  source 1..75: mol_type = other DNA
cttatctgccccacgacgcgcccatgttgctgctggaagaagtggtgagcgtcagcgatgacagcgcggtgtgcc

SEQ ID NO: 852081 - DNA, 75 bp, synthetic construct
  source 1..75: mol_type = other DNA
cgtctggtctggctggcatcgccaccagcagggcaaaaacagtattgagttagggatggtactgggcgcgcgtga

SEQ ID NO: 852082 - DNA, 75 bp, synthetic construct
  source 1..75: mol_type = other DNA
ccggcagaggcactgcacggcgatctggggatgattgaaagccgcgatgtgatgctgtttatctcttactccggt

SEQ ID NO: 852083 - DNA, 75 bp, synthetic construct
  source 1..75: mol_type = other DNA
gatgaactggaaagaaaccagcaatacatcaaatcccgcgatcaggagaacgaggatattgcgctaacggtaggg

SEQ ID NO: 852084 - DNA, 75 bp, synthetic construct
  source 1..75: mol_type = other DNA
tttcatctcctttaactggcttgcgctgcatcaactggtacgctgggtgtaatatgaccaccagtcttatcctgc

SEQ ID NO: 852085 - DNA, 75 bp, synthetic construct
  source 1..75: mol_type = other DNA
gtaagatggttaactataccctgcaaacaaacggactcagcaacacctcaatccatatattcccgcgatcgccaa

SEQ ID NO: 852086 - DNA, 75 bp, synthetic construct
  source 1..75: mol_type = other DNA
gtcagcctttaccgtgggcgaccagctgctgtggggggccgcggagccgctgcgtcggatgcttcgtcaactggc

SEQ ID NO: 852087 - DNA, 75 bp, synthetic construct
  source 1..75: mol_type = other DNA
tttacaatgaccatcaatgcctgccagacctctgtgaactatgacgccagcagcggcgcacgctgtaaggatcag

SEQ ID NO: 852088 - DNA, 75 bp, synthetic construct
  source 1..75: mol_type = other DNA
cgaggatattgcgctaacggtagggaaactgcgtgttgagcttgaggagacaaaatcaaaactcaacgaacagcg

SEQ ID NO: 852089 - DNA, 75 bp, synthetic construct
  source 1..75: mol_type = other DNA
atgatggctgaatcaattgtatgtgccttgttctggtatggtctcgtggggtggtgtactgctgaactgcaccgc

SEQ ID NO: 852090 - DNA, 75 bp, synthetic construct
  source 1..75: mol_type = other DNA
cgctcgcttgctgaacaaagtgcatcatcttatgcgtcgtgacgatgccatcccgcaggtggcgttaaccgccag

SEQ ID NO: 852091 - DNA, 75 bp, synthetic construct
  source 1..75: mol_type = other DNA
ttccgcgtctggaagacaaatctatcgcgctgctggcgatgaccggcaaaccgacgtcaccgctgggcctggcgg

SEQ ID NO: 852092 - DNA, 75 bp, synthetic construct
  source 1..75: mol_type = other DNA
atgagagttaacctactgatagcgatgataatctttgcgctaatctggcctgcaaccgcgctcagagcggctgtg

SEQ ID NO: 852093 - DNA, 75 bp, synthetic construct
  source 1..75: mol_type = other DNA
ccacacagtaatggcatacaaagtttctgaagtcatcgctgcaatccgcgccgctggcattcgcatcaaaggaga

SEQ ID NO: 852094 - DNA, 75 bp, synthetic construct
  source 1..75: mol_type = other DNA
gcaatacataaaacgccgcgatcaggagaacgaggatattgcgctaacggtagggaagctgcgcgttgagcttga

SEQ ID NO: 852095 - DNA, 75 bp, synthetic construct
  source 1..75: mol_type = other DNA
caggcggcctctatacccgcttatggcatgacaacgtcagcagtactgcgctccatcgccagcacaacatgaagg

SEQ ID NO: 852096 - DNA, 75 bp, synthetic construct
  source 1..75: mol_type = other DNA
gtgagcagcaaagtggaacaactgcgtgcgcagttaaatgaacatattctggtgctggacagcggtatgggcacc

SEQ ID NO: 852097 - DNA, 75 bp, synthetic construct
  source 1..75: mol_type = other DNA
acgcctcacgcaccgttggtgtggtggcggcgctgctttctgacactcagcgtgatgattttgtcgctcgtaccc

SEQ ID NO: 852098 - DNA, 75 bp, synthetic construct
  source 1..75: mol_type = other DNA
actcttcaaaatgggacgtcattgaaaaagggctgaagtgtattcagggcaaaggcattgttaactccatctcga

SEQ ID NO: 852099 - DNA, 75 bp, synthetic construct
  source 1..75: mol_type = other DNA
ctgagagtcaatgcctctacagtaaacttcaatcagaagcaaatatccctgcactttcaggtaatgataaaaaat

SEQ ID NO: 852100 - DNA, 75 bp, synthetic construct
  source 1..75: mol_type = other DNA
accctaattcaaattttgatattgtcgagaaaaaattccttcaatatgggatggagattcctagtgcatcaaaac

SEQ ID NO: 852101 - DNA, 75 bp, synthetic construct
  source 1..75: mol_type = other DNA
atctgggagctgctggaagtggaaaaacataccggtatgaaactcacggaatccttcgccatgtggccgggtgca

SEQ ID NO: 852102 - DNA, 75 bp, synthetic construct
  source 1..75: mol_type = other DNA
ccgcgctacgttgccggcgttctcggcccaaccaaccgcacggcgtccatttctccggacgtgaacgatccggca

SEQ ID NO: 852103 - DNA, 75 bp, synthetic construct
  source 1..75: mol_type = other DNA
ccggcggcgtatctaacgtttctttctcattccgtggtaacgatccggtgcgcgaagccattcacgcggtgttcc

SEQ ID NO: 852104 - DNA, 75 bp, synthetic construct
  source 1..75: mol_type = other DNA
ccttgcggatttcgtggcaccaaagatttctggtaaagcggattacattggcgcatttgccgtgactggcgggct

SEQ ID NO: 852105 - DNA, 75 bp, synthetic construct
  source 1..75: mol_type = other DNA
ccgaagaggttggcttcccgccagaagatatcatctttgacccgaacatcttcgcggtcgcaactggcattgaag

SEQ ID NO: 852106 - DNA, 75 bp, synthetic construct
  source 1..75: mol_type = other DNA
gacctgattctgattgaaaccgtcttcgacaccctcaacgctaaagcggcggtctttgcggtgaaaacggagttt

SEQ ID NO: 852107 - DNA, 75 bp, synthetic construct
  source 1..75: mol_type = other DNA
aagctggaacagcaacaggctaatgcggagccagaagaacaggttgatccgcgcaaagctgccgtcgaagcggct

SEQ ID NO: 852108 - DNA, 75 bp, synthetic construct
  source 1..75: mol_type = other DNA
tgctcttgtttgccgctggcattccgcaggctttcgccgctggcatacccgttttcgacggcgcagcacgaattg

SEQ ID NO: 852109 - DNA, 75 bp, synthetic construct
  source 1..75: mol_type = other DNA
acctggcctgcggtacagaatgaccgttacggctcccgactgtggctgcttcagcgcagcaaactgagaaaagtt

SEQ ID NO: 852110 - DNA, 75 bp, synthetic construct
  source 1..75: mol_type = other DNA
aacggtataatggcttttccaactctaaatggtcagaaccaatctgtagttggtattgctttaaaagaaggtatt

SEQ ID NO: 852111 - DNA, 75 bp, synthetic construct
  source 1..75: mol_type = other DNA
caaccgtccaaacgatttatggattcggacaaaagtcaggtaacgccatgagaaaatccgcagaatatttgcagc

SEQ ID NO: 852112 - DNA, 75 bp, synthetic construct
  source 1..75: mol_type = other DNA
cgttgctcttcccacagagtttacctgcgggcgatggcgggttgtctctggggcagggggttattgttgcggcgc

SEQ ID NO: 852113 - DNA, 75 bp, synthetic construct
  source 1..75: mol_type = other DNA
tgaataacgagctaatcaaatttagcacccctggtacaaattcagcgatcagagacttgatcacatcggaatcgg

SEQ ID NO: 852114 - DNA, 75 bp, synthetic construct
  source 1..75: mol_type = other DNA
gtgccaatccggtacctggaaatcatcatcagcgtcgatatggacgaatataaaacatttacgttatatcccaaa

SEQ ID NO: 852115 - DNA, 75 bp, synthetic construct
  source 1..75: mol_type = other DNA
gatccgcgcaaagccgccgtcgaagccgctattgcccgtgccaaagcgcgcaagctggaacagcaacaggctaat

SEQ ID NO: 852116 - DNA, 75 bp, synthetic construct
  source 1..75: mol_type = other DNA
tccgcgcaaagccgccgtcgaagccgctattgcccgtgccaaagcgcgcaagctggaacagcaacaggctaatgc

SEQ ID NO: 852117 - DNA, 75 bp, synthetic construct
  source 1..75: mol_type = other DNA
cgattgttgtcgccgaggattttcaacagccgtgctttaactctgcggtagtcgggtatgcatcacttgaagagt

SEQ ID NO: 852118 - DNA, 75 bp, synthetic construct
  source 1..75: mol_type = other DNA
ttatttatccaactgtccaatacctgttttggttttgctttgtaagcctgaaaaaaaaagtgttttgggaatgtt

SEQ ID NO: 852119 - DNA, 75 bp, synthetic construct
  source 1..75: mol_type = other DNA
aacagtttgccctgcaaagagcggagcattgccggcggcgctgcagggggaactgtagcgaaagacagcggtgta

SEQ ID NO: 852120 - DNA, 75 bp, synthetic construct
  source 1..75: mol_type = other DNA
gttagtgaaacgctttgggacacgtaatgtcatcctggtcacgatgtcctgcgcattgatcgggatgatgatatt

SEQ ID NO: 852121 - DNA, 75 bp, synthetic construct
  source 1..75: mol_type = other DNA
acctgtccgaagcgcagtcccgtattcaggacgccgactatgcgaccgaagtgtccaatatgtcgaaagcgcaga

SEQ ID NO: 852122 - DNA, 75 bp, synthetic construct
  source 1..75: mol_type = other DNA
gatcatccagcaggccggtaactccgtgctggcaaaagctaaccaggtaccgcagcaggttctgtctctgctgca

SEQ ID NO: 852123 - DNA, 75 bp, synthetic construct
  source 1..75: mol_type = other DNA
agctccatcgacaaattccgttcatccctgggtgctatccagaaccgtctggattccgccgtcaccaacctgaac

SEQ ID NO: 852124 - DNA, 75 bp, synthetic construct
  source 1..75: mol_type = other DNA
acggtggaacatatggcgggaagtttgttgcttatgattatgcagcatggctaaaccccggatttaaatatgcag

SEQ ID NO: 852125 - DNA, 75 bp, synthetic construct
  source 1..75: mol_type = other DNA
ggtcattcagctgcaactgctgtaaaaaccatcattaaagtcaaagatatgactattacttccgcaggtggtaat

SEQ ID NO: 852126 - DNA, 75 bp, synthetic construct
  source 1..75: mol_type = other DNA
ttctaaggattctctccttagcatgttggcacctaacgctggtgacagttttaccgcatctgtttctattggcgg

SEQ ID NO: 852127 - DNA, 75 bp, synthetic construct
  source 1..75: mol_type = other DNA
ttacaggcgctgtaattagttcagctgctctgcaatctgcaagcaaaacgactggtttcactgttggtacagcag

SEQ ID NO: 852128 - DNA, 75 bp, synthetic construct
  source 1..75: mol_type = other DNA
agatgatttctgtacattatgaatctacgccacatgtacattatattattcaaaaaatcaaaaaagcggggcgca

SEQ ID NO: 852129 - DNA, 75 bp, synthetic construct
  source 1..75: mol_type = other DNA
aacaatatgcggacattatcgtaccgcgcggtggtaaaaaccgtatcgccatcgatatattgaaagcgaaaatta

SEQ ID NO: 852130 - DNA, 75 bp, synthetic construct
  source 1..75: mol_type = other DNA
agctacaggtgctaaagctgtatatgttgatggcaacaatgaactgacttccactgcatcttacgatacgactta

SEQ ID NO: 852131 - DNA, 75 bp, synthetic construct
  source 1..75: mol_type = other DNA
tcgacttctatcgagcgtctttcttctggtctgcgtattaacagcgcgaaagatgacgccgcaggtcaggcgatt

SEQ ID NO: 852132 - DNA, 75 bp, synthetic construct
  source 1..75: mol_type = other DNA
gatgttgcgacttctggcaacaaagattcttacaccaacactgacggtacactgactactgataacaccactaaa

SEQ ID NO: 852133 - DNA, 75 bp, synthetic construct
  source 1..75: mol_type = other DNA
ataaccgccctcaatcgaaggtgtccgatgagaggaaatttcttgattacattcacagtcggaacagatgggttg

SEQ ID NO: 852134 - DNA, 75 bp, synthetic construct
  source 1..75: mol_type = other DNA
cgcgcccccctgatgcgcgagatggccgctgccatgggcgatgccgtcgaagaaaatttcgcgcaacagggtcgc

SEQ ID NO: 852135 - DNA, 75 bp, synthetic construct
  source 1..75: mol_type = other DNA
tatggcctgacaacgcgcgaggaagtgtttgccgatcgcggttatcaggctgacggctcgctggtgccgcgaagc

SEQ ID NO: 852136 - DNA, 75 bp, synthetic construct
  source 1..75: mol_type = other DNA
tgcccgtgcgcaaggcggcgtaatgcgtcatgtcaaaccgcacggcatgttatacaaccaggcggcgaaagaggc

SEQ ID NO: 852137 - DNA, 75 bp, synthetic construct
  source 1..75: mol_type = other DNA
gctgttctgctggaaggtggcgaagttcgtgaaatccaacgctatcgtctatgccaaaaacaatatgactatcgg

SEQ ID NO: 852138 - DNA, 75 bp, synthetic construct
  source 1..75: mol_type = other DNA
tgctgtctacagggggcactgcccgtctgttagcagaaaaaggtctgccggtaaccgaagtttccgattacaccg

SEQ ID NO: 852139 - DNA, 75 bp, synthetic construct
  source 1..75: mol_type = other DNA
acggtcaacatgcccgcgcgccccttccttcagcttgtgcaggacgacatcgacgagctggagaacaccgcaaac

SEQ ID NO: 852140 - DNA, 75 bp, synthetic construct
  source 1..75: mol_type = other DNA
cccgtggtttggtgtgtggatcttgcacggcaactatagcagtagcttgttactcgacaccattccgctgaccga

SEQ ID NO: 852141 - DNA, 75 bp, synthetic construct
  source 1..75: mol_type = other DNA
gcccgctgaacccgattaccgatttagcgaattggttgcgcaggcgatttgaactcaatcagtccgcgacaatcc

SEQ ID NO: 852142 - DNA, 75 bp, synthetic construct
  source 1..75: mol_type = other DNA
tcacggttaacccctcgcgtctttcaaacataaccgttattgaaacctatccagacaactctttttcagatgatg

SEQ ID NO: 852143 - DNA, 75 bp, synthetic construct
  source 1..75: mol_type = other DNA
ggcgagcacgcactggcgttcgcccgccgactacgctctacatttgccgaaaaggggattgttgtcgcagcataa

SEQ ID NO: 852144 - DNA, 75 bp, synthetic construct
  source 1..75: mol_type = other DNA
cggatatggcctttgtccgggtcggcgtaacgcagcagcaagcgcgccacgggcgcgaggcgctggagaaaaaag

SEQ ID NO: 852145 - DNA, 75 bp, synthetic construct
  source 1..75: mol_type = other DNA
gacctcaatcagtctgcgacgatcccgcggcacattcgctacgtgctgctggtcgtcatactggtgggatcggcc

SEQ ID NO: 852146 - DNA, 75 bp, synthetic construct
  source 1..75: mol_type = other DNA
agattgtctacgaaggtatcgaatttacaaataccggcactggcgctatagatgccacaggtaatggtaaattaa

SEQ ID NO: 852147 - DNA, 75 bp, synthetic construct
  source 1..75: mol_type = other DNA
tgtaaaaattgaaggtgctactgtttcagcatctgcatttacgggcattgcatattccgccaacaccggtgggaa

SEQ ID NO: 852148 - DNA, 75 bp, synthetic construct
  source 1..75: mol_type = other DNA
gctctatcgacaaattccgttcatccctgggtgctatccagaaccgtctggattctgcagtcaccaacctgaaca

SEQ ID NO: 852149 - DNA, 75 bp, synthetic construct
  source 1..75: mol_type = other DNA
caagacgaaggtgaaacgagtggtgagaaatacatttctaagtttgctggtacttggattccaccagaggaaaga

SEQ ID NO: 852150 - DNA, 75 bp, synthetic construct
  source 1..75: mol_type = other DNA
ctatgtaagtgccaatggtaacttaacgactaatacaacgagtgaatctgaagctactaccaatccgctggcagc

SEQ ID NO: 852151 - DNA, 75 bp, synthetic construct
  source 1..75: mol_type = other DNA
aacagctcaagagcaaaaagtcattattgctaaagatggttctttaactgctgctgatgacggtgccgctctcta

SEQ ID NO: 852152 - DNA, 75 bp, synthetic construct
  source 1..75: mol_type = other DNA
aggcaacttgacgactaacaacgctggtagcgcagctaaagctgatatgaaagcgctgctcaaagcagcgagcga

SEQ ID NO: 852153 - DNA, 75 bp, synthetic construct
  source 1..75: mol_type = other DNA
gcagaacgtcagtatgagaccgttaataattatggacgatgggcaaaacagcactatcgttcttctcaggcactt

SEQ ID NO: 852154 - DNA, 75 bp, synthetic construct
  source 1..75: mol_type = other DNA
ggcctgacgctcggtatcgatagtcgtttctcctgtgaagaaagcagcacaactcaggcgggtgtagtctggacg

SEQ ID NO: 852155 - DNA, 75 bp, synthetic construct
  source 1..75: mol_type = other DNA
taaatgatgtatctacatggcgaatgttaacacccgtacgacggtatgataatagaaaggatggttatgtttgct

SEQ ID NO: 852156 - DNA, 75 bp, synthetic construct
  source 1..75: mol_type = other DNA
ggtgttgcgattggcgctcacccgagttttcccgaccgggaaaattttgggcgcagcgtcatgcagctgccgcca

SEQ ID NO: 852157 - DNA, 75 bp, synthetic construct
  source 1..75: mol_type = other DNA
agcgccgtggagtatggacggctggcggctggatgtggtgcatatgctgggggaggcgggtggggcgcgcaataa

SEQ ID NO: 852158 - DNA, 75 bp, synthetic construct
  source 1..75: mol_type = other DNA
gcagaacgtcagtatgagtccgttaataattacgggcggtgggcaaagcagcactatcgtccttctgaggctctt

SEQ ID NO: 852159 - DNA, 75 bp, synthetic construct
  source 1..75: mol_type = other DNA
ctgctgcaacacttaaagatatggttggtttaaaactcgataatacgggggtcactacagctggagttaatagat

SEQ ID NO: 852160 - DNA, 75 bp, synthetic construct
  source 1..75: mol_type = other DNA
atggccttatggggaacgttgctgctctgtttcattcaggttcgcggcatgttggggctggatcgggtggtttaa

SEQ ID NO: 852161 - DNA, 75 bp, synthetic construct
  source 1..75: mol_type = other DNA
tgacaatagttctaataacccatatgcgaaaaaagtaggtgacgctgtttatgcggatggaaaaggtaaaattac

SEQ ID NO: 852162 - DNA, 75 bp, synthetic construct
  source 1..75: mol_type = other DNA
aatggcaaaggatctgtagccaataaagcggcaacagtaagtaatttgactgccgctggagctaaagaaacaaca

SEQ ID NO: 852163 - DNA, 75 bp, synthetic construct
  source 1..75: mol_type = other DNA
gatacatcaggtactagtgcaaccgttgcccctacgacagccctatacaaaaatagtgcagggcaattgactgca

SEQ ID NO: 852164 - DNA, 75 bp, synthetic construct
  source 1..75: mol_type = other DNA
attggtgctgatggtgaactgacgactgcgaccaacaagactgtcacagaaacttatcacgaatttgctaacggc

SEQ ID NO: 852165 - DNA, 75 bp, synthetic construct
  source 1..75: mol_type = other DNA
atattgctggagaaaacgccgctcggtaaatccatttatctgattggttctaacgaacgagcaacactttactcc

SEQ ID NO: 852166 - DNA, 75 bp, synthetic construct
  source 1..75: mol_type = other DNA
aatgacggccagactatcacgattgatctgaagaaaattgactcagatacgctggggctgagtgggtttaatgtg

SEQ ID NO: 852167 - DNA, 75 bp, synthetic construct
  source 1..75: mol_type = other DNA
aaggcctgactcaggctgcacgtaacgccaacgacggtatttccgttgcacagaccactgaaggcgcgctgtccg

SEQ ID NO: 852168 - DNA, 75 bp, synthetic construct
  source 1..75: mol_type = other DNA
ttaacaatggtcctctgtcattcactgcatcgttccaaaatggtgtatctggctccgcggtatcgaatgcagcct

SEQ ID NO: 852169 - DNA, 75 bp, synthetic construct
  source 1..75: mol_type = other DNA
aacagcgcagctctgcaatccttcctgacaccaaaagcaggtgatacagctaacctgagcgtcaaaatcggtacg

SEQ ID NO: 852170 - DNA, 75 bp, synthetic construct
  source 1..75: mol_type = other DNA
caacggttttggtgcagcagctacagactacacctacaataaagctacaaatgatttcactttcaatgccagcat

SEQ ID NO: 852171 - DNA, 75 bp, synthetic construct
  source 1..75: mol_type = other DNA
ttgaagacgcttacaccaaagctgatggttcactgactaccgataatacaaccaatctgtttttgcaaaaagacg

SEQ ID NO: 852172 - DNA, 75 bp, synthetic construct
  source 1..75: mol_type = other DNA
cgtaaggatgaatccaccgagaagttctataacggtgattgcgcgatgacgaccgcctcttccggttctcttgcc

SEQ ID NO: 852173 - DNA, 75 bp, synthetic construct
  source 1..75: mol_type = other DNA
tcgccatgctcgaagagatgaacaagaagggcgacttcagctacgtcggtcgtaaggatgaatccaccgagaagt

SEQ ID NO: 852174 - DNA, 75 bp, synthetic construct
  source 1..75: mol_type = other DNA
caaaacgccattatcggcggagccagcctgtgggtgatgcagggcaaagataaagaaacttacaccggcgtggcg

SEQ ID NO: 852175 - DNA, 75 bp, synthetic construct
  source 1..75: mol_type = other DNA
ttaatttaaattgccatgtgttaaatggagttgatattgatggtagacgatggcaactggaccttacctctggag

SEQ ID NO: 852176 - DNA, 75 bp, synthetic construct
  source 1..75: mol_type = other DNA
ccggcaagaagacgccacagcaggcgctggatactgccgttgagcgtgggaatcagttactgcgacgctttgagc

SEQ ID NO: 852177 - DNA, 75 bp, synthetic construct
  source 1..75: mol_type = other DNA
ccggcaagaagacgccacagcaggcgctggataccgccgttgagcgtgggaatcagttgctgcgccgttttgaga

SEQ ID NO: 852178 - DNA, 75 bp, synthetic construct
  source 1..75: mol_type = other DNA
ccctcgccctctattcaggataaaccagccagcactgacaataccaacgtcaacggcgaagacatggctgagatt

SEQ ID NO: 852179 - DNA, 75 bp, synthetic construct
  source 1..75: mol_type = other DNA
cgtggcgttactacaacgatcgcgatgtgcgcacaatcgttgagctggggaaagccatagacttcgatgccagaa

SEQ ID NO: 852180 - DNA, 75 bp, synthetic construct
  source 1..75: mol_type = other DNA
gcaggacgtgtgaccatctaatgatcgaccttgaaaccatgggaaaaaatcctgatgccccgattatctcaatag

SEQ ID NO: 852181 - DNA, 75 bp, synthetic construct
  source 1..75: mol_type = other DNA
ggctactactccgacagcaaaaccggacatttactctcccagccgttcaacagctcgactcctgttctctattac

SEQ ID NO: 852182 - DNA, 75 bp, synthetic construct
  source 1..75: mol_type = other DNA
agcagggcttttacgagaaaaacccaggagcggatattgccacgcgtcagatgctgaacaagccgccgttgccgt

SEQ ID NO: 852183 - DNA, 75 bp, synthetic construct
  source 1..75: mol_type = other DNA
catgccgcagatccgcgtgattgtggatgaagagctggagagcgtgtggaccggtaagaagacaccacagcaggc

SEQ ID NO: 852184 - DNA, 75 bp, synthetic construct
  source 1..75: mol_type = other DNA
tggcaactggaccttacctctggagcgcttaatcttgttgattgctataacgatcttgatgtccattttattatg

SEQ ID NO: 852185 - DNA, 75 bp, synthetic construct
  source 1..75: mol_type = other DNA
ccacgctaattacgccatcttacgccagggatttcataaccagattatcggtgccaacatcaccaactgtaagtt

SEQ ID NO: 852186 - DNA, 75 bp, synthetic construct
  source 1..75: mol_type = other DNA
tcgtcgtgcctggcggattggtttgtgacaatatcaacaccggcatcttcattcctcctggcaaaacgttacaca

SEQ ID NO: 852187 - DNA, 75 bp, synthetic construct
  source 1..75: mol_type = other DNA
cttacgataataattatccggaaaaccaggcagtgaaaaactttgtcgtggcgaatatcacgggatcggattgtc

SEQ ID NO: 852188 - DNA, 75 bp, synthetic construct
  source 1..75: mol_type = other DNA
gcattgaccatgaacttcgacttacgccaggacgttcgtggtaaatttatggctaaaaaagagacattactgtct

SEQ ID NO: 852189 - DNA, 75 bp, synthetic construct
  source 1..75: mol_type = other DNA
aaatgaccaatagtgccggaatgttaatcggttacggagtcattaaaggtaagtatctctcaataccgcaaaact

SEQ ID NO: 852190 - DNA, 75 bp, synthetic construct
  source 1..75: mol_type = other DNA
tactaatggcaaaatcaactggggcatcggcataggccttgcgggaagtacctacgataacaactacccggaaga

SEQ ID NO: 852191 - DNA, 75 bp, synthetic construct
  source 1..75: mol_type = other DNA
atattgagcgcggcgcggaacagtgcgaagtattaatggcgttaccagacgggcaaaccctgtgcgccacggtgc

SEQ ID NO: 852192 - DNA, 75 bp, synthetic construct
  source 1..75: mol_type = other DNA
acttctcttcagcaaggacagaatgtcacggcctactttaatgccgacagcgtgattatcgccacgctatgctaa

SEQ ID NO: 852193 - DNA, 75 bp, synthetic construct
  source 1..75: mol_type = other DNA
tgacactgtcgcccagggtgccgacaaccaattgccgggcattattcgtcatatagagcgcggtgcagaacagtg

SEQ ID NO: 852194 - DNA, 75 bp, synthetic construct
  source 1..75: mol_type = other DNA
gcgttaacattaacgactacaacccacacgactggattgcttcatttaaacaagccttcagcgaagggcaaacgg

SEQ ID NO: 852195 - DNA, 75 bp, synthetic construct
  source 1..75: mol_type = other DNA
gacatcgacgggattaatcaccatatcgttaatgtggaaaagataaacttcaggctaccgaaacgggaacgatag

SEQ ID NO: 852196 - DNA, 75 bp, synthetic construct
  source 1..75: mol_type = other DNA
agcgcccgtaaccagtggttcggtacgatcaccgctcgtaataatgatgatgttcaacaacatgtagacgtgtta

SEQ ID NO: 852197 - DNA, 75 bp, synthetic construct
  source 1..75: mol_type = other DNA
agcacgtcgacgtcaatgcgttcaaagagcgcctggaggtttccggcaccgtcaccattgccgaccgcatggcga

SEQ ID NO: 852198 - DNA, 75 bp, synthetic construct
  source 1..75: mol_type = other DNA
agcaagctgccttctatatagaagagaatgtcaaagaagcctccgttgccaccgctacccaggttcagggtaagg

SEQ ID NO: 852199 - DNA, 75 bp, synthetic construct
  source 1..75: mol_type = other DNA
aacagaacgtacgtgtcctgacatgtggtcagtgggccgagcgtgttccaggccttgatttcaaacgcgtgaacg

SEQ ID NO: 852200 - DNA, 75 bp, synthetic construct
  source 1..75: mol_type = other DNA
gattattgcgccgtccgccagcgaagaagccctgaaaatcaccgccgccaaacagaacgtacgcgtcctgacctg

SEQ ID NO: 852201 - DNA, 75 bp, synthetic construct
  source 1..75: mol_type = other DNA
aataaaaaaaatctgtcagatttttttggtaaatctcgcgtaacttttaacaaaatcttagcggatcttgaagaa

SEQ ID NO: 852202 - DNA, 75 bp, synthetic construct
  source 1..75: mol_type = other DNA
atgcaacaacgtcgtccaatccgccgcgctctgctcagtgtttctgacaaagccggtatcgtcgaattcgcccag

SEQ ID NO: 852203 - DNA, 75 bp, synthetic construct
  source 1..75: mol_type = other DNA
cggcgtggcggtcagcaactccattctcgatgcttacgatcgcgcgtataaaaccgacccaacctccgcattcgg

SEQ ID NO: 852204 - DNA, 75 bp, synthetic construct
  source 1..75: mol_type = other DNA
ctcgctggaagatgcggttgagaacatcgatatcggcggcccaacgatggtgcgctccgccgctaagaaccataa

SEQ ID NO: 852205 - DNA, 75 bp, synthetic construct
  source 1..75: mol_type = other DNA
ccgcctacgacagcatgattgcgaactacttcggcagcatggttccggcttaccacggtgaaaacaaagaagccg

SEQ ID NO: 852206 - DNA, 75 bp, synthetic construct
  source 1..75: mol_type = other DNA
aacagaacgtacgcgttctgacctgcggtcagtggggcgagcgtgttccgggtcttgatttcaaacgcgtgaacg

SEQ ID NO: 852207 - DNA, 75 bp, synthetic construct
  source 1..75: mol_type = other DNA
tctgcttgcaacccgtttcgacctcgctatcaaagccttcgagcacactgccgcctacgacagcatgattgccaa

SEQ ID NO: 852208 - DNA, 75 bp, synthetic construct
  source 1..75: mol_type = other DNA
atgcaacaacgtcgtccagtccaccgcgctctgctcagtgtttctgacaaagccggtatcgtcgaattcgcccag

SEQ ID NO: 852209 - DNA, 75 bp, synthetic construct
  source 1..75: mol_type = other DNA
ggttctatccgtgatgacgaagtgattgctgccgccgacgagcacggtattgcaatgctgttcaccgatatgcgc

SEQ ID NO: 852210 - DNA, 75 bp, synthetic construct
  source 1..75: mol_type = other DNA
taaactggtaaggacagtgcaggaactctttatgtctgcaaatatcaaaaactcagaagcgtttaaagccgcagc

SEQ ID NO: 852211 - DNA, 75 bp, synthetic construct
  source 1..75: mol_type = other DNA
cgtgatgccaaccagccatcacggccatacaagaagcaattcttcctcccactattcatcatcgtcatcctcttc

SEQ ID NO: 852212 - DNA, 75 bp, synthetic construct
  source 1..75: mol_type = other DNA
ccgttcatatgaacggcaggagatcccctgcccgtggcgttacaccaatgatcgcgatgtaagaacgatggtcgc

SEQ ID NO: 852213 - DNA, 75 bp, synthetic construct
  source 1..75: mol_type = other DNA
cgcgatgtacgcacaatcgttgagctggggaaagccatagacttcgatgtcagaactgctatcccattcgaaggt

SEQ ID NO: 852214 - DNA, 75 bp, synthetic construct
  source 1..75: mol_type = other DNA
taatatggaaatcagtaaaaactggaattcctatgccaagtttacttacgaaaagaatttcatctgaacctaaaa

SEQ ID NO: 852215 - DNA, 75 bp, synthetic construct
  source 1..75: mol_type = other DNA
agtgcgaaggctggacgcgttacaccttccccgcacgtgccgggcaatactcgcagtttatctgggattttaaat

SEQ ID NO: 852216 - DNA, 75 bp, synthetic construct
  source 1..75: mol_type = other DNA
tctatgaagccaggaaaaacattccacccaaaaatcctgtcgatgcagataaattactggctgcttctcacggag

SEQ ID NO: 852217 - DNA, 75 bp, synthetic construct
  source 1..75: mol_type = other DNA
tttgcgctatgttggcaatattgatgaagatggcgtctgccgcgtgaagattgctgaagtggatggcaacgatcc

SEQ ID NO: 852218 - DNA, 75 bp, synthetic construct
  source 1..75: mol_type = other DNA
gcgcaagctaaagagccgttcaaccttgggcgcttaattcgcctggtgaaagaatatcatctgctgaacccggtc

SEQ ID NO: 852219 - DNA, 75 bp, synthetic construct
  source 1..75: mol_type = other DNA
tggcactgctgctattcgtattatgctcagtaaacagttggccgttgcagatagttaaaggaactgttgtgggga

SEQ ID NO: 852220 - DNA, 75 bp, synthetic construct
  source 1..75: mol_type = other DNA
tgaagcgtcagcaaagctggcttaagaacaagcatatcgacttacgcgtttgcggcgtcgccaactcgaaggcgt

SEQ ID NO: 852221 - DNA, 75 bp, synthetic construct
  source 1..75: mol_type = other DNA
attacctcgaatctaccgtcgatattgctgagtccacccgccgtattgcggcaagccgcattccggctgaccaca

SEQ ID NO: 852222 - DNA, 75 bp, synthetic construct
  source 1..75: mol_type = other DNA
attatcagccactgccgctggtcctgcgcggatacggtgcgggtaatgacgttacagctgccggtgtctttgccg

SEQ ID NO: 852223 - DNA, 75 bp, synthetic construct
  source 1..75: mol_type = other DNA
gcgcgaagttgcctgggaacaaaactacccggatcgcgggcgtgagccgttggctggcgttcatgcttactacga

SEQ ID NO: 852224 - DNA, 75 bp, synthetic construct
  source 1..75: mol_type = other DNA
tcttacgcgctaccatcagatgctagaagaacagtatccactgcaggagaacgggcagatactgttggcatttcc

SEQ ID NO: 852225 - DNA, 75 bp, synthetic construct
  source 1..75: mol_type = other DNA
atgtctgactggaacccctctttatatctgcactttgccgctgaacgatcgcgtccggcggtggagctgcttgcc

SEQ ID NO: 852226 - DNA, 75 bp, synthetic construct
  source 1..75: mol_type = other DNA
tccgcaactggcaaccggaacaggcactcgatctgatttttgctaatgcctcactgcaatggctgcccgaccact

SEQ ID NO: 852227 - DNA, 75 bp, synthetic construct
  source 1..75: mol_type = other DNA
gtgccgctggagaatgtcgaatatgttgccgatcttggctgtggcccaggtaacagcaccgcccttctacaacaa

SEQ ID NO: 852228 - DNA, 75 bp, synthetic construct
  source 1..75: mol_type = other DNA
gattatcgattgggtgaccgccactggattacgtccgtggttacaggatctgaccgagagcgaacagcagctttt

SEQ ID NO: 852229 - DNA, 75 bp, synthetic construct
  source 1..75: mol_type = other DNA
agtgctatgcgccacggaagcagttcgctgacccggttgaccggccagtctgctatgacgccaagcacatggcga

SEQ ID NO: 852230 - DNA, 75 bp, synthetic construct
  source 1..75: mol_type = other DNA
atggtggcaggtgaggccattattataagtatcacggggggggggtttgtccggactgtgcatggcctctttcca

SEQ ID NO: 852231 - DNA, 75 bp, synthetic construct
  source 1..75: mol_type = other DNA
acggtgctgacggggggtttatggggcatttcctggggatgtgcaatgtggtttatctactgggggccgtcagga

SEQ ID NO: 852232 - DNA, 75 bp, synthetic construct
  source 1..75: mol_type = other DNA
tcaggcagtgaaaaattttgtcgtggcgaatatcaccggatcggactgtcggcaactgatccatgttgaaaatgg

SEQ ID NO: 852233 - DNA, 75 bp, synthetic construct
  source 1..75: mol_type = other DNA
gatgcaggaatcctctgttggacccgcattgagcatgaacttcgacatgcgcaaagacgtacgaggtgtctttat

SEQ ID NO: 852234 - DNA, 75 bp, synthetic construct
  source 1..75: mol_type = other DNA
atctttttatgcgtaatatcaaggtgatgcaggaatcctctgttggacccgcattgagcatgaacttcgacatgc

SEQ ID NO: 852235 - DNA, 75 bp, synthetic construct
  source 1..75: mol_type = other DNA
cggtaaacactttattatccgtaatattaaggcacgaaatatcaccccggaatacagtaagaaagccggaattga

SEQ ID NO: 852236 - DNA, 75 bp, synthetic construct
  source 1..75: mol_type = other DNA
tcagtaagaaagcaggcattgataacgcgacagtcgctatttacggttgtgacaatttcgtgattgataatattg

SEQ ID NO: 852237 - DNA, 75 bp, synthetic construct
  source 1..75: mol_type = other DNA
taaacattttgttattcgtaatatcaaagcccgtaatatcacgccggatttcagtaagaaagcaggtattgataa

SEQ ID NO: 852238 - DNA, 75 bp, synthetic construct
  source 1..75: mol_type = other DNA
ttggcccggtgacgcagatctatatcggcggcaaaaacaaacgggtcatgcgcaacctgaccatcgataacctga

SEQ ID NO: 852239 - DNA, 75 bp, synthetic construct
  source 1..75: mol_type = other DNA
tgataattttcgcgctaatctggccagtaactgcgctcagagcggcagtgagcaaaacaacctgggcggatgcac

SEQ ID NO: 852240 - DNA, 75 bp, synthetic construct
  source 1..75: mol_type = other DNA
atgagagttaacctactgatagcgatgataatatttgcgctaatctggcctgcaaccgcgctcagagctgcagtg

SEQ ID NO: 852241 - DNA, 75 bp, synthetic construct
  source 1..75: mol_type = other DNA
aatctaaatatgctgacggaatggcagtataatagtttgatgcgtgatgcgacggcaaaggggtatcgaaccggc

SEQ ID NO: 852242 - DNA, 75 bp, synthetic construct
  source 1..75: mol_type = other DNA
attaagtaacgatatcgtcagccagagcctgcgttttcataccaacgcgccgctggtcaatcagccggaacaggc

SEQ ID NO: 852243 - DNA, 75 bp, synthetic construct
  source 1..75: mol_type = other DNA
cctgaccgttcgtctggaaaaagctgcaacttacgagcagatcaaagctgccgttaaagctgctgctgaaggcga

SEQ ID NO: 852244 - DNA, 75 bp, synthetic construct
  source 1..75: mol_type = other DNA
aaagaaggttttaaacaaggttttaaacaaggagctcttgaagtggcgcgggaaatagcctgccggcttcgggat

SEQ ID NO: 852245 - DNA, 75 bp, synthetic construct
  source 1..75: mol_type = other DNA
accatctcatcgagcgcatcaactgtaccaacggcaaaatcaactggggcatcggcataggccttgcgggaagta

SEQ ID NO: 852246 - DNA, 75 bp, synthetic construct
  source 1..75: mol_type = other DNA
agcctgcgttttcataccaacgcgccgctggtcagccagccggaactggcgaccttcgcggtaacggatgaggcg

SEQ ID NO: 852247 - DNA, 75 bp, synthetic construct
  source 1..75: mol_type = other DNA
attaagtaacgatatcgtcagccagagcctgcgttttcataccaacgcgccgctggtcagccagccggaactggc

SEQ ID NO: 852248 - DNA, 75 bp, synthetic construct
  source 1..75: mol_type = other DNA
aatcgctataaggctgcgatattgcacagtttctgctttggggcgatcttcaatatgatcgtgctggcgcgtgaa

SEQ ID NO: 852249 - DNA, 75 bp, synthetic construct
  source 1..75: mol_type = other DNA
gaaaacagcgcaccggaattgcccgccgggcaacctgcaccttcttttggcccgggcgcggctgttccacctcca

SEQ ID NO: 852250 - DNA, 75 bp, synthetic construct
  source 1..75: mol_type = other DNA
gaaaacagtgcaccggaattacccgccgggcaacctgcaccttctttcgggcagggagcatcggttctgccgcca

SEQ ID NO: 852251 - DNA, 75 bp, synthetic construct
  source 1..75: mol_type = other DNA
atgcagatgcacgaacacgccgaaggcgcgccagtaccggcggcgctcacacgtgactgggaaggaaaacgcatg

SEQ ID NO: 852252 - DNA, 75 bp, synthetic construct
  source 1..75: mol_type = other DNA
cttcggggattatcaggacgctgtcgatcgcttgttaacgctgacgccaacggtggatagcgtggacgatttacc

SEQ ID NO: 852253 - DNA, 75 bp, synthetic construct
  source 1..75: mol_type = other DNA
aatgccaccgcagccagttcggtgacacgcataaagcgatcgtgaacttcttcgagaacgcacagctgtttggtt

SEQ ID NO: 852254 - DNA, 75 bp, synthetic construct
  source 1..75: mol_type = other DNA
gcagtatcaggtgacatcaaagcctgcgaaaggactgtcctcaatgaccgtggattatggtgaaaaatctgctgc

SEQ ID NO: 852255 - DNA, 75 bp, synthetic construct
  source 1..75: mol_type = other DNA
tggttagtaagaagatggaaagctaatcctttacggaaaacaaataatgttttaccctttaatttacaagtaaca

SEQ ID NO: 852256 - DNA, 75 bp, synthetic construct
  source 1..75: mol_type = other DNA
aggaaaaaatgccgccgatggcacgcagcatggcgaaaaaggcgtacctttttatcgcgatatccagttgctgtt

SEQ ID NO: 852257 - DNA, 75 bp, synthetic construct
  source 1..75: mol_type = other DNA
gattggtgtcgtagtactggcaatggcttttgcagaaggctctgccaacgattggttacccttattaatggttga

SEQ ID NO: 852258 - DNA, 75 bp, synthetic construct
  source 1..75: mol_type = other DNA
ggaaccagaaccacaggtcgatccgcggcaaggggacgtcgagggcggcaggggacggggcaaagcagagaaaca

SEQ ID NO: 852259 - DNA, 75 bp, synthetic construct
  source 1..75: mol_type = other DNA
gaaacttatacgcgtgttcgtggtggtaatgcaatgcaagctgaatgcgttatcgaaatgcagttatattctcag

SEQ ID NO: 852260 - DNA, 75 bp, synthetic construct
  source 1..75: mol_type = other DNA
aagcaatcagagaaagcattaattcggatactacatatcaagaattcgaatggttagtaagaagatggaaagcta

SEQ ID NO: 852261 - DNA, 75 bp, synthetic construct
  source 1..75: mol_type = other DNA
tagaaacgcagctggttaaccagctggtggggatgcactacgaactggtaaatgttaccgacgaaaccagtatga

SEQ ID NO: 852262 - DNA, 75 bp, synthetic construct
  source 1..75: mol_type = other DNA
ctgatggacagcaaaaagatgtggcggagtaattatgctcctcctctgctgcgtattctctggcggctgggtatc

SEQ ID NO: 852263 - DNA, 75 bp, synthetic construct
  source 1..75: mol_type = other DNA
tgccggaaagcgtaaagcacgtgcttccgtctcatgcccaggatatctataaagaagcgttcaacagcgcatggg

SEQ ID NO: 852264 - DNA, 75 bp, synthetic construct
  source 1..75: mol_type = other DNA
ggtgaaacggcgtatgccttaacgaaagcggcgattgttggcctgactaaatcgctggcggtggagtacgcgcag

SEQ ID NO: 852265 - DNA, 75 bp, synthetic construct
  source 1..75: mol_type = other DNA
atgagcctgttgcaatttagcggcctgtttgttgtctggctgctttgctcactgtttattgctacgctgacctgg

SEQ ID NO: 852266 - DNA, 75 bp, synthetic construct
  source 1..75: mol_type = other DNA
caactactttacctgggaagtgctgaataaccactccggactggcgatctcgcctacgcttataggctcactggt

SEQ ID NO: 852267 - DNA, 75 bp, synthetic construct
  source 1..75: mol_type = other DNA
tcgatccgcgcaaagccgccgtcgaagcggctattgcccgcgccaaagcgcgcaagcgggaacagcagcaggcta

SEQ ID NO: 852268 - DNA, 75 bp, synthetic construct
  source 1..75: mol_type = other DNA
gctaatgcgaagccagaagaacaggttgacccgcgcaaagccgccgtcgaagccgctatcgcccgcgccaaagcg

SEQ ID NO: 852269 - DNA, 75 bp, synthetic construct
  source 1..75: mol_type = other DNA
gtgatcccacgcgaagacgaggtagcaagggctctaacgtggacacctaaaatacttgagaggaagactgttctt

SEQ ID NO: 852270 - DNA, 75 bp, synthetic construct
  source 1..75: mol_type = other DNA
gcagcaaaaacagaagaagaaaattatggatatcgttgacagtgacgtcacactgcgcagcaaacgcgaattgat

SEQ ID NO: 852271 - DNA, 75 bp, synthetic construct
  source 1..75: mol_type = other DNA
cactggcgatatggtggcggacccaggcgaaacggcgtatgccttaacgaaagcggcgattgttgggctgaccaa

SEQ ID NO: 852272 - DNA, 75 bp, synthetic construct
  source 1..75: mol_type = other DNA
cattgattacaggcgcatcgcaagggattggcgaagggattgccagaacttttgcgcgttatggcgcgaacctaa

SEQ ID NO: 852273 - DNA, 75 bp, synthetic construct
  source 1..75: mol_type = other DNA
atatttgtaaacgattcagcttagactgcccggaagcgaatctgtccgaatgggaacaggttatcttcgaagaag

SEQ ID NO: 852274 - DNA, 75 bp, synthetic construct
  source 1..75: mol_type = other DNA
caacctgcataaattgggggaaggaaccctgaccataaacggaacaggtgtaaacccgggaggactgaaaacggg

SEQ ID NO: 852275 - DNA, 75 bp, synthetic construct
  source 1..75: mol_type = other DNA
tgatggcagtgtgaatataccggaaggtaccatgagtcaggacagtggtaccctgatattccaggggcatccggt

SEQ ID NO: 852276 - DNA, 75 bp, synthetic construct
  source 1..75: mol_type = other DNA
gtccagacagtgaaagaacggatcctgactgagcgggtaaaacaaccagttatctttcatggccagttgaccgga

SEQ ID NO: 852277 - DNA, 75 bp, synthetic construct
  source 1..75: mol_type = other DNA
ttctcagaacattcataatgaagtagaaaacacggggaaacaggagagttatcatttcgccttaatccgcaggtt

SEQ ID NO: 852278 - DNA, 75 bp, synthetic construct
  source 1..75: mol_type = other DNA
ttaagcaatcatggccgccccggggacagtggttcccctttgcttgcttatgacgcattacagaaaaaatgggtg

SEQ ID NO: 852279 - DNA, 75 bp, synthetic construct
  source 1..75: mol_type = other DNA
taaacccgggaggactgaaaacgggagacggtaccgttgtacttaaccagcaggcagacactgcaggtaatgttc

SEQ ID NO: 852280 - DNA, 75 bp, synthetic construct
  source 1..75: mol_type = other DNA
aaataggtagctatacaattcccattattgataccactggcgctggagatacttttaatggtgcatttgtttata

SEQ ID NO: 852281 - DNA, 75 bp, synthetic construct
  source 1..75: mol_type = other DNA
tggtgactacagcgataactacactcacgttcagattggtgtcgacagaaagcatgagctggacggtgtggattt

SEQ ID NO: 852282 - DNA, 75 bp, synthetic construct
  source 1..75: mol_type = other DNA
acagggacttcagtccgctgattggaagaacagggattgaactgggcaagaccttcagtggtaaggactggagtg

SEQ ID NO: 852283 - DNA, 75 bp, synthetic construct
  source 1..75: mol_type = other DNA
cagcggcaagacgaaatcggtggggggcggtctgtatgcttcagcattgtttgagtccggtgcctatatcgattt

SEQ ID NO: 852284 - DNA, 75 bp, synthetic construct
  source 1..75: mol_type = other DNA
ggacttcagtctgtcccgtaatgcatttatgaacgggaatatcagggccgttaaccagagcactgttattatcgg

SEQ ID NO: 852285 - DNA, 75 bp, synthetic construct
  source 1..75: mol_type = other DNA
ggacagccgtatgctgatgtccgttggcctgaatgcagaaatcagggataacgtccgctttggactggagtttga

SEQ ID NO: 852286 - DNA, 75 bp, synthetic construct
  source 1..75: mol_type = other DNA
cctctttctcagggagtttagtctccaggattcccggggcggttcagttcgctggggtgaaggtgctaacgatag

SEQ ID NO: 852287 - DNA, 75 bp, synthetic construct
  source 1..75: mol_type = other DNA
attgacctctatgatgctgtacgttttagctggcgtgtcagccttgaacgcgctcgtaaggctgaggtcatactg

SEQ ID NO: 852288 - DNA, 75 bp, synthetic construct
  source 1..75: mol_type = other DNA
gtggatgatgatgatgagttactgagtaacaaactcaaacaacttcgggagatcagattagctggtcttgaggtt

SEQ ID NO: 852289 - DNA, 75 bp, synthetic construct
  source 1..75: mol_type = other DNA
atacatgctgaaatatgactccactcacggtcgtttcgacggcaccgttgaagtgaaagacggtcatctgatcgt

SEQ ID NO: 852290 - DNA, 75 bp, synthetic construct
  source 1..75: mol_type = other DNA
atgaaaccttggcatgaagatgttagacgatattttacagaacaccttatctatgatgaatccagtgattccctg

SEQ ID NO: 852291 - DNA, 75 bp, synthetic construct
  source 1..75: mol_type = other DNA
acagtaagaggtatcgtgaggggggtatacatcgctgatgagtggctcaagtctacccgtgagaatttcccagag

SEQ ID NO: 852292 - DNA, 75 bp, synthetic construct
  source 1..75: mol_type = other DNA
caagtctacccgtgagaattttccagagataccctcatgggatgcggatgatgaatttgaagctacgcaaagttc

SEQ ID NO: 852293 - DNA, 75 bp, synthetic construct
  source 1..75: mol_type = other DNA
agagaatggtccggaagataccacgcaagatgacgatatgaagcagagcatcgtcaaatggctagctgaacgcca

SEQ ID NO: 852294 - DNA, 75 bp, synthetic construct
  source 1..75: mol_type = other DNA
atggcaatcgtggtctggcgttgctggacctgatcgaagagggcaacctggggctgatccgcgcggtagagaagt

SEQ ID NO: 852295 - DNA, 75 bp, synthetic construct
  source 1..75: mol_type = other DNA
tttgcgcgtcgcgcactgcgtggagatgttgcctcccgccgccggatgatcgagagtaacttgcgtctggtggta

SEQ ID NO: 852296 - DNA, 75 bp, synthetic construct
  source 1..75: mol_type = other DNA
tggcgcggcggccgcggcgcttcccagaacatcatcccgtcctctaccggtgctgctaaagctgtaggtaaagta

SEQ ID NO: 852297 - DNA, 75 bp, synthetic construct
  source 1..75: mol_type = other DNA
aatgaaaggcgttctgggctacaccgaagatgacgtagtatctaccgatttcaacggcgaagtttgcacttccgt

SEQ ID NO: 852298 - DNA, 75 bp, synthetic construct
  source 1..75: mol_type = other DNA
aggcagtgattttgttctgcgtacggacctgaaaaatgccgataaaattaatgtgactgaaaaagccacgggttc

SEQ ID NO: 852299 - DNA, 75 bp, synthetic construct
  source 1..75: mol_type = other DNA
ttccagaattgtcaggtaaagatattctgagccttgatggttcagtaaatctgcctggcggaaacctgagtaaag

SEQ ID NO: 852300 - DNA, 75 bp, synthetic construct
  source 1..75: mol_type = other DNA
ttggcgctttgtggaagccgagggaaccacaaacatccccaaggacgttgtaaccggctgcataccacctaccca

SEQ ID NO: 852301 - DNA, 75 bp, synthetic construct
  source 1..75: mol_type = other DNA
ctgccgttcctcgaagcgattcgccagttggctgttgaaattggccgcgaacatactctgtttatgcacctgacg

SEQ ID NO: 852302 - DNA, 75 bp, synthetic construct
  source 1..75: mol_type = other DNA
tgcccgagcaacattccactggtgcaatatttccgtcaggaaaaagcagaaattgccgccattcgtcaggaagag

SEQ ID NO: 852303 - DNA, 75 bp, synthetic construct
  source 1..75: mol_type = other DNA
ggcaaaccaggtgatctgtattatacaacctttgacggaaattattatctgttgaaaagtaaccgatatggcagc

SEQ ID NO: 852304 - DNA, 75 bp, synthetic construct
  source 1..75: mol_type = other DNA
gggtgacctgcgtgatatcaacggcgaagccggtgcatgggcacgcatcatgagcggtaccggctctgccagtgg

SEQ ID NO: 852305 - DNA, 75 bp, synthetic construct
  source 1..75: mol_type = other DNA
aaagatataaagaattgattgggaatgaatctgcttttaaatttaaagactattttagaatttttagccctcgtt

SEQ ID NO: 852306 - DNA, 75 bp, synthetic construct
  source 1..75: mol_type = other DNA
gcgaaagtaccgttcccggcgacgctttcctttattacccgcaacggagctacaaaaacctacgatgccgggtgc

SEQ ID NO: 852307 - DNA, 75 bp, synthetic construct
  source 1..75: mol_type = other DNA
ctgttcaactttcgctttcagaacactacatcaccggagtctggctggtatgaattttctacctccaacacgctg

SEQ ID NO: 852308 - DNA, 75 bp, synthetic construct
  source 1..75: mol_type = other DNA
gcggagcatggtgaggctggtcacttcacttccatcgagcaagaatatccccagatactcaacagagcgcgagca

SEQ ID NO: 852309 - DNA, 75 bp, synthetic construct
  source 1..75: mol_type = other DNA
gaaatctctggatatcagtcagttgtctacttcttgccttctgtgtctggatgctatttagcgcagttaccgtta

SEQ ID NO: 852310 - DNA, 75 bp, synthetic construct
  source 1..75: mol_type = other DNA
taccgaccagttacccgttttacagcgtctccatttgtggttgcttagtctgctctacctcgccactttcggttc

SEQ ID NO: 852311 - DNA, 75 bp, synthetic construct
  source 1..75: mol_type = other DNA
tattgcgccccactctacggctcatccttcagctttagctgaattaagcgtgattattgatgccgatggtgaaga

SEQ ID NO: 852312 - DNA, 75 bp, synthetic construct
  source 1..75: mol_type = other DNA
gaagatatcgaccacatcatcggctatgtggactcgaaagatctgctgaaccgcgtgctggccaatcaaagcctg

SEQ ID NO: 852313 - DNA, 75 bp, synthetic construct
  source 1..75: mol_type = other DNA
atgtcgattctaaagacctgctgaaccgcgtgctggctaaccaaagcctggcactgaacagcggcgtacaaattc

SEQ ID NO: 852314 - DNA, 75 bp, synthetic construct
  source 1..75: mol_type = other DNA
tgcgtatcatcaacccgatgcgcttctgcctgtacgtttgcaccccgctggtgtggttcttcaacggcctggcga

SEQ ID NO: 852315 - DNA, 75 bp, synthetic construct
  source 1..75: mol_type = other DNA
tgcttccggtgatattcatgcctctgcggcatcaacagttaccatcgggtctgacacgccggcagaactggcttc

SEQ ID NO: 852316 - DNA, 75 bp, synthetic construct
  source 1..75: mol_type = other DNA
gatcccgaaacgcactgattcggtgaagttctccggttacaaatttgaagtggtggatattgataactaccgcat

SEQ ID NO: 852317 - DNA, 75 bp, synthetic construct
  source 1..75: mol_type = other DNA
gctggtggtggggatcatcaccctcaacgacgtgatgaccacgctgatgggcgatctggtcggtccaggggctgg

SEQ ID NO: 852318 - DNA, 75 bp, synthetic construct
  source 1..75: mol_type = other DNA
cagagcattgcttagtgtaaatgtaggagggaagattgttacagaccgcgtaatgaggtctgtatggagtttctt

SEQ ID NO: 852319 - DNA, 75 bp, synthetic construct
  source 1..75: mol_type = other DNA
gttcaccgctttttgcttatgactcgttgcagaaaaaatgggttattgtaggcgttttaagagcatacgccggtc

SEQ ID NO: 852320 - DNA, 75 bp, synthetic construct
  source 1..75: mol_type = other DNA
agatggacctgagtatgaagaacaaggatttcagcccgttgattggcagaacagggattgaactgggcaaaacat

SEQ ID NO: 852321 - DNA, 75 bp, synthetic construct
  source 1..75: mol_type = other DNA
gcgcggccagccgcttacccgtggtcgcggcaaaatgctgcctgttcacgcgcccacctcgggtaccgttacggc

SEQ ID NO: 852322 - DNA, 75 bp, synthetic construct
  source 1..75: mol_type = other DNA
cttttaactttactctatggtatgttgttataagccggaaaacgctaaggcccttaatcagggatgttgaactcc

SEQ ID NO: 852323 - DNA, 75 bp, synthetic construct
  source 1..75: mol_type = other DNA
tctggcatataggtatgtatgacttgcatggaagttttattcattcgttttttcttgccagctccatgctcactg

SEQ ID NO: 852324 - DNA, 75 bp, synthetic construct
  source 1..75: mol_type = other DNA
cattaacctgcgtggaagcaggcgtaatggcaccgttgatcggcgtaattggttcgttgcaggcaatggaagcga

SEQ ID NO: 852325 - DNA, 75 bp, synthetic construct
  source 1..75: mol_type = other DNA
tacgatgcgatgacttgccagtttcgcgaaatgaaactgatgcgtaatccggggtgcgaggtgtgcgggcagtaa

SEQ ID NO: 852326 - DNA, 75 bp, synthetic construct
  source 1..75: mol_type = other DNA
cggctgcgcggcatcgcaatatctggcaagcgccggtgtcggcaacctgacgctgctcgacttcgacacggtttc

SEQ ID NO: 852327 - DNA, 75 bp, synthetic construct
  source 1..75: mol_type = other DNA
acaaccagcgggtaggcgagttaacgaagttagccaacggcgcgcacacttttaagtatgcacctgagtggttag

SEQ ID NO: 852328 - DNA, 75 bp, synthetic construct
  source 1..75: mol_type = other DNA
ggtggtttaaaactagatctttcaacagaaaatgtgaaattatccggtaatctctcatataacagaggaaaaaat

SEQ ID NO: 852329 - DNA, 75 bp, synthetic construct
  source 1..75: mol_type = other DNA
atggcggaactcagcgatcaggagatgctgcgctacaaccggcaaatcatcctgcgtggttttgattttgacggt

SEQ ID NO: 852330 - DNA, 75 bp, synthetic construct
  source 1..75: mol_type = other DNA
tcgttttcagcacgataacgaacagtggctgattcaggctaaacgctattcagggcgtatccgcgcggaacacgt

SEQ ID NO: 852331 - DNA, 75 bp, synthetic construct
  source 1..75: mol_type = other DNA
ggaaaattgacctttacacaaggttgtaaaattgacgccggtacggtattggatgtccccttcggagagtaccca

SEQ ID NO: 852332 - DNA, 75 bp, synthetic construct
  source 1..75: mol_type = other DNA
tctcattacgcattgagggagcggtgaatgctaacgattcccgggctgtagatatggggaacccggatatcggcg

SEQ ID NO: 852333 - DNA, 75 bp, synthetic construct
  source 1..75: mol_type = other DNA
accatatgctggttggcggtgtacgtccgcacctgtactgcctgcccattctcaaacgtaatgtgcatcaacagg

SEQ ID NO: 852334 - DNA, 75 bp, synthetic construct
  source 1..75: mol_type = other DNA
accatatgctggttggtggcgtgcgtccgcacctgtattgtctacccatcctcaaacgcaatattcaccaacagg

SEQ ID NO: 852335 - DNA, 75 bp, synthetic construct
  source 1..75: mol_type = other DNA
ccgcagcatctgatgtttaaccgcaaccatatgctggttggtggcgtgcgtccacacctgtattgtctacccatc

SEQ ID NO: 852336 - DNA, 75 bp, synthetic construct
  source 1..75: mol_type = other DNA
gttaaacgttatcatgctaaatccagacaaccgtttgatttattgtcagaaatagggcgagacagcgttggtgca

SEQ ID NO: 852337 - DNA, 75 bp, synthetic construct
  source 1..75: mol_type = other DNA
cagggcatgatcatgaacagcatcggtgaaaacagggctgtctgctttgaatatccatccccgatcatccctaaa

SEQ ID NO: 852338 - DNA, 75 bp, synthetic construct
  source 1..75: mol_type = other DNA
aatcatttcatgatattattaatcttgcgaatttaacatgtcataaaaacactgtcgcacctaaattaatatcat

SEQ ID NO: 852339 - DNA, 75 bp, synthetic construct
  source 1..75: mol_type = other DNA
ttgtatcagggtttctgaccgaaaatgatatatcatggtttaaccgaattaaagcagggggtggccttgatgtca

SEQ ID NO: 852340 - DNA, 75 bp, synthetic construct
  source 1..75: mol_type = other DNA
tttccatccgtgctgtgctgaccaactacgtgaaagccatccgttacctgcaggggattgagcataacggtgagt

SEQ ID NO: 852341 - DNA, 75 bp, synthetic construct
  source 1..75: mol_type = other DNA
cacagcagccacagcagccacagcagccacagcagccacagcagccacagcagccacagcagccacagcaactga

SEQ ID NO: 852342 - DNA, 75 bp, synthetic construct
  source 1..75: mol_type = other DNA
tcatggcttttgccttcagctggtcgtcagtgagcaaggctgccactaccagcgcttccgttgagtgcgaggggc

SEQ ID NO: 852343 - DNA, 75 bp, synthetic construct
  source 1..75: mol_type = other DNA
ttcgttgcccaaaccgctatgtgctgtggggaagggggaatcaaagcctgggattatgttcgaatggggtttctg

SEQ ID NO: 852344 - DNA, 75 bp, synthetic construct
  source 1..75: mol_type = other DNA
gctgcaatcgcgcatctatgtccgagcacaccattactatcacagctggatgcactatttttctgcctattcact

SEQ ID NO: 852345 - DNA, 75 bp, synthetic construct
  source 1..75: mol_type = other DNA
aagaatggactctgttagtcaaagtgtgagcagggacaatatcagtattacactgacgcgcaaggagtttcagtt

SEQ ID NO: 852346 - DNA, 75 bp, synthetic construct
  source 1..75: mol_type = other DNA
tcacctgattcagaggagtggtcatcacaaaaagcttccaaagacgtagagggcatcgtatttggagggaaaaaa

SEQ ID NO: 852347 - DNA, 75 bp, synthetic construct
  source 1..75: mol_type = other DNA
aaatgactgatgatggccacgcgaataatttagctggtttatatctggcatggcatcgctcttcccctgatgagt

SEQ ID NO: 852348 - DNA, 75 bp, synthetic construct
  source 1..75: mol_type = other DNA
tttttgcgctttctgcacccatggaaatacttaatcagggttgcaaacccgcgcatgactcgccaaaaatgtata

SEQ ID NO: 852349 - DNA, 75 bp, synthetic construct
  source 1..75: mol_type = other DNA
attgctgaattgtatgcatctaaaacaaataaagactacggaacaatgcccatatcctccgtatctatccagggg

SEQ ID NO: 852350 - DNA, 75 bp, synthetic construct
  source 1..75: mol_type = other DNA
gtcgtttgtcaatcatcaaccacaggtgacacaagccacaacgttgagcgaaatccctacatctacgcccgcctc

SEQ ID NO: 852351 - DNA, 75 bp, synthetic construct
  source 1..75: mol_type = other DNA
gttttgagaatggttttgatattacatctgacatatttaatcgtaagacattatatgatcaaatgatacggctta

SEQ ID NO: 852352 - DNA, 75 bp, synthetic construct
  source 1..75: mol_type = other DNA
tgctcacccaggatgacaccgtcaacctcagcaagtttatctcccgtgagcagctctctcccacggcagcctacc

SEQ ID NO: 852353 - DNA, 75 bp, synthetic construct
  source 1..75: mol_type = other DNA
atgaatatctatagctttgattttgatgagattgagagtcaggaggacttttatcgcgactttcgccaaaccttt

SEQ ID NO: 852354 - DNA, 75 bp, synthetic construct
  source 1..75: mol_type = other DNA
ggtctggcgaaagataaggtacgcgatctcgactctctatgggatgtgttaatgaacgatgtcctgccgctacca

SEQ ID NO: 852355 - DNA, 75 bp, synthetic construct
  source 1..75: mol_type = other DNA
tgacagagcaggacctttcaggggggcgtactgcacataacggtcatggaaggcaggctgcagcaaatccgggcg

SEQ ID NO: 852356 - DNA, 75 bp, synthetic construct
  source 1..75: mol_type = other DNA
gaagaagtgaacgccgatcgtaatgtttctaataacgccaaaaatcgtcaaatcgtgttgaatctttacgagaaa

SEQ ID NO: 852357 - DNA, 75 bp, synthetic construct
  source 1..75: mol_type = other DNA
tgaatacccaggaaactttctggaaaaatatcaatgatggtattggctccgggctggactggattggcatcggga

SEQ ID NO: 852358 - DNA, 75 bp, synthetic construct
  source 1..75: mol_type = other DNA
caacatcaccgtcagcgccaccatgcaactaccggataaagatatgtccggacagtcaaccagcaccacgagcgc

SEQ ID NO: 852359 - DNA, 75 bp, synthetic construct
  source 1..75: mol_type = other DNA
ggctgccatccgtgaactgatccttcgcgcctgcaggaacatgattaagctgctcacccaggatgacaccgtcaa

SEQ ID NO: 852360 - DNA, 75 bp, synthetic construct
  source 1..75: mol_type = other DNA
tcaaccaggttgctgaccgcctgaacatctccaaacacactgtctatctctacatccgccagttcaagagcggtg

SEQ ID NO: 852361 - DNA, 75 bp, synthetic construct
  source 1..75: mol_type = other DNA
ggtctgctgtgcatcaatatgaatcttgatgttcccttctcgcagattatgagcacctttgtgccgccagaaacc

SEQ ID NO: 852362 - DNA, 75 bp, synthetic construct
  source 1..75: mol_type = other DNA
atgaatgtcgcagacaagtatcgtgtgcgtctcgcgggtgctcatgctttttacgttttgtcagaacttgatacg

SEQ ID NO: 852363 - DNA, 75 bp, synthetic construct
  source 1..75: mol_type = other DNA
cgcatgagcctgtacggttatccgcgtgaaaccacgcctgaactggatgcgctgcataaaaccgacccaaacctg

SEQ ID NO: 852364 - DNA, 75 bp, synthetic construct
  source 1..75: mol_type = other DNA
atagtctggcatcgcgaatggaacccgcagcaccatggcaatttatttccggctactaccagtaccgccagcaac

SEQ ID NO: 852365 - DNA, 75 bp, synthetic construct
  source 1..75: mol_type = other DNA
tggatcaccaaccagcagacaatgaccgcccgcaacaccatgctgacggtgttctctaagcagacggataaacag

SEQ ID NO: 852366 - DNA, 75 bp, synthetic construct
  source 1..75: mol_type = other DNA
ccgatcagtactacgggaaaagcgcctaaagccgggacgtttgaaggcgtaacgaccatatatctggaaatggag

SEQ ID NO: 852367 - DNA, 75 bp, synthetic construct
  source 1..75: mol_type = other DNA
ttgcaggtgttgttttgttaatattcatcattattgttggttatttcttttctgagcgtaatgacagaaagatat

SEQ ID NO: 852368 - DNA, 75 bp, synthetic construct
  source 1..75: mol_type = other DNA
aataacgtggttacgtctcgtccgtacaccattgaaatcctgcaacaggcgctgacctttgccaatgaaaagaac

SEQ ID NO: 852369 - DNA, 75 bp, synthetic construct
  source 1..75: mol_type = other DNA
ctcgtccgtacaccattgaaatcctgcaacaggcgctgacctttgccaatgaaaagaacccggatctgtatctga

SEQ ID NO: 852370 - DNA, 75 bp, synthetic construct
  source 1..75: mol_type = other DNA
gatcgccatgaatacgtttatcaaaaacaagccgtttgagaaaacgttggataacctggcctcgcgtatggagcc

SEQ ID NO: 852371 - DNA, 75 bp, synthetic construct
  source 1..75: mol_type = other DNA
ctcgacgggttcagaagaatatttatctgtattatgttgtcatcagtatggtccggagtgatgtggtttttataa

SEQ ID NO: 852372 - DNA, 75 bp, synthetic construct
  source 1..75: mol_type = other DNA
cgcagccgtcgctgatgaacatgatgaaacaggcaggttataaaaccttctggatcaccaaccagcagacgatga

SEQ ID NO: 852373 - DNA, 75 bp, synthetic construct
  source 1..75: mol_type = other DNA
gatttggcgggactgacatacgatggttacgatccgacccgttctctggtgaatccgcaattcagggaaaccacc

SEQ ID NO: 852374 - DNA, 75 bp, synthetic construct
  source 1..75: mol_type = other DNA
cgaagccagcgagtatttaagccagtatttcagcctgaaaattgtgcttatcgcgctggcctatacggcggtggc

SEQ ID NO: 852375 - DNA, 75 bp, synthetic construct
  source 1..75: mol_type = other DNA
accgtcgttttttccaggcagagggaagctattcacccgaaatggacgttatttttgaagaatatgccctcattg

SEQ ID NO: 852376 - DNA, 75 bp, synthetic construct
  source 1..75: mol_type = other DNA
caccgttaatggcgttaaaatcggaacgcataaacacgatacccctcacggcatatctggtctgccgcataatta

SEQ ID NO: 852377 - DNA, 75 bp, synthetic construct
  source 1..75: mol_type = other DNA
gtgaaatgtaattcgtttgaagttgaagcaaaggacagcgctggttttattactccccaacttaccgcaagtgag

SEQ ID NO: 852378 - DNA, 75 bp, synthetic construct
  source 1..75: mol_type = other DNA
gccggaccgccgcatgggcgttgagatgacgctgctgcgcgcgctggcgttccatccacgtatgcctctgcctga

SEQ ID NO: 852379 - DNA, 75 bp, synthetic construct
  source 1..75: mol_type = other DNA
tgatgcagcaaaaagaagtggtcgccacaccgaaggcgctgaaaaaagcgctggaacatgaaaaaacgccggaac

SEQ ID NO: 852380 - DNA, 75 bp, synthetic construct
  source 1..75: mol_type = other DNA
accgtcgttttttccaggtagaaggaagctattcaccagaaatggacgttatctttgaagaagatacccttattg

SEQ ID NO: 852381 - DNA, 75 bp, synthetic construct
  source 1..75: mol_type = other DNA
ctcgctgaaattaattgatcaggccattgattcggtctgtcaaagtagaggtggttatttatttgagtctataca

SEQ ID NO: 852382 - DNA, 75 bp, synthetic construct
  source 1..75: mol_type = other DNA
ttaattaatgaagactattctgagttgttagaaattgtttctcgagtacctgaggatgcaagtttttataaaata

SEQ ID NO: 852383 - DNA, 75 bp, synthetic construct
  source 1..75: mol_type = other DNA
ttgtaagaagaaagatgccagaagttaaccagaaaacatatatacagctttcagctatcggtaataatataaatc

SEQ ID NO: 852384 - DNA, 75 bp, synthetic construct
  source 1..75: mol_type = other DNA
aatcgggcgtcactttgaactacactcctttcgcccgtgaagcattcgttttcatcgtcaatgcggataacccgg

SEQ ID NO: 852385 - DNA, 75 bp, synthetic construct
  source 1..75: mol_type = other DNA
tgttagtctcattagtcggaggtgagttctggtggatagtcattatacccgttggtgcgcatattagtttttcac

SEQ ID NO: 852386 - DNA, 75 bp, synthetic construct
  source 1..75: mol_type = other DNA
atgcactaagcgttataccggaagattttcattcctgggaatatctgacgaactctcgaacaccagaagcgtata

SEQ ID NO: 852387 - DNA, 75 bp, synthetic construct
  source 1..75: mol_type = other DNA
aaacacagcgccgaagaagagcgccaggcgattcagtatctgctggatctgcgctgcgacgcgatcatgatttat

SEQ ID NO: 852388 - DNA, 75 bp, synthetic construct
  source 1..75: mol_type = other DNA
atttttctatgcaacttatttcatcagctattggttgtgtttctatggtgttatatagtgagaaaataaggagga

SEQ ID NO: 852389 - DNA, 75 bp, synthetic construct
  source 1..75: mol_type = other DNA
aacttaaaggaatactcaaaattatttagtggtgcattaaagtttatatgtatattaacaatacctctaagtgta

SEQ ID NO: 852390 - DNA, 75 bp, synthetic construct
  source 1..75: mol_type = other DNA
tataaagacgcgctggcgcagcatggtattgcgctcaatgaaaaacttatcgctaacggtaaatggacgcccgcc

SEQ ID NO: 852391 - DNA, 75 bp, synthetic construct
  source 1..75: mol_type = other DNA
ggctacgtcagccaggagactaaagatcgtgtgtttcaggcggtggaagagagcggttatcgccctaacttgctg

SEQ ID NO: 852392 - DNA, 75 bp, synthetic construct
  source 1..75: mol_type = other DNA
ttgatgacatcattgacgcgcacagtcagccgataatggtgctcaatcgacgcctgcgtaaaaacagcagccata

SEQ ID NO: 852393 - DNA, 75 bp, synthetic construct
  source 1..75: mol_type = other DNA
aaaagtgtatggcatcgattacattgctgagaatattcagtatttaaatacaaaatcccccgcaagcagtcccgc

SEQ ID NO: 852394 - DNA, 75 bp, synthetic construct
  source 1..75: mol_type = other DNA
gtgtccactattctctcaggaatttcaggatctgccagacggtgctgagacgacgcttacaaatggcggtagtga

SEQ ID NO: 852395 - DNA, 75 bp, synthetic construct
  source 1..75: mol_type = other DNA
cgaggatgaattcgaagtggataatgatgcgacgcctgatgaaatacatgacgaagcaaaagatattttctttaa

SEQ ID NO: 852396 - DNA, 75 bp, synthetic construct
  source 1..75: mol_type = other DNA
cgttgaatcagtatttacaacctagattaacaagatattatcatcaaaataacttaaaggaatactcaaaattat

SEQ ID NO: 852397 - DNA, 75 bp, synthetic construct
  source 1..75: mol_type = other DNA
ccgtagcatattactttcaaatgaatcgcaaatcatattgacaactattaatctatttaccatcacactatctca

SEQ ID NO: 852398 - DNA, 75 bp, synthetic construct
  source 1..75: mol_type = other DNA
cgcaggtctgttatggctttattcaggaccgacttggtctgcgcaaacatttgttatggtttatcaccgcgttgt

SEQ ID NO: 852399 - DNA, 75 bp, synthetic construct
  source 1..75: mol_type = other DNA
agagaaatattgaaatctgaacctgttgtaagaagaaagatgccagaagttaaccagaaaacatatatacagctt

SEQ ID NO: 852400 - DNA, 75 bp, synthetic construct
  source 1..75: mol_type = other DNA
ctgacaggtttaaaaaccttattttgcttattgatggattaagttttggcacatttggttttcatccgcacgaag

SEQ ID NO: 852401 - DNA, 75 bp, synthetic construct
  source 1..75: mol_type = other DNA
tgacaaggcttccagtgctgcccgcgcggcatggggtaactcctcctacaaaattatcctcaaacagagtgcgaa

SEQ ID NO: 852402 - DNA, 75 bp, synthetic construct
  source 1..75: mol_type = other DNA
tgctcaggtactgcatgacaaatatatgatctggtgcagtgagcagttatggtccgccttcgtgctggctgctgt

SEQ ID NO: 852403 - DNA, 75 bp, synthetic construct
  source 1..75: mol_type = other DNA
cctcattggtctgatattatgggtaaaaataagctggcagacgtttataaacggctgtatttactggtggtgtac

SEQ ID NO: 852404 - DNA, 75 bp, synthetic construct
  source 1..75: mol_type = other DNA
tctccttggtctgttattatgggtaaaaataagctggcagacgtttataaacggctgtatttactggtggtgtac

SEQ ID NO: 852405 - DNA, 75 bp, synthetic construct
  source 1..75: mol_type = other DNA
actccttggtctgatattatgggtaaaaataagctggcagacgtttataaacggctgtatttactggtggtgtac

SEQ ID NO: 852406 - DNA, 75 bp, synthetic construct
  source 1..75: mol_type = other DNA
aatccggaaatggagaatcgcctgagtgccgtgcttgccgcaagagaagcagaaggtcgccagatggccagcctc

SEQ ID NO: 852407 - DNA, 75 bp, synthetic construct
  source 1..75: mol_type = other DNA
atccggatacccagcagcagatgcagcgtcgtgaagaggtgaacatcaacgtgcaccgggatcgtggggaggatg

SEQ ID NO: 852408 - DNA, 75 bp, synthetic construct
  source 1..75: mol_type = other DNA
acggcaaaaccttccggatgaacgctgcccaagtactgcatgataaatatatgatctggtgcggtgagcagctat

SEQ ID NO: 852409 - DNA, 75 bp, synthetic construct
  source 1..75: mol_type = other DNA
agcctctttgaaccggaggttgcctccggagaagatgtgactcaggctgaacagccacaacagccacaacagcca

SEQ ID NO: 852410 - DNA, 75 bp, synthetic construct
  source 1..75: mol_type = other DNA
gacctgccgctgaagctgaattctgaaatccagaacttcgccatgcacgggacagtcggctccgggaagtcccag

SEQ ID NO: 852411 - DNA, 75 bp, synthetic construct
  source 1..75: mol_type = other DNA
ggtatcgaccggtaaggatatggagcgtcagacgctggtcagttattccgacattcagtctctgccggatctgac

SEQ ID NO: 852412 - DNA, 75 bp, synthetic construct
  source 1..75: mol_type = other DNA
cctctttggtctgttattatgggtaaaaataagctggcagacgtttataaacggctgtatttactggtggtgtac

SEQ ID NO: 852413 - DNA, 75 bp, synthetic construct
  source 1..75: mol_type = other DNA
cggatatccagcagcagatgcagcgccgtgaagaggtaaatatcaacgtgcaccgggagcgcggggaggatgttg

SEQ ID NO: 852414 - DNA, 75 bp, synthetic construct
  source 1..75: mol_type = other DNA
gttatccgtcgtctggccaactacgcccgtcagcgtggtgatatggtggtgatttatgaccgttcaggggaattt

SEQ ID NO: 852415 - DNA, 75 bp, synthetic construct
  source 1..75: mol_type = other DNA
ataatcagactcttatctcagcaaaagaggtgttaagacgcgttcagcgtagcaaggcatggctttacaaacagc

SEQ ID NO: 852416 - DNA, 75 bp, synthetic construct
  source 1..75: mol_type = other DNA
agcctcttcgaaccggaggttgcctccggagaaggcgtgactcaggctgaacagccacaacagccacaacagcca

SEQ ID NO: 852417 - DNA, 75 bp, synthetic construct
  source 1..75: mol_type = other DNA
tgcccgctgtgccgcctgggatttgtggaaggagtgcctgacacagccggattttgataataccgcaaatactct

SEQ ID NO: 852418 - DNA, 75 bp, synthetic construct
  source 1..75: mol_type = other DNA
ataagaagtcagatgcaggtgtgagtgttccggcaggggggatcgagcaggagctgaaaatgaaaccggaagaag

SEQ ID NO: 852419 - DNA, 75 bp, synthetic construct
  source 1..75: mol_type = other DNA
gctccttggtctggtattatgggtaaaaataagctggcagacgtttataaacggctgtatttactggtggtgtac

SEQ ID NO: 852420 - DNA, 75 bp, synthetic construct
  source 1..75: mol_type = other DNA
cctcgttggtctggtattatgggtaaaaataagctggcagacgtttataaacggctgtatttactggtggtgtac

SEQ ID NO: 852421 - DNA, 75 bp, synthetic construct
  source 1..75: mol_type = other DNA
cctccttggtctgctattatgggtaaaaataagctggcagacgtttataaacggctgtatttactggtggtgtac

SEQ ID NO: 852422 - DNA, 75 bp, synthetic construct
  source 1..75: mol_type = other DNA
gagcaagaaggaaagcggctggcggacatcgccaaaaaacagccgctgaccctgctctactcagcaaaaaacacc

SEQ ID NO: 852423 - DNA, 75 bp, synthetic construct
  source 1..75: mol_type = other DNA
atgatccggctgaacagagcgatggttatcgcgtactggtcgaccgtctctggccgcgtggtatcaagaaaactg

SEQ ID NO: 852424 - DNA, 75 bp, synthetic construct
  source 1..75: mol_type = other DNA
atggtttttatgctaagagtgagacttttggaggaaatgggcgcagaaccccatatacggattggcgacctgccg

SEQ ID NO: 852425 - DNA, 75 bp, synthetic construct
  source 1..75: mol_type = other DNA
ctggcgtgattgtagctgtgtgcgccttgtattacttcaacttcggagtaaacggacatttatccagcaagactg

SEQ ID NO: 852426 - DNA, 75 bp, synthetic construct
  source 1..75: mol_type = other DNA
ttgtcattatatctgtttttagtctttctggatgtattgaagaaacaaaatcggttgattggtggcttgcacatc

SEQ ID NO: 852427 - DNA, 75 bp, synthetic construct
  source 1..75: mol_type = other DNA
tgcattgagtggatgtggtgaggaaatcaagaccgttgattggtggcgaaatcatccggaggaagcgatctcgaa

SEQ ID NO: 852428 - DNA, 75 bp, synthetic construct
  source 1..75: mol_type = other DNA
ggtgaaaccctgcgttttaacccgtttgcgaacatcaccgatattgaccagtcagcggagcgtgtccgtgaccag

SEQ ID NO: 852429 - DNA, 75 bp, synthetic construct
  source 1..75: mol_type = other DNA
gctctgttattaagagatatattcgagttatctaagcaaaccagtggggatgttctaatctataatactctttgg

SEQ ID NO: 852430 - DNA, 75 bp, synthetic construct
  source 1..75: mol_type = other DNA
cggtggcacgccgccaggagcttgcagaatgggctgactctcttacgccgaaacaggagtttcctgcggaacttg

SEQ ID NO: 852431 - DNA, 75 bp, synthetic construct
  source 1..75: mol_type = other DNA
acgtcagggaaagcgaaccggtgtcagcaccggcagcctggatagctggtactccagctgggtgatggcgcgcgg

SEQ ID NO: 852432 - DNA, 75 bp, synthetic construct
  source 1..75: mol_type = other DNA
aggggaatttgctggaacgtcaaaggtccgccagtaatcatcacgctcatccagggggccgcttggaattcggaa

SEQ ID NO: 852433 - DNA, 75 bp, synthetic construct
  source 1..75: mol_type = other DNA
gtacaccgaacgtgaaaataaccggtcatatctggaaacctatgtggaacaggggaatttgctggaacgtcaaag

SEQ ID NO: 852434 - DNA, 75 bp, synthetic construct
  source 1..75: mol_type = other DNA
aaaagcattcgagtatcacatcgactgcctgcccgctgaagcgcagaaagttttacgtaagcgcctgacccatca

SEQ ID NO: 852435 - DNA, 75 bp, synthetic construct
  source 1..75: mol_type = other DNA
cagcgtatcgccggaaactgataaaggagcagaaagctgaaatcgacatgctgtcgccggaagaactgcatgaaa

SEQ ID NO: 852436 - DNA, 75 bp, synthetic construct
  source 1..75: mol_type = other DNA
aagcagcgtcccggtgattgttaaggagcgtttccgctccacaggttcagcctggcgttcgctcaatccctttgt

SEQ ID NO: 852437 - DNA, 75 bp, synthetic construct
  source 1..75: mol_type = other DNA
ttaatgtggccaacctgatgccgttagtggcggataaccccctgacaccggcaggtctgctggcacccacctacc

SEQ ID NO: 852438 - DNA, 75 bp, synthetic construct
  source 1..75: mol_type = other DNA
ttcctggaagaactgaccaaacagtatccgatcgtatctatcgaagacggtctggacgaatctgactgggacggt

SEQ ID NO: 852439 - DNA, 75 bp, synthetic construct
  source 1..75: mol_type = other DNA
gctcaggcgctgattggcaaagacgctaaagatcaggctggcattgacaagatcatgatcgacctggacggcacc

SEQ ID NO: 852440 - DNA, 75 bp, synthetic construct
  source 1..75: mol_type = other DNA
tctcgtggggtagggaaggtaaaggctgaattgacccaggatgaagcgcagaagttaaaaaatagtcagtctaaa

SEQ ID NO: 852441 - DNA, 75 bp, synthetic construct
  source 1..75: mol_type = other DNA
cacaaggtcggtgaatttattgagaaaggttaccgtaccgcccgccgtcataccggtgcctatatcaccatcaca

SEQ ID NO: 852442 - DNA, 75 bp, synthetic construct
  source 1..75: mol_type = other DNA
tcaaacagagtgcgaaggagttcgcgaaatacaaccagctgtatccggaccagttccagccactgcagcgcgaca

SEQ ID NO: 852443 - DNA, 75 bp, synthetic construct
  source 1..75: mol_type = other DNA
gaatttccatctggcccgtaacccggaaatcgccttcctgtggaacatggccgacaactacagcaacctgctgaa

SEQ ID NO: 852444 - DNA, 75 bp, synthetic construct
  source 1..75: mol_type = other DNA
tgagagggataagctgctagccgctgcccgtgaacctgcagcacgaggagagtcctatgctgcaatgcgtgaaga

SEQ ID NO: 852445 - DNA, 75 bp, synthetic construct
  source 1..75: mol_type = other DNA
ttccaacgctgaagctctggctgttatcgctgaagctgttaaagctgctggttatgaactgggtaaagacatcac

SEQ ID NO: 852446 - DNA, 75 bp, synthetic construct
  source 1..75: mol_type = other DNA
agttcgcgaaatacaaccagctgtatccggaccagttccagccactgcagcgcgacatgattggtaagtttggtg

SEQ ID NO: 852447 - DNA, 75 bp, synthetic construct
  source 1..75: mol_type = other DNA
tcgccacgtctaccagctgtctcagaaaggcttagtacagcataatcgaaatgcctgggagaaggagccggtagt

SEQ ID NO: 852448 - DNA, 75 bp, synthetic construct
  source 1..75: mol_type = other DNA
aaggtaaaaggagagctgacacaggacgaggcgcagaaactgagtaacagccagtctaaatcacactcacgctaa

SEQ ID NO: 852449 - DNA, 75 bp, synthetic construct
  source 1..75: mol_type = other DNA
aaaggcgttgttcagcacagccgcagcgcctgggaaaaggagccggtagtgggccagaattatgaagtggtttat

SEQ ID NO: 852450 - DNA, 75 bp, synthetic construct
  source 1..75: mol_type = other DNA
acggggataccaggtaacccgcaggggcgcggggtgattgaaagggttaacaaggaaatacccaaagacgtggcc

SEQ ID NO: 852451 - DNA, 75 bp, synthetic construct
  source 1..75: mol_type = other DNA
agctggcgcgccagctatcggtattccgttcttctggccgtcctcggcgatgcccaatacggtaatgactgaatg

SEQ ID NO: 852452 - DNA, 75 bp, synthetic construct
  source 1..75: mol_type = other DNA
tttaccggagaaccaaaagcgccgacgcctgatgcaggaaataacaccacgcggattgcgaccactgcgtttgta

SEQ ID NO: 852453 - DNA, 75 bp, synthetic construct
  source 1..75: mol_type = other DNA
acaatatcaccctgaaaatcgaccctgctgtagtgctggcaactcgcaagtatgtggatgacaaggcactggagc

SEQ ID NO: 852454 - DNA, 75 bp, synthetic construct
  source 1..75: mol_type = other DNA
tcgtctttttattctctggcgttgtacaggcggcggagtttttcggtccgcgggaaagccggttgctttttgaag

SEQ ID NO: 852455 - DNA, 75 bp, synthetic construct
  source 1..75: mol_type = other DNA
atgtcgtacctttagaaaaacagcatccaatatatataatgatgaaaaaggaacgctatgaaccggagagagaag

SEQ ID NO: 852456 - DNA, 75 bp, synthetic construct
  source 1..75: mol_type = other DNA
ctgggatgacgggcgcggagttgatgcaggccgcggcctgttaagcgctcagggttatgcctatcaaagccactc

SEQ ID NO: 852457 - DNA, 75 bp, synthetic construct
  source 1..75: mol_type = other DNA
aatccgagttctaatcgctggagaaaattgcctgatggaaccatcattcaaatgggaatatcagcatcagggcca

SEQ ID NO: 852458 - DNA, 75 bp, synthetic construct
  source 1..75: mol_type = other DNA
ttttaggtattgagtcactcagtcctcatgtttccgggaatccaaagtttgaatatgcgaatatggtcgaagata

SEQ ID NO: 852459 - DNA, 75 bp, synthetic construct
  source 1..75: mol_type = other DNA
ggcttttgtgaaatcagcaattgcggcaatggtgggttctgcccctgcggcactggatacactgaatgaactggc

SEQ ID NO: 852460 - DNA, 75 bp, synthetic construct
  source 1..75: mol_type = other DNA
agcccccacggcggcacagtcggtcaacaatacacagattgccaccacggcttttgtgaaatcggcgattgcggc

SEQ ID NO: 852461 - DNA, 75 bp, synthetic construct
  source 1..75: mol_type = other DNA
atggtgctgattaccagcggcacggacaatatcaccctgagaatcgaccctgccgtagtgctggcaacccgcaag

SEQ ID NO: 852462 - DNA, 75 bp, synthetic construct
  source 1..75: mol_type = other DNA
aagaattattgatcatgatgcctgtcaacttacatcagtaaaacatttatcttcagttgaaaaattgagaaagtt

SEQ ID NO: 852463 - DNA, 75 bp, synthetic construct
  source 1..75: mol_type = other DNA
agccctgccggaagaccgggaaacacttttctgggccgtttccaattcattaccgggaggtgcctcaacaaagca

SEQ ID NO: 852464 - DNA, 75 bp, synthetic construct
  source 1..75: mol_type = other DNA
ttgacaccaccctgctcgcccgcgccgccgaagcgttggcagcacggtttggcgcgcagaccacgaccgttaagc

SEQ ID NO: 852465 - DNA, 75 bp, synthetic construct
  source 1..75: mol_type = other DNA
ccagtgcaaatcaaacaactgctggacgtcggcacacaaaccttactggtgccgatggtacaaaacgccgacgaa

SEQ ID NO: 852466 - DNA, 75 bp, synthetic construct
  source 1..75: mol_type = other DNA
aatgttgtaataattgacaacttaagtaattcatcttgcgagagcattcgaaggattgaattactagctaaaaaa

SEQ ID NO: 852467 - DNA, 75 bp, synthetic construct
  source 1..75: mol_type = other DNA
atgggggcgttgcctgaccgcattatcgaagcagcgaatactgcaaatgcacgtcagggaaagcgaaccggtgtc

SEQ ID NO: 852468 - DNA, 75 bp, synthetic construct
  source 1..75: mol_type = other DNA
aggccgcattgcacgggccacgcagaaaatcgaagaggctaaacgcgagcttaccccggctattacgcagaagcc

SEQ ID NO: 852469 - DNA, 75 bp, synthetic construct
  source 1..75: mol_type = other DNA
gaaaaagaagaactttatttattcgcatctgaacgcgaacgcaatttaaagaaaaacggcacaaacaaccgttaa

SEQ ID NO: 852470 - DNA, 75 bp, synthetic construct
  source 1..75: mol_type = other DNA
ttgaggatattaacgaaaaacgcactgatgcttttacatctgtgccgctggtttttcgcgtggagccctcatcca

SEQ ID NO: 852471 - DNA, 75 bp, synthetic construct
  source 1..75: mol_type = other DNA
atgtgcaggggctgcctcattcggcccccgagaaagcacactgatttttgacggacgccagaacagcgcctctta

SEQ ID NO: 852472 - DNA, 75 bp, synthetic construct
  source 1..75: mol_type = other DNA
ttcttgctggagtgctattctgctcatgtgcaggggctgcctcattcggcccccgagaaagcacactgatttttg

SEQ ID NO: 852473 - DNA, 75 bp, synthetic construct
  source 1..75: mol_type = other DNA
ttcttgcaggggctctgcttggctcgtatgcaggagcagcgtcttttggcccccgtgaaagtatgctgatttttg

SEQ ID NO: 852474 - DNA, 75 bp, synthetic construct
  source 1..75: mol_type = other DNA
tcggtactggtagtcggattaaatatggcgtcgtgaatgattacggggcggtgcgcgaatatgaaggagtcgtcc

SEQ ID NO: 852475 - DNA, 75 bp, synthetic construct
  source 1..75: mol_type = other DNA
catttactgtgcgtatcgtaaaaaaaagtgctgttcctgaagaccgggaaaccctgtactgggcggtctcaaact

SEQ ID NO: 852476 - DNA, 75 bp, synthetic construct
  source 1..75: mol_type = other DNA
ctttctgctctgctggagagacagcgctttaaggctggcgggtaagcaacaagaacggcttacagcggcctgcga

SEQ ID NO: 852477 - DNA, 75 bp, synthetic construct
  source 1..75: mol_type = other DNA
agaacagacaggctcaacgatgccgattacctcatagcagtaagaaacagaagggaaacgtgggcagtaaaagac

SEQ ID NO: 852478 - DNA, 75 bp, synthetic construct
  source 1..75: mol_type = other DNA
cttggcgcacctgtcccgatagtcggtgctatgactgagcacgccgctgcatggcgtgcctgtctgctggagcaa

SEQ ID NO: 852479 - DNA, 75 bp, synthetic construct
  source 1..75: mol_type = other DNA
cgctatcgaaggtaagacgcttaaacaagccagtgaagcgagagcaaacgatataaagaggaatgcttatggcat

SEQ ID NO: 852480 - DNA, 75 bp, synthetic construct
  source 1..75: mol_type = other DNA
gcgacgatgctcgatgcgcctgtcccgatagtcggtgctatgacggagcacgctgctgcatggcgtgcctgtctg

SEQ ID NO: 852481 - DNA, 75 bp, synthetic construct
  source 1..75: mol_type = other DNA
gacaatcttctttctgctctgttggagagacagcgccttgcgattggctggtaagcaaaaggaactgctggatat

SEQ ID NO: 852482 - DNA, 75 bp, synthetic construct
  source 1..75: mol_type = other DNA
agctacaacaactcccgttggcagtcattgacgaagtgattgtccgcgcgggggactatatcgacattggtacgc

SEQ ID NO: 852483 - DNA, 75 bp, synthetic construct
  source 1..75: mol_type = other DNA
atacgggtgacttccagtatgcgcagtgtttcggtgcgcctatcgtgtgtgaagccacacactggatgccgctac

SEQ ID NO: 852484 - DNA, 75 bp, synthetic construct
  source 1..75: mol_type = other DNA
atcgtggttagggaacgccttgtactggatgctgctaccagaaccgccgcagggagtgaatgatgaattggcctg

SEQ ID NO: 852485 - DNA, 75 bp, synthetic construct
  source 1..75: mol_type = other DNA
cccacgccgccagcggtacgccgagctattggcgcaggctggccgcatgactattccccggctgcatccgggcga

SEQ ID NO: 852486 - DNA, 75 bp, synthetic construct
  source 1..75: mol_type = other DNA
tgagtaagcaggtgctgaccatcttctttctgctctgctggagagacagcgccttgcgattggcgggtaagcaaa

SEQ ID NO: 852487 - DNA, 75 bp, synthetic construct
  source 1..75: mol_type = other DNA
aggaaggcgtctggataggggaaaatgtttccatcattggtgcttgcattggcagaaatagtgtggtagcggcaa

SEQ ID NO: 852488 - DNA, 75 bp, synthetic construct
  source 1..75: mol_type = other DNA
tctggcgatggactgcgcagcttctgaattctacaaagatggtaagtacgttctggctggcgaaggcaacaaagc

SEQ ID NO: 852489 - DNA, 75 bp, synthetic construct
  source 1..75: mol_type = other DNA
atctgggtatcaaagagttgcgcagtctgctcggtgataaagcgatgctgacgctgattgtcttctcgtttacgg

SEQ ID NO: 852490 - DNA, 75 bp, synthetic construct
  source 1..75: mol_type = other DNA
aacaggtgcaccatacaacggccgctactttgctccagctgacggcaatgctgccaaaagacaaaatctggcggt

SEQ ID NO: 852491 - DNA, 75 bp, synthetic construct
  source 1..75: mol_type = other DNA
gtaatgcgggcaagccaatctaccaaatgagtaagtggtgggcacgtcgccgctccagcgtgttccgctctatgt

SEQ ID NO: 852492 - DNA, 75 bp, synthetic construct
  source 1..75: mol_type = other DNA
cgtaaacaaatcgcgggtattgattttaaaccgcgttttacgccagaacagcaggagttccgtttcagtcactat

SEQ ID NO: 852493 - DNA, 75 bp, synthetic construct
  source 1..75: mol_type = other DNA
actatcgtgccgcagggcgtgctgtttggctccagcaaggcgcatcagtctctgcgtaaaacgctggtggaagat

SEQ ID NO: 852494 - DNA, 75 bp, synthetic construct
  source 1..75: mol_type = other DNA
aaagtatgccgcagatggtgcaggacattatgctgaccatgccgacgacacactttgttagcctcgcgcaggcca

SEQ ID NO: 852495 - DNA, 75 bp, synthetic construct
  source 1..75: mol_type = other DNA
gcggaactgaaactctacgctcgttattacacagtggaaaattgcgctgaagaaagctgtcgagactgcaatagt

SEQ ID NO: 852496 - DNA, 75 bp, synthetic construct
  source 1..75: mol_type = other DNA
attcacctctgaagaattcactcacttcctggaagaactgaccaaacagtatccgatcgtttctatcgaagacgg

SEQ ID NO: 852497 - DNA, 75 bp, synthetic construct
  source 1..75: mol_type = other DNA
accagctgattcgtatcgaagaagctctgggcgaaaaagcaccgtacaacggtcgtaaagagatcaaaggccagg

SEQ ID NO: 852498 - DNA, 75 bp, synthetic construct
  source 1..75: mol_type = other DNA
cgcgtagcgcccttattcgcctgaacgcggcgaatgctcgttttgtctatcaaccgtttacacgcgatcagcggg

SEQ ID NO: 852499 - DNA, 75 bp, synthetic construct
  source 1..75: mol_type = other DNA
ctgtggtgctgattttggatttgacccctatatcagtgatgtaccagatgttcaatgtgacctgaacacgacaaa

SEQ ID NO: 852500 - DNA, 75 bp, synthetic construct
  source 1..75: mol_type = other DNA
ctcgtagtgccattattcgcctgaatgcggcgaatgctcgttttgtttatcaaccgtttacacgcgatcagcggg

SEQ ID NO: 852501 - DNA, 75 bp, synthetic construct
  source 1..75: mol_type = other DNA
acgtggagttgagcgacggcactttatcgtggttagggaacgccttgtactggatgctgctaccagaaccgccgc

SEQ ID NO: 852502 - DNA, 75 bp, synthetic construct
  source 1..75: mol_type = other DNA
ccataattttagaggcgcagaatgtgtggataacctacaaaggaaagccaccaggaagaattactgattctctga

SEQ ID NO: 852503 - DNA, 75 bp, synthetic construct
  source 1..75: mol_type = other DNA
agataaattatataataaattattcggtatcgaagagattgtcagagattccagtaagcaaagcaaaattcatca

SEQ ID NO: 852504 - DNA, 75 bp, synthetic construct
  source 1..75: mol_type = other DNA
ccgcaaagacagctcagtgcgctcgcgcgttgaaaaaagcgaagccgacgcgcaagaaaccaataacgtcattcc

SEQ ID NO: 852505 - DNA, 75 bp, synthetic construct
  source 1..75: mol_type = other DNA
tatctaagactgaaagaaaaagaacagcttgatattattgataaaaatggacaagaaagattattgattatatca

SEQ ID NO: 852506 - DNA, 75 bp, synthetic construct
  source 1..75: mol_type = other DNA
aagcgtatagcgatctcgacgccattatcgcccccgacgccaacgcccgctgccgcacaagccgcagaaaacctg

SEQ ID NO: 852507 - DNA, 75 bp, synthetic construct
  source 1..75: mol_type = other DNA
gccgcagagcgtattgcatttattcccaaactggttggcgtgggattttttaccagcggtggcaacggcgcacaa

SEQ ID NO: 852508 - DNA, 75 bp, synthetic construct
  source 1..75: mol_type = other DNA
tgactgcaacgggcaatatgtctctgtgtggattaaaaaaagagtctctgacagcagcttctgaactggttacct

SEQ ID NO: 852509 - DNA, 75 bp, synthetic construct
  source 1..75: mol_type = other DNA
gcgcaatctcgatgatttgcgccggaggcactgttgcaaagttagcgatgaggcagccttttgtcttattcaaag

SEQ ID NO: 852510 - DNA, 75 bp, synthetic construct
  source 1..75: mol_type = other DNA
agtcagcggagcgtgtccgcgaccagttgtcggtgatggccagccccaacggtaacctggatgaagtgcatgaag

SEQ ID NO: 852511 - DNA, 75 bp, synthetic construct
  source 1..75: mol_type = other DNA
cgcaaccatgattggcgacgatgaaaccaactggggcacaaaatcgctggcgatactcgacatgccatttaccgc

SEQ ID NO: 852512 - DNA, 75 bp, synthetic construct
  source 1..75: mol_type = other DNA
gaatgtgtctgggctgggagtaaagttttctaatacggataatgctttgtcagatgatgtaattatgtctggcat

SEQ ID NO: 852513 - DNA, 75 bp, synthetic construct
  source 1..75: mol_type = other DNA
acttaaaagacaaaaacataaataatattctgataaccacagaacatcacagttttgtagtatccgtcttcgatg

SEQ ID NO: 852514 - DNA, 75 bp, synthetic construct
  source 1..75: mol_type = other DNA
tcgagctcttgaatggagaaacttttatgggcacaatgccagattatggcatgacgccgtgataaaatactccgg

SEQ ID NO: 852515 - DNA, 75 bp, synthetic construct
  source 1..75: mol_type = other DNA
cattatcactcactattattgttaaaacaagatgttataaataaagcgcgtagcttacctggtgcggagttttaa

SEQ ID NO: 852516 - DNA, 75 bp, synthetic construct
  source 1..75: mol_type = other DNA
ttcctgtttggtgccgaagcgcgctgtaacggcggttacggcttctggcagatggcatttggttctgatggtacg

SEQ ID NO: 852517 - DNA, 75 bp, synthetic construct
  source 1..75: mol_type = other DNA
ggaaaacgactacagctggttaagtcgtttcccgaaaatgcgcgagtggattggtgacaaggtcgtcaaatcact

SEQ ID NO: 852518 - DNA, 75 bp, synthetic construct
  source 1..75: mol_type = other DNA
tgaggttgtcggagcgctgagggcgggaatgacgatagaggatagggatagttatatcagggattcttttttttc

SEQ ID NO: 852519 - DNA, 75 bp, synthetic construct
  source 1..75: mol_type = other DNA
gctgttttgttgaagtgcctaaaggtgatgtcttctgcaattatgaatttaaagacagtttaggcagatctcatg

SEQ ID NO: 852520 - DNA, 75 bp, synthetic construct
  source 1..75: mol_type = other DNA
atcttcactaaaaaccagttgttcagaataaaggcagaaaataatgaaatacctgttggcaatatgggtattatg

SEQ ID NO: 852521 - DNA, 75 bp, synthetic construct
  source 1..75: mol_type = other DNA
gcagagtgtttcagtattcataatgataatttcagtgacctggaatgggagtgtaaccggccatcctttgttgta

SEQ ID NO: 852522 - DNA, 75 bp, synthetic construct
  source 1..75: mol_type = other DNA
ttgctaatgcgaaaaaaaataaatgcactctaaaatttatatggccctatggttctttcgagttgatattaagac

SEQ ID NO: 852523 - DNA, 75 bp, synthetic construct
  source 1..75: mol_type = other DNA
caaggatgcagttgtgcgggaggctcttcttcgtgattttgataatccgccctttaaaaaaagtgccggcttact

SEQ ID NO: 852524 - DNA, 75 bp, synthetic construct
  source 1..75: mol_type = other DNA
caatggaagtgccatcaggcagcaaggagaacgactacagctggttgagtcgtttcccgaaaatgcgcgagtggg

SEQ ID NO: 852525 - DNA, 75 bp, synthetic construct
  source 1..75: mol_type = other DNA
tgaataacgttgaccctcaggccatgatgataatggccactctgttatccctggatgcctcagcgcagagagttg

SEQ ID NO: 852526 - DNA, 75 bp, synthetic construct
  source 1..75: mol_type = other DNA
gaacactattttgtaaacaagcataaagttgaatatagttcccatctttggaagtctgaagcggttttgctaaat

SEQ ID NO: 852527 - DNA, 75 bp, synthetic construct
  source 1..75: mol_type = other DNA
gaccagctttaacgccgtggcagagttgataaacgccggacatcaggagattgctttccttaccggctcgatgga

SEQ ID NO: 852528 - DNA, 75 bp, synthetic construct
  source 1..75: mol_type = other DNA
tcgcctggcggcggaaagttatctcacgcaaaaaggcttatgcctcgctctggagttaggaccgcatacctacgt

SEQ ID NO: 852529 - DNA, 75 bp, synthetic construct
  source 1..75: mol_type = other DNA
ctgacgcaggccgcgttgaaaacgctggaatcaagcggagcgatacggattgaacgccgtgggcgcaatggcagt

SEQ ID NO: 852530 - DNA, 75 bp, synthetic construct
  source 1..75: mol_type = other DNA
gtgtttacttaacggcgtgtatgacatggcggtggtttcccgactggcggcggaaagttatctcacgcaaaaagg

SEQ ID NO: 852531 - DNA, 75 bp, synthetic construct
  source 1..75: mol_type = other DNA
atgctcgaatctttacagaagggtagcaaacttgcgggaggcaatctaagcaattctgctcagattggtttttat

SEQ ID NO: 852532 - DNA, 75 bp, synthetic construct
  source 1..75: mol_type = other DNA
ctggttgaattgggtgttctggaagaagaacaaaaagcaactctgaatcttcctaagccgaacaacactattctg

SEQ ID NO: 852533 - DNA, 75 bp, synthetic construct
  source 1..75: mol_type = other DNA
tgaaattaccgcagcctaacaatgctcgtgcaatcgtcaataatactgccgcactgattcgtaagaacgccggat

SEQ ID NO: 852534 - DNA, 75 bp, synthetic construct
  source 1..75: mol_type = other DNA
gacctgccgctgtttaaagatatccgcgtgaaagcgtttattgccgggcgggcgctggcaggcgcggcaaatccg

SEQ ID NO: 852535 - DNA, 75 bp, synthetic construct
  source 1..75: mol_type = other DNA
gcaaaactgccggacgcggttgcggtatcaatggaagatcatatcaatccgaactgtcacggacgctggttgaaa

SEQ ID NO: 852536 - DNA, 75 bp, synthetic construct
  source 1..75: mol_type = other DNA
gtggcagatcgtaatttgcacgaccttcttgctccgtgggtgccagacgcaccttcgcgagcactgcgagagatg

SEQ ID NO: 852537 - DNA, 75 bp, synthetic construct
  source 1..75: mol_type = other DNA
tatgcagactttgaagaaacagactggatcgaactggcattaaagaaaactcgcgaaaataaaaagctgattgaa

SEQ ID NO: 852538 - DNA, 75 bp, synthetic construct
  source 1..75: mol_type = other DNA
tttccgatatcggccttgagctttccattaccggcgggattacccctgctgacctgccgctgtttaaagatatcc

SEQ ID NO: 852539 - DNA, 75 bp, synthetic construct
  source 1..75: mol_type = other DNA
gcgtgaaggcatttattgccgggcgagcgctggcaggcgcggtaaatccggcgcaggtcgccgctgatttccatg

SEQ ID NO: 852540 - DNA, 75 bp, synthetic construct
  source 1..75: mol_type = other DNA
aatgttccggttaatccatatgaacactttgaagaaaccgattggatcgaactggcattagagaaaacccgcgaa

SEQ ID NO: 852541 - DNA, 75 bp, synthetic construct
  source 1..75: mol_type = other DNA
agaagcggtaaaaactcgctatgcgcatttaaatgccaactggctggagatgaataaccggctcattaacggcga

SEQ ID NO: 852542 - DNA, 75 bp, synthetic construct
  source 1..75: mol_type = other DNA
ggccaagcgtcgtctggaggtgttgtatcaatgttcgcaggcgctgaacaccagccagattgatgtgcattgttt

SEQ ID NO: 852543 - DNA, 75 bp, synthetic construct
  source 1..75: mol_type = other DNA
atgcagagttatcgtctgggttacgatctgcaacgcggcagtccgcaactcaatgcccatcgccagttgtttcag

SEQ ID NO: 852544 - DNA, 75 bp, synthetic construct
  source 1..75: mol_type = other DNA
atgaggtgcgccagacgctggagcgcgacttaagcacttgcgctcagggtaaggttagcgtggcgttatatcgtc

SEQ ID NO: 852545 - DNA, 75 bp, synthetic construct
  source 1..75: mol_type = other DNA
gataccagcctgccgaatgagcttggcctgcttgcaaaaacctttaaccagatgtcgagcgagctgcataaattg

SEQ ID NO: 852546 - DNA, 75 bp, synthetic construct
  source 1..75: mol_type = other DNA
tggaggaacgcgcgaccatcgcccgcgaattgcacgactcgctggctcaggtgctttcttatttgcgtatccagt

SEQ ID NO: 852547 - DNA, 75 bp, synthetic construct
  source 1..75: mol_type = other DNA
ttggagctgtaaagggatatattaggtttccattaatagaatatgaaagtattattgaagataattttattataa

SEQ ID NO: 852548 - DNA, 75 bp, synthetic construct
  source 1..75: mol_type = other DNA
ccgcacgttgtgcacgactttgaccatgagcgtggagctcagcatcgggggaatggcattctgactccagtggtg

SEQ ID NO: 852549 - DNA, 75 bp, synthetic construct
  source 1..75: mol_type = other DNA
tacgtgagatagcaaaacaggcaacacagggcgaatggggcgcatttatttcgacgggtactggtacgtatgcgg

SEQ ID NO: 852550 - DNA, 75 bp, synthetic construct
  source 1..75: mol_type = other DNA
agaacccgaaggtcattatggtctgaatatcatgcgcgaacgcgcggaacggctgggtgggacgctgactttttc

SEQ ID NO: 852551 - DNA, 75 bp, synthetic construct
  source 1..75: mol_type = other DNA
aatcacacggtttatatccgtgataacgggattggtatcggtgaaccgaaagaacccgaaggtcattatggtctg

SEQ ID NO: 852552 - DNA, 75 bp, synthetic construct
  source 1..75: mol_type = other DNA
ctgaccctcgactgccgtctgccaaccctggcgctggatgcgcaaatgcaggtgcatttgttgcaaattattcgc

SEQ ID NO: 852553 - DNA, 75 bp, synthetic construct
  source 1..75: mol_type = other DNA
cgcatacgccggatgcactggaaaaagccttacaggcggcgcgcctgcactgtgcgggcaagctgtggtgcgtct

SEQ ID NO: 852554 - DNA, 75 bp, synthetic construct
  source 1..75: mol_type = other DNA
aaataaaactgcatgaaaaactatcaaaaaacgacattctgaatgtcttagcagaacatatgacgatgcttgagg

SEQ ID NO: 852555 - DNA, 75 bp, synthetic construct
  source 1..75: mol_type = other DNA
ttatcaggggtggtctgaaggtatcagtgttgttcctgccacaatcattagtaaaataatccaagaggatataat

SEQ ID NO: 852556 - DNA, 75 bp, synthetic construct
  source 1..75: mol_type = other DNA
gtcatcatgactatagcgcgttccttagagcagaaaatccccagcgtctgtttgccctcaccactaaaggcacac

SEQ ID NO: 852557 - DNA, 75 bp, synthetic construct
  source 1..75: mol_type = other DNA
ccagcatcacaagaggtaacaatctccactgcagccaatgcggtcgtttattatccgatgagtgcacgcctggtc

SEQ ID NO: 852558 - DNA, 75 bp, synthetic construct
  source 1..75: mol_type = other DNA
tcttatgcggcaacagacagtattggactgaccgttattactactgtagaaatgggtacttgtaccgctacatta

SEQ ID NO: 852559 - DNA, 75 bp, synthetic construct
  source 1..75: mol_type = other DNA
aataaaaaagcacaaataaaattaaccaagcgagccacatgcgaaggtactgctaatgacggtgcggggttctga

SEQ ID NO: 852560 - DNA, 75 bp, synthetic construct
  source 1..75: mol_type = other DNA
ccactgtacctgcaacgggaagtgcggctccatttagctgtgcagcaccggcaaataaagaggtaattattgcct

SEQ ID NO: 852561 - DNA, 75 bp, synthetic construct
  source 1..75: mol_type = other DNA
aaaagcccagattaatctgactaaacgcgcaacttgtgaaggaataaataacgatggtcccggttttgccaatgg

SEQ ID NO: 852562 - DNA, 75 bp, synthetic construct
  source 1..75: mol_type = other DNA
cggaggccgacgttcccggattggtgaagggaaatacctatctgacgccacagcagcaaacggcagaactggctg

SEQ ID NO: 852563 - DNA, 75 bp, synthetic construct
  source 1..75: mol_type = other DNA
gtcatcatgactatcgcgcgttcctcgaagcagaaaatccccagcgcctgtttgccctcaccacgaaaggtacgc

SEQ ID NO: 852564 - DNA, 75 bp, synthetic construct
  source 1..75: mol_type = other DNA
tccaatgcggtgtcggtagtggtgtatgaagcctggcggcagctgggatatccgggagcgttgttgagagattag

SEQ ID NO: 852565 - DNA, 75 bp, synthetic construct
  source 1..75: mol_type = other DNA
ccggacagccgcagcatgaacctgtccaatgcggtgtcggtagtggtgtatgaagcctggcggcagctggggtat

SEQ ID NO: 852566 - DNA, 75 bp, synthetic construct
  source 1..75: mol_type = other DNA
caggcctgggaagttttcgaaaagctggaagattgttattttagccagcgtccagagaggcggagtacaactacc

SEQ ID NO: 852567 - DNA, 75 bp, synthetic construct
  source 1..75: mol_type = other DNA
tcatctatctcagccagctcaacgagcgtttatctgcactggcgggccgcttttaccatgaaccctctgacaatt

SEQ ID NO: 852568 - DNA, 75 bp, synthetic construct
  source 1..75: mol_type = other DNA
atgagtgaacaaatcaaacaggatatcgatctgattgagattttattttatctgaagaaaaagattcgtgttatc

SEQ ID NO: 852569 - DNA, 75 bp, synthetic construct
  source 1..75: mol_type = other DNA
attgctgaagagtttgccgacgtggcggtggtaacggatgacaacccgcgtactgaagagccgcgtgccatcatc

SEQ ID NO: 852570 - DNA, 75 bp, synthetic construct
  source 1..75: mol_type = other DNA
aaaccgacggtggtggtggattacgcgcatacgccggatgcactggaaaaagccttacaggcggcgcgcctgcac

SEQ ID NO: 852571 - DNA, 75 bp, synthetic construct
  source 1..75: mol_type = other DNA
tttcctcccacgggctggtacagcaccgtgtggcggcattgaaatttgcagcctccgtctttaccaatttaagcc

SEQ ID NO: 852572 - DNA, 75 bp, synthetic construct
  source 1..75: mol_type = other DNA
atgagtaaagagaagcaaacagttaacggggatgtgggtaacgttgtcagcggtgatgttaccattcataactat

SEQ ID NO: 852573 - DNA, 75 bp, synthetic construct
  source 1..75: mol_type = other DNA
taccgcaacgcgaagacaggcgcgtgtagttggcgcttccgctatcgctacgacgggaaagaagtcgaggttacg

SEQ ID NO: 852574 - DNA, 75 bp, synthetic construct
  source 1..75: mol_type = other DNA
agaacccttggtggacatttttatttctgctggtggttgcatatggggtcgagcaagcagcaaaagccttacgcg

SEQ ID NO: 852575 - DNA, 75 bp, synthetic construct
  source 1..75: mol_type = other DNA
tgcaaatgagatattgcttattggttgctgtctttatatttctttcggtatttttatcgggaaaatgatgccagt

SEQ ID NO: 852576 - DNA, 75 bp, synthetic construct
  source 1..75: mol_type = other DNA
gccccggcatcattctttacggtgtatcgccgctggaagatggctccaccggtgctgatttcggttgccagccag

SEQ ID NO: 852577 - DNA, 75 bp, synthetic construct
  source 1..75: mol_type = other DNA
cgccgcagttgcgcctgacgccgctctggcctccatcatttctaccattctggttatcgcaggccatcagagcat

SEQ ID NO: 852578 - DNA, 75 bp, synthetic construct
  source 1..75: mol_type = other DNA
ggacagaagttcatttaactattccagatttatgatgcaccttaaatatttttcaagtcgcgtgttatgcaatga

SEQ ID NO: 852579 - DNA, 75 bp, synthetic construct
  source 1..75: mol_type = other DNA
atgtttgaagtagttattacttctgacgtgccttgcctttttttttggagccatggagtgatcatcgaaaaagtc

SEQ ID NO: 852580 - DNA, 75 bp, synthetic construct
  source 1..75: mol_type = other DNA
taatgttggctttttctggaatgttgaacgctgctgattgttttgatctggcaggaagggattatcatatagatc

SEQ ID NO: 852581 - DNA, 75 bp, synthetic construct
  source 1..75: mol_type = other DNA
gaattatcacgccgagttaaacaattaatcatagcagcaaagaaacaactggaggcgttatgcgcaatgaaatag

SEQ ID NO: 852582 - DNA, 75 bp, synthetic construct
  source 1..75: mol_type = other DNA
atggttacgatgagatggttaaagtgctggccagtgtctggagtcaggaagccgcttctattgcacaagagataa

SEQ ID NO: 852583 - DNA, 75 bp, synthetic construct
  source 1..75: mol_type = other DNA
agatttatgatgcaccttaagtatttttctaatcgagttttatgtaatgaaaagataaaacagaaagatattggt

SEQ ID NO: 852584 - DNA, 75 bp, synthetic construct
  source 1..75: mol_type = other DNA
atggaatgtcggtccctgagcatccggctaaccggattttttatgtcagaaatgaacaaaaaaataaactctaca

SEQ ID NO: 852585 - DNA, 75 bp, synthetic construct
  source 1..75: mol_type = other DNA
gcatacaaattaataatgttttccttgatgaaatcaaagcgttgtacaaagcagagtatgcgataagtcgcgatg

SEQ ID NO: 852586 - DNA, 75 bp, synthetic construct
  source 1..75: mol_type = other DNA
ttcgggcttttattatgacggaccggggattggcgtcgaacgtgcgaccgggaaaatcagcatgtttctggcgca

SEQ ID NO: 852587 - DNA, 75 bp, synthetic construct
  source 1..75: mol_type = other DNA
tctccatgtggctgtccatcgccattcgtggcctgatggcgatgggggagaaccgtaaccgtcgtgtgtggttct

SEQ ID NO: 852588 - DNA, 75 bp, synthetic construct
  source 1..75: mol_type = other DNA
agtctctgccggatctgacctgttatgtcaccctgcccggaccgtatccggcagtaaaactctccctgaaatatc

SEQ ID NO: 852589 - DNA, 75 bp, synthetic construct
  source 1..75: mol_type = other DNA
gttaaaagttactatgatccctccatcgataagatcctgaatccgctggatgcacgctgtgccgcctgggattta

SEQ ID NO: 852590 - DNA, 75 bp, synthetic construct
  source 1..75: mol_type = other DNA
atgccattctatttcaggaaggagtgtccgttaaactcaggctacctcaacgcatggattgatgtggtaaaccct

SEQ ID NO: 852591 - DNA, 75 bp, synthetic construct
  source 1..75: mol_type = other DNA
gttcgagtcctatcgtatttgaatttaacaaccgcctgaatgaataccggaaaaataacggcctgctgccggata

SEQ ID NO: 852592 - DNA, 75 bp, synthetic construct
  source 1..75: mol_type = other DNA
gaaaccggcggcgagctggtggtgaatctttcgcgcctctatgaccactgcgtttatcgcttgtatgaggccagc

SEQ ID NO: 852593 - DNA, 75 bp, synthetic construct
  source 1..75: mol_type = other DNA
cgccaaaagccatattgaagggcggcgtttcgagaagaaagcccagagcatcaataaatgcatcgacattctcaa

SEQ ID NO: 852594 - DNA, 75 bp, synthetic construct
  source 1..75: mol_type = other DNA
ttaaccgcattcagtttcgtgagaaatttaccgggcagctactggtcaatgtggataaaggccgcgtggtgtgta

SEQ ID NO: 852595 - DNA, 75 bp, synthetic construct
  source 1..75: mol_type = other DNA
cgggcataaaccgccaccggagccggactggagcaacaccgttccagtaaacaaaacaatcccggttgatacgca

SEQ ID NO: 852596 - DNA, 75 bp, synthetic construct
  source 1..75: mol_type = other DNA
ccggccctggttaactccattgtcaaacacactatcctacaaaaagaggaaactgatgaaagaaaagaaacgcgt

SEQ ID NO: 852597 - DNA, 75 bp, synthetic construct
  source 1..75: mol_type = other DNA
cgctggaagtgtttgctttcggcagcctgtgcattatgtcggaaggtcgttgctatctgtcgtcgtatctgacgg

SEQ ID NO: 852598 - DNA, 75 bp, synthetic construct
  source 1..75: mol_type = other DNA
tctttgggctctcaagagatttgccacttaattacattgaaagacctgatgttgatttcaaacttaaacaggaat

SEQ ID NO: 852599 - DNA, 75 bp, synthetic construct
  source 1..75: mol_type = other DNA
gccatcaaagggttgaagttcggtgaaacctacatcaatcgtgaaaactttgaagcgatgcaaggtttccacgcc

SEQ ID NO: 852600 - DNA, 75 bp, synthetic construct
  source 1..75: mol_type = other DNA
gtctatgcgcgttatacccgtcgtggcggcctggacattaacccctggcgtagcaatagcgactttgtcccatcg

SEQ ID NO: 852601 - DNA, 75 bp, synthetic construct
  source 1..75: mol_type = other DNA
atccaaattcagtatcgtggacgccaaattgacagagaaaaactgctgcgttacctggtctcattccgtcatcac

SEQ ID NO: 852602 - DNA, 75 bp, synthetic construct
  source 1..75: mol_type = other DNA
tgctatctgtcgtcgtatctgaccggtgagtcgcccaacaccgtgggtgcgtgttctcctgcccgcttcgtgcgc

SEQ ID NO: 852603 - DNA, 75 bp, synthetic construct
  source 1..75: mol_type = other DNA
tgcggcgattttcgctgccgtcgccgcaaaagtgcacgccgatatcccctcagcccagcaaaaaatggccagtgc

SEQ ID NO: 852604 - DNA, 75 bp, synthetic construct
  source 1..75: mol_type = other DNA
ttgccggtagccgaaaataaatcacagcctttaccattaatgcgtcaggtacagatcacagctggtggcttaata

SEQ ID NO: 852605 - DNA, 75 bp, synthetic construct
  source 1..75: mol_type = other DNA
tgatccaacgcgtgacgaacccatcttgttgcatccgggagattgcgtgcgctttgtaccgcagaaggaggggat

SEQ ID NO: 852606 - DNA, 75 bp, synthetic construct
  source 1..75: mol_type = other DNA
ccaacgcccggcggctggcaattaattggtcggacatcgttgaatctgtttgatccaacgcgtgacgaacccatc

SEQ ID NO: 852607 - DNA, 75 bp, synthetic construct
  source 1..75: mol_type = other DNA
gcatacattaactacagcaaaaatcaaatacctcgggactttgtaacatcaataaaaaatagtatttattataaa

SEQ ID NO: 852608 - DNA, 75 bp, synthetic construct
  source 1..75: mol_type = other DNA
ttgccagtagcggtaaataaatctcaacccttgccgttaatgcgccaggtgcagatcgccgcgggtggtttaata

SEQ ID NO: 852609 - DNA, 75 bp, synthetic construct
  source 1..75: mol_type = other DNA
ccgttaatagcagcttcttcttattaagtggatttgtcggtgttggattaatgtttgcaggaatcagcggttttt

SEQ ID NO: 852610 - DNA, 75 bp, synthetic construct
  source 1..75: mol_type = other DNA
tcgaaggtggcgtcccggccaaagccgaaacgacagagctgatttttagtaaagagccgatcgctgttcatcgcg

SEQ ID NO: 852611 - DNA, 75 bp, synthetic construct
  source 1..75: mol_type = other DNA
gcagaaatctccggctggggtgatggctgtggtggataatattgtggcttatgccagtaatgctgccagtcgctc

SEQ ID NO: 852612 - DNA, 75 bp, synthetic construct
  source 1..75: mol_type = other DNA
attcgccagtacattgcggcatcgcccggcccggaggtgaactttacctggcagggcggtgaaccgacgctggcc

SEQ ID NO: 852613 - DNA, 75 bp, synthetic construct
  source 1..75: mol_type = other DNA
tgaattgcactcctccgtggaatacgtggtctggtttttaggttttcaaccgggcttcccgtatctcgggagttt

SEQ ID NO: 852614 - DNA, 75 bp, synthetic construct
  source 1..75: mol_type = other DNA
aaatgccgcaggaggcgagcagtgtattacgagaggagctggcgatagccctgaatgaactggcagacatacgag

SEQ ID NO: 852615 - DNA, 75 bp, synthetic construct
  source 1..75: mol_type = other DNA
atggctcgcgtgaaacgccgcattcttgctaaacgctacgcgccaattgaattaatcagcgtagctgtatctcgc

SEQ ID NO: 852616 - DNA, 75 bp, synthetic construct
  source 1..75: mol_type = other DNA
aacatatccttcctttattgtcgtcattttttatttcaggatgcgactctgatggaataagcaaggtaaagtctt

SEQ ID NO: 852617 - DNA, 75 bp, synthetic construct
  source 1..75: mol_type = other DNA
gctgggagtgatagtttttttgatattgaaataaatgaattgaaggatgaactattactctatagagaggaaaat

SEQ ID NO: 852618 - DNA, 75 bp, synthetic construct
  source 1..75: mol_type = other DNA
tatgcatgaggaaacctttggcccggttctgccggtggtcgcatttgacacgctggaagaggctatctcaatggc

SEQ ID NO: 852619 - DNA, 75 bp, synthetic construct
  source 1..75: mol_type = other DNA
gggccgttgattaacgcctcggcgctggaaagggtcgagcaaaaagtggcgcgcgcagtagaagagggggcgaga

SEQ ID NO: 852620 - DNA, 75 bp, synthetic construct
  source 1..75: mol_type = other DNA
cacagcctaacgcactggtaaaagttatcggtacttccacctgcgacattctgattgccgacaaacagagcgttg

SEQ ID NO: 852621 - DNA, 75 bp, synthetic construct
  source 1..75: mol_type = other DNA
tattccagcgaatggttctgggcaaaaatcctgcatgtgactcgccaggacagcgccgtggcgcaatctgccgca

SEQ ID NO: 852622 - DNA, 75 bp, synthetic construct
  source 1..75: mol_type = other DNA
ctgatcgccgacaaacagagcgttggcgagcgggcagtgaaaggtatttgcggtcaggttgatggcagcgtggtg

SEQ ID NO: 852623 - DNA, 75 bp, synthetic construct
  source 1..75: mol_type = other DNA
ggcagagcacaaccaaccgcattacgccaggccattcagagctacatcaacgaggacattcgcattgatgccaga

SEQ ID NO: 852624 - DNA, 75 bp, synthetic construct
  source 1..75: mol_type = other DNA
cattctggagacgatcaagaaagagaagatgaatctgaccgccacgacaggtgctggcgttctggtacgacaggg

SEQ ID NO: 852625 - DNA, 75 bp, synthetic construct
  source 1..75: mol_type = other DNA
ggcttagttaaaggattcagaactggtgactggaatgaggcttttataagcggggaaaaaatcgcagtcggcaag

SEQ ID NO: 852626 - DNA, 75 bp, synthetic construct
  source 1..75: mol_type = other DNA
aggggaaaggatattattatccgccgacattgctactggatgttcgtcaggaaatgtcgattatgcacgaggaaa

SEQ ID NO: 852627 - DNA, 75 bp, synthetic construct
  source 1..75: mol_type = other DNA
ttatatgcagaggaagttatctatccggggatgcactctgatgtcggtggtggctatcccgttcgcgatcagggg

SEQ ID NO: 852628 - DNA, 75 bp, synthetic construct
  source 1..75: mol_type = other DNA
tagtctgttttttgatggtacaaataataatgaatataatgacacaaaagcctctcatccaaccaatattgcgaa

SEQ ID NO: 852629 - DNA, 75 bp, synthetic construct
  source 1..75: mol_type = other DNA
cgtttgaaaccatgatttcgtggggggagcgttccatctccaaagcaatactcggcggcacgctgaccacggaag

SEQ ID NO: 852630 - DNA, 75 bp, synthetic construct
  source 1..75: mol_type = other DNA
cggttaatacgccgaccgccgggttaatccccaatggcgcgacggtggagcgcgaaatccccagcgattttcaga

SEQ ID NO: 852631 - DNA, 75 bp, synthetic construct
  source 1..75: mol_type = other DNA
cgtggtggtcggcgggatgaacgccaccggggccagcggctcgagcgtaacggttaatacaccgaccgccgggtt

SEQ ID NO: 852632 - DNA, 75 bp, synthetic construct
  source 1..75: mol_type = other DNA
aacaaacttatcgcctttaacgatctgctaaaaaaactggcgatcgcaccggaaaacgtggcttacgttggagat

SEQ ID NO: 852633 - DNA, 75 bp, synthetic construct
  source 1..75: mol_type = other DNA
atgagcaaagcaggtgcgtcgcttgcgacctgttacggccctgtcagcgccgacgttatagcaaaagcagagaac

SEQ ID NO: 852634 - DNA, 75 bp, synthetic construct
  source 1..75: mol_type = other DNA
tctgctgggagtaaggaaaacggaagagaggatagtttcgcaaatgtctttttctggggcaattttatggattaa

SEQ ID NO: 852635 - DNA, 75 bp, synthetic construct
  source 1..75: mol_type = other DNA
aatatcagaaaaattacgcaatataaatattcataaatatagaattaattcggttaatactaatagtgaaggtga

SEQ ID NO: 852636 - DNA, 75 bp, synthetic construct
  source 1..75: mol_type = other DNA
aaataaaaaatgccggacatggcggaaataaatattatcagaaagtcctggaaaatatgtggaaagaatgtgaga

SEQ ID NO: 852637 - DNA, 75 bp, synthetic construct
  source 1..75: mol_type = other DNA
cgtcgccgggttctcctgtccctgctcagcttcctctgcggccttctcttctataaacccacagcgtcgatcctt

SEQ ID NO: 852638 - DNA, 75 bp, synthetic construct
  source 1..75: mol_type = other DNA
atgcaaaactggataaaaacggtgatggtagccgtaaccctggcgctacccggcgtggcgctggcgcaatcgctg

SEQ ID NO: 852639 - DNA, 75 bp, synthetic construct
  source 1..75: mol_type = other DNA
ccaccgcgcagagttccaccaacgttaccgtgcgcgcgcccaccagccccggcgcgcgggtggcgtttatgtcgc

SEQ ID NO: 852640 - DNA, 75 bp, synthetic construct
  source 1..75: mol_type = other DNA
acgtcagccagccgaatgcctttgcgggcgggcgcacggcggtaacgccgcagagcaatatcgcggtgaatcatg

SEQ ID NO: 852641 - DNA, 75 bp, synthetic construct
  source 1..75: mol_type = other DNA
atgagtaaagcaggtgcgtcgattgagacctgttacggccctgtcagcgctgatgttatggcaaaagcagaaaat

SEQ ID NO: 852642 - DNA, 75 bp, synthetic construct
  source 1..75: mol_type = other DNA
tgattccagttttctggcgtcaaacaaaaacgtctggaatgagacaagatcctataacgaggctgacatgaacac

SEQ ID NO: 852643 - DNA, 75 bp, synthetic construct
  source 1..75: mol_type = other DNA
tgagcaggtagaacgtatcagtagtgacccccgcgaattaccggaagacgtacagtttcctaaaaactggtggcc

SEQ ID NO: 852644 - DNA, 75 bp, synthetic construct
  source 1..75: mol_type = other DNA
cgaatcaagcgcaatgatgatggtagtgttgcgctggataaggacgataacccggtaaaagaaatcgtccagctg

SEQ ID NO: 852645 - DNA, 75 bp, synthetic construct
  source 1..75: mol_type = other DNA
tttcactttcatgactctggagcagacagcggaggaagctggttacgttacctattacagtcgtggcactggtga

SEQ ID NO: 852646 - DNA, 75 bp, synthetic construct
  source 1..75: mol_type = other DNA
agggctgcagatccataaaggcgtattcactgacaaggaaggtcagaaaaccttcatccctgcttatgatgtaca

SEQ ID NO: 852647 - DNA, 75 bp, synthetic construct
  source 1..75: mol_type = other DNA
aagcagaactgcgcataaaagagcatcaggaggtgatggccgaggtacaacgtctgacaaatcctcagacagtag

SEQ ID NO: 852648 - DNA, 75 bp, synthetic construct
  source 1..75: mol_type = other DNA
ttatctggccttttatttttaaaaactattccgtgcgtgattttgcagagttcctggaaatttacggactcccca

SEQ ID NO: 852649 - DNA, 75 bp, synthetic construct
  source 1..75: mol_type = other DNA
ggtctcctggatacaggaaaaacttcatattccacagccggtcggtgatgaagccgtgtttactgtacaaccggt

SEQ ID NO: 852650 - DNA, 75 bp, synthetic construct
  source 1..75: mol_type = other DNA
cagcgttcggttgatcccctgctgaaacccgtcattttttctgtgctgaaagatggcccggaagccgccatgaac

SEQ ID NO: 852651 - DNA, 75 bp, synthetic construct
  source 1..75: mol_type = other DNA
tgccgtatccctgaaaataattctgcggcgtttcctcttcttattttgcagtcgtcttcattcattaccacgtcc

SEQ ID NO: 852652 - DNA, 75 bp, synthetic construct
  source 1..75: mol_type = other DNA
tccgccgtctgccgcgtatctgtttccagaccaaagaaccgggggatatcaccaaaataaccagtgcggtgatgc

SEQ ID NO: 852653 - DNA, 75 bp, synthetic construct
  source 1..75: mol_type = other DNA
atgtcagccatcgactgtataattaccgctgccggattatcatcaagaatgggacaatggaaaatgatgttaccc

SEQ ID NO: 852654 - DNA, 75 bp, synthetic construct
  source 1..75: mol_type = other DNA
tggcaaggtgctgaccgattctgaacaggtcgggcagtggggcgcgccgacactggacgtctgggtcgtgcggaa

SEQ ID NO: 852655 - DNA, 75 bp, synthetic construct
  source 1..75: mol_type = other DNA
atgaatatatatatttatgcaagctcatatgatgaaaatagtggtggctctgtagtcctacataggctatgccat

SEQ ID NO: 852656 - DNA, 75 bp, synthetic construct
  source 1..75: mol_type = other DNA
tgaatgacagtcacgcgcctggtgaagaaaaaggcgaaaagaaaaaactctcaaaagaggatttttatcgtgtca

SEQ ID NO: 852657 - DNA, 75 bp, synthetic construct
  source 1..75: mol_type = other DNA
caagatatggtgatacatttcagaggatttaatgttaaaagtattgacacaacaggcgctggagatgcttttatg

SEQ ID NO: 852658 - DNA, 75 bp, synthetic construct
  source 1..75: mol_type = other DNA
cccaatcggatgagtcgcttcagagctttattcataggatgatgcttcgtgttggctggagcgattttacaaccc

SEQ ID NO: 852659 - DNA, 75 bp, synthetic construct
  source 1..75: mol_type = other DNA
tactaatgtcattgattatggaaaaaacgaactgtattttaaatttaactcagcgattcatgactttgataatga

SEQ ID NO: 852660 - DNA, 75 bp, synthetic construct
  source 1..75: mol_type = other DNA
agacatataatagatgagcataacaaatcaatagatagggtgattgattgtttacaagaaattgaattttttttt

SEQ ID NO: 852661 - DNA, 75 bp, synthetic construct
  source 1..75: mol_type = other DNA
aaaccttccttttgccaaagttggcgatgagctgattatttttggcagtgagcgcgcatttggtgagtgggaagg

SEQ ID NO: 852662 - DNA, 75 bp, synthetic construct
  source 1..75: mol_type = other DNA
ttatgctcgatggcggggatttctcaccgccgaaaaccttcagcggaaaattgatctgccgcgactcactcattg

SEQ ID NO: 852663 - DNA, 75 bp, synthetic construct
  source 1..75: mol_type = other DNA
ttgttcattttttatatttgtgaagccggtcacctgaatattttttcccaccgattgcgcaaggacaatcggcaa

SEQ ID NO: 852664 - DNA, 75 bp, synthetic construct
  source 1..75: mol_type = other DNA
aacgtgaagaattcattaccgacagattttccggagaggattctcccttggtttatgttggtgcgcataatgtat

SEQ ID NO: 852665 - DNA, 75 bp, synthetic construct
  source 1..75: mol_type = other DNA
aatgtgcgcgcgttagcggtcgaacgttttgacaggcgttggaatgctgagcgaacggttttacttcgcttgcca

SEQ ID NO: 852666 - DNA, 75 bp, synthetic construct
  source 1..75: mol_type = other DNA
cttcgtgatgttcttatttctcacggactcatggaagaagaaagcacaacatgccgctatgcctttctttgctat

SEQ ID NO: 852667 - DNA, 75 bp, synthetic construct
  source 1..75: mol_type = other DNA
ttctgattattacccaacaggttgctcttcaattgctgattatggttttctctccaaaatccagagagacctcct

SEQ ID NO: 852668 - DNA, 75 bp, synthetic construct
  source 1..75: mol_type = other DNA
gttcctcctgaggtggctttgggggctttggctggggcggtaatttttgttacctcggccatagaatatcctgtt

SEQ ID NO: 852669 - DNA, 75 bp, synthetic construct
  source 1..75: mol_type = other DNA
ctttaaatcagtggcttagtgcgggttctcttgctgcggtgatagcaggggttcctccagaggtggctttgggag

SEQ ID NO: 852670 - DNA, 75 bp, synthetic construct
  source 1..75: mol_type = other DNA
ttcgtgtcggcaatcgtcgcagtacgtattggtatctggctctatcaccgttccgacaatccacgcgatttaatc

SEQ ID NO: 852671 - DNA, 75 bp, synthetic construct
  source 1..75: mol_type = other DNA
gttgagattgtgaacctgcagccgcccgcaattatcgccgcatggcagcggggagatattgatggtgcttatgtc

SEQ ID NO: 852672 - DNA, 75 bp, synthetic construct
  source 1..75: mol_type = other DNA
caacacctttgctaaagaaagcggagcaaccgtggactggcgtaagtttgacagtggagccagcatcgtgcgggc

SEQ ID NO: 852673 - DNA, 75 bp, synthetic construct
  source 1..75: mol_type = other DNA
gtattggtatatggctctaccatcgttcagataatccacgtgagttaattccggggagaaaagacaatggtaact

SEQ ID NO: 852674 - DNA, 75 bp, synthetic construct
  source 1..75: mol_type = other DNA
ttctctggcggcggtgatagcaggagttcctcctgaggttgctttgggtgctttggctggagcggtaatttttgt

SEQ ID NO: 852675 - DNA, 75 bp, synthetic construct
  source 1..75: mol_type = other DNA
agggatcgtcttctctgctggcgcattcgtgtcagcaatagtcgcagtgcgcattggcatctggctctatcaccg

SEQ ID NO: 852676 - DNA, 75 bp, synthetic construct
  source 1..75: mol_type = other DNA
agggattgttttctctgctggcgcattcgtgtcagcaatcgtcgcagtacgaattggcatctggctctatcaccg

SEQ ID NO: 852677 - DNA, 75 bp, synthetic construct
  source 1..75: mol_type = other DNA
tctgctggcgcattcgtgtcagcaatcgtagcagtacgtattggcatctggctctatcaccgttccgacaatcca

SEQ ID NO: 852678 - DNA, 75 bp, synthetic construct
  source 1..75: mol_type = other DNA
cgtcgccgggtgctcctgtcgatgctcagctttctttgcggccttctcttttacaaaccagcagcatcaattctt

SEQ ID NO: 852679 - DNA, 75 bp, synthetic construct
  source 1..75: mol_type = other DNA
ctttggctggagcggtaatttttgttacctctgcagtagagtaccccatccgtcgccgggtgctcctgtcgatgc

SEQ ID NO: 852680 - DNA, 75 bp, synthetic construct
  source 1..75: mol_type = other DNA
ggagataagagagatttaccaactgctgaagcggaaatatctcgcgtgcaggcgtctatcatcaaatggtatgcg

SEQ ID NO: 852681 - DNA, 75 bp, synthetic construct
  source 1..75: mol_type = other DNA
aagcattgtgatttctgtaatgttttgccttgtcaaaaaaatggtagatgaataccaacaaaactctgggcagta

SEQ ID NO: 852682 - DNA, 75 bp, synthetic construct
  source 1..75: mol_type = other DNA
tcagaataccataacggcaggcaagttctcgatgagatacaaacaccttcagcaattaacagtgagctttataca

SEQ ID NO: 852683 - DNA, 75 bp, synthetic construct
  source 1..75: mol_type = other DNA
atgtcgctgaggaaattactaacgctttttatcgtcttaatggcactgggaaccacctcgtcctgggcctcctgt

SEQ ID NO: 852684 - DNA, 75 bp, synthetic construct
  source 1..75: mol_type = other DNA
ctgctaagggcgttggtgtgcaggttataaaggacaacactcctttggaattcaacaaaaaatataatattggta

SEQ ID NO: 852685 - DNA, 75 bp, synthetic construct
  source 1..75: mol_type = other DNA
acaattattactctccctggcacgacaatgggcaacgatcagtttatccgtcaattttaacatgcaatggactgc

SEQ ID NO: 852686 - DNA, 75 bp, synthetic construct
  source 1..75: mol_type = other DNA
tgttagtctcagtagtcggaggtgagtactggtggatagtcattatacccgttggcgcgcatatcagtttttcgc

SEQ ID NO: 852687 - DNA, 75 bp, synthetic construct
  source 1..75: mol_type = other DNA
ctcctctttatgcttctcttactgggtattgtcgccggttatcaggcttatttatataaacagcttaatcccggc

SEQ ID NO: 852688 - DNA, 75 bp, synthetic construct
  source 1..75: mol_type = other DNA
actattaatactggctggctggataatcacactacatctggcagactatcaatttcgccagatgggagcgggctg

SEQ ID NO: 852689 - DNA, 75 bp, synthetic construct
  source 1..75: mol_type = other DNA
tacgatgcgcaaatgttcccgttggggaaatgtatctggaacggcgcacaaaaggacgtgcgccggattgaatcc

SEQ ID NO: 852690 - DNA, 75 bp, synthetic construct
  source 1..75: mol_type = other DNA
aagcatgttttcgggggtgtttttgggattgactatatgtactaataacataaagcactggcgtacggataacgg

SEQ ID NO: 852691 - DNA, 75 bp, synthetic construct
  source 1..75: mol_type = other DNA
ataaccggattgttaaaggtgatgccgatattatttttgtggcgcaaccctccggtgggcagaaaaaacgcgctg

SEQ ID NO: 852692 - DNA, 75 bp, synthetic construct
  source 1..75: mol_type = other DNA
ggaatcggcatgcgtttcagccgcggcggcgcgacggtgaatatcgtctatcccgacgtctattcgtcccgggta

SEQ ID NO: 852693 - DNA, 75 bp, synthetic construct
  source 1..75: mol_type = other DNA
tatcccgacactggtggataacgtgctgacctgcatcaccccaggctccagcgtcgatattctggtcactgacca

SEQ ID NO: 852694 - DNA, 75 bp, synthetic construct
  source 1..75: mol_type = other DNA
gctgcggttctctcggctatgcgatggtcgatgccgacaacgcaaaacaagtcgtgatgctcaccgaagaactgc

SEQ ID NO: 852695 - DNA, 75 bp, synthetic construct
  source 1..75: mol_type = other DNA
ggtactgagcgcgctggaaattgacacccagttcaacgttaacgtgctgactggctctgacggcgtactgcgtgg

SEQ ID NO: 852696 - DNA, 75 bp, synthetic construct
  source 1..75: mol_type = other DNA
gatagaggttttcttactggcctcaaaactgggcagctccgaggcattggttgtgaagaaaaccatcagcaagcc

SEQ ID NO: 852697 - DNA, 75 bp, synthetic construct
  source 1..75: mol_type = other DNA
gtaagtttgacagcggagccagcatcgtgcgggcgctggcttctggcgacgtgcaaatcggcaacctcggttcca

SEQ ID NO: 852698 - DNA, 75 bp, synthetic construct
  source 1..75: mol_type = other DNA
gacccgtatgaccactaacccgcgcgaactgctgattgcccgcagcgcagcagatgtgattgtcaactctggcta

SEQ ID NO: 852699 - DNA, 75 bp, synthetic construct
  source 1..75: mol_type = other DNA
ttcgcttcatgatcatcactggcgttcgtccgattaatgtccataacctgcgctgggactacgttcacgaggagg

SEQ ID NO: 852700 - DNA, 75 bp, synthetic construct
  source 1..75: mol_type = other DNA
ttgaagcgcgaagctttcgaggctcacgagcggagcatacttgcgcaggtggcattgctacggcggcgaggttaa

SEQ ID NO: 852701 - DNA, 75 bp, synthetic construct
  source 1..75: mol_type = other DNA
aaggggtcggcaccaccgccggcgggaaggattttaatatcgacctgcagtgcagcggcggcctgagtgaaacgg

SEQ ID NO: 852702 - DNA, 75 bp, synthetic construct
  source 1..75: mol_type = other DNA
aaacctaccaggctgaaaaagcgcgcgatcgcaaactgtgcgccaacctggaagaagcgattcgtcgctctggtt

SEQ ID NO: 852703 - DNA, 75 bp, synthetic construct
  source 1..75: mol_type = other DNA
atgaaattaaaataccttctgttatgtgcaactctgtctgtcgcctttacctcctctgcggtcattgcatctgaa

SEQ ID NO: 852704 - DNA, 75 bp, synthetic construct
  source 1..75: mol_type = other DNA
ctggcatattgtgagctggccggagggggatttacgcaccatccagccgcgcggagaactgccactgctggagcg

SEQ ID NO: 852705 - DNA, 75 bp, synthetic construct
  source 1..75: mol_type = other DNA
aataccgtaatacaaacaacgcaataggttacaccttccgttattacgcaacacaaatgggtgatgctgccaact

SEQ ID NO: 852706 - DNA, 75 bp, synthetic construct
  source 1..75: mol_type = other DNA
acgcgatgatttacctgggcgataacactgttttgcatcatgacaatgccggactgttaagccgccgcgagcaaa

SEQ ID NO: 852707 - DNA, 75 bp, synthetic construct
  source 1..75: mol_type = other DNA
aacattcagataatattaattctcttgattatcatcgaggagataaaaaggcagaagcaaatttggtggtatcgt

SEQ ID NO: 852708 - DNA, 75 bp, synthetic construct
  source 1..75: mol_type = other DNA
gttttccataaaggcaatcagtgggcaggtaatatcaccgactgtacggtgattgtgaccaaaaaagctgcttcc

SEQ ID NO: 852709 - DNA, 75 bp, synthetic construct
  source 1..75: mol_type = other DNA
ttgtcgatgggcgaattattcgcgctttgcaggccaacttgttcgcggttctgcgtgacattctcttcgtttacg

SEQ ID NO: 852710 - DNA, 75 bp, synthetic construct
  source 1..75: mol_type = other DNA
tcggagaaaagtggaagtttagataaaatgttagcagaaatagatgttgcttttgcatcaacttataccgcgctt

SEQ ID NO: 852711 - DNA, 75 bp, synthetic construct
  source 1..75: mol_type = other DNA
attgccggtattaaggtgaataaaggtactgaaaattttgaagtcgagccttttgaacaggatgccggactgaat

SEQ ID NO: 852712 - DNA, 75 bp, synthetic construct
  source 1..75: mol_type = other DNA
agttctcccggaattcagcctgaatgttgcgcaggaaaataccccaatcaatgtaccctacaaagaacgcaatga

SEQ ID NO: 852713 - DNA, 75 bp, synthetic construct
  source 1..75: mol_type = other DNA
tgatttctggaagcgtaacagcgaatttcattcttcattcagtcagaactggaatgaggctcaggacaaaattaa

SEQ ID NO: 852714 - DNA, 75 bp, synthetic construct
  source 1..75: mol_type = other DNA
gaagcagaaaaagcagccttaaagcaaggtattatcaagcctgatgatgagattagcgtgctcccaccaagagaa

SEQ ID NO: 852715 - DNA, 75 bp, synthetic construct
  source 1..75: mol_type = other DNA
cgatccgggaagtggtaataacccgggaggtacaagatacacgggttatggttttgaagttcgcaaaaacggtgt

SEQ ID NO: 852716 - DNA, 75 bp, synthetic construct
  source 1..75: mol_type = other DNA
ctggccgtcccttacaaagatcgtgcagaagctaaagcagctggcgctaaatgggacaaagagaaaaaaacctgg

SEQ ID NO: 852717 - DNA, 75 bp, synthetic construct
  source 1..75: mol_type = other DNA
aaagcgtgttcaaaagcagctcgctaaactcaatgaacctcagcagcaaactgcttacctgaagaagaaagggct

SEQ ID NO: 852718 - DNA, 75 bp, synthetic construct
  source 1..75: mol_type = other DNA
agcatcaggcacactgcaataaggaaaaacaaaatggctaaacgtgttacaaaattaaaggccgcagccgaggct

SEQ ID NO: 852719 - DNA, 75 bp, synthetic construct
  source 1..75: mol_type = other DNA
ttcatcgtcaatgtagataacccggttaattccctgaccgaacaacaagtgcgtgacatcttcagtggtgcaatt

SEQ ID NO: 852720 - DNA, 75 bp, synthetic construct
  source 1..75: mol_type = other DNA
ggtgggcagaaaaaacgcgcggaggaatcgggcgtcactttgatttacacgccttttgcccgtgaagcgtttgtt

SEQ ID NO: 852721 - DNA, 75 bp, synthetic construct
  source 1..75: mol_type = other DNA
taaaattattagcgattaacggcattgcgccgactgcggaaaacattcgcaacggcaaatatccgtacatcgtcg

SEQ ID NO: 852722 - DNA, 75 bp, synthetic construct
  source 1..75: mol_type = other DNA
atttaccttctgcttaacatttttatgttggcgctgggtgcgataatgctatttttctcggggcgagtatgggcg

SEQ ID NO: 852723 - DNA, 75 bp, synthetic construct
  source 1..75: mol_type = other DNA
cggttaattccctgactgaacaacaggtgcgtgacattttcagtggtgcaattaccaactggcgtactgttggcg

SEQ ID NO: 852724 - DNA, 75 bp, synthetic construct
  source 1..75: mol_type = other DNA
atggattttgacctcgctggtaatgactttttcggcatccccattctggcgcagtttttggcggcggttattgcc

SEQ ID NO: 852725 - DNA, 75 bp, synthetic construct
  source 1..75: mol_type = other DNA
aggccgcagcagaggcggcaccgcagacccgcgaagaagtcagccgcgatatccgcaccctgggcgatattcagc

SEQ ID NO: 852726 - DNA, 75 bp, synthetic construct
  source 1..75: mol_type = other DNA
actggaaccgaaagcagtcgcaggtgtcgccggaattacagttaaatcaggcattgaagatttttctattattcc

SEQ ID NO: 852727 - DNA, 75 bp, synthetic construct
  source 1..75: mol_type = other DNA
attacggagaaatacgcctcacagattgcgccgcttaaaaccagtattgaaaccctttcaaaaggtgttcaggga

SEQ ID NO: 852728 - DNA, 75 bp, synthetic construct
  source 1..75: mol_type = other DNA
tggctacaccttccgctattacgccacgcaaatgaacgctgacaagaatatcaaattgttagcgattaacggtat

SEQ ID NO: 852729 - DNA, 75 bp, synthetic construct
  source 1..75: mol_type = other DNA
gcggcgggcggctatgctgccgggcgttttttgcagcctgcgatcgggttcgggaaagagatgtcccgcgttcag

SEQ ID NO: 852730 - DNA, 75 bp, synthetic construct
  source 1..75: mol_type = other DNA
ggaattgcagggatatccattaaatcagatgttgaggattttgaaataatcccatttgaacaaactgtaactgat

SEQ ID NO: 852731 - DNA, 75 bp, synthetic construct
  source 1..75: mol_type = other DNA
attggtcacctgcgttggctgcgtaatatcgccgtagcattaggcaatgccccttgggatgaaacgattttgaca

SEQ ID NO: 852732 - DNA, 75 bp, synthetic construct
  source 1..75: mol_type = other DNA
atatcgccgtagcattaggcaatgccccttgggatgaaacgattttgacagcgctggaaagtcgtaaaggtgagc

SEQ ID NO: 852733 - DNA, 75 bp, synthetic construct
  source 1..75: mol_type = other DNA
atgcctgttaccaccttaagtatcccaagtatatctcaattatctcctgcaggagtacagtctttgcaggatgca

SEQ ID NO: 852734 - DNA, 75 bp, synthetic construct
  source 1..75: mol_type = other DNA
tgcgttggctgcgtaatatcgccgtagcattaggcaatgccccttgggatgaaacgattttgacagcgctggaaa

SEQ ID NO: 852735 - DNA, 75 bp, synthetic construct
  source 1..75: mol_type = other DNA
atgcggtaaatgcgtcgcctgtatgacgatttgcccgaccggcgccatcgtcgagccatataccgtagatgctcg

SEQ ID NO: 852736 - DNA, 75 bp, synthetic construct
  source 1..75: mol_type = other DNA
atggcactcccccgtattactcaaaaagagatgactgagcgtgaacagcgcgaactgaagacgctgctggatcgc

SEQ ID NO: 852737 - DNA, 75 bp, synthetic construct
  source 1..75: mol_type = other DNA
tgccacaaaaggatgttctgttttatcgactgtagataatgaccttggcaataaatcattaaattacgacccttt

SEQ ID NO: 852738 - DNA, 75 bp, synthetic construct
  source 1..75: mol_type = other DNA
cgctcaaccgtatctatgagagcgttatctgggatttccgcctcagccgcgcgctggtcgccgcctgctgcggcg

SEQ ID NO: 852739 - DNA, 75 bp, synthetic construct
  source 1..75: mol_type = other DNA
cgtgatcaccgatgtgactgcaaccagcgagcagactgacagtaccggcaacgtgctggctgtcagtgccaccgt

SEQ ID NO: 852740 - DNA, 75 bp, synthetic construct
  source 1..75: mol_type = other DNA
ggattttcagttgaaccggtgagaggaggcttactggataggctattggggcgtgagcatcgaatggagagaagg

SEQ ID NO: 852741 - DNA, 75 bp, synthetic construct
  source 1..75: mol_type = other DNA
atctggatgggcgtcgatcataatgtgcacacggaagccaatggctcacgtattgagaatgacgcaaataacaac

SEQ ID NO: 852742 - DNA, 75 bp, synthetic construct
  source 1..75: mol_type = other DNA
caccaagtatccactgaccggtctctttctggtgaatattccttcgggcaacttgcccggactcttttcctgggc

SEQ ID NO: 852743 - DNA, 75 bp, synthetic construct
  source 1..75: mol_type = other DNA
attggtcacttacgctggctgcgaaatatcgccgtagcactaggaaatgcgccctgggatgaagcgattctggcg

SEQ ID NO: 852744 - DNA, 75 bp, synthetic construct
  source 1..75: mol_type = other DNA
gccatgccacggatatcgccatcattatgggactggcaggaaacagcccgcaggatgttgttattgatgagatcc

SEQ ID NO: 852745 - DNA, 75 bp, synthetic construct
  source 1..75: mol_type = other DNA
ctaacgatccgatgaatgtcatcgactggatcaacatgtacgcgctggcggttagtgaagaaaacgcagctggcg

SEQ ID NO: 852746 - DNA, 75 bp, synthetic construct
  source 1..75: mol_type = other DNA
tttattgaaaatgatggtttgacgatagagaggttgattaatatcgatatagataatagctctaatgggggtatt

SEQ ID NO: 852747 - DNA, 75 bp, synthetic construct
  source 1..75: mol_type = other DNA
gttgcgtcgtcagctggtttccagcgataacatctctaacgatccgatgaatgtcatcgactggatcaacatgta

SEQ ID NO: 852748 - DNA, 75 bp, synthetic construct
  source 1..75: mol_type = other DNA
ggcggctggcgctattggcgcgctgtataaaatgaatgcctccatctctggtgcggaagtggggtgtcagggcga

SEQ ID NO: 852749 - DNA, 75 bp, synthetic construct
  source 1..75: mol_type = other DNA
ggcaggaagagctattaagcaaaacctattactctgtcggcggcgggtttatcgttgaagaagaacacttcggcc

SEQ ID NO: 852750 - DNA, 75 bp, synthetic construct
  source 1..75: mol_type = other DNA
aattattaaggattttattaaatcaaaaaataaagattacaaagatttttatgacatcccggaatgtaccaccag

SEQ ID NO: 852751 - DNA, 75 bp, synthetic construct
  source 1..75: mol_type = other DNA
gattttcgccaaagtgcgtcagcggcctagcgaaagcgcagttaagcagtgtgggcgaaggagacaaaaagtcgt

SEQ ID NO: 852752 - DNA, 75 bp, synthetic construct
  source 1..75: mol_type = other DNA
atgtgctcactgaatccgttctccgaggattttcgccaacagtgcgtcagcggcctggcgaaagcgcagttaagc

SEQ ID NO: 852753 - DNA, 75 bp, synthetic construct
  source 1..75: mol_type = other DNA
agagaaaaaatatggtgccttaacacaaccgtattttattgttgtttttcaccctgaaacattaagccaaacatc

SEQ ID NO: 852754 - DNA, 75 bp, synthetic construct
  source 1..75: mol_type = other DNA
cgtcgatgccaaaccggcagaatcagcagcaatcaccattctcaacaagaacgcagcacctgctaacctgttctg

SEQ ID NO: 852755 - DNA, 75 bp, synthetic construct
  source 1..75: mol_type = other DNA
ttttattggcagtaacgctgacactggttctgatataattcagaggaaagtaaaatatttttgcaaagagtataa

SEQ ID NO: 852756 - DNA, 75 bp, synthetic construct
  source 1..75: mol_type = other DNA
gcacaccgaagccaatggctcacgtattgagaatgacgcaaataacaacatccagacccgacttggtttccgcac

SEQ ID NO: 852757 - DNA, 75 bp, synthetic construct
  source 1..75: mol_type = other DNA
tgatcctcgcgcgtgggatgtagcaagcctgatggattttgctgtgccggtggtggcgtgtttacttgtatttat

SEQ ID NO: 852758 - DNA, 75 bp, synthetic construct
  source 1..75: mol_type = other DNA
ggggatctttatacgcgcaatctgcaacaacctggttctgcatctggctggcacaatattactttgtcattaacc

SEQ ID NO: 852759 - DNA, 75 bp, synthetic construct
  source 1..75: mol_type = other DNA
gcgtgacgataccggagaagtgcaggccgtggagcttgtggtgcgtggacgtcacaaagaagtggattccggcga

SEQ ID NO: 852760 - DNA, 75 bp, synthetic construct
  source 1..75: mol_type = other DNA
ctggggcttgatgacagtgcgctggacacagaatttaccattggtggtactgaactgctgctgtttaagcagatg

SEQ ID NO: 852761 - DNA, 75 bp, synthetic construct
  source 1..75: mol_type = other DNA
ctcggtctcgacgatgatgcgttaaccgtcgaatggtctgtcggtggcctgcctgatgtggcgctgtgggcgcag

SEQ ID NO: 852762 - DNA, 75 bp, synthetic construct
  source 1..75: mol_type = other DNA
cttggtctcgacgatgatgcgctcaccgtcgaatggtctgtcggtggcctgcctgatgtggcgctatgggcgcag

SEQ ID NO: 852763 - DNA, 75 bp, synthetic construct
  source 1..75: mol_type = other DNA
ttggctacagccgctggaaaaacgatgagtttctcgcggctattgcccactggttttccacccagcattacaccg

SEQ ID NO: 852764 - DNA, 75 bp, synthetic construct
  source 1..75: mol_type = other DNA
ctggggcttgatgacagtgctctggacacagagttttccattggtggtactgaactgctgctgtttaaacagatg

SEQ ID NO: 852765 - DNA, 75 bp, synthetic construct
  source 1..75: mol_type = other DNA
tcgcagtttatctgggatttcaaatgttttagcggtatcgaccatatcgaaaaccctgatgaagatggcatattt

SEQ ID NO: 852766 - DNA, 75 bp, synthetic construct
  source 1..75: mol_type = other DNA
gtgctgtccagttagggcagaaacagacgcagaaaaacagcggcggaatgaccgagctgtatctggactccggaa

SEQ ID NO: 852767 - DNA, 75 bp, synthetic construct
  source 1..75: mol_type = other DNA
gatgaaatccatatggatatggtatggggcgagcaaccgcatattccctggagtaacgtggcgcgcggaaactgg

SEQ ID NO: 852768 - DNA, 75 bp, synthetic construct
  source 1..75: mol_type = other DNA
atgccggggtatacctacggtgaagaaggtcgtggttttgtccgtctcaatgccggctgcccacgttcgaaactg

SEQ ID NO: 852769 - DNA, 75 bp, synthetic construct
  source 1..75: mol_type = other DNA
tcaacggcgctatcgccaacgaaaccaccctgctctgcaatgctcgcgatctgcacgcattccttggggtaggga

SEQ ID NO: 852770 - DNA, 75 bp, synthetic construct
  source 1..75: mol_type = other DNA
cgccaccacgaacaaaagagcaagtattgaaagaagcccgtgatcaaatcgatcgcgggttttttattgctggta

SEQ ID NO: 852771 - DNA, 75 bp, synthetic construct
  source 1..75: mol_type = other DNA
aattggctggttaattcttaatgaaaactacacgcctgttcttgctgtagactttgccactgctgacgatgaaat

SEQ ID NO: 852772 - DNA, 75 bp, synthetic construct
  source 1..75: mol_type = other DNA
ggggtaaacccggcctgcagttcgtcggcgacaggctggacgaaatccagataagcctggtcttccatcagcatt

SEQ ID NO: 852773 - DNA, 75 bp, synthetic construct
  source 1..75: mol_type = other DNA
caatacgcacgaagctcccgggtgtcggggcggtctccggtgccataccttcaccttcaggggtggcgcagttca

SEQ ID NO: 852774 - DNA, 75 bp, synthetic construct
  source 1..75: mol_type = other DNA
ggatatgcattggcctgaatatgtcgatccacgtatgcgcaaatatcgcgggcgtatgggccaggttattaacga

SEQ ID NO: 852775 - DNA, 75 bp, synthetic construct
  source 1..75: mol_type = other DNA
tgatatgcagtggcctgaatatgttgatccacgaatgcgcaaatatcgcgggcgtatgggcaaggttattaacga

SEQ ID NO: 852776 - DNA, 75 bp, synthetic construct
  source 1..75: mol_type = other DNA
ggattcgaaactggtttaccagttgcatgaccgcttcagcgacagcatgtgcattctgccgaccatagaagaccg

SEQ ID NO: 852777 - DNA, 75 bp, synthetic construct
  source 1..75: mol_type = other DNA
ccgccagatccgccgatacttcatcgagtgcgaacgcaaactgcaccagcaatcctccacgatactggcgccaca

SEQ ID NO: 852778 - DNA, 75 bp, synthetic construct
  source 1..75: mol_type = other DNA
gtttaccatcaccggagcaaatacaacccgtacagagcttacgcatgggacggagagaaaagcgtttacgtcggg

SEQ ID NO: 852779 - DNA, 75 bp, synthetic construct
  source 1..75: mol_type = other DNA
gctggggtcggcaacaaccgtgctgacccacatttcaccgacattaagtaaaatggccgccggaattatggtaag

SEQ ID NO: 852780 - DNA, 75 bp, synthetic construct
  source 1..75: mol_type = other DNA
atctactgctaagcatatcaatttttttcagcacgtcccagtgctcgaacaatggttaaaaaaggagtgcactgc

SEQ ID NO: 852781 - DNA, 75 bp, synthetic construct
  source 1..75: mol_type = other DNA
gacgactaccgaatccgatcaaatattgcaaatgaagcctgctgtagatattcttcatgtactatctccatcagc

SEQ ID NO: 852782 - DNA, 75 bp, synthetic construct
  source 1..75: mol_type = other DNA
tgttcgccgggtgctggaagagagtctgcctgcaaatttgaccttaatgatgaccgctacgggtgaatatcgtct

SEQ ID NO: 852783 - DNA, 75 bp, synthetic construct
  source 1..75: mol_type = other DNA
gattggggcattcatcataggaatgggattcgcctggttcagcaggatgacgaacattgatccagtgtggaaagt

SEQ ID NO: 852784 - DNA, 75 bp, synthetic construct
  source 1..75: mol_type = other DNA
tatcatggcggtgcttttatcgtcctagactcgcttgatactattgcgaaaaatgaaatcgcttatgcgcttgaa

SEQ ID NO: 852785 - DNA, 75 bp, synthetic construct
  source 1..75: mol_type = other DNA
tgcggttgatttcagcgatcataaagaggcatttgtgaacgtgaatacgccagaggagcttgcccgatggcaaga

SEQ ID NO: 852786 - DNA, 75 bp, synthetic construct
  source 1..75: mol_type = other DNA
tgagtggtttttgttttgcccgtgcgatacgccttacattccccctgatttagcagcccggcttaatcatcagcg

SEQ ID NO: 852787 - DNA, 75 bp, synthetic construct
  source 1..75: mol_type = other DNA
tataagcaggaatttcagggtattgagtccgctggtaatgctattactcctgaacaacgcgaaattcagcagctt

SEQ ID NO: 852788 - DNA, 75 bp, synthetic construct
  source 1..75: mol_type = other DNA
atgactgacaaatcattaaagaaattatcctcatccaagaaaaaacaacgcaaaaatgcggtaaacgaacatgaa

SEQ ID NO: 852789 - DNA, 75 bp, synthetic construct
  source 1..75: mol_type = other DNA
tgcattcattgggctgattgctggcgttgtttccgcattcgtgaagtggggggctgaagttccattgccgccacg

SEQ ID NO: 852790 - DNA, 75 bp, synthetic construct
  source 1..75: mol_type = other DNA
tcaacgcacggcaaaaagctgggttaacacaagatgcgttggctaaaaaagctggggtcaccagagttgcaatca

SEQ ID NO: 852791 - DNA, 75 bp, synthetic construct
  source 1..75: mol_type = other DNA
cggcaatcaccttaaaaatcgacccgtcggtcgtgctgtcaacgcgccagtatgtcgacgacaaggttatcgagg

SEQ ID NO: 852792 - DNA, 75 bp, synthetic construct
  source 1..75: mol_type = other DNA
ctcattaaccagacccgcatcgcgccgattaattcactgagcgtggatgctaacgacgccggtcagattattgcc

SEQ ID NO: 852793 - DNA, 75 bp, synthetic construct
  source 1..75: mol_type = other DNA
tgatccacgtgcatgggatgtggcaagcctgatggattttgctgtgccggtggtggcgtgtctgctgatctggat

SEQ ID NO: 852794 - DNA, 75 bp, synthetic construct
  source 1..75: mol_type = other DNA
acaggtgcgctgaccggtaaggataaccgtattctgcttctttcccagcctacgcgaccttcaggctatttctac

SEQ ID NO: 852795 - DNA, 75 bp, synthetic construct
  source 1..75: mol_type = other DNA
atggctacaccgcttattcgtgtcatgaacggacacatctacaaaataccaaatcgtcgtaagcgtaggcctgag

SEQ ID NO: 852796 - DNA, 75 bp, synthetic construct
  source 1..75: mol_type = other DNA
cgaaactggcggaaaatctgcgccgggcagtggaaggggattgtacgtggccgcagtacgatcgacaaaagcatg

SEQ ID NO: 852797 - DNA, 75 bp, synthetic construct
  source 1..75: mol_type = other DNA
aaaccgttgctgcgtatgctggcggccttacagacggtaaatccgcagcggcgtacggtggtttttctttgcgct

SEQ ID NO: 852798 - DNA, 75 bp, synthetic construct
  source 1..75: mol_type = other DNA
aagtgtgcctgatgctgggttcccgcgatgatgagagcgcccgtcgggcagacaacatcctaagaatgggcgggc

SEQ ID NO: 852799 - DNA, 75 bp, synthetic construct
  source 1..75: mol_type = other DNA
cgatcaaaccattacggtattcgtggtggcggtcggtaagcgcgagcgttctgccgcttacgatgcggccgataa

SEQ ID NO: 852800 - DNA, 75 bp, synthetic construct
  source 1..75: mol_type = other DNA
agtaccaccattatcgcttcagaaaaaatttgaactgatatacaataaatttaattcattacttagtgataagta

SEQ ID NO: 852801 - DNA, 75 bp, synthetic construct
  source 1..75: mol_type = other DNA
gccttttatgaccgtaccgacgggccgaatgttcgccgggtgctggaagagagtctgcctgcaaatttgacctta

SEQ ID NO: 852802 - DNA, 75 bp, synthetic construct
  source 1..75: mol_type = other DNA
ccttacagacggtaaatccgcagcggcgtacggtggtttttctttgcgctccgcctggtacaggaaaatcgactc

SEQ ID NO: 852803 - DNA, 75 bp, synthetic construct
  source 1..75: mol_type = other DNA
agaagtggcgggcgttggcatctttctgcgatttttctgtttttattcatgcccccgttcaaattctgcgggaac

SEQ ID NO: 852804 - DNA, 75 bp, synthetic construct
  source 1..75: mol_type = other DNA
gtgaaaattgaattaacggtgaatgggctgaaggtacaggcgcagtaccatgatgatgagataaaaaatgtacat

SEQ ID NO: 852805 - DNA, 75 bp, synthetic construct
  source 1..75: mol_type = other DNA
taccgcaccactcgtcatcgtcgaaggaaactggttgttgctggacgacgagaagtggtgccagcttgcgcaatt

SEQ ID NO: 852806 - DNA, 75 bp, synthetic construct
  source 1..75: mol_type = other DNA
atggctacaccgcttattcgtgtcatgagcggacacatctacagagtaccaaatcgtcgtaagcgtaagcctgag

SEQ ID NO: 852807 - DNA, 75 bp, synthetic construct
  source 1..75: mol_type = other DNA
gaaatgttcgggcatggcaagcgaatgaatatgccgtggtggggcggttttgatccgcgcgcgtgggatgtgaca

SEQ ID NO: 852808 - DNA, 75 bp, synthetic construct
  source 1..75: mol_type = other DNA
gcatccccgaaacgccgctgaccgaagatcagatcattatcttccaggtgccgatccccgaaccgctgcgcttta

SEQ ID NO: 852809 - DNA, 75 bp, synthetic construct
  source 1..75: mol_type = other DNA
acttcttcaagcgcgtgaccggggtaaacaccactgaacgtacggacaatgcgacgcttatccagacgcgccatc

SEQ ID NO: 852810 - DNA, 75 bp, synthetic construct
  source 1..75: mol_type = other DNA
attaactttggtacaccacaacaacagtggctcgacgctatcagcgttgccgaagcgcaaacgctgttgcgggaa

SEQ ID NO: 852811 - DNA, 75 bp, synthetic construct
  source 1..75: mol_type = other DNA
ttgctacaagggagtccttagccaggccgcagcgctgatacaaaaaaacatcccacaccccgagtgggtttttac

SEQ ID NO: 852812 - DNA, 75 bp, synthetic construct
  source 1..75: mol_type = other DNA
tgtctgtacggattatggtgacagggttgttttccgtaatcaccatgaccgcaatgcgctggcagataaactgga

SEQ ID NO: 852813 - DNA, 75 bp, synthetic construct
  source 1..75: mol_type = other DNA
accacctacgcctatccggtgaaggtgaacgggcgctacgtaatggacccgtcgccgatcccgaaattcgataac

SEQ ID NO: 852814 - DNA, 75 bp, synthetic construct
  source 1..75: mol_type = other DNA
gtgagatataccgccacgcctgctttcagggcgaacagcggcccggtgttattctcccgccgcccgcctggatgg

SEQ ID NO: 852815 - DNA, 75 bp, synthetic construct
  source 1..75: mol_type = other DNA
gctcaagagcagagtatgggataatgaagaggctgttaagaaaacttaaggataacgaacatattgaactttcaa

SEQ ID NO: 852816 - DNA, 75 bp, synthetic construct
  source 1..75: mol_type = other DNA
gaactgctgaaaatgtgtgattacaacggcctgtctatttctggcctgatgatgcacaacgagctggcgctgcgc

SEQ ID NO: 852817 - DNA, 75 bp, synthetic construct
  source 1..75: mol_type = other DNA
gctcgccgtggcataaacaaaccggtaattgccctggtgacacaaacgcgagttagcccacatgacgatgctttc

SEQ ID NO: 852818 - DNA, 75 bp, synthetic construct
  source 1..75: mol_type = other DNA
ggtgcggatctgctggtgatacccaccggagtagaaaaagtggcgattaactttggtacaccacaacaacagtgg

SEQ ID NO: 852819 - DNA, 75 bp, synthetic construct
  source 1..75: mol_type = other DNA
gtttggtgtcggcagtatgcaacccaaagtggaagccattgttgatttcatcaatgccagccagcaacaaggcaa

SEQ ID NO: 852820 - DNA, 75 bp, synthetic construct
  source 1..75: mol_type = other DNA
atgactttttggggtatctaattccaggtggattattcctgtttatcctttttttgttttctattgaaattaacc

SEQ ID NO: 852821 - DNA, 75 bp, synthetic construct
  source 1..75: mol_type = other DNA
atggcggtaccgcggtaatcatcaatggcgataataccaagctaaacactgcgggcgactcgaccatcaccaatg

SEQ ID NO: 852822 - DNA, 75 bp, synthetic construct
  source 1..75: mol_type = other DNA
aagtttatcgacagcagagaagcattatccaaagggtttactgttgattattccaatggcttcggtgatgcaatg

SEQ ID NO: 852823 - DNA, 75 bp, synthetic construct
  source 1..75: mol_type = other DNA
agactatttcttcgagtcatctgtcggggtgaatgtcacgggtaacaataatacagtatctctaaatggcgaatt

SEQ ID NO: 852824 - DNA, 75 bp, synthetic construct
  source 1..75: mol_type = other DNA
agagaagggagtgaaaatggaactgggcattatggtgtgcatcgtgttgttactctccgtggcggcggcgtggat

SEQ ID NO: 852825 - DNA, 75 bp, synthetic construct
  source 1..75: mol_type = other DNA
ttcgggtgatggtaatactatcgaaatagcgggcagtattctggttgataaagatcagaaagccgataatgcgca

SEQ ID NO: 852826 - DNA, 75 bp, synthetic construct
  source 1..75: mol_type = other DNA
tgatacgttcgttagcaacaaaggtaatattacggtcatcgaagataactctattggcatgctgcttgatggtga

SEQ ID NO: 852827 - DNA, 75 bp, synthetic construct
  source 1..75: mol_type = other DNA
tcactggtctgcgggatcgttacgctggcggttgccggttcgctggaatatctgggcttgccgtctaatgccgtt

SEQ ID NO: 852828 - DNA, 75 bp, synthetic construct
  source 1..75: mol_type = other DNA
tctcacctgttgaagcaagtgcgtcgcgatgtcgcacgcgttaagactttactgaacgagaaggcgggtgcgtaa

SEQ ID NO: 852829 - DNA, 75 bp, synthetic construct
  source 1..75: mol_type = other DNA
aaaataaaacgccgtggtacaggattccagatatttaattttattcgtagagtttttttgtttcctgtatcaatt

SEQ ID NO: 852830 - DNA, 75 bp, synthetic construct
  source 1..75: mol_type = other DNA
aggtggggcgatattctggcgggcagataaaatagcccattatggtgccctgaatgagctggcccggggatgtgt

SEQ ID NO: 852831 - DNA, 75 bp, synthetic construct
  source 1..75: mol_type = other DNA
atcgtaaatactttggttcaggacgcggtatcacctggtacaacttcgtctcagatcagtactccggtttccatg

SEQ ID NO: 852832 - DNA, 75 bp, synthetic construct
  source 1..75: mol_type = other DNA
aggagcacctggcaagattgtcgccgctgatacatggccatataaatatgctggggcattatacgttttcgttac

SEQ ID NO: 852833 - DNA, 75 bp, synthetic construct
  source 1..75: mol_type = other DNA
tcccatgaacagttccgtttctggcgggaaggaaagcgtattgcggtgagcttcagggggcctgaaagcggggca

SEQ ID NO: 852834 - DNA, 75 bp, synthetic construct
  source 1..75: mol_type = other DNA
cggggatggtgggctgaagaataacggcaccacggaatgggcaaccagtgaaaccgggaaaaccattaccgagtc

SEQ ID NO: 852835 - DNA, 75 bp, synthetic construct
  source 1..75: mol_type = other DNA
tgaatacctttttcaggtctctgaattttaatgactccggaaaaccgtgcaatatttgtgcaattgtttttttcc

SEQ ID NO: 852836 - DNA, 75 bp, synthetic construct
  source 1..75: mol_type = other DNA
cgtcatcaatccctttgaatgccgcaggcatggtgctgaaggcgggtgaggaagttaaaggcagtggctgctctg

SEQ ID NO: 852837 - DNA, 75 bp, synthetic construct
  source 1..75: mol_type = other DNA
ccgataatcctgcctgcacgctggcatcccgtcagtgcgcgttttattccgatgagggaacctgcctgcatgaat

SEQ ID NO: 852838 - DNA, 75 bp, synthetic construct
  source 1..75: mol_type = other DNA
gggttctgaaaggcacggaatgctcagagccgggcgggacgaaaaccggtgttatggaaggaaaaccctggagtc

SEQ ID NO: 852839 - DNA, 75 bp, synthetic construct
  source 1..75: mol_type = other DNA
attccgatgagggaacctgtctgcatgagtacgccacgtactcctgcgagtccagaacatcaggaaaagtgatgg

SEQ ID NO: 852840 - DNA, 75 bp, synthetic construct
  source 1..75: mol_type = other DNA
aacactgacgccaacaagcatgagaatgaacagataagccgtactgttcaggaaatgtttgaagagactgatatg

SEQ ID NO: 852841 - DNA, 75 bp, synthetic construct
  source 1..75: mol_type = other DNA
aacactgacgcgagcaaacatgagaaagaacagataagtcgtactgttcaggaaatgtttgaagaggctgatatg

SEQ ID NO: 852842 - DNA, 75 bp, synthetic construct
  source 1..75: mol_type = other DNA
gacagggagagtgtgacatatgagtgtaaggcttcagttaaggaaacactcaatatcatgggaaaagaactgccc

SEQ ID NO: 852843 - DNA, 75 bp, synthetic construct
  source 1..75: mol_type = other DNA
agaacagcttgatgagttaattcttgcccgtcagcgtttcgctcacggtatacaaacgctttttttcgatcatcc

SEQ ID NO: 852844 - DNA, 75 bp, synthetic construct
  source 1..75: mol_type = other DNA
ttgattttatatatttcaaatatacacattccttacgtcattgcacaaccaatcaaaatgctgggcgcaataact

SEQ ID NO: 852845 - DNA, 75 bp, synthetic construct
  source 1..75: mol_type = other DNA
agtgtgaaggctggacccgctacaccttccctgcccgcgcggggaaatactcgcagttcatctgggatttcaaat

SEQ ID NO: 852846 - DNA, 75 bp, synthetic construct
  source 1..75: mol_type = other DNA
tgggctagaacaacgcgccaaggttgctgctgaattcatagatggattgctgtccagacagagtgtgattgatac

SEQ ID NO: 852847 - DNA, 75 bp, synthetic construct
  source 1..75: mol_type = other DNA
atggttcaggttatgaaagaaaagataaatacctttttcagatctccgaattttaattattccgtaaagccgtgc

SEQ ID NO: 852848 - DNA, 75 bp, synthetic construct
  source 1..75: mol_type = other DNA
caccgaagggcgcaaaatcgttcatatcgatattgagccgacgcaaattggccgcgtgctgtgtccggatcttgg

SEQ ID NO: 852849 - DNA, 75 bp, synthetic construct
  source 1..75: mol_type = other DNA
aaattgaagacaaacattatattgaactcttctggaataaagtatactatttttggatatttttgaattttcgat

SEQ ID NO: 852850 - DNA, 75 bp, synthetic construct
  source 1..75: mol_type = other DNA
tgagattattagttaccgtagcggagcactcgaatacggagatcatgatgcgccaaacagcatgcgcaaggcaat

SEQ ID NO: 852851 - DNA, 75 bp, synthetic construct
  source 1..75: mol_type = other DNA
ccctgataaaggacattcttacggatattcgcatttatggaaagccacactttgatataaaggccttttatgaag

SEQ ID NO: 852852 - DNA, 75 bp, synthetic construct
  source 1..75: mol_type = other DNA
gattaccaccgtaccattttcagcggtagtggtctggcaagggcgattctggttactgtcgttcattcctggcgg

SEQ ID NO: 852853 - DNA, 75 bp, synthetic construct
  source 1..75: mol_type = other DNA
gtggtggtctggcaaggacgtttctggttactgtcattcattcccggtggctttctcggcatgacgctatttttt

SEQ ID NO: 852854 - DNA, 75 bp, synthetic construct
  source 1..75: mol_type = other DNA
gtgggcattttttgccgcgctggctgccggttggctggcctctgtaagtgggatttccggcttctgggcgagcgt

SEQ ID NO: 852855 - DNA, 75 bp, synthetic construct
  source 1..75: mol_type = other DNA
ggagaaattaattacgaatatctctttacggtaattgaaaattctgactacaacggttgggttggctgtgaatat

SEQ ID NO: 852856 - DNA, 75 bp, synthetic construct
  source 1..75: mol_type = other DNA
acagcagataaaccgcagtgaattcacaaactatacctgtgaacgggacacgatggtggaggagtattgcacacg

SEQ ID NO: 852857 - DNA, 75 bp, synthetic construct
  source 1..75: mol_type = other DNA
agtgcgaagcatcctgactgtcgggggattacggttgatgagctgcagaaaattcagttcgacagactggatttc

SEQ ID NO: 852858 - DNA, 75 bp, synthetic construct
  source 1..75: mol_type = other DNA
ttttcataaacgttggtttgggagaaacgataaataaagcctccggagctatgcagaaatcggctaatggagctg

SEQ ID NO: 852859 - DNA, 75 bp, synthetic construct
  source 1..75: mol_type = other DNA
aattcatagcatggaaagacctttgaatgatctgtcgcttcagaatacagacaatctactcaatagtattttcgg

SEQ ID NO: 852860 - DNA, 75 bp, synthetic construct
  source 1..75: mol_type = other DNA
caacgccacgccggaagatttcgctaaagtcggtcgactgatggcggaagggaaaatcactgctgacatgatgtt

SEQ ID NO: 852861 - DNA, 75 bp, synthetic construct
  source 1..75: mol_type = other DNA
ttacccaacggtcagaaaaccgctctgactcgttatcagagcatccatgatagatccgggcaggcgcaagatgat

SEQ ID NO: 852862 - DNA, 75 bp, synthetic construct
  source 1..75: mol_type = other DNA
ggcggttttattcagggagcgtccgcacgtgggatgctggaagtatttatcaaaacgattttccagcttaaaaac

SEQ ID NO: 852863 - DNA, 75 bp, synthetic construct
  source 1..75: mol_type = other DNA
acacagaatctgaaagccgcgataggctatggtgcactgaagggactatggccgatcgtaattgttatcctcggc

SEQ ID NO: 852864 - DNA, 75 bp, synthetic construct
  source 1..75: mol_type = other DNA
agtaacggcagcaatctgtcgatgaaaattgaatggatcgcaacccccggtgttctgattatcattgccagtgtt

SEQ ID NO: 852865 - DNA, 75 bp, synthetic construct
  source 1..75: mol_type = other DNA
tcttaatcagctgattgctgagggccaggtgtgtgtgttccggatgtctacgtcacgtgcattatatatttcttt

SEQ ID NO: 852866 - DNA, 75 bp, synthetic construct
  source 1..75: mol_type = other DNA
aactctggaaagttcgccagcaggctcttgagaataattaccgacaggcaattaaaaaaaactattccggcaaag

SEQ ID NO: 852867 - DNA, 75 bp, synthetic construct
  source 1..75: mol_type = other DNA
agaagctatctgaaaaataatccgggtctgttgaataaagcatggagtggacaaccgtttgattttgggagagca

SEQ ID NO: 852868 - DNA, 75 bp, synthetic construct
  source 1..75: mol_type = other DNA
tccactcaagcaaagacggcacgcttctggaacgcaccataacggtgacattacccagcggtcagacaacctcgc

SEQ ID NO: 852869 - DNA, 75 bp, synthetic construct
  source 1..75: mol_type = other DNA
caactgaaaactcaatatgaacaatctattaaatatgcagaggatcaaaaaaagagattagaaggattcactgat

SEQ ID NO: 852870 - DNA, 75 bp, synthetic construct
  source 1..75: mol_type = other DNA
cgggtacgtgattataggaaaggcgagttcgtaacaataccaaccctggtggagtttcataaaaagattaacggg

SEQ ID NO: 852871 - DNA, 75 bp, synthetic construct
  source 1..75: mol_type = other DNA
cctaactggctggcggcggccaatacctctggcgctacgggggggaaaatgatttcgccgcaaagcatcgccatc

SEQ ID NO: 852872 - DNA, 75 bp, synthetic construct
  source 1..75: mol_type = other DNA
ggcaatcaaagctcgcaagaagtttcccaatcagatgttcacggtctggggcggcaatcttattccggcgattgt

SEQ ID NO: 852873 - DNA, 75 bp, synthetic construct
  source 1..75: mol_type = other DNA
tattccgttctacgtgatgccaccagcacgactgcggggacgtcttacttcccgtacatttttatggctctgcca

SEQ ID NO: 852874 - DNA, 75 bp, synthetic construct
  source 1..75: mol_type = other DNA
ggctatctatgaagatcacccgtgggcgaaccgcgaatgcgtaccgatggccgatctggcaggggaaaaactgct

SEQ ID NO: 852875 - DNA, 75 bp, synthetic construct
  source 1..75: mol_type = other DNA
gctgggcgtaatgttgctggagcggacgagccgcaaagtgttgttcacccaggcgggaatgctgttggtggatca

SEQ ID NO: 852876 - DNA, 75 bp, synthetic construct
  source 1..75: mol_type = other DNA
cccggactgtggctctcacgacaccattccctgggccgatggctggatgtgccgcgactgcggctgtgaatgggg

SEQ ID NO: 852877 - DNA, 75 bp, synthetic construct
  source 1..75: mol_type = other DNA
tgtttgtggtgttgatttccggtggaattgatatttcgtttccagcaatgaccatcattgcgcaatacggcatgg

SEQ ID NO: 852878 - DNA, 75 bp, synthetic construct
  source 1..75: mol_type = other DNA
tcttattgaggcttcaggagatagcgctgatgcactttcatactctcgtggggcgttgttacgtgcgtgctcaat

SEQ ID NO: 852879 - DNA, 75 bp, synthetic construct
  source 1..75: mol_type = other DNA
atcccacagtatctgatggctgtttatcttggcgcagaacttccggctttcgctggaagtctggtcagcctgatc

SEQ ID NO: 852880 - DNA, 75 bp, synthetic construct
  source 1..75: mol_type = other DNA
atggctattttagcaatcattgcagttatcgccctgggtgggtacgcctacggatttattaaaacccgtgagctg

SEQ ID NO: 852881 - DNA, 75 bp, synthetic construct
  source 1..75: mol_type = other DNA
atcttggcgcagaacttcctgctttcgcgggaagtctggtcagcctgatcgtgatagtctttatggcaaaaaacc

SEQ ID NO: 852882 - DNA, 75 bp, synthetic construct
  source 1..75: mol_type = other DNA
gatcattttgattctgaaagtcaaaatgcccatacattatgccgtactcagcacactctttattaccctgactct

SEQ ID NO: 852883 - DNA, 75 bp, synthetic construct
  source 1..75: mol_type = other DNA
cgggacactgaaatactgctttgtctatattgttatccttggactgaaaataggcctgatctaccacctgttcat

SEQ ID NO: 852884 - DNA, 75 bp, synthetic construct
  source 1..75: mol_type = other DNA
ttctgtctcgatggcgaatgcgataaggctcagagcgggcagagtactgagagatcccctcataatttccccaaa

SEQ ID NO: 852885 - DNA, 75 bp, synthetic construct
  source 1..75: mol_type = other DNA
ggtgaaccgggctgacagcattgtgggaaacaccgggcagcagtgcagtgcgcaggagattagccgaagtgaata

SEQ ID NO: 852886 - DNA, 75 bp, synthetic construct
  source 1..75: mol_type = other DNA
agaccggcagggatgtggtgaaccgggctgacagcattgtgggaaacaccgggcagcagtgcagtgcgcaggaga

SEQ ID NO: 852887 - DNA, 75 bp, synthetic construct
  source 1..75: mol_type = other DNA
atgctcggcgcaaccttaagtttgcatggctggcgcttgcggggcgatcccaccctccatcctggcggctgtaaa

SEQ ID NO: 852888 - DNA, 75 bp, synthetic construct
  source 1..75: mol_type = other DNA
gtttccgccgatgaaagcgatctcgacgccagcgttgccacccgctggcaagaactctgccgtctggcagcacca

SEQ ID NO: 852889 - DNA, 75 bp, synthetic construct
  source 1..75: mol_type = other DNA
tacaccgacaatcctgcctgtaccctggtgtcacaccagtgcgccttttactccgaagaaggtgcctgtctgcat

SEQ ID NO: 852890 - DNA, 75 bp, synthetic construct
  source 1..75: mol_type = other DNA
ggggggttttattaaatctaattggtgagtttcttgtattcagtatgctagcttttattgcccatcgtaagtggg

SEQ ID NO: 852891 - DNA, 75 bp, synthetic construct
  source 1..75: mol_type = other DNA
atcacagtatatgttatctcaagtttcagaaattaaacctcaagataaactgttttattatagaattaaaaaaag

SEQ ID NO: 852892 - DNA, 75 bp, synthetic construct
  source 1..75: mol_type = other DNA
tcaatcgttcaaaaaatgacaacagcatgtcaaagtctaattaatccaatatcacagtatatgttatctcaagtt

SEQ ID NO: 852893 - DNA, 75 bp, synthetic construct
  source 1..75: mol_type = other DNA
atgcttactaaagaaccatcatttgcatcgctgctggtaaaacaaagtccggcaatgcactactacggtcacggc

SEQ ID NO: 852894 - DNA, 75 bp, synthetic construct
  source 1..75: mol_type = other DNA
catcgctgctggtaaaacaaagcccggcaatgcactacggtcacggctggatcatgggggaggatggtaaacgct

SEQ ID NO: 852895 - DNA, 75 bp, synthetic construct
  source 1..75: mol_type = other DNA
tggagtctataacccttaaagattggtttactttaaaagcgaaagagcaaattgaaaataagaataaagagaatg

SEQ ID NO: 852896 - DNA, 75 bp, synthetic construct
  source 1..75: mol_type = other DNA
tagatattaatggcaattcatacttagttagatgcgaagagaggcctaacggtgagtggcgtgtatatgatattg

SEQ ID NO: 852897 - DNA, 75 bp, synthetic construct
  source 1..75: mol_type = other DNA
cgactgccaaaagatccgtggggcaatgattatcagtatctcagcccgggtgaaaaagggatgtttgatgtttac

SEQ ID NO: 852898 - DNA, 75 bp, synthetic construct
  source 1..75: mol_type = other DNA
agcgatatcgtggcgctggaaaacgcactggatatgtaccgactggataacgggcgttatccgaccacagaacag

SEQ ID NO: 852899 - DNA, 75 bp, synthetic construct
  source 1..75: mol_type = other DNA
cacgtacaggaagttgcgccaaagccgctgtttattgtggcggagtactggtcgcatgaagtcgataaactgcaa

SEQ ID NO: 852900 - DNA, 75 bp, synthetic construct
  source 1..75: mol_type = other DNA
gctggcaggttgctccagcaacgctaaaatcgatcagctgtcttctgacgttcagactctgaacgctaaagttga

SEQ ID NO: 852901 - DNA, 75 bp, synthetic construct
  source 1..75: mol_type = other DNA
gtgctggtttctattgtggtgacgtcttgctggggattatttttcggtgatgttcattttagcggcgtctattcc

SEQ ID NO: 852902 - DNA, 75 bp, synthetic construct
  source 1..75: mol_type = other DNA
cactggatatgtaccgactggataacgggcgttatccgaccaccgaacaggggcttgaggcgctgatccagcagc

SEQ ID NO: 852903 - DNA, 75 bp, synthetic construct
  source 1..75: mol_type = other DNA
tcagtatgcgtcattacaaatccgatatgtcgatctgccgctgctgcgacaacttgcggagaacgaaacgtcaga

SEQ ID NO: 852904 - DNA, 75 bp, synthetic construct
  source 1..75: mol_type = other DNA
attaaacgcgatttccctcattccgtcgccagacttaccggcgcatattccctgacaatgggagctgcggcggca

SEQ ID NO: 852905 - DNA, 75 bp, synthetic construct
  source 1..75: mol_type = other DNA
ggtcgaaccgtggtttaaaccgctggcgtatgccttaattttgttgcgggaaaatggcgttccttcggtattcta

SEQ ID NO: 852906 - DNA, 75 bp, synthetic construct
  source 1..75: mol_type = other DNA
tcagtatgcatcattacaaatccgatatgtcgatctgccgttgttacgacaacttgcggagaacaaaacgtcaga

SEQ ID NO: 852907 - DNA, 75 bp, synthetic construct
  source 1..75: mol_type = other DNA
aattgtcgttgcagcgtcatttcctgaacgccattgaattgaagactctcgcccgtctaccgctaagctggtgcg

SEQ ID NO: 852908 - DNA, 75 bp, synthetic construct
  source 1..75: mol_type = other DNA
atgtacccgttcaatggccaggtgagtaatgagtccagtccgttgcagtcctccctgctggtcagtgaacgcatg

SEQ ID NO: 852909 - DNA, 75 bp, synthetic construct
  source 1..75: mol_type = other DNA
tgcgacgacccagcaaatgataatccaacccaaaccgacctcggcattaaaagccatctctacgcagtaacggag

SEQ ID NO: 852910 - DNA, 75 bp, synthetic construct
  source 1..75: mol_type = other DNA
caaaaagcacaggcagccaaaaagcacagcaaaaaacacagccagcagcaatctgcaaaaccagttgtacaacca

SEQ ID NO: 852911 - DNA, 75 bp, synthetic construct
  source 1..75: mol_type = other DNA
ttgccgctgctatgggtctctcttctgctgcctttgccgcagagactgcgaccacgcctgctccgactgctgcta

SEQ ID NO: 852912 - DNA, 75 bp, synthetic construct
  source 1..75: mol_type = other DNA
aggagtagaccttcagaaaagggcactggaaatagtaaaaaacaagggcgtgaaaaaaacgaaaacgaagccacc

SEQ ID NO: 852913 - DNA, 75 bp, synthetic construct
  source 1..75: mol_type = other DNA
ctttcaaagtaaatgactacgtgacatacccgtgcccaagttgcggaagaagcagtttgaaattaaataaagaaa

SEQ ID NO: 852914 - DNA, 75 bp, synthetic construct
  source 1..75: mol_type = other DNA
cagtccagcagagttcatcaccaaagtaatgcaatataaaagtgtgcaggcatacattgcagccgaactgtcagg

SEQ ID NO: 852915 - DNA, 75 bp, synthetic construct
  source 1..75: mol_type = other DNA
tcttgtcgcatttgacttccttattttcatagcatcagttaaaccaagaacagaaagccaagtaagacaaatacc

SEQ ID NO: 852916 - DNA, 75 bp, synthetic construct
  source 1..75: mol_type = other DNA
tttattgcatccgttaaacccagaactgaaggccaagtcagacaaatacctgatgataagataaaggaatttttt

SEQ ID NO: 852917 - DNA, 75 bp, synthetic construct
  source 1..75: mol_type = other DNA
gatcatgagagctttattaattgggcactatcttttggtatattaccttgtgcttttgcgatttttgcatattta

SEQ ID NO: 852918 - DNA, 75 bp, synthetic construct
  source 1..75: mol_type = other DNA
ttgccgctactatgggtctctcttctgtcgcatttgctgcagaaactgcgaccacgcctgctccgactgctacag

SEQ ID NO: 852919 - DNA, 75 bp, synthetic construct
  source 1..75: mol_type = other DNA
atattctctgttactggctctttaattaatctttggttgtggattatttctcttgtcgcatttgacttccttatt

SEQ ID NO: 852920 - DNA, 75 bp, synthetic construct
  source 1..75: mol_type = other DNA
ttactctctgtaaccggttctttaaaaaatctttggttgtgggttatttttattgttgtctttaattttcttatt

SEQ ID NO: 852921 - DNA, 75 bp, synthetic construct
  source 1..75: mol_type = other DNA
tcgctggcggtaatctgcaattctcaagcttcttagaagccactgacgataagcgtgatcaagaagcactgccac

SEQ ID NO: 852922 - DNA, 75 bp, synthetic construct
  source 1..75: mol_type = other DNA
ttaacgatgtggtccgggagcttgaggatgtatatggccaccaggagctgtggctttactctggccttaatgagg

SEQ ID NO: 852923 - DNA, 75 bp, synthetic construct
  source 1..75: mol_type = other DNA
atgaaaacgaagattttcgccgctggtacggcgctggcctgcctgatgctgtgcgccggttgcaccagcgcccgg

SEQ ID NO: 852924 - DNA, 75 bp, synthetic construct
  source 1..75: mol_type = other DNA
ctgacctgcctgatgctgtgcgccggttgcaccagcgccccgcctgcaccgacgccagtgattgtccacaacgcc

SEQ ID NO: 852925 - DNA, 75 bp, synthetic construct
  source 1..75: mol_type = other DNA
attcttaaacgaaacggcagaatggtgggtgaattttcgggccagcctgattgctgggtgctctccggtgattac

SEQ ID NO: 852926 - DNA, 75 bp, synthetic construct
  source 1..75: mol_type = other DNA
gcgtcaggaatggcgatctcccaaaattctcaaacgaaacggcagaatggtggcagaacaatcaggccagcctga

SEQ ID NO: 852927 - DNA, 75 bp, synthetic construct
  source 1..75: mol_type = other DNA
catctgccgcagtctgaacacagcgctccgccgtggaaagcctgcctcatcaataaggtctttaaagtgtattgt

SEQ ID NO: 852928 - DNA, 75 bp, synthetic construct
  source 1..75: mol_type = other DNA
atgccaggagtaccggaagtcaaattcatggggatattgactgtttatgtactgggggggacggaaatatataaa

SEQ ID NO: 852929 - DNA, 75 bp, synthetic construct
  source 1..75: mol_type = other DNA
gggaatggtgacaggaaagtctatgaatcgcttgtcagtggtgcttccacctttacgctgaaactcaggatgaag

SEQ ID NO: 852930 - DNA, 75 bp, synthetic construct
  source 1..75: mol_type = other DNA
gccgggacagtggaaagtgcctcgctgtcggctcatgcagggctatatttccttaactcccgttacgactttatg

SEQ ID NO: 852931 - DNA, 75 bp, synthetic construct
  source 1..75: mol_type = other DNA
gaaaaagacaccgctcgccgcatggtctaccacgcactgcaacatcctctgtatcgcgacattgaaaccattgtg

SEQ ID NO: 852932 - DNA, 75 bp, synthetic construct
  source 1..75: mol_type = other DNA
gtaaaacccgcccccgccgcagcatgttgtttgtgcctggcgctaatgccgcgatggtcagcaactctttcatct

SEQ ID NO: 852933 - DNA, 75 bp, synthetic construct
  source 1..75: mol_type = other DNA
gcagcttgagaacgcgctggcacgttgtgccagccaggtaaaaatgattaaacactgtcaggacgaaaacgatgc

SEQ ID NO: 852934 - DNA, 75 bp, synthetic construct
  source 1..75: mol_type = other DNA
tctctggtcactgcattgctttaacccgcgcccatttcgtgccattgaactttaccgccaggtgtgggaaggggg

SEQ ID NO: 852935 - DNA, 75 bp, synthetic construct
  source 1..75: mol_type = other DNA
gcagcattgagcttaaggaggcaggcggcaaggctgccagcagtgaggtgttccgcgagctgatcacactgtcac

SEQ ID NO: 852936 - DNA, 75 bp, synthetic construct
  source 1..75: mol_type = other DNA
ggggcagaatcagaccactgaagccagcgccaacaaagcttcggcgcaggccgggctggaagtgacggatgatat

SEQ ID NO: 852937 - DNA, 75 bp, synthetic construct
  source 1..75: mol_type = other DNA
tgctgggcgaactggccgagctgtacccgcagatgaacgctgaagacctgcaggaacggctggcacggattatgt

SEQ ID NO: 852938 - DNA, 75 bp, synthetic construct
  source 1..75: mol_type = other DNA
atggcaaaaggtatctgggtttcacccgatgagttcgtggcgttcaccgaacccaaaaaatcactgaccgcgcag

SEQ ID NO: 852939 - DNA, 75 bp, synthetic construct
  source 1..75: mol_type = other DNA
tttcgcgagctgatcacactgtcacgcagtaagatctccattgcattactcggtcagaatcagaccacggaagcg

SEQ ID NO: 852940 - DNA, 75 bp, synthetic construct
  source 1..75: mol_type = other DNA
aaattcgtggtgccggcacaggatgcatcctatgacaatccttacggttttccggatctgtccatgtgcttctgg

SEQ ID NO: 852941 - DNA, 75 bp, synthetic construct
  source 1..75: mol_type = other DNA
ggcggttttgatccacgtgcatgggatgtggcaagcctgatggattttgctgtgccggtggtggcgtgtctgctg

SEQ ID NO: 852942 - DNA, 75 bp, synthetic construct
  source 1..75: mol_type = other DNA
acctcatcgtcggacggccagaacttccgcaccggcagcaaggccgagagcaccggccacatcaacccgaaatac

SEQ ID NO: 852943 - DNA, 75 bp, synthetic construct
  source 1..75: mol_type = other DNA
cgcgttgcgttccggcgacatctgggtgcaggggtcgcgccagttcaaggacttcgaggactacctggtgccgcc

SEQ ID NO: 852944 - DNA, 75 bp, synthetic construct
  source 1..75: mol_type = other DNA
gcgaggcgcgcaacgcgctggccagggcggtcttcttctaccgattgggtgaaatccgcgaccgcagttttgagc

SEQ ID NO: 852945 - DNA, 75 bp, synthetic construct
  source 1..75: mol_type = other DNA
accacgtcatcgtcggacggccagaacttcagaaccggcagcaaagcagaaagcactggtcatatcaacccgaag

SEQ ID NO: 852946 - DNA, 75 bp, synthetic construct
  source 1..75: mol_type = other DNA
taccggcaggctgtccagttgctgaccgagctggccatgcaaaccgacaagggcatcgtgctggccagagccttg

SEQ ID NO: 852947 - DNA, 75 bp, synthetic construct
  source 1..75: mol_type = other DNA
aacagtaaccgcgcctccgcgcaggccggactggaagtcaccgatgatatccgtgacgctgacgctgatatcgtg

SEQ ID NO: 852948 - DNA, 75 bp, synthetic construct
  source 1..75: mol_type = other DNA
aacagttcatttgactggaatggcgtgcgcgaaccctttgtcgtggcgaccgaaaacgacagtcttaacggcgtg

SEQ ID NO: 852949 - DNA, 75 bp, synthetic construct
  source 1..75: mol_type = other DNA
attcctgccgatgttgaagaaaaactgctgcgctttgcccgcgccggtttggccgtcgccagcatgaaaggtaaa

SEQ ID NO: 852950 - DNA, 75 bp, synthetic construct
  source 1..75: mol_type = other DNA
cagccccaacggtaacctggatgaagtgcatgaaggtctgctgctgcaggcggtcagagcctcctggctggccaa

SEQ ID NO: 852951 - DNA, 75 bp, synthetic construct
  source 1..75: mol_type = other DNA
gaaattgtccgtaaaatggcagagaacaaacctgacctgccggacggcaaaacagagcaggctgtcagggagatt

SEQ ID NO: 852952 - DNA, 75 bp, synthetic construct
  source 1..75: mol_type = other DNA
tctcgcctccatgctgcgtatcccggtatgtatgcacaacgttgaagagaccaaagtgttgatcttgacccgcca

SEQ ID NO: 852953 - DNA, 75 bp, synthetic construct
  source 1..75: mol_type = other DNA
attcctgccgacgttgaagaaaaactgctgcgctttgcccgcgccggtttggcagtcgccagtatgaaaggtaaa

SEQ ID NO: 852954 - DNA, 75 bp, synthetic construct
  source 1..75: mol_type = other DNA
tggatgcggcaaaaattttcacacagacggcagatgatcaggagctggccacgctggttcacgggatgctgaatg

SEQ ID NO: 852955 - DNA, 75 bp, synthetic construct
  source 1..75: mol_type = other DNA
acaccaccgtcggaacgccagaagaacatgctgccgctgtcatttgccgaggcgattgatgccgatattcaggct

SEQ ID NO: 852956 - DNA, 75 bp, synthetic construct
  source 1..75: mol_type = other DNA
gctgtggccgccatccccgatgacagcagcattgaactcaaagccgcggatggcaaggcggacagcagcgaggta

SEQ ID NO: 852957 - DNA, 75 bp, synthetic construct
  source 1..75: mol_type = other DNA
cgcctgtttgtggacccgttaagccgcgccatgtacagctctgacggcccggattttgagtttgtgcagcagaaa

SEQ ID NO: 852958 - DNA, 75 bp, synthetic construct
  source 1..75: mol_type = other DNA
atgattatgtgtctgaaaaaataaatgctattgctgtgcagaggcgagcagagggagcaaaagagaaagatgtta

SEQ ID NO: 852959 - DNA, 75 bp, synthetic construct
  source 1..75: mol_type = other DNA
cgacgatgcccgctttattgtcctggagctgggcggtctgcaggacaagcctgatctgctggttgcggtaatgtt

SEQ ID NO: 852960 - DNA, 75 bp, synthetic construct
  source 1..75: mol_type = other DNA
gaccgcatcctgggcaagctgttcaacgccgccaagaacaagcatcagcagcaattccaggcgtccggcaaggcg

SEQ ID NO: 852961 - DNA, 75 bp, synthetic construct
  source 1..75: mol_type = other DNA
ccgggcgacaaaactttctgcaaaccgatgcctctataaaccacggtaactccggcggtgcgctggttaactcgc

SEQ ID NO: 852962 - DNA, 75 bp, synthetic construct
  source 1..75: mol_type = other DNA
ttgcgattggattaattgtcggcgctattctgctggttgccatgccttcgctgcgcagccttaacccgctttcca

SEQ ID NO: 852963 - DNA, 75 bp, synthetic construct
  source 1..75: mol_type = other DNA
ggcagaatttttctcatcaactgcatcaggggaaaaacacaaaccttttagactagtagaaatagatgatcggct

SEQ ID NO: 852964 - DNA, 75 bp, synthetic construct
  source 1..75: mol_type = other DNA
atgaagcgtgcggaatggggatccgtgaagataacacgctgatcaccaaagacacctctcgtttcgttccgcatt

SEQ ID NO: 852965 - DNA, 75 bp, synthetic construct
  source 1..75: mol_type = other DNA
ccggcgaatccggcgcaggtctggttaaagtgaccatcaacggcgcacacaactgccgtcgcgttgagatcgatc

SEQ ID NO: 852966 - DNA, 75 bp, synthetic construct
  source 1..75: mol_type = other DNA
ccactggcggtttacccactatcccaattaatgctcgtcgcgtaccgcacattggcgatgtggtgctggcaatcg

SEQ ID NO: 852967 - DNA, 75 bp, synthetic construct
  source 1..75: mol_type = other DNA
ctgtgttctccccctgccctctgatgcgggtcatcgtctgttcccgtccgtgccttttcgtgaaggtgagcggcg

SEQ ID NO: 852968 - DNA, 75 bp, synthetic construct
  source 1..75: mol_type = other DNA
tgggtttacggtgcgatagccggttgtacgttcttcattgcgcgtgaacacacccaggcagaatatcgctggatt

SEQ ID NO: 852969 - DNA, 75 bp, synthetic construct
  source 1..75: mol_type = other DNA
gctgctggatcaaaacatgccatccagtgcgatgagcattcatccggcttccagagcgcgcttcagcaggttgtg

SEQ ID NO: 852970 - DNA, 75 bp, synthetic construct
  source 1..75: mol_type = other DNA
ttttctgactatcttacgaaaaacagtggtccatttgttaaccactacttttgcagtattccatacagcaaagaa

SEQ ID NO: 852971 - DNA, 75 bp, synthetic construct
  source 1..75: mol_type = other DNA
gtggtcattttaacccggcggtcactattggtttatgggctggcggacgttttccggcaaaagaagtcgttggct

SEQ ID NO: 852972 - DNA, 75 bp, synthetic construct
  source 1..75: mol_type = other DNA
agcgaactggatgtcgtcgcgtttgaaaatcagccgccggttaaactggtggggaatttactatgccgctcgtgc

SEQ ID NO: 852973 - DNA, 75 bp, synthetic construct
  source 1..75: mol_type = other DNA
tcagattttttccagtatctattttccgattcgttcggcggtaatccaccgttatattcatgaggccggagtgca

SEQ ID NO: 852974 - DNA, 75 bp, synthetic construct
  source 1..75: mol_type = other DNA
ggcagagaaaactggccgattttctctgcactggagggataatacaagagatgctgggggctcaatatctttcta

SEQ ID NO: 852975 - DNA, 75 bp, synthetic construct
  source 1..75: mol_type = other DNA
ttagcatcaagaatgagcgagggagtgcctgtcggtgaatatgagttgagctcaatcgttaacaaaaatggacca

SEQ ID NO: 852976 - DNA, 75 bp, synthetic construct
  source 1..75: mol_type = other DNA
tttcctttcctgtaacaagcgagccgtcaactacgcgctttgaacttgccatttgtgaagatggtgaggaagtct

SEQ ID NO: 852977 - DNA, 75 bp, synthetic construct
  source 1..75: mol_type = other DNA
ctacccacgccagaacggcctggccgtggcgctccgcgagctgggccgcatcgagcgcacgctgttcatcctgga

SEQ ID NO: 852978 - DNA, 75 bp, synthetic construct
  source 1..75: mol_type = other DNA
caaattcgagccgcaacggcgctacgccactctcgtggcgctggccaccgagggcatggccaccgtcaccgacga

SEQ ID NO: 852979 - DNA, 75 bp, synthetic construct
  source 1..75: mol_type = other DNA
ttgggccgttggtggagatataagtggatcacttttcatccgtcattgacagtagcaaaacttaaagataaaaca

SEQ ID NO: 852980 - DNA, 75 bp, synthetic construct
  source 1..75: mol_type = other DNA
gtggggaggttttgatccacgcgtgtgggatgtgggaagtttgttggatttttctttcccaattatcggatgctt

SEQ ID NO: 852981 - DNA, 75 bp, synthetic construct
  source 1..75: mol_type = other DNA
tccgcgcccattgggacgaaatcctgcggctggccacctcgatcaaggggtctgacgctcagtggaacgaaaact

SEQ ID NO: 852982 - DNA, 75 bp, synthetic construct
  source 1..75: mol_type = other DNA
gagtgcagcgtgactcaggttgccatgttgaataatgtccttaatgcccgtgccccagacgtgccccaaagtgac

SEQ ID NO: 852983 - DNA, 75 bp, synthetic construct
  source 1..75: mol_type = other DNA
agcagaccgacaaaggcttgctgctggccggtcaggccctggagagcctacggcagaaacgacgcatcctgccgg

SEQ ID NO: 852984 - DNA, 75 bp, synthetic construct
  source 1..75: mol_type = other DNA
gcaacctcgattaagcaggggacagtcaccgcatcactgatgatgaaaaagttagccagttacccaaaacagaat

SEQ ID NO: 852985 - DNA, 75 bp, synthetic construct
  source 1..75: mol_type = other DNA
gctgcgcagcatgaacagcgacaacgcccgcaaggtgcccaccgacgcgccgaccgagttcatcaagccgcgctg

SEQ ID NO: 852986 - DNA, 75 bp, synthetic construct
  source 1..75: mol_type = other DNA
gcgtggaagaagtcagggccggagatggcttcgctggaggcctggctggaagaacatgagaaatacaggagtgtt

SEQ ID NO: 852987 - DNA, 75 bp, synthetic construct
  source 1..75: mol_type = other DNA
gagtccattgtggaggcgctcgaccacatgctgcgcaccaaactgccgcgcggggtgccgttctgcatccatctg

SEQ ID NO: 852988 - DNA, 75 bp, synthetic construct
  source 1..75: mol_type = other DNA
aatttatagagagcgtgcgtaagattgtgcagagagggttaaaacgtgactatttacgtcaggaagataatcttc

SEQ ID NO: 852989 - DNA, 75 bp, synthetic construct
  source 1..75: mol_type = other DNA
cacagcactgaaactgcctgacgaatcagcaaaggccaatgaagttctgggcgaaatgagcttcccgcagttcag

SEQ ID NO: 852990 - DNA, 75 bp, synthetic construct
  source 1..75: mol_type = other DNA
tgaaaatcatccgggcgtcgttacagggggccagtatcaccacacagacggtggatgcacaggcctttatcgata

SEQ ID NO: 852991 - DNA, 75 bp, synthetic construct
  source 1..75: mol_type = other DNA
atttacatcgagaacaggatgtaccgcacgccgcgtaacctcaaaaaactgaacgtcattgatgaggggtggcgt

SEQ ID NO: 852992 - DNA, 75 bp, synthetic construct
  source 1..75: mol_type = other DNA
gcaccacgccggtctgcgtcatgaccatcgtggcatccacttgggcggcgacaaaggaggactgccgacgtaacc

SEQ ID NO: 852993 - DNA, 75 bp, synthetic construct
  source 1..75: mol_type = other DNA
cagatactgcgcgggcaggttccgccggactggcgaccggtccttgcccgcgaaaacagaccggcaggctggcca

SEQ ID NO: 852994 - DNA, 75 bp, synthetic construct
  source 1..75: mol_type = other DNA
cgataaaaccgagcagtgcgggttttgggaaacggtgcgggttctgaagagcgtacatgaaagtattgatgataa

SEQ ID NO: 852995 - DNA, 75 bp, synthetic construct
  source 1..75: mol_type = other DNA
aacttccccagaggttctgcaacgtcattaattgagcaccgggcgggccaacataacagtgacaatgttattgaa

SEQ ID NO: 852996 - DNA, 75 bp, synthetic construct
  source 1..75: mol_type = other DNA
atgtcaatcatcacccgcattgaagacagcctcatctggctgtcccgctacggacttgccagagaatttccggaa

SEQ ID NO: 852997 - DNA, 75 bp, synthetic construct
  source 1..75: mol_type = other DNA
ccgggcaaatcaccagcggggacttcatcctgccgcagtaccaggaagaggtgaaaaaaacgctggcaccggcat

SEQ ID NO: 852998 - DNA, 75 bp, synthetic construct
  source 1..75: mol_type = other DNA
cgaagtaaattgccagcactgttgcggcaaacatcccgcccattacgccggtacctaccgcgttttgcgcgccag

SEQ ID NO: 852999 - DNA, 75 bp, synthetic construct
  source 1..75: mol_type = other DNA
gtgggttctgcacctgcggcactggatacgctgaacgaactggcagcggcgctggggaatgatccgaactttgcc

SEQ ID NO: 853000 - DNA, 75 bp, synthetic construct
  source 1..75: mol_type = other DNA
tcatgtatccggaaacccgaagtttgaatatgccagtatggttgacgatatcagagagaaagtgtctattgagat

SEQ ID NO: 853001 - DNA, 75 bp, synthetic construct
  source 1..75: mol_type = other DNA
attgccgtgggcaactgcccggaaagctataagccgcaactggctgaaggtagcgggcgcactcagaccgtgcgc

SEQ ID NO: 853002 - DNA, 75 bp, synthetic construct
  source 1..75: mol_type = other DNA
tgcgatagttgaacagcgtcgtcaggagggcgcaagagataaagatataagcgtttcgggaactgcttcaatgct

SEQ ID NO: 853003 - DNA, 75 bp, synthetic construct
  source 1..75: mol_type = other DNA
gcgcagggaggagcaatccaatctcatacgcatttattagctatccgagttagcggggcaacatcagctaccagc

SEQ ID NO: 853004 - DNA, 75 bp, synthetic construct
  source 1..75: mol_type = other DNA
taccaatttgagtggaaaggatgtagctggtcttctcacataccttggtttgggagaaggtgctccagctattgg

SEQ ID NO: 853005 - DNA, 75 bp, synthetic construct
  source 1..75: mol_type = other DNA
gagcatctgatgctttatctttttctctggggactgttggcaattatggacctgatctacgtgttttatttttag

SEQ ID NO: 853006 - DNA, 75 bp, synthetic construct
  source 1..75: mol_type = other DNA
ttaataatattcgcgagcatctgatgctttatctttatctttttctctggggactattagcaattatggacctaa

SEQ ID NO: 853007 - DNA, 75 bp, synthetic construct
  source 1..75: mol_type = other DNA
ttcatacgattacgggaatgtgggtcagtattgtgttgttcaaattgatgacgaatggctggagtggtttctact

SEQ ID NO: 853008 - DNA, 75 bp, synthetic construct
  source 1..75: mol_type = other DNA
aactcgtgtagaagctgcgcaagccactgaacggcgtattgcggcagatatcgacgatagtgaactaaaagcccc

SEQ ID NO: 853009 - DNA, 75 bp, synthetic construct
  source 1..75: mol_type = other DNA
aggggctatttctgcgcaacagctggatgacgaccgcgccgccgctgagagcgcccgagctgcgctggaatcggc

SEQ ID NO: 853010 - DNA, 75 bp, synthetic construct
  source 1..75: mol_type = other DNA
caggccgaactggactccgtggctaaacgtcatacgcgttcccgctcactcgcccaacgaggggctatttctgcg

SEQ ID NO: 853011 - DNA, 75 bp, synthetic construct
  source 1..75: mol_type = other DNA
caacttgaagtgatcggaacgctaccggaaccacactccgctatcgatttttcgcaagaggcggcgcttttcggc

SEQ ID NO: 853012 - DNA, 75 bp, synthetic construct
  source 1..75: mol_type = other DNA
cagtccgaacggcaacctcgatgaagtccatgaaggtctgcttctgcaggcagttcaggcggcctggttaagcaa

SEQ ID NO: 853013 - DNA, 75 bp, synthetic construct
  source 1..75: mol_type = other DNA
gcgggtttgcctgggtgttcgacatgggcgatggctataagtccctgtgtgaaaacatggggggcgtatacctcg

SEQ ID NO: 853014 - DNA, 75 bp, synthetic construct
  source 1..75: mol_type = other DNA
tactggaactcggtggcctggagtcgaggccctctctgcttatcgctgtgatgttttcattgattatttacatcg

SEQ ID NO: 853015 - DNA, 75 bp, synthetic construct
  source 1..75: mol_type = other DNA
ccttcattcacgcggaagggctgtgggaagacatcaaaatggggggagccacctgccgggctgagagtattcagg

SEQ ID NO: 853016 - DNA, 75 bp, synthetic construct
  source 1..75: mol_type = other DNA
gtatcaccaaccgactggatgaaattatcgaactgctcggtaagtactgctcctggggaatttacggcgaatact

SEQ ID NO: 853017 - DNA, 75 bp, synthetic construct
  source 1..75: mol_type = other DNA
caggaggcctgggaagaacataaggaaaaagcccgtattgaccatgttgtccagaagctgacggctattcgcgag

SEQ ID NO: 853018 - DNA, 75 bp, synthetic construct
  source 1..75: mol_type = other DNA
gagcgcagcgttatctccaaattcggggatgccaaagaccagtggttctcctcctttatgctgcgcatcaacgat

SEQ ID NO: 853019 - DNA, 75 bp, synthetic construct
  source 1..75: mol_type = other DNA
tatcgaactactcgggaagtactgctcctgggggatttacggcaaatatttcaacagcgacaagccgtcactgac

SEQ ID NO: 853020 - DNA, 75 bp, synthetic construct
  source 1..75: mol_type = other DNA
cacgggctatgaactttatgctggagaataacccggacatgttcatgctgtggatgggcggcgataacctctcta

SEQ ID NO: 853021 - DNA, 75 bp, synthetic construct
  source 1..75: mol_type = other DNA
tcatccgcaaatggaaaaatatgtggttaagccgatcttctcacgtgaaggcgcaaacgtgtcaatcatcgagaa

SEQ ID NO: 853022 - DNA, 75 bp, synthetic construct
  source 1..75: mol_type = other DNA
gcccggactggcgcgagaaagctcacgagtacggtttcaatttccataccatgtacggtgagccgtactggtgtg

SEQ ID NO: 853023 - DNA, 75 bp, synthetic construct
  source 1..75: mol_type = other DNA
cagccatcgctttattcgcgtcttgatctggcgtgggatggcactggcgaacctaaacttctggaaaataacgcc

SEQ ID NO: 853024 - DNA, 75 bp, synthetic construct
  source 1..75: mol_type = other DNA
gatatcaacgatcccctcgccgtgcgcgatcgggcaatgctggaagtgatgtacggcgcgggtctgcgtctttcc

SEQ ID NO: 853025 - DNA, 75 bp, synthetic construct
  source 1..75: mol_type = other DNA
ggctcatcaggtggtggcgctggagctggcgcaggcgttcgcccgactcggagcgaaggtgacgatcctggctcg

SEQ ID NO: 853026 - DNA, 75 bp, synthetic construct
  source 1..75: mol_type = other DNA
aagtcggtgagtttattcaaaaaggttaccgcacctgtcgccgccataccggtgcctatatcaccatcacacaga

SEQ ID NO: 853027 - DNA, 75 bp, synthetic construct
  source 1..75: mol_type = other DNA
ctgcgtcagcggctgggctccggtcagtcttctgtcgtgtcctacttccttaacatcacagcattctgcaaggac

SEQ ID NO: 853028 - DNA, 75 bp, synthetic construct
  source 1..75: mol_type = other DNA
ggtgcgctggttatctggaccgtgttgcagaacaaaccggcgattgaggtggcgcaggaatcacataacgatccc

SEQ ID NO: 853029 - DNA, 75 bp, synthetic construct
  source 1..75: mol_type = other DNA
atcggtgccggcgtggtgtcaaaaaccggccgcctgagcgacggcacctgggtctgggtgatccagtaccgggtc

SEQ ID NO: 853030 - DNA, 75 bp, synthetic construct
  source 1..75: mol_type = other DNA
aacgtgccgcgcgcgctcgccaacttcgacacgcgcggcttcatcaaactggtggttgaagaaggcagcggacga

SEQ ID NO: 853031 - DNA, 75 bp, synthetic construct
  source 1..75: mol_type = other DNA
cggctcatcggcgtgcaagcggtggccccggaagcgggtgaactgatccagacggcggtgctcgccattcgcaac

SEQ ID NO: 853032 - DNA, 75 bp, synthetic construct
  source 1..75: mol_type = other DNA
cggaagcacatcacgacgggatcgagaccgacagtcgcctgctaacactggataacgtgccgcgtgcgcttgcca

SEQ ID NO: 853033 - DNA, 75 bp, synthetic construct
  source 1..75: mol_type = other DNA
ggcggcagcggccggcactcgtgcggcgatcaacatgactggcggcgatgcggccctggacctgaccgcaatgcc

SEQ ID NO: 853034 - DNA, 75 bp, synthetic construct
  source 1..75: mol_type = other DNA
cctgatgccgttagtggcggataaccccctgacaccggcaggtctgctggcacccacctaccgtaaccagctggc

SEQ ID NO: 853035 - DNA, 75 bp, synthetic construct
  source 1..75: mol_type = other DNA
atgacgcaacaaatcaccctcatcaaagaccaaattctctccgataactatttcaccctgcacaacattacctac

SEQ ID NO: 853036 - DNA, 75 bp, synthetic construct
  source 1..75: mol_type = other DNA
cgatcgcggtaatggtgcgacgatcctcctgtacaacgcgaagaaaaagaccgtggttctgattcgtcagttccg

SEQ ID NO: 853037 - DNA, 75 bp, synthetic construct
  source 1..75: mol_type = other DNA
gcgttgcaatcgcatctcaacagcgtttctgctacctggcacgccttcggtcagaccaccaacaaaaagaaataa

SEQ ID NO: 853038 - DNA, 75 bp, synthetic construct
  source 1..75: mol_type = other DNA
ctggcggaaatcccgggtaatccgatctttatggcaattcacgttgccctgctcgactggttgattgccgcgcgt

SEQ ID NO: 853039 - DNA, 75 bp, synthetic construct
  source 1..75: mol_type = other DNA
ctgacgaagccgatcgtgcgttgcaatcgcatctcaacagcgtctctgctacctggcacgctttcggtcagacca

SEQ ID NO: 853040 - DNA, 75 bp, synthetic construct
  source 1..75: mol_type = other DNA
gtgcaaaattaacagagtggcaggttatagaaattaggaaaagactctctgaaaaagaagagtcagtacaagata

SEQ ID NO: 853041 - DNA, 75 bp, synthetic construct
  source 1..75: mol_type = other DNA
gatagcaaaaggaaggcatcgtggagccaagaaaggtcatgctcatcatggtgcaaaattaacagagtggcaggt

SEQ ID NO: 853042 - DNA, 75 bp, synthetic construct
  source 1..75: mol_type = other DNA
gctatgcggctgaacatgctactgatgaacaaatcgatttgctggcaaaagctctggaaatcaacagtcagtcgc

SEQ ID NO: 853043 - DNA, 75 bp, synthetic construct
  source 1..75: mol_type = other DNA
gtggaaatcattctcgagcgcgtaaccaatatttcgatgggtaacgaactcgataatgtgatggaatttgaagat

SEQ ID NO: 853044 - DNA, 75 bp, synthetic construct
  source 1..75: mol_type = other DNA
tcgatgggcagcgaactggataacgtcatggaatttgaagatatcgccgataacgcagcggacgcaccgactgaa

SEQ ID NO: 853045 - DNA, 75 bp, synthetic construct
  source 1..75: mol_type = other DNA
gtggaaggtgcttcgcacatggcggaaggttatacccgcgcaacggcagggaatatcggcgtatgtctggggact

SEQ ID NO: 853046 - DNA, 72 bp, synthetic construct
  source 1..72: mol_type = other DNA
gcaagcctgatggattttgctgtgccggtggtggcgtgtctgctggtctggctgttggttaatcgtgggtga

SEQ ID NO: 853047 - DNA, 75 bp, synthetic construct
  source 1..75: mol_type = other DNA
ctgctggttgaagtggcgcaggagatgcaaaaagcgggtcgtctgccgtgtcgtaaagaatgggtcgccgactgc

SEQ ID NO: 853048 - DNA, 75 bp, synthetic construct
  source 1..75: mol_type = other DNA
ccatgtgctggtcaacaacgcttatctggggctgattcgtcagtcacaacgcgcttttgacatggactactgcgt

SEQ ID NO: 853049 - DNA, 75 bp, synthetic construct
  source 1..75: mol_type = other DNA
gcgcttgtcttgcctgactggcaggtgggtgtgaaacgaatgctcaacgaattatttacgactacagcaatttaa

SEQ ID NO: 853050 - DNA, 75 bp, synthetic construct
  source 1..75: mol_type = other DNA
agataaggctgagtcagaacccgaatttgcacaattactcaatgcgaccagcgttgaatcaattgcaaaagcggc

SEQ ID NO: 853051 - DNA, 75 bp, synthetic construct
  source 1..75: mol_type = other DNA
tcgagtgtgattacaatcgctggcgtcgtcacagtgcctgtggcggtctcagcccggactgtcttgcactgcaaa

SEQ ID NO: 853052 - DNA, 75 bp, synthetic construct
  source 1..75: mol_type = other DNA
caggctgggcgcatgaccgtttaaaacgtgccgggttatcgcagagtttgtcgcgtggcaaatggtgcctaaccc

SEQ ID NO: 853053 - DNA, 75 bp, synthetic construct
  source 1..75: mol_type = other DNA
ccggtcaggcaccaagacacgttaaacaatggacgaaacaggaagatgcgttgctgataagcatgtacccgaaac

SEQ ID NO: 853054 - DNA, 75 bp, synthetic construct
  source 1..75: mol_type = other DNA
actctgcggcagccggagctcctctgatgctgaggctggcaggatgtggggacggtggtgcacttctgcccggaa

SEQ ID NO: 853055 - DNA, 75 bp, synthetic construct
  source 1..75: mol_type = other DNA
ctgtttgataacgaacgttttgaccatctctaccgcagcattaaccgcgtcgaagagaacgcgaaagctgcctga

SEQ ID NO: 853056 - DNA, 75 bp, synthetic construct
  source 1..75: mol_type = other DNA
ggtgcactttgcccatcaacgcgtttccacactctccggcggccagcaacagcgtgtggcgattgcccgcgcgct

SEQ ID NO: 853057 - DNA, 75 bp, synthetic construct
  source 1..75: mol_type = other DNA
acggcagcagccaacagtttgataacgatgaccatctctaccgcagcattaaccgcgtcgaagagaacgcgaaag

SEQ ID NO: 853058 - DNA, 75 bp, synthetic construct
  source 1..75: mol_type = other DNA
cagggcaggtaggttgggaactacagcgtgcgctggcacctttgggtaatttgattgctcttgatgttcactcta

SEQ ID NO: 853059 - DNA, 75 bp, synthetic construct
  source 1..75: mol_type = other DNA
ccgcctggcgggggagaaagagacgctctccatcattgacgaccagcacggggcgcccaccggcgctgagctgct

SEQ ID NO: 853060 - DNA, 75 bp, synthetic construct
  source 1..75: mol_type = other DNA
aacggccgctgaactcgcggttgtcgaatgagaagttccagcgcgtatttggcgtgacgctcccggactggcgcc

SEQ ID NO: 853061 - DNA, 75 bp, synthetic construct
  source 1..75: mol_type = other DNA
caatgaagtcggcgcctgggttattcactactctactgactacgtatttccgggaaccggtgaaataccgtggca

SEQ ID NO: 853062 - DNA, 75 bp, synthetic construct
  source 1..75: mol_type = other DNA
gaggcaccagcccgaacaccagaacgctgggaacagctcaaagaccaaatcgttgaagccttactggcctggcac

SEQ ID NO: 853063 - DNA, 75 bp, synthetic construct
  source 1..75: mol_type = other DNA
cgagtaacgtcggtgtttccaagctggcgttagcgatgccgtcctcagagttagtagatacttactcacgttttg

SEQ ID NO: 853064 - DNA, 75 bp, synthetic construct
  source 1..75: mol_type = other DNA
attaaaaccggtaccgcgaaaaaggtcgggccggacggtcgctacatcaataaatatattgcttataccgcaggc

SEQ ID NO: 853065 - DNA, 75 bp, synthetic construct
  source 1..75: mol_type = other DNA
atccgcaggcggggaaatactacggcggcgccgtttccgcgcccggcctttggtgccatcatgggcggcgtattg

SEQ ID NO: 853066 - DNA, 75 bp, synthetic construct
  source 1..75: mol_type = other DNA
gagccaaccgcagtcgcggatctgctgcaactggacaacgccggtgtagtggatatcggcggcggcactaccggc

SEQ ID NO: 853067 - DNA, 75 bp, synthetic construct
  source 1..75: mol_type = other DNA
gatttgggctgacccgaaagaagtgcatgacgcgggcggtatcagcgtcggtgaccgctggaaggcgctggctaa

SEQ ID NO: 853068 - DNA, 75 bp, synthetic construct
  source 1..75: mol_type = other DNA
ccggatgcgctgacaacgggcgataaaaatgaatttgtgattaatcaaggcgagggtacaggtggcagatcgtaa

SEQ ID NO: 853069 - DNA, 75 bp, synthetic construct
  source 1..75: mol_type = other DNA
caacgctttataaagacgccaccggagagtgtatctggtcgccggagaaacccacgcgaacctcagcttgtgggg

SEQ ID NO: 853070 - DNA, 75 bp, synthetic construct
  source 1..75: mol_type = other DNA
actgctgctcagtatcttcttcgttatggcgcggtccgaatttcaaaaggcaagggcgctgtctatcatcgtctc

SEQ ID NO: 853071 - DNA, 75 bp, synthetic construct
  source 1..75: mol_type = other DNA
ggtcttttctgatggcctgtggttccgaatcacgcttccctttaccaagctttatgccggataacttcagcctgg

SEQ ID NO: 853072 - DNA, 75 bp, synthetic construct
  source 1..75: mol_type = other DNA
aaccctgaccggggtattacagaagtcgagtaacgtcggtgtttccaagctggcgttagcgatgccgtcctcagc

SEQ ID NO: 853073 - DNA, 75 bp, synthetic construct
  source 1..75: mol_type = other DNA
atgaggctattaatagtaatatttcttattttctcggtgagattattggctgcagatgaagttttaacgaatcac

SEQ ID NO: 853074 - DNA, 75 bp, synthetic construct
  source 1..75: mol_type = other DNA
atggcttggaaataatgagccctaacaaacccaggatgggtacaaccattaaacttcggttcccaatgcaggaag

SEQ ID NO: 853075 - DNA, 75 bp, synthetic construct
  source 1..75: mol_type = other DNA
agtgagccatgtgctggatgagccaaccgcagtcgcggatctgctgcaactggacaacgccggtgtagtggatat

SEQ ID NO: 853076 - DNA, 75 bp, synthetic construct
  source 1..75: mol_type = other DNA
caccgggtaacaaagtcttattaatactggatgagacaaccaatcagaaacttttagcagctagagatcgtagcg

SEQ ID NO: 853077 - DNA, 75 bp, synthetic construct
  source 1..75: mol_type = other DNA
atgcgtatgcgtaatgacatcaacgcctggtttggttacgacgactctgtgccactgctcaatctgtacaatccg

SEQ ID NO: 853078 - DNA, 75 bp, synthetic construct
  source 1..75: mol_type = other DNA
ctataccttctttgacggtccgctttcaggtctgacgctgggcaccggtggtcgttatactggctccagctatgg

SEQ ID NO: 853079 - DNA, 75 bp, synthetic construct
  source 1..75: mol_type = other DNA
aacgatgcaggataagcggatcctgtttcgcactcgcgaatgtctcccggcattatttgaaggctttaacgacaa

SEQ ID NO: 853080 - DNA, 75 bp, synthetic construct
  source 1..75: mol_type = other DNA
atgggatgaggttgcgcaactggttaataccgggcgctttaaccgcagtaacttcgacctggcggcaaaatcact

SEQ ID NO: 853081 - DNA, 75 bp, synthetic construct
  source 1..75: mol_type = other DNA
tctggcggcgttggctatatgttttatgggatgaggttgcgcaactggttaataccgggcgctttaaccgcagta

SEQ ID NO: 853082 - DNA, 75 bp, synthetic construct
  source 1..75: mol_type = other DNA
ggatatcggcggcggcactaccggcattgccatcgtgaaaaagggcaaggtgacgtactcgcggatgaagccacc

SEQ ID NO: 853083 - DNA, 75 bp, synthetic construct
  source 1..75: mol_type = other DNA
tgcaactggacaacgccggtgtagtggatatcggcggtggcactaccggcattgccatcgtgaaaaagggcaagg

SEQ ID NO: 853084 - DNA, 75 bp, synthetic construct
  source 1..75: mol_type = other DNA
ctcggcggatgaagccaccggcggacatcacatctctctgactctcgccggaaatcgccgtatttcgctggaaga

SEQ ID NO: 853085 - DNA, 75 bp, synthetic construct
  source 1..75: mol_type = other DNA
atgtccgacagtgcttttgccgttacgcactacgccttcagtagcggagcaggaaggacatctgatggaaatgga

SEQ ID NO: 853086 - DNA, 75 bp, synthetic construct
  source 1..75: mol_type = other DNA
gaagaaaaaaaatggaaggatattttactgagctataattttacaagggttgatgagctggataggaaaatagca

SEQ ID NO: 853087 - DNA, 75 bp, synthetic construct
  source 1..75: mol_type = other DNA
tgaagggcagggcattacggatttatggctggcgggcggttcctgtatgcaaccgggcgtagcggcgctgttttg

SEQ ID NO: 853088 - DNA, 75 bp, synthetic construct
  source 1..75: mol_type = other DNA
tgggcttacggggcgatagccggttgtacgttcttcattgcgcgtgaacacacccaggcggaatatcgctggatt

SEQ ID NO: 853089 - DNA, 75 bp, synthetic construct
  source 1..75: mol_type = other DNA
cgcattttttgctggcgctatcgtggtcttcgacaaaacatggcggggtgagcgtttcagttacatcaaccgcac

SEQ ID NO: 853090 - DNA, 75 bp, synthetic construct
  source 1..75: mol_type = other DNA
gacaaggcgttaaacgaatcgcgcgtttggcctcttgaggttggactggtgtttaaccagattgaaggggctgac

SEQ ID NO: 853091 - DNA, 75 bp, synthetic construct
  source 1..75: mol_type = other DNA
atgcagatcctgtttaacgatcaaccgatgcagtgcgccgccgggcaaactgttcacgaactactggagcaactc

SEQ ID NO: 853092 - DNA, 75 bp, synthetic construct
  source 1..75: mol_type = other DNA
tcatcctctgcaccggcaattcggcgcgcagcatcatggccgaagctctcatcaacacgatggggcaagggcgct

SEQ ID NO: 853093 - DNA, 75 bp, synthetic construct
  source 1..75: mol_type = other DNA
ttcgacaagacctggaagggaccggcaatcagctacatagggcgcgatgaacttgaggcatgtggtgaggcgttt

SEQ ID NO: 853094 - DNA, 75 bp, synthetic construct
  source 1..75: mol_type = other DNA
ctcagttaggcggcatgctggtcgatatggctgcaaatcaggttaaaaaagagaaagccaaagtggccttctttt

SEQ ID NO: 853095 - DNA, 75 bp, synthetic construct
  source 1..75: mol_type = other DNA
gtggtcggtgcgggacctgctgggctggcgtttgccattaacgcggcggcgcgtgggcatcaggtaacgttgttt

SEQ ID NO: 853096 - DNA, 75 bp, synthetic construct
  source 1..75: mol_type = other DNA
ccatcatcggttgtggcgggattggttttgatacggcgatgtatttaagtcagccgggcgaatccaccagccaga

SEQ ID NO: 853097 - DNA, 75 bp, synthetic construct
  source 1..75: mol_type = other DNA
ttgaaatcattactggcaggatttcgttttctactcgccagcccgctggtgggagggattgcgttgctggggggt

SEQ ID NO: 853098 - DNA, 75 bp, synthetic construct
  source 1..75: mol_type = other DNA
ggtctgttgatgttgctctccacattgggggcgttcctcgccattggtctgtttggcctgatgccgatgtggatt

SEQ ID NO: 853099 - DNA, 75 bp, synthetic construct
  source 1..75: mol_type = other DNA
atggataagagtaagcgccatctggcgtggtgggttgtcggggcactggcggtggctgccgtcgtggcgtggtgg

SEQ ID NO: 853100 - DNA, 75 bp, synthetic construct
  source 1..75: mol_type = other DNA
atgcagatcctgtttaacgatcaaccgatgcagtgcgccgccgggcaaactgttcacgagctgctggagcaactc

SEQ ID NO: 853101 - DNA, 75 bp, synthetic construct
  source 1..75: mol_type = other DNA
atggatatcacgccgatacttcatgcaatttgtgtcgtagcggtgcaggtactggctggtctttttaccggaaac

SEQ ID NO: 853102 - DNA, 75 bp, synthetic construct
  source 1..75: mol_type = other DNA
acgctggagtgaccgggtggcagagcatgacctggaaaccctgttctggcagtggggtgagcgttttccgtcact

SEQ ID NO: 853103 - DNA, 75 bp, synthetic construct
  source 1..75: mol_type = other DNA
atgaacgcacgttcacaggcactggttcctctcagtacagagcaacaggccgcatggcgggcggtggcggagacg

SEQ ID NO: 853104 - DNA, 75 bp, synthetic construct
  source 1..75: mol_type = other DNA
gcgtgtttgctggtttggctgttggttaaacgcgaaagtcataatgccaggggaataccgcaggacgttcaggtt

SEQ ID NO: 853105 - DNA, 75 bp, synthetic construct
  source 1..75: mol_type = other DNA
aaaggtgagcacccacttcttgatgagcacatagcgtgggcgattgcgcagcaaatcgagagacgaaatgcgtgc

SEQ ID NO: 853106 - DNA, 75 bp, synthetic construct
  source 1..75: mol_type = other DNA
gcgcgtgatcagcgtgcggatgaattaccttcctgctaacgccgcatttgccagcacgctgaaaaaccccaaact

SEQ ID NO: 853107 - DNA, 75 bp, synthetic construct
  source 1..75: mol_type = other DNA
acccttgaagccgcacgttatgaagatgaaagcctgaacctgggcgattacgttgaagatcagattgagtctgtt

SEQ ID NO: 853108 - DNA, 75 bp, synthetic construct
  source 1..75: mol_type = other DNA
atgactctcaataaaaccgatcgcatcgtcattacgctgggcaaacagatcgttcacggcaaatacgtgccaggc

SEQ ID NO: 853109 - DNA, 75 bp, synthetic construct
  source 1..75: mol_type = other DNA
acggcttatcagtgcaatgagcgaagtgcgaaatctggtggaaccggcgattgcccgttgggcagcagagcgcgc

SEQ ID NO: 853110 - DNA, 75 bp, synthetic construct
  source 1..75: mol_type = other DNA
acgctggagtgactgggtggcagagcatgacctggaaaccctgttctggcagtggggcgagcgttttccgtcact

SEQ ID NO: 853111 - DNA, 75 bp, synthetic construct
  source 1..75: mol_type = other DNA
ccgactgttgaagcactgcgcgagcgtgctaaaaatgcactggccaccattgcacaggcccaggaagaaagcctc

SEQ ID NO: 853112 - DNA, 75 bp, synthetic construct
  source 1..75: mol_type = other DNA
gggaactcaacgtaatgaccgttgacgacctgcaggctaaacatcaggcggaagcacacgcagcgatcgatacct

SEQ ID NO: 853113 - DNA, 75 bp, synthetic construct
  source 1..75: mol_type = other DNA
gaatccgcagttcaaggaaaccactcgctggattggaaatccgtataaaaagaatggactcactgattttgacac

SEQ ID NO: 853114 - DNA, 75 bp, synthetic construct
  source 1..75: mol_type = other DNA
atgtacatcgttgatgtaatggatgacgcgccggatgtgctcgacaagctggcaatgcacaaagcacgcgaaggt

SEQ ID NO: 853115 - DNA, 75 bp, synthetic construct
  source 1..75: mol_type = other DNA
aaggcgcgcatccgccggagctgtttcgcgagcttgaaattgccgagctggatcaattgattgccgtttctcagc

SEQ ID NO: 853116 - DNA, 75 bp, synthetic construct
  source 1..75: mol_type = other DNA
tgccctccgagatcgccggccaggtggcgctgggcagcgatgcccgcatcgtgctcgacgccgctcccgacctgg

SEQ ID NO: 853117 - DNA, 75 bp, synthetic construct
  source 1..75: mol_type = other DNA
gcaactggctaacgccatcggcaaaccgaaagcggtacgggccgttgccagcgcctgtgccgccaacaagctggc

SEQ ID NO: 853118 - DNA, 75 bp, synthetic construct
  source 1..75: mol_type = other DNA
gtgtggacaccgagggctgaccagtctggtggacgagttaggctgctgactgaagagggatggctcgatgaccat

SEQ ID NO: 853119 - DNA, 75 bp, synthetic construct
  source 1..75: mol_type = other DNA
tcggcagttggttaccgaccaccgtaaccgcgccgcttaataccattcatgcggcgctgaaacgtattgctcaac

SEQ ID NO: 853120 - DNA, 75 bp, synthetic construct
  source 1..75: mol_type = other DNA
tttgcacaattacttaacgcgacgagtgtcgaagcgatcgcgaaagcagccaatgaagtcggcgcctgggttatt

SEQ ID NO: 853121 - DNA, 75 bp, synthetic construct
  source 1..75: mol_type = other DNA
ttagcggttattaacgatcagtttggtgcaccaacgggtgctgagctgctggctgattgtacggcacatgctatt

SEQ ID NO: 853122 - DNA, 75 bp, synthetic construct
  source 1..75: mol_type = other DNA
aattgcgtgatgggcacggcatgccattcagggaaataagcagacatatacacaaaatcacagggatacaggtgg

SEQ ID NO: 853123 - DNA, 75 bp, synthetic construct
  source 1..75: mol_type = other DNA
cagtgtcgcccagttcacgccaaaaactgtcgaaaccagcgatgaacggctgaaactgatgttccgcgtcaaagc

SEQ ID NO: 853124 - DNA, 75 bp, synthetic construct
  source 1..75: mol_type = other DNA
ccggagaaaaagcgttacagaaacattgcgcgaagcatattattttccgtaccagctgggtatatgcaggtaaag

SEQ ID NO: 853125 - DNA, 75 bp, synthetic construct
  source 1..75: mol_type = other DNA
gaaataacttcgccaaaacgatgttgcgtctggcaaaagagcgtgaagaattagcggttattaacgatcagtttg

SEQ ID NO: 853126 - DNA, 75 bp, synthetic construct
  source 1..75: mol_type = other DNA
ccgcgccagacatgctttgcgggaaaacgtctccttctacgcaaatgccagcgaggcactcgccgctggctttcg

SEQ ID NO: 853127 - DNA, 75 bp, synthetic construct
  source 1..75: mol_type = other DNA
gctgcacatccgcgagatttttcgcagtatgttgaccgcaaatacagtctggctgaactgatccacacctggtca

SEQ ID NO: 853128 - DNA, 75 bp, synthetic construct
  source 1..75: mol_type = other DNA
tgctttatgctctgctccttcatccggttgttctgaaatcgttaatcagacaggagccgctgaatgatactctgg

SEQ ID NO: 853129 - DNA, 75 bp, synthetic construct
  source 1..75: mol_type = other DNA
atggccgtacaacagaataaacccacccgttccaaacgtggcatgcgtcgttcccatgacgcgctgaccgcagtc

SEQ ID NO: 853130 - DNA, 75 bp, synthetic construct
  source 1..75: mol_type = other DNA
tgatacaccgccacataaaacccaggggcggaatgaagataaccccacacggcccatgtacactgttccgttcct

SEQ ID NO: 853131 - DNA, 75 bp, synthetic construct
  source 1..75: mol_type = other DNA
cgcgtccgtacaccattgaagcattacaacaagttctcactttcgccaacgaagagaatcctgatctgtatctaa

SEQ ID NO: 853132 - DNA, 75 bp, synthetic construct
  source 1..75: mol_type = other DNA
ggccggctttcagctggagagcactggggtgggcaatactttatttttgttttttttccactctgctgcaggtca

SEQ ID NO: 853133 - DNA, 75 bp, synthetic construct
  source 1..75: mol_type = other DNA
tggataaaatcacccacgcgtgtcgactgctggaacaggaaacgcctgtaacgttggaagccttagccgaccagg

SEQ ID NO: 853134 - DNA, 75 bp, synthetic construct
  source 1..75: mol_type = other DNA
aaagcagtacgtgcggtggcaagcgcttgcgccgctaataaattggctatcgttattccctgccatcgggtagta

SEQ ID NO: 853135 - DNA, 75 bp, synthetic construct
  source 1..75: mol_type = other DNA
cgttgatgttaccgctggatattcggggaaccgcttttcaacaacaagtctggcaggcattgtgtaccattcctt

SEQ ID NO: 853136 - DNA, 75 bp, synthetic construct
  source 1..75: mol_type = other DNA
cgctgacgttaccgttggatattcgcggcaccgctttccaacaacaagtctggcaagcattgcgttccattcctt

SEQ ID NO: 853137 - DNA, 75 bp, synthetic construct
  source 1..75: mol_type = other DNA
cgtggtgatggcacactttccggttaccgctggggcgtgtcgcgtaaagcgcaactgctgcgccgcgaagctgag

SEQ ID NO: 853138 - DNA, 75 bp, synthetic construct
  source 1..75: mol_type = other DNA
ttgcagcagatgtttcccgctgccgacaacgcgcctgccgatctgatgtttcagcaacatgtgcgtgaagtgatc

SEQ ID NO: 853139 - DNA, 75 bp, synthetic construct
  source 1..75: mol_type = other DNA
aaccaaatctccggcgctatgggcggcggtgattatgtactgcttctcgctgcgaagaatggcgaatctacgcaa

SEQ ID NO: 853140 - DNA, 75 bp, synthetic construct
  source 1..75: mol_type = other DNA
atgtgcaacgctgcttaaacccgtctctgctgagcatcacgaaaataagggcggtttcttcggctggtttaatac

SEQ ID NO: 853141 - DNA, 75 bp, synthetic construct
  source 1..75: mol_type = other DNA
gatctgctggctgacctctataaagctacccgcaaatacggggaagttgaccgggtatccttctttaaggacatc

SEQ ID NO: 853142 - DNA, 75 bp, synthetic construct
  source 1..75: mol_type = other DNA
agggttgcgcatccgcattgcagatctgattgacggtccgctgcgttctgtcacgcagtggctcacgcgggtggt

SEQ ID NO: 853143 - DNA, 75 bp, synthetic construct
  source 1..75: mol_type = other DNA
ggtaaactgttcaaaaccaaaaccggcgaactgtctatccactgtaccgagctgcgtctgctgaccaaagcactg

SEQ ID NO: 853144 - DNA, 75 bp, synthetic construct
  source 1..75: mol_type = other DNA
ggggccaccgtcgcgacgttgcgggttatgccgcaggtctggaactgttcgaccgccgtttgccggagctgatgt

SEQ ID NO: 853145 - DNA, 75 bp, synthetic construct
  source 1..75: mol_type = other DNA
cgtaaaggcccgctcaatctgccaaatctgacccgtctggggctggcgaaagcacacgaaggttctaccggtttc

SEQ ID NO: 853146 - DNA, 75 bp, synthetic construct
  source 1..75: mol_type = other DNA
gggaaattcagaaaatgcgggaacttggcggagagctgaaacgccacggcatttccctgacaggcagcgataaca

SEQ ID NO: 853147 - DNA, 75 bp, synthetic construct
  source 1..75: mol_type = other DNA
ggcggcatggatctcggcgagacggcggatattggctcaaatatcctgacgcagttcggcctttctgctgaccag

SEQ ID NO: 853148 - DNA, 75 bp, synthetic construct
  source 1..75: mol_type = other DNA
gaatgtcgtcagggtgttgcctgcgctgtggggaatggtgacgggttctgtttctttgctgggaggcgctatcgg

SEQ ID NO: 853149 - DNA, 75 bp, synthetic construct
  source 1..75: mol_type = other DNA
taaacccaaagacaacaaaccgctcacagacagcaataccgggacgctacgcagactcagcaaaattgctgataa

SEQ ID NO: 853150 - DNA, 75 bp, synthetic construct
  source 1..75: mol_type = other DNA
cgcatgggaaggtcttcgtattcgcatcagtgatctggttgacggtccgctgcgttctgtcacgcagtggctcac

SEQ ID NO: 853151 - DNA, 75 bp, synthetic construct
  source 1..75: mol_type = other DNA
agaaagaaaatcgaagacgcacagcgtgcggccattcttcaggacaaggttgctctgtttcagggagacattgcg

SEQ ID NO: 853152 - DNA, 75 bp, synthetic construct
  source 1..75: mol_type = other DNA
gccagatgatttttttggctactggaattatttttgcgaggcgcttaatatcatatatgaaggcagcccaccttt

SEQ ID NO: 853153 - DNA, 75 bp, synthetic construct
  source 1..75: mol_type = other DNA
caccatggcggcgttcgttacggcgctgatccccgacctgaccctgctgcatttccgtaacactacggaagccgg

SEQ ID NO: 853154 - DNA, 75 bp, synthetic construct
  source 1..75: mol_type = other DNA
ccgtgcggtaagtacgcgcatccgggcttttatcgatttccttagcgagcatgtaaaaacagctcccggaggagc

SEQ ID NO: 853155 - DNA, 75 bp, synthetic construct
  source 1..75: mol_type = other DNA
ctgaaacagctttgcctgagtggcaacgggattgcgtgtttgtccgactatatgatcgacagagaaattgctcgt

SEQ ID NO: 853156 - DNA, 75 bp, synthetic construct
  source 1..75: mol_type = other DNA
atgacagcgtgttcagcgttgatgagctggaaaaagcggtagtggtgaaaatcgccgatcgtcagtggcgttatt

SEQ ID NO: 853157 - DNA, 75 bp, synthetic construct
  source 1..75: mol_type = other DNA
gtgcggcgaagagttcacctccagccaggacgtcaccgaatatctgcaacagttgcttgagcgtgagcgcgaagc

SEQ ID NO: 853158 - DNA, 75 bp, synthetic construct
  source 1..75: mol_type = other DNA
ctgccgatgtcggtgcagccgacacagctggtgaccgaaaccctgaacgaacgccaggcgcgcgtgctgccgctt

SEQ ID NO: 853159 - DNA, 75 bp, synthetic construct
  source 1..75: mol_type = other DNA
cggattaacgataccgaaagcgacacctccagcccgctgcgttattgcccggagaaactcccggattcggtaagc

SEQ ID NO: 853160 - DNA, 75 bp, synthetic construct
  source 1..75: mol_type = other DNA
gactggcagaactcaatcctgtctgcgctgggcgtaaaaacggaagcctccgcgaaattatccattcaggcgggt

SEQ ID NO: 853161 - DNA, 75 bp, synthetic construct
  source 1..75: mol_type = other DNA
aacgcggcagaggctggtagcgcatacaaaagcattgataataaactacgggcagagatatttgccatgacactt

SEQ ID NO: 853162 - DNA, 75 bp, synthetic construct
  source 1..75: mol_type = other DNA
tcgtcgcgtacagtcaattttgcaggagatggcagcggcagaatcagaaattatggagacgcgtaatacaccgcg

SEQ ID NO: 853163 - DNA, 75 bp, synthetic construct
  source 1..75: mol_type = other DNA
gtgcttgagcaactggatgcacaggacaatttattttcatttatgaaaactgcgcattctattttgctccagggg

SEQ ID NO: 853164 - DNA, 75 bp, synthetic construct
  source 1..75: mol_type = other DNA
atgtgagctgcttggccagccgctgtataacgcagaaaagaaaatatgcgaaacactgaaagcggcagatactgc

SEQ ID NO: 853165 - DNA, 75 bp, synthetic construct
  source 1..75: mol_type = other DNA
gaatgaatgaactgagcaagaaacatctggggactcaagaaaacattctgtgttcgctgcgcttcttttacgtct

SEQ ID NO: 853166 - DNA, 75 bp, synthetic construct
  source 1..75: mol_type = other DNA
gattgacggtccgctgcgttctgtcacgcagtggctcacgcgggtggtctcaaaggtgacggcgctggcgcaggc

SEQ ID NO: 853167 - DNA, 75 bp, synthetic construct
  source 1..75: mol_type = other DNA
atgcgtcgaatgtttatcagcttaacgttgcgaagcttccaggcagcggcattttctcaactgtcagattctgac

SEQ ID NO: 853168 - DNA, 75 bp, synthetic construct
  source 1..75: mol_type = other DNA
tgtgtgttcaggatggtcgcactcacaaacaaatctgcgagatgtacagccgcgtcagtcgtgacccgttctggt

SEQ ID NO: 853169 - DNA, 75 bp, synthetic construct
  source 1..75: mol_type = other DNA
tgacggtattgaacgtggaatgaatactgaaggcgtgctgcctggtccgctcaatgtgccgcgccgtgccgtagc

SEQ ID NO: 853170 - DNA, 75 bp, synthetic construct
  source 1..75: mol_type = other DNA
atgcttttcaggtggacaaagagggccagcttaataccggacgtattctttccctgcgccgcgtcaagattcagg

SEQ ID NO: 853171 - DNA, 75 bp, synthetic construct
  source 1..75: mol_type = other DNA
aaaatggcaatggcaccggaggcgataaacccaaagacaacaaaccgctcacagacagcaataccggtacgctac

SEQ ID NO: 853172 - DNA, 75 bp, synthetic construct
  source 1..75: mol_type = other DNA
accgatacaaaagtatcaccagccagcaaagtgtcgaactaacgaacatgttaatcccctccactcctgaatttt

SEQ ID NO: 853173 - DNA, 75 bp, synthetic construct
  source 1..75: mol_type = other DNA
cagtggggaaatcaggaggatttggcatgcgcacagtggatctgggggcgaatcgtgagtctttacgaacaggcc

SEQ ID NO: 853174 - DNA, 75 bp, synthetic construct
  source 1..75: mol_type = other DNA
gccagtggggaacgcaggatgatttgacctgcgcacagtggctctggaaaaaaatcatcgccctgtacgagcagg

SEQ ID NO: 853175 - DNA, 75 bp, synthetic construct
  source 1..75: mol_type = other DNA
gcttcaggcagcggcattttctcaactgtcagattctgacccgtcaaaatctgacgcatcaaaatctgacgcatc

SEQ ID NO: 853176 - DNA, 75 bp, synthetic construct
  source 1..75: mol_type = other DNA
tctgtggcgaatatatcagcttcaacggcgagcagtcatttatctaaattattagattgccagctaatcacagta

SEQ ID NO: 853177 - DNA, 75 bp, synthetic construct
  source 1..75: mol_type = other DNA
gcggcaggattcaaaaaaattcaccttgattgcagcatgtcctgtcaggacgatccgattcccttaactgatgac

SEQ ID NO: 853178 - DNA, 75 bp, synthetic construct
  source 1..75: mol_type = other DNA
gccgttactgattgaagcgacctccaatcaggtggaccagttcggcggttataccggaatgacgcccgccgattt

SEQ ID NO: 853179 - DNA, 75 bp, synthetic construct
  source 1..75: mol_type = other DNA
cggcggtattgagcgcggtatttccaccgaaggcgtgctgccaggcaaactgcgcgttccacgccgtgcggcggc

SEQ ID NO: 853180 - DNA, 75 bp, synthetic construct
  source 1..75: mol_type = other DNA
ggtaaacaatttaccgacgatctgattgcccgtaatctgctgaaagacgtaacccgcgtggtggttgacgtctac

SEQ ID NO: 853181 - DNA, 75 bp, synthetic construct
  source 1..75: mol_type = other DNA
tatcccggcagtgctggcatactacgacaagtttatccgcgaagtgaacgctaactcactggctcgttacctgct

SEQ ID NO: 853182 - DNA, 75 bp, synthetic construct
  source 1..75: mol_type = other DNA
tatgggtctggcgggtaacctgccggataccgtggatatcgattccatccctagttttattcaggatgtgaatac

SEQ ID NO: 853183 - DNA, 75 bp, synthetic construct
  source 1..75: mol_type = other DNA
agttggtgtagcgtgctctatggcggcggcaggtctggctgaactgttaggcgcaagcccggcgcaggtatgcat

SEQ ID NO: 853184 - DNA, 75 bp, synthetic construct
  source 1..75: mol_type = other DNA
cggttgttgactggatcaacatgttcgctctggcggtgaacgaagagaacgctgctggtggtcgcgtggtgactg

SEQ ID NO: 853185 - DNA, 75 bp, synthetic construct
  source 1..75: mol_type = other DNA
gttccggtgcccggcggcgctcatgaaaccttaagcgaactggcggtcactacgccggatgccgcccgcgccacg

SEQ ID NO: 853186 - DNA, 75 bp, synthetic construct
  source 1..75: mol_type = other DNA
caacccggcgtcgaattcgatcacaccaacgttattgattatcagcccgtcaaagcgaccgccttaagccagatg

SEQ ID NO: 853187 - DNA, 75 bp, synthetic construct
  source 1..75: mol_type = other DNA
gacagcacaaagagggcaaaacaaatgggatttatgccgtttgctccgcgcatccgctggtactggaagccgcca

SEQ ID NO: 853188 - DNA, 75 bp, synthetic construct
  source 1..75: mol_type = other DNA
ggcagcacaaagggggcaaaacaaatgggatttatgccgtttgttccgcacatccgctggtgctggaagctgcca

SEQ ID NO: 853189 - DNA, 75 bp, synthetic construct
  source 1..75: mol_type = other DNA
ccatctggccacgcatcattgctctggtggttcaacccggcgtcgaattcgatcacaccaacgttattgattatc

SEQ ID NO: 853190 - DNA, 75 bp, synthetic construct
  source 1..75: mol_type = other DNA
ccgatgatttgattaaaagctacgtcgcggcgggattcaaaaaaatccatctcgattgcagtatgtcttgtcagg

SEQ ID NO: 853191 - DNA, 75 bp, synthetic construct
  source 1..75: mol_type = other DNA
tcaatggatggatgaattgccggctcgcttcagccataacacgcaacatcttgatgagaaaaaagagctgggaca

SEQ ID NO: 853192 - DNA, 75 bp, synthetic construct
  source 1..75: mol_type = other DNA
cgctgattaacccgcacaaaggcaaatttaacgtcaccgccaaaggtggactggtggaagaagagtacgtcgact

SEQ ID NO: 853193 - DNA, 75 bp, synthetic construct
  source 1..75: mol_type = other DNA
catgcctacatcatctacgcgccagcgttgatgatcgctctgtttgtgctgccgcatatgattcacgccagcctg

SEQ ID NO: 853194 - DNA, 75 bp, synthetic construct
  source 1..75: mol_type = other DNA
cagtaccggaactgccgcgcggctgggctgcgtctctattcatctcaatcataagttactcgataaagtgcgagt

SEQ ID NO: 853195 - DNA, 75 bp, synthetic construct
  source 1..75: mol_type = other DNA
tcgtcgctcatcgtggcggcggtaagctggccccggaaaacaccctggcggcaatcgacgtcggggcaaaatacg

SEQ ID NO: 853196 - DNA, 75 bp, synthetic construct
  source 1..75: mol_type = other DNA
gccaaaggcgagtttgtgtcgattttcgactgcgaccacgtgccaacgcgctcgttcctgcaaatgaccatgggc

SEQ ID NO: 853197 - DNA, 75 bp, synthetic construct
  source 1..75: mol_type = other DNA
cttgtcgggcattccacggctgatcttcctgactgcgccgctggcgttcctgctgcttcatgcctacatcatcta

SEQ ID NO: 853198 - DNA, 75 bp, synthetic construct
  source 1..75: mol_type = other DNA
ccgaaagtctgtcggcgcatatcggccaacgtattcgctgggcgcgtgggatggtgcaaatcttccgtcttgata

SEQ ID NO: 853199 - DNA, 75 bp, synthetic construct
  source 1..75: mol_type = other DNA
ggcgtggtatatcgcaccaccgacgctggtggcgctgattaacccgcacaaaggcaaatttaacgtcaccgccaa

SEQ ID NO: 853200 - DNA, 75 bp, synthetic construct
  source 1..75: mol_type = other DNA
atcggtagaaagcaaacaggtacgccgatcgcaccgcgtggagatgacgatgcccgcggcaattgcccgcgaaga

SEQ ID NO: 853201 - DNA, 75 bp, synthetic construct
  source 1..75: mol_type = other DNA
ctggcggagtttgctccgtcttcggtgaaaggcattttccgcgtgctgacttctctggtttcctgggttgtatcg

SEQ ID NO: 853202 - DNA, 75 bp, synthetic construct
  source 1..75: mol_type = other DNA
ttttacaacctgattattctcggcggcgcggtggcggtatcggtagaaagcaagcaggtccgtcgttcacaccgt

SEQ ID NO: 853203 - DNA, 75 bp, synthetic construct
  source 1..75: mol_type = other DNA
aggccgagcgtaatgacatggtggaatactttggcgagcacctcgacggttttgtctttacgcaaaacggttggg

SEQ ID NO: 853204 - DNA, 75 bp, synthetic construct
  source 1..75: mol_type = other DNA
cgatgatgcaggtgatcccaggcggtgcggctgcgcgtccgtttatcacccatcataacgcgctggatcttgaca

SEQ ID NO: 853205 - DNA, 75 bp, synthetic construct
  source 1..75: mol_type = other DNA
ttgccttcccgaacgatttccgtcgtgatcatacctctgaccaattgcacgcagaattcgatggtaaagagaacg

SEQ ID NO: 853206 - DNA, 75 bp, synthetic construct
  source 1..75: mol_type = other DNA
ggcggatctggataacttcgactctgcgaaagcgattgctgaatctatcggcatccacgttgagaagagctgggg

SEQ ID NO: 853207 - DNA, 75 bp, synthetic construct
  source 1..75: mol_type = other DNA
cacatctgattcagcctaccttcattactgaatatccggcagaagtatccccgctggcccgccgtaatgaggtta

SEQ ID NO: 853208 - DNA, 75 bp, synthetic construct
  source 1..75: mol_type = other DNA
cacatctgattcagcctacctttattactgaatatccggcagaagtgtctccgctggcccgccgtaatgaggtta

SEQ ID NO: 853209 - DNA, 75 bp, synthetic construct
  source 1..75: mol_type = other DNA
cacatctgattcagcctaccttaattactgaatatccggcagaagtctccccgctggcccgccgtaatgaggtta

SEQ ID NO: 853210 - DNA, 75 bp, synthetic construct
  source 1..75: mol_type = other DNA
ggctgctgtctgccggactggtcaatggtcgtaacgtctggcgcgccgatctcaccgagaaatatgcacaaatta

SEQ ID NO: 853211 - DNA, 75 bp, synthetic construct
  source 1..75: mol_type = other DNA
agccccatcgacctgagcgtggaaacgcgtcttgatgcagaagtgaaaagctggtttgccttcgccctacaaaaa

SEQ ID NO: 853212 - DNA, 75 bp, synthetic construct
  source 1..75: mol_type = other DNA
aagaattactggcggttgggcgtgaactgcgtgctcgtcactgggatcaacaaaagcaggcggggattgacctgc

SEQ ID NO: 853213 - DNA, 75 bp, synthetic construct
  source 1..75: mol_type = other DNA
atgtctgaacaacacgcacagggcgctgacgcggtagtcgatcttaacaatgaactgaaaacgcgtcgtgagaag

SEQ ID NO: 853214 - DNA, 75 bp, synthetic construct
  source 1..75: mol_type = other DNA
gctgaccgacaaaccggtgaaagggatgctgacggggccggtaaccatactctgctggtcattcccgcgtgaaga

SEQ ID NO: 853215 - DNA, 75 bp, synthetic construct
  source 1..75: mol_type = other DNA
gaagagtttgattatccaaatgaaatcggtccaggcgtctatgacattcactcgccaaacgtaccgagcgtggaa

SEQ ID NO: 853216 - DNA, 75 bp, synthetic construct
  source 1..75: mol_type = other DNA
gcagaaagtgaatctgctactcaaacgcggtcaacaggaatacgtcttcccgacccaggtggcacgcgtgatggg

SEQ ID NO: 853217 - DNA, 75 bp, synthetic construct
  source 1..75: mol_type = other DNA
accgtcgtgagctggcttatctctccgctgatgatttgcgctctatgtcggataaggcattgggtgcgctgcgtc

SEQ ID NO: 853218 - DNA, 75 bp, synthetic construct
  source 1..75: mol_type = other DNA
gaacagcgcctgcgtgagcaacaggaagccgagcgcctgctggcggatttctgcaaacgccagggcaagaacttt

SEQ ID NO: 853219 - DNA, 75 bp, synthetic construct
  source 1..75: mol_type = other DNA
cgagcgtgaagtgctttccgaacgcttcgccacgctctcctttgatgtacagaaaacccagcgtctgcatcaggc

SEQ ID NO: 853220 - DNA, 75 bp, synthetic construct
  source 1..75: mol_type = other DNA
cagccgtcgcgtcgaactggagcgggcgttgagtaatcatgaaaatgataaccagcagcagcgcattcagtttga

SEQ ID NO: 853221 - DNA, 75 bp, synthetic construct
  source 1..75: mol_type = other DNA
gatattattcgtaccgatgatccggtggaagctatcgaacagatggagatcgaacttagccgtctgaccgaagaa

SEQ ID NO: 853222 - DNA, 75 bp, synthetic construct
  source 1..75: mol_type = other DNA
gggctctgaagatcagcgcctgaatgcgctggcggaacgttttggcggcgtgctgttgtcagaaatttatgacga

SEQ ID NO: 853223 - DNA, 75 bp, synthetic construct
  source 1..75: mol_type = other DNA
gtgcggcgaagagttctcctccagccaggacgtcaccgaatatctgcaacagttgctggagcgtgagcgcgaagc

SEQ ID NO: 853224 - DNA, 75 bp, synthetic construct
  source 1..75: mol_type = other DNA
cggttctgaagatcagcgtctgaatgcactggcagaacggtttggtggtgtgttgctgtcagaaatttatgatga

SEQ ID NO: 853225 - DNA, 75 bp, synthetic construct
  source 1..75: mol_type = other DNA
tgctgcgtatgtcggaagatccaaaacgtccggaacgtaaaattcagttcttcgtggcggtttatcagcatctgc

SEQ ID NO: 853226 - DNA, 75 bp, synthetic construct
  source 1..75: mol_type = other DNA
gatgagctggtcacgacgctttccggcggtaatggtgcgggtaaatccaccaccatggcggcgtttgttacggcg

SEQ ID NO: 853227 - DNA, 75 bp, synthetic construct
  source 1..75: mol_type = other DNA
gtcatgcagcgcagttgagccagtacaaccaggtactggcctcgctgaaaagttcttacgacaccaaaaaagagc

SEQ ID NO: 853228 - DNA, 75 bp, synthetic construct
  source 1..75: mol_type = other DNA
cgttagcctggaagatgcgccgtacttctcggcgctgtatggcccgtcacgccacgccatcgtggtgccagatct

SEQ ID NO: 853229 - DNA, 75 bp, synthetic construct
  source 1..75: mol_type = other DNA
aactcgcgccaccagcgcgtggtggtcggtgtgcgtctgcaacaggttgccggacgcgatcgtaaagtggatatc

SEQ ID NO: 853230 - DNA, 75 bp, synthetic construct
  source 1..75: mol_type = other DNA
ggcccactggcaaaactgcgtcttggtttttccctcctgaccggatcattgaatgttgtcagggttctgcctgca

SEQ ID NO: 853231 - DNA, 75 bp, synthetic construct
  source 1..75: mol_type = other DNA
gtcttcgtattcgcatcagtgatctggttgacggtccgctgcgttttgtcacgcagtggttcacacgggtgcttg

SEQ ID NO: 853232 - DNA, 75 bp, synthetic construct
  source 1..75: mol_type = other DNA
ggcggtatggatctcggcgagacggcggatattggctcaaacatcctgacgcagttcggcctttctgctgaccag

SEQ ID NO: 853233 - DNA, 75 bp, synthetic construct
  source 1..75: mol_type = other DNA
acagacagcaataccggtacgctgcgcagactcagcaaaattgctgataacacaggtaagctggttgatgagacg

SEQ ID NO: 853234 - DNA, 75 bp, synthetic construct
  source 1..75: mol_type = other DNA
agcatggcaacggctggcggtatggatctcggcgagacggcagatattggctcaaatatcctgacgcagttcggc

SEQ ID NO: 853235 - DNA, 75 bp, synthetic construct
  source 1..75: mol_type = other DNA
atcgtggctgcgcttgccggagctgccattcttatctggaaatactgggacccaatcagggcattttttgccggg

SEQ ID NO: 853236 - DNA, 75 bp, synthetic construct
  source 1..75: mol_type = other DNA
ttgatgcaaaaacatggcgaccgctatgtgtggatcaacccgcctgctattccgctctctaccgaagagatggac

SEQ ID NO: 853237 - DNA, 75 bp, synthetic construct
  source 1..75: mol_type = other DNA
tgaacgtgcgtgaaacgcacgccatgctgctggatgtgctctctgaacagcacgagcagcatcaggatctgttta

SEQ ID NO: 853238 - DNA, 75 bp, synthetic construct
  source 1..75: mol_type = other DNA
tctatttgatcgaaggggatccgcagtcattcgatgacagcgtgttcagcgttgatgagctggaaaaagcggtag

SEQ ID NO: 853239 - DNA, 75 bp, synthetic construct
  source 1..75: mol_type = other DNA
cgtggatgggcctcttctcaggcttcaggggtaatgacagactggttaagccgcttcggtaccgcaagaatcacg

SEQ ID NO: 853240 - DNA, 75 bp, synthetic construct
  source 1..75: mol_type = other DNA
cctgttacgcaaactcaaccagtttcgtacgtttgttcgtaatgtccgcccgggtgatgaactggatgtcccggc

SEQ ID NO: 853241 - DNA, 75 bp, synthetic construct
  source 1..75: mol_type = other DNA
cgatgggcgagccgattagtgaaatccgcgatgtgcgtaataccgcgattatcgtaaaagaggcgttgcctggct

SEQ ID NO: 853242 - DNA, 75 bp, synthetic construct
  source 1..75: mol_type = other DNA
gagcgaaccggcagtgaagagaccctgaaagcggtggtgaacaccgatatcggacgcccctatctgccccgttca

SEQ ID NO: 853243 - DNA, 75 bp, synthetic construct
  source 1..75: mol_type = other DNA
acatgaggcaccgccaacaacggggatcctgtcactgtataaccggggagaccgccgccggtggtactggccgtg

SEQ ID NO: 853244 - DNA, 75 bp, synthetic construct
  source 1..75: mol_type = other DNA
actgacggccggggcagaaaaacgccgtcgccggaagaaaaaactgcggacggagcgtgcggaagataatccatg

SEQ ID NO: 853245 - DNA, 75 bp, synthetic construct
  source 1..75: mol_type = other DNA
ttatccggaggactgggatgttctgctgacggatgttttttataaaagctggccgctggcctccgccccttctca

SEQ ID NO: 853246 - DNA, 75 bp, synthetic construct
  source 1..75: mol_type = other DNA
tgtgtacggcatcatctgtgatccggcggatatgctggtggtgcagatgaccgagacgaaggcgcgtgagcattc

SEQ ID NO: 853247 - DNA, 75 bp, synthetic construct
  source 1..75: mol_type = other DNA
tcagacctgggaacaactgatttttaagctgctggcggcagaagaagagtatgagcgaaccggcagtgaagagac

SEQ ID NO: 853248 - DNA, 75 bp, synthetic construct
  source 1..75: mol_type = other DNA
gactgaccagcgcttccgtcaggactttggggatgatgtttataagtataagggcggcgataagaacgatactgt

SEQ ID NO: 853249 - DNA, 75 bp, synthetic construct
  source 1..75: mol_type = other DNA
gactggtatccgacccaaaaactcaaacattatctgcgccatactggcattgaagagacggtgcgttttgtcatg

SEQ ID NO: 853250 - DNA, 75 bp, synthetic construct
  source 1..75: mol_type = other DNA
cgtaaatccgctgattttaaaaaaaacgaagtccggtaatttcagagtagtaaaagaaataaaaaaatcaatccc

SEQ ID NO: 853251 - DNA, 75 bp, synthetic construct
  source 1..75: mol_type = other DNA
gatgaagaggaaacatcaaaatataaaggcggtgatggccatgatacggtattcagtggcggtatcgcggccggt

SEQ ID NO: 853252 - DNA, 75 bp, synthetic construct
  source 1..75: mol_type = other DNA
gtggagatattgcagagaattaacacggttcttgccgggcgcaccgatgaagagaaacaggccgacgctgatcgg

SEQ ID NO: 853253 - DNA, 75 bp, synthetic construct
  source 1..75: mol_type = other DNA
ggtggtagccaggctcaataatgttgccgaccaggtgattgcccagcgcaaggccgagggtgacgataccgtaga

SEQ ID NO: 853254 - DNA, 75 bp, synthetic construct
  source 1..75: mol_type = other DNA
ctccgatgggggatggtggtcgggaagacacacagaacaggctcagtgtgaataccctgatgatgaacacgtatt

SEQ ID NO: 853255 - DNA, 75 bp, synthetic construct
  source 1..75: mol_type = other DNA
cgacgttgaaaaccagtagcaccacgcaaggtaatgtggtgacgcagctttccaatcagcagcagtcgatttccg

SEQ ID NO: 853256 - DNA, 75 bp, synthetic construct
  source 1..75: mol_type = other DNA
ggcggctgggttggcaatggcgtctacgtttctggtgtgcagcgtgagtatgatgcgtttattaccaaccagtta

SEQ ID NO: 853257 - DNA, 75 bp, synthetic construct
  source 1..75: mol_type = other DNA
ggtgccgcgttcaggtaaatggcttgagcgtgatgccgtctcaccagagacactggcggaacatcctcttcttat

SEQ ID NO: 853258 - DNA, 75 bp, synthetic construct
  source 1..75: mol_type = other DNA
tcagtttaaaaccaccgatcagtatctgcgcgaccaggacaaacaggtcaatatcgcgataggtgccagcgttga

SEQ ID NO: 853259 - DNA, 75 bp, synthetic construct
  source 1..75: mol_type = other DNA
tttaccggcacaccagatgctaatgacagcttcacgttgaaaccggtaagcgatgccatcgtcaacatggacgtt

SEQ ID NO: 853260 - DNA, 75 bp, synthetic construct
  source 1..75: mol_type = other DNA
ggcagcacgacctcgctggcaacacagatgcaggatttcttcaccagtctgcaaacactggtcagtaacgcggaa

SEQ ID NO: 853261 - DNA, 75 bp, synthetic construct
  source 1..75: mol_type = other DNA
ttaaccgtaaaaaatatcacagtaaagagataacccgagaactgaacgatgaagctacattaaggcatgcggtat

SEQ ID NO: 853262 - DNA, 75 bp, synthetic construct
  source 1..75: mol_type = other DNA
actgatacctcctggaatgaatctggtgaggtaagtgatatttctgcattacattactcgggatatgataacaac

SEQ ID NO: 853263 - DNA, 75 bp, synthetic construct
  source 1..75: mol_type = other DNA
atttggtgaaggccttgcggtgggctatgatttttatcaacattacaatgttcctgtgcgcacggaagtggaatt

SEQ ID NO: 853264 - DNA, 75 bp, synthetic construct
  source 1..75: mol_type = other DNA
cggcaactggaggccgagctggacgatataaaccaactcaataaaggcatattgcggctgggaattccgccaatg

SEQ ID NO: 853265 - DNA, 75 bp, synthetic construct
  source 1..75: mol_type = other DNA
aatcgtgcgattaaccgtaaaaaatactctagtaaagagataacgacagaactgaacaataaagcgacattaagt

SEQ ID NO: 853266 - DNA, 75 bp, synthetic construct
  source 1..75: mol_type = other DNA
aacggtgtgccaggtttattctcgcccatgcgattttgttaagtttccccggtgtgccagcgatatatattcaaa

SEQ ID NO: 853267 - DNA, 75 bp, synthetic construct
  source 1..75: mol_type = other DNA
attcagtggcggtatcgcagccggttatgatttttatccacagttcagtattccggttcgtacagaactggagtt

SEQ ID NO: 853268 - DNA, 75 bp, synthetic construct
  source 1..75: mol_type = other DNA
atatggccagccgggccagaccatcagaacaatggggctgaagatgccggatggctccgtatacaccgctgaccc

SEQ ID NO: 853269 - DNA, 75 bp, synthetic construct
  source 1..75: mol_type = other DNA
taaaacaggagaggttggtgaacgggaaatattgacgatcaacaggtgcgtaaatgcatatctgaattctacaaa

SEQ ID NO: 853270 - DNA, 75 bp, synthetic construct
  source 1..75: mol_type = other DNA
ccgagaccaaggcgcgggaacactccagaacgcgtctttccagaacgtttcgtcacagcccggaggtcagtaagc

SEQ ID NO: 853271 - DNA, 75 bp, synthetic construct
  source 1..75: mol_type = other DNA
gggcaaaagtacttcgatagacgaacaagagagttgcgtgatgaactaggctgtgatctcgaaagctcgtacatt

SEQ ID NO: 853272 - DNA, 75 bp, synthetic construct
  source 1..75: mol_type = other DNA
ctgataccgtagaatacggtgaatacctgaccggcgtgcgaattgaagggctcacctattcactattctcattta

SEQ ID NO: 853273 - DNA, 75 bp, synthetic construct
  source 1..75: mol_type = other DNA
gggtaaaaaactgattgtggacgaggacaccggcgaactgcatggcaggcagctgacgccgcgccggttgcgtac

SEQ ID NO: 853274 - DNA, 75 bp, synthetic construct
  source 1..75: mol_type = other DNA
cgaaccgcgcagcgtgtcgccggggatgtctaccgacgcgctgaatcaggaaattctccaggtcagcagccagtt

SEQ ID NO: 853275 - DNA, 75 bp, synthetic construct
  source 1..75: mol_type = other DNA
gcgaagaggaagcgcatcatcacagtagcccggaaggagcaattgaagtcgatgaaagcgaagtcgatctcgatg

SEQ ID NO: 853276 - DNA, 75 bp, synthetic construct
  source 1..75: mol_type = other DNA
tggcctggtgcctcagttggggggcgtacgccgcgacggcccccgatagcaaacaaatctcacaagaactggagc

SEQ ID NO: 853277 - DNA, 75 bp, synthetic construct
  source 1..75: mol_type = other DNA
cgacgggcgcaggccgcaggtgatgtgccgctctggcttcttcagacggatgcactgaaagaccgggtgaataac

SEQ ID NO: 853278 - DNA, 75 bp, synthetic construct
  source 1..75: mol_type = other DNA
tacccgaaactctccgctactctgcgcgcacagttgaacaacatgcgtgatgagccgcgcagcgtgtcgccgggg

SEQ ID NO: 853279 - DNA, 75 bp, synthetic construct
  source 1..75: mol_type = other DNA
tcgtagaggcgctccagtctgccttaaatgcgcttgaggaacgaaaaggttcccttgagcgcatcaaacaatatc

SEQ ID NO: 853280 - DNA, 75 bp, synthetic construct
  source 1..75: mol_type = other DNA
cttcctgttccgggcgaattatgcctgaccagaaacgcgagctgaacggacgtggggtctggttgcgggatggtg

SEQ ID NO: 853281 - DNA, 75 bp, synthetic construct
  source 1..75: mol_type = other DNA
atttatcaggcaaagctgaaacgccttgaatttgaagaaaaggaaggctctctcatcgctaaagatgcggtcagg

SEQ ID NO: 853282 - DNA, 75 bp, synthetic construct
  source 1..75: mol_type = other DNA
aaaattgaagccgtcttggagcgtgaacttcatcaccggaatatcgtgaaacctgagcagtctttctctgccaag

SEQ ID NO: 853283 - DNA, 75 bp, synthetic construct
  source 1..75: mol_type = other DNA
agcgcatcactgcacagcctataagcaaggtggcaaaacccgcaagacccagaactacaaactggcagaagcctt

SEQ ID NO: 853284 - DNA, 75 bp, synthetic construct
  source 1..75: mol_type = other DNA
aacaaaaagaagtaattcagaaagttgccaacgacaataaaatatttcaacgtcaacaggaaattgaacaggaaa

SEQ ID NO: 853285 - DNA, 75 bp, synthetic construct
  source 1..75: mol_type = other DNA
agcaagccgtacaacctgttatagaaaaacataaaaaaacggtcggtaaagatactattaagcatttttatgatg

SEQ ID NO: 853286 - DNA, 75 bp, synthetic construct
  source 1..75: mol_type = other DNA
cggtccggcgctggcggcaggctgcacgatggtgctgaaacccgccagtcagacgccgttctctgcgctggcgct

SEQ ID NO: 853287 - DNA, 75 bp, synthetic construct
  source 1..75: mol_type = other DNA
gtgcgcaagctgtcgtttaccggctcgaccgaaattggtcgccagttaatggaacagtgcgcgaaagacatcaaa

SEQ ID NO: 853288 - DNA, 75 bp, synthetic construct
  source 1..75: mol_type = other DNA
tggatgccatgaccggctaccgtaatgaaccggatccctttaaagccagtgagacggcgtatctactttgcccgc

SEQ ID NO: 853289 - DNA, 75 bp, synthetic construct
  source 1..75: mol_type = other DNA
atgacgcctccgtcacaaaagagtgggggcgggaatattgtgacaatgtggaagtgttccctctgtgctatatgc

SEQ ID NO: 853290 - DNA, 75 bp, synthetic construct
  source 1..75: mol_type = other DNA
tttctacgcccgtgatttaagtcgcgtcttccgcgtgggcgaggcgctggagtacggcatcgtcggcatcaatac

SEQ ID NO: 853291 - DNA, 75 bp, synthetic construct
  source 1..75: mol_type = other DNA
ctgcgcgtgtggcaatcctgggtgcctggaaaccaattgctctggaatggcgctaagacgctggtacgaacaaca

SEQ ID NO: 853292 - DNA, 75 bp, synthetic construct
  source 1..75: mol_type = other DNA
cggttgagttttcccgcgacgttaacctgcaactctcctgggacgtagtagaaaaccgccttacgcaacaactgg

SEQ ID NO: 853293 - DNA, 75 bp, synthetic construct
  source 1..75: mol_type = other DNA
ggagcaggtacttgcagtatatggtccggtacatgcgcgactgcttcgtcagtcactggaactgatcactgatgc

SEQ ID NO: 853294 - DNA, 75 bp, synthetic construct
  source 1..75: mol_type = other DNA
gatggagaggatgacgatactctgtcggtggtggcgaaaacccgccgtaacctggaagcggatgtgacgctgttc

SEQ ID NO: 853295 - DNA, 75 bp, synthetic construct
  source 1..75: mol_type = other DNA
caaaagtacctgcgccgtccactgccgcatcaggtcgtgcgctttattgccgcctcatcttctgactttaatggc

SEQ ID NO: 853296 - DNA, 75 bp, synthetic construct
  source 1..75: mol_type = other DNA
gggtgcacacggtgtggcaggcgaactgggtcatatccccctgggagatatgacccaacactgcgcgtgtggcaa

SEQ ID NO: 853297 - DNA, 75 bp, synthetic construct
  source 1..75: mol_type = other DNA
gatctggttaatggcagtcagaaacccggcttcgacaacctggcgaaagcctccggcggatccatgcaactgacc

SEQ ID NO: 853298 - DNA, 75 bp, synthetic construct
  source 1..75: mol_type = other DNA
catgttctcagtggaaccggactgacgatcggtgtcggcttcggcgccacaaaaacactggccttatacagtgat

SEQ ID NO: 853299 - DNA, 75 bp, synthetic construct
  source 1..75: mol_type = other DNA
acggcttccagcaactgatgggcgaggttatcgaaagcgcgaccagtgcggtcgccagcctgcctgcgatggtga

SEQ ID NO: 853300 - DNA, 75 bp, synthetic construct
  source 1..75: mol_type = other DNA
gcagttctttgcccagcgtccgcaggtgcaggaacgtctgacgcagcaaattctcattgcgctacaaacgctgct

SEQ ID NO: 853301 - DNA, 75 bp, synthetic construct
  source 1..75: mol_type = other DNA
acagttctttgcccaacgaccgcaggtgcaggaacgtctgacccagcaaatccttattgcattgcaaacgctgct

SEQ ID NO: 853302 - DNA, 75 bp, synthetic construct
  source 1..75: mol_type = other DNA
tctgtggcaggaagtgctcaatggtgatggagaggatgacgatcccctgtcggtggtggcgaaaccccgccgtaa

SEQ ID NO: 853303 - DNA, 75 bp, synthetic construct
  source 1..75: mol_type = other DNA
gacccggaaagccgattacctgccgggttgctggatattggcgtcactaaacggcaaatcgccgtcatcagtaaa

SEQ ID NO: 853304 - DNA, 75 bp, synthetic construct
  source 1..75: mol_type = other DNA
aaaaaagcgggttttcacccgtcagaatctggcggggatccgtcagtaaaatcaaaacatgatccatcagataaa

SEQ ID NO: 853305 - DNA, 75 bp, synthetic construct
  source 1..75: mol_type = other DNA
acgtccgaaagaaccgaactggacagcctgggcaaatgaaattcgcctgatgtgtgtacaggacggtcgtaccca

SEQ ID NO: 853306 - DNA, 75 bp, synthetic construct
  source 1..75: mol_type = other DNA
agcgggttttcacccgtcagaatctggcggggatccgtcagtaaaatcaaaacatgatccgtcagataaaaaaac

SEQ ID NO: 853307 - DNA, 75 bp, synthetic construct
  source 1..75: mol_type = other DNA
cgcgatccgttctggtgccgtaacgtgctcagcccgtcgaagttgcgggaaaaatgggatgagctttccctgcgc

SEQ ID NO: 853308 - DNA, 75 bp, synthetic construct
  source 1..75: mol_type = other DNA
aggctggttaacgcgtaaggcgcgtcgacagggtaaccgcaatgcgtcgaacgtctatcagcttaacgttgcaaa

SEQ ID NO: 853309 - DNA, 75 bp, synthetic construct
  source 1..75: mol_type = other DNA
cgcgtcagccgcgatccgttctggtgccgtaacgtgctcagcccgtcgaagctgcgggaaaaatgggatgagctt

SEQ ID NO: 853310 - DNA, 75 bp, synthetic construct
  source 1..75: mol_type = other DNA
acgcagcagaatatcttggcgtctgtctgtcacgcttctatcagttaaagcgatatatcccaagctttcctccct

SEQ ID NO: 853311 - DNA, 75 bp, synthetic construct
  source 1..75: mol_type = other DNA
cctggaagcggatgtgacgctgttctgcgatgtcctgtgtgatactgacctgcaacgggtgttcactccggacga

SEQ ID NO: 853312 - DNA, 75 bp, synthetic construct
  source 1..75: mol_type = other DNA
cgctggccagactgtcggggtttcgtcataaaacggtgaaagtgccggaatgggggaatgtcagcgttgtgctgc

SEQ ID NO: 853313 - DNA, 75 bp, synthetic construct
  source 1..75: mol_type = other DNA
tgccgtgggaggctttttggtgctacgagcatcgcagatggtgtgatgaacttgatagcagttttccctactttg

SEQ ID NO: 853314 - DNA, 75 bp, synthetic construct
  source 1..75: mol_type = other DNA
gcgcttatcgccgtccgtaagtacgtacaccgaaaaacgcgaggacccgtacttcaaagccagttacgacaacgt

SEQ ID NO: 853315 - DNA, 75 bp, synthetic construct
  source 1..75: mol_type = other DNA
ttggctggaacgccgatatgatgtgcggcaatttcgacatcgacaccacggtgcgcaaccaactcaacggtatca

SEQ ID NO: 853316 - DNA, 75 bp, synthetic construct
  source 1..75: mol_type = other DNA
tatctgtcaccgctgaaacaacaacgtattcgtcagaaagttgaaaaactggatcgtctgaaagcccgggcttaa

SEQ ID NO: 853317 - DNA, 75 bp, synthetic construct
  source 1..75: mol_type = other DNA
agctattttgtggtatcgggagtagcaatatgctttatctgcctagataagctctccaagattaagatcgccgag

SEQ ID NO: 853318 - DNA, 75 bp, synthetic construct
  source 1..75: mol_type = other DNA
gatgctgagtacggaagagtttaaccgcctgcgcgacgcggtgccggaaaaggtcagcgaatgggggctgacgcc

SEQ ID NO: 853319 - DNA, 75 bp, synthetic construct
  source 1..75: mol_type = other DNA
aactggatatcggctgtgagcatcgccttgaacaatgcatgaccgcgctgcaagagacgctgacgccggagtcac

SEQ ID NO: 853320 - DNA, 75 bp, synthetic construct
  source 1..75: mol_type = other DNA
tagttatggcaggagggactggaagtagattatggccgctatcacgtgagttatatccaaaacagtttttaaaaa

SEQ ID NO: 853321 - DNA, 75 bp, synthetic construct
  source 1..75: mol_type = other DNA
tggcaaagggaagatgcaccgtggttaacgctgaatatgtgtgaacacctggctgaaacactggctgtttataat

SEQ ID NO: 853322 - DNA, 75 bp, synthetic construct
  source 1..75: mol_type = other DNA
attacccgggacattcccggccacctgttcgccggtggtgtggcttacgacggcgatgtaattacggtttacccc

SEQ ID NO: 853323 - DNA, 75 bp, synthetic construct
  source 1..75: mol_type = other DNA
cgatgccctgacggtttatccctacaccccggagtccattattgtcgaaggggactatttccctgccccggccat

SEQ ID NO: 853324 - DNA, 75 bp, synthetic construct
  source 1..75: mol_type = other DNA
gcttctatttttcttttaggtcattcattatcaggtccggaactaggtatagcaggaatttataacacaatagtt

SEQ ID NO: 853325 - DNA, 75 bp, synthetic construct
  source 1..75: mol_type = other DNA
ccacggtaactgatgcctccgcggtactggcgacagattacaaaatctcgttcgataataatcagtggcaggtca

SEQ ID NO: 853326 - DNA, 75 bp, synthetic construct
  source 1..75: mol_type = other DNA
gaaatgtatctggaaatggagcggttgattgctgatgcccgtccggtcagccgccacatgacagggctgaatatc

SEQ ID NO: 853327 - DNA, 75 bp, synthetic construct
  source 1..75: mol_type = other DNA
cattctattttattggcggttttataacttccataccttttgtatacgaaggattagtaacccaacatattttag

SEQ ID NO: 853328 - DNA, 75 bp, synthetic construct
  source 1..75: mol_type = other DNA
atgagtaattcgttgttaccaccatcagccagcaatttcatgcgttgtgccgaagccatcggaacacgcattaca

SEQ ID NO: 853329 - DNA, 75 bp, synthetic construct
  source 1..75: mol_type = other DNA
aagtaagctctggtgattatcttggtgaagatgatattgtccggcagaaagaaagatataaaaagaagattaacc

SEQ ID NO: 853330 - DNA, 75 bp, synthetic construct
  source 1..75: mol_type = other DNA
ggctctggcggaacatctggagtgggccacgtccagctactacggttcgccgttcagggagtggctgaaagccct

SEQ ID NO: 853331 - DNA, 75 bp, synthetic construct
  source 1..75: mol_type = other DNA
aaccggccgctttcaatgatggggttcaggaaggtggacaaaggcgacaacaccacagaaccggtggtgacgttt

SEQ ID NO: 853332 - DNA, 75 bp, synthetic construct
  source 1..75: mol_type = other DNA
tggcgtcgtggatggccgatcgtggtcatgcggccaatcaggaagacaaaaccgcgcttgaacaggtacgcgact

SEQ ID NO: 853333 - DNA, 75 bp, synthetic construct
  source 1..75: mol_type = other DNA
aaaaaggtcttgatataggtatttgttctatatgttcggcacacccactggtcattgaggctgcattacgttttg

SEQ ID NO: 853334 - DNA, 75 bp, synthetic construct
  source 1..75: mol_type = other DNA
gaacgcgccgtcgtgatgaactcaggcccgatcattttttctgaggatcttccgccgcagattcgtcagccagtc

SEQ ID NO: 853335 - DNA, 75 bp, synthetic construct
  source 1..75: mol_type = other DNA
tttgctgaacgggcggcaaaagctgttggcggctggatgacgctgccaccaggagagattaaggctgactggaat

SEQ ID NO: 853336 - DNA, 75 bp, synthetic construct
  source 1..75: mol_type = other DNA
tttctgacgagcaaaccagccttaaattcaaactggccttgttgcaggcgctacctgcggtaattgagaaatccg

SEQ ID NO: 853337 - DNA, 75 bp, synthetic construct
  source 1..75: mol_type = other DNA
ttgaaccgaggtggtgctgcggggaatgcggcatcaggcagcgttagtggcggaaacctggcagaacaggcattg

SEQ ID NO: 853338 - DNA, 75 bp, synthetic construct
  source 1..75: mol_type = other DNA
agtgcaaagcgcaataggttaagctttggattttctcctgaggatagtttttgttatagaatcagtattccttgt

SEQ ID NO: 853339 - DNA, 75 bp, synthetic construct
  source 1..75: mol_type = other DNA
ggaattatccctctcaatcttattgaagtcagttcaggtgattatttaggcgaagatgatattgttcggcaaaaa

SEQ ID NO: 853340 - DNA, 75 bp, synthetic construct
  source 1..75: mol_type = other DNA
gaggttagttcaggcgattatttaggtgaggatgatattgtacggcaaaaagaacgctacagaatagatgactaa

SEQ ID NO: 853341 - DNA, 75 bp, synthetic construct
  source 1..75: mol_type = other DNA
caattgattttgcagtaatggaaaaaacaaagcgttgtgtagtctatccccttgatattggttggagcgatgttg

SEQ ID NO: 853342 - DNA, 75 bp, synthetic construct
  source 1..75: mol_type = other DNA
cacatctgattcagcctaccttcattactgaatatccggcagaagtctcaccgctggcccgccgtaatgaggtta

SEQ ID NO: 853343 - DNA, 75 bp, synthetic construct
  source 1..75: mol_type = other DNA
tgttgccagtggatttactgcgtattccgcttttttcactgtctatttgcacgtctatttgctctttctgcgcac

SEQ ID NO: 853344 - DNA, 75 bp, synthetic construct
  source 1..75: mol_type = other DNA
tatgactaagttagatatggtttccgttatcccttccatttcgaaagtttttaacattggaaatgatggttcggg

SEQ ID NO: 853345 - DNA, 75 bp, synthetic construct
  source 1..75: mol_type = other DNA
atttaaaaggtattatatcagaatcgctttataaaaaggttttaaatggactaatcggtattcgtgatcgccttc

SEQ ID NO: 853346 - DNA, 75 bp, synthetic construct
  source 1..75: mol_type = other DNA
ctggttctgctgcccgcgtcacctgcggatatcaatattatctggccggatcttatgtggcgctggatttggctt

SEQ ID NO: 853347 - DNA, 75 bp, synthetic construct
  source 1..75: mol_type = other DNA
tgatgaacgcgttaaccttcggcctgcttattactgcgttgagtggtttcgctcaggggcaatcgctgacgttga

SEQ ID NO: 853348 - DNA, 75 bp, synthetic construct
  source 1..75: mol_type = other DNA
cttttacctgcaaaccgtgcttgggcgcagtgaagtagaaacgggtttactcctgacgccgtggccgttagctac

SEQ ID NO: 853349 - DNA, 75 bp, synthetic construct
  source 1..75: mol_type = other DNA
gatgatgcagaagatgatgaggatattatcgatctgcgtgaagatttgctggccgatgtggaatatcaggacgtt

SEQ ID NO: 853350 - DNA, 75 bp, synthetic construct
  source 1..75: mol_type = other DNA
aatattatcgtgatcagtttgatgatacccccatgatggtaaatgacctgtacctgacggttgtttataaccctg

SEQ ID NO: 853351 - DNA, 75 bp, synthetic construct
  source 1..75: mol_type = other DNA
taattatcctgacacgcattacaatatgacgttcccgcgtatggtgaatgaatattatcgtgatcagtttgatga

SEQ ID NO: 853352 - DNA, 75 bp, synthetic construct
  source 1..75: mol_type = other DNA
ccgcagtcatggcgtgccacttcgggcgctgattggcccaatttgcggggcagttttattggtagttggcgcctg

SEQ ID NO: 853353 - DNA, 75 bp, synthetic construct
  source 1..75: mol_type = other DNA
atgaatcagtcgctcacccttgcttttttgattgccgccggaattggtctggtagtccagaacacgctgatggtg

SEQ ID NO: 853354 - DNA, 75 bp, synthetic construct
  source 1..75: mol_type = other DNA
agatcatcagtattctccgcgagactgaagccggggtttctgcccgtgagctctgccgcaagcacgccatttccg

SEQ ID NO: 853355 - DNA, 75 bp, synthetic construct
  source 1..75: mol_type = other DNA
gctgtcatcgttgttctgtgccctttctgattcgctgcaaatgctaactctggcgcgtgtaatacaaggttttgg

SEQ ID NO: 853356 - DNA, 75 bp, synthetic construct
  source 1..75: mol_type = other DNA
ttggggttaggcgctccaacccgaagtggtaaaggggtaggttttgttattccaaatctgcttaattatcgtgat

SEQ ID NO: 853357 - DNA, 75 bp, synthetic construct
  source 1..75: mol_type = other DNA
aagcttttaatgaaaagttccgaaatactgagcatgttttatcacaccgctggaacccgctggactacataagcc

SEQ ID NO: 853358 - DNA, 75 bp, synthetic construct
  source 1..75: mol_type = other DNA
agtccgatattatatcaactataatattctctatcttaatggtaggcataggcggcgcgatcggggtatatgggg

SEQ ID NO: 853359 - DNA, 75 bp, synthetic construct
  source 1..75: mol_type = other DNA
cagtaatggtacgaacgagcaatacgtaggccgtgacctttatatgccgcaagagattgtagagttagggtcgca

SEQ ID NO: 853360 - DNA, 75 bp, synthetic construct
  source 1..75: mol_type = other DNA
cttctgcttctgattttgattttaatgaattacgccgtaaaaggatgtctgtttatattgtgctttcaccaacag

SEQ ID NO: 853361 - DNA, 75 bp, synthetic construct
  source 1..75: mol_type = other DNA
tagcaaaggttgcgttgaaggttttaaccgatttatcgctgtagatccaaaaactcgcggtaatatcatgcagaa

SEQ ID NO: 853362 - DNA, 75 bp, synthetic construct
  source 1..75: mol_type = other DNA
agcatagtggggaagggcaaacccagcgatacacccacaagtttactgtgacgaatttacttccagtggttgatg

SEQ ID NO: 853363 - DNA, 75 bp, synthetic construct
  source 1..75: mol_type = other DNA
aggagctttacgacagcggcgaggaatcaccaacagaatcaattttccttgagtctctggcccggcgtttcgaca

SEQ ID NO: 853364 - DNA, 75 bp, synthetic construct
  source 1..75: mol_type = other DNA
gaagtcccagaagaagatctggtttcatccaaaacagtcaaagattatctgaagctgtgtcaggggttgttttca

SEQ ID NO: 853365 - DNA, 75 bp, synthetic construct
  source 1..75: mol_type = other DNA
tacgaagtcattgaaactgttttgggtgctgatactattgtaaatactattacccgtcgtgatattaaaaactta

SEQ ID NO: 853366 - DNA, 75 bp, synthetic construct
  source 1..75: mol_type = other DNA
atattcttgaatcatctcccactaatggtgttaaatttgaggcgaaaagccacagctatggtatttatcacctta

SEQ ID NO: 853367 - DNA, 75 bp, synthetic construct
  source 1..75: mol_type = other DNA
atgaaaccgcaaattcctgcacctgccgcagtggttgaagagcctgcgccagcgatgacattgcaaaaagcatgg

SEQ ID NO: 853368 - DNA, 75 bp, synthetic construct
  source 1..75: mol_type = other DNA
ctgaatatcaacggtagtaatacgcctgaacgggatgaaatcgagaagaacaacattatcagcatcctttccggt

SEQ ID NO: 853369 - DNA, 75 bp, synthetic construct
  source 1..75: mol_type = other DNA
accggcacgacgggtagtctgatgttaacggccgccggggcagtcattaacaccgcactgttgtatgcgggcaat

SEQ ID NO: 853370 - DNA, 75 bp, synthetic construct
  source 1..75: mol_type = other DNA
acgctgggctggtcggatatccataaccaggcagactataaagccagccataccggaatcagtttatcgggtggc

SEQ ID NO: 853371 - DNA, 75 bp, synthetic construct
  source 1..75: mol_type = other DNA
cgatattctcattaccgggagccagattaagtccggcaatgacaccagcctgaatgcacagaacgatattctgct

SEQ ID NO: 853372 - DNA, 75 bp, synthetic construct
  source 1..75: mol_type = other DNA
ccatgtattacaccgggaaaaacccgctggcgaagattggttataagagtgaagacgtcttcgtaccgaagggcg

SEQ ID NO: 853373 - DNA, 75 bp, synthetic construct
  source 1..75: mol_type = other DNA
cgaccaccatgtattacaccgggaaaaacccgctggcgaagattggttataagagtgaagacgtcttcgtaccga

SEQ ID NO: 853374 - DNA, 75 bp, synthetic construct
  source 1..75: mol_type = other DNA
cggggtatccaggccgcgacggcagcgcttcagggactggcgggggataatttagcaggtgctctggccggagct

SEQ ID NO: 853375 - DNA, 75 bp, synthetic construct
  source 1..75: mol_type = other DNA
ggcggtcttaccggaaacagcaccgcatcagcagcagtgggcgcacagagcgggaagaatgctgttgagaataat

SEQ ID NO: 853376 - DNA, 75 bp, synthetic construct
  source 1..75: mol_type = other DNA
gatgggagtcagcctgtcgctcaccacccagaaatcgaaatcacaacaacattctgaaagtgacacagtatccgg

SEQ ID NO: 853377 - DNA, 75 bp, synthetic construct
  source 1..75: mol_type = other DNA
tacaaagacagcgctgtctggtgtgcaggccggacaggctgcggcaatggcctccgcaaccggtgacccgaatgc

SEQ ID NO: 853378 - DNA, 75 bp, synthetic construct
  source 1..75: mol_type = other DNA
aaaatgtgattaaaaatgggaaatcaactcccagcagaaatggtacaacagtacactttgagcctgagaataaag

SEQ ID NO: 853379 - DNA, 75 bp, synthetic construct
  source 1..75: mol_type = other DNA
gaatcagcctaaaaacccatcttatcagcctgtcaggaacctaccagctactattagtaatagagagtattctgg

SEQ ID NO: 853380 - DNA, 75 bp, synthetic construct
  source 1..75: mol_type = other DNA
agggctggccggcggtcttaccggaaacagcaccgcatcagcagcagtgggcgcacagagcgggaagaatgctgt

SEQ ID NO: 853381 - DNA, 75 bp, synthetic construct
  source 1..75: mol_type = other DNA
actggcgacgcgtatgtcgatcacccaagcttcgggatggcgatttgcggtcgtatgcttgaagcgcagggcttt

SEQ ID NO: 853382 - DNA, 75 bp, synthetic construct
  source 1..75: mol_type = other DNA
gaagatagcctggatctcagcacgaacgatatttttggctttgatttatccgagtttattgcagctaaagaagaa

SEQ ID NO: 853383 - DNA, 75 bp, synthetic construct
  source 1..75: mol_type = other DNA
actcgtgacgaaattcagcaaatgcagaatgaggcgcttgaaggtctggaagatatttctgaacaaatcctggaa

SEQ ID NO: 853384 - DNA, 75 bp, synthetic construct
  source 1..75: mol_type = other DNA
atgagagctgccaccgctacgaagccaaaaaaaattgatgcctaccgtaaggagccatcagtaaataaaaagtat

SEQ ID NO: 853385 - DNA, 75 bp, synthetic construct
  source 1..75: mol_type = other DNA
gcaaggcccgtaaagctaaagtcatgctaagtcagtgtggcttcgtggggggcggcgtagggctggcctctgaag

SEQ ID NO: 853386 - DNA, 75 bp, synthetic construct
  source 1..75: mol_type = other DNA
cagaagccagtcccagcttgaacagttgaatacagcgctggatatgctgctttctaaagaaattgtgatgggcta

SEQ ID NO: 853387 - DNA, 75 bp, synthetic construct
  source 1..75: mol_type = other DNA
cagtttaatttgctgaaagaagctgattttgaatatctgctgactcaaacattttcttgcatatccgaggcttca

SEQ ID NO: 853388 - DNA, 75 bp, synthetic construct
  source 1..75: mol_type = other DNA
tccgctttctaccgaagagatggacagcgtctttgcgctgccgtacaagcgcgtgccgcatccggcttacggtaa

SEQ ID NO: 853389 - DNA, 75 bp, synthetic construct
  source 1..75: mol_type = other DNA
cgaagccgtgggaaaaaacctacgttttgttaccttctttcgagaaagtgaagggcgataaagtgctgtacgctc

SEQ ID NO: 853390 - DNA, 75 bp, synthetic construct
  source 1..75: mol_type = other DNA
gttgctgcgttatcacgatccggcaaactggccgttaatccgccaggcgctggaagcaatgggtaagaaacattt

SEQ ID NO: 853391 - DNA, 75 bp, synthetic construct
  source 1..75: mol_type = other DNA
gatcctcgacgagccaacgcgcggtattgacgtgggcgcccacgccgagatcatccgcctgattgaaacgctgtg

SEQ ID NO: 853392 - DNA, 75 bp, synthetic construct
  source 1..75: mol_type = other DNA
tgataccccagggaaaatcgacccaatcccgcatccgtatggcgaagatttgccgtgtgcggataacaaacctgt

SEQ ID NO: 853393 - DNA, 75 bp, synthetic construct
  source 1..75: mol_type = other DNA
ctatgaccgctttaaagagctgttcgacacctactcgaaacaggcaggtaaagagcagtatctgatcccatattt

SEQ ID NO: 853394 - DNA, 75 bp, synthetic construct
  source 1..75: mol_type = other DNA
gtgttacagacggcattggctttacgcttacataaatctcgctctaaaggccgaaaaaatcagcgctcgacacgg

SEQ ID NO: 853395 - DNA, 75 bp, synthetic construct
  source 1..75: mol_type = other DNA
cgggaaaataggggcattgccttcaccggatactcagcaactgaccgcaacggtacgtgcgcagtctcgtttgca

SEQ ID NO: 853396 - DNA, 75 bp, synthetic construct
  source 1..75: mol_type = other DNA
aaagcaactttttgctgattgctgccgtgtatgacaccactgacaaagcctccagttcggatatcgccgactggc

SEQ ID NO: 853397 - DNA, 75 bp, synthetic construct
  source 1..75: mol_type = other DNA
atggaaggttccgattttttactcgcgggagtgctgtttctcttcgcggcggtggctgcggtgccgctagcatcg

SEQ ID NO: 853398 - DNA, 75 bp, synthetic construct
  source 1..75: mol_type = other DNA
gtgagtttgcctttgtcctcttttctaccgcttcttcacaacgttattccagggcgaccagatggcgctgttgct

SEQ ID NO: 853399 - DNA, 75 bp, synthetic construct
  source 1..75: mol_type = other DNA
ttggggtgctttatacccatcttctgtgggtggtgataagtgtggttgtgctggtagcggtgaaaattctcgtgc

SEQ ID NO: 853400 - DNA, 75 bp, synthetic construct
  source 1..75: mol_type = other DNA
catgcagaacctgccgccctcgctgcgccaggacgtgcttgatgacgcagctcaacgcgttgcccgtggcggcat

SEQ ID NO: 853401 - DNA, 75 bp, synthetic construct
  source 1..75: mol_type = other DNA
tggcgcgaagttttccaggatctcaaccatcacggggtttatcacagcggagaagtggtagggctggggaatctg

SEQ ID NO: 853402 - DNA, 75 bp, synthetic construct
  source 1..75: mol_type = other DNA
tcaccgagttggtttgtggcttttgtataccgccagaatggagtcggatgtaattacatttactgccggcttaga

SEQ ID NO: 853403 - DNA, 75 bp, synthetic construct
  source 1..75: mol_type = other DNA
cgtttttgcacgaaataggtgataccgcgacggcaggtttgcttacagccgatggacgtccaacgaaacagctta

SEQ ID NO: 853404 - DNA, 75 bp, synthetic construct
  source 1..75: mol_type = other DNA
atgacggcatctgttcagcgaaaagaggcaaggggagcggtgcgtttcctgtggcaactggcaccattacaacgt

SEQ ID NO: 853405 - DNA, 75 bp, synthetic construct
  source 1..75: mol_type = other DNA
tgtggctgatggcagtgctggcgcaaccggtattctggctggcatttcgggggacaggaaatcagtggtgggaac

SEQ ID NO: 853406 - DNA, 75 bp, synthetic construct
  source 1..75: mol_type = other DNA
ttgggatgcatccgcatcaggcacagcgggcgcaactgcattttcgccgcctggatatgcggatgctgcgagagc

SEQ ID NO: 853407 - DNA, 75 bp, synthetic construct
  source 1..75: mol_type = other DNA
ttattgcacaggaagtaatggaggcgataccagaagctgtgggatcgtttactcattacggtgaagagttgcagg

SEQ ID NO: 853408 - DNA, 75 bp, synthetic construct
  source 1..75: mol_type = other DNA
gggcattatgggcagtggctgacaggcttcagtatgatgtttttaatgtacgccctgacggcggcgtacattagc

SEQ ID NO: 853409 - DNA, 75 bp, synthetic construct
  source 1..75: mol_type = other DNA
ctgtttcagcgctcaaacagcattggcggacgtctgcaaacgggggcgattacctttctgccaccgctggcgttt

SEQ ID NO: 853410 - DNA, 75 bp, synthetic construct
  source 1..75: mol_type = other DNA
aagcgggagccgaactggttagcgatgtgctgccttatgaagagatgaagttgcgcatgctcaacggcagtcatt

SEQ ID NO: 853411 - DNA, 75 bp, synthetic construct
  source 1..75: mol_type = other DNA
gtgctggcactgcgacaaccagctgcgtgaccagacatccgaatcactgagcaacttgctcaacaaaatctgcag

SEQ ID NO: 853412 - DNA, 75 bp, synthetic construct
  source 1..75: mol_type = other DNA
gcgtgattcattcattgcagatctaaaaggcgtcgggcttaatgaagaggccagcttatatagtaatttcaaccc

SEQ ID NO: 853413 - DNA, 75 bp, synthetic construct
  source 1..75: mol_type = other DNA
ctggtggcggtgaaaattctcgtgctgtatctgttagcgcgcctgtatggcgtgcgcagttctgagcggatgcag

SEQ ID NO: 853414 - DNA, 75 bp, synthetic construct
  source 1..75: mol_type = other DNA
gcgacgccacgcaggtcgatcttttacgttctgcgggtgcagaggccgctgagtctatcgtcattacctgtaacg

SEQ ID NO: 853415 - DNA, 75 bp, synthetic construct
  source 1..75: mol_type = other DNA
ggcgctcgatttttggcgtaggcgcggcgcaggtgctgttaagtgcggcgttgctggcgggattattgatgctga

SEQ ID NO: 853416 - DNA, 75 bp, synthetic construct
  source 1..75: mol_type = other DNA
ccacgtcattcctcggcgttgcgttaggtttatttgattatctggcagatttgtttcagcgttcaaataccgttg

SEQ ID NO: 853417 - DNA, 75 bp, synthetic construct
  source 1..75: mol_type = other DNA
gcgtcacgttaatcttgttgattgggctttgggcgttgatgtgctacacggcgctattactgctggaggtgtacc

SEQ ID NO: 853418 - DNA, 75 bp, synthetic construct
  source 1..75: mol_type = other DNA
tgctggcgggattattgatgctgacggatttcgcctggcaggcggcggtggtcggtggcattggccttgcgatgt

SEQ ID NO: 853419 - DNA, 75 bp, synthetic construct
  source 1..75: mol_type = other DNA
tacaacaacaaggaggacggttataagcaaaatatcgagtacgttgaagatcaggacgcaatgcgccgttatggt

SEQ ID NO: 853420 - DNA, 75 bp, synthetic construct
  source 1..75: mol_type = other DNA
cacattccggcaggtctggagaattatgagccctatatccgcagtgagcgctgcgtggaatggattgactggcag

SEQ ID NO: 853421 - DNA, 75 bp, synthetic construct
  source 1..75: mol_type = other DNA
cctgcctgcgcctgtctgctggagtcatagaagaattacctgttaacgacggcgatatcatgacattcatgcaga

SEQ ID NO: 853422 - DNA, 75 bp, synthetic construct
  source 1..75: mol_type = other DNA
gcttgcctttttccggcatttgcggatatagtttttccgctgccgtaaaatcggcagccgggcgtgagaacccga

SEQ ID NO: 853423 - DNA, 75 bp, synthetic construct
  source 1..75: mol_type = other DNA
ttgcgcctcggaaaatgaaatcgcagatgttgatgataccgttcatgagcaggcatgcaggcacaccggtgagga

SEQ ID NO: 853424 - DNA, 75 bp, synthetic construct
  source 1..75: mol_type = other DNA
gtgagaacccgagcaatctaacggcgacatatgacgcgccatgcgtctttttttgtgtcgcaatcaacgccacag

SEQ ID NO: 853425 - DNA, 75 bp, synthetic construct
  source 1..75: mol_type = other DNA
gctgaacgcgacccttcagaatctgataaaccttgccggaccactgcagggaaggattaaccggcaccgggacag

SEQ ID NO: 853426 - DNA, 75 bp, synthetic construct
  source 1..75: mol_type = other DNA
gtctgcgagaaatgtcatttccatctcccgatctacacaccggaagtgctgacgctatgcccgaaatgtggtcat

SEQ ID NO: 853427 - DNA, 75 bp, synthetic construct
  source 1..75: mol_type = other DNA
aaagcctctggcaggaactggcggacattaccgataaaacgcaacttgagtggcgcgaagttttccaggatctca

SEQ ID NO: 853428 - DNA, 75 bp, synthetic construct
  source 1..75: mol_type = other DNA
atttggtgatctgacggtactgtacaccacgtatgccgttcgtctggcaagagggtacatgtttccaccggatgc

SEQ ID NO: 853429 - DNA, 75 bp, synthetic construct
  source 1..75: mol_type = other DNA
tctgacagagaaactcactgcgctgagagacctgaatgttttcagcctgcaggaacagcagaacgttcgggaggt

SEQ ID NO: 853430 - DNA, 75 bp, synthetic construct
  source 1..75: mol_type = other DNA
cctcactgccgataaactgaatattaagtttgcgccaaatggtactggaaaaagtacgctgtcacgggccataag

SEQ ID NO: 853431 - DNA, 75 bp, synthetic construct
  source 1..75: mol_type = other DNA
tcccgatctacacaccggaagtgctgacgctatgccctaaatgtggtcatgaccagttccagagacgcccgtttg

SEQ ID NO: 853432 - DNA, 75 bp, synthetic construct
  source 1..75: mol_type = other DNA
tattgtatttatgagtgggttgttacaatcttgtgaatcggagcaggagagacacatacttaaggaaagctttat

SEQ ID NO: 853433 - DNA, 75 bp, synthetic construct
  source 1..75: mol_type = other DNA
atcaccgaagggacttatctctcaagccctggcaacctgtcagtaaaactgactgcaacatgggaagggaaatct

SEQ ID NO: 853434 - DNA, 75 bp, synthetic construct
  source 1..75: mol_type = other DNA
atcgcgcaggcaaacgtaactcaggtcgaattgtggcgtttaccaaaaacagtgtcacactcgatgcgcctgtgt

SEQ ID NO: 853435 - DNA, 75 bp, synthetic construct
  source 1..75: mol_type = other DNA
ggctcaccgagttggtttgtggcttttatataccgccagaatggagtcggatgtaattacatttactgccggctt

SEQ ID NO: 853436 - DNA, 75 bp, synthetic construct
  source 1..75: mol_type = other DNA
caacatggcgggtaaaaccttacgtcagcacagcctgaaccgcctgtggctgatggcgcttctggcccagccggg

SEQ ID NO: 853437 - DNA, 75 bp, synthetic construct
  source 1..75: mol_type = other DNA
ctgtatggatgatgagtcgagtcagttattgtacagtttgttccatgagaatgttagtggttgggtacgaggatt

SEQ ID NO: 853438 - DNA, 75 bp, synthetic construct
  source 1..75: mol_type = other DNA
tggacactgcaaaactaattgccgaagcagccagtaccacctttacgcacgcaggtcttggagatagcgaaactt

SEQ ID NO: 853439 - DNA, 75 bp, synthetic construct
  source 1..75: mol_type = other DNA
gaaagttattgtcagagcctaatgttgatatagtctggatttctgttgagcaggctattttcaaagagtgggaaa

SEQ ID NO: 853440 - DNA, 75 bp, synthetic construct
  source 1..75: mol_type = other DNA
gttgagttgctgaataacctgatccagctttcgaactcagcacaagaacttcttgaaataaatcatattttcaag

SEQ ID NO: 853441 - DNA, 75 bp, synthetic construct
  source 1..75: mol_type = other DNA
tgttagtgtactaagtgggatggttaaatcatgtgaaattgaacaagaacgtcatatacttaatgatattttatg

SEQ ID NO: 853442 - DNA, 75 bp, synthetic construct
  source 1..75: mol_type = other DNA
taagctactgtcttcatccaatccagcctggattcttttcgacctgttaacgaatgaacgatatgggcttggcca

SEQ ID NO: 853443 - DNA, 75 bp, synthetic construct
  source 1..75: mol_type = other DNA
atgggagattagttatcaatgggcagagaatcgacgtttacgacgacaataatgtactcagggtaagaattggtc

SEQ ID NO: 853444 - DNA, 75 bp, synthetic construct
  source 1..75: mol_type = other DNA
tatttggcacgatattttcacatcaacactaaataatattgttttggcatcgggtgctgaacaggaaaggtatat

SEQ ID NO: 853445 - DNA, 75 bp, synthetic construct
  source 1..75: mol_type = other DNA
gtacggtgaatttccataccgaagaggtgatgctggacaaaattaccggaaaaacgccggtggcggcctatgttt

SEQ ID NO: 853446 - DNA, 75 bp, synthetic construct
  source 1..75: mol_type = other DNA
acgccgaaagcagaaatcgaaggcgaaattggtgactctcatatgggccttgcggcacgtatgatgagccaggcg

SEQ ID NO: 853447 - DNA, 75 bp, synthetic construct
  source 1..75: mol_type = other DNA
ggctacgtcaagccgaaacacgaatttaattaccagcaggcggttgagcgtcttcccggtgaagatccggctcaa

SEQ ID NO: 853448 - DNA, 75 bp, synthetic construct
  source 1..75: mol_type = other DNA
tgcgtatcatcaccgataacctcaaacaggaagagcacgcgattgtccaggtggaagaaatgcaggcggtaaatg

SEQ ID NO: 853449 - DNA, 75 bp, synthetic construct
  source 1..75: mol_type = other DNA
gagctgtttttccgccgtacggtgaatttccataccgaagaggtgatgctggacaaaattaccggaaaaacgccg

SEQ ID NO: 853450 - DNA, 75 bp, synthetic construct
  source 1..75: mol_type = other DNA
atgcgtaagctggcgggtaacctgaaacagtccaacacgctgctgatcttcatcaaccagatccgtatgaaaatt

SEQ ID NO: 853451 - DNA, 75 bp, synthetic construct
  source 1..75: mol_type = other DNA
gcgcactggtcgacaggattggtcattatgacatcaacgtaaccaacctgactgcgtcaacgggcggctgcggtg

SEQ ID NO: 853452 - DNA, 75 bp, synthetic construct
  source 1..75: mol_type = other DNA
ttgaccgcgatcctgcgcaaattaccagcgagatgattgcgcagtacgaagatgccagcggcaaaaagctctacc

SEQ ID NO: 853453 - DNA, 75 bp, synthetic construct
  source 1..75: mol_type = other DNA
agatgttccctaaagtcgtaaggaatacattctttgatgtaaagttatcaccaaggctcattgataacgatttta

SEQ ID NO: 853454 - DNA, 75 bp, synthetic construct
  source 1..75: mol_type = other DNA
gttgttacggtgccattcaggatgctcaggcgttgtccgaaggtgtggcggcctcttcccgttatccgaaacact

SEQ ID NO: 853455 - DNA, 75 bp, synthetic construct
  source 1..75: mol_type = other DNA
cgccgctgttgctggatcttaatgagaacgatccgggtattctggttacgcaatctgaaccgccccgggtttcct

SEQ ID NO: 853456 - DNA, 75 bp, synthetic construct
  source 1..75: mol_type = other DNA
ctgcaggtacccgcgtcagcgcttccgacagcattatttttgcaaccgatacggacgtagtgctgaaagccggat

SEQ ID NO: 853457 - DNA, 75 bp, synthetic construct
  source 1..75: mol_type = other DNA
taaggaatggtcaaaacaggatcgtgacacgttcgatcctacacatgatattgacctttactgcgaccaggccag

SEQ ID NO: 853458 - DNA, 75 bp, synthetic construct
  source 1..75: mol_type = other DNA
aacataggtgcggaaacgccgcaggagatcgccatcagcgtgctggcagaaatattacaggtgaaaaataacgcg

SEQ ID NO: 853459 - DNA, 75 bp, synthetic construct
  source 1..75: mol_type = other DNA
tgctggcagaaatattacaggtgaaaaataacgcgccgggtgggctgatgatgaaaccttctcatccttccggac

SEQ ID NO: 853460 - DNA, 75 bp, synthetic construct
  source 1..75: mol_type = other DNA
tggtgtacttgaggcgttaatgatgttgatgcaccagggcgttaaagcgacgaaagaagtactggaagtggctta

SEQ ID NO: 853461 - DNA, 75 bp, synthetic construct
  source 1..75: mol_type = other DNA
cggtcttgtgaatattgccattatggacggtaccgtctggcgtctgctgaatggctttaagctgttccgcgaaaa

SEQ ID NO: 853462 - DNA, 75 bp, synthetic construct
  source 1..75: mol_type = other DNA
tggatgcgtactgcgattttgcctccgggaccatcaatatcgcgattatggatggcacggtctggcgtatgctga

SEQ ID NO: 853463 - DNA, 75 bp, synthetic construct
  source 1..75: mol_type = other DNA
gcaggcgatattgcaactggcgtggctctgcgtctgtatcatgctggcttcaaagtgatcatgttagaagtggaa

SEQ ID NO: 853464 - DNA, 75 bp, synthetic construct
  source 1..75: mol_type = other DNA
caatggcacagcggtgaaacgctggttgttgaaccgaatattcaccagttgccgaaaaaactgatcggactttgc

SEQ ID NO: 853465 - DNA, 75 bp, synthetic construct
  source 1..75: mol_type = other DNA
gacgtcaacattgcttactgcccggaacgcgtgttaccgggccaggttatggtcgagctgattaaaaacgatcgc

SEQ ID NO: 853466 - DNA, 75 bp, synthetic construct
  source 1..75: mol_type = other DNA
actgattcgcctggcgaatcgtcaccctcgcgtcaatattcttcagcctggccctggcgtgggcggtcactgcat

SEQ ID NO: 853467 - DNA, 75 bp, synthetic construct
  source 1..75: mol_type = other DNA
accgagaaaatggcagaatggttagcagaaatgcgtccggacctgactttcccgcagcaggtgggcgaacaggcc

SEQ ID NO: 853468 - DNA, 75 bp, synthetic construct
  source 1..75: mol_type = other DNA
cgccagcgaactgtacaaaattttcctcgaaggtgagtgtgtcgtcactaactcgcggacggcggaaatgtgtaa

SEQ ID NO: 853469 - DNA, 75 bp, synthetic construct
  source 1..75: mol_type = other DNA
gtcttcaggatcaggaagtacgttatcgccaacgttatctggacctgatcgctaacgataaatcccgccaaactt

SEQ ID NO: 853470 - DNA, 75 bp, synthetic construct
  source 1..75: mol_type = other DNA
cggggcaaatctacattccatttgtgaactggatgctttatgtcgcagtcgtgattgtgatagtcagctttgagc

SEQ ID NO: 853471 - DNA, 75 bp, synthetic construct
  source 1..75: mol_type = other DNA
agcatggtacagccatggtcggtaagctttttgcgcctatcatgctgacctggtttttgattctggcagggttgg

SEQ ID NO: 853472 - DNA, 75 bp, synthetic construct
  source 1..75: mol_type = other DNA
tctcattgacgcgtcaggcggtacgtctgggatatttgtcgccgatgcgcattattcacacctccgaaatggagt

SEQ ID NO: 853473 - DNA, 75 bp, synthetic construct
  source 1..75: mol_type = other DNA
cgttatggcatggccgcctgtgccgtggataatttgattgatgcgttacaaggaaaggttgagaagaactgtgtg

SEQ ID NO: 853474 - DNA, 75 bp, synthetic construct
  source 1..75: mol_type = other DNA
gtgagcaaaattaactatcaggcactgcgtgaagcggcagaaaaggcaacgaaagggagctacatcgtagggcat

SEQ ID NO: 853475 - DNA, 75 bp, synthetic construct
  source 1..75: mol_type = other DNA
tcgcaggcggttatctctggtgtcttctcattgacgcgtcaggcggtacgtctgggatatttgtcgccgatgcgc

SEQ ID NO: 853476 - DNA, 75 bp, synthetic construct
  source 1..75: mol_type = other DNA
taagagcggactagcatggatttataacacactgtttggccctggcgaattaccggacgaatctgagaaagatgc

SEQ ID NO: 853477 - DNA, 75 bp, synthetic construct
  source 1..75: mol_type = other DNA
gcggagattgattgtaagcaagtccgggattttgttgccaaggctaatccggctaccgtgctggaattactggat

SEQ ID NO: 853478 - DNA, 75 bp, synthetic construct
  source 1..75: mol_type = other DNA
cacatctgattcagcctaccttgattactgaatatccggcagaagtttctccgctggcccgccgtaatgaggtta

SEQ ID NO: 853479 - DNA, 75 bp, synthetic construct
  source 1..75: mol_type = other DNA
agcttgaagcagcagagaacaaccttattgatagcgaatgccatgttgctgaactggaagaagcgctacgcgata

SEQ ID NO: 853480 - DNA, 75 bp, synthetic construct
  source 1..75: mol_type = other DNA
atgggattcgaaggattctggtctggtcaggctggaaaaacggaagttaaatatgatggagtttatatgcagttt

SEQ ID NO: 853481 - DNA, 75 bp, synthetic construct
  source 1..75: mol_type = other DNA
ggagaacgaggaaattgcgctaacggtagggaagctgcgtgttgagctggaagccgcagagaagcgcaacgcaaa

SEQ ID NO: 853482 - DNA, 75 bp, synthetic construct
  source 1..75: mol_type = other DNA
aataattgcggctgttgggtttgtcgcaggtaaggcaattttctctgataatgttgtgtttaggcgaaagatgta

SEQ ID NO: 853483 - DNA, 75 bp, synthetic construct
  source 1..75: mol_type = other DNA
cattgattcgcggctgaccatcgtcgccagacaacattccatttcaaaaaaccagctcattgttgatgtcttaga

SEQ ID NO: 853484 - DNA, 75 bp, synthetic construct
  source 1..75: mol_type = other DNA
cagctcacgccgcatggatagattaaaagtggtcatttaccctatggctgaccgctcactggtgacctattttcc

SEQ ID NO: 853485 - DNA, 75 bp, synthetic construct
  source 1..75: mol_type = other DNA
gcggtgcgcaggcggtaaccgttgaggattcaatgtcgatgattcatgcctcgcgtggcgtgttaaaacccgccg

SEQ ID NO: 853486 - DNA, 75 bp, synthetic construct
  source 1..75: mol_type = other DNA
tgattcagcctaccttgattacggaatatccggcagaagtgtccccgctggcgcgacgtaacgatgttaacccgg

SEQ ID NO: 853487 - DNA, 75 bp, synthetic construct
  source 1..75: mol_type = other DNA
tgattcagcctaccttgattacggaatatccggcagaagtctccccgctggcgcgccgtaaagatgttaacccgg

SEQ ID NO: 853488 - DNA, 75 bp, synthetic construct
  source 1..75: mol_type = other DNA
tgattcagcctaccttgattacggaatatccggcagaagtatccccgctggcgcggcgtaacgatgttaacccgg

SEQ ID NO: 853489 - DNA, 75 bp, synthetic construct
  source 1..75: mol_type = other DNA
gagtttgatttttacaggcaaatttatcctgtgacagggggagagcacaaggttgaagccttgatgtggacgcat

SEQ ID NO: 853490 - DNA, 75 bp, synthetic construct
  source 1..75: mol_type = other DNA
gatattcagtgtactcttgctaacacctttcctaatgaacatccggaagcctttattttggttacgtcagcggaa

SEQ ID NO: 853491 - DNA, 75 bp, synthetic construct
  source 1..75: mol_type = other DNA
agtaatcgctgttgttggatttgtcgctggtaaggcaattttctcagataatgttgtgttcagaagaaggatgta

SEQ ID NO: 853492 - DNA, 75 bp, synthetic construct
  source 1..75: mol_type = other DNA
aagacaccggtaatcctctgtcggtcatcccgaaatatactatcaataactcgcttaactggaccatcacccagg

SEQ ID NO: 853493 - DNA, 75 bp, synthetic construct
  source 1..75: mol_type = other DNA
gctctggtggacggtatcgaagccagtatgtctttcccactggtgaaagatcgtctgaactggaataccaatgcc

SEQ ID NO: 853494 - DNA, 75 bp, synthetic construct
  source 1..75: mol_type = other DNA
tggtgttagatggctttctttcatatgctgcggcaatagctgcttgccagatagcaccagaggtcaaaaattact

SEQ ID NO: 853495 - DNA, 75 bp, synthetic construct
  source 1..75: mol_type = other DNA
taagctgggaaacagcggccagccgttatgacacggcgatgcagttgcaggcagtaacggctgcgttaattagta

SEQ ID NO: 853496 - DNA, 75 bp, synthetic construct
  source 1..75: mol_type = other DNA
cggatatccataaccaggcagactataaagccagccataccggaatcagtttatcgggtggctcagggatgtcag

SEQ ID NO: 853497 - DNA, 75 bp, synthetic construct
  source 1..75: mol_type = other DNA
aacatcagtaacctcacccggacagaacagtgggcgatgaacaacggatataaccatttcagcggaacggatacc

SEQ ID NO: 853498 - DNA, 75 bp, synthetic construct
  source 1..75: mol_type = other DNA
cttgcgcaattacatcttacgtttgatcgccaatgtgtcaagcctggtgatgcagcttccttaattagacttttc

SEQ ID NO: 853499 - DNA, 75 bp, synthetic construct
  source 1..75: mol_type = other DNA
cgaactggggcagcaaattatggccggccgtatgtcgctggataatattgcccggtacgctgagcagcataatct

SEQ ID NO: 853500 - DNA, 75 bp, synthetic construct
  source 1..75: mol_type = other DNA
atgcaaacttattttgaccagctcgaacgcgttctttttgccggacctaaaaccgataatcatctggcgtttcgc

SEQ ID NO: 853501 - DNA, 75 bp, synthetic construct
  source 1..75: mol_type = other DNA
cggggtaaaacactgcataccgcagggaccacgcagggacagaatctcaccgtgcaggcggacagatgggcgaac

SEQ ID NO: 853502 - DNA, 75 bp, synthetic construct
  source 1..75: mol_type = other DNA
acgtcagggcgaccacgctggatggtgatggtctgttgcagggcgccggtgcactggcgcttgcaggcgacaccc

SEQ ID NO: 853503 - DNA, 75 bp, synthetic construct
  source 1..75: mol_type = other DNA
ttggttttggcccaagttggggttggagtgcaactgaaattaaaggcgttgacgttaatggtacttcaacaagtg

SEQ ID NO: 853504 - DNA, 75 bp, synthetic construct
  source 1..75: mol_type = other DNA
gttgacctgggcgtgaaagagaagcttatcgagaaagcaggcgcgtggtacagctacaaaggtgagaagatcggt

SEQ ID NO: 853505 - DNA, 75 bp, synthetic construct
  source 1..75: mol_type = other DNA
aggtactggctggcggtctgaatccggcagtggcacagcttataaaacaggccacaggcgataaccgggaagcaa

SEQ ID NO: 853506 - DNA, 75 bp, synthetic construct
  source 1..75: mol_type = other DNA
ggactgaatgcagggaatccggggcaggtactggctggcggtctgaatccggcagtggcacagcttataaaacag

SEQ ID NO: 853507 - DNA, 75 bp, synthetic construct
  source 1..75: mol_type = other DNA
tcagctctttaaggcccgcctgattaaagatcagtttgtgacaacccgaactctactggattttctgcatcattt

SEQ ID NO: 853508 - DNA, 75 bp, synthetic construct
  source 1..75: mol_type = other DNA
aacagtccaacacgctgctgatcttcattaaccagatccgtatgaaaattggtgtgatgttcggtaacccggaaa

SEQ ID NO: 853509 - DNA, 75 bp, synthetic construct
  source 1..75: mol_type = other DNA
gaacgtcagggcgaccacgctggatggcgatggcctgttgcagggcgccgctgcactggcgcttgcaggcgacac

SEQ ID NO: 853510 - DNA, 75 bp, synthetic construct
  source 1..75: mol_type = other DNA
aggctcggaagtgttcctgtcgctggttgaccagtatgaagcgccgtacccggaaaatctgcgccatatcaccat

SEQ ID NO: 853511 - DNA, 75 bp, synthetic construct
  source 1..75: mol_type = other DNA
cggcattgccagtggcgatgtggctggcgcggctgctggggctggtgccgggaagaacgttgttgagaataactt

SEQ ID NO: 853512 - DNA, 75 bp, synthetic construct
  source 1..75: mol_type = other DNA
tgtcccgtcagcagaccctgacagtccgtatctgattacggtgaatccgaaactggatggtctcggaaaggtgga

SEQ ID NO: 853513 - DNA, 75 bp, synthetic construct
  source 1..75: mol_type = other DNA
aggcgcgctggcaggtgcttcggctccggaactggcgcaccagctgaaatcaacagaaaaagacccggcagtaaa

SEQ ID NO: 853514 - DNA, 75 bp, synthetic construct
  source 1..75: mol_type = other DNA
tttcgcccgctctaccacacccgcaataatgatgaaggcaatcacgggcgttatttttccctgcgccgggagccc

SEQ ID NO: 853515 - DNA, 75 bp, synthetic construct
  source 1..75: mol_type = other DNA
ttctcgcaaatgatgctacacagcatgcagcgcggcagaattatgacctggccggtcagggctggacagcgggga

SEQ ID NO: 853516 - DNA, 75 bp, synthetic construct
  source 1..75: mol_type = other DNA
tgcaacagcccgttatgtacgaaggcctggagccggatcaggggctgctgccgctggcgtggaacgtgtttcacg

SEQ ID NO: 853517 - DNA, 75 bp, synthetic construct
  source 1..75: mol_type = other DNA
ataatgatgaaggcaatcacgggcgttatttttccctgcgccgggagccgcgccggttgtcggaaaacgcccgcc

SEQ ID NO: 853518 - DNA, 75 bp, synthetic construct
  source 1..75: mol_type = other DNA
atctggatcaccgtactggtggtcaggcgctgcgcgatctgctgaacctgtttattcctgctcatgacagtccac

SEQ ID NO: 853519 - DNA, 75 bp, synthetic construct
  source 1..75: mol_type = other DNA
tcactcccacgccttcaatgagcgtggcccagctccatcccgatccggaagagggcgatctggcgaagggattca

SEQ ID NO: 853520 - DNA, 75 bp, synthetic construct
  source 1..75: mol_type = other DNA
ctggaaaagaactccttatgatcgaccgatttataccacatccactggcgctacaggaaataaaatatattcctg

SEQ ID NO: 853521 - DNA, 75 bp, synthetic construct
  source 1..75: mol_type = other DNA
gttgttatggtgccattcaggataatcaggcactgagtgaagggatcacctctgcgattcgttatccgaaacact

SEQ ID NO: 853522 - DNA, 75 bp, synthetic construct
  source 1..75: mol_type = other DNA
tcttccgggggaggatccggcccgtcttaatgacccggcctaccgtcgcctgcgtattctgactgacaacctgaa

SEQ ID NO: 853523 - DNA, 75 bp, synthetic construct
  source 1..75: mol_type = other DNA
aaaaatggtctgagcaggaccgtgatacgtttgatccgacgcatgatattgacctctactgcgatcaggccagcg

SEQ ID NO: 853524 - DNA, 75 bp, synthetic construct
  source 1..75: mol_type = other DNA
caccgataacccggcagaactggacgaagacgcggggacggtctcggctaacttcatcggcgtcaagtgcgtgaa

SEQ ID NO: 853525 - DNA, 75 bp, synthetic construct
  source 1..75: mol_type = other DNA
atggctttaagcttttccgcgaaaaaatggatacccgtcgcggttcaaattcacaactcgaaacggcagtgaaag

SEQ ID NO: 853526 - DNA, 75 bp, synthetic construct
  source 1..75: mol_type = other DNA
gaaataacattgagcaggctgatggtaaaaaatggtctgagcaggaccgtgatacgtttgatccgacgcatgata

SEQ ID NO: 853527 - DNA, 75 bp, synthetic construct
  source 1..75: mol_type = other DNA
tttaccatgacgcagtccgcaccgctgatggtgttgccggacccggatgagtttgtggtggtgcaggtgaaataa

SEQ ID NO: 853528 - DNA, 75 bp, synthetic construct
  source 1..75: mol_type = other DNA
ttgacctctactgcgacctggccagcggtcttgtgaatattgccattatggacggtaccgtctggcgtcttctga

SEQ ID NO: 853529 - DNA, 75 bp, synthetic construct
  source 1..75: mol_type = other DNA
acctcaaacaggaagagcacgccattgtccaggtggaagaaatgcaggcggtgaatgccgtgctgtatggcaaat

SEQ ID NO: 853530 - DNA, 75 bp, synthetic construct
  source 1..75: mol_type = other DNA
gggaatacggcagcagagggcattcgttgctatggtgccattcaggatgcacaggcgttgtccgaaggtgtggtg

SEQ ID NO: 853531 - DNA, 75 bp, synthetic construct
  source 1..75: mol_type = other DNA
tgcgtatcatcaccgataacctcaaacaggaagagcacgccattgtccaggtggaagagatgcaggcggtgaatg

SEQ ID NO: 853532 - DNA, 75 bp, synthetic construct
  source 1..75: mol_type = other DNA
gccccgggtttcctggagagtattttatctgtgaactcaggctgccagatcattatttccgatggaagcataata

SEQ ID NO: 853533 - DNA, 75 bp, synthetic construct
  source 1..75: mol_type = other DNA
tccggacaacagcggtatacaaaaagaaagtcattcaaaaaaatatccgttctccctgatttatatcatcccggt

SEQ ID NO: 853534 - DNA, 75 bp, synthetic construct
  source 1..75: mol_type = other DNA
caaaattgctcaagaggctggattgcaaaatgccggtcatgccaaaatagatgaaatgttggttgctgctcatgc

SEQ ID NO: 853535 - DNA, 75 bp, synthetic construct
  source 1..75: mol_type = other DNA
aagacaaaattatccaacatggatattatatttctttatcccaggatagtttgataaataatctattttcgagga

SEQ ID NO: 853536 - DNA, 75 bp, synthetic construct
  source 1..75: mol_type = other DNA
cggatggcagcgtatggataagtccaggttttacgccgcagtgtctgatcaacaaaggcaccataccggcgactg

SEQ ID NO: 853537 - DNA, 75 bp, synthetic construct
  source 1..75: mol_type = other DNA
gacaaaactgaaaattaactgccttttccttcgttataccgatgaggaatgtagcgcggttaaggggcgggaata

SEQ ID NO: 853538 - DNA, 75 bp, synthetic construct
  source 1..75: mol_type = other DNA
gacggtggagttaagacagaagaacgtgatgaatttaagaaaatggcggagggtgacaccgggatcatttgtgtt

SEQ ID NO: 853539 - DNA, 75 bp, synthetic construct
  source 1..75: mol_type = other DNA
cgctggaatttgaccctgccgataatgacgattatgccatgcaacagcttgataagcgtgatagtacggctatgg

SEQ ID NO: 853540 - DNA, 75 bp, synthetic construct
  source 1..75: mol_type = other DNA
gcggctgcggacgttctggataacagcaacggctgggtgggggagctatcggtattccacaaaatgcagataggt

SEQ ID NO: 853541 - DNA, 75 bp, synthetic construct
  source 1..75: mol_type = other DNA
attggtgctggtgcggcttataatgaatcgccttatcgcggttataatgaaaatacgaaggcaattccgctgatt

SEQ ID NO: 853542 - DNA, 75 bp, synthetic construct
  source 1..75: mol_type = other DNA
gatcaatcaagattggtccggccagcgtggcctggctcgagtctgaggttgacgactggatcaacctcaaattag

SEQ ID NO: 853543 - DNA, 75 bp, synthetic construct
  source 1..75: mol_type = other DNA
aatataacagaaaacgacaaatcaattaattctgttgaaagagtgaataattcgcagaaaacagacccattggta

SEQ ID NO: 853544 - DNA, 75 bp, synthetic construct
  source 1..75: mol_type = other DNA
aaagttcccggttctaccaagccggataccgtatccctaaatatgctctggaatatagagggcaatcaatttttg

SEQ ID NO: 853545 - DNA, 75 bp, synthetic construct
  source 1..75: mol_type = other DNA
gcaaagttgtatgaacttttaaatatagatagtaagaagtgcttcaatgctaaaacaaaaaatattttaatgagg

SEQ ID NO: 853546 - DNA, 75 bp, synthetic construct
  source 1..75: mol_type = other DNA
ttattatatatagagagtgtttccctaatctcagtaaatcattactttatttggcggtcataaaaattatggaaa

SEQ ID NO: 853547 - DNA, 75 bp, synthetic construct
  source 1..75: mol_type = other DNA
ggcaaaaaaagaaaatattataaattgggatgatttgtcatggggtagaggggtttcatttaaaaataacaatca

SEQ ID NO: 853548 - DNA, 75 bp, synthetic construct
  source 1..75: mol_type = other DNA
atcactggccatggatagtgagaacctgatgttctctctgtttaagaatggtcagccggttgtcggtgatgaata

SEQ ID NO: 853549 - DNA, 75 bp, synthetic construct
  source 1..75: mol_type = other DNA
atctcatacagcaagggctatcgctgctatccgcgaaaatggtgaattagaattttacaacctgttaggaacaga

SEQ ID NO: 853550 - DNA, 75 bp, synthetic construct
  source 1..75: mol_type = other DNA
ttataatgataaaactaaaccctgggatacattttcaaaagcgataaaacttagtaatagattattactcctaaa

SEQ ID NO: 853551 - DNA, 75 bp, synthetic construct
  source 1..75: mol_type = other DNA
ttagaacagcgtcggctgttaatccgcgttcgaaatatcgacaatctggaaaaaatttataagcttatcgtttca

SEQ ID NO: 853552 - DNA, 75 bp, synthetic construct
  source 1..75: mol_type = other DNA
gaagaggtcacttttcacatttgattcaaaaggtaatgtgaccgttaaaggtaagggtatcacccatacacttca

SEQ ID NO: 853553 - DNA, 75 bp, synthetic construct
  source 1..75: mol_type = other DNA
agaccagtgaggttaacgaaaaagtcgaatcccgcacactggttggtgtgagttctgatggcaccctgactcgtg

SEQ ID NO: 853554 - DNA, 75 bp, synthetic construct
  source 1..75: mol_type = other DNA
ggcgtgttggtggcgctcgcgtgtcgcgtagcgaacgcatccaggcagtagctcgtatgcttgatgagcatattg

SEQ ID NO: 853555 - DNA, 75 bp, synthetic construct
  source 1..75: mol_type = other DNA
agacattaaagtactgcctaaaacaatggcgcataaatatctgagctggtggcgtgttggtggcgctcgcgtgtc

SEQ ID NO: 853556 - DNA, 75 bp, synthetic construct
  source 1..75: mol_type = other DNA
caatgccgcattgggggcgaagttggcgcaaccggagcgggaggtatatagcttcgttggcgacggctcatttat

SEQ ID NO: 853557 - DNA, 75 bp, synthetic construct
  source 1..75: mol_type = other DNA
cacacacaaatgagtgtacgagcgtcgaacgcttaaaaatgctggcggatgagcggctgtataaaagtaagaaaa

SEQ ID NO: 853558 - DNA, 75 bp, synthetic construct
  source 1..75: mol_type = other DNA
gactccagaacgacagttggtgttaactccgacggaaccctgacccgtgcagaaggagccagcaaaaccctcgct

SEQ ID NO: 853559 - DNA, 75 bp, synthetic construct
  source 1..75: mol_type = other DNA
ggcagtaggtaaccgagccaaagttgataaagatgcaacagaaggtactgcgttaggggcaaaggcaacagtaac

SEQ ID NO: 853560 - DNA, 75 bp, synthetic construct
  source 1..75: mol_type = other DNA
ctgaacagtcagcagcgtcaaattcgtgagaatcacgaagagatgaagcgtgcagcagcacagagtgcagcgctg

SEQ ID NO: 853561 - DNA, 75 bp, synthetic construct
  source 1..75: mol_type = other DNA
agcagtgggctcatgggctgctgcggacggtaaacaaagtacagctctgggggagggagcatatgcctatgcaga

SEQ ID NO: 853562 - DNA, 75 bp, synthetic construct
  source 1..75: mol_type = other DNA
agatgaagcgtgcagcagcacagagtgcagcgctggcggggcttttccagccgtacagtgtggggaaattcaacg

SEQ ID NO: 853563 - DNA, 75 bp, synthetic construct
  source 1..75: mol_type = other DNA
actaaaaatacacaggctattcagtccaatactcgccagttgcaggagcataatgcacgcctgaacagccagcag

SEQ ID NO: 853564 - DNA, 75 bp, synthetic construct
  source 1..75: mol_type = other DNA
aaataaaaacagtgttgcattaggagctaattcacgcacaacccgtgacaatgaggtttatatcggttatgaagc

SEQ ID NO: 853565 - DNA, 75 bp, synthetic construct
  source 1..75: mol_type = other DNA
actcgatttcaccctcttatttgtatgatgttggcccttatctgatttccagtgatgagtgtattcagatcaagg

SEQ ID NO: 853566 - DNA, 75 bp, synthetic construct
  source 1..75: mol_type = other DNA
cgtcaatttccaggtggggagtattaatttaagcaccagtatcggcgtggcgcattcaaatgaatgtactaccgt

SEQ ID NO: 853567 - DNA, 75 bp, synthetic construct
  source 1..75: mol_type = other DNA
ggggaatacctatgaagttgtaaagacaggcggtaatggtaacttcagatacgaagtaaaagagaaaaacggcaa

SEQ ID NO: 853568 - DNA, 75 bp, synthetic construct
  source 1..75: mol_type = other DNA
accgtttcaacgagcagaccgcagcgaaagcgggtattgcagcgagtgatggcgatgtgtcctacaacatgggcg

SEQ ID NO: 853569 - DNA, 75 bp, synthetic construct
  source 1..75: mol_type = other DNA
tcaaatggggatgtaataatcaatggcagtggcattacgtacacaattcatgacggtgcgctgaacgattttgct

SEQ ID NO: 853570 - DNA, 75 bp, synthetic construct
  source 1..75: mol_type = other DNA
tcaataagaacagcaaggctaacgccccggtgaaaggatatattgacgcagcatctgaagcagcccgtacagttg

SEQ ID NO: 853571 - DNA, 75 bp, synthetic construct
  source 1..75: mol_type = other DNA
tgaaagggctgcataccagcctgacgctgacggttgcctcgctgattgtggcgctgattctggcgttgattttta

SEQ ID NO: 853572 - DNA, 75 bp, synthetic construct
  source 1..75: mol_type = other DNA
gcgctgattctggcgttgatttttaccatcatcctgacgctaaaaacgccggtgctggtgtggctggtgcgtggt

SEQ ID NO: 853573 - DNA, 75 bp, synthetic construct
  source 1..75: mol_type = other DNA
ggcagggattatttacctgattgttaacggtctgttgacgctgatgatgcgtctgatcgagcgcaaagcactggc

SEQ ID NO: 853574 - DNA, 75 bp, synthetic construct
  source 1..75: mol_type = other DNA
ctatgaagatgaagcgggattctgcttcgccgcaacgctggaagatataaagaaaaatgactttgtcctgacccc

SEQ ID NO: 853575 - DNA, 75 bp, synthetic construct
  source 1..75: mol_type = other DNA
tgatggcgaacccgccgttcaacatgaaggagtggtggaacgccaagctggaaaacgacgtgcgctggaaatacg

SEQ ID NO: 853576 - DNA, 75 bp, synthetic construct
  source 1..75: mol_type = other DNA
tgccgaagaattttccggtgagtaaaatcacctcgtctgatgagatgaccatcactgccgagctggcgaacggtc

SEQ ID NO: 853577 - DNA, 75 bp, synthetic construct
  source 1..75: mol_type = other DNA
atcgctgaccggcggcattgaggtgcccatgaacaggacggtcaatgatgacatcatcggcctggacggttcagt

SEQ ID NO: 853578 - DNA, 75 bp, synthetic construct
  source 1..75: mol_type = other DNA
ctagatggaccaatcgccggactttgctcgctggaaaaaggtgctgcatatgtcgggttaacaaaactggcacta

SEQ ID NO: 853579 - DNA, 75 bp, synthetic construct
  source 1..75: mol_type = other DNA
catctttatatgatcaactaatcgaagatgatattaacatcagatatgaaaataaaaaaggaatggaaactgaac

SEQ ID NO: 853580 - DNA, 75 bp, synthetic construct
  source 1..75: mol_type = other DNA
gcgctgattctggcgttaatttttaccatcattctgacgctgaaaacgccggtactggtgtggctggtgcgtggc

SEQ ID NO: 853581 - DNA, 75 bp, synthetic construct
  source 1..75: mol_type = other DNA
tggtgtatgtgctttcggcggcctggctgcatggcgaagcaaaccataatgccgaagaaggtacggcagatcttg

SEQ ID NO: 853582 - DNA, 75 bp, synthetic construct
  source 1..75: mol_type = other DNA
ggcaaacaaggaggactgccagaccgttaaaggtaagcaggtttactcccccagagtttcaaaactggagcaact

SEQ ID NO: 853583 - DNA, 75 bp, synthetic construct
  source 1..75: mol_type = other DNA
ttcgccgcaacgctggaagatataaagaaaaatgactttgtcctgaccccaggtcgctatgtcggtgctgccgag

SEQ ID NO: 853584 - DNA, 75 bp, synthetic construct
  source 1..75: mol_type = other DNA
ggtgatcagggtcgtgcaatagctgcctatcatgctggtatggggcatgttgataaggggagagtagtcgcaggt

SEQ ID NO: 853585 - DNA, 75 bp, synthetic construct
  source 1..75: mol_type = other DNA
cctgggacctgtttaaccgtaatgccagttatggtgttagtgaaaaagctgcgcagatagctgcagcgacggggc

SEQ ID NO: 853586 - DNA, 75 bp, synthetic construct
  source 1..75: mol_type = other DNA
attgaggccgatgtgcgtcggagtgaatcagaagctgaatattattattttaaagagaaggaaacaggggaggaa

SEQ ID NO: 853587 - DNA, 75 bp, synthetic construct
  source 1..75: mol_type = other DNA
gtaatgctgttggcgttaacgatctggtcaacaaattcatgaatggtcgggggatgcgtcgagaagtcgtccagg

SEQ ID NO: 853588 - DNA, 75 bp, synthetic construct
  source 1..75: mol_type = other DNA
tgatggactgtatgacaaactcattaatgcccggggaatgcgctcaaataattctcctcaaccagcttccacgtc

SEQ ID NO: 853589 - DNA, 75 bp, synthetic construct
  source 1..75: mol_type = other DNA
aaaggtcagcacgcctcagccgggcgttatgcgcacggtaccactgtcaattgatgatccgttgatgaatgacta

SEQ ID NO: 853590 - DNA, 75 bp, synthetic construct
  source 1..75: mol_type = other DNA
atgttgaaatcccccctgttctggaaaatgactagcctgtttggtgcagtattgctgttgttgattccgataatg

SEQ ID NO: 853591 - DNA, 75 bp, synthetic construct
  source 1..75: mol_type = other DNA
ttaatatcttccctattctagttatagtaattgcaggtctgtcagtcgcccttgttaaaagttgctcagacgcca

SEQ ID NO: 853592 - DNA, 75 bp, synthetic construct
  source 1..75: mol_type = other DNA
taaacgagctggataacaaattctggaaggcggctgacaagctgcgcgccaacatggatgccgccaactacaagc

SEQ ID NO: 853593 - DNA, 75 bp, synthetic construct
  source 1..75: mol_type = other DNA
ccggcgtttagcgtcgcagtcactacgccagccgatcagtatcaattaacggatcgggcgaccaagtacgccatt

SEQ ID NO: 853594 - DNA, 75 bp, synthetic construct
  source 1..75: mol_type = other DNA
agcgcgctgttgttgggaaccagtgtgctggtggtggcgctggccggcatgatgtttcatgatgtttgtgactcg

SEQ ID NO: 853595 - DNA, 75 bp, synthetic construct
  source 1..75: mol_type = other DNA
ttctttgtttttgaaacgctcaccgcgcaacgtttacacccaatgcaatatttgctggtggggctttcattggtg

SEQ ID NO: 853596 - DNA, 75 bp, synthetic construct
  source 1..75: mol_type = other DNA
cgatccggaagggaaggtgattgcgctggacagccatatccggctggcgaatccccgcacgccagagagtgagtc

SEQ ID NO: 853597 - DNA, 75 bp, synthetic construct
  source 1..75: mol_type = other DNA
gaacgccgctgaaagaacagcagacgatttttggtcgtgataagcaaaccggtgcgccgctgggaatgcagcatg

SEQ ID NO: 853598 - DNA, 75 bp, synthetic construct
  source 1..75: mol_type = other DNA
ctcagggacaagatgccagaatattaaaaagaaaattggagcaagaacatttttcaacatattacgatgaatttc

SEQ ID NO: 853599 - DNA, 75 bp, synthetic construct
  source 1..75: mol_type = other DNA
atccccgcacgccagagagtgagtccagcctgatgctgcgtcgtggctacagttattcgttgggcgtcaccaact

SEQ ID NO: 853600 - DNA, 75 bp, synthetic construct
  source 1..75: mol_type = other DNA
gaaaaaggcttcctgacagtacaaaaaaggctcaatggcgaagcgctggaggaatacgttaaaccggtgatgctg

SEQ ID NO: 853601 - DNA, 75 bp, synthetic construct
  source 1..75: mol_type = other DNA
agcatgatgtgcccgattacgccagcgatccggaagggaaggtgattgcgctggacagccatatccggctggcga

SEQ ID NO: 853602 - DNA, 75 bp, synthetic construct
  source 1..75: mol_type = other DNA
aagcattgtgtcgcgcaatgtcgatccgctggaagcggcggtaattaccgtcggcagcattgttgcgggtgaggc

SEQ ID NO: 853603 - DNA, 75 bp, synthetic construct
  source 1..75: mol_type = other DNA
aaagccatcgatccggtgctggttgccgcacatatcaccaccgcattacaaagcattgtgtcgcgcaatgtcgat

SEQ ID NO: 853604 - DNA, 75 bp, synthetic construct
  source 1..75: mol_type = other DNA
tttgcctccccagccgccgaccatgccagattgagagagtacgggaaatgcctcgataacgatcttgatcgcttc

SEQ ID NO: 853605 - DNA, 75 bp, synthetic construct
  source 1..75: mol_type = other DNA
tggtgcataaccccggatacgacttcaacgatgcaagtctggtgtcggcaagtagctactggggtgcgctggtag

SEQ ID NO: 853606 - DNA, 75 bp, synthetic construct
  source 1..75: mol_type = other DNA
cctgtggggttatgaagttgaacaagggctggcgacgacgggcgtggtcgctaccttaaaagtcggtgacggaga

SEQ ID NO: 853607 - DNA, 75 bp, synthetic construct
  source 1..75: mol_type = other DNA
tgaaactcgccgttttaacggtacgttgcgtctcatcttccagccagcggaagagatgatcaatggcggtgagat

SEQ ID NO: 853608 - DNA, 75 bp, synthetic construct
  source 1..75: mol_type = other DNA
tacattgcgcccgataatctcaccatcacgttatcggtgggccactcattgtttgatgagcgctttggccttgcg

SEQ ID NO: 853609 - DNA, 75 bp, synthetic construct
  source 1..75: mol_type = other DNA
agctatgataaataacctattacaggaagttgatatagcccttggtaaaataaatgacattatagacagcagaaa

SEQ ID NO: 853610 - DNA, 75 bp, synthetic construct
  source 1..75: mol_type = other DNA
aatctggcgctggttatcgcggcctgtgtgaccttcactggtgcgctgtgttacttctttatcgtcaaagatcgc

SEQ ID NO: 853611 - DNA, 75 bp, synthetic construct
  source 1..75: mol_type = other DNA
ctgctggtacgcgtggtatcgcaaccgggcgcagtttgtcctgaccgacgaagaacggacgtatctctccgcgcc

SEQ ID NO: 853612 - DNA, 75 bp, synthetic construct
  source 1..75: mol_type = other DNA
gtgacaccgccaccaccagtgaaatcaaagccaaactgctggcggacgatatcgtcccttcccgtcatgtgaaag

SEQ ID NO: 853613 - DNA, 75 bp, synthetic construct
  source 1..75: mol_type = other DNA
ggtaatttcatggatgacagcgccatcaccgcgaaagtgaaggcggcgctggtggatcatgacaacatcaagagc

SEQ ID NO: 853614 - DNA, 75 bp, synthetic construct
  source 1..75: mol_type = other DNA
ttcgtcgtcttgaagacggctcctacactatcgaatcaaattccaacctgaataagcagaagttgctttgtgaca

SEQ ID NO: 853615 - DNA, 75 bp, synthetic construct
  source 1..75: mol_type = other DNA
ccgggcaactcgatatggggctactgtttgtctgctaccaacacgatctggaaaaagggcttcctgacagtacaa

SEQ ID NO: 853616 - DNA, 75 bp, synthetic construct
  source 1..75: mol_type = other DNA
ggaatacgtcaaacccatcggcggggggtatttttttgcgctgccgggggtgaagaatgcgaacgattacctggg

SEQ ID NO: 853617 - DNA, 75 bp, synthetic construct
  source 1..75: mol_type = other DNA
ggcgagttaggattatcggcgacagagtttggcgttttgctttctgcattttctctgtcttatggtttttcacaa

SEQ ID NO: 853618 - DNA, 75 bp, synthetic construct
  source 1..75: mol_type = other DNA
cccgtcagacagctaagtacccgctatggtgaagaatatcgtgaggataatttttcttccgtccgtcccgcagaa

SEQ ID NO: 853619 - DNA, 75 bp, synthetic construct
  source 1..75: mol_type = other DNA
ttagccgcgatacccgacaacttcttctgacccgtattcctgctcttgcacaagcccaggctgccagctttggcg

SEQ ID NO: 853620 - DNA, 75 bp, synthetic construct
  source 1..75: mol_type = other DNA
acgataaacaacatgaatataatattgaaacttcattagattttagttctcctttgccagagccggagcgagagc

SEQ ID NO: 853621 - DNA, 75 bp, synthetic construct
  source 1..75: mol_type = other DNA
aacgcaaaatctacgcttacaagatcaccaaatggaaagctaagtggtggcgctctcggaatgttccagtttacg

SEQ ID NO: 853622 - DNA, 75 bp, synthetic construct
  source 1..75: mol_type = other DNA
gcatgttgataaggggagagtagtcgccggtaccggcgaatatgtgactcgtgtcagagggtatcagcagatgct

SEQ ID NO: 853623 - DNA, 75 bp, synthetic construct
  source 1..75: mol_type = other DNA
cgccgggcgtgctgcatacccagtttttaagagcaagcggcataaacaggccgcagaactaactgccagcgcatt

SEQ ID NO: 853624 - DNA, 75 bp, synthetic construct
  source 1..75: mol_type = other DNA
aagtattgcccaggccattgatagtgggattaccaatttagaaacatatatttctaaccttggtgacaccatatc

SEQ ID NO: 853625 - DNA, 75 bp, synthetic construct
  source 1..75: mol_type = other DNA
tggacacggcgaaagatagcaataaaacagttaaagaaactgccaatcagattatcaatgcaaatgccgtagaaa

SEQ ID NO: 853626 - DNA, 75 bp, synthetic construct
  source 1..75: mol_type = other DNA
tacccaatccgatcggcgaggctaatgcgaaagaaatcactccagagttaaaagctccggttaatagccaccagg

SEQ ID NO: 853627 - DNA, 75 bp, synthetic construct
  source 1..75: mol_type = other DNA
tcgtcggtgaacaggtatggaatttcgccgattttgcgacctcgcaaggcatattgcgcgttggcggtaacaaga

SEQ ID NO: 853628 - DNA, 75 bp, synthetic construct
  source 1..75: mol_type = other DNA
cgcgcccgtctgggcgcggctcgcgggattgccgcttcattgacttttgtctgcctggcatttctgataggaccg

SEQ ID NO: 853629 - DNA, 75 bp, synthetic construct
  source 1..75: mol_type = other DNA
caccgataccatcagcgatctctttgatgtgctgtgcctgaaccgttattacggttggtatgtccaaagcggcga

SEQ ID NO: 853630 - DNA, 75 bp, synthetic construct
  source 1..75: mol_type = other DNA
gagtgtgatatctacccgctgcgcgtcggcatccggtcagtggcagtgaagggcgaacagttcctgatcaaccac

SEQ ID NO: 853631 - DNA, 75 bp, synthetic construct
  source 1..75: mol_type = other DNA
taaagagctgattgcgcgtgacaaaaaccacccaagcgtggtgatgtggagtattgccaacgaaccggatacccg

SEQ ID NO: 853632 - DNA, 75 bp, synthetic construct
  source 1..75: mol_type = other DNA
agcgaagaggcagtcaacggggaaactcagcaggcgcacttacaggcgattaaagagctgatagcgcgtgacaaa

SEQ ID NO: 853633 - DNA, 75 bp, synthetic construct
  source 1..75: mol_type = other DNA
acggctgctggcaatgtgtatgttgatacacctatgccagttgaagaggcacgtccggtagcaaacaactcaagt

SEQ ID NO: 853634 - DNA, 75 bp, synthetic construct
  source 1..75: mol_type = other DNA
acaatagacaacatgaatataatattgaaacttcattagattttagttctcctttgccagagccggagcgagagc

SEQ ID NO: 853635 - DNA, 75 bp, synthetic construct
  source 1..75: mol_type = other DNA
acaatatacatcatgaatataatattgaaacttcattagattttagttctcctttgccagagccggagcgagagc

SEQ ID NO: 853636 - DNA, 75 bp, synthetic construct
  source 1..75: mol_type = other DNA
acaataaacagcatgaatataatattgaaacttcattagattttagttctcctttgccagagccggagcgagagc

SEQ ID NO: 853637 - DNA, 75 bp, synthetic construct
  source 1..75: mol_type = other DNA
accatacacaccatgaatataatattgaaacttcattagattttagttctcctttgccagagccggagcgagagc

SEQ ID NO: 853638 - DNA, 75 bp, synthetic construct
  source 1..75: mol_type = other DNA
actatatacaacatgaatataatattgaaacttcattagattttagttctcctttgccagagccggagcgagagc

SEQ ID NO: 853639 - DNA, 75 bp, synthetic construct
  source 1..75: mol_type = other DNA
actataaacatcatgaatataatattgaaacttcattagattttagttctcctttgccagagccggagcgagagc

SEQ ID NO: 853640 - DNA, 75 bp, synthetic construct
  source 1..75: mol_type = other DNA
cgcaggtgatcgcaaagcacaagattgatggatcacgccttgcccggcataccacgctggcaaatgcattcatct

SEQ ID NO: 853641 - DNA, 75 bp, synthetic construct
  source 1..75: mol_type = other DNA
atttggccgaatacgaagattttattaatcaggaacagttcgccggacgtcctctggccgaatatgttgctgagg

SEQ ID NO: 853642 - DNA, 75 bp, synthetic construct
  source 1..75: mol_type = other DNA
cgtagtagtgagagtgcctctcgtgcgcaggtcatcgcaaagcacaaaattgatggctcacgcctggcccggcat

SEQ ID NO: 853643 - DNA, 75 bp, synthetic construct
  source 1..75: mol_type = other DNA
cccatttcattatctgatatagaccataaaaatcatgaatataatattgaaacttcattagattttagttctcct

SEQ ID NO: 853644 - DNA, 75 bp, synthetic construct
  source 1..75: mol_type = other DNA
tctccgtggaatggatgatttttacattaagacaacgagttttgaatgcccatacgagccttgtaaaattaaagc

SEQ ID NO: 853645 - DNA, 75 bp, synthetic construct
  source 1..75: mol_type = other DNA
tgcgattcgtcaggagtggttgaaagatcctaatgaaccagactggtatgacacgctgccgggtatttaccgtga

SEQ ID NO: 853646 - DNA, 75 bp, synthetic construct
  source 1..75: mol_type = other DNA
gtactgatggggcaatgaaactgagagaaatgctgtccatatataactacaacaataatcactctgtatcaattt

SEQ ID NO: 853647 - DNA, 75 bp, synthetic construct
  source 1..75: mol_type = other DNA
cccgttgttaatctcttcgaaaaaaaatcagaaccgctacgattatctgaaggtcaggatgagtatcaggttaat

SEQ ID NO: 853648 - DNA, 75 bp, synthetic construct
  source 1..75: mol_type = other DNA
agatattgctcatctgcgaataacagcactgaagcgaccatcaagaatgctgccggcgatgacattaaaaggaat

SEQ ID NO: 853649 - DNA, 75 bp, synthetic construct
  source 1..75: mol_type = other DNA
tgatttatggtgaaacctatgtcagttccggacttgcatcccttatatttgcgaatatgcctgtagctgttttga

SEQ ID NO: 853650 - DNA, 75 bp, synthetic construct
  source 1..75: mol_type = other DNA
ataccgtttgttgccgggatatttcttactcttttctcacggcgagtgtctgcaaccaacaaacatcgggatcgc

SEQ ID NO: 853651 - DNA, 75 bp, synthetic construct
  source 1..75: mol_type = other DNA
taaacataaatctaaaaccatctgccagtttagaacggtatatccactgactatcgtcccggcaacggttaatga

SEQ ID NO: 853652 - DNA, 75 bp, synthetic construct
  source 1..75: mol_type = other DNA
gtatgccgtggctcggtgctgaaagcgacggcagcaaaaacggcgatctaccaaaagcgcagttccgcaaatgga

SEQ ID NO: 853653 - DNA, 75 bp, synthetic construct
  source 1..75: mol_type = other DNA
gtgtcggaacactgaatccggtattcacacgggggatgccctggttcggcgcagaaagcgaccacgggaaaaggg

SEQ ID NO: 853654 - DNA, 75 bp, synthetic construct
  source 1..75: mol_type = other DNA
ccggtgtcagtctgccgtatggctataccctggtggattacacgtattcatggagtgactacctcagcaccattg

SEQ ID NO: 853655 - DNA, 75 bp, synthetic construct
  source 1..75: mol_type = other DNA
ttcatttgaaccaaataagacttccagtggaatgacatccatttataaagttccagttggtacatcgatatattc

SEQ ID NO: 853656 - DNA, 75 bp, synthetic construct
  source 1..75: mol_type = other DNA
ttttaatctggaatataaataaagtaacattacacaggtatgaaaaagatttggtcaaggaaatcccattaaaaa

SEQ ID NO: 853657 - DNA, 75 bp, synthetic construct
  source 1..75: mol_type = other DNA
gcagcagcgcattttcgaatgcaaaagatgcacaaaattttgcggcgggcgttagcgtgccttatggctacagcc

SEQ ID NO: 853658 - DNA, 75 bp, synthetic construct
  source 1..75: mol_type = other DNA
atgcagcaccggcaggataacttactggcgaacagaaattttttgcctggtatggtttccggtcagtgcgcattc

SEQ ID NO: 853659 - DNA, 75 bp, synthetic construct
  source 1..75: mol_type = other DNA
cacctggaatcgctctatcgccgtctggaagtgaaaaaccgtacccaggcagcgatgatgttaaatatatcctcc

SEQ ID NO: 853660 - DNA, 75 bp, synthetic construct
  source 1..75: mol_type = other DNA
gtctattaccaagccagtatctgacgaggcagcaaatgctataattaaatataatgataacaggacaaaatttgc

SEQ ID NO: 853661 - DNA, 75 bp, synthetic construct
  source 1..75: mol_type = other DNA
taccccacggactacggctaccgactggtaaaaggactggcgacccatcccaatgttggtgcggtgttgattatc

SEQ ID NO: 853662 - DNA, 75 bp, synthetic construct
  source 1..75: mol_type = other DNA
agtcaatatttattcatggaatgaaagtcagtttacagcagcgtattccaggtgtgagtattcagggggtcagtc

SEQ ID NO: 853663 - DNA, 75 bp, synthetic construct
  source 1..75: mol_type = other DNA
cgtcatcatccgcgtgactacattgagtcaatggaagcggcgctgaaaaccgtgcttgcagagcttagcgccgaa

SEQ ID NO: 853664 - DNA, 75 bp, synthetic construct
  source 1..75: mol_type = other DNA
ggcgatgagcgccgaacaacactatcttccaacttccgccccggcacaggctgcccaggccgttgcgactctata

SEQ ID NO: 853665 - DNA, 75 bp, synthetic construct
  source 1..75: mol_type = other DNA
atgcaacggcggctatctctgttttgagcgtcggtgccaccaccggcgtaaaaaaaagaaagctggtcgaacaat

SEQ ID NO: 853666 - DNA, 75 bp, synthetic construct
  source 1..75: mol_type = other DNA
atgcaacggcggctatctcggttctaagcatcggcgccaccaccggtgtaaaaaacagaaagctggtcgaacaat

SEQ ID NO: 853667 - DNA, 75 bp, synthetic construct
  source 1..75: mol_type = other DNA
cgtttgtcactaaccgtaacggcagtctgtggaagttgaatattgacgatgtcgattttacgcggttttctcagg

SEQ ID NO: 853668 - DNA, 75 bp, synthetic construct
  source 1..75: mol_type = other DNA
tgcttcagggcagcagccgtaaactcacttcattttctgtcgggctgaatcacacccacaagtttctgggggggg

SEQ ID NO: 853669 - DNA, 75 bp, synthetic construct
  source 1..75: mol_type = other DNA
tttatagaagtcaaaatatcaaactgggtaagagcaggtggagcattagctgtatttgtgattgtctattacgtg

SEQ ID NO: 853670 - DNA, 75 bp, synthetic construct
  source 1..75: mol_type = other DNA
ttatgacttatcagggtgagtccattaatcttatttcactggatcacgaatatccagagtcctgtcttcaaaatt

SEQ ID NO: 853671 - DNA, 75 bp, synthetic construct
  source 1..75: mol_type = other DNA
caacgccgctggacagagaagcgcgtaaccgtggcacgtcggtgtacttcccttcgcaggttatcccgatgctgc

SEQ ID NO: 853672 - DNA, 75 bp, synthetic construct
  source 1..75: mol_type = other DNA
cgccagactcaggttaacgaacctggaacggtagttgccagtaaacagtcggccccgttgcacgatctgcttaag

SEQ ID NO: 853673 - DNA, 75 bp, synthetic construct
  source 1..75: mol_type = other DNA
cttcaatgtgcctggaacatggcgggccgggtcggacgccgtgcgtcagatcctgcgccagcaagccggtgtcga

SEQ ID NO: 853674 - DNA, 75 bp, synthetic construct
  source 1..75: mol_type = other DNA
agacggtatctggttttttgatgagagttgtccggggggagctgtttgggtgcttgaagatggctctctcgaatg

SEQ ID NO: 853675 - DNA, 75 bp, synthetic construct
  source 1..75: mol_type = other DNA
tttgcattaggcgcggtgttagccgttgtggcgttatggttacgtcgtcagttggatgaaacttcgcaacaagaa

SEQ ID NO: 853676 - DNA, 75 bp, synthetic construct
  source 1..75: mol_type = other DNA
cgcccggaattaatcattcgtctcggaattgatatagataccgccatcgcccgcaagcctgatcacgactatgcc

SEQ ID NO: 853677 - DNA, 75 bp, synthetic construct
  source 1..75: mol_type = other DNA
actgaacggcgttatctggggctactctccggtgaagacggcgataaaatcaaacggttgccgttagttggtgtc

SEQ ID NO: 853678 - DNA, 75 bp, synthetic construct
  source 1..75: mol_type = other DNA
gcgctgtcggataagattggtcgccgtacctcaatgttatgtttcggttctctggcagccatttttaccgttcct

SEQ ID NO: 853679 - DNA, 75 bp, synthetic construct
  source 1..75: mol_type = other DNA
gtttttatgcctcatttcagtatgtcacgttgatcggcggacaactgttggcactactggttgtagtggttttac

SEQ ID NO: 853680 - DNA, 75 bp, synthetic construct
  source 1..75: mol_type = other DNA
atggaaacagccttcttctggtatgtgaccttgatggccgtagtggcgtttctggtttctttgatgctacatcgc

SEQ ID NO: 853681 - DNA, 75 bp, synthetic construct
  source 1..75: mol_type = other DNA
aaccggttcgttgcagggggtatataacctggcgggattcattaccacagcgagcgggcaacgaatggcgtttgt

SEQ ID NO: 853682 - DNA, 75 bp, synthetic construct
  source 1..75: mol_type = other DNA
aaagcgcagcctgaagcggaagtcgttgcacagccggaaccggtcgtagaagaaacgccggagccagtggctatc

SEQ ID NO: 853683 - DNA, 75 bp, synthetic construct
  source 1..75: mol_type = other DNA
atggtggtttctccggcagaagaagagcagccggtggaagaaatcgctcaggagcaggaaaaaccgaccaaagaa

SEQ ID NO: 853684 - DNA, 75 bp, synthetic construct
  source 1..75: mol_type = other DNA
acaagccgttgaagagcagccgcaggcgcatactgaagccgaggcggaaacttttgctgccgacgttgtggaagt

SEQ ID NO: 853685 - DNA, 75 bp, synthetic construct
  source 1..75: mol_type = other DNA
ttctgtcgggctgaatcacacccacaagtttctggggggggtcggaacactgaatccggtattcacacgggggat

SEQ ID NO: 853686 - DNA, 75 bp, synthetic construct
  source 1..75: mol_type = other DNA
ttctggtttttttatccccgcattttcgtctccggcagccatgctgtctccgggtgaccgcagtgcaattcagca

SEQ ID NO: 853687 - DNA, 75 bp, synthetic construct
  source 1..75: mol_type = other DNA
gctgtcctggtctctgttctccctgccatatgtgggaactgtccgtgcagtggctgcactggacggcggctggct

SEQ ID NO: 853688 - DNA, 75 bp, synthetic construct
  source 1..75: mol_type = other DNA
tctcggtggctgaccagtttggtattcctatccgctacattggtgtcggcgaacgtattgaggatttgcgtccgt

SEQ ID NO: 853689 - DNA, 75 bp, synthetic construct
  source 1..75: mol_type = other DNA
gccgttgaagagcagccgcaggcgcatactgaagctgaggcggaaacttttgctgccgacgttgtggaagtcact

SEQ ID NO: 853690 - DNA, 75 bp, synthetic construct
  source 1..75: mol_type = other DNA
attatgctgaaaaagtcggacaacatgatcgccgatacggttttccgcatgatcggccatgcgcgcttcaatgtg

SEQ ID NO: 853691 - DNA, 75 bp, synthetic construct
  source 1..75: mol_type = other DNA
tgaccgaaggcgcgacccgcaagcagcttcgcgatgctgaggcgctctacggcctgttgaaagaagagatgggcg

SEQ ID NO: 853692 - DNA, 75 bp, synthetic construct
  source 1..75: mol_type = other DNA
ggaagttattactgagccggaaacgatagttgaagaaacgccagcgtcagtcattgaacctgaagttacgccaga

SEQ ID NO: 853693 - DNA, 75 bp, synthetic construct
  source 1..75: mol_type = other DNA
gccgttgaagagcagccgcaggcgcatactgaagccgaggcggaaacttttgctgccgacgttgtggaagttact

SEQ ID NO: 853694 - DNA, 75 bp, synthetic construct
  source 1..75: mol_type = other DNA
gtgcaacagataagcaccactgtcagtgtgggtcatactcaggagcaggttaaaaatgccattttgaaagcaggt

SEQ ID NO: 853695 - DNA, 75 bp, synthetic construct
  source 1..75: mol_type = other DNA
atgaggaaggcatatcttatggaatctattcaaccctggattgaaaaatttattaagcaagcacagcaacaacgt

SEQ ID NO: 853696 - DNA, 75 bp, synthetic construct
  source 1..75: mol_type = other DNA
tagctatgaggattttatacagggctatcgtccgaatggcgtcggcttccgacgtaaagacggcatattttacaa

SEQ ID NO: 853697 - DNA, 75 bp, synthetic construct
  source 1..75: mol_type = other DNA
ccagtatttaaaagagattgagcgttatgtcggaggcgtaaggctgaaagacatgcacccgacagaacgtggtaa

SEQ ID NO: 853698 - DNA, 75 bp, synthetic construct
  source 1..75: mol_type = other DNA
gaagagccggaacaaattgaacaatcctacgccagctgccaaccgtggccggagcaggtggtattagatggggaa

SEQ ID NO: 853699 - DNA, 75 bp, synthetic construct
  source 1..75: mol_type = other DNA
gcgccgctttattgcgatgaagagggcaaacatccggtcacccagtttgataaaagcgacgttgaatacgccggg

SEQ ID NO: 853700 - DNA, 75 bp, synthetic construct
  source 1..75: mol_type = other DNA
cgttgcatcctttggcgcttcccgcaaaaggcggtgaagcgatggtgagtcgtgcagctactgtgccgcccattt

SEQ ID NO: 853701 - DNA, 75 bp, synthetic construct
  source 1..75: mol_type = other DNA
ctggactccctgaaatccagcgtttcctggttgctggaaaaactcggcattgtcagtaaagaggctgcaaaggcg

SEQ ID NO: 853702 - DNA, 75 bp, synthetic construct
  source 1..75: mol_type = other DNA
aggaaaaagagggctatgatccggcgttctctgcggcagtaaatattgcctctgctcccattggcctaatgatcc

SEQ ID NO: 853703 - DNA, 75 bp, synthetic construct
  source 1..75: mol_type = other DNA
ttaatgaggttgcaaaagagaaactgccgcattacgtcatgagcgcaactgcagagatcggacgtgttgcagcag

SEQ ID NO: 853704 - DNA, 75 bp, synthetic construct
  source 1..75: mol_type = other DNA
atgcactcatttgggaatgcaatagggaaacccatcaccgcatttctcggtggcgtggtggaaggattcaaagcg

SEQ ID NO: 853705 - DNA, 75 bp, synthetic construct
  source 1..75: mol_type = other DNA
accggattgaagcaccgacgcagatcatcatccagacacagccaggacaaagtgcgcaggatattgcgcgggagg

SEQ ID NO: 853706 - DNA, 75 bp, synthetic construct
  source 1..75: mol_type = other DNA
ccgaccaaaattaccgattttgcgccgctttactgcgatgaagagggcaaacatccggtcacccagtttgataaa

SEQ ID NO: 853707 - DNA, 75 bp, synthetic construct
  source 1..75: mol_type = other DNA
tgtctttgacgccaaagtgactgttgatggtctgcgcgcggttaagccaatgcgtgaatggcaactctctgataa

SEQ ID NO: 853708 - DNA, 75 bp, synthetic construct
  source 1..75: mol_type = other DNA
atggctcaaatcttcaattttagttctggtccggcaatgctaccggcagaggtgcttaaacaggctcaacaggaa

SEQ ID NO: 853709 - DNA, 75 bp, synthetic construct
  source 1..75: mol_type = other DNA
tatctcactatattactggctttcgaaagacgaacttcattaacaagcaccctggcaactttatataaaatgctg

SEQ ID NO: 853710 - DNA, 75 bp, synthetic construct
  source 1..75: mol_type = other DNA
tgatggtattggtgctggcaatggtgacctatattccgcaaatcagtatggcattgccaagagcactgggctact

SEQ ID NO: 853711 - DNA, 75 bp, synthetic construct
  source 1..75: mol_type = other DNA
agatgtggtggtcgccgctgacttctcttcaaccattctttcccgtccgattgacgtcagccgttatggtgtaat

SEQ ID NO: 853712 - DNA, 75 bp, synthetic construct
  source 1..75: mol_type = other DNA
agatgtggtggtcgccgccgacttctcttcaaccattctttcccgtccgattgacgtcagccgttatggcgtgat

SEQ ID NO: 853713 - DNA, 75 bp, synthetic construct
  source 1..75: mol_type = other DNA
ttgctgaaggcgcagaaaagaacgggatcaacgccgaactggcgatgaaaatcttcgacctggtggagaaattcg

SEQ ID NO: 853714 - DNA, 75 bp, synthetic construct
  source 1..75: mol_type = other DNA
gcacgccggtggggtggttatcgcgccgaccaaaattaccgattttgcgccgctttattgcgatgaagagggcaa

SEQ ID NO: 853715 - DNA, 75 bp, synthetic construct
  source 1..75: mol_type = other DNA
aagagatctcctatccggacgtacagtggcagcatgaaagcctgaaaccggtactggagccaacctacggcatta

SEQ ID NO: 853716 - DNA, 75 bp, synthetic construct
  source 1..75: mol_type = other DNA
atgaacaaagaaaatgtcattaccctggaaaatccggtcaaacgtggtgagcaggttatcgaaaaggtcacgctg

SEQ ID NO: 853717 - DNA, 75 bp, synthetic construct
  source 1..75: mol_type = other DNA
cggtttgcctgtcgtggcgaccaacgacgtacgttttatcgacagcagcgactttgacgcacacgaaatccgcgt

SEQ ID NO: 853718 - DNA, 75 bp, synthetic construct
  source 1..75: mol_type = other DNA
gctttgatgacttcagcggtgggcttaaaatgaccgctcgcgaagtgatggatattgacgaagcccgggaaaaat

SEQ ID NO: 853719 - DNA, 75 bp, synthetic construct
  source 1..75: mol_type = other DNA
tattaattctatttggcagttttgccgttatgctggcaataggtgtgccaatcactttttctattggtctttctt

SEQ ID NO: 853720 - DNA, 75 bp, synthetic construct
  source 1..75: mol_type = other DNA
aagccgaaggcaccggactggggctggcggtcgtgcataatattgttgaacaacacggtggtacaattcaggtcg

SEQ ID NO: 853721 - DNA, 75 bp, synthetic construct
  source 1..75: mol_type = other DNA
gtttgcggtcacggatgaacaaggaacaatcgtgatgcatagcaactccggcatggtgggaaaacagctttattc

SEQ ID NO: 853722 - DNA, 75 bp, synthetic construct
  source 1..75: mol_type = other DNA
tggagtttatctccaccattttgcagaccgtactcaatcttggcctgttgtgcctcggcctgattttggttgtct

SEQ ID NO: 853723 - DNA, 75 bp, synthetic construct
  source 1..75: mol_type = other DNA
atgaagcgcaaagagaagctggtggcgctggggcatcttgcggcaggcgttgcccacgaaatccgtaacccactt

SEQ ID NO: 853724 - DNA, 75 bp, synthetic construct
  source 1..75: mol_type = other DNA
tcaccccgtacttcaccaccaaagccgaaggcaccgggctggggctggcggttgtgcataatattgttgaacaac

SEQ ID NO: 853725 - DNA, 75 bp, synthetic construct
  source 1..75: mol_type = other DNA
tgctattcaggctattggtgagcatggcgtgattagtgtgacggcaagtgaaagcggcaatggcgtgaaaattaa

SEQ ID NO: 853726 - DNA, 75 bp, synthetic construct
  source 1..75: mol_type = other DNA
cgctggcaaaaaccctggggcgtgtgttgtctgtattccataaccgtcgctgggatagcgattttctgaccctaa

SEQ ID NO: 853727 - DNA, 75 bp, synthetic construct
  source 1..75: mol_type = other DNA
tgaaaaatggcgagcgtctgccacaagaggattggggctacgatatgcgtgacggcgtacttacccgcgttgaag

SEQ ID NO: 853728 - DNA, 75 bp, synthetic construct
  source 1..75: mol_type = other DNA
gggtttaggcagtttttctaacggtaacgccgtcggcgggttaaccacgcaagaagaaaaatcgctgggtgccta

SEQ ID NO: 853729 - DNA, 75 bp, synthetic construct
  source 1..75: mol_type = other DNA
acggttgtctctgaaccgaagcatctctttaatgatcccaatattgacctgattgtcattcctacgcccaacgat

SEQ ID NO: 853730 - DNA, 75 bp, synthetic construct
  source 1..75: mol_type = other DNA
gatggcgtacttacccgcgtggaaggtgaggaacgtgtcgaagaaacgctgttgacagtgccggggaattatccg

SEQ ID NO: 853731 - DNA, 75 bp, synthetic construct
  source 1..75: mol_type = other DNA
cacggcaccatgctggcagcagccgagtcagcacggtatatcgtgcatggatcccgaggcagttatgtgaaatat

SEQ ID NO: 853732 - DNA, 75 bp, synthetic construct
  source 1..75: mol_type = other DNA
tggcactttttcagggaacacgacccgcattatcagtggacgcttccctataccattccctaatcaaccgcttgt

SEQ ID NO: 853733 - DNA, 75 bp, synthetic construct
  source 1..75: mol_type = other DNA
gcccgatgtcggtattcgtattgaaaatctcggcggcggagttgcaaatattccttttcagaacggtatccttcc

SEQ ID NO: 853734 - DNA, 75 bp, synthetic construct
  source 1..75: mol_type = other DNA
tcattggcgctgaacattacatagacgagtcaagaactgattggttgtgtgggtataaaaacctattcggaaagt

SEQ ID NO: 853735 - DNA, 75 bp, synthetic construct
  source 1..75: mol_type = other DNA
aagggcatttattcttttttatcaaagatacgatacccacttagcaagtttattttgaaaaaattattacatatc

SEQ ID NO: 853736 - DNA, 75 bp, synthetic construct
  source 1..75: mol_type = other DNA
gcgccatttacccaaactgattctggagtcggttgttaccacttcgattgtattactgttgatcggtttttccgt

SEQ ID NO: 853737 - DNA, 75 bp, synthetic construct
  source 1..75: mol_type = other DNA
aagccattgaggcgaaacccaatgcagtctggcaggaccagctggtgctgaacaaaaccagcggaggctaccgga

SEQ ID NO: 853738 - DNA, 75 bp, synthetic construct
  source 1..75: mol_type = other DNA
gttaatctggtcggtggtgagctggaaacaggaaaatttcagggcacagccaccattaccgtcatcgtgcggtaa

SEQ ID NO: 853739 - DNA, 75 bp, synthetic construct
  source 1..75: mol_type = other DNA
gaactatgagaaattaccttttggatttatcattgccgcgtttgctatactaaagatagcatttaaaataaaatt

SEQ ID NO: 853740 - DNA, 75 bp, synthetic construct
  source 1..75: mol_type = other DNA
tgaccagggctttttacgccagtggagcaaggtggcgaaagaacgcaaactgcaacggctctatatcggcgaacc

SEQ ID NO: 853741 - DNA, 75 bp, synthetic construct
  source 1..75: mol_type = other DNA
acgccagccaaagccagggcaaacgccatgacatcattcagcttggtggggaaaatctggctgcagggttaaatg

SEQ ID NO: 853742 - DNA, 75 bp, synthetic construct
  source 1..75: mol_type = other DNA
tgtgtaacagagagggcattacgcaagcccagtttgttgagaagctgcttgaaaatgaattaaaagctcagggac

SEQ ID NO: 853743 - DNA, 75 bp, synthetic construct
  source 1..75: mol_type = other DNA
ggcatggttgagtgtcggtggtatgacggttacggtgtcaaacgggaagcctttcatgaaactgagcttgttccg

SEQ ID NO: 853744 - DNA, 75 bp, synthetic construct
  source 1..75: mol_type = other DNA
tctggctaaaaaccagaatacccgtgacatccgaaatattaaaaatttttcctcacatcaacattcactgggcga

SEQ ID NO: 853745 - DNA, 75 bp, synthetic construct
  source 1..75: mol_type = other DNA
actgcaatatcgaaccggtttccggcctgaaaaatctgcaaaatttgcaggcggtgctggcgcgacgtcaggcgg

SEQ ID NO: 853746 - DNA, 75 bp, synthetic construct
  source 1..75: mol_type = other DNA
ctttataaatgaagttaaaggcaccattgatacagcaactttcaggttacagactggtactggtgcttttgcctt

SEQ ID NO: 853747 - DNA, 75 bp, synthetic construct
  source 1..75: mol_type = other DNA
agtaccctaaactggcactagcctatccagacatgaaacttccagacctgcggggggagtttattcgtggatggg

SEQ ID NO: 853748 - DNA, 75 bp, synthetic construct
  source 1..75: mol_type = other DNA
gtggaggcatccggtgccagcctggagaaggggcggcatgaccagctacttacagcgcttcgtgcgctgctgtta

SEQ ID NO: 853749 - DNA, 75 bp, synthetic construct
  source 1..75: mol_type = other DNA
ttgtttcgtgaaaaatacatagttggtataggtagggataaaaacgaaaacgttggtttgggagaaggttcggca

SEQ ID NO: 853750 - DNA, 75 bp, synthetic construct
  source 1..75: mol_type = other DNA
agtgagttcacctgatgcctcctctttaattaaagaaaccagaccacggaaccttgcatttgcgtatatcgtgag

SEQ ID NO: 853751 - DNA, 75 bp, synthetic construct
  source 1..75: mol_type = other DNA
atctggatgatgactactttgacatgttgcaggaagaactttgtagcgtggtggaggcatccggtgccagtctgg

SEQ ID NO: 853752 - DNA, 75 bp, synthetic construct
  source 1..75: mol_type = other DNA
cctgttccgtggccttcagccactccgccgacaggctggctaaaatgcaacggagcagctttttctgctgaagaa

SEQ ID NO: 853753 - DNA, 75 bp, synthetic construct
  source 1..75: mol_type = other DNA
cgtggtgagtttattcgtggctgggatgacgggcgcggtattgatgcaggacgtgttttattgagcattcagaca

SEQ ID NO: 853754 - DNA, 75 bp, synthetic construct
  source 1..75: mol_type = other DNA
ttacccgttggcgtacctgttccgtggccctcagccactccgccaacaggctggctaaaatgcaacggagcagct

SEQ ID NO: 853755 - DNA, 75 bp, synthetic construct
  source 1..75: mol_type = other DNA
ctgaaatgcaacggtgcggctttttctgctgaagaatacccggaactggcaaaggtttatccgacaaataaattg

SEQ ID NO: 853756 - DNA, 75 bp, synthetic construct
  source 1..75: mol_type = other DNA
cgggtactcaaaggacagcggaggataattttaccggggcatggatatcaatgcgccctcgtaacctttcattta

SEQ ID NO: 853757 - DNA, 75 bp, synthetic construct
  source 1..75: mol_type = other DNA
ttggcgtgccggttccatggccgtcagccacaccgccagagggctggctgaaatgtaacggcgcagcattttctt

SEQ ID NO: 853758 - DNA, 75 bp, synthetic construct
  source 1..75: mol_type = other DNA
gttgcaggaggaactttgcagcgtggtggaggcatccggtgccagcctggagaaggggcggcacgaccagttact

SEQ ID NO: 853759 - DNA, 75 bp, synthetic construct
  source 1..75: mol_type = other DNA
attggcgaagaaacggggatgatttgcgtctcccgaccgacgaacccaacaggtaatgtaataaccgatgaagag

SEQ ID NO: 853760 - DNA, 75 bp, synthetic construct
  source 1..75: mol_type = other DNA
ccattacgaccgagcagctctaccagcgcctgaaagcacgcggcgtgctgatggtgccggggcacaacttcttcc

SEQ ID NO: 853761 - DNA, 75 bp, synthetic construct
  source 1..75: mol_type = other DNA
gattgccagccatccgttccgctccattctgttcccgtgggcaaattatgtgacaatggcgttccttatttgcgt

SEQ ID NO: 853762 - DNA, 75 bp, synthetic construct
  source 1..75: mol_type = other DNA
aagtgtgagtggggctttttacggaggtacctcagtccggaataacatcaatgtatctatgacatacgctaatga

SEQ ID NO: 853763 - DNA, 75 bp, synthetic construct
  source 1..75: mol_type = other DNA
atgccagttagctgttacctctgcattttcttaaacgttggtttgggagaaggttcggcattacccgttggtgtg

SEQ ID NO: 853764 - DNA, 75 bp, synthetic construct
  source 1..75: mol_type = other DNA
gtgattgataacgcttatggcgtcccgttcccgggtatcatcttcagcgaagcgcgcccgctgtggaatccgaat

SEQ ID NO: 853765 - DNA, 75 bp, synthetic construct
  source 1..75: mol_type = other DNA
atcttcccgtggaatgaaattggcagcaacggcagcccgttcgtactgacttttgccaaaatcggtattaccgca

SEQ ID NO: 853766 - DNA, 75 bp, synthetic construct
  source 1..75: mol_type = other DNA
gcgctgtttacccaaaagtgattagccttgatgcttcaaaaattgttccaactgcaaacgaaaaccgcccacgca

SEQ ID NO: 853767 - DNA, 75 bp, synthetic construct
  source 1..75: mol_type = other DNA
ggatttacatcatcatatggcgggagtgaaacccgtccacgaaatattgcatttaactttatcgtgagggctgca

SEQ ID NO: 853768 - DNA, 75 bp, synthetic construct
  source 1..75: mol_type = other DNA
tttgtgattttgataagccagctgcgttttcgccgtgcacacaaagcggcaattgccagccatccgttccgctca

SEQ ID NO: 853769 - DNA, 75 bp, synthetic construct
  source 1..75: mol_type = other DNA
gacggctgcgctctctggctgtaacagcggcatgtacagttgcggacgtatgctctacgcactggcgaaaaaccg

SEQ ID NO: 853770 - DNA, 75 bp, synthetic construct
  source 1..75: mol_type = other DNA
gttgattggcatcaccgctggtgaagcaaaaaatccacaggtcacgctacgtagtgcggtaggtaaagtgctgtg

SEQ ID NO: 853771 - DNA, 75 bp, synthetic construct
  source 1..75: mol_type = other DNA
gacgctacgctcactgctctagcggcactagctacagcagcagataaactcccttatttcacaggtgttgatcgt

SEQ ID NO: 853772 - DNA, 75 bp, synthetic construct
  source 1..75: mol_type = other DNA
gtaaacccaggaatactggccacatacggtgacgggggaatagttaaaacggacgaacccggtcttaaggtgcct

SEQ ID NO: 853773 - DNA, 75 bp, synthetic construct
  source 1..75: mol_type = other DNA
ggtttgggagaaggtgctccagctattggtgttccgttcttctggccgtccgccgcaatgccagataccgtaatc

SEQ ID NO: 853774 - DNA, 75 bp, synthetic construct
  source 1..75: mol_type = other DNA
gaaggctctgcattacctgttggtgtccctgttccgtggccttccgccactccgccaacaggctggctgaaatgc

SEQ ID NO: 853775 - DNA, 75 bp, synthetic construct
  source 1..75: mol_type = other DNA
tgtctgggatgacgggcgaggtgtagacggtggtcgcgaattattaagctggcagaacgctacaaacttttctca

SEQ ID NO: 853776 - DNA, 75 bp, synthetic construct
  source 1..75: mol_type = other DNA
atgaatgacgttacagttgttacatcggttacttacccatcacccgagtcgttggctctggtggctgatgtgcaa

SEQ ID NO: 853777 - DNA, 75 bp, synthetic construct
  source 1..75: mol_type = other DNA
ttttcataaaccttggtttgggagaaggtgctccagctattggcgttccgttcttctggccgtccgctgcaatgc

SEQ ID NO: 853778 - DNA, 75 bp, synthetic construct
  source 1..75: mol_type = other DNA
acaactctaatgagcgggcaattggtgaaatgtatgtcgttcctgccgatactcgcccacggaatattgcattta

SEQ ID NO: 853779 - DNA, 75 bp, synthetic construct
  source 1..75: mol_type = other DNA
gaagttatcattcagacagcggcggttctggtggcggctcaagtggcggcggatttaacggaggtggcggttctt

SEQ ID NO: 853780 - DNA, 75 bp, synthetic construct
  source 1..75: mol_type = other DNA
gttatcattcagacaacagcggttccggtggaggctcaagtggcggcggatttagcggcggtggcggttcttctg

SEQ ID NO: 853781 - DNA, 75 bp, synthetic construct
  source 1..75: mol_type = other DNA
aacggagcagctttttctgctgaagaatacccggaactggcaaaggcttatccgacaaataaattacctgattta

SEQ ID NO: 853782 - DNA, 75 bp, synthetic construct
  source 1..75: mol_type = other DNA
acccaaaagtgattggccttgatgcttcaagaattgttccaactgcaaacgaaaaccgtcctcgtaacattgcct

SEQ ID NO: 853783 - DNA, 75 bp, synthetic construct
  source 1..75: mol_type = other DNA
tgtagttacggctgatgctttcggggaacttattacggcaaattcaatttctacggtatcggttggtggttctga

SEQ ID NO: 853784 - DNA, 75 bp, synthetic construct
  source 1..75: mol_type = other DNA
caaattctgtcatcgacagctggtccggtatggtgtttttgaagttcaacggggcgaaattttctgccactgatt

SEQ ID NO: 853785 - DNA, 75 bp, synthetic construct
  source 1..75: mol_type = other DNA
atgctggaaaaagccaatctgtacgcgcagctctatattcgtcctaacgaacagaatttgtcccgctcgctgttt

SEQ ID NO: 853786 - DNA, 75 bp, synthetic construct
  source 1..75: mol_type = other DNA
acagaacctctcccgttcgctgtttctagccactggcgatatattgccgctgaataaaaaaaggcgagcgtgtat

SEQ ID NO: 853787 - DNA, 75 bp, synthetic construct
  source 1..75: mol_type = other DNA
aaaggtaagctgaccatcagccacgcctttgcgctggcaacgctcaacgagcaacaggtagatgaactggcgaac

SEQ ID NO: 853788 - DNA, 75 bp, synthetic construct
  source 1..75: mol_type = other DNA
ttaagtcagctataacggcacttatcaacggtgcacctggcacactggatacgcttaaagaaatagctgctgcga

SEQ ID NO: 853789 - DNA, 75 bp, synthetic construct
  source 1..75: mol_type = other DNA
cgccacaccgccagcaggctggttaaagtgcgacgggcgcgcctttacaaaagaacaatatcctgttctggccag

SEQ ID NO: 853790 - DNA, 75 bp, synthetic construct
  source 1..75: mol_type = other DNA
ggtgatttcattcgtatctgggatgacgggcgaggtgcagacggtggtcgcgaattattaagctggcaggcagct

SEQ ID NO: 853791 - DNA, 75 bp, synthetic construct
  source 1..75: mol_type = other DNA
tcgccaaaatccgtttggcgatatcaaatcggatggcacggtgaaaacggctctcgaaaaccttggtttgggaga

SEQ ID NO: 853792 - DNA, 75 bp, synthetic construct
  source 1..75: mol_type = other DNA
ccgtccacgatggcggctgttttggggcagtttatcgcgaacgctgaactggacgcactcgatgatggtgacgtt

SEQ ID NO: 853793 - DNA, 75 bp, synthetic construct
  source 1..75: mol_type = other DNA
cggtatggtgtttttgaagttcaacggggcgaaattttctgccactgattaccctgtgctggcgaaagtgtttcc

SEQ ID NO: 853794 - DNA, 75 bp, synthetic construct
  source 1..75: mol_type = other DNA
catgctggaaaaagccaatctctacgcgcagctctatattcgtcctaacgaacagaacctctcccgttcgctgtt

SEQ ID NO: 853795 - DNA, 75 bp, synthetic construct
  source 1..75: mol_type = other DNA
tcgcgacatgcatattcatctcgacaaaaccttctacggcgggccgtggcgctcgctcaatcgtccggcaggcac

SEQ ID NO: 853796 - DNA, 75 bp, synthetic construct
  source 1..75: mol_type = other DNA
atggtgacgggggaatagttaaaacggacgaacccggtcttaatgtgccttcctcactacgagctattagggaag

SEQ ID NO: 853797 - DNA, 75 bp, synthetic construct
  source 1..75: mol_type = other DNA
gtatggtgaggtactacggtttcctgagtccggtgaagcgccggttactggaagatgttgtgtacgtcataacgg

SEQ ID NO: 853798 - DNA, 75 bp, synthetic construct
  source 1..75: mol_type = other DNA
gtgaggtactacggttttctgagtccggtgaagcgccggttactggaagatgtagtgtacgtcataacggaaaca

SEQ ID NO: 853799 - DNA, 75 bp, synthetic construct
  source 1..75: mol_type = other DNA
tctggcagagcctgatgcacaagccgctggcacgaatgctgtggtgcggctgagagccgcagaggggaagctacg

SEQ ID NO: 853800 - DNA, 75 bp, synthetic construct
  source 1..75: mol_type = other DNA
ggataacgccacacatgtggcggtgtacttcggctcttacctgaaaaaaccgccggtgccgatgagccgtctgga

SEQ ID NO: 853801 - DNA, 75 bp, synthetic construct
  source 1..75: mol_type = other DNA
gtgtaaaagccgctcctgcccgcactgcggggtgaaggctggcgcacagtggatacagtatctgctgagcctggt

SEQ ID NO: 853802 - DNA, 75 bp, synthetic construct
  source 1..75: mol_type = other DNA
gtgaggtactacggtttcctgagtccggtgacgcgccggttactggaagatgttgtgtacgtcataacggagacg

SEQ ID NO: 853803 - DNA, 75 bp, synthetic construct
  source 1..75: mol_type = other DNA
ggttgacccgctgaaatgcattctttgcggaagtcagatgtggtttacgggactgaagaggggctaccgtctggc

SEQ ID NO: 853804 - DNA, 75 bp, synthetic construct
  source 1..75: mol_type = other DNA
tggtgtttcacaaccggtggttactggcagagatgagccgcattgcagcggatgtgatactggaaatctgccatc

SEQ ID NO: 853805 - DNA, 75 bp, synthetic construct
  source 1..75: mol_type = other DNA
gaccacgctgatgggttacacacagtggtgctgttcatcaccggactgttgccacacaaaaaaggtctgcttccg

SEQ ID NO: 853806 - DNA, 75 bp, synthetic construct
  source 1..75: mol_type = other DNA
cgcttgctggtcttgctacaggcgcaaataaactgccgtactttaccggtacagacactgtttctcagactgact

SEQ ID NO: 853807 - DNA, 75 bp, synthetic construct
  source 1..75: mol_type = other DNA
ttactgaaggttgacccgctgaagtgcgtgctgtgtggaagtcagatgcgttttacggggctgaagcggggatga

SEQ ID NO: 853808 - DNA, 75 bp, synthetic construct
  source 1..75: mol_type = other DNA
gtacgtcataacagaaacagtgagaaaaacggcgaggcaaatcaccttgagagggatttaccagcggttactgaa

SEQ ID NO: 853809 - DNA, 75 bp, synthetic construct
  source 1..75: mol_type = other DNA
gacatcaggtcacacctggaaaaatcttcatttttacgcccctaaggtgatgagcatgtggcgttaccggataac

SEQ ID NO: 853810 - DNA, 75 bp, synthetic construct
  source 1..75: mol_type = other DNA
tggtcgagagttcgccggggcgggatatcactgacaccaaatggcgctgtggcggcgcacatgaggcaccgccaa

SEQ ID NO: 853811 - DNA, 75 bp, synthetic construct
  source 1..75: mol_type = other DNA
ccgaagggctgattgacggctggattgtgtacggcatcatctgtgatccggcggatatgctggtggtgcaaatga

SEQ ID NO: 853812 - DNA, 75 bp, synthetic construct
  source 1..75: mol_type = other DNA
tgtctgcgatccgtctgactttttgctggtgcagatgacacaggataaggcgcaggagcactccaaaaagcgcct

SEQ ID NO: 853813 - DNA, 75 bp, synthetic construct
  source 1..75: mol_type = other DNA
atccattctgcttttggcttcctcgaaaatatttcgctatgggatgtcacatcaacagtgcagggcgtggaaagt

SEQ ID NO: 853814 - DNA, 75 bp, synthetic construct
  source 1..75: mol_type = other DNA
gtactcagcgtgagttactgaactccttactccagggtggcgacacgctactgcttgaactgaccaagctgaaag

SEQ ID NO: 853815 - DNA, 75 bp, synthetic construct
  source 1..75: mol_type = other DNA
gaactgaataacaaagggatctggcttcgtgaaggtgaacgggcggtggcggacggcagtatcaccggaacgcca

SEQ ID NO: 853816 - DNA, 75 bp, synthetic construct
  source 1..75: mol_type = other DNA
aatcaggtggagagggatgtatcagcggttactgaaggttgacccgctgaaatgcattctttgcggaagtcagat

SEQ ID NO: 853817 - DNA, 75 bp, synthetic construct
  source 1..75: mol_type = other DNA
aatcacctggagagggatgtatcagaggttactgaaggttgacccgctgaagtgcgtgctgtgcgggagtcagat

SEQ ID NO: 853818 - DNA, 75 bp, synthetic construct
  source 1..75: mol_type = other DNA
ccggagctggtgataccggatgcgctggcagttgaaggaagcagcagacgggactggaatcgcttcctggacagt

SEQ ID NO: 853819 - DNA, 75 bp, synthetic construct
  source 1..75: mol_type = other DNA
acacgcattaccgccgtggctggaatgtcaacgtatcccgggtgatggataatgccacccatgtggcggtgtact

SEQ ID NO: 853820 - DNA, 75 bp, synthetic construct
  source 1..75: mol_type = other DNA
aaacggagcaaaaaaccgccattcataccctgaatcaatcagagccatccagtttaatcgtcggttccgttcata

SEQ ID NO: 853821 - DNA, 75 bp, synthetic construct
  source 1..75: mol_type = other DNA
aagaaatatgcaattgtgctgaagggaagataccttcttggagaagatacctatcaggttaataccgcgtcacat

SEQ ID NO: 853822 - DNA, 75 bp, synthetic construct
  source 1..75: mol_type = other DNA
tgccgatgagccgtctggagcactatgcaggtcaggatgaaatcggtctgcgttacaacagccaccggacaaaac

SEQ ID NO: 853823 - DNA, 75 bp, synthetic construct
  source 1..75: mol_type = other DNA
gctgggatgacgggcgtggtgtggatgcgggacgtgccttgctaagtcttcaggatgactcttttgaagcgcaca

SEQ ID NO: 853824 - DNA, 75 bp, synthetic construct
  source 1..75: mol_type = other DNA
gataattttaccggggcatggatatcaatgcgcccccgcaatgttgcttttaattacatcgtaagggccgcataa

SEQ ID NO: 853825 - DNA, 75 bp, synthetic construct
  source 1..75: mol_type = other DNA
gcaagcctgacgccgggtgctgatagcccacttgattttgatgattattctgtatcttctaatccaaatggatat

SEQ ID NO: 853826 - DNA, 75 bp, synthetic construct
  source 1..75: mol_type = other DNA
ggaaatcagccaggattttcacgatttaatttcaccagtaactctgtgggtgatggtgtgaattttgttgctgtc

SEQ ID NO: 853827 - DNA, 75 bp, synthetic construct
  source 1..75: mol_type = other DNA
ttagctcaacacaatacggatttggtgacactctaacctctaatcaatggggggccataaatggcaaaaagtgga

SEQ ID NO: 853828 - DNA, 75 bp, synthetic construct
  source 1..75: mol_type = other DNA
atgccagttagccgttatctctgcattttcataaacgttggtttgggagaaggttcggcattacccgttggcgtg

SEQ ID NO: 853829 - DNA, 75 bp, synthetic construct
  source 1..75: mol_type = other DNA
accccaccaataaattaccggatttacggggcgagtttattcgtggctgggatgacgggcgagggattgatgcag

SEQ ID NO: 853830 - DNA, 75 bp, synthetic construct
  source 1..75: mol_type = other DNA
cgggatgttggaaaaacaccgccatattgttgtagctaacgatggatatgacacaaaagatgaatgggagttggc

SEQ ID NO: 853831 - DNA, 75 bp, synthetic construct
  source 1..75: mol_type = other DNA
atgtaccccaaactggcaaaagcctaccccactaataaattaccggatttacgcggagaatttatccgtggctgg

SEQ ID NO: 853832 - DNA, 75 bp, synthetic construct
  source 1..75: mol_type = other DNA
cttcaatcccggccagccagtgaaaaaccaccaacacaaccacgccggcatatcgctgaacaagctccaaactgg

SEQ ID NO: 853833 - DNA, 75 bp, synthetic construct
  source 1..75: mol_type = other DNA
gcaacagaacgcatcgctggtgcaggaatcagctgccgccgcagctgcgctggaagaacaggccagtcgtttaac

SEQ ID NO: 853834 - DNA, 75 bp, synthetic construct
  source 1..75: mol_type = other DNA
tactgcgcttcgtgcgctgctgttaagccgcaagaatccgtttggtgatatcaaatcggatggcacggtgaaaac

SEQ ID NO: 853835 - DNA, 75 bp, synthetic construct
  source 1..75: mol_type = other DNA
aggttcggcgttacccgttggtgtgcctgttccgtggcctgcagccactccgccaacaggctggctgaaatgcaa

SEQ ID NO: 853836 - DNA, 75 bp, synthetic construct
  source 1..75: mol_type = other DNA
aggcaccattgatacagcaactttcaggttacagactggtactggtgcttttgccttagcatctcaagctacgcg

SEQ ID NO: 853837 - DNA, 75 bp, synthetic construct
  source 1..75: mol_type = other DNA
caacgactaaacctgcaggtgcgaatgaaacacgcccacgaaatgtcgcttttaactatattgtgagggctgcat

SEQ ID NO: 853838 - DNA, 75 bp, synthetic construct
  source 1..75: mol_type = other DNA
taacttgaaaactatagcgaccaacgcgccaggtggttcagaaacccgtccgcgcaacattgcattcaactacat

SEQ ID NO: 853839 - DNA, 75 bp, synthetic construct
  source 1..75: mol_type = other DNA
ggagtatcggtaatactggcgggagggaaacccgtccacgaaatattgcctttaactacattgtcagggcggcct

SEQ ID NO: 853840 - DNA, 75 bp, synthetic construct
  source 1..75: mol_type = other DNA
atgccagttagccattatctctgcactttcataaacgttggtttgggagaaggttcagcattacctattggtgcg

SEQ ID NO: 853841 - DNA, 75 bp, synthetic construct
  source 1..75: mol_type = other DNA
ccgttggtgtgcccgttccgtggccctcagccacgccgccaactgggtggctaaaatgtaacggagcagcatttt

SEQ ID NO: 853842 - DNA, 75 bp, synthetic construct
  source 1..75: mol_type = other DNA
acgtggtgagtttattcgtggctgggatgacggacgtggtatggatacggggagggcaatattatccgctcaggg

SEQ ID NO: 853843 - DNA, 75 bp, synthetic construct
  source 1..75: mol_type = other DNA
gacggacgtggagtggatgccgggcgacaattattatcttcacagggggatgcaataagaaatattgagggattc

SEQ ID NO: 853844 - DNA, 75 bp, synthetic construct
  source 1..75: mol_type = other DNA
atagggaaaattcagctttttagagatttagttatcagtggtccatttcgtcataacggtaataactatctgact

SEQ ID NO: 853845 - DNA, 75 bp, synthetic construct
  source 1..75: mol_type = other DNA
tgatactaaccgtagcttgctttcatcacagggcgatgccattcgaaatataattggtgcattagtggatgtcag

SEQ ID NO: 853846 - DNA, 75 bp, synthetic construct
  source 1..75: mol_type = other DNA
gtagatgtcaggtttaatacctatccttctgattctggcgtttttacaaccagcgtcatcggagatgcttcatct

SEQ ID NO: 853847 - DNA, 75 bp, synthetic construct
  source 1..75: mol_type = other DNA
atcagccggatgaaattcccgttctggaatggcagggagtacgtgtcgtaacaaccgaaactcttgctaaggggt

SEQ ID NO: 853848 - DNA, 75 bp, synthetic construct
  source 1..75: mol_type = other DNA
ccggcggccgtaaaaatgtaccgttccagcagtacataaacgccggatatttcacagtgaaagaagtggtgctgg

SEQ ID NO: 853849 - DNA, 75 bp, synthetic construct
  source 1..75: mol_type = other DNA
acggaaccgatgaaggcaatattcgtaaaaatttgtcttgcaactccgatcgctttgaagaaggtaaacactact

SEQ ID NO: 853850 - DNA, 75 bp, synthetic construct
  source 1..75: mol_type = other DNA
cgaaacaggtgcatggaaagatgctgttgactgggtactcaaagaggcttgccaggctgtaagcattagcaacaa

SEQ ID NO: 853851 - DNA, 75 bp, synthetic construct
  source 1..75: mol_type = other DNA
gttcttagcatattactttcttgagtatgcaactccctattactctgtagataaaatacatagcaatttacttaa

SEQ ID NO: 853852 - DNA, 75 bp, synthetic construct
  source 1..75: mol_type = other DNA
gctgacgccccaattaacggggaaaggccaacagtggttgacgcgtaaactgctcgatgctggcttgttaaaacc

SEQ ID NO: 853853 - DNA, 75 bp, synthetic construct
  source 1..75: mol_type = other DNA
gcggacgtaaaaatgtaccgtttcagcagtacataaacgccggatatttcacagtgaaagaagtggtgctggatg

SEQ ID NO: 853854 - DNA, 75 bp, synthetic construct
  source 1..75: mol_type = other DNA
gggagaacggcatcctgatagcgtccggtggacgtaaaaatgtaccgttccagcagtacataaacgccggatatt

SEQ ID NO: 853855 - DNA, 75 bp, synthetic construct
  source 1..75: mol_type = other DNA
caccgcattctgttgtctgatatccgcgaatacctgctcgaacaggggcatctgaattacgcaaccgtcgcagcc

SEQ ID NO: 853856 - DNA, 75 bp, synthetic construct
  source 1..75: mol_type = other DNA
cattctttgaaaaactggaagacagctacttccgacaaaaagaacagcaaccggtcgcaatcccccagacgcttc

SEQ ID NO: 853857 - DNA, 75 bp, synthetic construct
  source 1..75: mol_type = other DNA
gaagcacgcaaggaggcacacagaatgaaagctactaacgttaaatcagaaaaagttcatgcaccttcagttcag

SEQ ID NO: 853858 - DNA, 75 bp, synthetic construct
  source 1..75: mol_type = other DNA
tatttcacggtgaaagaagtggtgctggatgatgaagatggctaccagatacggttgacgcctcaattaacgggt

SEQ ID NO: 853859 - DNA, 75 bp, synthetic construct
  source 1..75: mol_type = other DNA
tatgcctataaccgtctggtgaaaaaggaccctgtgagcggcgagcagagcctgcgcatgcgcatgtcgcgacac

SEQ ID NO: 853860 - DNA, 75 bp, synthetic construct
  source 1..75: mol_type = other DNA
atgaaagatttaactttgaagtttcatgacaaactgcagtttaaggccttcctgtcatctcttggctgggaggat

SEQ ID NO: 853861 - DNA, 75 bp, synthetic construct
  source 1..75: mol_type = other DNA
atgaaagatttaactttgaagtttcatgacaaactgcagtttaaggccttcctgtcatctcttgtctggggggac

SEQ ID NO: 853862 - DNA, 75 bp, synthetic construct
  source 1..75: mol_type = other DNA
atgaaagatttaactttgaagtttcatgacaaactgcagtttaaggccttcctgtcatctcttgtctgggcggag

SEQ ID NO: 853863 - DNA, 75 bp, synthetic construct
  source 1..75: mol_type = other DNA
actgcgtaaaaccttggttagtacaacatccttgacttctggctggtggggtactcgcttggtggacgggtggcg

SEQ ID NO: 853864 - DNA, 75 bp, synthetic construct
  source 1..75: mol_type = other DNA
atccattgcttgccgtatttgtttatgtgagatgcaaacactcacaaaagaaatacagcggagagcataccgata

SEQ ID NO: 853865 - DNA, 75 bp, synthetic construct
  source 1..75: mol_type = other DNA
atgaaagatttaactttgaagtttcatgacaaactgcagtttaaggccttcctgtcatctcttggctgggtggaa

SEQ ID NO: 853866 - DNA, 75 bp, synthetic construct
  source 1..75: mol_type = other DNA
gctggtgcaactctccaatatcacttttgccatcggcatggtgggttacaaacgcctgatggaaactcgcccgat

SEQ ID NO: 853867 - DNA, 75 bp, synthetic construct
  source 1..75: mol_type = other DNA
tcttgatgatacgtttgatgtttctgtgttctctgattatgtggtggagctggaagcaccgcttcgggaatggag

SEQ ID NO: 853868 - DNA, 75 bp, synthetic construct
  source 1..75: mol_type = other DNA
tccggaaaaacagcacctcctcgatgccatctggccggttctggtcagcttcagtgatgcgggcacacacaccgt

SEQ ID NO: 853869 - DNA, 75 bp, synthetic construct
  source 1..75: mol_type = other DNA
tccggcaggattactggttaacctggctatctggcaccaacagccgcactggccaacatttattacaggcgcgct

SEQ ID NO: 853870 - DNA, 75 bp, synthetic construct
  source 1..75: mol_type = other DNA
cgctggggctatgcctttagcgccttgctggcggtgattggtgccgggattattcgctatgatcaggtcaccgac

SEQ ID NO: 853871 - DNA, 75 bp, synthetic construct
  source 1..75: mol_type = other DNA
actgacgccgctctacatcacgctgatttatgacatcatgagtaagcgccgtctgcgctggggatatgcttttag

SEQ ID NO: 853872 - DNA, 75 bp, synthetic construct
  source 1..75: mol_type = other DNA
tccaccaaacccaaatgcgaaaatccgtcctggtatcgtcctgcgcgctataaggcgctgagcgggcaactaggg

SEQ ID NO: 853873 - DNA, 75 bp, synthetic construct
  source 1..75: mol_type = other DNA
tcggtaaaacggcgcgcgagaaagcgaaaaaaggcgatgcaggcaaaaaaggcggcaagcggcgtcaggtcggca

SEQ ID NO: 853874 - DNA, 75 bp, synthetic construct
  source 1..75: mol_type = other DNA
cggttaatatggacgagcgcaaaatcgactttagcctgatctccagcgaacgcgcaccgcgcaacgtcggtaaaa

SEQ ID NO: 853875 - DNA, 75 bp, synthetic construct
  source 1..75: mol_type = other DNA
aaaaggtaaactttgagccagacagcgccttccgcggtgagaaaaaaacgaagccgaaagcggcgaagaaagacg

SEQ ID NO: 853876 - DNA, 75 bp, synthetic construct
  source 1..75: mol_type = other DNA
tgactacgcggaactgctggaatcggttgctgaccgtcctgacgcagaaatgctgcaaaccatgctgttgcgctc

SEQ ID NO: 853877 - DNA, 75 bp, synthetic construct
  source 1..75: mol_type = other DNA
catcgatggtctggttcacgtctcttcgctggacaacgactactatcgctttgatcaagtcggacaacgcctgat

SEQ ID NO: 853878 - DNA, 75 bp, synthetic construct
  source 1..75: mol_type = other DNA
ccgtattgaacgtatcgaacagacccagcgtaacgacgcacacaagttaattgaagagtgcatgattctggcgaa

SEQ ID NO: 853879 - DNA, 75 bp, synthetic construct
  source 1..75: mol_type = other DNA
tttaggtttctctggcgtcaattataccggttggctctacatcgcgtggttacccggttatttgcaagccgagca

SEQ ID NO: 853880 - DNA, 75 bp, synthetic construct
  source 1..75: mol_type = other DNA
gccgattggcacgctgcatatgccgctcaaacagttgcacgacaaaggcgtaaaagtgatgaccggcaccgacag

SEQ ID NO: 853881 - DNA, 75 bp, synthetic construct
  source 1..75: mol_type = other DNA
cccgcagcacggtttgctgctgtcgaaatcggaatccttaatgcgcgaagcgatgcaggcgggggcgcattacgt

SEQ ID NO: 853882 - DNA, 75 bp, synthetic construct
  source 1..75: mol_type = other DNA
tgggcgcgcggatgggctttgtggtcgtagtcgaactgactcagcgtccgactcgccgcaccaaagcggtgggta

SEQ ID NO: 853883 - DNA, 75 bp, synthetic construct
  source 1..75: mol_type = other DNA
catctacaccggagcctattatctggctcaggcgtttaaaaagtggggcgtttcgtgggatgcagtcggggcata

SEQ ID NO: 853884 - DNA, 75 bp, synthetic construct
  source 1..75: mol_type = other DNA
tcggtggatgaataccagaaacacgggcgttcggaaatgcttcggtacgtctccatcggcgaatccttcgcctga

SEQ ID NO: 853885 - DNA, 75 bp, synthetic construct
  source 1..75: mol_type = other DNA
taattatcctcaagacagataaaaaccacgatctgttgagctggaacgaaaagcggacagataacggcttactca

SEQ ID NO: 853886 - DNA, 75 bp, synthetic construct
  source 1..75: mol_type = other DNA
ttgtcaggatgcctgccagatgcagattgcctggtaaatgaccagcagccattattgtcggtatttgtcgctgat

SEQ ID NO: 853887 - DNA, 75 bp, synthetic construct
  source 1..75: mol_type = other DNA
cacatcctgaagcgtatgccgccggatgaagcctactggtgtacgccggaacgcttacagcaactggccatcagg

SEQ ID NO: 853888 - DNA, 75 bp, synthetic construct
  source 1..75: mol_type = other DNA
atgaagcctactggtgcacgccggaacgcctgcagcgactggccatcagggagttgcgtcagcttgaactgacgc

SEQ ID NO: 853889 - DNA, 75 bp, synthetic construct
  source 1..75: mol_type = other DNA
gactggcgtcagcaacgtcggaacaactctatttattacctgaattgttaaagcagtttttgtccagcccggagg

SEQ ID NO: 853890 - DNA, 75 bp, synthetic construct
  source 1..75: mol_type = other DNA
ccgtcaatgaagcgatggcttatatgatgcaaaaagtgcagggcggggaattggggcttaatgatgtcctcgcaa

SEQ ID NO: 853891 - DNA, 75 bp, synthetic construct
  source 1..75: mol_type = other DNA
ttggggcttaatgatgtcctcgccacggatattgtgctgaccattcgtcagcgactttttgccgaggcggaagcc

SEQ ID NO: 853892 - DNA, 75 bp, synthetic construct
  source 1..75: mol_type = other DNA
agcgcacgaagcgccgtcgcggtgagcactccaccaaacccaaatgcgaaaatccgtcctggtatcgtcctgagc

SEQ ID NO: 853893 - DNA, 75 bp, synthetic construct
  source 1..75: mol_type = other DNA
ccgaagagcagatccgtttctgggaagactatgaagcgggaagggcgaccactttcctggttgaaccggaaagga

SEQ ID NO: 853894 - DNA, 75 bp, synthetic construct
  source 1..75: mol_type = other DNA
atctccgtgcatgcggccagaaaacgctggtatctgcagcgcagccaggatgcactgaaacaccgtcgcgcgaaa

SEQ ID NO: 853895 - DNA, 75 bp, synthetic construct
  source 1..75: mol_type = other DNA
aacactggagtcagcttccgcccgaagagcaaatccgtttctgggaggactatgaagcgggaagggcgacttctt

SEQ ID NO: 853896 - DNA, 75 bp, synthetic construct
  source 1..75: mol_type = other DNA
caccggctggctggcagatgctgggcgtcgacatggttaaacttcacgaacagcagcagaagcggctgtgtgaaa

SEQ ID NO: 853897 - DNA, 75 bp, synthetic construct
  source 1..75: mol_type = other DNA
cgaacagcagcagaagcggcttcgtgaaagtgaaatccgccagcagctcatccgggaaggtgtactgcgtgagga

SEQ ID NO: 853898 - DNA, 75 bp, synthetic construct
  source 1..75: mol_type = other DNA
tggctgctccggaagatttggcagactctgcacagcgactggaggaggtgtgtcagtggctggcggaaagtacag

SEQ ID NO: 853899 - DNA, 75 bp, synthetic construct
  source 1..75: mol_type = other DNA
gagcagttactggaagaccgtctggagactggctgcgcgccgctgcctttgtggcaggcggcaacgcaaaacgtc

SEQ ID NO: 853900 - DNA, 75 bp, synthetic construct
  source 1..75: mol_type = other DNA
aggcccgttacttgagagttatgaaatttgtccgatacctgacgtcgtgctggctgctccggaagatttggcaga

SEQ ID NO: 853901 - DNA, 75 bp, synthetic construct
  source 1..75: mol_type = other DNA
gggaagtatacagcccaggatgcaaccacgacacaaaaagggatagttcagctcagtagcgacaccaacagcact

SEQ ID NO: 853902 - DNA, 75 bp, synthetic construct
  source 1..75: mol_type = other DNA
attcatgcggctgaatttgttgccagaacctataccgattcatatcagttaggagatggggagctgcttgtttgt

SEQ ID NO: 853903 - DNA, 75 bp, synthetic construct
  source 1..75: mol_type = other DNA
aaaggcttatccgacaaataaattgcctgatttacgtggtgagtttattcgcggctgggatgacgggcgcggtgt

SEQ ID NO: 853904 - DNA, 75 bp, synthetic construct
  source 1..75: mol_type = other DNA
tgcctgttccatggccttcagccacaccgccaacaggctggctgaaatgcaacggtgcggcattttctgctgaag

SEQ ID NO: 853905 - DNA, 75 bp, synthetic construct
  source 1..75: mol_type = other DNA
aatctggatggagtaaggggccggatggggtaattacacaatggggtattttcggtttccccgttggacagacag

SEQ ID NO: 853906 - DNA, 75 bp, synthetic construct
  source 1..75: mol_type = other DNA
gaaaacggctctcgaaaaccttggtttgggagaaggttcagcattacctgttggtgcacctgttccgtggccttc

SEQ ID NO: 853907 - DNA, 75 bp, synthetic construct
  source 1..75: mol_type = other DNA
atggcgagtgcgcaggcgtcgtggtgaacagttgctggaggacaagctggaggctggctgcgcaccgctggtgtt

SEQ ID NO: 853908 - DNA, 75 bp, synthetic construct
  source 1..75: mol_type = other DNA
gaaaagttgctggaggacaaactggaggctggctgcgcgccgctggcgttgtggcagggggcaacgcaaaaactc

SEQ ID NO: 853909 - DNA, 75 bp, synthetic construct
  source 1..75: mol_type = other DNA
cgtggtgagtttattcgtggctgggatgatgaacgtggtgtggatagtgggcgaactctgctttcagcgcaagga

SEQ ID NO: 853910 - DNA, 75 bp, synthetic construct
  source 1..75: mol_type = other DNA
aaaatactattgctgacattctcacataccttggtttgggagaaggttctgcgttgcctgttggcgtaccagttc

SEQ ID NO: 853911 - DNA, 75 bp, synthetic construct
  source 1..75: mol_type = other DNA
atgaaaacagagactccatccgtaaaaatcgttgctatcaccgccgatgaagcggggcaacgtatcgacaacttt

SEQ ID NO: 853912 - DNA, 75 bp, synthetic construct
  source 1..75: mol_type = other DNA
aataaattgcctgatttacgtggtgagtttattcgtggctgggatgacggacgtggtatggatacggggagggca

SEQ ID NO: 853913 - DNA, 75 bp, synthetic construct
  source 1..75: mol_type = other DNA
aataaattgcctgatttacgtggggagtttatacgtggctgggatgatggaagaggcattgatagtggtaggggg

SEQ ID NO: 853914 - DNA, 75 bp, synthetic construct
  source 1..75: mol_type = other DNA
cgaactctgctttcagcacaaggagatgctatccgaaacattaccggggtggttggctacagttcaattggcgat

SEQ ID NO: 853915 - DNA, 75 bp, synthetic construct
  source 1..75: mol_type = other DNA
gaaggcaaaccgtcggaaacacgctttaaagtggaagaacgctatgcatttgccaccctggtgcgttgtagcccg

SEQ ID NO: 853916 - DNA, 75 bp, synthetic construct
  source 1..75: mol_type = other DNA
gcgtgaaaaaggcatgcaaaaagattatctggcgctagtgcgtggtcagtggcagtcgcatgtcaagagcgtgca

SEQ ID NO: 853917 - DNA, 75 bp, synthetic construct
  source 1..75: mol_type = other DNA
atccaataccttggtttaagagaaatcggaaccagcggcgaaaagatccccctgttgagcacagctaatacctgg

SEQ ID NO: 853918 - DNA, 75 bp, synthetic construct
  source 1..75: mol_type = other DNA
atctacaaccgctaatgcttttcaaattcctggtgggcgtgaaacccgtccgagaaatattgcatttaactatat

SEQ ID NO: 853919 - DNA, 75 bp, synthetic construct
  source 1..75: mol_type = other DNA
ggcggtttgccaccaaaaggccaggatatgaaccaaattttatacgaactttctgctctgggtagatggtcgagc

SEQ ID NO: 853920 - DNA, 75 bp, synthetic construct
  source 1..75: mol_type = other DNA
atgatgccattagacgccagtagtctgatggggtcgattgccgggattgccgaactggtgaaagacagcgccagc

SEQ ID NO: 853921 - DNA, 75 bp, synthetic construct
  source 1..75: mol_type = other DNA
tttttgtcgcgctggtcattgtcggcgcgggcgtcaaaatcgtgccgcagggctatcaatggacggtagaacgct

SEQ ID NO: 853922 - DNA, 75 bp, synthetic construct
  source 1..75: mol_type = other DNA
acgcagtctgttttattcaggtgattgacgcgccgcgcgcggcttatgaagtcagcaatctggagctggcgatca

SEQ ID NO: 853923 - DNA, 75 bp, synthetic construct
  source 1..75: mol_type = other DNA
tggctgaaatgtaacggtgcagcattttcttctgaaatgtaccccaaactggcaaaagcctaccccgcgaataaa

SEQ ID NO: 853924 - DNA, 75 bp, synthetic construct
  source 1..75: mol_type = other DNA
tataaaattaaaaattgcatcacagttcgatacattacccaagttaactttaaataagaaaattgtaataccttt

SEQ ID NO: 853925 - DNA, 75 bp, synthetic construct
  source 1..75: mol_type = other DNA
aataaagcttgaagaaaaatttgtaaaaataacaaaggatagcaatgcctttatatgttttctttcacaaataga

SEQ ID NO: 853926 - DNA, 75 bp, synthetic construct
  source 1..75: mol_type = other DNA
ttattgccgggatcggtatttattttatcgcaaactcctttcgcgtactatcagatctgcgcccggaccttcagg

SEQ ID NO: 853927 - DNA, 75 bp, synthetic construct
  source 1..75: mol_type = other DNA
ggtagaaaacaagaaaaactgatgcgtgcttttcagtctccagaaaacagccgattaataaattatataaatagt

SEQ ID NO: 853928 - DNA, 75 bp, synthetic construct
  source 1..75: mol_type = other DNA
agtgctctgagtttactaaggaaataacgtcactttcaaattcattgtctataagaattgcaccaaaagaaaacc

SEQ ID NO: 853929 - DNA, 75 bp, synthetic construct
  source 1..75: mol_type = other DNA
aagaggtcgataccgatatacaacgcaagaaacagtactaacagggttccctagatatgataatttagttaaaaa

SEQ ID NO: 853930 - DNA, 75 bp, synthetic construct
  source 1..75: mol_type = other DNA
gtcaattgatggcaagtttgattactccgatcttcctgatgaggcgacgctctacgcgcgtgttcaggagataga

SEQ ID NO: 853931 - DNA, 75 bp, synthetic construct
  source 1..75: mol_type = other DNA
cggatgattatctgtctctggtccacgtcactgaccacaacggacttctggtttacgccgacgagattgccggtt

SEQ ID NO: 853932 - DNA, 75 bp, synthetic construct
  source 1..75: mol_type = other DNA
catacgattgatatcgatagttgcgaaactttttttggatactatgataaatgtcccgataatggtaaaggagat

SEQ ID NO: 853933 - DNA, 75 bp, synthetic construct
  source 1..75: mol_type = other DNA
gctgctgatgacggctgaacagggcaaacctctggcggaagcccgtggcgaagcgctgtatgcagcctcctttgt

SEQ ID NO: 853934 - DNA, 75 bp, synthetic construct
  source 1..75: mol_type = other DNA
agcggcgaaagtgatgggggactataccgatatcgaaattattgaagcacatcatcggcataaagtggatgcgcc

SEQ ID NO: 853935 - DNA, 75 bp, synthetic construct
  source 1..75: mol_type = other DNA
accgatatcgaaattattgaagcacatcatagacataaagttgatgcgccgtcaggcaccgcactggcaatggga

SEQ ID NO: 853936 - DNA, 75 bp, synthetic construct
  source 1..75: mol_type = other DNA
tgagctcagcgccgcactggccagaatgctccatatgcaccacatactgctggaacgaacccggtacagagaaaa

SEQ ID NO: 853937 - DNA, 75 bp, synthetic construct
  source 1..75: mol_type = other DNA
tatccccatcttgctacagcatatccatcagggaaactacctgatctccgtggtgagtttattcgtggatgggat

SEQ ID NO: 853938 - DNA, 75 bp, synthetic construct
  source 1..75: mol_type = other DNA
ttattcgtggctgggatgatgggcgcggtattgatgctggacgtgttttattgagtattcaggccggaatgctgg

SEQ ID NO: 853939 - DNA, 75 bp, synthetic construct
  source 1..75: mol_type = other DNA
ccggtatggtgtttttgaagtttaacggggcgaaattttctgcctctgattaccctgtgctggcgaaagtgtttc

SEQ ID NO: 853940 - DNA, 75 bp, synthetic construct
  source 1..75: mol_type = other DNA
aactcccgtatttcactggaactgatacagcagctcagactgatttaacttctgttggccgtgacattattggga

SEQ ID NO: 853941 - DNA, 75 bp, synthetic construct
  source 1..75: mol_type = other DNA
accaggacactacgggaacctcggggatagtcggcatgggattcaacaatgaagattccattacagaccttcgtg

SEQ ID NO: 853942 - DNA, 75 bp, synthetic construct
  source 1..75: mol_type = other DNA
attcatgcggctgaatttattgccagaacctataccgattcatatcagttaggagatggagagctgcttgtttgt

SEQ ID NO: 853943 - DNA, 75 bp, synthetic construct
  source 1..75: mol_type = other DNA
actccgcgcagccctggcccggatgctccatatgcatcatatgatgctggaaaccgtaagcgtcaacggagcacc

SEQ ID NO: 853944 - DNA, 75 bp, synthetic construct
  source 1..75: mol_type = other DNA
acgcgggtggcgaaccgacaggtgaactggctgacgctatcgccgcgtcttttggcagctttgccgatttcaaag

SEQ ID NO: 853945 - DNA, 75 bp, synthetic construct
  source 1..75: mol_type = other DNA
gtcgagtagtcttcactcccgtcgcaaacagagcctttgccattgctgatcggttcagaaaaaccagccctttcc

SEQ ID NO: 853946 - DNA, 75 bp, synthetic construct
  source 1..75: mol_type = other DNA
aaatgcgaaaaggtcgagtagtcttcactcccgtcgcaaacagagcctttgccattgctgatcggttcagaaaaa

SEQ ID NO: 853947 - DNA, 75 bp, synthetic construct
  source 1..75: mol_type = other DNA
tggaacatcaggacgatttagcccgcctgatgaccctggaacagggtaaaccgctggccgaagcgaaaggtgaaa

SEQ ID NO: 853948 - DNA, 75 bp, synthetic construct
  source 1..75: mol_type = other DNA
atgcatgaagctccattacaggcgctcaatattctggccagatacccacaaaaaaagacaaggtgtaacgcatgt

SEQ ID NO: 853949 - DNA, 75 bp, synthetic construct
  source 1..75: mol_type = other DNA
aaagtaaacttccacaactaggcacgactatttttacccggatgagcgcgttggcgcagcagcaccaggcgatta

SEQ ID NO: 853950 - DNA, 75 bp, synthetic construct
  source 1..75: mol_type = other DNA
aggtacatactttttgctggtggattacagcgcggtatctaccctggatgatgttgagttttgccagtggctgac

SEQ ID NO: 853951 - DNA, 75 bp, synthetic construct
  source 1..75: mol_type = other DNA
atttcgccgctttgtggcaggcgattgccgggcacgagatttttgtcattagcgatgaagtctacgagcacatca

SEQ ID NO: 853952 - DNA, 75 bp, synthetic construct
  source 1..75: mol_type = other DNA
atcaaccccgattggcggttattcagcgatgatttgaaggtgtggttaattatcgagcatcattattataatgtt

SEQ ID NO: 853953 - DNA, 75 bp, synthetic construct
  source 1..75: mol_type = other DNA
atcaaccctgattggcggctgttcagtgaagacctcaaggtatggttaatcatcgatcatcttgaatataacagg

SEQ ID NO: 853954 - DNA, 75 bp, synthetic construct
  source 1..75: mol_type = other DNA
aggcacttactttttgctggtggattacagcgccgtttctacgttgaatgatgtcgagttctgtcagtggttaac

SEQ ID NO: 853955 - DNA, 75 bp, synthetic construct
  source 1..75: mol_type = other DNA
ccttcccccataaactgattcgtctctgttttgccaagaaggaatcgacgttgctggcagcagctgaacgcctgc

SEQ ID NO: 853956 - DNA, 75 bp, synthetic construct
  source 1..75: mol_type = other DNA
attgctcagaaaacggaacgtctgtatggctatcaaccggatgccgatagtgatatcaccgtaacggcaggggcg

SEQ ID NO: 853957 - DNA, 75 bp, synthetic construct
  source 1..75: mol_type = other DNA
ccgcattggtgcgcaatggcgatgaagtgatttgttttgatcccagctatgacagttacgcccccgccatcgcgc

SEQ ID NO: 853958 - DNA, 75 bp, synthetic construct
  source 1..75: mol_type = other DNA
ccttcccccataagctcattcgtctctgttttgccaagaaggaatcgacgttgctggcggcagctgaacgcctgc

SEQ ID NO: 853959 - DNA, 75 bp, synthetic construct
  source 1..75: mol_type = other DNA
tgtgctggcgcatccgcaactgcgtgagcgggcggtggcggtgtcatcgtttggcaagacctatcatatgaccgg

SEQ ID NO: 853960 - DNA, 75 bp, synthetic construct
  source 1..75: mol_type = other DNA
ttggcaagacctatcatatgaccggctggaaagtgggttattgcgttgcgccagcgcccatcagcgccgaaattc

SEQ ID NO: 853961 - DNA, 75 bp, synthetic construct
  source 1..75: mol_type = other DNA
atcaatctcgactggaggctgttcagtgaagatttgaaggtgtggttaattgttgagcaccacgcttacaacaag

SEQ ID NO: 853962 - DNA, 75 bp, synthetic construct
  source 1..75: mol_type = other DNA
tagcttcagcgatccggcacttagccatgctcttgaccgacgggtattccacgattttttccagcaggccgccaa

SEQ ID NO: 853963 - DNA, 75 bp, synthetic construct
  source 1..75: mol_type = other DNA
aggtgggccgcgatctgcaaatcttcaactcgctgaaagcaaatatggcagattacctgctacttgatggtgagt

SEQ ID NO: 853964 - DNA, 75 bp, synthetic construct
  source 1..75: mol_type = other DNA
tttactttcattattgtgctgttgatgtggagcgccgtgcgcctgccacgaatggaagcctttttgatcttcctt

SEQ ID NO: 853965 - DNA, 75 bp, synthetic construct
  source 1..75: mol_type = other DNA
gcaggacccgcgcccagcctatcgtaaaggtgaagaagcgggtaaaacctatgccgtctggctgcatgattttaa

SEQ ID NO: 853966 - DNA, 75 bp, synthetic construct
  source 1..75: mol_type = other DNA
cagagatggcggtgagttttaccgcagaggtcgaaaagcagcttttgacgctggagaagcgttatccgcagttaa

SEQ ID NO: 853967 - DNA, 75 bp, synthetic construct
  source 1..75: mol_type = other DNA
aggcacaggcgcataactgggcgctgatgtgtgcccgcctcactgattttgtgaatgcaggcgggaagcgcagtc

SEQ ID NO: 853968 - DNA, 75 bp, synthetic construct
  source 1..75: mol_type = other DNA
gggataagcggatgttcgagctgtatgaaattcctccgcatatcaaaccgaactggcaggtgtggtacgagtgcg

SEQ ID NO: 853969 - DNA, 75 bp, synthetic construct
  source 1..75: mol_type = other DNA
tgccgtctcactggtgcgccacacggatggcacgccgctctattttatcgctcagattgaagacattaacgagct

SEQ ID NO: 853970 - DNA, 75 bp, synthetic construct
  source 1..75: mol_type = other DNA
ttgagctttcgcagtttggcacccaactcgccccactgtggttcccgacgtccatcatgatggtggcgttttatc

SEQ ID NO: 853971 - DNA, 75 bp, synthetic construct
  source 1..75: mol_type = other DNA
ggtgtggtacgagtgcgtgctgccggaagatcgccagcacgccgaaaaagtgattcgcgattcattgcaatcgcg

SEQ ID NO: 853972 - DNA, 75 bp, synthetic construct
  source 1..75: mol_type = other DNA
gaaagcatatttccgaaagcgaaacccgttttcgcaacgcgatggagtattccgccatcggcatggcccttgtgg

SEQ ID NO: 853973 - DNA, 75 bp, synthetic construct
  source 1..75: mol_type = other DNA
aatggctgcaatccaacaaagcgctctgccagtttctcggttacagtcaggaagagctgcgcggactcacctttc

SEQ ID NO: 853974 - DNA, 75 bp, synthetic construct
  source 1..75: mol_type = other DNA
gatcctcaacactccgcataaccccagtgcaactgtctggcagcaggctgatttcgccgctttgtggcaggcgat

SEQ ID NO: 853975 - DNA, 75 bp, synthetic construct
  source 1..75: mol_type = other DNA
ggggaggtggggattaaggatgtacgggcgttacgtatacttggggcaaaaatgtgttggttgcgactgcggtag

SEQ ID NO: 853976 - DNA, 75 bp, synthetic construct
  source 1..75: mol_type = other DNA
attgccccctcaacggttgacccgtcaaattttgatggatcaactgttgataacaaactgccgattaggggggcg

SEQ ID NO: 853977 - DNA, 75 bp, synthetic construct
  source 1..75: mol_type = other DNA
ctggatccaagtatcccgtatatccatcctgatttagcgcacacagaagaggggcaaggtaagcaatcggaggtg

SEQ ID NO: 853978 - DNA, 75 bp, synthetic construct
  source 1..75: mol_type = other DNA
acattatttaaataatttgatatgcaactttttaaataaatccattcctagttctgaaggacgagacgaagctaa

SEQ ID NO: 853979 - DNA, 75 bp, synthetic construct
  source 1..75: mol_type = other DNA
gtgaagatgcgtgcagggcagcatatttcggcgagaaatatagtagatgggaaagaaggagattttgtatatcct

SEQ ID NO: 853980 - DNA, 75 bp, synthetic construct
  source 1..75: mol_type = other DNA
ttgatgaaagtttatggcgaaatcaactgaagctggtacgtctgtcaaaatattctctcgacgcagcgcttaaag

SEQ ID NO: 853981 - DNA, 75 bp, synthetic construct
  source 1..75: mol_type = other DNA
ggagccaaaagtgaatcaaccgtgaaatcggctattgccgaactggcaaaagagggctggctgactaaggaagag

SEQ ID NO: 853982 - DNA, 75 bp, synthetic construct
  source 1..75: mol_type = other DNA
actggttatccgcctggggcgttcgcccgcgcagcgttgcgtaaatcacatttctgaaccggacactgaaatacc

SEQ ID NO: 853983 - DNA, 75 bp, synthetic construct
  source 1..75: mol_type = other DNA
gaagatttagcgtgtgcgcagtggatctgggggcgaatcgtgagtctttacgagcaggctgccagcgatgatggc

SEQ ID NO: 853984 - DNA, 75 bp, synthetic construct
  source 1..75: mol_type = other DNA
actggtcattcgtcttgggcgtgggcctgcgcagagttgcgtgaatcatatttctgaaccggacactgaaattcc

SEQ ID NO: 853985 - DNA, 75 bp, synthetic construct
  source 1..75: mol_type = other DNA
caaaactgcgcgaaaaatgggatgaactggtcattcgtcttgggcgtgggcctgcgcagagttgcgtgaatcata

SEQ ID NO: 853986 - DNA, 75 bp, synthetic construct
  source 1..75: mol_type = other DNA
gacgacatgggctaacgatgtccggatgatgcgcatgctggatggccgcagtcaccggcagatttgtgaaatgtt

SEQ ID NO: 853987 - DNA, 75 bp, synthetic construct
  source 1..75: mol_type = other DNA
tttcgttttaactcatgaggatggtgttttaacattaatagacggaatgatttcatcaccagaaaaaataaaaat

SEQ ID NO: 853988 - DNA, 75 bp, synthetic construct
  source 1..75: mol_type = other DNA
attgaactggcggagaaacttgcgcttgccagcctcacccaggacgttaaagataacgacagacaaaccacgttg

SEQ ID NO: 853989 - DNA, 75 bp, synthetic construct
  source 1..75: mol_type = other DNA
tacgttgcaaacgttgtttcggtgtcagattctgatgtcagtattagcaactatcgtgagcaaacgaacgatatc

SEQ ID NO: 853990 - DNA, 75 bp, synthetic construct
  source 1..75: mol_type = other DNA
cagattccgatgccagcatcagcaactatcgtgaacaaaccaacgatatcatcaagcgtgcgttgcaaattcttc

SEQ ID NO: 853991 - DNA, 75 bp, synthetic construct
  source 1..75: mol_type = other DNA
agcgccaccgtctggcagcaggctgattttgccgctttgtggcaggcaattgccgatcgtgagatttttgtcatt

SEQ ID NO: 853992 - DNA, 75 bp, synthetic construct
  source 1..75: mol_type = other DNA
atgaaactggtagcgattgacaaaaatctgaaagcacagaaaaacgcgccggggcatgcagtcaaaaaagcaaag

SEQ ID NO: 853993 - DNA, 75 bp, synthetic construct
  source 1..75: mol_type = other DNA
atgcgatccccaaatgccagcaagaacagatatgggcaccgataccctcaattagtgacgtaatgcctcaggaac

SEQ ID NO: 853994 - DNA, 75 bp, synthetic construct
  source 1..75: mol_type = other DNA
acatacccgccatccctttgtccttgcggcgctattttctggtgttggcgtcggcatcgctctgggcaatgaata

SEQ ID NO: 853995 - DNA, 75 bp, synthetic construct
  source 1..75: mol_type = other DNA
cacaagaaagccgtcaattgatggtgctttcgctggcaatgcccgatgaaccggtgctgcgaaaatgctggcgag

SEQ ID NO: 853996 - DNA, 75 bp, synthetic construct
  source 1..75: mol_type = other DNA
gctttcggagttgacggaagggatcaccatgagcgccgaccaccgtcgcgcgctggttgactccctgaataaaat

SEQ ID NO: 853997 - DNA, 75 bp, synthetic construct
  source 1..75: mol_type = other DNA
agacatgatcgttcaggcgtcgaagatggccatcgttgaattagagcgattaggctctgaacgctttattactcc

SEQ ID NO: 853998 - DNA, 75 bp, synthetic construct
  source 1..75: mol_type = other DNA
atgaacgccgatatttacgagaaaataatgtctgatctcgagtttgaccgagacaatctggaagacgtctggcgt

SEQ ID NO: 853999 - DNA, 75 bp, synthetic construct
  source 1..75: mol_type = other DNA
ccgttagcaaaaaccactcaacaacccatgagctggtggttgctggctattctgtacggtctggcgggttttggt

SEQ ID NO: 854000 - DNA, 75 bp, synthetic construct
  source 1..75: mol_type = other DNA
aattcagcatgtgggttacagacaaggacgcctggtacttcgccaactacgacccacgcatgaagcgtgaaggcc

SEQ ID NO: 854001 - DNA, 75 bp, synthetic construct
  source 1..75: mol_type = other DNA
gtgaaatcgaattacgccagaaacaatacgaatactaccgtgatttactgttcagtttcccaaaacctgaaactg

SEQ ID NO: 854002 - DNA, 75 bp, synthetic construct
  source 1..75: mol_type = other DNA
ataacgcccgcccgcaatatcaaccgcagccacaggatgccattttgcagcattcggtggtggcgaatcagttaa

SEQ ID NO: 854003 - DNA, 75 bp, synthetic construct
  source 1..75: mol_type = other DNA
ggcgcgcgggatatcggcggtacggggctgtttgatgcggaatatctggtcgccagcaaagcctgggggccgttc

SEQ ID NO: 854004 - DNA, 75 bp, synthetic construct
  source 1..75: mol_type = other DNA
cccataatttttcgtgacgaaagcatgcgcaccgcctgctctcccgacggtttatgcagcgacggtaacggtctt

SEQ ID NO: 854005 - DNA, 75 bp, synthetic construct
  source 1..75: mol_type = other DNA
gatgcaactggcctctgatccactctccatgcgtatttatacccctgaggagtgtgaaagactggatgccagctg

SEQ ID NO: 854006 - DNA, 75 bp, synthetic construct
  source 1..75: mol_type = other DNA
ttcaggaagccaccaaagcagtaagagcaggcggaagcaaagaagcattagcggcggcggaacgcagatttatgg

SEQ ID NO: 854007 - DNA, 75 bp, synthetic construct
  source 1..75: mol_type = other DNA
aacggccttgagctgaaatgtccgtttacctcccgggatttcatgaaattccggctcggtggtttcgaggccata

SEQ ID NO: 854008 - DNA, 75 bp, synthetic construct
  source 1..75: mol_type = other DNA
atgttaccgtgcacgacctttacgcgcactatcccgacttttttattgatatcccccgtgagcaggcattactgc

SEQ ID NO: 854009 - DNA, 75 bp, synthetic construct
  source 1..75: mol_type = other DNA
gtgattgtctttcagcatcctctttatacctatagctgcccggcgctactgaaagagtggctggaccgggtatta

SEQ ID NO: 854010 - DNA, 75 bp, synthetic construct
  source 1..75: mol_type = other DNA
cgaagggatcatccgtgctaatcggatcgtgatgaacgatctgccggatgggatcaaaacgatccgcattacgga

SEQ ID NO: 854011 - DNA, 75 bp, synthetic construct
  source 1..75: mol_type = other DNA
ggcgatgtattggttattcgttgcatagatagctcaataaataccagatatctatatcagattttggcagatgac

SEQ ID NO: 854012 - DNA, 75 bp, synthetic construct
  source 1..75: mol_type = other DNA
acgatcgcccttatcgcattacccgtggcgatctcttttatattcatgctgacgataaacactcctacgcttccg

SEQ ID NO: 854013 - DNA, 75 bp, synthetic construct
  source 1..75: mol_type = other DNA
tttaggcagtgcgggcatggcgctggtgcggcaggttatcgggcagcttgagcacgaaagcaatcagcccgcgcc

SEQ ID NO: 854014 - DNA, 75 bp, synthetic construct
  source 1..75: mol_type = other DNA
agaaaaaatccaggcacgaatgtctgattacgctggatttatttgtcatgccgataaagttcgtcacgccaaccg

SEQ ID NO: 854015 - DNA, 75 bp, synthetic construct
  source 1..75: mol_type = other DNA
gtgccgggtgacctgccgttctcattagatcgactggacgacgacgttcgcgcgtatctggaaaataacgacgct

SEQ ID NO: 854016 - DNA, 75 bp, synthetic construct
  source 1..75: mol_type = other DNA
gctgcaggattacgtgcagcagtagaactaaagcgtcgtcagcaaaatgtgctgatcgcgaccgccgggttatac

SEQ ID NO: 854017 - DNA, 75 bp, synthetic construct
  source 1..75: mol_type = other DNA
ccaggcgctggcaaacgaaaacggtatgacgctggcaacggtgaaagaaaaaatccagacgcgaatgtctgatta

SEQ ID NO: 854018 - DNA, 75 bp, synthetic construct
  source 1..75: mol_type = other DNA
gccatgtgggggaaattgccgaactgtttatgtggcggcatatgtctcttacttcggctgccgtattaacacaat

SEQ ID NO: 854019 - DNA, 75 bp, synthetic construct
  source 1..75: mol_type = other DNA
gatgtagcaaaagcggctgagtctgctggaattgatataaacgcattaacaccaggaatgcgatctggaagtcgt

SEQ ID NO: 854020 - DNA, 75 bp, synthetic construct
  source 1..75: mol_type = other DNA
gctgccgatgacaggcaacggcaaaattgatcaggcggcaatggttcaagaggttatccaacgtatgtcgcaatc

SEQ ID NO: 854021 - DNA, 75 bp, synthetic construct
  source 1..75: mol_type = other DNA
tatcgggcaaattcttggcccggcgctgaccagtatgctcggcaacggaacgtcggcgccacactctgcggcgca

SEQ ID NO: 854022 - DNA, 75 bp, synthetic construct
  source 1..75: mol_type = other DNA
catcggcgcttgccagcgccactctctgcggcgcggcggcgttgtttattgctgcgcttatcagcacagtacaat

SEQ ID NO: 854023 - DNA, 75 bp, synthetic construct
  source 1..75: mol_type = other DNA
aacaatctcagaatccctaaaaggcaccattgatacattaactggtgcaatggcagggggaggtactggaaagtc

SEQ ID NO: 854024 - DNA, 75 bp, synthetic construct
  source 1..75: mol_type = other DNA
gaaatcgaagagctgaaagaaaaaaacaaactcactgtcgcaggaagttcaaaatgcccagcatcagcgcgaaga

SEQ ID NO: 854025 - DNA, 75 bp, synthetic construct
  source 1..75: mol_type = other DNA
tgataccatcactctgttgcagatggaaatcgaagagctgaaagaaaaaaacaaactcactgtcgcaggaagttc

SEQ ID NO: 854026 - DNA, 75 bp, synthetic construct
  source 1..75: mol_type = other DNA
atgaacacgctggaagacatcaacgaacgctttggcctcaatgcgcaggatagggtgttcgggctgtcatcattg

SEQ ID NO: 854027 - DNA, 75 bp, synthetic construct
  source 1..75: mol_type = other DNA
tctggcgcgaagcgagtgatgagcgaatttaccgcactggggatcgcgggcgctactttgctgacgggcaagtcg

SEQ ID NO: 854028 - DNA, 75 bp, synthetic construct
  source 1..75: mol_type = other DNA
ccgtcgcttgaagcggaagtccttcagctggaggagaaaattgctgcgcttcaggtgcgtgaggacgcaaccctc

SEQ ID NO: 854029 - DNA, 75 bp, synthetic construct
  source 1..75: mol_type = other DNA
ggtgatgactatcgcccgccaactgagcgtaccgggaaatctcaatcttttaggctttgtgacgctcatttacgg

SEQ ID NO: 854030 - DNA, 75 bp, synthetic construct
  source 1..75: mol_type = other DNA
tggttgctgccatttattctggtgttattgattcgcgtcctggcgggtgtcgccagcgccggtatgctgattttt

SEQ ID NO: 854031 - DNA, 75 bp, synthetic construct
  source 1..75: mol_type = other DNA
tcgtgctcagttagccgtgcagttgccgtattacctgctgccccaacatttctttcttctcaaggtgctgccgat

SEQ ID NO: 854032 - DNA, 75 bp, synthetic construct
  source 1..75: mol_type = other DNA
ccggtctttccagacaatgcgaccagttaagtcagactgtgtcagatacaaaggcagagagggacaggtttgaac

SEQ ID NO: 854033 - DNA, 75 bp, synthetic construct
  source 1..75: mol_type = other DNA
cgtatcaggccgattgcgtgatccttgcaggcaatgcggttatgccgactatcgatgcggcatgtaagattgccc

SEQ ID NO: 854034 - DNA, 75 bp, synthetic construct
  source 1..75: mol_type = other DNA
actcgtcgcggcgtaaaagaagaatggcgttttcgctctgaactcgctgaagacaaaaatcacaaattaacaatt

SEQ ID NO: 854035 - DNA, 75 bp, synthetic construct
  source 1..75: mol_type = other DNA
cgttccacgccacgcgggtaatggattttggctccagcttgttagatatggcagtagcgcaagagcagcaatcag

SEQ ID NO: 854036 - DNA, 75 bp, synthetic construct
  source 1..75: mol_type = other DNA
acagaactcaatgcacaaggcagtattaacgtcgtcaattattcccaacatgatgaacaggatggagttaagtaa

SEQ ID NO: 854037 - DNA, 75 bp, synthetic construct
  source 1..75: mol_type = other DNA
catctgtttagcgatccgacggttgcccgaagtttactgcgttatcgctggcacaacttgccaggcgcgcagtag

SEQ ID NO: 854038 - DNA, 75 bp, synthetic construct
  source 1..75: mol_type = other DNA
gcgtgcagcagagttacgaccaacttcttgcagtatcaacagaaaactggcgtcaatggtggcagaaacgtcgta

SEQ ID NO: 854039 - DNA, 75 bp, synthetic construct
  source 1..75: mol_type = other DNA
tgtttgagttaggttcggtcagcaaaacatttacgggcgtgcttggtggcgacgctattgctcgaggggaaatca

SEQ ID NO: 854040 - DNA, 75 bp, synthetic construct
  source 1..75: mol_type = other DNA
gacagctttggtttttacgcggcactaagccagttattgctggtgttagtggagagcgaccaccaaaacagataa

SEQ ID NO: 854041 - DNA, 75 bp, synthetic construct
  source 1..75: mol_type = other DNA
taacagatgttcgcaaggctgaacgtatcgttggcagtgaagtgaaagagatccaggcaactgagcaccataaat

SEQ ID NO: 854042 - DNA, 75 bp, synthetic construct
  source 1..75: mol_type = other DNA
gatattgtgcatcgcacaattaccccgcttatagagcaacaaaagatccccggtatggcggtggcggtaatttat

SEQ ID NO: 854043 - DNA, 75 bp, synthetic construct
  source 1..75: mol_type = other DNA
ggtatcgtgatgctggcaaacaaaaactatcccaatccagcgagagtcgacgccgcctggcagattcttaacgct

SEQ ID NO: 854044 - DNA, 75 bp, synthetic construct
  source 1..75: mol_type = other DNA
gcctgggctgggaaatgctggactggccggtaaatcctgacagcatcattaacggcagtgacaataaaattgcac

SEQ ID NO: 854045 - DNA, 75 bp, synthetic construct
  source 1..75: mol_type = other DNA
gcaccgctggatgcgctgacgcatgccggacttctcatagacgacgagcagtttgatgaaatcaatattgtgcgc

SEQ ID NO: 854046 - DNA, 75 bp, synthetic construct
  source 1..75: mol_type = other DNA
gtttgatgaaataaatattgtgcgcggactgcctgttcctggtggtcggttggggataaaaatcacagaactgga

SEQ ID NO: 854047 - DNA, 75 bp, synthetic construct
  source 1..75: mol_type = other DNA
cgagcagtttgatgaaatcaatattgtgcgcggtcagctcgttcctgggggggcggctgggcgtgaagatttaca

SEQ ID NO: 854048 - DNA, 75 bp, synthetic construct
  source 1..75: mol_type = other DNA
gtgaaattaaagcgttcgtgccggaagagttctgggaagtcgatgccagcacgaccacgccatctggtgaagcgt

SEQ ID NO: 854049 - DNA, 75 bp, synthetic construct
  source 1..75: mol_type = other DNA
tcagtcgacgattgaaaaattttttaatcccttcagtaaagacgaatacagcagtgttatctcggcacaacgtga

SEQ ID NO: 854050 - DNA, 75 bp, synthetic construct
  source 1..75: mol_type = other DNA
ggtgagttttatacccaggacggcgtactggttgcctcgaccgttcaggaaggggtgatgcgtaatcacaattaa

SEQ ID NO: 854051 - DNA, 75 bp, synthetic construct
  source 1..75: mol_type = other DNA
ggctatgacgtaaaacctgaaatgacgccgcgcgaacagcagcgagtgattatggcgtttcagatgcacttccgc

SEQ ID NO: 854052 - DNA, 75 bp, synthetic construct
  source 1..75: mol_type = other DNA
tcaggcgcttattccactggcgaaggatattatcgcccgctatcacatcaaaccggaaaacgtagtggctcatgc

SEQ ID NO: 854053 - DNA, 75 bp, synthetic construct
  source 1..75: mol_type = other DNA
gtcggggcgacgattgttggcagcattgagacggtctgggcgggcaccattacgccgccgcgcgaaggcatcatc

SEQ ID NO: 854054 - DNA, 75 bp, synthetic construct
  source 1..75: mol_type = other DNA
ggttatgacgttaaacctgatatgataccgcgcgagcagcggcgcgtgattatggcgttccagatgcatttccgc

SEQ ID NO: 854055 - DNA, 75 bp, synthetic construct
  source 1..75: mol_type = other DNA
ggtcagctcgcattatctggtccctgcggtgccaccgcgatacaacggtaaaccgcgcatctggcaactggtgcc

SEQ ID NO: 854056 - DNA, 75 bp, synthetic construct
  source 1..75: mol_type = other DNA
tcaggcgctcattccactggcgaaagagattatcgcccgctatcacatcaaaccagagaatgtggtggcacatgc

SEQ ID NO: 854057 - DNA, 75 bp, synthetic construct
  source 1..75: mol_type = other DNA
gttaccgatcgcctggaagaaaatttccgcgaattaatgaactacgactttaccgcgcagatggaaaacagtctg

SEQ ID NO: 854058 - DNA, 75 bp, synthetic construct
  source 1..75: mol_type = other DNA
ccgcaactattgttgccagtaaagggcaacagatatggaccggaggtaacgacgccgaagccttaagcaaaggca

SEQ ID NO: 854059 - DNA, 75 bp, synthetic construct
  source 1..75: mol_type = other DNA
ctggatatgtataccgaagtcaatacgcaaaccaatctcccggcgcagattgatatcagcgccgtcgctggtgat

SEQ ID NO: 854060 - DNA, 75 bp, synthetic construct
  source 1..75: mol_type = other DNA
agggcggtatgcgcccgaaccagatggttctgaccagcattgactgcccgacctgtggtcgaaaaatggggattc

SEQ ID NO: 854061 - DNA, 75 bp, synthetic construct
  source 1..75: mol_type = other DNA
gccgggctgtggcgcttattgttcgccagcagcggctgaaattaagcctgtccggacggctggcaataaaaatta

SEQ ID NO: 854062 - DNA, 75 bp, synthetic construct
  source 1..75: mol_type = other DNA
acaccagaaaacatggcctgcggttcattggggccaaccactggcggtcgaatggacggttatgtcgataccttt

SEQ ID NO: 854063 - DNA, 75 bp, synthetic construct
  source 1..75: mol_type = other DNA
gaaacgagcagggacaagcattccgcgatgttgaactggaaaaaacattgctcgacgccagccagcaatttggta

SEQ ID NO: 854064 - DNA, 75 bp, synthetic construct
  source 1..75: mol_type = other DNA
acttgtggtcgcaaaatggggattcgcacagcgagcaccggggtattccttggctgttctggctatgcgctgccg

SEQ ID NO: 854065 - DNA, 75 bp, synthetic construct
  source 1..75: mol_type = other DNA
atgtgcgtgtagaaaaccgtcgtttctatgcggaaaaaatgggcgaaatcgtcaccgatcgcctggaagagaatt

SEQ ID NO: 854066 - DNA, 75 bp, synthetic construct
  source 1..75: mol_type = other DNA
tccgcgaattaatgaactacgactttaccgcgcagatggaaaacagtctggaccaggtggcaaatcacgaagcag

SEQ ID NO: 854067 - DNA, 75 bp, synthetic construct
  source 1..75: mol_type = other DNA
atttcgaccattcaggatcgtggctatgtgcgagtagaaaatcgtcgtttctacgcggaaaaaatgggtgaaatt

SEQ ID NO: 854068 - DNA, 75 bp, synthetic construct
  source 1..75: mol_type = other DNA
cggagctgccgtgcgaaaaatcagatgcttatttcgtgctgcgtgacggtgctgccggtgtgttcctggcggcca

SEQ ID NO: 854069 - DNA, 75 bp, synthetic construct
  source 1..75: mol_type = other DNA
tggctgttccggctacgctctgccaccgaaagagcgttgcaaaaccaccatcaacctggtgccggaaaacgaagt

SEQ ID NO: 854070 - DNA, 75 bp, synthetic construct
  source 1..75: mol_type = other DNA
gctggcgggtaactacctgatggcggatctcttccgcaacggtacgtttgtgaccacttacctctccccgcgtga

SEQ ID NO: 854071 - DNA, 75 bp, synthetic construct
  source 1..75: mol_type = other DNA
gatcttcctgaagctgacggagagagtttccgtagttggtttaagaaacatctggcgcaggagaaaaagaatgga

SEQ ID NO: 854072 - DNA, 75 bp, synthetic construct
  source 1..75: mol_type = other DNA
tattgtcgataacgggcgttctgaggtgctggcctctgaatttcgggatgtgctgcgctgtattcgctgcggggc

SEQ ID NO: 854073 - DNA, 75 bp, synthetic construct
  source 1..75: mol_type = other DNA
atcgtcgggtgatggctgaaaaagggatcaccgcaaaagcagagcaacgggcgataaaaatgttcgcttatgcca

SEQ ID NO: 854074 - DNA, 75 bp, synthetic construct
  source 1..75: mol_type = other DNA
gctattcccggctgccattcgttagcacaggcccgcaagtaccctgatttgccgctggttttgctttcccattga

SEQ ID NO: 854075 - DNA, 75 bp, synthetic construct
  source 1..75: mol_type = other DNA
aataatgcaaccttctcgtcggtggataatacggaaacgcgctgcacagggctcggcggtttacgtcgccattcc

SEQ ID NO: 854076 - DNA, 75 bp, synthetic construct
  source 1..75: mol_type = other DNA
cgcgtagtgctgttggcgcacgtttgacgggatataacacctggttgacggggccgcgcgaagcgggccacgttg

SEQ ID NO: 854077 - DNA, 75 bp, synthetic construct
  source 1..75: mol_type = other DNA
caagtgggcgcagaaaggggaatgggtgaatatgtgtaaccatctccctgattttgtgaacagtaacggcgtccc

SEQ ID NO: 854078 - DNA, 75 bp, synthetic construct
  source 1..75: mol_type = other DNA
ctgataatgagccgaaaaccgacgcacagccagaacaaccagaaccggctcagtccggaactgacagtactatga

SEQ ID NO: 854079 - DNA, 75 bp, synthetic construct
  source 1..75: mol_type = other DNA
atgcaaactaaaccctaccctgtcttaatcaggtcagaatgttttttaccctttggtgcgggatgggattgtcct

SEQ ID NO: 854080 - DNA, 75 bp, synthetic construct
  source 1..75: mol_type = other DNA
ttcaatggcaaagcaaatcggcaatgctgtaccttgcgaactcgctagactatttgggctacatctcatagaaaa

SEQ ID NO: 854081 - DNA, 75 bp, synthetic construct
  source 1..75: mol_type = other DNA
cagtttgatgaaatcaatattgtgcgcggtcagctcgtttctggtgggcggctgggcgtgaagatttacaaaatt

SEQ ID NO: 854082 - DNA, 75 bp, synthetic construct
  source 1..75: mol_type = other DNA
cagacgacttcgccgggatttatgactatacgctcttgaaatttggtgaagctcaggcagaccattatacagacg

SEQ ID NO: 854083 - DNA, 75 bp, synthetic construct
  source 1..75: mol_type = other DNA
cgaactacttgatgaaaagaattcttatgacctttgtcaaatattaagcccaaaaagaccttacgcagctccggg

SEQ ID NO: 854084 - DNA, 75 bp, synthetic construct
  source 1..75: mol_type = other DNA
gtgatgctgacggggcgcgtaaagcaatgatggcgcaccttagctttgttcacaccaccatgaaacgattcgatg

SEQ ID NO: 854085 - DNA, 75 bp, synthetic construct
  source 1..75: mol_type = other DNA
ccagcagcggctgaaattaagcctgtccggaaggctggtaatcaggattattgcagagccaccggataagcgccg

SEQ ID NO: 854086 - DNA, 75 bp, synthetic construct
  source 1..75: mol_type = other DNA
tgttcgccagcagcggctgaaactgaacctgtccggaaggctggcaatcagaatcaccgcagagccaccagataa

SEQ ID NO: 854087 - DNA, 75 bp, synthetic construct
  source 1..75: mol_type = other DNA
gcaccgctggatgcgctgacgcatgcgggagtgctcattgatgacgagcagtttgatgaaatcaatattgtacgt

SEQ ID NO: 854088 - DNA, 75 bp, synthetic construct
  source 1..75: mol_type = other DNA
gcgcccctggatgcgctgacgcatgcggggctgttaatggacgatgagcagtttgatgaaatcaatattgtacgt

SEQ ID NO: 854089 - DNA, 75 bp, synthetic construct
  source 1..75: mol_type = other DNA
gaaaagattcagctttgttttgaagcaacgctcagcgaagacccggacctcgcttcgcaagcggacgttcgtttt

SEQ ID NO: 854090 - DNA, 75 bp, synthetic construct
  source 1..75: mol_type = other DNA
gtgatgccgacggggcgcgtaaagcaatgatggcgcaccttagttttgttcacaccaccatgaaacgattcgatg

SEQ ID NO: 854091 - DNA, 75 bp, synthetic construct
  source 1..75: mol_type = other DNA
gcttcaggcttatgtcttaacgtggatgattccttaatgattgttttacccagacgcctgtcagacgaggttgcc

SEQ ID NO: 854092 - DNA, 75 bp, synthetic construct
  source 1..75: mol_type = other DNA
tcagcaggttatggagcggtggggagcatgggctgcaaacaatcacgaagatgtgtcatgggcgtcaatcgctgc

SEQ ID NO: 854093 - DNA, 75 bp, synthetic construct
  source 1..75: mol_type = other DNA
gtgcgcggtcagctcgttcctggtgggcgactgggcgtgaagatttacgaaataatgcatgacgggcaggccaac

SEQ ID NO: 854094 - DNA, 75 bp, synthetic construct
  source 1..75: mol_type = other DNA
tgttcgccagcagcgactgaaattaaacctgtccggaaggctggcgataaagattattgcagagccaccggataa

SEQ ID NO: 854095 - DNA, 75 bp, synthetic construct
  source 1..75: mol_type = other DNA
ttcggcgagaaatatagtagatgggaaagaaggagattttgtatatccttgttttggcggaaacggtattcgtgg

SEQ ID NO: 854096 - DNA, 75 bp, synthetic construct
  source 1..75: mol_type = other DNA
ccgatgttccgggtttatctccgtattttgacaaaagaaataacaaagtttactggcgttacaggcatcccacca

SEQ ID NO: 854097 - DNA, 75 bp, synthetic construct
  source 1..75: mol_type = other DNA
ggagcaagggatcgacacccaaattttgctgggccattcgaatcaaaaaatgaccgatatttacaacgatgcacg

SEQ ID NO: 854098 - DNA, 75 bp, synthetic construct
  source 1..75: mol_type = other DNA
atgagtggatgatgatttataacgcagcggaaaaggatggttactttttacagcgcggtatgctgctggcactga

SEQ ID NO: 854099 - DNA, 75 bp, synthetic construct
  source 1..75: mol_type = other DNA
ctatccaagaagtgatgcctatcattggttggaatgaacttgaaaaattagccttgaatacattactggtaaggt

SEQ ID NO: 854100 - DNA, 75 bp, synthetic construct
  source 1..75: mol_type = other DNA
agccatggataatatgattagcgacatggacaacgctgccagtgagtttgtgacaacatttctggaaaaaagaaa

SEQ ID NO: 854101 - DNA, 75 bp, synthetic construct
  source 1..75: mol_type = other DNA
ggtttttgatgaacgttttggcaccagaccgttaaatgccataaccgtaaaggatgtggtatcggtgctggaaga

SEQ ID NO: 854102 - DNA, 75 bp, synthetic construct
  source 1..75: mol_type = other DNA
ggccattcgaatcaaaaaatgaccgatatttacaacgatgcacgtggtaaggagtggaaaaaactggtcatttga

SEQ ID NO: 854103 - DNA, 75 bp, synthetic construct
  source 1..75: mol_type = other DNA
agggacagccaagcgcggcgggatggttaagccagcaacgttaacagttgcatttaaaaaagcgcgggactctgt

SEQ ID NO: 854104 - DNA, 75 bp, synthetic construct
  source 1..75: mol_type = other DNA
aaaaattcaacaggaaagatatgaaaacggagagatcaaactcaacacactgaaacagaaagcatctcctctcag

SEQ ID NO: 854105 - DNA, 75 bp, synthetic construct
  source 1..75: mol_type = other DNA
accaaaattttgctgggccattcgaatcaaaaaatgaccgatatttacaacgacgcacgcggtaaggaatggaaa

SEQ ID NO: 854106 - DNA, 75 bp, synthetic construct
  source 1..75: mol_type = other DNA
gctttaaccctgcagaatcggcaaaaaaaccgcaggtgcggatatcaagacagcgactgacttttgatgagtgga

SEQ ID NO: 854107 - DNA, 75 bp, synthetic construct
  source 1..75: mol_type = other DNA
tgatcgatgttttccgggaagctcagcaaacgggcgatgtcccgccaggctttaaccctgcagaatcggcaaaaa

SEQ ID NO: 854108 - DNA, 75 bp, synthetic construct
  source 1..75: mol_type = other DNA
aaaagacaaaaaaacccctcaggaaggcgatgtttatgtcattattaacagtcaactgacgctggcagaagattt

SEQ ID NO: 854109 - DNA, 75 bp, synthetic construct
  source 1..75: mol_type = other DNA
ggggcaaagagtgaatcaacggttaaagctgcgatagcagaactggaaaagaacggctggctgacgaaggaagaa

SEQ ID NO: 854110 - DNA, 75 bp, synthetic construct
  source 1..75: mol_type = other DNA
tctgggaagggtgtgccttcaccggcatgatcttatccagggtggcagtaatggctcgccttgcagattacagca

SEQ ID NO: 854111 - DNA, 75 bp, synthetic construct
  source 1..75: mol_type = other DNA
gacttcgaacgtctgatggaaggcgctaagctgctgaaatgttcagagtttggtgaggcgatcatcaagaatatg

SEQ ID NO: 854112 - DNA, 75 bp, synthetic construct
  source 1..75: mol_type = other DNA
gaacggctggctgacgaaggaggaacgtaaggtcggtgggcgtaatgaaagcaatatctaccgtcttaatgtgga

SEQ ID NO: 854113 - DNA, 75 bp, synthetic construct
  source 1..75: mol_type = other DNA
attaagatggcggattctgatgcgctgcgcgtgggtgattacaccgtagcaattggtaacccgttcggcctgggc

SEQ ID NO: 854114 - DNA, 75 bp, synthetic construct
  source 1..75: mol_type = other DNA
cagtggggaacccgtgaggatttgacgtgtgcacagtggatctgggggcgggttttaaacctgtacgagcaggct

SEQ ID NO: 854115 - DNA, 75 bp, synthetic construct
  source 1..75: mol_type = other DNA
gatcactgattccgcaaaaatcatcaacaacgctcaagttgcttatctggggctcgactccctgaccgacaacat

SEQ ID NO: 854116 - DNA, 75 bp, synthetic construct
  source 1..75: mol_type = other DNA
ttgatgaagttctactacgacatcatccaacctgagcacccaaactctgatctggaaggcttgctgtcgatgttc

SEQ ID NO: 854117 - DNA, 75 bp, synthetic construct
  source 1..75: mol_type = other DNA
agcgtgcttatgaaatcctaaagcgggataagcaaaccttgcttaaccaaggtcacggcaaacaaatgggttcaa

SEQ ID NO: 854118 - DNA, 75 bp, synthetic construct
  source 1..75: mol_type = other DNA
tatggaaggcgcaatcaatgcgaagaccgtaacctatgacttcgagcgtctgatggaaggcgctaaactgctgaa

SEQ ID NO: 854119 - DNA, 75 bp, synthetic construct
  source 1..75: mol_type = other DNA
acctatgacttcgaacgtctgatggagggcgctaaactgctgaaatgttcagagtttggtgacgcgatcatcaag

SEQ ID NO: 854120 - DNA, 75 bp, synthetic construct
  source 1..75: mol_type = other DNA
acgggcgttgactgcactatccgcgagctggcgcaaaccatcgccaaagtggtgggttacaaaggtcgggtggtt

SEQ ID NO: 854121 - DNA, 75 bp, synthetic construct
  source 1..75: mol_type = other DNA
tttaaccctgcagaatctgcaaaaaaaccgcaggtgcggatatcaagacagcgactgacttttgatgagtggatg

SEQ ID NO: 854122 - DNA, 75 bp, synthetic construct
  source 1..75: mol_type = other DNA
gtttgatgaaatcaatattgtgcgcggtaagctcgttcctggtggtcggctgggcgtgaagatttgcgaaattag

SEQ ID NO: 854123 - DNA, 75 bp, synthetic construct
  source 1..75: mol_type = other DNA
tcgtgacctggacaacattctgaaagcaccgctggatgcgctgacgcatgcgggagtgctcattgatgacgagca

SEQ ID NO: 854124 - DNA, 75 bp, synthetic construct
  source 1..75: mol_type = other DNA
gagccaccggataagcgccgccgtgacctggacaatattctgaaagcgccgctggatgcgctgacgcatgcgggg

SEQ ID NO: 854125 - DNA, 75 bp, synthetic construct
  source 1..75: mol_type = other DNA
taccttacccgccgacggtgaacacttactggcgacgccgtggcagcacatattttatctcggaggagggaaagc

SEQ ID NO: 854126 - DNA, 75 bp, synthetic construct
  source 1..75: mol_type = other DNA
gtttgatgaaattaatatagtgcgcggtcagtctgttcctggtgggcggctgggcgtgaagatttacgaaataat

SEQ ID NO: 854127 - DNA, 75 bp, synthetic construct
  source 1..75: mol_type = other DNA
gttatcgccgtgatgtggcgcttattgttcgccagcagcggctgaaattaagcctgtccggaaggctggcgataa

SEQ ID NO: 854128 - DNA, 75 bp, synthetic construct
  source 1..75: mol_type = other DNA
tgttcgccagcagcggttgaaattaaacctgtccggaaggctggcgataaagattattgcagagccatcggataa

SEQ ID NO: 854129 - DNA, 75 bp, synthetic construct
  source 1..75: mol_type = other DNA
cagacgaggtagctgaccgtgtgcgggcgctgattgatgaaaaacaactggaggcgggcatgaagttgcccgctg

SEQ ID NO: 854130 - DNA, 75 bp, synthetic construct
  source 1..75: mol_type = other DNA
acccgccaacggtgaacacttactggcgtcgtcgtggcagcacatattttgtatcaaaagccggggagcgttatc

SEQ ID NO: 854131 - DNA, 75 bp, synthetic construct
  source 1..75: mol_type = other DNA
tccggaaggctggcgataaagattattgcagagccgccggataagcgccgtcgtgacttggacaacattctgaaa

SEQ ID NO: 854132 - DNA, 75 bp, synthetic construct
  source 1..75: mol_type = other DNA
tccggaaggctggcgataaagattattgccgagccaccggataagcgccgccgtgacttggacaatattctgaaa

SEQ ID NO: 854133 - DNA, 75 bp, synthetic construct
  source 1..75: mol_type = other DNA
gtacgtggccagccagtatctggtggacgtctgggggtgaagatttaccccataatgcttgaagggcaggtcaaa

SEQ ID NO: 854134 - DNA, 75 bp, synthetic construct
  source 1..75: mol_type = other DNA
ctgaaagcgccgctggatgcgctgacgcatgcggggttgctaatggacgatgagcagtttgatgaaatcaatatc

SEQ ID NO: 854135 - DNA, 75 bp, synthetic construct
  source 1..75: mol_type = other DNA
gtggaccttgctccatccatgatcctgaagcggctctggaatatgctcgtcgatttaaagcccttaccgcagagg

SEQ ID NO: 854136 - DNA, 75 bp, synthetic construct
  source 1..75: mol_type = other DNA
tacacattaccgacgaacagattctgatgaccccggagcagttaaaggctgctttcccattaagtctgcaacaag

SEQ ID NO: 854137 - DNA, 75 bp, synthetic construct
  source 1..75: mol_type = other DNA
tggtaatcgctccattattggtctgatgattgaaagtaatatccacgaaggtaatcagtcttccgaacagccgcg

SEQ ID NO: 854138 - DNA, 75 bp, synthetic construct
  source 1..75: mol_type = other DNA
accgcgcagtgaaatgaaatacggtgtatccgtaaccgatgcctgcattagctgggaaatgaccgatgccttgct

SEQ ID NO: 854139 - DNA, 75 bp, synthetic construct
  source 1..75: mol_type = other DNA
caatgtgaaaaagagatggaacaggcgggactgcgcccgtctctgatggtagattgcagccacggtaattccaat

SEQ ID NO: 854140 - DNA, 75 bp, synthetic construct
  source 1..75: mol_type = other DNA
cagtctggcaacggcaattaacgccatgcgtgctgctgctcagccgcatcgttttgtcggtattaaccaggctgg

SEQ ID NO: 854141 - DNA, 75 bp, synthetic construct
  source 1..75: mol_type = other DNA
atatatacaacggccagagttgtcgttgccggtggcaaagattcaattcttgtaaaattctttaactcactaaca

SEQ ID NO: 854142 - DNA, 75 bp, synthetic construct
  source 1..75: mol_type = other DNA
ttaccatttttctgaataattacagaaaaattcaacaggaaagatatgaaaacggcgagatcaaactcaacacgc

SEQ ID NO: 854143 - DNA, 75 bp, synthetic construct
  source 1..75: mol_type = other DNA
ttattttcttttgttcctgatgttctgtgctggattttccttatcaatttacctgccattcattccgtttatttt

SEQ ID NO: 854144 - DNA, 75 bp, synthetic construct
  source 1..75: mol_type = other DNA
gcgcgtctattttgaaaaaccacgtaccactgtcggctggaaagggttaattaacgatccccatatggatggctc

SEQ ID NO: 854145 - DNA, 75 bp, synthetic construct
  source 1..75: mol_type = other DNA
gcaggttgcgttgctacaaacgcaaggtaatccggacggacatgtgatcctgcgcggcggcaaagcaccgaatta

SEQ ID NO: 854146 - DNA, 75 bp, synthetic construct
  source 1..75: mol_type = other DNA
ttgctgggtcattcgaatcaaaaaatgaccgatatttacaacgacgcacgcggtaaggagtggaaaaaactggtt

SEQ ID NO: 854147 - DNA, 75 bp, synthetic construct
  source 1..75: mol_type = other DNA
tatttattgcccggagcggctgaagctgaatcttgactggcagggggcgattccgggatttagcgccagcgcagg

SEQ ID NO: 854148 - DNA, 75 bp, synthetic construct
  source 1..75: mol_type = other DNA
tgcaatggcggatgagccgtttgattatatcggtctgccgttcaacgacacggcctccgttaacacgctggtgac

SEQ ID NO: 854149 - DNA, 75 bp, synthetic construct
  source 1..75: mol_type = other DNA
ctgcataccagtgcgtatgtactgcgcaaactgaaatccgtcattaccagtaagtacgggcgtcacaagcttgcc

SEQ ID NO: 854150 - DNA, 75 bp, synthetic construct
  source 1..75: mol_type = other DNA
gttgcggataacagctacctcgacagtgagactctgcataccagtgcgtatgtactgcgcaaactgaaatccgtc

SEQ ID NO: 854151 - DNA, 75 bp, synthetic construct
  source 1..75: mol_type = other DNA
atggttctggtggtggtgagattctgcctgcggggcttcaggttgtgacggaagccggaactgcgggtagtggcg

SEQ ID NO: 854152 - DNA, 75 bp, synthetic construct
  source 1..75: mol_type = other DNA
cgtcgaatacgctggtgccgttgttctacgccgagatggacaattctgcggcaaatacagcggtgaccagcgagc

SEQ ID NO: 854153 - DNA, 75 bp, synthetic construct
  source 1..75: mol_type = other DNA
gcagcagtctctgctgtcacatgggattgcaacgtcatacgtagaaagcggtacgcttcgcattcagcgagacgt

SEQ ID NO: 854154 - DNA, 75 bp, synthetic construct
  source 1..75: mol_type = other DNA
gaaagatctggagattaaaacactgctgatggacgagcaggatcacggctatgcgctgactggtgatgcgctttc

SEQ ID NO: 854155 - DNA, 75 bp, synthetic construct
  source 1..75: mol_type = other DNA
attcagtgggatgcaacctccgcaacgctgaaagctctcggttgtcacaatatcgaccgcgtgcttctcgcttaa

SEQ ID NO: 854156 - DNA, 75 bp, synthetic construct
  source 1..75: mol_type = other DNA
gcgtgaaatcgagttgcgccagaaacagtacgaatattatcgagatatgctatttagtttcccgaagccggaagt

SEQ ID NO: 854157 - DNA, 75 bp, synthetic construct
  source 1..75: mol_type = other DNA
cgccatctggctggcaaaacagtatggtatcgatgctatcggttttaacgcgccagacctgaatatgaagcacgg

SEQ ID NO: 854158 - DNA, 75 bp, synthetic construct
  source 1..75: mol_type = other DNA
cgcgccgttgattcagtgggatgcaacttccgcaacgctgaaagccctcggctgtaacaacatcgaccgcgtgct

SEQ ID NO: 854159 - DNA, 75 bp, synthetic construct
  source 1..75: mol_type = other DNA
ctgatggacgagcagaatcacggctttacgttaactggcgatgcgctttcccaggcggcgattgcggcggcaaac

SEQ ID NO: 854160 - DNA, 75 bp, synthetic construct
  source 1..75: mol_type = other DNA
atgacgataagttttaatactgttccgtcagacacgctggtgccgttgttttacgccgagatggacaattctgcg

SEQ ID NO: 854161 - DNA, 75 bp, synthetic construct
  source 1..75: mol_type = other DNA
taccgtttattgaggacaggacaactggcagcgaacgtacgataccccttagcgataaagattctgtcgtagagc

SEQ ID NO: 854162 - DNA, 75 bp, synthetic construct
  source 1..75: mol_type = other DNA
gatcaccttccctttggtgcacacaactgaaacccaaaatcgaggtttaaagctcgtcatacttgaaaaggacgc

SEQ ID NO: 854163 - DNA, 75 bp, synthetic construct
  source 1..75: mol_type = other DNA
ttaagttgtgtggcgaagtgaccattcttaacagattacagtattttttgcggaccgcattagtgattttctcta

SEQ ID NO: 854164 - DNA, 75 bp, synthetic construct
  source 1..75: mol_type = other DNA
gctcctgacctggagaaaggacgcggaaagttggttcgcctgcgagagaaactcgccagaatcagcgcggtgatt

SEQ ID NO: 854165 - DNA, 75 bp, synthetic construct
  source 1..75: mol_type = other DNA
gcgccatctggctggcaaaacagtacggcatcgacgctatcgggtttaacgcgccagacctcaatatgaagcacg

SEQ ID NO: 854166 - DNA, 75 bp, synthetic construct
  source 1..75: mol_type = other DNA
gacgcgaaaatcttcaatcgtcagccaaaatatctcgggccgtcggtcattattggtccgtttagtgagcatggt

SEQ ID NO: 854167 - DNA, 75 bp, synthetic construct
  source 1..75: mol_type = other DNA
atgccactgcggttgccaccgcgattaaggaagcggtaaatggtgttatcaccctgccgtttacggcgtcatctg

SEQ ID NO: 854168 - DNA, 75 bp, synthetic construct
  source 1..75: mol_type = other DNA
ccgactatgacattatccgcgccgccgaaaccggcctggtacagattcaggcgcgaatgggtggcaccggcgaac

SEQ ID NO: 854169 - DNA, 75 bp, synthetic construct
  source 1..75: mol_type = other DNA
gcctgcgggacttcaggtcgtgacggaagccggaactgcaggtagtggagcacctgatcttaccgccgctgttgc

SEQ ID NO: 854170 - DNA, 75 bp, synthetic construct
  source 1..75: mol_type = other DNA
tatgcagtatatttctatgcttgttttttcttagttttatcgatattcgtgagcaatggttgccagcttgtgtaa

SEQ ID NO: 854171 - DNA, 75 bp, synthetic construct
  source 1..75: mol_type = other DNA
cacgctgtcagaactggtgaccgcaggtgaccagtttaaccagcagcacatcaccctggcggggtacgaaaaaga

SEQ ID NO: 854172 - DNA, 75 bp, synthetic construct
  source 1..75: mol_type = other DNA
actatgcacgccagatttgtggtgcgggaagtcagctggcgcgtatggtcgaggcttatcgccagactgacccgt

SEQ ID NO: 854173 - DNA, 75 bp, synthetic construct
  source 1..75: mol_type = other DNA
gttgattgctcttctccagcgcgataaatcgcgcaagtttatcgcccagcaaattgttcgctggctggagagtga

SEQ ID NO: 854174 - DNA, 75 bp, synthetic construct
  source 1..75: mol_type = other DNA
gttccgctcattgctgtaggaacggacttcaaagcaggaaccggtgataacaccgataccacggtcaacgcaacg

SEQ ID NO: 854175 - DNA, 75 bp, synthetic construct
  source 1..75: mol_type = other DNA
ttgagctcatcgttaacaacatcgccaatgtcccggataagagcaatcacagccacgaagccagcgcacaggccg

SEQ ID NO: 854176 - DNA, 75 bp, synthetic construct
  source 1..75: mol_type = other DNA
ttaacgcgctcattaatcatcactacaaaatcgttgctgcctcctggcaggcgaaaaacaatgctgcacgtacgc

SEQ ID NO: 854177 - DNA, 75 bp, synthetic construct
  source 1..75: mol_type = other DNA
aaagagcgcgtagaaaaaggaatgatgagcgcccttcccgaaacggatatctggacactgacactgcgtttaccc

SEQ ID NO: 854178 - DNA, 75 bp, synthetic construct
  source 1..75: mol_type = other DNA
aattatcagttcggcgttccgctaaaagatcaattggatagcgataaagtgaaagcggcgcactcgctgatgggc

SEQ ID NO: 854179 - DNA, 75 bp, synthetic construct
  source 1..75: mol_type = other DNA
acatcgcgaacgtgccagaagagaacaaccacagccacgaagccagcgctcaggcagatggcgttgatggtgtag

SEQ ID NO: 854180 - DNA, 75 bp, synthetic construct
  source 1..75: mol_type = other DNA
atccgctccggctcccgtcagttcgggcgtgagtccacgcggggaggtgtgaaccgtcccgggaatcctggagac

SEQ ID NO: 854181 - DNA, 75 bp, synthetic construct
  source 1..75: mol_type = other DNA
ttatgatatcaataggtgtctggacatatgtagttatcattacattacttgcattcatttattcttatcaaaaaa

SEQ ID NO: 854182 - DNA, 75 bp, synthetic construct
  source 1..75: mol_type = other DNA
caagcagaatccagagttgtactggcaaatccttgcagaagccgccagaatcgcccagggaaaagagcagcaaaa

SEQ ID NO: 854183 - DNA, 75 bp, synthetic construct
  source 1..75: mol_type = other DNA
tcatccgctctctgactggaaaaactctgaggatttcgacttttatgaagagcgtccggcgcgcggttgggatat

SEQ ID NO: 854184 - DNA, 75 bp, synthetic construct
  source 1..75: mol_type = other DNA
ggcagtcgtcatgattttgttgagcgtaataactttattgttctggaatacaaagaaaaagatccgcttgatgtc

SEQ ID NO: 854185 - DNA, 75 bp, synthetic construct
  source 1..75: mol_type = other DNA
atgtcttacgccacaccggaacagttcatcagggcgttcagtgaacgcgaggcgtgcacactgacggatgaagag

SEQ ID NO: 854186 - DNA, 75 bp, synthetic construct
  source 1..75: mol_type = other DNA
aatttaacttggacaaagctcgcaaaaaagagattcgcgcagccttaaccagcgtgggtatgacccctcaacatg

SEQ ID NO: 854187 - DNA, 75 bp, synthetic construct
  source 1..75: mol_type = other DNA
acattggttggcggatgtattgggctgattttgtatttgctgtcgcagctcccggctttgttccccctcggcaat

SEQ ID NO: 854188 - DNA, 75 bp, synthetic construct
  source 1..75: mol_type = other DNA
agcaactgcgccagttaaatcaacataacggctggttactggaaggacagattgagcgcaatcaacaggcgctgg

SEQ ID NO: 854189 - DNA, 75 bp, synthetic construct
  source 1..75: mol_type = other DNA
ccactcatcttgagcttgagaaaaaccgtggttactggcgggcaaaagggtttgatcgtgatagttgtcaactgt

SEQ ID NO: 854190 - DNA, 75 bp, synthetic construct
  source 1..75: mol_type = other DNA
taccgatgatgcgcgtattcagcgcctgcttaagcgcgcggtccatcgggcgattgataaggtcgatctttccgg

SEQ ID NO: 854191 - DNA, 75 bp, synthetic construct
  source 1..75: mol_type = other DNA
ttggcgaaaatctcggtcagttcgtgcaggaaaaatttctcgatacccaatcgctggtggcattgattcgacgtc

SEQ ID NO: 854192 - DNA, 75 bp, synthetic construct
  source 1..75: mol_type = other DNA
agctgcgccagaaacagtacgaatattaccgtgatttgctgttcagtttccctaaacctgattccgtaacgaact

SEQ ID NO: 854193 - DNA, 75 bp, synthetic construct
  source 1..75: mol_type = other DNA
ttttgccattagttggcttcattctgctggcgttctctcgcggacgctggtctgaaaatgtctcagcgatcgttg

SEQ ID NO: 854194 - DNA, 75 bp, synthetic construct
  source 1..75: mol_type = other DNA
gctggccggttttgcggcgctggtacagaccgacatcaaacgtgttctcgcttactctaccatgagccagattgg

SEQ ID NO: 854195 - DNA, 75 bp, synthetic construct
  source 1..75: mol_type = other DNA
acgagctgattctattttcgaagagatattcgaaattgctgacaatgcgattccagatgctgctgaggtggcaaa

SEQ ID NO: 854196 - DNA, 75 bp, synthetic construct
  source 1..75: mol_type = other DNA
tggcgcactgattgtaccgccgctgcagggcgtgcttccgcaaacgacggagctggcgcacggcagcatgttgac

SEQ ID NO: 854197 - DNA, 75 bp, synthetic construct
  source 1..75: mol_type = other DNA
gtggaactggcaccagcgcactttgctgacggcaataacatgctgatgtgggtgacgctgatgctgctgggcggt

SEQ ID NO: 854198 - DNA, 75 bp, synthetic construct
  source 1..75: mol_type = other DNA
gacttcttcgctaacggtgagcaggcatacagccagccgctgtggacatggatgtcggtaggcgactttaacatc

SEQ ID NO: 854199 - DNA, 75 bp, synthetic construct
  source 1..75: mol_type = other DNA
agccgggctgcgtgagcgggtggctgaactggcaatgatggcccgggagcaggggcgggaggtgcagattatcgc

SEQ ID NO: 854200 - DNA, 75 bp, synthetic construct
  source 1..75: mol_type = other DNA
agaagcaacaaatacatattctggcatggttgagtctgtaaaaggtatatttgtttctggcggcagtaacttgag

SEQ ID NO: 854201 - DNA, 75 bp, synthetic construct
  source 1..75: mol_type = other DNA
tacagaaaggaactgcccacgatgtgctggagccgaaaccggaccgggaggtcatgaatgcgcagcggctgttca

SEQ ID NO: 854202 - DNA, 75 bp, synthetic construct
  source 1..75: mol_type = other DNA
gttattcaatgactgtacagccagttcaggcatccacacgaacagcagcgcgtggcatttttgaaatggaactgt

SEQ ID NO: 854203 - DNA, 75 bp, synthetic construct
  source 1..75: mol_type = other DNA
tgggtggaaacgcccgggcattccgtcagcgacagtgcgaaggtttttgcctccgtcacacagatggcaatggac

SEQ ID NO: 854204 - DNA, 75 bp, synthetic construct
  source 1..75: mol_type = other DNA
tatacttaattgatagtatgataaggccgcccatcatggtctttggttttttctttgcttctgtagccatcatcg

SEQ ID NO: 854205 - DNA, 75 bp, synthetic construct
  source 1..75: mol_type = other DNA
tcatgaaacagaaccgggtgaccgtacatccggagaaaagtgtcccccggacggccggttacagcgatgccgtca

SEQ ID NO: 854206 - DNA, 75 bp, synthetic construct
  source 1..75: mol_type = other DNA
cagcacaaggacggcagcgcgcggcatctttgagatggagttgtgcaaatatgccatcaaccagtcgctggcaga

SEQ ID NO: 854207 - DNA, 75 bp, synthetic construct
  source 1..75: mol_type = other DNA
agtaacgttttcaggataagaaaatcgattctgatattggtggtttttgttcttgtggcggggttatctgtaaac

SEQ ID NO: 854208 - DNA, 75 bp, synthetic construct
  source 1..75: mol_type = other DNA
ggaaggtaaccggaaactgatggccggctttgagtcagcctacgtggccctgtcgcgtatgaagcagcatgtgca

SEQ ID NO: 854209 - DNA, 75 bp, synthetic construct
  source 1..75: mol_type = other DNA
ggcagaggtactggcacagcggcaggctgaagaggccatccgccgtgaaacggaacgccgcgcagatgaaattgt

SEQ ID NO: 854210 - DNA, 75 bp, synthetic construct
  source 1..75: mol_type = other DNA
cagcagacccgggtgattcgccccggccaggagcgggcagagcaacatattgacctggcttatgccatcaccgcc

SEQ ID NO: 854211 - DNA, 75 bp, synthetic construct
  source 1..75: mol_type = other DNA
taaattcactggagcagctacatttattaataaaatattctccgccaccgcaccggctattaactttttcctttt

SEQ ID NO: 854212 - DNA, 75 bp, synthetic construct
  source 1..75: mol_type = other DNA
cggtgaatcttgccagcgaagaaccgtatcataatgcactcaatgaaaaactggtaaaagagaccatcgaattag

SEQ ID NO: 854213 - DNA, 75 bp, synthetic construct
  source 1..75: mol_type = other DNA
aaattaaagcctttttgccgatctatgacttctcatacgaaatgaccaccctgctctccccggacgaacgtaccg

SEQ ID NO: 854214 - DNA, 75 bp, synthetic construct
  source 1..75: mol_type = other DNA
atattcaggatggtagcgtcttacatgtaacccataaatcgacaaccaatccccagggtaatccattaatcgtag

SEQ ID NO: 854215 - DNA, 75 bp, synthetic construct
  source 1..75: mol_type = other DNA
tcggcttcattggtatccgcaaggttatcagcgcggctcaggccggacgttttcagggcgcatccgcaattatca

SEQ ID NO: 854216 - DNA, 75 bp, synthetic construct
  source 1..75: mol_type = other DNA
actggatgaaacccgtactgcggaaaaacttgcccgccatccctcctttacggtggtttctgagcagataaaggc

SEQ ID NO: 854217 - DNA, 75 bp, synthetic construct
  source 1..75: mol_type = other DNA
ctggtcaaagagacgatcgaactggcggaacaagtcaaccataccgaagttcatctggttggcgcttacccagta

SEQ ID NO: 854218 - DNA, 75 bp, synthetic construct
  source 1..75: mol_type = other DNA
gtgctggaaagtaaaaacctggccttcagcatggtggacctgctgacagaggcgaagtcgtttgctgcagaagga

SEQ ID NO: 854219 - DNA, 75 bp, synthetic construct
  source 1..75: mol_type = other DNA
taaattcacaggagtagccacctttattaataaaatattctccgctaccgcgccagccattaactttttcctgtt

SEQ ID NO: 854220 - DNA, 75 bp, synthetic construct
  source 1..75: mol_type = other DNA
aaacgtccgaccgtttcacggtggtacagggttatgccggtgtgggtaagaccacacagttccgggcggtgatgt

SEQ ID NO: 854221 - DNA, 75 bp, synthetic construct
  source 1..75: mol_type = other DNA
ccagatggcaacccattaaccattggcgaagatgtcactgttggtcacaaggtgatgctccacggctgcaccatt

SEQ ID NO: 854222 - DNA, 75 bp, synthetic construct
  source 1..75: mol_type = other DNA
atgtctgatgttttacgcccataccgcgatctttttccacaaatcggtcagcgcgtaatgatcgacgatagcagc

SEQ ID NO: 854223 - DNA, 75 bp, synthetic construct
  source 1..75: mol_type = other DNA
ctggcggcagtaacttgagaaaatctcctgcaacaaacattattcagaagaaggatgcaaataaaaatgatgacg

SEQ ID NO: 854224 - DNA, 75 bp, synthetic construct
  source 1..75: mol_type = other DNA
cggggatgcgcagttcgtggccctgcagggcagccgtaacggagaaagcctgctggctgataatatgcaggatgg

SEQ ID NO: 854225 - DNA, 75 bp, synthetic construct
  source 1..75: mol_type = other DNA
agcccccactgccgcacagtcggttaacaatacacagattgccaccacggcttttgtgaaatcggcaattgcagc

SEQ ID NO: 854226 - DNA, 75 bp, synthetic construct
  source 1..75: mol_type = other DNA
tttcaccggaaatcgtcgatgcctcacatcaggcgcttctgcagtatatccgtccgggcgcacagaatcagatga

SEQ ID NO: 854227 - DNA, 75 bp, synthetic construct
  source 1..75: mol_type = other DNA
ctgatatcaaacattacattcttattctgaaacgagaaaacggggtgacctggctggataatttcgggggaaaca

SEQ ID NO: 854228 - DNA, 75 bp, synthetic construct
  source 1..75: mol_type = other DNA
ataccttggtttgggaacggcatcgaaaaggaatgtcgggacgggggaaaatcagataccggatatgggagcatt

SEQ ID NO: 854229 - DNA, 75 bp, synthetic construct
  source 1..75: mol_type = other DNA
atgattaactggccctggtgttttttctcagtgcaaggtgattatcttcatcataaggctcttttcagaaaaagc

SEQ ID NO: 854230 - DNA, 75 bp, synthetic construct
  source 1..75: mol_type = other DNA
tttttgcgatgaatatggatatgcccacatcggatggtttagggctgcgccaagccatcacaaaagaagtgctca

SEQ ID NO: 854231 - DNA, 75 bp, synthetic construct
  source 1..75: mol_type = other DNA
tgtgggcgtgggtaacgttttggatgtttccgttagtggtgagtccggggtttttatgtgctgtcggttatttca

SEQ ID NO: 854232 - DNA, 75 bp, synthetic construct
  source 1..75: mol_type = other DNA
ggacaaaaaatgaatgcgttgttaatgcaatctcatgttttgttgccggaattatttttgtggatgagttaacgc

SEQ ID NO: 854233 - DNA, 75 bp, synthetic construct
  source 1..75: mol_type = other DNA
atgctgcgcgcatttgcccgcctttttcgccgcgtttgtttttctcgccggactctaaagattgcctgcttactg

SEQ ID NO: 854234 - DNA, 75 bp, synthetic construct
  source 1..75: mol_type = other DNA
tcttcagaatgagcaacgcactgccgtgacgccaatggcatttaatgccccctttgccgtgtcacagaacagtgc

SEQ ID NO: 854235 - DNA, 75 bp, synthetic construct
  source 1..75: mol_type = other DNA
tgatattcttaagattgcaagttggttatatgcatatgtaatgatttcaaaagggatgactcagttatttgttat

SEQ ID NO: 854236 - DNA, 75 bp, synthetic construct
  source 1..75: mol_type = other DNA
tatggggcgcatcgataatgggggttgggtccgccaatgtgatggtgcaacttgccgctgataatatcgcaaatg

SEQ ID NO: 854237 - DNA, 75 bp, synthetic construct
  source 1..75: mol_type = other DNA
tggaacaaaacccgcttcggtaagaacatttttgccattggcggtaacccggaagcggcgaaagtatctggtgtc

SEQ ID NO: 854238 - DNA, 75 bp, synthetic construct
  source 1..75: mol_type = other DNA
ttcaaagtgaaacagatataccaatagtgatcgttcatggacccaaaggggaagataaagccagggcattagtgg

SEQ ID NO: 854239 - DNA, 75 bp, synthetic construct
  source 1..75: mol_type = other DNA
atgatatttatcagtcagttgaaagcaaaaacgaatttccaggtcgtcggtttaaccatgaagtgctattcccct

SEQ ID NO: 854240 - DNA, 75 bp, synthetic construct
  source 1..75: mol_type = other DNA
caaaaacgaattttcaggttgttggtataaccatgaattgctactcccctttgtgcaagaacgcgtcccggatgg

SEQ ID NO: 854241 - DNA, 75 bp, synthetic construct
  source 1..75: mol_type = other DNA
tataataatgtctaccgtttatccttatcaccctcgattaaacgttcagcagcaatcataaaagatgcttatatc

SEQ ID NO: 854242 - DNA, 75 bp, synthetic construct
  source 1..75: mol_type = other DNA
ttaatgcgcttaaacttgaacagactaaattaacattagtcacaatgactatgcaggatcacgcaacattaaaag

SEQ ID NO: 854243 - DNA, 75 bp, synthetic construct
  source 1..75: mol_type = other DNA
cccatgacatgggcatttatgatgcgtgaggcgggttttccggcagtcaggtcaatatatgaattgccattaagc

SEQ ID NO: 854244 - DNA, 75 bp, synthetic construct
  source 1..75: mol_type = other DNA
ttctgattgtctgtgccattggtgcggttatcggtttaatcaacggcctgatcattgcttatctcaacgtgacgc

SEQ ID NO: 854245 - DNA, 75 bp, synthetic construct
  source 1..75: mol_type = other DNA
tattctcacccagtcatcggtgcgtattattatcgcgctcggtgtggcagggttaattgtcacccaggggaccga

SEQ ID NO: 854246 - DNA, 75 bp, synthetic construct
  source 1..75: mol_type = other DNA
tggcagggttaattgtcacccaggggaccgacctttctgcggggcgtcaagtagggctggcggcagtggtggcag

SEQ ID NO: 854247 - DNA, 75 bp, synthetic construct
  source 1..75: mol_type = other DNA
acgttcagcagcaatcataaaagatgcttatatcgcaataactcctgacacctcaatattacatatggcaagtgc

SEQ ID NO: 854248 - DNA, 75 bp, synthetic construct
  source 1..75: mol_type = other DNA
caatatatgaattgccattaagcgaggatgtactcgatgaggtgcgcgaggaaatgcgatcgttaggatcttaca

SEQ ID NO: 854249 - DNA, 75 bp, synthetic construct
  source 1..75: mol_type = other DNA
tcacaatgactatgcaggatcacgcaacattaaaagaaataaaatatttagcgaagaacataacactgcaatacg

SEQ ID NO: 854250 - DNA, 75 bp, synthetic construct
  source 1..75: mol_type = other DNA
tcgcgttattgaatcaggccacagagcgcattcacacggctatcgttgtgcaggatcccaccatgcagcggcgca

SEQ ID NO: 854251 - DNA, 75 bp, synthetic construct
  source 1..75: mol_type = other DNA
tttcgacggcaaccatagatgccataaatgttatcggacagtggctggcgcaggatgatttctccggtgaggtgc

SEQ ID NO: 854252 - DNA, 75 bp, synthetic construct
  source 1..75: mol_type = other DNA
ggtgctagtaactcttacaataaagacactcttattaactggatgaaagcacaaggatctactccggtagtaatt

SEQ ID NO: 854253 - DNA, 75 bp, synthetic construct
  source 1..75: mol_type = other DNA
cttgggctggaggccgggcaggaggtaaaatatgaactgcattgcttaccaaattaccatcacgtcttttttttc

SEQ ID NO: 854254 - DNA, 75 bp, synthetic construct
  source 1..75: mol_type = other DNA
acccgtgacgaaggacttcgtaactcactgcggggcgcaattatgggactgtataactgcgcactgggcagcgat

SEQ ID NO: 854255 - DNA, 75 bp, synthetic construct
  source 1..75: mol_type = other DNA
ctggattgaagaccagtcaacaaactgcggtgaaaacgcacgctttagcatcgcgctattgaatcaggccgtaga

SEQ ID NO: 854256 - DNA, 75 bp, synthetic construct
  source 1..75: mol_type = other DNA
gattggcgggctggaaggccgtttactgaaggatggtgaccgactcccgattggcaaatcgaagcatgattttat

SEQ ID NO: 854257 - DNA, 75 bp, synthetic construct
  source 1..75: mol_type = other DNA
tgggtggtttgctctgacgggtgccggttgcgaagcgcggctggatgataatgccgtctggaccggctggcgatt

SEQ ID NO: 854258 - DNA, 75 bp, synthetic construct
  source 1..75: mol_type = other DNA
ggttcgtggctcaggacatcgtatcccgccaggtgcagctgattaaatctcttccgctggaagctgccgaccgcg

SEQ ID NO: 854259 - DNA, 75 bp, synthetic construct
  source 1..75: mol_type = other DNA
gaggtttaaatctattacgactttgcatcaacttgattactacaacttacaatatgattacaaaagcaaatggaa

SEQ ID NO: 854260 - DNA, 75 bp, synthetic construct
  source 1..75: mol_type = other DNA
attctggcgttcgccctggcaactgagtccgcaaagcaaccggatgggctatcgcttacaggggcaaattttaaa

SEQ ID NO: 854261 - DNA, 75 bp, synthetic construct
  source 1..75: mol_type = other DNA
acgcaccaccgatcgcgaactgttatctcacggtttgttaccgggcgtggtgcaggtgccgcataacggccagcc

SEQ ID NO: 854262 - DNA, 75 bp, synthetic construct
  source 1..75: mol_type = other DNA
acgtattgaaacactttgtcagcaactcaccgctgaaaattatgacctatctcgcctgattcagggattatttag

SEQ ID NO: 854263 - DNA, 75 bp, synthetic construct
  source 1..75: mol_type = other DNA
atgaatagtaacctgaccaggatatgttaccgtggtgagactggagaaagtgatctcagaacgttgatccttggc

SEQ ID NO: 854264 - DNA, 75 bp, synthetic construct
  source 1..75: mol_type = other DNA
cataaatgcttcggctcgctgggactggcactggaagaaggtttgacgctaaccaatctgacagaaagccagttt

SEQ ID NO: 854265 - DNA, 75 bp, synthetic construct
  source 1..75: mol_type = other DNA
gttaatcgccaccgccgggttatacatgggaacatcggcctgctccggttccgataaacagacgctgtttaccgc

SEQ ID NO: 854266 - DNA, 75 bp, synthetic construct
  source 1..75: mol_type = other DNA
accagtctcttcgggcgccagtaccaatgacatgggcattcatgatgcgagaggctggtttcccgcctgtccgcc

SEQ ID NO: 854267 - DNA, 75 bp, synthetic construct
  source 1..75: mol_type = other DNA
tgccgggcttttagctggaatgtgattatgttggcatttatccgttttctttttgcaggcctgctgctggtgatc

SEQ ID NO: 854268 - DNA, 75 bp, synthetic construct
  source 1..75: mol_type = other DNA
atgcttttaattcaacctggatttggccttagcatcaaaaaagggcacatgtttggcgagaaagagtcacaacga

SEQ ID NO: 854269 - DNA, 75 bp, synthetic construct
  source 1..75: mol_type = other DNA
actcaatcaacataacataccactgccagaattggcgaacgggcactataccgcttatgcggtacgcaaaacgaa

SEQ ID NO: 854270 - DNA, 75 bp, synthetic construct
  source 1..75: mol_type = other DNA
gccgtagatgtatttaaccacccgttaactggcgtttatctcaatagcttcaccctggatatgctcaggagcggc

SEQ ID NO: 854271 - DNA, 75 bp, synthetic construct
  source 1..75: mol_type = other DNA
ccggggtgatggaagcctttgagctcgacatttatgcctcagaatataatgaactcgcttttaccttgcacaaac

SEQ ID NO: 854272 - DNA, 75 bp, synthetic construct
  source 1..75: mol_type = other DNA
cattatattgatgctggcggtggtagtcgtggagcgcggatgattattgatccacaaggagaatatcttccacaa

SEQ ID NO: 854273 - DNA, 75 bp, synthetic construct
  source 1..75: mol_type = other DNA
atgtcgattacccgatctggcaagttgatgcgctagtcgttggtagcggcgcggcagggctgcgcgcagcggttg

SEQ ID NO: 854274 - DNA, 75 bp, synthetic construct
  source 1..75: mol_type = other DNA
cccgcatgggttgtcacggtagacggtgtggattacccactctggcaaacagatgccctggtagtcggcagtggt

SEQ ID NO: 854275 - DNA, 75 bp, synthetic construct
  source 1..75: mol_type = other DNA
gggcaaacctccaacgcttgatggcatgaccggtcacgctggcgaactcccgaactgccgctgttacaaagaaat

SEQ ID NO: 854276 - DNA, 75 bp, synthetic construct
  source 1..75: mol_type = other DNA
acgtatttgtacgccatattgcgaataatcaacttcgttctctggccgaggtagccacggtggcgcatcagttaa

SEQ ID NO: 854277 - DNA, 75 bp, synthetic construct
  source 1..75: mol_type = other DNA
gcgcggcaggttatcggtcagcttgagcacgaaagcagtcagcatgcaccgttcgccaacgagatggcggagtta

SEQ ID NO: 854278 - DNA, 75 bp, synthetic construct
  source 1..75: mol_type = other DNA
aggaaggggaaaatgatttaccctcgaccgccagtcgcgagatcttgtttatgcaattactgctcttgctgcgta

SEQ ID NO: 854279 - DNA, 75 bp, synthetic construct
  source 1..75: mol_type = other DNA
tacgcttccgttaacgatctggtgttgcagaacattatttattgcccggagcggctgacgcttaatctcgactgg

SEQ ID NO: 854280 - DNA, 75 bp, synthetic construct
  source 1..75: mol_type = other DNA
aactgatggataacgcccgcgaactggcgcagcagctggttaacagcgctccgctggcgattgcggcgcttaccg

SEQ ID NO: 854281 - DNA, 75 bp, synthetic construct
  source 1..75: mol_type = other DNA
agaattcggtacattgagacattttattaacgataacggtgtgcgcaatacatttaattttgaacaagctggcca

SEQ ID NO: 854282 - DNA, 75 bp, synthetic construct
  source 1..75: mol_type = other DNA
taaagacgtcgcgattaaagggcagggctttttccaggtgatgttgccagatggctcatcagcctatacccgtga

SEQ ID NO: 854283 - DNA, 75 bp, synthetic construct
  source 1..75: mol_type = other DNA
caaaaggcccagaggatggaaatgccatctctgttgcagaatcaacacatggacgaggctcaggccgaagctaag

SEQ ID NO: 854284 - DNA, 75 bp, synthetic construct
  source 1..75: mol_type = other DNA
aatggggcaaacctccaacgcttgacggcatgacaggtcacgctggcgagctcccgaattgtcgctgttataaag

SEQ ID NO: 854285 - DNA, 75 bp, synthetic construct
  source 1..75: mol_type = other DNA
tgatggcgatgtccgagattcccacgatcacatgaaaggtaaattcgtccgctgggattcacctccaactttgga

SEQ ID NO: 854286 - DNA, 75 bp, synthetic construct
  source 1..75: mol_type = other DNA
atgcaatctgattttttacagttagcgttcgcttttgcaggatatgtttgtattggcttctgtgtatacataatc

SEQ ID NO: 854287 - DNA, 75 bp, synthetic construct
  source 1..75: mol_type = other DNA
agcggcagcagaaggcgaagcgccggatgctgatttcgggccaggcggatttgctgggttaaccgaaattttcaa

SEQ ID NO: 854288 - DNA, 75 bp, synthetic construct
  source 1..75: mol_type = other DNA
ctgcattcggaagatgccattgaagggccgctggcgtttgccgagaagcgcgatccggtgtggaaaggacgttaa

SEQ ID NO: 854289 - DNA, 75 bp, synthetic construct
  source 1..75: mol_type = other DNA
tccggatggcactgtgttcgctcacgcgggtgacgtgatcaacccattgtgcgatccgaaggaagtttgcaagcc

SEQ ID NO: 854290 - DNA, 75 bp, synthetic construct
  source 1..75: mol_type = other DNA
ccctacgttgttcaaaacgtacaacatcacagccgttcccacgattgtgatgctggaggatgagccgctgcctgg

SEQ ID NO: 854291 - DNA, 75 bp, synthetic construct
  source 1..75: mol_type = other DNA
ccagggataaaatgcactggggaccatatggtcaccttgtgcgggaggtccatcttcatgcacgtaaactctggc

SEQ ID NO: 854292 - DNA, 75 bp, synthetic construct
  source 1..75: mol_type = other DNA
gctgtttgccgccgcgctgatgaatgtccagataaattctgtgacgggcgtgttcagcatggcaggatttttgat

SEQ ID NO: 854293 - DNA, 75 bp, synthetic construct
  source 1..75: mol_type = other DNA
aggtaataccaatatgcgcagaacacctggcgttcgtgaagaaaaactgaaaaatattaatggagatgataaaga

SEQ ID NO: 854294 - DNA, 75 bp, synthetic construct
  source 1..75: mol_type = other DNA
ggtctgacggagagggctttccccgatgacttaccttatgaaattgaacgtgaacctttaagtaacagttttact

SEQ ID NO: 854295 - DNA, 75 bp, synthetic construct
  source 1..75: mol_type = other DNA
gccctggcaaccccatgcatgaggggttgatgaagcatatggacatgatccgtgaatttcagaccatcgagggca

SEQ ID NO: 854296 - DNA, 75 bp, synthetic construct
  source 1..75: mol_type = other DNA
cgtcgagcgtatcttcgagcgcattcaggctttcgatacggcgaccgtcggtaccacgcagctgatccacaaagc

SEQ ID NO: 854297 - DNA, 75 bp, synthetic construct
  source 1..75: mol_type = other DNA
ctaagcggtacatcaagaagcgaggcagtagaaaaattagtagagttaaaaattgatgaaattatcaatgaaatg

SEQ ID NO: 854298 - DNA, 75 bp, synthetic construct
  source 1..75: mol_type = other DNA
acgaagcccggcgactgcgcgcagaacgctggcaggctgaaaatcaggaagggatggcagaggtcgccaggttta

SEQ ID NO: 854299 - DNA, 75 bp, synthetic construct
  source 1..75: mol_type = other DNA
atgaagcagcgtattacagtgacagttgacagcgacagctatcagctgctcaaggcgtatgacgtgaatatctcc

SEQ ID NO: 854300 - DNA, 75 bp, synthetic construct
  source 1..75: mol_type = other DNA
ggtctggtaagcacaaccatgcagaatgaagcccgtcgtctgcgtgccgaacgctggaaagcggaaaatcaggaa

SEQ ID NO: 854301 - DNA, 75 bp, synthetic construct
  source 1..75: mol_type = other DNA
atggggtttagcgccgtagttgaaaatcttaactacacaccatctgcgcttgtggcgacgttcggaaagaggatc

SEQ ID NO: 854302 - DNA, 75 bp, synthetic construct
  source 1..75: mol_type = other DNA
gggctgaggagtctgcgggacgcggggaaagcattgaaccgtatttttcacgcacgtttgagaacgtggccaccc

SEQ ID NO: 854303 - DNA, 75 bp, synthetic construct
  source 1..75: mol_type = other DNA
ttattctcttaaaaagaatccgagctaagaaggtttttccaacaggtaatgtcccgcttaaagtttcatttttaa

SEQ ID NO: 854304 - DNA, 75 bp, synthetic construct
  source 1..75: mol_type = other DNA
ccacggcggattcgtacgataactttgttgcccgtgtcggtatgcagcagcctaaccagcatgccgcatcgacct

SEQ ID NO: 854305 - DNA, 75 bp, synthetic construct
  source 1..75: mol_type = other DNA
atttattcaccttggcggagagattgagtataggtatgtatttagtgatggcaatatatttgatacatacgccat

SEQ ID NO: 854306 - DNA, 75 bp, synthetic construct
  source 1..75: mol_type = other DNA
cgggcaaacgcgccagcgtcgttgcgctggatagcgggctgcatgtgcaacaaatctggattcagggtcaattag

SEQ ID NO: 854307 - DNA, 75 bp, synthetic construct
  source 1..75: mol_type = other DNA
atgacaggtttacatcaccgcgaaccgggaatggttggcgcgggattaacggacaagcgcgcctggctggaactg

SEQ ID NO: 854308 - DNA, 75 bp, synthetic construct
  source 1..75: mol_type = other DNA
tccaccgcaaggtttgacactgcactggtttagcgtggcggcacagcgcagtgatattcttgatgccgtgacact

SEQ ID NO: 854309 - DNA, 75 bp, synthetic construct
  source 1..75: mol_type = other DNA
tcaccatcgtggtcggtcatgcgactttttgtgtagttgtggtgtttaacaatgtcatcgcccgttttcgccgca

SEQ ID NO: 854310 - DNA, 75 bp, synthetic construct
  source 1..75: mol_type = other DNA
atgcactctgaacgcgcaccgtttttcctcaaactggcggcctggggcggcgtggttttcctacattttcccatt

SEQ ID NO: 854311 - DNA, 75 bp, synthetic construct
  source 1..75: mol_type = other DNA
ccatcagtacagcttcagtggtctggatgacatcctttcacagtttgcagaacagattagtggcgctgttggtat

SEQ ID NO: 854312 - DNA, 75 bp, synthetic construct
  source 1..75: mol_type = other DNA
aatatcaaaaatgtgaaaaagactttgggtaacaaattctacggcagctgctggaacacctggttccaggaataa

SEQ ID NO: 854313 - DNA, 75 bp, synthetic construct
  source 1..75: mol_type = other DNA
cagctcaccaggcgcattaaggcgcttggccccaatctcggcaagccagaattctatgacatcgtgacgacggcg

SEQ ID NO: 854314 - DNA, 75 bp, synthetic construct
  source 1..75: mol_type = other DNA
agacgaagcgccgccaggcatcggcgaacttggcgacaaaccgccagagtcgccaggcggagatccgatatcgaa

SEQ ID NO: 854315 - DNA, 75 bp, synthetic construct
  source 1..75: mol_type = other DNA
gtggtgaccactgccacgggcattccagcctggcgcatccatcacagtcgactgattcgctttgatggcgtcacg

SEQ ID NO: 854316 - DNA, 75 bp, synthetic construct
  source 1..75: mol_type = other DNA
tttgcggacctacaaggtggaaaaacttcgtgagcttattgcgctgggcggccaggcattcgaggcgctgctgaa

SEQ ID NO: 854317 - DNA, 75 bp, synthetic construct
  source 1..75: mol_type = other DNA
tgattgggaatatccgcccatatttgaaaaaaatttggcaagcagattgtatcggtggaacaaatggcgatgtat

SEQ ID NO: 854318 - DNA, 75 bp, synthetic construct
  source 1..75: mol_type = other DNA
ctaaccgcgctggtcggcgtactggcggcatcgtttaacgaatttatctctatgctgccgaagtttaataaggag

SEQ ID NO: 854319 - DNA, 75 bp, synthetic construct
  source 1..75: mol_type = other DNA
aaagatctccgtgttgcggttaaaattgaacatttgacatacagttttcccttcaatataaagcgccctgatgtt

SEQ ID NO: 854320 - DNA, 75 bp, synthetic construct
  source 1..75: mol_type = other DNA
aatcgtcacttgtcaagtctggtggtcaattacattggaatattgattcgccatcagaacaacagccacaaaaga

SEQ ID NO: 854321 - DNA, 75 bp, synthetic construct
  source 1..75: mol_type = other DNA
tgatcgtctggttagggctggcgctgctggacgtacagtttgcactgatgtgggcagttctggcgtttttgctca

SEQ ID NO: 854322 - DNA, 75 bp, synthetic construct
  source 1..75: mol_type = other DNA
tgggcggtgctggcatttttactcaactatgttcccaatatcggcgcggtactctccgccgtaccgccaatgatc

SEQ ID NO: 854323 - DNA, 75 bp, synthetic construct
  source 1..75: mol_type = other DNA
gaaaccaccaaaggcggcagcaaactggcgattttactggggccaggcagaccgaaaagtcggttaccgggttaa

SEQ ID NO: 854324 - DNA, 75 bp, synthetic construct
  source 1..75: mol_type = other DNA
tcgctcttaatcttgatggcagtgcccaggaaagaaccttttcagagacaatagctcaaaagctaatagctatga

SEQ ID NO: 854325 - DNA, 75 bp, synthetic construct
  source 1..75: mol_type = other DNA
tcagtatgacaatgcaggactatgccagcttaaatgaaataaaaaaactggcgaaaagtataagagagcaacacg

SEQ ID NO: 854326 - DNA, 75 bp, synthetic construct
  source 1..75: mol_type = other DNA
tatggcagatatttcagagacgattgtggtagggaaaaatattgatcacatcaatctggatgagttcagaaatac

SEQ ID NO: 854327 - DNA, 75 bp, synthetic construct
  source 1..75: mol_type = other DNA
catcgttagccgcaagtgaaatcgaagatttaatcaggcttaaatgcttagacttaccggatattgattttgacc

SEQ ID NO: 854328 - DNA, 75 bp, synthetic construct
  source 1..75: mol_type = other DNA
tattaattgtcacatctacaattaataaagccgtttttgattcgctttgtcttaaggagactaaattaacattag

SEQ ID NO: 854329 - DNA, 75 bp, synthetic construct
  source 1..75: mol_type = other DNA
actgaaaaagcagtagagctaacccagtattttgacaatgtctatcatttatcgttggctccttcaatagcacgt

SEQ ID NO: 854330 - DNA, 75 bp, synthetic construct
  source 1..75: mol_type = other DNA
gaaaccaccaaaggcggcagcaaactggcgattctactggggccaggcagaccgaaaagtcggttaccgggatga

SEQ ID NO: 854331 - DNA, 75 bp, synthetic construct
  source 1..75: mol_type = other DNA
atcggcaatgagaaagagcatttgcctgttgataacgcctatcgttttgtcctgtggcgcgatgtcaacaaagat

SEQ ID NO: 854332 - DNA, 75 bp, synthetic construct
  source 1..75: mol_type = other DNA
aagattcaaaagatttcgacttctatttagaacgacctgcgcgtggttgggatgttcgtgcggaagcctggctac

SEQ ID NO: 854333 - DNA, 75 bp, synthetic construct
  source 1..75: mol_type = other DNA
tgaaatggcaatcgactagcgatgttggcatcagtagcgcaactcttgcctcaatcgcatgtggactgaaaaaga

SEQ ID NO: 854334 - DNA, 75 bp, synthetic construct
  source 1..75: mol_type = other DNA
gtactgtttatttcagccagttttcagcgcaacgcaaagaagaacgtacaataggtaatgcaggaattggcgtaa

SEQ ID NO: 854335 - DNA, 75 bp, synthetic construct
  source 1..75: mol_type = other DNA
atatcgtgagaaagatcccctcgatgtcactctgtggctgaaagccgatgccaccaatgaacatcctgagtgcgt

SEQ ID NO: 854336 - DNA, 75 bp, synthetic construct
  source 1..75: mol_type = other DNA
atgttaatgcgtttatctaccgtgtatctgcgactaaccccgtcaatcttatcgacaatgagaaagagcatttac

SEQ ID NO: 854337 - DNA, 75 bp, synthetic construct
  source 1..75: mol_type = other DNA
caactggcaattcatgccggatatcaactgagctggcagggtatcgaaaaagaggcctggaatcaggcaaatcag

SEQ ID NO: 854338 - DNA, 75 bp, synthetic construct
  source 1..75: mol_type = other DNA
atccgccagcagcagcggctggaacaggccgcttacgaaatgacggcgctgcgtgctgcgaccattgagcttggt

SEQ ID NO: 854339 - DNA, 75 bp, synthetic construct
  source 1..75: mol_type = other DNA
atgagcgataaattcggcgaagggcgcgatccgtatctttatcctggccttgatatcatgcgtaaccggctgaac

SEQ ID NO: 854340 - DNA, 75 bp, synthetic construct
  source 1..75: mol_type = other DNA
aagtctgaaatgaagacgtacgggaacaaagcaccagagacttacagaagaatcagcgagctacgcaaggactaa

SEQ ID NO: 854341 - DNA, 75 bp, synthetic construct
  source 1..75: mol_type = other DNA
aagtctgaaatgaagatacacggaaacaaagcgccagagacttacagaagaattagcgagttacgcaaggactaa

SEQ ID NO: 854342 - DNA, 75 bp, synthetic construct
  source 1..75: mol_type = other DNA
tgcatccattccgtgcgggaagtggcctggcacagcggatcttcttcgagcaactggctattcatgcgggctatc

SEQ ID NO: 854343 - DNA, 75 bp, synthetic construct
  source 1..75: mol_type = other DNA
aaggaacatatggcacagatgaataccggaatgctgagcagacgctgacagacagtcttaaccggcaactgaacg

SEQ ID NO: 854344 - DNA, 75 bp, synthetic construct
  source 1..75: mol_type = other DNA
agcagcgccttgatgaacttcaggagaaaaagcgccagaaagatttacaggatgcaaaagagcaggcagagcgga

SEQ ID NO: 854345 - DNA, 75 bp, synthetic construct
  source 1..75: mol_type = other DNA
gcgctgggcagtacgctgcaaaccttatctgactggtggaagcagttctgggatgccgccatgaatatcgggcgt

SEQ ID NO: 854346 - DNA, 75 bp, synthetic construct
  source 1..75: mol_type = other DNA
atgacaacatctgtagcggccacagaactggcaaagctggggaaatgtgaagcgatgatcaagaaagtcgccaac

SEQ ID NO: 854347 - DNA, 75 bp, synthetic construct
  source 1..75: mol_type = other DNA
cacagcctggacagtggaacagttgttcacgtctgcgttcagtagcatgagtgactggctggcgacattctgtac

SEQ ID NO: 854348 - DNA, 75 bp, synthetic construct
  source 1..75: mol_type = other DNA
ccgctgccagtgtgacgcccaatgcagatggcggtgtttatcagtctgcggatttgagccgttacagtggctcag

SEQ ID NO: 854349 - DNA, 75 bp, synthetic construct
  source 1..75: mol_type = other DNA
tgagcgcaaaaaaattcatcagtggtattaccgcgccgatgatcttgagcataaaaccgcgttgctggtgcatct

SEQ ID NO: 854350 - DNA, 75 bp, synthetic construct
  source 1..75: mol_type = other DNA
aaaacgccatcgcgataccaaaaatattggtaaacgccgcaaaccaagcggaacaggcgtaccgccgcaaacggc

SEQ ID NO: 854351 - DNA, 75 bp, synthetic construct
  source 1..75: mol_type = other DNA
aaaacgccatcgcgataccaaaaatattggtaagcgccgcaaaccaagcggaacgggcgtgccgccgcaaacgac

SEQ ID NO: 854352 - DNA, 75 bp, synthetic construct
  source 1..75: mol_type = other DNA
aaggaacatacggcacagatgaataccggaatgctgagcagatgctgacagacagtcttaaccggcaactgaacg

SEQ ID NO: 854353 - DNA, 75 bp, synthetic construct
  source 1..75: mol_type = other DNA
aacttttgcgtccgcaggcgctggatttggtttcccgtgatggcaagcatgtcgtcccaacgctgtggaagccgg

SEQ ID NO: 854354 - DNA, 75 bp, synthetic construct
  source 1..75: mol_type = other DNA
ttatcagtcggctgatttgagtcgctacagtggcacggtggttaaccgtccgacgttttttgcttttgcaaaagg

SEQ ID NO: 854355 - DNA, 75 bp, synthetic construct
  source 1..75: mol_type = other DNA
tcagaaaaggttgtacgcagacttatggtggaggaacagcttgtcgtcagccgtaaccgtcgtcgtcgctacagc

SEQ ID NO: 854356 - DNA, 75 bp, synthetic construct
  source 1..75: mol_type = other DNA
tacagtcagcaacaggcacaggtggaaggacagattgctgctgcagacagtcagcaggcattgccactgaaagga

SEQ ID NO: 854357 - DNA, 75 bp, synthetic construct
  source 1..75: mol_type = other DNA
gctgcagaagtgtatatccgcaaaatggagcaggcaggaaagaccacgcattcgctggggctgaaaagtgcagcg

SEQ ID NO: 854358 - DNA, 75 bp, synthetic construct
  source 1..75: mol_type = other DNA
ggcagataggtccggctgccctgaaggtggtttatgacctcgggaaaaaagcggcagcggactttatgcaacatg

SEQ ID NO: 854359 - DNA, 75 bp, synthetic construct
  source 1..75: mol_type = other DNA
aattctgtctggcagtacgcaagaagagattaccgagaaatatacggcaatcgcagaccttggtaaaagtgccgc

SEQ ID NO: 854360 - DNA, 75 bp, synthetic construct
  source 1..75: mol_type = other DNA
ggagcggcgacaggtcgatacgccagtcagtcatattgatttactgccgacaatgatggcgctggcagatattga

SEQ ID NO: 854361 - DNA, 75 bp, synthetic construct
  source 1..75: mol_type = other DNA
atggctatcgtcacctgcatgcgatgctcagacatgagggggtacggctatcagaaaaggttgtacgcagactta

SEQ ID NO: 854362 - DNA, 75 bp, synthetic construct
  source 1..75: mol_type = other DNA
tggctctgcagcagcgcatcagcgacctggacgggaaaaaactgacggcagatgaaaagagtgtgctggcccgta

SEQ ID NO: 854363 - DNA, 75 bp, synthetic construct
  source 1..75: mol_type = other DNA
gctgcagtacagtcagcaacaggcacaggtggaaggacagattgctgctgcaagacagtcagcaggcattgccac

SEQ ID NO: 854364 - DNA, 75 bp, synthetic construct
  source 1..75: mol_type = other DNA
agtgtgacgcccaatgctgatggtggtgtttatcagtctgctgatttgagtcgctacagtggcacggtggttaac

SEQ ID NO: 854365 - DNA, 75 bp, synthetic construct
  source 1..75: mol_type = other DNA
atgcagcaagtggatgcttacatcagatggtataacgagcggcgtataaaattatcgctgggtgcagtcagcccc

SEQ ID NO: 854366 - DNA, 75 bp, synthetic construct
  source 1..75: mol_type = other DNA
gtccggctgccctgaaggtggtttatgatctcgggaaaaaagcggcagcggactttatgcaacagcaggcccgtg

SEQ ID NO: 854367 - DNA, 75 bp, synthetic construct
  source 1..75: mol_type = other DNA
tgatcagcagcgacagcgatatcaggtacaactgagtcttcgccagaaataccagcaacagctggagcagttgag

SEQ ID NO: 854368 - DNA, 75 bp, synthetic construct
  source 1..75: mol_type = other DNA
ccatcaccggtggcgtggcttatatgaaccacgcagaagtgttcagcgaaaaccaggacatcgtggtcgccacaa

SEQ ID NO: 854369 - DNA, 75 bp, synthetic construct
  source 1..75: mol_type = other DNA
tcacgctggcgttatgtggtattgccggaagtgcaatatataaattgccttatttacgggaaacctattacgacg

SEQ ID NO: 854370 - DNA, 75 bp, synthetic construct
  source 1..75: mol_type = other DNA
ctggggcgcagcagccgctggtacaaaagtgaagtagagcagtggatgcagcagcgaatagaggagtcacgagga

SEQ ID NO: 854371 - DNA, 75 bp, synthetic construct
  source 1..75: mol_type = other DNA
gtcgtagaggaaggcaaacagacgctgacactcgacggcaaaacctggttacttgagcgtccactgcgcgccgac

SEQ ID NO: 854372 - DNA, 75 bp, synthetic construct
  source 1..75: mol_type = other DNA
taccacaggagaacgcaacgctaacagcgcgctttatggtgctgtctggcgggcagcaaaggctatgggttatca

SEQ ID NO: 854373 - DNA, 75 bp, synthetic construct
  source 1..75: mol_type = other DNA
acgttgtattacatacacccgggcagatgaatcaggagcatctcttcgcgcagctggttttgttcgtgtgaaaga

SEQ ID NO: 854374 - DNA, 75 bp, synthetic construct
  source 1..75: mol_type = other DNA
gtgttgcgaaggcgtttatatccagacatcaccgacacaataaaccacctgttgggcataaattcagcattggtc

SEQ ID NO: 854375 - DNA, 75 bp, synthetic construct
  source 1..75: mol_type = other DNA
gcgtgttgctgcgtgccgacgatcccctgatcgacatgaactacatcaccagtttcaccggcatgaccgataaat

SEQ ID NO: 854376 - DNA, 75 bp, synthetic construct
  source 1..75: mol_type = other DNA
ctggggcgcagcagccgctggtacaaaagtgaagtagagcagtggatgcagcaacgaatcgaggaatcccggggg

SEQ ID NO: 854377 - DNA, 75 bp, synthetic construct
  source 1..75: mol_type = other DNA
gcgtattgctgcgtgccgacgatccactgatcgacatgagctacatcaccagtttcaccggcatgaccgacaaag

SEQ ID NO: 854378 - DNA, 75 bp, synthetic construct
  source 1..75: mol_type = other DNA
gatggacgtcgttctggtgccacaaggtacgctaatcgagcaaattcgctgtggtggcgctggacttggtggttt

SEQ ID NO: 854379 - DNA, 75 bp, synthetic construct
  source 1..75: mol_type = other DNA
actgcgtgttgctgcgtgccgacgatcccctgatcgacatgaactacatcaccagcttcaccggtatgactgaca

SEQ ID NO: 854380 - DNA, 75 bp, synthetic construct
  source 1..75: mol_type = other DNA
ctggggcgcagcagccgctggtacaaaagtgaagtagagcagtggatgcagcaacgaatcgagagatcaaggggg

SEQ ID NO: 854381 - DNA, 75 bp, synthetic construct
  source 1..75: mol_type = other DNA
atcttgcgtatgttctacaccatggtgcgcaacagtgcgatcaccggcatttactccaccacgctgcgccagtta

SEQ ID NO: 854382 - DNA, 75 bp, synthetic construct
  source 1..75: mol_type = other DNA
gcgaaagctatttttgagcattctgcgtcaccccggcgcaatgcgccgcgggttactgccgatgcatcgccatag

SEQ ID NO: 854383 - DNA, 75 bp, synthetic construct
  source 1..75: mol_type = other DNA
cccgtcgccatctgcaacaaccgctgtgtaatattccggaagcacgaaaactgtttttgagcattctgcgtcacc

SEQ ID NO: 854384 - DNA, 75 bp, synthetic construct
  source 1..75: mol_type = other DNA
tcgagcggatgatgaaggattacttccgcgtcacgcgccgcgtcagcgaactcaaccagatgctgctacaactgt

SEQ ID NO: 854385 - DNA, 75 bp, synthetic construct
  source 1..75: mol_type = other DNA
cgatttcccgcgtaagaaatccggtccgccgcgtattttgatcctcaccccaactcgcgagctggcgatgcaggt

SEQ ID NO: 854386 - DNA, 75 bp, synthetic construct
  source 1..75: mol_type = other DNA
gtgaagagacgcgccctcgccacccgttgtgtgtggatgtctggccacgcctgccatcgccggagctgattttca

SEQ ID NO: 854387 - DNA, 75 bp, synthetic construct
  source 1..75: mol_type = other DNA
cgaactccacgggctgaactcacgcgaaacacagctggtcgcctggctggttcgccagcacttgctgatgtcggt

SEQ ID NO: 854388 - DNA, 75 bp, synthetic construct
  source 1..75: mol_type = other DNA
tgaggttattcggtttggtctggagcaggtgctgacacaaagtagctggcagccaccgcagccgcgtcgccaacc

SEQ ID NO: 854389 - DNA, 75 bp, synthetic construct
  source 1..75: mol_type = other DNA
gtgggataaaagcccatatcgatactttccagcgttggctgggtgatgcctttgacaatgggatctccgcagaac

SEQ ID NO: 854390 - DNA, 75 bp, synthetic construct
  source 1..75: mol_type = other DNA
acctttatcgtgctggaacccgatggcagcccgctgtccgcagatcgtcatgaggttattcggtttggtctggag

SEQ ID NO: 854391 - DNA, 75 bp, synthetic construct
  source 1..75: mol_type = other DNA
atgaatacccttccagaacagtacgcaaataccgctctccccaccctgcccggtcaaccgcaaaatccatgcgtc

SEQ ID NO: 854392 - DNA, 75 bp, synthetic construct
  source 1..75: mol_type = other DNA
cgccatgcccgtcgccatctgcaacaaccgctgtgtaatattccggaagcgcgaaaactgtttttgagcattctg

SEQ ID NO: 854393 - DNA, 75 bp, synthetic construct
  source 1..75: mol_type = other DNA
agccaccgcagccccgtcgccaacctgccaaattgcgccattttactgttgaaaccgaagtgacgtttttgccga

SEQ ID NO: 854394 - DNA, 75 bp, synthetic construct
  source 1..75: mol_type = other DNA
aaaaaagtgatatatctttagaaccaaaattcattgatggtcgtcttgatttaaatgaagttggtaacattagaa

SEQ ID NO: 854395 - DNA, 75 bp, synthetic construct
  source 1..75: mol_type = other DNA
tgcggccatgaatattggtcgtgaagactcgctggatgaacagattgccgctttacaggagaaagtgtcgcgggc

SEQ ID NO: 854396 - DNA, 75 bp, synthetic construct
  source 1..75: mol_type = other DNA
tttatcagtctgctgatttgagtcgctacagtggcacggtggttaaccgtccgacgttttttgcttttgcaaaag

SEQ ID NO: 854397 - DNA, 75 bp, synthetic construct
  source 1..75: mol_type = other DNA
gaacgccagccgtgttggttatcggaagcgttctccgtcatccttctgtcgctgaagacacagcacagtcacatt

SEQ ID NO: 854398 - DNA, 75 bp, synthetic construct
  source 1..75: mol_type = other DNA
cgtcacgggccggtaatgcggatctggaaatggcaatgtatctcgcccagacccgctactataaaaccgccgcga

SEQ ID NO: 854399 - DNA, 75 bp, synthetic construct
  source 1..75: mol_type = other DNA
caggtggcgattgtgattctggcgaataaaaactacccgaataccgaaagagtcaaagctgcacaggctattttg

SEQ ID NO: 854400 - DNA, 75 bp, synthetic construct
  source 1..75: mol_type = other DNA
aaaacgtggcccggatacgttctcggatcgaagctccctgccagctacgaagtaaatgccgtatcgtttgatcac

SEQ ID NO: 854401 - DNA, 75 bp, synthetic construct
  source 1..75: mol_type = other DNA
tactgtttctgaaggcccctcccgaatgggggaaacagcgagtgcattacatctgttcaattccctcatcaaaga

SEQ ID NO: 854402 - DNA, 75 bp, synthetic construct
  source 1..75: mol_type = other DNA
tgcatcctttcaggccggtcctgaatttctccgcgctgcagcgcgatgtcatccggatggtcgcgtttatggcaa

SEQ ID NO: 854403 - DNA, 75 bp, synthetic construct
  source 1..75: mol_type = other DNA
gtcacgtttaacgggcagcaactgacgctggaaagtctgtcccagatccgcgccggtcgtcaggagtgggagcga

SEQ ID NO: 854404 - DNA, 75 bp, synthetic construct
  source 1..75: mol_type = other DNA
atgcatacagtttctgaaaatcagtgcggtaaatacgcattactgctgcaacaggccagaaccgaagcacaggct

SEQ ID NO: 854405 - DNA, 75 bp, synthetic construct
  source 1..75: mol_type = other DNA
gtgcggtactggcgctctcttcgtcttttactgtcaacgcagctgaaaacgacaaaccgcagtatctttccgact

SEQ ID NO: 854406 - DNA, 75 bp, synthetic construct
  source 1..75: mol_type = other DNA
tggctttaatgccagtattaagcctgtcggtattttctgctggcgtatatgcagcagatgtatctgtaaactcat

SEQ ID NO: 854407 - DNA, 75 bp, synthetic construct
  source 1..75: mol_type = other DNA
ctatcggagcgctctgcctgttcttgacggttgtaccgaaaagcagtaaaggcacagaggccgaggtgtccggtt

SEQ ID NO: 854408 - DNA, 75 bp, synthetic construct
  source 1..75: mol_type = other DNA
ggtctgtggtggtggtcgaaatcggctacaaacccggcgcgtggtacggccgttcggcatcgccttattggtttt

SEQ ID NO: 854409 - DNA, 75 bp, synthetic construct
  source 1..75: mol_type = other DNA
gtggcgctgtgggtgatgcggcgcaaaagcgcggttcccggggagacgataaaaataacccataatcgttgtata

SEQ ID NO: 854410 - DNA, 75 bp, synthetic construct
  source 1..75: mol_type = other DNA
atcgatgctggaactttccggggtgaaagatggtgagttaattccagcgaaactgtttaaccatctggtgacctg

SEQ ID NO: 854411 - DNA, 75 bp, synthetic construct
  source 1..75: mol_type = other DNA
taaagcacgacatcggtctgccgggtgattcacctttgctttcacgccacttcccggccgcagaacaaaaccttg

SEQ ID NO: 854412 - DNA, 75 bp, synthetic construct
  source 1..75: mol_type = other DNA
ggattatatccgtcataactttggtcagacgccgctgaatcagctctcaccggagcaattaaaaaccattctcac

SEQ ID NO: 854413 - DNA, 75 bp, synthetic construct
  source 1..75: mol_type = other DNA
tgagttttgagcaggcgatgcaaacacgtgtcttccagccactcaaactcaaccatacgtggattaatgtacctc

SEQ ID NO: 854414 - DNA, 75 bp, synthetic construct
  source 1..75: mol_type = other DNA
cgtactttttgctgaagatgtaacggatatccacgctcgtctgtctgcactgggttctggagaaactcaggttgg

SEQ ID NO: 854415 - DNA, 75 bp, synthetic construct
  source 1..75: mol_type = other DNA
tcgcttattttgtcaatacaaaaacaaatcaaattctgtttagtgcagatgataaggggcttgtcacgacagtag

SEQ ID NO: 854416 - DNA, 75 bp, synthetic construct
  source 1..75: mol_type = other DNA
ggtcgtattgctgctcgcggcgctggtggcgctgtgggtgatgcggcgcaaaagcgcggttcccggggagacgat

SEQ ID NO: 854417 - DNA, 75 bp, synthetic construct
  source 1..75: mol_type = other DNA
gaaggccggtcagccggttgagcgcctgaatgcagaggccagcgcgctgacgcaggatctgcaaaaagccgtgac

SEQ ID NO: 854418 - DNA, 75 bp, synthetic construct
  source 1..75: mol_type = other DNA
gatattcttctggaagaggttctgaggcaggctggtattccgttgctcagttgtccaaccccggaaacgggaaaa

SEQ ID NO: 854419 - DNA, 75 bp, synthetic construct
  source 1..75: mol_type = other DNA
tacaaccagtcaggacggtccttaatttctccgcgctgcagcgcgatgtgatccggatggtggcgtttgtggcga

SEQ ID NO: 854420 - DNA, 75 bp, synthetic construct
  source 1..75: mol_type = other DNA
aatctttagagatatgctggaagtgctaccgccgatgaactggtgtcttatcggaccgaattcaacattcatgtt

SEQ ID NO: 854421 - DNA, 75 bp, synthetic construct
  source 1..75: mol_type = other DNA
gcccgcattttcgccgcgagggttattggcaaaatatctcttttcttcagataataatgcgttgcaatttgagtt

SEQ ID NO: 854422 - DNA, 75 bp, synthetic construct
  source 1..75: mol_type = other DNA
cgggacacgaccgggatatcccttaaaagatgggtccccgccaggctttacgcacgatataccgccgctgatacc

SEQ ID NO: 854423 - DNA, 75 bp, synthetic construct
  source 1..75: mol_type = other DNA
cgtgctcagcgtcaacaacataatctggatatcgccacggtgggtatgggtgatcagcagcggcagcgatatcag

SEQ ID NO: 854424 - DNA, 75 bp, synthetic construct
  source 1..75: mol_type = other DNA
taaaaagctgacagcagatgaaaaaagcgtgctggcgcataaggatgagctgattcaggcactgacgctgctgga

SEQ ID NO: 854425 - DNA, 75 bp, synthetic construct
  source 1..75: mol_type = other DNA
tattaatgccatgcagtacgccgatcaggctgtcagggatgcggcgatacaacgtgaaaatgaacgttacgagaa

SEQ ID NO: 854426 - DNA, 75 bp, synthetic construct
  source 1..75: mol_type = other DNA
ctttgtcggatgttcggcgctgatggcgatggtctgctacctctttgtggttggcgacattaaacgaatggaatt

SEQ ID NO: 854427 - DNA, 75 bp, synthetic construct
  source 1..75: mol_type = other DNA
gtcgattccggcattgtgtggttttgccggcggcgtactcggcggtgtcttttcggattatttgatcaaacgcgg

SEQ ID NO: 854428 - DNA, 75 bp, synthetic construct
  source 1..75: mol_type = other DNA
atcccgaactggctcgtggtatgtacctatatgaacaccgccggtgctacgacaatattattggatactgtaata

SEQ ID NO: 854429 - DNA, 75 bp, synthetic construct
  source 1..75: mol_type = other DNA
tagtatatggtacacagcattgcatagagccaactcatgtagctttgaactatggtcacaatttagggcactggg

SEQ ID NO: 854430 - DNA, 75 bp, synthetic construct
  source 1..75: mol_type = other DNA
tactgctgttgcctatactgcggccggtattgtcgcgtctaatttcaaagtcccttacgattccagtgcagtgct

SEQ ID NO: 854431 - DNA, 75 bp, synthetic construct
  source 1..75: mol_type = other DNA
tatcaagaattaaacaacttgaagcatctaataacgaattacaaagccgagtacaacaagagagaattgatgaaa

SEQ ID NO: 854432 - DNA, 75 bp, synthetic construct
  source 1..75: mol_type = other DNA
cagaaggagggggaagcctttaaccgtcagctgtcgctgacaggacattatgccggggtcactgccgggcagctg

SEQ ID NO: 854433 - DNA, 75 bp, synthetic construct
  source 1..75: mol_type = other DNA
tggctatgctgatgatgacggtatcacggtaaatcatctatcaagatcaaatgattattatcgtgttgatgtatt

SEQ ID NO: 854434 - DNA, 75 bp, synthetic construct
  source 1..75: mol_type = other DNA
agttttttgattttatgcgagtggaaaagcaaattgaatggggtacgaaacttttttgttttaactcttggggtt

SEQ ID NO: 854435 - DNA, 75 bp, synthetic construct
  source 1..75: mol_type = other DNA
gcagacagattgaattatcagaaaatggctcaggtagtggatggtgttataaccttgttatacaacagtaaataa

SEQ ID NO: 854436 - DNA, 75 bp, synthetic construct
  source 1..75: mol_type = other DNA
gctttctggctgttgctggtcgccctgcttaatgcccgacatggtgatgtgatgacgctttccggtgtactgctg

SEQ ID NO: 854437 - DNA, 75 bp, synthetic construct
  source 1..75: mol_type = other DNA
cgcagcagcgaggctacacagttcactgtgccggtgcgaccgcctccgagctacccggtgataccacaccgtttg

SEQ ID NO: 854438 - DNA, 75 bp, synthetic construct
  source 1..75: mol_type = other DNA
attatgtttgttcgtttctgattatcttgtatgttaaacaaaatgaaaattatccatccattctgctacagcatg

SEQ ID NO: 854439 - DNA, 75 bp, synthetic construct
  source 1..75: mol_type = other DNA
gcgaaaagactcccctggacggcatcatcttctcaggttgaatacgatcagcagcgtcttaacgatcttcaggag

SEQ ID NO: 854440 - DNA, 75 bp, synthetic construct
  source 1..75: mol_type = other DNA
tgacggcagatgaaaaaagcgtgctggcgcacaaggatgagctggttcaggtgctgacgctgctggatgcaaaac

SEQ ID NO: 854441 - DNA, 75 bp, synthetic construct
  source 1..75: mol_type = other DNA
gcggtcagggatgcggcgatacagcgggaaaatgaacgttacgaaaaaaccatcagaaaaaaaacaccggccacc

SEQ ID NO: 854442 - DNA, 75 bp, synthetic construct
  source 1..75: mol_type = other DNA
tcccgccgtaatgattactgacaccgctttttatcgtaataaacaataccacttgcccggtgatacagcagacag

SEQ ID NO: 854443 - DNA, 75 bp, synthetic construct
  source 1..75: mol_type = other DNA
tcaaccacgctgaatatcaaaggagagagttaccggttaaaagagaaacgtaaagcaggagtgctgaccaaaaac

SEQ ID NO: 854444 - DNA, 75 bp, synthetic construct
  source 1..75: mol_type = other DNA
gtttcgttttcaatcgtgctctggcgcttcagaatgagaatcatgaggccggtaataaatacatccctcgtatac

SEQ ID NO: 854445 - DNA, 75 bp, synthetic construct
  source 1..75: mol_type = other DNA
gtttgacaattgcatttgtcgccggttttgttgttgccagaaaattgacactccgaaaagttgcctcatcggtaa

SEQ ID NO: 854446 - DNA, 75 bp, synthetic construct
  source 1..75: mol_type = other DNA
tgttgccgtaaatcacgatgcagacagccacatatcacctgcgccggaacttatggagtttcatctgaaaacccg

SEQ ID NO: 854447 - DNA, 75 bp, synthetic construct
  source 1..75: mol_type = other DNA
attcacctcggaaagtctgcctgtgcgatggaaacacgcggtatcgaaacagaacgcggcgaacagaatcgtctg

SEQ ID NO: 854448 - DNA, 75 bp, synthetic construct
  source 1..75: mol_type = other DNA
gcgacggtccggcatgtactggaacagatgcgccaggggtggccctcttacggttttccggcgctgccgcatcac

SEQ ID NO: 854449 - DNA, 75 bp, synthetic construct
  source 1..75: mol_type = other DNA
gccgtgaaacggcattagtcggggttattacggagctggggcgtgccagagagccgggaacgggcaggataaccc

SEQ ID NO: 854450 - DNA, 75 bp, synthetic construct
  source 1..75: mol_type = other DNA
tgcgacgctaaaagaaaacggcaaaaaggcattacggcagaaatggcgatttatcatctcagcatgaaaatcatt

SEQ ID NO: 854451 - DNA, 75 bp, synthetic construct
  source 1..75: mol_type = other DNA
gtaaagcgggtgagtctggtactctggcccgttcgttggatgccatcgctgaccaggcaaaacccgtgaccgttg

SEQ ID NO: 854452 - DNA, 75 bp, synthetic construct
  source 1..75: mol_type = other DNA
tgattatcaatggtggcaggaacggcatagacgaccggcgagcgcgatacatcactgccagtaaggtgctgacgg

SEQ ID NO: 854453 - DNA, 75 bp, synthetic construct
  source 1..75: mol_type = other DNA
ggctaacttcgttcgggctgggcgtctcactcagggacaggctaatgcacttggtcgccgtgctggtgaaccacc

SEQ ID NO: 854454 - DNA, 75 bp, synthetic construct
  source 1..75: mol_type = other DNA
aaggcgtcgacaaggagctatacaccgcagaaaacctatcgtgactctcgttggcaagaacgagatgagttgttc

SEQ ID NO: 854455 - DNA, 75 bp, synthetic construct
  source 1..75: mol_type = other DNA
tacaaaaaagccacaggatgagcgtacacttcaccagccaggggcaaataaaaaggtggtttcagaaaaagcgct

SEQ ID NO: 854456 - DNA, 75 bp, synthetic construct
  source 1..75: mol_type = other DNA
gtttcctcttaataaacccgtgctgatcactgatgtgctgactgccagcggtaaagcgggtgagtccggtactct

SEQ ID NO: 854457 - DNA, 75 bp, synthetic construct
  source 1..75: mol_type = other DNA
gtgcttccgtcgccggattacagtcatctgatagtcagcaccatcacggagaacggggtatgcctggcaggttac

SEQ ID NO: 854458 - DNA, 75 bp, synthetic construct
  source 1..75: mol_type = other DNA
aaaaagatccaggaaattgacgaactcagaagcagaggtgtcaggctcaggattgcctgcgaccatgcgggcctt

SEQ ID NO: 854459 - DNA, 75 bp, synthetic construct
  source 1..75: mol_type = other DNA
tgttattgcggtaaacaaggttgtattgaaacctttatttcgggaaccggattcgctacagattatcatcggctg

SEQ ID NO: 854460 - DNA, 75 bp, synthetic construct
  source 1..75: mol_type = other DNA
cgatccggtagcggagctggcattggaccgttatgagtggcgcctggcgaagtcactggcacatgtggtgaatat

SEQ ID NO: 854461 - DNA, 75 bp, synthetic construct
  source 1..75: mol_type = other DNA
gcaagaatatgcagagagcttagcaatacctgatgagctctatcagcaactacaaaaaaaccacaggatgagcgt

SEQ ID NO: 854462 - DNA, 75 bp, synthetic construct
  source 1..75: mol_type = other DNA
tacaaaaaagccacaggatgagcgtacacttcaccagccagggacaaataaaaatggtggtttcagaaaaaatgt

SEQ ID NO: 854463 - DNA, 75 bp, synthetic construct
  source 1..75: mol_type = other DNA
tcagaagcagaggggtcaggctcaggatcgcctgcgaccatgcgggccttggcgtttccacatattataagcttc

SEQ ID NO: 854464 - DNA, 75 bp, synthetic construct
  source 1..75: mol_type = other DNA
acggtcagccattcgataaagacttaagcgcgcggttgcagcgggaagtgcggctggcaaatgacgccaactgtc

SEQ ID NO: 854465 - DNA, 75 bp, synthetic construct
  source 1..75: mol_type = other DNA
cgccatcgtctgcccacgccgcgtgatgattaccggcagactattgaaacgatcgccacgttggttgatatggcg

SEQ ID NO: 854466 - DNA, 75 bp, synthetic construct
  source 1..75: mol_type = other DNA
tgatggtctcggatatacgtaatggaatatcagaatctcatgagacgctggcccggcctgagcgtgtgagaatgt

SEQ ID NO: 854467 - DNA, 75 bp, synthetic construct
  source 1..75: mol_type = other DNA
gcaccaaaactgaagtgattgcactgggcgatgcaggagagcaattgtaccgtcatcgtgtgctcacgccgcgtg

SEQ ID NO: 854468 - DNA, 75 bp, synthetic construct
  source 1..75: mol_type = other DNA
gagcaggcgacggggcagcgcggaacggtaggtatgggcattcctggctcaatttcgccttacaccggtgtggtg

SEQ ID NO: 854469 - DNA, 75 bp, synthetic construct
  source 1..75: mol_type = other DNA
tgttattgcggtaaacaaggttgtattgaaacctttatttcgggcacgggatttgccacagattatcgtcgtttg

SEQ ID NO: 854470 - DNA, 75 bp, synthetic construct
  source 1..75: mol_type = other DNA
gcatggggaacaatgctcccggcgatggctggaattatcgtgggcgcggacttatccagattaccggtctgaata

SEQ ID NO: 854471 - DNA, 75 bp, synthetic construct
  source 1..75: mol_type = other DNA
cggtactgacgcaggccggggcggatgccgacgcggatttgtccgcctttatcgaaccactggacaccctccgga

SEQ ID NO: 854472 - DNA, 75 bp, synthetic construct
  source 1..75: mol_type = other DNA
gattgactgcggcgatcttccgctggcgttgcgtattggtgcgtatgtggtccgtcataacctcattatgccgga

SEQ ID NO: 854473 - DNA, 75 bp, synthetic construct
  source 1..75: mol_type = other DNA
gcccgcgctttctcacgccgtggaacggctgacaatgagacaaaaggcgaagcgctaaaactgtttcgacgtgcg

SEQ ID NO: 854474 - DNA, 75 bp, synthetic construct
  source 1..75: mol_type = other DNA
atctgcgttggatctccgccctgatgtatcgcaatggcgtgattgaagaaaccggcgtcgccgctggtgtgctga

SEQ ID NO: 854475 - DNA, 75 bp, synthetic construct
  source 1..75: mol_type = other DNA
cgcccgctgccacaacatcgatcctgaaacccagcgcccgcgcaaagtattcgacaccatttccgataacgccgc

SEQ ID NO: 854476 - DNA, 75 bp, synthetic construct
  source 1..75: mol_type = other DNA
ttctggtgcaggtcaaggcggatgacagcactgatattaagccatatctggcggtgctcgatgaggtccaggaga

SEQ ID NO: 854477 - DNA, 75 bp, synthetic construct
  source 1..75: mol_type = other DNA
tcgctaaagtgaccgatgatatcggccgtcgtcagaccttcaacaccgcaattgcggcgattatggagctgatga

SEQ ID NO: 854478 - DNA, 75 bp, synthetic construct
  source 1..75: mol_type = other DNA
cgccaccacgaaaaccgcgacgaaaaaggcaggcaaaaagagcgccacaaaagccactgccacacggaaaagcaa

SEQ ID NO: 854479 - DNA, 75 bp, synthetic construct
  source 1..75: mol_type = other DNA
ttcagcgcacgatggcacaacgcgccggactgaccgatgacagtcagtcacagacagtgcgcacggctcacgaac

SEQ ID NO: 854480 - DNA, 75 bp, synthetic construct
  source 1..75: mol_type = other DNA
gcccgaacgaccagaccgtactggcgaacgaacaagttatcgacggctgttgctggcgctgcgataccaaagttg

SEQ ID NO: 854481 - DNA, 75 bp, synthetic construct
  source 1..75: mol_type = other DNA
acggaaaaaggcgtgctgttcaactctggcgagttcaacggtcttgaccatgaagcggcctttaacgccattgcc

SEQ ID NO: 854482 - DNA, 75 bp, synthetic construct
  source 1..75: mol_type = other DNA
ccgatcggctgggacgcgtttggtctgcctgcggaaggcgctgcggtaaaaaacaacaccgcaccggcaccgtgg

SEQ ID NO: 854483 - DNA, 75 bp, synthetic construct
  source 1..75: mol_type = other DNA
cagcgatatcccgaccgatcgctttatcgtgccgcgcattgaagtggagctggcttttgtgctggcaaaaccgct

SEQ ID NO: 854484 - DNA, 75 bp, synthetic construct
  source 1..75: mol_type = other DNA
ttcgtcggatattattgttgggctttataacgataccataaaattaaatctggcgcactggaggcaaccgcatta

SEQ ID NO: 854485 - DNA, 75 bp, synthetic construct
  source 1..75: mol_type = other DNA
ctttgaaaaactggccagcctggatggcggtcgcacccagtccatgtttgactctcacccaccatcaacagagcg

SEQ ID NO: 854486 - DNA, 75 bp, synthetic construct
  source 1..75: mol_type = other DNA
cagtccatgtttgactctcacccaccatcaacagagcgtgcgcaacacatccgtgatcgtatcgcctctggtaag

SEQ ID NO: 854487 - DNA, 75 bp, synthetic construct
  source 1..75: mol_type = other DNA
ggctaactttgttcggacaggacgtctcactcagggacaagccaacgcattggggcgtcgcgcaggtgaaccacc

SEQ ID NO: 854488 - DNA, 75 bp, synthetic construct
  source 1..75: mol_type = other DNA
ctccagcaaaggctgcatgaagtataccggcgatattgcacgtgtaactctgattatcaatggtggcaggaacgg

SEQ ID NO: 854489 - DNA, 75 bp, synthetic construct
  source 1..75: mol_type = other DNA
cgccacaaaaggctgcatgaagtacaccggcgacatggtgcgcgtcacgcagatcatcaatggcgggcagaacgg

SEQ ID NO: 854490 - DNA, 75 bp, synthetic construct
  source 1..75: mol_type = other DNA
gggggcttcacccggttgcaggaaaatttcaactacagcgtcaccggactggctaacttcgttcgggctgggcgt

SEQ ID NO: 854491 - DNA, 75 bp, synthetic construct
  source 1..75: mol_type = other DNA
tggggcgccgtgctggtgaaccaccattgccacttgagcgccagcgcgcgatcgcaaatctggtatacagcaaac

SEQ ID NO: 854492 - DNA, 75 bp, synthetic construct
  source 1..75: mol_type = other DNA
aaattgtcgccaaccaggacatgccggacgaagtgcgcgccaaattatgcaaggcgtgtgcctttgcccgtcgtg

SEQ ID NO: 854493 - DNA, 75 bp, synthetic construct
  source 1..75: mol_type = other DNA
tgattatcaatggtggcaggaacggcatcgacgaccggcacgcgcggtacattactgccagtaaggtgctggtgg

SEQ ID NO: 854494 - DNA, 75 bp, synthetic construct
  source 1..75: mol_type = other DNA
cgcacgctggttctcgcatataacttctgcgatgaaagagtttggtatcagcaaaccagaagatcaggcaatgtt

SEQ ID NO: 854495 - DNA, 75 bp, synthetic construct
  source 1..75: mol_type = other DNA
tggctggaattaccgtgggcgcggacttatccagattaccggtttgaataactatcgtgattgcggaaacggtct

SEQ ID NO: 854496 - DNA, 75 bp, synthetic construct
  source 1..75: mol_type = other DNA
tcggaagccggatattatcagaaacccgtaaacagctcagtgaagatctgaaccgtctgaaacggggtgacgtat

SEQ ID NO: 854497 - DNA, 75 bp, synthetic construct
  source 1..75: mol_type = other DNA
ttttctgggtattgcattattttttgcgattttcatcagacaaagggctgtcggaagccggatattatcagaaac

SEQ ID NO: 854498 - DNA, 75 bp, synthetic construct
  source 1..75: mol_type = other DNA
atggcccatcccgtagtctgatagacaatatacaccgtgttttcaccacccttacaggaatattgcatacccgcc

SEQ ID NO: 854499 - DNA, 75 bp, synthetic construct
  source 1..75: mol_type = other DNA
gaaatcaataaaataaccacaccaggctctactgatttgaggaaaagaaattatttcaagttagatgagaaaaaa

SEQ ID NO: 854500 - DNA, 75 bp, synthetic construct
  source 1..75: mol_type = other DNA
gaattgaaaggtgatgttgaggagcaacatagaagagatttattcgaaagaataaattcaggtgttaagagactg

SEQ ID NO: 854501 - DNA, 75 bp, synthetic construct
  source 1..75: mol_type = other DNA
gttgtccccgcgctgtggaagccagaaattttcagcttgatcaaactcgccgcccaggataaagacgtcacgcgc

SEQ ID NO: 854502 - DNA, 75 bp, synthetic construct
  source 1..75: mol_type = other DNA
ccgcataatgctagagtcaaaatcaaaaaaaatagagtgcaatatcagtgatgttaatatcatcgctaaagtaat

SEQ ID NO: 854503 - DNA, 75 bp, synthetic construct
  source 1..75: mol_type = other DNA
agaggattttccagctcccctgcatttggttttgattgaggaacctgaagctcacttgcatgcacaagtgcaaca

SEQ ID NO: 854504 - DNA, 75 bp, synthetic construct
  source 1..75: mol_type = other DNA
atcttcccgccaaaattcattagatatacacgaccgaatttctgagcggattgataaagaaaattacacaatagc

SEQ ID NO: 854505 - DNA, 75 bp, synthetic construct
  source 1..75: mol_type = other DNA
tacctaagaaggtgataaaagtatcatcctccataaatagctttgaatgtggtttttctgatatcaattttgttg

SEQ ID NO: 854506 - DNA, 75 bp, synthetic construct
  source 1..75: mol_type = other DNA
cgcccaggacaaagacgtcacgcgcatttttgttaatccggcgattaaacaacaactttgccttgatgcgggcac

SEQ ID NO: 854507 - DNA, 75 bp, synthetic construct
  source 1..75: mol_type = other DNA
cgatgatttaacatttgattgtgaaaaagaagatataaaattagttgccaaaattttctcacagtaccgtactat

SEQ ID NO: 854508 - DNA, 75 bp, synthetic construct
  source 1..75: mol_type = other DNA
gtggcaagcccatcaggaacggatatccgcagtatccaagacttatttatcaaatcaggtcatacaagacctttt

SEQ ID NO: 854509 - DNA, 75 bp, synthetic construct
  source 1..75: mol_type = other DNA
actgcgtgttgctgcgtgccgacgatcccctgatcgacatgaactacatcaccagtttcaccggcatgaccgata

SEQ ID NO: 854510 - DNA, 75 bp, synthetic construct
  source 1..75: mol_type = other DNA
agtaagttggcagcatcacctattgcagcgttacttatccggattatcctcagaagtgtaaatcagcattctcct

SEQ ID NO: 854511 - DNA, 75 bp, synthetic construct
  source 1..75: mol_type = other DNA
cagtttcatgaaagggttgttcaggattgtggatatgaagcggtggtatctgtgcccgcaggtacgggtcgctga

SEQ ID NO: 854512 - DNA, 75 bp, synthetic construct
  source 1..75: mol_type = other DNA
catgattttgctgggtattgccgtcacacctgtgctgttgtcatcctcaagcctcggcaatcaactttccagcgg

SEQ ID NO: 854513 - DNA, 75 bp, synthetic construct
  source 1..75: mol_type = other DNA
atacggcatcaggattgcgtattgccatgattttgctgggtattgccgtcacacctgtgctgttgtcatcctcaa

SEQ ID NO: 854514 - DNA, 75 bp, synthetic construct
  source 1..75: mol_type = other DNA
gatgccagaaaactgctgcagatgaccggagaatggctgaatacaacaggaactgatcagcaatcaccggaacat

SEQ ID NO: 854515 - DNA, 75 bp, synthetic construct
  source 1..75: mol_type = other DNA
tcgaaaccgggaaggttgctgcaaagctggggctcgcacaggcaatatgcaatgctctggataagcctctaaatg

SEQ ID NO: 854516 - DNA, 75 bp, synthetic construct
  source 1..75: mol_type = other DNA
aaaatgtaatatctaattgttatttggcagcggcagatggaaaaaagatataccaatttaaatatcaaaatcaaa

SEQ ID NO: 854517 - DNA, 75 bp, synthetic construct
  source 1..75: mol_type = other DNA
caaatcaggtcatacaagacctttttttctcatgctaataatcccaaacaaagaaaatatttccaactgttattt

SEQ ID NO: 854518 - DNA, 75 bp, synthetic construct
  source 1..75: mol_type = other DNA
ctctgaacagatttttaaaattactggcgacgagaatgtggcaaaaaatgaattagaaccgtggacacctgaagg

SEQ ID NO: 854519 - DNA, 75 bp, synthetic construct
  source 1..75: mol_type = other DNA
atgtcaaacgcacagaaagttattaacgctgaaaaatataacgagtgggtgaaaaagttctcagagcagattttt

SEQ ID NO: 854520 - DNA, 75 bp, synthetic construct
  source 1..75: mol_type = other DNA
atgttaaatacacagaaaaccattaatgcggaaaaatataacgagtgggtgaggaaattttctgagcagattttt

SEQ ID NO: 854521 - DNA, 75 bp, synthetic construct
  source 1..75: mol_type = other DNA
caaaatcagaagtgaatagtcagctacaaacttttgctcagctggcgctggataaatccgagctggtcattcgct

SEQ ID NO: 854522 - DNA, 75 bp, synthetic construct
  source 1..75: mol_type = other DNA
ccgaaggcggtcaaggctgcatacgaccttgcagccggcaaggcgcccgtcagccacactcacccgtggagtcag

SEQ ID NO: 854523 - DNA, 75 bp, synthetic construct
  source 1..75: mol_type = other DNA
gtctataacgccgtgaatcatacgccggaaggtacgcatatcaccgtacgctggcagcgagtgccgcacggtgcc

SEQ ID NO: 854524 - DNA, 75 bp, synthetic construct
  source 1..75: mol_type = other DNA
ctgtatggcttacaccagatgcagctgcgaaataaaaaacgccgccgcgaactgggcaatctgattaaacgtttt

SEQ ID NO: 854525 - DNA, 75 bp, synthetic construct
  source 1..75: mol_type = other DNA
tcattgcccggattatttcgcgttattagtgatggttatcgaagcgcggagcatggtagatgcgcaaggtcaacc

SEQ ID NO: 854526 - DNA, 75 bp, synthetic construct
  source 1..75: mol_type = other DNA
cagaacggagttttcagggggaaatgaaacccgcccacgtaacatcgccttcaattatattgtgagagctgcata

SEQ ID NO: 854527 - DNA, 75 bp, synthetic construct
  source 1..75: mol_type = other DNA
actaacagcacgtctgaagtgctggccgctacaccgaaagctgtcaaggctgcatatgacctggctaacggaaaa

SEQ ID NO: 854528 - DNA, 75 bp, synthetic construct
  source 1..75: mol_type = other DNA
tttacctttgaaatagataacgacctcaaggtgtctggcaacgaagaccaacttcgcagcgcgatttctaacctg

SEQ ID NO: 854529 - DNA, 75 bp, synthetic construct
  source 1..75: mol_type = other DNA
agttactgacgctgtcaaaaatagaagccgcgccaacgcagttgcttaatgaaaaggttgatgtgccgatgatgc

SEQ ID NO: 854530 - DNA, 75 bp, synthetic construct
  source 1..75: mol_type = other DNA
atccgtccgccaccgccttaccggctgtcagcacactcggactgccgttctccaccccggactcgcgtatagggt

SEQ ID NO: 854531 - DNA, 75 bp, synthetic construct
  source 1..75: mol_type = other DNA
tgatgtcacgcaaatgcatcaactggaaggggcgcggcgtaacttttttgccaacgtgagccatgagttacgcac

SEQ ID NO: 854532 - DNA, 75 bp, synthetic construct
  source 1..75: mol_type = other DNA
cacgaaagccgcctgcatattgagagtacggtaggtaaaggtacgcgtttcagttttgttctgccggaacgttta

SEQ ID NO: 854533 - DNA, 75 bp, synthetic construct
  source 1..75: mol_type = other DNA
gttgataaagcgcgttcccgacaaacaggtggcagcggattagggttagccatcgttaaacatgcggtgaatcat

SEQ ID NO: 854534 - DNA, 75 bp, synthetic construct
  source 1..75: mol_type = other DNA
aaattgaaagcacgacgcaaatagacattatccgccaggcttatcttgctcgcttaccgttgtgtcatcccgaaa

SEQ ID NO: 854535 - DNA, 75 bp, synthetic construct
  source 1..75: mol_type = other DNA
ttcagcagggaaaccgatggcttaactggctggagaagcagccggtgcagatgagccgcctgaacattatgccgg

SEQ ID NO: 854536 - DNA, 75 bp, synthetic construct
  source 1..75: mol_type = other DNA
attcccatgaccagtgatgagagcaacaggctgaacctgaaaagtataaagtcgatatgtatgcttatacaaccg

SEQ ID NO: 854537 - DNA, 75 bp, synthetic construct
  source 1..75: mol_type = other DNA
gggtgagtttattcgtggctgggatgatgggcgtggagtggacagtgggcgagcgttattgagtgctcagagcga

SEQ ID NO: 854538 - DNA, 75 bp, synthetic construct
  source 1..75: mol_type = other DNA
aagaggtgtaccacatccatatgcacctgctgggtggccgtccgttggggccaatgctggcgcataaaggtctgt

SEQ ID NO: 854539 - DNA, 75 bp, synthetic construct
  source 1..75: mol_type = other DNA
tggtggacaagaggtgtatcacatccatatgcacctgctgggaggccgtccgctgggcccaatgctggcgcataa

SEQ ID NO: 854540 - DNA, 75 bp, synthetic construct
  source 1..75: mol_type = other DNA
tgctggaacttcaggaacggcggagagctggaattattcctgtgacacaggaagcaaaggaacatcaggtcaggg

SEQ ID NO: 854541 - DNA, 75 bp, synthetic construct
  source 1..75: mol_type = other DNA
ggaaagcctgcttgccgatctctgcgcgtactgggaaagttacccatctacacaagctgataatttgttgttgca

SEQ ID NO: 854542 - DNA, 75 bp, synthetic construct
  source 1..75: mol_type = other DNA
actgcgtttatggcaatggaaggtccgtggttcattcctgatgatgtcaagttacatcgcaaactgttgcgctgg

SEQ ID NO: 854543 - DNA, 75 bp, synthetic construct
  source 1..75: mol_type = other DNA
gcaaggtcaaccgctgaaatatgttcctggtgagagcgcccggacgcggctgttatggcggaaattttacatagc

SEQ ID NO: 854544 - DNA, 75 bp, synthetic construct
  source 1..75: mol_type = other DNA
atgaaaacatgttggcaaattctcgaaattgaaagcacgacgcaaacagagattatccgtcaggcttatcttgct

SEQ ID NO: 854545 - DNA, 75 bp, synthetic construct
  source 1..75: mol_type = other DNA
gtggagcaagcgtcattgcccggattatttcgcgttattagtgctggttattgaagcgcgaagcatggttgatgc

SEQ ID NO: 854546 - DNA, 75 bp, synthetic construct
  source 1..75: mol_type = other DNA
tcactgaattgtgcatcgctgctggcggagcgtttgaactggtacgcgttcaatgatggcgaagaaatggatgag

SEQ ID NO: 854547 - DNA, 75 bp, synthetic construct
  source 1..75: mol_type = other DNA
agataacctgccgtctggcacgggcaatcagcctttatccagtcagcaacgtacttcgctggaaagcttaatgac

SEQ ID NO: 854548 - DNA, 75 bp, synthetic construct
  source 1..75: mol_type = other DNA
gacttcaagaaagccatgtggaccattcctcctgagcggaaacctattgaaggggtcaagtattcccatcgtggc

SEQ ID NO: 854549 - DNA, 75 bp, synthetic construct
  source 1..75: mol_type = other DNA
tttcagagcttcttgaacgactggatgcatacagaggacaacctcttacccggctggcaaccaaactcaccttgc

SEQ ID NO: 854550 - DNA, 75 bp, synthetic construct
  source 1..75: mol_type = other DNA
aagtctcgctggtcgatgccagaggtcgccgggatgaagcccgtaagttgttagctaacggcgtcgatcctagtg

SEQ ID NO: 854551 - DNA, 75 bp, synthetic construct
  source 1..75: mol_type = other DNA
agcgatcctgaagcagataaaacagttctgtggcgaacatgaactcatttttattggcgatcacgatccgcgtaa

SEQ ID NO: 854552 - DNA, 75 bp, synthetic construct
  source 1..75: mol_type = other DNA
gccaatgagcgagaacactgttaacaaggcccttcgctcaatggggtatgacacgaaaacggaagtctgtgggca

SEQ ID NO: 854553 - DNA, 75 bp, synthetic construct
  source 1..75: mol_type = other DNA
ggttctaaaatgcgcacacctcatctggtgccattgtctcatcaggctctggcaatcctcaaacaggttcacaag

SEQ ID NO: 854554 - DNA, 75 bp, synthetic construct
  source 1..75: mol_type = other DNA
cttctggaagaggttctgaggcaggctggtattccgttgctcagaagccacgatgccagaaaactgctgcagatg

SEQ ID NO: 854555 - DNA, 75 bp, synthetic construct
  source 1..75: mol_type = other DNA
gccaatgagtgagaatacgcttaacaaggccttgcgagtgatgggctatgacacaaacggaagtgtgtggacatg

SEQ ID NO: 854556 - DNA, 75 bp, synthetic construct
  source 1..75: mol_type = other DNA
tggtttcaggaccatggcgtgtagctcgttgatcgagtcgggattatggtcgagggatgcggtagagcggcagat

SEQ ID NO: 854557 - DNA, 75 bp, synthetic construct
  source 1..75: mol_type = other DNA
gagccatcaggagcgtagctctgttagggctgcctacatccataaagcggaacatctgggggagcgcaggttgat

SEQ ID NO: 854558 - DNA, 75 bp, synthetic construct
  source 1..75: mol_type = other DNA
gctgcgttttgctcgctggtcagaagtggattttgatactgccatgtggacgattccaggggagcgtgaaccgct

SEQ ID NO: 854559 - DNA, 75 bp, synthetic construct
  source 1..75: mol_type = other DNA
aaagcagtcgagtcatccgggcggctcgaagttgccgcccgtttacagcagcgtactaccgcgattatgcgcttt

SEQ ID NO: 854560 - DNA, 75 bp, synthetic construct
  source 1..75: mol_type = other DNA
cggcttccgcacaatggcctgtagttcgctaattgagtcaggactatggtccaaggatgcggtggaaaggcagat

SEQ ID NO: 854561 - DNA, 75 bp, synthetic construct
  source 1..75: mol_type = other DNA
ctggggcgtaagttgaataatcaaggccattcaataggtatcgctctcggtgcctgtaccgttcctgccgcgggc

SEQ ID NO: 854562 - DNA, 75 bp, synthetic construct
  source 1..75: mol_type = other DNA
gctgcattttgcccgctggtcagaagtagattttgaaacggctatgtggacaatcccaggtgagcgtgagcaact

SEQ ID NO: 854563 - DNA, 75 bp, synthetic construct
  source 1..75: mol_type = other DNA
gttgcagtggtgggctgattatctggatgcgaaccgtgagaagggggttagtccgtttgattactctaaagacaa

SEQ ID NO: 854564 - DNA, 75 bp, synthetic construct
  source 1..75: mol_type = other DNA
cgcatgtgcaccacgctaccgaaaacgcacattgcggtgatgggcatggagcgtatcgcaccgacctttgccgag

SEQ ID NO: 854565 - DNA, 75 bp, synthetic construct
  source 1..75: mol_type = other DNA
aaagatgttaacaatgccacccgttcttttggcatcgcactgtcagcctgtacggttcccgccgcgggaaaaccc

SEQ ID NO: 854566 - DNA, 75 bp, synthetic construct
  source 1..75: mol_type = other DNA
aaggcagctggcaggaagaaccacaaaccaaacaaccgctccagtctggcgatcgggtgattgcgctggttaaca

SEQ ID NO: 854567 - DNA, 75 bp, synthetic construct
  source 1..75: mol_type = other DNA
agacggctataccggcaggccgctaacccgctgggcaacggaactcactctgcttatctttattcgctccagtga

SEQ ID NO: 854568 - DNA, 75 bp, synthetic construct
  source 1..75: mol_type = other DNA
aagggaagaggccagaaagctggtagctgctggtatcgatcctcgtgagcataaacgtgctgtgaaagaagagca

SEQ ID NO: 854569 - DNA, 75 bp, synthetic construct
  source 1..75: mol_type = other DNA
ttgaagtggcttcccgccttcaacagcgcaccacggccatcatgcgttatgcagtgcaaagcgggttaattgatt

SEQ ID NO: 854570 - DNA, 75 bp, synthetic construct
  source 1..75: mol_type = other DNA
cggtgcgctatcgacaaccaaagcgcgacattaccccgcgttaccctccagccgcttccctgagtttcttgctcg

SEQ ID NO: 854571 - DNA, 75 bp, synthetic construct
  source 1..75: mol_type = other DNA
ccttactaacttttgtgcgttccagtgagttgcgtttcgcgcgttgggatgagttcgacttcgataaatctcttt

SEQ ID NO: 854572 - DNA, 75 bp, synthetic construct
  source 1..75: mol_type = other DNA
acaacccggcgcaagagatggcgggggcggtagcttccagtaatcggcagcatcgtccggcgctggagttaaagc

SEQ ID NO: 854573 - DNA, 75 bp, synthetic construct
  source 1..75: mol_type = other DNA
agcatctgggggagcgtagattgatgttgcagtggtgggcggattatctggatgcgaatatgcaagaagttatct

SEQ ID NO: 854574 - DNA, 75 bp, synthetic construct
  source 1..75: mol_type = other DNA
gcgctgcgtcagatgccgggaacatgaagaagggagatgccgccagccatgctgaacaatggctctccggtacgc

SEQ ID NO: 854575 - DNA, 75 bp, synthetic construct
  source 1..75: mol_type = other DNA
gtggcctctatggtggagaacaaccagcgagtggcaatgcatccggcagagcagatcagcgggttccgcacgttg

SEQ ID NO: 854576 - DNA, 75 bp, synthetic construct
  source 1..75: mol_type = other DNA
acggcctgtcaggcgttgcggcaggtggtcgccgtcttgccgcactgcaactgttgctcagcgaacagcgcatcg

SEQ ID NO: 854577 - DNA, 75 bp, synthetic construct
  source 1..75: mol_type = other DNA
aagcctcagaacggggagaaagaagggcagggagagaacagcagcggtggctccctccatgtggtcagcagcaag

SEQ ID NO: 854578 - DNA, 75 bp, synthetic construct
  source 1..75: mol_type = other DNA
gctgtgcagctgcgtgttcgactactgcaccaccacccggcacccgtttgtcctgcgccttgaggtgcatcacag

SEQ ID NO: 854579 - DNA, 75 bp, synthetic construct
  source 1..75: mol_type = other DNA
agcagcagcgtcttgatgaactgtacgccattcaggaggccactgaaacgtttgaggacgaagctgcgattcagg

SEQ ID NO: 854580 - DNA, 75 bp, synthetic construct
  source 1..75: mol_type = other DNA
ataaacctgtcattactgtcgaaaattatgatcgtattgatggtccatacgctgacgacagcgatgccaaaggcc

SEQ ID NO: 854581 - DNA, 75 bp, synthetic construct
  source 1..75: mol_type = other DNA
gacaatgaggggcgggtgtttgcccgcaagggcgatgtggtgaacccgcttaaaaccgtaccgtttgtccagacc

SEQ ID NO: 854582 - DNA, 75 bp, synthetic construct
  source 1..75: mol_type = other DNA
taacgctggaatcaatagcgaagtggccgttgatcacttaccggcaggggattacaggccgctcgcgtattgatg

SEQ ID NO: 854583 - DNA, 75 bp, synthetic construct
  source 1..75: mol_type = other DNA
cgcagtgaggatgacgtggctgacgacgctgaccgcacggaacaggtgcaggaaaaagcgtcagtggaggaaatc

SEQ ID NO: 854584 - DNA, 75 bp, synthetic construct
  source 1..75: mol_type = other DNA
acgtccgtgaagatctgttcagccaggacgagggcgacggtacggctgacagcgtgctggttgagcgtctggtgc

SEQ ID NO: 854585 - DNA, 75 bp, synthetic construct
  source 1..75: mol_type = other DNA
aacgggcaaggctgaaagccctgctgccggaagggtgggagaaggacttcaccaccttctttgcccttgacggcg

SEQ ID NO: 854586 - DNA, 75 bp, synthetic construct
  source 1..75: mol_type = other DNA
ctccctccatgtggtcagcagcaagccggatgtgacgaaggggatcagcgccccgttactcaaaaagatgtcttc

SEQ ID NO: 854587 - DNA, 75 bp, synthetic construct
  source 1..75: mol_type = other DNA
tgtatcatcagaacaagggtagaagagcatctgagcctgatacacctttcttactgcttgccaaacgcatccctc

SEQ ID NO: 854588 - DNA, 75 bp, synthetic construct
  source 1..75: mol_type = other DNA
aaagatactgtttctataacaatccgtaagccgtcaggtatttttatcagtcatgacaaatttataaaacagggc

SEQ ID NO: 854589 - DNA, 75 bp, synthetic construct
  source 1..75: mol_type = other DNA
tcataagccacttaatgaaattgaaggactgacagaaatcgccgttaacagaccaaatgagctgtttttaaaggt

SEQ ID NO: 854590 - DNA, 75 bp, synthetic construct
  source 1..75: mol_type = other DNA
gtaagcggaacattgctgaattgaagacaagggatctgcttgtacccattaaagccgtagagtcatcagggcgtc

SEQ ID NO: 854591 - DNA, 75 bp, synthetic construct
  source 1..75: mol_type = other DNA
gctgtgcagagtggtttaatcgactacaaccctgcacaagaaattgccggtgcggttgctacggcaaaaagacag

SEQ ID NO: 854592 - DNA, 75 bp, synthetic construct
  source 1..75: mol_type = other DNA
gaacaaacaaatatgagttatcaagactgtctgtcttttgcttctgctatagcagactatcatgataatggttcg

SEQ ID NO: 854593 - DNA, 75 bp, synthetic construct
  source 1..75: mol_type = other DNA
tccgttgatggggttcagacccgtgagcatgggcataccagccgtagcaaccttgatgaggtggagacggcgatc

SEQ ID NO: 854594 - DNA, 75 bp, synthetic construct
  source 1..75: mol_type = other DNA
gctcagtaagaaacagattgtggaagcgctgaaagaggccggactgtcaggtgctgcgtcagatgccgggaacat

SEQ ID NO: 854595 - DNA, 75 bp, synthetic construct
  source 1..75: mol_type = other DNA
gtgcgcaccatcccttattcggaggacagcgtccgtggtctggccgattccattgagtcgctcggactgcttcag

SEQ ID NO: 854596 - DNA, 75 bp, synthetic construct
  source 1..75: mol_type = other DNA
tcctacaaagatatattatgcaaaaggtttttattacaaggaaattgcatctggttttatttcatcaaaaaaact

SEQ ID NO: 854597 - DNA, 75 bp, synthetic construct
  source 1..75: mol_type = other DNA
gaaagctgcttacagcacggtttcggcacatctcatcaagcgggtaattacagaaacggaaatttccgttacaca

SEQ ID NO: 854598 - DNA, 75 bp, synthetic construct
  source 1..75: mol_type = other DNA
aaattggctcatctcgccccggaaatcctcgaactgctggcaaacaatacccttgatgtggagcagtgccaggca

SEQ ID NO: 854599 - DNA, 75 bp, synthetic construct
  source 1..75: mol_type = other DNA
tgcccgcatcacctttaaccgccaggcatcgttgctgaagaccaactacgttagccgtcaggattacgacaccgc

SEQ ID NO: 854600 - DNA, 75 bp, synthetic construct
  source 1..75: mol_type = other DNA
ctgatccgacggtcgatgaaaccacaggttcagtgactttgcgggcgattttccctaacccaaatggcgacctgc

SEQ ID NO: 854601 - DNA, 75 bp, synthetic construct
  source 1..75: mol_type = other DNA
cggcggtctgtatgaccatctacatcggtgtgatggcactggagtttgctccggcattgtttgaacgtctgggct

SEQ ID NO: 854602 - DNA, 75 bp, synthetic construct
  source 1..75: mol_type = other DNA
agtggatgaaggtagccgccagaatgtattactggtgccgcaggaaggcgtcacccacaacgcccagggtaaagc

SEQ ID NO: 854603 - DNA, 75 bp, synthetic construct
  source 1..75: mol_type = other DNA
caatctggaaaatggtaaacgctacagccagaccggcacgctgaaattctccgacccgacggtggatgaaaccac

SEQ ID NO: 854604 - DNA, 75 bp, synthetic construct
  source 1..75: mol_type = other DNA
ttgttagtaccgcaagaaggcgttacccataactcccagggcaaagcaacggcgctcattctggataaagacgat

SEQ ID NO: 854605 - DNA, 75 bp, synthetic construct
  source 1..75: mol_type = other DNA
gataaccagatggtgcaattgcaactcgagaaaacttggccggaaaatggctggggcgagaagacgatcagcttc

SEQ ID NO: 854606 - DNA, 75 bp, synthetic construct
  source 1..75: mol_type = other DNA
cgatgcgtggcaattttacggcgatcatgcgaaaggggttgttaagggtagttttgataatcgcgtaatggcgcg

SEQ ID NO: 854607 - DNA, 75 bp, synthetic construct
  source 1..75: mol_type = other DNA
ttcattatgtaaaagataatgacggcgatgcgtggcaattttacggcgatcatgcgaaaggggttgttaagggta

SEQ ID NO: 854608 - DNA, 75 bp, synthetic construct
  source 1..75: mol_type = other DNA
aagccacgatgccagaaaactgctgcagatgaccggagaatggctgaatacaacaggggctgctcatcagcagtc

SEQ ID NO: 854609 - DNA, 75 bp, synthetic construct
  source 1..75: mol_type = other DNA
gctgccgggcaggttgccccggctctctctcttgatggctccattcagtcggagggcgatcaggtttcaatcggc

SEQ ID NO: 854610 - DNA, 75 bp, synthetic construct
  source 1..75: mol_type = other DNA
gcagccgcgctccttagaggtagaggtacggcgcactaaagaggagacgtccgccttggtttccttgcgtagcag

SEQ ID NO: 854611 - DNA, 75 bp, synthetic construct
  source 1..75: mol_type = other DNA
cggtgaccgtcggcgcattagttaccgctaatcaagctgattccctggttaccgtgcagcgtcttgacccgattt

SEQ ID NO: 854612 - DNA, 75 bp, synthetic construct
  source 1..75: mol_type = other DNA
taaacttcgtaatgaattacgtgttcactcttgagacttggtattcattttcgtcttgcgacgttaagaatccgt

SEQ ID NO: 854613 - DNA, 75 bp, synthetic construct
  source 1..75: mol_type = other DNA
aaactcttcaatttaaaagtttgatgctcaaagaattaaacttcgtaatgaattacgtgttcactcttgagactt

SEQ ID NO: 854614 - DNA, 75 bp, synthetic construct
  source 1..75: mol_type = other DNA
gccatgcaatttatttctgagcgtgtcggtcaactggaatctgtttcattgattggtcgctttcgcgttcttgac

SEQ ID NO: 854615 - DNA, 75 bp, synthetic construct
  source 1..75: mol_type = other DNA
tcgttgctgaaaaccaactatgtcagccgccaggattacgacaccgcgcacacccaactgaatgaagcggaagcc

SEQ ID NO: 854616 - DNA, 75 bp, synthetic construct
  source 1..75: mol_type = other DNA
tgcctggcatgtatgtcacggcattagtggatgaaggtagccgccagaatgtattactggtgccgcaggaaggcg

SEQ ID NO: 854617 - DNA, 75 bp, synthetic construct
  source 1..75: mol_type = other DNA
tcttcaatttaaaagtttgatgctcaaagaattaaacttcgtaatgaattacgtgttcactcctgagacttggta

SEQ ID NO: 854618 - DNA, 75 bp, synthetic construct
  source 1..75: mol_type = other DNA
agcgtctcaaatatcttcacatcattccattagctgctattgtttgggccagttttgcatatcgctctgatatta

SEQ ID NO: 854619 - DNA, 75 bp, synthetic construct
  source 1..75: mol_type = other DNA
ggaaatccacgttcgccagcgcaccatgaagaaagagctggaaaagctgaccagtgcggatgagatactggcata

SEQ ID NO: 854620 - DNA, 75 bp, synthetic construct
  source 1..75: mol_type = other DNA
gctgaaggtggtgtatgacagccggggtgtgattacgggatacggtaaggacactgcgttactgtggccggtgaa

SEQ ID NO: 854621 - DNA, 75 bp, synthetic construct
  source 1..75: mol_type = other DNA
gtttgagcacaatgggcgtaaatgggactacgggaagtcaacgcagacgcgtcttgagccgtcggtggcggcagc

SEQ ID NO: 854622 - DNA, 75 bp, synthetic construct
  source 1..75: mol_type = other DNA
tgcactgcctttatgtgttattacagttttaataatcacacttcttgtcaggtcaggcaggaggtttatttcaga

SEQ ID NO: 854623 - DNA, 75 bp, synthetic construct
  source 1..75: mol_type = other DNA
actcttcactttttgttgcttacatgggctgtcttgggtggggaagcgcttatttctatggctggggcacttcct

SEQ ID NO: 854624 - DNA, 75 bp, synthetic construct
  source 1..75: mol_type = other DNA
tgatgtcaggatttatgatctatttcagggtattttcacttattgctggttggtataagccccagtttaaaaatt

SEQ ID NO: 854625 - DNA, 75 bp, synthetic construct
  source 1..75: mol_type = other DNA
tattgcgctgtattcgctgcggtgcctgtattaatacctgtcccgcttatcgccagattggtgggcatggctatg

SEQ ID NO: 854626 - DNA, 75 bp, synthetic construct
  source 1..75: mol_type = other DNA
ctgtattaatacctgtcccgcttatcgccagattggtggacatggctatggctcaatctaccctggcccaatcgg

SEQ ID NO: 854627 - DNA, 75 bp, synthetic construct
  source 1..75: mol_type = other DNA
ttgaaacggaccttggggaatatattcttcagctagcacatgagccaccatcgcatgtggttgtgccggcaatac

SEQ ID NO: 854628 - DNA, 75 bp, synthetic construct
  source 1..75: mol_type = other DNA
atacccctgaaaaacctgatgtgccgggtgcgatgtacctgaaatcagaggatggtcaggactggtatgagtgtc

SEQ ID NO: 854629 - DNA, 75 bp, synthetic construct
  source 1..75: mol_type = other DNA
acgggaagtcaacgcagacgcgtcttgagccatcggtggcggcagcgaaagcggggaaactgccggaggcgtttt

SEQ ID NO: 854630 - DNA, 75 bp, synthetic construct
  source 1..75: mol_type = other DNA
cagacaagattttctgagtgctgaagttggcgtaacgggatgtaactttgccgttgcagaaacagggtcagtttg

SEQ ID NO: 854631 - DNA, 75 bp, synthetic construct
  source 1..75: mol_type = other DNA
gaagataaaatgtcaagattaaacttgtttaatgccttgaggtttgtttttaatatttataaagacgacaaaaat

SEQ ID NO: 854632 - DNA, 75 bp, synthetic construct
  source 1..75: mol_type = other DNA
taaaatcgatgaagttgtcaaaggaagcccagctgctcaggctggcttgcaaaaagacgatgtgatcattggcgt

SEQ ID NO: 854633 - DNA, 75 bp, synthetic construct
  source 1..75: mol_type = other DNA
cagttaaccaggtggcccgattattcggagttacgcgttggtcaatattcaagtggatgcaacgaatcccggact

SEQ ID NO: 854634 - DNA, 75 bp, synthetic construct
  source 1..75: mol_type = other DNA
aggaactgcgcgaaagaggcatcaacttttgcaatctgacggattcaattgatacacagtatcttgttaacacca

SEQ ID NO: 854635 - DNA, 75 bp, synthetic construct
  source 1..75: mol_type = other DNA
gagagtctgacaaaggtcgggttcttcggaccattggttggtgcaaacgcaaccaccttacacttgccggtcttc

SEQ ID NO: 854636 - DNA, 75 bp, synthetic construct
  source 1..75: mol_type = other DNA
gctggcggagcggtggttctggcagggcaacgattatgcgttgatagctgcggaaatagttgctcgtgatctttg

SEQ ID NO: 854637 - DNA, 75 bp, synthetic construct
  source 1..75: mol_type = other DNA
caatttgacttctgacggtattggtgcacagggaggtctggcacaagatgcttatgtcattttgaaaccttcaaa

SEQ ID NO: 854638 - DNA, 75 bp, synthetic construct
  source 1..75: mol_type = other DNA
cacgtttacccattttagtgccgaacatttcggtgcactggcgtgtacgctggaacttggtaaagcattgccatt

SEQ ID NO: 854639 - DNA, 75 bp, synthetic construct
  source 1..75: mol_type = other DNA
ggcgcgcctgttgatgatttcacgctgccggagcactacacccgcaagcgtatccgtgcgatgggccgcgtgtcg

SEQ ID NO: 854640 - DNA, 75 bp, synthetic construct
  source 1..75: mol_type = other DNA
cattttcggctctcgatatgcgtgccggtaccatcatcagggttgaggagagtaaaacatcaaagcccacctggc

SEQ ID NO: 854641 - DNA, 75 bp, synthetic construct
  source 1..75: mol_type = other DNA
tgctgaaagcggagaaacctgtcgggcgcgcgaactggaacagtgcctggaagatttttatgaccagggcaaaga

SEQ ID NO: 854642 - DNA, 75 bp, synthetic construct
  source 1..75: mol_type = other DNA
tatcgtgagaacgccgccgctccgttatcgggtggtttcgcaaattactcgccactcgccgtccttcgaaatgca

SEQ ID NO: 854643 - DNA, 75 bp, synthetic construct
  source 1..75: mol_type = other DNA
tggcgcaggacggggaggaacgttttaccgtaacccatgatgtagagtatgtgttattccctaatccgttggtag

SEQ ID NO: 854644 - DNA, 75 bp, synthetic construct
  source 1..75: mol_type = other DNA
cagtgaaactataatcgcatcaaagcatcacgatccgctttccccgaaaacagtatcaaagtattttacaaaggc

SEQ ID NO: 854645 - DNA, 75 bp, synthetic construct
  source 1..75: mol_type = other DNA
aatcaggtcaacccttgttgacgtttttcgtgaggcaatagccgaggggcatgtggcaacgaatccggtaacagc

SEQ ID NO: 854646 - DNA, 75 bp, synthetic construct
  source 1..75: mol_type = other DNA
cagaccgaaaactctactcgactacgccagcaaaatcagggcaatccgaagaaaattgccggacaaaccgctcgc

SEQ ID NO: 854647 - DNA, 75 bp, synthetic construct
  source 1..75: mol_type = other DNA
caaggcggcggagtggcttttctctgatggcggctacacgatgaatattagccagcttgccagaatgaaggatga

SEQ ID NO: 854648 - DNA, 75 bp, synthetic construct
  source 1..75: mol_type = other DNA
tcgacgtagttgataatgaattaacaatgtttgccactgacggaaaacgcgtggtgatcgccacatggacgcaca

SEQ ID NO: 854649 - DNA, 75 bp, synthetic construct
  source 1..75: mol_type = other DNA
tcgagtaccactatccgcgtggtttcgatgattgcttcactattgaaccggatctgccgttcaagtcattcctgt

SEQ ID NO: 854650 - DNA, 75 bp, synthetic construct
  source 1..75: mol_type = other DNA
agtatgtcgagatttaccatgcagccgaacctctccctatctggctaaggctggcgatggatttggccgtcgtta

SEQ ID NO: 854651 - DNA, 75 bp, synthetic construct
  source 1..75: mol_type = other DNA
gccagcaaaatcagggcaatccgaagaaaattgccggacaaaccgctcgctgacatatcaacgaaagaggtggca

SEQ ID NO: 854652 - DNA, 75 bp, synthetic construct
  source 1..75: mol_type = other DNA
cgctcaaggctgacagctaatgagtatgtcgcgatttaccatgcagccgaacatctcccaatctggctgaggctg

SEQ ID NO: 854653 - DNA, 75 bp, synthetic construct
  source 1..75: mol_type = other DNA
tttgcccaacgtcttctcggacataaatcagattcaatggcggcgcggtatagggacagccgagggagagaatgg

SEQ ID NO: 854654 - DNA, 75 bp, synthetic construct
  source 1..75: mol_type = other DNA
catcacgaaccactttccccgaaaacagtatcgaagtattttacaaaggcgagaaatgcatctggactctcattt

SEQ ID NO: 854655 - DNA, 75 bp, synthetic construct
  source 1..75: mol_type = other DNA
gtggttatcgctacatggacgcacaaccatgatgatattgtttttcgtcgcaaggctgcggagtggcttttctct

SEQ ID NO: 854656 - DNA, 75 bp, synthetic construct
  source 1..75: mol_type = other DNA
atgggtaaaccgcccgttgatgacgacattccggcagaagaacaggtacgtattctgcgtaaactgttcgatcgc

SEQ ID NO: 854657 - DNA, 75 bp, synthetic construct
  source 1..75: mol_type = other DNA
cgaacaaaccgacgccgtttgttgcgccattgcttgaagctttagatatcgccaaatactttagcgtggtcatcg

SEQ ID NO: 854658 - DNA, 75 bp, synthetic construct
  source 1..75: mol_type = other DNA
cccacaggatggctattcgccggtagtacgcgactatgacaccggcctgccaacacaaggggtgaaggtggaaga

SEQ ID NO: 854659 - DNA, 75 bp, synthetic construct
  source 1..75: mol_type = other DNA
agaacgcccgctttaatgtgaaaaaagtctggccctattcgcgcttttcgttttccacgctgggcaaggaaattc

SEQ ID NO: 854660 - DNA, 75 bp, synthetic construct
  source 1..75: mol_type = other DNA
acattccggcagaagaacaagtacgtattctgcgtaaactgttcgatcgctactatggcgaggttgccgaagagg

SEQ ID NO: 854661 - DNA, 75 bp, synthetic construct
  source 1..75: mol_type = other DNA
cgaggctatcgatcttagccagcctgatgtaatttatcagtctatcaatgaccttctgcccgcattagggcttcc

SEQ ID NO: 854662 - DNA, 75 bp, synthetic construct
  source 1..75: mol_type = other DNA
tggtcttgaagttcaaattgagctttccagccgccgctttatggggttgaaggagcgtcgccgggcactggcggg

SEQ ID NO: 854663 - DNA, 75 bp, synthetic construct
  source 1..75: mol_type = other DNA
cagatgctgaaagctacggcaatgctatctatatcgctaaccaccagaacaactatgacatggtgacagcatcga

SEQ ID NO: 854664 - DNA, 75 bp, synthetic construct
  source 1..75: mol_type = other DNA
tacggtccacaaaaaaaatggaatgaagatgccaagaagaatgcggatatcttgtttggtgcatcagaacaatct

SEQ ID NO: 854665 - DNA, 75 bp, synthetic construct
  source 1..75: mol_type = other DNA
gggtgacggatgactttaaactggtgctcaacctcttcaccagtgatgaactttacgatcgccgtaatgattcaa

SEQ ID NO: 854666 - DNA, 75 bp, synthetic construct
  source 1..75: mol_type = other DNA
acatggacaaaattcgcgatccgttccgcagttaccaatggagcctgcgtccgtggcgtaaagatgcactgccgc

SEQ ID NO: 854667 - DNA, 75 bp, synthetic construct
  source 1..75: mol_type = other DNA
ttgtctggagattcagggggccagtctaatgaactggcgacaacgatcgataaagaattgaatcaagggattggc

SEQ ID NO: 854668 - DNA, 75 bp, synthetic construct
  source 1..75: mol_type = other DNA
cgtcttctcgggcataaatcagattcaatggcggcgcggtatagagacagccgtggacgggaatgggacaaaatt

SEQ ID NO: 854669 - DNA, 75 bp, synthetic construct
  source 1..75: mol_type = other DNA
ggctatgataatactgaggataatgatgaggcggcatctgattatgcattaaaaataaatgaaaactctgattaa

SEQ ID NO: 854670 - DNA, 75 bp, synthetic construct
  source 1..75: mol_type = other DNA
aagttttcggctatgataatagtgaggataatgatgaagcggcatctgattatgcactaaaaataaatgaaaact

SEQ ID NO: 854671 - DNA, 75 bp, synthetic construct
  source 1..75: mol_type = other DNA
cgtggcgaagccatcatggcaggttgccagctatccgttcaaaaccgggcgtcgtatgtggcgctggatgcgaaa

SEQ ID NO: 854672 - DNA, 75 bp, synthetic construct
  source 1..75: mol_type = other DNA
caacctgcgcctgaatctgaaggattgcagtacaccacggtagcaaaccaacttaccgccctgaagtataacgcg

SEQ ID NO: 854673 - DNA, 75 bp, synthetic construct
  source 1..75: mol_type = other DNA
tgccagttttcaggcattcggcgctttcgctgctgataaacgcagtatctattttgacggtcagcgtaccgatga

SEQ ID NO: 854674 - DNA, 75 bp, synthetic construct
  source 1..75: mol_type = other DNA
gggagcgatctcattttctaccctaaaagtcaaggagatgataagcctgaaaacatcctgaaaattgtcaaagaa

SEQ ID NO: 854675 - DNA, 75 bp, synthetic construct
  source 1..75: mol_type = other DNA
atcaaatggcctgataaggttaaaaaccttgagttgcttgggcgtcatgtttctgttcaggcgtttaaagacaac

SEQ ID NO: 854676 - DNA, 75 bp, synthetic construct
  source 1..75: mol_type = other DNA
atgtcgtggagatggtatctgcagatagcaccgcacttctgaagaaaatcaaatggcctgataaggtcaaaaatc

SEQ ID NO: 854677 - DNA, 75 bp, synthetic construct
  source 1..75: mol_type = other DNA
ggataacctgtcgtctggcgcaggcaatcaacctttatccagcttgcaacgtaccgcgttggaaagtttgatgac

SEQ ID NO: 854678 - DNA, 75 bp, synthetic construct
  source 1..75: mol_type = other DNA
acctgggggctgggtggtgttctgcaggagatccgcacatcaactgcgtttggcatgactgatgcccaggtaaaa

SEQ ID NO: 854679 - DNA, 75 bp, synthetic construct
  source 1..75: mol_type = other DNA
ggcgaagcagaacgcaaaagaaaccacctgggggctgggcggcgttctgcaggaaatccgcacatcaacggcgtt

SEQ ID NO: 854680 - DNA, 75 bp, synthetic construct
  source 1..75: mol_type = other DNA
gacaaaaggtgccggggcgctgggctggatggggaaaggtgccggtcgtgccctgtcacgtctgggtggcccggt

SEQ ID NO: 854681 - DNA, 75 bp, synthetic construct
  source 1..75: mol_type = other DNA
gtgctgttcaatctcatccttatgagggcgaaccatagtgttggagcagacataccgtttgcacactatgggcat

SEQ ID NO: 854682 - DNA, 75 bp, synthetic construct
  source 1..75: mol_type = other DNA
ttactggctgccgtcaaccagacgctggtgagtttcgaccatccgctaactgacggcgacgaagtggctttcttc

SEQ ID NO: 854683 - DNA, 75 bp, synthetic construct
  source 1..75: mol_type = other DNA
acctgccactgtatcgtcagagtgaaatctttgcccgacagggtgtcgaactgagccgtgcattactctccaact

SEQ ID NO: 854684 - DNA, 75 bp, synthetic construct
  source 1..75: mol_type = other DNA
gtgcgccgcctttaccgtatgagtcatctcgttgccatgatcttccggctatcattgttgaaaactccgatgtgt

SEQ ID NO: 854685 - DNA, 75 bp, synthetic construct
  source 1..75: mol_type = other DNA
gtggcgatgaatattcacatgccgggctggcttcgtcgcggtgatgaagtactcgacattgtgttaggtgaaatg

SEQ ID NO: 854686 - DNA, 75 bp, synthetic construct
  source 1..75: mol_type = other DNA
ccaaccgttgaagcgttacgccagcacctggctgcgcagagcgatcgctgggcgctggcgctggaagatggcaaa

SEQ ID NO: 854687 - DNA, 75 bp, synthetic construct
  source 1..75: mol_type = other DNA
atctgactgcgcagagcgatcgctgggcgctggcgctggaagatggcaaattgctggctgccgtcaaccagacgc

SEQ ID NO: 854688 - DNA, 75 bp, synthetic construct
  source 1..75: mol_type = other DNA
acgtggtgatgatcctgaaaaagtattctcagagattcaagccgaaaagagcgcactaaatattatcgttgatgg

SEQ ID NO: 854689 - DNA, 75 bp, synthetic construct
  source 1..75: mol_type = other DNA
agatcgcttagttgatactgttattcttccattatttgaggcgtttttacgtcacgcggtaattaactcaaaaat

SEQ ID NO: 854690 - DNA, 75 bp, synthetic construct
  source 1..75: mol_type = other DNA
ctttttccagcaggtggtacgcggcgtcatcatcgtggtggcggtgctggcgaatatcttgctgacccagcgaag

SEQ ID NO: 854691 - DNA, 75 bp, synthetic construct
  source 1..75: mol_type = other DNA
gccattattccgcgcgtggtattgttccgattcgtattactgcaattccacatattatcgataacactactatta

SEQ ID NO: 854692 - DNA, 75 bp, synthetic construct
  source 1..75: mol_type = other DNA
ctgatccagaaacgaatttcagctagtagcatggcgttcatcgagcgtccgaaagattctggtgacgattttgat

SEQ ID NO: 854693 - DNA, 75 bp, synthetic construct
  source 1..75: mol_type = other DNA
aaacaatgaagcccgtagcatactggtttcgtaaaatcaacctactgactcaaacctacacaggtgataactatc

SEQ ID NO: 854694 - DNA, 75 bp, synthetic construct
  source 1..75: mol_type = other DNA
caaccgcaggagtgggagaaattttcccgcgtctaccccaacgacaccgagcgccatttcctcgacgcgctggtc

SEQ ID NO: 854695 - DNA, 75 bp, synthetic construct
  source 1..75: mol_type = other DNA
ttttcaagaaagatctcggcagctttgttcgcttctacgaatttatgtcacagatcgtcgagtacgatgacaagg

SEQ ID NO: 854696 - DNA, 75 bp, synthetic construct
  source 1..75: mol_type = other DNA
gaccgcacggtgctggacgaccagcttcaggacaccatctggcagttcgagcatgccgacggcgtggtcgggcgc

SEQ ID NO: 854697 - DNA, 75 bp, synthetic construct
  source 1..75: mol_type = other DNA
gccgtatcgtgccggaactggtctacagcccgtatgcctcgaataacgtctttgcagaaacgggcgtaaaagcca

SEQ ID NO: 854698 - DNA, 75 bp, synthetic construct
  source 1..75: mol_type = other DNA
cccgcgtttaccccaacgacaccgagcgccatttcctcgacgcgctggtcgcgcagcttaaaaaagccgacagca

SEQ ID NO: 854699 - DNA, 75 bp, synthetic construct
  source 1..75: mol_type = other DNA
gtcggcaaaggtgacacctacgacagagagcgtgcactatacgcacaagacaccttaaacttcgtacaaaccacc

SEQ ID NO: 854700 - DNA, 75 bp, synthetic construct
  source 1..75: mol_type = other DNA
aaatagtcgtgcagtaacaatgatttataacaagtatagcgatgagtttagcgccggaatgactcaggtactcga

SEQ ID NO: 854701 - DNA, 75 bp, synthetic construct
  source 1..75: mol_type = other DNA
agccagcaactttacccggcaatgaaacaggctaagtcagaatacgcagggatgctatacgacatcgcccacgac

SEQ ID NO: 854702 - DNA, 75 bp, synthetic construct
  source 1..75: mol_type = other DNA
cttacctgtctgataaggatgttgcccgtttagctaaccgtttcatacttgatgtactacttaaagggctgggcc

SEQ ID NO: 854703 - DNA, 75 bp, synthetic construct
  source 1..75: mol_type = other DNA
gtacttcatcaaaaataaatcgaatgcggcgatcagtaatatctgtaaaccggcggtcgaacgctggaaaaagcg

SEQ ID NO: 854704 - DNA, 75 bp, synthetic construct
  source 1..75: mol_type = other DNA
ccgccacgccaaaacccaaaacccttgagctttttggtcgccgcccgcacccggaagagcccgcctcaaaaacca

SEQ ID NO: 854705 - DNA, 75 bp, synthetic construct
  source 1..75: mol_type = other DNA
accaagaaatcgcttcttcgtgaaatgaagaatcttggtaccaacaattttgtcgtaaagaacgctcagccaatg

SEQ ID NO: 854706 - DNA, 75 bp, synthetic construct
  source 1..75: mol_type = other DNA
accgacaaagatatgatcagcaatgctttttcggtgtataacaaaataactgaaaatgaaaatgttatgacacaa

SEQ ID NO: 854707 - DNA, 75 bp, synthetic construct
  source 1..75: mol_type = other DNA
aacgaaacggctgatcgggcatatgaactctatctgagtgaaaacagtaactgcggatttaaggagaagaattat

SEQ ID NO: 854708 - DNA, 75 bp, synthetic construct
  source 1..75: mol_type = other DNA
ccaaacaaaccgaacaggaagccgtgaaggacgcggccagtgaaaggttctggggaggtacagacactcccggcc

SEQ ID NO: 854709 - DNA, 75 bp, synthetic construct
  source 1..75: mol_type = other DNA
gagtctgaggacgcccagctttcccgcatggtggcccggtcgcagtcggccgctggccggatgcaggcgattcag

SEQ ID NO: 854710 - DNA, 75 bp, synthetic construct
  source 1..75: mol_type = other DNA
aacaagaggaagagaatttaatccgtctggatacgcggcatcttttcgatgctaatactgtctggttgggactga

SEQ ID NO: 854711 - DNA, 75 bp, synthetic construct
  source 1..75: mol_type = other DNA
ccatagtttgctcgttcctgtcgatcatcccttaacacaaattacgccattgacgctggaatcaatagcgaagtg

SEQ ID NO: 854712 - DNA, 75 bp, synthetic construct
  source 1..75: mol_type = other DNA
aatgccgaccatggccgtgactggcgtgggcaaagatatggtgcgcgatcagcgttatttctcgctggctacccg

SEQ ID NO: 854713 - DNA, 75 bp, synthetic construct
  source 1..75: mol_type = other DNA
gagcactctccaaatgcaatagcactactttgtcctacgtgccatgcgaaagtaacgaaacgtctttactctaaa

SEQ ID NO: 854714 - DNA, 75 bp, synthetic construct
  source 1..75: mol_type = other DNA
gactttgctcgcgggtcgagctctggttcctggcattaaaggggacatggctgtgatccttgtcagccaacaggg

SEQ ID NO: 854715 - DNA, 75 bp, synthetic construct
  source 1..75: mol_type = other DNA
ctacgcccgatgagtggttccactttgatctggtgttggggatgacagacaggcttttacctgtggtgtccaatc

SEQ ID NO: 854716 - DNA, 75 bp, synthetic construct
  source 1..75: mol_type = other DNA
caggcgtacatcgatgcggcgctggaggtttgccagaagcatatcggcaagcggtttgataacgggctggagttt

SEQ ID NO: 854717 - DNA, 75 bp, synthetic construct
  source 1..75: mol_type = other DNA
ggtgccagtggatacagcatcacttccgccaccaacaacaataaattaagcggtactgcggtaatttataagtaa

SEQ ID NO: 854718 - DNA, 75 bp, synthetic construct
  source 1..75: mol_type = other DNA
gaattcactcctgccatcaagatcggatgccttatgtacgtttcccaactgtacgaataccgcacgatgattagt

SEQ ID NO: 854719 - DNA, 75 bp, synthetic construct
  source 1..75: mol_type = other DNA
gccaaaacgcagttgagtaagtgggttcgcttacaccctcacaatattgcccagaaatcacaggtcatcattgaa

SEQ ID NO: 854720 - DNA, 75 bp, synthetic construct
  source 1..75: mol_type = other DNA
cagggcaatatggagtccaacggtaagtacgttgaccgtaacggtaacgttgtggattaccagactggcccgatt

SEQ ID NO: 854721 - DNA, 75 bp, synthetic construct
  source 1..75: mol_type = other DNA
agatctggcgaaagagtgcgatctggcgggcgcgattaagtcgatgttctctggtgagaagatcaaccgcaccga

SEQ ID NO: 854722 - DNA, 75 bp, synthetic construct
  source 1..75: mol_type = other DNA
tgcgatttcatcgccccggctatcactcataacccactctctgaccaccaccagaaactgctgtctaacttcttt

SEQ ID NO: 854723 - DNA, 75 bp, synthetic construct
  source 1..75: mol_type = other DNA
aacatcttcaccttcgaccagtggggcgtggagctgggtaaacaactggcgaaccgtattctgccagagctgaaa

SEQ ID NO: 854724 - DNA, 75 bp, synthetic construct
  source 1..75: mol_type = other DNA
cgttcaaagtgttcgaaggtaaccgtccgaccaactccatcctgctgcgcgaaatcactccgttcagcctgggtg

SEQ ID NO: 854725 - DNA, 75 bp, synthetic construct
  source 1..75: mol_type = other DNA
gcaccgtttcgcggcgtacttccagcagggcaatatggagtccaacggtaagtatgttgaccgtaacggtaaggt

SEQ ID NO: 854726 - DNA, 75 bp, synthetic construct
  source 1..75: mol_type = other DNA
tgcgcccggatattaccgcattctgccggtggcggtcagtggtatcagccatgtggccagtgaggaaaactggct

SEQ ID NO: 854727 - DNA, 75 bp, synthetic construct
  source 1..75: mol_type = other DNA
aacatggccgtactcgcgtttctcgttctcccaactggggagggaaatacacaaagcctttgcactgacggaatc

SEQ ID NO: 854728 - DNA, 75 bp, synthetic construct
  source 1..75: mol_type = other DNA
tgtacgaactggcgaccacgggcgatgtggtgatcccttccggcacggacagcgcattgctgccggtgaaagcca

SEQ ID NO: 854729 - DNA, 75 bp, synthetic construct
  source 1..75: mol_type = other DNA
accgtaacggtaacgttgtggattaccagactggcccgattatctggggtgaaccaggcactaacggtcagcacg

SEQ ID NO: 854730 - DNA, 75 bp, synthetic construct
  source 1..75: mol_type = other DNA
gggaactcagcgaattgcagctgatgtgcagagactgcgtcagtcaggtatggttatagtcacccgggaagttga

SEQ ID NO: 854731 - DNA, 75 bp, synthetic construct
  source 1..75: mol_type = other DNA
aatgttgattatgtgaccagttttgagctgccgtttcgtctgctgttaacccggacaccgcagatgattgacagc

SEQ ID NO: 854732 - DNA, 75 bp, synthetic construct
  source 1..75: mol_type = other DNA
acgccgcctgggactatgcccggcattatatgaaaacagagcttagcttcggttatgcctgctacaaaaacgata

SEQ ID NO: 854733 - DNA, 75 bp, synthetic construct
  source 1..75: mol_type = other DNA
ttgaagcttgtattcaatattactggtgatttcgataaggtgtttttaccactggagttttctggttttcatggg

SEQ ID NO: 854734 - DNA, 75 bp, synthetic construct
  source 1..75: mol_type = other DNA
gtgccaataaaaaataaactggggtttatttcaatgaaggttgtgtttaatgtaatggatggttttgataagact

SEQ ID NO: 854735 - DNA, 75 bp, synthetic construct
  source 1..75: mol_type = other DNA
agtgttgggatttattaaagacatcacaacgagtaaacaaagaaatcgattcgcagttatgggattatataaatg

SEQ ID NO: 854736 - DNA, 75 bp, synthetic construct
  source 1..75: mol_type = other DNA
gaggtggcgatgaccaccaaactggatggaaagaaaaccgttttcctgccttttaaccggggaaccgcagaaggc

SEQ ID NO: 854737 - DNA, 75 bp, synthetic construct
  source 1..75: mol_type = other DNA
atggtatctaaatccgcagaactattattccagaattacattattgagcaactatcatccagtggttggttattt

SEQ ID NO: 854738 - DNA, 75 bp, synthetic construct
  source 1..75: mol_type = other DNA
atgaaggttgtgtttaatgtaatggatggttttgataagacttttttgcccctggagttttctggttttcatggc

SEQ ID NO: 854739 - DNA, 75 bp, synthetic construct
  source 1..75: mol_type = other DNA
taaatcactagttgaatattggttacaaacaggaatgggtgacttttctgttttaaacgaaaacaaacatactcc

SEQ ID NO: 854740 - DNA, 75 bp, synthetic construct
  source 1..75: mol_type = other DNA
ctgatttcatttgacttttcaattaaattattgattgaaaatatcgacaacacagcaaataaacttgatgaatta

SEQ ID NO: 854741 - DNA, 75 bp, synthetic construct
  source 1..75: mol_type = other DNA
cttcctgtggcagtggatggcattgatgcggtggaaaacgaggagaactggttgacagtgccgggcgcggatgaa

SEQ ID NO: 854742 - DNA, 75 bp, synthetic construct
  source 1..75: mol_type = other DNA
gaagtatgggtgagtaaaattattaatgatgaaaatcgaaaagttcagtggaatgatgctattaatgggcttcct

SEQ ID NO: 854743 - DNA, 75 bp, synthetic construct
  source 1..75: mol_type = other DNA
cctatctatcacacgtgaagtaccgtcaaaatgtgtacatatattccgctacaaggatgacgaatttgaaatagt

SEQ ID NO: 854744 - DNA, 75 bp, synthetic construct
  source 1..75: mol_type = other DNA
ggtaatgttcaacgcatttcatcctatgttttcggtgataaatcgatttctaaaccttttgatgaatggcttgag

SEQ ID NO: 854745 - DNA, 75 bp, synthetic construct
  source 1..75: mol_type = other DNA
ccggattgcccgtgataatcctgacagcggtgtggtggtgagaattgccggtgaaggtcgtccgtggaatcccgg

SEQ ID NO: 854746 - DNA, 75 bp, synthetic construct
  source 1..75: mol_type = other DNA
cgatttacggtctgatccttaacgggatgaaagggctgtatacgcgcattggtcgtcactatttcgccaatccgg

SEQ ID NO: 854747 - DNA, 75 bp, synthetic construct
  source 1..75: mol_type = other DNA
cggtaaaggtggttttaagcacaagcatgctaacctgcgtcacattctgaccaaaaaagcgactaaacgtaaacg

SEQ ID NO: 854748 - DNA, 75 bp, synthetic construct
  source 1..75: mol_type = other DNA
gtgctgctaagcgcttcaaaaaaaccggtaaaggtggttttaagcacaagcacgctaacctgcgtcacattctga

SEQ ID NO: 854749 - DNA, 75 bp, synthetic construct
  source 1..75: mol_type = other DNA
ccgctgtatcccgacatcagcccggaaattattgcgattgctatcggttcaggtgcgattggctgcacgatcgtt

SEQ ID NO: 854750 - DNA, 75 bp, synthetic construct
  source 1..75: mol_type = other DNA
gctccggaacggacgactgataacctgtcttaccgacaaccaggagccctctccctgccttatctggctgccggc

SEQ ID NO: 854751 - DNA, 75 bp, synthetic construct
  source 1..75: mol_type = other DNA
cctgaaatgctttcatttatacagaatacggggatcgcacggatacttccgctccggaacggacgactgataacc

SEQ ID NO: 854752 - DNA, 75 bp, synthetic construct
  source 1..75: mol_type = other DNA
aagcggggatcaacctgctggcccgcagcgctgtcacccaggcgcgtcagcgcgtgggggccgccccggtggaat

SEQ ID NO: 854753 - DNA, 75 bp, synthetic construct
  source 1..75: mol_type = other DNA
ataaagatagctcgggtaattttgattatccgtttgttatcttatcatcaggacgtgaaaaaaaaaatttgggaa

SEQ ID NO: 854754 - DNA, 75 bp, synthetic construct
  source 1..75: mol_type = other DNA
ggacgtgaaaaaaatttgggaaaaacgatctacttgaattatccagggacatttcaacaaaagacgataagaagc

SEQ ID NO: 854755 - DNA, 75 bp, synthetic construct
  source 1..75: mol_type = other DNA
catgatcgcctggcggttcgcttatcactcattatcagccgactgatggccggagaatctctgtcactaaaaaca

SEQ ID NO: 854756 - DNA, 75 bp, synthetic construct
  source 1..75: mol_type = other DNA
caggttcttttagattccagagcccttgatgactttttgaaaagctatgatagcttaaaactaagttacgctacg

SEQ ID NO: 854757 - DNA, 75 bp, synthetic construct
  source 1..75: mol_type = other DNA
tggcaacccgttactacggcgtagcgtatggttactccaaaggtatcgatatcgttaaagatatgggtggtggct

SEQ ID NO: 854758 - DNA, 75 bp, synthetic construct
  source 1..75: mol_type = other DNA
gatattgaattggttaattgtgatatcacttcatttaagggggggaggagtctcggcagcaaaaaaagggactgt

SEQ ID NO: 854759 - DNA, 75 bp, synthetic construct
  source 1..75: mol_type = other DNA
tgctgataatccggaaaatattctcgcctggttagggccggcaattggtccacgcgcgttcgaagtgggggggag

SEQ ID NO: 854760 - DNA, 75 bp, synthetic construct
  source 1..75: mol_type = other DNA
tactggaagagacggtttcctgttttgctgataatccggaaaatattctcgcctggttagggccggcaattggtc

SEQ ID NO: 854761 - DNA, 75 bp, synthetic construct
  source 1..75: mol_type = other DNA
ggttcgcgaggcgtttatggcagtagacgccaaagcgagtacagctttcattcagcatggtgataagtatctggc

SEQ ID NO: 854762 - DNA, 75 bp, synthetic construct
  source 1..75: mol_type = other DNA
taacccggatcacgttgaggagaatcgcaagcggctttttgctgcgggcaacttgccttcaaaaccggtttggct

SEQ ID NO: 854763 - DNA, 75 bp, synthetic construct
  source 1..75: mol_type = other DNA
aaattttcggtggtaatcgctgtacatacactgaaaatgagactttcttctcttatcgtcgcgacaagtgcacgg

SEQ ID NO: 854764 - DNA, 75 bp, synthetic construct
  source 1..75: mol_type = other DNA
taacccggatcacgttgaggagaatcgcaagcgactttttgctgcgggcaatttgccttcaaaaccggtctggct

SEQ ID NO: 854765 - DNA, 75 bp, synthetic construct
  source 1..75: mol_type = other DNA
cttcattttcgggtccatgagcggttcggcgagtgtgaacctcagccgggataaaatgcacagtaactacgacag

SEQ ID NO: 854766 - DNA, 75 bp, synthetic construct
  source 1..75: mol_type = other DNA
agctggtgacggctacggtgataacgctgaagtgtggtcattagcagccaagtatgatgcaaataatatctatgc

SEQ ID NO: 854767 - DNA, 75 bp, synthetic construct
  source 1..75: mol_type = other DNA
agtttggtgttttgctttctgcattttctctgtcttatggtttttcacaacttccttccggtattttgctagacc

SEQ ID NO: 854768 - DNA, 75 bp, synthetic construct
  source 1..75: mol_type = other DNA
cttaagcttactggcgaaccttatgcctcaaaacgagcagatgcctcttatagcaatacgcctggcacggtttgc

SEQ ID NO: 854769 - DNA, 75 bp, synthetic construct
  source 1..75: mol_type = other DNA
tcaacctcggtgcccattgtggcgataacccggatcacgttgaggagaatcgcaagcgactttttgctgcgggca

SEQ ID NO: 854770 - DNA, 75 bp, synthetic construct
  source 1..75: mol_type = other DNA
tctggttttgttagtgatgttattggttccgtaggcggtgaatttgttggtaataaagttaaagataagatagga

SEQ ID NO: 854771 - DNA, 75 bp, synthetic construct
  source 1..75: mol_type = other DNA
ttctaacacatgttaaaacaagtaagtacaagcccattattatcatgttgtggattatttcttttcttcagcgtg

SEQ ID NO: 854772 - DNA, 75 bp, synthetic construct
  source 1..75: mol_type = other DNA
ccatcaccagcctccctcaggcagaaaaggacggacgaaccccgctagccgcggtctctgccgatatgattgcgg

SEQ ID NO: 854773 - DNA, 75 bp, synthetic construct
  source 1..75: mol_type = other DNA
atgtctggatgtcgcacctgctggaaaaactaccggaagaaaaacaggcatcggcgctgaaagacgataacccgg

SEQ ID NO: 854774 - DNA, 75 bp, synthetic construct
  source 1..75: mol_type = other DNA
tactgaacgccctataaaccagacaatttatcgcgaatttaacggtatatcggttttatgggatccaatatatgc

SEQ ID NO: 854775 - DNA, 75 bp, synthetic construct
  source 1..75: mol_type = other DNA
ttaatgagctggctaaagagaaattgcagtcttatgtgatgcgcgcaatgagtgaactcggcgaactggcgagcg

SEQ ID NO: 854776 - DNA, 75 bp, synthetic construct
  source 1..75: mol_type = other DNA
ttcacgccgcatgaattgtggctgctgactgacctgaccgaagactcaaccctcattgatggttttttagcgcag

SEQ ID NO: 854777 - DNA, 75 bp, synthetic construct
  source 1..75: mol_type = other DNA
atgtttgattataagatttccaaacatccgcactttgacgaagcctgccgcgctttcgcgctgcgtcacaacatg

SEQ ID NO: 854778 - DNA, 75 bp, synthetic construct
  source 1..75: mol_type = other DNA
acccgcacgcaggcgcccggggctgtttcacaggaggggccggatgtgcagcaggcggtgacacaggccattgcc

SEQ ID NO: 854779 - DNA, 75 bp, synthetic construct
  source 1..75: mol_type = other DNA
tatgtggcactgccggcgtttgaccgtaacggcaagtcagcaggtatctggctgaacccactgaccacggatgac

SEQ ID NO: 854780 - DNA, 75 bp, synthetic construct
  source 1..75: mol_type = other DNA
accgggtgaccgtacatccggagaaaagtgtcccccggacggccggttacagcgatgcggtcagtgttctggcac

SEQ ID NO: 854781 - DNA, 75 bp, synthetic construct
  source 1..75: mol_type = other DNA
atgcgcgaggataccatgaatacagtcacactgaatgaggccctactggcgactgtcgcgggtgaagtcgtcata

SEQ ID NO: 854782 - DNA, 75 bp, synthetic construct
  source 1..75: mol_type = other DNA
aatcacagctccgggtgattaccctgaaaataccacaactatcgccccgttaacaccatacgataaatgggatgg

SEQ ID NO: 854783 - DNA, 75 bp, synthetic construct
  source 1..75: mol_type = other DNA
gccacccgtatgatactggaaacgtccgaccgtttcacggtggtgcagggctatgccggtgtgggtaagaccaca

SEQ ID NO: 854784 - DNA, 75 bp, synthetic construct
  source 1..75: mol_type = other DNA
acaggcgcgtctacaggctaatccggcaatgtcgagcgtggttgataccatgaccggcatcggcgcaacatttgg

SEQ ID NO: 854785 - DNA, 75 bp, synthetic construct
  source 1..75: mol_type = other DNA
gcaggcccgtttacaggctaatcctgcgatggcgagtgcagttgataccatgactggtcttggtgcttcattcgg

SEQ ID NO: 854786 - DNA, 75 bp, synthetic construct
  source 1..75: mol_type = other DNA
gttgaaccctgctcaacctcatttattaaccgcaccagaaatttggctgcttaccgatctgactgaagattcgac

SEQ ID NO: 854787 - DNA, 75 bp, synthetic construct
  source 1..75: mol_type = other DNA
ttaaccgcaccagaaatctggctgcttaccgatctgacagaagattcaacgctggtagatggttttctggcacag

SEQ ID NO: 854788 - DNA, 75 bp, synthetic construct
  source 1..75: mol_type = other DNA
gctgtcgccggcgtcccacgttatggtctggatggtcaccccaaagggcaggtctcagaatctgaagcacagagt

SEQ ID NO: 854789 - DNA, 75 bp, synthetic construct
  source 1..75: mol_type = other DNA
tcccgccgcgtatatctgcagcggacagctgtcgccggcgtccctcgttatggtctggatggtcaccctgaaggg

SEQ ID NO: 854790 - DNA, 75 bp, synthetic construct
  source 1..75: mol_type = other DNA
cgaatacgcagactataacgtttgtggccgataaggcgaccgcaaccgtctccggtattgaggtgattggcaact

SEQ ID NO: 854791 - DNA, 75 bp, synthetic construct
  source 1..75: mol_type = other DNA
tgcattcgcactgcgacacaatctggtgaaactggcagaacgtgcaggcatgaatgtacagattctgcggaacaa

SEQ ID NO: 854792 - DNA, 75 bp, synthetic construct
  source 1..75: mol_type = other DNA
tgaatgtgcagattctgcggaacaagctgaacccagctcaacctcatttattaaccgcaccagaaatctggctgc

SEQ ID NO: 854793 - DNA, 75 bp, synthetic construct
  source 1..75: mol_type = other DNA
tgaaggagagagtgtggccgggtggacgcttgtgtatgccgtccatggtgaagcaacgttccgggtgaatggtcg

SEQ ID NO: 854794 - DNA, 75 bp, synthetic construct
  source 1..75: mol_type = other DNA
cgccggggggcgctgtcatatgcggcggtggcaccccggggatataccagtctgtcgcaggtggcactgctcggg

SEQ ID NO: 854795 - DNA, 75 bp, synthetic construct
  source 1..75: mol_type = other DNA
cccgttctgacggaggttcagcagacacagcttaaggaactgccggcgtcccttgagcagattcaggcggcacag

SEQ ID NO: 854796 - DNA, 75 bp, synthetic construct
  source 1..75: mol_type = other DNA
gcaggcccgtttacaggctaatcctgcgatggcaagtgcagttgatactgtaactggcctcggtgcgtcattcgg

SEQ ID NO: 854797 - DNA, 75 bp, synthetic construct
  source 1..75: mol_type = other DNA
actgaagggggaggaaaaagagcgggcccgactggggtatgcggcggatgacctgggttttgtgggggatccgta

SEQ ID NO: 854798 - DNA, 75 bp, synthetic construct
  source 1..75: mol_type = other DNA
actgaatggggaggaaaaagagcgggcccggctggggtatgcggcggatgaccttggttttgtgggggatccgta

SEQ ID NO: 854799 - DNA, 75 bp, synthetic construct
  source 1..75: mol_type = other DNA
actgaatggggaggaaaaagagcgggcccgtctggggtatgcggcggatgacctgggttttgtgggggatccgta

SEQ ID NO: 854800 - DNA, 75 bp, synthetic construct
  source 1..75: mol_type = other DNA
aactcaccttcaccgtgaaggatgcgtacgggaaccttgtcaccgggctgaagccagatgcaccgcagtttagtg

SEQ ID NO: 854801 - DNA, 75 bp, synthetic construct
  source 1..75: mol_type = other DNA
actgaagggggaggaaaaagagcgggcccggctggggtatgcggcggatgacctaggttttgtgggggatccgta

SEQ ID NO: 854802 - DNA, 75 bp, synthetic construct
  source 1..75: mol_type = other DNA
actgaagggggaggaaaaagagcgggcccgtctggggtatgcggcggatgaccttggttttgtgggggatccgta

SEQ ID NO: 854803 - DNA, 75 bp, synthetic construct
  source 1..75: mol_type = other DNA
tgaacagaaatattgctgccagaagcgcggcccagaatgtgctgaacagtacaacggcggtgggctcacgtctga

SEQ ID NO: 854804 - DNA, 75 bp, synthetic construct
  source 1..75: mol_type = other DNA
tgaacagaaatattgctgccagaaccgctgcccagaatgcgctgaacagtacaacggcggtgggctcacgtctga

SEQ ID NO: 854805 - DNA, 75 bp, synthetic construct
  source 1..75: mol_type = other DNA
tgaacagaaatattgctgccagaatcgccgcccagaatgcgctgaacagtacaacggcggtgggctcacgtctga

SEQ ID NO: 854806 - DNA, 75 bp, synthetic construct
  source 1..75: mol_type = other DNA
actgaaaggggaggaaaaagagcgggcccggctggggtatgcggcggatgacctgggttttgtgggggatccgta

SEQ ID NO: 854807 - DNA, 75 bp, synthetic construct
  source 1..75: mol_type = other DNA
cagagcgtgagctggccctgtccagactgaaaggggacgaaaaagagcggggccgactggggtatgcggcggatg

SEQ ID NO: 854808 - DNA, 75 bp, synthetic construct
  source 1..75: mol_type = other DNA
cgtgatgaatatgccgccatgccggaaacggtttccagtagtatcacgaaggtggaaaacgcctttatggcctgg

SEQ ID NO: 854809 - DNA, 75 bp, synthetic construct
  source 1..75: mol_type = other DNA
gaaaatcagagacggaaaaagcggaagacagtttttcccggcttctgaagcagcagaaagagcaactggcactgg

SEQ ID NO: 854810 - DNA, 75 bp, synthetic construct
  source 1..75: mol_type = other DNA
tcgcgtatggggcaggattactaccgcaccatgcagaacggaggtcgacagtctgctgctgcatcccgtgaaatg

SEQ ID NO: 854811 - DNA, 75 bp, synthetic construct
  source 1..75: mol_type = other DNA
tgctgaatggtgttgcagacaatattgataccgtggctgctgcagctggcgcactggttgccgtcggggtagccc

SEQ ID NO: 854812 - DNA, 75 bp, synthetic construct
  source 1..75: mol_type = other DNA
tggtgtgccggggcttgtcatgctgggggctgcggcctggtacacgatgtatcagaatcaggagcaggccagaga

SEQ ID NO: 854813 - DNA, 75 bp, synthetic construct
  source 1..75: mol_type = other DNA
ggcactggccggtcagaacacggagctggcgaagctgaagtaccagacagcgctgggtgaactgaaaaccctgac

SEQ ID NO: 854814 - DNA, 75 bp, synthetic construct
  source 1..75: mol_type = other DNA
cctgattgaccagcaaaaaatccgggaacagttgcgatcccgggaagagaccctgaagaatgataatgtggctgc

SEQ ID NO: 854815 - DNA, 75 bp, synthetic construct
  source 1..75: mol_type = other DNA
actgacacgggcagcggacggctctcttggggtcagggccattggcaatgtgaatggtggcggtggatttgttta

SEQ ID NO: 854816 - DNA, 75 bp, synthetic construct
  source 1..75: mol_type = other DNA
gataaccctgaccgtcgtggacagctatggtaacccgttgcaggggcaagaagttacgctgactttaccgcaggg

SEQ ID NO: 854817 - DNA, 75 bp, synthetic construct
  source 1..75: mol_type = other DNA
acagaagatatttataaacggctgattaaacagcaaaaagaacaaatagcactggcagggcagaatactgaactg

SEQ ID NO: 854818 - DNA, 75 bp, synthetic construct
  source 1..75: mol_type = other DNA
gacacttaaacagttgattcatatgctaatcatcctgatcatattgattattgttatgccggtaagcgtaaaaga

SEQ ID NO: 854819 - DNA, 75 bp, synthetic construct
  source 1..75: mol_type = other DNA
aggcatcacagcgtgaattaatggcgatcagccagagaacggggacggcgttttctgataacgccagcctttttg

SEQ ID NO: 854820 - DNA, 75 bp, synthetic construct
  source 1..75: mol_type = other DNA
cagcggacggctctcttggagtcagagccattggcaatgtgaatggtggcggtggatttgtttattctcccgtgt

SEQ ID NO: 854821 - DNA, 75 bp, synthetic construct
  source 1..75: mol_type = other DNA
ctcggctttgtgggagaggcgtatcggacagccagacagaattatatcaataactcactggatgcctggcgaaat

SEQ ID NO: 854822 - DNA, 75 bp, synthetic construct
  source 1..75: mol_type = other DNA
gacgcagattgccacggcgcgggcaagggcagccgtgtaccgtgctcagcaggcagtggcggcagcccgcgggac

SEQ ID NO: 854823 - DNA, 75 bp, synthetic construct
  source 1..75: mol_type = other DNA
gacgaaacaatggctgtccgcttcgcccgactgcaaagtggcaccggttgcgcaggccggtgaggaatcgcaggc

SEQ ID NO: 854824 - DNA, 75 bp, synthetic construct
  source 1..75: mol_type = other DNA
ggatgttgttgatgatagggagtcagatgatggtgtctgactgggagccatcattacttacgcagcttgaacaaa

SEQ ID NO: 854825 - DNA, 75 bp, synthetic construct
  source 1..75: mol_type = other DNA
cgcagaatatggcgcataaaaaacgctttgccagccaggtcattaaacgctttgaaacaggtattgaaggctttt

SEQ ID NO: 854826 - DNA, 75 bp, synthetic construct
  source 1..75: mol_type = other DNA
ggtaaccctgaccgttgtggacacctatggtaacccgttgcagggacaaaatgtgacgctgactctgccgaaagg

SEQ ID NO: 854827 - DNA, 75 bp, synthetic construct
  source 1..75: mol_type = other DNA
ccacccgggactattttgcccgcagaacgtgaactttcagaattaattggtgtaacgagaacgacgttacgcgaa

SEQ ID NO: 854828 - DNA, 75 bp, synthetic construct
  source 1..75: mol_type = other DNA
tggccgatcacgccgatgcttttgctgatctggattacaacattttccgcggtctggcgtttgcctctggcaacc

SEQ ID NO: 854829 - DNA, 75 bp, synthetic construct
  source 1..75: mol_type = other DNA
tatcgtcagcgatatgggcgggaatgtgctgcaaaaactcaccgaaggcgcgtcgattctcggactgtttgtgat

SEQ ID NO: 854830 - DNA, 75 bp, synthetic construct
  source 1..75: mol_type = other DNA
cttacataaacttagataaaagtgctggtggtgtttttaatgaaatgaaagcgagggaaaaggcactgcgtaaag

SEQ ID NO: 854831 - DNA, 75 bp, synthetic construct
  source 1..75: mol_type = other DNA
ctgcatggattatcgaagagttgcggggaatcattgccagccaggataaagtggcggcagttgccgcccttgatg

SEQ ID NO: 854832 - DNA, 75 bp, synthetic construct
  source 1..75: mol_type = other DNA
aaaccagcaatccggttccactggtcaccatcgacagctacgacgataaagcctggcgtgacacgctgttaaaag

SEQ ID NO: 854833 - DNA, 75 bp, synthetic construct
  source 1..75: mol_type = other DNA
ctccggtagttcaccacagaccaccgccacgtctgaaagcggcgtgacgcaacccagtgctccggctccccaaat

SEQ ID NO: 854834 - DNA, 75 bp, synthetic construct
  source 1..75: mol_type = other DNA
attctcgaccaactttgccctggtttgctggcgctcggtctgacgctgcttatggttcgtctgctcaacaaaaaa

SEQ ID NO: 854835 - DNA, 75 bp, synthetic construct
  source 1..75: mol_type = other DNA
tttgatgcctgtattgattcgtggaaagcggccacggaattaaataattcgatttatatgtggagcatcctgatg

SEQ ID NO: 854836 - DNA, 75 bp, synthetic construct
  source 1..75: mol_type = other DNA
atggcgacgttacgtgaactgattatcaaaatttcggcaaattcgcagtcattccagtcggagatccagcgggct

SEQ ID NO: 854837 - DNA, 75 bp, synthetic construct
  source 1..75: mol_type = other DNA
tgtgcttaacggcgttgttaattccgcttatcacgctgtgactgaaagaattgaggtattcgctgctcagaagcg

SEQ ID NO: 854838 - DNA, 75 bp, synthetic construct
  source 1..75: mol_type = other DNA
cgatagtgccattaacatcgggatcagaggttctctgagcggttatgttcagcccttggtttcatcacgtatatt

SEQ ID NO: 854839 - DNA, 75 bp, synthetic construct
  source 1..75: mol_type = other DNA
tacgcagattgccacggcgcgggcaagggcagccgtgtaccgtgcacagcaggcagtggcggcagcccgcgggac

SEQ ID NO: 854840 - DNA, 75 bp, synthetic construct
  source 1..75: mol_type = other DNA
aacgcagattgccacggcgcgggcaagtgcagccgtgtaccgtgcccagcaggcagtggcggcagcccgcgggac

SEQ ID NO: 854841 - DNA, 75 bp, synthetic construct
  source 1..75: mol_type = other DNA
aattcggtcaatgaaagtggtgaccggatcgtacgtgcactggctgcgggtatgggcgtggcccgtaaagatctg

SEQ ID NO: 854842 - DNA, 75 bp, synthetic construct
  source 1..75: mol_type = other DNA
tgttacagcaccgggcattaatgggaaaatgagtgagctaaatgctgcatttggtttagttcagttgaaacatat

SEQ ID NO: 854843 - DNA, 75 bp, synthetic construct
  source 1..75: mol_type = other DNA
cttttttaccggatttaaatgaatttatcccgtatcttgaaaagatttgggaaaataaatggttgacaaataatg

SEQ ID NO: 854844 - DNA, 75 bp, synthetic construct
  source 1..75: mol_type = other DNA
aaccatttcttcctgagttatcggagtttataccattcctagagaaaatatgggaaaataaatggttgacaaata

SEQ ID NO: 854845 - DNA, 75 bp, synthetic construct
  source 1..75: mol_type = other DNA
gaaagagcgattaggctttgaaaaagacagcaagaaatcgttccattcattccgtcacacgttttctacaaggct

SEQ ID NO: 854846 - DNA, 75 bp, synthetic construct
  source 1..75: mol_type = other DNA
ttggaagcagaaaccgcgtttaaatcctcggagatttcatcaaaagctgcatggttcgttgattttcccggtgta

SEQ ID NO: 854847 - DNA, 75 bp, synthetic construct
  source 1..75: mol_type = other DNA
aactccctttgcgtaaacgcattaaactggtcatcccgctttttaaaggtgttatgaccatcctctgtggttaca

SEQ ID NO: 854848 - DNA, 75 bp, synthetic construct
  source 1..75: mol_type = other DNA
gaatctggccgcgcccgatgaatacggcttttatgccaacgtcaatccacatgttgatcatccccgttggtcgca

SEQ ID NO: 854849 - DNA, 75 bp, synthetic construct
  source 1..75: mol_type = other DNA
gctggaagagcgtatttatcgtatgcgctgcgtagaagcatggtcgatggtggtgccgtggattggttttccgct

SEQ ID NO: 854850 - DNA, 75 bp, synthetic construct
  source 1..75: mol_type = other DNA
ggccaccgaacgttttattggttcaggcggcattctggatgtacaacgccagccaacgctgctgtttaacggata

SEQ ID NO: 854851 - DNA, 75 bp, synthetic construct
  source 1..75: mol_type = other DNA
gaagaagctgtacgtggcgtgaccaaagagatccgcattccgactctggaagagtgtgacgtttgccacggtagc

SEQ ID NO: 854852 - DNA, 75 bp, synthetic construct
  source 1..75: mol_type = other DNA
ggcggataagactacggcgaccatctccagtattgaggtgattggcaaccgtgcagtggcggatggcaaagccaa

SEQ ID NO: 854853 - DNA, 75 bp, synthetic construct
  source 1..75: mol_type = other DNA
caactcgctgatgttcatgaaaaacctgacaatttctggcggattcctgctgctggcaattaccggtccgggcgc

SEQ ID NO: 854854 - DNA, 75 bp, synthetic construct
  source 1..75: mol_type = other DNA
ccgggtgaagcggcaccgtaccagaagcagataacacgggatgtggtgctggacagtcgttcaccggactgcgaa

SEQ ID NO: 854855 - DNA, 75 bp, synthetic construct
  source 1..75: mol_type = other DNA
ctcaaccgtgcgctgcgtgaacagtcctgctcccgggtacggcggagcctgcttcgtctgccgtgggaacatgac

SEQ ID NO: 854856 - DNA, 75 bp, synthetic construct
  source 1..75: mol_type = other DNA
ccatgacgggctggtacagcgtctggacacgctgctgttgcagctacgggcgaagtgccagcgtctgatggcgat

SEQ ID NO: 854857 - DNA, 75 bp, synthetic construct
  source 1..75: mol_type = other DNA
tggtgccgtggattggttttccgctgcacaaattgctggcgcttgccgaacccaccagcaatgcgaagtatgtcg

SEQ ID NO: 854858 - DNA, 75 bp, synthetic construct
  source 1..75: mol_type = other DNA
ctgcactttctttgcctcacgctgcgcatgccgatctgcttagctggtttaaagggaacgatcgcccacccgccc

SEQ ID NO: 854859 - DNA, 75 bp, synthetic construct
  source 1..75: mol_type = other DNA
atgaatgctatcccttatttcgactatagcatggcccccttctggccatcttatcagaacaaagtcgtcggcgtt

SEQ ID NO: 854860 - DNA, 75 bp, synthetic construct
  source 1..75: mol_type = other DNA
gggacagtcaccgcatcgctgatgatgaaaaagttagccagttacccaaaacagaatggacttgccaaagcgctg

SEQ ID NO: 854861 - DNA, 75 bp, synthetic construct
  source 1..75: mol_type = other DNA
tgagaaatgggtgaccgatactgaggcacagcacggcgcagcagtagatgcagcagaagcacagcgccagtcgct

SEQ ID NO: 854862 - DNA, 75 bp, synthetic construct
  source 1..75: mol_type = other DNA
tccatcagtctgattcaactgaaattacgggccggacggaatctgacgcaggcagaaaccagccgacttaacacg

SEQ ID NO: 854863 - DNA, 75 bp, synthetic construct
  source 1..75: mol_type = other DNA
gttcagccacggttgagcatggaaaataccacggtagctgctgataataatgtggagaaaaatgtcgcgtcgttt

SEQ ID NO: 854864 - DNA, 75 bp, synthetic construct
  source 1..75: mol_type = other DNA
ttagatgctcctggctcatataaagctggttatgcaatttgccgttctgcagattttaactcatgggaatatgtg

SEQ ID NO: 854865 - DNA, 75 bp, synthetic construct
  source 1..75: mol_type = other DNA
caactcgatacggatagcattcgcgagcgtcgggtactggcaggcagccgctatgacctggttgagcgtaataac

SEQ ID NO: 854866 - DNA, 75 bp, synthetic construct
  source 1..75: mol_type = other DNA
cggcagaagcacagcgtcagtcactgattgatactgcaatggcttccattagtctgattcagctgaaattacagg

SEQ ID NO: 854867 - DNA, 75 bp, synthetic construct
  source 1..75: mol_type = other DNA
atgtctcaggttcaattttctcataactcgctgttttgcgtagatattatcaagacttataaacctaatttcacg

SEQ ID NO: 854868 - DNA, 75 bp, synthetic construct
  source 1..75: mol_type = other DNA
gatggcgttattgctgttctttttattttgtatatttatctctctaaaagagcaaaaggtatatttatacactaa

SEQ ID NO: 854869 - DNA, 75 bp, synthetic construct
  source 1..75: mol_type = other DNA
gcaaattcgggacgcctggggaagcatggttctaaaaaatgttgtacgtgaaacggatgaagttggtaaaggtca

SEQ ID NO: 854870 - DNA, 75 bp, synthetic construct
  source 1..75: mol_type = other DNA
atgaatatattaatactggtgtaagtatgcccgcctgttccactggtattgacccgggcgaaaacattcctggaa

SEQ ID NO: 854871 - DNA, 75 bp, synthetic construct
  source 1..75: mol_type = other DNA
aactgaaattgcaggccgggcgaaaactgacgcagacagaaaccacccggcttaacgtcgtgctggattacattg

SEQ ID NO: 854872 - DNA, 75 bp, synthetic construct
  source 1..75: mol_type = other DNA
catgcccaaacgctggcagcagcggaactctcaaagcaaaactttattaatcttatttgcggctttctgcgcaaa

SEQ ID NO: 854873 - DNA, 75 bp, synthetic construct
  source 1..75: mol_type = other DNA
tcctcactgcctgcgcatcaggtactgcatcagctaccgctggtctgcaaaatcggtgcgcccgatgatgtcacg

SEQ ID NO: 854874 - DNA, 75 bp, synthetic construct
  source 1..75: mol_type = other DNA
ccttctgagtccccctcctccggacgtccgctcacccaggcggaggcagagcaccaggcctctgacaggatccgg

SEQ ID NO: 854875 - DNA, 75 bp, synthetic construct
  source 1..75: mol_type = other DNA
gggaaaaacggcgtgaggcattacaaaaactgcttgcccgcatcaacacacagcatcctgacgcccgccccccgg

SEQ ID NO: 854876 - DNA, 75 bp, synthetic construct
  source 1..75: mol_type = other DNA
ttttaggcgtttccaaatcagcggaagagcgtgaaatcaaaaaggcctacaaacgcctggccatgaaatatcacc

SEQ ID NO: 854877 - DNA, 75 bp, synthetic construct
  source 1..75: mol_type = other DNA
atgacaaacgacgccaggtcatcttccctttccagtggcatttccccttcagttaatcgtacatcacaggcggaa

SEQ ID NO: 854878 - DNA, 75 bp, synthetic construct
  source 1..75: mol_type = other DNA
gccaggcggagagcgaaccttaccggcaggtgacagtgtcacgcggagaggttgtctccattctgtttgttgagc

SEQ ID NO: 854879 - DNA, 75 bp, synthetic construct
  source 1..75: mol_type = other DNA
caacacacagatccttcagggaaactacggcagcattaccggcagggtgggaatgcctgatggcgaggcgctggc

SEQ ID NO: 854880 - DNA, 75 bp, synthetic construct
  source 1..75: mol_type = other DNA
aacggatgaaagacggccagaaattaaaggagctggacggtgctttgctggagatgctggaaatcaaaagctcgc

SEQ ID NO: 854881 - DNA, 75 bp, synthetic construct
  source 1..75: mol_type = other DNA
ctttctatgaatatctgctaacgcaccagtggcgaaaagtgcgcgtcacccgtaccccggcctatgacgtgatgg

SEQ ID NO: 854882 - DNA, 75 bp, synthetic construct
  source 1..75: mol_type = other DNA
tgaaagacagccagaaactaaaggagctggacggtgctttgctggaaatgctggaaataaaaagcacgctcgata

SEQ ID NO: 854883 - DNA, 75 bp, synthetic construct
  source 1..75: mol_type = other DNA
tctgaaggtcaatgcatatgccctgaatgaacgaacaggaatgtcaaccgtggccagcgacgtgaaccaccgctg

SEQ ID NO: 854884 - DNA, 75 bp, synthetic construct
  source 1..75: mol_type = other DNA
ccccagcgccgaccgcgcacactatgttgacggtatgaagtttgagccggaagtgttcgacgtggtgaaagggct

SEQ ID NO: 854885 - DNA, 75 bp, synthetic construct
  source 1..75: mol_type = other DNA
ccccgtcaggcgacggatattacctcaatctccacaacacactggcagataaggacgaattcaacgagaagaacc

SEQ ID NO: 854886 - DNA, 75 bp, synthetic construct
  source 1..75: mol_type = other DNA
ttgaggacgagaaccgacgcctcaaacagatgtttgccgatctcagtcttgagaaccgggcactgaaagatgtca

SEQ ID NO: 854887 - DNA, 75 bp, synthetic construct
  source 1..75: mol_type = other DNA
ccaaccggcgagcacaacagcccgcgttcaaagagcttctttgatggtgtgaagaagtttttcgacgacctgact

SEQ ID NO: 854888 - DNA, 75 bp, synthetic construct
  source 1..75: mol_type = other DNA
gccaatcagcgtgtgcatgcaaccagcctgggttatttctggtgccgggagttcggcaagatgtatggcaggaaa

SEQ ID NO: 854889 - DNA, 75 bp, synthetic construct
  source 1..75: mol_type = other DNA
atttacgtttccctgagtatatgcctgccaccatcatggataccgatttagattcagcggtgatttctcgttttt

SEQ ID NO: 854890 - DNA, 75 bp, synthetic construct
  source 1..75: mol_type = other DNA
cgggatgccctgacgcccggaaagctgaaaacgcaggcagtacgcctgcgttttgctgatggtacgctgatcgat

SEQ ID NO: 854891 - DNA, 75 bp, synthetic construct
  source 1..75: mol_type = other DNA
cgttcagtgatttcgcccgcgatcgccgtggagtgtgcgatccggaagcccgttgcctcgccggtaatcccggct

SEQ ID NO: 854892 - DNA, 75 bp, synthetic construct
  source 1..75: mol_type = other DNA
gtggtcgaaacgccggtaggtctgaacgagaagcagaaacaactgctgcaagatctgcaagaaagcttcggaggc

SEQ ID NO: 854893 - DNA, 75 bp, synthetic construct
  source 1..75: mol_type = other DNA
atgaatgctattccttatttcgactatagcctggcacccttctgggcatcttatcagaacaaagtcatcggcgtc

SEQ ID NO: 854894 - DNA, 75 bp, synthetic construct
  source 1..75: mol_type = other DNA
acgcgcaactcgaaggcttaagtcgtaataccaggcagcccaatgaaacgacgttggttagtggacaattgacct

SEQ ID NO: 854895 - DNA, 75 bp, synthetic construct
  source 1..75: mol_type = other DNA
ggcgtcgaaggtggagcctattatgtttataaattaggtgctcgtgctgatatgagtacccgatggtatcttgat

SEQ ID NO: 854896 - DNA, 75 bp, synthetic construct
  source 1..75: mol_type = other DNA
cgtcagtgcgctgatgaatgcaacccccggacgtgatctctgctggatcctaacccgtcatcctgaaaagccgga

SEQ ID NO: 854897 - DNA, 75 bp, synthetic construct
  source 1..75: mol_type = other DNA
aacgccttcagtgacagaaaaatctggttcggtatggattttatcgaaaccgtcagtgcgctgatgaatgcaaca

SEQ ID NO: 854898 - DNA, 75 bp, synthetic construct
  source 1..75: mol_type = other DNA
cgttcagtgatttcgcccgcgatcgccgtggagtgtgcgatccggaagcccgttgcctcgctggtaatccctggt

SEQ ID NO: 854899 - DNA, 75 bp, synthetic construct
  source 1..75: mol_type = other DNA
atactgaggcacagcataacgccgcagtagacgcggcagaagtacggcgccagtcactgattgatgctgctatgg

SEQ ID NO: 854900 - DNA, 75 bp, synthetic construct
  source 1..75: mol_type = other DNA
tctgcagattttaactcatgggaatatgtgccagaccatcgcggtgaaatcgtctatagcaccgaaacaggagaa

SEQ ID NO: 854901 - DNA, 75 bp, synthetic construct
  source 1..75: mol_type = other DNA
atgctcctggcacacataaggctggttatgcaatctgccgttcggcagattttaactcatgggaatatgtgccag

SEQ ID NO: 854902 - DNA, 75 bp, synthetic construct
  source 1..75: mol_type = other DNA
taacaccatacgataaatgggatggtgaaaaatgggtgacagatactgaggcacaacatcgtgccgcagtagaag

SEQ ID NO: 854903 - DNA, 75 bp, synthetic construct
  source 1..75: mol_type = other DNA
acaccgaaacgggagacgccaaagaaatcacagctccgggtgattatcctgaaaatacaaccactatcgccccgt

SEQ ID NO: 854904 - DNA, 75 bp, synthetic construct
  source 1..75: mol_type = other DNA
gttatgctatctgccgttcgatagatttaaactcatgggaatatgtgccagaccatcgcggtgaaatcgtctata

SEQ ID NO: 854905 - DNA, 75 bp, synthetic construct
  source 1..75: mol_type = other DNA
gcggaatactggcgcgattatttgaaactgagcgccaatggttatattcgggcttctggctggaaaaaatcgccg

SEQ ID NO: 854906 - DNA, 75 bp, synthetic construct
  source 1..75: mol_type = other DNA
tgagaaatgggtaaccgatactgaggcacagcatagcgccgcagtagacgcggcagaagcacagcgccagtcact

SEQ ID NO: 854907 - DNA, 75 bp, synthetic construct
  source 1..75: mol_type = other DNA
cggtattcctgcatattcctgtttagatgctccaggtgcctacaaagctggttatgcaatctgccgctctgcaga

SEQ ID NO: 854908 - DNA, 75 bp, synthetic construct
  source 1..75: mol_type = other DNA
aatcacagcaccgggtgattaccctgataatacaaccactctcgcaccgttaacgccatacgataaatgggatgg

SEQ ID NO: 854909 - DNA, 75 bp, synthetic construct
  source 1..75: mol_type = other DNA
gcacagcatagcgccgcagtagatgcagcagaagcacaacgccagtcgctgattgatactgcaatggcttccatc

SEQ ID NO: 854910 - DNA, 75 bp, synthetic construct
  source 1..75: mol_type = other DNA
atggcgcagctgttacagtggattatatcggtgccatcaaagacgattatgtcacgctttcaccgttaacgccat

SEQ ID NO: 854911 - DNA, 75 bp, synthetic construct
  source 1..75: mol_type = other DNA
gattacattgacgcggtgacggcaacagataccagcaccgcgccggatgttatctggcctgaactgccggaggcg

SEQ ID NO: 854912 - DNA, 75 bp, synthetic construct
  source 1..75: mol_type = other DNA
gtatctggctgaacccgctgaccacggatgacggaaacgggctgcggggattcagcggtgaaggccgggtgaaag

SEQ ID NO: 854913 - DNA, 75 bp, synthetic construct
  source 1..75: mol_type = other DNA
cgtttggttttcttgttcattaagtcacctgttttgtgttgtggtgagaatatcacctttcatcaggtggccaaa

SEQ ID NO: 854914 - DNA, 75 bp, synthetic construct
  source 1..75: mol_type = other DNA
ctggcacaggatcgtccgccgctggctattgtgtcagggcagggtggcgcagccgggcagcgtgagcgggtggct

SEQ ID NO: 854915 - DNA, 75 bp, synthetic construct
  source 1..75: mol_type = other DNA
tccgctatgcccggctggccggagattttgcggccagcgtgaaagccggagaagagagcgtggcacaggtcagcg

SEQ ID NO: 854916 - DNA, 75 bp, synthetic construct
  source 1..75: mol_type = other DNA
tctgagggtgacagggaaaattcccggactccgcgtctccggcggtgaccgcctgcaggtgtcgtccgtcagtga

SEQ ID NO: 854917 - DNA, 75 bp, synthetic construct
  source 1..75: mol_type = other DNA
tgattcatgatgcacgggaaaaggccggagaactggggcaggtgcaggtcatggtgcctgtcctgaacacagcga

SEQ ID NO: 854918 - DNA, 75 bp, synthetic construct
  source 1..75: mol_type = other DNA
cggctggcagcgccggtaattactacaccgacaaggataattactacgtactgggcagcatggaggaacgctggg

SEQ ID NO: 854919 - DNA, 75 bp, synthetic construct
  source 1..75: mol_type = other DNA
gttatgcaatctgccgttctgcagattttaactcatgggaatatgtgtcagaccatcgcggtgaaattgtctatg

SEQ ID NO: 854920 - DNA, 75 bp, synthetic construct
  source 1..75: mol_type = other DNA
tggggtacagaccgcaacaatgacggttaccctgttctcggcaaataaccctgttgggggaatgtgtgggtcgac

SEQ ID NO: 854921 - DNA, 75 bp, synthetic construct
  source 1..75: mol_type = other DNA
gagtggatgcagacgctgaaggaaaccaggttcgacatccgggcatatcgtgacgcggcggatcagcgtgcggag

SEQ ID NO: 854922 - DNA, 75 bp, synthetic construct
  source 1..75: mol_type = other DNA
aaggaggcggtcacgccgctgatggagagagtacctggcgaactcatggagaaactgacatcaggacagcgcgcc

SEQ ID NO: 854923 - DNA, 75 bp, synthetic construct
  source 1..75: mol_type = other DNA
cagaagtccgcacttcacacgccggcacagcaggccattcatctggcccttccggtggtggaaagtaaaaacctg

SEQ ID NO: 854924 - DNA, 75 bp, synthetic construct
  source 1..75: mol_type = other DNA
agtttattgccacgaaggcggggaatattatcgtctataactacgatggtgaaactcgggaatatatttctgcat

SEQ ID NO: 854925 - DNA, 75 bp, synthetic construct
  source 1..75: mol_type = other DNA
tgtattcggaacccgcctccggcgttctgaagattctttcccgcctgttattggtgtcgcggcacataaaggcgg

SEQ ID NO: 854926 - DNA, 75 bp, synthetic construct
  source 1..75: mol_type = other DNA
gtttcttctcaggctatcagggatgcagagaaagccgggcggcttccacaccctgacatggaaacccggggaaga

SEQ ID NO: 854927 - DNA, 75 bp, synthetic construct
  source 1..75: mol_type = other DNA
aggtgaagcagcggatttagttggagtatcttctcaggctatcagggatgccgagaaagcaggccggctaccgca

SEQ ID NO: 854928 - DNA, 75 bp, synthetic construct
  source 1..75: mol_type = other DNA
accttcaacaggagactggtcagaaacaagtaatggggtctacgtggcgaccttgactctgggatctgccgcggg

SEQ ID NO: 854929 - DNA, 75 bp, synthetic construct
  source 1..75: mol_type = other DNA
aatcacagctccgggtgattaccctgaaaatacaaccactatcgtcccgttaacgccatatgataaatgggatgg

SEQ ID NO: 854930 - DNA, 75 bp, synthetic construct
  source 1..75: mol_type = other DNA
ttggtgttgctgctcacaaaggtggtgtttacaaaacctccgtttctgttcacctggctcaggacctggccctga

SEQ ID NO: 854931 - DNA, 75 bp, synthetic construct
  source 1..75: mol_type = other DNA
catcttgctcaggatctggctctgaaggggctacgtgttttgctcgtagaaggtaacgacccccaaggaacagca

SEQ ID NO: 854932 - DNA, 75 bp, synthetic construct
  source 1..75: mol_type = other DNA
ctgacgaaatacagtaataataatggttctcagtccccctggatggaagagcagatcagggatgcctggggcgga

SEQ ID NO: 854933 - DNA, 75 bp, synthetic construct
  source 1..75: mol_type = other DNA
caactgaatatctcgctgtcggcgtcggtatcccggcatgttcttgtttggatgcaccaggtacacataaagctg

SEQ ID NO: 854934 - DNA, 75 bp, synthetic construct
  source 1..75: mol_type = other DNA
caccttgcccaggatctggctctcaagggactacgaattctgcttgtggaaggtaacgatccccaaggaacagca

SEQ ID NO: 854935 - DNA, 75 bp, synthetic construct
  source 1..75: mol_type = other DNA
ttgaaactgagttaatgggcaaatttgatgaaggtaaactgcccaccgatccacacctgatgctccgactggcca

SEQ ID NO: 854936 - DNA, 75 bp, synthetic construct
  source 1..75: mol_type = other DNA
actatgatgtcatagttattgacagcgcgcctaacctgggtatcggcacgattaatgtcgtatgtgctgctgatg

SEQ ID NO: 854937 - DNA, 75 bp, synthetic construct
  source 1..75: mol_type = other DNA
cccggcaaatttagctctggatcccgatgggacggcgacaacgaatgagcaaggacaggctattttcaccgccac

SEQ ID NO: 854938 - DNA, 75 bp, synthetic construct
  source 1..75: mol_type = other DNA
cagcagaagcacagcgccagtcactgattgatactgcaatggcttccatcagtctgattcagctgaaattgcagg

SEQ ID NO: 854939 - DNA, 75 bp, synthetic construct
  source 1..75: mol_type = other DNA
gacgctcctggtacatataaggctggttatacaatttgccgttctgtagatttaaattcatgggaatatgtgcca

SEQ ID NO: 854940 - DNA, 75 bp, synthetic construct
  source 1..75: mol_type = other DNA
ggtgccgcagtagacgcggcagaagcacagcgccagtcactgattgatgcagcaatggcttccatcagtctgatt

SEQ ID NO: 854941 - DNA, 75 bp, synthetic construct
  source 1..75: mol_type = other DNA
gcgaactcatcaccacaaaggcgggagacattaccgtttacaattatgatggtgagacacgagaatatatttcca

SEQ ID NO: 854942 - DNA, 75 bp, synthetic construct
  source 1..75: mol_type = other DNA
agtctgattcaactgaaattacaggccggacggaatctgacgcaggcagaaaccaaccgacttaacacggtgctg

SEQ ID NO: 854943 - DNA, 75 bp, synthetic construct
  source 1..75: mol_type = other DNA
ttttaactcatgggaatatgtgccagaccatcgcggtgaaattgtctataacaccgaaacgggagatgccaaaga

SEQ ID NO: 854944 - DNA, 75 bp, synthetic construct
  source 1..75: mol_type = other DNA
atgcataaagcaatattaaatagtgaactcattgcaacaaaggaaggggatgttaccgtttataactatgatggt

SEQ ID NO: 854945 - DNA, 75 bp, synthetic construct
  source 1..75: mol_type = other DNA
gattacactgacgcggtgacggcaacagataccagcaccgcgccggatgtcatctggcctgaactgccggaggcg

SEQ ID NO: 854946 - DNA, 75 bp, synthetic construct
  source 1..75: mol_type = other DNA
agtctgattcaacttaaattgcaggccgggcggaagctgatgcaggcagagaccacccgacttaacactgtgctg

SEQ ID NO: 854947 - DNA, 75 bp, synthetic construct
  source 1..75: mol_type = other DNA
cggtattccggcatgttcctgtcttgatgcacctggcatacataaggttggttatgctatctgtcgttctgtgaa

SEQ ID NO: 854948 - DNA, 75 bp, synthetic construct
  source 1..75: mol_type = other DNA
aatcacagctccgggtgattatcctgaaaacacgaccactatcgccccgttaacgccatacgataaatgggatgg

SEQ ID NO: 854949 - DNA, 75 bp, synthetic construct
  source 1..75: mol_type = other DNA
agcttattgccgtacaggaaggaaacattatcgtttacaactataacagtgagacacgggaatatatttctgcat

SEQ ID NO: 854950 - DNA, 75 bp, synthetic construct
  source 1..75: mol_type = other DNA
aactgagcgccaatggttatatccgggcttctggctggaaaaaatcgccggatgttgaggattatcaggaacgcc

SEQ ID NO: 854951 - DNA, 75 bp, synthetic construct
  source 1..75: mol_type = other DNA
gatggttatattgatgaaacctataccgactatatgacctatttttatgaaaatagcctgagtcgaattgataag

SEQ ID NO: 854952 - DNA, 75 bp, synthetic construct
  source 1..75: mol_type = other DNA
tatatacgataaggaattatctagatataataatcatcctcactataatcaggctgagaaagctgatatagcaaa

SEQ ID NO: 854953 - DNA, 75 bp, synthetic construct
  source 1..75: mol_type = other DNA
cacgctatttaataagtgggaaaagtttgtttcacttttatctgaaggtaatataaagacactacttacattatc

SEQ ID NO: 854954 - DNA, 75 bp, synthetic construct
  source 1..75: mol_type = other DNA
tctggaagctgtcacatggctggaaggagttctcattcctggatatggtcgaatgtattgatgaaaagctcgtct

SEQ ID NO: 854955 - DNA, 75 bp, synthetic construct
  source 1..75: mol_type = other DNA
gtttattcaacagaaaccggaaatgcagtcccgatatctgaactgggggaacttcctgaaaatgtcacatttatt

SEQ ID NO: 854956 - DNA, 75 bp, synthetic construct
  source 1..75: mol_type = other DNA
gggaagggggaaataatattaaaagtaattgatatgtcatttttaccaggaggtacactcaatgttggtactaat

SEQ ID NO: 854957 - DNA, 75 bp, synthetic construct
  source 1..75: mol_type = other DNA
gatgtacgccgtactcagcctgtttttttgcgatccggagatgcatccggcggatttcagtctgcttgtaccgaa

SEQ ID NO: 854958 - DNA, 75 bp, synthetic construct
  source 1..75: mol_type = other DNA
atatgccgactggcgacatttttaccgtacgcattattttcacgatacccaactggatatgcatttttccgggct

SEQ ID NO: 854959 - DNA, 75 bp, synthetic construct
  source 1..75: mol_type = other DNA
ccgtactcagcctgtttttttgcgatccggatatgtatccctcggacttcagtctgcttgccccccggcgtgagg

SEQ ID NO: 854960 - DNA, 75 bp, synthetic construct
  source 1..75: mol_type = other DNA
cgtccggttcggagggacggagggcgcgatatttcaccttctgcggatgtggtggatgtcagcgaggatgatgtt

SEQ ID NO: 854961 - DNA, 75 bp, synthetic construct
  source 1..75: mol_type = other DNA
tacatcattgcgcagcaggacgataacagtcaggccatgcagtggctgacccggctgcgggataattctcatcgc

SEQ ID NO: 854962 - DNA, 75 bp, synthetic construct
  source 1..75: mol_type = other DNA
gttccgcaccacgaatatgatttatttgaagaactgatattgacgccctatttcaatattaacctcaaagaattt

SEQ ID NO: 854963 - DNA, 75 bp, synthetic construct
  source 1..75: mol_type = other DNA
gtgctgttcgctaatttcgccgaggcgctggcagaaggccgcagtaaagcgcaggccaacagtctgaaaggggtc

SEQ ID NO: 854964 - DNA, 75 bp, synthetic construct
  source 1..75: mol_type = other DNA
agggcagtttggtggcgatgaccggcgacggcaccaacgatgctccggcgctggcgcaggcagatgtcgcggtgg

SEQ ID NO: 854965 - DNA, 75 bp, synthetic construct
  source 1..75: mol_type = other DNA
cagtctgctgaccacctttattagtatcgcgatggtgagcggtgcgatgcccggcaatgcgctatttagcgcggc

SEQ ID NO: 854966 - DNA, 75 bp, synthetic construct
  source 1..75: mol_type = other DNA
cggtgacggtgtaggcggctccatcagctatgaatacgaaggctttggtatcgtgggagcgtatggtgctgctga

SEQ ID NO: 854967 - DNA, 75 bp, synthetic construct
  source 1..75: mol_type = other DNA
gccggtagctacgacgatccacgctttaaactggtgatcgatgatggtgtcaatttcgttaatcaaaccagccag

SEQ ID NO: 854968 - DNA, 75 bp, synthetic construct
  source 1..75: mol_type = other DNA
caggcacgttttctcgcctctggtctgaaatgtcgttattacaatccggcaatccacacggcagcttttgcctta

SEQ ID NO: 854969 - DNA, 75 bp, synthetic construct
  source 1..75: mol_type = other DNA
ggggtaaatctgcaaatatgaatgtcgctgaggttggaactgatagttttggttttacttatggaaagtttgttt

SEQ ID NO: 854970 - DNA, 75 bp, synthetic construct
  source 1..75: mol_type = other DNA
caacaacagcgacaagcgccgccgattcagctaagacatacagagacgaggcccacgaatacgctaatcagacag

SEQ ID NO: 854971 - DNA, 75 bp, synthetic construct
  source 1..75: mol_type = other DNA
actgcgttactatcagggcaaggaatcagaaatagctgacgccgtcgaatttttcagcgacaacaaagatgtgat

SEQ ID NO: 854972 - DNA, 75 bp, synthetic construct
  source 1..75: mol_type = other DNA
ccggggaatcggctccggtgatccgtgaatccggcggtgattttgcctccgtcaccggcggcacgcgtattcttt

SEQ ID NO: 854973 - DNA, 75 bp, synthetic construct
  source 1..75: mol_type = other DNA
tggtctgtctgatcccaacgactattggcggcttgctttcagcgatcggcgtcgccgggatgagccggatgctgg

SEQ ID NO: 854974 - DNA, 75 bp, synthetic construct
  source 1..75: mol_type = other DNA
cgagattgccctgaccatcctgctgattgccctgaccatcgtctttttactggcaaccgcaacgctatggccatt

SEQ ID NO: 854975 - DNA, 75 bp, synthetic construct
  source 1..75: mol_type = other DNA
tttgtcctgaaactggcgcgagagatggggagacccgactggcgcgccatgcttgccgggatgacatccaccgaa

SEQ ID NO: 854976 - DNA, 75 bp, synthetic construct
  source 1..75: mol_type = other DNA
gaagcggcgggcacccttgtgcaactgattgaccagcgggtacaggcggtgatgctgtccatgcgacgtgacggg

SEQ ID NO: 854977 - DNA, 75 bp, synthetic construct
  source 1..75: mol_type = other DNA
cgtcatcacagaaagtgctgatggatatcagccagcggacgggcacggcattttcggataatgcggccctgtttg

SEQ ID NO: 854978 - DNA, 75 bp, synthetic construct
  source 1..75: mol_type = other DNA
tcagtctcagtatcagaccggggatatcagtgaggatttttacagacaggcactggcacagaacgcgcagtatct

SEQ ID NO: 854979 - DNA, 75 bp, synthetic construct
  source 1..75: mol_type = other DNA
atccctgcaggaaaaaatcgcaggatatcagtatgttctggcgaaaccgggctggacgaccggtgacggattcat

SEQ ID NO: 854980 - DNA, 75 bp, synthetic construct
  source 1..75: mol_type = other DNA
cactctggatgataaacagcagagtgccctgacaaaaacagagcgtgagctggccctgtccagactgaaagggga

SEQ ID NO: 854981 - DNA, 75 bp, synthetic construct
  source 1..75: mol_type = other DNA
gggcgaggtctgtacaggaaacgctggcgtcactggagtacaaccgtgtagcgaggatacgtgaggaggcggcag

SEQ ID NO: 854982 - DNA, 75 bp, synthetic construct
  source 1..75: mol_type = other DNA
agtttaaaggcaccggtaacatggaactgcacctctctcgtaagatcgctgaaaaacgcgtcttcccggctatcg

SEQ ID NO: 854983 - DNA, 75 bp, synthetic construct
  source 1..75: mol_type = other DNA
aagatggacgaagttatctacgaagagtttaaaggtacaggcaacatggaactgcacctttctcgtaagattgct

SEQ ID NO: 854984 - DNA, 75 bp, synthetic construct
  source 1..75: mol_type = other DNA
agggcggcagcctgaccatcatcgctaccgcgcttatcgataccggttccaagatggacgaagttatctacgaag

SEQ ID NO: 854985 - DNA, 75 bp, synthetic construct
  source 1..75: mol_type = other DNA
ctggggaatgaactgcttcagcagcgtcagggactggtgaatgtaccgttacggctgccgcaggccaccctggat

SEQ ID NO: 854986 - DNA, 75 bp, synthetic construct
  source 1..75: mol_type = other DNA
ttcggtgcggcgcgtaacgtagaagagggcggcagcctgaccatcatcgctaccgcgcttatcgataccggttcc

SEQ ID NO: 854987 - DNA, 75 bp, synthetic construct
  source 1..75: mol_type = other DNA
tgctgactggtggtgtggatgctaacgctctgcatcgtccgaaacgcttcttcggcgctgcgcgtaacgtggaag

SEQ ID NO: 854988 - DNA, 75 bp, synthetic construct
  source 1..75: mol_type = other DNA
cactgaacggtgtggccggaaatattgataccgtggcaacagctgcgggtgtgctggttgctgtcggggtggccc

SEQ ID NO: 854989 - DNA, 75 bp, synthetic construct
  source 1..75: mol_type = other DNA
actcttggcgaaggtaaagtggccaacctgaccgcattcacaccagattttaaaatcactaagaccatcgttaac

SEQ ID NO: 854990 - DNA, 75 bp, synthetic construct
  source 1..75: mol_type = other DNA
agttcatttttgcgggtaaaacaatatactaccgtaacggactttgtgtggatgagaacggtacgttaagcggtt

SEQ ID NO: 854991 - DNA, 75 bp, synthetic construct
  source 1..75: mol_type = other DNA
gattaagcgtattaaaccttcaattatctaccgtttattgctgattgtcctcggaataccaatggtgatttacgg

SEQ ID NO: 854992 - DNA, 75 bp, synthetic construct
  source 1..75: mol_type = other DNA
gggcgatattccaccttctgcggatgtggcggatgtcacagtggatgatgatgttgcattaatgatgacttctgc

SEQ ID NO: 854993 - DNA, 75 bp, synthetic construct
  source 1..75: mol_type = other DNA
cggatttcagtctgcttgcgccagcgtgtgaggaagagcagacggagatgccggacgaggaagacatgctgatgc

SEQ ID NO: 854994 - DNA, 75 bp, synthetic construct
  source 1..75: mol_type = other DNA
agaaagccaatgagaaatcaggctgtactaactatttgccgacgcttatcaccaccagcgatgagctgatgaaac

SEQ ID NO: 854995 - DNA, 75 bp, synthetic construct
  source 1..75: mol_type = other DNA
gtgcaactgattgaccagcgggtacaggcggtgatgttatccatgcgtcgtgacggaggaatgctgagtggatga

SEQ ID NO: 854996 - DNA, 75 bp, synthetic construct
  source 1..75: mol_type = other DNA
ggggtatgcggcggatgacctcggttttgtgggtgatccgtatcaggaggcgagacaacgttatatcagtaatgc

SEQ ID NO: 854997 - DNA, 75 bp, synthetic construct
  source 1..75: mol_type = other DNA
gagtgaacgccttaaagaccaggaggctttttatgccgaatcggatgcgcagcgtgctgactggcagaaagggct

SEQ ID NO: 854998 - DNA, 75 bp, synthetic construct
  source 1..75: mol_type = other DNA
aactccagtaaaacatccacagtacagattaagcgtattaaaccttcaattatctaccgtttattgctgattggc

SEQ ID NO: 854999 - DNA, 75 bp, synthetic construct
  source 1..75: mol_type = other DNA
ttttgcgatcaggatatgcatccggcggatttcagtctgctggctacctggcgagaggaagagcagacggagatg

SEQ ID NO: 855000 - DNA, 75 bp, synthetic construct
  source 1..75: mol_type = other DNA
agaatataaagcccaggtgaagcagctcattgaaatgaaccgaattaccattgccaatggcgatattggttttaa

SEQ ID NO: 855001 - DNA, 75 bp, synthetic construct
  source 1..75: mol_type = other DNA
tattgcggtaatgcctgatgtgcacctgggaaaaggttccaccattggtagcgtgatcccaacgaaaggggcgat

SEQ ID NO: 855002 - DNA, 75 bp, synthetic construct
  source 1..75: mol_type = other DNA
tgccagccttaaccgcgatgcgatgatggaaaacgtggtaacggcgttgcagagcgttacgcagaaaacggtaag

SEQ ID NO: 855003 - DNA, 75 bp, synthetic construct
  source 1..75: mol_type = other DNA
taatgccatcgggacttactttatcgatctggcacaaaaagagatgcaggaaacgcttgaaacgttgccatcgcg

SEQ ID NO: 855004 - DNA, 75 bp, synthetic construct
  source 1..75: mol_type = other DNA
gcatttcgttttcgttacagacagcaatgtctgcaggacacagaggcacagcaactggcagcggtgatggccggg

SEQ ID NO: 855005 - DNA, 75 bp, synthetic construct
  source 1..75: mol_type = other DNA
taacggcacctttgccttcagaaaccactgtgcagtctgaaggcaatgtgccatctgagagccagccagaaacat

SEQ ID NO: 855006 - DNA, 75 bp, synthetic construct
  source 1..75: mol_type = other DNA
ctggcaaacccggctttactgacaaagcacaacagcaatgatgatttcagccttcttctgccgtctgttggggca

SEQ ID NO: 855007 - DNA, 75 bp, synthetic construct
  source 1..75: mol_type = other DNA
caaaacggtattaacgctgatatcggtgccagcatggacctggatgacaactggacgctgggtctggtcgcacaa

SEQ ID NO: 855008 - DNA, 75 bp, synthetic construct
  source 1..75: mol_type = other DNA
cgaactggaagaagtccaggatgacaaaccatccctgtttgcccgcgtcacggcgctgtttaccaaaaaagagca

SEQ ID NO: 855009 - DNA, 75 bp, synthetic construct
  source 1..75: mol_type = other DNA
gtgattacgacaaagacgattttgacggtgacaagtaccacaacacgaaaaacggattcaacgccgatattggtg

SEQ ID NO: 855010 - DNA, 75 bp, synthetic construct
  source 1..75: mol_type = other DNA
ccacctgttaacgtcgatgctaaatgggctgagcttgaagccggttatcagtggttaacgcaaaaatatccccgt

SEQ ID NO: 855011 - DNA, 75 bp, synthetic construct
  source 1..75: mol_type = other DNA
tgcaaaaagaacagcactttggcgaagagatctacgtgacgcgtaaaggcgcggtgtctgcgcgtgctggtcaat

SEQ ID NO: 855012 - DNA, 75 bp, synthetic construct
  source 1..75: mol_type = other DNA
gccaacccggctttactgacaaagcacaacagcaatgatgatttcagcctgttactgccgtccgtgggcgcacaa

SEQ ID NO: 855013 - DNA, 75 bp, synthetic construct
  source 1..75: mol_type = other DNA
cgatatgttgctgagtctgttttctgctgcagaggaccatgctgcagtagtgacagcggatggagaatgcttaca

SEQ ID NO: 855014 - DNA, 75 bp, synthetic construct
  source 1..75: mol_type = other DNA
gctatatggaagcagaagccgcccggctgggcctcggattggcctatgttcctgttgaactggtcgcggatgatt

SEQ ID NO: 855015 - DNA, 75 bp, synthetic construct
  source 1..75: mol_type = other DNA
gcagcataccctccgcctcagcagcagaaagaagaaccatcattgatgcaacaagctggcgattggctcactggt

SEQ ID NO: 855016 - DNA, 75 bp, synthetic construct
  source 1..75: mol_type = other DNA
gtaagggttattggtaacctaaaaaccggaggcgcgctattggctggggaaacagggattggccttatgtcgagg

SEQ ID NO: 855017 - DNA, 75 bp, synthetic construct
  source 1..75: mol_type = other DNA
atggacgaaatgaatttaagtcctgaagcacaggaactgcatgacagcattgtggcagaacttcagtccggcggg

SEQ ID NO: 855018 - DNA, 75 bp, synthetic construct
  source 1..75: mol_type = other DNA
attcgccgccatgttgaggctaacggcggtcacttccctaccgatgttgatcaaaaagtcgatcaggttgcgcgt

SEQ ID NO: 855019 - DNA, 75 bp, synthetic construct
  source 1..75: mol_type = other DNA
ggggaatcccgtgaataccgcgtcaccttccgtgaactgacggcgaaagacagcattgatgcggaaaccgatgct

SEQ ID NO: 855020 - DNA, 75 bp, synthetic construct
  source 1..75: mol_type = other DNA
caggaaccgatggggcagaagtggaagtccgggatacgttgcagtctgcaacagacgtagaggaaaagtcatcgg

SEQ ID NO: 855021 - DNA, 75 bp, synthetic construct
  source 1..75: mol_type = other DNA
ccacttcttgcacaccttgagggtgaactggtcagtggaaagttatggcagccggggatgtcatcaccggatgag

SEQ ID NO: 855022 - DNA, 75 bp, synthetic construct
  source 1..75: mol_type = other DNA
tgatgataccgatatgttgctgagtctgttttctgtggttgatgacaatgcttctgtaccggtaacagcaggaga

SEQ ID NO: 855023 - DNA, 75 bp, synthetic construct
  source 1..75: mol_type = other DNA
tcaagttgttgacggcgatgcgctacaattagccggacgtggcagctggtttgttgcctccaatgaagaactggc

SEQ ID NO: 855024 - DNA, 75 bp, synthetic construct
  source 1..75: mol_type = other DNA
tttatttagtaaataaaaaaatttttgagagtatatcgtatctgactatcatacaaatggtagcgatgattttgc

SEQ ID NO: 855025 - DNA, 75 bp, synthetic construct
  source 1..75: mol_type = other DNA
gaatttacgctgcagccctctgtttcaggaaccgatgaggccgaagcagtcgtcccggatacgttgcagtctgca

SEQ ID NO: 855026 - DNA, 75 bp, synthetic construct
  source 1..75: mol_type = other DNA
caaaggaagtgaacggtgtcacagaaactttcaggatccgcccgcaggtgactgccggtgtctcctggcacaacg

SEQ ID NO: 855027 - DNA, 75 bp, synthetic construct
  source 1..75: mol_type = other DNA
atcgccctctcccagaaatcaccaacgtttttagtccgacgctggtgcgtcgtcattcagtttcaacgccgccgc

SEQ ID NO: 855028 - DNA, 75 bp, synthetic construct
  source 1..75: mol_type = other DNA
ttcgttgattggttttgacgatgtgctggtgtcacgttatgtacgcccacgtttgaccaccgtacgctacccaat

SEQ ID NO: 855029 - DNA, 75 bp, synthetic construct
  source 1..75: mol_type = other DNA
ttgattggcaacggttaccacaacgaacaaaaagagcgtcaggccattgagcaactgatccgccatcgctgtgct

SEQ ID NO: 855030 - DNA, 75 bp, synthetic construct
  source 1..75: mol_type = other DNA
tggcggcctgttgtcagcgatcggcgtcgccgggatgagtcggatgctgggcgcgaatgtgattgccaccagcgg

SEQ ID NO: 855031 - DNA, 75 bp, synthetic construct
  source 1..75: mol_type = other DNA
ttagcgcaactatcatttcaggttgtacttcttccgtaccattaataaagaaaactcaatcaggaaaacctgagg

SEQ ID NO: 855032 - DNA, 75 bp, synthetic construct
  source 1..75: mol_type = other DNA
tcgccctctcccggaaatcactaatgtctttagtccgacgctggtacgtcgccattcagtgtcaactccgtcgct

SEQ ID NO: 855033 - DNA, 75 bp, synthetic construct
  source 1..75: mol_type = other DNA
gaatttccccgcttattcgcaccttccttagtagcaggtactgcaaacgctgcagaaatctataacaaagatggc

SEQ ID NO: 855034 - DNA, 75 bp, synthetic construct
  source 1..75: mol_type = other DNA
taaaggggaaactcagattaactccgatctgactggctacggtcagtgggaatacaacttccagggtaataactc

SEQ ID NO: 855035 - DNA, 75 bp, synthetic construct
  source 1..75: mol_type = other DNA
actacatcatcaaccagatcgattctgacaacaaactgggcgtaggttcagacgacaccgttgctgtgggtatcg

SEQ ID NO: 855036 - DNA, 75 bp, synthetic construct
  source 1..75: mol_type = other DNA
ccaatgaccggctggtgacatttggcgaaccagacgaaagcggcggcgaacaggcaatgaccgagcttttgggac

SEQ ID NO: 855037 - DNA, 75 bp, synthetic construct
  source 1..75: mol_type = other DNA
ccaatgatcggctggtaacttttggcgaaccggatgaaagcggcggcgaacaggcaatgactgaactgctgggaa

SEQ ID NO: 855038 - DNA, 75 bp, synthetic construct
  source 1..75: mol_type = other DNA
ctttgttaaatgccgaaaaaacaggactttggtcctgttttttttataccttccagagcaatctcacgtcttgca

SEQ ID NO: 855039 - DNA, 75 bp, synthetic construct
  source 1..75: mol_type = other DNA
cgctggctgaaggccgcagtaaagcgcaggctaatagtctgaaaggagtgaaaaaaaccgcctttgcccgcaaac

SEQ ID NO: 855040 - DNA, 75 bp, synthetic construct
  source 1..75: mol_type = other DNA
ttaccgctgcagaggaaacggtgagcgaactggaagaaatccaggaggacaagccgtccctgtttgcccgtgtca

SEQ ID NO: 855041 - DNA, 75 bp, synthetic construct
  source 1..75: mol_type = other DNA
tcttatcccgtcgctgcggttatctttctggccagtattatggtgccaacgttaaagatgatcgccattgcgtgg

SEQ ID NO: 855042 - DNA, 75 bp, synthetic construct
  source 1..75: mol_type = other DNA
gcgttgattcgtcagtatcaggcagaaggccgtttagtggcgatgaccggcgatggcaccaacgatgctccggcg

SEQ ID NO: 855043 - DNA, 75 bp, synthetic construct
  source 1..75: mol_type = other DNA
cttcacaccaaaattccagcgtgttgacctgttcaactacaacgtgctggtcaaaaattatgacagcagcgcatt

SEQ ID NO: 855044 - DNA, 75 bp, synthetic construct
  source 1..75: mol_type = other DNA
caggaagaacgcctgtctgagcttgagacagccctgcaggcacagcagaccgcctttaacgaactggtggacaag

SEQ ID NO: 855045 - DNA, 75 bp, synthetic construct
  source 1..75: mol_type = other DNA
ctgtttaactacaacgtaacggttcgtgattacgacaaagacgattttggcggtgacaagtaccacaacacgaaa

SEQ ID NO: 855046 - DNA, 75 bp, synthetic construct
  source 1..75: mol_type = other DNA
tggtggaactcacttcattgctgatgctgtggcgcagtctgcaaatggcgtctttgtgtctcttcctgacgtcga

SEQ ID NO: 855047 - DNA, 75 bp, synthetic construct
  source 1..75: mol_type = other DNA
gtggaaccgcatgagaagacagcaatcaacgacgagctgtatctctcaatttcgaagctgcaggagcatgcagca

SEQ ID NO: 855048 - DNA, 75 bp, synthetic construct
  source 1..75: mol_type = other DNA
gttgacgttctgctactggataaaaccggcaccatcacactcggtaaccgtcaggcgtcggagtttatccccgcg

SEQ ID NO: 855049 - DNA, 75 bp, synthetic construct
  source 1..75: mol_type = other DNA
gttgacgttctgctactggataaaaccggcaccatcacactcggtaaccgtcaggcgtcagagtttatccccgca

SEQ ID NO: 855050 - DNA, 75 bp, synthetic construct
  source 1..75: mol_type = other DNA
gcaggccaacagtctgaaaggggtgaaaaaaactgcctttgcccgcaagcttcgtgagccgaaatatggcgctgc

SEQ ID NO: 855051 - DNA, 75 bp, synthetic construct
  source 1..75: mol_type = other DNA
aaaaacagcctgagtggtacgtgaaagctgtcagaaaaactatcgcggcgttgccgggggggtacgctgaagctg

SEQ ID NO: 855052 - DNA, 75 bp, synthetic construct
  source 1..75: mol_type = other DNA
ggggagaatatcctttaataatatatcagcaatactgggtactgtagcggttattctgaattgccatcatcaggg

SEQ ID NO: 855053 - DNA, 75 bp, synthetic construct
  source 1..75: mol_type = other DNA
gaagagcgtaaatctatcggtaccctgagcgcatttgaacagaacgcgctggaaggtatgctggatacgctgaag

SEQ ID NO: 855054 - DNA, 75 bp, synthetic construct
  source 1..75: mol_type = other DNA
cagcttcaccgaacaagaagtggctgatttgaccaaacgtatccagaatgcgggtactgaagtggttgaagcaaa

SEQ ID NO: 855055 - DNA, 75 bp, synthetic construct
  source 1..75: mol_type = other DNA
ccacaaagcgctcgccggtggcgtgctgtgcccggacggccagtggcggcagattgtcaccatcgaggacgcact

SEQ ID NO: 855056 - DNA, 75 bp, synthetic construct
  source 1..75: mol_type = other DNA
cgatcctcgacgaagctgacatttattgcggtattatcgctgatggcctgcatgttgattacgccaacattcgta

SEQ ID NO: 855057 - DNA, 75 bp, synthetic construct
  source 1..75: mol_type = other DNA
gcgtaatctggtcgaacattgtggtatcgcactggatgaagtgctgcgtatggcgacgctctatccggcacgtgc

SEQ ID NO: 855058 - DNA, 75 bp, synthetic construct
  source 1..75: mol_type = other DNA
ctcttgcggaagcgcagctccgggggacgcagatagcaaccgccagggcgcgtgcggcagtttatcgtgcgcaac

SEQ ID NO: 855059 - DNA, 75 bp, synthetic construct
  source 1..75: mol_type = other DNA
ggtaatgagttacttcagcagcgtcaggggctggtgaatgtaccgttacggctgccacaggcaaccctggatgat

SEQ ID NO: 855060 - DNA, 75 bp, synthetic construct
  source 1..75: mol_type = other DNA
acacctcgcgcccgtcgctgcgcaatttcgttttaagtcataccgacctgatgggcagcttttctacgccgttcg

SEQ ID NO: 855061 - DNA, 75 bp, synthetic construct
  source 1..75: mol_type = other DNA
tcgcgatgaacaaggctctggtgtcgggtgttaaatacctgtgcgtcacagaaaaaaggtgcatgtcgatgcagc

SEQ ID NO: 855062 - DNA, 75 bp, synthetic construct
  source 1..75: mol_type = other DNA
cagcttttctctgcgatgatgaaggcagctacacactcaggtgaagatactgcggatgctgacatgcagaatgcc

SEQ ID NO: 855063 - DNA, 75 bp, synthetic construct
  source 1..75: mol_type = other DNA
ttgcaaaaggggccgggctgatgggggaagccggacctgaagccattatgcccctgacccgggcggcggatggct

SEQ ID NO: 855064 - DNA, 75 bp, synthetic construct
  source 1..75: mol_type = other DNA
gcgccgacgattttcgcaacctcttcatgtgcgagtttgttgacgataaagcgtcggtattcccgttcgaggagc

SEQ ID NO: 855065 - DNA, 75 bp, synthetic construct
  source 1..75: mol_type = other DNA
aggacagaatgattaaaagaagtcttttcagcttctggccaaccctgttccagtatgaggtcattctggagtcac

SEQ ID NO: 855066 - DNA, 75 bp, synthetic construct
  source 1..75: mol_type = other DNA
agaaaagctgcagcagcgatcccgttgttataaacaggtatatcagcgtggatgcaccacgcctggaccgtctcc

SEQ ID NO: 855067 - DNA, 75 bp, synthetic construct
  source 1..75: mol_type = other DNA
gatgcgccacgcctggaccgtctccgccgtcttgttccccgtacgctcaacgtcgaatcccgtcaccggaaaatg

SEQ ID NO: 855068 - DNA, 75 bp, synthetic construct
  source 1..75: mol_type = other DNA
acgatagacttttcgactcaacaaagttatgtctcttcgttaaatagtatacggacagagatatcgacccctctt

SEQ ID NO: 855069 - DNA, 75 bp, synthetic construct
  source 1..75: mol_type = other DNA
atgatacggcaagaacgatctggtatctggcctagacgttttggccgtgaagacgatgtggaagtcatcaacttc

SEQ ID NO: 855070 - DNA, 75 bp, synthetic construct
  source 1..75: mol_type = other DNA
ctgcaaaaccctccagaaaaagacgaaaaattcgcacagagccgcacacgatcgtggatacattccagcaacgca

SEQ ID NO: 855071 - DNA, 75 bp, synthetic construct
  source 1..75: mol_type = other DNA
tcataaggcgctggccgggggcgtgctgtgcccggacggacagtggcggcagattgtcaccatcgaggatgcgct

SEQ ID NO: 855072 - DNA, 75 bp, synthetic construct
  source 1..75: mol_type = other DNA
ttctctgaccgtccgtttaactggcgcccggtctggattggctatgacccgtcgcacaccggcgacagcgctggc

SEQ ID NO: 855073 - DNA, 75 bp, synthetic construct
  source 1..75: mol_type = other DNA
aaaaatacaacgtcgaatacatcggaattgatgccaccggcctcggtgtcggcgtgttccagctcgtgcgctcgt

SEQ ID NO: 855074 - DNA, 75 bp, synthetic construct
  source 1..75: mol_type = other DNA
gaaaccatctttgcctgggcgattaacccgctttgctgggcaagaggattcacccttgtcgatggcaaggcacag

SEQ ID NO: 855075 - DNA, 75 bp, synthetic construct
  source 1..75: mol_type = other DNA
cgggagttgtggctgagtatggacgatctgacccgccatataatgtttttcgccaccaccggtggtggtaaaacg

SEQ ID NO: 855076 - DNA, 75 bp, synthetic construct
  source 1..75: mol_type = other DNA
aggacagaatgattaaaagaagccttttcagcttctggccaactctgtttcagtatgaggtcatcctggagtcac

SEQ ID NO: 855077 - DNA, 75 bp, synthetic construct
  source 1..75: mol_type = other DNA
cgactgcgaaacctgcaaatggcagattgaaatgtctacaagccttcgctgcgagcacccgattacgctgctggc

SEQ ID NO: 855078 - DNA, 75 bp, synthetic construct
  source 1..75: mol_type = other DNA
ggtgggcagtatgaacggcagtgcgggtctggtgtattccccggtctaccatatcgccattcagaatgacgggac

SEQ ID NO: 855079 - DNA, 75 bp, synthetic construct
  source 1..75: mol_type = other DNA
gtcgggagtggggggatggattggtagtgttggcgactggctttccggtgcagtagcgaacgcaaaaggcggtgt

SEQ ID NO: 855080 - DNA, 75 bp, synthetic construct
  source 1..75: mol_type = other DNA
cgctgccatcgttaacgggctgaagtcactttccaaaagcatgtccggtgccggaggatggcttggtacagtcgg

SEQ ID NO: 855081 - DNA, 75 bp, synthetic construct
  source 1..75: mol_type = other DNA
ccttggtctggtgggggatatgtatcaggaggcgaggcagcgttacatccgtaattcgatggaagcctggcgcaa

SEQ ID NO: 855082 - DNA, 75 bp, synthetic construct
  source 1..75: mol_type = other DNA
gtgctggttgctgtcggggtcgcccggtactttggcaatatggcatccggtgtgggaaaggccacgacagaactg

SEQ ID NO: 855083 - DNA, 75 bp, synthetic construct
  source 1..75: mol_type = other DNA
cccgttcggctgcctcgatgcgtgaatatggttacagtgccggtgatgtactgaaggtgacggaggccatttcga

SEQ ID NO: 855084 - DNA, 75 bp, synthetic construct
  source 1..75: mol_type = other DNA
cagtatctgagtgaacgtctgaaagagcaggaagccttttatgccgaatcggatgcgcagcgtgcggactggcag

SEQ ID NO: 855085 - DNA, 75 bp, synthetic construct
  source 1..75: mol_type = other DNA
ggtgggtggcgcgaatgaagccagcggagcgacgaaaacgctctccggcgtgctgaacggtgttgccggtaatat

SEQ ID NO: 855086 - DNA, 75 bp, synthetic construct
  source 1..75: mol_type = other DNA
agtgcgggtctggtgtattccccggtctaccatatcgccattcagaatgacgggactaatggccagatagggccg

SEQ ID NO: 855087 - DNA, 75 bp, synthetic construct
  source 1..75: mol_type = other DNA
gatgctgtcgtttccacgatggacgggctggtatcaaatatttccgatgcactggccggaaatgttgtggactgg

SEQ ID NO: 855088 - DNA, 75 bp, synthetic construct
  source 1..75: mol_type = other DNA
ttgcgaaaggtgccgggctgatgggggaagccggacctgaagctatcatgccgcttacgcgggcggcggacggtt

SEQ ID NO: 855089 - DNA, 75 bp, synthetic construct
  source 1..75: mol_type = other DNA
aaaaaatccgggaacagttgcgatcccgggaagagacactaaagaatgagaatgcggctgcgcgtgcgtcgaatg

SEQ ID NO: 855090 - DNA, 75 bp, synthetic construct
  source 1..75: mol_type = other DNA
aagcggcgggcacccttgtgcaactgattgaccagcgggtacaggcggtgatgctgtccatgcgacgtgacgggg

SEQ ID NO: 855091 - DNA, 75 bp, synthetic construct
  source 1..75: mol_type = other DNA
tgataccgtggcaacagctgcgggtgtgctggttgctgtcggggtggcccggtactttggtaatctggcttaccg

SEQ ID NO: 855092 - DNA, 75 bp, synthetic construct
  source 1..75: mol_type = other DNA
cggggctgaaaatctccggtgccagtacggctgaggcgggttcggtgatcacccagttcagccaggcgctggcac

SEQ ID NO: 855093 - DNA, 75 bp, synthetic construct
  source 1..75: mol_type = other DNA
gaaacggtttccagtagtatcacgaaggtggaaaacgcctttatggcctgggtgggcggtgcgaatgaggccagc

SEQ ID NO: 855094 - DNA, 75 bp, synthetic construct
  source 1..75: mol_type = other DNA
acaggcaattacgaatgtagagtcgatccgcgaagcagtgggagtaaaaggcattccggtgattgccacctcctc

SEQ ID NO: 855095 - DNA, 75 bp, synthetic construct
  source 1..75: mol_type = other DNA
cagaatagtgattctgaaatatggttttctggcattgatattgatacgcaacttttatttcagaatgctgaagtt

SEQ ID NO: 855096 - DNA, 75 bp, synthetic construct
  source 1..75: mol_type = other DNA
cccgttcggcagcctcgatgcgtgaatatggttacagtgctgatgatgtgctgaaggtgacggaggccatttcca

SEQ ID NO: 855097 - DNA, 75 bp, synthetic construct
  source 1..75: mol_type = other DNA
accagaatcaggaacaggccagggagtctgcgcgccagtatgcactgacgattgatgaaatcgcgcataaaacgc

SEQ ID NO: 855098 - DNA, 75 bp, synthetic construct
  source 1..75: mol_type = other DNA
cgcagggcgaactgaaaaccctgacggagatacagaagcaggaactgctgcgcaatgcggccctgattgaccagc

SEQ ID NO: 855099 - DNA, 75 bp, synthetic construct
  source 1..75: mol_type = other DNA
cgacgcgccctggctgagctgaacagccagttgacggaaattcgcggttctgctgtcggagtggctggcgcattt

SEQ ID NO: 855100 - DNA, 75 bp, synthetic construct
  source 1..75: mol_type = other DNA
ataacgaggcgaataacccaaatcccggggtggaaaatcagagacggaaaaagcggaagacagtttttcccggct

SEQ ID NO: 855101 - DNA, 75 bp, synthetic construct
  source 1..75: mol_type = other DNA
aaagcgcaatccattcaggatgtgcttgccgggctggaggagcgacgggtggcgttgatccgtcaacaggccgcg

SEQ ID NO: 855102 - DNA, 75 bp, synthetic construct
  source 1..75: mol_type = other DNA
actgccacaggccactctggatgataaacagcagagcgccctgaataacacagagcgtcaactggccctgtcccg

SEQ ID NO: 855103 - DNA, 75 bp, synthetic construct
  source 1..75: mol_type = other DNA
atgaccaattccaccgatacaaccttgttgcatgacccgcgacggcaggcatcgctgctttactggcagggtttt

SEQ ID NO: 855104 - DNA, 75 bp, synthetic construct
  source 1..75: mol_type = other DNA
ccagattggcgccacgttttattttgcccgtgaagcattgattgacgccctgctgaccggacgcaaccagatttt

SEQ ID NO: 855105 - DNA, 75 bp, synthetic construct
  source 1..75: mol_type = other DNA
acctcgatccccgtcggcaggccatgctgctgtactttcagggataccgcgtagcccgcattgctgaaatgctgg

SEQ ID NO: 855106 - DNA, 75 bp, synthetic construct
  source 1..75: mol_type = other DNA
gggcgggcaaacgggcgatacgctgggagcagccatagagcttggtgaactggtcttcctgctggcactgctata

SEQ ID NO: 855107 - DNA, 75 bp, synthetic construct
  source 1..75: mol_type = other DNA
atagccaccaatattggcgtagcgttgtttgatgatgaaggaaacctcgtaccgattaatcgtcctccagcaaac

SEQ ID NO: 855108 - DNA, 75 bp, synthetic construct
  source 1..75: mol_type = other DNA
aaaaccggcggtgacttcaaggaaattgacctgctgggacgccagattgaacgactggcacgggtaaaccgttac

SEQ ID NO: 855109 - DNA, 75 bp, synthetic construct
  source 1..75: mol_type = other DNA
tcgaaaagctggaagagattttcctcgaccagtcctttgagtatcagctcaactggcacaaggccggtatcgcgc

SEQ ID NO: 855110 - DNA, 75 bp, synthetic construct
  source 1..75: mol_type = other DNA
aaaggcaaaacctttacagcgaaaccgaaaccggacgcagaaattgcctcgctgttagggaaggtgcgaacaagt

SEQ ID NO: 855111 - DNA, 75 bp, synthetic construct
  source 1..75: mol_type = other DNA
ctatcgccaactgctggaacacgttaaagcaaccggcgttaatgtctgggtacaggatggcagcggcgtggataa

SEQ ID NO: 855112 - DNA, 75 bp, synthetic construct
  source 1..75: mol_type = other DNA
aggcaaaagacgttatccgccgtggctgtctggaatacgacgtcagcgccaccgacatcaccagctcgtttatgg

SEQ ID NO: 855113 - DNA, 75 bp, synthetic construct
  source 1..75: mol_type = other DNA
ctgtctggaatatgacgtcagcgcccgacatcaccagctcgtttatggctatccgcaggaccatgaccagcagcg

SEQ ID NO: 855114 - DNA, 75 bp, synthetic construct
  source 1..75: mol_type = other DNA
agattgtcaccattgaggacgccctgaaaggcggctgcacgctgttcgacattgagcagctcaaacgcgaaaaca

SEQ ID NO: 855115 - DNA, 75 bp, synthetic construct
  source 1..75: mol_type = other DNA
ccgaccaataaacccagtgtaccgattctggcaatccccaccacagcaggcactgcggcagaagtgaccattaac

SEQ ID NO: 855116 - DNA, 75 bp, synthetic construct
  source 1..75: mol_type = other DNA
gggatcgcgttcttagcatcaatgaaactgctgatgtatggtcgtatgcttatggaaataatttgcttactctct

SEQ ID NO: 855117 - DNA, 75 bp, synthetic construct
  source 1..75: mol_type = other DNA
actaaattagctcttcgtttttgtcgggtacgccagtacgcgacgtgtgatgctttaaaggatttgcgcatgagt

SEQ ID NO: 855118 - DNA, 75 bp, synthetic construct
  source 1..75: mol_type = other DNA
ttggttattcttttttggtgttatatccaatgggatatttttaatttttatacctcagatttttttcctttatat

SEQ ID NO: 855119 - DNA, 75 bp, synthetic construct
  source 1..75: mol_type = other DNA
aacggttctactgaagatttgaccgctcgcgtgctggatctggcttcgccaatcggtcgtggtcaacgtggtctg

SEQ ID NO: 855120 - DNA, 75 bp, synthetic construct
  source 1..75: mol_type = other DNA
ccagagcattgcttacaaccacccggattgtgtgctgatggttctgctgatcgacgaacgtccggaagaagtaac

SEQ ID NO: 855121 - DNA, 75 bp, synthetic construct
  source 1..75: mol_type = other DNA
gaaaaacgcgtcttcccggctatcgactataaccgttccggtacccgtaaagaagaactgctcactactcaggaa

SEQ ID NO: 855122 - DNA, 75 bp, synthetic construct
  source 1..75: mol_type = other DNA
tatgtcgatgaaatattctggatcccgaattttcagaagctgcgcaaagtcgcctcgggcatggcctctcagaag

SEQ ID NO: 855123 - DNA, 75 bp, synthetic construct
  source 1..75: mol_type = other DNA
gactttgccgcacaggcagaggggatccgaaagctgaccgagaaatataacgttgaatacatcggcattgacgcg

SEQ ID NO: 855124 - DNA, 75 bp, synthetic construct
  source 1..75: mol_type = other DNA
actggttatcccgttttgacagccttctcgacagtgccctgtcgcagcaccgtgccgtctcgttaatccgggtgg

SEQ ID NO: 855125 - DNA, 75 bp, synthetic construct
  source 1..75: mol_type = other DNA
aaaagatatcagataaaaaggctaatcttcgagttaagataattaactctgagattattttttctcttttgtttt

SEQ ID NO: 855126 - DNA, 75 bp, synthetic construct
  source 1..75: mol_type = other DNA
aacacaacgggttatctacctccgtgaaggctatgaacatgaatgcttcagcccgcttgagcatttcaggcaaaa

SEQ ID NO: 855127 - DNA, 75 bp, synthetic construct
  source 1..75: mol_type = other DNA
aacacaacgggttatctacctccgcgaaggttatgagcatgaatgcttcagtccgctcgaacagtttcgtcgtaa

SEQ ID NO: 855128 - DNA, 75 bp, synthetic construct
  source 1..75: mol_type = other DNA
cgcagcgaagccgcccgtcagccattgctgaaatggttaaacaatgctcagcgactgcttagtgatgtttcggca

SEQ ID NO: 855129 - DNA, 75 bp, synthetic construct
  source 1..75: mol_type = other DNA
gcgactggcgcgcgttaaccgctacagccagaccggcaacgaggtcgaccttaaccccaatgttgccaatcgcaa

SEQ ID NO: 855130 - DNA, 75 bp, synthetic construct
  source 1..75: mol_type = other DNA
tttgccgcgaatccgttcggctcccgcccggtatggattggttacgacccgtcacaccgtggcgacagcgccgga

SEQ ID NO: 855131 - DNA, 75 bp, synthetic construct
  source 1..75: mol_type = other DNA
cagtggtaccgcgcaggactggagcaccgtattcgtgacattctcaaatcccgccagattggcgcgacattctat

SEQ ID NO: 855132 - DNA, 75 bp, synthetic construct
  source 1..75: mol_type = other DNA
cacctgcgcaccacctacttttcaaccccctcgacgctggcacatggtgcttatccgttctggtcaggtgagctg

SEQ ID NO: 855133 - DNA, 75 bp, synthetic construct
  source 1..75: mol_type = other DNA
agattgtcaccatcgaggatgcgctcgccgggggatgcacgctgtttaatctggatcaactgaaacaggaaaaca

SEQ ID NO: 855134 - DNA, 75 bp, synthetic construct
  source 1..75: mol_type = other DNA
gtatccgttctggtcaggtgaactgtttaaccggggacgcagcaacgcgagcgagcgcgtcgacatcgatatcag

SEQ ID NO: 855135 - DNA, 75 bp, synthetic construct
  source 1..75: mol_type = other DNA
cttcagcttctggcccaccctgtttcagtatgaagcggatgaaacatcccccgcacgggggattttttatgtcgg

SEQ ID NO: 855136 - DNA, 75 bp, synthetic construct
  source 1..75: mol_type = other DNA
ccgggttcgttaatacggcaacaaatactttctaccgtttttcagattttacacatatatcagtgcccggtgtga

SEQ ID NO: 855137 - DNA, 75 bp, synthetic construct
  source 1..75: mol_type = other DNA
gttcaggcagatacagagagaatttcgtctggcactgtctgaaactgctcctgtttatacgatgacaccggaaga

SEQ ID NO: 855138 - DNA, 75 bp, synthetic construct
  source 1..75: mol_type = other DNA
gcaaccgtgcagtggcggatggcaaaaccaaacagacgtataaagttacggtgactgatgccaataacaacctgt

SEQ ID NO: 855139 - DNA, 75 bp, synthetic construct
  source 1..75: mol_type = other DNA
cctttctgccagtaaggcacaggcccacgttttcaaacagtacatcatcgactttgccaaagaagtggaggtgga

SEQ ID NO: 855140 - DNA, 75 bp, synthetic construct
  source 1..75: mol_type = other DNA
gaccgactttcatgcactggctctgcgcccctttggctggcgcgaagtgtggatcggttatgacccggcaaaagg

SEQ ID NO: 855141 - DNA, 75 bp, synthetic construct
  source 1..75: mol_type = other DNA
gacttccgcgcccaggcggatgccatcaaaaaattgaccgaacagtacaacgtgacctatatcggcatcgactcg

SEQ ID NO: 855142 - DNA, 75 bp, synthetic construct
  source 1..75: mol_type = other DNA
tcaaaaaactgaccgaacagtacaacgtgacatatatcggcatcgactcaacaggtgtcggtcacggggtttacg

SEQ ID NO: 855143 - DNA, 75 bp, synthetic construct
  source 1..75: mol_type = other DNA
gatggacttccgcgctcaggctgacgccatcaaaaaactgaccgaacagtacaacgtgacttatatcggtatcga

SEQ ID NO: 855144 - DNA, 75 bp, synthetic construct
  source 1..75: mol_type = other DNA
gtgagttcgtggacgatctcgcgtccgtgttcccgctcagcgaactgcaggcgtgcatggtggacagttgggaag

SEQ ID NO: 855145 - DNA, 75 bp, synthetic construct
  source 1..75: mol_type = other DNA
tgctaacatggttaaacaacgcgcagcggctgattagcgatgtttcagcaaaaccggtttatatcagtagttttt

SEQ ID NO: 855146 - DNA, 75 bp, synthetic construct
  source 1..75: mol_type = other DNA
agccgcaccgaggaagccagtcacgccgatctcgcgtgggcaaccatgcacgtattaatcaatgagccgctgacc

SEQ ID NO: 855147 - DNA, 75 bp, synthetic construct
  source 1..75: mol_type = other DNA
accggcgtcggtcacggggtttacgagaacgtgaaagcattttttcctgccgtcagggagtttgtctacaacccc

SEQ ID NO: 855148 - DNA, 75 bp, synthetic construct
  source 1..75: mol_type = other DNA
gatagcgttgcccccatcagccgtgtcgaaatgagtctggaagcgcggctgacccagctcatcatcaaaccgcag

SEQ ID NO: 855149 - DNA, 75 bp, synthetic construct
  source 1..75: mol_type = other DNA
gacagcgttgcccccatcagccgtgtcgaaatgagcctggaagcgcggctgacccagctcatcatcaaaccgcag

SEQ ID NO: 855150 - DNA, 75 bp, synthetic construct
  source 1..75: mol_type = other DNA
tgagacgaagcagcatgacggttccgggcaacgtaattatggttgcagtcgtgggccggggcgtcttctggatgg

SEQ ID NO: 855151 - DNA, 75 bp, synthetic construct
  source 1..75: mol_type = other DNA
tggtccggtgcgctgttcaaccgtggacgcaacaaagctgacaaggtggacatcgacctgtcccacagcaatttg

SEQ ID NO: 855152 - DNA, 75 bp, synthetic construct
  source 1..75: mol_type = other DNA
tccaggcggacgcctttccgtaaaccggcatcatctgatgctcgcccttcttccgatgatacgcctttgtcgggt

SEQ ID NO: 855153 - DNA, 75 bp, synthetic construct
  source 1..75: mol_type = other DNA
gcatggtagacagctgggaaatctggaccgactttcatgcactggcgctgcgcccgtttggctggcgcgaagtgt

SEQ ID NO: 855154 - DNA, 75 bp, synthetic construct
  source 1..75: mol_type = other DNA
cgcacgagctacaaaatcatcggtgtatcaatatgcgcctgccgacagccggtgggctttaccactgggagtttg

SEQ ID NO: 855155 - DNA, 75 bp, synthetic construct
  source 1..75: mol_type = other DNA
gaactggtggtggataacggttttgtcgatattgtcgaaggtcgctttgatgccggagtacggctgggcgaaagt

SEQ ID NO: 855156 - DNA, 75 bp, synthetic construct
  source 1..75: mol_type = other DNA
gacgagcttgaacaggagctggaatcacttattcacctgaacggcacgccctccgggaatattcggttatctgcc

SEQ ID NO: 855157 - DNA, 75 bp, synthetic construct
  source 1..75: mol_type = other DNA
atgattgatactaccgatatcctttctcaaaacatcaagtacctgatggacaaagccaagataagctcgataact

SEQ ID NO: 855158 - DNA, 75 bp, synthetic construct
  source 1..75: mol_type = other DNA
ttttgctgcaaaccctgcgcctgaaacgcctcacgaactacaaaatcatcgctgcatcaacatgcgtttgccaac

SEQ ID NO: 855159 - DNA, 75 bp, synthetic construct
  source 1..75: mol_type = other DNA
aacttttcccggatattatctttactaccccagccgcaagcagcatccgcctgcttttgcgctgttaatcgatgc

SEQ ID NO: 855160 - DNA, 75 bp, synthetic construct
  source 1..75: mol_type = other DNA
tgtcgatattgttgaagggcgttttgatgccgggatacgtctgggtgaaactgtagataatgatatgattgcagt

SEQ ID NO: 855161 - DNA, 75 bp, synthetic construct
  source 1..75: mol_type = other DNA
tgtcgatattgttgaaggtcgttttgatgccgggatacgtctgggtgaaactgttgataatgatatgattgcagt

SEQ ID NO: 855162 - DNA, 75 bp, synthetic construct
  source 1..75: mol_type = other DNA
tgtcgatattgttgaaggacgttttgatgccgggatacgtctgggtgaaactgtggataatgatatgattgcagt

SEQ ID NO: 855163 - DNA, 75 bp, synthetic construct
  source 1..75: mol_type = other DNA
ggaggaaaggttaaatatccgcctcttaacccgaacgactcgcagcgtggctcccacagaagcgggggagagaat

SEQ ID NO: 855164 - DNA, 75 bp, synthetic construct
  source 1..75: mol_type = other DNA
gtctttccccggatattacctttattacccgagccgtaagcagcatccgcccgcttttgcgttgatgatcgatgc

SEQ ID NO: 855165 - DNA, 75 bp, synthetic construct
  source 1..75: mol_type = other DNA
ttacctttactatcccagccgtaagcagcatccgcctgcttttgcgctgttgattgatgcacttcgctacgcgga

SEQ ID NO: 855166 - DNA, 75 bp, synthetic construct
  source 1..75: mol_type = other DNA
agcatggcgtcgttcggtcaatggtctgggtgagcatttgcaggcatgggtgcggtactgctatgggtatgacct

SEQ ID NO: 855167 - DNA, 75 bp, synthetic construct
  source 1..75: mol_type = other DNA
agccgatgctcaggtcatcgaactggtgcgtcagcaactggggttggatcagccgctgtatcaccagttctggca

SEQ ID NO: 855168 - DNA, 75 bp, synthetic construct
  source 1..75: mol_type = other DNA
aattatcgccgccgtctggcgtaaccgttggccggatcgattgagtatgaccattgcggtgtcggggatctcgtt

SEQ ID NO: 855169 - DNA, 75 bp, synthetic construct
  source 1..75: mol_type = other DNA
accgccatttacagatctgtccggatgctcagctcggcctggcggaacaactgttgctcggtgtcgttgatacgg

SEQ ID NO: 855170 - DNA, 75 bp, synthetic construct
  source 1..75: mol_type = other DNA
ggcagcctgagttcacagataaaacactctccaggaaacccggggcggttcaagaggttcctgttagctacgttt

SEQ ID NO: 855171 - DNA, 75 bp, synthetic construct
  source 1..75: mol_type = other DNA
ccattgcggtgtcggggatctcctttccggcatttgcgctggggatgcttctgattcaggttttctctgttgaac

SEQ ID NO: 855172 - DNA, 75 bp, synthetic construct
  source 1..75: mol_type = other DNA
aacgcgatgatcccggtagtgaccatgatgggcttacagtttggctttttgctcggtggttccatcgtggtggag

SEQ ID NO: 855173 - DNA, 75 bp, synthetic construct
  source 1..75: mol_type = other DNA
gcatattaagcgcgtcatctaaagctgatgcagtcgcgccgctcaaagtgggtacttatactttagatggcaaag

SEQ ID NO: 855174 - DNA, 75 bp, synthetic construct
  source 1..75: mol_type = other DNA
agcgtcagcatagcggcaaaaaaatacagggccgtgtcactaaaaaactgatagggcttgtctggctggcggcgc

SEQ ID NO: 855175 - DNA, 75 bp, synthetic construct
  source 1..75: mol_type = other DNA
ggacagctgcaggcgttcagtgagcatccaccagcagataagaacaaatacccccggcaccatcctgaaatcgtc

SEQ ID NO: 855176 - DNA, 75 bp, synthetic construct
  source 1..75: mol_type = other DNA
tggcagttattgatgaaaataactgtattggctgcactaagtgcattcaggcgtgtccggtagacgccattgttg

SEQ ID NO: 855177 - DNA, 75 bp, synthetic construct
  source 1..75: mol_type = other DNA
gagaaaaattccagccggtcagcaaaaaagagatgctgcacatgcgggaagtggtgacatcacttaaaaacccga

SEQ ID NO: 855178 - DNA, 75 bp, synthetic construct
  source 1..75: mol_type = other DNA
ctttgaaaaactggctagtctggatggcggtcgcacccagtccatgtttgactctcacccaccatcaacagagcg

SEQ ID NO: 855179 - DNA, 75 bp, synthetic construct
  source 1..75: mol_type = other DNA
ctccggcaatatccgtttatctgccggggagcatgccgcgcgaagtctggtatggccgaagctaaagccttttct

SEQ ID NO: 855180 - DNA, 75 bp, synthetic construct
  source 1..75: mol_type = other DNA
gggcgaacgctggacgatccggggcgtaagccgcaaaaccaatgcggcggcgatgaaggttaacgcgcaggtgct

SEQ ID NO: 855181 - DNA, 75 bp, synthetic construct
  source 1..75: mol_type = other DNA
gcaatgaggcagcggtgaaactggcttcttccttagccgctgacgggatcgccacgttccgcgtactgttcccgg

SEQ ID NO: 855182 - DNA, 75 bp, synthetic construct
  source 1..75: mol_type = other DNA
gtacgggcgcaagatcaccgacgattgcgcagggaacgccgctacacatgtacctgcccggcactcacggcggcg

SEQ ID NO: 855183 - DNA, 75 bp, synthetic construct
  source 1..75: mol_type = other DNA
cgaatcgctgatcgacgccatgtcgttctgggtcgccggagtccgtaacgtcacggcggcttacggggtgaacgg

SEQ ID NO: 855184 - DNA, 75 bp, synthetic construct
  source 1..75: mol_type = other DNA
cgagtccgggcatgagcacttcaccgggtcgctggttgtgccggtgatggatctgaacgggcagatccgcgagat

SEQ ID NO: 855185 - DNA, 75 bp, synthetic construct
  source 1..75: mol_type = other DNA
aatacgagttgctgtgggacggcagcggcgacggctcgcacctgtgcggcctgatcgaaccggaggataaccagg

SEQ ID NO: 855186 - DNA, 75 bp, synthetic construct
  source 1..75: mol_type = other DNA
cagcacattggaaaggccatccagtggtgggactcgttggtgacgagttgcatgataaaattggtggttgctcca

SEQ ID NO: 855187 - DNA, 75 bp, synthetic construct
  source 1..75: mol_type = other DNA
atttctggcgatccccccagaaattggggagttaattatgaactataccgtgagatataagaaaaaccccgaaga

SEQ ID NO: 855188 - DNA, 75 bp, synthetic construct
  source 1..75: mol_type = other DNA
acatgatcagtaaaggcttgtttgaaatggctgtggcgattcggtatggcgaaaactacagtctgaacaccatgc

SEQ ID NO: 855189 - DNA, 75 bp, synthetic construct
  source 1..75: mol_type = other DNA
gggcacgccgttcttgcctgtggagagatggtgcagtcaggccgctcgttgaagcaggaacccaccgaaatgatt

SEQ ID NO: 855190 - DNA, 75 bp, synthetic construct
  source 1..75: mol_type = other DNA
gagcgggtgaacgaccggaaaatcacggcagacgggaaggagggaccgggtgaccgcagcggcgaagcgtaccct

SEQ ID NO: 855191 - DNA, 75 bp, synthetic construct
  source 1..75: mol_type = other DNA
ttatgtcacaggtagtcgtccggttcagttagctaaattggctgctggtgactttcgaatcgatacttgcagtac

SEQ ID NO: 855192 - DNA, 75 bp, synthetic construct
  source 1..75: mol_type = other DNA
acactggcaggccgcaccggagccggagaacaccgccccggagatgagcgacacggatcgggaggcggcgcttga

SEQ ID NO: 855193 - DNA, 75 bp, synthetic construct
  source 1..75: mol_type = other DNA
acgttggtgatcgcatatgggtccgtgaagcgtgggcgatattaggcaatgaggatggttgcagtgtggactgga

SEQ ID NO: 855194 - DNA, 75 bp, synthetic construct
  source 1..75: mol_type = other DNA
atggtttatgcccgttcggtaacgttggtgatcgcatatgggtccgtgaaacattcaacgctttttggctggata

SEQ ID NO: 855195 - DNA, 75 bp, synthetic construct
  source 1..75: mol_type = other DNA
aaaatcgcctgtcacaaagtaaattcagatgccaggtatgtggatatacagcgaacgccgatgtaaacggcgctc

SEQ ID NO: 855196 - DNA, 75 bp, synthetic construct
  source 1..75: mol_type = other DNA
ggaaacctcacactgtgaatgaaaagtttgatggtgggtggcgtccatcaattcacatgccgcgatgggcatcac

SEQ ID NO: 855197 - DNA, 75 bp, synthetic construct
  source 1..75: mol_type = other DNA
aacgcagcaaggatttatcgggccagttgtgagcaaaaaccgggggattatggcttatggtcgatacccgatgat

SEQ ID NO: 855198 - DNA, 75 bp, synthetic construct
  source 1..75: mol_type = other DNA
acccacgttatggatgcacctgaacatggtttatgcccgttcggtaacgttggtgatcgcatatgggtccgtgaa

SEQ ID NO: 855199 - DNA, 75 bp, synthetic construct
  source 1..75: mol_type = other DNA
gacgccagaagatcgggaggcggcgctggaactgctgcgcgacgagtgtcttgcgtcacgcatcgcttctgatat

SEQ ID NO: 855200 - DNA, 75 bp, synthetic construct
  source 1..75: mol_type = other DNA
gtgctggacaccgaaagcggcgtggtgttcgcggatagcgtggatatgatgagcacccgcagtcgcggcggttat

SEQ ID NO: 855201 - DNA, 75 bp, synthetic construct
  source 1..75: mol_type = other DNA
gagcgcggcgggtaagtcctcgctgatggatgcggtgctgaacctgatcccaccggaagaacgcttacagtacag

SEQ ID NO: 855202 - DNA, 75 bp, synthetic construct
  source 1..75: mol_type = other DNA
aaatcaggtttaaaccgttcgatactggatcagggctggtatgaaatgcgccgccagcttgagtacaagcagctc

SEQ ID NO: 855203 - DNA, 75 bp, synthetic construct
  source 1..75: mol_type = other DNA
aaaccgttcgatactggatcagggctggtatgaaatgcgccgccagcttgcgtacaagcagctctggcgtggcgg

SEQ ID NO: 855204 - DNA, 75 bp, synthetic construct
  source 1..75: mol_type = other DNA
gttcgacggggacggcagcgcagacggcgcgcatctgtgcgggctgatcgacgtaccggaaaacgccggagaagt

SEQ ID NO: 855205 - DNA, 75 bp, synthetic construct
  source 1..75: mol_type = other DNA
tccgcggtggtggcggttcttcaggaggcggcggttcatccggccgttggtgatcgtaatgcgcttaatctttat

SEQ ID NO: 855206 - DNA, 75 bp, synthetic construct
  source 1..75: mol_type = other DNA
atgcgtatttttctcttacttctgatgctatgtggtttccaggcattcgctgaacaattgccttcagtaactgac

SEQ ID NO: 855207 - DNA, 75 bp, synthetic construct
  source 1..75: mol_type = other DNA
ttgtcgtgatgctgataattattgtgggatggtgcctggtgttcgccagtaataaagatattgcattcatctcaa

SEQ ID NO: 855208 - DNA, 75 bp, synthetic construct
  source 1..75: mol_type = other DNA
gtttgctaatccgcaacgctcactgccatgtcttgcctggacattgctgatgatcgccattattgccgccgtctg

SEQ ID NO: 855209 - DNA, 75 bp, synthetic construct
  source 1..75: mol_type = other DNA
acagactctcgagcagcaaaaccacttccaggtggccgtgttggttacgccgaccacagggggcaaaaatattaa

SEQ ID NO: 855210 - DNA, 75 bp, synthetic construct
  source 1..75: mol_type = other DNA
ccacctctttttatcggcatttccgcgacgtagacgaactgggtctgaccatggttgatgagagtggtttaatgc

SEQ ID NO: 855211 - DNA, 75 bp, synthetic construct
  source 1..75: mol_type = other DNA
tggtatcgtcagcgttcaatgaaaggcagctggctacagctcgttattggtgtgctggatatcgtcattgcctgg

SEQ ID NO: 855212 - DNA, 75 bp, synthetic construct
  source 1..75: mol_type = other DNA
tcgggttgctgtgtatcagtttcccgttcgtctctggcgatattttaagcacagtagtgggtgcattattaatct

SEQ ID NO: 855213 - DNA, 75 bp, synthetic construct
  source 1..75: mol_type = other DNA
attgaagatgcaataaagcgtaataaaagattgcttgacgaaattgaagctattaaaaactcagaacctttggac

SEQ ID NO: 855214 - DNA, 75 bp, synthetic construct
  source 1..75: mol_type = other DNA
aaaggttcttcttcatcctcttccggtggaggctcaagtggcggcggatttagcggcgggggcggttcttctggc

SEQ ID NO: 855215 - DNA, 75 bp, synthetic construct
  source 1..75: mol_type = other DNA
aacaaagtgctttaaatcaacaattacagactctcgagcagcaaaaccacttccaggtggccgtgttggttacgc

SEQ ID NO: 855216 - DNA, 75 bp, synthetic construct
  source 1..75: mol_type = other DNA
agatggtagaaatgttatacgaaatgagagaaaaagcgggattaacaaagtcagcgctggccgaacgaatggggt

SEQ ID NO: 855217 - DNA, 75 bp, synthetic construct
  source 1..75: mol_type = other DNA
cccctatggtctggtttttctcctttcaggacgatgtcatcattcggcgggtatcggtcgtttgggtaatgactc

SEQ ID NO: 855218 - DNA, 75 bp, synthetic construct
  source 1..75: mol_type = other DNA
gatgctgaaggttgccgcccgtcgcgccgccgcgctaaaggcagacaatgtccactggatccagcgcgcctggga

SEQ ID NO: 855219 - DNA, 75 bp, synthetic construct
  source 1..75: mol_type = other DNA
aaagccagagccagaacagatggttcggtaagggaaaccaaccgctggaatctgttgtttctgtctaccggggaa

SEQ ID NO: 855220 - DNA, 75 bp, synthetic construct
  source 1..75: mol_type = other DNA
acggtaaaaccacgacgatgaaagtggctgcatcagtatgtggtggaacagatttctggcatacgtggcgggcga

SEQ ID NO: 855221 - DNA, 75 bp, synthetic construct
  source 1..75: mol_type = other DNA
ccaatgattcgcccgcgggatgtagaaacgctgctacaaggaatgcgtgacgatcccgcgttgccagtggcaacg

SEQ ID NO: 855222 - DNA, 75 bp, synthetic construct
  source 1..75: mol_type = other DNA
cgatcccgcgttgccggtggcaacgctatgccacgcgatttctgccgaagaagcgacggagcccagcacagtaaa

SEQ ID NO: 855223 - DNA, 75 bp, synthetic construct
  source 1..75: mol_type = other DNA
atgagcaaagcagttattgtcattccggctcgttatggctcatcgcgcctgccgggtaagccgctactcgatatt

SEQ ID NO: 855224 - DNA, 75 bp, synthetic construct
  source 1..75: mol_type = other DNA
caaagaggctttaacgtttatcgtgcctgatacgcagtgtgctgaatatattaagcgttggtatcttccacaggc

SEQ ID NO: 855225 - DNA, 75 bp, synthetic construct
  source 1..75: mol_type = other DNA
tgctatgcggttttcaggtattcgctgaacaattgccttcagtaactgacttaaccgggacattaacgacagaag

SEQ ID NO: 855226 - DNA, 75 bp, synthetic construct
  source 1..75: mol_type = other DNA
ataatctcttcgccgggttaacgcgtggaattgagggcattgccctgtttacgcataccaaagccagtctcagcc

SEQ ID NO: 855227 - DNA, 75 bp, synthetic construct
  source 1..75: mol_type = other DNA
gccggatatgcaggaactgcctgttaagcctgccagacaaaaagcccctaaacgcgacatgggtcttaccgtggc

SEQ ID NO: 855228 - DNA, 75 bp, synthetic construct
  source 1..75: mol_type = other DNA
taaggctgactggaatgactttcatcgggagcacggtattacccgtgcccgtgaagcctttcgcaacggtctggt

SEQ ID NO: 855229 - DNA, 75 bp, synthetic construct
  source 1..75: mol_type = other DNA
tggtgattaccgaaggttacgctacggcgctgacggtaagccagctcactgccggatgcgtagtggctgccatat

SEQ ID NO: 855230 - DNA, 75 bp, synthetic construct
  source 1..75: mol_type = other DNA
gtatatctctgctggacagcctagaatggcccaggtcgtaaggtctgtattgatcgatgtgtttaaagaagcaca

SEQ ID NO: 855231 - DNA, 75 bp, synthetic construct
  source 1..75: mol_type = other DNA
atagcagctctgtaaataaaaaacataataaacctaaacaagtgaaattaagagcttttaagatagaaaacaata

SEQ ID NO: 855232 - DNA, 75 bp, synthetic construct
  source 1..75: mol_type = other DNA
agagcttgagataatttttaaagttgagcctggctgtactgacctacttgttgctataaaggatgtaattgattc

SEQ ID NO: 855233 - DNA, 75 bp, synthetic construct
  source 1..75: mol_type = other DNA
ataaatcaggcgtgaaattagatttacgtgtagtcgcgtccgatccatcaattaatatcattgataaattaaaag

SEQ ID NO: 855234 - DNA, 75 bp, synthetic construct
  source 1..75: mol_type = other DNA
tgggaaatgtactgagatttgccctacccgtgcgctggaaatgaagggcaagcgtatgtcggtaacggcagtgat

SEQ ID NO: 855235 - DNA, 75 bp, synthetic construct
  source 1..75: mol_type = other DNA
ttttaaaataacatgtcgtcttcttgctatttctgacgagggcggttcaagattagagaaatgccaaccttggta

SEQ ID NO: 855236 - DNA, 75 bp, synthetic construct
  source 1..75: mol_type = other DNA
tcgccggtattgatgaaattcttgaagggaaaaaaccgatagatcggactggccccctgaatctccagacaacca

SEQ ID NO: 855237 - DNA, 75 bp, synthetic construct
  source 1..75: mol_type = other DNA
ctgcgggcgggattgtcggcagtttatcgcaatcacaacttggtgatctgggcgagaaattagttaattcgcaat

SEQ ID NO: 855238 - DNA, 75 bp, synthetic construct
  source 1..75: mol_type = other DNA
caggcatgtcaggagatggacagcaaggcgacgattgcgccagccaatagcgaatatgctagacgtctgacgaca

SEQ ID NO: 855239 - DNA, 75 bp, synthetic construct
  source 1..75: mol_type = other DNA
cgaatacgctaaacgtctgacaactattgccaatgcgctaggcaacaatatcaacggtcagccggtaaattacaa

SEQ ID NO: 855240 - DNA, 75 bp, synthetic construct
  source 1..75: mol_type = other DNA
taatcctgaaaagcaaagtgacatcgctgcgttggtggatatcgacgttattaaggagaatctgtataacctgtc

SEQ ID NO: 855241 - DNA, 75 bp, synthetic construct
  source 1..75: mol_type = other DNA
ttattgaaaacgatcggctcaagcagtttgatgtgatttttgccaatccgccatattccatcaagaaatggaatc

SEQ ID NO: 855242 - DNA, 75 bp, synthetic construct
  source 1..75: mol_type = other DNA
atgttgctaaatgcggtgatggatcttcgtgctagaggagaagagtggcgctcagtgtacctttatggtcaggag

SEQ ID NO: 855243 - DNA, 75 bp, synthetic construct
  source 1..75: mol_type = other DNA
ctttgcctggtatttgcggtatcctgatgaggagattaatgaaggtatatggggatataatgctgttctgtatgg

SEQ ID NO: 855244 - DNA, 75 bp, synthetic construct
  source 1..75: mol_type = other DNA
ataaatagtggagatcttggcttaaataaagatcaaccacttgttataatacaatttatcgccaattctgatggt

SEQ ID NO: 855245 - DNA, 75 bp, synthetic construct
  source 1..75: mol_type = other DNA
gtggtctgaagtgctgcgtatctacaaggaccgctacaatttcccaatcgcagactggggaaaagaagaatattc

SEQ ID NO: 855246 - DNA, 75 bp, synthetic construct
  source 1..75: mol_type = other DNA
gctggagaaaaaactcaatctgtgcctgcatgatggtgatgaaaaagcagagtatgaaggcttccccggcaattt

SEQ ID NO: 855247 - DNA, 75 bp, synthetic construct
  source 1..75: mol_type = other DNA
gacgtggaatataacttttaacagcgcccccccgtctccacttaattttgtttttgtgaggaagttccagattag

SEQ ID NO: 855248 - DNA, 75 bp, synthetic construct
  source 1..75: mol_type = other DNA
cgatgattattcttacgatcttctgcgccaacgcggcatcagcccggcaggtcttgccaccagctttgaaaaact

SEQ ID NO: 855249 - DNA, 75 bp, synthetic construct
  source 1..75: mol_type = other DNA
aaaaagttaatgaagatcgaaaacataattcaataacatttgatataaccgatgatgctaccggaactttaccaa

SEQ ID NO: 855250 - DNA, 75 bp, synthetic construct
  source 1..75: mol_type = other DNA
ggctatcaactggtactacaaacacaaagcctaccagcttctgcgcgacgggcagatctcgcgggaggactatga

SEQ ID NO: 855251 - DNA, 75 bp, synthetic construct
  source 1..75: mol_type = other DNA
atgtttctgataattctcacgccactggtgggcgtgctgggggcgcttttgctgtcgtatggcgcatggatgatt

SEQ ID NO: 855252 - DNA, 75 bp, synthetic construct
  source 1..75: mol_type = other DNA
aaatcatgttattgcgctctgctctcggcatgggcatcgtgatggtgctgatggggctggcgcaaaatatctggc

SEQ ID NO: 855253 - DNA, 75 bp, synthetic construct
  source 1..75: mol_type = other DNA
cctaccagcgcacagaacgcaatcatcaacgtagcggccattggcatcacgttaaacccggcaagcaagctggct

SEQ ID NO: 855254 - DNA, 75 bp, synthetic construct
  source 1..75: mol_type = other DNA
tctggaatgaaattgcagcagaacgtacaagccatttacgtagaatgcaaagcgaaactggaggttgccagtgag

SEQ ID NO: 855255 - DNA, 75 bp, synthetic construct
  source 1..75: mol_type = other DNA
gctgttagcactggttactggccagaggttaggtgatatctcgcgtatgaaatttagtgatatttgggatgatca

SEQ ID NO: 855256 - DNA, 75 bp, synthetic construct
  source 1..75: mol_type = other DNA
aatggtgaattattctatggccgccgcggaacgttaacgcacttctcattgcaagaagcgatgtgtgaactggaa

SEQ ID NO: 855257 - DNA, 75 bp, synthetic construct
  source 1..75: mol_type = other DNA
gcagatggacattgagaacttcgacgttagcccgttcctgtgtggggttatcgccctgtcgctactgtatgccgc

SEQ ID NO: 855258 - DNA, 75 bp, synthetic construct
  source 1..75: mol_type = other DNA
ccagtggctggtactgctgaaagataccgcgctggtcagtttgattagtgtgaatgatttaatgctgcaaaccaa

SEQ ID NO: 855259 - DNA, 75 bp, synthetic construct
  source 1..75: mol_type = other DNA
tcactatggaagtccacgacgttccggcgattgttgctgccgtgcgcagtgtcgtgccagacgccatcattatga

SEQ ID NO: 855260 - DNA, 75 bp, synthetic construct
  source 1..75: mol_type = other DNA
gggaaaacgcctatctgatgggccagatggttgatgccgataccgcctacatgaccagtcgtggcctgcgtactt

SEQ ID NO: 855261 - DNA, 75 bp, synthetic construct
  source 1..75: mol_type = other DNA
cctgcggggcggcagcggttgctaattccattcttgcttttgtcgaacagggcgatcatgtgttgatgaccaaca

SEQ ID NO: 855262 - DNA, 75 bp, synthetic construct
  source 1..75: mol_type = other DNA
cagcggtgtggtggtgagaattgccggtgaaggtcgcccgtggaatcccggtgccatcaccggcggtcgcgtgtg

SEQ ID NO: 855263 - DNA, 75 bp, synthetic construct
  source 1..75: mol_type = other DNA
aatgaggaccggcgcgtgctgaacagcatgattcatgatgcacgggaaaaggctggtgagctgggaaaagagcag

SEQ ID NO: 855264 - DNA, 75 bp, synthetic construct
  source 1..75: mol_type = other DNA
ggcgtttgaccgtaacggcaagtctgccggtatctggctgaacccgctgaccacggatgacggaaacgggctgcg

SEQ ID NO: 855265 - DNA, 75 bp, synthetic construct
  source 1..75: mol_type = other DNA
tcaggtacccgtatctggctcgttgccggtgttaccgatatgtgtaaatctttcaacggatacgacatatgctga

SEQ ID NO: 855266 - DNA, 75 bp, synthetic construct
  source 1..75: mol_type = other DNA
gaaggtactgccgaaaatattcagatagagctaagggatgaccaggatgcgacgttaaaaaatggcgatagcaaa

SEQ ID NO: 855267 - DNA, 75 bp, synthetic construct
  source 1..75: mol_type = other DNA
gcatctggctcgttgccggcgttaccgatatgcgtaaatccttcaacggactgggagaacaggtacagcatgtgc

SEQ ID NO: 855268 - DNA, 75 bp, synthetic construct
  source 1..75: mol_type = other DNA
attgatatttcgattcaggcgggaaccaagtatctgataggtcactcggatgccatgatcggcaccgcagtatgc

SEQ ID NO: 855269 - DNA, 75 bp, synthetic construct
  source 1..75: mol_type = other DNA
aaatgcatatagataccgacgaagccaacgctgcaggcgctgataatcctgacgtttttgccacgctggtgtcgg

SEQ ID NO: 855270 - DNA, 75 bp, synthetic construct
  source 1..75: mol_type = other DNA
caccacgacctgaccagttgcgcacacatgaacgtctgcgaaagctgggctttaccgtggtggtactggatagca

SEQ ID NO: 855271 - DNA, 75 bp, synthetic construct
  source 1..75: mol_type = other DNA
cacggcctgaccagttgcgcgaacatgaacgtctgcgaaagctgggctttaccgtggtggtgctggatagcaaaa

SEQ ID NO: 855272 - DNA, 75 bp, synthetic construct
  source 1..75: mol_type = other DNA
gatcaggacccacagttacacacgcatgtggtggtggctaatgtcacgcagcataacggcgagtggaagacactg

SEQ ID NO: 855273 - DNA, 75 bp, synthetic construct
  source 1..75: mol_type = other DNA
atgccgtacagaaaggaactgcccacgatgtgctggagccgaaaccggaccgggaggtcatgaatgcagagcggc

SEQ ID NO: 855274 - DNA, 75 bp, synthetic construct
  source 1..75: mol_type = other DNA
cgcgtctcaccggatatgcgtcttgaaatgcatattgataccgacgaagccaacgctgcaggcgctgataatcct

SEQ ID NO: 855275 - DNA, 75 bp, synthetic construct
  source 1..75: mol_type = other DNA
aaatcatcggtccgaaagggcgggtggtgaaacacaacggcatgattgtcgcctggcgccatatccatatctcgc

SEQ ID NO: 855276 - DNA, 75 bp, synthetic construct
  source 1..75: mol_type = other DNA
ggctattttcctttgtgcttaagaaaaaactcaatgatgaagagctggcgaactatctggataacttcagtttat

SEQ ID NO: 855277 - DNA, 75 bp, synthetic construct
  source 1..75: mol_type = other DNA
aaaactcaataatgaagagctggcgaactatctggataacttcagtttattcagcatggcctactcgtggggcgg

SEQ ID NO: 855278 - DNA, 75 bp, synthetic construct
  source 1..75: mol_type = other DNA
aagttcgtatctcccggtctccgctcggtaccagatcgcattgttctgctacccggcggtcgcatcgtctttgtc

SEQ ID NO: 855279 - DNA, 75 bp, synthetic construct
  source 1..75: mol_type = other DNA
tcgaaaagcacctcgtcgctgaagtaaaaaaggctggcggggttgcctttaagttcgtatctcccggtctccgct

SEQ ID NO: 855280 - DNA, 75 bp, synthetic construct
  source 1..75: mol_type = other DNA
cacgctccgaccagctgcgcgagcacgaacggctccgcgctctgggctttaccgtggtcgtgctggatagcaaaa

SEQ ID NO: 855281 - DNA, 75 bp, synthetic construct
  source 1..75: mol_type = other DNA
aagccgtacagaaaggaacggctcacgatgtgctggagccgggggctgaccgggaggtcatgaatgcgcagcggc

SEQ ID NO: 855282 - DNA, 75 bp, synthetic construct
  source 1..75: mol_type = other DNA
accctgaacggtctggcccgcagcggtcgtgatgtccggctgtattcctcactggatgaaacccgtacggcggaa

SEQ ID NO: 855283 - DNA, 75 bp, synthetic construct
  source 1..75: mol_type = other DNA
tgttcagtacggcgcgggagctacgggacgtggcagctggtcgtgccgttctccgtcaggcggggcttgccgggg

SEQ ID NO: 855284 - DNA, 75 bp, synthetic construct
  source 1..75: mol_type = other DNA
ctgacctgccggacggcaaaacagagctggctgtcagggatattgccggacaggagcgtgaccggtctgccatat

SEQ ID NO: 855285 - DNA, 75 bp, synthetic construct
  source 1..75: mol_type = other DNA
ggcagagcaacatattgacctggcctatgccatcaccgcccacggtgcgcagggggcgagtgaaacctttgccat

SEQ ID NO: 855286 - DNA, 75 bp, synthetic construct
  source 1..75: mol_type = other DNA
acgccctgattgcggccggtggtggtcgtgccgtggccagcggtgacacggaccagctgcaggccatcgcgcccg

SEQ ID NO: 855287 - DNA, 75 bp, synthetic construct
  source 1..75: mol_type = other DNA
ggagagagtacctggcgaactcatggagaaactgacatcaggacagcgtgccgctacccgcatgatactggaaac

SEQ ID NO: 855288 - DNA, 75 bp, synthetic construct
  source 1..75: mol_type = other DNA
agagagtacctggcgaactcatggagaaactgacatcaggacagcgtgccgccacccgcatgatactggaaacgt

SEQ ID NO: 855289 - DNA, 75 bp, synthetic construct
  source 1..75: mol_type = other DNA
ttacggtggtttctgagcagataaaggcgcgggccggtgagacatcgctggaaaccgccatcagtcagcagaaaa

SEQ ID NO: 855290 - DNA, 75 bp, synthetic construct
  source 1..75: mol_type = other DNA
atgaatgcgcagcggctgttcagtacggcacgggaactgcgggacgtggcggcaggccgtgccgttctccgtcag

SEQ ID NO: 855291 - DNA, 75 bp, synthetic construct
  source 1..75: mol_type = other DNA
atcagcaaggatgacgggctgataaccctgcaggatgcggaaggtaacacgcggctgatttcgccccgggaggcg

SEQ ID NO: 855292 - DNA, 75 bp, synthetic construct
  source 1..75: mol_type = other DNA
gccgtgaaacggaacgccgcgcagatgaaattgtccgtaaaatggcagagaacaaacctgacctgccggacggca

SEQ ID NO: 855293 - DNA, 75 bp, synthetic construct
  source 1..75: mol_type = other DNA
cagcatgattcatgatgcacgggaaaaggccggtgagctggggaaagagcaggtcatggtgcctgtcctgaacac

SEQ ID NO: 855294 - DNA, 75 bp, synthetic construct
  source 1..75: mol_type = other DNA
agccggagaagagagcgtggcacaggtcagcggggtacgggaacaggccatactgacacagtccattcgcagtga

SEQ ID NO: 855295 - DNA, 75 bp, synthetic construct
  source 1..75: mol_type = other DNA
tgcaggagcgtctgcagcagatggagcgggatatggtccgtgacctgcagaaagagaaaaccctgggcggagact

SEQ ID NO: 855296 - DNA, 75 bp, synthetic construct
  source 1..75: mol_type = other DNA
cactgccggagagtgtgctgcgtgaatcacaacgggagcgggaagcggtccgggaggttgcccgggaaaatctgc

SEQ ID NO: 855297 - DNA, 75 bp, synthetic construct
  source 1..75: mol_type = other DNA
cgataaccgtcagggctggacggatgccatcaacaatgccgtacagaaaggaactgcccacgatgtgctagagcc

SEQ ID NO: 855298 - DNA, 75 bp, synthetic construct
  source 1..75: mol_type = other DNA
cagttccgggcggtgatgtcagccgtgaacatgctgccggagagtgagcgtccccgtgtcgttgggctggggccc

SEQ ID NO: 855299 - DNA, 75 bp, synthetic construct
  source 1..75: mol_type = other DNA
acgacaaaacagagcggactgtcagggatattgccgggcaggagcaggacagggcttcgtcatcagaacggaaaa

SEQ ID NO: 855300 - DNA, 75 bp, synthetic construct
  source 1..75: mol_type = other DNA
actggcacagcggcaggctgaagaggccatccgccgtgaaacggaacgccgcgcagatgagattgtcagaaaaat

SEQ ID NO: 855301 - DNA, 75 bp, synthetic construct
  source 1..75: mol_type = other DNA
cagcagcgtccagccgggtgccggaaacggtgagccggtcacggcagaggtactggcacagcggcaggctgaaga

SEQ ID NO: 855302 - DNA, 75 bp, synthetic construct
  source 1..75: mol_type = other DNA
tgtcaccggtctggctggacagtcggagccgttatctgcgggatatgtaccgaccggggatggtgatggagcagt

SEQ ID NO: 855303 - DNA, 75 bp, synthetic construct
  source 1..75: mol_type = other DNA
aacggtcggtatactgccgccggaaaatggtgtgattgaacgggcacgcgccggtatcgatgaggccatcagccg

SEQ ID NO: 855304 - DNA, 75 bp, synthetic construct
  source 1..75: mol_type = other DNA
ggggatatcccggataacagcgtccagccgggggccggaaatggtgaaccggttacagctgaagtgctggcacag

SEQ ID NO: 855305 - DNA, 75 bp, synthetic construct
  source 1..75: mol_type = other DNA
cggagaaaagtgtcccccggacggccggttacagcgatgccgtcagtgttctggcacaggatcgcccgtcgctgg

SEQ ID NO: 855306 - DNA, 75 bp, synthetic construct
  source 1..75: mol_type = other DNA
ggaggccgtcggggaagatgcctcgctgaaatcccgggatgtggcggcactggatacgcgtaaatccaaacagca

SEQ ID NO: 855307 - DNA, 75 bp, synthetic construct
  source 1..75: mol_type = other DNA
tgctgctcgatacgctgatcgcacagttgatcgccctgctccagcgcgataaatcgcgcaagtttatcgcccagc

SEQ ID NO: 855308 - DNA, 75 bp, synthetic construct
  source 1..75: mol_type = other DNA
ccgctatctgggcgagttatgggccgatcttcgccagtggctgaaggctgatattaacagcgatgattccagggt

SEQ ID NO: 855309 - DNA, 75 bp, synthetic construct
  source 1..75: mol_type = other DNA
tatccgcgtcaacggcacgctggtcggtggctgtattgggctgattttatatttattgtcgcaaattccgtcctt

SEQ ID NO: 855310 - DNA, 75 bp, synthetic construct
  source 1..75: mol_type = other DNA
gtcttgccgtcctgctagcagggtgcggtgatgatggcatctatggcaactacactaatcaacagtatggcgtca

SEQ ID NO: 855311 - DNA, 75 bp, synthetic construct
  source 1..75: mol_type = other DNA
cccctcgctgaccgttgtctggaactgcatcacgcattgcgaaagaaagaacacggtaaggagaatacaacgtgc

SEQ ID NO: 855312 - DNA, 75 bp, synthetic construct
  source 1..75: mol_type = other DNA
ataaagatgaagccgaagtggctttgtcaaaaatttctggagagaaaaggctcgctagtgagagggatggcacag

SEQ ID NO: 855313 - DNA, 75 bp, synthetic construct
  source 1..75: mol_type = other DNA
gggatgcgcagggcgaaacgcaggtggtgcgtatttcctctctggacagcagctggtcgctgttccggccggaaa

SEQ ID NO: 855314 - DNA, 75 bp, synthetic construct
  source 1..75: mol_type = other DNA
ccggtatcgatgaggccatcagccgtgagcagctcatccccctcgaccgtgagaaggggctgttcacgtccggga

SEQ ID NO: 855315 - DNA, 75 bp, synthetic construct
  source 1..75: mol_type = other DNA
tatggcacagacctgctggtttcccgtgcgtcgtatgaggctgaaaaaagcattcttcgccatattctcgaaggt

SEQ ID NO: 855316 - DNA, 75 bp, synthetic construct
  source 1..75: mol_type = other DNA
aaatagaattaaatatcggcaaagatctgcagtttattcgtgttaacggtacgctggttggcggatgtattgggc

SEQ ID NO: 855317 - DNA, 75 bp, synthetic construct
  source 1..75: mol_type = other DNA
ggtcaatggtttggcgaaacgttaattgccgatgatgccttgcgggcgtcgttaaatggtcacctggaacaagcc

SEQ ID NO: 855318 - DNA, 75 bp, synthetic construct
  source 1..75: mol_type = other DNA
gttgatcgcccttctccagcgcgataaatcgcgcaagtttatcgcccagcagattgttcgctggctggagagtga

SEQ ID NO: 855319 - DNA, 75 bp, synthetic construct
  source 1..75: mol_type = other DNA
gtcgctgctgaccacgcaggcgtatacaggacgaccctggcctttgattgatggcgtcgggcagatttacggcat

SEQ ID NO: 855320 - DNA, 75 bp, synthetic construct
  source 1..75: mol_type = other DNA
gatttgcgggagcgcctgcaatcctcatcgttcagcgatatgctgtccggcttcaaagataaggtgacatcatcc

SEQ ID NO: 855321 - DNA, 75 bp, synthetic construct
  source 1..75: mol_type = other DNA
gtatgtgattacggatattcagacgacccgtgaagagtttgatcgctatggacgggcgaaaaaaattacgttttc

SEQ ID NO: 855322 - DNA, 75 bp, synthetic construct
  source 1..75: mol_type = other DNA
tggtggttgagacgcttgagcaactgggtatccgcgacatggttttcactcgggaacctggcggtacgcaacttg

SEQ ID NO: 855323 - DNA, 75 bp, synthetic construct
  source 1..75: mol_type = other DNA
gagcgcctgcaatcctcatcgttcagtgatatgctgtccggcttcaaagataaggtcacatcatcccttaacagc

SEQ ID NO: 855324 - DNA, 75 bp, synthetic construct
  source 1..75: mol_type = other DNA
aagtaccgcgtaataaaagcggctgggcgctgggtacgctctccacaggcggcgttagtggtgcgttgctcggcc

SEQ ID NO: 855325 - DNA, 75 bp, synthetic construct
  source 1..75: mol_type = other DNA
acgctttccggtcttctctacccggaaattacaggcggtgaagtctcacttaccgcgctgacaactcaggcgtat

SEQ ID NO: 855326 - DNA, 75 bp, synthetic construct
  source 1..75: mol_type = other DNA
tactcattaaagaagagacaattttcactctgaaaccagggaccgggcgactggcacttggtgaacagctttacg

SEQ ID NO: 855327 - DNA, 75 bp, synthetic construct
  source 1..75: mol_type = other DNA
tgttattgttggtggtactgggtattgcctccggtgcgggtgtctggaaggtccgccattttggcgatagcaaat

SEQ ID NO: 855328 - DNA, 75 bp, synthetic construct
  source 1..75: mol_type = other DNA
catcgttcagtgatatgctgtccggcttcaaagataaggtcacatcatcccttaacagcgtggccagttcagtta

SEQ ID NO: 855329 - DNA, 75 bp, synthetic construct
  source 1..75: mol_type = other DNA
acagactgacccgacggtgatttacgggatgggggagcgttataatggcaagctttctcgtgctgatcttgagac

SEQ ID NO: 855330 - DNA, 75 bp, synthetic construct
  source 1..75: mol_type = other DNA
gttggttttggccagacacctggatgtataccgctaataccactgatgttgcgttgcttaagcgagcgcataaga

SEQ ID NO: 855331 - DNA, 75 bp, synthetic construct
  source 1..75: mol_type = other DNA
gaaccggatctttctcactttaaagccgggacttaccgctttacaccgcagatgaccgtgcgcgagatgctgaaa

SEQ ID NO: 855332 - DNA, 75 bp, synthetic construct
  source 1..75: mol_type = other DNA
gtgaaggtcgtccgtggaatcccggtgccatcaccggtggtcgcgtgtggggggatatcccggacaacagtgtcc

SEQ ID NO: 855333 - DNA, 75 bp, synthetic construct
  source 1..75: mol_type = other DNA
cataggcattgcccgcaatgtcggcgctcattacgtgctgtactccagcgcctctggcaacgttaacgctccgac

SEQ ID NO: 855334 - DNA, 75 bp, synthetic construct
  source 1..75: mol_type = other DNA
cgcggctgatggcgtgacggcgggtagcgttctgttggtggatagcgtcaataaccgtaccaacggttcgctgaa

SEQ ID NO: 855335 - DNA, 75 bp, synthetic construct
  source 1..75: mol_type = other DNA
aatttacactcgtttctgcccaacagctttcaatggccaaacagcagttaggtttgtcgccgcaggacagtttag

SEQ ID NO: 855336 - DNA, 75 bp, synthetic construct
  source 1..75: mol_type = other DNA
gaaaaatgccactgaaacgcaatggcttaaaaatgccccgtcacagccattgcaacagtcactgaaagaccttga

SEQ ID NO: 855337 - DNA, 75 bp, synthetic construct
  source 1..75: mol_type = other DNA
aaatggcttcctggctggttgagtggaaaaatgccactgaaacgcaatggcttaaagattctcccagtcacagcc

SEQ ID NO: 855338 - DNA, 75 bp, synthetic construct
  source 1..75: mol_type = other DNA
cctgcaccggtagaagaagtgaaaccagcgccggaacaacctgccgagccacaacagcctgtccccacagtgcca

SEQ ID NO: 855339 - DNA, 75 bp, synthetic construct
  source 1..75: mol_type = other DNA
gtttcgttttcaatcgtgctctggcacgtcagaatgagaatcataaggccggtaataaatacatcccttacggga

SEQ ID NO: 855340 - DNA, 75 bp, synthetic construct
  source 1..75: mol_type = other DNA
ggacttcgcgtctccggtggtgaccgtctgcaggtgacatccgtcagtgaggatgcgatgacggttgttgtgccg

SEQ ID NO: 855341 - DNA, 75 bp, synthetic construct
  source 1..75: mol_type = other DNA
tggctgataacatgcaggatggcgtccggattgcccgtgataatcctgacagcggtgtggtggtgagaatcgccg

SEQ ID NO: 855342 - DNA, 75 bp, synthetic construct
  source 1..75: mol_type = other DNA
agcgtcctgctggttgatagcgttaacaaccgtactaacggttcgctgaatgccgcagaagcgaccgaaacgctg

SEQ ID NO: 855343 - DNA, 75 bp, synthetic construct
  source 1..75: mol_type = other DNA
tcgggtcgccgctgtggggcgtcaaatgggacgcggtaacggctatctggcaaccattggcgcgatttcgccgtt

SEQ ID NO: 855344 - DNA, 75 bp, synthetic construct
  source 1..75: mol_type = other DNA
gaaaaacgccactgaaacgcaatggcttaaagattcgccctcacagccattgcaacagtcactgaaaggccttga

SEQ ID NO: 855345 - DNA, 75 bp, synthetic construct
  source 1..75: mol_type = other DNA
gccactgaaacgcaatggcttaaagatgccccgtcacagccattgcaacagtcactgaaagaccttgagcgggct

SEQ ID NO: 855346 - DNA, 75 bp, synthetic construct
  source 1..75: mol_type = other DNA
gcaggacgccggaagcacgggagcagacgctgattgtcacgcatctgaatgaggaccggcgcgtactgaacagca

SEQ ID NO: 855347 - DNA, 75 bp, synthetic construct
  source 1..75: mol_type = other DNA
ccggtttaactaactccactgatgcgacagaagagctgtccagcctgaagattgtagagcaggaagggtatcagg

SEQ ID NO: 855348 - DNA, 75 bp, synthetic construct
  source 1..75: mol_type = other DNA
tgccgggatccggctgggtgaaagtgtggataaggatatgattgcagtgcgaattgggccggatatgcggatggc

SEQ ID NO: 855349 - DNA, 75 bp, synthetic construct
  source 1..75: mol_type = other DNA
gcatgacacgcagctgcagcagcgcagcggagaaacgccggatttcagcaacacgctgttcctgctcgatgagag

SEQ ID NO: 855350 - DNA, 75 bp, synthetic construct
  source 1..75: mol_type = other DNA
cggagagtgtactgcgtgaaccacaacgggtgcgggaagcggtccgggaggttgcccgggaaaatctgctgcagg

SEQ ID NO: 855351 - DNA, 75 bp, synthetic construct
  source 1..75: mol_type = other DNA
tggatacgcgaaaatccaaacagcacgtcgatccggaagtcagaatggctgaatggatgcagacgctgaaggaaa

SEQ ID NO: 855352 - DNA, 75 bp, synthetic construct
  source 1..75: mol_type = other DNA
tccaggtcctgcaagactggtgtccgacatttccaggctactatctctattatccaagtcgcaaacagcaccctc

SEQ ID NO: 855353 - DNA, 75 bp, synthetic construct
  source 1..75: mol_type = other DNA
tcaatattgttgaagggcgttttgatgccggcgtcagattaggcgaaagcgttgataaggacatgattgccgtca

SEQ ID NO: 855354 - DNA, 75 bp, synthetic construct
  source 1..75: mol_type = other DNA
ggcgctgtaagcgacctgattcagtttggtactgtgaataaaggagctacatctgagaaaaatttctcagttaaa

SEQ ID NO: 855355 - DNA, 75 bp, synthetic construct
  source 1..75: mol_type = other DNA
agagcgaagttttaccaaagcagcgagcaaactcggcgtctctcagtctgcacttagccatgcaatgaaggcact

SEQ ID NO: 855356 - DNA, 75 bp, synthetic construct
  source 1..75: mol_type = other DNA
ccgcccttgatggactgggacttgcttatctgccgctggataccgtggagaattatcttgaaaacgggatgttag

SEQ ID NO: 855357 - DNA, 75 bp, synthetic construct
  source 1..75: mol_type = other DNA
atcaagcttttatcgccgtggcccgagaaaaaagcttcactaaagcggccgctcagttaggtgtctcacagtcgg

SEQ ID NO: 855358 - DNA, 75 bp, synthetic construct
  source 1..75: mol_type = other DNA
ctggagcagctacggttaatgaacgcgggaatcaacattcgcacgtttgaggttgctgcaaccggtccgggcgtt

SEQ ID NO: 855359 - DNA, 75 bp, synthetic construct
  source 1..75: mol_type = other DNA
cagcgaaaactggttaaagagcgttctcggctgaaacgggctacggtcagaaatccgaacgcaaaaattatcgtt

SEQ ID NO: 855360 - DNA, 75 bp, synthetic construct
  source 1..75: mol_type = other DNA
aaattgctcgacgatgcgataagccaggcgcatcatcagccgcgccacgttttactggtggatcgcgggctggcg

SEQ ID NO: 855361 - DNA, 75 bp, synthetic construct
  source 1..75: mol_type = other DNA
tgtctacgcaccgctgctggcggggatggcgaccattgtttacgaagggttgccgacctggccggactgtggcgt

SEQ ID NO: 855362 - DNA, 75 bp, synthetic construct
  source 1..75: mol_type = other DNA
gtcccgacgcaggcgtcgtaaaaaggggcagcgttcagccctgaaaggtggcggcagtgtgcttgtggtgggaaa

SEQ ID NO: 855363 - DNA, 75 bp, synthetic construct
  source 1..75: mol_type = other DNA
tcgtcccaacagtacgctacgggccggtcagcatcgttatcagcgggcatttatccagcgattaaaaaatggtcg

SEQ ID NO: 855364 - DNA, 75 bp, synthetic construct
  source 1..75: mol_type = other DNA
atgtgatgggcaatttctggtcggcgcactggccgcagtcgcattttcgccatcatttgctgatgtgccgccatt

SEQ ID NO: 855365 - DNA, 75 bp, synthetic construct
  source 1..75: mol_type = other DNA
tgcatcggcgaaactgaagctgagaacgaagcgggcaaaactgaagaagtttgcgcacgtcagatcgacgcagtg

SEQ ID NO: 855366 - DNA, 75 bp, synthetic construct
  source 1..75: mol_type = other DNA
tgcatcggtgaaaccgaagctgaaaacgaagcgggcaaaactgaagaagtttgcgcacgtcagatcgacgcggta

SEQ ID NO: 855367 - DNA, 75 bp, synthetic construct
  source 1..75: mol_type = other DNA
cctgagcctgtccggcgcattcaccggtgaaacttctgccgctatgctgaaagacatcggcgctcagtacatcat

SEQ ID NO: 855368 - DNA, 75 bp, synthetic construct
  source 1..75: mol_type = other DNA
cgagccgaccgccagttgggtgagcaatacgctggatgtgccagtgatcgacaattactggcagaccgaatccgg

SEQ ID NO: 855369 - DNA, 75 bp, synthetic construct
  source 1..75: mol_type = other DNA
caggcaactggagtttaccattctacggttccgtcgcattgcttattattggtatatttctgacgttcttcatgc

SEQ ID NO: 855370 - DNA, 75 bp, synthetic construct
  source 1..75: mol_type = other DNA
tttcgtcggtggctttatatcactattcctcgccagattgctattaggtgtaggggaaggtgcggcgctgccttc

SEQ ID NO: 855371 - DNA, 75 bp, synthetic construct
  source 1..75: mol_type = other DNA
cgattgacaatctgagccgggttcgtaaaaacgccattccggcggcttcagcaatggccattaaccgcgtggcca

SEQ ID NO: 855372 - DNA, 75 bp, synthetic construct
  source 1..75: mol_type = other DNA
tggatgttctgataccaggaaggcttcagacaaaaagccgggtgcagccgctgtactctggttcaagcgtggtga

SEQ ID NO: 855373 - DNA, 75 bp, synthetic construct
  source 1..75: mol_type = other DNA
tggatgttctgataccaggaaggcttcagacaaaaagccgggtgtagccgctgtcctctggctcaagcgtggtga

SEQ ID NO: 855374 - DNA, 75 bp, synthetic construct
  source 1..75: mol_type = other DNA
gggaaaaaccgttaccccattgatgtggtgaaaatcccgatggcggccccactgaaacaggcatttgatgagaat

SEQ ID NO: 855375 - DNA, 75 bp, synthetic construct
  source 1..75: mol_type = other DNA
cagcgcagtgattgattacctgaccacactgccttatgtcgacaccgcgcgaattggcgcaatgggaatttgcgc

SEQ ID NO: 855376 - DNA, 75 bp, synthetic construct
  source 1..75: mol_type = other DNA
ggtacctatgccgaaaagctggcagaaaaagggtttgtgacggtagcttacgatgcgtcttatcagggcgaaagt

SEQ ID NO: 855377 - DNA, 75 bp, synthetic construct
  source 1..75: mol_type = other DNA
attagcagcgaagaatacgccattatgccactggctccaatgaaggagtccgatgcgccgaacgaagaactgcgt

SEQ ID NO: 855378 - DNA, 75 bp, synthetic construct
  source 1..75: mol_type = other DNA
aagaatggctttcgccagacgcactaactctcacaactgcggcccatttcagtactctgatttatgcgaggacat

SEQ ID NO: 855379 - DNA, 75 bp, synthetic construct
  source 1..75: mol_type = other DNA
gaagcccggtatgcgaagggcaatgacgataagggaaggaaaaagcgtaatcgtcttcccattcaggtggtgaaa

SEQ ID NO: 855380 - DNA, 75 bp, synthetic construct
  source 1..75: mol_type = other DNA
atgttgatcacccccgctggtcacaggctactgagcgatttattggttcaggcggcatcctcgatgtacagcgcc

SEQ ID NO: 855381 - DNA, 75 bp, synthetic construct
  source 1..75: mol_type = other DNA
tcgcgaaaaaattcgctgtactgaaagaacagggtctgactccggttctgtgcatcggtgaaactgaagctgaaa

SEQ ID NO: 855382 - DNA, 75 bp, synthetic construct
  source 1..75: mol_type = other DNA
cgcatacggtgtgtcagtcacccgattgcagcctcagggggagcgtttggccgttaccttagcaccggttgaatt

SEQ ID NO: 855383 - DNA, 75 bp, synthetic construct
  source 1..75: mol_type = other DNA
tttttcgtgacattctggccggtatgtccgccgcaggtctgtcccgcacggccagacaggtggggcaggcagtac

SEQ ID NO: 855384 - DNA, 75 bp, synthetic construct
  source 1..75: mol_type = other DNA
tatgagcgagttagttggtgtaaactcgtatggggcgtcgaatacgaagaattacctgaaatgcatgacgaataa

SEQ ID NO: 855385 - DNA, 75 bp, synthetic construct
  source 1..75: mol_type = other DNA
cgttgacgccgccagaggtagaaggctttaacgcgacgacgtttgatgaactgcaaaagccgatgagtgagcgcg

SEQ ID NO: 855386 - DNA, 75 bp, synthetic construct
  source 1..75: mol_type = other DNA
gctatgcagagaatcaatactttgtcgatccatgcaaactgttgctgacaaccccaggtattgatgcacgtaacg

SEQ ID NO: 855387 - DNA, 75 bp, synthetic construct
  source 1..75: mol_type = other DNA
gtttgccgcactggatatcaacgccaaaatgcatgaaggtgtcagcggtcgtaatatgtggatggattgtgtggt

SEQ ID NO: 855388 - DNA, 75 bp, synthetic construct
  source 1..75: mol_type = other DNA
cgtgaatatgaggaatggctattggacacggcatatatatatacctgacgcctccagtgataataaaggacgtat

SEQ ID NO: 855389 - DNA, 75 bp, synthetic construct
  source 1..75: mol_type = other DNA
aaaacgcaaagtaaaccttttcgcaatattcctgaaaaccatcaggagcgaagagaaatacgtgcagatgacaaa

SEQ ID NO: 855390 - DNA, 75 bp, synthetic construct
  source 1..75: mol_type = other DNA
ctcgtttttgcttcccgagcagtttccagtccgcaccgattttgggattaagatggataaatacttcatcttcat

SEQ ID NO: 855391 - DNA, 75 bp, synthetic construct
  source 1..75: mol_type = other DNA
gggcagctacgattcaaactggctaaccaccgcatgaacagttcggtgatgaacaagttccacatcaacgtactg

SEQ ID NO: 855392 - DNA, 75 bp, synthetic construct
  source 1..75: mol_type = other DNA
tggaccagggatatccatgtacctgcggcctccgcggagaataaaggccgtattctgaccctcaatcatgaagcc

SEQ ID NO: 855393 - DNA, 75 bp, synthetic construct
  source 1..75: mol_type = other DNA
cattcctgtaagtcgtatgattgttaataattatgcgcctctacacctaaaggaagttatgttaccaaccggaga

SEQ ID NO: 855394 - DNA, 75 bp, synthetic construct
  source 1..75: mol_type = other DNA
tctttcgttacaacaatcatagcgacccaggtacgctcgacccgcaaaaggtggaggagaatactgccgcgcaga

SEQ ID NO: 855395 - DNA, 75 bp, synthetic construct
  source 1..75: mol_type = other DNA
agcatgaatccgcaagaagccaactacgcctatttacgcggtgaagtggagctggttcgtctgccggatgccgaa

SEQ ID NO: 855396 - DNA, 75 bp, synthetic construct
  source 1..75: mol_type = other DNA
tacaaacagcatgaagagcgctacgccggttataccctgcgtcagttgtgtcaggaaatgcatgatttgtatgcc

SEQ ID NO: 855397 - DNA, 75 bp, synthetic construct
  source 1..75: mol_type = other DNA
atctggggtggtgctgttctgcgttacttcagcgctctggaagaagggatcaacctgctgccaggttttgcaccg

SEQ ID NO: 855398 - DNA, 75 bp, synthetic construct
  source 1..75: mol_type = other DNA
cactggttgatttgaaattcatcatggccgatactggcttcggtaagaccttcatctatgaccggattaagtccg

SEQ ID NO: 855399 - DNA, 75 bp, synthetic construct
  source 1..75: mol_type = other DNA
gtgaaagcaatggataaggcattcacccgtgtggatgaaacctttgaggccatccgtgacagcctgaatcagcag

SEQ ID NO: 855400 - DNA, 75 bp, synthetic construct
  source 1..75: mol_type = other DNA
tttaccgggatgacatcgaccgttttctggaaatacgcacccggcgcatcaaccaggacagcaccaggcgcgtcc

SEQ ID NO: 855401 - DNA, 75 bp, synthetic construct
  source 1..75: mol_type = other DNA
atcttgatgcccgacgagccggtgatttcatgctgtctcggcagtcgtgggatgcgacgtacaatgatgcctcca

SEQ ID NO: 855402 - DNA, 75 bp, synthetic construct
  source 1..75: mol_type = other DNA
atattacaatttcaatattcagaaaccgccgtttgatgacgtccgtgtgcgtcgggcgttgtaccttacggtcga

SEQ ID NO: 855403 - DNA, 75 bp, synthetic construct
  source 1..75: mol_type = other DNA
tacgttggcggtttcccgctgcataatccccaggattatgtctacagcaaagagttgtatatcaaggcacattga

SEQ ID NO: 855404 - DNA, 75 bp, synthetic construct
  source 1..75: mol_type = other DNA
gttgagaacgcccgcaaccacgctgacgccgccagaggtaaaaggctttagcgcgacgacgttcgatgaactgca

SEQ ID NO: 855405 - DNA, 75 bp, synthetic construct
  source 1..75: mol_type = other DNA
gcgctatattttccatctgcgtagcggtttgcagtggtcagacggtcagcctctgacggcagaggattttgtcct

SEQ ID NO: 855406 - DNA, 75 bp, synthetic construct
  source 1..75: mol_type = other DNA
gtgcaacctgcccaggctgaatcctgggaagtgtcagatggcggcaaacactatattttccatttacgcaacggc

SEQ ID NO: 855407 - DNA, 75 bp, synthetic construct
  source 1..75: mol_type = other DNA
caaaatgctggttttactgatgttaactgttgcgggtcttggcgcatttatgagttcaactggcgtcgtcgctat

SEQ ID NO: 855408 - DNA, 75 bp, synthetic construct
  source 1..75: mol_type = other DNA
cgctatcatcgcctgcctgctgatggggaaattccgttgtatcgatgctgaaagcgcctataaatccattcactg

SEQ ID NO: 855409 - DNA, 75 bp, synthetic construct
  source 1..75: mol_type = other DNA
tttagcgtaacgcctatcggtctggttgtattggtgctgggcattttctatatgctggtgatgcgctttatgttg

SEQ ID NO: 855410 - DNA, 75 bp, synthetic construct
  source 1..75: mol_type = other DNA
actttgtgaagctgggagtaccgttcaccattatcgtgatggttgtttgtgtggtgatgatcccgatgttgtttc

SEQ ID NO: 855411 - DNA, 75 bp, synthetic construct
  source 1..75: mol_type = other DNA
ggcaaaacagggccgcgattttgtggcgctgaatttaccagaagaagtgagtgaagcatctcccgcacacagcca

SEQ ID NO: 855412 - DNA, 75 bp, synthetic construct
  source 1..75: mol_type = other DNA
tcattggtgttgaacgctggcgtcgttttcgtcgtgttattgtgaatgtgaacggggtttctgaatttcgtgcgc

SEQ ID NO: 855413 - DNA, 75 bp, synthetic construct
  source 1..75: mol_type = other DNA
caaattgcaggacagcttttatatgaacgtttccttggatgcactgaacacggcatgcaaggatgtctgttttcc

SEQ ID NO: 855414 - DNA, 75 bp, synthetic construct
  source 1..75: mol_type = other DNA
taaaaccaacatcgcctgatgctcccccttcttccgatgacacgcctttacctggtgggggggctgatacccgga

SEQ ID NO: 855415 - DNA, 75 bp, synthetic construct
  source 1..75: mol_type = other DNA
tttgcatccctgaaagccaaaattcaggcttaccagcggaaaaaaagatgtgccaatcagcgtgtgcatgcaacc

SEQ ID NO: 855416 - DNA, 75 bp, synthetic construct
  source 1..75: mol_type = other DNA
cgatggtttggtccgtaccggtgttgccaccgtaatgggaacatggctggtcaaagtggcgggcaacagtgaaat

SEQ ID NO: 855417 - DNA, 75 bp, synthetic construct
  source 1..75: mol_type = other DNA
agagccctttatctcgtgaagtatgagacgaagcagcatgacggttctggtcaacgtaattatggttgcagtcgt

SEQ ID NO: 855418 - DNA, 75 bp, synthetic construct
  source 1..75: mol_type = other DNA
cagacaaaaagtctggtggatccgctgtgctctgggtcaagcgtggtgatgtggaagcgatgcagaaagccatgg

SEQ ID NO: 855419 - DNA, 75 bp, synthetic construct
  source 1..75: mol_type = other DNA
ctggatatctatccggaatataccggcaatggcgctttcttctttaaagatgaaaacgatgcagcgtggaaaaac

SEQ ID NO: 855420 - DNA, 75 bp, synthetic construct
  source 1..75: mol_type = other DNA
tatttctcctttatatcgctggcgctatcctgatgtcttgtttcatcaaatataacgatctcgatcgtggtggcc

SEQ ID NO: 855421 - DNA, 75 bp, synthetic construct
  source 1..75: mol_type = other DNA
gtgaagaccctaacgatatttatcacgatcttgggggtgaagatgattgaatgccttattgctgtgattgttttg

SEQ ID NO: 855422 - DNA, 75 bp, synthetic construct
  source 1..75: mol_type = other DNA
tatgccggactggcggataaccggaaccgcctggcagaggtggttacccggaaattgcaggacagctttggtgat

SEQ ID NO: 855423 - DNA, 75 bp, synthetic construct
  source 1..75: mol_type = other DNA
acccatctggtgagcgacgaatttaccgacacgcttgaatgtgaatccgggattccgttttcagatgaaatcgcg

SEQ ID NO: 855424 - DNA, 75 bp, synthetic construct
  source 1..75: mol_type = other DNA
cgaccttcgcccgcgccttgtgcctgtcagtagccagaatttcgcagatatggcatcgcttcacaacttccatac

SEQ ID NO: 855425 - DNA, 75 bp, synthetic construct
  source 1..75: mol_type = other DNA
gcctcaagtcggctgaagacgacgccgtttcacagcaagaggatttgactgttgcgcgtgatttgcttcagtccg

SEQ ID NO: 855426 - DNA, 75 bp, synthetic construct
  source 1..75: mol_type = other DNA
gcaaataacacctggaccatcgccgtgcgtcaggatgtggcagagaaaaacaaactcacttcgcttgccgacctg

SEQ ID NO: 855427 - DNA, 75 bp, synthetic construct
  source 1..75: mol_type = other DNA
attgcagcaactgaatgccagcattgcagtggaaggactggatgccaaaaaagtggctgccgactacctgaaaca

SEQ ID NO: 855428 - DNA, 75 bp, synthetic construct
  source 1..75: mol_type = other DNA
agtcgttatctgaaagacggtggcacctttaaactggcggcctcggcagagtttattgaacgcgccgatgcgttg

SEQ ID NO: 855429 - DNA, 75 bp, synthetic construct
  source 1..75: mol_type = other DNA
acccgcaaattgcgggacagtttttatgtggacgtctcctgggatgcgctgaatgtggcatacagtgaacaccct

SEQ ID NO: 855430 - DNA, 75 bp, synthetic construct
  source 1..75: mol_type = other DNA
gttaatctggctgacgcccgcgcctgcaaataacacctggaccatcgccgtgcgtcaggatgtggcagagaaaaa

SEQ ID NO: 855431 - DNA, 75 bp, synthetic construct
  source 1..75: mol_type = other DNA
aaacatccggcgttaatgcggcgatggcttacggcactgacggcccggtcgcggcgctggggctgcaaaccttaa

SEQ ID NO: 855432 - DNA, 75 bp, synthetic construct
  source 1..75: mol_type = other DNA
aaccgccgggacgttttgtgctgtgtgtcctgtggatgcccgttaacacttcagcggggcaatgacggacaacaa

SEQ ID NO: 855433 - DNA, 75 bp, synthetic construct
  source 1..75: mol_type = other DNA
cactcaccgcgctggtattaagctcaatgcttggcgcaggagttttcagtctgccacaaaatatggcggcagttg

SEQ ID NO: 855434 - DNA, 75 bp, synthetic construct
  source 1..75: mol_type = other DNA
ttggggcattactggcgctggcattttattactcgcctttgccatgctgatcctgacacgcattcgtcccgatct

SEQ ID NO: 855435 - DNA, 75 bp, synthetic construct
  source 1..75: mol_type = other DNA
accgctgccagcattaacctggtggcgacactggcaaaattgttgccgctgggtctgtttgttgtgctggcgatg

SEQ ID NO: 855436 - DNA, 75 bp, synthetic construct
  source 1..75: mol_type = other DNA
atggcgataaaagggcttgagcaggcgattgataatctgagccgggttcgtaaaaacgccattccggcggcttct

SEQ ID NO: 855437 - DNA, 75 bp, synthetic construct
  source 1..75: mol_type = other DNA
tctacgttctggtgccagagaacggagatacttttaaaatcggcatttcatgtggtccattggcacggtttaaag

SEQ ID NO: 855438 - DNA, 75 bp, synthetic construct
  source 1..75: mol_type = other DNA
ctttttgatcctgcgcggtgtacagaccgctgccagcattaacctggtggcaacgctggcaaaattgttgccatt

SEQ ID NO: 855439 - DNA, 75 bp, synthetic construct
  source 1..75: mol_type = other DNA
tggatgttctgataccaggaaggcttcagacaaaaagccgggtgaagccgctgttctctgggtcaagcgtggtga

SEQ ID NO: 855440 - DNA, 75 bp, synthetic construct
  source 1..75: mol_type = other DNA
ctaccagtgcatcgcgtagcaactatcgctacagcctgagcgaaacacacgcaacaccggatggccacgctgtaa

SEQ ID NO: 855441 - DNA, 75 bp, synthetic construct
  source 1..75: mol_type = other DNA
cattacccgcaccacggacagcggaatcagcactaaacacctttccccggcagaactgaacaaggtcaacgccga

SEQ ID NO: 855442 - DNA, 75 bp, synthetic construct
  source 1..75: mol_type = other DNA
gaatcgtggtccacaaatgcccacgcaatccgtttaccggaaaccgcatttttgcactgagcagcggcgacaatc

SEQ ID NO: 855443 - DNA, 75 bp, synthetic construct
  source 1..75: mol_type = other DNA
cacattgtacgaagcacttcgcacagttgatcgtctgcttcgcggacaaagttttattaaacaggctgatttata

SEQ ID NO: 855444 - DNA, 75 bp, synthetic construct
  source 1..75: mol_type = other DNA
acgacaagggcaggaaaaagcgtaatcgccttcccattcaggtggtgaaaatcccgatggcggccccactgaaac

SEQ ID NO: 855445 - DNA, 75 bp, synthetic construct
  source 1..75: mol_type = other DNA
ggcaatgacgacaagggaaggaaaaagcgtaatcgccttcccattcaggtggtgaaaatcccgatggcggcccca

SEQ ID NO: 855446 - DNA, 75 bp, synthetic construct
  source 1..75: mol_type = other DNA
acttaaagccggtcagcatcgttatcagcgggcattcatccagcgattaaataatgggcgctggcatgttatgca

SEQ ID NO: 855447 - DNA, 75 bp, synthetic construct
  source 1..75: mol_type = other DNA
aaggaacggtccagactgaaacgggcgacggtcagaaatccgaatgccagaattatcgttaaccgcggtgatctc

SEQ ID NO: 855448 - DNA, 75 bp, synthetic construct
  source 1..75: mol_type = other DNA
acaggttgcccgggaaaccagggtgagacggaaactggttaaggaacggtccagactgaaacgggccacggtcag

SEQ ID NO: 855449 - DNA, 75 bp, synthetic construct
  source 1..75: mol_type = other DNA
atggcgataaaagggcttgatcaggcgattgaaaatctgagccgggttcgtaaaaacgccattccgtcggcttca

SEQ ID NO: 855450 - DNA, 75 bp, synthetic construct
  source 1..75: mol_type = other DNA
acaggttgcccgtgagacaaaggtgcgccggaaactggtaaaggaacgctccagactgaaacgggccacggtcag

SEQ ID NO: 855451 - DNA, 75 bp, synthetic construct
  source 1..75: mol_type = other DNA
gattcagcggtgatttctcgttttttcgaatccctgaaagcaaaaattcaggcttaccagcgaaaaaaacgacga

SEQ ID NO: 855452 - DNA, 75 bp, synthetic construct
  source 1..75: mol_type = other DNA
cagcaactgaaaaatggccgctggcatgtcatgcagcgtgtggccgggaaaaaccgttaccccattgatgtaatg

SEQ ID NO: 855453 - DNA, 75 bp, synthetic construct
  source 1..75: mol_type = other DNA
ccgttgaaaacctcagccgtatcagcaaaacggcggtgcccggtgccgccgcaatggccattagccaggtaacac

SEQ ID NO: 855454 - DNA, 75 bp, synthetic construct
  source 1..75: mol_type = other DNA
agactgaaacgggccacggtcagaaatccgaatgccagaattatcgttaaccgcggtgatctcccggtgattaag

SEQ ID NO: 855455 - DNA, 75 bp, synthetic construct
  source 1..75: mol_type = other DNA
aggtgtagaatttcgttcaatcgtagggcaaactgatgtttcagcagctactggcaaaactgctaccacgaatga

SEQ ID NO: 855456 - DNA, 75 bp, synthetic construct
  source 1..75: mol_type = other DNA
tggcaaactgatatttcagcagccactggcaaaacggctaccacaaatgatggcggtactaccagtaaaaagaac

SEQ ID NO: 855457 - DNA, 75 bp, synthetic construct
  source 1..75: mol_type = other DNA
gtaaagacgggattaagattgacgattccattattactagttttaaagcctctaaagatgttggtatttcaaacg

SEQ ID NO: 855458 - DNA, 75 bp, synthetic construct
  source 1..75: mol_type = other DNA
gaagacttggtaaaaattcgctctttggtcattagtcgttggggggaatgctacgaggaaagttgtcaaccgata

SEQ ID NO: 855459 - DNA, 75 bp, synthetic construct
  source 1..75: mol_type = other DNA
aaaggtactcagggcctggaactgggagaaatcgcccatgacaaactggagcatctggaaattatctctggcggt

SEQ ID NO: 855460 - DNA, 75 bp, synthetic construct
  source 1..75: mol_type = other DNA
gctaccggatgtgttgggtaaaaactatatcgaccaccaggatttcaacctgttgccggacaccatcaaaaccct

SEQ ID NO: 855461 - DNA, 75 bp, synthetic construct
  source 1..75: mol_type = other DNA
acatggaatttgacagccctatgatggttaccactcaaaatatgcaatcagggcaaaccgtcacagataatgtgc

SEQ ID NO: 855462 - DNA, 75 bp, synthetic construct
  source 1..75: mol_type = other DNA
gggcaaactgatgtttcagcagctactggcaaaactgctaccacgaatgacggtggcgcgaccagtaaaaagaat

SEQ ID NO: 855463 - DNA, 75 bp, synthetic construct
  source 1..75: mol_type = other DNA
ctgacatcgcccaactccatcttgctgttaccccgctactgcgtgggctgggtagtaccctggctgtacgcaact

SEQ ID NO: 855464 - DNA, 75 bp, synthetic construct
  source 1..75: mol_type = other DNA
cgacactcttgaaagctggagagaccagaagcagattatttcggtcatctgtcgagatggtattaaaattgacga

SEQ ID NO: 855465 - DNA, 75 bp, synthetic construct
  source 1..75: mol_type = other DNA
ctggaaagactgctactacaaatgacggtggtgtgaccagtaagaagaatgcaggtaacgtgaccactgaacgca

SEQ ID NO: 855466 - DNA, 75 bp, synthetic construct
  source 1..75: mol_type = other DNA
tccggtagtatccttatctcaagagataataagctggtggagaacttcatcgacactcttgaaagctggagagac

SEQ ID NO: 855467 - DNA, 75 bp, synthetic construct
  source 1..75: mol_type = other DNA
atgtcgctcaaacaattctcgaacagctgggtagccagcgatttgttgttatgaccggcgctaaaaatctggctt

SEQ ID NO: 855468 - DNA, 75 bp, synthetic construct
  source 1..75: mol_type = other DNA
aacgtgcacccggtagccactgccgctggcgcaagggtagccgctcccgccatcagcacctgcaggactggctgt

SEQ ID NO: 855469 - DNA, 75 bp, synthetic construct
  source 1..75: mol_type = other DNA
gggcgcgagtttatgcgccgctctggtgatgcctggcttgttgtccaggccggatggctggatgaaggtaatggc

SEQ ID NO: 855470 - DNA, 75 bp, synthetic construct
  source 1..75: mol_type = other DNA
atccgttccaaaaggactacagacttcgaaatataatgaaggactgctcatttatttgcgtactaaaaatgctag

SEQ ID NO: 855471 - DNA, 75 bp, synthetic construct
  source 1..75: mol_type = other DNA
ttggaaaaatatttttcagtagaaattaatactgaggataattattccagtgtattaaaggcaattagagatcag

SEQ ID NO: 855472 - DNA, 75 bp, synthetic construct
  source 1..75: mol_type = other DNA
agtgatttcacatattctaataatgagtattttattggttctttagttttggttggagatgaaacaggaagggag

SEQ ID NO: 855473 - DNA, 75 bp, synthetic construct
  source 1..75: mol_type = other DNA
ttatacaatctttgaaactctgaatgctaggggattaaacttaagttatgtagatcttataaaaaacaaattatt

SEQ ID NO: 855474 - DNA, 75 bp, synthetic construct
  source 1..75: mol_type = other DNA
gagcggatggcgaccccggaaacgattgtaatgaaccgcgacagtctggcggacaccctgctgaccaccgaggga

SEQ ID NO: 855475 - DNA, 75 bp, synthetic construct
  source 1..75: mol_type = other DNA
aagaccttatctctcatgagtctgccgggaatatgggctatgtgatcctcgcccaacccgcaacctcagcaaaat

SEQ ID NO: 855476 - DNA, 75 bp, synthetic construct
  source 1..75: mol_type = other DNA
tatcggagcacgaggggatttattgcgatcagctgcagtggctttttacccgggataccgggctgtatacacgac

SEQ ID NO: 855477 - DNA, 75 bp, synthetic construct
  source 1..75: mol_type = other DNA
cccccgccactcatcgccccggtccgggaacgatggcttttcccgctcccgcaaccggacacggtattcagcggt

SEQ ID NO: 855478 - DNA, 75 bp, synthetic construct
  source 1..75: mol_type = other DNA
accccgccactcatcgccccggtccgggaacgctggcttttcccgctcccgcaaccggacacggtattcagcggt

SEQ ID NO: 855479 - DNA, 75 bp, synthetic construct
  source 1..75: mol_type = other DNA
cgtgattgcccgcgacaaccgggataatcaggagtttgtgtttgcagagtgttactccaccgctatagcagcact

SEQ ID NO: 855480 - DNA, 75 bp, synthetic construct
  source 1..75: mol_type = other DNA
gtttgacggtggcgggtgatcctctctccgggatcgtcccaacccgctcttcggctcccgtcagggatggtgtga

SEQ ID NO: 855481 - DNA, 75 bp, synthetic construct
  source 1..75: mol_type = other DNA
atttgcaaaggggcgccgcagctcccgttcgctactctacgcgctgttcgatgatgacctgcagctgccatccgc

SEQ ID NO: 855482 - DNA, 75 bp, synthetic construct
  source 1..75: mol_type = other DNA
gacacgcgtatggtgattctcgactataacgaggtgcgcagcctggagcgtattcagcaggcgcttaatgccagt

SEQ ID NO: 855483 - DNA, 75 bp, synthetic construct
  source 1..75: mol_type = other DNA
agatgatgatccgttttccggacttatcggatacgaccgtagtctccgtgatgcggtagaaaaaggccgcgcagc

SEQ ID NO: 855484 - DNA, 75 bp, synthetic construct
  source 1..75: mol_type = other DNA
atgcgaattctggctatcgataccgcgacagaggtctgctctgtcgctctgtggaacgacggtaatgtcaacgct

SEQ ID NO: 855485 - DNA, 75 bp, synthetic construct
  source 1..75: mol_type = other DNA
atgcgaattctggctatcgataccgcgacagaggcctgctctgtcgccctgtgggatgacagcactgtcaacgct

SEQ ID NO: 855486 - DNA, 75 bp, synthetic construct
  source 1..75: mol_type = other DNA
ccaacggctaaatccattctcgacgatctcaaccgttcctgcctgcggactaaagacggcttccctgattattcg

SEQ ID NO: 855487 - DNA, 75 bp, synthetic construct
  source 1..75: mol_type = other DNA
gctgttttcccgcccggtgtacgccacctttgactggggcatccgtgacgctgacggttatcactttattctcgg

SEQ ID NO: 855488 - DNA, 75 bp, synthetic construct
  source 1..75: mol_type = other DNA
attcagaccatctggggcgacgacgaccgctttgtgaagacgtactggtcgctgttttcccgtccggtgtacgcc

SEQ ID NO: 855489 - DNA, 75 bp, synthetic construct
  source 1..75: mol_type = other DNA
aaaatggcgcgcgtcagcgggcgggatgtcgatttcgcgtcgttgcgccatcaacacatcggcgcgcgggtgccg

SEQ ID NO: 855490 - DNA, 75 bp, synthetic construct
  source 1..75: mol_type = other DNA
gcaagggatagataccagaaagctacttgggcataaaacacaacaacaaaccgatcgttaccatgatgaccgagg

SEQ ID NO: 855491 - DNA, 75 bp, synthetic construct
  source 1..75: mol_type = other DNA
gagatgagcagttcgggcaggatttcaccctgcacgaagcattaagaacggcagaccggttaatcagcggtcgca

SEQ ID NO: 855492 - DNA, 75 bp, synthetic construct
  source 1..75: mol_type = other DNA
ggcattcgtatatcgtttacgcgccgctgctggcggggatggcgactatcgtttacgaaggattgccgacctggc

SEQ ID NO: 855493 - DNA, 75 bp, synthetic construct
  source 1..75: mol_type = other DNA
gaacggatgcaacagctttccggcgaatgggtgacggtaggtacaggctggcaagcctggccggatctcggtaaa

SEQ ID NO: 855494 - DNA, 75 bp, synthetic construct
  source 1..75: mol_type = other DNA
atgctcttggaaaacaatttgtccaggccagagaagagcatcaggaatcgcagcagcagcgtgacgattcacagg

SEQ ID NO: 855495 - DNA, 75 bp, synthetic construct
  source 1..75: mol_type = other DNA
cggcaagattcttgaggcaattgatcgctttgaggacaagttcagaggggaaggactgaagttcgaaagggagaa

SEQ ID NO: 855496 - DNA, 75 bp, synthetic construct
  source 1..75: mol_type = other DNA
tacagaacaggctcaggccacagaacaggctcaggccacagaacaggctcaggctacagagcaggcgcaggccac

SEQ ID NO: 855497 - DNA, 75 bp, synthetic construct
  source 1..75: mol_type = other DNA
tccgatcgccagcagggatttgaaatgctgtttaacgaagtctatgcccaggtctatgaccgggtactgcgtgag

SEQ ID NO: 855498 - DNA, 75 bp, synthetic construct
  source 1..75: mol_type = other DNA
attgccaattcatatgaagaataccgtactccagtgtatgcggtttctttctcgaaggatgagtttagtgaagat

SEQ ID NO: 855499 - DNA, 75 bp, synthetic construct
  source 1..75: mol_type = other DNA
gagggggggatagtaacgcttgataagccatttgaagtaattgccaattcatatgaagaataccatactccagtg

SEQ ID NO: 855500 - DNA, 75 bp, synthetic construct
  source 1..75: mol_type = other DNA
ctgttaatgacgctaatatggcagtgatggaacaggcgggggattcgtccagagaatcaccagaagagatactcg

SEQ ID NO: 855501 - DNA, 75 bp, synthetic construct
  source 1..75: mol_type = other DNA
gtttactgaagcgcaagccgaagcaatggtgacaattgtcttcagtgcgggtgccgaggcgttggacgtcggcgt

SEQ ID NO: 855502 - DNA, 75 bp, synthetic construct
  source 1..75: mol_type = other DNA
gctgcccgacgtgctggggaaaaactatatcgatcaccaggacttcaacctgttgccggataccgtaaaaacact

SEQ ID NO: 855503 - DNA, 75 bp, synthetic construct
  source 1..75: mol_type = other DNA
tattattcgtgcagaaaagaaaaatatgtataatgaattgcgcgaaatgcggcaacagatttattctttgcctaa

SEQ ID NO: 855504 - DNA, 75 bp, synthetic construct
  source 1..75: mol_type = other DNA
aaaacatatggagaacaactgtctgaaaaaacgtttgagccggtagtaacaataagaaaactgagttatgaagaa

SEQ ID NO: 855505 - DNA, 75 bp, synthetic construct
  source 1..75: mol_type = other DNA
gctcaggccacagaacaggctcaggctacagagcaggcgcaggccacagagcaggcgcaggccacagagcaggcg

SEQ ID NO: 855506 - DNA, 75 bp, synthetic construct
  source 1..75: mol_type = other DNA
ttttgcagtttaatcatcatcagcactggcagtcgatgtaccgttttgatctctgtgaacaacaacaaagtgatt

SEQ ID NO: 855507 - DNA, 75 bp, synthetic construct
  source 1..75: mol_type = other DNA
cgatgaaagagcgcgctaagccagaaatcatcaaaggttcgcgtaaacgccgtattgctgccggttgcggtatgc

SEQ ID NO: 855508 - DNA, 75 bp, synthetic construct
  source 1..75: mol_type = other DNA
ggcgacggcttcgatctcaacgacttccttgagcaactgcgccagatgaaaaatatgggcggcatggccagcttg

SEQ ID NO: 855509 - DNA, 75 bp, synthetic construct
  source 1..75: mol_type = other DNA
gcaacaggttaaacgcctgacgcctgacgcagcaacaacaggcaccgctggtcaggttcttcatggtctgttcga

SEQ ID NO: 855510 - DNA, 75 bp, synthetic construct
  source 1..75: mol_type = other DNA
cctgaccagcttctatgggctggaatggataagatcgtctcgcccatcgcgaagttcgttaacgaaaatacttcc

SEQ ID NO: 855511 - DNA, 75 bp, synthetic construct
  source 1..75: mol_type = other DNA
tttctggtcggcgcactggccgcagtcgcattttcgccatcatttgctgatgtgccgccatttgccggacggcgg

SEQ ID NO: 855512 - DNA, 75 bp, synthetic construct
  source 1..75: mol_type = other DNA
cctgtttgtggttgacgccatgaccggtcaggatgcggccaatacggcaaaagcattcaatgaagcgttaccgct

SEQ ID NO: 855513 - DNA, 75 bp, synthetic construct
  source 1..75: mol_type = other DNA
cgttccacccggatcgtatcgcttcccgtattctcggcatgggtgacgtgctgtcgctgatcgaagatattgaaa

SEQ ID NO: 855514 - DNA, 75 bp, synthetic construct
  source 1..75: mol_type = other DNA
agcgccgttcggctgattggtcagtgagtaacacgggattaaccggatacattgaaggctataacgactgtttac

SEQ ID NO: 855515 - DNA, 75 bp, synthetic construct
  source 1..75: mol_type = other DNA
gatggacgataaagtgctggtgcgtatggaagccatcatcaactcgatgacgatgaaagagcgcgctaagccaga

SEQ ID NO: 855516 - DNA, 75 bp, synthetic construct
  source 1..75: mol_type = other DNA
ggcgacggcttcgatctcaacgattttcttgagcaactgcgccagatgaaaaatatgggcggcatggctagcctg

SEQ ID NO: 855517 - DNA, 75 bp, synthetic construct
  source 1..75: mol_type = other DNA
tgtcgcgcacgctgcgtaatatcagtggccgtggacgcctcactgaagacaacgtaaaagatacgctgcgcgaag

SEQ ID NO: 855518 - DNA, 75 bp, synthetic construct
  source 1..75: mol_type = other DNA
ttgatgtagcccctggcgttcctgttaatgtcctgtcacgtgatgcgcatatccaggcactacagaaggctatga

SEQ ID NO: 855519 - DNA, 75 bp, synthetic construct
  source 1..75: mol_type = other DNA
ttgccagcgtcctttacgtgataacgccccatgccttcgcgcagggctcggtaaccgtctatctgccgggcgaga

SEQ ID NO: 855520 - DNA, 75 bp, synthetic construct
  source 1..75: mol_type = other DNA
agcttgcttcctgggaagcagaagctgacgacgatgtggcggcaacgattaaatccgtgcgccagcagttactca

SEQ ID NO: 855521 - DNA, 75 bp, synthetic construct
  source 1..75: mol_type = other DNA
cttcttctgcctgtgccttttccgggcgttcccctggcggggcgggctgtcgtgaacggagccagcggagctgtc

SEQ ID NO: 855522 - DNA, 75 bp, synthetic construct
  source 1..75: mol_type = other DNA
tgcacgcgcaggcgttactttccgctataccgagaacggtccggaaggtctggtaacgggtaaaaaagccatcgt

SEQ ID NO: 855523 - DNA, 75 bp, synthetic construct
  source 1..75: mol_type = other DNA
aaaactattttgacctggttgcacgcgcaggcgttactttccgctataccgagaacggtccggaaggtctggtaa

SEQ ID NO: 855524 - DNA, 75 bp, synthetic construct
  source 1..75: mol_type = other DNA
cgacagattaaacgaccgctggcgttaccgggaatggatatccgcagccgaatcttttgccctgccggtcgtttt

SEQ ID NO: 855525 - DNA, 75 bp, synthetic construct
  source 1..75: mol_type = other DNA
tttgagatgctgtttaacgaggtctacgcccaggtctatgaccgggtgcttcgtgaaaaacagcgggagccggaa

SEQ ID NO: 855526 - DNA, 75 bp, synthetic construct
  source 1..75: mol_type = other DNA
accggggagatatcccccattacgatgaggaaatggccactcccgaaaccatcgtcaccaatcgcgatatgctca

SEQ ID NO: 855527 - DNA, 75 bp, synthetic construct
  source 1..75: mol_type = other DNA
tccgcgccagcaggaagccctggcactgtctgatgaactgattgccgagttgaaagcgcatgacgttatcgtgat

SEQ ID NO: 855528 - DNA, 75 bp, synthetic construct
  source 1..75: mol_type = other DNA
ccgggcgtcccccttgcggggcgggctgtcgtgaacggagccagcgaagctgtctccgccctggcgggcttccat

SEQ ID NO: 855529 - DNA, 75 bp, synthetic construct
  source 1..75: mol_type = other DNA
aactggcacggcgacagcaggatgaaagtgaacttaatgctcaggctgtttcattttataaaacagcagaggtaa

SEQ ID NO: 855530 - DNA, 75 bp, synthetic construct
  source 1..75: mol_type = other DNA
aacagcgatgttggttttttcgacaatgctgtaggagcggcattgtctggtttgtactccgggctggtggcaaag

SEQ ID NO: 855531 - DNA, 75 bp, synthetic construct
  source 1..75: mol_type = other DNA
atgtttaccgccagttggttaacgagttggctgacacggcccgccattacgccggaacacaacagctacgcggtc

SEQ ID NO: 855532 - DNA, 75 bp, synthetic construct
  source 1..75: mol_type = other DNA
aatactgacgccagcaagcatgagaaggagcagattagccgtgtggttcaggaaatgtttgaagaagcagagttc

SEQ ID NO: 855533 - DNA, 75 bp, synthetic construct
  source 1..75: mol_type = other DNA
aaacgtattgtgcgagtaaagacagagatcgtcattaaatcgcccttcaatttcttgaaaaggtcgaaaaatcac

SEQ ID NO: 855534 - DNA, 75 bp, synthetic construct
  source 1..75: mol_type = other DNA
gatgatggctgaatggcttggcggtgatgtgtcacctggtatcaacgttggctacatttttgctgatgcagatgt

SEQ ID NO: 855535 - DNA, 75 bp, synthetic construct
  source 1..75: mol_type = other DNA
tgaccggcataatgaaagcccagatagactggatcccgctgtctgaaggcgccgtacgcccgtcccagggaaaaa

SEQ ID NO: 855536 - DNA, 75 bp, synthetic construct
  source 1..75: mol_type = other DNA
tgaccggcatcatgaaggcccagattgactggataccactttcggaaggcgctgttcgcccttctcagggtaaga

SEQ ID NO: 855537 - DNA, 75 bp, synthetic construct
  source 1..75: mol_type = other DNA
ctgacgaaacgagtgcaccagatcttccctgatgccgaagtaagggtgaagccgatgcaggcgaacggcttgaat

SEQ ID NO: 855538 - DNA, 75 bp, synthetic construct
  source 1..75: mol_type = other DNA
atgttgttgcccgccgacatctctgttaactggtttatgaacggcgtggagacggcaaacgaatgccgattaatt

SEQ ID NO: 855539 - DNA, 75 bp, synthetic construct
  source 1..75: mol_type = other DNA
ttagctggtttatgaacggcgttgagacggcaaatgagtgccgattaatcacgcgcgggcggctggcgtttatca

SEQ ID NO: 855540 - DNA, 75 bp, synthetic construct
  source 1..75: mol_type = other DNA
tcgttgataaagcagcgctcgaacatcaacgaaatcacatcggttgcgtaatgttattgcccgctgacgtttctg

SEQ ID NO: 855541 - DNA, 75 bp, synthetic construct
  source 1..75: mol_type = other DNA
atccaaaccgtatgcctgttggtagcggtaaccagttggcgaagtggaacggttggaattacttccaccggaagg

SEQ ID NO: 855542 - DNA, 75 bp, synthetic construct
  source 1..75: mol_type = other DNA
tggtcagggcggcgctgcgtaagcttggtgtagcatcagatgcaactctcactgatatcgaacctcagtctatgc

SEQ ID NO: 855543 - DNA, 75 bp, synthetic construct
  source 1..75: mol_type = other DNA
aacaaacgaagctgaagctatcgctattgccactgaggccaacactcgcctggctgaacaaagaacccggcagat

SEQ ID NO: 855544 - DNA, 75 bp, synthetic construct
  source 1..75: mol_type = other DNA
aggcgcagatcgactggataccgttgagtgaaggcgcggttcgtccttcgcagggcaagacacttgcagtgatgc

SEQ ID NO: 855545 - DNA, 75 bp, synthetic construct
  source 1..75: mol_type = other DNA
tcgttaagggcgcgggtaaatcagttagaaaaggagcgcccgattttgctaaaggcgtatcgtgatgatgaccca

SEQ ID NO: 855546 - DNA, 75 bp, synthetic construct
  source 1..75: mol_type = other DNA
gtaaactgctggcgcttggtggcgttgcacttggtgccgccatcttgccgacccctgcgtttgcgacactctcta

SEQ ID NO: 855547 - DNA, 75 bp, synthetic construct
  source 1..75: mol_type = other DNA
agagttagaaaagcatgcgcaaagttatgataaaagtttactccctaatgcggtcttcattctttcgaaaggctt

SEQ ID NO: 855548 - DNA, 75 bp, synthetic construct
  source 1..75: mol_type = other DNA
tattcgcaaagctggttaataatctgacattaacggcgcgtgtgtgcagtgatacgcaacaattaagggcgtgga

SEQ ID NO: 855549 - DNA, 75 bp, synthetic construct
  source 1..75: mol_type = other DNA
atgacgatggacgaggccatcaagcgccgttcggctgaatggtcagtgagtaataccggattaaccggatatatt

SEQ ID NO: 855550 - DNA, 75 bp, synthetic construct
  source 1..75: mol_type = other DNA
aattcagggatcttgtaaacggaataactgataagtccaggacttattcaaatacacaacaattaagggctgtga

SEQ ID NO: 855551 - DNA, 75 bp, synthetic construct
  source 1..75: mol_type = other DNA
ctgacaacggaagaaggtgcccggctgctgacggccatgggctcggaggtgaaaattttcaacccgtccggcctg

SEQ ID NO: 855552 - DNA, 75 bp, synthetic construct
  source 1..75: mol_type = other DNA
tcatgcaggtttgtggtggttcacagtcgtttaacacggtcaatcagatgcggatacttggccgctggatgcgga

SEQ ID NO: 855553 - DNA, 75 bp, synthetic construct
  source 1..75: mol_type = other DNA
cggcttattttgatgatgcgcttgccagcaaacttacgggcaacaacgaaaccatgccgcgaattctcatcctgt

SEQ ID NO: 855554 - DNA, 75 bp, synthetic construct
  source 1..75: mol_type = other DNA
gcagaactaattaattgggtgaaagccacggatatagcttatggtaatgcaggtgacaactatgagacttatgaa

SEQ ID NO: 855555 - DNA, 75 bp, synthetic construct
  source 1..75: mol_type = other DNA
aacgccagactagtgctcaaaaaaaagaacgtgctgattttgctgagaaagaagcgaggacaaaagaatggatat

SEQ ID NO: 855556 - DNA, 75 bp, synthetic construct
  source 1..75: mol_type = other DNA
ggaatggtgtggtgctctccggaacgacatggagcgatgactggtattatgaaggcacaaattgactggatacca

SEQ ID NO: 855557 - DNA, 75 bp, synthetic construct
  source 1..75: mol_type = other DNA
caggcaacgcggcgcgtatggcggcagaaaatctgcgcgagaaaattctctttcatggcgcacaaatgcttgatg

SEQ ID NO: 855558 - DNA, 75 bp, synthetic construct
  source 1..75: mol_type = other DNA
tggaaattatcgaacgtaaccgggtacacgaagggcaagagctgaaaattctcggtgcaatcggtgaagaccatt

SEQ ID NO: 855559 - DNA, 75 bp, synthetic construct
  source 1..75: mol_type = other DNA
cgtaaaaataatccgcaggccaccattgatatcgctccgactttccgcgatgaccttgaagtcattggtaagcat

SEQ ID NO: 855560 - DNA, 75 bp, synthetic construct
  source 1..75: mol_type = other DNA
cgtaaaaataacccacaagccacgattgatatcgccccgactttccgcgacgaccttgaagtcattggtaagcac

SEQ ID NO: 855561 - DNA, 75 bp, synthetic construct
  source 1..75: mol_type = other DNA
cggtgccggaacaactttcaacatgctgcaaacgctgaacgaagcctacaaagtgttgcaattacaaggctatcg

SEQ ID NO: 855562 - DNA, 75 bp, synthetic construct
  source 1..75: mol_type = other DNA
attcacgatgcctgcggcatctggttacgcgaatggcatttcacaccggagaaaatactcaccgcgctggaaaaa

SEQ ID NO: 855563 - DNA, 75 bp, synthetic construct
  source 1..75: mol_type = other DNA
cgcacctacccgcgaagagatcgacgacgcgctttctggtttgttcagccgcgatgcaggctggcaacaatacta

SEQ ID NO: 855564 - DNA, 75 bp, synthetic construct
  source 1..75: mol_type = other DNA
caaacgaaagaagcgacgcattctggatgaggtaactggcaagattattatgctggataatccgccgatttccgg

SEQ ID NO: 855565 - DNA, 75 bp, synthetic construct
  source 1..75: mol_type = other DNA
ctcgatagcggtgcgcttatctcagtaacgcgatcacgttcacaacaaaaggcgacaagttcgcacgtaagtctt

SEQ ID NO: 855566 - DNA, 75 bp, synthetic construct
  source 1..75: mol_type = other DNA
tctcgccctcgcaaaaatatcgccgccagtattcatggtcatattggcgatatggacaaaggctttgccgatgcc

SEQ ID NO: 855567 - DNA, 75 bp, synthetic construct
  source 1..75: mol_type = other DNA
gtatgttcggcaagaaaatgcgtcacgtcggcgatcgcgttgctgcggtcgtcgctgaaagtgaagaaattgcgc

SEQ ID NO: 855568 - DNA, 75 bp, synthetic construct
  source 1..75: mol_type = other DNA
tcaggtcattgaactggcggttgcacgtaaaaataatccgcaggccaccattgatatcgctccgactttccgtga

SEQ ID NO: 855569 - DNA, 75 bp, synthetic construct
  source 1..75: mol_type = other DNA
cgttggcgatcgtgttgccgcagtagtcgctgaaagtgaagagatagcgctcgaggcacttaagctcatcaacgt

SEQ ID NO: 855570 - DNA, 75 bp, synthetic construct
  source 1..75: mol_type = other DNA
gcggtcacgtttgcccggttagctgtattgatctcggggaagtgaagtttaagaagggagagaaagaacatccgg

SEQ ID NO: 855571 - DNA, 75 bp, synthetic construct
  source 1..75: mol_type = other DNA
atttccggatattccggtaaagcggtaaaaccgatcgccctgcgctttattcagcaaatgcgcacccatccagaa

SEQ ID NO: 855572 - DNA, 75 bp, synthetic construct
  source 1..75: mol_type = other DNA
gcggtcacgtctgtccggtgggatgcattgatctcggggaagtgaagtttaaaaaaggagagaaagaacatccgg

SEQ ID NO: 855573 - DNA, 75 bp, synthetic construct
  source 1..75: mol_type = other DNA
cataaagcctggttgctgtggtgttacagcggcagcatttgctgggaacaccagattgcgataacacagtgggcg

SEQ ID NO: 855574 - DNA, 75 bp, synthetic construct
  source 1..75: mol_type = other DNA
taatgcacttacgttcacaacaaaaggtagctaataccaaatattgcaaaaccgaactgaaacgtgtattttcag

SEQ ID NO: 855575 - DNA, 75 bp, synthetic construct
  source 1..75: mol_type = other DNA
tcgatctgaatcagaaaattggtatgccgatcgtcaacggtaaatcgagtatttccggttattccggtaaagcgg

SEQ ID NO: 855576 - DNA, 75 bp, synthetic construct
  source 1..75: mol_type = other DNA
gcggtcacgtctgcccggtgggttgtattgatctcggagaagtgaagtttaagaagggagagaaagaacacccgg

SEQ ID NO: 855577 - DNA, 75 bp, synthetic construct
  source 1..75: mol_type = other DNA
ttcgtgagcaactcatgattgccactgcggatcttagtgggtcgacaaaaggccagctggaagcctggcaggaaa

SEQ ID NO: 855578 - DNA, 75 bp, synthetic construct
  source 1..75: mol_type = other DNA
cgttcggggcgaagtccatttcggaaattggcgtaaatggcgcagcaccagcaatagctaccgcaattcacgatg

SEQ ID NO: 855579 - DNA, 75 bp, synthetic construct
  source 1..75: mol_type = other DNA
tcagcaaatgcgcacccatccggaactgcgtgatttcccgattagcggtatcggtggtattgagacctgggaaga

SEQ ID NO: 855580 - DNA, 75 bp, synthetic construct
  source 1..75: mol_type = other DNA
acttctcctgtccgcaaatgacttctcatgcgatgggtagcgatgtcgggcaaagcccggagctggtagaaaaat

SEQ ID NO: 855581 - DNA, 75 bp, synthetic construct
  source 1..75: mol_type = other DNA
atgttaacgaaagatctttcgattactttttgcggcgtgaagtttcccaacccgttctgcctctcttcttcgccg

SEQ ID NO: 855582 - DNA, 75 bp, synthetic construct
  source 1..75: mol_type = other DNA
ctcgactccaaggcgctacttcatgtttcgcgatcacgttcacaacaaaaggcagcaaactatcagcaaggtatt

SEQ ID NO: 855583 - DNA, 75 bp, synthetic construct
  source 1..75: mol_type = other DNA
cagctgcctgtcggagtcgggcctgacgaccggatgccgccaggcagccgggagccgaaggtgcgcccggcagac

SEQ ID NO: 855584 - DNA, 75 bp, synthetic construct
  source 1..75: mol_type = other DNA
caacatctgcactggtagggcgtgaaaacttaatgcaggccggggcgatcaccatgttgaccgtgcgcctggggt

SEQ ID NO: 855585 - DNA, 75 bp, synthetic construct
  source 1..75: mol_type = other DNA
tggcattggcttcattggactgtgccttaatgcactgctgccggagccgtcattgctggcaatctatttacttgg

SEQ ID NO: 855586 - DNA, 75 bp, synthetic construct
  source 1..75: mol_type = other DNA
ttattgcttctaacgagaacacgttcaaaacaaaagacgacattttcacagcaaaatattgcaaaactggattaa

SEQ ID NO: 855587 - DNA, 75 bp, synthetic construct
  source 1..75: mol_type = other DNA
cctttaatagtcctttcgaaaccgggatacgttcgcttgcgattctggttgcagccttccctgagtcttatgatt

SEQ ID NO: 855588 - DNA, 75 bp, synthetic construct
  source 1..75: mol_type = other DNA
ccgccaggcagccgggagccgaaggtgcgcaggcagacaggacaacactgcagtagtcagaatcagagcagcaga

SEQ ID NO: 855589 - DNA, 75 bp, synthetic construct
  source 1..75: mol_type = other DNA
agcgaaagtcactggcgcgaccgatctgagcaataaatcgctgcgcgtaatcgctgaccacattcgttcttgtgc

SEQ ID NO: 855590 - DNA, 75 bp, synthetic construct
  source 1..75: mol_type = other DNA
tggtggggccactgatcgaggtcatgggctctgcgggtgaagacctgaaacgccaacaggctcaggttgagcagg

SEQ ID NO: 855591 - DNA, 75 bp, synthetic construct
  source 1..75: mol_type = other DNA
ttcaccgcagggcgttaaaaccgagcatgagatcctgcggatctttgaaagcgatcggggacgtattatcaactc

SEQ ID NO: 855592 - DNA, 75 bp, synthetic construct
  source 1..75: mol_type = other DNA
ctgaatatctacaccccattattagatattgatggttcattagttattgttggccaggttggtcctgtggaagaa

SEQ ID NO: 855593 - DNA, 75 bp, synthetic construct
  source 1..75: mol_type = other DNA
ctgaatatctacaccccattgttagatattgatggtgcattagttattgttggacaggttgggcctgtggaagaa

SEQ ID NO: 855594 - DNA, 75 bp, synthetic construct
  source 1..75: mol_type = other DNA
cgcacatctgctgaaaggcgatagcaataatctggctgataaagtgcgttcagtactggaacgtacgcgtcagct

SEQ ID NO: 855595 - DNA, 75 bp, synthetic construct
  source 1..75: mol_type = other DNA
caagcagtcgcatgccaagggttcgcatattcccctggtgcagccggttgaatactccagcgcatcgtggcgccg

SEQ ID NO: 855596 - DNA, 75 bp, synthetic construct
  source 1..75: mol_type = other DNA
atgacagctcgctacatcgcaattgactggggatcgaccaacctgcgcgcctggctttatcagggcgacaactgc

SEQ ID NO: 855597 - DNA, 75 bp, synthetic construct
  source 1..75: mol_type = other DNA
gcgggagggacaactaaaaactggtccaaaacatttactcgtcactgggttgcaatgaaacacatttttcaccga

SEQ ID NO: 855598 - DNA, 75 bp, synthetic construct
  source 1..75: mol_type = other DNA
tcccgctgaatccgcggcaacgcgcgccgagacagcagcaaaacgggcagaggatattgcatccgccgtggcgct

SEQ ID NO: 855599 - DNA, 75 bp, synthetic construct
  source 1..75: mol_type = other DNA
tgttaaatatgatgattgaatcaggtgagcaatatacgcacgccagtctggaagcggcgatcaaagcgcgttttg

SEQ ID NO: 855600 - DNA, 75 bp, synthetic construct
  source 1..75: mol_type = other DNA
ctggcagcaaaaggcaaatttataccttcagaagacggtttttcgaccgatcagagtaagatttgccgtcactga

SEQ ID NO: 855601 - DNA, 75 bp, synthetic construct
  source 1..75: mol_type = other DNA
gccggaacatcgctgaccgagcgttaccaacaagcctttcaggctatgggttgcgacgtaacggcggtggcgggc

SEQ ID NO: 855602 - DNA, 75 bp, synthetic construct
  source 1..75: mol_type = other DNA
ctggcattactggcgggagtgacaactaaaaactggtccaaaacatttactcgtcactgggttgcaatgaaacac

SEQ ID NO: 855603 - DNA, 75 bp, synthetic construct
  source 1..75: mol_type = other DNA
cgctgttctgtctctcgatgagcatcagaaagcatggttgctgtggagttacagtgaaaatattcgctgggagca

SEQ ID NO: 855604 - DNA, 75 bp, synthetic construct
  source 1..75: mol_type = other DNA
gatgaggtaactggcaagattattatgctggataatccgccgatttccggtaaacagtcgtacgcaaaaggttca

SEQ ID NO: 855605 - DNA, 75 bp, synthetic construct
  source 1..75: mol_type = other DNA
tcaattcctctggtcagtccgattgagttttcgacatcatcgtggcggcgggctgttctgtctcttgaagaacat

SEQ ID NO: 855606 - DNA, 75 bp, synthetic construct
  source 1..75: mol_type = other DNA
tggctggcggcacaggatgtgaagagtgagctggctgggcgtgaaacttatgaatatcaggagctggcattactg

SEQ ID NO: 855607 - DNA, 75 bp, synthetic construct
  source 1..75: mol_type = other DNA
cgctgtttgagcgcttagaggggcgtgaccctaacacgctggttggtttgccgcttattgcgctctgtcagatgt

SEQ ID NO: 855608 - DNA, 75 bp, synthetic construct
  source 1..75: mol_type = other DNA
atagactccgatagagaattcataaaatcaatttattttgatttgttttttgatgaaaacgctaataagcaatca

SEQ ID NO: 855609 - DNA, 75 bp, synthetic construct
  source 1..75: mol_type = other DNA
actggggggggagtactaatatgacatttcgactgaaaactaaagaacctataccgcctggaaattatgattttt

SEQ ID NO: 855610 - DNA, 75 bp, synthetic construct
  source 1..75: mol_type = other DNA
cgatcctgaatacttctttaaagaagaagatcgtctgtttggtcgttttaccttactgcgtcgcggcaaaaagaa

SEQ ID NO: 855611 - DNA, 75 bp, synthetic construct
  source 1..75: mol_type = other DNA
gacctgatttgcaccaacccgccgttcggtacgcctaaatttgataaaggcaaaaatggtcaaaactcaaaagcc

SEQ ID NO: 855612 - DNA, 75 bp, synthetic construct
  source 1..75: mol_type = other DNA
tgtggcgtttgtatcacgaagaagaagtgacggtttatgatccgcaggatgttgaattcaaatgcacctgctcgc

SEQ ID NO: 855613 - DNA, 75 bp, synthetic construct
  source 1..75: mol_type = other DNA
gcgcggcgaactggtaaccgtttcggaaaccctgcaacagatccttgagaatcacgattatccgcagcccgttaa

SEQ ID NO: 855614 - DNA, 75 bp, synthetic construct
  source 1..75: mol_type = other DNA
ggtgacatataccgttacggcagccaaagaatttctggaagtcgtgttatcaaaggctctcactgctgtctgcta

SEQ ID NO: 855615 - DNA, 75 bp, synthetic construct
  source 1..75: mol_type = other DNA
aagtcggcactggaaacaaaatttgggcgcgactcaactttctttgatccgaaccgcgtcgggaagtacatcctg

SEQ ID NO: 855616 - DNA, 75 bp, synthetic construct
  source 1..75: mol_type = other DNA
cactccctatttcaagaatgtgaaagatggtgatgttgttacgtttaagatccgcgtttcagtaactggcgcagg

SEQ ID NO: 855617 - DNA, 75 bp, synthetic construct
  source 1..75: mol_type = other DNA
tgatgcgaagcaattcggtcacggtcaaagctctgggtgcaggtttgacaacctatagcctgataaaagcgataa

SEQ ID NO: 855618 - DNA, 75 bp, synthetic construct
  source 1..75: mol_type = other DNA
gtgtcgtgcgggaagcggcctataagtgggaaactcgccaccaattgcagcaggcgtacaattcagcgagtgacg

SEQ ID NO: 855619 - DNA, 75 bp, synthetic construct
  source 1..75: mol_type = other DNA
tggtggggaaattcgagattccatagagagtggtaacatcacatacaaagatatactgaaagttcagccatttgg

SEQ ID NO: 855620 - DNA, 75 bp, synthetic construct
  source 1..75: mol_type = other DNA
ggatgaaaacggcgagcctaaatgggcgggctatcgtaccgatttgcgcagaacgggcgggactgataaaaagcc

SEQ ID NO: 855621 - DNA, 75 bp, synthetic construct
  source 1..75: mol_type = other DNA
aggtttggtgacgggccgtggcaggatgttaaggggctggatgaagtgggcagtgatacaggcagaacaggagaa

SEQ ID NO: 855622 - DNA, 75 bp, synthetic construct
  source 1..75: mol_type = other DNA
gtggacgccggttatcccggcgtaaacctgctgattattaaagataatcagattgtgtatcgcaaagcctgggga

SEQ ID NO: 855623 - DNA, 75 bp, synthetic construct
  source 1..75: mol_type = other DNA
cagcgccgcaaaataccctgttctgacagaaagttcgccagagaaagcagggtttaacgtcgaacggcttaacca

SEQ ID NO: 855624 - DNA, 75 bp, synthetic construct
  source 1..75: mol_type = other DNA
gtggtagccgttggtgatcaggtagaaaaatatgcgccgggcgatctggtcggtgtcggctgcattgtcgacagt

SEQ ID NO: 855625 - DNA, 75 bp, synthetic construct
  source 1..75: mol_type = other DNA
attccgctaaacaaccacttgaaccgatggatatcacccggcgtgaaccgggaccgcatgatgtcaaaatcgaaa

SEQ ID NO: 855626 - DNA, 75 bp, synthetic construct
  source 1..75: mol_type = other DNA
atgaatatcaaggctattggtgcttattccgcgacgcaaccgctggaaccgatggatattaccaggcgtgaaccg

SEQ ID NO: 855627 - DNA, 75 bp, synthetic construct
  source 1..75: mol_type = other DNA
tacctacccgcaccagattgaagtaattacatcagagcaaatgatggatgcctactccagcgtcggtatgccaat

SEQ ID NO: 855628 - DNA, 75 bp, synthetic construct
  source 1..75: mol_type = other DNA
ctgctggaacacaaaccggagacagcagagaccccggccggaacaccgcgccggtggtggccgtggggaaaacgc

SEQ ID NO: 855629 - DNA, 75 bp, synthetic construct
  source 1..75: mol_type = other DNA
acggcaggaaatgcagtccatgagactgctggaacacaaaccggagacagcagagaccccggccggaacaccgcg

SEQ ID NO: 855630 - DNA, 75 bp, synthetic construct
  source 1..75: mol_type = other DNA
tgatgactatttccttaatgccagacatatgacgcaggatgtagctgacatgttagctgacgagaacgtttatta

SEQ ID NO: 855631 - DNA, 75 bp, synthetic construct
  source 1..75: mol_type = other DNA
tgtggtcttccagccaccgtataacagcccgtggtacagcggcattaatccgtatgctctcggattcgccatgtt

SEQ ID NO: 855632 - DNA, 75 bp, synthetic construct
  source 1..75: mol_type = other DNA
accgtgctggatgacgatcggcataattatctggaaatttccgccattcataatgaagaaggatatcgggagatc

SEQ ID NO: 855633 - DNA, 75 bp, synthetic construct
  source 1..75: mol_type = other DNA
ttgatggaatagacatcgacgccaagaggaaagaggcaacaaatcgcgttaatcctcaaacaggcgcgccaaata

SEQ ID NO: 855634 - DNA, 75 bp, synthetic construct
  source 1..75: mol_type = other DNA
tgttttcattttccgggccgcagcggcagtcaggttaaactgctgtggtccaccggtgacggactgtgcctcctg

SEQ ID NO: 855635 - DNA, 75 bp, synthetic construct
  source 1..75: mol_type = other DNA
aataccagatgcaactgtccggggagaaggcaaaatatgcctgttttatttatatcgaaagaacaatatacaatc

SEQ ID NO: 855636 - DNA, 75 bp, synthetic construct
  source 1..75: mol_type = other DNA
atgcgcaattcaccgcgacggcgcgcagccggggccggaaaaaggtattcgacaaggataagcagcgcatggtca

SEQ ID NO: 855637 - DNA, 75 bp, synthetic construct
  source 1..75: mol_type = other DNA
tattgctggatcccgcttttctccataaattccggcgtggtcattaccccggtctataaaattgatccccggaaa

SEQ ID NO: 855638 - DNA, 75 bp, synthetic construct
  source 1..75: mol_type = other DNA
atacaaacctccgctctggcaggtacagggcgtggtttatctccggtactcccctgcacagtaataatcatcact

SEQ ID NO: 855639 - DNA, 75 bp, synthetic construct
  source 1..75: mol_type = other DNA
aaccggatcagatcactgttgtttgtaattacagagaataatttcagtcttctccgttcaccgcaacagtgttta

SEQ ID NO: 855640 - DNA, 75 bp, synthetic construct
  source 1..75: mol_type = other DNA
caaacagtcgcatgccaagggggcgcatattccactggtgcagccggtggaatactccacctcatcgtggcgccg

SEQ ID NO: 855641 - DNA, 75 bp, synthetic construct
  source 1..75: mol_type = other DNA
cagaaagcgtggctgctatggaactatagcgagaacgtgcgctggtgctatcaggtggaaatcactcaatgggcg

SEQ ID NO: 855642 - DNA, 75 bp, synthetic construct
  source 1..75: mol_type = other DNA
tcaattgccctggtcagcccggttgagttttcgacatcatcatggcggcgggctttgctgtctcttgaagagcat

SEQ ID NO: 855643 - DNA, 75 bp, synthetic construct
  source 1..75: mol_type = other DNA
tcaggtggcgataactcagtgggcatgggcagagttccgtgagcaactcggcacgaagaaggtggccggcaagac

SEQ ID NO: 855644 - DNA, 75 bp, synthetic construct
  source 1..75: mol_type = other DNA
gacgcgcagaaaaagcgcatggttaaccccgacggcccgccgatgagcggcagtcagtcacgcgccaagggctcg

SEQ ID NO: 855645 - DNA, 75 bp, synthetic construct
  source 1..75: mol_type = other DNA
tggaacgagtttaaggctctgttaggtacaagaaaaattgccagtaagacactggaacgcctgaagaagttgatc

SEQ ID NO: 855646 - DNA, 75 bp, synthetic construct
  source 1..75: mol_type = other DNA
caaccgcccctaaagcttcacaggcgaccagcgtatccccgctggagcagtcaggctcctcaaaaacgaaatttt

SEQ ID NO: 855647 - DNA, 75 bp, synthetic construct
  source 1..75: mol_type = other DNA
tatgccgatgcggcgctggctgaaggctttatatcgaccgcgacgcggcgttcctctatcctggctgcggcagaa

SEQ ID NO: 855648 - DNA, 75 bp, synthetic construct
  source 1..75: mol_type = other DNA
cgaaggccagcaagagaaattagatggtgcttataatgttcggaatatcaataagatatttatttcaggatggca

SEQ ID NO: 855649 - DNA, 75 bp, synthetic construct
  source 1..75: mol_type = other DNA
atcggctaatggctggtatattggtggtaactttgtctttggtggtattgttggctggttgcttgtggacccatt

SEQ ID NO: 855650 - DNA, 75 bp, synthetic construct
  source 1..75: mol_type = other DNA
aaagggcgttgaagaattgcacttatgttggttcttattgcaagtccaaagtattgggtgcttgcatagaggagc

SEQ ID NO: 855651 - DNA, 75 bp, synthetic construct
  source 1..75: mol_type = other DNA
gatcaacttattgagcagctaaaagagcaggttaaagaagtcatgatggacgtctttaaatctgctgggcaagat

SEQ ID NO: 855652 - DNA, 75 bp, synthetic construct
  source 1..75: mol_type = other DNA
ggtcgtatggggcggggactatacgtattttctggtgcgtaacatcccgggactgtcctgggtaaaggcatgggg

SEQ ID NO: 855653 - DNA, 75 bp, synthetic construct
  source 1..75: mol_type = other DNA
ccgttgccgcaggctgaaaatctgttcaggaagagcggcgcaagcatcatcgagaaaggacaaaatgcctttttc

SEQ ID NO: 855654 - DNA, 75 bp, synthetic construct
  source 1..75: mol_type = other DNA
aggaaaacgacgccggagaagttgaacatatcccgatgctgaaaaccttcaccgtgtttaacgttcagcaaatcg

SEQ ID NO: 855655 - DNA, 75 bp, synthetic construct
  source 1..75: mol_type = other DNA
ccgcagccggttgccggtttcgatccgctgccgcaggcggaagcactcatgatccggagcggggcaaaaatcacc

SEQ ID NO: 855656 - DNA, 75 bp, synthetic construct
  source 1..75: mol_type = other DNA
aaatacgatttacatatcggccgctgcaggattatatttactagcaaaactggagagtttaaaaagtaactatcc

SEQ ID NO: 855657 - DNA, 75 bp, synthetic construct
  source 1..75: mol_type = other DNA
cgatttgtcagggctggtccgaattctcacagtggcttgatgccgtgattcagcgtgtcgaaatgtacaacgcat

SEQ ID NO: 855658 - DNA, 75 bp, synthetic construct
  source 1..75: mol_type = other DNA
aataccagatgcagctatccggggagaagacgaaatatgcctgttttatttatatcgaaagaacaatatacaatc

SEQ ID NO: 855659 - DNA, 75 bp, synthetic construct
  source 1..75: mol_type = other DNA
actttcgatcgctctgacgaatcagcgaaggcactggaatctggtcgctgcgatacgctggcctcggatcaatca

SEQ ID NO: 855660 - DNA, 75 bp, synthetic construct
  source 1..75: mol_type = other DNA
tgatatttgtcgtggtgttgccgctgctgtatttggtgacgacacgaaagtgaaatataccccactcacagcaaa

SEQ ID NO: 855661 - DNA, 75 bp, synthetic construct
  source 1..75: mol_type = other DNA
gacacgaaagtgaaatataccccgctcactgcaaaagaacgcttcaccgctttacagtcaggggaggtggatttg

SEQ ID NO: 855662 - DNA, 75 bp, synthetic construct
  source 1..75: mol_type = other DNA
aacgcttaacagattatcaactttcattacttaaaaaattagatgacaagactccactacatccttcaagcgatg

SEQ ID NO: 855663 - DNA, 75 bp, synthetic construct
  source 1..75: mol_type = other DNA
gacttgttagatccttcatttttattttggtttctttttgtaagttgttattgtctatcaattgcagttttctca

SEQ ID NO: 855664 - DNA, 75 bp, synthetic construct
  source 1..75: mol_type = other DNA
ctttaaaagactttggacaaaacagacataccacacttaaacctgttaattacgtttccaacataaaattagcat

SEQ ID NO: 855665 - DNA, 75 bp, synthetic construct
  source 1..75: mol_type = other DNA
agaactggatggcgctaccgtctgtattcaggcgggtactgataccgaactcaacgtcgccgattacttcaaggc

SEQ ID NO: 855666 - DNA, 75 bp, synthetic construct
  source 1..75: mol_type = other DNA
agagctggacggtgcaacggtctgtattcaggctggtacagacaccgagctcaacgtcgccgattacttcaaggc

SEQ ID NO: 855667 - DNA, 75 bp, synthetic construct
  source 1..75: mol_type = other DNA
tcacagcaaaagaacgtttcaccgctttacagtcaggagaggtggatttgctctcccgtaatacgacgtggactt

SEQ ID NO: 855668 - DNA, 75 bp, synthetic construct
  source 1..75: mol_type = other DNA
aaagaaccgcttgggccggtagttcgtcgtggcgatgatgaatggttctcgattgtacgctggacgcttttcgcc

SEQ ID NO: 855669 - DNA, 75 bp, synthetic construct
  source 1..75: mol_type = other DNA
aaggttttgtgcaatgcgggatcagtgatggattacctgggttctcttatgccgatgctgacggtaagttttcag

SEQ ID NO: 855670 - DNA, 75 bp, synthetic construct
  source 1..75: mol_type = other DNA
gtattgatgttgatgtttgtcgtagtgttgccgctgctgtatttggtgacgacacgaaagtgaaatataccccac

SEQ ID NO: 855671 - DNA, 75 bp, synthetic construct
  source 1..75: mol_type = other DNA
agtctgtcaggaaacagttttaaagaaggctggaacccgggactgtttaatgccggcaaagtttacaattacgtc

SEQ ID NO: 855672 - DNA, 75 bp, synthetic construct
  source 1..75: mol_type = other DNA
accggtacacctcgacctcgcccgcgtgcgcgactgcctgaaagtggttaaagagtacgacgtgccgctgttcat

SEQ ID NO: 855673 - DNA, 75 bp, synthetic construct
  source 1..75: mol_type = other DNA
ctccggcgcaatggcgaccatcgtcaacagccgccgctcctcttacggctacgaccagcgcctggagctacacgg

SEQ ID NO: 855674 - DNA, 75 bp, synthetic construct
  source 1..75: mol_type = other DNA
gtgaagaactggctaatacaattcttcatcagaaagagcaggcgctggaagcacagctgaatgttgtgcgggagg

SEQ ID NO: 855675 - DNA, 75 bp, synthetic construct
  source 1..75: mol_type = other DNA
tgtctcagcaggcaattgggctacttgaacaaatgagaggattacatgagatgctggtattcccttcccccagaa

SEQ ID NO: 855676 - DNA, 75 bp, synthetic construct
  source 1..75: mol_type = other DNA
cgaataatgttggggggtttggggatgtggagaaggcaagtaatgtatttgttcgtaacgaacttatccccttac

SEQ ID NO: 855677 - DNA, 75 bp, synthetic construct
  source 1..75: mol_type = other DNA
atatgtataaaaaaatccaagcggaagccgcaactactgacctcaaaacacttgaacagtttttaaaaaagttca

SEQ ID NO: 855678 - DNA, 75 bp, synthetic construct
  source 1..75: mol_type = other DNA
tgaaatctctggcagaaagcatcaggcaggaaatttcaacattctcaggaatgaaccgaatctacctcacaggcg

SEQ ID NO: 855679 - DNA, 75 bp, synthetic construct
  source 1..75: mol_type = other DNA
cacaccctgcaattattttattgctgatgagttaataaaaaacaggcatgataatgaatatctccggacattaat

SEQ ID NO: 855680 - DNA, 75 bp, synthetic construct
  source 1..75: mol_type = other DNA
atgctaaaagtatcatgcgatgatggttcaactaacgtaaaactggcctggcttgaagatggcgaggtaagaacc

SEQ ID NO: 855681 - DNA, 75 bp, synthetic construct
  source 1..75: mol_type = other DNA
tgtattgaatgcgaactctcaaacgctgaatggaatgaaagagcgtttactgcaagcccggcacgaactggacga

SEQ ID NO: 855682 - DNA, 75 bp, synthetic construct
  source 1..75: mol_type = other DNA
tggcagaccgaaacattgcgatagaatgcccaccgaccagcaatacacgtatcagtcagtaccgaaacgtcagcg

SEQ ID NO: 855683 - DNA, 75 bp, synthetic construct
  source 1..75: mol_type = other DNA
atgaagttcgagtccagtcagaggagccaaatttctgaaaagcccgcttttatagcgggctttttgctatatctg

SEQ ID NO: 855684 - DNA, 75 bp, synthetic construct
  source 1..75: mol_type = other DNA
ccaatgggcatacaacatcatcaaaaaggtgggtaactactcggaaatttttgagcgcaacgtcggctccgaaag

SEQ ID NO: 855685 - DNA, 75 bp, synthetic construct
  source 1..75: mol_type = other DNA
attattcccggattatgtgtctctcatgacgataaccacaatgtgatgcgcggcgaagaaacacaattgatcggc

SEQ ID NO: 855686 - DNA, 75 bp, synthetic construct
  source 1..75: mol_type = other DNA
tccggctgcggtgttagcagaagtcacgaccgactggcgtgaagagaaaacgccagtggtaatggcaggaatggt

SEQ ID NO: 855687 - DNA, 75 bp, synthetic construct
  source 1..75: mol_type = other DNA
cgttaagaattatacctgattcttcatttacgccaaatccttatccagaacaaaatggatggtttgatggtacat

SEQ ID NO: 855688 - DNA, 75 bp, synthetic construct
  source 1..75: mol_type = other DNA
gaaagctggagcagcaaagcgttcgcccgcaaagtggcttatttgccgcagcagcttcctccggcagaagggatg

SEQ ID NO: 855689 - DNA, 75 bp, synthetic construct
  source 1..75: mol_type = other DNA
aaattatgcgcggcgaaaccctcgaaatgatttatggcatcccgatgggtattttgccgcatccggcgggtgctg

SEQ ID NO: 855690 - DNA, 75 bp, synthetic construct
  source 1..75: mol_type = other DNA
atgattgctcagggaacgcctgcggaaattatgcgcggcgaaaccctcgaaatgatttatggcatcccgatgggt

SEQ ID NO: 855691 - DNA, 75 bp, synthetic construct
  source 1..75: mol_type = other DNA
aaatcttcaccttcagctttttgctgattacgcttgcctcgtttttacaattttttgccaccacgccagagcacc

SEQ ID NO: 855692 - DNA, 75 bp, synthetic construct
  source 1..75: mol_type = other DNA
gctggcacagtggggaatgcaagccaccttattgctcctggcggcaggaaatgcaggaggtgcgaatgaacatac

SEQ ID NO: 855693 - DNA, 75 bp, synthetic construct
  source 1..75: mol_type = other DNA
atctccgaccatatcgggcggcaaaaaatcttcaccttcagctttatgctgattacgctcgcctcgttcctgcaa

SEQ ID NO: 855694 - DNA, 75 bp, synthetic construct
  source 1..75: mol_type = other DNA
ttaaaggctagcgtatctattggaccgttaagaattatacctgattcttcatttacgccaaatccttatccagaa

SEQ ID NO: 855695 - DNA, 75 bp, synthetic construct
  source 1..75: mol_type = other DNA
aatggcgatggtaatctggatgtttatgctaataacgtccatgttatgcgctttgtctccggaagcattcaaagt

SEQ ID NO: 855696 - DNA, 75 bp, synthetic construct
  source 1..75: mol_type = other DNA
atgtcctcggcgttacttggtttgtttcttggcagcctggttttggggtggatctccgaccatatcggacggcaa

SEQ ID NO: 855697 - DNA, 75 bp, synthetic construct
  source 1..75: mol_type = other DNA
catccagatggatatgtttattacggtgatacaccagattttatcaaagggaaaatttacccctacggcaactgg

SEQ ID NO: 855698 - DNA, 75 bp, synthetic construct
  source 1..75: mol_type = other DNA
gattcaaagcatgggtggcacgccagtgtggccgctgattgcgctgtcgaatatcgctcagggctccgccgtgat

SEQ ID NO: 855699 - DNA, 75 bp, synthetic construct
  source 1..75: mol_type = other DNA
tgtacccttccctgcaaacgatctacgattttctgtggttgatcggtgaagcgatcttcttctacctgccggtcg

SEQ ID NO: 855700 - DNA, 75 bp, synthetic construct
  source 1..75: mol_type = other DNA
atgaaatggcatgagcagttgatctctcatttcgcggagatcttcttcccgttgctgcccgcgttgattagcggc

SEQ ID NO: 855701 - DNA, 75 bp, synthetic construct
  source 1..75: mol_type = other DNA
ggcgcataacatatgcttcggcctgaagcagcaaaaagtgtctgtcaacgagcagcaaacacgcctaacggaagc

SEQ ID NO: 855702 - DNA, 75 bp, synthetic construct
  source 1..75: mol_type = other DNA
gtcgtctgattttgctgatatggctgtgtgttctgacggcgctggggatttctgcgcttaacaatcgtgatctga

SEQ ID NO: 855703 - DNA, 75 bp, synthetic construct
  source 1..75: mol_type = other DNA
cgcattccattcctcgtcaaacttaatcacaacgagacgctaagttacccaaacacctacgatcaaacgctgtat

SEQ ID NO: 855704 - DNA, 75 bp, synthetic construct
  source 1..75: mol_type = other DNA
accataacgagacgctaagttacccgaacacctacgatcaaacgctatatgccagcgtagagcaggcgttcaata

SEQ ID NO: 855705 - DNA, 75 bp, synthetic construct
  source 1..75: mol_type = other DNA
cctttccattttgccggttgatcagggcgtcgagcactctgccggagcttcatttgccgctaacccactctactt

SEQ ID NO: 855706 - DNA, 75 bp, synthetic construct
  source 1..75: mol_type = other DNA
ttttggtgttattgggtgtcgaaaaggatgacgacgaacagaaagcaaaccgtctgtgcgagcgtgtgctcggct

SEQ ID NO: 855707 - DNA, 75 bp, synthetic construct
  source 1..75: mol_type = other DNA
catctattttggctcgcaagagtcacgtcggcagattgaagaaatttctgcggcctttgaacgtgcacatgagct

SEQ ID NO: 855708 - DNA, 75 bp, synthetic construct
  source 1..75: mol_type = other DNA
ccggggtggtaaaatcccgcgggggggggggcgggggggggggcgccccgcggtggtggttactcgaattctgga

SEQ ID NO: 855709 - DNA, 75 bp, synthetic construct
  source 1..75: mol_type = other DNA
gatgtttgccgattgaataatctacgtggcccggtatcacttttcttaatgactctggctgaatcaggtgaacgt

SEQ ID NO: 855710 - DNA, 75 bp, synthetic construct
  source 1..75: mol_type = other DNA
tatgtcaaccgggttcaacacagggcaacaggcaaattaccagtccggttgtctcaaatgagcatctgccggtat

SEQ ID NO: 855711 - DNA, 75 bp, synthetic construct
  source 1..75: mol_type = other DNA
agaatggtttgaaaaatataaccatgacttggttgtctggaggaatgaagaaacggtttttaacattgaaaagaa

SEQ ID NO: 855712 - DNA, 75 bp, synthetic construct
  source 1..75: mol_type = other DNA
acgccacgctcgccagaacggtggtcgcatgctattacgctctggttgctgattctggcgattgtttcaacctca

SEQ ID NO: 855713 - DNA, 75 bp, synthetic construct
  source 1..75: mol_type = other DNA
cttattccacacaagggagcagacaaatcactaatcctgtcttttccactgagcatttacctgtatttcatcaac

SEQ ID NO: 855714 - DNA, 75 bp, synthetic construct
  source 1..75: mol_type = other DNA
tagaatcttaatttcacaaaacaaaatatttatatcttcatggggtaaaacaaaaataataaacataactcattg

SEQ ID NO: 855715 - DNA, 75 bp, synthetic construct
  source 1..75: mol_type = other DNA
tgtggcttaactggctgcaaccaaccacatcaaatgggttatattgtaaagacctctagcggcattgaaactaac

SEQ ID NO: 855716 - DNA, 75 bp, synthetic construct
  source 1..75: mol_type = other DNA
gcgctttgatatgtccgagtatatggagcgtcacactgtcagccgcctgattggtgcgcctccgggatacgtcgg

SEQ ID NO: 855717 - DNA, 75 bp, synthetic construct
  source 1..75: mol_type = other DNA
caggataccaacagcatcctgtttatcgatgagatccacaccatcatcggcgcaggcgcagcttctggcggtcag

SEQ ID NO: 855718 - DNA, 75 bp, synthetic construct
  source 1..75: mol_type = other DNA
aatggttaaagaagttttaagctcaggcaatgtggacacatataaaaaatatattgatagtttaagcgaaggtcg

SEQ ID NO: 855719 - DNA, 75 bp, synthetic construct
  source 1..75: mol_type = other DNA
tcgtaagttttttgttgcgctcaaagaagatctaaagaaaattcagggcattgatctgcaaacaaccccaagccc

SEQ ID NO: 855720 - DNA, 75 bp, synthetic construct
  source 1..75: mol_type = other DNA
gataagaaaaccaaaacaattctatttgcaatgaataaacacatgcgcgaatctggagaagcaacaagtgagttc

SEQ ID NO: 855721 - DNA, 75 bp, synthetic construct
  source 1..75: mol_type = other DNA
aggcgctgggcgcaaaaccgcagattaatgctgaagaggaaattcgtcgtagtgtcgattttctgaaaagctacc

SEQ ID NO: 855722 - DNA, 75 bp, synthetic construct
  source 1..75: mol_type = other DNA
atgcctgacatccgcaacgctgccaccctgtacatcgatactgcggataagttcgcacaggtgagcatcaaccat

SEQ ID NO: 855723 - DNA, 75 bp, synthetic construct
  source 1..75: mol_type = other DNA
aactcgaagcgcgtaaccgttgcccgtcaggttgcgttgctgtattcgccgcccgtatccgtcaggaggcatcac

SEQ ID NO: 855724 - DNA, 75 bp, synthetic construct
  source 1..75: mol_type = other DNA
tgccagcgatttacgccatatcaatggtgttgtgcattgtgcgtacccgtgcaccatccagtcatttcacgagtt

SEQ ID NO: 855725 - DNA, 75 bp, synthetic construct
  source 1..75: mol_type = other DNA
accgacgatcgctgtagcgtgacagcgttgcgattgcgggaaggggaggaacaacttaacgagctgcggcgcaaa

SEQ ID NO: 855726 - DNA, 75 bp, synthetic construct
  source 1..75: mol_type = other DNA
aaataaactggcatcgtcgttatcgttcaccgcagggcgttaaaaccgaacatgagatcttgcggatctttgaaa

SEQ ID NO: 855727 - DNA, 75 bp, synthetic construct
  source 1..75: mol_type = other DNA
atgtcgcagacagaaaatgcagtaacctcctcatcaggtacaaagcgagcataccgaaaaggtaatcctctgacg

SEQ ID NO: 855728 - DNA, 75 bp, synthetic construct
  source 1..75: mol_type = other DNA
atggtgggctgtatggggccgacttcggtcgggctggtttcctctaacgccagttgtggtaaccctgtacagtcc

SEQ ID NO: 855729 - DNA, 75 bp, synthetic construct
  source 1..75: mol_type = other DNA
tgctatcagcctggcgggcgatttttggttgcttttagccgccgtgggtatttcctgagaaactcttcaagtgca

SEQ ID NO: 855730 - DNA, 75 bp, synthetic construct
  source 1..75: mol_type = other DNA
gacggcggtacggatattaatccgctgtatcgtctcaacaaacgccagggtaaacagttgctgacggcattaggt

SEQ ID NO: 855731 - DNA, 75 bp, synthetic construct
  source 1..75: mol_type = other DNA
aacacatccgaccacttaagcaaaaaagcggcatatactgaggctatcccttataaaacggggatcgggcgtagg

SEQ ID NO: 855732 - DNA, 75 bp, synthetic construct
  source 1..75: mol_type = other DNA
cggtcaggctggtttccgttaacgccagttgtggtaaccctgtacagtccaccgccagcgagcttaccacctccg

SEQ ID NO: 855733 - DNA, 75 bp, synthetic construct
  source 1..75: mol_type = other DNA
aagcacgtagcctttgcccgtccggttgcgttgctgtattcgccgcccgtatccgtcagggggtgactcatgctt

SEQ ID NO: 855734 - DNA, 75 bp, synthetic construct
  source 1..75: mol_type = other DNA
gtttgctggtccaactggggtcgggaaaaccgaggtgacggtacagctttccaaagccctgggcattgagctttt

SEQ ID NO: 855735 - DNA, 75 bp, synthetic construct
  source 1..75: mol_type = other DNA
ggtttattgtccatatcatcagggcgaggcatatgtaaagatgactggacagagtatgaccgggaaagataatgt

SEQ ID NO: 855736 - DNA, 75 bp, synthetic construct
  source 1..75: mol_type = other DNA
tctggcgacaaatattgatggacttggaattgaactttatcaggggggggagggaactggaaaccatcttatctt

SEQ ID NO: 855737 - DNA, 75 bp, synthetic construct
  source 1..75: mol_type = other DNA
tgctgcagaatccgcggcaacgcgcgccgagacagcagcaaaacgggcagaggatattgcatccgccgtggcgct

SEQ ID NO: 855738 - DNA, 75 bp, synthetic construct
  source 1..75: mol_type = other DNA
gcctgaagtctggtgaagagcagaaagattgcgaacaacctgcaacggatgatgttcagaaggatgggggagatg

SEQ ID NO: 855739 - DNA, 75 bp, synthetic construct
  source 1..75: mol_type = other DNA
ctcgccagtaagtgggatactattctctttgatgaagtccaggatgccaatccggtcacctgtgcctttgtcctg

SEQ ID NO: 855740 - DNA, 75 bp, synthetic construct
  source 1..75: mol_type = other DNA
tttggtcctgccgtggccggggtggccagccagttactgaagcgtgccggcgagagccgtgaggtgaccggcagg

SEQ ID NO: 855741 - DNA, 75 bp, synthetic construct
  source 1..75: mol_type = other DNA
gggttatgaatgaattgaaaagtcgtggccgcaagaacgctcacatcctgagcatcctccaattcgactggcctg

SEQ ID NO: 855742 - DNA, 75 bp, synthetic construct
  source 1..75: mol_type = other DNA
gcttggttttaatattgccggggaccaagaaaaaaaaggtgctatcatattttttcagaactcaatcaaataaat

SEQ ID NO: 855743 - DNA, 75 bp, synthetic construct
  source 1..75: mol_type = other DNA
tgcggctgaatccgcggcaacgcgcgccgagacagcagcaaaacgggcagaggatattgcatccgccgtggcgct

SEQ ID NO: 855744 - DNA, 75 bp, synthetic construct
  source 1..75: mol_type = other DNA
cgtgtatacagatgaaccttataatgttacccgagcactgttattaatggtgatacttacagcaacctgttcggg

SEQ ID NO: 855745 - DNA, 75 bp, synthetic construct
  source 1..75: mol_type = other DNA
tcgttatgtaagtccggtgacacaaaaaagacgtaatgctggattgggaacttacccagaggtcagtattgctga

SEQ ID NO: 855746 - DNA, 75 bp, synthetic construct
  source 1..75: mol_type = other DNA
atagcaactgcgcttaaagacaaagcggagcaggcaggagcttcccacttccgaatcacttctctgggaggaaac

SEQ ID NO: 855747 - DNA, 75 bp, synthetic construct
  source 1..75: mol_type = other DNA
cgaaataaacaaaaccagaaagcagcagaggcatcaccgtcagaagatagggaaaacgatgccgtatacgggcag

SEQ ID NO: 855748 - DNA, 75 bp, synthetic construct
  source 1..75: mol_type = other DNA
cgttacaaaaatgcgggcattaccaaagttgtcggcaccgaagcgcgtggcttcttgtttggcgctccggtagct

SEQ ID NO: 855749 - DNA, 75 bp, synthetic construct
  source 1..75: mol_type = other DNA
acaaacctgattgccgttactttgaggtgaacgtgcacgggcagttcggcggcattgtttactatcaggagattc

SEQ ID NO: 855750 - DNA, 75 bp, synthetic construct
  source 1..75: mol_type = other DNA
aaaacgccatcattgagtggaagggcactcatcttgtggtaaacgcttttgccggcacaggaaaaaccaccacgt

SEQ ID NO: 855751 - DNA, 75 bp, synthetic construct
  source 1..75: mol_type = other DNA
gtttgccggtcctaccggggtcgggaaaacagaggtgacggtacagctttcgaaagctttgggcattgagcttct

SEQ ID NO: 855752 - DNA, 75 bp, synthetic construct
  source 1..75: mol_type = other DNA
ctatcaggagttcagcaacatttttgagaaagaccgtgctctggcgcgtcgcttccagaaaattgatattactga

SEQ ID NO: 855753 - DNA, 75 bp, synthetic construct
  source 1..75: mol_type = other DNA
gatcatctgtcaactgacgtgatccatcaggtggtggataaattcatcgtcgagttgcaggttcagctggatcag

SEQ ID NO: 855754 - DNA, 75 bp, synthetic construct
  source 1..75: mol_type = other DNA
gcagaaactggttgtgaacgcctttgccggtacaggaaagaccagtaccctggttcagtatgcactggcaaaccc

SEQ ID NO: 855755 - DNA, 75 bp, synthetic construct
  source 1..75: mol_type = other DNA
gccctgatggcacattccctgtcacgcatgatacctacctgaagctgttccagttgtcatccccggacctgtccc

SEQ ID NO: 855756 - DNA, 75 bp, synthetic construct
  source 1..75: mol_type = other DNA
ccagctggcagaagaggctggcagagatgaacaaagccagaaagcaacagaggcatcaccgtcagaaaacgggga

SEQ ID NO: 855757 - DNA, 75 bp, synthetic construct
  source 1..75: mol_type = other DNA
aatcgggctacgatgtttttaaatatatttccatcagccgtttgcttcatgcagcgccagtaaaatatgccgcca

SEQ ID NO: 855758 - DNA, 75 bp, synthetic construct
  source 1..75: mol_type = other DNA
tcatgatgaaacctgtctgttatatgtggctgtcacccgggccctcaggacgctggtactgaatgatctgatgca

SEQ ID NO: 855759 - DNA, 75 bp, synthetic construct
  source 1..75: mol_type = other DNA
ttcgtcttgcactcagcagcctgaatcagtttctgtgcagtgctgacaaggagccggggctgcagcatttgccgg

SEQ ID NO: 855760 - DNA, 75 bp, synthetic construct
  source 1..75: mol_type = other DNA
gaacggatgatgtctcaattttgtcgaaagagggatataataaaagatgggaacattacactacgaataatgttt

SEQ ID NO: 855761 - DNA, 75 bp, synthetic construct
  source 1..75: mol_type = other DNA
gattaaagaattatctttctctacattcaatctcaaaagactagataaagaaatagacttcatctattccactct

SEQ ID NO: 855762 - DNA, 75 bp, synthetic construct
  source 1..75: mol_type = other DNA
gattaaagaattatctttctctacattcaatctcaaaagactaaatagagaaatagacttcatctattccactct

SEQ ID NO: 855763 - DNA, 75 bp, synthetic construct
  source 1..75: mol_type = other DNA
atgatgacgccagagcgttttatgagcgttttggttttgttcagtcagtagtggcacctgataccttgttttata

SEQ ID NO: 855764 - DNA, 75 bp, synthetic construct
  source 1..75: mol_type = other DNA
tatgataacgtaatggataagcagtctggcaatctggcgacatggatccctcgtgaccagattgtcagaatggat

SEQ ID NO: 855765 - DNA, 75 bp, synthetic construct
  source 1..75: mol_type = other DNA
gagcgatggcaacctatatccctgcagatcagattgccatggtgaggatcagacgaaccagaaataaagctatta

SEQ ID NO: 855766 - DNA, 75 bp, synthetic construct
  source 1..75: mol_type = other DNA
cagtaatgctaactttgctttttacggtttctttcttctccagaggcgaaacaacactccgactggcttatgccg

SEQ ID NO: 855767 - DNA, 75 bp, synthetic construct
  source 1..75: mol_type = other DNA
aaggcgttcctctatccaaaggctacattaaagcagcttttaaagaggtttacagcaacccgaaattactgaact

SEQ ID NO: 855768 - DNA, 75 bp, synthetic construct
  source 1..75: mol_type = other DNA
aaggtgttccgttatccaaaggctacattaaagcggcttttaaagaggtttacagcaatccgaaattactgaact

SEQ ID NO: 855769 - DNA, 75 bp, synthetic construct
  source 1..75: mol_type = other DNA
atgaccgatattaacgatgtaatcaagaccattgatgagctgattgatggcggcatactgacacagtatgccatc

SEQ ID NO: 855770 - DNA, 75 bp, synthetic construct
  source 1..75: mol_type = other DNA
gggcatggtttcggtaaatggctgctgagtgataccatccaccgggttgtcaatctggctgagcaggttggcatt

SEQ ID NO: 855771 - DNA, 75 bp, synthetic construct
  source 1..75: mol_type = other DNA
gtggcctcaaagatattcgaggaatgttattaccgtgcgattgatagcggggaataccctgatgaacagcaagca

SEQ ID NO: 855772 - DNA, 75 bp, synthetic construct
  source 1..75: mol_type = other DNA
atgcatgacaaattactgatgtggcatcagagctggcaaaaaagtctggagttacctggcgcaccacaacttgtg

SEQ ID NO: 855773 - DNA, 75 bp, synthetic construct
  source 1..75: mol_type = other DNA
gctgtcagccaccattgccgatcggaaaatgtgggctgaaatgaaaatgaatccgactgacctcgcggatgtcag

SEQ ID NO: 855774 - DNA, 75 bp, synthetic construct
  source 1..75: mol_type = other DNA
atgaataccgatgcaattgagtcgatggtcagggacgtgttgaaccgaatgaacagtctccaggatacagctcct

SEQ ID NO: 855775 - DNA, 75 bp, synthetic construct
  source 1..75: mol_type = other DNA
aagcgtgcatgtaacagccgggtacgcgaatcactgcaaaaagtcggtgcgttcgcatcgattgagactggcagt

SEQ ID NO: 855776 - DNA, 75 bp, synthetic construct
  source 1..75: mol_type = other DNA
acgagcgcattctggctatctataacgcgctgcgcccgttccgctcctcgcaggcggagctgctggcgatcgccg

SEQ ID NO: 855777 - DNA, 75 bp, synthetic construct
  source 1..75: mol_type = other DNA
ggctaacaacctggtctacaacctgcacctgctgaccggcaaaatttcccagccgggttgcggtccgttctccct

SEQ ID NO: 855778 - DNA, 75 bp, synthetic construct
  source 1..75: mol_type = other DNA
tttcaataacgttctttgctggctggcggtgttcaatactctgggtggggccgcgccgttaattcgttctctctg

SEQ ID NO: 855779 - DNA, 75 bp, synthetic construct
  source 1..75: mol_type = other DNA
attacgcagatgccgaactcaaggcgctggcagctaaagagtggcaacagataggcgaatgggatttgagtgctt

SEQ ID NO: 855780 - DNA, 75 bp, synthetic construct
  source 1..75: mol_type = other DNA
aaaatgtgggctgaaatgaaaatgaatccaactgacctcgcggatgtcagcggttacacctacacctatctcatg

SEQ ID NO: 855781 - DNA, 75 bp, synthetic construct
  source 1..75: mol_type = other DNA
gaaggggtatacggtgccattattatcgatgcccaggagcctgaaccttttgcttacgatcgtgagcatgtgatc

SEQ ID NO: 855782 - DNA, 75 bp, synthetic construct
  source 1..75: mol_type = other DNA
gagggggtttacggtgccatcattattgatgcccgggaaccggagccctttgcttatgaccgcgagcatgtggtg

SEQ ID NO: 855783 - DNA, 75 bp, synthetic construct
  source 1..75: mol_type = other DNA
atgagcgagaaaaccatgcgcgtgcaggattatccgttagccacccgctgcccggagcatatcctgacgcctacc

SEQ ID NO: 855784 - DNA, 75 bp, synthetic construct
  source 1..75: mol_type = other DNA
aaagcgttatcaggccaaaatttgtgctgcatttgtacgtgaagcggcggagttatacgtcgaacgtaaaaagct

SEQ ID NO: 855785 - DNA, 75 bp, synthetic construct
  source 1..75: mol_type = other DNA
atgaaaggattcgcatgggaaaagaactaactgatctatttaatagattgtggccaaatacacctgaatatccag

SEQ ID NO: 855786 - DNA, 75 bp, synthetic construct
  source 1..75: mol_type = other DNA
cagaccaattcgacattgtactgccagaaagcgccatgccattgactgatgcgcaatggcgttatcgcgatcgtg

SEQ ID NO: 855787 - DNA, 75 bp, synthetic construct
  source 1..75: mol_type = other DNA
agaataaaaaggaaattatgatgaaaggtattgtgctcgctggcggttccggaacccgtctctatccgattaccc

SEQ ID NO: 855788 - DNA, 75 bp, synthetic construct
  source 1..75: mol_type = other DNA
gctggctcactgaaagtgaggtcgtgacctacgggaatgagatgagcaagaccaattacggtcaatatttgctca

SEQ ID NO: 855789 - DNA, 75 bp, synthetic construct
  source 1..75: mol_type = other DNA
atgaaaggtattgttctggccggcggttccggcacgcgtttatatcccatcactcagggcgtctccaagcagctg

SEQ ID NO: 855790 - DNA, 75 bp, synthetic construct
  source 1..75: mol_type = other DNA
tatgataatcaggtggtggattttgcaaagcaagttaaaccatctcctcgtggtgagcttgaaatcacttcaata

SEQ ID NO: 855791 - DNA, 75 bp, synthetic construct
  source 1..75: mol_type = other DNA
tggtgaagagttcatcgctggtgatgaatgtgccctggttttaggggataatattttcttcggtcaaagtttcgg

SEQ ID NO: 855792 - DNA, 75 bp, synthetic construct
  source 1..75: mol_type = other DNA
cgcagtacagccctctccggatggtctggcacaggcatttatcattggagaagagttcattaacaatgagccttg

SEQ ID NO: 855793 - DNA, 75 bp, synthetic construct
  source 1..75: mol_type = other DNA
aaccagatgtatctggagcaaggtgacctgcatgttgaactgctggggcgcggttttgcttggctggatacgggc

SEQ ID NO: 855794 - DNA, 75 bp, synthetic construct
  source 1..75: mol_type = other DNA
taaaaagctggaagcggcagcggcgaagacttccggtgccacggtgtttggttatcaggtgctggatccggagcg

SEQ ID NO: 855795 - DNA, 75 bp, synthetic construct
  source 1..75: mol_type = other DNA
atatctactttggccagagcttcggtaaaaaactggaagcggcggcgaagacttccggtgccacggtgtttggtt

SEQ ID NO: 855796 - DNA, 75 bp, synthetic construct
  source 1..75: mol_type = other DNA
agaaaccactgaagccgaaatcgaactgggcggtgaccgggctctacttctatgacaacaacgtggtggagatgg

SEQ ID NO: 855797 - DNA, 75 bp, synthetic construct
  source 1..75: mol_type = other DNA
agctacgccatccagccgtcgccggatggtctggcgcaggcctttatcattggcgagaagtttatcggcaacgat

SEQ ID NO: 855798 - DNA, 75 bp, synthetic construct
  source 1..75: mol_type = other DNA
acggcctggcgcaggcctttatcattggcgagaagtttatcggcaacgatgcctgcgccctagtgctgggggata

SEQ ID NO: 855799 - DNA, 75 bp, synthetic construct
  source 1..75: mol_type = other DNA
gattagtaaaatactctcactactttctcttatattaactgtaagtttaactttaccttatttaggacaagagag

SEQ ID NO: 855800 - DNA, 75 bp, synthetic construct
  source 1..75: mol_type = other DNA
cataaatgatcatcaggtagcggcgaacaattttccctggttagcagacaacgatcccattattcttcccccaaa

SEQ ID NO: 855801 - DNA, 75 bp, synthetic construct
  source 1..75: mol_type = other DNA
gatggaggctggatcggctggatgatcaaacctctgggccgctggtcgttaatcatggaaatcgatgaaggcttt

SEQ ID NO: 855802 - DNA, 75 bp, synthetic construct
  source 1..75: mol_type = other DNA
cattatggactcgcccaaaactcaaaaatagcagcaaggtactgccagataacgccctcctccacctcggtgaaa

SEQ ID NO: 855803 - DNA, 75 bp, synthetic construct
  source 1..75: mol_type = other DNA
gacttccgcaaccaaattcttcatcaacccgaccggacgttttgttatcggcggcccgatgggtgactgcggtct

SEQ ID NO: 855804 - DNA, 75 bp, synthetic construct
  source 1..75: mol_type = other DNA
tacgcgatcggcgtggctgaaccgacttccatcatggtagaaactttcggtactgagaaagtccctactgaacaa

SEQ ID NO: 855805 - DNA, 75 bp, synthetic construct
  source 1..75: mol_type = other DNA
aagcaccttcggtattgaatacgcaactgaaactgtcatcttctggtggcaaattgatttcgattttgactataa

SEQ ID NO: 855806 - DNA, 75 bp, synthetic construct
  source 1..75: mol_type = other DNA
actcaaaataaaaataacgacaacagtcctgtgggtaaatacccggcgaaaatcccccctttaccgttgttttat

SEQ ID NO: 855807 - DNA, 75 bp, synthetic construct
  source 1..75: mol_type = other DNA
gcggtgaatcgcctgatgatctcccgtaacatagatgccaccgttgctgattttatctctgcattagcccgatat

SEQ ID NO: 855808 - DNA, 75 bp, synthetic construct
  source 1..75: mol_type = other DNA
aacggcatcgattattgctgttctgggcgccgcaggtttagccgttggtctggccttgcaggggtctttgtccaa

SEQ ID NO: 855809 - DNA, 75 bp, synthetic construct
  source 1..75: mol_type = other DNA
ggtctggatgataacggttcgttgctgctggattttggcccacgccagttcaccgtcagctttgatgaaacctta

SEQ ID NO: 855810 - DNA, 75 bp, synthetic construct
  source 1..75: mol_type = other DNA
ggctgatgcgattagccaggcaatcagcttaattaaggcccaaaagactgagatacccgcgcgtactatggcggt

SEQ ID NO: 855811 - DNA, 75 bp, synthetic construct
  source 1..75: mol_type = other DNA
gccgcgaactcacggtggcggagcttgaagatcggttagcaccggatctcggtctggatgataacggttcgttgc

SEQ ID NO: 855812 - DNA, 75 bp, synthetic construct
  source 1..75: mol_type = other DNA
gtctgcttcaaaagatgaggcgaccagacaagcgtcagcagcgaatggcagggccacgacggcaccgacgaaggc

SEQ ID NO: 855813 - DNA, 75 bp, synthetic construct
  source 1..75: mol_type = other DNA
taaaactgacgccgctggaaaagctcccgattggcaaaggcattgtgaagcgtcgtggcgagaaactggcgatcc

SEQ ID NO: 855814 - DNA, 75 bp, synthetic construct
  source 1..75: mol_type = other DNA
ggcatggtcgagttttcacgtaaattcccggatcgctacttcgacgtggcaattgccgagcaacacgcggtgacc

SEQ ID NO: 855815 - DNA, 75 bp, synthetic construct
  source 1..75: mol_type = other DNA
aacgccgtgcctgcaggctggctggtctgtcactttcaacctgccgttattcggctcagcgtccggctgctgacg

SEQ ID NO: 855816 - DNA, 75 bp, synthetic construct
  source 1..75: mol_type = other DNA
gattttctggcatttagccgcgcggcaacaggtcgcctgcgtgacgagctggcgaaatacccctttgctgacggc

SEQ ID NO: 855817 - DNA, 75 bp, synthetic construct
  source 1..75: mol_type = other DNA
cggcgaccgataccctgaccattaagggcacgccgccgaacctgcgcgatcaattgcagcgccggacgtccggcg

SEQ ID NO: 855818 - DNA, 75 bp, synthetic construct
  source 1..75: mol_type = other DNA
aaaggcggcctgcacccgttcccgtggcgcggcgaaagcgaatatgacgtattaagcgtcgggcattcatcaacc

SEQ ID NO: 855819 - DNA, 75 bp, synthetic construct
  source 1..75: mol_type = other DNA
tacagctgaatccgcggcaacgcgcgccgagacagcagcaaaacgggcagaggatattgcatccgccgtggcgct

SEQ ID NO: 855820 - DNA, 75 bp, synthetic construct
  source 1..75: mol_type = other DNA
aaatgtcacgccaggaagttcgtgagcgcgtgaaggcgatgatgatgaaagtcggcttgctacccaatctgatta

SEQ ID NO: 855821 - DNA, 75 bp, synthetic construct
  source 1..75: mol_type = other DNA
gaacgctacgctggtcgatatgcgttttgtgaaaccgcttgatgaagcgttaattctggaaatggccgccagcca

SEQ ID NO: 855822 - DNA, 75 bp, synthetic construct
  source 1..75: mol_type = other DNA
gccaattggcaaaggcattgtgaagcgtcgtggcgagaaactggcgatccttaactttggtacgctgatgccaga

SEQ ID NO: 855823 - DNA, 75 bp, synthetic construct
  source 1..75: mol_type = other DNA
tccacaaggaactcaggaagaaatgcgcgccgaactcggcctcgatgccaccggtatggaagccaaaatcaaagc

SEQ ID NO: 855824 - DNA, 75 bp, synthetic construct
  source 1..75: mol_type = other DNA
ggactggctcgccttatgcaggagcaaatattccgactacttttacaccgtccggtacggtgacgctttcatggt

SEQ ID NO: 855825 - DNA, 75 bp, synthetic construct
  source 1..75: mol_type = other DNA
aaaatgttcgctatgcgctttcgctgccatggcaaatcgacagcgataataccgcgcgcacggtggtcattaagg

SEQ ID NO: 855826 - DNA, 75 bp, synthetic construct
  source 1..75: mol_type = other DNA
cacagcctgcctattagcaatgatctcgatgtttgcccctgttgtcagcaatctgcctctggattattatgccct

SEQ ID NO: 855827 - DNA, 75 bp, synthetic construct
  source 1..75: mol_type = other DNA
gtcagagcggctgagtctcagaagaaagagcagattgcatatgcaggtgaaatcattgccacgctgcaggatgct

SEQ ID NO: 855828 - DNA, 75 bp, synthetic construct
  source 1..75: mol_type = other DNA
ccaatctggcttacggtggcttgtctgattgtcttcggtttgctgctgaacaaaactacctttgggcgcaacacg

SEQ ID NO: 855829 - DNA, 75 bp, synthetic construct
  source 1..75: mol_type = other DNA
gtctgcttcaaaagatgaggcgaccagacaagcgtcagcagcgaatggcagggccacgaccgcagcgacgaaggc

SEQ ID NO: 855830 - DNA, 75 bp, synthetic construct
  source 1..75: mol_type = other DNA
tactcatctcaccctgccacacctggaacctctgtatgtggatgttccagagtatggtggtgtaagcggctcgct

SEQ ID NO: 855831 - DNA, 75 bp, synthetic construct
  source 1..75: mol_type = other DNA
cagacctcattcatcgctgaattaccagacgccggctgaatttgcagcaagctggagaaatagaaaattagaagg

SEQ ID NO: 855832 - DNA, 75 bp, synthetic construct
  source 1..75: mol_type = other DNA
ataacattttctctggcaacatatgcgtcagatgtaggaattgcctctgtcgtcaggggggcacaggttggatcg

SEQ ID NO: 855833 - DNA, 75 bp, synthetic construct
  source 1..75: mol_type = other DNA
gttacgctattcgtttaaggaggtttcagcagtaagcctgaatggtgttgccggaggtaacggtttttgtatcga

SEQ ID NO: 855834 - DNA, 75 bp, synthetic construct
  source 1..75: mol_type = other DNA
gaaaaaataccgtgtgttactgaatcgcgttcagccggaagatgctccggatatagaatggccggaaatgccgca

SEQ ID NO: 855835 - DNA, 75 bp, synthetic construct
  source 1..75: mol_type = other DNA
ggaacggaaatgcgtgggtgaatgatgagaatgcagagcgtgatgcgcttgtcagagcggcggagtctcagaaga

SEQ ID NO: 855836 - DNA, 75 bp, synthetic construct
  source 1..75: mol_type = other DNA
gtggctatctcaaaataaaaaacaactttcaggaaattgttgatgctggcccatctgcactggctcaggcccaat

SEQ ID NO: 855837 - DNA, 75 bp, synthetic construct
  source 1..75: mol_type = other DNA
gaaacattaggtgtcgtaggggaatctggttgcggtaaatccacctttgctcgcgctattatcggtctggttaaa

SEQ ID NO: 855838 - DNA, 75 bp, synthetic construct
  source 1..75: mol_type = other DNA
gcagtgctatgcgccacggaagcagttcgctgacccggttgaccggccagtctgctatgacgccaagcacatggc

SEQ ID NO: 855839 - DNA, 75 bp, synthetic construct
  source 1..75: mol_type = other DNA
gctgggaaagtggtctacggcagataaacaacccgtttgctggtcagtgacccaacgctggcggcctggctggtc

SEQ ID NO: 855840 - DNA, 75 bp, synthetic construct
  source 1..75: mol_type = other DNA
aagcccatcagcagcagtttcgtgaacgactgatgcaggaacttcttgcgcgcgtgcagcttcagacatggacga

SEQ ID NO: 855841 - DNA, 75 bp, synthetic construct
  source 1..75: mol_type = other DNA
aacagcccatctccaccggcagaatactataattgtgagaaatatagtctacttgattcggtttgtatgttgttc

SEQ ID NO: 855842 - DNA, 75 bp, synthetic construct
  source 1..75: mol_type = other DNA
agcatttgatttgctgtacagtgagtatgacaaatcactggaacgactgaatagtagattgaattcaaatgattc

SEQ ID NO: 855843 - DNA, 75 bp, synthetic construct
  source 1..75: mol_type = other DNA
actataattgtgagaaatatagtctacttgattcggtttgtatgttgttcaggaacatggtgccagtaacccttc

SEQ ID NO: 855844 - DNA, 75 bp, synthetic construct
  source 1..75: mol_type = other DNA
tctggcagttagtccagttctcccgccgcttcaaaactgaagaagtgtggccggaagagctgctggcgaagaaac

SEQ ID NO: 855845 - DNA, 75 bp, synthetic construct
  source 1..75: mol_type = other DNA
cggaactgcgtggcaaaacgctgtatgaggttctgtatgccaccccggaagtgagcaaattcccggtatccgaac

SEQ ID NO: 855846 - DNA, 75 bp, synthetic construct
  source 1..75: mol_type = other DNA
gatcctgccgaccgcaatgtgggtagagaaagagggggcttacggtaacgccgaacgccgtactcagttctggcg

SEQ ID NO: 855847 - DNA, 75 bp, synthetic construct
  source 1..75: mol_type = other DNA
aatggtttcacctacaaaaaaccgtcaggcgtcccccataaattcagtgaagagaaacaaaggcaattcattgaa

SEQ ID NO: 855848 - DNA, 75 bp, synthetic construct
  source 1..75: mol_type = other DNA
gatcggtatgttcggttctggtcagtggactatctgggaaggttatgccgcgtccaagctgtttaaagcgggctt

SEQ ID NO: 855849 - DNA, 75 bp, synthetic construct
  source 1..75: mol_type = other DNA
tggaatatcccgagcggcaccattccggcgaaaatcggtctgcacgcggtggcacaagaccgtgcgctgaaagac

SEQ ID NO: 855850 - DNA, 75 bp, synthetic construct
  source 1..75: mol_type = other DNA
cgcaggatagttatcggagtatgatgtttcattcacaaatagcgctgaatcagttggtgttgctggagcgggggg

SEQ ID NO: 855851 - DNA, 75 bp, synthetic construct
  source 1..75: mol_type = other DNA
tgcggtagaactggggacgtatgatgaggtctaccataatccgctgcatccttataccaaagcattgatgtcggc

SEQ ID NO: 855852 - DNA, 75 bp, synthetic construct
  source 1..75: mol_type = other DNA
atgaatgtcgccattgtgacaataaatcaggaccatgccgcaatagcgaactggctggcggcgcaggatttcagc

SEQ ID NO: 855853 - DNA, 75 bp, synthetic construct
  source 1..75: mol_type = other DNA
cctctggtatgcagcaactgaacattgtcccaggtgcgcttcccgactggctggttagcatagagaacctgaaaa

SEQ ID NO: 855854 - DNA, 75 bp, synthetic construct
  source 1..75: mol_type = other DNA
cgcacccgttgcccgattgccggacctgaatgtgccaaaacgcgtccggtgctggagggaagcttcagacatgcc

SEQ ID NO: 855855 - DNA, 75 bp, synthetic construct
  source 1..75: mol_type = other DNA
cctacaccaaagcgctgatgtcggcagtgccgatccctgacccggatctggaaaagaacaaaactatccagttgc

SEQ ID NO: 855856 - DNA, 75 bp, synthetic construct
  source 1..75: mol_type = other DNA
aaatgtcacgccaggaagttcgcgagcgcgtgaaggcgatgatgctgaaagtcgggttattgcctaacctgatta

SEQ ID NO: 855857 - DNA, 75 bp, synthetic construct
  source 1..75: mol_type = other DNA
aaccccatcgcccaggccgcgatgttcggctatttcctgatgtctgtttttatgatcgtcaccggttttgcgctg

SEQ ID NO: 855858 - DNA, 75 bp, synthetic construct
  source 1..75: mol_type = other DNA
gaacagattgtggcctgcctgttgcgggatatcctgtcgcaggatagttatcggagtatgatgtttcattcacaa

SEQ ID NO: 855859 - DNA, 75 bp, synthetic construct
  source 1..75: mol_type = other DNA
gaattgccgattcaacaggggaacctgataaacgccagcgtgacaataaaaaaacgccgggaaatactgacaaat

SEQ ID NO: 855860 - DNA, 75 bp, synthetic construct
  source 1..75: mol_type = other DNA
aatcatgacgccagtgcagcggtattttcacaggcagatgttggcgtggttgatgactggaaagtggtgctggag

SEQ ID NO: 855861 - DNA, 75 bp, synthetic construct
  source 1..75: mol_type = other DNA
taatagccagtttgtggtggctgtgaatcatgacgccagcgcggcggtattttcacaggcagatgttggcgtggt

SEQ ID NO: 855862 - DNA, 75 bp, synthetic construct
  source 1..75: mol_type = other DNA
tatcgtgccagtatggcgtaaaagctggtggcagggcgtgtggtatgaaatccgctggtatctgtttctggcaaa

SEQ ID NO: 855863 - DNA, 75 bp, synthetic construct
  source 1..75: mol_type = other DNA
aatctgccaaacgaatttattgagcagtttaagacgggtcaagccaaagagatcgataccgcgatttgtgcgaaa

SEQ ID NO: 855864 - DNA, 75 bp, synthetic construct
  source 1..75: mol_type = other DNA
caacctgccgtttatttcgctggggcaagtcggtgagggcaaactgatggttatcggtaacccgcactacaacag

SEQ ID NO: 855865 - DNA, 75 bp, synthetic construct
  source 1..75: mol_type = other DNA
gccacaaacatcgtttcgccaacgatgtgcagatctccatcggtgatgcgcactcgggttatccggtaatgaaca

SEQ ID NO: 855866 - DNA, 75 bp, synthetic construct
  source 1..75: mol_type = other DNA
ccgttctataaagatggtaagtggaaaaacgaactgagttctcctgccccgctaggcgaactggagtcaggctct

SEQ ID NO: 855867 - DNA, 75 bp, synthetic construct
  source 1..75: mol_type = other DNA
ttggcatcgacacctttgaactgggctcagtacgcggcaataagtcgactattgcactgacggaactgggcgatg

SEQ ID NO: 855868 - DNA, 75 bp, synthetic construct
  source 1..75: mol_type = other DNA
cgaagaacaacctgaacgccagcaattacagtaattacactgacggcgtagcagaattcgctaaagaactggata

SEQ ID NO: 855869 - DNA, 75 bp, synthetic construct
  source 1..75: mol_type = other DNA
taccgcgaccttcaacctgccgtttatttcgctggggcaagtcggtgaaggcaaactgatggttatcggtaaccc

SEQ ID NO: 855870 - DNA, 75 bp, synthetic construct
  source 1..75: mol_type = other DNA
ctcaactatatggaaaaaccgctgacgcgcctgatgctgggccgttcctggtgggatctgaacattaaggttgat

SEQ ID NO: 855871 - DNA, 75 bp, synthetic construct
  source 1..75: mol_type = other DNA
gcgtgtagttccggatgaagtacgcaaggtttttgctgaatatcccaacgtgattaacgagattatcaatctctc

SEQ ID NO: 855872 - DNA, 75 bp, synthetic construct
  source 1..75: mol_type = other DNA
tatatggaaaaaccgctgacgcgcctgatgctggggcgttcctggtgggatctgaacatcaaagttgatgttgag

SEQ ID NO: 855873 - DNA, 75 bp, synthetic construct
  source 1..75: mol_type = other DNA
agtcggcttacgagacgctggcggcgcttaatctgccgaaaccgcagcaagggccggaaaccattaatcaggtta

SEQ ID NO: 855874 - DNA, 75 bp, synthetic construct
  source 1..75: mol_type = other DNA
cattcaacacccagtcagaagctgcgcgtagcctgcgtgcggttgacaaagtgtcgtttagcctggaggacgcgc

SEQ ID NO: 855875 - DNA, 75 bp, synthetic construct
  source 1..75: mol_type = other DNA
caatgcggtttcgctggtaacgtccagtaacagctgtccggcggatacagaacaggtttgcctgacgttctcctc

SEQ ID NO: 855876 - DNA, 75 bp, synthetic construct
  source 1..75: mol_type = other DNA
actacgaggtcaactgtctggaatatcgtcctggcacgggggttccggttactggtggcatgtatgttccacagt

SEQ ID NO: 855877 - DNA, 75 bp, synthetic construct
  source 1..75: mol_type = other DNA
tttgaaaaactgtataagcaaatcgatctggcaccggaagaattcaaaaagctggtaaatgaggaagtggaaaac

SEQ ID NO: 855878 - DNA, 75 bp, synthetic construct
  source 1..75: mol_type = other DNA
gaggtcaactgcctggaatatcgtcctggcacgggggtttccggttactggtggcatgtatgttccacagtatac

SEQ ID NO: 855879 - DNA, 75 bp, synthetic construct
  source 1..75: mol_type = other DNA
aagacaacaagcctgatgacaagccgaaactggaagttgcgagctggcaggaggaagttgaggtgattagacttg

SEQ ID NO: 855880 - DNA, 75 bp, synthetic construct
  source 1..75: mol_type = other DNA
catgtatgttccacagtatacgcaactaagccttaacgccgacactgcgaaagcgatggtgcaggctgcggattt

SEQ ID NO: 855881 - DNA, 75 bp, synthetic construct
  source 1..75: mol_type = other DNA
ggacacgctgatgctgtgtgcctcctgggtcgctcagacggacctttccgcattctttaagaaatggaatccggg

SEQ ID NO: 855882 - DNA, 75 bp, synthetic construct
  source 1..75: mol_type = other DNA
aagcgggcatgatgaacccgagctacccgctcaactatatggaaaaaccgctgacacgcctgatgctgggccgtt

SEQ ID NO: 855883 - DNA, 75 bp, synthetic construct
  source 1..75: mol_type = other DNA
aaaacgttcaccgagttcctgaactgctataccaacgatgcctataccgatggcacacagtgctccgcagagctg

SEQ ID NO: 855884 - DNA, 75 bp, synthetic construct
  source 1..75: mol_type = other DNA
cgacaacaccttcggcggcaagaattattgtgctgaatccaacggtaacgctgccgacacgctgatgctgtgcgc

SEQ ID NO: 855885 - DNA, 75 bp, synthetic construct
  source 1..75: mol_type = other DNA
tatctccgttgagcatttaagtggctatggcgatctcgatccgcaggcaatgcctctgctgatccttaacggctt

SEQ ID NO: 855886 - DNA, 75 bp, synthetic construct
  source 1..75: mol_type = other DNA
tcagtacgcggcaataagtcgactattgcgctgactgaattgggtgatgaagttcacggcgcgaatgttgatcag

SEQ ID NO: 855887 - DNA, 75 bp, synthetic construct
  source 1..75: mol_type = other DNA
agtcaaccggcctgtgggcaccggcccagcaggacgtcaccattaagtcttcggcgtcagtcccagtgactgtta

SEQ ID NO: 855888 - DNA, 75 bp, synthetic construct
  source 1..75: mol_type = other DNA
caaggtctttgccgaatatcccaacgtgatcaacgagattatcaatctctcgttatccaacggtgcgacgctggg

SEQ ID NO: 855889 - DNA, 75 bp, synthetic construct
  source 1..75: mol_type = other DNA
acctcgtacgggcctggcaacaactgaatgcgcaacatggtgtggcgctgaatatctgcgtagcggcagcattac

SEQ ID NO: 855890 - DNA, 75 bp, synthetic construct
  source 1..75: mol_type = other DNA
gaatgcgcaacatggggtggcgctgaatatctgcgtagcggcagcgttacgccgcggtatcgtcgatgaaactga

SEQ ID NO: 855891 - DNA, 75 bp, synthetic construct
  source 1..75: mol_type = other DNA
aatatctgcgtagcggcagcattacgccgtggcgttgttgatgaaacggaggccggaagactggggcttgcttcg

SEQ ID NO: 855892 - DNA, 75 bp, synthetic construct
  source 1..75: mol_type = other DNA
ttaggtatggggtatatgttagccgaaatagaacgaggtgcggatgctgtaggggggataccatctaccttattg

SEQ ID NO: 855893 - DNA, 75 bp, synthetic construct
  source 1..75: mol_type = other DNA
gaatacagtggaagtgtttgcctgccaaacgtagctatttacgcggcaggctaccggaaatcaaaacaactgacg

SEQ ID NO: 855894 - DNA, 75 bp, synthetic construct
  source 1..75: mol_type = other DNA
atgtgaacggcgttccgcttcgtgagagtctcagctacaacgggggcggtgcaggtatttggcgggcaaatggct

SEQ ID NO: 855895 - DNA, 75 bp, synthetic construct
  source 1..75: mol_type = other DNA
aaggtcagcaacatgtcaaagtcagcagcgggtacggtcagccagccggggcgcaatgttcgggcaaaatcaggt

SEQ ID NO: 855896 - DNA, 75 bp, synthetic construct
  source 1..75: mol_type = other DNA
atgcgtgatttcaaagatgagagttttatcagccagttcctgtcaccgaaagtgatgcgtgatttccgcttcttc

SEQ ID NO: 855897 - DNA, 75 bp, synthetic construct
  source 1..75: mol_type = other DNA
gatagcggagtgtatactggcttaactatgcggcatcagtgcagattgtatgaaaagtacaccataaccgatgtg

SEQ ID NO: 855898 - DNA, 75 bp, synthetic construct
  source 1..75: mol_type = other DNA
tataaagaaaaggatatttctaacagggctttaattggaacattcttgactttgttgatgttgctttttggtttt

SEQ ID NO: 855899 - DNA, 75 bp, synthetic construct
  source 1..75: mol_type = other DNA
aggatggtcgccggagttctcagcctggtaccacgaacgccgtgaacagtatctcaaagaggcgcgcgaccatct

SEQ ID NO: 855900 - DNA, 75 bp, synthetic construct
  source 1..75: mol_type = other DNA
taccccacgcaggaagaggcgcagaaggtcgcggacgactacacgcaggcctgcctgccggataacctgccggac

SEQ ID NO: 855901 - DNA, 75 bp, synthetic construct
  source 1..75: mol_type = other DNA
tttcctttagttggggggaaaccatctcctttggcatcgacacttttgagcttggttctgtgcgtggtaacaagt

SEQ ID NO: 855902 - DNA, 75 bp, synthetic construct
  source 1..75: mol_type = other DNA
ttgccaacttaatatttttagaagaagaggctcttatcagtgaggaagtcggaaaattaggtggaaattacacga

SEQ ID NO: 855903 - DNA, 75 bp, synthetic construct
  source 1..75: mol_type = other DNA
aggtaattcatctaaaagtgtatcggccattttagatgttgaatatgaaaactgtaaaagcaaacttaataaata

SEQ ID NO: 855904 - DNA, 75 bp, synthetic construct
  source 1..75: mol_type = other DNA
ttgataacaagcctgataagaaaccgaaactggaagtagccagctggcaagaagaggttgatggtaaacaggtaa

SEQ ID NO: 855905 - DNA, 75 bp, synthetic construct
  source 1..75: mol_type = other DNA
ggctaaagagattgatacggcgatttgtgactcccttgggggctgcaactctcagcgttggttctcgttgacagc

SEQ ID NO: 855906 - DNA, 75 bp, synthetic construct
  source 1..75: mol_type = other DNA
ctgggcggaagccagcgggtaactggtgctacctgtaatggtgaatccagcgatggctttacctttacgccaggc

SEQ ID NO: 855907 - DNA, 75 bp, synthetic construct
  source 1..75: mol_type = other DNA
cctgcctgaaccttaagggtgactggctgaaagaggccggatttgataccgggcggggtgtcacggtgaagattt

SEQ ID NO: 855908 - DNA, 75 bp, synthetic construct
  source 1..75: mol_type = other DNA
tgcgggaggaacttcatcaggctaaacaggcggttaaaggaatgaaggttgggatatccggcgtattgaaagaag

SEQ ID NO: 855909 - DNA, 75 bp, synthetic construct
  source 1..75: mol_type = other DNA
cacaatcgaaaacacagagcgttatgctgagtttaaaagtggcaacttaagtgcgcgtgtcagcaaaggtgagtt

SEQ ID NO: 855910 - DNA, 75 bp, synthetic construct
  source 1..75: mol_type = other DNA
gctgtctcctttgccgtgagccggcccgccgcatcacgtgccagccggtggcggatttcaccgccccggtcccct

SEQ ID NO: 855911 - DNA, 75 bp, synthetic construct
  source 1..75: mol_type = other DNA
tggtttcgcgagcgacttatcgcccaccgtttagcgtcggtcaatctgtcacgtttaccttacgagcctaaactt

SEQ ID NO: 855912 - DNA, 75 bp, synthetic construct
  source 1..75: mol_type = other DNA
cggtgatcgctgaagcggttgaacgtgaacagcctgaacatttgcgcagctggtttcgcgagcggcttatcgccc

SEQ ID NO: 855913 - DNA, 75 bp, synthetic construct
  source 1..75: mol_type = other DNA
ctctccaacactaatggctacagggttatctaacgctgcaaccggaggtactaacgctacaatggcactggttgc

SEQ ID NO: 855914 - DNA, 75 bp, synthetic construct
  source 1..75: mol_type = other DNA
ttctccaactctaacttcaactggtttgtctaatgctgccgttaatggtactaacgccactatgattttaactgc

SEQ ID NO: 855915 - DNA, 75 bp, synthetic construct
  source 1..75: mol_type = other DNA
tcaactataacgtagcaaatggtattaaatcttttgactttgcagctcaactaaaacgccctgcagccggcgcaa

SEQ ID NO: 855916 - DNA, 75 bp, synthetic construct
  source 1..75: mol_type = other DNA
atgaaaaaagtgacccggtacgctgccattggcgttatttcagcttcattgattggtgcagttgtgtgtggcctt

SEQ ID NO: 855917 - DNA, 75 bp, synthetic construct
  source 1..75: mol_type = other DNA
ttgattatagcgtaacaggtggaatcaaatcatttgattattctgctgtgcttgctaaacctgctggagctgcag

SEQ ID NO: 855918 - DNA, 75 bp, synthetic construct
  source 1..75: mol_type = other DNA
caattctggcagttctgggtgtagcgtctaatgccatggctgcgccaaacacggggaccgtaaactttacggggg

SEQ ID NO: 855919 - DNA, 75 bp, synthetic construct
  source 1..75: mol_type = other DNA
catggcgacgacccgctgatgctggtcctcgccgccgaccatatcatcaataaccagccggtcttccacgacgcc

SEQ ID NO: 855920 - DNA, 75 bp, synthetic construct
  source 1..75: mol_type = other DNA
gaagccgccaacaatatggaagagctggaggaaacggcaaagctgatttttattctcggtgaccgcccgatccgt

SEQ ID NO: 855921 - DNA, 75 bp, synthetic construct
  source 1..75: mol_type = other DNA
cctgactatcgcggcagataatgccatcttcggccagactggcccgaaagtcggttccttcgacggcggctgggg

SEQ ID NO: 855922 - DNA, 75 bp, synthetic construct
  source 1..75: mol_type = other DNA
accgtgagatttaccgtccctggggccgctgcgacgtggtggtccagaccccgcgcttcaacgtcaaccgcatta

SEQ ID NO: 855923 - DNA, 75 bp, synthetic construct
  source 1..75: mol_type = other DNA
cgcgccgaggcttacctcgcctccggggagtactactggaacagcggcatgtttatgttccgcgccaagaaatac

SEQ ID NO: 855924 - DNA, 75 bp, synthetic construct
  source 1..75: mol_type = other DNA
accgtgagatttaccgcccctggggccgctgcgacgtggtggtccagaccccgcgcttcaacgtcaaccgcatca

SEQ ID NO: 855925 - DNA, 75 bp, synthetic construct
  source 1..75: mol_type = other DNA
agcttcataaaaactgttcaagctatggtgccagccatttacccaatttggagtgggaattaaactggcagcaaa

SEQ ID NO: 855926 - DNA, 75 bp, synthetic construct
  source 1..75: mol_type = other DNA
ggctgtggaactcagtaaaggtcgccgggatttccgcgattggtatcgtggcgctctccaccacctgcgcctacg

SEQ ID NO: 855927 - DNA, 75 bp, synthetic construct
  source 1..75: mol_type = other DNA
tcgtcgctatctcgctgcgtcagggaaacttcgcgaccggtagcctgatcccggagcaaatctcctgggatcact

SEQ ID NO: 855928 - DNA, 75 bp, synthetic construct
  source 1..75: mol_type = other DNA
aacttaccgccgtgaaggctacgaatatgattgcgttatgcctgtttatcagttcaaccgtgatttttctctggt

SEQ ID NO: 855929 - DNA, 75 bp, synthetic construct
  source 1..75: mol_type = other DNA
tactgacagaccgcggcgcacaactcgaagccgctgcgctggcgtcaggcgtgccggtggtgctgaacaaatttg

SEQ ID NO: 855930 - DNA, 75 bp, synthetic construct
  source 1..75: mol_type = other DNA
gcagactgcgcacagtaagcagtccaccagccggaagaaatctcacgcaaatattcaggacatgaagaacatatc

SEQ ID NO: 855931 - DNA, 75 bp, synthetic construct
  source 1..75: mol_type = other DNA
acggcggcgttatctttgcttacctgggcgggattgcgctgcacgtctggacgattaaaggttatttcgaaacca

SEQ ID NO: 855932 - DNA, 75 bp, synthetic construct
  source 1..75: mol_type = other DNA
aaatgcttgaacaactcgaccagaaaggcatccgcgtcaccaacggggcgagacggctttatgtcgcgttgaaca

SEQ ID NO: 855933 - DNA, 75 bp, synthetic construct
  source 1..75: mol_type = other DNA
atgctgctttccgtgccgttgacaattattgtcaaaattgcgcttgaacaaacagcgggaggtcaaagcatcgcc

SEQ ID NO: 855934 - DNA, 75 bp, synthetic construct
  source 1..75: mol_type = other DNA
agaacctctggttccatatctccatgagatatttgtatttctacttgtccataagaagttagctttgagtagaaa

SEQ ID NO: 855935 - DNA, 75 bp, synthetic construct
  source 1..75: mol_type = other DNA
gctgaccgtcgggctggtctctttcgccatgggcgccgaatccggtggccagtggggcaccatcggcgccgggac

SEQ ID NO: 855936 - DNA, 75 bp, synthetic construct
  source 1..75: mol_type = other DNA
ctatttctcaataagtatgagaaaattcattaaagtaaataataccgtgtcacatttgacccggtattatgtaag

SEQ ID NO: 855937 - DNA, 75 bp, synthetic construct
  source 1..75: mol_type = other DNA
tggaggaaacggccaggctaatttttattctcagcgaccgcccgatccgctatctgaccgcagatgaaattgcgg

SEQ ID NO: 855938 - DNA, 75 bp, synthetic construct
  source 1..75: mol_type = other DNA
gtgccgcgaaatgctgcaaaacagcccgatggcgctgcgctgcctgaaagctgcactgaacgccgactgtgacgg

SEQ ID NO: 855939 - DNA, 75 bp, synthetic construct
  source 1..75: mol_type = other DNA
ggaaatgggcgcagacgattacgtcaccaaaccgctggaactgcgcgaactggtggtacgagtgaaaaacttgct

SEQ ID NO: 855940 - DNA, 75 bp, synthetic construct
  source 1..75: mol_type = other DNA
atcggattgaccgtattgttgggctggaaatgggcgcagacgattacgtcaccaaaccgctggaactgcgcgaac

SEQ ID NO: 855941 - DNA, 75 bp, synthetic construct
  source 1..75: mol_type = other DNA
tcctaccgttgacggtaaatttgtttccgcatttagcccggaaggattgaacacgggtttttgtggagcgtggaa

SEQ ID NO: 855942 - DNA, 75 bp, synthetic construct
  source 1..75: mol_type = other DNA
tactgcggaatccgcggcaacgcgcgccgagacagcagcaaaacgggcagaggatattgcatccgccgtggcgct

SEQ ID NO: 855943 - DNA, 75 bp, synthetic construct
  source 1..75: mol_type = other DNA
ctgctggatattaatttgcccgatgaaaatggtctgatgttaacccgcgccctgcgggaacgttcaacagtgggc

SEQ ID NO: 855944 - DNA, 75 bp, synthetic construct
  source 1..75: mol_type = other DNA
gtgttaattcgtcgtttacgccataaactcagtgcggatttactggtgacacaacatggcgaaggttatttctta

SEQ ID NO: 855945 - DNA, 75 bp, synthetic construct
  source 1..75: mol_type = other DNA
aagctaatggatgttcagatgcagcaaatgtcgcttcaggagctgctgattgcggctaaggagaaaattgttgaa

SEQ ID NO: 855946 - DNA, 75 bp, synthetic construct
  source 1..75: mol_type = other DNA
ttttggtttgttgattatcggcgtgttgttattgctggtgctggtggagttgcgacgttttcgccagacgccgcc

SEQ ID NO: 855947 - DNA, 75 bp, synthetic construct
  source 1..75: mol_type = other DNA
gtttgctcggcgtcgcggtgccggtgcagatccagatgatgacgcattctacctggcaggtggggctttcggtga

SEQ ID NO: 855948 - DNA, 75 bp, synthetic construct
  source 1..75: mol_type = other DNA
gacggaagcggcgcgtgaattacttcctgatgccgattatgtctatgttgtggacttcactgataaagaagtgac

SEQ ID NO: 855949 - DNA, 75 bp, synthetic construct
  source 1..75: mol_type = other DNA
tcacggcgaaattgttgctaacgcattaagcggcgatgcgctcgatgcaatgtttaaatccctgggcaaagccgc

SEQ ID NO: 855950 - DNA, 75 bp, synthetic construct
  source 1..75: mol_type = other DNA
ggtactctggtctatcgcagcaagctttctgcagatactgaccaatctccggtttatatttgtcccaattgctac

SEQ ID NO: 855951 - DNA, 75 bp, synthetic construct
  source 1..75: mol_type = other DNA
ggcggatacatcctctccgaagataattttcctgcacatgatgggttctcatccaaatccgtgtgacagccttaa

SEQ ID NO: 855952 - DNA, 75 bp, synthetic construct
  source 1..75: mol_type = other DNA
ataaaattaattttagctcaagagttggaaaactagaatcagggcagactactgaaattattgaagcaagaaaat

SEQ ID NO: 855953 - DNA, 75 bp, synthetic construct
  source 1..75: mol_type = other DNA
agaaatcgccgcccagaataaacgccagttaaaagccagacaaacttccggcgtgcaacaatttctcgccaaatt

SEQ ID NO: 855954 - DNA, 75 bp, synthetic construct
  source 1..75: mol_type = other DNA
cgcttcctacatggcgcgcattgttgggcagaaaaaagcacgtgaaatctggttcctgtgccgtcagtacgacgc

SEQ ID NO: 855955 - DNA, 75 bp, synthetic construct
  source 1..75: mol_type = other DNA
tccggcgtacatcacttgaacgtgctggacttccagcgtcagatccgtacctgcccgaaaccggttgtcgcgatg

SEQ ID NO: 855956 - DNA, 75 bp, synthetic construct
  source 1..75: mol_type = other DNA
gatggattatctggcaaacggtattcccgaacgtccggcacgcttcataaacgcattacaaaattattatcacac

SEQ ID NO: 855957 - DNA, 75 bp, synthetic construct
  source 1..75: mol_type = other DNA
atggcgcgtgcaggtttaggtcacgaacataaaccggttggttcgttcctgtttgccggcctaccggggtcggga

SEQ ID NO: 855958 - DNA, 75 bp, synthetic construct
  source 1..75: mol_type = other DNA
gtcgatgcggctaacctgatcaaaccgttgctctccagcggtaaaattcgcgtaattggttcgacaacctatcag

SEQ ID NO: 855959 - DNA, 75 bp, synthetic construct
  source 1..75: mol_type = other DNA
ataaagaccttataaaccacgtcactcacggcatggtgattaaatcgctggcgacacagcaacttagcccctttg

SEQ ID NO: 855960 - DNA, 75 bp, synthetic construct
  source 1..75: mol_type = other DNA
ttaataggctctggaaaacttccacagcctgataagtttacttactattacccagatctttctttaacaagaata

SEQ ID NO: 855961 - DNA, 75 bp, synthetic construct
  source 1..75: mol_type = other DNA
tggtcttatccaccaggataacagcaccgatgcgatggaagagatcaagaagatctttacgccggagtttcgtaa

SEQ ID NO: 855962 - DNA, 75 bp, synthetic construct
  source 1..75: mol_type = other DNA
ggcctgaaaccgaagtatgaagcgcaccacgacgtgcgttataccgcaaaagcggtgcgtgcagcggtagagctg

SEQ ID NO: 855963 - DNA, 75 bp, synthetic construct
  source 1..75: mol_type = other DNA
cccgcgcacgtaatcatattcatgttctggaagagaacatggcgttgttgatggaacaggctatcgccaacgaag

SEQ ID NO: 855964 - DNA, 75 bp, synthetic construct
  source 1..75: mol_type = other DNA
gggacgagctgttgaaagtgcgtggcgaagtgaacaaagtcattgagcaagcgcgtgccgataagaaagtgggtg

SEQ ID NO: 855965 - DNA, 75 bp, synthetic construct
  source 1..75: mol_type = other DNA
aaactgaccgcgctgggtgatgaattacgatttgtcctgttgacctctggcgttgccgttgcagactataacgac

SEQ ID NO: 855966 - DNA, 75 bp, synthetic construct
  source 1..75: mol_type = other DNA
cggaccggagctgctggtggtgctacctgaagcgaaagcggtgggatcggtggcgatgtcgatgctgggaagcga

SEQ ID NO: 855967 - DNA, 75 bp, synthetic construct
  source 1..75: mol_type = other DNA
tttccggatcgctggcgcttaggtgcgccgtcgaaccacactcatctggcattaagccgtcagtctttcgaaccg

SEQ ID NO: 855968 - DNA, 75 bp, synthetic construct
  source 1..75: mol_type = other DNA
gcagcgcactcttactgccgccagcagtctcgacgacatgctaatgcgctttcatcggtgggcacgcgatcttgg

SEQ ID NO: 855969 - DNA, 75 bp, synthetic construct
  source 1..75: mol_type = other DNA
aactaaaacacagtgggcagaaataaacagggctattgagtacggtaaatctcagggcgtcaaagtgacggtaac

SEQ ID NO: 855970 - DNA, 75 bp, synthetic construct
  source 1..75: mol_type = other DNA
actcggcaccgcttatggtcacatcgcccttagcgttgataacgccgctgaagcgtgcgaaaaaatccgtcagaa

SEQ ID NO: 855971 - DNA, 75 bp, synthetic construct
  source 1..75: mol_type = other DNA
atgcgtcttcttcataccatgctgcgcgttggcgatctgcaacgctccatcgatttttataccaaagtgctgggc

SEQ ID NO: 855972 - DNA, 75 bp, synthetic construct
  source 1..75: mol_type = other DNA
ttccgttgttgacgtgcgtccggaatttgccggtcacgcagcggacatgtatctggaaggttctgaccagcaccg

SEQ ID NO: 855973 - DNA, 75 bp, synthetic construct
  source 1..75: mol_type = other DNA
ttctacctcgacatcatcaaagaccgtcagtacaccgccaaagcggacagcgtggcgcgtcgtagctgccagact

SEQ ID NO: 855974 - DNA, 75 bp, synthetic construct
  source 1..75: mol_type = other DNA
gggatcttgatgcgaaagagatcctcggcgatgaagctgatcagtacgtgaaagtgccggacacattggatgtat

SEQ ID NO: 855975 - DNA, 75 bp, synthetic construct
  source 1..75: mol_type = other DNA
aaacttggaaggaagttgttgaaggatttaatttgaaaccaaagatatattattcgcatcacgacaaacccaaaa

SEQ ID NO: 855976 - DNA, 75 bp, synthetic construct
  source 1..75: mol_type = other DNA
tgatacggctatttcttacgatgtaattccatttattaagcctctcgatatcagttcagaagagtcaaagtcaca

SEQ ID NO: 855977 - DNA, 75 bp, synthetic construct
  source 1..75: mol_type = other DNA
tgatacagctatttcttacgatgtaattccatttattaaatttcaagatatcagtagagaagaatcaaaagataa

SEQ ID NO: 855978 - DNA, 75 bp, synthetic construct
  source 1..75: mol_type = other DNA
gcttctgaagaagataagcggtacatccttcaaaactgcctggtactacgttcattttaccgcagagaaaaaggt

SEQ ID NO: 855979 - DNA, 75 bp, synthetic construct
  source 1..75: mol_type = other DNA
gacgggcagtaaggtgttatcgcttctggaaagcagtaaacgatacctctggtacggtaatgttgccactgcact

SEQ ID NO: 855980 - DNA, 75 bp, synthetic construct
  source 1..75: mol_type = other DNA
gtccagccagacggcagcgaaaaccagcgaaacgaatgccaaagccagtgaaactgcggcaaaaaacagccaggt

SEQ ID NO: 855981 - DNA, 75 bp, synthetic construct
  source 1..75: mol_type = other DNA
aagcggtggtatatctgtaacatcatcaacagatgaatttgagtttaaatatggacgtttcacagtaggaagcga

SEQ ID NO: 855982 - DNA, 75 bp, synthetic construct
  source 1..75: mol_type = other DNA
tgctccggatgcgagtgagcggagggtggctgaactggaacaggcctgcgctgccgcgggcattcgtatcaaagg

SEQ ID NO: 855983 - DNA, 75 bp, synthetic construct
  source 1..75: mol_type = other DNA
agaaaaaggaaaagaaaaagaccaaaaaacggttgattaaaaatattgaatttccttatcgagtaatttcaggag

SEQ ID NO: 855984 - DNA, 75 bp, synthetic construct
  source 1..75: mol_type = other DNA
acttcttccttaagaggggaggatggagtcgatttaactctgcttttatgaagtatttgtctacttctttagcca

SEQ ID NO: 855985 - DNA, 75 bp, synthetic construct
  source 1..75: mol_type = other DNA
aaaaagatgttgaaaacctgatagaaagtaaaacgtctgatgatgttattatttttctttccggccccacatcgc

SEQ ID NO: 855986 - DNA, 75 bp, synthetic construct
  source 1..75: mol_type = other DNA
atcgaagcggactgaatccagaaaagatcaacataatccgttatgcggacgatttcgtgatcacgggaataagcc

SEQ ID NO: 855987 - DNA, 75 bp, synthetic construct
  source 1..75: mol_type = other DNA
ctacgatgctggaatccatacaaggttactctcgcctaagaaatctgtggctccgacagggaggccagtgccccg

SEQ ID NO: 855988 - DNA, 75 bp, synthetic construct
  source 1..75: mol_type = other DNA
tacagaaaaataaaagaaattttaccacaagtgaataatacaggcgaaattgtttcagagaggagtggatgtgcg

SEQ ID NO: 855989 - DNA, 75 bp, synthetic construct
  source 1..75: mol_type = other DNA
gaagtggggaaacgtcaattagacgaaatcaatcggatccgctacgaactggaattaatggcagttactctggct

SEQ ID NO: 855990 - DNA, 75 bp, synthetic construct
  source 1..75: mol_type = other DNA
tatctctatgaagcgattaatccagcggaattacgggagcatatagaaaactatcatctgttactcgctgcgtaa

SEQ ID NO: 855991 - DNA, 75 bp, synthetic construct
  source 1..75: mol_type = other DNA
gcagttgctctggctgttgaaaacctcaccccgcaagacctggcggaactccaggaattgctcgagaaattacag

SEQ ID NO: 855992 - DNA, 75 bp, synthetic construct
  source 1..75: mol_type = other DNA
atgctgggttatgccgatatctcaccgactaacatcccgctgctgattaccgccggaagttctgctctgctcggt

SEQ ID NO: 855993 - DNA, 75 bp, synthetic construct
  source 1..75: mol_type = other DNA
atgaaaacaacagcaaagctgtcgttcatgatgtttgttgaatggtttatctggggcgcgtggtttgtgccattg

SEQ ID NO: 855994 - DNA, 75 bp, synthetic construct
  source 1..75: mol_type = other DNA
agctggttaatcagtacatcagcgaactgcaaaaaacattcagcgactgcggaaaatcaagcgatcgtttctttt

SEQ ID NO: 855995 - DNA, 75 bp, synthetic construct
  source 1..75: mol_type = other DNA
ggcaaacgtattgggatggaaaacggcaccacgcaccagaaatatattcaggatcagcacccggaagtgaaaact

SEQ ID NO: 855996 - DNA, 75 bp, synthetic construct
  source 1..75: mol_type = other DNA
cctgcatttatgagccattccgcaatgacccgcgcctggttgtgctggcttccgctgaccttatcggcaacgacg

SEQ ID NO: 855997 - DNA, 75 bp, synthetic construct
  source 1..75: mol_type = other DNA
atttactggacaattatacggcggggctggcgcagcattttggcacgcaaaaccctggccgttatttttcgctaa

SEQ ID NO: 855998 - DNA, 75 bp, synthetic construct
  source 1..75: mol_type = other DNA
acaattaacggtgctggccggttctgatctgattgccgctgaacagctgcgcatggcaaaccagaccgataagcc

SEQ ID NO: 855999 - DNA, 75 bp, synthetic construct
  source 1..75: mol_type = other DNA
gttcttcactggcaaacagcgtgatgttgctaccggtggtcgtgttgaccgcttcaacaagcgtttcaacatccc

SEQ ID NO: 856000 - DNA, 75 bp, synthetic construct
  source 1..75: mol_type = other DNA
ttctgccgcagagaaaatcaatttcggcgtctctgccacttatccgccattcgaatcgatggatgcaaataacca

SEQ ID NO: 856001 - DNA, 75 bp, synthetic construct
  source 1..75: mol_type = other DNA
ttcacggcgtaagttacgatttttactacgttaccgcttacatctatgtcgataaaaagcccccgtgcatatgcg

SEQ ID NO: 856002 - DNA, 75 bp, synthetic construct
  source 1..75: mol_type = other DNA
ctactgccgtagtgctcggtttcttgctctactggggggggattcgcctgaatcttggcgcatttttcaaatgga

SEQ ID NO: 856003 - DNA, 75 bp, synthetic construct
  source 1..75: mol_type = other DNA
actgctggggcgtaccaaatccggcactctggtactgactgaggataacaccgggttacgttttgaactgacacc

SEQ ID NO: 856004 - DNA, 75 bp, synthetic construct
  source 1..75: mol_type = other DNA
cccaccgttcgttgtttgcacagcaccctgaattacgtccgacaggaaataatcgtcatcgctggtctgagctgg

SEQ ID NO: 856005 - DNA, 75 bp, synthetic construct
  source 1..75: mol_type = other DNA
atgtttattcattttatcagccggcaggggcgaaaccttctggtgaatataaaagatatcagttttgttcttcag

SEQ ID NO: 856006 - DNA, 75 bp, synthetic construct
  source 1..75: mol_type = other DNA
aggggcgaaatcttctgataaatataaaagacatcagtttcgttcttcaaaagggggttttttgtgaaattcata

SEQ ID NO: 856007 - DNA, 75 bp, synthetic construct
  source 1..75: mol_type = other DNA
ggaaccactttcaggaaatcgccttcgatatgagcgcggtgctgtcaactcactcgctgtttggcacgctgatgg

SEQ ID NO: 856008 - DNA, 75 bp, synthetic construct
  source 1..75: mol_type = other DNA
tctggcatgtggattcttgccgcaaatgctgggttatgccgatatctctccgactaacatcccgctgctgattac

SEQ ID NO: 856009 - DNA, 75 bp, synthetic construct
  source 1..75: mol_type = other DNA
tcatgatgtttgttgaatggtttatctggggcgcgtggtttgtgccattgtggctgtggttaagtaaaagcggtt

SEQ ID NO: 856010 - DNA, 75 bp, synthetic construct
  source 1..75: mol_type = other DNA
tgctggcattgccgtttttcaccaaacgctttggtatcaaaaaggtattattacttggtctggtcaccgctgcga

SEQ ID NO: 856011 - DNA, 75 bp, synthetic construct
  source 1..75: mol_type = other DNA
ctgaattatggaaagattggatagaattcagaaagacaagtaaaccaattagcaccagaacccttgcagattatg

SEQ ID NO: 856012 - DNA, 75 bp, synthetic construct
  source 1..75: mol_type = other DNA
tgccatgggattagctcaagctcgtaaagctcatgcggatgcaattgaattagtaagaaaaggtatagatcctcg

SEQ ID NO: 856013 - DNA, 75 bp, synthetic construct
  source 1..75: mol_type = other DNA
gtattaacctgcaatcgggtaacgatgcttgcgtcgccatggccgattttgccgctggtagccaggacgcttttg

SEQ ID NO: 856014 - DNA, 75 bp, synthetic construct
  source 1..75: mol_type = other DNA
ctggccagaaaaacggaaccggtggcacctgctgcccccgtgccgacaacaccagacaaaccggaaaggatcgtc

SEQ ID NO: 856015 - DNA, 75 bp, synthetic construct
  source 1..75: mol_type = other DNA
ttcgccaactgtggcggttcaggaatgacactgggattactactggccatctttattgcatcaaagcgggcagaa

SEQ ID NO: 856016 - DNA, 75 bp, synthetic construct
  source 1..75: mol_type = other DNA
tggtatccagccctggttccggtaaaaccacgctgctgactgaaaccttaatgcgcctgaaagacagcgttccat

SEQ ID NO: 856017 - DNA, 75 bp, synthetic construct
  source 1..75: mol_type = other DNA
agatcggcagaccttctggccattctcaaggcgctgaaggccaaaggcgttcatgccaaactgctctactcccga

SEQ ID NO: 856018 - DNA, 75 bp, synthetic construct
  source 1..75: mol_type = other DNA
caccgaggcaattcggcacgtattgcagccgctgccgctttccagcccggcactgttaatcacccagcatatgcc

SEQ ID NO: 856019 - DNA, 75 bp, synthetic construct
  source 1..75: mol_type = other DNA
aactgaggcaattcgtcacgtactgcaaccgttgccgctttccagcccggcattgttaattacccaacatatgcc

SEQ ID NO: 856020 - DNA, 75 bp, synthetic construct
  source 1..75: mol_type = other DNA
gtgaatattccttatggttcacttgctaccgcgatgacccaacaaccacaatcccgcgcccgtctgggcgcggct

SEQ ID NO: 856021 - DNA, 75 bp, synthetic construct
  source 1..75: mol_type = other DNA
ggtgcaacggcgaccagctttctctttatgttgttgctgtttttacgcatgagcaccaccgggcttactgcgcag

SEQ ID NO: 856022 - DNA, 75 bp, synthetic construct
  source 1..75: mol_type = other DNA
gcctggcgaggtaatttccgccgtttgctggcgcttaaccgcgatatcatgctgcgctcgctgttgctgcaactc

SEQ ID NO: 856023 - DNA, 75 bp, synthetic construct
  source 1..75: mol_type = other DNA
aagtcaatccagaaattgaaatcatccttatttccgccaccagcggcgaagggatggaccagtggctgaactggc

SEQ ID NO: 856024 - DNA, 75 bp, synthetic construct
  source 1..75: mol_type = other DNA
tccattggcttaaaagcaaaatatgtagaaaaacatttttccagattgtcaataatttctttacctgcgttgata

SEQ ID NO: 856025 - DNA, 75 bp, synthetic construct
  source 1..75: mol_type = other DNA
aacatgccgtgctcttgttgcgtgcctaaacaagttcggcgcaaaagtcagtcttgatgacgtgttcccgccgga

SEQ ID NO: 856026 - DNA, 75 bp, synthetic construct
  source 1..75: mol_type = other DNA
ctttgccggtgcgccttcgctgacggtcgatgcagtcattgtcccttgcggcaatattgcggatatcgctaacaa

SEQ ID NO: 856027 - DNA, 75 bp, synthetic construct
  source 1..75: mol_type = other DNA
gagcaggcgacgcgctttatggcttcgttaaccggcttggaagagtacctggtggcggaagttagtccgatcgaa

SEQ ID NO: 856028 - DNA, 75 bp, synthetic construct
  source 1..75: mol_type = other DNA
tgatgctgcttgatgaggtgcatacctattccggcgtcagcggtgcacagaacggcatgctgatccgccgctggc

SEQ ID NO: 856029 - DNA, 75 bp, synthetic construct
  source 1..75: mol_type = other DNA
aagatgcttggtgcaggcatcgcaatggcatggcttgtctgtacattccctgcccgacagagagttgtcgcggta

SEQ ID NO: 856030 - DNA, 75 bp, synthetic construct
  source 1..75: mol_type = other DNA
gactaattgggagaaggtatggagagacagaggatttctaacatcacctaaagatgatgcatatgagagtgattt

SEQ ID NO: 856031 - DNA, 75 bp, synthetic construct
  source 1..75: mol_type = other DNA
cagacacaggttactatctcattaacagtgcctttggtaacgggagtacgctggggtatttgcccctaaatttct

SEQ ID NO: 856032 - DNA, 75 bp, synthetic construct
  source 1..75: mol_type = other DNA
atccaccattgacaattatatatcaaaaatacaggataatcataatacgccatggatattaaacaatgaaaacgt

SEQ ID NO: 856033 - DNA, 75 bp, synthetic construct
  source 1..75: mol_type = other DNA
ggcaaaccgctggataaaacccgcgctaattccctgccccgccactttatcactcagcatctacccaccgattaa

SEQ ID NO: 856034 - DNA, 75 bp, synthetic construct
  source 1..75: mol_type = other DNA
gcatcagccgatgctctatcgcttgcagcaggtcagtagccgccgcttgctgtcgaatctggtgagcgaatttcg

SEQ ID NO: 856035 - DNA, 75 bp, synthetic construct
  source 1..75: mol_type = other DNA
taccgggatcatcagccactatttcagggacaaaaatggcctgctggaagcgaccatgcgcgatatcaccagcca

SEQ ID NO: 856036 - DNA, 75 bp, synthetic construct
  source 1..75: mol_type = other DNA
aacgttgcggcagacgcgcaaattgaacactgaactggcaaagaaaggtgtgcgcaaagtgcgtatcgccgcatt

SEQ ID NO: 856037 - DNA, 75 bp, synthetic construct
  source 1..75: mol_type = other DNA
ccgccgacgacttcggcaccggctattcctgcctgcaacatctgaaatgctgccccatcaccacattgaaaatcg

SEQ ID NO: 856038 - DNA, 75 bp, synthetic construct
  source 1..75: mol_type = other DNA
ggtgctggccgatatggccctgcccgccgagcttctggagatcgaactgaccgaatcggtcgcattcggcaatcc

SEQ ID NO: 856039 - DNA, 75 bp, synthetic construct
  source 1..75: mol_type = other DNA
tatctccggcgaaatgctgaaaaaagcctggcgaggtaatttccgccgtttgctggcgcttaaccgcgatatcat

SEQ ID NO: 856040 - DNA, 75 bp, synthetic construct
  source 1..75: mol_type = other DNA
gccggggaactggtttggtgaaataggtatgattgataaatgtccgcgcacacacgatgccagagcgacgggtaa

SEQ ID NO: 856041 - DNA, 75 bp, synthetic construct
  source 1..75: mol_type = other DNA
atggaatttcaatgcatgtggatcgtcgtaatgatagtgtaaatattgaaaatagtgcaataattgttaaccgta

SEQ ID NO: 856042 - DNA, 75 bp, synthetic construct
  source 1..75: mol_type = other DNA
ttctccggtgcggtaaccaatacgccagcactgggggcagggcagcagatcttgcgcgacctgggtacaccaatg

SEQ ID NO: 856043 - DNA, 75 bp, synthetic construct
  source 1..75: mol_type = other DNA
tttttcattcagtcaaaaggttgctttttcaaaactggaacaagattttgaaaatataatgataatatatcggga

SEQ ID NO: 856044 - DNA, 75 bp, synthetic construct
  source 1..75: mol_type = other DNA
ctaatcctgaacaatataagaaagatgaggttccaatagttaatactaagcagcatccctatttagataatgtca

SEQ ID NO: 856045 - DNA, 75 bp, synthetic construct
  source 1..75: mol_type = other DNA
gtgattatcatcccggcaattttgctgctgattggtgtcttcttcctgccagacagcccacgttggtttgccgcc

SEQ ID NO: 856046 - DNA, 75 bp, synthetic construct
  source 1..75: mol_type = other DNA
gctattaacagcaaactttgaaatcgatccaggtagtggatggatatattttcaggcaacactgaaatgtctgcc

SEQ ID NO: 856047 - DNA, 75 bp, synthetic construct
  source 1..75: mol_type = other DNA
ctgcaccgcgtgtcattgattcagaaaatcaccagtccggaggcccatttattatggggtttggttcttctggaa

SEQ ID NO: 856048 - DNA, 75 bp, synthetic construct
  source 1..75: mol_type = other DNA
tcctgcttcagtccctccgcttcctgatatctggctacccttgaatgattctctggaagcgataacagggtatgc

SEQ ID NO: 856049 - DNA, 75 bp, synthetic construct
  source 1..75: mol_type = other DNA
cgtcggccattttgtttctcaggcggggatgacattaagtagcgatatgctgcatgttattcaggaatttggcct

SEQ ID NO: 856050 - DNA, 75 bp, synthetic construct
  source 1..75: mol_type = other DNA
ggacaaattcgccagttggtatcccggtagtacgatagatgctctgagtagagggacgttatccgcgatggcagc

SEQ ID NO: 856051 - DNA, 75 bp, synthetic construct
  source 1..75: mol_type = other DNA
gagatcgaaaagtgcttgactgatattattgaaaataaaaatgcagattatttttttattgactatatttcaggt

SEQ ID NO: 856052 - DNA, 75 bp, synthetic construct
  source 1..75: mol_type = other DNA
tgcgaaggcacgggaggggcactccatcgaacaactctgtgcaacagctgcactggcgggggaagcgataaaaac

SEQ ID NO: 856053 - DNA, 75 bp, synthetic construct
  source 1..75: mol_type = other DNA
atgtatgttttcccggatatcggggatcgccttatcgaggaaatcgaaactgaggatttgctggtcacgctgcgc

SEQ ID NO: 856054 - DNA, 75 bp, synthetic construct
  source 1..75: mol_type = other DNA
gctcaaaactctggtatatgaagtaccgcatcgacgggaaagagaaaaaactggcctttggcccctacccggaga

SEQ ID NO: 856055 - DNA, 75 bp, synthetic construct
  source 1..75: mol_type = other DNA
tttccgggcgatggcatgcagcgcgctgagtgagtcgggactgtggagcaaagaagccattgaaaagcagatgag

SEQ ID NO: 856056 - DNA, 75 bp, synthetic construct
  source 1..75: mol_type = other DNA
tgctggcgcttaaccgcgatatcatgctgcgctcgctgttgttgcaactctgtttcggcgcgatcaccgtacttg

SEQ ID NO: 856057 - DNA, 75 bp, synthetic construct
  source 1..75: mol_type = other DNA
cgctgttaacgcggttctgatgacgctactcacctttaccgcctatgcgctggatggttttgcctacgcggttga

SEQ ID NO: 856058 - DNA, 75 bp, synthetic construct
  source 1..75: mol_type = other DNA
agtggtacagcacttacacctgtggagtttaaatatcttcagcttttagctggggaacatccagaatacgttctg

SEQ ID NO: 856059 - DNA, 75 bp, synthetic construct
  source 1..75: mol_type = other DNA
agaggatttgctggtcacgctgcgtaaggtggagagcaaaggctttctggagatcaccgcccggctgaaaaacta

SEQ ID NO: 856060 - DNA, 75 bp, synthetic construct
  source 1..75: mol_type = other DNA
aaatatgcgctcaaactgtcgctaatgttttttgtgcgctccagcgaactacgttttgcccgctggagtgaaatc

SEQ ID NO: 856061 - DNA, 75 bp, synthetic construct
  source 1..75: mol_type = other DNA
cttccgggcgatggcctgtagtgcgctcagtgagtcagggttgtggagcaaagaagcgattgaaaagcagatgag

SEQ ID NO: 856062 - DNA, 75 bp, synthetic construct
  source 1..75: mol_type = other DNA
ccggcgaatacgaccaggacaagtgcatgagcgacaacaccgtcaacaaggcgctgcgcgtgatgggttacgaca

SEQ ID NO: 856063 - DNA, 75 bp, synthetic construct
  source 1..75: mol_type = other DNA
aaatacgcgcttaagctgtcgctgattttttttgtgcgctccagcgaactacgctttgcgcgctggagtgagatc

SEQ ID NO: 856064 - DNA, 75 bp, synthetic construct
  source 1..75: mol_type = other DNA
tctccctgttgcaggctcgctgcctgcgcgaaacagcacgcaataacattcatgcaggcgtcgatccggctgcgg

SEQ ID NO: 856065 - DNA, 75 bp, synthetic construct
  source 1..75: mol_type = other DNA
cattactatggctaaaattgttaatgaaataaaatcatcaaactatgtcgctggttcgaatggttggaggataac

SEQ ID NO: 856066 - DNA, 75 bp, synthetic construct
  source 1..75: mol_type = other DNA
atgttgatgcgacgtactccatcaagctggcaaccgacaacaacggcatgaaatacgcaacaggtatgtcacttg

SEQ ID NO: 856067 - DNA, 75 bp, synthetic construct
  source 1..75: mol_type = other DNA
aaatgaccttaaaaacgctactgacaacctaaaaactgcaactgacaacctgacaaacatcactgacgaattgag

SEQ ID NO: 856068 - DNA, 75 bp, synthetic construct
  source 1..75: mol_type = other DNA
tggtaacgctgaatttaataacgtaacagtacgcggcacggtatacgctaattctggggtgtttaatggtactat

SEQ ID NO: 856069 - DNA, 75 bp, synthetic construct
  source 1..75: mol_type = other DNA
gtcaattgaggggcaatcagtatcaattgaggaaaacaaaaccgctatcaccagccttgaatcagacatgtcggc

SEQ ID NO: 856070 - DNA, 75 bp, synthetic construct
  source 1..75: mol_type = other DNA
acgccagtagcggtaaattttctggttcacttgaggctaaaacctttataggtgacgttgcgaacatgtacacag

SEQ ID NO: 856071 - DNA, 75 bp, synthetic construct
  source 1..75: mol_type = other DNA
aatgacactcctgtaactgacgcgaacggtaataccagtatccctggtgttagcgttgcgtggcgaaatggtact

SEQ ID NO: 856072 - DNA, 75 bp, synthetic construct
  source 1..75: mol_type = other DNA
caaactaacacgcgggttactcttaccgctcaatataagaaaggccgcaacgaaacaaaggcacagattgaccgc

SEQ ID NO: 856073 - DNA, 75 bp, synthetic construct
  source 1..75: mol_type = other DNA
acacgcttaatcatttccgtgttccgaacatcgaaaacctgaaagtcataaacattgcgtcagagacggttcaat

SEQ ID NO: 856074 - DNA, 75 bp, synthetic construct
  source 1..75: mol_type = other DNA
ggcccgtgacgccattcacttcacccctggggatattatcgagatcctcgacaataaccgcgctggtgctcgttt

SEQ ID NO: 856075 - DNA, 75 bp, synthetic construct
  source 1..75: mol_type = other DNA
cgcgacggctacaacgaaaccacgctggaggcgttcggctgtacttctcgcggacaggcttaccgcgctggtaaa

SEQ ID NO: 856076 - DNA, 75 bp, synthetic construct
  source 1..75: mol_type = other DNA
gcggtacgaacgctcaatcgcagtgtattttcctcgtcgatcgcttcgtgttaatgacggcagcaaacggcacat

SEQ ID NO: 856077 - DNA, 75 bp, synthetic construct
  source 1..75: mol_type = other DNA
gtcaacagcactttctacgcatgaaacatcaagcgcggaaaaattcagccagatctcagcgtctttcgaagctgt

SEQ ID NO: 856078 - DNA, 75 bp, synthetic construct
  source 1..75: mol_type = other DNA
ttactgaggcgcatcgctcaggttgtcgcattactcaatgcgtccgggaagcgggattccattctgctggccgtt

SEQ ID NO: 856079 - DNA, 75 bp, synthetic construct
  source 1..75: mol_type = other DNA
gagaaaatactgacgccgacagagtggaaactgctgtgggtgaagctggaaggaaaaccgcttccgtcacaggcg

SEQ ID NO: 856080 - DNA, 75 bp, synthetic construct
  source 1..75: mol_type = other DNA
gagtggaaattgctgtgggttaagctggaaggaaaaccgcttccgtcacagacgccgacactgaaatgggcctgt

SEQ ID NO: 856081 - DNA, 75 bp, synthetic construct
  source 1..75: mol_type = other DNA
gatgtgaattacgtgctgcaacgtcatatccgtgaagcggcagcagaaattgagttgacgagaacatttggcaaa

SEQ ID NO: 856082 - DNA, 75 bp, synthetic construct
  source 1..75: mol_type = other DNA
atttcagacggtattttgtccggtgcatttcctgcacgccgcctggcaaaactcggtatcaacgacaatatggct

SEQ ID NO: 856083 - DNA, 75 bp, synthetic construct
  source 1..75: mol_type = other DNA
cggcgcgtttgcgggccgccgccttgccaagctcggcattaacgacaatatggccgcgcgtattcgcagcgaatt

SEQ ID NO: 856084 - DNA, 75 bp, synthetic construct
  source 1..75: mol_type = other DNA
aactatcaccgcagagatgaacacgatggactcaaacatcaaaggcgagatagcgcgagtagacaaagctattgc

SEQ ID NO: 856085 - DNA, 75 bp, synthetic construct
  source 1..75: mol_type = other DNA
attgacgctggcgtgtattctttaggggttcgcggaagaaatgatactggcatgaagggtgccgaaagtatcgtt

SEQ ID NO: 856086 - DNA, 75 bp, synthetic construct
  source 1..75: mol_type = other DNA
gcacttattccggtttatggcttggcggcttgaaacaggcttacactaataaccctgcgtggatcttccgttacc

SEQ ID NO: 856087 - DNA, 75 bp, synthetic construct
  source 1..75: mol_type = other DNA
attagaggtgaagtctttggtgatgttggtagtattgaggctgatttgagggaaatcagtacactgattcatcgg

SEQ ID NO: 856088 - DNA, 75 bp, synthetic construct
  source 1..75: mol_type = other DNA
ctaacgttgaatggccggatcactaacatttcaaaatacattaaaaatagtcaagataaaatcgtcgaacatata

SEQ ID NO: 856089 - DNA, 75 bp, synthetic construct
  source 1..75: mol_type = other DNA
gccggatggaccgcagttaatgaccgatcgtttaaaggagctggctaccgcaggttttactctaacgcagaggta

SEQ ID NO: 856090 - DNA, 75 bp, synthetic construct
  source 1..75: mol_type = other DNA
tttgtgtcggatcaccagtgtagccgaaaccgaaaataatagcgtgtataccatcgaagcagcgcaacatgaccc

SEQ ID NO: 856091 - DNA, 75 bp, synthetic construct
  source 1..75: mol_type = other DNA
taacccgtggcgtttaaagcgtaccgcaacagctgctgaaattagtcagtttggcaatacactttcctgcgaaaa

SEQ ID NO: 856092 - DNA, 75 bp, synthetic construct
  source 1..75: mol_type = other DNA
ggtctgccaaagggcgtgatgctaacgcataacaatattctcgccagtgagcgggcttattgcgcgcgactgaat

SEQ ID NO: 856093 - DNA, 75 bp, synthetic construct
  source 1..75: mol_type = other DNA
aacaacgtcgtgcggcgtatcgtcagcaagggttatggggcgatgcttcactggccgattactggcagcagaccg

SEQ ID NO: 856094 - DNA, 75 bp, synthetic construct
  source 1..75: mol_type = other DNA
tgctgtcgaaaattcataccaccctcactatactgaaagataaaggcgtcaatgccgtattttgggatttcccca

SEQ ID NO: 856095 - DNA, 75 bp, synthetic construct
  source 1..75: mol_type = other DNA
ttgcatcgcgtcccttctgcggtcagctataccgtgcgtcagctggaagagtggctggcggtgccgctttttgaa

SEQ ID NO: 856096 - DNA, 75 bp, synthetic construct
  source 1..75: mol_type = other DNA
gcgctggaaatgatcaccactgttgccggaaatacgccggtagacgtgggatatgcggtcgctagagatctcatt

SEQ ID NO: 856097 - DNA, 75 bp, synthetic construct
  source 1..75: mol_type = other DNA
tgagagttgggtgcgccagctcaggcgagagcgtcaggggattgcgccctttgccacacctattactccagacca

SEQ ID NO: 856098 - DNA, 75 bp, synthetic construct
  source 1..75: mol_type = other DNA
atgaacaagaaaaccaaacgtactttcacccctgaattcaggctggaatgtgcacagctaattgttgataagggc

SEQ ID NO: 856099 - DNA, 75 bp, synthetic construct
  source 1..75: mol_type = other DNA
cgatgaatgtcggctctaccactcttgagagatgggtacgtcagctcagacgagagcgccaggggattgccccct

SEQ ID NO: 856100 - DNA, 75 bp, synthetic construct
  source 1..75: mol_type = other DNA
gttatggcccgtcttgcagactacagcaatgacgagggcgtgtcatggcctgccattgaaactatccggcgtcag

SEQ ID NO: 856101 - DNA, 75 bp, synthetic construct
  source 1..75: mol_type = other DNA
tgagagctgggtacgtcagctcagacgagagtgccaggggattgccccctctgccacaccgattactccagacca

SEQ ID NO: 856102 - DNA, 75 bp, synthetic construct
  source 1..75: mol_type = other DNA
ctgccacacccattactccagaccagcaacgtatccgcgagctggaaaagcaagttcgccgtctggaggaacaaa

SEQ ID NO: 856103 - DNA, 75 bp, synthetic construct
  source 1..75: mol_type = other DNA
agcgttaagcgcctcgataatgcaatatcagatgaaacgcaggcaagaagcgacgcaataacagtggttaaagct

SEQ ID NO: 856104 - DNA, 75 bp, synthetic construct
  source 1..75: mol_type = other DNA
atcaagcaatcgctgacgagactagcgcgcggactcaagccatcagcgacgtaaatgcaagtatttcaacgctag

SEQ ID NO: 856105 - DNA, 75 bp, synthetic construct
  source 1..75: mol_type = other DNA
aacctcaaaactgcaactgataacctgacaaacatcactgacgatttgagggttgacacggacaacctgacaaac

SEQ ID NO: 856106 - DNA, 75 bp, synthetic construct
  source 1..75: mol_type = other DNA
aatgacacacctgtaactgacgcgaacggaaatacatcaatcccggggattagtatagcctggcgcaatggcacg

SEQ ID NO: 856107 - DNA, 75 bp, synthetic construct
  source 1..75: mol_type = other DNA
ccgcgcggaatgctacaacgccgtgattgtgtcctggactgaccctgaaaacggctgggagcaatcaaaagagta

SEQ ID NO: 856108 - DNA, 75 bp, synthetic construct
  source 1..75: mol_type = other DNA
cgcaatggactccagcatcaaaggggaaatcgcccgcgttgacaaagcaatcgcaaccgaaacgcaggcaagaag

SEQ ID NO: 856109 - DNA, 75 bp, synthetic construct
  source 1..75: mol_type = other DNA
cttaccgctcaatataagaaagggcgcaacgaaacgaaagcgcagattgaccgcatagacaacgttatcgcagag

SEQ ID NO: 856110 - DNA, 75 bp, synthetic construct
  source 1..75: mol_type = other DNA
ccggcatcagtaaccactaaagcacaatatacggggcgtggtcatcagtggacgtttggcggcatgaatacaggt

SEQ ID NO: 856111 - DNA, 75 bp, synthetic construct
  source 1..75: mol_type = other DNA
gcattcgcggtcgtaatgatacgggcatgaagggcgctgagagtgtagttgatctggttattggtgcaccagcag

SEQ ID NO: 856112 - DNA, 75 bp, synthetic construct
  source 1..75: mol_type = other DNA
ataatacatccgtcatgttgatggttgatgttaaaccgtcatcatcttctacgtggtcgctgattaaagacatac

SEQ ID NO: 856113 - DNA, 75 bp, synthetic construct
  source 1..75: mol_type = other DNA
ggcgcaatctttgaggtaaacaacgacacgcttaatcacttccgcgtgccgaacattgaaaacctgaaggtgtta

SEQ ID NO: 856114 - DNA, 75 bp, synthetic construct
  source 1..75: mol_type = other DNA
attcgtaacggaactgtttttgctgtatcaactgacgcagcaaaacccgtcctgtgccgaatcatcagcgtagca

SEQ ID NO: 856115 - DNA, 75 bp, synthetic construct
  source 1..75: mol_type = other DNA
gccgcaaagaaaccaacgcgcaaattgaccgtattgacaatgttatagcagaggagaaaaaagccacagcggaag

SEQ ID NO: 856116 - DNA, 75 bp, synthetic construct
  source 1..75: mol_type = other DNA
ttgaaaactgacgaacttgcgactttctttacctggactactatttatctgtcgaaggaagaccatacaaaattc

SEQ ID NO: 856117 - DNA, 75 bp, synthetic construct
  source 1..75: mol_type = other DNA
atccatcatcccataacgaacgaataaaagtaatcatttcatattttgattcctgtcattctttaattaataaaa

SEQ ID NO: 856118 - DNA, 75 bp, synthetic construct
  source 1..75: mol_type = other DNA
ttgcgcctgacaacccacaaaattgcatcagaaatgttaatttatttttaaaggaaaagtattgtaatgtttccc

SEQ ID NO: 856119 - DNA, 75 bp, synthetic construct
  source 1..75: mol_type = other DNA
caggcagctggcagcacaacgcccggatgccgcagggcttcgccgccagataagccgctttatcagcagacgggc

SEQ ID NO: 856120 - DNA, 75 bp, synthetic construct
  source 1..75: mol_type = other DNA
gttcataccatcttcaacgaaagaatattatcttgcctctctcgtcgcctttgctttatggaaagaggcacccga

SEQ ID NO: 856121 - DNA, 75 bp, synthetic construct
  source 1..75: mol_type = other DNA
atgcaaaaagcatatacctcgaggaactcaggcaggcgtggcttaaaaagaaaagcgcttgtcaaaagtttaagt

SEQ ID NO: 856122 - DNA, 75 bp, synthetic construct
  source 1..75: mol_type = other DNA
atggtggcgttttcgatgtttgaagcggcctactattcagagattatccgcgctggtattcaaagtatttctcgt

SEQ ID NO: 856123 - DNA, 75 bp, synthetic construct
  source 1..75: mol_type = other DNA
aacatattatgccgcagaacgaaaatttgtcggctaaatggcgcgaagagctgggaagcgactggcagcgtattc

SEQ ID NO: 856124 - DNA, 75 bp, synthetic construct
  source 1..75: mol_type = other DNA
gatccccggcgcaacctctctctattactgggaaggtaagctggaacaggaatatgaagtacagatgatcttaaa

SEQ ID NO: 856125 - DNA, 75 bp, synthetic construct
  source 1..75: mol_type = other DNA
cagattttattgcaaaaatgaatcgcctgcatccaaggtttgaggatgtgaaaacagacgaactggatgattcag

SEQ ID NO: 856126 - DNA, 75 bp, synthetic construct
  source 1..75: mol_type = other DNA
gtcactgtggggggcgatgagtgaatcttttatggttttctcgatttcgcgcatcgtcagtggttttgctgttgg

SEQ ID NO: 856127 - DNA, 75 bp, synthetic construct
  source 1..75: mol_type = other DNA
actggtgatggtactgttgtggttttacctgattgtgccgggttttctgcaaaatgtgctgggattatcgccgaa

SEQ ID NO: 856128 - DNA, 75 bp, synthetic construct
  source 1..75: mol_type = other DNA
tgacgccatcatgcactccgacgagtttttatcaaaactgccgaacgtgctggatgttgaacaggtgacaggcca

SEQ ID NO: 856129 - DNA, 75 bp, synthetic construct
  source 1..75: mol_type = other DNA
gatcctggcgatgctgtcgctcatatcacctgggatgaaaaacaggcaacgctgagaaatggtaaaatcactgcc

SEQ ID NO: 856130 - DNA, 75 bp, synthetic construct
  source 1..75: mol_type = other DNA
ttatacccatgaacactacgcgggtgggcaaacgcttcatcattgcgcaccgctgcaccagataccggtattcat

SEQ ID NO: 856131 - DNA, 75 bp, synthetic construct
  source 1..75: mol_type = other DNA
gcagaaagctggaatatttatgatcagtactgctttggcccagaccttctcgttgcccctgtaatgcacgaaggt

SEQ ID NO: 856132 - DNA, 75 bp, synthetic construct
  source 1..75: mol_type = other DNA
gatctctgtcggttcctctgtgctgcataccggccgcagcgaaaatggccgtttcattcgtcaggtaggcgttga

SEQ ID NO: 856133 - DNA, 75 bp, synthetic construct
  source 1..75: mol_type = other DNA
gataccagtcgatatttttccctgaatgacccgcaggaaaatgcgctgcgtcttgcgctgctggagtccgtcgag

SEQ ID NO: 856134 - DNA, 75 bp, synthetic construct
  source 1..75: mol_type = other DNA
aataccggctgtatcaggccgcagaccgcccgactgagaaaattgcggcgcagatgctgggcagtaccattgctg

SEQ ID NO: 856135 - DNA, 75 bp, synthetic construct
  source 1..75: mol_type = other DNA
atcgtctggtctggcaacaagacgatcgttatctctggattgaagcatggggtgagaacagtttacgtgtgcgta

SEQ ID NO: 856136 - DNA, 75 bp, synthetic construct
  source 1..75: mol_type = other DNA
gtggccgaaaatactgacccggtaaccaacaaaaacggcgaggacgtcaacaccggctggcatgccatcgtcaaa

SEQ ID NO: 856137 - DNA, 75 bp, synthetic construct
  source 1..75: mol_type = other DNA
tttaaccgcattcagaattttgttaacagacagatcgcgctggatatcctgcgcatcgcctttaacggtaccagc

SEQ ID NO: 856138 - DNA, 75 bp, synthetic construct
  source 1..75: mol_type = other DNA
ctgtgctggaagtcggtaatatctatccgcgtatgtacgccaaaacgttcttcgatggtatgaccgcggctggtg

SEQ ID NO: 856139 - DNA, 75 bp, synthetic construct
  source 1..75: mol_type = other DNA
gttcccttcctgctttctaatcgcggctatggttttctgtggaataacccagcggtgggtcgcgtcactttcgcg

SEQ ID NO: 856140 - DNA, 75 bp, synthetic construct
  source 1..75: mol_type = other DNA
tatggtgccctggtgtggtcaggcgatatccactcctccttccgttctctgcgcaatcagtttgctgcggggctg

SEQ ID NO: 856141 - DNA, 75 bp, synthetic construct
  source 1..75: mol_type = other DNA
tcaacaacgatgcgattaacttcaaaattagtaatgtgaatacgagtgtaagagcacttgctttagggggcttcc

SEQ ID NO: 856142 - DNA, 75 bp, synthetic construct
  source 1..75: mol_type = other DNA
ggagttaacaaaagaaaaatccagcccttacattttcccgctttcgactaatggtaagcgtccggttcgtacgga

SEQ ID NO: 856143 - DNA, 75 bp, synthetic construct
  source 1..75: mol_type = other DNA
aagtggttggcactattatgagcggtctgctgttggggatcttgctggcacggacagttgccggattgctggcga

SEQ ID NO: 856144 - DNA, 75 bp, synthetic construct
  source 1..75: mol_type = other DNA
atgccgcaggtctgctgtttcttgttcccctcggtgatatgtttgaacgccgccgcctgattgtctcgatgacct

SEQ ID NO: 856145 - DNA, 75 bp, synthetic construct
  source 1..75: mol_type = other DNA
gatggatacccagcgtgcgctcaacttcctggtgcgtaaggcgcgtttaccgggcgggcaactagagcaggcgcg

SEQ ID NO: 856146 - DNA, 75 bp, synthetic construct
  source 1..75: mol_type = other DNA
cacaaaaaggtttaagtctgattgaatcggcaatggtcctggctatcagtgcggtcattgtttctggtgttttgt

SEQ ID NO: 856147 - DNA, 75 bp, synthetic construct
  source 1..75: mol_type = other DNA
atgaaaaagttagttcttgccgctttacttgcttcctttactttcggtgcttctgccgcagagaaaatcaatttt

SEQ ID NO: 856148 - DNA, 75 bp, synthetic construct
  source 1..75: mol_type = other DNA
atggccgctaatcttaccgagactgctatacgtggattgaagacaaaaagcacggcgttttacgtgtggagcaac

SEQ ID NO: 856149 - DNA, 75 bp, synthetic construct
  source 1..75: mol_type = other DNA
atggccgtcaatcttactgaaacagctatccgagcattgaaagcaaaaaaggcatcgttctatgtctggagcaac

SEQ ID NO: 856150 - DNA, 75 bp, synthetic construct
  source 1..75: mol_type = other DNA
cgatttctgctatttctggcattccgacaacaacagaaccaggaggtgcaaaggtgtttaccaccccatcaggac

SEQ ID NO: 856151 - DNA, 75 bp, synthetic construct
  source 1..75: mol_type = other DNA
ccggtttattctcggtcgtggcgcaaattctggttccactggcggcaacactggcttcaccagacaaacgcggca

SEQ ID NO: 856152 - DNA, 75 bp, synthetic construct
  source 1..75: mol_type = other DNA
aagtggttggcactattatgagcggtctgctgttggggatcttactcgcacggaccgttgccggattgctggcga

SEQ ID NO: 856153 - DNA, 75 bp, synthetic construct
  source 1..75: mol_type = other DNA
actggtgcatggctacgttaacaagatgaagctcgacaacaagcggacgtgggccgatgtcctgaagcgtcttga

SEQ ID NO: 856154 - DNA, 75 bp, synthetic construct
  source 1..75: mol_type = other DNA
acagttggcggatgaaattgaaaatatctacagtgacctggagcagttgagccgggtaattatggaagggcatca

SEQ ID NO: 856155 - DNA, 75 bp, synthetic construct
  source 1..75: mol_type = other DNA
cccgggcgcaattatctttatgatcctcgcgggcctggcgccgtatctgtactttaagcggaagaactggttgta

SEQ ID NO: 856156 - DNA, 75 bp, synthetic construct
  source 1..75: mol_type = other DNA
gacggtaacgcctacgagttgctgctggatctgttcgaaaccaaaatcgaacagttggcagatgaaattgaaaat

SEQ ID NO: 856157 - DNA, 75 bp, synthetic construct
  source 1..75: mol_type = other DNA
tctcggtggtatccgtggtattcctgccgccgacgctcgttgcttccagctatgggatgaactttgagtttatgc

SEQ ID NO: 856158 - DNA, 75 bp, synthetic construct
  source 1..75: mol_type = other DNA
agggaattagtaataactctatctcctttaaagttagtaatattgacaactcagtacagatgcttgcattaggta

SEQ ID NO: 856159 - DNA, 75 bp, synthetic construct
  source 1..75: mol_type = other DNA
cagagatgacagtaaacgtaaatagtatattccaaaaactagacgttcagacacgtactattgcaagtaatagcg

SEQ ID NO: 856160 - DNA, 75 bp, synthetic construct
  source 1..75: mol_type = other DNA
gatggatacccagcgtgcgctcaacttcctggtgcgtaaggcgcgtttaccgggtggtcaactggagcaggcgcg

SEQ ID NO: 856161 - DNA, 75 bp, synthetic construct
  source 1..75: mol_type = other DNA
aagatcacgccggtaactccactgtggcatttaccatccgtgatggtcgtctgtttactctgcgtgagcgtgaac

SEQ ID NO: 856162 - DNA, 75 bp, synthetic construct
  source 1..75: mol_type = other DNA
aacatctgacattagaccgcaaaacacttaaaaaccactggcatcctttctatttttataaaggcgaatgtgagt

SEQ ID NO: 856163 - DNA, 75 bp, synthetic construct
  source 1..75: mol_type = other DNA
tacgggatgaactttgagtttatgccggaactgaagtggagcttcggctaccctggcgcgattatctttatgatc

SEQ ID NO: 856164 - DNA, 75 bp, synthetic construct
  source 1..75: mol_type = other DNA
ctgaagtggagcttcggctaccctggcgcgattatctttatgatcctcgcgggcctggcaccgtatctgtacttt

SEQ ID NO: 856165 - DNA, 75 bp, synthetic construct
  source 1..75: mol_type = other DNA
attgccagcaaaatgacattttgctcattgaggacgttgacagactttcccgcctgtcaggggaagactggaata

SEQ ID NO: 856166 - DNA, 75 bp, synthetic construct
  source 1..75: mol_type = other DNA
ataagcatagggtcgattatttttaatgtgaattatttccatacaactatagttaaaaatggacagatcattaat

SEQ ID NO: 856167 - DNA, 75 bp, synthetic construct
  source 1..75: mol_type = other DNA
attagctggcaggatgcacgcgtaacgcgtccctacgaacacactaatcctgacgtggcctatgtcacctctttt

SEQ ID NO: 856168 - DNA, 75 bp, synthetic construct
  source 1..75: mol_type = other DNA
gtgatcattactggcggcggttcgaacagcgatctgtttatgcaaatttttgccgacgtgttcaaccttccggca

SEQ ID NO: 856169 - DNA, 75 bp, synthetic construct
  source 1..75: mol_type = other DNA
taagatgcgtgatggtgtcagcattaaggattttggagctcaaaatggaatcttaaatgataacaaggatgcttt

SEQ ID NO: 856170 - DNA, 75 bp, synthetic construct
  source 1..75: mol_type = other DNA
attattggaagatgccagcgaatgcagcgatcttcttaagctatataaaaatgtcgctgtaaaacatgtgtttag

SEQ ID NO: 856171 - DNA, 75 bp, synthetic construct
  source 1..75: mol_type = other DNA
aagatgccgcagtcatggagaagtttaatatcccccgtcatatgctgtttgatgtgcaaatgccaggcactgttc

SEQ ID NO: 856172 - DNA, 75 bp, synthetic construct
  source 1..75: mol_type = other DNA
ctgccggttgtttgtaccaccagtgataaaccggtagaagctctgggagccggattactggatgatgaaacggcg

SEQ ID NO: 856173 - DNA, 75 bp, synthetic construct
  source 1..75: mol_type = other DNA
caagatcagccactacatcaccctgatggttgagggcagcaatatttgtgatatcggccatcgcgactgggctcc

SEQ ID NO: 856174 - DNA, 75 bp, synthetic construct
  source 1..75: mol_type = other DNA
caggctactttaatagggacagtggccttcatagccagacctattggaggtggttttttggtgccatggctgata

SEQ ID NO: 856175 - DNA, 75 bp, synthetic construct
  source 1..75: mol_type = other DNA
gcaaccagctattattgcggaacgagcaagcgtacaaagccgacaatatggtgagttgctttacgccgaggatga

SEQ ID NO: 856176 - DNA, 75 bp, synthetic construct
  source 1..75: mol_type = other DNA
attacgatgcaaagcaaaacagaatatctaaccttgccgatccatcacttgagcaggacgctgtaaataatcgct

SEQ ID NO: 856177 - DNA, 75 bp, synthetic construct
  source 1..75: mol_type = other DNA
tgaaatctcgctggagcgggcgctgctttataccgccagccataagcaaaccgaaggcgaaccggtgattattcg

SEQ ID NO: 856178 - DNA, 75 bp, synthetic construct
  source 1..75: mol_type = other DNA
gtcgttagggcgctttgaccagtatatgttgccgttctatcaggcatcattaacccagggcgaagatccggcgtt

SEQ ID NO: 856179 - DNA, 75 bp, synthetic construct
  source 1..75: mol_type = other DNA
aaaatccgaaactgcagcggcatcatcaaagaacgcggcgaaaacctcagaaacgaatgcagctaatagtgcaca

SEQ ID NO: 856180 - DNA, 75 bp, synthetic construct
  source 1..75: mol_type = other DNA
gattggtcacaacggttctggtaaatccactctgctcaaaatgcttggtcgtcaccagccaccgtcggaagggga

SEQ ID NO: 856181 - DNA, 75 bp, synthetic construct
  source 1..75: mol_type = other DNA
ataccacttttgcactgcgtaatatctcctttcgtatgcccgggcgcacgcttttgcatccgctgtcgttaacct

SEQ ID NO: 856182 - DNA, 75 bp, synthetic construct
  source 1..75: mol_type = other DNA
aaccaaaacctcaagaagtgcaagaccccgtattcatcgattttgccaaagcttatttccgttaccagcagggac

SEQ ID NO: 856183 - DNA, 75 bp, synthetic construct
  source 1..75: mol_type = other DNA
tggcgattagctggtgcattaaccgattgattttgcatccgttacgcaatattgctcgcgaacttaacgccatcc

SEQ ID NO: 856184 - DNA, 75 bp, synthetic construct
  source 1..75: mol_type = other DNA
ctggtgctacaggcggattccttccgtatgtataagttcgtgatgagcaccctctcaacgttagtgaccatttac

SEQ ID NO: 856185 - DNA, 75 bp, synthetic construct
  source 1..75: mol_type = other DNA
tcggcgctggatatcgcccaccaggttgatgtactggcgctggtgcatcgtttaagtcaggagcgtggcttgacg

SEQ ID NO: 856186 - DNA, 75 bp, synthetic construct
  source 1..75: mol_type = other DNA
gagaggagaaactgcccagtgatattgctctcaatgcgctggccgaaatttttgccactaatccaattaatgaga

SEQ ID NO: 856187 - DNA, 75 bp, synthetic construct
  source 1..75: mol_type = other DNA
gctccgcatatcattgtggccgtgagattgagcggctggctaagtttgtagctgaaaaccagcttgtatcaagtg

SEQ ID NO: 856188 - DNA, 75 bp, synthetic construct
  source 1..75: mol_type = other DNA
tagccggggcttagctaaggaagatggtgtgcatacgctaaatagcctgtggcaacacactatgaaacgtttgcc

SEQ ID NO: 856189 - DNA, 75 bp, synthetic construct
  source 1..75: mol_type = other DNA
tggtatggctgaacgcctagactccacaaaagcgctatttgggcctgtcggcgatgtggcaaagcatctgcccgt

SEQ ID NO: 856190 - DNA, 75 bp, synthetic construct
  source 1..75: mol_type = other DNA
ctatgcaaaattgggtcaatccaattaagcgtgaagatgataagaataaaacaggccgagaggcgaagaaaaata

SEQ ID NO: 856191 - DNA, 75 bp, synthetic construct
  source 1..75: mol_type = other DNA
ctttgtttgcacttaatgtaaatcagttccacgggaatcgccgatgtataccgattgaattgtataaaccaacca

SEQ ID NO: 856192 - DNA, 75 bp, synthetic construct
  source 1..75: mol_type = other DNA
ctgatttcctgaatgaggcaggccgcgaaaacggactctaccggagctacattcaacctcgactggatgagctga

SEQ ID NO: 856193 - DNA, 75 bp, synthetic construct
  source 1..75: mol_type = other DNA
tgcattgtagatgcatctattagcaacaataaacaaacgaagccaattaaattagttaaagctgatggtgtatgg

SEQ ID NO: 856194 - DNA, 75 bp, synthetic construct
  source 1..75: mol_type = other DNA
tcattctttctacttttctattaactgcatgtaatagtgaaccaagtcaagatgatatctacaatgcattcaaaa

SEQ ID NO: 856195 - DNA, 75 bp, synthetic construct
  source 1..75: mol_type = other DNA
atgaaaacatactcaattctcgcagttatcctttctacttttctattaacagcctgtaattcagaaccttctgaa

SEQ ID NO: 856196 - DNA, 75 bp, synthetic construct
  source 1..75: mol_type = other DNA
cgatggcggcggacaaaattattctcgctgtaggtcaacatgccgaacttgctgctttttccgcactggaaccgc

SEQ ID NO: 856197 - DNA, 75 bp, synthetic construct
  source 1..75: mol_type = other DNA
aaagcggttgtacccgtgccggtgttgatgctcccattgatatcggtcgcttacagcgttttgttactgattttg

SEQ ID NO: 856198 - DNA, 75 bp, synthetic construct
  source 1..75: mol_type = other DNA
gtaatgctgaatcaggaaaccgcaaaggcagcacgaaccgattcaggttaacagcgcacaggcggcagcggcctc

SEQ ID NO: 856199 - DNA, 75 bp, synthetic construct
  source 1..75: mol_type = other DNA
attggcattatcaccttcgttgcgatggggtggcaatttagccagaaacgcgctacgcgtcggttgctggaacgc

SEQ ID NO: 856200 - DNA, 75 bp, synthetic construct
  source 1..75: mol_type = other DNA
ggtgctttgttgggcagttggttgttgcaatatgactttcgtctggtctgcgccacgggggcgattttgtttgta

SEQ ID NO: 856201 - DNA, 75 bp, synthetic construct
  source 1..75: mol_type = other DNA
gcgtcgccagcggctgggcgatgcaggcgcaaccaggcgataaactcacggtggccggaccgcgaggttcgctgg

SEQ ID NO: 856202 - DNA, 75 bp, synthetic construct
  source 1..75: mol_type = other DNA
tgcattgtcgatgcctcgattagcaatatgaaacagacaaagcctgttaagcttgtgaaagctgatggtgtctgg

SEQ ID NO: 856203 - DNA, 75 bp, synthetic construct
  source 1..75: mol_type = other DNA
tccgccgcgttcggcgctggtggtgaaactaatccgtccacaacagcgtggtcgttttttctcgctgttgatgat

SEQ ID NO: 856204 - DNA, 75 bp, synthetic construct
  source 1..75: mol_type = other DNA
ttcaccctgatttgtctgttttatatcggttcgatcattgccgaacctgcgcgtgaaaccttaagcgcctcgctg

SEQ ID NO: 856205 - DNA, 75 bp, synthetic construct
  source 1..75: mol_type = other DNA
gatgcctttgcggagttagagccgcagcgtaacaccatcaaaacacaaaattatcagacccgcgatccgcaagtc

SEQ ID NO: 856206 - DNA, 75 bp, synthetic construct
  source 1..75: mol_type = other DNA
ttggcctgtgcgataactatcaggaaatcaacgtggaaaccgcgctggccgatgaatcctcggtgttttacacct

SEQ ID NO: 856207 - DNA, 75 bp, synthetic construct
  source 1..75: mol_type = other DNA
gtgtggatcactattgcaccgttcgtgacagtggagcacgatcaggatggcagaggagaagctgagttcttatta

SEQ ID NO: 856208 - DNA, 75 bp, synthetic construct
  source 1..75: mol_type = other DNA
gcaagcgcggcggctgcttctgccactgcatcagccaacagtcaaaaagcagcaaaaaccagtgaaaccaatgca

SEQ ID NO: 856209 - DNA, 75 bp, synthetic construct
  source 1..75: mol_type = other DNA
ttccggcaatgcaccaggtgccggaagatgcgcaggggtatccggccgttacccccgaacaattacttgaattag

SEQ ID NO: 856210 - DNA, 75 bp, synthetic construct
  source 1..75: mol_type = other DNA
tggtcggtgcgtattcgcgaatttgccgcccgtttcggcgcgctggctgacctttacatttttaaacgtgaacca

SEQ ID NO: 856211 - DNA, 75 bp, synthetic construct
  source 1..75: mol_type = other DNA
atggtgtttaaccatacctctacccaacatgcctggtttcacgaggcgctgaagaaagaaagtccttatcgtcag

SEQ ID NO: 856212 - DNA, 75 bp, synthetic construct
  source 1..75: mol_type = other DNA
ggcaagcgaaaaagagtttaccagcgccagagagctgggcgtttcgatcatcgatggatttacaccagtagccgt

SEQ ID NO: 856213 - DNA, 75 bp, synthetic construct
  source 1..75: mol_type = other DNA
ccggtggctggttgcgtaacggcattccgcaattccggttaccgcaatcagtgctggatgcagaaatcgcccgta

SEQ ID NO: 856214 - DNA, 75 bp, synthetic construct
  source 1..75: mol_type = other DNA
gtgacaaaaccgtggtttatgccgtgaaaaccgggaaagaagccgctgaggcgattcatcactatttagagggag

SEQ ID NO: 856215 - DNA, 75 bp, synthetic construct
  source 1..75: mol_type = other DNA
ggggatgataagtttatcaccaccgactatttgcaacagtgccctgtggagcacgatcaggatggcagaggagaa

SEQ ID NO: 856216 - DNA, 75 bp, synthetic construct
  source 1..75: mol_type = other DNA
accgcttttgcggcgctggagccgaagcgcaacatcatcgaaacgaaaaattaccagactcgcgacccacaactg

SEQ ID NO: 856217 - DNA, 75 bp, synthetic construct
  source 1..75: mol_type = other DNA
ccgctgtttgagcatagcgacgttgagattgccgtcgacttcttgcaacgtgcacgacaggcgcaaggcgatatc

SEQ ID NO: 856218 - DNA, 75 bp, synthetic construct
  source 1..75: mol_type = other DNA
ggtcggtgcgcagtgctatgcaggctggggtggtctgattgtgctgccggtggttgaaggcaagttgggttacat

SEQ ID NO: 856219 - DNA, 75 bp, synthetic construct
  source 1..75: mol_type = other DNA
gcggcgctggtgatggggtgtgttggcgtcactgaaggggcgattcctttcgccgccgccgatccgttacgtgtg

SEQ ID NO: 856220 - DNA, 75 bp, synthetic construct
  source 1..75: mol_type = other DNA
ctcagggggtttataccgtggtggccattgccgctgtgggtatttgtatcccgccgctgggtatggggctggcga

SEQ ID NO: 856221 - DNA, 75 bp, synthetic construct
  source 1..75: mol_type = other DNA
ccgacagaaaacctgttatcggtcaacgaacaggaaagggtgacaagacccactggattatttttatgaaggagg

SEQ ID NO: 856222 - DNA, 75 bp, synthetic construct
  source 1..75: mol_type = other DNA
agatgcctggcgtgatgatttgcgacagagatttaaagaagcttttcgggtgttgaggccgcacggcgttctgat

SEQ ID NO: 856223 - DNA, 75 bp, synthetic construct
  source 1..75: mol_type = other DNA
cctgttcgccagatattggcactgaccgacagaaaacctgttatcggtcaacgaacaggaaaaaacgataaaacc

SEQ ID NO: 856224 - DNA, 75 bp, synthetic construct
  source 1..75: mol_type = other DNA
tgatttctgttgcgccactgctgattgcctgtggcgatggcgcgctggaaatcgtcaccggacaggcgggagacg

SEQ ID NO: 856225 - DNA, 75 bp, synthetic construct
  source 1..75: mol_type = other DNA
gcattaccatgcaaggctcacaattagcgcaaacgctggggctggtgcaaggttcacgattaaatagccaatcaa

SEQ ID NO: 856226 - DNA, 75 bp, synthetic construct
  source 1..75: mol_type = other DNA
cgcgcgctattacgcaacttattctcaatctggtggaaggttcgccaattaagctgattgatggcggaaaacaaa

SEQ ID NO: 856227 - DNA, 75 bp, synthetic construct
  source 1..75: mol_type = other DNA
acgatatgggatgcctgggcattgaagccttgctggctgccggttacgaaattagcgccatttttactcataccg

SEQ ID NO: 856228 - DNA, 75 bp, synthetic construct
  source 1..75: mol_type = other DNA
cgttgtcgaaagtagcagctactacggcaaaggatatcaggacgtagagcatcgtaaaccgagcatccgcaatgc

SEQ ID NO: 856229 - DNA, 75 bp, synthetic construct
  source 1..75: mol_type = other DNA
cctcggggtgaatggctttattggcaaccatctgacagaacgcctgctgcgcgaagatcattatgaagtttacgg

SEQ ID NO: 856230 - DNA, 75 bp, synthetic construct
  source 1..75: mol_type = other DNA
aaagattttcagatgtcatctgatgaagtcactttcaatgctgacagcgttcgctcaaaactggaactattatcc

SEQ ID NO: 856231 - DNA, 75 bp, synthetic construct
  source 1..75: mol_type = other DNA
cagaagctcacgctatcgtacatcgctatttgggtccccatgttttattgggcgatgaagtggcaacggcgaccc

SEQ ID NO: 856232 - DNA, 75 bp, synthetic construct
  source 1..75: mol_type = other DNA
gctggcgcagtggggaatgcaagtcaccttattgctcctggcgacagtgttgttggttggttttgttgtgacctg

SEQ ID NO: 856233 - DNA, 75 bp, synthetic construct
  source 1..75: mol_type = other DNA
ctatagctggacacaagggagctggacgctgaccggcggcctgccagaagcgaaaaaagaagacgagctgccgtt

SEQ ID NO: 856234 - DNA, 75 bp, synthetic construct
  source 1..75: mol_type = other DNA
ctggctgccgactatcgcccagactattggtctggaagatgcgctgaccgccagcctgatgctcaatgccttgtt

SEQ ID NO: 856235 - DNA, 75 bp, synthetic construct
  source 1..75: mol_type = other DNA
ttcctgacccacctgctggcacatcgaaaatttttacttggcagttttctgctgctggcggtcacgttgatggtg

SEQ ID NO: 856236 - DNA, 75 bp, synthetic construct
  source 1..75: mol_type = other DNA
atcttattggattgcgcattttgatcggcattggtctgggaggcgattactcagtcggtcacaccttgctggctg

SEQ ID NO: 856237 - DNA, 75 bp, synthetic construct
  source 1..75: mol_type = other DNA
gaactgcaacgtatgattgatgatctgcagctagacgaagtagttattgcagaacatatagatcgtatcagtcgt

SEQ ID NO: 856238 - DNA, 75 bp, synthetic construct
  source 1..75: mol_type = other DNA
tggcccgccaggccgggcggtacaagggccgccgtgctgatccgaagcgccgcgcccaagttgtcgcgctgcgca

SEQ ID NO: 856239 - DNA, 75 bp, synthetic construct
  source 1..75: mol_type = other DNA
cctacagcccggcgaggtggtcattgccgagaagatcgaccgcatcagccgcctacctttgcccgaggccgagcg

SEQ ID NO: 856240 - DNA, 75 bp, synthetic construct
  source 1..75: mol_type = other DNA
ggtgctcagaatggctgcattattgcgggtgacaacccggatgcggcgctggcgttagaaaaagcccgcgcgttc

SEQ ID NO: 856241 - DNA, 75 bp, synthetic construct
  source 1..75: mol_type = other DNA
ggcgcacagaacggctgcatcatcgcgggcgacaacccggatgcggcgctggcattagaaaaagcccgcgcgttc

SEQ ID NO: 856242 - DNA, 75 bp, synthetic construct
  source 1..75: mol_type = other DNA
agcgaagctcgccattcccggtattgtggatcttaccgaactggcaaacgctcaatccggtgtcgcgaaggtcgt

SEQ ID NO: 856243 - DNA, 75 bp, synthetic construct
  source 1..75: mol_type = other DNA
tatgggcgtggtggtgccacacggcgtgctgttccgtggctccagcgaaggtaaaattcgccagaaaatgattga

SEQ ID NO: 856244 - DNA, 75 bp, synthetic construct
  source 1..75: mol_type = other DNA
tgaaacccagaattacgggaccagcttgctcgaatacgcctacgagccgtacatgaatctgcgttcggcgatccg

SEQ ID NO: 856245 - DNA, 75 bp, synthetic construct
  source 1..75: mol_type = other DNA
tctctatcgtgccggtacataacggaaacgatagtgactatgacgccgcgcaggcgttgtgtgacgagctgatga

SEQ ID NO: 856246 - DNA, 75 bp, synthetic construct
  source 1..75: mol_type = other DNA
gagttcgaggtcagcggcaacctggcgggatttagcggcgattatctgaaggacgcgtcagggaaaatggttttc

SEQ ID NO: 856247 - DNA, 75 bp, synthetic construct
  source 1..75: mol_type = other DNA
acagcattgcggatattgcctgctggccgtgggttaatgcctggactcgccagcgaattgacctcgcaatgtatc

SEQ ID NO: 856248 - DNA, 75 bp, synthetic construct
  source 1..75: mol_type = other DNA
atgatcgatctctatttcgccccgacacccaatggtcacaaaattacgctgtttctcgaagaagcagggctggat

SEQ ID NO: 856249 - DNA, 75 bp, synthetic construct
  source 1..75: mol_type = other DNA
cattttccagcatgcctttggtattcagggtgtcgtgccgaacaatgaagccattgtttccgtagcgcagaaaag

SEQ ID NO: 856250 - DNA, 75 bp, synthetic construct
  source 1..75: mol_type = other DNA
acaaatattgaccatcgaaatcatattaaagggttgatatatgatgaactcaattctttggtttcggttttacaa

SEQ ID NO: 856251 - DNA, 75 bp, synthetic construct
  source 1..75: mol_type = other DNA
gacggaagagagcgatatccttaatgcactggaaaatcatcagtttgctatttggttacagccacaggtcgagat

SEQ ID NO: 856252 - DNA, 75 bp, synthetic construct
  source 1..75: mol_type = other DNA
atcgacaaaatgtttgttgaaggcttgccggaagatagcagcatgattgctgcaattatcatgctggcgcagagc

SEQ ID NO: 856253 - DNA, 75 bp, synthetic construct
  source 1..75: mol_type = other DNA
acggaggtgctcaacgaccggacaacggatgtgaaacatgaccatacggaaaccatcggtaacgaccagaagata

SEQ ID NO: 856254 - DNA, 75 bp, synthetic construct
  source 1..75: mol_type = other DNA
ctggcgcaggggctacacccgtggccgtggacgctgaatattgccggaaccggctaccgctaccccagccgttct

SEQ ID NO: 856255 - DNA, 75 bp, synthetic construct
  source 1..75: mol_type = other DNA
cagtcggcctgcttatcagcgcccacgcctgtgcagtaccaccgctgtatgcgcaaatcgcccgtcagcagcagg

SEQ ID NO: 856256 - DNA, 75 bp, synthetic construct
  source 1..75: mol_type = other DNA
gtttttgcgcatttcgcccaacaataaaattccggcgattgttgatcatgtcccgactgacggcggagaaccatt

SEQ ID NO: 856257 - DNA, 75 bp, synthetic construct
  source 1..75: mol_type = other DNA
tatgggcgtagttgtgccacacggtgtgcttttccgtggctccagcgaaggtaaaattcgccagaaactgatcga

SEQ ID NO: 856258 - DNA, 75 bp, synthetic construct
  source 1..75: mol_type = other DNA
ctggcgaaaatgaacatgttcctgcacggcgaagacaaccacaaaatcgagtggggtgataccattcgtaacccg

SEQ ID NO: 856259 - DNA, 75 bp, synthetic construct
  source 1..75: mol_type = other DNA
tacgacgaatataaagagcaatatggtgatgcgccggaactgattgaagccatgatggcgaacgagcgttttgtg

SEQ ID NO: 856260 - DNA, 75 bp, synthetic construct
  source 1..75: mol_type = other DNA
tggggccatgacgaggccgagaacgataagtttggccgttttcggcgcggtgtaccgccgaagactaagggtgat

SEQ ID NO: 856261 - DNA, 75 bp, synthetic construct
  source 1..75: mol_type = other DNA
ccagaaccagctcagcgcagaaaatatccagaagatcgttaacacctatcgagaaggcgataacgtcgagaaata

SEQ ID NO: 856262 - DNA, 75 bp, synthetic construct
  source 1..75: mol_type = other DNA
ggcttgccggaaaaactgttctacggtacaggtattcctgctgcgattctgattttcaaaaaacagaaagtggat

SEQ ID NO: 856263 - DNA, 75 bp, synthetic construct
  source 1..75: mol_type = other DNA
ggagcatggaaagaagttggctattctgaggttgatttgagcacagcagaaacgtatccctgccctgtaccctgt

SEQ ID NO: 856264 - DNA, 75 bp, synthetic construct
  source 1..75: mol_type = other DNA
attccttacgctattgaacgttatcaggttgaaactcagcgtctttaccatgtactgggtgatgctgccaactta

SEQ ID NO: 856265 - DNA, 75 bp, synthetic construct
  source 1..75: mol_type = other DNA
caccgaatggtcacaaaatcacgttgtttctcgaagaggcaaggctggattatcgcttaatcaaagttgacctcg

SEQ ID NO: 856266 - DNA, 75 bp, synthetic construct
  source 1..75: mol_type = other DNA
gtgagtacaccggtaaccattcttgatatgtgctgtggcagccgtatgttctggttcgataagaatgacgaccgg

SEQ ID NO: 856267 - DNA, 75 bp, synthetic construct
  source 1..75: mol_type = other DNA
tccttaccatgctgttcctcaagtacatttcagatgtctggcaggatcactatgacgaatacaaagaacagtatg

SEQ ID NO: 856268 - DNA, 75 bp, synthetic construct
  source 1..75: mol_type = other DNA
atggaagaaatgattttgctgtcattaatatggcatcggttcgggagtgaaaaaggttactcgcctgcttgctgg

SEQ ID NO: 856269 - DNA, 75 bp, synthetic construct
  source 1..75: mol_type = other DNA
tgggcggcctgcgttcagcttgtacatacgttggggcttcacgcctgaaagagctgaccaagcgcaccacgttta

SEQ ID NO: 856270 - DNA, 75 bp, synthetic construct
  source 1..75: mol_type = other DNA
cggcatgagctccgagtctgcgatgaaacgtcacgttggcggcgttgcggaatatcgcgcagcagaaggtaaaac

SEQ ID NO: 856271 - DNA, 75 bp, synthetic construct
  source 1..75: mol_type = other DNA
atgcacgtcacactggttgaaattaacgttcatgaagacaaggttgacgagtttatcgaagtttttcgccagaac

SEQ ID NO: 856272 - DNA, 75 bp, synthetic construct
  source 1..75: mol_type = other DNA
ttcaaccgagctactggcaggtgtttgcgctggcaatggctatcgccatcatcatcccgattgtactcacctcgt

SEQ ID NO: 856273 - DNA, 75 bp, synthetic construct
  source 1..75: mol_type = other DNA
gccgctgattgcgctgtcgaatatcgctcagggctccgccgtgataggcattatcatttccagccgcaagcacaa

SEQ ID NO: 856274 - DNA, 75 bp, synthetic construct
  source 1..75: mol_type = other DNA
gggcgttattgaaactcgccttaaacgcatcgtgccggattacctctatctggtggtggtgcccgtctgttcgct

SEQ ID NO: 856275 - DNA, 75 bp, synthetic construct
  source 1..75: mol_type = other DNA
tttattggaatcgggcttggcgtactgttaggttctatcccggtatttgttccgggatttccggcagcgttgaaa

SEQ ID NO: 856276 - DNA, 75 bp, synthetic construct
  source 1..75: mol_type = other DNA
gctggttctatgaccgatcctccggcgctggcgtttgccaataatcttcatcctaccagcggtgcggcggcgctc

SEQ ID NO: 856277 - DNA, 75 bp, synthetic construct
  source 1..75: mol_type = other DNA
tccaaccagtggtgcagcggctctctcttacgccacggtgtatccattagtcatgtttctgcgcatcatcacacc

SEQ ID NO: 856278 - DNA, 75 bp, synthetic construct
  source 1..75: mol_type = other DNA
cttgatgatgaaggttttcattatatgggatatatagttcttcaacaaaaagaacagtatcaacatgaggtcatt

SEQ ID NO: 856279 - DNA, 75 bp, synthetic construct
  source 1..75: mol_type = other DNA
cggattattaaaagaaccgtgcacaacaatatgaaggctgccgtagaacgtcataagagaaggtttaactgcaaa

SEQ ID NO: 856280 - DNA, 75 bp, synthetic construct
  source 1..75: mol_type = other DNA
aacgcctcattaccttgcctgtgttgagaaactggagtcactaatgagttgtccaagaaaaaagcgaatattcaa

SEQ ID NO: 856281 - DNA, 75 bp, synthetic construct
  source 1..75: mol_type = other DNA
ttagggataaaaacccacgttgtaaaggatctcacacgtgaaattaatgctgtaaaagatataatagcgttgtat

SEQ ID NO: 856282 - DNA, 75 bp, synthetic construct
  source 1..75: mol_type = other DNA
gtgctgcatcagcaatacccaacggtaaaaggatttgaacgcgcctttccttcactctgctttgcactggcgacc

SEQ ID NO: 856283 - DNA, 75 bp, synthetic construct
  source 1..75: mol_type = other DNA
ttgccaatcgagttagtgcacgactatcattgcgcgatccacaggatgaatcattacgcatcttatgcgacgttc

SEQ ID NO: 856284 - DNA, 75 bp, synthetic construct
  source 1..75: mol_type = other DNA
aagaaggttctgtatatcgggctggatgatgatgaaaacggtataccagaagtaaaaccccagcaaattatcgta

SEQ ID NO: 856285 - DNA, 75 bp, synthetic construct
  source 1..75: mol_type = other DNA
atttagataaccgcagcagcttgcagttcatcgatccgaaaggccatacgctgactcaaagccaaaacgacgcac

SEQ ID NO: 856286 - DNA, 75 bp, synthetic construct
  source 1..75: mol_type = other DNA
agatatgcgcttatcccacataatgaaattgaattaagtcgcacagtttcagggttaatggctgattttatgatg

SEQ ID NO: 856287 - DNA, 75 bp, synthetic construct
  source 1..75: mol_type = other DNA
cgacgaacatgccgacatgctttacaaactggccggacagatggtgaaccatttgtgcagttatcagccggagga

SEQ ID NO: 856288 - DNA, 75 bp, synthetic construct
  source 1..75: mol_type = other DNA
agtagacggtgtttctgcatcgtttgtcggcggcgataccgcatcttgctctatgggggattctgaaggtttttt

SEQ ID NO: 856289 - DNA, 75 bp, synthetic construct
  source 1..75: mol_type = other DNA
ttcagacctgtacagatgcaaacaacgcggcaacctgttcatcatgggcttgggtggcaaattcccagaactatc

SEQ ID NO: 856290 - DNA, 75 bp, synthetic construct
  source 1..75: mol_type = other DNA
atgaaacaccctttcctgttgggggcatttttgctcccaatctttgcgcatgcgcaaatcaatacaactcccgac

SEQ ID NO: 856291 - DNA, 75 bp, synthetic construct
  source 1..75: mol_type = other DNA
accggcgggcagtacgcagatgaccctgagtacttatattctgggctttgcgttggggcagttaatctacgggcc

SEQ ID NO: 856292 - DNA, 75 bp, synthetic construct
  source 1..75: mol_type = other DNA
cggatgcgtgtcgatggtgtcatccaatgcgatggcggtcattctggatgagtttccccatatggcgggaacggc

SEQ ID NO: 856293 - DNA, 75 bp, synthetic construct
  source 1..75: mol_type = other DNA
caataaaaagggactggtttaacaaaaagcgttcttatcgttgcaaccggaaagttgactttaattttgacaaca

SEQ ID NO: 856294 - DNA, 75 bp, synthetic construct
  source 1..75: mol_type = other DNA
gggatgacattaagtagcgatatgctgcatgttattcaggaatttggcctgatcctgttcgtttataccatcggg

SEQ ID NO: 856295 - DNA, 75 bp, synthetic construct
  source 1..75: mol_type = other DNA
cccggctatttcccctcagattctcctgatttgcataaccctgtttcagccgtcatcatagtctgctgttgtata

SEQ ID NO: 856296 - DNA, 75 bp, synthetic construct
  source 1..75: mol_type = other DNA
aacttgcagccgcttatccgtcaggcgtgatccctgatatgcgtggctggacgattaagggcaaacctgccagtg

SEQ ID NO: 856297 - DNA, 75 bp, synthetic construct
  source 1..75: mol_type = other DNA
aaacgtcagaaacgaatgcggcagcgtcacaacaatcagcagccacttctgcatccaccgcgaccacgaaagcgt

SEQ ID NO: 856298 - DNA, 75 bp, synthetic construct
  source 1..75: mol_type = other DNA
gagcatattgaaaaatactaccgcacaaaaactattgacttgcttatctccacacaccccgatggtgaccacgtc

SEQ ID NO: 856299 - DNA, 75 bp, synthetic construct
  source 1..75: mol_type = other DNA
agcctacgctacattgcggctcaatatcagccagaccttttatccgattggtgctgcgtctggtattttattggg

SEQ ID NO: 856300 - DNA, 75 bp, synthetic construct
  source 1..75: mol_type = other DNA
ccgcagagtcttcaaaaagcgcggcagccaccagtgcaggtgcagcgaaaacgtcggaaatgaatgccgcagcat

SEQ ID NO: 856301 - DNA, 75 bp, synthetic construct
  source 1..75: mol_type = other DNA
aaatctggcgacgtctattttgctgttcagtgatgttctcgccatgaaaggcgtggatgaagtatttgcctattt

SEQ ID NO: 856302 - DNA, 75 bp, synthetic construct
  source 1..75: mol_type = other DNA
ttactattgatactcgtattcttcagaacagtaatgaaaagattactgaaattttcattgcgaaatataaagacg

SEQ ID NO: 856303 - DNA, 75 bp, synthetic construct
  source 1..75: mol_type = other DNA
atgcaagcggcattaatactatttatactaacgtcaatatacaaccacccaatctattttattagaacatacatc

SEQ ID NO: 856304 - DNA, 75 bp, synthetic construct
  source 1..75: mol_type = other DNA
cgctgctggaaggggcattgtgggacggtgagcagttcgagaacgttgacggaaaacgctacctgcgtgtgctgg

SEQ ID NO: 856305 - DNA, 75 bp, synthetic construct
  source 1..75: mol_type = other DNA
cgataataacttcccgttttcctccagccgctggcctaatatggcggatgacaacgagtttattctactggatgt

SEQ ID NO: 856306 - DNA, 75 bp, synthetic construct
  source 1..75: mol_type = other DNA
ctggaagacaaccagaacgccatcggcgacttcaatatgatcgatgacacccacgggctggtgatcgagcgcgac

SEQ ID NO: 856307 - DNA, 75 bp, synthetic construct
  source 1..75: mol_type = other DNA
cggaaaaaaaaggaattgaaataaaagagccttttcaaggaatgacctgggataatgctactctggttgttatcg

SEQ ID NO: 856308 - DNA, 75 bp, synthetic construct
  source 1..75: mol_type = other DNA
cggctacgttgctgttgttggctggatgtgaacaggaaaggatgcccgaaccaaatgcggcgacgtgtgcccccg

SEQ ID NO: 856309 - DNA, 75 bp, synthetic construct
  source 1..75: mol_type = other DNA
atgaaaaaaacattaattgttattttattatgtttttgtcactcagttttagcatatccataccgtatctatact

SEQ ID NO: 856310 - DNA, 75 bp, synthetic construct
  source 1..75: mol_type = other DNA
tgaattagataatattgatcaaaataaaattgacgagatacttatgaccattagaaaaaataagggcgtgtatgg

SEQ ID NO: 856311 - DNA, 75 bp, synthetic construct
  source 1..75: mol_type = other DNA
gtgcttggtaagcgtattcgcgacctgcactttaaagaacgctatgacgttgttatctcgcgcctgaaccgtgcc

SEQ ID NO: 856312 - DNA, 75 bp, synthetic construct
  source 1..75: mol_type = other DNA
cgaagaaactgggcctgaccaacaccaccttccagacggtacacggcctggatgcaccggggcagtttagtaccg

SEQ ID NO: 856313 - DNA, 75 bp, synthetic construct
  source 1..75: mol_type = other DNA
tcaggtctctgtggcggatttgaataaaggtgtgatcattcagtccggtaatgatgcctgtattgcactggcaga

SEQ ID NO: 856314 - DNA, 75 bp, synthetic construct
  source 1..75: mol_type = other DNA
ctcggcagtcggattccggcgctgcgtgaagactataaacttggacgtttatgcgggcgttattttctggcaacg

SEQ ID NO: 856315 - DNA, 75 bp, synthetic construct
  source 1..75: mol_type = other DNA
tcatgcgcaccggattccgataaacaccctcatcaagcggtcattaatgcttttacaaggcgtggagccaaagta

SEQ ID NO: 856316 - DNA, 75 bp, synthetic construct
  source 1..75: mol_type = other DNA
cccaaaaaagctgaggatacagctggatttgaagtactaaaagcagtctttgagtctgtagttgaaaaaacgaag

SEQ ID NO: 856317 - DNA, 75 bp, synthetic construct
  source 1..75: mol_type = other DNA
caatttattgagaaaccgccaggcaagctacgcattttcgaaatttatccgccgaagccgctgcatagcatcgcg

SEQ ID NO: 856318 - DNA, 75 bp, synthetic construct
  source 1..75: mol_type = other DNA
tggtggaagcgactgcacgccagatgccgttgcagatggataccgccgcgcggttgttcgatagcggcaaatcgt

SEQ ID NO: 856319 - DNA, 75 bp, synthetic construct
  source 1..75: mol_type = other DNA
gccatctggtgccagtggtgacgccggaatcgatcgttattccgcctgcgccagtcgccaacgatacgctggttg

SEQ ID NO: 856320 - DNA, 75 bp, synthetic construct
  source 1..75: mol_type = other DNA
ccaagctttgagtcaaagctcacacatttgtttttttcagtgaacaaacttcacgcttttactgatggcaataaa

SEQ ID NO: 856321 - DNA, 75 bp, synthetic construct
  source 1..75: mol_type = other DNA
tttacatccttgcagtactggtgttgggtgccgctcgcgtctggttattcccccatgccgatggtgctgtcgata

SEQ ID NO: 856322 - DNA, 75 bp, synthetic construct
  source 1..75: mol_type = other DNA
gaaatggaaaacatcgcagtttgggtggctgatggagcaatcgataaggagctactcaaaaacatcattcatgat

SEQ ID NO: 856323 - DNA, 75 bp, synthetic construct
  source 1..75: mol_type = other DNA
ccgccagctgtgagagcaaatttaaagcccatcccgatcattattttaccgaagatgccagtgaacatcaccatc

SEQ ID NO: 856324 - DNA, 75 bp, synthetic construct
  source 1..75: mol_type = other DNA
aaggttcgcctacggtgacaggaattatcagtctcagtccgggtggggaagcctctcttttgcgtgtaacggccg

SEQ ID NO: 856325 - DNA, 75 bp, synthetic construct
  source 1..75: mol_type = other DNA
acaacaaccagactgcttctgaacagacattatccccggacgagagccacgtattgcataaggtgagagatcccg

SEQ ID NO: 856326 - DNA, 75 bp, synthetic construct
  source 1..75: mol_type = other DNA
gccttggggcggcgattaatacggcggtagggcttggtctgtatccggattacgcaacggctgtcgacaaaatgg

SEQ ID NO: 856327 - DNA, 75 bp, synthetic construct
  source 1..75: mol_type = other DNA
agggttattccagtagccagcatcaaccaggtgaagttaaccacagagagttttgtgcgcagagatgacatctgc

SEQ ID NO: 856328 - DNA, 75 bp, synthetic construct
  source 1..75: mol_type = other DNA
gaaagtttcaggcggatggagaatatataaaaactttcaatatatttccgaacatgttgatacatttgattataa

SEQ ID NO: 856329 - DNA, 75 bp, synthetic construct
  source 1..75: mol_type = other DNA
cgcagccggtgctaaaaggttcgctggccagtcttgaaggtgagatccgcgatgtgcaggcaattggcacacatc

SEQ ID NO: 856330 - DNA, 75 bp, synthetic construct
  source 1..75: mol_type = other DNA
ccttgctgtatgaaggttacggtattcgcaaaggcatgtggacggtgagctggctacgcgacatgttaggcgagt

SEQ ID NO: 856331 - DNA, 75 bp, synthetic construct
  source 1..75: mol_type = other DNA
ttgtgcaagtctgggggcagcgattaatacggcggtaggtctggggctatacccggattacgcaacggctgtcga

SEQ ID NO: 856332 - DNA, 75 bp, synthetic construct
  source 1..75: mol_type = other DNA
ttcagaaacatggatggcctggtggccatttattttgaagccgcagctgttattacggtgcttgttctgctggga

SEQ ID NO: 856333 - DNA, 75 bp, synthetic construct
  source 1..75: mol_type = other DNA
gccaacggtaactgaagagggtatcgtctggccggaagggccacgcccgccgtcgcgcgactatacaccactgta

SEQ ID NO: 856334 - DNA, 75 bp, synthetic construct
  source 1..75: mol_type = other DNA
aatgagcccatcgagaacaagatcatcctacattcaccaactaacgtgatcttctttggcccccctggcactggc

SEQ ID NO: 856335 - DNA, 75 bp, synthetic construct
  source 1..75: mol_type = other DNA
gaccggaaattggttacagaaaaactatgaattgaaacaagccatacacgcccaatctcctgacacagatcctta

SEQ ID NO: 856336 - DNA, 75 bp, synthetic construct
  source 1..75: mol_type = other DNA
gccaacggtaactgaagaggggatcgtctggccggaagggccacgtccaccgtcgcgcgactatacgccactgta

SEQ ID NO: 856337 - DNA, 75 bp, synthetic construct
  source 1..75: mol_type = other DNA
gcattgtccttggcggcgaggcgctggacggttttacatcgcgcggctttgacgatcacagcaaactcttctttc

SEQ ID NO: 856338 - DNA, 75 bp, synthetic construct
  source 1..75: mol_type = other DNA
gtacaggataacgcctgtcaggattatctcgtgcaccttgatggttttaatatcgaatggttggcgcatgatgag

SEQ ID NO: 856339 - DNA, 75 bp, synthetic construct
  source 1..75: mol_type = other DNA
gacggtgtaaatgatgccccggcgctagcagcggctgacgtgggcatagctatgggaacgggtacagatgtggca

SEQ ID NO: 856340 - DNA, 75 bp, synthetic construct
  source 1..75: mol_type = other DNA
tggtcatgtggttgcgatggcgggggacggtgtaaatgatgccccggcgctagcagcggctgacgtgggcatagc

SEQ ID NO: 856341 - DNA, 75 bp, synthetic construct
  source 1..75: mol_type = other DNA
ctgctttatccggcgtatggcatactcctctcgccggtgatcgcggcagctgctatggccctttcctccgtcagc

SEQ ID NO: 856342 - DNA, 75 bp, synthetic construct
  source 1..75: mol_type = other DNA
aaggcgatttgatgatactgaacagagcacgtcatctgtcagaaatcaccatgacaaatatccggcagaatctgt

SEQ ID NO: 856343 - DNA, 75 bp, synthetic construct
  source 1..75: mol_type = other DNA
gaatactgctgtcgccagttattgcggcggcggccatggctctttcttccgtcagcgtcattgtgaatgcgttgc

SEQ ID NO: 856344 - DNA, 75 bp, synthetic construct
  source 1..75: mol_type = other DNA
cctgtccctgcgcgctggggctggccacgccgatgtcgataatggtgggggtgggcaaaggagcccaggccgggg

SEQ ID NO: 856345 - DNA, 75 bp, synthetic construct
  source 1..75: mol_type = other DNA
catacctttcaaaagactcagtgccaccgagtgcaggttcttttattttaggcggtgctatttttgctgcatttt

SEQ ID NO: 856346 - DNA, 75 bp, synthetic construct
  source 1..75: mol_type = other DNA
cagtgatgtggaatgctccatatcgttcgctatcgataaccaacgtctcgcagtgttaaacggcgatgcgaaggt

SEQ ID NO: 856347 - DNA, 75 bp, synthetic construct
  source 1..75: mol_type = other DNA
atgcaaaaggtaaaattacccctgactctcgatccggttcgtacggctcaaaaacgccttgattaccagggtatt

SEQ ID NO: 856348 - DNA, 75 bp, synthetic construct
  source 1..75: mol_type = other DNA
tgaagtgtccgaagcggacatggtctttggtgaactgcctgaagaagcgcaaaaaccaaacccatttgccgtatt

SEQ ID NO: 856349 - DNA, 75 bp, synthetic construct
  source 1..75: mol_type = other DNA
ttattggcaatcctcgccagtaaatcccgtgacaatagtcgcacgccaatgcaatggagcaacggcgataatgcc

SEQ ID NO: 856350 - DNA, 75 bp, synthetic construct
  source 1..75: mol_type = other DNA
aagtctgtgagttctgggccgatcgcggggtcgacgggttacgcctggatgtagtgaatttgatctctaaagatc

SEQ ID NO: 856351 - DNA, 75 bp, synthetic construct
  source 1..75: mol_type = other DNA
atatccttcaaccaacggagcgttcgcctgggcagataacaatgatggtcagggataccgttgatggcctcgttt

SEQ ID NO: 856352 - DNA, 75 bp, synthetic construct
  source 1..75: mol_type = other DNA
gggaaaaatattgttgctgccgctatgcgtatccgttacgcccaggggtggcagtggaccgttgaagtggatggt

SEQ ID NO: 856353 - DNA, 75 bp, synthetic construct
  source 1..75: mol_type = other DNA
ctaccggcgatgtcacctatgcgcgggatcaggttacggaatttaagtcattcccaatgaccttcgcattgcaca

SEQ ID NO: 856354 - DNA, 75 bp, synthetic construct
  source 1..75: mol_type = other DNA
gacgacattatttggctccggcgttggtgagcgggaagttggtaagctgacgtcaatcatcatgaacaaaatgct

SEQ ID NO: 856355 - DNA, 75 bp, synthetic construct
  source 1..75: mol_type = other DNA
ttccggtgcatgattctgaacactgcgaagtgtccgaagcggacatggtctttggtgaactgcctgaagaagtgc

SEQ ID NO: 856356 - DNA, 75 bp, synthetic construct
  source 1..75: mol_type = other DNA
ttccggtgcatgattctgaacactgtgaagtgtccgaagcggacatggtctttggtgaactgctgaagaagcgca

SEQ ID NO: 856357 - DNA, 75 bp, synthetic construct
  source 1..75: mol_type = other DNA
gttcttgtcatacccaatcactttccagaaatacacatccgcaggctcaggtgtttctgctttggtcaacggtgc

SEQ ID NO: 856358 - DNA, 75 bp, synthetic construct
  source 1..75: mol_type = other DNA
atcagaaattaatcgcgctgcgtaaacaagaacccattctgacatggggcgattaccaggatctgctgccaaaca

SEQ ID NO: 856359 - DNA, 75 bp, synthetic construct
  source 1..75: mol_type = other DNA
aataataaaaacctcaaatctcttcgtgatcttcaaattgaatttgtaacctcccttataggttgtttaagagtg

SEQ ID NO: 856360 - DNA, 75 bp, synthetic construct
  source 1..75: mol_type = other DNA
ccacaagtgatttatctgaacttgctaacctatatacgacaaggtcaatgctggccaggtttgatattaagttaa

SEQ ID NO: 856361 - DNA, 75 bp, synthetic construct
  source 1..75: mol_type = other DNA
acaggctgacgcacaggagctgaaaaatgcccgtgaagaagggctggtgctggaaacggaattgtttaccttcat

SEQ ID NO: 856362 - DNA, 75 bp, synthetic construct
  source 1..75: mol_type = other DNA
gacctaaacatcgagtttaactttagtggtggttcaggtgaaatataccaagaagcagatatgctttttacagct

SEQ ID NO: 856363 - DNA, 75 bp, synthetic construct
  source 1..75: mol_type = other DNA
tccggtctccccgcgctttctaactttgactttaacttcaacagaactggtgtagagggatatagcgatttaaaa

SEQ ID NO: 856364 - DNA, 75 bp, synthetic construct
  source 1..75: mol_type = other DNA
caaatgggtacttcagatcactaatatctgtgtcgtttagcgcatttgatccattctccccccccgaggaacagc

SEQ ID NO: 856365 - DNA, 75 bp, synthetic construct
  source 1..75: mol_type = other DNA
agcacgtccacatagtgaagccattcgcgacgcgcagcggaaaaaaccgaaagctccggtacatgccgtgttgac

SEQ ID NO: 856366 - DNA, 75 bp, synthetic construct
  source 1..75: mol_type = other DNA
agcacgtccgcataatgaagccattcgcgatgcgcaacggaaaaaaccgaaagttccggtacatgccgtgttgac

SEQ ID NO: 856367 - DNA, 75 bp, synthetic construct
  source 1..75: mol_type = other DNA
tggcatttgtacagttcttgttttttctttgttatgtaataaaagcaaagctttatattagagagaaatattata

SEQ ID NO: 856368 - DNA, 75 bp, synthetic construct
  source 1..75: mol_type = other DNA
acgtccgagacgaacgccaggtcttctgaaacggcagcggaacagagcgcctcagctgcggcagactctgagaca

SEQ ID NO: 856369 - DNA, 75 bp, synthetic construct
  source 1..75: mol_type = other DNA
aacgcatttttattgtgccaacggaagatggcgaaggctttacccgtgaatggcaggctgttcccgtgctaaacc

SEQ ID NO: 856370 - DNA, 75 bp, synthetic construct
  source 1..75: mol_type = other DNA
tgactgtatttaagaaggataaaattattatgtctgaaaatataaaagtaacgggcagatattcattaagcccta

SEQ ID NO: 856371 - DNA, 75 bp, synthetic construct
  source 1..75: mol_type = other DNA
gtatgactagtgggcagccaatgacgtcgattggttatgagcttattgttatctccgcctgcgttttaggtggcg

SEQ ID NO: 856372 - DNA, 75 bp, synthetic construct
  source 1..75: mol_type = other DNA
tgaagaatatgaacgtgcgcgtgacgtggaactaccgcagcatgagcacgaaaatcatcaacatgatcatgacaa

SEQ ID NO: 856373 - DNA, 75 bp, synthetic construct
  source 1..75: mol_type = other DNA
tggctgtcattctccccggagcagcgcgaaggtacgctgattatttccggcacaaacgaatcaagggtaatcctc

SEQ ID NO: 856374 - DNA, 75 bp, synthetic construct
  source 1..75: mol_type = other DNA
ggaaaagctatatgaccatgagcgcgaaggccgttctggagtcgcagggctttaacgtcaccgcactggctccct

SEQ ID NO: 856375 - DNA, 75 bp, synthetic construct
  source 1..75: mol_type = other DNA
gaaaaacgtgtcccgatgactcgcctgcgtaagcgtgtggcagagcgtctgctggaagcgaaaaactccaccgct

SEQ ID NO: 856376 - DNA, 75 bp, synthetic construct
  source 1..75: mol_type = other DNA
cgcgaatccgtgggcttcctggtaacgatcaaagagttgctggaagatccgacgcgtctgctgctggacgtgtag

SEQ ID NO: 856377 - DNA, 75 bp, synthetic construct
  source 1..75: mol_type = other DNA
gacgagcagatccgcgcattctctcgccggtcagagcaaattgaaaagggacttgctgaaatgggcctgacgcgg

SEQ ID NO: 856378 - DNA, 75 bp, synthetic construct
  source 1..75: mol_type = other DNA
atgaaaaagccgtagccgcagccgtgcgcgaggctgaaaaacttgctcaggcccggactactcacaagggtaaat

SEQ ID NO: 856379 - DNA, 75 bp, synthetic construct
  source 1..75: mol_type = other DNA
gcgcggttacagaaattgtgacgagcaaagatcggtttgtggccgcacatggttatgccggtaccggtaaaagct

SEQ ID NO: 856380 - DNA, 75 bp, synthetic construct
  source 1..75: mol_type = other DNA
ccagtcccgattgctggccgtggcaaataaaaaggctatcggccaggcatcaaagcaggatattgaagccgccta

SEQ ID NO: 856381 - DNA, 75 bp, synthetic construct
  source 1..75: mol_type = other DNA
aagccgcgctaaatgcagcagaagggaaaataaaggcgtcgttgacccacgtaaccagcatcgtagaggaaaaaa

SEQ ID NO: 856382 - DNA, 75 bp, synthetic construct
  source 1..75: mol_type = other DNA
cgagggctggttagccagcagaacgttaaaacccgaacagttaaaagcggttatgggaattattcatacccccaa

SEQ ID NO: 856383 - DNA, 75 bp, synthetic construct
  source 1..75: mol_type = other DNA
tcgcgaatccgtgggcttccttgtaacgatcaaagagttgctggaagatccgacgcgtctgctgctggacgtgta

SEQ ID NO: 856384 - DNA, 75 bp, synthetic construct
  source 1..75: mol_type = other DNA
gcagtgcaaagcgcctcaaatccctgcaggaagataactatttggatcacgctcgttctgtagctatccgcatgt

SEQ ID NO: 856385 - DNA, 75 bp, synthetic construct
  source 1..75: mol_type = other DNA
ttgctgacaatgatgcgcacggcgcaggtctggcggctgcctttaaatgtgggcataagaatctcatgagtcgta

SEQ ID NO: 856386 - DNA, 75 bp, synthetic construct
  source 1..75: mol_type = other DNA
gcatcaaaaacaggttatgacggtacatcggcggatgcactgtgtgcggtgctggtggcggtggtgtcggtgaag

SEQ ID NO: 856387 - DNA, 75 bp, synthetic construct
  source 1..75: mol_type = other DNA
acgatgatcgggcgcaagagatactggatgcgctggagaaaaaacatggggcgcttcttcagtgccgggccgtga

SEQ ID NO: 856388 - DNA, 75 bp, synthetic construct
  source 1..75: mol_type = other DNA
tgaccgaagatgaaacacttgaacaggcctatgatatttttctcgaactggccgcagataatctcgatccggctg

SEQ ID NO: 856389 - DNA, 75 bp, synthetic construct
  source 1..75: mol_type = other DNA
atgttctgctgttcaatcttcagtttgaagagcgcggcggcgcggagttattcgatccggcagaagactggcagg

SEQ ID NO: 856390 - DNA, 75 bp, synthetic construct
  source 1..75: mol_type = other DNA
cttccgttgatgcgttgtgtgcggtcctggtgtcggtgctctcagtaaaagtcctgtcattcatccaccagcagg

SEQ ID NO: 856391 - DNA, 75 bp, synthetic construct
  source 1..75: mol_type = other DNA
cgcctgtcgacgcattgtgtgcagtgctggtgtcagtggtgtcggtgaagattctgtcgttcatccaccagcagg

SEQ ID NO: 856392 - DNA, 75 bp, synthetic construct
  source 1..75: mol_type = other DNA
tggcgcgtggtggcacattttctggtgtcgtttattgtcggcgtgctgggagcgcgtgtgctgtcagcctggatt

SEQ ID NO: 856393 - DNA, 75 bp, synthetic construct
  source 1..75: mol_type = other DNA
tggcgtgtggcggcgcattttctggtgtcgttcattatcggcgtgctgggggcagaggttctggcgtcctggctg

SEQ ID NO: 856394 - DNA, 75 bp, synthetic construct
  source 1..75: mol_type = other DNA
attctctcgttcatccaccagcaggatattgcatcgctggtgtccggtgtgttctcccgcctgcggggtggagga

SEQ ID NO: 856395 - DNA, 75 bp, synthetic construct
  source 1..75: mol_type = other DNA
gtacggctgcggcgctcggtggggcgacggtattcgggctgtttaccgggacggatttcgggattgtgttcggcg

SEQ ID NO: 856396 - DNA, 75 bp, synthetic construct
  source 1..75: mol_type = other DNA
aggtgatggtaatagcggaagtacaggctacgccacgctgaattatcgcggtggttacggcaatgccaacatcgg

SEQ ID NO: 856397 - DNA, 75 bp, synthetic construct
  source 1..75: mol_type = other DNA
atgtctggaaatataggggcaaatccagcaatcatcaaactgtcttggatagaagccgcagtggatgcgcacaaa

SEQ ID NO: 856398 - DNA, 75 bp, synthetic construct
  source 1..75: mol_type = other DNA
ggatgcgcacaaaacgttaaatttcgaacccagtggaagaaagcgtattggctttgacgtggctgacagtggtac

SEQ ID NO: 856399 - DNA, 75 bp, synthetic construct
  source 1..75: mol_type = other DNA
tgacgacgctgaccgcacggaacaggtgcaggaaaaagtgtcagtggaggaaatcagtctgccactgctgacgaa

SEQ ID NO: 856400 - DNA, 75 bp, synthetic construct
  source 1..75: mol_type = other DNA
ctgctgaccgcgcctaaactgcaccgtatgacgcaggatgacgctgcagacaaagcggcgaaagctgctgtagcg

SEQ ID NO: 856401 - DNA, 75 bp, synthetic construct
  source 1..75: mol_type = other DNA
aaattacgtaagctggaatttctcgcggcagatgctctgcgcgaaggtgccgatacgctgattactgccggcgcg

SEQ ID NO: 856402 - DNA, 75 bp, synthetic construct
  source 1..75: mol_type = other DNA
tgtgaattaccagaggtttaacgccggtgctggtgtgcatgagccagatgacgaatacaacggcatccccaacaa

SEQ ID NO: 856403 - DNA, 75 bp, synthetic construct
  source 1..75: mol_type = other DNA
gggaacagtaaattccgcttcgtgggggctgatgccttctcgccagacgaactgcgcaccgatttgttcagcgac

SEQ ID NO: 856404 - DNA, 75 bp, synthetic construct
  source 1..75: mol_type = other DNA
tcgccgactggctgcactcaacatgctggcagagcgtggcatcattccggctgactggcctgttcgggtgaaggt

SEQ ID NO: 856405 - DNA, 75 bp, synthetic construct
  source 1..75: mol_type = other DNA
tcgccgactggctgcactcaacatgctggcagagcgtggcatcattccggctgactggcctgtacgtgtgaaggt

SEQ ID NO: 856406 - DNA, 75 bp, synthetic construct
  source 1..75: mol_type = other DNA
ataccctgcctggtgaccgttacggtgtcgccgcaggcggtcgccgactggcagcactcaacatgctggcagagc

SEQ ID NO: 856407 - DNA, 75 bp, synthetic construct
  source 1..75: mol_type = other DNA
gtccgcttgacacgctggagagcgctatcggattccacatgcgcgactggtggcagccgacaaaagcaaactttt

SEQ ID NO: 856408 - DNA, 75 bp, synthetic construct
  source 1..75: mol_type = other DNA
atgtcagttacagagtctaaggcaaaaacggagcgtaaatccagccgtaaaccgtcaaaagagcaggagactgcc

SEQ ID NO: 856409 - DNA, 75 bp, synthetic construct
  source 1..75: mol_type = other DNA
gtggttatgttgcaggtatgatggctgtgccggataacgttaccgatccgctgatgtcactggaagtctatggtc

SEQ ID NO: 856410 - DNA, 75 bp, synthetic construct
  source 1..75: mol_type = other DNA
ccagtgaagggggggtaatttttgacagccgggccatgagtaaactgggaattattaacactttgtgggatggag

SEQ ID NO: 856411 - DNA, 75 bp, synthetic construct
  source 1..75: mol_type = other DNA
aaaagctattgtattgagaaggggatcctctgtatgaaaaaaaatgacattttacagcgtggtccgaaccgtttc

SEQ ID NO: 856412 - DNA, 75 bp, synthetic construct
  source 1..75: mol_type = other DNA
ttgatggccgggcaatgagtaaacttggaatacttaactctttgtgggatggtggttctcttttcatcgacagga

SEQ ID NO: 856413 - DNA, 75 bp, synthetic construct
  source 1..75: mol_type = other DNA
acgctggggcagccgttaaacgatacggtggtgcttgttaaagcgcctggcgcaaaagatgcaaaagtcgaaaac

SEQ ID NO: 856414 - DNA, 75 bp, synthetic construct
  source 1..75: mol_type = other DNA
cagccatagcgatgatattaagcagctctattacggagtcagcggtggggtactggctcatgccaatggcgtaac

SEQ ID NO: 856415 - DNA, 75 bp, synthetic construct
  source 1..75: mol_type = other DNA
gaaatttacatgggcctgttaatctttactctctgattctggctgattccggtgaaaggaaaacgaccgtggata

SEQ ID NO: 856416 - DNA, 75 bp, synthetic construct
  source 1..75: mol_type = other DNA
ctgctgcatacggcccggctgaacggtctggagccggtagcctggctgcgtgatgtactggagaagctgccgtcg

SEQ ID NO: 856417 - DNA, 75 bp, synthetic construct
  source 1..75: mol_type = other DNA
catcacgtatgcgctgaagcggtggcaggcgctgacgacgtacctggatgacggacaggtgccggtggacaacaa

SEQ ID NO: 856418 - DNA, 75 bp, synthetic construct
  source 1..75: mol_type = other DNA
aggttacgatccatctggagtaagggaaggcgtgaagtctatcctaaaccgcttagcgcgggttaaagcgggggg

SEQ ID NO: 856419 - DNA, 75 bp, synthetic construct
  source 1..75: mol_type = other DNA
gttctcttttcatcgacaggaaatcatctcccggaattattttgaaggatccaagactgacgatatcggtgatga

SEQ ID NO: 856420 - DNA, 75 bp, synthetic construct
  source 1..75: mol_type = other DNA
gcttgaaacgcatctgaataagtctcctgttccgccgcagatacgtcgaacaatttttaatgagacaacgataga

SEQ ID NO: 856421 - DNA, 75 bp, synthetic construct
  source 1..75: mol_type = other DNA
agcaatcgctcttttgctcttgtatccagtgaaggggggataatttttgacagccgggccatgagtaaactggga

SEQ ID NO: 856422 - DNA, 75 bp, synthetic construct
  source 1..75: mol_type = other DNA
cttatatccgtggctgaagaatctgttttctgtttgggtgattttattttgcccttcaatgggaccgctaccacg

SEQ ID NO: 856423 - DNA, 75 bp, synthetic construct
  source 1..75: mol_type = other DNA
tgccggagcagttctcagcggcatcgtgtcttgccaatctgcaattttatgaaccgcgcactattcacgactcgt

SEQ ID NO: 856424 - DNA, 75 bp, synthetic construct
  source 1..75: mol_type = other DNA
caatactggcaggcaacgggggatgaaagtttcattgcccacgaaggtatggcgttacttctggaaaccgcaaaa

SEQ ID NO: 856425 - DNA, 75 bp, synthetic construct
  source 1..75: mol_type = other DNA
attgccataaatggtgagattttctcgttatcccgcgaagcatggcagcgtgagcttaactttgccagtggcgaa

SEQ ID NO: 856426 - DNA, 75 bp, synthetic construct
  source 1..75: mol_type = other DNA
caaagagttgtggctgccagaaactcagcccgacggcgttttgccgcaggatgattcgtttatggctaagccggc

SEQ ID NO: 856427 - DNA, 75 bp, synthetic construct
  source 1..75: mol_type = other DNA
tgagcttgactttgccagtggcgaattacgccgcaacgttgtctggtgtaccagtaacggcgcgcgttacaccat

SEQ ID NO: 856428 - DNA, 75 bp, synthetic construct
  source 1..75: mol_type = other DNA
gatgtagtcaatttacttgttaaacgcgctgtatttcataagcaaatttcatccgtggatgaactgacaaaatta

SEQ ID NO: 856429 - DNA, 75 bp, synthetic construct
  source 1..75: mol_type = other DNA
acagcgcggaacagattctggccctgggtgtgccgcctgtctttattgatcaggtgatggcgcttaccgatgaag

SEQ ID NO: 856430 - DNA, 75 bp, synthetic construct
  source 1..75: mol_type = other DNA
ctgacaaaattaacgacagaacttgccagctattgcgctgatgaatttaaaaaactgaacgacaaaaggaactgg

SEQ ID NO: 856431 - DNA, 75 bp, synthetic construct
  source 1..75: mol_type = other DNA
tgagcttgactttgccagtggcgaattacgccgcaacgttgtctggcgtaccagcaacggcgcaggttacaccat

SEQ ID NO: 856432 - DNA, 75 bp, synthetic construct
  source 1..75: mol_type = other DNA
ctgacgaaattaacgacagaaatcgccagttattgcgctgatgaatttaagaagctgaacgacaaaaggagctgg

SEQ ID NO: 856433 - DNA, 75 bp, synthetic construct
  source 1..75: mol_type = other DNA
gccagctcggccttcaaccctatgagcctgtttctcaggctatgcatgaattcaccgatactcgtgatgaaaaca

SEQ ID NO: 856434 - DNA, 75 bp, synthetic construct
  source 1..75: mol_type = other DNA
aaccccaattcagccagcataccctgaataaatatgcctcattaatggcgcaggggaacggctatcttgggcttc

SEQ ID NO: 856435 - DNA, 75 bp, synthetic construct
  source 1..75: mol_type = other DNA
ctggccttcggcatcactttacgactacccgccgcaagaacagtggaacgctttccagaaactggcacaaatgct

SEQ ID NO: 856436 - DNA, 75 bp, synthetic construct
  source 1..75: mol_type = other DNA
gatctggggcagcaaacggatatcgatatctatcttgatcggcacgtggtacgccagggacgctatctttcgctg

SEQ ID NO: 856437 - DNA, 75 bp, synthetic construct
  source 1..75: mol_type = other DNA
cttattcaacttggtcttgataaagaaaagcgcgacataactgaatctgttatcgcgatttatcagagcgaatta

SEQ ID NO: 856438 - DNA, 75 bp, synthetic construct
  source 1..75: mol_type = other DNA
cgttatgaaaaatggcgatttgtctcttattcaactttgtcttgataaagaaaaacgcgacataactgaatctgt

SEQ ID NO: 856439 - DNA, 75 bp, synthetic construct
  source 1..75: mol_type = other DNA
gtactcgcatgatggaaattcaggcctattatgaaagctgcctgaatccacaactgatcaccccttcagaaagcc

SEQ ID NO: 856440 - DNA, 75 bp, synthetic construct
  source 1..75: mol_type = other DNA
ggcgtcgattcgcggggaagagagtgagcaaatcgagctactcaatattcgcaaagaaacgcatgaagagtatgc

SEQ ID NO: 856441 - DNA, 75 bp, synthetic construct
  source 1..75: mol_type = other DNA
agcagcattgcggcaaaaggcttaaccggcgaaggctacaaaggccacgttttctgggatacagaagtatttttg

SEQ ID NO: 856442 - DNA, 75 bp, synthetic construct
  source 1..75: mol_type = other DNA
gatcaactgccgctgatcgcgctggaaatcagtattaccccgctggacgccgaggcatcagtgctgatctcaaca

SEQ ID NO: 856443 - DNA, 75 bp, synthetic construct
  source 1..75: mol_type = other DNA
aggggactgaaatcgatcttggtgctgatccgcatagctgtgatgacggtatccacgctgccgcaactggcgcta

SEQ ID NO: 856444 - DNA, 75 bp, synthetic construct
  source 1..75: mol_type = other DNA
tatttctacatgcgtgaccagtacaacctgacactctcacgccaacaaacgcagctttttaacgcctggaacaag

SEQ ID NO: 856445 - DNA, 75 bp, synthetic construct
  source 1..75: mol_type = other DNA
gcaattttatgtatagtcagtggaacggcggcgaagggcagtacgggcagtgtgccatgaaggtggatttcaaag

SEQ ID NO: 856446 - DNA, 75 bp, synthetic construct
  source 1..75: mol_type = other DNA
tatttctatatgcgtgaccagtacaacctgacactctcacgccagcaaacgcaactgtttaacgcctggaacaag

SEQ ID NO: 856447 - DNA, 75 bp, synthetic construct
  source 1..75: mol_type = other DNA
ggcaagcccgccagtggtcgtgccgtattgtctcaggaacaggatggcattaaatcgcatacccacagcgccagc

SEQ ID NO: 856448 - DNA, 75 bp, synthetic construct
  source 1..75: mol_type = other DNA
tttgacaaatctgcatacccgaaacttgcagcagcttatccgtcaggcgtgatccctgatatgcgtggctggacg

SEQ ID NO: 856449 - DNA, 75 bp, synthetic construct
  source 1..75: mol_type = other DNA
tccattcttcccgcaaaagttgccgtagataactcacaaaataaacggaatgcgcaagcctttggcgcacttatt

SEQ ID NO: 856450 - DNA, 75 bp, synthetic construct
  source 1..75: mol_type = other DNA
acaacggatatccaacagcgtatggaaatatcattcacctgaaagggatgacagccgttggcgaaggtgagttac

SEQ ID NO: 856451 - DNA, 75 bp, synthetic construct
  source 1..75: mol_type = other DNA
gccagtgcctacacacatctctggaacacggattttgtcagtggcttcgcaccggttaccgaatcactgttcaac

SEQ ID NO: 856452 - DNA, 75 bp, synthetic construct
  source 1..75: mol_type = other DNA
gatttttttgtttggatgagtttcacaatttccatatgagcgatgatgtccttcgtgaaagactccgttcaatag

SEQ ID NO: 856453 - DNA, 75 bp, synthetic construct
  source 1..75: mol_type = other DNA
aaaaatgaaatggtgggaaaaagattatgaagaactagaactgattctttcagaatttaaatatccagactcgga

SEQ ID NO: 856454 - DNA, 75 bp, synthetic construct
  source 1..75: mol_type = other DNA
gcgcgtcgagtcctgaagtcactactttactcggaagcaatccggtaagaatttaccctttcggaattcaggacg

SEQ ID NO: 856455 - DNA, 75 bp, synthetic construct
  source 1..75: mol_type = other DNA
ggagctaaaaaagcagacattggtatcagcgccagaaggctcaaatctttacaggacgataactatctggaccat

SEQ ID NO: 856456 - DNA, 75 bp, synthetic construct
  source 1..75: mol_type = other DNA
gctctgcatgaaactgattctggcgatggggtgatttttttaaccgatatagcaggcgctgcaccttatcgtgtt

SEQ ID NO: 856457 - DNA, 75 bp, synthetic construct
  source 1..75: mol_type = other DNA
gcaccgtactggacccatttttaggtagcggaacaacttgccgtgtagcagcacaaatgggatattcatcgattg

SEQ ID NO: 856458 - DNA, 75 bp, synthetic construct
  source 1..75: mol_type = other DNA
acttttgacaaatctgcttacccgaaacttgcagccgcttatccgtcaggcgtgatccctgatatgcgtggctgg

SEQ ID NO: 856459 - DNA, 75 bp, synthetic construct
  source 1..75: mol_type = other DNA
gcatatcacgcgctggggcggacaggaaagagaccccgaaacaaagcgctatcgctactcattcgatgttgactg

SEQ ID NO: 856460 - DNA, 75 bp, synthetic construct
  source 1..75: mol_type = other DNA
ttgtccttcaattctgacagagaaaggagctgcaatgtttatacgccatcaaggtgtcgtaatacagataatatt

SEQ ID NO: 856461 - DNA, 75 bp, synthetic construct
  source 1..75: mol_type = other DNA
ccgtgtggggcagtggttcaccaccagcaacggtcacgttctgcgggtttgcctggtcaatacagaaagccagaa

SEQ ID NO: 856462 - DNA, 75 bp, synthetic construct
  source 1..75: mol_type = other DNA
atgattcgccgcgtcgttaattccctgtatcaccgatacaaccgttgcccccgtgtggggcagtggttcaccacc

SEQ ID NO: 856463 - DNA, 75 bp, synthetic construct
  source 1..75: mol_type = other DNA
acttcatcgaaagtctggaagcgatcaaaccgtacatcatcggcaactcccgcaccgcggatcagggtactaaca

SEQ ID NO: 856464 - DNA, 75 bp, synthetic construct
  source 1..75: mol_type = other DNA
aaaatggcgatttgtctcttattcaacttggtcttgataaagaaaaacgcgaaataactgaatctgttatcgcga

SEQ ID NO: 856465 - DNA, 75 bp, synthetic construct
  source 1..75: mol_type = other DNA
gatcagtacggtcatggacttaacgcctaccgtattaattcttacaccagtattaatgccattagtgaaagaagc

SEQ ID NO: 856466 - DNA, 75 bp, synthetic construct
  source 1..75: mol_type = other DNA
ggttgtctgccaggttcagggacgcactcatacccttagctatccactggcagtgtttcagtccggaaaaatgtt

SEQ ID NO: 856467 - DNA, 75 bp, synthetic construct
  source 1..75: mol_type = other DNA
gcggggtataaccagctttgtgatgaaaatattgataattttgattttctgaatacacctgaaaagacgttaatc

SEQ ID NO: 856468 - DNA, 75 bp, synthetic construct
  source 1..75: mol_type = other DNA
gaatacacctgaaaagacgttaatccttgatggagtcaggctgtgtgaaaagaaaatgacatcaaagttatcagg

SEQ ID NO: 856469 - DNA, 75 bp, synthetic construct
  source 1..75: mol_type = other DNA
agtcgtgtgtgaattactggggcgtaactacaccattagctacccactggcggtgtttcagtccgggaaaatgtt

SEQ ID NO: 856470 - DNA, 75 bp, synthetic construct
  source 1..75: mol_type = other DNA
atgtgggcgttgggcaacgctgggcgcgcggcaactggctggtggtatgacaacttgctggatgaaaatcttcag

SEQ ID NO: 856471 - DNA, 75 bp, synthetic construct
  source 1..75: mol_type = other DNA
ggaaaaacactttgctgaaattgtgaaagatttcggcgaaaccagtatgaatgataacgggctggatactggcga

SEQ ID NO: 856472 - DNA, 75 bp, synthetic construct
  source 1..75: mol_type = other DNA
ggcaggcggtacagctaacgcacaatctaccttcgagcaaaaagcggcaaatccctttgagaataacaatgatgg

SEQ ID NO: 856473 - DNA, 75 bp, synthetic construct
  source 1..75: mol_type = other DNA
ccgccacgttcagcgaatgctgaaactggcagaccttgccccagtgatcctcgatgcgctggcagaagaccacat

SEQ ID NO: 856474 - DNA, 75 bp, synthetic construct
  source 1..75: mol_type = other DNA
ccgccacgttcagcgaatgctgaaactggcagaccttgccccagtgatcctagatgcgctggcagaagaccccat

SEQ ID NO: 856475 - DNA, 75 bp, synthetic construct
  source 1..75: mol_type = other DNA
ccgtcagcgaactggcggagtccattaagggcgttggcctgttgcagaatctggtcgtgcatacccagcctggtg

SEQ ID NO: 856476 - DNA, 75 bp, synthetic construct
  source 1..75: mol_type = other DNA
ccgccacgttcagcgaatgctgaaactggccgaccttgccccagtgatcctcgatgcgctggcagaagaccccat

SEQ ID NO: 856477 - DNA, 75 bp, synthetic construct
  source 1..75: mol_type = other DNA
ccgccacgttcagcgaatgctgaaactggctgaccttgccccagtgatcctcgatgcgctggcagaagacctcat

SEQ ID NO: 856478 - DNA, 75 bp, synthetic construct
  source 1..75: mol_type = other DNA
ccgccacgttcagcgaatgctgaaactggctgaccttgccccagtgatccttgatgcgctggcagaagaccccat

SEQ ID NO: 856479 - DNA, 75 bp, synthetic construct
  source 1..75: mol_type = other DNA
tcgggatgcatattgaagagtatcacagaaggctgacaagtgatgctcccagtggaaagagaggtcagtcatggc

SEQ ID NO: 856480 - DNA, 75 bp, synthetic construct
  source 1..75: mol_type = other DNA
cggacaccttaaaaagctgcagattatcgacgccctgaatgacgccggactgtccggtgccgcacgggacgcgga

SEQ ID NO: 856481 - DNA, 75 bp, synthetic construct
  source 1..75: mol_type = other DNA
ctggtacagcagcctgaaaaagcggtggctctgatggtctggcggctgtgcagttgtgttttcgattactgcaac

SEQ ID NO: 856482 - DNA, 75 bp, synthetic construct
  source 1..75: mol_type = other DNA
tgctgattgaaacacagggcgaggtctgcctccttccccttcccgacgatgcagcagaacgcttgttcccgtcgg

SEQ ID NO: 856483 - DNA, 75 bp, synthetic construct
  source 1..75: mol_type = other DNA
actgattaagtcaccgctgaatgtgcgcacggtgccgtattccgcagagtctgtcagcgaactggcggagtccat

SEQ ID NO: 856484 - DNA, 75 bp, synthetic construct
  source 1..75: mol_type = other DNA
tgcagatgctgggacgtgccgcaggtgctcagactcagccggaagaggggaaacagttcagcggtcagcctcagc

SEQ ID NO: 856485 - DNA, 75 bp, synthetic construct
  source 1..75: mol_type = other DNA
ccgccacgttcagcgaatgctgaaactggcggaccttgccccagtgatcctcgatgcgctggcagaagaccgcat

SEQ ID NO: 856486 - DNA, 75 bp, synthetic construct
  source 1..75: mol_type = other DNA
atccctgctcagtttctgcaccgcgtgcagcatccacggcgttcagacccgcgagtgtggtcacacgtcacgcag

SEQ ID NO: 856487 - DNA, 75 bp, synthetic construct
  source 1..75: mol_type = other DNA
cattccgcaggaactggcgactgccgcatcaatgactgaaaacggtcatcgtcgggatatgcaccctgccgaaca

SEQ ID NO: 856488 - DNA, 75 bp, synthetic construct
  source 1..75: mol_type = other DNA
tcactcagtcaggaggtgctgttatccctgctcagtttctgcaccgcatgcagccttaacggtgtccagacccgc

SEQ ID NO: 856489 - DNA, 75 bp, synthetic construct
  source 1..75: mol_type = other DNA
aacgaactgatgacgcgttacgacgcgctggaaaatcagtgtgaggaatctgacctgctggaagcagaaatgaag

SEQ ID NO: 856490 - DNA, 75 bp, synthetic construct
  source 1..75: mol_type = other DNA
acctgaaaaagccgcagattatcgcagccctgaatgaggcaggactgtccggtgccgcacgggacgcggagaaga

SEQ ID NO: 856491 - DNA, 75 bp, synthetic construct
  source 1..75: mol_type = other DNA
tgtggtcacacgtcacgcagcccgctggacacgctggagagcgccatcggctttcacatgcgcgactggtggcag

SEQ ID NO: 856492 - DNA, 75 bp, synthetic construct
  source 1..75: mol_type = other DNA
atgtcagttacagagtctaaggcaaaaacggggcgtaaatccagccgtaaaccgtcaaaagatcaggagactgtc

SEQ ID NO: 856493 - DNA, 75 bp, synthetic construct
  source 1..75: mol_type = other DNA
ctggcagaccttgcacccgtcatccttgatgcgctggcagaagaccgcatcaccaccgaacactgtcaggcgctg

SEQ ID NO: 856494 - DNA, 75 bp, synthetic construct
  source 1..75: mol_type = other DNA
ccgccacgttcagcgaatgctgaaactggcggaccttgccccagtgatcctggatgcgctggcagaagaccccat

SEQ ID NO: 856495 - DNA, 75 bp, synthetic construct
  source 1..75: mol_type = other DNA
aaattacgtaaactggaatttctcgcggctgatgctctgcgcgaaggtgccgacactctgcttaccgcgggggcg

SEQ ID NO: 856496 - DNA, 75 bp, synthetic construct
  source 1..75: mol_type = other DNA
aggtggccacgtcagaaagctggcgtgacaaacagacgggggagatgcgggagcagacggaatggcaccgcgtgg

SEQ ID NO: 856497 - DNA, 75 bp, synthetic construct
  source 1..75: mol_type = other DNA
aactgcgtactgatttgtttagcgatgacggggacggttatgtggaccgtgtggcgctcgatgctgccctgctgg

SEQ ID NO: 856498 - DNA, 75 bp, synthetic construct
  source 1..75: mol_type = other DNA
accgctgggtgcctggctggatgtgtgcaccacatccacagacagataccactgaacgcaccgataacctggctg

SEQ ID NO: 856499 - DNA, 75 bp, synthetic construct
  source 1..75: mol_type = other DNA
ccactgctgacgaaaatgtcttccgaacgcacgctggcagtccaggcggcactgatgcagcaaccggacaaatcc

SEQ ID NO: 856500 - DNA, 75 bp, synthetic construct
  source 1..75: mol_type = other DNA
atgcgcgactggtggcagccgacgaaagcaaactttttcggacacctgaaaaagccgcagattatcgcagccctg

SEQ ID NO: 856501 - DNA, 75 bp, synthetic construct
  source 1..75: mol_type = other DNA
tgcggtttcgtgtcagggagcgcagtcgccataaatccgcgctggtcatgcagaagtacagccgccagcaggcac

SEQ ID NO: 856502 - DNA, 75 bp, synthetic construct
  source 1..75: mol_type = other DNA
cgcgaaaacaagaggccgtggacgtaaggccgcgcagccggagcctccgtcgcaaccgccggagggtgacgatta

SEQ ID NO: 856503 - DNA, 75 bp, synthetic construct
  source 1..75: mol_type = other DNA
atccttgtgaaaaccacgggcaccatgcagatgctgaggagtgcaccacagcagaacgctcagacgcaaccggag

SEQ ID NO: 856504 - DNA, 75 bp, synthetic construct
  source 1..75: mol_type = other DNA
acagaggctggtatggcggcaagggaggccggtcatgccgtccgtgagatggagcggtggatggtgccgaacaaa

SEQ ID NO: 856505 - DNA, 75 bp, synthetic construct
  source 1..75: mol_type = other DNA
gaaagacaaccgctgggtgcctggctggatgtgtgcaccacgtccacaggcagagacggaaaccacggagtaccg

SEQ ID NO: 856506 - DNA, 75 bp, synthetic construct
  source 1..75: mol_type = other DNA
ccgccatgtccagcgaatgctgaaactggctgaccttgcgcctgtcatcctcgatgcgctggcagaagaccgcat

SEQ ID NO: 856507 - DNA, 75 bp, synthetic construct
  source 1..75: mol_type = other DNA
atatcagccctgcaaactatgcttccaactctaaggaaagaatacgagattgatccagtaaaaacagaaaagata

SEQ ID NO: 856508 - DNA, 75 bp, synthetic construct
  source 1..75: mol_type = other DNA
ggaaaacactaaattccgcttcgtgggggctgatgctttctcacctgacgaactgcgtactgatttgttcagcga

SEQ ID NO: 856509 - DNA, 75 bp, synthetic construct
  source 1..75: mol_type = other DNA
gaaggacggtgccgcattcatggcgatgatggcagaaaaagcccgtcttgcagccctgttaccggagggatgggc

SEQ ID NO: 856510 - DNA, 75 bp, synthetic construct
  source 1..75: mol_type = other DNA
gaaaatcaaaatttgaagtcaatccttgacggtaatcctattttaagtagacaagaaaattatcatgatccctat

SEQ ID NO: 856511 - DNA, 75 bp, synthetic construct
  source 1..75: mol_type = other DNA
gaatatctgcgcaagggtgcgcaggtctacatcgaaggtcagcttcgcacccgtagctgggaagataacggtatc

SEQ ID NO: 856512 - DNA, 75 bp, synthetic construct
  source 1..75: mol_type = other DNA
aagaacgtaaggctgcggtacggcggcggaatctggagaaacgtatcaacaggcatgcaccactgtttgcggatg

SEQ ID NO: 856513 - DNA, 75 bp, synthetic construct
  source 1..75: mol_type = other DNA
cgcatggcgggcggtggcggagacagaaaaacgccgccaccagggaaacacgctggcggaatatccgtatgcggg

SEQ ID NO: 856514 - DNA, 75 bp, synthetic construct
  source 1..75: mol_type = other DNA
gggaggcagagcagaaagcccgtgcgtaccaggcgctggtcgcccaggctgaaatcgaactggcattccattcac

SEQ ID NO: 856515 - DNA, 75 bp, synthetic construct
  source 1..75: mol_type = other DNA
gatgaagaaaggtgatgcggctgaacatgcagagcaccatatgaaagacaaccgctgggtgcctggctggatgtg

SEQ ID NO: 856516 - DNA, 75 bp, synthetic construct
  source 1..75: mol_type = other DNA
acgaaaatgtcctcagagcgcacgctggcagtccaggcagcactgatgcagcagccggacaaatccctggcactt

SEQ ID NO: 856517 - DNA, 75 bp, synthetic construct
  source 1..75: mol_type = other DNA
aactgatggcacgttacgatgcgctggaaaaccagtgtgaggaatccgacctgctggaagcagaaatgaagctga

SEQ ID NO: 856518 - DNA, 75 bp, synthetic construct
  source 1..75: mol_type = other DNA
ggcaggtgaatatctgcgcaagggcgcgcaggtctacatcgaggggcaactccgtacccgtagctgggacgacaa

SEQ ID NO: 856519 - DNA, 75 bp, synthetic construct
  source 1..75: mol_type = other DNA
cctcagcagaatgggcggcactgttgcaaagttagcgatgaggcagccttttgtcttattcaaaggccttacatt

SEQ ID NO: 856520 - DNA, 75 bp, synthetic construct
  source 1..75: mol_type = other DNA
atgaaagacaaccgctgggtgcctggctggatgtgttcaccacgtccacagacggatgccactgaacgcgccgat

SEQ ID NO: 856521 - DNA, 75 bp, synthetic construct
  source 1..75: mol_type = other DNA
gtgttatcgcagaaattcccacggaacccctcagagcgcacgctggcagtccaggcagcactgatgcagcagccg

SEQ ID NO: 856522 - DNA, 75 bp, synthetic construct
  source 1..75: mol_type = other DNA
tcactcagccaggacgtgctgttatccctgctcagtttctgcaccgcgtgcagtattcacggcgttcagacccgc

SEQ ID NO: 856523 - DNA, 75 bp, synthetic construct
  source 1..75: mol_type = other DNA
gtgtgtccagcgtggtgtgcagttgcgcagtgaggatgacgcgactgacgacgctgaccgcacggaacaggtgca

SEQ ID NO: 856524 - DNA, 75 bp, synthetic construct
  source 1..75: mol_type = other DNA
cgtattccgcagagtctgtcagcgaactggcggagtccattaagggcgttggcctgttacagaatctggtcgtgc

SEQ ID NO: 856525 - DNA, 75 bp, synthetic construct
  source 1..75: mol_type = other DNA
gagcagacagaatggcatcgcgtggtgctgttcggcaagctcgcggaagtggcaggtgaatgtctgcgcaagggc

SEQ ID NO: 856526 - DNA, 75 bp, synthetic construct
  source 1..75: mol_type = other DNA
ctggtcatgcagaagtacagccgccagcaggcacgggaggcagagcagaaagcccgtgcgtaccaggcgctggtt

SEQ ID NO: 856527 - DNA, 75 bp, synthetic construct
  source 1..75: mol_type = other DNA
aaacggagcgtaaatccagccgtaaacctgcaaaaacgcaggaaactgtcctgtctgccctgctggcgcagacgg

SEQ ID NO: 856528 - DNA, 75 bp, synthetic construct
  source 1..75: mol_type = other DNA
ccgccctgttaccggagggatgggcatgggatatgacgacgttcctgtcactcagccaggaggtgctgttatccc

SEQ ID NO: 856529 - DNA, 75 bp, synthetic construct
  source 1..75: mol_type = other DNA
gtaaatctctccattctcaaattcctcggtttcgaacaaaccttcaaaaatgctctgactaccctgccgatgggc

SEQ ID NO: 856530 - DNA, 75 bp, synthetic construct
  source 1..75: mol_type = other DNA
attcttgttaagaccacgggcaccatgcagatgctggggagtgcaccacagcagaacgctcaggcgcaaccgaag

SEQ ID NO: 856531 - DNA, 75 bp, synthetic construct
  source 1..75: mol_type = other DNA
cggaggccggtacgaaaaaaggtggcgcaaaaacgaaaggccgtggacgtaaggccgcgcagccggagcctcagc

SEQ ID NO: 856532 - DNA, 75 bp, synthetic construct
  source 1..75: mol_type = other DNA
tgggaagataacggtatcacccgttacgtcactgaaattcttgttaagaccacgggcaccatgcagatgctgggg

SEQ ID NO: 856533 - DNA, 75 bp, synthetic construct
  source 1..75: mol_type = other DNA
tgttctggcagtggggcgagcgttttccgtcactggccggaatggaacgctggcagtggcaggatatgccgttct

SEQ ID NO: 856534 - DNA, 75 bp, synthetic construct
  source 1..75: mol_type = other DNA
agtgatgcgtttctgtcaggcgttaatgaccgagctgtatcgtcacctgggtgcagataccgacgttccggcggg

SEQ ID NO: 856535 - DNA, 75 bp, synthetic construct
  source 1..75: mol_type = other DNA
tcgccacaaatccgcactggttatgcagaagtacagccgtcagcaggcacgggaggcagagcagaaagcccgtgc

SEQ ID NO: 856536 - DNA, 75 bp, synthetic construct
  source 1..75: mol_type = other DNA
ggcagagcatgacctggaaactctgttctggcagtggggtgagcgttttccgtcactggccggaatggaacgctg

SEQ ID NO: 856537 - DNA, 75 bp, synthetic construct
  source 1..75: mol_type = other DNA
atgtcagttacagagtctaaggcaaaaacggagcgtaaatccagccgtaaatcgtcaaaagaacaggaaaccgcc

SEQ ID NO: 856538 - DNA, 75 bp, synthetic construct
  source 1..75: mol_type = other DNA
atgacgacgttcctgtcactcagtcaggaggtgctgttatccctgctcagtttctgcaccgcatgcagccttaac

SEQ ID NO: 856539 - DNA, 75 bp, synthetic construct
  source 1..75: mol_type = other DNA
caggatatgccattctggcaggtcatcacagaggctggtatggcggcaagggaggccagtcatgctgtccgtgag

SEQ ID NO: 856540 - DNA, 75 bp, synthetic construct
  source 1..75: mol_type = other DNA
atgagcgtacgttcacgggcactggttcccctctgcacagagcaacaggccgcatggcaggcggtggcggagacg

SEQ ID NO: 856541 - DNA, 75 bp, synthetic construct
  source 1..75: mol_type = other DNA
aaaaactccaggctgtcgctgaacaccttcgggaagccgaaggctggggatggtgcgccggacgcatggagcctg

SEQ ID NO: 856542 - DNA, 75 bp, synthetic construct
  source 1..75: mol_type = other DNA
ccggaaggatgggaacgggatatgacgacgttcctgtcactcagccaggaggtgctgttatccctgctcagcttc

SEQ ID NO: 856543 - DNA, 75 bp, synthetic construct
  source 1..75: mol_type = other DNA
atcagcctggaatgtgaacattattcgctgaccagcgatgcgccgtcagggaaggaaggtgccgcattcatggcg

SEQ ID NO: 856544 - DNA, 75 bp, synthetic construct
  source 1..75: mol_type = other DNA
ttccgtggatggcgtacagacccgggagtgtggtcacacatcacgcagcccgctggacacactggaaaccgctat

SEQ ID NO: 856545 - DNA, 75 bp, synthetic construct
  source 1..75: mol_type = other DNA
tcagtcgggatggggaggtaaaccggaagtacagaccattcgtcgtctggtgaccgaaagtgaagtggcggtggt

SEQ ID NO: 856546 - DNA, 75 bp, synthetic construct
  source 1..75: mol_type = other DNA
cgcagtgaggatgacgtggctgacgacgctgaccgcacggaacagatgcaggagaaagcgtcagtggaggaaatc

SEQ ID NO: 856547 - DNA, 75 bp, synthetic construct
  source 1..75: mol_type = other DNA
cgctgggtgcctggctggatgtgtccaccacgtccacagattgatgctactgaacacaccgctaacctggctgat

SEQ ID NO: 856548 - DNA, 75 bp, synthetic construct
  source 1..75: mol_type = other DNA
ctgtcactccgccaggaggtgctgttgtccctgctcagtttctgcaccgcgtgcagtattcacggtgttcagacc

SEQ ID NO: 856549 - DNA, 75 bp, synthetic construct
  source 1..75: mol_type = other DNA
ccttcccggtgatgcagcagagcggttgtttccgtcggtgcggtttcgtgtcagggagcgcagtcgccataaatc

SEQ ID NO: 856550 - DNA, 75 bp, synthetic construct
  source 1..75: mol_type = other DNA
tgcggttccgtgtcagggagcgcagtcgccacaaatccgcactggtcatgcagaagtacagctgtcagcaggcac

SEQ ID NO: 856551 - DNA, 75 bp, synthetic construct
  source 1..75: mol_type = other DNA
tgctgattgaaacacagggcgaggtctgcctccttccccttcccggtgatgcagcagagcggctgttcccgtcgg

SEQ ID NO: 856552 - DNA, 75 bp, synthetic construct
  source 1..75: mol_type = other DNA
aagtaacttatccgtgctgtcgccattggggcttgaatcgttggtgaagcagacaaccatgagttacccgcctgc

SEQ ID NO: 856553 - DNA, 75 bp, synthetic construct
  source 1..75: mol_type = other DNA
tggcgcagtatgacgagcaactggcggaatattacctcacccgtggcagcaataatcgccgggatacctggagcg

SEQ ID NO: 856554 - DNA, 75 bp, synthetic construct
  source 1..75: mol_type = other DNA
caatgatggcgcagaatgcattaatcgcagcggaatcgctgggattgggcgggtatatatcggcggcctgcgcaa

SEQ ID NO: 856555 - DNA, 75 bp, synthetic construct
  source 1..75: mol_type = other DNA
atccagtctaaccatgtgcggcagactgccgcagttgcggcgaaactcggtctgcactgcgtggcgctgctggaa

SEQ ID NO: 856556 - DNA, 75 bp, synthetic construct
  source 1..75: mol_type = other DNA
acctgaaaaagccgcagattatcgcagccctgaatgaagcaggactgtccggtgccgcacgggacgcagagaaga

SEQ ID NO: 856557 - DNA, 75 bp, synthetic construct
  source 1..75: mol_type = other DNA
agtttctgcaccgcatgcagccttaacggtgtccagacccgtgagtgtggtcacacgtcacgcagtccgcttgac

SEQ ID NO: 856558 - DNA, 75 bp, synthetic construct
  source 1..75: mol_type = other DNA
caccaccgaacactgtcaggcgctggcgctggagaacgacaccgcgcgtcaggtgcaggtgtttgaagccgcctg

SEQ ID NO: 856559 - DNA, 75 bp, synthetic construct
  source 1..75: mol_type = other DNA
tcgccataaatccgcactggtcatgcagaagtacagccgtcagcaggcgagggaggcagggcagaaaacccgtgc

SEQ ID NO: 856560 - DNA, 75 bp, synthetic construct
  source 1..75: mol_type = other DNA
caaaaacgcaggaaacagtcctgtctgccctgctggcgcagacggaggaagtgagcgtgccgctggcctcgctga

SEQ ID NO: 856561 - DNA, 75 bp, synthetic construct
  source 1..75: mol_type = other DNA
tctacggcataaaaaataaaaaagcaaaagcctcagaaaaaattgccaacttttttcatctcatcaaggtattac

SEQ ID NO: 856562 - DNA, 75 bp, synthetic construct
  source 1..75: mol_type = other DNA
ctcgatgcgctggcagaagaccgcatcaccaccgaacactgtcaggcgctggcgctggagaacgacaccgcgcgt

SEQ ID NO: 856563 - DNA, 75 bp, synthetic construct
  source 1..75: mol_type = other DNA
atcagcctggaatgtaaacattattcgctgaccagcgatcgccgtcagggaaggaaggtgccgcgttcatggcga

SEQ ID NO: 856564 - DNA, 75 bp, synthetic construct
  source 1..75: mol_type = other DNA
tgaccgaaagtgaagtggcggtggcggggaacagtaaattccgcttcgtgggggctgatgccttctcgccagagg

SEQ ID NO: 856565 - DNA, 75 bp, synthetic construct
  source 1..75: mol_type = other DNA
atgaagctgatgcgctgcatggcgaaggtcagggcgtggacgccggagatgcgtgccggaagcggtgtggtggtg

SEQ ID NO: 856566 - DNA, 75 bp, synthetic construct
  source 1..75: mol_type = other DNA
atcagcctggaatgtgaacattattcgctgaccagcgatgcgccatcggggaaggaaggtgccgcattcatggcg

SEQ ID NO: 856567 - DNA, 75 bp, synthetic construct
  source 1..75: mol_type = other DNA
agcaccatatgaaagacaaccgctgggtgcctggctggatgtgtgcaccacgtctacagcaagacggaaaccacg

SEQ ID NO: 856568 - DNA, 75 bp, synthetic construct
  source 1..75: mol_type = other DNA
tatctttcggttattccggcggcagatgtcattgctgctgttgataaattattgccatcctccacgacaggtacg

SEQ ID NO: 856569 - DNA, 75 bp, synthetic construct
  source 1..75: mol_type = other DNA
ttatcaggacaccatcccgatcctgtctgaaaatccagagattaacgcgctctacggcataaaaaataaaaaagc

SEQ ID NO: 856570 - DNA, 75 bp, synthetic construct
  source 1..75: mol_type = other DNA
cgatcagcgtgaccgaaatgagatgtatctttcggttattccggcggcagatgtcattgctgctgtcgataaatt

SEQ ID NO: 856571 - DNA, 75 bp, synthetic construct
  source 1..75: mol_type = other DNA
tcaccgaaagtgaagtggcggtggcagggaacagtaaattccgcttcgtgggggctgatgccttctcgccagaag

SEQ ID NO: 856572 - DNA, 75 bp, synthetic construct
  source 1..75: mol_type = other DNA
taaccgaaagtgaagtggcggtggccgggaacagtaaattccgcttcgtgggggctgatgccttctcgccagaag

SEQ ID NO: 856573 - DNA, 75 bp, synthetic construct
  source 1..75: mol_type = other DNA
taaccgaaagtgaagtggcggtggcagggaacagtaaattccgcttcgtgggggctgatgccttctcgccagacg

SEQ ID NO: 856574 - DNA, 75 bp, synthetic construct
  source 1..75: mol_type = other DNA
ccagctattgcgctgatgaatttaagaaactgaacgacaaaggagctggtaatgccggacaacatagattttatt

SEQ ID NO: 856575 - DNA, 75 bp, synthetic construct
  source 1..75: mol_type = other DNA
ctgtttgtgattctggcgccaatgctttcacagtttgcctatgacgacaccgactgggcgatgatgtccagcgcc

SEQ ID NO: 856576 - DNA, 75 bp, synthetic construct
  source 1..75: mol_type = other DNA
cccggatatggagtccggtcactactttggtactgactcatccggtcgcgacctgcttgtgcgcgttgcgattgg

SEQ ID NO: 856577 - DNA, 75 bp, synthetic construct
  source 1..75: mol_type = other DNA
cggtcctgttagcagacagttttaaagctggtggcaaagtgctttcctgtggcaacggcggctcccattgcgacg

SEQ ID NO: 856578 - DNA, 75 bp, synthetic construct
  source 1..75: mol_type = other DNA
atgcgtaatattgaaaccctcacgactaaaaccggaccggatgacgtagggctaaatattttactgacagaggct

SEQ ID NO: 856579 - DNA, 75 bp, synthetic construct
  source 1..75: mol_type = other DNA
atacctgaccatgctgcatgaagagctttccagccatatgatgaaagaagagcaaattctcttcccgatgattaa

SEQ ID NO: 856580 - DNA, 75 bp, synthetic construct
  source 1..75: mol_type = other DNA
gggccaatcagcgtaatggaaagcgaacacgatgaagcgggtgaactgctggaagtaatcaaacacgctaccaat

SEQ ID NO: 856581 - DNA, 75 bp, synthetic construct
  source 1..75: mol_type = other DNA
ttccagacggtatatcgcggtattattgagcgtgttaaatcttctggtgcgatggggatgtatgccggtgctgat

SEQ ID NO: 856582 - DNA, 75 bp, synthetic construct
  source 1..75: mol_type = other DNA
tcgccgacctgtataaaatcagtaaagatccacgggctgccatagccgtgaagaaaatcgcggggttgtaccgtc

SEQ ID NO: 856583 - DNA, 75 bp, synthetic construct
  source 1..75: mol_type = other DNA
cgccggttcactgatggccggaaaccgcgcggcacagataatgagccttctggaaacggcaaaacgtaatggtct

SEQ ID NO: 856584 - DNA, 75 bp, synthetic construct
  source 1..75: mol_type = other DNA
cggtcctgttagcagacagttttaaagccggtggcaaagtgctttcctgcggcaacggcggctcccattgcgacg

SEQ ID NO: 856585 - DNA, 75 bp, synthetic construct
  source 1..75: mol_type = other DNA
tcgaagcgcggagcatggtagatgcgcaaggtaagccgttgaaatatgttcctggtgagagcgcccggacgcggc

SEQ ID NO: 856586 - DNA, 75 bp, synthetic construct
  source 1..75: mol_type = other DNA
tcgcatcatgatctggcgtactcttgcgaccgacacctttgacatcgctctgccggttaaccagtcctttgatgt

SEQ ID NO: 856587 - DNA, 75 bp, synthetic construct
  source 1..75: mol_type = other DNA
cgccagctaaaccacgtcgaagcagcagaactgctgcgtgtgacctctgaagcaatccagaacgaagcgcaggag

SEQ ID NO: 856588 - DNA, 75 bp, synthetic construct
  source 1..75: mol_type = other DNA
ttgctggcgattgcgacctctgcagccttactgacaggatgtcagaatacgcacggtattaataccgatttggct

SEQ ID NO: 856589 - DNA, 75 bp, synthetic construct
  source 1..75: mol_type = other DNA
atgccatttcagctaccagcggtgtggcttcccagctttcccgctcacaattgggtgatatcgcagaaggcgcta

SEQ ID NO: 856590 - DNA, 75 bp, synthetic construct
  source 1..75: mol_type = other DNA
gattttgttcgggcactgtataaaaacgtcgaagttctggattctggcgcgcgcggctccactaacacttttgtc

SEQ ID NO: 856591 - DNA, 75 bp, synthetic construct
  source 1..75: mol_type = other DNA
tagcgcacccgatgcggcgctctactggtatgcgcgaattattaccgccggtggcgatccgttatatgttgcgcg

SEQ ID NO: 856592 - DNA, 75 bp, synthetic construct
  source 1..75: mol_type = other DNA
tgcaaattatcaacaattaatgatttatccaaattcagttaaagaccgtgaaacatctgaatatccttatgttga

SEQ ID NO: 856593 - DNA, 75 bp, synthetic construct
  source 1..75: mol_type = other DNA
ggactgccagccagtatgaggagtggttgagtaaatcacacttattagattcattttgcatcctaagccggtttg

SEQ ID NO: 856594 - DNA, 75 bp, synthetic construct
  source 1..75: mol_type = other DNA
atgcaaaaagttgtcctcgcaaccggcaatgccggtaaagtgcgtgagctggcgtcgctgcttagcgacttcggt

SEQ ID NO: 856595 - DNA, 75 bp, synthetic construct
  source 1..75: mol_type = other DNA
cgccagctaacccacgtcgaagcggcagaactgcttcgtgtgactgctgaagcaatccagaacgaagtgcaggag

SEQ ID NO: 856596 - DNA, 75 bp, synthetic construct
  source 1..75: mol_type = other DNA
tagcctggcgtgttatatcacatcccgccaactaaaccacgtcgaagcggcagaactgttgcgtgtaactgctga

SEQ ID NO: 856597 - DNA, 75 bp, synthetic construct
  source 1..75: mol_type = other DNA
gatttcgtgcggtcgttgtataaaaacgttgaagttctggattccggcgcgcgtggctctactaatactttcgtc

SEQ ID NO: 856598 - DNA, 75 bp, synthetic construct
  source 1..75: mol_type = other DNA
gatttcgtgcagtcactgtatagaaacgttgaagtgctggactccggcgcgcgcggttccacgaatacttttgtc

SEQ ID NO: 856599 - DNA, 75 bp, synthetic construct
  source 1..75: mol_type = other DNA
cgtggggatatgccctgcaccacaacaataacgatcaggcaaaagctcaggattttgtgcagtcattgtataaaa

SEQ ID NO: 856600 - DNA, 75 bp, synthetic construct
  source 1..75: mol_type = other DNA
gcagatgaagctcgcacgccagcagcgtttcggtaaaaaatgcgaatcgctggccgggatgcagcgttccctgtt

SEQ ID NO: 856601 - DNA, 75 bp, synthetic construct
  source 1..75: mol_type = other DNA
gaagagcagttcacgtgtgcacaatgccgccggagatatcgtttcactgcgtgatgtgattgagggtgataaatc

SEQ ID NO: 856602 - DNA, 75 bp, synthetic construct
  source 1..75: mol_type = other DNA
aaaactatgcctggggaagcaaaacggcactgactgaactttatggcatggaaaatccatccaaccagccgatgg

SEQ ID NO: 856603 - DNA, 75 bp, synthetic construct
  source 1..75: mol_type = other DNA
ccatcagccagcagagtgccgccattttgttctgcgtcgaaggcgatgcaacgctgtggaaaggttctcagcagt

SEQ ID NO: 856604 - DNA, 75 bp, synthetic construct
  source 1..75: mol_type = other DNA
ggcacagaaagcggcggaaaataatcctgaactggcggcctttattgacgaatgccgtaacaccaaagttgccga

SEQ ID NO: 856605 - DNA, 75 bp, synthetic construct
  source 1..75: mol_type = other DNA
tgcctgcggaaggcgcggcggtgaaaaacaacaccgcgccagcaccgtggacgtacgacaacatcgcgtatatga

SEQ ID NO: 856606 - DNA, 75 bp, synthetic construct
  source 1..75: mol_type = other DNA
accagatgatgagtcaggccttccaagaaaatacaaacacgcagtaggctatcagttattgctgagaatgctatc

SEQ ID NO: 856607 - DNA, 75 bp, synthetic construct
  source 1..75: mol_type = other DNA
ctgaacaaccgattgagaaagactggcgtagcgccccgctggcggaaatcatcgaccacattattgtgcgctatc

SEQ ID NO: 856608 - DNA, 75 bp, synthetic construct
  source 1..75: mol_type = other DNA
atgcgcatacctaacagaacgacggcggcgaccatcgcagccagtgaaaaaggcgttgatgtacaccgcgcagac

SEQ ID NO: 856609 - DNA, 75 bp, synthetic construct
  source 1..75: mol_type = other DNA
ggttcttcttctttcgccagcaacaatatctatgactataccaacgagactgcgaacgacgtcttcgacgtgcgt

SEQ ID NO: 856610 - DNA, 75 bp, synthetic construct
  source 1..75: mol_type = other DNA
gctgaaacgccgcacgcttacctgcaaggcgtggcgctggaagtgatggcgaactccgataacgtgctgcgtgcg

SEQ ID NO: 856611 - DNA, 75 bp, synthetic construct
  source 1..75: mol_type = other DNA
agctggttttcgccctgacccctttcctcgcgatgaacgcgtttcgtgagttttccgagattgtctccctgctcc

SEQ ID NO: 856612 - DNA, 75 bp, synthetic construct
  source 1..75: mol_type = other DNA
aattgctcactttttacaacagcctaatgccgaacgtttaagcgaactgttcgccagcctgttgaatatgcaggg

SEQ ID NO: 856613 - DNA, 75 bp, synthetic construct
  source 1..75: mol_type = other DNA
tcgtcgtcagacctttaacactgcaattgcggcgattatggagctgatgaacaaactggcaaaagcaccgaccga

SEQ ID NO: 856614 - DNA, 75 bp, synthetic construct
  source 1..75: mol_type = other DNA
ccattgccctgaatgtgacgagccgctgcactatatccgcgatgcggtgagtgaaaagctggagtatattcccgc

SEQ ID NO: 856615 - DNA, 75 bp, synthetic construct
  source 1..75: mol_type = other DNA
atgtcaaagctgatgattgtgctggttgtgttgttatcgctggcggtggcgggactgtttctggtgaagcatgaa

SEQ ID NO: 856616 - DNA, 75 bp, synthetic construct
  source 1..75: mol_type = other DNA
attgaggatggacattctcaacaagcgccaacaggtgtgtatgctaatgcttttaatggtgtttcgcagatttat

SEQ ID NO: 856617 - DNA, 75 bp, synthetic construct
  source 1..75: mol_type = other DNA
cctggcgcgtctgccggaatggccagaggagcgactggcagagttgctgcctcttgagggatttaccttctccgg

SEQ ID NO: 856618 - DNA, 75 bp, synthetic construct
  source 1..75: mol_type = other DNA
tactctacggcatggatatctccgctctcaccacaacaaatgacatcgaaaaactgcgcgcgatggcacttgcca

SEQ ID NO: 856619 - DNA, 75 bp, synthetic construct
  source 1..75: mol_type = other DNA
ggaccgtcagttgtgtgcttcgactgccggaccggacgtagccatgagtatcctgaaaactggcttcagggctgg

SEQ ID NO: 856620 - DNA, 75 bp, synthetic construct
  source 1..75: mol_type = other DNA
cgtcacgcggaagatccgactccgctggtatgccacggcagctggccgggcgtgattactcgtgaaccagcgggt

SEQ ID NO: 856621 - DNA, 75 bp, synthetic construct
  source 1..75: mol_type = other DNA
taccggacgaccaacgtcaggcgcgtttccactgcgtgctggtatatctgcgtcacgcggaagatcccactccgc

SEQ ID NO: 856622 - DNA, 75 bp, synthetic construct
  source 1..75: mol_type = other DNA
gttccggcatggctacgttgctgatggtgatgaagggtatcacagttattgcactgcttgccgtagtcacgggga

SEQ ID NO: 856623 - DNA, 75 bp, synthetic construct
  source 1..75: mol_type = other DNA
cagtaaatatactgaccatcttcccctgtatcgtcagcagcacattttcgcccggatgggtgtggagcttcccgt

SEQ ID NO: 856624 - DNA, 75 bp, synthetic construct
  source 1..75: mol_type = other DNA
gtgaaccgctatgtgcgcccgcagtacagttgcccctgttgtcagaaggtgttcagtggtgaaatgtcggctcac

SEQ ID NO: 856625 - DNA, 75 bp, synthetic construct
  source 1..75: mol_type = other DNA
tactctacggcatggatatctccgctctcaccacgacaaatgacatcgaaaaactgcgcgcaatggcacttgcca

SEQ ID NO: 856626 - DNA, 75 bp, synthetic construct
  source 1..75: mol_type = other DNA
ttgccggagagatgtcatcagcgaactctacgcttgttgcggacaataaaactccaacggttaaaacgacgacgg

SEQ ID NO: 856627 - DNA, 75 bp, synthetic construct
  source 1..75: mol_type = other DNA
cagttttatgaaaggactgttcagaattgtggatatgaagcggtggtatctgtgtccacaggtacgggtcgcgga

SEQ ID NO: 856628 - DNA, 75 bp, synthetic construct
  source 1..75: mol_type = other DNA
ctcagaagtgtaaatcagcattctcctttgctgatgcaattgcatgcggcaggtatacggaccggtgatgcagag

SEQ ID NO: 856629 - DNA, 75 bp, synthetic construct
  source 1..75: mol_type = other DNA
atgttgaagttatcgagcaggacgggcggaaaaaaacgttccaggtggacacggcatatgtgccgtatctgaccc

SEQ ID NO: 856630 - DNA, 75 bp, synthetic construct
  source 1..75: mol_type = other DNA
cacaccatggagggcccggtctttgctgccggtgaggcatcctggggtatcagcaacacgtggtcgctttatggg

SEQ ID NO: 856631 - DNA, 75 bp, synthetic construct
  source 1..75: mol_type = other DNA
gcctggctggagtattccgatgcctcctggctgccgccgtcacgctgggataacggtattccggggctgttgttt

SEQ ID NO: 856632 - DNA, 75 bp, synthetic construct
  source 1..75: mol_type = other DNA
tctggcccgctgcgtggcgtgggcaaatatctctgttcaggttctttttccactcgctgtcacctttacgccagt

SEQ ID NO: 856633 - DNA, 75 bp, synthetic construct
  source 1..75: mol_type = other DNA
caaaagatgtctatgacaaccctgtgaccagcctcacgccggaagcgccgtcattagcgggtgctgctgctgtag

SEQ ID NO: 856634 - DNA, 75 bp, synthetic construct
  source 1..75: mol_type = other DNA
gcgtgaacagctcgcaaaggccagcgaggaagccagccgccgcgagcaatcaataacgaggttacttaatgaaaa

SEQ ID NO: 856635 - DNA, 75 bp, synthetic construct
  source 1..75: mol_type = other DNA
cgctgatgctggcggacaatggcgagtttaagccgtgggatggtcaggaatctgggaaggctgtttatctgacct

SEQ ID NO: 856636 - DNA, 75 bp, synthetic construct
  source 1..75: mol_type = other DNA
gggaaaaggagcagtacgatgtttcactgaacaaggggcttgaagatggcaaaacatcagtcggctttcagtaca

SEQ ID NO: 856637 - DNA, 75 bp, synthetic construct
  source 1..75: mol_type = other DNA
gtacgggaaccttgtcaccgggctgaagccagatgcaccgcagtttagtggtgccgccagcacggggacagagcg

SEQ ID NO: 856638 - DNA, 75 bp, synthetic construct
  source 1..75: mol_type = other DNA
tataacgggactgcgggggctaacttcggtgcctggcgtctgcgtgcggactatcagggcaacctgaatcacacc

SEQ ID NO: 856639 - DNA, 75 bp, synthetic construct
  source 1..75: mol_type = other DNA
tatgccgtcgattttaatacggatgttctggatgccgaagacagacagaatattgatatttcccggttctcccgg

SEQ ID NO: 856640 - DNA, 75 bp, synthetic construct
  source 1..75: mol_type = other DNA
acatctgactattacacgctgtcggtgaaccgctacttcgatgcgttcagctttaagaatatcgcgctggggctg

SEQ ID NO: 856641 - DNA, 75 bp, synthetic construct
  source 1..75: mol_type = other DNA
tgtcgtgttgcgtctggcagacaacagtcatccaccgtttggtgccagcgtgacaaacgcaaaaggtcgtgagct

SEQ ID NO: 856642 - DNA, 75 bp, synthetic construct
  source 1..75: mol_type = other DNA
gcagagtgttaaccatatggctgatgacgatgttgatcgcgagctgcgggagtcatggaagcgtcccggtggtgg

SEQ ID NO: 856643 - DNA, 75 bp, synthetic construct
  source 1..75: mol_type = other DNA
ccgggcgtgcgtaacctggcgatctcccaggccgtagcgccgcataatctctattacgcaccggatccctcctcg

SEQ ID NO: 856644 - DNA, 75 bp, synthetic construct
  source 1..75: mol_type = other DNA
ccaggcgtgcgtaacctggcgatctcccaggccgttgcaccgcataatctctactacgcaccggacccttcctca

SEQ ID NO: 856645 - DNA, 75 bp, synthetic construct
  source 1..75: mol_type = other DNA
ttgctgccggtgaggcatcctggggtatcagtaacaagtggtcgctttacggtggcggtatcgttgccggggatt

SEQ ID NO: 856646 - DNA, 75 bp, synthetic construct
  source 1..75: mol_type = other DNA
ccgggacctgagtgagttcggtactgtttccgctgatgtaacccagtccgtggcccgtattccgggagaagagac

SEQ ID NO: 856647 - DNA, 75 bp, synthetic construct
  source 1..75: mol_type = other DNA
aggggccattggttatcgtgagttcgaagttctgaaaggtagacgtctgtttgctgtgttgcggatgtctgataa

SEQ ID NO: 856648 - DNA, 75 bp, synthetic construct
  source 1..75: mol_type = other DNA
ccagggaatttcaccgtcggcatttccggtgacgtttctggaaccgccagcttccggcgcagacggaaagaaaat

SEQ ID NO: 856649 - DNA, 75 bp, synthetic construct
  source 1..75: mol_type = other DNA
acgctcaacaagaacttcgaggactggaaggcatcggtcaacctgcagtacagccatcagacggctttgttgaat

SEQ ID NO: 856650 - DNA, 75 bp, synthetic construct
  source 1..75: mol_type = other DNA
cagccatcagacttactgggaccgccggacatctgactattacacgctgtcggtgaaccgttacttcgatgcgtt

SEQ ID NO: 856651 - DNA, 75 bp, synthetic construct
  source 1..75: mol_type = other DNA
cgtgttgactggaacggaaaaactcaatgcgttgtaaacatacctgacgagataaaaaatcaacagcagctattt

SEQ ID NO: 856652 - DNA, 75 bp, synthetic construct
  source 1..75: mol_type = other DNA
cttgatatgtgggggaaaatagtaggtataagcagatacattgtcgctccaattgacagtgattcatttggattt

SEQ ID NO: 856653 - DNA, 75 bp, synthetic construct
  source 1..75: mol_type = other DNA
tttaactacctgcgaaacattcgggcttgatatgtgggggaaaattgttggcataagcagatatattgttgcgcc

SEQ ID NO: 856654 - DNA, 75 bp, synthetic construct
  source 1..75: mol_type = other DNA
agctggatacggttcaatttttggtgacagtaatcgcttaaaactggatttatgccaacattgcctgaaagacgt

SEQ ID NO: 856655 - DNA, 75 bp, synthetic construct
  source 1..75: mol_type = other DNA
ttgctattaagcgcaatggcgaaagtcactgaaggtattgcgcttctgaaaccggtacacatcaaacgttatgaa

SEQ ID NO: 856656 - DNA, 75 bp, synthetic construct
  source 1..75: mol_type = other DNA
gttcagctttttcctgttccggaaccggcccgggccacactggagaatataatttttcctgacacggggcgggca

SEQ ID NO: 856657 - DNA, 75 bp, synthetic construct
  source 1..75: mol_type = other DNA
tcgtaggaataaaccaagtggtaagtccttactttggattttcatcagatgcttatccgtttaatgatggtacat

SEQ ID NO: 856658 - DNA, 75 bp, synthetic construct
  source 1..75: mol_type = other DNA
gatctatggctcagaatcttaaatgaatgtccgaatatacgctgggataatctaagtgagtgtttgctaaattat

SEQ ID NO: 856659 - DNA, 75 bp, synthetic construct
  source 1..75: mol_type = other DNA
ccggtgaggtttacttcccgccggaaatagcacaaacacgctattatttcccgacaaacaggggccttgaaggca

SEQ ID NO: 856660 - DNA, 75 bp, synthetic construct
  source 1..75: mol_type = other DNA
ctgggactgctttacccgcgttggtccggcagaaggcgaacgcgccattgcccaggcgattgtttacctggcctg

SEQ ID NO: 856661 - DNA, 75 bp, synthetic construct
  source 1..75: mol_type = other DNA
atgtccataaaaggccttgaacaggccatagaaaaccttaacagcatcagcaaaacggctgttccgcgggcatcg

SEQ ID NO: 856662 - DNA, 75 bp, synthetic construct
  source 1..75: mol_type = other DNA
tgcagggggattattactggtcatcgctggcgggcaccaccgggcaccaccgggcagcaccatgcggcggatgtt

SEQ ID NO: 856663 - DNA, 75 bp, synthetic construct
  source 1..75: mol_type = other DNA
aattgtactgaccatcgtgaagttcaaattccacccgtttctggcgctgttgctggccagcttcttcgtgggaac

SEQ ID NO: 856664 - DNA, 75 bp, synthetic construct
  source 1..75: mol_type = other DNA
atgtctagtatttccgaagctcatatgttcgccgctggcgctcatggtggcgttggtcagaaaagaaaatatacc

SEQ ID NO: 856665 - DNA, 75 bp, synthetic construct
  source 1..75: mol_type = other DNA
gttctggtcacgaacaaacgcacttataacattgtgttgcactatgtaggtgactacaccacgaaagacgcccag

SEQ ID NO: 856666 - DNA, 75 bp, synthetic construct
  source 1..75: mol_type = other DNA
agtgacaagctggccgcgtttaacgacccacaaaaccgttatgcgttttgcctgacctgcgccaacgtgcgttaa

SEQ ID NO: 856667 - DNA, 75 bp, synthetic construct
  source 1..75: mol_type = other DNA
gcaggaaaactcactgtttgacattgtaaacaccattcgccaggcaaaagatgaccggaacatcaccggtatcgt

SEQ ID NO: 856668 - DNA, 75 bp, synthetic construct
  source 1..75: mol_type = other DNA
tatcaacatcccccaggcgtggatggaatattctgatgcttcttggttgccaccttcacgctgggatgatggtat

SEQ ID NO: 856669 - DNA, 75 bp, synthetic construct
  source 1..75: mol_type = other DNA
agattgaatgtgagttgggacggaaaaatacagtgcgtcgtagatattacggagaagataaatccagaccaacaa

SEQ ID NO: 856670 - DNA, 75 bp, synthetic construct
  source 1..75: mol_type = other DNA
aaacgccgtggtcaatgaaacaggccacgcttcagctgacctatgaatacccgtttgacgagcagaaaaaagcct

SEQ ID NO: 856671 - DNA, 75 bp, synthetic construct
  source 1..75: mol_type = other DNA
agcgagtctccgtattttagcccgtcgttgattgacgatattgcctatcttgatcgcgccgtggccaactacctg

SEQ ID NO: 856672 - DNA, 75 bp, synthetic construct
  source 1..75: mol_type = other DNA
cgtgcgactcgccagaatgcctctattgactcatttatggccgctattgatttgcagtcgtctatttacggtcgc

SEQ ID NO: 856673 - DNA, 75 bp, synthetic construct
  source 1..75: mol_type = other DNA
caagctggctgacctgctcgacaatacctcttctatcgtgagtcgcgatcccgagttttcagctgtctacctcgc

SEQ ID NO: 856674 - DNA, 75 bp, synthetic construct
  source 1..75: mol_type = other DNA
tgctgcttgatatttctggtgtgatcgtcgataagcccgacagttcgcagcggtttagtaagttaagtcgtcagt

SEQ ID NO: 856675 - DNA, 75 bp, synthetic construct
  source 1..75: mol_type = other DNA
ggcactgccgccggaagcgcagctgatgatgcagttaagcattgagaatggctataaacgctttatcacgctggt

SEQ ID NO: 856676 - DNA, 75 bp, synthetic construct
  source 1..75: mol_type = other DNA
aaagaaactgctggccgcggcgcattgctgcttgatatttccggcgttatcgtcgataagcctgacagttcacaa

SEQ ID NO: 856677 - DNA, 75 bp, synthetic construct
  source 1..75: mol_type = other DNA
ctccggcagcaactgctccggcggctcaaccagcactggctgctcgtagcgaaaaacgtgtaccgatgactcgtc

SEQ ID NO: 856678 - DNA, 75 bp, synthetic construct
  source 1..75: mol_type = other DNA
gttgatttaagacctggatcttcgtcttttggaaagcatgtaggtgttatactttctggggataaaaataatcaa

SEQ ID NO: 856679 - DNA, 75 bp, synthetic construct
  source 1..75: mol_type = other DNA
ccctatataggaattaaatgggagaatgagtacaatgtaagattgtcagataaagataaaaaaaatccaacaatg

SEQ ID NO: 856680 - DNA, 75 bp, synthetic construct
  source 1..75: mol_type = other DNA
acctacatttgggaaatgggttggagtgaatttgtctgctgagaataagcgccagttgtggatcccggaagggtt

SEQ ID NO: 856681 - DNA, 75 bp, synthetic construct
  source 1..75: mol_type = other DNA
gtgctggtgaccgaagagggcgaatgctggtttgattcgccgatcatcgctgaatatattgaattaatgaatgtt

SEQ ID NO: 856682 - DNA, 75 bp, synthetic construct
  source 1..75: mol_type = other DNA
aagatcttgttattattgagccaaaaatatataatgatgaaagaggttatttttatgagttttataataaaaata

SEQ ID NO: 856683 - DNA, 75 bp, synthetic construct
  source 1..75: mol_type = other DNA
agatcatttaatcaaagctcacaaacagaaccgaacgcgctacagaacacaggtattgaagctattttagattca

SEQ ID NO: 856684 - DNA, 75 bp, synthetic construct
  source 1..75: mol_type = other DNA
ttccagcacgattgaccgattaaagcagatgcaggataaaataattagcttcatgttcattcataaagaggctgt

SEQ ID NO: 856685 - DNA, 75 bp, synthetic construct
  source 1..75: mol_type = other DNA
atggcaaaagttaactttttcgacacacgtatagtaaaaaaattttcagactacacatcaacaataagcactatt

SEQ ID NO: 856686 - DNA, 75 bp, synthetic construct
  source 1..75: mol_type = other DNA
gagacggcagaatttgtttataagacgacgaattattatgctcctgggtatgaaggtagcatcatttggaatgat

SEQ ID NO: 856687 - DNA, 75 bp, synthetic construct
  source 1..75: mol_type = other DNA
aaagagaaaatatagttttatcgaaaaaggatataaatcaacctaatttatcatatagtttttctctcaaacagt

SEQ ID NO: 856688 - DNA, 75 bp, synthetic construct
  source 1..75: mol_type = other DNA
tcatgggtttcaagtattatcagatattgtagattttgaatataaatgcactgattattattatccggagtttga

SEQ ID NO: 856689 - DNA, 75 bp, synthetic construct
  source 1..75: mol_type = other DNA
acgaaattggtcccagctcatacgctcaaacgagggggtgccacaacctggcctttttctacaaagacgagcttt

SEQ ID NO: 856690 - DNA, 75 bp, synthetic construct
  source 1..75: mol_type = other DNA
tcgtgttgttatcgctggcggtggcgggtctgtttctggcgaagcataaaaacgccagcctgcgcacctcactgg

SEQ ID NO: 856691 - DNA, 75 bp, synthetic construct
  source 1..75: mol_type = other DNA
gaggaaatgtatcaggagctggagcgcctcgttgctgatgcaaaaccggcaagccgccatatgacgggactggct

SEQ ID NO: 856692 - DNA, 75 bp, synthetic construct
  source 1..75: mol_type = other DNA
aaaaaacgctttgacggtgaaatttttgacctggacatctcgctggaccgtgttgaaggtgccgcgctggagttt

SEQ ID NO: 856693 - DNA, 75 bp, synthetic construct
  source 1..75: mol_type = other DNA
aggaccgcaatatcaccggtattgtgatggatctgaaaaacttcgcaggcggcgaccagccgtctatgcagtaca

SEQ ID NO: 856694 - DNA, 75 bp, synthetic construct
  source 1..75: mol_type = other DNA
ccggattttttaaatggacgtggcgtctgctgaatttcgtccgtgaaatggtacttaacctgttctttatttttc

SEQ ID NO: 856695 - DNA, 75 bp, synthetic construct
  source 1..75: mol_type = other DNA
tttttgccggtgcgggatgctatcacggtgacgccctgacggtttatccctacaccccggaggccattattgtcg

SEQ ID NO: 856696 - DNA, 75 bp, synthetic construct
  source 1..75: mol_type = other DNA
tgtttgtgctgcgtattttgcgccgtatccagtcaccgcatcatcggctgcaggatgctatcgaaaatcgtgata

SEQ ID NO: 856697 - DNA, 75 bp, synthetic construct
  source 1..75: mol_type = other DNA
caggagaacagaagtctatattcataaccttaatgaagatggatttacaccagtgcttgtaaaggctactccgca

SEQ ID NO: 856698 - DNA, 75 bp, synthetic construct
  source 1..75: mol_type = other DNA
tcaaacgagggggtgccacaacctggcctttttctacaaagacgagctttctgtggttgatattcaagggttaca

SEQ ID NO: 856699 - DNA, 75 bp, synthetic construct
  source 1..75: mol_type = other DNA
catcaggccattattgagcaaagaacgcaggacagtaatatccgaaatgatgtaaaacatcaggttgataatatg

SEQ ID NO: 856700 - DNA, 75 bp, synthetic construct
  source 1..75: mol_type = other DNA
atgaaactgactctactgactctgacgctcgaagcagacagcgttaacgtgcaggcactgaacatggggcgaatt

SEQ ID NO: 856701 - DNA, 75 bp, synthetic construct
  source 1..75: mol_type = other DNA
gaagatatgggcgactggctgcgtcagcatccacagcagcatatttcgatcaatcttgaatccaccgtgctcacc

SEQ ID NO: 856702 - DNA, 75 bp, synthetic construct
  source 1..75: mol_type = other DNA
ctgctggggagaggatgaggacaagccggaggtggatccgtttgcggctctggaagacgcgctgagccttgcagc

SEQ ID NO: 856703 - DNA, 75 bp, synthetic construct
  source 1..75: mol_type = other DNA
agctttacacctcggctcatcctcctgcagagttttatccagtcggtgcaccaatcccgtggccatcagataccg

SEQ ID NO: 856704 - DNA, 75 bp, synthetic construct
  source 1..75: mol_type = other DNA
tattacaggccgttgatctgattgccgccgaggatactcgtcacactggtttattgctgcaacattttgggatta

SEQ ID NO: 856705 - DNA, 75 bp, synthetic construct
  source 1..75: mol_type = other DNA
caaagaagatgaaaaccgtcgtaaaggcgaaatggtgctgattgttgaaggccataaagcacaggaagaagactt

SEQ ID NO: 856706 - DNA, 75 bp, synthetic construct
  source 1..75: mol_type = other DNA
ggtccgggagttactgtgccggaaaagtaactttgtcgtgacttgcgctctggcaaacaagctggccagaatagc

SEQ ID NO: 856707 - DNA, 75 bp, synthetic construct
  source 1..75: mol_type = other DNA
tattcattgccaggatcgtcgcggcaaggctgtttaccgtaaaaaatttacacggccaaagttaatcgaattttt

SEQ ID NO: 856708 - DNA, 75 bp, synthetic construct
  source 1..75: mol_type = other DNA
tgcagcccagaaccgaatctcagcaggcaatgcgagctctgcatcgtgtccgtgaatccctggttcaggataagg

SEQ ID NO: 856709 - DNA, 75 bp, synthetic construct
  source 1..75: mol_type = other DNA
ggcaatgcgtgcgctgcatcgtgtccgtgaatccttggttcaggataaggtaaaaacaaccaatcagatgcatgc

SEQ ID NO: 856710 - DNA, 75 bp, synthetic construct
  source 1..75: mol_type = other DNA
tacagcccagaactgaatctcagcaggcaatgcgtgcgctgcatcgtgtccgtgaatccttggttcaggataagg

SEQ ID NO: 856711 - DNA, 75 bp, synthetic construct
  source 1..75: mol_type = other DNA
ccgtggatgaactgacaaaattaacgacagaaattgccagctattgcgctgatgaatttaaaaaacttaacgaca

SEQ ID NO: 856712 - DNA, 75 bp, synthetic construct
  source 1..75: mol_type = other DNA
ggtcgccgtgatgcgctaaaagcgattgaagcggaaccgcgcacgctgattttttatgaatcgacccaccgtctg

SEQ ID NO: 856713 - DNA, 75 bp, synthetic construct
  source 1..75: mol_type = other DNA
tgatgctgaagctatctgtgaggcagcatcacgcccatcaatgcgtttcgttcagccaaaaacggaatctcagca

SEQ ID NO: 856714 - DNA, 75 bp, synthetic construct
  source 1..75: mol_type = other DNA
gcaatggaagcctgcggcggttctcattttatagcgcgaaaactggtcgaacttgggcatattccaaagctgata

SEQ ID NO: 856715 - DNA, 75 bp, synthetic construct
  source 1..75: mol_type = other DNA
ttcttgaggacagtagtttgcctctttatctcagccagttactgctgaaattacaacagcattatcactatcttg

SEQ ID NO: 856716 - DNA, 75 bp, synthetic construct
  source 1..75: mol_type = other DNA
ctgctggggcgaggatgaggataaagtggagtcagatccgtttgcggcgctggaagacgcgctgagctttgcagc

SEQ ID NO: 856717 - DNA, 75 bp, synthetic construct
  source 1..75: mol_type = other DNA
tatagcttttaatgaatactttgacactcaagttgatgacaatattatctctcataaatcccttaatgggttata

SEQ ID NO: 856718 - DNA, 75 bp, synthetic construct
  source 1..75: mol_type = other DNA
tttgattacagccgccaggcgttactctgtgtgccgcgcaacctgccgcaaaccaatcaaccgggttccgcacgg

SEQ ID NO: 856719 - DNA, 75 bp, synthetic construct
  source 1..75: mol_type = other DNA
tgctggggcgaggatgaggataaagtggagtcagatccgtttgcggcgctggaagacgcgctgagctttgcagca

SEQ ID NO: 856720 - DNA, 75 bp, synthetic construct
  source 1..75: mol_type = other DNA
atgcgacttgcgctccgtctggggcgcaccttatccgaactgggccacagtctgagtgcgagcgaggcgatgatg

SEQ ID NO: 856721 - DNA, 75 bp, synthetic construct
  source 1..75: mol_type = other DNA
ccccgctgggcgatgagcgcggggatatccgtaatgcgcagatcgtgaaagcggttttcggggcgcaggggatga

SEQ ID NO: 856722 - DNA, 75 bp, synthetic construct
  source 1..75: mol_type = other DNA
taatggcacaaaaacccggaagctggatttttacctcggcaacgttgtcagtgaatgacgatctgcatcatttta

SEQ ID NO: 856723 - DNA, 75 bp, synthetic construct
  source 1..75: mol_type = other DNA
aatccgcaaattcagcgggcgtttttactgctcgatgacacgcttgaactctgttacgacgtggcgaaattgtcg

SEQ ID NO: 856724 - DNA, 75 bp, synthetic construct
  source 1..75: mol_type = other DNA
actgaaggacgccatgctctgctggggagaggatgaggacaagccggaggtggatccgtttgcggctctggaaga

SEQ ID NO: 856725 - DNA, 75 bp, synthetic construct
  source 1..75: mol_type = other DNA
gtgacggacgattttgcaccagacggtcaactggcgaaagcgatacctggctttaagccgcgtgaaccacagcga

SEQ ID NO: 856726 - DNA, 75 bp, synthetic construct
  source 1..75: mol_type = other DNA
cagcgtggcggataaattcaaagagttaatggcgcaaaagcccggtagctggatcttcacctcagcaacgctgtc

SEQ ID NO: 856727 - DNA, 75 bp, synthetic construct
  source 1..75: mol_type = other DNA
agtgcagctcccggatgcggtcattactctcaagcagggcgtagggcgactgattcgcgatgccgacgatcgtgg

SEQ ID NO: 856728 - DNA, 75 bp, synthetic construct
  source 1..75: mol_type = other DNA
ctatgccatcacttctgatgctgtaaaagttccgaatcctcgccatcttatcaatgtaagtcgtaatctgcgacg

SEQ ID NO: 856729 - DNA, 75 bp, synthetic construct
  source 1..75: mol_type = other DNA
atgttaagagcaacaaaagtacgtatataccccactcctgaacaggcagagtacctcaatgcccagttcggtgca

SEQ ID NO: 856730 - DNA, 75 bp, synthetic construct
  source 1..75: mol_type = other DNA
gctggcggagaaagcagcccgggaagcagagctggcggcaaaaaaagcgcaggccagacaggcgctgtccattta

SEQ ID NO: 856731 - DNA, 75 bp, synthetic construct
  source 1..75: mol_type = other DNA
cgcagcggaatatcccgctctcgcataaaaaactgcgcagggcgctgaaggccattacccgttcagaaagctatc

SEQ ID NO: 856732 - DNA, 75 bp, synthetic construct
  source 1..75: mol_type = other DNA
atggaaggtgaaaaagcagaaactggcggagaaggctgcccgggaagggaagcagagctgacagcaaaaaaagcg

SEQ ID NO: 856733 - DNA, 75 bp, synthetic construct
  source 1..75: mol_type = other DNA
aggccagacaggcgctgtccatttatctgacgctgccctcgctggatgaggccgtgaacaccctgaaaccctggt

SEQ ID NO: 856734 - DNA, 75 bp, synthetic construct
  source 1..75: mol_type = other DNA
atgacagagcagaaacgaccggtactgacactgaaacggaaaacggaaggggaaacaccgatccggagccggaaa

SEQ ID NO: 856735 - DNA, 75 bp, synthetic construct
  source 1..75: mol_type = other DNA
atcacccgttcagaaagctatctgtgtgccatgaaagccggtgcctgccggtatgatacggaagggtatgtgacg

SEQ ID NO: 856736 - DNA, 75 bp, synthetic construct
  source 1..75: mol_type = other DNA
acggagcatatttctcaggaggaggaagtgtatgcggcagcgcgtctggagaaaatccgtcgccagaaccggata

SEQ ID NO: 856737 - DNA, 75 bp, synthetic construct
  source 1..75: mol_type = other DNA
aagcgtatgcggcagcgcgtctggcgaaaattcgtcgccagaaccggataaaggcagaacttcaggccgtgcttg

SEQ ID NO: 856738 - DNA, 75 bp, synthetic construct
  source 1..75: mol_type = other DNA
cccccggcttctggcctgcggtatccgggacgtgttactggaagacgtggcgcagcggaatatcccgctctcgca

SEQ ID NO: 856739 - DNA, 75 bp, synthetic construct
  source 1..75: mol_type = other DNA
atgctgtgcgccggttgcaccagcgtccggcctgcaccgacgccagtgattgtccacaacgcctgcccgaaagtg

SEQ ID NO: 856740 - DNA, 75 bp, synthetic construct
  source 1..75: mol_type = other DNA
aaggcagaacttcaggccgtgcttgatgagaataaaaaaaagcctccatcagagaggaggcagggaaataaggct

SEQ ID NO: 856741 - DNA, 75 bp, synthetic construct
  source 1..75: mol_type = other DNA
tgggtatgtctgaagcggattcaatcacccttttctcttcctttagtgccctggtttatggtctggtcgctatcg

SEQ ID NO: 856742 - DNA, 75 bp, synthetic construct
  source 1..75: mol_type = other DNA
ttgccacctggctgctgcacaatcaggaagttgcgcgtatggcgctgggcgttgttgccttcggtattgtggtta

SEQ ID NO: 856743 - DNA, 75 bp, synthetic construct
  source 1..75: mol_type = other DNA
gatgtaaaaaatcgtacggcagattgcatagcaaacttgcttgcagacaagttttaccagaaacatatcgagccg

SEQ ID NO: 856744 - DNA, 75 bp, synthetic construct
  source 1..75: mol_type = other DNA
ggtctggttgtggaaaaacaactctgcgctggtccagttgctcggctttgtccgctgctggcggtcacgtccact

SEQ ID NO: 856745 - DNA, 75 bp, synthetic construct
  source 1..75: mol_type = other DNA
atcggcggctggttaggcgataaggtactgggtactaaacgcgtcattatgctcggcgcaattgtactggcgatc

SEQ ID NO: 856746 - DNA, 75 bp, synthetic construct
  source 1..75: mol_type = other DNA
gaaaggtgctgcgcgtcgtaaaatgatcgttgccttcatcctgatgctcgaagcaatcatcttcttcgtgctgta

SEQ ID NO: 856747 - DNA, 75 bp, synthetic construct
  source 1..75: mol_type = other DNA
aagcgatacagaaattttgaggttgacgcttctgatgagttgtcgagcatggagctggcccgttcagaaggatac

SEQ ID NO: 856748 - DNA, 75 bp, synthetic construct
  source 1..75: mol_type = other DNA
gcactgatatcaaatgtgacagggctggatatggggctggcgcattttgtcatcaaatcggacggcaataaaatt

SEQ ID NO: 856749 - DNA, 75 bp, synthetic construct
  source 1..75: mol_type = other DNA
atgttaagagcaacaaaagtacgcatttacccgacaccagaacaggcagagtacctcaatgcccagttcggtgca

SEQ ID NO: 856750 - DNA, 75 bp, synthetic construct
  source 1..75: mol_type = other DNA
ggcgggttgttataccgcaaccctgactatgatggctgctgaaaaaggtattgacctcgaaggcattgagttgga

SEQ ID NO: 856751 - DNA, 75 bp, synthetic construct
  source 1..75: mol_type = other DNA
cgctggtcagcgaaatgaaaaatacttcccctatccatgacacgctggctaaccctgtagaaatgattacacgct

SEQ ID NO: 856752 - DNA, 75 bp, synthetic construct
  source 1..75: mol_type = other DNA
gtgttggctcggttgcataatggcgttcagcaaatatggtttcgcttccgataaaatcacattgtcattcaatga

SEQ ID NO: 856753 - DNA, 75 bp, synthetic construct
  source 1..75: mol_type = other DNA
tattcccgtcgatgatgatgacgtgtctcatgcgcttcatacaggtaagttttatcatccttacagtggtcaatt

SEQ ID NO: 856754 - DNA, 75 bp, synthetic construct
  source 1..75: mol_type = other DNA
tgattaacgcctttctgatgacgagacaggcatataacgattttcgtggctggcagcttcctgccggagaaaacg

SEQ ID NO: 856755 - DNA, 75 bp, synthetic construct
  source 1..75: mol_type = other DNA
tgccagtcggttttatcgaacagcagcgctggagtcgggtcacggacacctatggtgttaagcaccagcgaaaag

SEQ ID NO: 856756 - DNA, 75 bp, synthetic construct
  source 1..75: mol_type = other DNA
tccggcctgcaccgacgccagtgattgtcgccaacgcctgcccgaaagtgagcctttgcccgatgccgggcagtg

SEQ ID NO: 856757 - DNA, 75 bp, synthetic construct
  source 1..75: mol_type = other DNA
catctctgaagttgatgagaagtcctggcgcgtgcgcgttcgcagcggcgaactggaaacaggctggctgcgctg

SEQ ID NO: 856758 - DNA, 75 bp, synthetic construct
  source 1..75: mol_type = other DNA
cagcgattataagcgatgtctatcgcacttccctgaaccaagctctgcgagtcaatctctcagacatcatcatga

SEQ ID NO: 856759 - DNA, 75 bp, synthetic construct
  source 1..75: mol_type = other DNA
gctggagtccaaaagaagtattcgaaaaggcttatcgtccggtatcagggttaagtttcggccttgccatggaag

SEQ ID NO: 856760 - DNA, 75 bp, synthetic construct
  source 1..75: mol_type = other DNA
cgctggtacggcgctgacctgcctgatgctgtgcgccggttgcaccagcgcccggcctgcaccgacgccagtgat

SEQ ID NO: 856761 - DNA, 75 bp, synthetic construct
  source 1..75: mol_type = other DNA
actggataagctgaaagtttccacccatgtgttccgcgtgggtacgtataaatctgccgttgaaccgtttattcg

SEQ ID NO: 856762 - DNA, 75 bp, synthetic construct
  source 1..75: mol_type = other DNA
cgctggcagatgtttctatcaccagggcactgccgccggaagcgcagcagatgatgcagttaagcattgagaatg

SEQ ID NO: 856763 - DNA, 75 bp, synthetic construct
  source 1..75: mol_type = other DNA
atggtactttctgattgttattcatgggctaacgagcagtttggacatacccgtcgcggtgatccgcgtcgtaca

SEQ ID NO: 856764 - DNA, 75 bp, synthetic construct
  source 1..75: mol_type = other DNA
atgatgatgactaaggtgtctgtcgttatgatgaatataacggttttcccggaaggttttttacgggcaatactt

SEQ ID NO: 856765 - DNA, 75 bp, synthetic construct
  source 1..75: mol_type = other DNA
cgtacgggagtgcatggatgtacgtatatcaacgacccgtcgatggattaaagctgattgcaagcggcgactggt

SEQ ID NO: 856766 - DNA, 75 bp, synthetic construct
  source 1..75: mol_type = other DNA
atatcacgcacagcggcggcaacttcacctcaaacggcatcacagtgcatacgcataaacacggtggcgtgaaag

SEQ ID NO: 856767 - DNA, 75 bp, synthetic construct
  source 1..75: mol_type = other DNA
caggtgctggactccaccattgctaacgtggcgatccccactatcgccgggaatctggctcatcgctcagccagg

SEQ ID NO: 856768 - DNA, 75 bp, synthetic construct
  source 1..75: mol_type = other DNA
aaccttctgagaacggcgacgcttgacgtcacaaaaggaggaaagatgagcggcaatatcacgcacagcggcggc

SEQ ID NO: 856769 - DNA, 75 bp, synthetic construct
  source 1..75: mol_type = other DNA
cgtggaatgcacaaaccttctgagaacagcgacgcttgacgtcacaaaagggggaaagatgagcggcaatatcac

SEQ ID NO: 856770 - DNA, 75 bp, synthetic construct
  source 1..75: mol_type = other DNA
tcagcgataaaaaaattcgtcaggctgtgcgccagttttccccccactcgttccagcaattaaaaaaatttattc

SEQ ID NO: 856771 - DNA, 75 bp, synthetic construct
  source 1..75: mol_type = other DNA
tagtaatattgacataaataaattacagaatgatgtgggaagctatatttcccaggcaaatgccataacgccaaa

SEQ ID NO: 856772 - DNA, 75 bp, synthetic construct
  source 1..75: mol_type = other DNA
ggcagcgcaaagctctataactcatattataaagggaaacggctggtttggtaagaaattagcttccctttgtga

SEQ ID NO: 856773 - DNA, 75 bp, synthetic construct
  source 1..75: mol_type = other DNA
cgtcggaggtggtgtgtacccgcaaacttatcaccgccaccctggaggtgcagaacggcggcgagatgcgcggca

SEQ ID NO: 856774 - DNA, 75 bp, synthetic construct
  source 1..75: mol_type = other DNA
tcagcaacatcatcagaaccggcgtgattttcgacgtgaacccgcagacctgggaggtccgggtgcgcagtggcg

SEQ ID NO: 856775 - DNA, 75 bp, synthetic construct
  source 1..75: mol_type = other DNA
ataattggcagcctgtggagtgatgccaatccggcccccggcaaaagcctgaaagaaatcgtggtcacagcgcct

SEQ ID NO: 856776 - DNA, 75 bp, synthetic construct
  source 1..75: mol_type = other DNA
tctgagaacggcgacgcttgacgtcacaaaagggggaaagatgagcggcaatatcacgcacagcggcggcgattt

SEQ ID NO: 856777 - DNA, 75 bp, synthetic construct
  source 1..75: mol_type = other DNA
aactggaaacaggctggctgcgctggaacaccacgcgcgcgggagccttcaatgtgtggctgccgccatcaccag

SEQ ID NO: 856778 - DNA, 75 bp, synthetic construct
  source 1..75: mol_type = other DNA
gatgcagatgatgatcaccgcacctgatggggctgaatttagctatgacgcaaaggcgggcgcgctgagtgctgg

SEQ ID NO: 856779 - DNA, 75 bp, synthetic construct
  source 1..75: mol_type = other DNA
tcatggccagcgccgcgttgggatggattttctcaatggaacatgctggtgtcgcagtggcgaattttgtgactt

SEQ ID NO: 856780 - DNA, 75 bp, synthetic construct
  source 1..75: mol_type = other DNA
acagggccaattgcgtttattgccctgattgcgccacagctggcgttacgcttaaccagaacgccgggattaccg

SEQ ID NO: 856781 - DNA, 75 bp, synthetic construct
  source 1..75: mol_type = other DNA
gggccagcttgtgttcaccaaaaactatgcctccaaccgtcgtaacgccagggcccgacgcggatttgtggacta

SEQ ID NO: 856782 - DNA, 75 bp, synthetic construct
  source 1..75: mol_type = other DNA
aaaccttacttgacctgaattatgcccgtcaggtcaacgaaatttctttatataccgcacttggtggcggttggc

SEQ ID NO: 856783 - DNA, 75 bp, synthetic construct
  source 1..75: mol_type = other DNA
ttctggtggggaaaatgcgcggcggacttggcgtggcaaacattctcgtcagcaccatgatgggcggcgtcagcg

SEQ ID NO: 856784 - DNA, 75 bp, synthetic construct
  source 1..75: mol_type = other DNA
ctgacgctggggatgtttcttgaaggaaacgccattttgctgatcctggtaccactattaaaaccggtggtcgaa

SEQ ID NO: 856785 - DNA, 75 bp, synthetic construct
  source 1..75: mol_type = other DNA
aaaggatactaagccatttaaatgccgttaacagaagaatgactgcaaccggtaataaacgaatatcggacctca

SEQ ID NO: 856786 - DNA, 75 bp, synthetic construct
  source 1..75: mol_type = other DNA
tccagacccaatacgtataggtgcaatggaaaatgcagcggatgattcttcaaaatcaaaaacaggaactacaat

SEQ ID NO: 856787 - DNA, 75 bp, synthetic construct
  source 1..75: mol_type = other DNA
atgaccaggccagtaacgttatcagaaccccatttcagccagcataccctgaacaagtatgcatcgctgatggcg

SEQ ID NO: 856788 - DNA, 75 bp, synthetic construct
  source 1..75: mol_type = other DNA
cgcaaacattgattgtctggacaggcatggcaccaacgagaaggcaaaacgaacttttacaacactggggtgagc

SEQ ID NO: 856789 - DNA, 75 bp, synthetic construct
  source 1..75: mol_type = other DNA
tgcaagaagagatgatgtcaattcttcgtatggctaatcctgccaaactacgcgcgagaattatttcactgggtc

SEQ ID NO: 856790 - DNA, 75 bp, synthetic construct
  source 1..75: mol_type = other DNA
ctgcacttttatcatcgcgatggcgataccgcacaatgtctggaagccctggcgcaggccgggcttgccggattc

SEQ ID NO: 856791 - DNA, 75 bp, synthetic construct
  source 1..75: mol_type = other DNA
atcgctaaacgtcagggggaactggcgcaggcgaataatgcattgcaactgttattgggaagctacggcaagctg

SEQ ID NO: 856792 - DNA, 75 bp, synthetic construct
  source 1..75: mol_type = other DNA
cggctgacgatctggcatccgggcgttcaacctttatggtggagatgaccgaaaccgccaatattctgcataacg

SEQ ID NO: 856793 - DNA, 75 bp, synthetic construct
  source 1..75: mol_type = other DNA
acgtccacttacgatggtctgtcgctggcgtgggcgtgcgcggaaaatctggcgaataagattaaggcattgacg

SEQ ID NO: 856794 - DNA, 75 bp, synthetic construct
  source 1..75: mol_type = other DNA
gcgtcaggtgggcgacctggaacgtattctggcgcgtctggcgttgcgtaccgctcgcccgcgcgatctggcccg

SEQ ID NO: 856795 - DNA, 75 bp, synthetic construct
  source 1..75: mol_type = other DNA
tagattcacacaccccaatgatgcagcagtatctcaggctgaaagcccagcatcccgagatcctgctgttttacc

SEQ ID NO: 856796 - DNA, 75 bp, synthetic construct
  source 1..75: mol_type = other DNA
gaaaaacagctttatgaagagctgttcgacctgctgttgccgcatctggaagcgttgcaacagagcgcgagcgcg

SEQ ID NO: 856797 - DNA, 75 bp, synthetic construct
  source 1..75: mol_type = other DNA
gggcgtgcgctgaaaatctggcgaataagattaaagcgttgacgttgtttgctacccactactttgaactgactc

SEQ ID NO: 856798 - DNA, 75 bp, synthetic construct
  source 1..75: mol_type = other DNA
gtggaaaactatctcgccaaactggtgaatcagggagagtccgttgccatctgcgaacaaattggcgatccggcg

SEQ ID NO: 856799 - DNA, 75 bp, synthetic construct
  source 1..75: mol_type = other DNA
gagatcctgctgttttaccggatgggtgatttttatgaactgttttatgacgacgcaaaacgcgcgtcgcaactg

SEQ ID NO: 856800 - DNA, 75 bp, synthetic construct
  source 1..75: mol_type = other DNA
ggcgtcgataacatcatcgtcaccgtctcgcgcggctatttgcagttgaatcccgaggtcattatcgaagcgctg

SEQ ID NO: 856801 - DNA, 75 bp, synthetic construct
  source 1..75: mol_type = other DNA
atgagtgcaatagaaaatttcgatgcccatacgcccatgatgcagcagtatctcaagctgaaagcccagcatccc

SEQ ID NO: 856802 - DNA, 75 bp, synthetic construct
  source 1..75: mol_type = other DNA
atgcgccagaccgcgttgattgcgctgatggcgtatattggcagttacgtaccggcacaaaaagtcgagattggg

SEQ ID NO: 856803 - DNA, 75 bp, synthetic construct
  source 1..75: mol_type = other DNA
gatcccgatggcgggtattccctaccatgcagtggaaaactatctcgccaaactggtgaatcaaggtgagtcggt

SEQ ID NO: 856804 - DNA, 75 bp, synthetic construct
  source 1..75: mol_type = other DNA
cccgtgagcaggtatcggcagggatgcgacatgcccgtgccagtgaatcaccgttctggccttcacctgggcaat

SEQ ID NO: 856805 - DNA, 75 bp, synthetic construct
  source 1..75: mol_type = other DNA
ttttcctcggttgcatgatcgcaatgttacagcaagtaaccggcgttaacgttatgatgtattacgcacctattg

SEQ ID NO: 856806 - DNA, 75 bp, synthetic construct
  source 1..75: mol_type = other DNA
tggcgttatatgtttgctgccggcattgccccatgcattctgttctgtattttagtattctttataccggaatcc

SEQ ID NO: 856807 - DNA, 75 bp, synthetic construct
  source 1..75: mol_type = other DNA
atgtggatattcgccatctgctgcatcttcagttacttctttatctgccgttacctgccggaaacaaaaggcatt

SEQ ID NO: 856808 - DNA, 75 bp, synthetic construct
  source 1..75: mol_type = other DNA
catgaaagccagcgatccgcgaaacgcgttttactggcgtttcgtggagctggggactatcaatatgcctgccca

SEQ ID NO: 856809 - DNA, 75 bp, synthetic construct
  source 1..75: mol_type = other DNA
gtacgcaggggaaaactgcgccgcaatgtggtggtcctttcccggcgctcccgcgatggcgggatggaatctggt

SEQ ID NO: 856810 - DNA, 75 bp, synthetic construct
  source 1..75: mol_type = other DNA
tggttatacaagctcaggtcaaaatacctggggtgtacaaggctcagtaggtatgtctacgggggcgttagctaa

SEQ ID NO: 856811 - DNA, 75 bp, synthetic construct
  source 1..75: mol_type = other DNA
cagaccctgcgtgagatgaacgccgacaacctgcgcaaggtgccggccgatgcacccacggccttcatcaagccg

SEQ ID NO: 856812 - DNA, 75 bp, synthetic construct
  source 1..75: mol_type = other DNA
cggggctaccgcgccctggtcgaaccactcacggactcgcatcgggccaagctggacgagctgttgaagctcaag

SEQ ID NO: 856813 - DNA, 75 bp, synthetic construct
  source 1..75: mol_type = other DNA
tggccagcgcttccgcgcgggtggccggggcgagagcaccgggcacgtcaacccgaagtacggtagcgagccggg

SEQ ID NO: 856814 - DNA, 75 bp, synthetic construct
  source 1..75: mol_type = other DNA
ctctgtatgtacctgataacatgaagaatgccagttggttttctaaagccgcagatgtgtttaccgcgatagttt

SEQ ID NO: 856815 - DNA, 75 bp, synthetic construct
  source 1..75: mol_type = other DNA
agatgcccgccgccttcaggtagtggagccaaacgcagggacacaatcacgcattgatgaagcgatgaaattgct

SEQ ID NO: 856816 - DNA, 75 bp, synthetic construct
  source 1..75: mol_type = other DNA
tcgccgaattcaagaagtggagccaaacgcagggacacaatcacgtattgatgaagcgatgaagttgctcaaagg

SEQ ID NO: 856817 - DNA, 75 bp, synthetic construct
  source 1..75: mol_type = other DNA
tcgcacgtggtgatgatggcctcgcccaaagaccttgaacgctttgcgcttggtttttcgctttccgaagggatt

SEQ ID NO: 856818 - DNA, 75 bp, synthetic construct
  source 1..75: mol_type = other DNA
ctcctcaaaacgtggacagcttttctgcaagggatgcccgtaaagtatgtgggcttaacgatatcgatgacgttt

SEQ ID NO: 856819 - DNA, 75 bp, synthetic construct
  source 1..75: mol_type = other DNA
gaggcccggagtgctccagctgcgcatgtactgtcctcataggcggtgttaccattgcgttaacagaaactttac

SEQ ID NO: 856820 - DNA, 75 bp, synthetic construct
  source 1..75: mol_type = other DNA
ggtaagaaagtgtcgcaggctctggatattctgacctacaccaacaagaaagcggctgtactggttaagaaagtt

SEQ ID NO: 856821 - DNA, 75 bp, synthetic construct
  source 1..75: mol_type = other DNA
acgcagccaccctgggagggataacaccggcacagtggcttatggaggaatacagacgagggaaggcagcgggac

SEQ ID NO: 856822 - DNA, 75 bp, synthetic construct
  source 1..75: mol_type = other DNA
gggcgaaaaaggtggcttccggacagcagatacccgatccggtgatcagcatacaggcaaagccagagcccatga

SEQ ID NO: 856823 - DNA, 75 bp, synthetic construct
  source 1..75: mol_type = other DNA
gtgatcagcatacaggcaaagccagagcccatgagtacacctccggacacagggagagacgtttaccacccgcca

SEQ ID NO: 856824 - DNA, 75 bp, synthetic construct
  source 1..75: mol_type = other DNA
gaaagccagcgatccccgaaatgcgttttactggcgctttgtggagctgggaacgataaacatgcccgcgcatcc

SEQ ID NO: 856825 - DNA, 75 bp, synthetic construct
  source 1..75: mol_type = other DNA
agtcaaaatgtcaatcatcatgaattaattatcaccaaaccggttgataaatcctcaccattgctggcaaaagca

SEQ ID NO: 856826 - DNA, 75 bp, synthetic construct
  source 1..75: mol_type = other DNA
tgagtggagagacacaagggctgatttcagcaggttgctcaacgcttgattctgtcggaaacaaagcgcagccag

SEQ ID NO: 856827 - DNA, 75 bp, synthetic construct
  source 1..75: mol_type = other DNA
ctggaatctgccattgctaacgctgaacacaacgatggcgctgacattgacgatctgaaagttacgaaaattttc

SEQ ID NO: 856828 - DNA, 75 bp, synthetic construct
  source 1..75: mol_type = other DNA
tccttttgtccgtcctgcgtttgatacccgtgaagaactggcaacgcgagtcgctatgaaacgtatgaaccaggc

SEQ ID NO: 856829 - DNA, 75 bp, synthetic construct
  source 1..75: mol_type = other DNA
ggcgtccatattcgtggtgttaacccgcgcaccgggaacagcgataacacaatgaaggcgagtaacccgagaaac

SEQ ID NO: 856830 - DNA, 75 bp, synthetic construct
  source 1..75: mol_type = other DNA
ctggctgaagcgccgtctcttttattacaccactccgtttttttcatcgcttctggcccttcataaggggccccg

SEQ ID NO: 856831 - DNA, 75 bp, synthetic construct
  source 1..75: mol_type = other DNA
atggctggaaaactgtttcggcagctgaaatggaattcttttattgtggcgggaaactgccacgcaaaagcgtca

SEQ ID NO: 856832 - DNA, 75 bp, synthetic construct
  source 1..75: mol_type = other DNA
cgatgatggttatcttgataactggctcagagcatggccggtcctgaaggaatataaccttcatgcacatatttt

SEQ ID NO: 856833 - DNA, 75 bp, synthetic construct
  source 1..75: mol_type = other DNA
ggctggaccaaaaatgaagttgaaaacttactctatgcgggcttcctcggcgtcttccttggcggacgtattggt

SEQ ID NO: 856834 - DNA, 75 bp, synthetic construct
  source 1..75: mol_type = other DNA
ggctggaccaaaaacgaagtcgaaaacttactctatgcgggcttcctgggagtcttcctcggtggccgaattggc

SEQ ID NO: 856835 - DNA, 75 bp, synthetic construct
  source 1..75: mol_type = other DNA
atgatgcctatattatttctttagattatccattacaggattttgtggtttttctggaattaaagtcattaatgt

SEQ ID NO: 856836 - DNA, 75 bp, synthetic construct
  source 1..75: mol_type = other DNA
tgatgacggttatcttgataactggctccaggcctggccgattcttaaggaatataatctgcatgcacatatttt

SEQ ID NO: 856837 - DNA, 75 bp, synthetic construct
  source 1..75: mol_type = other DNA
aaatacaggttttgataagagtagggttgatgatgacggaacagatttaaatcatgtaaaacaagttcgtttgtc

SEQ ID NO: 856838 - DNA, 75 bp, synthetic construct
  source 1..75: mol_type = other DNA
tgtacaaattttgcgttcagcggaaaacctggtaccgggaagaaccacttagcggcagctactcgcggccttaat

SEQ ID NO: 856839 - DNA, 75 bp, synthetic construct
  source 1..75: mol_type = other DNA
tctaatgtaccgtcgactcgtcagaagcgagaacatcactctgttcagcccgcatgatgtgcctgatatgtacga

SEQ ID NO: 856840 - DNA, 75 bp, synthetic construct
  source 1..75: mol_type = other DNA
cgtcgtgctggaattggtattggttttggccgtatccgtgcgctgggcagcgagatccgcaatggtgaagccacc

SEQ ID NO: 856841 - DNA, 75 bp, synthetic construct
  source 1..75: mol_type = other DNA
tttctgcatcaaggacagagcggtgcaggtatgtgagagaagatacactggaaggaaaacgatgtcttacagaaa

SEQ ID NO: 856842 - DNA, 75 bp, synthetic construct
  source 1..75: mol_type = other DNA
aacagcgcgagaaattcggcttcctgctcgacgccctgaaatacggtactccgccgcacgcaggtctggcatttg

SEQ ID NO: 856843 - DNA, 75 bp, synthetic construct
  source 1..75: mol_type = other DNA
ccgatcggtatgatgctaaagcagtaaaagaacgtctggcgatgatgacgccgcagaacgcgcgtatctggtata

SEQ ID NO: 856844 - DNA, 75 bp, synthetic construct
  source 1..75: mol_type = other DNA
cgcacggctttctatctggaagttgagaacgacgccttgcccggtgcggtagaccgcctggccgatgctattgca

SEQ ID NO: 856845 - DNA, 75 bp, synthetic construct
  source 1..75: mol_type = other DNA
gcaaccaggcgtcggttggtggcataagtttttccaccaacgctaacaacggccttatggttaatgctaatggtt

SEQ ID NO: 856846 - DNA, 75 bp, synthetic construct
  source 1..75: mol_type = other DNA
gtattcgctttcccgatgagcgtggggcgtcaatggggggtgggcttcctgctgcaaagcaacaataaacaacct

SEQ ID NO: 856847 - DNA, 75 bp, synthetic construct
  source 1..75: mol_type = other DNA
acgatttctcgctgattaagccagaaaagaaatatgaccatccagagctgattatcgatgagtcgaatttgcgcg

SEQ ID NO: 856848 - DNA, 75 bp, synthetic construct
  source 1..75: mol_type = other DNA
tcagcccgaaagagccacacaataaaacggcttattttgtcgatgcgccgtatcaggtcgataaaatcagcgagc

SEQ ID NO: 856849 - DNA, 75 bp, synthetic construct
  source 1..75: mol_type = other DNA
gcgccaagctttgctaacccgactgctctgtccgagctgagcattcaggttgtgaagaaggcagagaataattga

SEQ ID NO: 856850 - DNA, 75 bp, synthetic construct
  source 1..75: mol_type = other DNA
cgtctgaccatgctgctgaccggcaccgacaatatccgtgacgttatcgccttcccgaaaaccacggcggcagcg

SEQ ID NO: 856851 - DNA, 75 bp, synthetic construct
  source 1..75: mol_type = other DNA
ggtgactctgtgtggttgggtcaatcgtcgtcgtgatcttggtagcctgatcttcatcgatatgcgcgaccgcga

SEQ ID NO: 856852 - DNA, 75 bp, synthetic construct
  source 1..75: mol_type = other DNA
ccgattttgttcagcgaacactggcgcttatcgatcaatataacgaaatgattgaggtgcagggcaagccattca

SEQ ID NO: 856853 - DNA, 75 bp, synthetic construct
  source 1..75: mol_type = other DNA
tgttaataaaatgccattggcttatttcggaagatatggaagaggatggcaccattccagcaaaagcagcaattg

SEQ ID NO: 856854 - DNA, 75 bp, synthetic construct
  source 1..75: mol_type = other DNA
ctgaacgtcacgcctgggttacagggccgctgggcgagaaagtgaatgccagttgggggatctccggcgatggca

SEQ ID NO: 856855 - DNA, 75 bp, synthetic construct
  source 1..75: mol_type = other DNA
ctaccactttcagtacgccaacggctccctgacaaatacaggaaatgcgacgctgcggatcctcgcctacggccc

SEQ ID NO: 856856 - DNA, 75 bp, synthetic construct
  source 1..75: mol_type = other DNA
cgggcctttgagttgcttggccgggcggaggtggcaaacccttctcatccctatctcatgaaaaaacggctacag

SEQ ID NO: 856857 - DNA, 75 bp, synthetic construct
  source 1..75: mol_type = other DNA
gaagtggcggcaacgaaagtcggcgcgctgtctaaaggtcagttgaaagagttccttgacgccaatctggcataa

SEQ ID NO: 856858 - DNA, 75 bp, synthetic construct
  source 1..75: mol_type = other DNA
tccatctaattacttacttgatacctgcaacatttacaacaaggctgtgaaccgccccggaaatcctggagacta

SEQ ID NO: 856859 - DNA, 75 bp, synthetic construct
  source 1..75: mol_type = other DNA
gatgattgtcgagctggacaataacctctctcactatgccgatgtcattaaaaaagcgctgcatgttgatgtgaa

SEQ ID NO: 856860 - DNA, 75 bp, synthetic construct
  source 1..75: mol_type = other DNA
atggctaagattaactctcagataaaagaggtggatggtaaactcgatgactgcgagcaatccattaaagagtcg

SEQ ID NO: 856861 - DNA, 75 bp, synthetic construct
  source 1..75: mol_type = other DNA
tcaccgccgagttacagccggtactacggcaggtcggcgatctggagcgtattctggcacgcctggcgttacgca

SEQ ID NO: 856862 - DNA, 75 bp, synthetic construct
  source 1..75: mol_type = other DNA
aggcgtcgccaacgtacatctcgatgcgctggagcacggcgacactatcgcctttatgcacagcgtgcaggacgg

SEQ ID NO: 856863 - DNA, 75 bp, synthetic construct
  source 1..75: mol_type = other DNA
gcgggcagtttttccgtctcgctggtggacggatgctggcacgacttcgccaccggggacagcggcggcgacctt

SEQ ID NO: 856864 - DNA, 75 bp, synthetic construct
  source 1..75: mol_type = other DNA
aatggcttctgccagcggcattcaattcgttaaccgcgacactaaaaacccgctggtgacgaccacatacggtac

SEQ ID NO: 856865 - DNA, 75 bp, synthetic construct
  source 1..75: mol_type = other DNA
ctagattcacaaaaacgaacaaaagagaatctgcaacatgttaataaatcagtagaaaaattatcttttgccata

SEQ ID NO: 856866 - DNA, 75 bp, synthetic construct
  source 1..75: mol_type = other DNA
atgtctggaccaccgaaaaccccgacccatctacgtttggtgagggggaacccatctaaacgcccgatcaatgag

SEQ ID NO: 856867 - DNA, 75 bp, synthetic construct
  source 1..75: mol_type = other DNA
ccgattgtttcgattgcgattcgcgttgtatcgaagcgttttcgcaacatcagtaaaaacatgcagaacaccatg

SEQ ID NO: 856868 - DNA, 75 bp, synthetic construct
  source 1..75: mol_type = other DNA
tcgtccatagtcggctctggttcagttgttattcgaaatgttgatgaaaacgttgtagtcgctggttctccaact

SEQ ID NO: 856869 - DNA, 75 bp, synthetic construct
  source 1..75: mol_type = other DNA
gatagtttagatgaacctcataaatattgctactttattgcgattggcgaaccctattatagggctatctggttg

SEQ ID NO: 856870 - DNA, 75 bp, synthetic construct
  source 1..75: mol_type = other DNA
gaagaagcggcgcgtatggcttatgccatggactttatcaataagatggataacggtcttgatacggtgattggt

SEQ ID NO: 856871 - DNA, 75 bp, synthetic construct
  source 1..75: mol_type = other DNA
tgattgcccaccgcttgtctaccattgaaaaggcagacgaaatcgtggtcgtcgaggatggtgtcattgtggaac

SEQ ID NO: 856872 - DNA, 75 bp, synthetic construct
  source 1..75: mol_type = other DNA
gaaaacggcgtgctgctctctggcggtcagcgtcagcgtattgctatcgctcgagccttgttgcgtgatagcccg

SEQ ID NO: 856873 - DNA, 75 bp, synthetic construct
  source 1..75: mol_type = other DNA
cgtgactatgccgatgtttaatgccttctggcagcaaaataaactgatcgaaatgcgccgcagcgagaagaacga

SEQ ID NO: 856874 - DNA, 75 bp, synthetic construct
  source 1..75: mol_type = other DNA
tcaaacctggcggaaaagagatctataccgaaggtaaagatgaaatggcgtggctgaaatttttctatgatgtcg

SEQ ID NO: 856875 - DNA, 75 bp, synthetic construct
  source 1..75: mol_type = other DNA
gcaatgcttgcagagtttggtatgtcaccggcaagccgggcgaaagtaaatatcgccggaccggatgatgttgat

SEQ ID NO: 856876 - DNA, 75 bp, synthetic construct
  source 1..75: mol_type = other DNA
attattattttattgggataggcaaaccatcaactaggaagcactatttaaatatcataagaaaacataatctac

SEQ ID NO: 856877 - DNA, 75 bp, synthetic construct
  source 1..75: mol_type = other DNA
acagggtatgtctacaccgaaattgagcctcgcaggtgggtaattggggatggcgcaccgcaaagtgagccagtt

SEQ ID NO: 856878 - DNA, 75 bp, synthetic construct
  source 1..75: mol_type = other DNA
tgacccgggagccaataacgtcatcaatgattgtaagtcaagaacaatgtatttatgatcaagccaaaggaaact

SEQ ID NO: 856879 - DNA, 75 bp, synthetic construct
  source 1..75: mol_type = other DNA
accagacggagaaatacgccgctacgacagacaacagaacataatctgtggcgagtgccggaagagtgaagttat

SEQ ID NO: 856880 - DNA, 75 bp, synthetic construct
  source 1..75: mol_type = other DNA
ccgcaggcaacccacagcgcgcccaccgcccaatgctgacccgtcaggatcttgaagcggcaaaggcacgcaata

SEQ ID NO: 856881 - DNA, 75 bp, synthetic construct
  source 1..75: mol_type = other DNA
ataccggtgaagcgtcctgttaatgtgcaaagaattgaattacgaagctgggtgagggctttccatgctctcagt

SEQ ID NO: 856882 - DNA, 75 bp, synthetic construct
  source 1..75: mol_type = other DNA
gcgctggggatgccacgactctgttcagcgcagcgtctggcgggggcaatggtcgaggaaatcttctctgtaaat

SEQ ID NO: 856883 - DNA, 75 bp, synthetic construct
  source 1..75: mol_type = other DNA
ttttagtggatctggcgcagggcgatgatgcccgccttccacaagcccatcagcagcagtttcgtgaacgactga

SEQ ID NO: 856884 - DNA, 75 bp, synthetic construct
  source 1..75: mol_type = other DNA
gcggccagtggtgatgtctggctctctggttgcggggtatttctatcagagcaggcgtatcgcgtatggcgtaag

SEQ ID NO: 856885 - DNA, 75 bp, synthetic construct
  source 1..75: mol_type = other DNA
tgcaggaggcgcgggcgcaatatcgactgaccgatgccgatcgctacccgcaactcaacggcgagggtagcggca

SEQ ID NO: 856886 - DNA, 75 bp, synthetic construct
  source 1..75: mol_type = other DNA
tggctggtatcagggtgaatatatttgctggcctgccaccctgggcgatgtgaataaccagcccgaagcaacgta

SEQ ID NO: 856887 - DNA, 75 bp, synthetic construct
  source 1..75: mol_type = other DNA
ccggtctgaaattgccgtcgtggctgaacaaaggcgaccccgccaggctgttgcgtggctgcgtgaaattctggt

SEQ ID NO: 856888 - DNA, 75 bp, synthetic construct
  source 1..75: mol_type = other DNA
ggcgtcagcgaagtgagcttcacggaatttgcggctgaaaaaggctacgaacttgaagagagcttcccggcagac

SEQ ID NO: 856889 - DNA, 75 bp, synthetic construct
  source 1..75: mol_type = other DNA
atatcaacccaactcattatcttgatatcaaccatgcggatatcgttgcgcgtattgatttaactgagtgggaaa

SEQ ID NO: 856890 - DNA, 75 bp, synthetic construct
  source 1..75: mol_type = other DNA
tgcaggaagcgcgggcgcaatatcgtctgaccgatgccgaccgctacccacagctcaatggcgagggcagcggca

SEQ ID NO: 856891 - DNA, 75 bp, synthetic construct
  source 1..75: mol_type = other DNA
ttgacaaagacgttactggacggctctggtcgcgtactggagtcagtttatccccgctttttggtggatctggcg

SEQ ID NO: 856892 - DNA, 75 bp, synthetic construct
  source 1..75: mol_type = other DNA
aaatatcttgtttggttgggtttaattccacatcatattttattaaggtatttaaggaatattacaacacaacac

SEQ ID NO: 856893 - DNA, 75 bp, synthetic construct
  source 1..75: mol_type = other DNA
atgcttacatctaaaaaagaaatgcagagttctaaaaataaacaagaggagaatttagcgttattgttaactaat

SEQ ID NO: 856894 - DNA, 75 bp, synthetic construct
  source 1..75: mol_type = other DNA
aaggccacataaatcactcgaactgatgacgccagtggactatattttacgtgagagtaaaaattgcaatatgtg

SEQ ID NO: 856895 - DNA, 75 bp, synthetic construct
  source 1..75: mol_type = other DNA
gcactcaacggttcagggcgtatctgctgaacgagcctggcgcgatccggcagagatgatcgttattagttattc

SEQ ID NO: 856896 - DNA, 75 bp, synthetic construct
  source 1..75: mol_type = other DNA
gctgagcgcgcctggcgcgatcccgcagaaatgatcgttattaactattcaactaacattccttctggttacgat

SEQ ID NO: 856897 - DNA, 75 bp, synthetic construct
  source 1..75: mol_type = other DNA
aaaagctgattagagattatcctagctatgaactctttgctaaacaacaaaaagaacgctttagtttacttagta

SEQ ID NO: 856898 - DNA, 75 bp, synthetic construct
  source 1..75: mol_type = other DNA
gtctgcttcaaaagatgaggcgaccagacaagcgtcagcagcgaatggcagcgccacgacggcagcgacgaaggc

SEQ ID NO: 856899 - DNA, 75 bp, synthetic construct
  source 1..75: mol_type = other DNA
aaaacgaagcagctcctgcccaggaaccggtgtctgctaagcctgctgaaaagccaaaaccgacagtgacgccag

SEQ ID NO: 856900 - DNA, 75 bp, synthetic construct
  source 1..75: mol_type = other DNA
cgcatgacgatgtcgcagctggagagagcgacgggagcagactggcattcggttcgacgctgccttgtggatgtg

SEQ ID NO: 856901 - DNA, 75 bp, synthetic construct
  source 1..75: mol_type = other DNA
gacgaaaaaaacactggcatcccgatgtgctgaaagagattcgacgcctcaggacagagctgccgaacctcggta

SEQ ID NO: 856902 - DNA, 75 bp, synthetic construct
  source 1..75: mol_type = other DNA
atgcaaatgcagcatctgatggttggctatcctaagtactaccaaacggccgattatgcgttgaggctttcagtg

SEQ ID NO: 856903 - DNA, 75 bp, synthetic construct
  source 1..75: mol_type = other DNA
agagccaattcatcatgtcgtgacttggaaaaataataatcaattaacccaatgcggtccatttaaaataaaatt

SEQ ID NO: 856904 - DNA, 75 bp, synthetic construct
  source 1..75: mol_type = other DNA
cgttggtggcattaatcgtgctgctggctggttgttccagtaatgcgcagtataatagcagtgcatcgggtaatg

SEQ ID NO: 856905 - DNA, 75 bp, synthetic construct
  source 1..75: mol_type = other DNA
cagtccggtctggcacagggaagttcaccaggaaaattcatttctccggggaaaaagtaccctcagccgcatgtg

SEQ ID NO: 856906 - DNA, 75 bp, synthetic construct
  source 1..75: mol_type = other DNA
aacccgtgcgggcgagcaggatatcagcgcagcaattgctcaccagaaaagccagctgcatacaccggctgaaca

SEQ ID NO: 856907 - DNA, 75 bp, synthetic construct
  source 1..75: mol_type = other DNA
cgctgacgccggtctggctggacagtaaaaaccggggtatccgcgataattatcgtgagggaatggtgatggagc

SEQ ID NO: 856908 - DNA, 75 bp, synthetic construct
  source 1..75: mol_type = other DNA
atgaaaagcctgatactacaacatattccggaagcctgtatactggggctctttgttgcccgtacaactcgggga

SEQ ID NO: 856909 - DNA, 75 bp, synthetic construct
  source 1..75: mol_type = other DNA
ccggacacacgcctgaagggcggggagagcgtcacagtgatgaaagtggaggacgggcagctgacggtacagcgg

SEQ ID NO: 856910 - DNA, 75 bp, synthetic construct
  source 1..75: mol_type = other DNA
ggtcatggcgatgctgggcggcgataaacgccttatcgatgcccacaaccaggcggtaaccgaagcggtgcggca

SEQ ID NO: 856911 - DNA, 75 bp, synthetic construct
  source 1..75: mol_type = other DNA
aaagatgtgatgcgctggaacagcgacactgcgaatctgcaaccaggcgataagctgacgttgtttgtgaaaaac

SEQ ID NO: 856912 - DNA, 75 bp, synthetic construct
  source 1..75: mol_type = other DNA
agcgatagcattacgtatcgtgtgcgcaaaggcgattcgctttcaagcattgctaaacgccacggcgtgaacatc

SEQ ID NO: 856913 - DNA, 75 bp, synthetic construct
  source 1..75: mol_type = other DNA
cttcacgtctcggcgtaagcaccaaagatttgcagcagtggaacaaactgcgcggatctaagctgaagccaggcc

SEQ ID NO: 856914 - DNA, 75 bp, synthetic construct
  source 1..75: mol_type = other DNA
tgccagttctggtgaccagtaatatccgggatggcgaactacgtaaggtttcgacctgggaagcacataaaggtg

SEQ ID NO: 856915 - DNA, 75 bp, synthetic construct
  source 1..75: mol_type = other DNA
gagcgttattgcctgttaccataagaaaaagcgactttagtggtcgctttttgtgtcataataataaagtcgttt

SEQ ID NO: 856916 - DNA, 75 bp, synthetic construct
  source 1..75: mol_type = other DNA
gcttctgaccgtagcggcttataacagcggcgaaggtcgagtcatgaaggcaattaaaacgaacaaagcgcgtgg

SEQ ID NO: 856917 - DNA, 75 bp, synthetic construct
  source 1..75: mol_type = other DNA
ctctgcggtcgatcactggctggcagaactgacaatgaacaagctttacgatcgcgttccggcttctgtctggaa

SEQ ID NO: 856918 - DNA, 75 bp, synthetic construct
  source 1..75: mol_type = other DNA
gaaacaaatggtgggcagttactgacaatggggaagaaccggcatcgaaagtaacccactggatgccgctaccgg

SEQ ID NO: 856919 - DNA, 75 bp, synthetic construct
  source 1..75: mol_type = other DNA
atgccgtatttgcagtaccagcgtacatgtgcagctccatcagcaaaaggggatgataagtttatcaccaccgac

SEQ ID NO: 856920 - DNA, 75 bp, synthetic construct
  source 1..75: mol_type = other DNA
atgaaactggtaagtcataaagaactgcataacgagtggatgcagagcgacgaatatcgcgctgcatggcaggaa

SEQ ID NO: 856921 - DNA, 75 bp, synthetic construct
  source 1..75: mol_type = other DNA
agccaattcggcgcaaggcgatgtgcgtaataccggtgtaataggctttgccgcctttgaattacaaggcccggc

SEQ ID NO: 856922 - DNA, 75 bp, synthetic construct
  source 1..75: mol_type = other DNA
ataacacgcagctgctgatccagattatccggcaatacgggcgaacatgccgccgctatcagtttgaagtcatta

SEQ ID NO: 856923 - DNA, 75 bp, synthetic construct
  source 1..75: mol_type = other DNA
acaacacgcagttgctgatccagataattcgccagtacgggcgaacatgccgccgttatcagtttgaggtgatca

SEQ ID NO: 856924 - DNA, 75 bp, synthetic construct
  source 1..75: mol_type = other DNA
atgaactggcggtattttactcagccgcagatcaccgcctcgccgctggagcgtgttatcgagaaaaataaatac

SEQ ID NO: 856925 - DNA, 75 bp, synthetic construct
  source 1..75: mol_type = other DNA
aagaagtattgtttgccaaaaagcagctaaatcagctctctacaatcaaaaataaagtttcacagctgacgaggc

SEQ ID NO: 856926 - DNA, 75 bp, synthetic construct
  source 1..75: mol_type = other DNA
ccgattatttaatgcgtttacgtcgttgccagacaattgacacgctggagcgtgttatcgagaaaaataaatacg

SEQ ID NO: 856927 - DNA, 75 bp, synthetic construct
  source 1..75: mol_type = other DNA
aagaaacacaatctgccgcacaacagcctgaacttcgtattccacggtggttccggttctactgctcaggaaatc

SEQ ID NO: 856928 - DNA, 75 bp, synthetic construct
  source 1..75: mol_type = other DNA
attaatgagttaaaatactttatgtacgatgtgttgaaaaaagagattgaaaaatcaagtgtgggctatattgta

SEQ ID NO: 856929 - DNA, 75 bp, synthetic construct
  source 1..75: mol_type = other DNA
agagatttgatagattattatacatgagtattgttgttgttatttttagtttcctcacctgctctttattaatta

SEQ ID NO: 856930 - DNA, 75 bp, synthetic construct
  source 1..75: mol_type = other DNA
atgacgagaatgagcgaaaccgaactactaaaaataatccgccgtgttaccggagccagccagacagcagacaaa

SEQ ID NO: 856931 - DNA, 75 bp, synthetic construct
  source 1..75: mol_type = other DNA
cgatagtcagacctggacaaccgcacaattcatttcatggctggagagtcagggggcatttaaccacccttactg

SEQ ID NO: 856932 - DNA, 75 bp, synthetic construct
  source 1..75: mol_type = other DNA
aagcactgactgcggatataacattaacgccgaaagatattggtactttaaattcagtaacgatgtctttctctg

SEQ ID NO: 856933 - DNA, 75 bp, synthetic construct
  source 1..75: mol_type = other DNA
cgccgttctcaacaacggagggagagcgcgaaaaatacttaccagtggaagaagccggaacgactgcggcggtaa

SEQ ID NO: 856934 - DNA, 75 bp, synthetic construct
  source 1..75: mol_type = other DNA
taatccgccgtgctggtggaatcagccagctggctgacgaacaggccaagcagccggatacagtcaccgctgaaa

SEQ ID NO: 856935 - DNA, 75 bp, synthetic construct
  source 1..75: mol_type = other DNA
cgagttgctggcctaccgtcgccgcgtgcagatgtaccgggagagcgagaaaaagacttaccagtggaagaagcc

SEQ ID NO: 856936 - DNA, 75 bp, synthetic construct
  source 1..75: mol_type = other DNA
aaccgggtaaaacgatggcgcaattgttccgcgaccacggactacccgctaccgatgtctatgcgatggcgcagg

SEQ ID NO: 856937 - DNA, 75 bp, synthetic construct
  source 1..75: mol_type = other DNA
gtccggttgcccgccaggtggaagggatgttcgtgcagatgatgctgaaaagtatgcgtgaagccctaccgaaag

SEQ ID NO: 856938 - DNA, 75 bp, synthetic construct
  source 1..75: mol_type = other DNA
cctctggcaactggaaagggccagttactgaaatcaccacgactgaatatgaaaacggcgaagcgaagaaagtaa

SEQ ID NO: 856939 - DNA, 75 bp, synthetic construct
  source 1..75: mol_type = other DNA
gtctgcttcaaaagatgaggcgaccagacaagcgtcagcagcgaatggcagtgccacgacagcatcgacgaaggc

SEQ ID NO: 856940 - DNA, 75 bp, synthetic construct
  source 1..75: mol_type = other DNA
cggaatcagccaggaagcaggcaaacaggaggccacgcagccggacagcgtgatagccgaaaattacgcgcgtgt

SEQ ID NO: 856941 - DNA, 75 bp, synthetic construct
  source 1..75: mol_type = other DNA
taatttgcaaaatgggcagatggtgaaaatccgccagaacgccagcggcgtggtgacgggcttaaccattgatac

SEQ ID NO: 856942 - DNA, 75 bp, synthetic construct
  source 1..75: mol_type = other DNA
atgacagaagccgaaatactgggattaatccgccgcgtctcaggaatcagccagcaggctgacgaacaggctacg

SEQ ID NO: 856943 - DNA, 75 bp, synthetic construct
  source 1..75: mol_type = other DNA
tcacctatgaaagtattactcaggagcactgtgttgcaggaaccagtgcgtacagtctgtgggaagagcggcttt

SEQ ID NO: 856944 - DNA, 75 bp, synthetic construct
  source 1..75: mol_type = other DNA
ctccgcaggctgttcatcactggcatctattgggaacaaagcgcagattgcgcatatggatcagatcatggtgct

SEQ ID NO: 856945 - DNA, 75 bp, synthetic construct
  source 1..75: mol_type = other DNA
aaactttccttaacaatgcttctttggaaagatgaattgctttccctattaagtgatgtaggggagctacagaat

SEQ ID NO: 856946 - DNA, 75 bp, synthetic construct
  source 1..75: mol_type = other DNA
cctggtcggcgagaacttcgccaccctgcgccgttacacgccggccttgctggaggtgctggaactgcgcgccgc

SEQ ID NO: 856947 - DNA, 75 bp, synthetic construct
  source 1..75: mol_type = other DNA
ttaccgcgtcctaaaatcacagaaattctcgacgaggtaaacagctggacagcgtttacccgacatttttcacat

SEQ ID NO: 856948 - DNA, 75 bp, synthetic construct
  source 1..75: mol_type = other DNA
ttacctatgagagcatcaactgggagcacatcgtcgccggaaccagtgcgtacagtctgtggagtgaacggattt

SEQ ID NO: 856949 - DNA, 75 bp, synthetic construct
  source 1..75: mol_type = other DNA
taatccgccgcgtcgccggaatcagccagcaggctgacgaacaggccacgcagccggacagcatgaccgcagata

SEQ ID NO: 856950 - DNA, 75 bp, synthetic construct
  source 1..75: mol_type = other DNA
cagacaggtttccgtattttacggggaatgatgtcgccagcctggcaaccctgacaaaagtcgggcgggatattc

SEQ ID NO: 856951 - DNA, 75 bp, synthetic construct
  source 1..75: mol_type = other DNA
gatgcgccgtgatggtatccagcttaatgatgtggatatgcgcgacatacggatccgcgttctggaaatgctggc

SEQ ID NO: 856952 - DNA, 75 bp, synthetic construct
  source 1..75: mol_type = other DNA
attcatttggtttttgtcatgagtcgatagcatctcttttgtctattactaatggttcctccaggaatgcaattt

SEQ ID NO: 856953 - DNA, 75 bp, synthetic construct
  source 1..75: mol_type = other DNA
aagtagttaatgttttatggctttttttctgcaaaaaatctaatatgatactggattcttgtagaggattgcttt

SEQ ID NO: 856954 - DNA, 75 bp, synthetic construct
  source 1..75: mol_type = other DNA
attcaatggaaagtttttattctttatttatttggtttttgtcatgaatcgatagcatctcttttgtctattact

SEQ ID NO: 856955 - DNA, 75 bp, synthetic construct
  source 1..75: mol_type = other DNA
tttggtgtcaaagcctctggcaactggaaagggccagtcactgaaatcaccacgactgaatatgaaaatggcgaa

SEQ ID NO: 856956 - DNA, 75 bp, synthetic construct
  source 1..75: mol_type = other DNA
aagtgtcggaatggcgaaagaactggcaatgatcgaacgcaatgatcagggccgcgccgttcgtcagtacttcat

SEQ ID NO: 856957 - DNA, 75 bp, synthetic construct
  source 1..75: mol_type = other DNA
atgcccgggcgctttgaactaaaaccaaccctggagaaagtctggcacgcgccggacaattttcgcttcatggac

SEQ ID NO: 856958 - DNA, 75 bp, synthetic construct
  source 1..75: mol_type = other DNA
gaatcattattgcggcaatagtgctgattatcggtattcttctgcctggagatgaaacacgccagatgcctgttg

SEQ ID NO: 856959 - DNA, 75 bp, synthetic construct
  source 1..75: mol_type = other DNA
ggcgcacctggaaacccaaaacaagatttacaacattttgacaccggaacagaaaaagcaatttaatgcgaattt

SEQ ID NO: 856960 - DNA, 75 bp, synthetic construct
  source 1..75: mol_type = other DNA
gagatgggcaaaacgacgcagcagcgccactacagcaacgagagcaacatgatcgcccgtatcgtgctgggtggc

SEQ ID NO: 856961 - DNA, 75 bp, synthetic construct
  source 1..75: mol_type = other DNA
ttattggcgggagtgaaaccactattgttagcgccagagcgttacataaggcgttaggtgtagggcgcgttttcc

SEQ ID NO: 856962 - DNA, 75 bp, synthetic construct
  source 1..75: mol_type = other DNA
aaacataccgaagctgcttttcagtttgccaacgttgctgattcctacgccgccaattcggcgcaaggcgatgta

SEQ ID NO: 856963 - DNA, 75 bp, synthetic construct
  source 1..75: mol_type = other DNA
ctgcttttgaattgcaaagcccggttcaaaatgcgcaatcgccatgttctgcgcaggcatttcctgcagacaaca

SEQ ID NO: 856964 - DNA, 75 bp, synthetic construct
  source 1..75: mol_type = other DNA
taatttcaattcgcttcctataacacggggttatgattcatcaaataatgcgccgagatatattgttcaggctcg

SEQ ID NO: 856965 - DNA, 75 bp, synthetic construct
  source 1..75: mol_type = other DNA
ctgcggagttaatgcgacttttatcgcggacggggtgccacagtttgctctggttaatgggctgtacgcaatgga

SEQ ID NO: 856966 - DNA, 75 bp, synthetic construct
  source 1..75: mol_type = other DNA
ccggcaggttatgaagttctacaagaactggatgagttagattctttattaattatagatctcggggcaccacat

SEQ ID NO: 856967 - DNA, 75 bp, synthetic construct
  source 1..75: mol_type = other DNA
gtctgcttcaaaagatgaggcgaccagacaagcgtcagcagcgaatggcagtgccacgactgcaacgacgaaggc

SEQ ID NO: 856968 - DNA, 75 bp, synthetic construct
  source 1..75: mol_type = other DNA
gaagacgttgattacgcatacaccgagctgagcaaaatcagcccgcgcttcaccatcgcagcttccttcggtaac

SEQ ID NO: 856969 - DNA, 75 bp, synthetic construct
  source 1..75: mol_type = other DNA
gcccaggcggcgctggaatcaggctggggacaacggcaaatccgtcgtgaaaatggtgagccaagctataacctg

SEQ ID NO: 856970 - DNA, 75 bp, synthetic construct
  source 1..75: mol_type = other DNA
gggtctacagctcttatcttgaagcattgtcggattatgtaggactgttaacgcgtaatccgcgttacgctgccg

SEQ ID NO: 856971 - DNA, 75 bp, synthetic construct
  source 1..75: mol_type = other DNA
ccggttagttacaacttccatgtgccgttagctgatggtggcgtcctgctgggagccagcccggaactgctgctg

SEQ ID NO: 856972 - DNA, 75 bp, synthetic construct
  source 1..75: mol_type = other DNA
gggggcgcaggccctacaggacgcgggctatgccaccgatcctcactatgcccgtaaactcaccaacatgatcca

SEQ ID NO: 856973 - DNA, 75 bp, synthetic construct
  source 1..75: mol_type = other DNA
cccgcaaactaacccatatgattcagcagatgaaatcggtaagcgacaaagtgagcaaaacttacaacatgagta

SEQ ID NO: 856974 - DNA, 75 bp, synthetic construct
  source 1..75: mol_type = other DNA
ggctatgctaccgatcctcattatgcccgcaaactcaccaacatgattcaacagatgaaatcggtaagcgacaag

SEQ ID NO: 856975 - DNA, 75 bp, synthetic construct
  source 1..75: mol_type = other DNA
tgaaaatgaacatcgataccgatactcaatgggcaacctgggaaggcgttctgaactactacaaagcgaacgaag

SEQ ID NO: 856976 - DNA, 75 bp, synthetic construct
  source 1..75: mol_type = other DNA
gtacacggtgtttacaagccgggtaacgtggttctgactccgaccatcctgcgcgactctcaggagtatgtttct

SEQ ID NO: 856977 - DNA, 75 bp, synthetic construct
  source 1..75: mol_type = other DNA
gcgggtgagaaacacttcgctgctaccggtaagccgctattctcttctcacatgatcgacctgtcagaagaatct

SEQ ID NO: 856978 - DNA, 75 bp, synthetic construct
  source 1..75: mol_type = other DNA
tgagttacacgttccttcctctccacaattgattaccacgccgacgctgtggcatctcgcaactccctttgaagg

SEQ ID NO: 856979 - DNA, 75 bp, synthetic construct
  source 1..75: mol_type = other DNA
aggtgcgtctgtttgccggagcggggattgtgcctgcgtcgtcaccgttgggtgagtggcgcgaaacaggcgtca

SEQ ID NO: 856980 - DNA, 75 bp, synthetic construct
  source 1..75: mol_type = other DNA
tcacgttcaccagatggctgaacattatggtgttccggttatcctgcataccgaccactgcgcgaagaaactgct

SEQ ID NO: 856981 - DNA, 75 bp, synthetic construct
  source 1..75: mol_type = other DNA
gctgaaaaatttccatgagaaatattactccgccaatctgatgaaggctgttatctacagtaacaaaccgctgca

SEQ ID NO: 856982 - DNA, 75 bp, synthetic construct
  source 1..75: mol_type = other DNA
agatccggaagtccgttacatccccaacgggggcgcagtggcaaacctgcaggtggccacgtctgaaagctggcg

SEQ ID NO: 856983 - DNA, 75 bp, synthetic construct
  source 1..75: mol_type = other DNA
gttcatgccctgccaggtgaccgttacggtgtcgccgcaggtggtcgccgactggcagcactcaacatgctggca

SEQ ID NO: 856984 - DNA, 75 bp, synthetic construct
  source 1..75: mol_type = other DNA
ggtggtgaacgattactgtttaagatttccgggccaatggtggtggtcaaagtagggattattgtcgtgttcggt

SEQ ID NO: 856985 - DNA, 75 bp, synthetic construct
  source 1..75: mol_type = other DNA
agctcgcggaagtggcaggtgaatatctgcgtaagggcgcgcaggtctacatcgaggggcaactccgtacccgta

SEQ ID NO: 856986 - DNA, 75 bp, synthetic construct
  source 1..75: mol_type = other DNA
atggcagttcgtggcattaacaaggtcattctcgtaggccgactgggaaaagatccagaagtccgttacatcccc

SEQ ID NO: 856987 - DNA, 75 bp, synthetic construct
  source 1..75: mol_type = other DNA
agctcgcggaagtggcaggtgaatatctgcgtaagggcgcgcaggtctacatcgaaggccagcttcgcacccgta

SEQ ID NO: 856988 - DNA, 75 bp, synthetic construct
  source 1..75: mol_type = other DNA
cgataaaattaatgctgaagttcgtgtacttgaagggatcctcagaaatattccgtcagtgatcactgtccggga

SEQ ID NO: 856989 - DNA, 75 bp, synthetic construct
  source 1..75: mol_type = other DNA
atttacgccaggcttctgaagatgccggtgccggtcatgtagatgaaaccggattcggttctgcgctgttctaca

SEQ ID NO: 856990 - DNA, 75 bp, synthetic construct
  source 1..75: mol_type = other DNA
cgctatgtttggtcgtatgctggcgaaaaaacccgggtttaatgtagaagccgcctgccaggtcgcgcatgcgtt

SEQ ID NO: 856991 - DNA, 75 bp, synthetic construct
  source 1..75: mol_type = other DNA
gtgcctggctggatgtgtacaccacgtccacaggcagagacggaaaccacggagtaccgtgacgaccaggcagaa

SEQ ID NO: 856992 - DNA, 75 bp, synthetic construct
  source 1..75: mol_type = other DNA
tacctgttgaaatgacaaaggatttcaatcaaaggacctatttgacaggttctaaagctatgtttggtaaagtag

SEQ ID NO: 856993 - DNA, 75 bp, synthetic construct
  source 1..75: mol_type = other DNA
tgccattccatgtatgattatctatccattgctttgggtaaatggtatgagtttttggtattatctttctactta

SEQ ID NO: 856994 - DNA, 75 bp, synthetic construct
  source 1..75: mol_type = other DNA
gtggtggtcaaagtagggatcattgtggtgttcggctttgcgatgatcccgcactggaacttcgccaatataacc

SEQ ID NO: 856995 - DNA, 75 bp, synthetic construct
  source 1..75: mol_type = other DNA
gtcgcccacccgccgcggagggtttcaggcgacgatggagctgctgcgtttgcccgaaccgcctacggcgatagt

SEQ ID NO: 856996 - DNA, 75 bp, synthetic construct
  source 1..75: mol_type = other DNA
tgcgatttttcatgccgtccctgaccgcagaagaactgcgcggcaaccgttctcagtggctgtatgccgtcgatg

SEQ ID NO: 856997 - DNA, 75 bp, synthetic construct
  source 1..75: mol_type = other DNA
tcgcagaggctggtatggcggcaagggtggtcggtcatgctgtccgtgagatggagcggtggatggtgccgaaca

SEQ ID NO: 856998 - DNA, 75 bp, synthetic construct
  source 1..75: mol_type = other DNA
gaagtccgttacatccccaacgggggcgcagtggcaaacctgcaggtggccacgtcagaaacctggcgcgacaaa

SEQ ID NO: 856999 - DNA, 75 bp, synthetic construct
  source 1..75: mol_type = other DNA
tgtccagacccgtgagtatggtcacacgtcacgcagtccgctggacacgctggagagcgccatcggctttcacat

SEQ ID NO: 857000 - DNA, 75 bp, synthetic construct
  source 1..75: mol_type = other DNA
tggtcacacgtcacgcagtccgcttgactcgctggaaagcgctatcggattccacatgcgcgactggtggcagcc

SEQ ID NO: 857001 - DNA, 75 bp, synthetic construct
  source 1..75: mol_type = other DNA
tgcagatgctggggagtgcaccacagcagaacgctcaggcgcaaccggagcctcagcagaatgggcagccacaga

SEQ ID NO: 857002 - DNA, 75 bp, synthetic construct
  source 1..75: mol_type = other DNA
aaatactggcaacacgactcgcactgcgtactcaccggattagctatatcacgctcatcgcagtaattctgtttt

SEQ ID NO: 857003 - DNA, 75 bp, synthetic construct
  source 1..75: mol_type = other DNA
cgcgaaaacaaaaggccgtgcacgtaaggccgcgcagccggagcctcagccgccggagggcgacgattacgggtt

SEQ ID NO: 857004 - DNA, 75 bp, synthetic construct
  source 1..75: mol_type = other DNA
cgctgggttccaggctggatgtgtgcaccacgcccacagacggatgccactgaacgcaccgataacctggctgat

SEQ ID NO: 857005 - DNA, 75 bp, synthetic construct
  source 1..75: mol_type = other DNA
gagcgtacagtaaaccagcacaaatcagcctggaatgtaaacattattcgctgaccagcgatgcgccgtcaggga

SEQ ID NO: 857006 - DNA, 75 bp, synthetic construct
  source 1..75: mol_type = other DNA
aacataccgctgtctgccggagccggaagcggtgctgacggaggcggaagacgaacgcctgaacgaactgatgac

SEQ ID NO: 857007 - DNA, 75 bp, synthetic construct
  source 1..75: mol_type = other DNA
gttgaagctgcctgtcaggtatcacatgcattaggcgtcagtgccgtgaccgttgagtctgattttttcactgct

SEQ ID NO: 857008 - DNA, 75 bp, synthetic construct
  source 1..75: mol_type = other DNA
tttgcttctcaaaacggcactctgattgttgatgcctcttctgaaaacactctggatatcagcggaaaagcgagc

SEQ ID NO: 857009 - DNA, 75 bp, synthetic construct
  source 1..75: mol_type = other DNA
gcgtggacgttcattctgacagctataactctgtgctgggtgaggccggtacgcgcgtgggttatgacttcgctg

SEQ ID NO: 857010 - DNA, 75 bp, synthetic construct
  source 1..75: mol_type = other DNA
cgacactgaaggttacagcttccacgcttacctgagccgccagtataacaacggtatcttcattgatactgctgc

SEQ ID NO: 857011 - DNA, 75 bp, synthetic construct
  source 1..75: mol_type = other DNA
tcgtgagctagaactggaaaattatgccactccaggcatgatctctaataatcctgctgtcagggctcttgataa

SEQ ID NO: 857012 - DNA, 75 bp, synthetic construct
  source 1..75: mol_type = other DNA
agcagcaatcacctttggtttcaccagaggaaaattccagacaggaaaatgttgttaataatgctaacggcttcg

SEQ ID NO: 857013 - DNA, 75 bp, synthetic construct
  source 1..75: mol_type = other DNA
atggcagatatcatcgacaatgccgctgaaatcgaagaattgcagcgcaatctctccctgcaaaaatacaaatcc

SEQ ID NO: 857014 - DNA, 75 bp, synthetic construct
  source 1..75: mol_type = other DNA
attatccatttctacgaatattgatgctgaacctagttttttcgatccgtcattctctactgtagagaatctggc

SEQ ID NO: 857015 - DNA, 75 bp, synthetic construct
  source 1..75: mol_type = other DNA
gtttatagtgatgtagaacgacctaccgctcaagacgtaggcgcggtgtcaattacggcacgagttgattttggt

SEQ ID NO: 857016 - DNA, 75 bp, synthetic construct
  source 1..75: mol_type = other DNA
gacctggatgtaaacggtgtaatgctgggtggtgatacccgcttcatgactgaagatggtagctggctggcaggt

SEQ ID NO: 857017 - DNA, 75 bp, synthetic construct
  source 1..75: mol_type = other DNA
agatgagcggcgacgcctggctgttcgtggatgcagagcttgcgccagttgccagcaggatattgaacttatcaa

SEQ ID NO: 857018 - DNA, 75 bp, synthetic construct
  source 1..75: mol_type = other DNA
tcaaaaacctgcagacaatcgccaccaaaatgaaagcccagaaattccaggggcagtatacaggtactgactacg

SEQ ID NO: 857019 - DNA, 75 bp, synthetic construct
  source 1..75: mol_type = other DNA
tctggggcatttaagagatgggagaaaaccctatcaacagatgaagcaaaaaccattgcccgcacggggattatt

SEQ ID NO: 857020 - DNA, 75 bp, synthetic construct
  source 1..75: mol_type = other DNA
catttgccctggggatctttaagccacgtacgttgatgatcacctcacaggtgctattcctggcggcgggtatca

SEQ ID NO: 857021 - DNA, 75 bp, synthetic construct
  source 1..75: mol_type = other DNA
aggcccgttttcgttgcgcgcaggcgtggccagctcgaccttaggcatcgcgcaggtttgcggttcatcactgtg

SEQ ID NO: 857022 - DNA, 75 bp, synthetic construct
  source 1..75: mol_type = other DNA
atcggcgcatggaatatgctgatcgggattctgattgcctgtagcatagtgagcctgttgctgattatgttcgtc

SEQ ID NO: 857023 - DNA, 75 bp, synthetic construct
  source 1..75: mol_type = other DNA
tattaaccgcttatgcccctgcaaacctgaaccgtgacgagtcaggaagaccaaaaacagcatatatgggtggtg

SEQ ID NO: 857024 - DNA, 75 bp, synthetic construct
  source 1..75: mol_type = other DNA
gcgcactgcttgccggtgaggaaaacagcaggctgcgtgcagcccactggttacatgagaggggcctgaaagtat

SEQ ID NO: 857025 - DNA, 75 bp, synthetic construct
  source 1..75: mol_type = other DNA
gagcctgttgctgattatgctcatcactcctggacgccctgttaccgctcatgaagaaatccatcaccactcttg

SEQ ID NO: 857026 - DNA, 75 bp, synthetic construct
  source 1..75: mol_type = other DNA
cttattttgctttaaaaaaagagaaagaggaggataaaggtttaaccttactggaaattgccggcgcactgatta

SEQ ID NO: 857027 - DNA, 75 bp, synthetic construct
  source 1..75: mol_type = other DNA
gtatggggtggcattcggcgaaaaaggcatgaatccgctgaccagaacttcatttattattaccgaagatctgac

SEQ ID NO: 857028 - DNA, 75 bp, synthetic construct
  source 1..75: mol_type = other DNA
gaagacactctatacaatcaaattagagcaaaaattccaacaagagctaccgtagataccacccataccactaac

SEQ ID NO: 857029 - DNA, 75 bp, synthetic construct
  source 1..75: mol_type = other DNA
gcggtcgggattatccgctcactgcttgccggtgaggaaaacgccaggctgcgtgcagcccactggttacatgag

SEQ ID NO: 857030 - DNA, 75 bp, synthetic construct
  source 1..75: mol_type = other DNA
agtagggattattgtcgtgttcggttttgcgatgatcccgcactggaatttcgccaatataaccgccttcccgca

SEQ ID NO: 857031 - DNA, 75 bp, synthetic construct
  source 1..75: mol_type = other DNA
ggtggtcaaagtggggattattgtcgtgttcggttttgcgatgatcccgcactggaatttcgccaatataaccgc

SEQ ID NO: 857032 - DNA, 75 bp, synthetic construct
  source 1..75: mol_type = other DNA
aggtggtcgccgactggcagcactcaacatgctggcagagcgtggcatcattccggctgactggcctgtccgcgt

SEQ ID NO: 857033 - DNA, 75 bp, synthetic construct
  source 1..75: mol_type = other DNA
atgtgcgcacggtgccgtattccgcagagtccgtcagcgaactgggcggagtccattaagggcgttggcctgttg

SEQ ID NO: 857034 - DNA, 75 bp, synthetic construct
  source 1..75: mol_type = other DNA
ttacgtcaccgaaatccttgttaaaaccacgggcaccatgcagatgctggggagtgcaccacagcagaacgctca

SEQ ID NO: 857035 - DNA, 75 bp, synthetic construct
  source 1..75: mol_type = other DNA
ggtcagcctcagccggaaccacaggcggaggccggtacgaaaaaaggaggcgcaaaaacgaaaggccgtggacgt

SEQ ID NO: 857036 - DNA, 75 bp, synthetic construct
  source 1..75: mol_type = other DNA
acgggacatgacgacgttcctgtcactcagccaggaggtgctgttatccctgctcagtttctgcactgcatgcag

SEQ ID NO: 857037 - DNA, 75 bp, synthetic construct
  source 1..75: mol_type = other DNA
atgatgtggctgacgacgctgaccgcacggaacaggggctggagagcgcgtcagtggaggaaattagtctgccgt

SEQ ID NO: 857038 - DNA, 75 bp, synthetic construct
  source 1..75: mol_type = other DNA
actgtgaatacaccgtgccgggtgaaatcttcactacggaaaatggtgtcaaagtgattggttataccgatcttc

SEQ ID NO: 857039 - DNA, 75 bp, synthetic construct
  source 1..75: mol_type = other DNA
attcttgttaagaccacgggcaccatgcagatgctggggagtgcaccacagcagaacgctcagacgcaaccggag

SEQ ID NO: 857040 - DNA, 75 bp, synthetic construct
  source 1..75: mol_type = other DNA
catcttagcgttggtgatcattgcggcgtggatgctgatgttaaaaggtattcgcaccagaacgtgggggcagcc

SEQ ID NO: 857041 - DNA, 75 bp, synthetic construct
  source 1..75: mol_type = other DNA
gggcacttcactgtgttcgcgctggcctgcgttgtcggttattacgtggtgtggaatgtatcgcacgcgctgcat

SEQ ID NO: 857042 - DNA, 75 bp, synthetic construct
  source 1..75: mol_type = other DNA
aagcagcaccggaagtcaaaaccgaggaaaaatgtgcctgttcgccgtggcgtaaatacgccttgatggcgctgg

SEQ ID NO: 857043 - DNA, 75 bp, synthetic construct
  source 1..75: mol_type = other DNA
tcgcggtgcttatagccagcattaatattttcggtggcttcactgtgactcagcgcatgctgaaaatgttccgca

SEQ ID NO: 857044 - DNA, 75 bp, synthetic construct
  source 1..75: mol_type = other DNA
tcgccataaatccgcactggtcatgcagaagtacagccgtcagcaggcgagggaggcagagcagaaagcccgtgc

SEQ ID NO: 857045 - DNA, 75 bp, synthetic construct
  source 1..75: mol_type = other DNA
tgacaaacagactggggagatgcgggagcagacagaatggcaacgcgtggtgctgttcggcaagctcgcggaagt

SEQ ID NO: 857046 - DNA, 75 bp, synthetic construct
  source 1..75: mol_type = other DNA
tgacaaacagacaggggagatgcgggagcagaccgaatggcatcgcgtggtgctgttcggcaagctcgcggaagt

SEQ ID NO: 857047 - DNA, 75 bp, synthetic construct
  source 1..75: mol_type = other DNA
gaacagacggaatggcaccgcgtggtgctgttcggcaagctcgcggaagtggctggtgaatatctgcgcaagggc

SEQ ID NO: 857048 - DNA, 75 bp, synthetic construct
  source 1..75: mol_type = other DNA
gagcagaccgaatggcagcgcgtggtgctgttcggcaagctcgcggaagtggcaggcgaatatctgcgcaagggg

SEQ ID NO: 857049 - DNA, 75 bp, synthetic construct
  source 1..75: mol_type = other DNA
gagcagacagaatggcaccgcgtggtgctgttcggcaagctcgcggaagtggcaggagaatatctgcgcaagggg

SEQ ID NO: 857050 - DNA, 75 bp, synthetic construct
  source 1..75: mol_type = other DNA
tgacaaacagacgggggagatgcgggagcagactgaatggcaacgcgtggtgctgttcggcaagctcgcggaagt

SEQ ID NO: 857051 - DNA, 75 bp, synthetic construct
  source 1..75: mol_type = other DNA
cttcagtgggtgtatgccatcgatgtgctgattgaaacacagggcgaggtctgcctccttccacttcctggagat

SEQ ID NO: 857052 - DNA, 75 bp, synthetic construct
  source 1..75: mol_type = other DNA
cttcagtggctgtatgccatcgatgtgctgattgaaacacagggcgaggtctgcctccttccgcttcctggcgat

SEQ ID NO: 857053 - DNA, 75 bp, synthetic construct
  source 1..75: mol_type = other DNA
cttcagtggatgtatgccatcgatgtgctgattgaaacacagggcgaggtctgcctccttccgcttcctggagat

SEQ ID NO: 857054 - DNA, 75 bp, synthetic construct
  source 1..75: mol_type = other DNA
cttcagtgggtgtatgccatcgatgtgctgattgaaacacagggcgaggtctgcctccttccgcttcctggggat

SEQ ID NO: 857055 - DNA, 75 bp, synthetic construct
  source 1..75: mol_type = other DNA
cttcagtgggtgtatgccatcgatgtgctgattgaaacacagggcgaggtctgcctccttccccttcctggcgat

SEQ ID NO: 857056 - DNA, 75 bp, synthetic construct
  source 1..75: mol_type = other DNA
cttcagtgggtgtatgccatcgatgtgctgattgaaacacagggcgaggtctgcctccttcctcttcctggtgat

SEQ ID NO: 857057 - DNA, 75 bp, synthetic construct
  source 1..75: mol_type = other DNA
acgctaccgtttatgaccatttatttgagtcgccagtacggtctgggagtcgatctgatcggttatgcgatgaca

SEQ ID NO: 857058 - DNA, 75 bp, synthetic construct
  source 1..75: mol_type = other DNA
ccgacgaaagcgaacttcttcgggcaccttaaaaagccgcagattatcgacgccctgaatgacgccggactgtcc

SEQ ID NO: 857059 - DNA, 75 bp, synthetic construct
  source 1..75: mol_type = other DNA
gcgctggagaacgacaccgcgcgtcaggtgcaggtgtttgaagccgcctgccagtcaggatggggcggtaaaccg

SEQ ID NO: 857060 - DNA, 75 bp, synthetic construct
  source 1..75: mol_type = other DNA
tattgacttactgctgatcgctgatgatgagcatgcagactgccacagctatatgcggcttgttgaaagtcgcag

SEQ ID NO: 857061 - DNA, 75 bp, synthetic construct
  source 1..75: mol_type = other DNA
ttgttacgcaaagaccgtatggcggtagatattgccatgtttggtcgtatgctggcgaataaacccgagtttaat

SEQ ID NO: 857062 - DNA, 75 bp, synthetic construct
  source 1..75: mol_type = other DNA
tcggtttctgccgtgaggatgccggaacataccgctgtctgccggagccggaagcggtgctgacggaggcagaag

SEQ ID NO: 857063 - DNA, 75 bp, synthetic construct
  source 1..75: mol_type = other DNA
atgtgtccagcgtggtgtgcagttgcgcagtgaggatgacgcggctgacgacgctgaccgcacggaacaggtgca

SEQ ID NO: 857064 - DNA, 75 bp, synthetic construct
  source 1..75: mol_type = other DNA
ttccgaacgcacgctggcagtccaggcagcactgatgcagcaaccggacaaatctctggcactgttggcatggac

SEQ ID NO: 857065 - DNA, 75 bp, synthetic construct
  source 1..75: mol_type = other DNA
tgactgcatggcgaaggtcagggcgtggacgccggaaatgcgtgccggaagcggtgtggtggtgtcctggcgtta

SEQ ID NO: 857066 - DNA, 75 bp, synthetic construct
  source 1..75: mol_type = other DNA
tcgcggaagccagtctggcagcaagagaggccggtcacgctgtccgtgagatggagcggtggatggtgccgaaca

SEQ ID NO: 857067 - DNA, 75 bp, synthetic construct
  source 1..75: mol_type = other DNA
cgcagcgaggatgatgcggctgacgacgctgaccgcacggaacaggtgcgggacaaagcggccgtggaggaaatc

SEQ ID NO: 857068 - DNA, 75 bp, synthetic construct
  source 1..75: mol_type = other DNA
cgcagcgaggatgatgcggctgacgacgctgaccgcacggaacaggtgccggagaaagcggccgtggaggaaatc

SEQ ID NO: 857069 - DNA, 75 bp, synthetic construct
  source 1..75: mol_type = other DNA
cgcagcgaggatgatgcggctgacgacgctgaccgcacggaacaggtgccggacaaagcggcggtggaggaaatc

SEQ ID NO: 857070 - DNA, 75 bp, synthetic construct
  source 1..75: mol_type = other DNA
cagaagaccgaatgcgcaagttttgacgtgatgaacaaacagggaagcatgaaggacgtgctggactttatctgc

SEQ ID NO: 857071 - DNA, 75 bp, synthetic construct
  source 1..75: mol_type = other DNA
cgcagtgaagatgacgtggctgacgacgctgaacgcacggaacaggtgcgtagaaagaggcagtggaggaaatca

SEQ ID NO: 857072 - DNA, 75 bp, synthetic construct
  source 1..75: mol_type = other DNA
cgctgaccagcgatgcgccatcggggaaggaaggtgctgcattcctggcgctgatggccgaaaaagcccgtcttg

SEQ ID NO: 857073 - DNA, 75 bp, synthetic construct
  source 1..75: mol_type = other DNA
gtgtttgaagccgcctgccagtcaggatggggcggtaaaccggaagtgcagaccattcgtcgtctggtgaccgaa

SEQ ID NO: 857074 - DNA, 75 bp, synthetic construct
  source 1..75: mol_type = other DNA
tggggaatatctgctgcaatatttacagttggtgaaatcatttatgcccctggcgaatatatgctgattgaccat

SEQ ID NO: 857075 - DNA, 75 bp, synthetic construct
  source 1..75: mol_type = other DNA
gaaagcctggtttgccgacaatctttcatccaccagcaaaacgaagatcttctcgatcaactacaccatgctcaa

SEQ ID NO: 857076 - DNA, 75 bp, synthetic construct
  source 1..75: mol_type = other DNA
cagggcgtggacgccggagatgcgtaccggaagcggtgtggtggtgtcctggcgttacggtaatgtgtgtgtcca

SEQ ID NO: 857077 - DNA, 75 bp, synthetic construct
  source 1..75: mol_type = other DNA
tacgcctcctgggcgatggcagaaaaaggcaccgaacaaccgcgttctctggcggcggctttctatgaacccatt

SEQ ID NO: 857078 - DNA, 75 bp, synthetic construct
  source 1..75: mol_type = other DNA
tgttaaccgcttaccctgctgccaatcttaaccgtgatgattccggctctccgaaaactgtgatactgggtggag

SEQ ID NO: 857079 - DNA, 75 bp, synthetic construct
  source 1..75: mol_type = other DNA
caacgcgtctgcgcgtttcctcgcaaagtctgaaacgtgcgtggcgcacttctgcactttttgaacaggcgctgg

SEQ ID NO: 857080 - DNA, 75 bp, synthetic construct
  source 1..75: mol_type = other DNA
ttctcccacgcgacgagcgggctatctggctgtgatggagttaatgtcattaccggcgccaccaacagctattat

SEQ ID NO: 857081 - DNA, 75 bp, synthetic construct
  source 1..75: mol_type = other DNA
atgcctgtaacgaagtgtgaaccagaaaccacccgcaaagcaagccgtaaatatgcaaaaacgcaggaaacactc

SEQ ID NO: 857082 - DNA, 75 bp, synthetic construct
  source 1..75: mol_type = other DNA
ggagaaagcgtcagtggaggaaataagtctgccactgctgacgaaaatgtcttccgaacgcacgctggcagtcca

SEQ ID NO: 857083 - DNA, 75 bp, synthetic construct
  source 1..75: mol_type = other DNA
acctgctgaccgcgtatgttgatgagttaagcgcaccatacctggaagatgcagagatcgattttgttaccgacc

SEQ ID NO: 857084 - DNA, 75 bp, synthetic construct
  source 1..75: mol_type = other DNA
tgagcgaaaatgacaagggcggcgtatggattcagtactttggcggtaaacagaaacataccaccgcgggaaatg

SEQ ID NO: 857085 - DNA, 75 bp, synthetic construct
  source 1..75: mol_type = other DNA
tttcgtaaaaaacacgcataaagcatccaacgccagctccgtgattcaggcaatggcagctgctccggctaacgt

SEQ ID NO: 857086 - DNA, 75 bp, synthetic construct
  source 1..75: mol_type = other DNA
atgaaccttttggcgcactggacccggtaacgcgcggcgcgttgcaacaagagatgacgcgtattcaccgtttgt

SEQ ID NO: 857087 - DNA, 75 bp, synthetic construct
  source 1..75: mol_type = other DNA
aagtgttgccggtggttgacgatcaaggtaaaccttgcggcacattacattttcaggatctgctggtggaggcgt

SEQ ID NO: 857088 - DNA, 75 bp, synthetic construct
  source 1..75: mol_type = other DNA
ccggcgaatgatttcgtccgccagttttttggccgtagtgaactgggggtccgcctgctttcgttacgtagcgtg

SEQ ID NO: 857089 - DNA, 75 bp, synthetic construct
  source 1..75: mol_type = other DNA
atggctaacgatagctggagcgggcaggataaagctcaacactttatcgcctcggcgatgctttccgccgccgga

SEQ ID NO: 857090 - DNA, 75 bp, synthetic construct
  source 1..75: mol_type = other DNA
atttctgaaccagttaatgctgtacttctgtacggtggtctgtgtgctgtatctcctttcgggtgggtacagggc

SEQ ID NO: 857091 - DNA, 75 bp, synthetic construct
  source 1..75: mol_type = other DNA
atctgccgcgatatccattcatcaaatggagtgatttcggtaaaaacgaaagattttatgaacttatcactcaat

SEQ ID NO: 857092 - DNA, 75 bp, synthetic construct
  source 1..75: mol_type = other DNA
ggcagattgataaaagggccgctgagaaaatcagcgccagtcagtcagccggaagcaaacccgaagagcccgtta

SEQ ID NO: 857093 - DNA, 75 bp, synthetic construct
  source 1..75: mol_type = other DNA
agctggaaagattttgcctgggatgtcgccggtgcaactaccggctataccatctggcaactggcgcatcactaa

SEQ ID NO: 857094 - DNA, 75 bp, synthetic construct
  source 1..75: mol_type = other DNA
gccgccccgaggggagcggctggagctggaaagattttacctgggatgtcgccggtgcaactaccggctatacca

SEQ ID NO: 857095 - DNA, 75 bp, synthetic construct
  source 1..75: mol_type = other DNA
aaccggtgcagccgctgccgttcacccagacgtttgatctcaacaaactggatgatgcattacgtcatctcaacg

SEQ ID NO: 857096 - DNA, 75 bp, synthetic construct
  source 1..75: mol_type = other DNA
tcactcgacagcaatgtgatcgcttccttcgaacaacctttctctcatcatggtgggacaaaagtgttaagcggt

SEQ ID NO: 857097 - DNA, 75 bp, synthetic construct
  source 1..75: mol_type = other DNA
gttggtcaggttgcgggcggtgttccggcgatgtgtgatggtgtcacccaggggcaggatggaatggaattgtcg

SEQ ID NO: 857098 - DNA, 75 bp, synthetic construct
  source 1..75: mol_type = other DNA
taacggcgaataccagaccgacaccgacgcctacaggccgctgggggaatactgggaatccatcggcggcacatg

SEQ ID NO: 857099 - DNA, 75 bp, synthetic construct
  source 1..75: mol_type = other DNA
aactgctcaaggcgggtctgctgcatgaagatgtgaatacggtagcgggttttggtctttctcgttataccctcg

SEQ ID NO: 857100 - DNA, 75 bp, synthetic construct
  source 1..75: mol_type = other DNA
ggggcaggacggaatggaactatccctgttaagccgcgaagtgattgcgatgtctgcggctgtggggctgtctca

SEQ ID NO: 857101 - DNA, 75 bp, synthetic construct
  source 1..75: mol_type = other DNA
ctttctgatgtcgtaccgctgatggcgcgtctctacccgaacggtccggccgatattaaccatttccaggcagcg

SEQ ID NO: 857102 - DNA, 75 bp, synthetic construct
  source 1..75: mol_type = other DNA
ctgcgtccatccatcggttactcctattctaaagcactggacgtagcaggtcagtttttggatttgcccctatat

SEQ ID NO: 857103 - DNA, 75 bp, synthetic construct
  source 1..75: mol_type = other DNA
cattaagccgggacagttggttctgcttgaagcctttggcggtggattcacctggggctccgcgctggttcgttt

SEQ ID NO: 857104 - DNA, 75 bp, synthetic construct
  source 1..75: mol_type = other DNA
atatctctggaagggccccagggaaataatgtcacgctcaatggcacaaccataaatgctcaaggcaataagaac

SEQ ID NO: 857105 - DNA, 75 bp, synthetic construct
  source 1..75: mol_type = other DNA
tatttacagtaatgatcggccagttaattttctatgctgatcaacatggtttgcggctgacgtttggtgaagcgt

SEQ ID NO: 857106 - DNA, 75 bp, synthetic construct
  source 1..75: mol_type = other DNA
aaagaagccgaacgcggcgtggtaacacgctttggtaaattcagccatctggttgagccgggtctgaactggaaa

SEQ ID NO: 857107 - DNA, 75 bp, synthetic construct
  source 1..75: mol_type = other DNA
ggcgcatggggcggtcgttttaaaaaccgcccggatggcaatcatttcagccttgagcacgacggcgtgcgctga

SEQ ID NO: 857108 - DNA, 75 bp, synthetic construct
  source 1..75: mol_type = other DNA
ggcttttggggcgtagtgttaggcctgttaattggccatatgtttgataaagcccgtagccgtaaaatggcgtgg

SEQ ID NO: 857109 - DNA, 75 bp, synthetic construct
  source 1..75: mol_type = other DNA
tccctggtactattggcctggacaaaattgcaaataaaaccactcaagcacaggcgaattttaatctggttgcca

SEQ ID NO: 857110 - DNA, 75 bp, synthetic construct
  source 1..75: mol_type = other DNA
tcggaatgggatttaaaaggaaggcgacctcaggcgatacatttctgaaacccaatagcacagaatacatacgct

SEQ ID NO: 857111 - DNA, 75 bp, synthetic construct
  source 1..75: mol_type = other DNA
ctcctcctcaacaaccagtaatattggtatgggatttaaaagattagagacttcgggcgatacgtttctgaaacc

SEQ ID NO: 857112 - DNA, 75 bp, synthetic construct
  source 1..75: mol_type = other DNA
atgataaaaatagcaccctataaattggcgatactgacgggaataatgttatatccttgtgtattagctacggat

SEQ ID NO: 857113 - DNA, 75 bp, synthetic construct
  source 1..75: mol_type = other DNA
caatactgactggattatttttatcatcctctgtacttgcaacagacattaatgttgattttacagcaaccgtaa

SEQ ID NO: 857114 - DNA, 75 bp, synthetic construct
  source 1..75: mol_type = other DNA
aattagctggattgataccacaatgactggaaatcagtctggtagtacatcgctgattattccacaatcttctga

SEQ ID NO: 857115 - DNA, 75 bp, synthetic construct
  source 1..75: mol_type = other DNA
gccggtagtcaccgacgcgcaaaagggcattatcattcattacgtcccggcgctgccgcgtaaagtgctgcgcgt

SEQ ID NO: 857116 - DNA, 75 bp, synthetic construct
  source 1..75: mol_type = other DNA
gccgtacttctcgcgagatgagcgccgtaaaattttgcccactatcaccctgaaagaggtgatggcctatcgcga

SEQ ID NO: 857117 - DNA, 75 bp, synthetic construct
  source 1..75: mol_type = other DNA
cagatgctgcaggcaccgcaaacgctcggcgaagaagcatcgaagttaagtaaagatttcgatcgcggcaatatg

SEQ ID NO: 857118 - DNA, 75 bp, synthetic construct
  source 1..75: mol_type = other DNA
ggctcttagtctaacatcaaaaaggctttatgaaacacctcagcaagaacgtaattttttgtgtcatataaatga

SEQ ID NO: 857119 - DNA, 75 bp, synthetic construct
  source 1..75: mol_type = other DNA
ctttcctgcctgccgaccgtttaacgcggcaacttaaagctgaaatgggattacatgagtcacagctgcccggac

SEQ ID NO: 857120 - DNA, 75 bp, synthetic construct
  source 1..75: mol_type = other DNA
gcttttaccctttctgaaatattatgcgaccctgctgctcgacaatatggcccgccgtcgagcccccgctgttaa

SEQ ID NO: 857121 - DNA, 75 bp, synthetic construct
  source 1..75: mol_type = other DNA
atgagcattgagattgccaatattaagaagtcttttggtcgcacccaggtgctgaacgatatctcactggatatt

SEQ ID NO: 857122 - DNA, 75 bp, synthetic construct
  source 1..75: mol_type = other DNA
ccgataagctggtggcgaaaggtttaccgccagagatgatggagatggcgaagcagaaagcgcaggaaattcagc

SEQ ID NO: 857123 - DNA, 75 bp, synthetic construct
  source 1..75: mol_type = other DNA
gcgatgattgctgccactcaggggaccgaacgtcaagcctgggttacggggccgctgggtgagaaggtgaatgcc

SEQ ID NO: 857124 - DNA, 75 bp, synthetic construct
  source 1..75: mol_type = other DNA
gaaagcctgccctgccggactttataagcaggatgacgcaggaaacattcattttgattccgccggttgtctgga

SEQ ID NO: 857125 - DNA, 75 bp, synthetic construct
  source 1..75: mol_type = other DNA
gatgatggagatggcgaagcagaaagcgcaggaaattcagcaggcctatgagctgataaagcagcagaaagggtt

SEQ ID NO: 857126 - DNA, 75 bp, synthetic construct
  source 1..75: mol_type = other DNA
gtttttgcgcatgatgcagggcggtgcacagtttggcggcggttatcagcagcaatctggcggtggtaactggca

SEQ ID NO: 857127 - DNA, 75 bp, synthetic construct
  source 1..75: mol_type = other DNA
tgaagccgacggatgatgcgaccaccatcaaacgtgcctaccgtaagctgatgagtgaacaccatcccgataagt

SEQ ID NO: 857128 - DNA, 75 bp, synthetic construct
  source 1..75: mol_type = other DNA
tctggcggatcgttatccggcgcagctttccggcggtcagaaacagcgtgtggcgcttgcacgcgcgctggctgt

SEQ ID NO: 857129 - DNA, 75 bp, synthetic construct
  source 1..75: mol_type = other DNA
cgacaacatcgcctttggcctgacggtgctgccgcgtcgagagcgcccaaatgcggcggcgatcaaagcgaaagt

SEQ ID NO: 857130 - DNA, 75 bp, synthetic construct
  source 1..75: mol_type = other DNA
cgacaatatcgcttttggcctgacggtgctgccgcgtcgcgagcgcccgaatgcggcggcgatcaaagcgaaagt

SEQ ID NO: 857131 - DNA, 75 bp, synthetic construct
  source 1..75: mol_type = other DNA
catatcattctggcggcaaatcccgatatcaatgaattccgtaaattaatgaaagcctgccctgccggactttat

SEQ ID NO: 857132 - DNA, 75 bp, synthetic construct
  source 1..75: mol_type = other DNA
atcagacatacagacacagacgaaatactcttgcgtctgagtaaacaccatcatttatatgagaaaaagaaaaca

SEQ ID NO: 857133 - DNA, 75 bp, synthetic construct
  source 1..75: mol_type = other DNA
tgcttgatgaaccgtttggcgcgttggatgcgcaggtgcgtaaagagctgcgtcgctggctgcgtcaactccatg

SEQ ID NO: 857134 - DNA, 75 bp, synthetic construct
  source 1..75: mol_type = other DNA
tgctgttgatggcagtcactctcggatcgcaactggcgctcaccactttggggcatcacttcgtttaccgactgc

SEQ ID NO: 857135 - DNA, 75 bp, synthetic construct
  source 1..75: mol_type = other DNA
ttatcagatattgaagctttcgaggctgatacgattaaggccctacttgcctccgatttgcttccaagaatggaa

SEQ ID NO: 857136 - DNA, 75 bp, synthetic construct
  source 1..75: mol_type = other DNA
aaatgaaccgttaccgacttaatcggggtggggagcgtgctgcaaatagtgcacttcagatcatcgctatcggac

SEQ ID NO: 857137 - DNA, 75 bp, synthetic construct
  source 1..75: mol_type = other DNA
ataacgcgttttccgttggtccgattaatctcaccatcaaacgtggcgagctgctgtttctgattggtggcaacg

SEQ ID NO: 857138 - DNA, 75 bp, synthetic construct
  source 1..75: mol_type = other DNA
gcgcattgccgacgttgttgacggcacaggtggcgtttaacaagctgaacaaatttgcgctcgcgccttttaaag

SEQ ID NO: 857139 - DNA, 75 bp, synthetic construct
  source 1..75: mol_type = other DNA
ataacgcgttttccgttgggccgattaacctcaccatcaaacgtggcgaactgctgtttctgattggtggcaacg

SEQ ID NO: 857140 - DNA, 75 bp, synthetic construct
  source 1..75: mol_type = other DNA
taggcgggattgaatacggcaaaactgaaacattccactactgcaataaatcactaaacaatataaagaatattg

SEQ ID NO: 857141 - DNA, 75 bp, synthetic construct
  source 1..75: mol_type = other DNA
ggaagcggatcgttttgactgcgcggtgtctcgttatgttgatgataatggcagctatatcggatttgtatccgc

SEQ ID NO: 857142 - DNA, 75 bp, synthetic construct
  source 1..75: mol_type = other DNA
tctttaccactttctgtgttgattggttatgaaaagaacgctcgcacacactccgtggagcaggtagatcagatt

SEQ ID NO: 857143 - DNA, 75 bp, synthetic construct
  source 1..75: mol_type = other DNA
gggtgcagtcgatgatgcccgaatgcggtattgaacccaaaattctgatcaaagggccgccgcgccgcgaggtgc

SEQ ID NO: 857144 - DNA, 75 bp, synthetic construct
  source 1..75: mol_type = other DNA
gggtgcagtcgatgatgcctgaatgcggaattgaacccaaaattctgatcgaagggccgccgcgccgcgaggtgc

SEQ ID NO: 857145 - DNA, 75 bp, synthetic construct
  source 1..75: mol_type = other DNA
aaaccgaacactggaaattgcggaaataacacgctctttaaagaacctagcaaaagaattacaaattcctgttgt

SEQ ID NO: 857146 - DNA, 75 bp, synthetic construct
  source 1..75: mol_type = other DNA
gtttttgtaaaccgggtcgggcaacggtttatacccatccgcagcgtttgagcggtgatgatgccaacttactga

SEQ ID NO: 857147 - DNA, 75 bp, synthetic construct
  source 1..75: mol_type = other DNA
acattttcacggggtcacatgttgtcgtttccgtgtctgatatggttgataaccagccggacttcttcgatccca

SEQ ID NO: 857148 - DNA, 75 bp, synthetic construct
  source 1..75: mol_type = other DNA
aaccagccggactttttcgatcctgcatttagtcctatcgagaacatcgcagcattcccgacgataaccgaatct

SEQ ID NO: 857149 - DNA, 75 bp, synthetic construct
  source 1..75: mol_type = other DNA
ctttacgcaaaatattgtctcttgaacagaatttattgaacatggcaagcgttaaggccgagcgtattaaagagc

SEQ ID NO: 857150 - DNA, 75 bp, synthetic construct
  source 1..75: mol_type = other DNA
ggtgtacatccatttacagggggtatagacgacacagcattagccggaaaccgtttcgtaacttacaagggaact

SEQ ID NO: 857151 - DNA, 75 bp, synthetic construct
  source 1..75: mol_type = other DNA
ggtgtaaatcctttcagtggtcctattgatagtgaatctctgacaggaaaccgtttcgtaacttacaagggaact

SEQ ID NO: 857152 - DNA, 75 bp, synthetic construct
  source 1..75: mol_type = other DNA
atattttcactggatcacatgttgaagtgtcgatctctaaccagatagacaatcaggtcgactttttcgatccta

SEQ ID NO: 857153 - DNA, 75 bp, synthetic construct
  source 1..75: mol_type = other DNA
cgggattgatatgtacctcgttggtttaccgcgcatcgccgccgatctcaatgccagcgaagcgcagttgcatat

SEQ ID NO: 857154 - DNA, 75 bp, synthetic construct
  source 1..75: mol_type = other DNA
atgcttaaattcccgtggcagagtctgttctggacgatggcaacgatgggcatcgcggtactgatgttgtctttg

SEQ ID NO: 857155 - DNA, 75 bp, synthetic construct
  source 1..75: mol_type = other DNA
ttgccctggttttactttatcccgccgggattgatatgtacctcgttggtttaccgcgcatcgccgccgatctca

SEQ ID NO: 857156 - DNA, 75 bp, synthetic construct
  source 1..75: mol_type = other DNA
ctttacgcaaaatattatctcttgaacgtaatttattgaacatggcaagtcttaaggccgagcgtattaaagagc

SEQ ID NO: 857157 - DNA, 75 bp, synthetic construct
  source 1..75: mol_type = other DNA
cggtaatagacctgcatcgtgcgcagatacgggcaaaagtaccacgtcgttggcgggataaagatttgattggtc

SEQ ID NO: 857158 - DNA, 75 bp, synthetic construct
  source 1..75: mol_type = other DNA
cgcactgcctcaggtaaaatacaaaagtttttgttacggaaagatattatgcggcgattaacgcaggatgtctgt

SEQ ID NO: 857159 - DNA, 75 bp, synthetic construct
  source 1..75: mol_type = other DNA
ggaaatgactcggtttgctaatggctacgccagtttgatagaaagcgcaaagcgctctatagaccaatacaatga

SEQ ID NO: 857160 - DNA, 75 bp, synthetic construct
  source 1..75: mol_type = other DNA
ggcgatcctgatatttacgcctattttcctgccgatcgctcagcatctgggaatagatcccatccacttcggtat

SEQ ID NO: 857161 - DNA, 75 bp, synthetic construct
  source 1..75: mol_type = other DNA
ttccctcgccagtggcgggacttctgtcgctgcgttgttcttagctggatatctgccgggcatcctcaccgctgt

SEQ ID NO: 857162 - DNA, 75 bp, synthetic construct
  source 1..75: mol_type = other DNA
cagaggccaccggagcaaccggatgatttaggcggcctgaaacgggcgattaaacgcactgaaaaagaaatgggg

SEQ ID NO: 857163 - DNA, 75 bp, synthetic construct
  source 1..75: mol_type = other DNA
atgctggcaataggtgtgccaattacttttgcgattggtctttcttcgctgttatctattattactgccttacca

SEQ ID NO: 857164 - DNA, 75 bp, synthetic construct
  source 1..75: mol_type = other DNA
ccctggcgatgatttaccgggaaatcactcttaagaagctcaatgatattctgttagattcggtagtaaccagtt

SEQ ID NO: 857165 - DNA, 75 bp, synthetic construct
  source 1..75: mol_type = other DNA
tcattattggcggtattatcgcaggggtatttacgcccacagaagcatcagcaatagcggtaatttatagtttag

SEQ ID NO: 857166 - DNA, 75 bp, synthetic construct
  source 1..75: mol_type = other DNA
gataaggatgtagatcttaccgcgaatattgtatccagcacttgtcaggtagaagttaataataatggtgttgtt

SEQ ID NO: 857167 - DNA, 75 bp, synthetic construct
  source 1..75: mol_type = other DNA
tatccagctatgattcgcatggattatggccaggaattttttgatccaacacggacggaatgcgcagaaaaacat

SEQ ID NO: 857168 - DNA, 75 bp, synthetic construct
  source 1..75: mol_type = other DNA
cgccggaatcggcgcattacggcggagtgacatcatcaaactctgccagcctcgagagcgcaggtgccagtgccc

SEQ ID NO: 857169 - DNA, 75 bp, synthetic construct
  source 1..75: mol_type = other DNA
atggtacatgaccgcatagcggaggaactcgaggcgaaaggattttaccggagggcggcggcgcgatggggtgaa

SEQ ID NO: 857170 - DNA, 75 bp, synthetic construct
  source 1..75: mol_type = other DNA
gtagatcgcacttatgctgaaatgggtatagatggtgtaagcgatgaaatatggcgtaattacccagacagctaa

SEQ ID NO: 857171 - DNA, 75 bp, synthetic construct
  source 1..75: mol_type = other DNA
ctggtacaacaaacgtccaagtctgtgggtggagccgcgtaataaatggggcaaaggtacaatcggtctgatgga

SEQ ID NO: 857172 - DNA, 75 bp, synthetic construct
  source 1..75: mol_type = other DNA
gacccggaaagccgtcgtatgctgcgcgttaccgttaaggatgcgattgccgctgaccagttgttcaccacgctg

SEQ ID NO: 857173 - DNA, 75 bp, synthetic construct
  source 1..75: mol_type = other DNA
atgacaacaacggcgcaatggacgctctgtgggctgaggcgttgagtgaacaaaaatcaacaaacaataaaagcg

SEQ ID NO: 857174 - DNA, 75 bp, synthetic construct
  source 1..75: mol_type = other DNA
atattccggttaagctgaccgtcgagctgggtcgcacacgtatgaccatcaaagagctgttacgtctgacgcaag

SEQ ID NO: 857175 - DNA, 75 bp, synthetic construct
  source 1..75: mol_type = other DNA
gctgggccgtacgcggatgaccatcaaagagctgttgcgtctgacgcaagggtccgtcgtggcgctggacggtct

SEQ ID NO: 857176 - DNA, 75 bp, synthetic construct
  source 1..75: mol_type = other DNA
ttgaaagaaatgatggattatatttttagtgaagatttaaatctgagagcagaaccaacacagcagagcttagat

SEQ ID NO: 857177 - DNA, 75 bp, synthetic construct
  source 1..75: mol_type = other DNA
atgacagctacagccagaacggcggcgtgttagtggatgagaacaacagcgcagcaggctatggagatggtcctt

SEQ ID NO: 857178 - DNA, 75 bp, synthetic construct
  source 1..75: mol_type = other DNA
atgacagcgacagccagaacaacggtgttttagtggatcagaacaacagcgcagcaggctatggcgatgcatcat

SEQ ID NO: 857179 - DNA, 75 bp, synthetic construct
  source 1..75: mol_type = other DNA
aacaataacggcaacaccaccgttgacggcaaggattccacgggcaccgagataaacggtgacaaagccatcgtc

SEQ ID NO: 857180 - DNA, 75 bp, synthetic construct
  source 1..75: mol_type = other DNA
tgatatcaccggcgacagcgccacggtggacaacaaaggcggcatgacggttaccgatccggattccatcggtat

SEQ ID NO: 857181 - DNA, 75 bp, synthetic construct
  source 1..75: mol_type = other DNA
tcgattggcattcagatcgacggcgacaaggcagttgtcaataacgaaggtgacaacgccatcagtaacggcggc

SEQ ID NO: 857182 - DNA, 75 bp, synthetic construct
  source 1..75: mol_type = other DNA
gacggtggataacaagggcaccatgaccgtcaccgatccggagtccatgggtatccagatcgacggtgacaaggc

SEQ ID NO: 857183 - DNA, 75 bp, synthetic construct
  source 1..75: mol_type = other DNA
agaaaaacgcgcttgcagatgggtcgcaggttgcttccttggatttgcccctatatttccagacatctgttatca

SEQ ID NO: 857184 - DNA, 75 bp, synthetic construct
  source 1..75: mol_type = other DNA
gtggacaacaaaggcggcatgaccgtcaccgatccggattccatcggtattcagatcgacggcgacaaggcggtt

SEQ ID NO: 857185 - DNA, 75 bp, synthetic construct
  source 1..75: mol_type = other DNA
gtcgctggctacagagatgcatgacatggctgtggcggcatcgctgacgcaagaacgggggcgagtggctgcggt

SEQ ID NO: 857186 - DNA, 75 bp, synthetic construct
  source 1..75: mol_type = other DNA
cggagatgaacgccaacaacagcagtgcggcgaacgtggtgaaatcgctgcgtaacccgtatctgcaagtgagcg

SEQ ID NO: 857187 - DNA, 75 bp, synthetic construct
  source 1..75: mol_type = other DNA
gcaagccggaagatgtctgggcggcgctggagaaagatcgggaaaacctgttttttatcgatgtgcaggcgcggg

SEQ ID NO: 857188 - DNA, 75 bp, synthetic construct
  source 1..75: mol_type = other DNA
gggtctggtgtttgaagaaggggaaaatcaggatcaggtgaaatatcaggctgcgcaccaccaactgattgccag

SEQ ID NO: 857189 - DNA, 75 bp, synthetic construct
  source 1..75: mol_type = other DNA
agcgcggcgtcagcacgcataatgaagatgaagcccgtttaaaccgtcggatgtgcgaagttgcggaacggatca

SEQ ID NO: 857190 - DNA, 75 bp, synthetic construct
  source 1..75: mol_type = other DNA
ggcaatgtcaccgtgatcaacggctacttcccgcagggtgaaagccgcgaccatcccacaaaattcccggcaaag

SEQ ID NO: 857191 - DNA, 75 bp, synthetic construct
  source 1..75: mol_type = other DNA
ctgggggctggtagataccttccgtcacgctaatccggaaacagcagatcgcttttcgtggtttgattaccgctc

SEQ ID NO: 857192 - DNA, 75 bp, synthetic construct
  source 1..75: mol_type = other DNA
ttgttaccagctatcgaaaaagcaatgccgcctctgctggtggcccgaatgcgcagccacagttcagcctatttt

SEQ ID NO: 857193 - DNA, 75 bp, synthetic construct
  source 1..75: mol_type = other DNA
gtacgacgacagccatccggaagccctggctcgcaatacccagaaaattttccgctgggtagagaaagacacccc

SEQ ID NO: 857194 - DNA, 75 bp, synthetic construct
  source 1..75: mol_type = other DNA
tgtcgcggtggcaatagctggcttcaaccagatcaaccgtggtggcccggccggaaatgctgtggctgtgcattg

SEQ ID NO: 857195 - DNA, 75 bp, synthetic construct
  source 1..75: mol_type = other DNA
gatatcgccctgatggcagagatgggattcaaagtgttccgtacctcaattgcctggagccgcctctttccgcag

SEQ ID NO: 857196 - DNA, 75 bp, synthetic construct
  source 1..75: mol_type = other DNA
tgaacgcttggcacgccagacgctgtatcgcgccaatcgcctgttcatggaggcgtataccgaaattctggaact

SEQ ID NO: 857197 - DNA, 75 bp, synthetic construct
  source 1..75: mol_type = other DNA
attttccgctggatagagaaagacacccctgatgcagttgaaaaaattcaggcgttgttaccagcgatcgaaaag

SEQ ID NO: 857198 - DNA, 75 bp, synthetic construct
  source 1..75: mol_type = other DNA
tgatgcggttgaaaaaattcaggcgttgttaccagcgatcgaaaaagcaatgccacctctgctggtggcccggat

SEQ ID NO: 857199 - DNA, 75 bp, synthetic construct
  source 1..75: mol_type = other DNA
atgcctttatcgttattaattggcctgcgttttagtcgcggacggcgacgcggcggcatggtgtcgctgatctcc

SEQ ID NO: 857200 - DNA, 75 bp, synthetic construct
  source 1..75: mol_type = other DNA
cgggagcttgtcgagcgacgggatcggctgatgaaagatatagatgagctcgttgcatcagcgatcgttctgttc

SEQ ID NO: 857201 - DNA, 75 bp, synthetic construct
  source 1..75: mol_type = other DNA
gacagccatccggaagccctggcccgtaatacccagaaaattttccgttggctggataaagacacccctgatgct

SEQ ID NO: 857202 - DNA, 75 bp, synthetic construct
  source 1..75: mol_type = other DNA
tggcaggaagcactggataacgtgcaaaaagtgccgggtattgccgctgccgcgccgtatatcaatttcaccggg

SEQ ID NO: 857203 - DNA, 75 bp, synthetic construct
  source 1..75: mol_type = other DNA
ttatcggcgtggtggtttcgctgcaactcactccgattatcgagtggattgaagatctgatcggccatcagttcc

SEQ ID NO: 857204 - DNA, 75 bp, synthetic construct
  source 1..75: mol_type = other DNA
atgcctggaacaattttaaagccggtgaacagcagattattatcggcaaaggcgtggcggatgcgttgaaagtga

SEQ ID NO: 857205 - DNA, 75 bp, synthetic construct
  source 1..75: mol_type = other DNA
atgaaaatcaaacatgagcacatccgcatggcgatgaatgcctgggcctatccggacggtgaaaaagtaccggct

SEQ ID NO: 857206 - DNA, 75 bp, synthetic construct
  source 1..75: mol_type = other DNA
tgttaccggcgatcgaaaaggcgatgccgcctttgctggtggcccgtatgcgcagtcacagttctgaatattacc

SEQ ID NO: 857207 - DNA, 75 bp, synthetic construct
  source 1..75: mol_type = other DNA
aaaaggcgatgccgcctttgctggtggcccgtatgcgcagccacagttctgaatattaccgtgagatcgtcgaac

SEQ ID NO: 857208 - DNA, 75 bp, synthetic construct
  source 1..75: mol_type = other DNA
gcatggcgatgaatgcctgggcgcgtcctgatggcgaaaaagttccagcagctgaaataacccgggcttattttg

SEQ ID NO: 857209 - DNA, 75 bp, synthetic construct
  source 1..75: mol_type = other DNA
gcatggcgatgaatgcctgggcgcatccggacggcgaaaaagtaccgactgcgaagattaccaaagcgtatttcg

SEQ ID NO: 857210 - DNA, 75 bp, synthetic construct
  source 1..75: mol_type = other DNA
tgttgcgtcagcggtcgttttgtatgaccagataaatcgcggcggcccggcagggaatgctgtggtgatgcacta

SEQ ID NO: 857211 - DNA, 75 bp, synthetic construct
  source 1..75: mol_type = other DNA
tgctttcggttgcctttgcacgccattcgccgaagatccgcctcacattgtgcgatgtctctgcgccagcagtag

SEQ ID NO: 857212 - DNA, 75 bp, synthetic construct
  source 1..75: mol_type = other DNA
acttttgggctggtctttgcgtctgtttattcgctggcaatgctgcatcgcgcttacttcggtaaggcgaaaagc

SEQ ID NO: 857213 - DNA, 75 bp, synthetic construct
  source 1..75: mol_type = other DNA
tgatgttgatcgctatcctggcgctggtcttcgttcactacaatgcgaccggtgtctggaccttcaactatgaag

SEQ ID NO: 857214 - DNA, 75 bp, synthetic construct
  source 1..75: mol_type = other DNA
cctcaacctgatgtggatcctgggcggtgttatcggcgtgtttcttgccatcgacatgttcctgttcttcttctt

SEQ ID NO: 857215 - DNA, 75 bp, synthetic construct
  source 1..75: mol_type = other DNA
gcgaaggcggtgaatttattctttttttatttgcagagcaattccttagatttccacaaattatttgcaaaatga

SEQ ID NO: 857216 - DNA, 75 bp, synthetic construct
  source 1..75: mol_type = other DNA
cctgacggcgctggagcagtccggtgagatgggccggaaaatggatgcctttaaggagcgggtgatccgtaacag

SEQ ID NO: 857217 - DNA, 75 bp, synthetic construct
  source 1..75: mol_type = other DNA
acctttgggctggtctttgcatctgtttattcgctggcgatgcttcatcgcgcttacttcggtaaagcgaaaagc

SEQ ID NO: 857218 - DNA, 75 bp, synthetic construct
  source 1..75: mol_type = other DNA
cagcaagtccacgctggccgccgggatcatgatgacggcgctgttactgaactggcggcaggcggcgggctacac

SEQ ID NO: 857219 - DNA, 75 bp, synthetic construct
  source 1..75: mol_type = other DNA
gctgatgtggtgacggtggggattgacggcgggggcctggatgatctgctgggaatgtacgtgactggccgtgac

SEQ ID NO: 857220 - DNA, 75 bp, synthetic construct
  source 1..75: mol_type = other DNA
acggaattgtggtggggataagccagggctggaaactgggcggggccattaaaaccaccgagcgcaaactggctg

SEQ ID NO: 857221 - DNA, 75 bp, synthetic construct
  source 1..75: mol_type = other DNA
gaattccgcagtggcagtctgaattcgacatgccgtggatcccgcgttttggtatctctatccatctcgccattg

SEQ ID NO: 857222 - DNA, 75 bp, synthetic construct
  source 1..75: mol_type = other DNA
ctgggaaatgatgctggtgccaatgtacttcctgatcgcactgtgggggcataaagcctctgacggtaaaacgcg

SEQ ID NO: 857223 - DNA, 75 bp, synthetic construct
  source 1..75: mol_type = other DNA
cggagttcgcgcctatcgctatgtggctgggggttatcggtattttctacggtgcgtggatggcctttaatcagt

SEQ ID NO: 857224 - DNA, 75 bp, synthetic construct
  source 1..75: mol_type = other DNA
ataggcgtagataaagataataaaaaattatgtttatactggggcgagtctaaactctattccaatctgagcaaa

SEQ ID NO: 857225 - DNA, 75 bp, synthetic construct
  source 1..75: mol_type = other DNA
gctgttcgatatcacgctggattgcccacagggcgaaacgctggtgttacttggccccagcggcgcgggtaaaag

SEQ ID NO: 857226 - DNA, 75 bp, synthetic construct
  source 1..75: mol_type = other DNA
aagaagatatccaatttatgattgaaaatggaatgattcgcaacgaaattgacgttagcaatattgttttaccac

SEQ ID NO: 857227 - DNA, 75 bp, synthetic construct
  source 1..75: mol_type = other DNA
gccctgccgggaaggtgtctgggaactcaggatagatcaaggggctgggtatcgggtttattacagcctggtgga

SEQ ID NO: 857228 - DNA, 75 bp, synthetic construct
  source 1..75: mol_type = other DNA
ccgtgctcatacccagcaattccaccattggcaggtgttaagccgccagatgggggataacgcccgttttagcct

SEQ ID NO: 857229 - DNA, 75 bp, synthetic construct
  source 1..75: mol_type = other DNA
aaggatgtcgatgattttgttgcgtcagcggttgttttgtatgaccagatgaatcgcggcggcccggcagggaat

SEQ ID NO: 857230 - DNA, 75 bp, synthetic construct
  source 1..75: mol_type = other DNA
ctcgctgctgcgtgtactcaatctgcttgagatgccgcgctccggtacgctcaacattgcaggcaaccatttcga

SEQ ID NO: 857231 - DNA, 75 bp, synthetic construct
  source 1..75: mol_type = other DNA
atcaaaaccaccgagcgcaaactggctgaaggggtgctgattcacggtgatcagcccctgatggcctggtgtgtc

SEQ ID NO: 857232 - DNA, 75 bp, synthetic construct
  source 1..75: mol_type = other DNA
gcaatatataaatgcatgaaaagtatatcacctttgattactagttcattaggtactgggagtgcggaggaaaga

SEQ ID NO: 857233 - DNA, 75 bp, synthetic construct
  source 1..75: mol_type = other DNA
tggaatacagaggaatatgcttagttgggtttgatcttaaagattatccacaagggcccagttcaattgatatca

SEQ ID NO: 857234 - DNA, 75 bp, synthetic construct
  source 1..75: mol_type = other DNA
tttctgaaaaggggttgcttatggaaattaaagaaggcccttttaacgtattagaggcaaaagaatatttaataa

SEQ ID NO: 857235 - DNA, 75 bp, synthetic construct
  source 1..75: mol_type = other DNA
agcagggccgttgtatcagcctggacgatatcctgcgtcgtgctgatgtggtgacggtggggattgacggcggag

SEQ ID NO: 857236 - DNA, 75 bp, synthetic construct
  source 1..75: mol_type = other DNA
gaaaacctcgccatggttaacccgaatctcggttattcggtggatgaggcctttctgtaccgggagtaccgtaaa

SEQ ID NO: 857237 - DNA, 75 bp, synthetic construct
  source 1..75: mol_type = other DNA
cagtatgacatttatcatatgcagcggatggaaggtgaattaaccaacaccatgatccaatgggtcgataaaatt

SEQ ID NO: 857238 - DNA, 75 bp, synthetic construct
  source 1..75: mol_type = other DNA
agaaattaattatgattatctctttaaggtaattgaaaattctgactacaacggttgggttggctgtgaatataa

SEQ ID NO: 857239 - DNA, 75 bp, synthetic construct
  source 1..75: mol_type = other DNA
ttttgataaaaatcattaggggattcatcagtgcgcagtgtggttttcgcggcgttgaatttatgttcccttatg

SEQ ID NO: 857240 - DNA, 75 bp, synthetic construct
  source 1..75: mol_type = other DNA
aacgatccgcattgaaccgccactgacactgaccattgaacagtgtgaactggtgatcaaagcggcgcgtaaggc

SEQ ID NO: 857241 - DNA, 75 bp, synthetic construct
  source 1..75: mol_type = other DNA
ggcgcaatccctgcaatacttaaatcggtatcatgtgatacgcgagcctccggagcatattttgaacaggttacc

SEQ ID NO: 857242 - DNA, 75 bp, synthetic construct
  source 1..75: mol_type = other DNA
cgcatcgcggcgaaccggggaccggagaaattaattatgattatctctttaaggtaatcgaaaattctgactaca

SEQ ID NO: 857243 - DNA, 75 bp, synthetic construct
  source 1..75: mol_type = other DNA
gatcaacctgattgatgaaagtgaatttaccaaaacatctgaggttgcaaccgacaacatcgttgctgttggtat

SEQ ID NO: 857244 - DNA, 75 bp, synthetic construct
  source 1..75: mol_type = other DNA
cgtaacaacgacttctttggtctggttgatggtctgaactttgctgctcagtaccaaggcaaaaacgatcgtagc

SEQ ID NO: 857245 - DNA, 75 bp, synthetic construct
  source 1..75: mol_type = other DNA
gaaggattcggcgtgggtgcaacctatgctaaatctgatcgcactaataatcaggttatctacggtaacaacggt

SEQ ID NO: 857246 - DNA, 75 bp, synthetic construct
  source 1..75: mol_type = other DNA
gttgaactgaaacgcctgacggtcaaagacctgaagcaggtgcgcaaaatcagtaaagacccggctgactgggac

SEQ ID NO: 857247 - DNA, 75 bp, synthetic construct
  source 1..75: mol_type = other DNA
cggggatgggtgagagcaacgaaggcgctgacgcaggcgcaggggctgctggcaaggtggttcaggtttcagccg

SEQ ID NO: 857248 - DNA, 75 bp, synthetic construct
  source 1..75: mol_type = other DNA
taactacggtgtagcatacgacattggtgcgtggactgacgtactgccagaattcggtggtgatacttggaccca

SEQ ID NO: 857249 - DNA, 75 bp, synthetic construct
  source 1..75: mol_type = other DNA
ttgaatacttcaaagagcatgtcaatccggggtttttagagtatcgcaaatctgttaccgccggcggggattacg

SEQ ID NO: 857250 - DNA, 75 bp, synthetic construct
  source 1..75: mol_type = other DNA
tccattccgtatatctggggtgcgacggcgattggcgttaacggtgatgcggtggatccgaaatctgtcaccagc

SEQ ID NO: 857251 - DNA, 75 bp, synthetic construct
  source 1..75: mol_type = other DNA
accccacagaagggggcatgcaggatattattgactgcattcgtgctgaactgggtgccggaaccacgaaaaacg

SEQ ID NO: 857252 - DNA, 75 bp, synthetic construct
  source 1..75: mol_type = other DNA
ccctgacagtgctgatggatcattatcttgatactgatgctctggcagacgggctaccgctgtatgtgtcgctgt

SEQ ID NO: 857253 - DNA, 75 bp, synthetic construct
  source 1..75: mol_type = other DNA
gtgctgtcggtaaaccgatgggtttacttttcattgctgaaaaaattgttccaggcaatgaacctctgccagatc

SEQ ID NO: 857254 - DNA, 75 bp, synthetic construct
  source 1..75: mol_type = other DNA
aagtcgaagttaacgaacttcagcaatctcgatccagacatgctcaacaagccgtttgacccgaataacgactac

SEQ ID NO: 857255 - DNA, 75 bp, synthetic construct
  source 1..75: mol_type = other DNA
acaaaggcagcctgctgctgaccgacgatgcccgtgaagtgttccagatggcgctgcgcaaactgggctactccg

SEQ ID NO: 857256 - DNA, 75 bp, synthetic construct
  source 1..75: mol_type = other DNA
cctattcagaaacccagaatatgactaaattcgcagattactttgtggctaataaagcacaaaacttcgaagctg

SEQ ID NO: 857257 - DNA, 75 bp, synthetic construct
  source 1..75: mol_type = other DNA
gggcaagatgttcgcctgcgaacatgagaacgtacagccggacatcctgtgcctggcaaaagccctcggcggcgg

SEQ ID NO: 857258 - DNA, 75 bp, synthetic construct
  source 1..75: mol_type = other DNA
agaacgttcagccggacatcctgtgtctggcgaaagccctcggcggcggcgtgatgccaattggcgcaactattg

SEQ ID NO: 857259 - DNA, 75 bp, synthetic construct
  source 1..75: mol_type = other DNA
ataccttaatctggtacggcggtattatcggattaagctccttattatcgaaagttaaattcttcgaatggttag

SEQ ID NO: 857260 - DNA, 75 bp, synthetic construct
  source 1..75: mol_type = other DNA
atgaaaaaattaacggtggcaatttctgctgtggctgcatcagtatcagtactgatggcgatgtctgctcaggca

SEQ ID NO: 857261 - DNA, 75 bp, synthetic construct
  source 1..75: mol_type = other DNA
caatcaaaaggtaaagatcttggcatttttggtgaccaggatttagtcaaatatgttgatgttggcgcaacttat

SEQ ID NO: 857262 - DNA, 75 bp, synthetic construct
  source 1..75: mol_type = other DNA
agtttcacgagaagctgcgtgaactgctgacgacgctgaatctgaagctggaaccggcggatgattttcgtgacg

SEQ ID NO: 857263 - DNA, 75 bp, synthetic construct
  source 1..75: mol_type = other DNA
gccagtgggcttttatcggtctggttatgtgtcttgtgacgtattatactggctcagttgctgtttacttcctga

SEQ ID NO: 857264 - DNA, 75 bp, synthetic construct
  source 1..75: mol_type = other DNA
attttaagagtattcgcgctatttttggtgctcaccctacgaatcttaaaaataaccacggggagagattatttg

SEQ ID NO: 857265 - DNA, 75 bp, synthetic construct
  source 1..75: mol_type = other DNA
gtgatgtgattatttcgaggcttcctacaggtgaattaagttatgttcttcagaagatgttttcttgtctccact

SEQ ID NO: 857266 - DNA, 75 bp, synthetic construct
  source 1..75: mol_type = other DNA
tgagctggatgaggaaaagaagcagcttaaactcgaaaagcagaaagttaagcagaagcctgtaacagtcaaaga

SEQ ID NO: 857267 - DNA, 75 bp, synthetic construct
  source 1..75: mol_type = other DNA
ctctaaccgctcgcggtatagataccatgaagctcggcatgactctggcagatacgggcgaaaatagaggccttc

SEQ ID NO: 857268 - DNA, 75 bp, synthetic construct
  source 1..75: mol_type = other DNA
tcgatttgtacagcaacatcgaccgggagctgatactcagtaagcgagaagacctggagggaacaaaaggacttg

SEQ ID NO: 857269 - DNA, 75 bp, synthetic construct
  source 1..75: mol_type = other DNA
taaccatccatgtaagatcatctatgcaaccagtgaaaaagaagatgctgataaattttctgcacaattaggtta

SEQ ID NO: 857270 - DNA, 75 bp, synthetic construct
  source 1..75: mol_type = other DNA
tatacgataacaagtaaatacaggcagaagatattagggagtgaggtttatctctttgaccccttttccagaaaa

SEQ ID NO: 857271 - DNA, 75 bp, synthetic construct
  source 1..75: mol_type = other DNA
tgaagtgaccaacagctatgtttatattaagagctggatcggtacttacggctacatgtatcgtgatatccagat

SEQ ID NO: 857272 - DNA, 75 bp, synthetic construct
  source 1..75: mol_type = other DNA
caaattttggtataactattaatgatactttaataacggattttcgcgatgtagttaatgaaagagattttgttt

SEQ ID NO: 857273 - DNA, 75 bp, synthetic construct
  source 1..75: mol_type = other DNA
ggatgttgctctttatggtgatgcgaagtttgccagtgacaatgatttaaaaaaatcaaaactgcttaagtggga

SEQ ID NO: 857274 - DNA, 75 bp, synthetic construct
  source 1..75: mol_type = other DNA
ttcaacgctgaaatttgatgaggagtttattctgcttaaaggtgaaaatccgattaaatgtaagaaagcctttta

SEQ ID NO: 857275 - DNA, 75 bp, synthetic construct
  source 1..75: mol_type = other DNA
gaagattatcttcgtgggcaagcagtattagaagcgaagctggatgccttatatagcaaaatcgagctgttacaa

SEQ ID NO: 857276 - DNA, 75 bp, synthetic construct
  source 1..75: mol_type = other DNA
ccttcagtcaaaaggtaaagaccttggtgttcatggtgaccgagacttagtcaagtatgtcgatgtcggtgctac

SEQ ID NO: 857277 - DNA, 75 bp, synthetic construct
  source 1..75: mol_type = other DNA
atcgttgctaaaaaaagatgaatttgcttatgatctttcagctctgaatgttcaggatagcccatggttaattgt

SEQ ID NO: 857278 - DNA, 75 bp, synthetic construct
  source 1..75: mol_type = other DNA
tagcgttgttttacatgatggtgctgtttgtacaattcgcacccagcaactttatgattctgcgattgaatatta

SEQ ID NO: 857279 - DNA, 75 bp, synthetic construct
  source 1..75: mol_type = other DNA
atgacgttaccgagtggacacccgaagagcagattgatcaaaaaatttaccgtactaggcccgtatattcgtgaa

SEQ ID NO: 857280 - DNA, 75 bp, synthetic construct
  source 1..75: mol_type = other DNA
gcaactggtgttgcaacttatcgtaacaacgacttctttggtctggtcgatggcctgaactttgctgctcagtat

SEQ ID NO: 857281 - DNA, 75 bp, synthetic construct
  source 1..75: mol_type = other DNA
ttttctggatggacagcctggcgatcccggcaaatgccaaaaacaaagaaggcgcgctgaaattgatcaacttcc

SEQ ID NO: 857282 - DNA, 75 bp, synthetic construct
  source 1..75: mol_type = other DNA
ctacgattgcagcatctgttctgatggcaatgtctgcacaagcggcagaaatctataacaaagacggtagtaaac

SEQ ID NO: 857283 - DNA, 75 bp, synthetic construct
  source 1..75: mol_type = other DNA
ttttaaaaagcaacgcggagctgagcatctaattctctgcggtcttgccatctcttttttgttcggggcgctgac

SEQ ID NO: 857284 - DNA, 75 bp, synthetic construct
  source 1..75: mol_type = other DNA
gggcgatgtggggagccatggtagtgctgattgggttgatgttattcagtattaccagagggacagtttcactgt

SEQ ID NO: 857285 - DNA, 75 bp, synthetic construct
  source 1..75: mol_type = other DNA
tgtaaggcgattactttctcaatcttctgaaatacgcagtgcaagtagtcttcaggttgaaagaatctgggtcga

SEQ ID NO: 857286 - DNA, 75 bp, synthetic construct
  source 1..75: mol_type = other DNA
gattgaaaatgagagcggttatttgattacctatttcagaaggatatatcaggcgcttcgtgggcaatcatctca

SEQ ID NO: 857287 - DNA, 75 bp, synthetic construct
  source 1..75: mol_type = other DNA
ggttgaacgactggagcacaccctgcgtgaatttcacgagaagctgcgtgagctgctggcgacgctgaatctgaa

SEQ ID NO: 857288 - DNA, 75 bp, synthetic construct
  source 1..75: mol_type = other DNA
aagaactgaatgatgattcaaccgtcaatttcctgcgcgatctggaaaaagaacagcagcatgatggcctgttgc

SEQ ID NO: 857289 - DNA, 75 bp, synthetic construct
  source 1..75: mol_type = other DNA
ccaggagaaaagcttaactctctggaagaactcttccaaaaaacgatggaagaatatgagcagcgttcaagcaag

SEQ ID NO: 857290 - DNA, 75 bp, synthetic construct
  source 1..75: mol_type = other DNA
ggtcaacgtcaacacgcttgaggcattaccgcttttacagggggcaacggatgccgccggttttatggcgcggat

SEQ ID NO: 857291 - DNA, 75 bp, synthetic construct
  source 1..75: mol_type = other DNA
tcgccctgttactgacagccgctgccgtgcagggctccacccgggatgaaatagagcgactctggaatccgcagg

SEQ ID NO: 857292 - DNA, 75 bp, synthetic construct
  source 1..75: mol_type = other DNA
tatggcttttccgtttttccctacaccctggatggtcagggtgatacggctttccggaggcattactggcaccac

SEQ ID NO: 857293 - DNA, 75 bp, synthetic construct
  source 1..75: mol_type = other DNA
aactcaacacgcaaatgaacctcgagttttatgcatccaatctctacctccacctgagcaactggtgttctgagc

SEQ ID NO: 857294 - DNA, 75 bp, synthetic construct
  source 1..75: mol_type = other DNA
ttttgcgataaccaaaatcgcattgaagagtgacgttgcggtgccgggcattgatgccgctacttttgacggcat

SEQ ID NO: 857295 - DNA, 75 bp, synthetic construct
  source 1..75: mol_type = other DNA
ctgattggtgcggcccacgcggcatgtttctcaatggcgctttcgttgatgttgggagaggccgggtttacacca

SEQ ID NO: 857296 - DNA, 75 bp, synthetic construct
  source 1..75: mol_type = other DNA
ctggaaatcgaatttaaaggcgaaacggtcagcaagtggacgttctctgaaaacagcagcaagatgaaaaccggt

SEQ ID NO: 857297 - DNA, 75 bp, synthetic construct
  source 1..75: mol_type = other DNA
gctcaacttggtgagcctgatacaagaactacactcgacagtggcaacgaacaatggagatactttatgtataac

SEQ ID NO: 857298 - DNA, 75 bp, synthetic construct
  source 1..75: mol_type = other DNA
cggttctcagatccagtctaaaactcttgaaatagattttaaaggggaggtcgttagtaaatggactttctcttc

SEQ ID NO: 857299 - DNA, 75 bp, synthetic construct
  source 1..75: mol_type = other DNA
cggttcccagactcagtctagaactctcgaaatcgacttcaatggagaaaccgtaagcaaatggacattctctac

SEQ ID NO: 857300 - DNA, 75 bp, synthetic construct
  source 1..75: mol_type = other DNA
tcaccctgttactgacaaccgctaccgtgcagggctccacccgggatgaaatagagcgactctgggatccgcagg

SEQ ID NO: 857301 - DNA, 75 bp, synthetic construct
  source 1..75: mol_type = other DNA
cagttttgcatccctttagtgccggtaatttgctgttcctgaattaccatccgcaaagcgaactggtgatgaaca

SEQ ID NO: 857302 - DNA, 75 bp, synthetic construct
  source 1..75: mol_type = other DNA
atgtctctcactaaatcactgctgttcaccctgttactgacagccgctgctgtgcaggcctccacccgggatgaa

SEQ ID NO: 857303 - DNA, 75 bp, synthetic construct
  source 1..75: mol_type = other DNA
ttgcggcgggtccctgctcattgcctgccgggtgccacacacccgtatgagtccctgtcgccggggctgatactg

SEQ ID NO: 857304 - DNA, 75 bp, synthetic construct
  source 1..75: mol_type = other DNA
tgatgaactacccccctgttgtaatggcgcatacggttgccgtttttctctcatttgatggcgaactcgacaccc

SEQ ID NO: 857305 - DNA, 75 bp, synthetic construct
  source 1..75: mol_type = other DNA
tcaacgcctgggaatgggcggtggtttttatgatcgaaccttacaaaactggcagcactacaaaatgcaaccgat

SEQ ID NO: 857306 - DNA, 75 bp, synthetic construct
  source 1..75: mol_type = other DNA
atggcgcatacagttgccgtattcctctcgtttgatggcgaactcgacactcaaccgctcatagaacaactctgg

SEQ ID NO: 857307 - DNA, 75 bp, synthetic construct
  source 1..75: mol_type = other DNA
aactccgcacacgaaaggtaaagtgctggatgtcggctgtggcgcgggcgtgctttcggttgcctttgcgcgcca

SEQ ID NO: 857308 - DNA, 75 bp, synthetic construct
  source 1..75: mol_type = other DNA
tcattctgttgatgatggccacaggtgtgcaggcctccacccgggatgaaattgaacgactctggaatccgcagg

SEQ ID NO: 857309 - DNA, 75 bp, synthetic construct
  source 1..75: mol_type = other DNA
cgtgcggaaatcgagcgactctggcatccggagggaatggccgcacggacaactcagccggcagcagacgcacag

SEQ ID NO: 857310 - DNA, 75 bp, synthetic construct
  source 1..75: mol_type = other DNA
tcattctgttgataatggccacaggtgtgcgggcctccacccgggatgaaattgaacgactctggaatccgcagg

SEQ ID NO: 857311 - DNA, 75 bp, synthetic construct
  source 1..75: mol_type = other DNA
ggccagctgtacacaggcatccacacgtgcggaaatcgagcgactctggcatccggagggaatggcagcacggac

SEQ ID NO: 857312 - DNA, 75 bp, synthetic construct
  source 1..75: mol_type = other DNA
atgtctctcactaaatcactgctgtttaccctgttactgacagccgctgccgtgcaggcctccacccgggatgaa

SEQ ID NO: 857313 - DNA, 75 bp, synthetic construct
  source 1..75: mol_type = other DNA
gccctcctgggcgagccagatacaagaaccgctcttgataacggtaatgaagaatggacttactttatgaataac

SEQ ID NO: 857314 - DNA, 75 bp, synthetic construct
  source 1..75: mol_type = other DNA
tttgttaatctgctggatatgtcaacacgatggagtaaagcagataaagaagatacatacaatggattcgatcgt

SEQ ID NO: 857315 - DNA, 75 bp, synthetic construct
  source 1..75: mol_type = other DNA
atgataaaaaaacttcctgttttaattcttctggtgctgtcggggagtctttcttccgccgtggctgctgataaa

SEQ ID NO: 857316 - DNA, 75 bp, synthetic construct
  source 1..75: mol_type = other DNA
aagtactggcatccctgacctcattacagcgtgaatttaacaaaaaacagtctgacggaaagaaagtgtcgttgg

SEQ ID NO: 857317 - DNA, 75 bp, synthetic construct
  source 1..75: mol_type = other DNA
gggtatttacatctcgatcgagaagaccattatcattacaatcaccgtttctggtgggtgctttaaaaaagaata

SEQ ID NO: 857318 - DNA, 75 bp, synthetic construct
  source 1..75: mol_type = other DNA
gtttattccgctacccacaccaacccattcagattttctggtttgaccgtgatgaatggttaatgcttgtaatta

SEQ ID NO: 857319 - DNA, 75 bp, synthetic construct
  source 1..75: mol_type = other DNA
aaagcctggctagagcgtaaacagcgagagaacgaagaaagaaaactccttagtgagttgaaatggcttaaggat

SEQ ID NO: 857320 - DNA, 75 bp, synthetic construct
  source 1..75: mol_type = other DNA
gcaaagagtcgtggaatgcgctgctgttaactttaactggcggcctgacgctggccccgatatgtctggtgttct

SEQ ID NO: 857321 - DNA, 75 bp, synthetic construct
  source 1..75: mol_type = other DNA
atggtgcacctgtggaggagcagggactgggatggaaaaataaatgtggtacaggaaacggcaaatataccatca

SEQ ID NO: 857322 - DNA, 75 bp, synthetic construct
  source 1..75: mol_type = other DNA
gattattgaatcaggaaaaaacattcacaattttaatatcggacagcaagttgcggtaattccgtatatttcttg

SEQ ID NO: 857323 - DNA, 75 bp, synthetic construct
  source 1..75: mol_type = other DNA
aaaaagcagaagtcatatatcgccggttgaaagcctcattgataaagccagtcagctggatctcaccgttcctga

SEQ ID NO: 857324 - DNA, 75 bp, synthetic construct
  source 1..75: mol_type = other DNA
tcagaccatcactgctattcgtactcaagcgggcattgttcagcggctggcggcagataacgccagcgtgaagca

SEQ ID NO: 857325 - DNA, 75 bp, synthetic construct
  source 1..75: mol_type = other DNA
ttgcgtgaacttaaccagtcgctgcaaaaggaactggcgcgcaatcagcatctggctgaacggttgctggaaacc

SEQ ID NO: 857326 - DNA, 75 bp, synthetic construct
  source 1..75: mol_type = other DNA
cagcaggaagaaacatccgtgacattatttcagggaaaaatgagtaccgacggaaataactattccatcatcaaa

SEQ ID NO: 857327 - DNA, 75 bp, synthetic construct
  source 1..75: mol_type = other DNA
ttaagtatctgcgcgggatgcacctcaacgatgcgaaaagcacctttggcagccgcgttgaccgccatcatagcc

SEQ ID NO: 857328 - DNA, 75 bp, synthetic construct
  source 1..75: mol_type = other DNA
acccaggcagccatctgatgcagatttcagaagaggattgtctggcgcgcattgccgaatccatcaatattgcgc

SEQ ID NO: 857329 - DNA, 75 bp, synthetic construct
  source 1..75: mol_type = other DNA
aacatctcgcggcgattatcgacggcgtggaagataaatcccgtgtcggcgtctgcattgatacctgccatgctt

SEQ ID NO: 857330 - DNA, 75 bp, synthetic construct
  source 1..75: mol_type = other DNA
gggttcacagacgcaggccaaaacgctggaaatcgaatttaaaggcgaaaccgtcagcaagtggacgttctctga

SEQ ID NO: 857331 - DNA, 75 bp, synthetic construct
  source 1..75: mol_type = other DNA
accgcattcggtcagcccgaaaccaaaactacacttgatagtggcaatgaacaatggacttattcgatggacaac

SEQ ID NO: 857332 - DNA, 75 bp, synthetic construct
  source 1..75: mol_type = other DNA
agctttaaggcaatgggagatatatcggcattatgagcacttaaactattttaaatcaatattatgttttgtttc

SEQ ID NO: 857333 - DNA, 75 bp, synthetic construct
  source 1..75: mol_type = other DNA
cctttggaacccagagaaactcgaaagccaattgaaatttatggttgataaccaattagatttttcatttacggg

SEQ ID NO: 857334 - DNA, 75 bp, synthetic construct
  source 1..75: mol_type = other DNA
ccaacctggtatgatcgcgaccgctttattctttccaacggtcacgcgtcgatgctgctctacagtttgctacat

SEQ ID NO: 857335 - DNA, 75 bp, synthetic construct
  source 1..75: mol_type = other DNA
gtacgaaaacgggctgtatacgcgccacatcagactcagtcgcccagtatctgacagcaaatacccttgccaccc

SEQ ID NO: 857336 - DNA, 75 bp, synthetic construct
  source 1..75: mol_type = other DNA
ggcttgtcggcaatggcaaatctataggactatcgaaaaaatcccattttcttcttcagcttattattttgctca

SEQ ID NO: 857337 - DNA, 75 bp, synthetic construct
  source 1..75: mol_type = other DNA
tgatgacttatggtgtgagcaaaaattatccaagcaaatagattatatgattagcacaaattgtgctttttgctt

SEQ ID NO: 857338 - DNA, 75 bp, synthetic construct
  source 1..75: mol_type = other DNA
ttacaccatcgtataactccagtgaatggattgaacaaacttatcttagtataaaatcacagagttattctaatt

SEQ ID NO: 857339 - DNA, 75 bp, synthetic construct
  source 1..75: mol_type = other DNA
agttactggatcatatcggtattgacccgtcaggtgtggggcagattctggattcactggcggaagctgtagtgg

SEQ ID NO: 857340 - DNA, 75 bp, synthetic construct
  source 1..75: mol_type = other DNA
tttcaggatcttgttgcctgtggagatatgacgattgtacgtcgggtcggggatgacacggcggaagtggcagag

SEQ ID NO: 857341 - DNA, 75 bp, synthetic construct
  source 1..75: mol_type = other DNA
cttatggccctgtttaatgccgtttcgctaatggcacttaatcctgaagcgaagaagaaagattaccaggtattt

SEQ ID NO: 857342 - DNA, 75 bp, synthetic construct
  source 1..75: mol_type = other DNA
gtcatgattgacggtcggaagttcaattgcgttgccagtatagccagagcgcatggacttgatccggtaacggtg

SEQ ID NO: 857343 - DNA, 75 bp, synthetic construct
  source 1..75: mol_type = other DNA
ctgaaggggtgctggtgcatggtgaccagcccctgatggcctggtgtgtcggcaatgcccgggtggagcctaaag

SEQ ID NO: 857344 - DNA, 75 bp, synthetic construct
  source 1..75: mol_type = other DNA
tcagaaatcgcaaagtacactagtgagccggatgcgacttttccaacgccgatcataatttccgtcgatgattca

SEQ ID NO: 857345 - DNA, 75 bp, synthetic construct
  source 1..75: mol_type = other DNA
cgctgcattcgcgcttttaatccatggccaatgagttggctggaaattgaaggacagccggttaaggtctggaaa

SEQ ID NO: 857346 - DNA, 75 bp, synthetic construct
  source 1..75: mol_type = other DNA
tcatggaagggaatattgctacaacaatcaaaaacaacctgaataacattggacatattcaattagccgataacc

SEQ ID NO: 857347 - DNA, 75 bp, synthetic construct
  source 1..75: mol_type = other DNA
ggaagccattaatacaaaagatattcccggtttttttgttaacaacaccagacaagctctcaatattattcatga

SEQ ID NO: 857348 - DNA, 75 bp, synthetic construct
  source 1..75: mol_type = other DNA
cttgatgaaacccgtaagcaggtgcatgccctgcagatgcagggaccactgcaaatcccgaccgggaataacggc

SEQ ID NO: 857349 - DNA, 75 bp, synthetic construct
  source 1..75: mol_type = other DNA
ttattcttttcctgttatccagtaaaagctatgctgaagaggtaagtatagattcgggggatccctgtactgtct

SEQ ID NO: 857350 - DNA, 75 bp, synthetic construct
  source 1..75: mol_type = other DNA
aaggtctgcccgtttttcaaccggtttccctgcgtccacaagaaaaccagcaactggtcgccgatctacaggctg

SEQ ID NO: 857351 - DNA, 75 bp, synthetic construct
  source 1..75: mol_type = other DNA
cagctcaacaccaaccttgtttaccagaaagtcaaagaccgggctgatagcgctgatgaagagttctggggactg

SEQ ID NO: 857352 - DNA, 75 bp, synthetic construct
  source 1..75: mol_type = other DNA
gaagagagcgtgcgtcgcgatgtggcgcgtgaactgcatgatgatatcggtcagaccattaccgctattcgtacc

SEQ ID NO: 857353 - DNA, 75 bp, synthetic construct
  source 1..75: mol_type = other DNA
tgttggtgcaaagtttgaccggattgttgcttggcgcaggtatccagcgcctgcgtgaacttaatcagtcgttgc

SEQ ID NO: 857354 - DNA, 75 bp, synthetic construct
  source 1..75: mol_type = other DNA
tcaccctgcaaggctggcagcaggatgaacggttgatgctggtgattgaagacgatggcagcggtttaccgccgg

SEQ ID NO: 857355 - DNA, 75 bp, synthetic construct
  source 1..75: mol_type = other DNA
gccgtttgttagggcggttacgtccgcgccagctggatgatctcaccctggagcaggccatccgctcactgatgc

SEQ ID NO: 857356 - DNA, 75 bp, synthetic construct
  source 1..75: mol_type = other DNA
ctgacgctggctcctgtttgtctcgtgttctggcattacctggcgaataacacctggctaccgctggggccgtcg

SEQ ID NO: 857357 - DNA, 75 bp, synthetic construct
  source 1..75: mol_type = other DNA
ctgccaggaagggctgaacaacattgtgaaacatgctgatgccagcgcggtcacgctgcaaggctggcagcagga

SEQ ID NO: 857358 - DNA, 75 bp, synthetic construct
  source 1..75: mol_type = other DNA
ttaaggagcgggtgatccgaaacagtctgcggccccctgccgtgcccggtatcggacgcaccgagaaatacggaa

SEQ ID NO: 857359 - DNA, 75 bp, synthetic construct
  source 1..75: mol_type = other DNA
ttaaggagcgggtgatccgaaacagtctgcggccccctgccgtgcccggtatcggacgcacagagaaatacggca

SEQ ID NO: 857360 - DNA, 75 bp, synthetic construct
  source 1..75: mol_type = other DNA
atagtattagcagtgggacgtttaacttatcagaaggggtttgataggttaattcgtatttgggcttccatatcg

SEQ ID NO: 857361 - DNA, 75 bp, synthetic construct
  source 1..75: mol_type = other DNA
ttaaggagcgggtgatccggaacagtctgcggccccctgccgtgcccggtatcggacgcacggagaaatacggca

SEQ ID NO: 857362 - DNA, 75 bp, synthetic construct
  source 1..75: mol_type = other DNA
ttaaggagcgggtgatccggaacagtctgcggccccctgccgtgcccggtatcggacgcaccgagaaatacggga

SEQ ID NO: 857363 - DNA, 75 bp, synthetic construct
  source 1..75: mol_type = other DNA
ttaaggagcgggtgatccgcaacagtctgcggccccctgccgtgcccggtatcggacgcaccgagaaatacggca

SEQ ID NO: 857364 - DNA, 75 bp, synthetic construct
  source 1..75: mol_type = other DNA
tttgctctgaacgatccggccgcaggtacgaccggtccgtggtacaccaacggtacttttggcttaacggcgggc

SEQ ID NO: 857365 - DNA, 75 bp, synthetic construct
  source 1..75: mol_type = other DNA
gagttgtgggagatggcgattttcgatctctacaatcgaattctggaatcgggcaaaacacggttgttgatcacc

SEQ ID NO: 857366 - DNA, 75 bp, synthetic construct
  source 1..75: mol_type = other DNA
cacgctatttatgacactggatcagctggatcatgcgtcgattaccgcacagcgtaagctgaccattccgtttgt

SEQ ID NO: 857367 - DNA, 75 bp, synthetic construct
  source 1..75: mol_type = other DNA
gcctgctgtgtcagattgacagcgccaccacctatctgcgcgaagagtttggccttgctgctgaaccacgcagtg

SEQ ID NO: 857368 - DNA, 75 bp, synthetic construct
  source 1..75: mol_type = other DNA
gcgtcttgactgggggcagatctacaaattgcagccactttctgatgaagataagttgcaggcgctacagttacg

SEQ ID NO: 857369 - DNA, 75 bp, synthetic construct
  source 1..75: mol_type = other DNA
cacgctatttatgacgttggatcagctcgatcgggcgtcgattaccgcacaacgtaagttgaccatcccgtttgt

SEQ ID NO: 857370 - DNA, 75 bp, synthetic construct
  source 1..75: mol_type = other DNA
gagttgtgggagatggcgattttcgatctctacaatcggattctggagtcgggcaaaacacggttgttgatcacc

SEQ ID NO: 857371 - DNA, 75 bp, synthetic construct
  source 1..75: mol_type = other DNA
tcccggcgtttatcctggtcgatgacaaaggtaacgacttcttccagcagatcgtcaacaaacagtgcgcgaact

SEQ ID NO: 857372 - DNA, 75 bp, synthetic construct
  source 1..75: mol_type = other DNA
acactgccaccggcgctgccggggaagggtgtaacgaaaaaagcagccttcattactccaggagtcagaaggctg

SEQ ID NO: 857373 - DNA, 75 bp, synthetic construct
  source 1..75: mol_type = other DNA
gttatgcacatgattgtcagttagtagaaaaacttcctgtcgaagagtgggatattccgctacctgcggtggtta

SEQ ID NO: 857374 - DNA, 75 bp, synthetic construct
  source 1..75: mol_type = other DNA
tgcgcgttgaccttaaccgtccgatgaaagagatcctcgcacagttgtcgcagtatcccgtttctacacgcttat

SEQ ID NO: 857375 - DNA, 75 bp, synthetic construct
  source 1..75: mol_type = other DNA
ctgctctgctgaccgtaatatcaaagcgaagatcaaccgtcaggggatctggatcgaaaaactggaacataatcc

SEQ ID NO: 857376 - DNA, 75 bp, synthetic construct
  source 1..75: mol_type = other DNA
gcgcgtcaggcgtttcatgatgcgtcatttatgctgcgtccggctcaccaacaacaggtggccgacattctgcgt

SEQ ID NO: 857377 - DNA, 75 bp, synthetic construct
  source 1..75: mol_type = other DNA
ctcctctttactggccgcgctgcaaaatgtgctgcgtcaggaacatagcggttacatctatctctgggcacgcga

SEQ ID NO: 857378 - DNA, 75 bp, synthetic construct
  source 1..75: mol_type = other DNA
gaatgacgtggcgcgggcagccagtcaggttcagacactggcggagaaaaccagcatcaggcgcaaattgagcgc

SEQ ID NO: 857379 - DNA, 75 bp, synthetic construct
  source 1..75: mol_type = other DNA
aacgtatctctaccaggaaactaaagccctgctgacacccgacaaactgaaaaacttcctcgtcgagaaaatgcg

SEQ ID NO: 857380 - DNA, 75 bp, synthetic construct
  source 1..75: mol_type = other DNA
gcgaaaatcaaccgcgaaggtatctggatcgaaaaactggaacacaatccaggccagtacattccagaagaactg

SEQ ID NO: 857381 - DNA, 75 bp, synthetic construct
  source 1..75: mol_type = other DNA
acgggcggcggaacgcgagcaaacccgccaattgctggctggcagcgtagcccgcctgtactgggagtggcaaac

SEQ ID NO: 857382 - DNA, 75 bp, synthetic construct
  source 1..75: mol_type = other DNA
cagaacgcaccggatatgcaggtggctgaacagcgcattcaactggctgaagcacaggcgaaagctgtagccact

SEQ ID NO: 857383 - DNA, 75 bp, synthetic construct
  source 1..75: mol_type = other DNA
aggatgcgttgcacttaagcgatctgttccgtcattccgcgcagcaaatgggcgttacggcaggcctgacgctac

SEQ ID NO: 857384 - DNA, 75 bp, synthetic construct
  source 1..75: mol_type = other DNA
attcgtcacggcggcacggtggtatttgtcggcctgtttaaaggtgagttgcagttctccgatccggaattccat

SEQ ID NO: 857385 - DNA, 75 bp, synthetic construct
  source 1..75: mol_type = other DNA
tcagtctcttcgcgaagcccgcgaaaccaacgcagcacaacagcgcgtgctggccgacaaaaatgaaaaaataga

SEQ ID NO: 857386 - DNA, 75 bp, synthetic construct
  source 1..75: mol_type = other DNA
gcgattttgtgaaatcctggttgaggtatctctgaacacaccggcacagctctctttgccactttatcttcctga

SEQ ID NO: 857387 - DNA, 75 bp, synthetic construct
  source 1..75: mol_type = other DNA
ctttcatgctccgcccggcacaccagaaacaggttgcggctattcttcacgatccagaagccagcgaaaacgaca

SEQ ID NO: 857388 - DNA, 75 bp, synthetic construct
  source 1..75: mol_type = other DNA
caaccgttttttaactacccacgtgttctgggccatgaaatatgtggagagattgttgggctgggtaaaaatata

SEQ ID NO: 857389 - DNA, 75 bp, synthetic construct
  source 1..75: mol_type = other DNA
gctgatcttaaaaatggtcagcaagttgctgtgatcccttatgttgcctgtcagcaatgcccggcatgtaaaagc

SEQ ID NO: 857390 - DNA, 75 bp, synthetic construct
  source 1..75: mol_type = other DNA
gaaacaggttgcggctattcttcacgatccagaagccagcgaaaacgacaagtacgtggcgctgcaattcttaag

SEQ ID NO: 857391 - DNA, 75 bp, synthetic construct
  source 1..75: mol_type = other DNA
cgaccgccagactatttttggccttgtccgtgaacgtccgatcgacattcacaaagaccctgtggcactgaacaa

SEQ ID NO: 857392 - DNA, 75 bp, synthetic construct
  source 1..75: mol_type = other DNA
atccatcgctgggcaaaaaatgaagttatcgacaacgaccgcgaagactggaagcgtatctcggcatcaatgcgc

SEQ ID NO: 857393 - DNA, 75 bp, synthetic construct
  source 1..75: mol_type = other DNA
cttccttttcactgataaggatggcgaaaaatatggtcgtgcaaacaaactttctggtctgaataaggcgctggc

SEQ ID NO: 857394 - DNA, 75 bp, synthetic construct
  source 1..75: mol_type = other DNA
atggcatttgagaaacccaaaaagcaaaacatgcccacgctacgaccagaagaattacccaagctgatgcgttct

SEQ ID NO: 857395 - DNA, 75 bp, synthetic construct
  source 1..75: mol_type = other DNA
tacgaaaagcctacaatcgctcaacatatttacacgcaagaattgaattgatgaattggtggggacgacatattc

SEQ ID NO: 857396 - DNA, 75 bp, synthetic construct
  source 1..75: mol_type = other DNA
cagcgaattaatgaggtcatgaaattcgccattaatacaggcctgctggatgcaaacccggcgtcaaccattgat

SEQ ID NO: 857397 - DNA, 75 bp, synthetic construct
  source 1..75: mol_type = other DNA
ttgttgcacatggtttacgttctatagccagtactgccatgaatgaagcaggattcaatgctgatgttattgagg

SEQ ID NO: 857398 - DNA, 75 bp, synthetic construct
  source 1..75: mol_type = other DNA
actactgacccttgtacgcccttctgaagcctctggtactcggtgggcagagatcaatctcgatgcaaagctctg

SEQ ID NO: 857399 - DNA, 75 bp, synthetic construct
  source 1..75: mol_type = other DNA
tagaaaaagatgtattccctgccatcggtgagatccctgttcagcaaatcaaagcccgaacacttgttgaagccc

SEQ ID NO: 857400 - DNA, 75 bp, synthetic construct
  source 1..75: mol_type = other DNA
ggaatgatccaaagcaagcgatgaatagtcagacagctaatgcagcgttaaaacggattggttatggtggtaaat

SEQ ID NO: 857401 - DNA, 75 bp, synthetic construct
  source 1..75: mol_type = other DNA
catgatggcgatgggcttttcctgatagtgaaaaccagcgggaaaaagctctggcgtttccgttatcaacgtccg

SEQ ID NO: 857402 - DNA, 75 bp, synthetic construct
  source 1..75: mol_type = other DNA
gcaaaacgagaacacattgttcctttgtccccccaagctttagacattttgaatataatgaaacccatcagtgct

SEQ ID NO: 857403 - DNA, 75 bp, synthetic construct
  source 1..75: mol_type = other DNA
agcaagtacggccatgaacgaacatggttggaatgctgatatcattgaatcagctcttgcgcatattgataaaaa

SEQ ID NO: 857404 - DNA, 75 bp, synthetic construct
  source 1..75: mol_type = other DNA
tctctttctgctcgtataggtgtttccgttcttgatactcaaaatggagaatattgggattacaatggcaatcag

SEQ ID NO: 857405 - DNA, 75 bp, synthetic construct
  source 1..75: mol_type = other DNA
caaacacaggcttcaatggcagagcgaaatgatgcgattgttaaaattggtcattcaatttttgacgtttataca

SEQ ID NO: 857406 - DNA, 75 bp, synthetic construct
  source 1..75: mol_type = other DNA
tgaggaaggattcccgcctgatgtcattgaagcagcactggctcatgtagacaaaaatgaggtacgtcgcgctta

SEQ ID NO: 857407 - DNA, 75 bp, synthetic construct
  source 1..75: mol_type = other DNA
atgtttcgtaaaaacagaaaattaacagcgcacatcaggaaactcagtctcctgattcagcgatacagagatgat

SEQ ID NO: 857408 - DNA, 75 bp, synthetic construct
  source 1..75: mol_type = other DNA
attgagcctgatttaaatgaaggtaagctcggtgatttgagggatacgacaactcctaaggcaatagccagtact

SEQ ID NO: 857409 - DNA, 75 bp, synthetic construct
  source 1..75: mol_type = other DNA
atatgatgctgagcaaggaaaagttaatcccaatagtacagtcgagattaagaaagcagatcttgtgacctattc

SEQ ID NO: 857410 - DNA, 75 bp, synthetic construct
  source 1..75: mol_type = other DNA
agaattacctaagctgatgcgttctctggtcatgtcgaatctgtctgtttcgactcgatgtcttattgagtggca

SEQ ID NO: 857411 - DNA, 75 bp, synthetic construct
  source 1..75: mol_type = other DNA
agatcgatcttgatacaaaactctggactattccccctgaacggatgaaagccaaacgtgaacacattgttcctt

SEQ ID NO: 857412 - DNA, 75 bp, synthetic construct
  source 1..75: mol_type = other DNA
tgaacttatcgaagaacaacaacagatagccatagacagtattttttcgactgttgcattcaattggttccagct

SEQ ID NO: 857413 - DNA, 75 bp, synthetic construct
  source 1..75: mol_type = other DNA
ctatgatgcaatggtgggctgctttcgtgatgacagcggatcgcggaagcgtgattgaaggtgggataaaaggaa

SEQ ID NO: 857414 - DNA, 75 bp, synthetic construct
  source 1..75: mol_type = other DNA
ggccgagagtttatctttcccagtcgcatcaaaccaacccagccaatgaacagccaaacagtgaatgcagcactc

SEQ ID NO: 857415 - DNA, 75 bp, synthetic construct
  source 1..75: mol_type = other DNA
tcgaacaaaaaacgaacaatcattagtttgggatcgcttgatgaagtctccctggctgatgccagaaaacgccgt

SEQ ID NO: 857416 - DNA, 75 bp, synthetic construct
  source 1..75: mol_type = other DNA
tgcaaatccggcttcaggtgtcggaatggcttttgaaaagcccaaaaaacaaaacatgccgacactgcggccaga

SEQ ID NO: 857417 - DNA, 75 bp, synthetic construct
  source 1..75: mol_type = other DNA
atgtcaaacaaaccctttcattatcaggctcctttcccactcaaaaaagatgataccgagtactacctgctgacc

SEQ ID NO: 857418 - DNA, 75 bp, synthetic construct
  source 1..75: mol_type = other DNA
ctgcaagcgcagggcggaagtatgatcatgctggcgaaaggcaatcgcagccagcaggtgacggatgcctgtaaa

SEQ ID NO: 857419 - DNA, 75 bp, synthetic construct
  source 1..75: mol_type = other DNA
tgaaagttcttgatgtaccaacaaagccagtatctattcctgttaagaatgaggctgcaaaaccagttttcactt

SEQ ID NO: 857420 - DNA, 75 bp, synthetic construct
  source 1..75: mol_type = other DNA
atacttcgctcatgacatccgcgtgattcgcctgccacgtcacggcgcatcctgcccggtaggcatgggagtctc

SEQ ID NO: 857421 - DNA, 75 bp, synthetic construct
  source 1..75: mol_type = other DNA
gatcgatctttatgccgttgatggcgacgagtacaaattcctctgtatcgccaaaggtggcggttcggcaaacaa

SEQ ID NO: 857422 - DNA, 75 bp, synthetic construct
  source 1..75: mol_type = other DNA
gtgtctataacacttatatcgaagataatctgcgctactcgcaaaacgcgccgctggatatgtataaagaggtga

SEQ ID NO: 857423 - DNA, 75 bp, synthetic construct
  source 1..75: mol_type = other DNA
cacttgatgacgcccgttaccaggcaaaatacgtttcagttatctggcaaaaactgatcccgagtcaggctgatt

SEQ ID NO: 857424 - DNA, 75 bp, synthetic construct
  source 1..75: mol_type = other DNA
attgatcgggacaccattaaatggtggcttaagcaatcacgcgaagcgcaatctgccattatgaccgatgaaatc

SEQ ID NO: 857425 - DNA, 75 bp, synthetic construct
  source 1..75: mol_type = other DNA
ttttcgcctgctggggcaaaccagcgtggaccgcttgctgcaactctctcagggccaggcggtgaagggcaatca

SEQ ID NO: 857426 - DNA, 75 bp, synthetic construct
  source 1..75: mol_type = other DNA
gaggagagcatgcttctgcctgtctccggtcaggaactgcccattcgttggcttgctcaacactgcagcgaaaaa

SEQ ID NO: 857427 - DNA, 75 bp, synthetic construct
  source 1..75: mol_type = other DNA
catctggaaaaaacgtcgcgaaggtgaacgcaaggaaaccggaaaatacacgtctgttgttgatctcgcccgcgc

SEQ ID NO: 857428 - DNA, 75 bp, synthetic construct
  source 1..75: mol_type = other DNA
cgcgcgttgctggttagccagaaacaatgaagttatcgacaaagatcgcgaagactggaagcgcatttccgcatc

SEQ ID NO: 857429 - DNA, 75 bp, synthetic construct
  source 1..75: mol_type = other DNA
aggggatcccctgcccgtggcgttacaccaatgatcgcgatgtaagaacgatggttgctctgggactggtgatgg

SEQ ID NO: 857430 - DNA, 75 bp, synthetic construct
  source 1..75: mol_type = other DNA
ggctttccgcctgatgtcattgaggcagcacttgcccatgtagacaagaatgaagttcgtcgcgcttataaccgc

SEQ ID NO: 857431 - DNA, 75 bp, synthetic construct
  source 1..75: mol_type = other DNA
catcgtgaacatatatttcctagcaggaataaccctcaagaaccgatgaatagccaaacagcaaatgcagcatta

SEQ ID NO: 857432 - DNA, 75 bp, synthetic construct
  source 1..75: mol_type = other DNA
ctggcctactctctgtggcctggtgacattgatgccggaaacattgacggcagcatccatcgctgggcaaaaaat

SEQ ID NO: 857433 - DNA, 75 bp, synthetic construct
  source 1..75: mol_type = other DNA
aaaacatgccaagcatacgcccggatcaacttccacagctaatgcagactatgcgtacggcaagtatcagcttgt

SEQ ID NO: 857434 - DNA, 75 bp, synthetic construct
  source 1..75: mol_type = other DNA
gaagctaaaaccaatactttccaactcgtagctgaacgatggtggaatgtgaagaaagccagcgtgacagaggac

SEQ ID NO: 857435 - DNA, 75 bp, synthetic construct
  source 1..75: mol_type = other DNA
gcattggcccctacccgtcagttacgcttgccgatgccagaaactaccgggcagagtcacgctctctcctggcga

SEQ ID NO: 857436 - DNA, 75 bp, synthetic construct
  source 1..75: mol_type = other DNA
gccccgatcatctcaataggtgcaatatttttcgatccgcaaaccggagatatgggaccggaatttagtaagact

SEQ ID NO: 857437 - DNA, 75 bp, synthetic construct
  source 1..75: mol_type = other DNA
ctcaggaggaaatggaaggcagtggcggcgatcactaccacaccacagataatgaaagtggcgagacagcaaatc

SEQ ID NO: 857438 - DNA, 75 bp, synthetic construct
  source 1..75: mol_type = other DNA
gagcgccataatgcacttgatgacgcccgttaccaggcaaaaatacgtttcagttatctggcaaaaactgatccc

SEQ ID NO: 857439 - DNA, 75 bp, synthetic construct
  source 1..75: mol_type = other DNA
acaggaaccggaaaaaatctgcaccgcctgcggtcagagcggtggcggcaactgccctgattgtggtgcggtgat

SEQ ID NO: 857440 - DNA, 75 bp, synthetic construct
  source 1..75: mol_type = other DNA
gaagcgtatctcggcatcaatgcgcaaacagcctgatgcccttcgctacgaccgccaaactatttttggccttgt

SEQ ID NO: 857441 - DNA, 75 bp, synthetic construct
  source 1..75: mol_type = other DNA
tccggcaaccggagagatggggccagaattcagcaaaactatcgatctggaaaccgcaggcggagtcatcgatcg

SEQ ID NO: 857442 - DNA, 75 bp, synthetic construct
  source 1..75: mol_type = other DNA
cctgaacaagtctgatcacaaaatttgccatagtcaggccaaagaggttttcggtgccgatatgctagacatggt

SEQ ID NO: 857443 - DNA, 75 bp, synthetic construct
  source 1..75: mol_type = other DNA
tctggtaatacgatgaaatacgcgatgacgattcagaatgtcatcgatctgtataaccatcgtaaagtaccgaag

SEQ ID NO: 857444 - DNA, 75 bp, synthetic construct
  source 1..75: mol_type = other DNA
ttgaggcagcgcagcaagctggggtagcgacagctatcgatttcgccatatttcagaatcatggttaccggggac

SEQ ID NO: 857445 - DNA, 75 bp, synthetic construct
  source 1..75: mol_type = other DNA
tggatgggcgtccggcggtgaaaaatctgcgggaaatcctctctgaatggctggtgttccgtcgtgataccgtac

SEQ ID NO: 857446 - DNA, 75 bp, synthetic construct
  source 1..75: mol_type = other DNA
ccattaccgattttgccgccgacgagctgcacgttggcgaaatccatttcctgccctaccacacgctgggcatca

SEQ ID NO: 857447 - DNA, 75 bp, synthetic construct
  source 1..75: mol_type = other DNA
ggtgaagtgaaaagcgttgaggagatcatgacgaccgttctgcgcgataaaccgttttacgatcgcagcggcggc

SEQ ID NO: 857448 - DNA, 75 bp, synthetic construct
  source 1..75: mol_type = other DNA
ttcattacagggagaatatatattctcttgataattatgagcgttacataactgacaattcgctatttgagaata

SEQ ID NO: 857449 - DNA, 75 bp, synthetic construct
  source 1..75: mol_type = other DNA
tgcaattcgagataaccaaagggacaagagaagctgttgctgcattgataaagcttggcaatttgcacagtaaag

SEQ ID NO: 857450 - DNA, 75 bp, synthetic construct
  source 1..75: mol_type = other DNA
cggggctgtgatttggtcaaactcaaagtatcagatgctgcatatggcagttctgtctcaagcagagcaacggtg

SEQ ID NO: 857451 - DNA, 75 bp, synthetic construct
  source 1..75: mol_type = other DNA
gaatgtcgtaagacgtatgttctcagatgtagatgcggatatttatctaatggttgatggagatgacacttatga

SEQ ID NO: 857452 - DNA, 75 bp, synthetic construct
  source 1..75: mol_type = other DNA
agtcataaactgattaatatcgttgtttttgtcgcaattgtagaatacgcctatttatttctccatttctattaa

SEQ ID NO: 857453 - DNA, 75 bp, synthetic construct
  source 1..75: mol_type = other DNA
gaaaacaataattaaactttactcgcttgaacggccactatacttttttagggaaggtgcgaacaagtccctgat

SEQ ID NO: 857454 - DNA, 75 bp, synthetic construct
  source 1..75: mol_type = other DNA
cgtatgttgatgttcccggtaagcgatctgccgcagctgtcgaagggcaaaggcaacaagattatcaacattcca

SEQ ID NO: 857455 - DNA, 75 bp, synthetic construct
  source 1..75: mol_type = other DNA
atcggttggcaattctcccgcagaacgcctcctgaattaaaaaacagactgcattgctggctggtcttttctccg

SEQ ID NO: 857456 - DNA, 75 bp, synthetic construct
  source 1..75: mol_type = other DNA
tcacgttaacttttctggctgaaataatattctcctttccgctcctggttgtgcgtatttctcttcaggaattac

SEQ ID NO: 857457 - DNA, 75 bp, synthetic construct
  source 1..75: mol_type = other DNA
tgacaccatcgacactgtattaaaaaccattctgccgtttatggcgttcgtctcggcgctcatcggcatcattat

SEQ ID NO: 857458 - DNA, 75 bp, synthetic construct
  source 1..75: mol_type = other DNA
gttggttggcaatttgcttccagaactcaatctgaattgaaaagcagactgcattgttggttggtatttgcacca

SEQ ID NO: 857459 - DNA, 75 bp, synthetic construct
  source 1..75: mol_type = other DNA
ggttacccctgaatttttttcaatttgggtctcagccgtggactgactttatcggtccgataagcgcccagcttg

SEQ ID NO: 857460 - DNA, 75 bp, synthetic construct
  source 1..75: mol_type = other DNA
cagatacggaagtggagtgagtggggaacgtgcctgagttttgttacgttgggtatgatggcgtgggctttgcgg

SEQ ID NO: 857461 - DNA, 75 bp, synthetic construct
  source 1..75: mol_type = other DNA
aaaatcgtctatatcaccgccggtacccggcctgcgattgttgacaaactggcacagcttactggctggcaagct

SEQ ID NO: 857462 - DNA, 75 bp, synthetic construct
  source 1..75: mol_type = other DNA
gtcggtccaataagcgcactgaaccgccccgggtttcctggagagtgttttatctgtgaactcaggctgccagat

SEQ ID NO: 857463 - DNA, 75 bp, synthetic construct
  source 1..75: mol_type = other DNA
aacttgggttattggctgaatatacgcttttgttctgcgccatatgttgcgttggttggcaatttgctcgcataa

SEQ ID NO: 857464 - DNA, 75 bp, synthetic construct
  source 1..75: mol_type = other DNA
attgattggcgtgcagattggtctcggcaatattccgccgcatctggctttacctgcgctgtttgccatcaacgc

SEQ ID NO: 857465 - DNA, 75 bp, synthetic construct
  source 1..75: mol_type = other DNA
ggcgctcatctgctccttcccactgctttcacctttcctcggcccaggcgcagttatcgcacaggttatcggcgt

SEQ ID NO: 857466 - DNA, 75 bp, synthetic construct
  source 1..75: mol_type = other DNA
acgataccagcaagaaaatcaccgaacaaagcgatggcttactggcgaaagtaggaatgggcatggggtctgcgg

SEQ ID NO: 857467 - DNA, 75 bp, synthetic construct
  source 1..75: mol_type = other DNA
aactaaccagcacatttcaacccggcaatacaaccgaatctttcatgggggggtagaaaagcttggtctcgaaga

SEQ ID NO: 857468 - DNA, 75 bp, synthetic construct
  source 1..75: mol_type = other DNA
accagaaccagcatgaatcggaacggaactaccaaaaagcggaacggaactaccaaaaagcggaacaaaacagtc

SEQ ID NO: 857469 - DNA, 75 bp, synthetic construct
  source 1..75: mol_type = other DNA
catccaccagcagagtgtggattcacctgtcggtcgaccttgaaacgatgggaacaaatcctgatgcgccaatca

SEQ ID NO: 857470 - DNA, 75 bp, synthetic construct
  source 1..75: mol_type = other DNA
ccattcctgacgaactggcaacaagggaagaaggcgctgtggctgtagccacagccattgaagctggcgacgaac

SEQ ID NO: 857471 - DNA, 75 bp, synthetic construct
  source 1..75: mol_type = other DNA
cgtggcgaagcatcctcccgtgttttaattctcattgatggtcaggaggtaacttatcagcgcgccggagataat

SEQ ID NO: 857472 - DNA, 75 bp, synthetic construct
  source 1..75: mol_type = other DNA
ttagtcttcctgctggagcgggaaatgttgttgagtggtctgtgataactgactacggttcaagttcaggaaaac

SEQ ID NO: 857473 - DNA, 75 bp, synthetic construct
  source 1..75: mol_type = other DNA
gcaacaaaacgagccagaaacgaaacaacctgagccagtagcgcaacaggaaccggaaaaagtctgcaccgcctg

SEQ ID NO: 857474 - DNA, 75 bp, synthetic construct
  source 1..75: mol_type = other DNA
cattcgatgaagagaatcaggttgaagttcaggaaaatgatccgaaggaaatggaaggcgctgaacatccacaca

SEQ ID NO: 857475 - DNA, 75 bp, synthetic construct
  source 1..75: mol_type = other DNA
ggaaatggaaagtgccggactcccgaacaaggagtgcaccgaaggcgatcaacatgccaatgacaataatgaaac

SEQ ID NO: 857476 - DNA, 75 bp, synthetic construct
  source 1..75: mol_type = other DNA
tgcttccctggaaacccatcattgagcgggtcggggcggagtatacccgggtgaggacgcgccttgttgcccttg

SEQ ID NO: 857477 - DNA, 75 bp, synthetic construct
  source 1..75: mol_type = other DNA
gagttcagcaaaacgattgatgcaaaaacaggtggcggcactgtcgacataagctcaatcgaatggtggctggtg

SEQ ID NO: 857478 - DNA, 75 bp, synthetic construct
  source 1..75: mol_type = other DNA
aggggctactgaaatcacgaaagaagaatattttgcccgtaaaaacggtacatactcaggttcacaacaaaatac

SEQ ID NO: 857479 - DNA, 75 bp, synthetic construct
  source 1..75: mol_type = other DNA
cggtaccatccatcgctgggctaaaaatgaggttatcgacaaggatcgcgaagactggaagcgtatctcagcatc

SEQ ID NO: 857480 - DNA, 75 bp, synthetic construct
  source 1..75: mol_type = other DNA
ttaactgtctgggcgatgcacgcgcggtgtgtgtaggcactgctccttattatatcaagggtatgcgctttattg

SEQ ID NO: 857481 - DNA, 75 bp, synthetic construct
  source 1..75: mol_type = other DNA
agtgatcacaggtttaatatcatggtctctgccaaactggaaaagccctgacagtgttcgtacttttgccgacaa

SEQ ID NO: 857482 - DNA, 75 bp, synthetic construct
  source 1..75: mol_type = other DNA
cgagagctgcattgaagcattccatgaagctgaaaccagcctgaatcataccgctttccgtcgtaatcaatggga

SEQ ID NO: 857483 - DNA, 75 bp, synthetic construct
  source 1..75: mol_type = other DNA
tgctttcaggcgtgttactcggtttaccgttcgggcgtcaggtcagttcaatgtatgacgatttacacgccggac

SEQ ID NO: 857484 - DNA, 75 bp, synthetic construct
  source 1..75: mol_type = other DNA
tgcaatttgagataactaaagggactagagaagccgttactgcattgataaagcttagtaatttgcatagtaaag

SEQ ID NO: 857485 - DNA, 75 bp, synthetic construct
  source 1..75: mol_type = other DNA
cttagtttatgggttcctcaggaagaggccgcagtaatcagcgccgggataagaagtggttcaattgtggatgca

SEQ ID NO: 857486 - DNA, 75 bp, synthetic construct
  source 1..75: mol_type = other DNA
aaaatgacaacgctcaactcactgaacgttcttcaggactttgcatcaccatggttaagcacacgccttgacagc

SEQ ID NO: 857487 - DNA, 75 bp, synthetic construct
  source 1..75: mol_type = other DNA
acgcaaaaggcttcccggctgacgatcctgaggcaaaacgcgaatacgaaaaagcggcgaaagacttctgcattg

SEQ ID NO: 857488 - DNA, 75 bp, synthetic construct
  source 1..75: mol_type = other DNA
tgattttgatattactccggtccaagtacctgacaaggtggaagagatgaacccgaaagatattaactttaacgt

SEQ ID NO: 857489 - DNA, 75 bp, synthetic construct
  source 1..75: mol_type = other DNA
tccagaagcaaaacgcgaatacgaaaaagcggcaaaagatttctgtatcgacaatttgtctgcgttcgataaata

SEQ ID NO: 857490 - DNA, 75 bp, synthetic construct
  source 1..75: mol_type = other DNA
tcggcaattttacatgccgacaatgccgccggacaggtcgcggcaaaaatgggtatggaacatgccatcaaaacc

SEQ ID NO: 857491 - DNA, 75 bp, synthetic construct
  source 1..75: mol_type = other DNA
tatccgttccgaatcatcggggtaactgttaagccaaagaaagcaggtggtggctggaaaatcgaagagttctga

SEQ ID NO: 857492 - DNA, 75 bp, synthetic construct
  source 1..75: mol_type = other DNA
atggatcaatcttgccctggcgaaatacacgcaaaaggtttcccggctgacgatcctgaagcaaaacgtgaatac

SEQ ID NO: 857493 - DNA, 75 bp, synthetic construct
  source 1..75: mol_type = other DNA
ggaaaaaatcctgatgccccgattatctcaataggtgcaatatttttcgatccgcaaaccggagagatggggcca

SEQ ID NO: 857494 - DNA, 75 bp, synthetic construct
  source 1..75: mol_type = other DNA
ggcgcaacaggaagtggaaaaagcctgcaccgcctgcggtcagaccggcggcggcaactgccctgattgtggcgc

SEQ ID NO: 857495 - DNA, 75 bp, synthetic construct
  source 1..75: mol_type = other DNA
ggcctacgctctctggcctggtgatgtggatgccggaaacattgacggcagcatccatcgctgggcaaaaaatga

SEQ ID NO: 857496 - DNA, 75 bp, synthetic construct
  source 1..75: mol_type = other DNA
aaaactatcgttctggaaactgctggcggagtcattgatcgggacaccattaagtggtggctgaaacagtcacgc

SEQ ID NO: 857497 - DNA, 75 bp, synthetic construct
  source 1..75: mol_type = other DNA
cgtggctttactacaacgatcgcgatgtacgcacaatcgttgaactgggtaatgccattggctttgatgtcagaa

SEQ ID NO: 857498 - DNA, 75 bp, synthetic construct
  source 1..75: mol_type = other DNA
ggacaccattaagtggtggctgaaacagtcacgcgaagcgcaatccgccattcttaccgatgaaatcccgttaga

SEQ ID NO: 857499 - DNA, 75 bp, synthetic construct
  source 1..75: mol_type = other DNA
gaaaatggaaggcgctgaacatccacacaaagagaatgctggcagcgctcaggatcacgccagcgatagtgaaac

SEQ ID NO: 857500 - DNA, 75 bp, synthetic construct
  source 1..75: mol_type = other DNA
acgaccagaaagcggaacaaaacagcccaaatacgcaacaaaacgagccagaaacgaaacaacctgaaccagtag

SEQ ID NO: 857501 - DNA, 75 bp, synthetic construct
  source 1..75: mol_type = other DNA
agacggcagatcactcaattaaggtgaccggtcatcacgaaatcacatccaccagcaggacgtgtgaccatctaa

SEQ ID NO: 857502 - DNA, 75 bp, synthetic construct
  source 1..75: mol_type = other DNA
cagcaaggaaactctcgctgctgcacgacatacaccggaaaaggatatcctggaagaagttaaccgcgaactggc

SEQ ID NO: 857503 - DNA, 75 bp, synthetic construct
  source 1..75: mol_type = other DNA
atcacgcgaagcgcaatctgccattatgaccgatgaaatcccgttagatgatgcactgttacaattgcgggaatt

SEQ ID NO: 857504 - DNA, 75 bp, synthetic construct
  source 1..75: mol_type = other DNA
tttttggccttgtccgtgagcgtccgatcgacattcacaaagatcccatagcactgaacaaatatatctgcgaat

SEQ ID NO: 857505 - DNA, 75 bp, synthetic construct
  source 1..75: mol_type = other DNA
tccggtgaattttttgttcaggtctggggaaatggagccaacttcgacaacgtgattttacgccgttcatacgaa

SEQ ID NO: 857506 - DNA, 75 bp, synthetic construct
  source 1..75: mol_type = other DNA
catggcaacattcgacgggcatatcgttgaggcattgatgaaaatgcctgaagttaatgtcatgtattcagagct

SEQ ID NO: 857507 - DNA, 75 bp, synthetic construct
  source 1..75: mol_type = other DNA
gccttttgacccgaataacgactactccattccgtatatctggggtgcgacggcgattggtgttaacggtgatgc

SEQ ID NO: 857508 - DNA, 75 bp, synthetic construct
  source 1..75: mol_type = other DNA
tcgcgatgtacgcacaatcgttgagctgggaaaaacaatcgactttgatgctagaaccgttattccattcgaagg

SEQ ID NO: 857509 - DNA, 75 bp, synthetic construct
  source 1..75: mol_type = other DNA
tcccctgcccgtggcgttactacaacgatcgcgatgtgcgcacaattgttgaactgggaaattccattggctttg

SEQ ID NO: 857510 - DNA, 75 bp, synthetic construct
  source 1..75: mol_type = other DNA
ggttgctctgggactggtgatggatttcgacgcaagaacgactattccattcgaaggtgaacgccataacgctct

SEQ ID NO: 857511 - DNA, 75 bp, synthetic construct
  source 1..75: mol_type = other DNA
agaaacgaaacagcctgaaccagtggcgcaacaggaagtggaaaaagtctgcaccgcctgcggtcagaccggcgg

SEQ ID NO: 857512 - DNA, 75 bp, synthetic construct
  source 1..75: mol_type = other DNA
aatgctctggatgacgctcttcaccaggcaaaatacgtaacagccactatacaaaaactgatcccgaatcaggct

SEQ ID NO: 857513 - DNA, 75 bp, synthetic construct
  source 1..75: mol_type = other DNA
ccggttgagactgaatccgatccgatgaacgtcacttttgacaagctggcccctgaagtacagaacgctgtcatg

SEQ ID NO: 857514 - DNA, 75 bp, synthetic construct
  source 1..75: mol_type = other DNA
gtggcactgaacaaatacattactgaatacctgactacaaagggcgtgtttgaagatgaaggaagaaatcagagc

SEQ ID NO: 857515 - DNA, 75 bp, synthetic construct
  source 1..75: mol_type = other DNA
acagaacgaccagaaagcggaacaaaacagcccggatgcgcaacaaaacgggccagaagtgcaacagtcagagcc

SEQ ID NO: 857516 - DNA, 75 bp, synthetic construct
  source 1..75: mol_type = other DNA
atacaagcagacatggaaaacactggatgatgaactggcctacgctctctggcctggtgatgtggatgccggaaa

SEQ ID NO: 857517 - DNA, 75 bp, synthetic construct
  source 1..75: mol_type = other DNA
tctgtaagcggctcgtcagaaccgtattgatatttactgagagctcagatcaactttccagggcaacagatcgcg

SEQ ID NO: 857518 - DNA, 75 bp, synthetic construct
  source 1..75: mol_type = other DNA
agcgacccgaatgatccgaaatgggtaaaggggattgagacccgcgattctgtaaaccagaaccagcaagaatcg

SEQ ID NO: 857519 - DNA, 75 bp, synthetic construct
  source 1..75: mol_type = other DNA
acttatgagtatgaaggattcggtgtaggtgcaacctatgctaaatctgatcgcactaataatcaggttatctac

SEQ ID NO: 857520 - DNA, 75 bp, synthetic construct
  source 1..75: mol_type = other DNA
acaacgacttctttggtctggttgatggcctgaactttgcagctcagtatcagggcaaaaatgaccgaaatgaag

SEQ ID NO: 857521 - DNA, 75 bp, synthetic construct
  source 1..75: mol_type = other DNA
aacgcaacaggaacctgaaaaagtctgcaccgcctgcggtcagagcggtggcggcaactgccctgattgtggcgc

SEQ ID NO: 857522 - DNA, 75 bp, synthetic construct
  source 1..75: mol_type = other DNA
tgtggttaaggctctggcagagtgcggcgcacagatcagtatggtctcaggagccagtatcggggctctcaatgg

SEQ ID NO: 857523 - DNA, 75 bp, synthetic construct
  source 1..75: mol_type = other DNA
tgcaccgcctgcggtcagaccggcggcggcaactgccctgattgtggcgcagtgatgggcgacgcaacataccag

SEQ ID NO: 857524 - DNA, 75 bp, synthetic construct
  source 1..75: mol_type = other DNA
tttttggccttgtccgtgaacgtccgatcgacattcacaaagatcccgtagcactgaacaaatatatctgcgaat

SEQ ID NO: 857525 - DNA, 75 bp, synthetic construct
  source 1..75: mol_type = other DNA
tgtccggtggcggggcggtgggcgcttatcaggcgggagtggttaaggcactggcagagtgtggtacacagatca

SEQ ID NO: 857526 - DNA, 75 bp, synthetic construct
  source 1..75: mol_type = other DNA
aaagaattgatcgacgccggtaaagagctgccgcagtacatcaaagatcatccgatctactacgcaggtccggca

SEQ ID NO: 857527 - DNA, 75 bp, synthetic construct
  source 1..75: mol_type = other DNA
aaccgcccgatgaaagagatcctcgcccagctttcgcaatacccggtatccactcgtttgtcgctcaccggcacc

SEQ ID NO: 857528 - DNA, 75 bp, synthetic construct
  source 1..75: mol_type = other DNA
gctgggatgagggatcgtcttcctttgtcccggtcgaaccagagccgaatacagaaattgttaactttaatcagt

SEQ ID NO: 857529 - DNA, 75 bp, synthetic construct
  source 1..75: mol_type = other DNA
caacccgattttcaggccgctggcaaagatggagttcagtttgtatcaattgaagatatctttatgcagtcgcat

SEQ ID NO: 857530 - DNA, 75 bp, synthetic construct
  source 1..75: mol_type = other DNA
cgacgcttcttcaccatatatcgacaatcaacaggtttgacaatctgatggctcagccgttgttgtcagatgagc

SEQ ID NO: 857531 - DNA, 75 bp, synthetic construct
  source 1..75: mol_type = other DNA
agattcagggaacaatgtacggtgatggtggtatgggaggatggcgaaacaggcaggggaatactcccgtgacgc

SEQ ID NO: 857532 - DNA, 75 bp, synthetic construct
  source 1..75: mol_type = other DNA
ttcaggtttggggaaatggagccaacttcgacaacacgattttgcgccgttcatacgaacggcaggggatcccct

SEQ ID NO: 857533 - DNA, 75 bp, synthetic construct
  source 1..75: mol_type = other DNA
aagaaaaaaataatgaggaaaaatcacaaccgtctgacgcaatggcagatgaacaggcaacgactgaagcaatgg

SEQ ID NO: 857534 - DNA, 75 bp, synthetic construct
  source 1..75: mol_type = other DNA
tttcgcccgcaaaaacggtacatactcaggttcacaacaaaatactggtgcatctgacacgaccgcacaaccagg

SEQ ID NO: 857535 - DNA, 75 bp, synthetic construct
  source 1..75: mol_type = other DNA
aacagtcacgcgaagcacaatccgccattctgaccgatgaaatcccgttggatgatgcactgctgcaattccggg

SEQ ID NO: 857536 - DNA, 75 bp, synthetic construct
  source 1..75: mol_type = other DNA
aaccagagccggtaaaagttaccgctgacgaagtaaacaaaattatgcaggcagccaatatcagccagcctgacg

SEQ ID NO: 857537 - DNA, 75 bp, synthetic construct
  source 1..75: mol_type = other DNA
gcgctgcgtaaactgggttattccggtaacactaccgatccgaaagagattgaagccgcatataacgagctgaaa

SEQ ID NO: 857538 - DNA, 75 bp, synthetic construct
  source 1..75: mol_type = other DNA
gcgagacagcaaatcccttaattaaggttaactgtcatcataaagtcacatccaccagcaggttgtggcaccatc

SEQ ID NO: 857539 - DNA, 75 bp, synthetic construct
  source 1..75: mol_type = other DNA
gcttccggcgctaatgctggcggcgggaacctcactgatcgcggcgaaggtttcgttcacgatctgacgtcactg

SEQ ID NO: 857540 - DNA, 75 bp, synthetic construct
  source 1..75: mol_type = other DNA
cagaatcagccagaaacggaacataacgaccagaaagcggaacagaacgacccaaatacgcaacaaaacgagcca

SEQ ID NO: 857541 - DNA, 75 bp, synthetic construct
  source 1..75: mol_type = other DNA
cgtgaggggccgttctacttcctcttcaccgacaaggatggcgaaaaatacggtcgcgcaaacaaactttctggt

SEQ ID NO: 857542 - DNA, 75 bp, synthetic construct
  source 1..75: mol_type = other DNA
ggccagaatcgggacaaaatagccaggacgcacaccaaaatgaaccaaaaacgatacatccggagccagcagcgc

SEQ ID NO: 857543 - DNA, 75 bp, synthetic construct
  source 1..75: mol_type = other DNA
cggccgccaccgttgagtcataccagcaaaccgggatacacgttgcccagtcgataattgattacttcgcaggaa

SEQ ID NO: 857544 - DNA, 75 bp, synthetic construct
  source 1..75: mol_type = other DNA
gtcattgatcgggacaccattaaatggtggcttaagcaatcacgcgaagcgcaatctgccattatgaccgatgaa

SEQ ID NO: 857545 - DNA, 75 bp, synthetic construct
  source 1..75: mol_type = other DNA
aatggcccgaaattcaggcagagatgcgcatctggaaaaaacgtcgcgaaggtgaacgcaaggaaacaaatacac

SEQ ID NO: 857546 - DNA, 75 bp, synthetic construct
  source 1..75: mol_type = other DNA
ccattccggacgaacaggcaataaaggaagaaggtgcagtcgctgtagctactgccattgaagccggtgatgaac

SEQ ID NO: 857547 - DNA, 75 bp, synthetic construct
  source 1..75: mol_type = other DNA
gcaattcctggaacattatccggctgctcaggactgcgcttataaatttcttgtctgcgaggataaacctggtat

SEQ ID NO: 857548 - DNA, 75 bp, synthetic construct
  source 1..75: mol_type = other DNA
gcactgacccggtcagaggcggtattgcagaaaagccaggagataactgaaggtgcagattcggcactgagaaac

SEQ ID NO: 857549 - DNA, 75 bp, synthetic construct
  source 1..75: mol_type = other DNA
caccacgatccttgagatccgtccccggaaaaggctgaaacatgcaggtgatggtggcaacagcggcggtctgct

SEQ ID NO: 857550 - DNA, 75 bp, synthetic construct
  source 1..75: mol_type = other DNA
gcagaacgaaaagaaaccgggaaacatacttctgttgttgagctggcccgcgccagagtcaaccaacagcacact

SEQ ID NO: 857551 - DNA, 75 bp, synthetic construct
  source 1..75: mol_type = other DNA
atcccttaattaaggtgaacggtcatcacgaaagcacatccaccagcaggttgtggcaccatctgatgattgacc

SEQ ID NO: 857552 - DNA, 75 bp, synthetic construct
  source 1..75: mol_type = other DNA
aggcgaacggtcatcataatctcacatccaccagcagagcggggattcatctgatgatcgaccttgaaaccatgg

SEQ ID NO: 857553 - DNA, 75 bp, synthetic construct
  source 1..75: mol_type = other DNA
tgcctatctgtgtgcagcgagggtttccgatgtgttatcgctgaaatgggagcagattggaaacgacggaatctt

SEQ ID NO: 857554 - DNA, 75 bp, synthetic construct
  source 1..75: mol_type = other DNA
tcgaaggtgagcgccataatgcacttgatgacgcccgttatcaggcaaaatacgtttcagctatctggcaaaaac

SEQ ID NO: 857555 - DNA, 75 bp, synthetic construct
  source 1..75: mol_type = other DNA
agcacactaaaaactcagcagcaaaaatcaactctgtcactgctgccattcgtcgcgaatacaggcagacatgga

SEQ ID NO: 857556 - DNA, 75 bp, synthetic construct
  source 1..75: mol_type = other DNA
caggtcagattctgcctgttcgatggctggcacagcacggcagcgaaaaaccgatcacacacgtttcgcggggcg

SEQ ID NO: 857557 - DNA, 75 bp, synthetic construct
  source 1..75: mol_type = other DNA
tacgcacaatcgttgagctggggaaagccatagacttcgatgccagaacggctattccattcgaaggtgagcgcc

SEQ ID NO: 857558 - DNA, 75 bp, synthetic construct
  source 1..75: mol_type = other DNA
ttgttgcaggaagacatggcaacattcgacggacatatcgttgaagcgttgatgaaaatgccagaagttaacgcc

SEQ ID NO: 857559 - DNA, 75 bp, synthetic construct
  source 1..75: mol_type = other DNA
taaaccagaaccagcaagaatcggaacagaacgaccagaaagcggaacaaaacagcccaaatacgcaacaaaacg

SEQ ID NO: 857560 - DNA, 75 bp, synthetic construct
  source 1..75: mol_type = other DNA
atgtccggttttcaacaaaccatgcaaatgctgaatgagggcatcgttcccactgcgatgctggttgccaacgat

SEQ ID NO: 857561 - DNA, 75 bp, synthetic construct
  source 1..75: mol_type = other DNA
tttcatcaaaccatgcagatgctgaatgagtgcatcattcctaccgcgatgctggttgccaacgatcagatggcg

SEQ ID NO: 857562 - DNA, 75 bp, synthetic construct
  source 1..75: mol_type = other DNA
gatagatccggttaatcaggtaaaagttaccgctgacgaagtaaacaaaattatgcaggcagccaatatcagcca

SEQ ID NO: 857563 - DNA, 75 bp, synthetic construct
  source 1..75: mol_type = other DNA
taacagagactgatcacgagaaccccagcaaggaaactctcacagctgcccggcatacgccggaaaaagatatcc

SEQ ID NO: 857564 - DNA, 75 bp, synthetic construct
  source 1..75: mol_type = other DNA
cggtcatcacgaaatcacatccaccagcaggacgtgtgaccatctaatgatcgaccttgaaaccatgggaaaaaa

SEQ ID NO: 857565 - DNA, 75 bp, synthetic construct
  source 1..75: mol_type = other DNA
gggcgacgcaacataccaggaaacattcgatgaagagtatcaggttgaagttcaggaagatgatccggagaaaat

SEQ ID NO: 857566 - DNA, 75 bp, synthetic construct
  source 1..75: mol_type = other DNA
aggagaacactggcggcaatcagcatcatgccagcgatagtgaaactggcgaggcgtcagatcccttaattaagg

SEQ ID NO: 857567 - DNA, 75 bp, synthetic construct
  source 1..75: mol_type = other DNA
aaacggtacatactcaggttcacaacaaaatactggtgcatctgacacgaccgcacaaccagggtcagtaaaagt

SEQ ID NO: 857568 - DNA, 75 bp, synthetic construct
  source 1..75: mol_type = other DNA
gcaaaaaaagaagttatcgacaacgaccgcgaagactggaagcgtatctcggcatcaatgcgcaaacaacctgat

SEQ ID NO: 857569 - DNA, 75 bp, synthetic construct
  source 1..75: mol_type = other DNA
actgatgcatctgacacgaccgcacaaccagacctggtaaaagttaccgctgacgaagtaaacaaaattatgcag

SEQ ID NO: 857570 - DNA, 75 bp, synthetic construct
  source 1..75: mol_type = other DNA
gctcaggactgcgcttataaatttcttgtctgcgaggataaacccggcatgccccgccctgctatcgactcctgg

SEQ ID NO: 857571 - DNA, 75 bp, synthetic construct
  source 1..75: mol_type = other DNA
gcactggatgacgcccgtcaccaggcaaaatacgttacagctacgatacaaaaactgatcccgagtcaggctgat

SEQ ID NO: 857572 - DNA, 75 bp, synthetic construct
  source 1..75: mol_type = other DNA
atggggtaatggtgcaactttcgataacgcaattttgcgcacctcatacgaacgtctggacatcccctgcccgtg

SEQ ID NO: 857573 - DNA, 75 bp, synthetic construct
  source 1..75: mol_type = other DNA
actcagatgaaaaattcgttcaggtatggggtaatggtgcaactttcgataacgcaattttgcgcacctcatacg

SEQ ID NO: 857574 - DNA, 75 bp, synthetic construct
  source 1..75: mol_type = other DNA
ataccgaatatatgcaggaaaaccgctgggatgaggaatgcgcttcctttgttccggtcgaaccagaatccgatc

SEQ ID NO: 857575 - DNA, 75 bp, synthetic construct
  source 1..75: mol_type = other DNA
ttgcgggaatttatcgacgaaaactccggtgaattttttgttcaggtctggggaaatggagccaacttcgacaac

SEQ ID NO: 857576 - DNA, 75 bp, synthetic construct
  source 1..75: mol_type = other DNA
atctcacatccaccagcagagcggggattcatctgatgatcgatcttgaaaccatgggaaaaaatcccgatgccc

SEQ ID NO: 857577 - DNA, 75 bp, synthetic construct
  source 1..75: mol_type = other DNA
gacgcaacctgccaggaaacattcgatgaagaaaatcaggctgaagctcaggaggaaatggaaggcagtggcggc

SEQ ID NO: 857578 - DNA, 75 bp, synthetic construct
  source 1..75: mol_type = other DNA
acccgcgattctgtgaaccagaaccagcaagaaacggaacagaacgaccagaaagcggaacaaaacagcccaaat

SEQ ID NO: 857579 - DNA, 75 bp, synthetic construct
  source 1..75: mol_type = other DNA
tggcgccactgaaatcacaaaagaagaatattttgcccgaaaaaaatggcacatacacgggcttaccgcaaaatg

SEQ ID NO: 857580 - DNA, 75 bp, synthetic construct
  source 1..75: mol_type = other DNA
cacagctgaaacgctcatggctgcccggcatacaccggaaaaagatatcctggaagaaattaacggcggactggc

SEQ ID NO: 857581 - DNA, 75 bp, synthetic construct
  source 1..75: mol_type = other DNA
cggggctactgaaatcacgaaagaagaatatttcgcccgcaaaaacagtacatactcaggttcacaacaaaatac

SEQ ID NO: 857582 - DNA, 75 bp, synthetic construct
  source 1..75: mol_type = other DNA
cattcaacgaagaaagccaggatgaagcccggaaaaaaaatccggaggaaatggaaaatgccgtgctcccgaata

SEQ ID NO: 857583 - DNA, 75 bp, synthetic construct
  source 1..75: mol_type = other DNA
aaaccccaacgctcagtatttttcttaccgatgaggtacacgcccgcccggcaatggtgggattcttctttactg

SEQ ID NO: 857584 - DNA, 75 bp, synthetic construct
  source 1..75: mol_type = other DNA
gtttgtcatttgtacattgatgtggggctcgaacagcctgtacatcatcaacatgccgctatttattatcaacga

SEQ ID NO: 857585 - DNA, 75 bp, synthetic construct
  source 1..75: mol_type = other DNA
aatggccagaaattcaggcagagatgcgcatctggaaaaaacgtcgcgaaggtgaacgcaaggaaaccggaaaat

SEQ ID NO: 857586 - DNA, 75 bp, synthetic construct
  source 1..75: mol_type = other DNA
gaaaactctgctgaaaaaaccggggatgtcactgttgccgttcgccgagaatacaaacagacatggaaaacactc

SEQ ID NO: 857587 - DNA, 75 bp, synthetic construct
  source 1..75: mol_type = other DNA
gttgctctgggactggtgatggatttcgacgcaagaacgactattccattcgaaggtgaacgccataacgctctg

SEQ ID NO: 857588 - DNA, 75 bp, synthetic construct
  source 1..75: mol_type = other DNA
agcggaacaaaacagcccaaatgcgttacaaaacgagccagaaacgaaacaacctgagccagtagcgcaacagga

SEQ ID NO: 857589 - DNA, 75 bp, synthetic construct
  source 1..75: mol_type = other DNA
ggaagaaggtgccgtcgctgtagctactgccattgaagccggtgatgaacgtcgcgcccgcgcaaaatttcactg

SEQ ID NO: 857590 - DNA, 75 bp, synthetic construct
  source 1..75: mol_type = other DNA
acatcatcaacatgccgctatttattatcaacgaactgcatcttcccgagaaactggccggtgtgatgatgggga

SEQ ID NO: 857591 - DNA, 75 bp, synthetic construct
  source 1..75: mol_type = other DNA
ggtgatgtggatgccggaaacattgacggcagcatccatcgctgggcaaaaaatgaagttatcgacaacgaccgc

SEQ ID NO: 857592 - DNA, 75 bp, synthetic construct
  source 1..75: mol_type = other DNA
tttcgacgcaagaacgactattccattcgaaggtgaacgccataacgctctgaacgatgcacgttaccaggcgaa

SEQ ID NO: 857593 - DNA, 75 bp, synthetic construct
  source 1..75: mol_type = other DNA
gcagcagcgtaacgtggttgccagcactcttcgtacgactgcaatcagcgaagcagcgtatgccgtcacacgatt

SEQ ID NO: 857594 - DNA, 75 bp, synthetic construct
  source 1..75: mol_type = other DNA
tgagacagcgcaaccacccacgcgggaaaatctcaccatcatacgcgaatcgctgaacgcggcaattgaacagga

SEQ ID NO: 857595 - DNA, 75 bp, synthetic construct
  source 1..75: mol_type = other DNA
gtacgacggcacacgccagaacctccgcctatgaagcaccatcggttaaacgctcatggtatcagtgccagaatc

SEQ ID NO: 857596 - DNA, 75 bp, synthetic construct
  source 1..75: mol_type = other DNA
atggccgcgctgccggttgatgaagtcaggggcatcggtcggcgtatttcgaaaaaactggaggcgatggggatc

SEQ ID NO: 857597 - DNA, 75 bp, synthetic construct
  source 1..75: mol_type = other DNA
ttttaacgtggtactcgagcgaacggtccgggagttgcgcggagagccttgtcttgagctggaggagtttgcgcc

SEQ ID NO: 857598 - DNA, 75 bp, synthetic construct
  source 1..75: mol_type = other DNA
tgtaccacagcatgagccaacgggttatggctgttctggagtcgctttctcccgcagttgagccctactcaattg

SEQ ID NO: 857599 - DNA, 75 bp, synthetic construct
  source 1..75: mol_type = other DNA
gtgagccagtcgttacaacgcttacgtgcgcaatttaatgaccctttattcattcgctcaggaaaaggtatcgcg

SEQ ID NO: 857600 - DNA, 75 bp, synthetic construct
  source 1..75: mol_type = other DNA
agcacgcctggcagaagagaaacgcatcgctgacgaagcggcagcacgcgctgctgatgtagagcaccgtcgtgc

SEQ ID NO: 857601 - DNA, 75 bp, synthetic construct
  source 1..75: mol_type = other DNA
gtgagccggtggttgccgatctggcgaaaatgccgcacttgttggttgcggggactaccggttccggtaaatctg

SEQ ID NO: 857602 - DNA, 75 bp, synthetic construct
  source 1..75: mol_type = other DNA
tgcatgccattgcatacaattcgcaatactctaatatgtagtaataagcatccgcgaattactgacaatagcact

SEQ ID NO: 857603 - DNA, 75 bp, synthetic construct
  source 1..75: mol_type = other DNA
attgcatacgattcgtaataccctaatttgtagtaataaacatccccggattacagataccagtacttacgaaca

SEQ ID NO: 857604 - DNA, 75 bp, synthetic construct
  source 1..75: mol_type = other DNA
tcagtcgttacaacgcttacgtgcgcaatttaatgaccctttattcattcgctcaggaaaaggtatcgcgccgac

SEQ ID NO: 857605 - DNA, 75 bp, synthetic construct
  source 1..75: mol_type = other DNA
gcgatctggctgtggtgaatactcctgccggggaagcgagctggtatgttaatgctatcgagtacgtgaaaccgt

SEQ ID NO: 857606 - DNA, 75 bp, synthetic construct
  source 1..75: mol_type = other DNA
tttcaacggggtctcatcttctgacagctaacagcgatcgcctttcctttgactgggaaggtgatgcgattgaat

SEQ ID NO: 857607 - DNA, 75 bp, synthetic construct
  source 1..75: mol_type = other DNA
gacgacagacactttcagtaaggcgaatgcgcagtcaactgacgcgggtaaatatgcctgcgtggtgaccgattc

SEQ ID NO: 857608 - DNA, 75 bp, synthetic construct
  source 1..75: mol_type = other DNA
gaatcaggcccagaacgccctgcgtgatgcctatgacaatgacacggtgtatgcgtttaaggtgctgtttccgtc

SEQ ID NO: 857609 - DNA, 75 bp, synthetic construct
  source 1..75: mol_type = other DNA
tatgtggctggccagtggcggtgactggtttttcgatttaaataagacggaacaaaaagaggcaatagatctgtt

SEQ ID NO: 857610 - DNA, 75 bp, synthetic construct
  source 1..75: mol_type = other DNA
gtgggccggatagtcttaacgtgctacgcctgttaaaccagccctggtttacatcggttaaaggcaaccacgagg

SEQ ID NO: 857611 - DNA, 75 bp, synthetic construct
  source 1..75: mol_type = other DNA
ggcgctgcgcaacgtctggggctgaaacgcacgaccctgctgtcacggatgaagcggctgggaattgataaatcg

SEQ ID NO: 857612 - DNA, 75 bp, synthetic construct
  source 1..75: mol_type = other DNA
tgctgtggttaaagagtggcgggccccgttctgcgcgcgtgtggaacgggtgcttagcgagccgcatcatccctc

SEQ ID NO: 857613 - DNA, 75 bp, synthetic construct
  source 1..75: mol_type = other DNA
gaagaagggcaggtggaaaaattaatgcagtggttaaagagtggcggcccgcgttctgcgcgtgtggaacggggg

SEQ ID NO: 857614 - DNA, 75 bp, synthetic construct
  source 1..75: mol_type = other DNA
cgcgcattgctgaaaaaagaagtcggcgatctggcggtggtgaatacccctgccgggaagcgagctggtatgtta

SEQ ID NO: 857615 - DNA, 75 bp, synthetic construct
  source 1..75: mol_type = other DNA
atgtctgctttgtatgaacgctcacagctgacgcaggtgatgatttcatctgccccggcgactgctgaaactatg

SEQ ID NO: 857616 - DNA, 75 bp, synthetic construct
  source 1..75: mol_type = other DNA
tgttcctggtttatgcttattcaggatttgaagaaagcatttatctatatagggcatacaaaaatgagtgctttt

SEQ ID NO: 857617 - DNA, 75 bp, synthetic construct
  source 1..75: mol_type = other DNA
ctgatgaaagttgtggacggtattaatcattcaggactcggaaaagtgtggtttgcgggccgggggattgcatct

SEQ ID NO: 857618 - DNA, 75 bp, synthetic construct
  source 1..75: mol_type = other DNA
caaacgtggcaggcatcgcgagcagctattgaaattgagttgcctgtatggtttgtcagtgatgctattgctgtg

SEQ ID NO: 857619 - DNA, 75 bp, synthetic construct
  source 1..75: mol_type = other DNA
cgcatttcacaattcgattggcatcataggttgcaactgaccccgcaaaataattcggcttccacccgtgcggat

SEQ ID NO: 857620 - DNA, 75 bp, synthetic construct
  source 1..75: mol_type = other DNA
gcaacaatgcatggactgccagttgcgacacgaccgaagatcaaaatggttcaattacagtttacgccatttgcc

SEQ ID NO: 857621 - DNA, 75 bp, synthetic construct
  source 1..75: mol_type = other DNA
cctgggcggttcaatgctgatgcaggggctgattagcgccgagcagctggcacaggcgctggcagagcaaaacgg

SEQ ID NO: 857622 - DNA, 75 bp, synthetic construct
  source 1..75: mol_type = other DNA
agcttcgatgaatactggaagaaagactccaccgccgagctgtaccacttcatcggtaaagatatcgtttacttc

SEQ ID NO: 857623 - DNA, 75 bp, synthetic construct
  source 1..75: mol_type = other DNA
ggcctgcagcagtgggacatttcccgcgacgcgccttacttcggttttgaaattccgaacgcgccgggcaaatat

SEQ ID NO: 857624 - DNA, 75 bp, synthetic construct
  source 1..75: mol_type = other DNA
attttgcaggctttaatatcagctatgacaactatcactcaacgcacagcgaagagaaccgccagttgtcggagc

SEQ ID NO: 857625 - DNA, 75 bp, synthetic construct
  source 1..75: mol_type = other DNA
gaccgtagtgcgtaatgcctcctacagcggtgacggcggccttgatggccaggtcatcatcgacggcgagtactg

SEQ ID NO: 857626 - DNA, 75 bp, synthetic construct
  source 1..75: mol_type = other DNA
tcagacggcgctgaactgtgcgctggagctggaacgtcagggcgtgctggaagagttcggcgtcaccatgattgg

SEQ ID NO: 857627 - DNA, 75 bp, synthetic construct
  source 1..75: mol_type = other DNA
attcgagctggatgcgacccacggcacagcgattgtgctgggcgaagcaggtattaacccgcgtttggtgaacaa

SEQ ID NO: 857628 - DNA, 75 bp, synthetic construct
  source 1..75: mol_type = other DNA
cgatgaatccctgctgaaaaccacgtaccgttataacgccgccggagaactgacggaggtcattctgccggggga

SEQ ID NO: 857629 - DNA, 75 bp, synthetic construct
  source 1..75: mol_type = other DNA
gaccgtggtgcgtaatgcctcctacagcgctgacggcggccttgatggccaggtcatcatcgacggggaatactg

SEQ ID NO: 857630 - DNA, 75 bp, synthetic construct
  source 1..75: mol_type = other DNA
aggacttcgaccggcttctcctggagtcgggccgccgggggctgtttatccacacgggccgtaccgggaaaaaaa

SEQ ID NO: 857631 - DNA, 75 bp, synthetic construct
  source 1..75: mol_type = other DNA
gccgacgatgcccacggcacgccgatcatgcttaaagctcagcagcttggtatcaccccggagcagatgattggc

SEQ ID NO: 857632 - DNA, 75 bp, synthetic construct
  source 1..75: mol_type = other DNA
cgatgcctggcatttcctttctattttcagcggcagcgcatggttaatgactctgctgtggctaaactttggctt

SEQ ID NO: 857633 - DNA, 75 bp, synthetic construct
  source 1..75: mol_type = other DNA
atctggtcgagcgtaaagatctgattcagatcccagtgtatccgttcgaacgcgaatggacgcacttcaccagca

SEQ ID NO: 857634 - DNA, 75 bp, synthetic construct
  source 1..75: mol_type = other DNA
aagagataaacacagaaggtctatccaaagccatcacatcatctcttttcaatgatgacgcgaactcgttcgcaa

SEQ ID NO: 857635 - DNA, 75 bp, synthetic construct
  source 1..75: mol_type = other DNA
ccagctgctaacggtggttcatccaacgttggcagaaattaagaaagaaggggagtctggtcggcgtaagatcag

SEQ ID NO: 857636 - DNA, 75 bp, synthetic construct
  source 1..75: mol_type = other DNA
gaaagtgaatatggcggggggaatcccggcaatcttcgcttcccgtattattctgttcccggcgaccatcgcgtc

SEQ ID NO: 857637 - DNA, 75 bp, synthetic construct
  source 1..75: mol_type = other DNA
cgacgcggtcacgatccgcgggcaatgttgtacaatgcagttcagcatcagtggctcacggaacagcaggccggt

SEQ ID NO: 857638 - DNA, 75 bp, synthetic construct
  source 1..75: mol_type = other DNA
gcgaagtctgcggcgcgacctacagcccgactgaactgatcgagccgaaatcggtggtttctggcgctaccccgg

SEQ ID NO: 857639 - DNA, 75 bp, synthetic construct
  source 1..75: mol_type = other DNA
gtttctggcgctacgccggtaatgcgtgattccgaacacttcttctttgatctgccttctttcagcgaaatgttg

SEQ ID NO: 857640 - DNA, 75 bp, synthetic construct
  source 1..75: mol_type = other DNA
gaaatgagtcaggagcatcagactgatttcgcaggctttaatatcagctatgacaactatcactcaacgcacagc

SEQ ID NO: 857641 - DNA, 75 bp, synthetic construct
  source 1..75: mol_type = other DNA
tacagggcttaattttagcaaggagaatataactaaaggagtgatttcaacaaggtggcataatgacctatattc

SEQ ID NO: 857642 - DNA, 75 bp, synthetic construct
  source 1..75: mol_type = other DNA
caaaatgcaggagtggtttgaatctggtctgcaacagtgggatatctcccgcgacgcaccttacttcggttttga

SEQ ID NO: 857643 - DNA, 75 bp, synthetic construct
  source 1..75: mol_type = other DNA
aatccgttcaaggcgctgtataaccgcatcgatatgaagcaggttgaagcactggtggaagcatctaaagaagaa

SEQ ID NO: 857644 - DNA, 75 bp, synthetic construct
  source 1..75: mol_type = other DNA
gtgtgccgggcgctggcaaaaattcagggctacaaaaccattaacgcgctggtgtttagcgaaaacgcccaacgc

SEQ ID NO: 857645 - DNA, 75 bp, synthetic construct
  source 1..75: mol_type = other DNA
cgtcttaagccatttaatcttccctgtattgtggtggatgacggcagcgatgccgccacgcaacagcaactggat

SEQ ID NO: 857646 - DNA, 75 bp, synthetic construct
  source 1..75: mol_type = other DNA
tttaaacagataatgcaggagatggctcctcaggcaggcattaacctgatgccggtaacagatatcggcccagaa

SEQ ID NO: 857647 - DNA, 75 bp, synthetic construct
  source 1..75: mol_type = other DNA
gacttgattgatggcacgaatatactgccgttccaggctcgttatattgctctcgggcagtccgtagctggtact

SEQ ID NO: 857648 - DNA, 75 bp, synthetic construct
  source 1..75: mol_type = other DNA
cttataatgaaaaagatgaagcaaaaaaactcggcgcccgctgggatgccagtagaaaaacctggtatatccccg

SEQ ID NO: 857649 - DNA, 75 bp, synthetic construct
  source 1..75: mol_type = other DNA
gtttaatttttcgatttctggcaactgccggaaattcaggacaaggagtaaagggtgcttaacgatccccgattt

SEQ ID NO: 857650 - DNA, 75 bp, synthetic construct
  source 1..75: mol_type = other DNA
gatctccggccagccaatttacgatgactccatcccccgctcacggctgtacgggcgctgggtcacccacgtctg

SEQ ID NO: 857651 - DNA, 75 bp, synthetic construct
  source 1..75: mol_type = other DNA
gaactgaaggcggcgcaggactacgatattttcctgcgcatggtggtggcctacggcgagccgtggaagattgaa

SEQ ID NO: 857652 - DNA, 75 bp, synthetic construct
  source 1..75: mol_type = other DNA
gagcctgatgaagtaataagaatgttcagaatgtatgtcgtttatgttattgcgtttattatcctctttttattg

SEQ ID NO: 857653 - DNA, 75 bp, synthetic construct
  source 1..75: mol_type = other DNA
gcgccagcacggcaagctgcatattcactgcgaaacctttgccgacccgctgctgttgccgcgtggcgaacgcca

SEQ ID NO: 857654 - DNA, 75 bp, synthetic construct
  source 1..75: mol_type = other DNA
gccggtaacagatatcggcccggaaaccgccatcctgctcaaagagaagctggataacggcgaatgggtggcgat

SEQ ID NO: 857655 - DNA, 75 bp, synthetic construct
  source 1..75: mol_type = other DNA
gcccagtgaatctgattttcgccctacgccagcacggcaagctgcatattcactgcgaaacctttgccgatccgc

SEQ ID NO: 857656 - DNA, 75 bp, synthetic construct
  source 1..75: mol_type = other DNA
acaaaatacagcaaactctgctaattctattgcacaaaatgctcaatcgacagctaaccaggcaatcaaagatgc

SEQ ID NO: 857657 - DNA, 75 bp, synthetic construct
  source 1..75: mol_type = other DNA
caaatggacctccagcctgacactgaactacttcctctggcgtgaccgcaaaggagcaataagcaactttgtcag

SEQ ID NO: 857658 - DNA, 75 bp, synthetic construct
  source 1..75: mol_type = other DNA
gctgcacggcaaagacgttacggtgcgtgaagctctcgccggacaggtacccagcgcaggcgtcgggacctgttt

SEQ ID NO: 857659 - DNA, 75 bp, synthetic construct
  source 1..75: mol_type = other DNA
tcggcaatatggccgaactggcggcaaccacgctcgattacgaaaattatcatatctttgttggtacttatccca

SEQ ID NO: 857660 - DNA, 75 bp, synthetic construct
  source 1..75: mol_type = other DNA
gcaaaggtttatgttgaaggcgcatggaatcgggttacgaataaaaaaggtaatacttcactttatgatcacaat

SEQ ID NO: 857661 - DNA, 75 bp, synthetic construct
  source 1..75: mol_type = other DNA
ttacagcacgcgcggacgtcaaacatgatctgcgtgcgcgaatatttccccgataccttttccaccgcagtgcgg

SEQ ID NO: 857662 - DNA, 75 bp, synthetic construct
  source 1..75: mol_type = other DNA
cacaggcgctggcagagcaaaacggcgtggcatgggaatcgatcgatgcctggcagatcccttcctctctgattg

SEQ ID NO: 857663 - DNA, 75 bp, synthetic construct
  source 1..75: mol_type = other DNA
atgtttggagagtcacccaagagagatatgttggcgatgtcgtctgctgcggtaagcgcagccgagggtgatgaa

SEQ ID NO: 857664 - DNA, 75 bp, synthetic construct
  source 1..75: mol_type = other DNA
atcaattcgtcgaacagctacaccgacagcaaaatcagtgatgcgaagacggaactgaacgccaatattgataag

SEQ ID NO: 857665 - DNA, 75 bp, synthetic construct
  source 1..75: mol_type = other DNA
aaaagattgagcgtgctgaaaaacgtcttaatgccggtattgcaggtgtcgccgcaatatcttcaattccatatg

SEQ ID NO: 857666 - DNA, 75 bp, synthetic construct
  source 1..75: mol_type = other DNA
cccacatcaggtgcggcgacggcgcagacgctgatgtcatcctgttctgcactggatgactgcatcagtgacagc

SEQ ID NO: 857667 - DNA, 75 bp, synthetic construct
  source 1..75: mol_type = other DNA
cgcctttatggtaacgccagcgacctggtcaccatgatcaaaacgctttccggtgtcagcctcggcagcgatctg

SEQ ID NO: 857668 - DNA, 75 bp, synthetic construct
  source 1..75: mol_type = other DNA
gaccttcattactttcgtcgtcttcaggctggcgtgacagacttcaggacgcgtcatttcgcggcgtgccgttta

SEQ ID NO: 857669 - DNA, 75 bp, synthetic construct
  source 1..75: mol_type = other DNA
tatttcggcgttgctctgccggcaaagttcaccgacttcggtggccatcttatcgacggtctgattaacggtatc

SEQ ID NO: 857670 - DNA, 75 bp, synthetic construct
  source 1..75: mol_type = other DNA
gaatgccaaaagccccgaggcactgtcaggttttaaatctgccatgaaaatagaaaatgataccgccagagacga

SEQ ID NO: 857671 - DNA, 75 bp, synthetic construct
  source 1..75: mol_type = other DNA
gggttcaatcgaaagttataaggctgctggaatctctccgattgaaggcatgatgagcgtcatagagcgctacct

SEQ ID NO: 857672 - DNA, 75 bp, synthetic construct
  source 1..75: mol_type = other DNA
ccagcgtaaccggaatgggtgacagcatcagtgactggttcagcgaaaagctgggcatccattcgccgagtcgcg

SEQ ID NO: 857673 - DNA, 75 bp, synthetic construct
  source 1..75: mol_type = other DNA
gccatcggtactgccattcgtcgggcatccctgcaggtcaatcagctccaggaatctctgttgagcggcgttggt

SEQ ID NO: 857674 - DNA, 75 bp, synthetic construct
  source 1..75: mol_type = other DNA
ggtggtgtactgtcaggtgggctggttcgcggcattatgatcgccgggcgggccgttctctggattggccgggcg

SEQ ID NO: 857675 - DNA, 75 bp, synthetic construct
  source 1..75: mol_type = other DNA
gcagccagcctgggcaaaatactagccggaggcttactcagaggattaacgctcgccggtaaagccatactctgg

SEQ ID NO: 857676 - DNA, 75 bp, synthetic construct
  source 1..75: mol_type = other DNA
ggcaaagaaatagcggagagcgaattactctggcctgttgatcgtgtgcagaaatcacttaatggcgagttacaa

SEQ ID NO: 857677 - DNA, 75 bp, synthetic construct
  source 1..75: mol_type = other DNA
ttgaaaccactcattatcgccatatctgggtggtaggtgacattcatggagattatcaattattgcaatcccgcc

SEQ ID NO: 857678 - DNA, 75 bp, synthetic construct
  source 1..75: mol_type = other DNA
taaaatatgtcatcgcacatgcggattatccgggtgatgaatatcagtttggtaaagaaatagcagaaagcgaat

SEQ ID NO: 857679 - DNA, 75 bp, synthetic construct
  source 1..75: mol_type = other DNA
gaagcgcagtcccgtattcaggacgccgactatgcgaccgaagtgtccaacatgtcgaaagcgcagattatccag

SEQ ID NO: 857680 - DNA, 75 bp, synthetic construct
  source 1..75: mol_type = other DNA
cgcaatcgctaaagtcgacaaattccgctcctccctcggtgccgttcaaaaccgtctggattctgcggtcaccaa

SEQ ID NO: 857681 - DNA, 75 bp, synthetic construct
  source 1..75: mol_type = other DNA
tatccagacatttgccaatcaggtttatattgataccggctcgccggaaagcagacggttatcgttttataaaat

SEQ ID NO: 857682 - DNA, 75 bp, synthetic construct
  source 1..75: mol_type = other DNA
gatgctcggtaaagcggccacggccaccaaagcagatatgactgacctcgcaaaaatgacctatgcctttagcga

SEQ ID NO: 857683 - DNA, 75 bp, synthetic construct
  source 1..75: mol_type = other DNA
gtcacgtttttttcgttttaataccgcgtggcagtggggagaacgtgaagaacaggcggtaaaacaattaggcaa

SEQ ID NO: 857684 - DNA, 75 bp, synthetic construct
  source 1..75: mol_type = other DNA
ctctggctggagctcccggagccgttagatgccggcgaattaagcctggcggcactgacgcatcatatcagtatt

SEQ ID NO: 857685 - DNA, 75 bp, synthetic construct
  source 1..75: mol_type = other DNA
ttttaataccgcgtggcagtggggagagcgtgaagaacaggcggtaaaacaattaggcaaacttattcaagaacg

SEQ ID NO: 857686 - DNA, 75 bp, synthetic construct
  source 1..75: mol_type = other DNA
tggggttcagaacagcacaaataaaaggcgattatgtatattcctataatagtcgtataaaaattaaattagggg

SEQ ID NO: 857687 - DNA, 75 bp, synthetic construct
  source 1..75: mol_type = other DNA
agctcatcagtgcgctccttgcgattaagatagcgactgttggtctcaaactggggctgaatctccttatttccc

SEQ ID NO: 857688 - DNA, 75 bp, synthetic construct
  source 1..75: mol_type = other DNA
gcgccgggtaaaatgttttctaccggtgaaaactggtcacgttttttcgttttaataccgcgtggcagtggggag

SEQ ID NO: 857689 - DNA, 75 bp, synthetic construct
  source 1..75: mol_type = other DNA
gatggtgccggatgtaccgaaagtaccccccgtattagagcgctatatgcgcggcgaccttaccttacccagagg

SEQ ID NO: 857690 - DNA, 75 bp, synthetic construct
  source 1..75: mol_type = other DNA
cgggcggactgttcaggggcgtgatggttgtggcaaaggctttcctctggtttggcagggcgttgttaatgaacc

SEQ ID NO: 857691 - DNA, 75 bp, synthetic construct
  source 1..75: mol_type = other DNA
ggctttcagatattggcaactacatgccgaatatcgcccgtgcagccacggcaacccgtaccgcaggaacggaat

SEQ ID NO: 857692 - DNA, 75 bp, synthetic construct
  source 1..75: mol_type = other DNA
ttgggtgatagtagagaatccttgtttctacggcgcgttgcaggcgctggagcgattacggctgaaggcgttatc

SEQ ID NO: 857693 - DNA, 75 bp, synthetic construct
  source 1..75: mol_type = other DNA
cgttgcaggagtatccggtgaaagcgtgctggctgatgactaatagccagaacccactcggatttaccttaacgc

SEQ ID NO: 857694 - DNA, 75 bp, synthetic construct
  source 1..75: mol_type = other DNA
aacaattacgcgaacaaattgtgtcagatatctggcagcccggcgatcgtctgccttcgctacgtgagcaagtgg

SEQ ID NO: 857695 - DNA, 75 bp, synthetic construct
  source 1..75: mol_type = other DNA
acaaaagcaccgtagtattgagcctcagagttcctgaatctgaagccgctatgtatgatgcgatgtgtaaagatg

SEQ ID NO: 857696 - DNA, 75 bp, synthetic construct
  source 1..75: mol_type = other DNA
gcgttattgcacaggaagtaatggaggcgataccagaagctgtgggatcgtttactcattacggtgaagagttgc

SEQ ID NO: 857697 - DNA, 75 bp, synthetic construct
  source 1..75: mol_type = other DNA
taaataattcagggaacagtaagttctttaattttaaccttgatggtaccttcagttcttatcagggattggttg

SEQ ID NO: 857698 - DNA, 75 bp, synthetic construct
  source 1..75: mol_type = other DNA
tttctggagcaaattcaggtctggggcgctcggctgcatcgtattagcgctgtcgagcacgatcagaatatggcg

SEQ ID NO: 857699 - DNA, 75 bp, synthetic construct
  source 1..75: mol_type = other DNA
agaaagaagtcttgaacttttccgggcatataactatactccccgcatagctgaattgttggctatacggttttt

SEQ ID NO: 857700 - DNA, 75 bp, synthetic construct
  source 1..75: mol_type = other DNA
atggcgaaatcaaaacgggaagtgaagcccaccgccttttccatcagtttttcgcagaacttcagcgttccggca

SEQ ID NO: 857701 - DNA, 75 bp, synthetic construct
  source 1..75: mol_type = other DNA
actgtcaggcctggcttgatgacctcacccggctgcaggtcactcatgggctctgccagcctgaaattaaaaagt

SEQ ID NO: 857702 - DNA, 75 bp, synthetic construct
  source 1..75: mol_type = other DNA
ttacaggagttgatttggaaaaagttggttgtatatgtcaatgattttaatttaagcaatcgagaaaaaaacata

SEQ ID NO: 857703 - DNA, 75 bp, synthetic construct
  source 1..75: mol_type = other DNA
ggcgtctggttgaactggcaacagatgtcaccgtcagacatgtactgatgcgctacatcaaccgcctttccgatt

SEQ ID NO: 857704 - DNA, 75 bp, synthetic construct
  source 1..75: mol_type = other DNA
agctggtgcggcactattcagtggatttgtccgagtccgtatcggcctcatcatgggcgcaaaaactggtttctg

SEQ ID NO: 857705 - DNA, 75 bp, synthetic construct
  source 1..75: mol_type = other DNA
ggcagtgaaaaaggcgctggacaggttgattaaagaagctacccgacaagacgtcgcgataacggtgctggaaac

SEQ ID NO: 857706 - DNA, 75 bp, synthetic construct
  source 1..75: mol_type = other DNA
aaaaactggtttctgggcattgggcgttttaccgctgatgagaaggaacaatcggatgcaatccgttatgagacg

SEQ ID NO: 857707 - DNA, 75 bp, synthetic construct
  source 1..75: mol_type = other DNA
cgtcagaacgtaatctggcgttgatcaagcgttactataagcgttttggcgaggcaattgagctgctggagaagg

SEQ ID NO: 857708 - DNA, 75 bp, synthetic construct
  source 1..75: mol_type = other DNA
cgcctggttactgacgaaggtgaaaaaagcgtgccgctggcggaagttcagccaggcatgctactgcgcctgacg

SEQ ID NO: 857709 - DNA, 75 bp, synthetic construct
  source 1..75: mol_type = other DNA
atgttaattacccatatagctcataaacatctcaatcgtgccgtatacgaaaaaggcggtgatggtggtgcctct

SEQ ID NO: 857710 - DNA, 75 bp, synthetic construct
  source 1..75: mol_type = other DNA
gatttctttgccagcgaacgcattgaccaggtctatctggcggcggcgaaagtgggcggcattgttgccaacaac

SEQ ID NO: 857711 - DNA, 75 bp, synthetic construct
  source 1..75: mol_type = other DNA
ctggcggtaatggttctcgcgggcggccatttttatcgtagcgcgtggaaaagcttgctgaacggcacggcgacg

SEQ ID NO: 857712 - DNA, 75 bp, synthetic construct
  source 1..75: mol_type = other DNA
tccgctggcaggctatcgttgctctggcagtgggtatcccggtgatggtctggggaatgatcggcgataacatga

SEQ ID NO: 857713 - DNA, 75 bp, synthetic construct
  source 1..75: mol_type = other DNA
atgtcacaaactatcgacctgaccctagacggcctgtcctgcggtcactgcgttaaacgcgtgaaagaaagtctt

SEQ ID NO: 857714 - DNA, 75 bp, synthetic construct
  source 1..75: mol_type = other DNA
tggcgccgcgggggtatcctctgcggccgctggcggtcagcgaacgctgggaagcgccagttctgcgaaagatgt

SEQ ID NO: 857715 - DNA, 75 bp, synthetic construct
  source 1..75: mol_type = other DNA
ttaatgcagcaggtggctgaaactaaccgacagttcgaagtcgagcaaaaacgtaatgaccggctgctgcaggca

SEQ ID NO: 857716 - DNA, 75 bp, synthetic construct
  source 1..75: mol_type = other DNA
gcgataagcaggcgtttattgacagtttccgcaaggtggagcactggttcggcgattacgcacagcgttttcaga

SEQ ID NO: 857717 - DNA, 75 bp, synthetic construct
  source 1..75: mol_type = other DNA
acacaccggacgagatcgcaaagctatgtgattgcggcagggctacagtgtttcgcgtgaagaaagaaatgcttg

SEQ ID NO: 857718 - DNA, 75 bp, synthetic construct
  source 1..75: mol_type = other DNA
ggattactgttcaatttctcgcaaactcgatgagcttcgacaactccccacaatcacgcctgatcctaaccatga

SEQ ID NO: 857719 - DNA, 75 bp, synthetic construct
  source 1..75: mol_type = other DNA
gcaccgaaaaaagcctggaccgccgtggcgatgaaaacggcaacacacaaacttgctgacgccgtacaacccgga

SEQ ID NO: 857720 - DNA, 75 bp, synthetic construct
  source 1..75: mol_type = other DNA
agaaacgggccgctactctgacacgctgcgttcggcgctgatttctctggatggcgataacgcatgggcattaag

SEQ ID NO: 857721 - DNA, 75 bp, synthetic construct
  source 1..75: mol_type = other DNA
gcagacctgtacagcggtaaaacaaaatcatggggtggtggtttctatgccagtggtctgttccggtccggcgct

SEQ ID NO: 857722 - DNA, 75 bp, synthetic construct
  source 1..75: mol_type = other DNA
tctgcagacatcagtgggtctttcagcaaggagaatggtcgcctgactttgcaggggcatccggttatccatgca

SEQ ID NO: 857723 - DNA, 75 bp, synthetic construct
  source 1..75: mol_type = other DNA
ggggataatgccggcctgtatgcaggtccgttcagtatgttatcgggtgatatcatcgttcagggaaagggaacc

SEQ ID NO: 857724 - DNA, 75 bp, synthetic construct
  source 1..75: mol_type = other DNA
ggctccgattaaaagccgtaagatctgcattattgccgggatgttctgttctgccgcctttacgctggtagtacc

SEQ ID NO: 857725 - DNA, 75 bp, synthetic construct
  source 1..75: mol_type = other DNA
gagcggctttttcttctatcggaggacccatcccttaccgaagagattatgcggcttaaaaagcggattgagtgt

SEQ ID NO: 857726 - DNA, 75 bp, synthetic construct
  source 1..75: mol_type = other DNA
aaggtggtagagccaccagcagacgctccctaccctaagtcccatctggacgctgctggcctggtcaggggtgac

SEQ ID NO: 857727 - DNA, 75 bp, synthetic construct
  source 1..75: mol_type = other DNA
ataaaccgaatgccaccgtaatggtcgatgttgatcgtcagggctttgttgatttactggcagagcggctgaaat

SEQ ID NO: 857728 - DNA, 75 bp, synthetic construct
  source 1..75: mol_type = other DNA
ataaaccgaatgctaccgtaatggtcgacgttgatcgtcagggctttgttgatttactggcagatcgtctgaaat

SEQ ID NO: 857729 - DNA, 75 bp, synthetic construct
  source 1..75: mol_type = other DNA
accggagccggcgtttgcaccgcaaaattgcacggcggtagaactaatggcaaaaacactgcgcgaaagtgctga

SEQ ID NO: 857730 - DNA, 75 bp, synthetic construct
  source 1..75: mol_type = other DNA
tcttattcctcagagttttctctcacagatctattcagaggataatgacgctcccgtcttttttaatgcctcatc

SEQ ID NO: 857731 - DNA, 75 bp, synthetic construct
  source 1..75: mol_type = other DNA
gctcggatttttatccgatgagtactggttattcgaatgcgttcagtaattttctggatgcaattggaaattatc

SEQ ID NO: 857732 - DNA, 75 bp, synthetic construct
  source 1..75: mol_type = other DNA
gctgggttggcgtggaaacacaggggaaatatactcagggtactgatgaatcccctaatgattttggtaaaaatc

SEQ ID NO: 857733 - DNA, 75 bp, synthetic construct
  source 1..75: mol_type = other DNA
atccctttcctgtttggagcggccgggatgctggtcaacggttacgtaaccgactggctggtcaaagtaggaatg

SEQ ID NO: 857734 - DNA, 75 bp, synthetic construct
  source 1..75: mol_type = other DNA
tgtcattgccagatattgctttaccagaacctgaaacgccgcctgccgcaacggttgtcgcccaggagggcgaag

SEQ ID NO: 857735 - DNA, 75 bp, synthetic construct
  source 1..75: mol_type = other DNA
ctgaaatcgcagcggcgaatgttccatcaccagattgaacggggcaacccgcgacgaacgttcacagggatggca

SEQ ID NO: 857736 - DNA, 75 bp, synthetic construct
  source 1..75: mol_type = other DNA
gaaacgccagggcttggcgataaaatcgaactgcgcctttctgactggatcacccattttgcgggtaaaaaaatc

SEQ ID NO: 857737 - DNA, 75 bp, synthetic construct
  source 1..75: mol_type = other DNA
tgcttctggttgcgattggcaaagagttcatcaatcactactacacgcaaatcagcgagaacatggcatcccagg

SEQ ID NO: 857738 - DNA, 75 bp, synthetic construct
  source 1..75: mol_type = other DNA
ttcagcgacccgatggcagcctgcgcactgctccagtcacagcagaattccgacgaggcgctcagcatcaagcgc

SEQ ID NO: 857739 - DNA, 75 bp, synthetic construct
  source 1..75: mol_type = other DNA
gtgaacgtgccgcgttaactggcttctcactgatacgcctgccggaccaggaaaaatggagcggcgacggtgccg

SEQ ID NO: 857740 - DNA, 75 bp, synthetic construct
  source 1..75: mol_type = other DNA
aataacgttcgcgaaaaacttcaggatgcagcttcccaatgccgtcgggtaaaggggcaggaactactgacactt

SEQ ID NO: 857741 - DNA, 75 bp, synthetic construct
  source 1..75: mol_type = other DNA
gcaaacagcctataacctggatttaaaaagcacagggttgatggcggctatccctttcctgtttggggctgccgg

SEQ ID NO: 857742 - DNA, 75 bp, synthetic construct
  source 1..75: mol_type = other DNA
gggaatgatgctcggattcagtggcatcaactacactgcgtggctgtatctggcctggcttcctggttacctgca

SEQ ID NO: 857743 - DNA, 75 bp, synthetic construct
  source 1..75: mol_type = other DNA
atgctgaaaactatccgaaaacacggtattacgctggcactgtttgccgccggttcaacaggtttaacggcggcc

SEQ ID NO: 857744 - DNA, 75 bp, synthetic construct
  source 1..75: mol_type = other DNA
tgcgccagagttaggtaaaggtgagcatcgggtttacatcgccaaacaggatgacaaaccggtagccgccgttct

SEQ ID NO: 857745 - DNA, 75 bp, synthetic construct
  source 1..75: mol_type = other DNA
gaagagaatggagcgtgaacgcgcttacagcgctcgcctccgtgagaaaattgagaaggtatggaacgagtgttt

SEQ ID NO: 857746 - DNA, 75 bp, synthetic construct
  source 1..75: mol_type = other DNA
cgtttgctgaacagtttggctttgggaaaagggaaaccgcagatgcgctgaagcgtcttcgtgatgctgggttta

SEQ ID NO: 857747 - DNA, 75 bp, synthetic construct
  source 1..75: mol_type = other DNA
aagcgccttcgtgatgccgggtttatttccctggatttacgcacggtggaaatgctcgatggtgtgaaatgcagc

SEQ ID NO: 857748 - DNA, 75 bp, synthetic construct
  source 1..75: mol_type = other DNA
cagtcagacgcgaggacccgtacttcaaagccagttacgacaacgtggactacagccagatcccggcaggattca

SEQ ID NO: 857749 - DNA, 75 bp, synthetic construct
  source 1..75: mol_type = other DNA
ggatgtgatgcgccagcaggtgcagaaactggccttcgaattgcaggtgcgcggtctgatgaacgtgcagtttgc

SEQ ID NO: 857750 - DNA, 75 bp, synthetic construct
  source 1..75: mol_type = other DNA
cttattgggaattgtccctaccgagctgtacgatttacatcgcaattttctgaaactaaaagaaataaagttgaa

SEQ ID NO: 857751 - DNA, 75 bp, synthetic construct
  source 1..75: mol_type = other DNA
tatttccggcaatgtcacccccgcgaactggtggaaacatattcggctacccagtggtcgtccggatgcgactgc

SEQ ID NO: 857752 - DNA, 75 bp, synthetic construct
  source 1..75: mol_type = other DNA
ggagatggcggtactaactggagtgttgttgatactgattttgtacagaacatgatcaacgaagacacggatgca

SEQ ID NO: 857753 - DNA, 75 bp, synthetic construct
  source 1..75: mol_type = other DNA
cagtttcaggctggcgcaacaaacattcctatttttaataataaaggggaattagtaggacatcttgataaagcg

SEQ ID NO: 857754 - DNA, 75 bp, synthetic construct
  source 1..75: mol_type = other DNA
ggaggtgggcgacagcgacagatagatatcctgtctggtcttggtgccatgtctgacgaattcggtaaatccagt

SEQ ID NO: 857755 - DNA, 75 bp, synthetic construct
  source 1..75: mol_type = other DNA
tactggtaccgcccgacagaggtcagggatgagcacaccggagcgttgctgggatatcgcaagcgtgttcagggc

SEQ ID NO: 857756 - DNA, 75 bp, synthetic construct
  source 1..75: mol_type = other DNA
gtggggccgtacagtatgttgtcaggtaatatcaatgttcaggataaagggactgtcaccctcggaggggaaggg

SEQ ID NO: 857757 - DNA, 75 bp, synthetic construct
  source 1..75: mol_type = other DNA
agacaaccagcaggttaatccggacaatatatcctggggctaccggggtggggccctagatgtcaacgggaatga

SEQ ID NO: 857758 - DNA, 75 bp, synthetic construct
  source 1..75: mol_type = other DNA
cagtgcgctgcaatataaagtgcattatgacaccaccctgaacggtggtttcgctaccgcgatggcgctgaatgc

SEQ ID NO: 857759 - DNA, 75 bp, synthetic construct
  source 1..75: mol_type = other DNA
acgcctcactggcgctgcgcgaagacggttatgaaaccattatggttaactgtaacccggaaaccgtctccaccg

SEQ ID NO: 857760 - DNA, 75 bp, synthetic construct
  source 1..75: mol_type = other DNA
ggcgtcttcaacctgaccaacattgaccgctggttcctggtacagattgaagaactggtgcgtctggaagagaaa

SEQ ID NO: 857761 - DNA, 75 bp, synthetic construct
  source 1..75: mol_type = other DNA
aatatacctacatcatcaacaccacgtcaggtcgtcgcgcgattgaagactcccgcgtgattcgtcgcagcgcgc

SEQ ID NO: 857762 - DNA, 75 bp, synthetic construct
  source 1..75: mol_type = other DNA
aaatggctgatgcaacctacatcgagccgattcactgggaagttgtacgcaagattattgaaaaagagcgcccgg

SEQ ID NO: 857763 - DNA, 75 bp, synthetic construct
  source 1..75: mol_type = other DNA
gtaaagccctgcgtgaagagggttaccgcgtcattctggtgaactccaacccggcgaccatcatgaccgacccgg

SEQ ID NO: 857764 - DNA, 75 bp, synthetic construct
  source 1..75: mol_type = other DNA
cagaaatgcgctctaccggggaagtcatgggcgtgggccgcaccttcgctgaagcgtttgccaaagcgcagctgg

SEQ ID NO: 857765 - DNA, 75 bp, synthetic construct
  source 1..75: mol_type = other DNA
actacgacacttccgatcgcctctacttcgagccggtaactctggaagacgtgctggaaattgtgcgtattgaga

SEQ ID NO: 857766 - DNA, 75 bp, synthetic construct
  source 1..75: mol_type = other DNA
ggcgcagagcgtatctggtatatcgctgatgccttccgcgcgggcctgtctgtagacggcgtgtttaatttgacc

SEQ ID NO: 857767 - DNA, 75 bp, synthetic construct
  source 1..75: mol_type = other DNA
ttcctcgcttcaacttcgaaaaattcgctggtgctaacgaccgtctgaccactcagatgaaatcggttggcgaag

SEQ ID NO: 857768 - DNA, 75 bp, synthetic construct
  source 1..75: mol_type = other DNA
ctgcgacggtgaaatggtgctgattggcggcattatggagcacatcgagcaggcgggcgtgcactccggtgactc

SEQ ID NO: 857769 - DNA, 75 bp, synthetic construct
  source 1..75: mol_type = other DNA
ctggaaattgtgcgcatcgagaaaccgaaaggcgttatcgtccagtacggcggtcagaccccgctgaaactggcg

SEQ ID NO: 857770 - DNA, 75 bp, synthetic construct
  source 1..75: mol_type = other DNA
cgaccagtatgacctgcacccggtttataagcgcgtggatacctgtgcggcagagttcgccaccgacaccgctta

SEQ ID NO: 857771 - DNA, 75 bp, synthetic construct
  source 1..75: mol_type = other DNA
ccagtgggcgtccggatgcgacggctatcgctctgctttcagagatcgtttactggtaccgcccgacagaggtca

SEQ ID NO: 857772 - DNA, 75 bp, synthetic construct
  source 1..75: mol_type = other DNA
tttcgatcgtgaccttctcgacatgcgtatcgtcactgaagaagtggtcgttaaaaaccataacgctgttggcaa

SEQ ID NO: 857773 - DNA, 75 bp, synthetic construct
  source 1..75: mol_type = other DNA
gaagccggacccaactttttttccatttttttccgcgatgggaaaaattacctaatgttagccctggtaatggtc

SEQ ID NO: 857774 - DNA, 75 bp, synthetic construct
  source 1..75: mol_type = other DNA
ttgattgccggattaattgtcagtcttgtgcccgtggttatctgtttcttgttcggtgcttatgtattgcgaatg

SEQ ID NO: 857775 - DNA, 75 bp, synthetic construct
  source 1..75: mol_type = other DNA
ttagcctcgggtatgcgttaacctatttaattggtctggtcagtctgattgtcggcgcgcgttatttaccgaagt

SEQ ID NO: 857776 - DNA, 75 bp, synthetic construct
  source 1..75: mol_type = other DNA
catcggcctgacagccgggatgttagctggctccatgacttcaacaccagttctggttggtgccggcgatacgtt

SEQ ID NO: 857777 - DNA, 75 bp, synthetic construct
  source 1..75: mol_type = other DNA
gcctgggccgacggcaaaaacttgcgtgaactgggtatttatcgacaaacaggttgctacattgaacgtattcgt

SEQ ID NO: 857778 - DNA, 75 bp, synthetic construct
  source 1..75: mol_type = other DNA
tggacggcttgtcctgcggtcactgcgttaaacgcgtaaaagagagtcttgagcagcgcccggacgttgagcagg

SEQ ID NO: 857779 - DNA, 75 bp, synthetic construct
  source 1..75: mol_type = other DNA
cgacactgtagtgttcgataaaaccgggacgctgactgaagggaagccgcaggttgtcgcagtgaaaacatttgc

SEQ ID NO: 857780 - DNA, 75 bp, synthetic construct
  source 1..75: mol_type = other DNA
agatcactcagggtgaagcatggctggatgaagccatgctaacgggcgaacctatcccactgcaaaaaagcgaag

SEQ ID NO: 857781 - DNA, 75 bp, synthetic construct
  source 1..75: mol_type = other DNA
gttatgcgggcacttatgcaatagctaacgtgctgctgacgttggcagggacaatcatcgtaatggtatggccag

SEQ ID NO: 857782 - DNA, 75 bp, synthetic construct
  source 1..75: mol_type = other DNA
attatcgcctgtccatgtgcgctggggctggcaacaccgatgtcgattatttccggcgtcgggcgcgcggcagaa

SEQ ID NO: 857783 - DNA, 75 bp, synthetic construct
  source 1..75: mol_type = other DNA
attattgcctgcccctgtgcgctggggctggcgacgccgatgtcgattatttccggcgtcgggcgcgcggcagaa

SEQ ID NO: 857784 - DNA, 75 bp, synthetic construct
  source 1..75: mol_type = other DNA
tctacccaatcctgctggtatacagcgtggcaatcaccaacacggtagaaagcttcatgtcccaccagttgggta

SEQ ID NO: 857785 - DNA, 75 bp, synthetic construct
  source 1..75: mol_type = other DNA
ggacgggagaaaaacagaacaatgttacaatcgcggggctatcagccatcacatttgatgcaaaaaaaaatattt

SEQ ID NO: 857786 - DNA, 75 bp, synthetic construct
  source 1..75: mol_type = other DNA
atggtgggcaaagatctgtgcgtcaatatcgaactggatggcggcggaaaacggtatatcagcgggctggtgacg

SEQ ID NO: 857787 - DNA, 75 bp, synthetic construct
  source 1..75: mol_type = other DNA
gaccgtgtaggctttagattcgaagacggcaaaaaagtccgtttcttcaagtctaatagcgaaactatcaagtaa

SEQ ID NO: 857788 - DNA, 75 bp, synthetic construct
  source 1..75: mol_type = other DNA
gattctggcaaaccgaaaaatagcattccgtagttcttctctgtttactattatcaatactattgcggtaaccga

SEQ ID NO: 857789 - DNA, 75 bp, synthetic construct
  source 1..75: mol_type = other DNA
attgcaagtccaataaattcaggtacatcacgcttactgcaattttctatagatgcagacggtcgaccttcaaag

SEQ ID NO: 857790 - DNA, 75 bp, synthetic construct
  source 1..75: mol_type = other DNA
gcatacatcgttaatatttgtatctgataataatttccagccccatcaacagacgaaattttatctattcattga

SEQ ID NO: 857791 - DNA, 75 bp, synthetic construct
  source 1..75: mol_type = other DNA
cctgttattaccctgttaagtggtgctggcttgcttcgatgtggtcattgtggggcaagtatggttaagagaagc

SEQ ID NO: 857792 - DNA, 75 bp, synthetic construct
  source 1..75: mol_type = other DNA
gtcgctgattctgatcgtcggtatgatgaccattgttcgcttcggtgagcagatgattgttaaggcgatgagtat

SEQ ID NO: 857793 - DNA, 75 bp, synthetic construct
  source 1..75: mol_type = other DNA
atcgcgtggatggcaccgattatcgcaatgatcgcaatcaccaagtccttcctcggtcactacctgggcgcacgt

SEQ ID NO: 857794 - DNA, 75 bp, synthetic construct
  source 1..75: mol_type = other DNA
agagatagccgcaaaatatgatcttgagctagttacaagctatcaggattttggtgtatctgcattcaaaggggc

SEQ ID NO: 857795 - DNA, 75 bp, synthetic construct
  source 1..75: mol_type = other DNA
aaaggattattaccctcgtgttattgatgatgctacgttctatcaccttaagaaaaatattggtgctagagcatg

SEQ ID NO: 857796 - DNA, 75 bp, synthetic construct
  source 1..75: mol_type = other DNA
tggaccgcttatcccgtgccgatattgtcagtgcgcaggagttattcctttcaatcatccgtagggggataacca

SEQ ID NO: 857797 - DNA, 75 bp, synthetic construct
  source 1..75: mol_type = other DNA
ctggaaaatgatgagttaattgtcggcagcgaagatggtatcgatccggtttcactggcggctctgacacgtaag

SEQ ID NO: 857798 - DNA, 75 bp, synthetic construct
  source 1..75: mol_type = other DNA
cgtcgaaatgggggcggagaaatacgattatcttagccgcttcaatggtaagccagcctccgggctgggggtaaa

SEQ ID NO: 857799 - DNA, 75 bp, synthetic construct
  source 1..75: mol_type = other DNA
cgaatataacagtgggttatccccaaacgaatcggaaaatcgatactggaaaaactctaactcggtggccagttt

SEQ ID NO: 857800 - DNA, 75 bp, synthetic construct
  source 1..75: mol_type = other DNA
tgggctgggccatgtcgttctcgccggacagcaggctcaccatgaaagcgctggaaatggcatgggaaacccgtg

SEQ ID NO: 857801 - DNA, 75 bp, synthetic construct
  source 1..75: mol_type = other DNA
aagcctccattgaagacgtggtgaaaaccctgttagaagctatcgcgctggttttcctcgtcatgtatctgttcc

SEQ ID NO: 857802 - DNA, 75 bp, synthetic construct
  source 1..75: mol_type = other DNA
ggggaacgggcaaaacgtggcccgcatgtttgttcgcctgaaagactggagtgagcgcgacagtaaaaccggcac

SEQ ID NO: 857803 - DNA, 75 bp, synthetic construct
  source 1..75: mol_type = other DNA
cgggctggaaaacgacgtttacttccaggtaggcctgttaacggtgattggtttatcggcgaaaaacgccatcct

SEQ ID NO: 857804 - DNA, 75 bp, synthetic construct
  source 1..75: mol_type = other DNA
atccttgacccggtagcgatggaaaatgcgattaatgcgattccgggcgtggtgactgttggtctgtttgccaac

SEQ ID NO: 857805 - DNA, 75 bp, synthetic construct
  source 1..75: mol_type = other DNA
aatgctaaagagggcagaggaacactctattttgccgggcaggggatccagcaacaatggcagatgaagcgagcc

SEQ ID NO: 857806 - DNA, 75 bp, synthetic construct
  source 1..75: mol_type = other DNA
gcggcagcgaaaaccgtgctttcagcgatgaaaaacgacgatttcagtaagcagaaactggcggaatatcgtcag

SEQ ID NO: 857807 - DNA, 75 bp, synthetic construct
  source 1..75: mol_type = other DNA
agagtatgagccggcgcggaaactgctgggataacagcccaatggagcgcttcttcaggagtctgaagaacgaat

SEQ ID NO: 857808 - DNA, 75 bp, synthetic construct
  source 1..75: mol_type = other DNA
cacgccataacggactatatcgttggatattacaacgcactaagaccgcacgaatataacggtgggttaccccca

SEQ ID NO: 857809 - DNA, 75 bp, synthetic construct
  source 1..75: mol_type = other DNA
tccagttctgaagcatccactgaaaaactgaaaagcctcggcattcacgtttttgatctcaatgaagtggacagc

SEQ ID NO: 857810 - DNA, 75 bp, synthetic construct
  source 1..75: mol_type = other DNA
tggaagaccgtggcatgtttactacctcggtacaattgcccagcggttcaacccaacaacagaccctgaaagtcg

SEQ ID NO: 857811 - DNA, 75 bp, synthetic construct
  source 1..75: mol_type = other DNA
actggctcagcatgaagacacttctacggtgcagcttagcggtgacctgtttagcgggcgctggggcgatgatgg

SEQ ID NO: 857812 - DNA, 75 bp, synthetic construct
  source 1..75: mol_type = other DNA
gactacacgctggtggaagataacaacgactggtatctgcgatcgcaagaagtaacgccaccatcgccacctgat

SEQ ID NO: 857813 - DNA, 75 bp, synthetic construct
  source 1..75: mol_type = other DNA
atgcggattatttttctacgcaaggagtatttatctttactcccgtcaatgattgcatctcttttctctgctaac

SEQ ID NO: 857814 - DNA, 75 bp, synthetic construct
  source 1..75: mol_type = other DNA
tgtcgttctcgccggacagcaggctcaccatgaaagcgctggaaatggcatgggaaacccgtggtaagcccgtcg

SEQ ID NO: 857815 - DNA, 75 bp, synthetic construct
  source 1..75: mol_type = other DNA
caaatcaggtgtggtgcggtgattttacttatagtgtgcccggagttcagggcgggcatggatgcttaaatgaac

SEQ ID NO: 857816 - DNA, 75 bp, synthetic construct
  source 1..75: mol_type = other DNA
cgtaagcttcagcgaggcagctcacgtcataacggactatatcgttggatattacagcgcactaagaccgcacga

SEQ ID NO: 857817 - DNA, 75 bp, synthetic construct
  source 1..75: mol_type = other DNA
agagcggcacatcatacaacgatggccttgaagtcagcggcaacggcggtacggttatcggcagtcaggatgtgg

SEQ ID NO: 857818 - DNA, 75 bp, synthetic construct
  source 1..75: mol_type = other DNA
cggcgcacaggctccggcactgtatgcaatttcattgctggtagtgttcctgtgtctggcggccctgtatgagag

SEQ ID NO: 857819 - DNA, 75 bp, synthetic construct
  source 1..75: mol_type = other DNA
aggctcgcgttatcgccagcagcccgccagcaatcagcggcctcggcagttctgcgggattcgatatggaattgc

SEQ ID NO: 857820 - DNA, 75 bp, synthetic construct
  source 1..75: mol_type = other DNA
ggcagcgtggcgtggcagaaagggagtgatgattttgcccagacggcagggtttttgtcgatgacggtgaaatgg

SEQ ID NO: 857821 - DNA, 75 bp, synthetic construct
  source 1..75: mol_type = other DNA
gtagccagcagcagggggcgtggctggatagctggctgcaatatgcatggtttagcaatgatgtttccgaacaag

SEQ ID NO: 857822 - DNA, 75 bp, synthetic construct
  source 1..75: mol_type = other DNA
cgggcaggatacttccgtcgcccttaatgcctcattgtttaacggcgatgggacgctggtgaatgctaccgatgg

SEQ ID NO: 857823 - DNA, 75 bp, synthetic construct
  source 1..75: mol_type = other DNA
gagacgcgtggccaaccccgggatgtcgtgttccatagcgaccagggaagccagtatacaggccttaaatatcaa

SEQ ID NO: 857824 - DNA, 75 bp, synthetic construct
  source 1..75: mol_type = other DNA
caggaaggaagtcttactgctgtcgccgccggagaacaggttgttcctgcctctgaacttgctgccgccatgaag

SEQ ID NO: 857825 - DNA, 75 bp, synthetic construct
  source 1..75: mol_type = other DNA
gacgaggcattgaaagccagctggctggcggaagtagaagagatgcgtactcgcattctggcaatgcgtcaggaa

SEQ ID NO: 857826 - DNA, 75 bp, synthetic construct
  source 1..75: mol_type = other DNA
aacgcaatttcgattatctgcttaatcagcgcggcatgttcagttataccggtttaagtgccgctcaggttgacc

SEQ ID NO: 857827 - DNA, 75 bp, synthetic construct
  source 1..75: mol_type = other DNA
tcgtggtttcgcttggcttgatacaggtacccatgaaagtttgcttcaagcttcccaatttgttgaaacgatcga

SEQ ID NO: 857828 - DNA, 75 bp, synthetic construct
  source 1..75: mol_type = other DNA
tggcaatcatgctggctcatgcgtcgttgcatgatgcagccgaggttctttgttcggatgttgtcacgccggtca

SEQ ID NO: 857829 - DNA, 75 bp, synthetic construct
  source 1..75: mol_type = other DNA
cagcgaggctttaatggctgttcttgatggtataaaccggcgtggaaagagccagcttttttttgcaggccaggg

SEQ ID NO: 857830 - DNA, 75 bp, synthetic construct
  source 1..75: mol_type = other DNA
gagctcctcaaagatgcggtggtgtatggtcagtcgcgaaaatggataacgtatacgcccttgttgccaacggac

SEQ ID NO: 857831 - DNA, 75 bp, synthetic construct
  source 1..75: mol_type = other DNA
atgattgatgtcttagggccggagaaacgcagacggcgtaccacacaggaaaagatcgctatcgttcagcagagc

SEQ ID NO: 857832 - DNA, 75 bp, synthetic construct
  source 1..75: mol_type = other DNA
agcgcctgctcggaaaaaaaacgatggaaaatgaactccttaaagaagccgttgatgctgaagcagtcctctcct

SEQ ID NO: 857833 - DNA, 75 bp, synthetic construct
  source 1..75: mol_type = other DNA
tcagcggaaatgctgtacttgcaaaaaatgttggggctacaaggcttaccgctgattgcagagaatggcgcagtg

SEQ ID NO: 857834 - DNA, 75 bp, synthetic construct
  source 1..75: mol_type = other DNA
cgcgtctggcgaacgcagcgtgaaggaccggaaggatggcgtgaagggctggaccattttttctccgcccgttaa

SEQ ID NO: 857835 - DNA, 75 bp, synthetic construct
  source 1..75: mol_type = other DNA
gtgctgtggccgcaggagaacaggtcgttcctgcctctgaacttgctgctgccatgaagcagattaaagaactcc

SEQ ID NO: 857836 - DNA, 75 bp, synthetic construct
  source 1..75: mol_type = other DNA
tatgataatcgcgttatcgatttcgctaaaaaagttaaaccttcagtgagaggggagctggagattactgatctt

SEQ ID NO: 857837 - DNA, 75 bp, synthetic construct
  source 1..75: mol_type = other DNA
gaagccagtacgcaatgcaaggcagataatggcagcactggtacaaacaaacttatcttcaccatcaatggttaa

SEQ ID NO: 857838 - DNA, 75 bp, synthetic construct
  source 1..75: mol_type = other DNA
gctggttaaaccatgatgaattaaatgataaaggagagtttttgaaaaaaaatcactacggacaatatttactca

SEQ ID NO: 857839 - DNA, 75 bp, synthetic construct
  source 1..75: mol_type = other DNA
atatcgttggatattacagcgcactaagaccgcacgaatataacggtgggttacccccaaacgaatcggaaaatc

SEQ ID NO: 857840 - DNA, 75 bp, synthetic construct
  source 1..75: mol_type = other DNA
gtaagcccggcggggtgatgttccacagcgatcagggcagtcattatacgagcaggcagttccggcagttattgt

SEQ ID NO: 857841 - DNA, 75 bp, synthetic construct
  source 1..75: mol_type = other DNA
gaatggaacgcccgtcacacagaaggctggcacgaaggacatgatgctcctagaacggatagccactccagtcta

SEQ ID NO: 857842 - DNA, 75 bp, synthetic construct
  source 1..75: mol_type = other DNA
gttctgggacaaggctttatccaataacaatgggggtttcaaagcagctattgcccatttatgataaaccgatga

SEQ ID NO: 857843 - DNA, 75 bp, synthetic construct
  source 1..75: mol_type = other DNA
gcgtcaggcctcaccattataacggagggctgacgccggaagagtcagagaacagataccatttttactgtaaaa

SEQ ID NO: 857844 - DNA, 75 bp, synthetic construct
  source 1..75: mol_type = other DNA
cgggtaagcgctgggcgtacctcgccgttgttctcgacctgttcgcaagaaaaccagtgggctgggccatctcgt

SEQ ID NO: 857845 - DNA, 75 bp, synthetic construct
  source 1..75: mol_type = other DNA
atggtttagcccaagcatttattattggtgaaaactttattggaaatgacacagtatgtcttatgcttggagata

SEQ ID NO: 857846 - DNA, 75 bp, synthetic construct
  source 1..75: mol_type = other DNA
accgactcgttaaccgggctaccgaatcggcgggcaatttttgaaaatctgacgacgctgttttctctggccggc

SEQ ID NO: 857847 - DNA, 75 bp, synthetic construct
  source 1..75: mol_type = other DNA
atttaactgttgaattactaggacgtggttttgcatggctggatacaggaacccatgacagcttgattgaagctg

SEQ ID NO: 857848 - DNA, 75 bp, synthetic construct
  source 1..75: mol_type = other DNA
tatcagtccgagcgcgagcgtcttaaatttcagcatgaaactgttcagcttgtccctgtcagtgatgtcaggcgg

SEQ ID NO: 857849 - DNA, 75 bp, synthetic construct
  source 1..75: mol_type = other DNA
actaccgctggccagttttgccgctctgttaatgagcgaacctgccgggctggcaataggcaaaatcaaacttgc

SEQ ID NO: 857850 - DNA, 75 bp, synthetic construct
  source 1..75: mol_type = other DNA
ctgaccgaaggccaacgggaaattacagaactgggtagctggcgcaaatacaccgggcattttcatactgtgtaa

SEQ ID NO: 857851 - DNA, 75 bp, synthetic construct
  source 1..75: mol_type = other DNA
agttaaatattaatcaactggcagccctttcaggcctgcaccggcagaccgttaccgcaagaatggcggatgttc

SEQ ID NO: 857852 - DNA, 75 bp, synthetic construct
  source 1..75: mol_type = other DNA
aatcttactgtgaaacctttggttgggtaagcaaagagaatctggcgcgaatgaaagagttgacctacaaagcga

SEQ ID NO: 857853 - DNA, 75 bp, synthetic construct
  source 1..75: mol_type = other DNA
acttctataatggttctgccgttcgcctgtgctggaagcatgatgcggaatacatgatgaaggggtacggcaagc

SEQ ID NO: 857854 - DNA, 75 bp, synthetic construct
  source 1..75: mol_type = other DNA
acggcccactggtagaagagaaactcgatgcctggctggcggcacataccatcgcagaagttaaagaacgctttg

SEQ ID NO: 857855 - DNA, 75 bp, synthetic construct
  source 1..75: mol_type = other DNA
atgtggcccgtgaatcaatcactcagtggcaaacgatggatggtcgcacctgcaaagggccgaacatcatgccga

SEQ ID NO: 857856 - DNA, 75 bp, synthetic construct
  source 1..75: mol_type = other DNA
tggattacttcaacggcggcgaaatgtgcccgcgcatgaccaaaggtaaagatccctactacgccggttgcggtc

SEQ ID NO: 857857 - DNA, 75 bp, synthetic construct
  source 1..75: mol_type = other DNA
ggcaccgcttgcgcgttacgcatggatatatcgttcgatactggaaagcgtggctctgatgctgaagaacaatta

SEQ ID NO: 857858 - DNA, 75 bp, synthetic construct
  source 1..75: mol_type = other DNA
gtcccgctggtggacatgacaaactcaagctatatcggttgaccgatattctgactgaatttatggggttaccac

SEQ ID NO: 857859 - DNA, 75 bp, synthetic construct
  source 1..75: mol_type = other DNA
cctgctcggtacgccggaaatccggaaggcactcagcttatccaccgtatcgaatgcccttacggcccactggta

SEQ ID NO: 857860 - DNA, 75 bp, synthetic construct
  source 1..75: mol_type = other DNA
tgtgcctgtcagtgatgtcaggcggtcgttttccgtcgtggtgaaagcgatagttcaggtactggaaacctggcc

SEQ ID NO: 857861 - DNA, 75 bp, synthetic construct
  source 1..75: mol_type = other DNA
attgttggtggtcaggcacaagcggacacaatagaaggttttgaaaatatcgttaaacttgtaaaaggtacgaaa

SEQ ID NO: 857862 - DNA, 75 bp, synthetic construct
  source 1..75: mol_type = other DNA
aaagtaaaaagattaaatgcagatttgatacaaatcactgaaaacagcaaagtaatacaatccaaatttgatcca

SEQ ID NO: 857863 - DNA, 75 bp, synthetic construct
  source 1..75: mol_type = other DNA
ctccactgtttttcgtgccactggcaaacaaggactggtccgacgaagatccgcaaaaaatcgttttgtacggtc

SEQ ID NO: 857864 - DNA, 75 bp, synthetic construct
  source 1..75: mol_type = other DNA
gtttggggttccgttccccaaacgcggctgaagaacatctgaaagcgttggcacgcaaaggcgtaattgaaattg

SEQ ID NO: 857865 - DNA, 75 bp, synthetic construct
  source 1..75: mol_type = other DNA
gtttggggttccgttccccaaacgcggctgaagaacatctgaaggcgctggcacgcaaaggcgttattgaaattg

SEQ ID NO: 857866 - DNA, 75 bp, synthetic construct
  source 1..75: mol_type = other DNA
aagtcttgctgcgtcacagtgatgatttcgaaaaaagccgtattctgtttgccggagacttacaggatgacctgc

SEQ ID NO: 857867 - DNA, 75 bp, synthetic construct
  source 1..75: mol_type = other DNA
acgtttacggtttcactgtcagtcaggacggcaaaatgaaaaaagctctccagaatgatatgacgcgcttaagtt

SEQ ID NO: 857868 - DNA, 75 bp, synthetic construct
  source 1..75: mol_type = other DNA
caatcgaagctctttcgattatatggtaaaggcatgcgaaaccgctcctgattttgctatccctagctggggtgt

SEQ ID NO: 857869 - DNA, 75 bp, synthetic construct
  source 1..75: mol_type = other DNA
tatttatggctgggactgttaatgcagcatcaagcgtaaaggatatttgtaccgactacacgaaataccttgggc

SEQ ID NO: 857870 - DNA, 75 bp, synthetic construct
  source 1..75: mol_type = other DNA
ttactgcaacatacctgcgcgcagcttcacgcaggtgagacgttgacgctgcaaaaacgggtgtggatcgactag

SEQ ID NO: 857871 - DNA, 75 bp, synthetic construct
  source 1..75: mol_type = other DNA
aagagcgccgtttgcagcaacataccagtgcgcagcttcatgcaggcgagacagtgacgttgcaaaaaactggtg

SEQ ID NO: 857872 - DNA, 75 bp, synthetic construct
  source 1..75: mol_type = other DNA
atcaaaaactcactgacaaaagctacagacatcctcaatgaggacactaaaagaatcagggagaaactgtgtgat

SEQ ID NO: 857873 - DNA, 75 bp, synthetic construct
  source 1..75: mol_type = other DNA
gatcgagaacgtcgcctgggccgacaccattcgcgttcaaccgaactccccgcagctctcccgccgcaatttgca

SEQ ID NO: 857874 - DNA, 75 bp, synthetic construct
  source 1..75: mol_type = other DNA
aaccttttgaaggaacaattccgttccgtattttgcagcgtggacgtgttctttctgaaggttcgttcagtggta

SEQ ID NO: 857875 - DNA, 75 bp, synthetic construct
  source 1..75: mol_type = other DNA
agccctttaacggaacgattccatttagggttttgcagcgtggacgtgttctggttaaggatatcttcagtggta

SEQ ID NO: 857876 - DNA, 75 bp, synthetic construct
  source 1..75: mol_type = other DNA
agccctttaacggaacaattccgttccgggttttacagcgtgggcgtgttctggctgaaggcacattcagtggta

SEQ ID NO: 857877 - DNA, 75 bp, synthetic construct
  source 1..75: mol_type = other DNA
aaccttttaacggaacaatcccgttccggattttacagtgtggtcgtgttctggctgaaggcacattcagtggta

SEQ ID NO: 857878 - DNA, 75 bp, synthetic construct
  source 1..75: mol_type = other DNA
ccgtgttttgcaacatggccgtgttctgcttgaagaggtgttcagaggtaaatgcactgaatgttattcacgaac

SEQ ID NO: 857879 - DNA, 75 bp, synthetic construct
  source 1..75: mol_type = other DNA
atacgaagtggatgccacgaatgaagccctcaccgttgagtgtgcgatgaataccgataaatgccggatgttatc

SEQ ID NO: 857880 - DNA, 75 bp, synthetic construct
  source 1..75: mol_type = other DNA
gttaccagatcaaacagagtctgagtcgacgaggaaattgctgggataacagcccgatggagcgcttcttcagga

SEQ ID NO: 857881 - DNA, 75 bp, synthetic construct
  source 1..75: mol_type = other DNA
tgggaaacccgtggtaaacccggcggggtgatgttccacagcgatcagggtagtcattatacgagcaggcagttc

SEQ ID NO: 857882 - DNA, 75 bp, synthetic construct
  source 1..75: mol_type = other DNA
agttactgtggcgataccggatcaggcagagtatgagccggcgcggaaattgctgggataacagcccaatggagc

SEQ ID NO: 857883 - DNA, 75 bp, synthetic construct
  source 1..75: mol_type = other DNA
ctttcaggtgaatgccacgaatgaagagctaaccgttgagtgtacgatgaatactgataaatgccgaatggtatc

SEQ ID NO: 857884 - DNA, 75 bp, synthetic construct
  source 1..75: mol_type = other DNA
agccttttcagggaacaattccgttccgtgttttgcagcctggtcgtgttcttgttgaaggtacgttcagtggta

SEQ ID NO: 857885 - DNA, 75 bp, synthetic construct
  source 1..75: mol_type = other DNA
gtatggtgcggcgacgtgacgtacagtgtgcccggagttcagggcgggcatggatgcttaaatgaaccgcgagtc

SEQ ID NO: 857886 - DNA, 75 bp, synthetic construct
  source 1..75: mol_type = other DNA
gataaagcggaagcgatcacagcggcaatgaaaggaggctatatcaacgtactggtaaccgatcaggaaactgcc

SEQ ID NO: 857887 - DNA, 75 bp, synthetic construct
  source 1..75: mol_type = other DNA
taaaaaatgcccgcgtgcagttaagtttgcgcgctcagcaattatcaatggtcggtaacgatttgcgttatgccg

SEQ ID NO: 857888 - DNA, 75 bp, synthetic construct
  source 1..75: mol_type = other DNA
aaaaaaaaccggccccccgtctccgccgcatcggtgatatagggataaacctgttcgcaccactggcagaaaccc

SEQ ID NO: 857889 - DNA, 75 bp, synthetic construct
  source 1..75: mol_type = other DNA
aactagaaaatgaagataatgccaagaaaagagcagagttgcttgctcagctagaggtgataaagcaaaacgctg

SEQ ID NO: 857890 - DNA, 75 bp, synthetic construct
  source 1..75: mol_type = other DNA
taggtctgggtctgtatccggattacgcaacggcgatcgacaaaatggttcgcgtgaaagatatctttatgcctg

SEQ ID NO: 857891 - DNA, 75 bp, synthetic construct
  source 1..75: mol_type = other DNA
atgagagacgacaacagcaccgacaaaaaaaaaccggccccccgtctccgccgcatcggtgacatcgggataaac

SEQ ID NO: 857892 - DNA, 75 bp, synthetic construct
  source 1..75: mol_type = other DNA
atgaaagacgacaacagcatcgacgaaaaaaaaccggctccccgtctccgccgcatcggtgatatagggataaat

SEQ ID NO: 857893 - DNA, 75 bp, synthetic construct
  source 1..75: mol_type = other DNA
gtctcggcggtgatgagtttttggttgtttcactaaacaacgagaatgcggatatttcgtcgctgcgagaacgta

SEQ ID NO: 857894 - DNA, 75 bp, synthetic construct
  source 1..75: mol_type = other DNA
cgttgtctgctccacctcagtcaggtccaggtcactggaatatgataattttccggaaatcagcgaagcgaacat

SEQ ID NO: 857895 - DNA, 75 bp, synthetic construct
  source 1..75: mol_type = other DNA
atttaagattaaaaattgatgacgaccttattgaacaaatcgacaacatagcaaatacgcgcggggaaaggaaag

SEQ ID NO: 857896 - DNA, 75 bp, synthetic construct
  source 1..75: mol_type = other DNA
atggaaatagtttatagcgcctcaaataacagttttttcgctaaaaatgacgtggcgaaatatgaacaggccgga

SEQ ID NO: 857897 - DNA, 75 bp, synthetic construct
  source 1..75: mol_type = other DNA
ttctgagcacaccaattcacttaccggatggatcattctatggcacgctttgcgccgccagcagtgagaagcgcc

SEQ ID NO: 857898 - DNA, 75 bp, synthetic construct
  source 1..75: mol_type = other DNA
tctcgcagtcactcgctaaagaacagtctctggaaagtctggttcggcaacttctggaaatgctggaaatggtca

SEQ ID NO: 857899 - DNA, 75 bp, synthetic construct
  source 1..75: mol_type = other DNA
aggcgaaaccgttgccgattaccttgatgcctttgatgtggatctgtttttaacaactaacgttgaagatgcgca

SEQ ID NO: 857900 - DNA, 75 bp, synthetic construct
  source 1..75: mol_type = other DNA
tgatcagcgtactaacggtgatttgaaagacttcttatctgctcaaaaatcaggcggtggtaactctcagccgat

SEQ ID NO: 857901 - DNA, 75 bp, synthetic construct
  source 1..75: mol_type = other DNA
attcagaagtatctaaggcgaccggactctcgattgaatcccttcaaagactggaaaaggaattttctggcactg

SEQ ID NO: 857902 - DNA, 75 bp, synthetic construct
  source 1..75: mol_type = other DNA
agggcaagtgcgcattgcttttgacggtgatgcagtgcttttctctgatgaaagtgagttagtttataaaactca

SEQ ID NO: 857903 - DNA, 75 bp, synthetic construct
  source 1..75: mol_type = other DNA
ccggatgataaatcaccgttggttgaagtcgttgtgatgtcacgtaacagccctgatacaggtatccgcgttctg

SEQ ID NO: 857904 - DNA, 75 bp, synthetic construct
  source 1..75: mol_type = other DNA
tagttattggcatcagtgcaactgcgctttttgacatgagcgaatccgaccatatgtttcgggaaacctttgcga

SEQ ID NO: 857905 - DNA, 75 bp, synthetic construct
  source 1..75: mol_type = other DNA
cgactgaatgcacttgatgttaaattgcaaggacaagttgccgcgtctatcacttcccagaatagccagttgcaa

SEQ ID NO: 857906 - DNA, 75 bp, synthetic construct
  source 1..75: mol_type = other DNA
agaacaagaagaagcagaaaaagcggcagaagaagcaaggaaggccgcagaaaaagcacagaaacagcgtgaaga

SEQ ID NO: 857907 - DNA, 75 bp, synthetic construct
  source 1..75: mol_type = other DNA
cggattttcagaaaagctggtgccgaatgcgcgtcccgccctcgattgtccggttgtgtatccgtatgcgccaaa

SEQ ID NO: 857908 - DNA, 75 bp, synthetic construct
  source 1..75: mol_type = other DNA
agatggtcatggatgctatcaaacgtcacgctaagtttgttgctcaggcgatagaagacgttcagcgtcgtaaga

SEQ ID NO: 857909 - DNA, 75 bp, synthetic construct
  source 1..75: mol_type = other DNA
gggaacatctaacccgcaaggcagatcctaaccgtgatttgactatcccgactacaccaactcgaccagcttcat

SEQ ID NO: 857910 - DNA, 75 bp, synthetic construct
  source 1..75: mol_type = other DNA
caaataatccgtttgctaaatttaatgcaatcgataaagagaaatcggaagcggaacaagattataagaccgata

SEQ ID NO: 857911 - DNA, 75 bp, synthetic construct
  source 1..75: mol_type = other DNA
gaggatgcgcagcaagatatcccgatggctgagggaccttatgccactttgctaaaaaaaatagccaagcttcag

SEQ ID NO: 857912 - DNA, 75 bp, synthetic construct
  source 1..75: mol_type = other DNA
ttgatattgccgacggaaaaacgctggttattggcaatacagagaatgacggagctgttgactctattgctggta

SEQ ID NO: 857913 - DNA, 75 bp, synthetic construct
  source 1..75: mol_type = other DNA
cgaatggcgtaccgctgttcatgtcataccaacattagatctgaattattatcacgatccccattcgacggaaat

SEQ ID NO: 857914 - DNA, 75 bp, synthetic construct
  source 1..75: mol_type = other DNA
tctgatttctccacctggcagagcggtacatcatacaaagatggccttgaagtcagtggcagcagcggaacggtt

SEQ ID NO: 857915 - DNA, 75 bp, synthetic construct
  source 1..75: mol_type = other DNA
gcgagtggatgcttgggattgttggtggctacagcgataaccagggcgacagccgctcgagtatgaccggaactc

SEQ ID NO: 857916 - DNA, 75 bp, synthetic construct
  source 1..75: mol_type = other DNA
tgcgcggcagcgtggcgtggcagaaagggagtgatgattttgcccagacggcagggtttttgtcgatgacggtga

SEQ ID NO: 857917 - DNA, 75 bp, synthetic construct
  source 1..75: mol_type = other DNA
tatgaccggaactcgcgccgataaccagaaccacggttatgccgttgggctgacctcaagctggtttcagcacgg

SEQ ID NO: 857918 - DNA, 75 bp, synthetic construct
  source 1..75: mol_type = other DNA
atgcatgggcttctggtgatccatcgggactatttaagtttgcccaggaaaatccagcgtttgttgcacaggcac

SEQ ID NO: 857919 - DNA, 75 bp, synthetic construct
  source 1..75: mol_type = other DNA
gcagcagcaacagcaggagcgtaaagcggcattccagaaaggttatgcggatgcttatgcgtccggcgacaggga

SEQ ID NO: 857920 - DNA, 75 bp, synthetic construct
  source 1..75: mol_type = other DNA
tgtgcatttggttgctgccgcaaaggttgttccttccggtaaagtaccttatgccagtaattcagagctttttga

SEQ ID NO: 857921 - DNA, 75 bp, synthetic construct
  source 1..75: mol_type = other DNA
accactcatcggggattatcgcctcgctggaagccgggtatcagtggttaccggggcatggagtggtgattgaac

SEQ ID NO: 857922 - DNA, 75 bp, synthetic construct
  source 1..75: mol_type = other DNA
caacaaggaaagagtggtggagccagaacaattatcttttttaaatcagcaaatcatgtgttttttatgatggtt

SEQ ID NO: 857923 - DNA, 75 bp, synthetic construct
  source 1..75: mol_type = other DNA
gttggtctgaccgcgttacgtggtctggctggagttgctgatatttataagcaggaacagcaacagaaagctatt

SEQ ID NO: 857924 - DNA, 75 bp, synthetic construct
  source 1..75: mol_type = other DNA
ccgaagagatgaatttgcccaaaaatctgagcttcctgcgcgatagctccatctctatttcccttacgatgatgg

SEQ ID NO: 857925 - DNA, 75 bp, synthetic construct
  source 1..75: mol_type = other DNA
caaagatgttagtgctgctgtctttgtttatcactggggtccatgcaaatgaagagcaggcccttatcaaagaca

SEQ ID NO: 857926 - DNA, 75 bp, synthetic construct
  source 1..75: mol_type = other DNA
gaacctgtaagccaaacttacaagttgccagttaatacaccttgccaagatgcgccagtccatatctggctgcaa

SEQ ID NO: 857927 - DNA, 75 bp, synthetic construct
  source 1..75: mol_type = other DNA
gtgccattaaacaactggcaattcagcgccctgccacccccccctagcaacgaggtcgagatattacacaatgcc

SEQ ID NO: 857928 - DNA, 75 bp, synthetic construct
  source 1..75: mol_type = other DNA
tgattttcactgacctcgatggcaccctgttggacattcacagttacgactggcagccagccgccccgtggttga

SEQ ID NO: 857929 - DNA, 75 bp, synthetic construct
  source 1..75: mol_type = other DNA
aaagatattttcacaaaatcaggtctctttttctttttccagagtacctgtcagttctgccacgaagaaagtcaa

SEQ ID NO: 857930 - DNA, 75 bp, synthetic construct
  source 1..75: mol_type = other DNA
gttccaggatttctctgtacctaatgcgcagattattgaccaatttaaaatccgtgaagttccaactattttcct

SEQ ID NO: 857931 - DNA, 75 bp, synthetic construct
  source 1..75: mol_type = other DNA
gcgcacagtcaggtaagacaacggttgagaataatgcgctgtctgagcttgtgccgcctcgcgtacagcaggatg

SEQ ID NO: 857932 - DNA, 75 bp, synthetic construct
  source 1..75: mol_type = other DNA
agcggaccgggggtagaagagaatatgcgggcgcaattgctccagcgaccatcagcgctcagccaaaaagcctca

SEQ ID NO: 857933 - DNA, 75 bp, synthetic construct
  source 1..75: mol_type = other DNA
cactggtatgcacgccgacgcggtcacgatccgcgggcaatgttgtacaatgcggttcagcatcagtggctcacg

SEQ ID NO: 857934 - DNA, 75 bp, synthetic construct
  source 1..75: mol_type = other DNA
cagggggggcagcggtagccggcgcacagtcgggtaagacaacggttgagaataatgcgctgtctgaacttgtgc

SEQ ID NO: 857935 - DNA, 75 bp, synthetic construct
  source 1..75: mol_type = other DNA
ggtgggaatgattgccacacagatgtacggtaagccggtgagtgaattgagcgaggcagagaagcagacggtctc

SEQ ID NO: 857936 - DNA, 75 bp, synthetic construct
  source 1..75: mol_type = other DNA
atgcggcgcagcgagcgtataacagggaaataccagcaggcgatacaggccgcaacggcagcggtacagggacta

SEQ ID NO: 857937 - DNA, 75 bp, synthetic construct
  source 1..75: mol_type = other DNA
gcagccaggctgcgctgacgcagcgacatgaagcgtctgaaacactcatctggcgcgacagtgatgagcgaatga

SEQ ID NO: 857938 - DNA, 75 bp, synthetic construct
  source 1..75: mol_type = other DNA
tcagtcgatgcagcactcgaaggattaccgctgggcgtctaatgacagagtgggtaaaccgcctgcgtatcagtt

SEQ ID NO: 857939 - DNA, 75 bp, synthetic construct
  source 1..75: mol_type = other DNA
ctgccacaccagaccatgcagcgtgaatcagattatcgctggccgtcaaattcccgtatcggtaaacgggatgcc

SEQ ID NO: 857940 - DNA, 75 bp, synthetic construct
  source 1..75: mol_type = other DNA
catcagcgggcgcaacgaaatggcgatgcttggaactgcgttgaacaatatgtctgcagaactggcggaaagtta

SEQ ID NO: 857941 - DNA, 75 bp, synthetic construct
  source 1..75: mol_type = other DNA
atgcgtaatggaaaaatactggctacgggagaaaatgtctccctgggaactgtaaataaaagcaaagtacccctg

SEQ ID NO: 857942 - DNA, 75 bp, synthetic construct
  source 1..75: mol_type = other DNA
ttaccgttaaaactctatattacccctgtcggggcggccggtggcgttgtcataaacgcgggagaagttattgct

SEQ ID NO: 857943 - DNA, 75 bp, synthetic construct
  source 1..75: mol_type = other DNA
tgggtaaaacaatcagtataaaggtcctgttcggtatttatcttctattaatggcaggcaaagtttttgccttca

SEQ ID NO: 857944 - DNA, 75 bp, synthetic construct
  source 1..75: mol_type = other DNA
ggactggcggggatggcggtttctggctggctggtacaaggcgttcagggcagcgcccatgctattaacaaagcg

SEQ ID NO: 857945 - DNA, 75 bp, synthetic construct
  source 1..75: mol_type = other DNA
caccgcactgaaacgcggcgcggatggttatctgttaaaagatatggaaccggaagatctgctgaaagcattgca

SEQ ID NO: 857946 - DNA, 75 bp, synthetic construct
  source 1..75: mol_type = other DNA
tcacaccactgaaatgcgcattgagacggtagtgatggtccaccgggtgatggcggtgtttatgacattgctctt

SEQ ID NO: 857947 - DNA, 75 bp, synthetic construct
  source 1..75: mol_type = other DNA
attcccgcgccccgctgtgtgaacgcctgtcacctgtactcaacggcttacagaatttaaccctgctacgtgata

SEQ ID NO: 857948 - DNA, 75 bp, synthetic construct
  source 1..75: mol_type = other DNA
gctcgattgctacaaccgtggcgacaattgttagcgatggcgagtgcggtaagtcaccgtgatttcagccagcga

SEQ ID NO: 857949 - DNA, 75 bp, synthetic construct
  source 1..75: mol_type = other DNA
ttgatcacctggtctctggtttcgaccgtacaacggaaatgcgtattgagacagttgtgatggtccatcggggga

SEQ ID NO: 857950 - DNA, 75 bp, synthetic construct
  source 1..75: mol_type = other DNA
cgaagtggttcattcactggcgaagtggaaacgtcagaccttagggcaacacgactttcagcgcggggcgaaggg

SEQ ID NO: 857951 - DNA, 75 bp, synthetic construct
  source 1..75: mol_type = other DNA
gtcgtgctaaacctgaagctaaagcctatacacttggggatgggcaagggctgtctttacttgtagagccaaatg

SEQ ID NO: 857952 - DNA, 75 bp, synthetic construct
  source 1..75: mol_type = other DNA
tgtggtccgcctgtcaccgcagggtactgacactttcgcgatgctcgacgccttccgcgctaatgaaaatggcgc

SEQ ID NO: 857953 - DNA, 75 bp, synthetic construct
  source 1..75: mol_type = other DNA
tttgaaccgggaatgacggtctcccttgttgcccggcaacatggtgtggcagccagccagccagctatttctctg

SEQ ID NO: 857954 - DNA, 75 bp, synthetic construct
  source 1..75: mol_type = other DNA
tatgcggggtcggtattgcccgtactaagacgctggcgaagctgtgtaaccacgctgcaaaaacatggcccgcta

SEQ ID NO: 857955 - DNA, 75 bp, synthetic construct
  source 1..75: mol_type = other DNA
atggatagcgcatgtgcccttgttaccttcggacaaggaatagccccggtaagccgtgttctgggcgtgtcacgt

SEQ ID NO: 857956 - DNA, 75 bp, synthetic construct
  source 1..75: mol_type = other DNA
ttgtcgttgggtgtgtaccctgatgtgtctctgtctgatgccagggcggcaagggatgaggctaaaaggcttctt

SEQ ID NO: 857957 - DNA, 75 bp, synthetic construct
  source 1..75: mol_type = other DNA
caaaagcgagaacaggcgaacaaatgcggtaacacctttgaggcgatcgcccgtgagtggtatgaaaaacgcctg

SEQ ID NO: 857958 - DNA, 75 bp, synthetic construct
  source 1..75: mol_type = other DNA
cataagagagaacaggcgagcaaattcggtaacacctttgaggcgatcgcccgtgagtggtatgaaaaacgcctg

SEQ ID NO: 857959 - DNA, 75 bp, synthetic construct
  source 1..75: mol_type = other DNA
cgagagatgctccagtggtatgccgactatatggattcgctcgagcatggcggaaatgtggtgcatggtgagttc

SEQ ID NO: 857960 - DNA, 75 bp, synthetic construct
  source 1..75: mol_type = other DNA
tgagtgatatggcattgactgtgttggtaaggcgcatcggctatgcaggacgcgttacagggcatggattccgcc

SEQ ID NO: 857961 - DNA, 75 bp, synthetic construct
  source 1..75: mol_type = other DNA
aaactgcaaagccgaaagagaagccctacaaattggctgatggtgggagtctttacttattggttaaccccaacg

SEQ ID NO: 857962 - DNA, 75 bp, synthetic construct
  source 1..75: mol_type = other DNA
gccgccggagaacaggttgttcctgcctctgaacttgctgccgccatgaagcagattaaagaactccagcgcctg

SEQ ID NO: 857963 - DNA, 75 bp, synthetic construct
  source 1..75: mol_type = other DNA
ttattttctttgtcctgaatgacaaagaagaggcaccgtccgttgaggtgaaaaaagaagacggggcatcgcaaa

SEQ ID NO: 857964 - DNA, 75 bp, synthetic construct
  source 1..75: mol_type = other DNA
cgcagacggcgtaccacacaggaaaagatcgcaattgttcagcagagctttgaaccggggatgacggtctccctc

SEQ ID NO: 857965 - DNA, 75 bp, synthetic construct
  source 1..75: mol_type = other DNA
atgtctaacactagttctaattttgagataactggaactttgctggggcaggagcttcgtaaacgtaaaactcct

SEQ ID NO: 857966 - DNA, 75 bp, synthetic construct
  source 1..75: mol_type = other DNA
agcgcagacgtcgcagcattcaggaaaaaattgccattgttcagaagagctttgaacccggcatgacggtgtcgc

SEQ ID NO: 857967 - DNA, 75 bp, synthetic construct
  source 1..75: mol_type = other DNA
atgcggtggaggtggacagtaccagtaacagtggctcagctaagacacctgatccagcatgacagggaaaagttg

SEQ ID NO: 857968 - DNA, 75 bp, synthetic construct
  source 1..75: mol_type = other DNA
tattttttgcacctatcggcgaagcaaaaattgctgaaaataaaacaggtgcggcgatggcgttgggtagcttta

SEQ ID NO: 857969 - DNA, 75 bp, synthetic construct
  source 1..75: mol_type = other DNA
ctacactgcgaaactctcttcgcgcattgatgatatcgatctcaacctggaggatttcgttcagcgcgtgaatgc

SEQ ID NO: 857970 - DNA, 75 bp, synthetic construct
  source 1..75: mol_type = other DNA
aagcaataccaggagggaagtcttactgctgtggccgcaggagaacaggtcgttcctacctctgaacttgctgct

SEQ ID NO: 857971 - DNA, 75 bp, synthetic construct
  source 1..75: mol_type = other DNA
agcgcctgagcggcaaaaaacgatggaaaatgaactccttaaagaagccgttgaatatgggcgcgcaaaaaagtg

SEQ ID NO: 857972 - DNA, 75 bp, synthetic construct
  source 1..75: mol_type = other DNA
aaaaaatcgcaattattcaacagactatggggccgggcatgacggtgtcccacgtggcgcgtttgcatggaattc

SEQ ID NO: 857973 - DNA, 75 bp, synthetic construct
  source 1..75: mol_type = other DNA
tctgtgcgacaagcgcggcgacagcgtaagcttcgatgaatactggaagaaagactccaccgccgagctgtatca

SEQ ID NO: 857974 - DNA, 75 bp, synthetic construct
  source 1..75: mol_type = other DNA
ttccacagcctgttctggcctgcaatgctggaaggcagcaacttccgcaagccgaccaacctgtttgttcacggc

SEQ ID NO: 857975 - DNA, 75 bp, synthetic construct
  source 1..75: mol_type = other DNA
ccgacgaactgccggaatttttccgcgtttttaatacgtacaccggaagccagatcgtcaaactggcaatgcggc

SEQ ID NO: 857976 - DNA, 75 bp, synthetic construct
  source 1..75: mol_type = other DNA
gactttgcccgcatagcgggcaaacaggtcaaacttcagattgcccagtttaagttggcccacagccgggccttt

SEQ ID NO: 857977 - DNA, 75 bp, synthetic construct
  source 1..75: mol_type = other DNA
atgaaatattccttagggccggtgctatggtactggccaaaagagacgctggaagaattttatcagcaggccgcc

SEQ ID NO: 857978 - DNA, 75 bp, synthetic construct
  source 1..75: mol_type = other DNA
atgcgttttcatccgctggctgagcgcgtggccctaaatggctgtaattatgttaacctgtcggccatctcagat

SEQ ID NO: 857979 - DNA, 75 bp, synthetic construct
  source 1..75: mol_type = other DNA
gtttggcagtggccacgctcggcgtggccacacacaatacgactggcaccattacttgtctgtgcttcagaagaa

SEQ ID NO: 857980 - DNA, 75 bp, synthetic construct
  source 1..75: mol_type = other DNA
ggcattcccaagcgcggcatctacgacaacatgaagaccgctgtggattcggtggggcgtggcaaagagcgcagg

SEQ ID NO: 857981 - DNA, 75 bp, synthetic construct
  source 1..75: mol_type = other DNA
ggtgcggtactcagtgctgtggaattggcattggagtgtggcaagccatcgaaggagcatgtgcttaatctgttg

SEQ ID NO: 857982 - DNA, 75 bp, synthetic construct
  source 1..75: mol_type = other DNA
acggcaatacctcgggtaacacgaccgtggtggttaaccccattaccggcactggtgaaccgacttctacaggta

SEQ ID NO: 857983 - DNA, 75 bp, synthetic construct
  source 1..75: mol_type = other DNA
gatacgctgacggtaaacggtgattataccggcggcggtacgctactgttcgacagcgaattaaacggcgatgac

SEQ ID NO: 857984 - DNA, 75 bp, synthetic construct
  source 1..75: mol_type = other DNA
gcacagatcattaccactcgtcggggattatcgcctcgctggaggcggggtatcagtggttaccggggcgtggtg

SEQ ID NO: 857985 - DNA, 75 bp, synthetic construct
  source 1..75: mol_type = other DNA
aggaaattaacgctggaacacgctaaaaaattggcaacgcgattcggcatttctcccgccttgtttattgattaa

SEQ ID NO: 857986 - DNA, 75 bp, synthetic construct
  source 1..75: mol_type = other DNA
gattgccgacatcttgcaagcaggagaaaagctaactgctgtggcaccttttctggcgggtattcagaacgagga

SEQ ID NO: 857987 - DNA, 75 bp, synthetic construct
  source 1..75: mol_type = other DNA
ggtgccgtcgatttacatgttactaacgccgtgtttcgcaataacgtcgctaatgacggtaaaggtggcgcaatt

SEQ ID NO: 857988 - DNA, 75 bp, synthetic construct
  source 1..75: mol_type = other DNA
aggaattcatttcgttgtttaaccggacagcctgttatcacaaacgtcataaggtgtttgaagactttgtcagct

SEQ ID NO: 857989 - DNA, 75 bp, synthetic construct
  source 1..75: mol_type = other DNA
atgatgctgtcgtactgggaaaggcactgggcatatctcctcctgaactcctgtttggagaaaaagactcttctg

SEQ ID NO: 857990 - DNA, 75 bp, synthetic construct
  source 1..75: mol_type = other DNA
taaaattaagtacttggtgagtagacttacatcaaccatttcatcccctcccattactgaaacggttacaggcga

SEQ ID NO: 857991 - DNA, 75 bp, synthetic construct
  source 1..75: mol_type = other DNA
catttcgttctgctcagatgatgagggtgtatgcattgatggcgttatcgcggctgtgctgatctcaaatggtca

SEQ ID NO: 857992 - DNA, 75 bp, synthetic construct
  source 1..75: mol_type = other DNA
gcggcgtttactcgcgtatcccgaaaacgtcagttcatgatttatggcggaagtgccattctggccatactgctc

SEQ ID NO: 857993 - DNA, 75 bp, synthetic construct
  source 1..75: mol_type = other DNA
cctcactcactctgtctgcgttgattgacgtaaaaaaaccgccgaaagaggcggcgtttactcgcgtatcccgaa

SEQ ID NO: 857994 - DNA, 75 bp, synthetic construct
  source 1..75: mol_type = other DNA
tatcagaaaagaggatcttcccacaggggcgtcctcattctggtcactggcactgatgataaaacccctcatcga

SEQ ID NO: 857995 - DNA, 75 bp, synthetic construct
  source 1..75: mol_type = other DNA
gcaactggaactgggggataaataccgtagtcagtttttcacgccatggagtgtggccagcatgatggcacagat

SEQ ID NO: 857996 - DNA, 75 bp, synthetic construct
  source 1..75: mol_type = other DNA
cggggccagttttttacgccctggagtgtggccagcatgatggcacagatgcagctggggaatgtgaaggcgttg

SEQ ID NO: 857997 - DNA, 75 bp, synthetic construct
  source 1..75: mol_type = other DNA
gtagtgtgattgccctggaaaaccggcttcagttcagtgaggcccgggaacagaagtatctgcgaatcgtcagtg

SEQ ID NO: 857998 - DNA, 75 bp, synthetic construct
  source 1..75: mol_type = other DNA
ggtcgtatattggcggcggtaagacgggaaatatgtttaaccagttgctggcatccaaaaaattgacgaaaacag

SEQ ID NO: 857999 - DNA, 75 bp, synthetic construct
  source 1..75: mol_type = other DNA
tgtgtggtgtggccggagaagtggtgattggtaactcgctctgtaatgagcgacgccgcgtactgctgactcccg

SEQ ID NO: 858000 - DNA, 75 bp, synthetic construct
  source 1..75: mol_type = other DNA
cagtatgattctggcaatggctgacaccctgaaccgttcggggtatccggcataccacaggatgtgggtgtcggc

SEQ ID NO: 858001 - DNA, 75 bp, synthetic construct
  source 1..75: mol_type = other DNA
atgatgaatataatcagactttatatttatccgttatttctcggctttgttattgtgccgttgttggtgtggccg

SEQ ID NO: 858002 - DNA, 75 bp, synthetic construct
  source 1..75: mol_type = other DNA
gacccacaccggggtaactttatcgttagtaaagatggtgtcaggataattgacctatccggtaaaagctgtacg

SEQ ID NO: 858003 - DNA, 75 bp, synthetic construct
  source 1..75: mol_type = other DNA
agacgctgactcatttgagtggaaaggatgtagctggtcttctcgcataccttggtttgagagaagcggcaaaac

SEQ ID NO: 858004 - DNA, 75 bp, synthetic construct
  source 1..75: mol_type = other DNA
agacgctgactcatttgagtggaaaggatgttgccggtcttctcgcataccttggttttggagaaggtgctaact

SEQ ID NO: 858005 - DNA, 75 bp, synthetic construct
  source 1..75: mol_type = other DNA
ttgacgatcgtgatgcggcgaacctgctgacgaattgtgaaattgtcgtggattcatcgcagctgcctcagcttg

SEQ ID NO: 858006 - DNA, 75 bp, synthetic construct
  source 1..75: mol_type = other DNA
cgggttgcccttactgcgttcgtgcaaaagatctggcagaaaaattaagcaacgagcgcgatgattttcactatc

SEQ ID NO: 858007 - DNA, 75 bp, synthetic construct
  source 1..75: mol_type = other DNA
atgtgtatctaccttaacttaatgatttttaccaaaatcattaggggattcatcagtacgaaatatggtcgctat

SEQ ID NO: 858008 - DNA, 75 bp, synthetic construct
  source 1..75: mol_type = other DNA
gtttgtttgccgctttcacgactggaaaataacgaggcgtcgcatccgctgttggcgacctgtgtcagtgaaatc

SEQ ID NO: 858009 - DNA, 75 bp, synthetic construct
  source 1..75: mol_type = other DNA
ctgaactgattgagcgcatttatggtctgcgctgcatgatcattgacgatccagttgccggaacgccgcttgtgg

SEQ ID NO: 858010 - DNA, 75 bp, synthetic construct
  source 1..75: mol_type = other DNA
tttgcgctgcatgattattgatgatcccgtggcaggaacaccattggtggtgccgctcggacgaacggcaccttc

SEQ ID NO: 858011 - DNA, 75 bp, synthetic construct
  source 1..75: mol_type = other DNA
gggttatgttacctggaggaatgataattcagcgtgtttatcttggatttcctgttggcaccaatgtaagacaca

SEQ ID NO: 858012 - DNA, 75 bp, synthetic construct
  source 1..75: mol_type = other DNA
attcagcaccaccattaacaatgcgctggcaggtaaacaaccgctggacaatacgctgactcatttgagtggaaa

SEQ ID NO: 858013 - DNA, 75 bp, synthetic construct
  source 1..75: mol_type = other DNA
ggttgcatcatttcttcagcatggcaaacatggtctgagggaccggtatatcttttaacgattggaggagttgca

SEQ ID NO: 858014 - DNA, 75 bp, synthetic construct
  source 1..75: mol_type = other DNA
cttgaagagggggactactactggaaagacctgatgggctgccaggtagtaaccactgaaggctacgatctcggt

SEQ ID NO: 858015 - DNA, 75 bp, synthetic construct
  source 1..75: mol_type = other DNA
ccgatgataaggagtatgccgatgttcttgttgctatcactgaagctgccaacaaactgcgaaaagacttaatgg

SEQ ID NO: 858016 - DNA, 75 bp, synthetic construct
  source 1..75: mol_type = other DNA
gttctttagatgaaatcgtactacctgaatcaagttcagatgctgtcgaagagatacttgaagaaaatcgtaggg

SEQ ID NO: 858017 - DNA, 75 bp, synthetic construct
  source 1..75: mol_type = other DNA
gcatctgactttcaccggcgaagattcaccgatggcaaaccttatgttgtctgtcatgggggcattcgccgagtt

SEQ ID NO: 858018 - DNA, 75 bp, synthetic construct
  source 1..75: mol_type = other DNA
gccgagccggatttaatcattcaagcgttcaatgaataccagctattgtgcgctctgcgggaagggccatttggc

SEQ ID NO: 858019 - DNA, 75 bp, synthetic construct
  source 1..75: mol_type = other DNA
cgtttgtcgctgtatgccgatgagcgtattttgagtgcggcaatcgccacgcgcactgagcggcgcagtggtctg

SEQ ID NO: 858020 - DNA, 75 bp, synthetic construct
  source 1..75: mol_type = other DNA
caccgcagtgacccgtgcgcgtcgccgtttatcgttgtatgccgatgagcgcatattaagtgcggcaatcgccac

SEQ ID NO: 858021 - DNA, 75 bp, synthetic construct
  source 1..75: mol_type = other DNA
tcggcgatggcggcggaacattaccaacgccggacgcaaagcagactgggctggtgaatgagaaacgccgggctg

SEQ ID NO: 858022 - DNA, 75 bp, synthetic construct
  source 1..75: mol_type = other DNA
ggcaaacctgaaagatgcgtttggtatcaaggaacgtctcgtaccgttccttgatgggcaggttatcaagaaagt

SEQ ID NO: 858023 - DNA, 75 bp, synthetic construct
  source 1..75: mol_type = other DNA
taatgacgttctcgtcattaaggcaaacctgaaagatgcgtttggtatcaaggaacgtctcgtaccgttcctcga

SEQ ID NO: 858024 - DNA, 75 bp, synthetic construct
  source 1..75: mol_type = other DNA
gtccgccttgatgtactggtatcctcatttctgggtgaaacagccgccaacctgcgtaaaatttttgattttatt

SEQ ID NO: 858025 - DNA, 75 bp, synthetic construct
  source 1..75: mol_type = other DNA
atggctaacggtaaggtattaaggcaactaataaaagcgggcgcaaccggcgataccgccgctttccgtcgcgtt

SEQ ID NO: 858026 - DNA, 75 bp, synthetic construct
  source 1..75: mol_type = other DNA
tgagctggacatgccgctggcaattgtccgccttgatgtattggtatcctcatttctgggtgaaacagccgcaaa

SEQ ID NO: 858027 - DNA, 75 bp, synthetic construct
  source 1..75: mol_type = other DNA
tatgtggatgataaggtactggagctgaaggtgtacgtggatgatcagatggcaaaacatcttgcagcaccggac

SEQ ID NO: 858028 - DNA, 75 bp, synthetic construct
  source 1..75: mol_type = other DNA
tacactggatgtggcttacgaaggttccggctctggtgactggcgtacgagtggagttactgctggcattggcct

SEQ ID NO: 858029 - DNA, 75 bp, synthetic construct
  source 1..75: mol_type = other DNA
acgtctattgcatggtctgtcggcgcgcaatttaacttcaatgaaagtgttactatggacgtcacttatgaaagc

SEQ ID NO: 858030 - DNA, 75 bp, synthetic construct
  source 1..75: mol_type = other DNA
gcgatctgacaccacaaccaccgaaaacaccgcaagccttgctggagtttgccaaagccaatccaggcgcagtta

SEQ ID NO: 858031 - DNA, 75 bp, synthetic construct
  source 1..75: mol_type = other DNA
cggtgttactcatccgtccgtgtacgcatctgaaacccgtccgcgcaacattgcatttaactacatcgtgagggc

SEQ ID NO: 858032 - DNA, 75 bp, synthetic construct
  source 1..75: mol_type = other DNA
ggacttacagggcatcgacctcagacggtgttactcatccgtccgtgtacgcatctgaaacccgtccgcgcaaca

SEQ ID NO: 858033 - DNA, 75 bp, synthetic construct
  source 1..75: mol_type = other DNA
cattgatcttgaacggcactataatataaaaaatgaattgaaagactttggctatacatatctcatattcaaaaa

SEQ ID NO: 858034 - DNA, 75 bp, synthetic construct
  source 1..75: mol_type = other DNA
cggatggatgctctgcagaaagctaacacattgcgcctgtcgctgacctttaaccctgcacatgcgcagcaaaaa

SEQ ID NO: 858035 - DNA, 75 bp, synthetic construct
  source 1..75: mol_type = other DNA
cctatccgcgcccgccagactttactggcaccgcatttcttgaacagttactgattatgctgacgccagatcccg

SEQ ID NO: 858036 - DNA, 75 bp, synthetic construct
  source 1..75: mol_type = other DNA
gggaagatttttcaatgccaacgcaaggtgcggaatcgccctggggcggcgcgcaattgacgtttatcgcccgcc

SEQ ID NO: 858037 - DNA, 75 bp, synthetic construct
  source 1..75: mol_type = other DNA
ccgtctggtttaacgcctggggcggcgacaccgcgattaaccgctatctcgactgggtcagcggtgagatgaaaa

SEQ ID NO: 858038 - DNA, 75 bp, synthetic construct
  source 1..75: mol_type = other DNA
caaggatttcccgccctctcccgcacgaatggataccctgttgaaagcgggctcgttgcgcctgtcgttgacctt

SEQ ID NO: 858039 - DNA, 75 bp, synthetic construct
  source 1..75: mol_type = other DNA
gcgacctcacgccacaaccaccgcaaacgccgcaagcgttgctggaatttgccaaagccaatcctggtacggtca

SEQ ID NO: 858040 - DNA, 75 bp, synthetic construct
  source 1..75: mol_type = other DNA
tggttgaaatgcaatggtgcggctttttctgctgaagaatacccggaactggcaaaggcttacccagagttaaaa

SEQ ID NO: 858041 - DNA, 75 bp, synthetic construct
  source 1..75: mol_type = other DNA
cgggttgcccttactgcgtgcgtgccaaagatttggcagaaaagttaagtaatgaacacgatgattttcactatc

SEQ ID NO: 858042 - DNA, 75 bp, synthetic construct
  source 1..75: mol_type = other DNA
ggtgatggtggtgcgcctttaggtgctgggcggggattcgtgatgaccgcagaaggcccaacattaaccggtttt

SEQ ID NO: 858043 - DNA, 75 bp, synthetic construct
  source 1..75: mol_type = other DNA
tagatgtctaccatgtctggtgggacccggatctcgccagtcagatcctgcgtgccggaaaacgggtaatgactc

SEQ ID NO: 858044 - DNA, 75 bp, synthetic construct
  source 1..75: mol_type = other DNA
cgcacctactgcggcacagtcggtcaacaatacacagattgccaccacggcttttgtgaaatcggcaattgcggc

SEQ ID NO: 858045 - DNA, 75 bp, synthetic construct
  source 1..75: mol_type = other DNA
cttttgtgaaatcggcaattgcagcaatggtggggtcagcacctgctgcactggatacgctgaacgaactggcgg

SEQ ID NO: 858046 - DNA, 75 bp, synthetic construct
  source 1..75: mol_type = other DNA
ctgtcaggtaagcagccactggatgagacgctgactcatttgagtggaaaggatgtagctggtcttctcgcatac

SEQ ID NO: 858047 - DNA, 75 bp, synthetic construct
  source 1..75: mol_type = other DNA
tggctaaaatgcaatggtgcggctttttctgctgaagaatacccggaactggcaaaggtttatccgacaaataaa

SEQ ID NO: 858048 - DNA, 75 bp, synthetic construct
  source 1..75: mol_type = other DNA
cttggtttgggagaaggttcggcattacccgttggtgtgcctgtcccgtggccttccgccactccgccaacaggc

SEQ ID NO: 858049 - DNA, 75 bp, synthetic construct
  source 1..75: mol_type = other DNA
ggtgatggcggtgcgcctttaggcgctgggcgagggttcgtgatgactgcagaaggcccaacgttaaccggcttt

SEQ ID NO: 858050 - DNA, 75 bp, synthetic construct
  source 1..75: mol_type = other DNA
gccgcctgttatatgcaggtggttggcggtctgccaatgggaacaaaagatctgtacgaagcgcgggaacaggtg

SEQ ID NO: 858051 - DNA, 75 bp, synthetic construct
  source 1..75: mol_type = other DNA
accctgaaaactttagtcagggccatttaatgtggaatgatgacttattcagcgaagcacagccgttatgggaag

SEQ ID NO: 858052 - DNA, 75 bp, synthetic construct
  source 1..75: mol_type = other DNA
tggccttgatgcttcaagaattgttccaactgcaaacgaaaatcgaccccgtaacattgcctttaattatatcgt

SEQ ID NO: 858053 - DNA, 75 bp, synthetic construct
  source 1..75: mol_type = other DNA
gatctctactgtttcccgacaattaagagcaatgataattgcatcgtgaaaaattacttaatggttattaatgaa

SEQ ID NO: 858054 - DNA, 75 bp, synthetic construct
  source 1..75: mol_type = other DNA
attttttgaaccgttggatgaataccgatcccaatgcgttcaatactgatttaactaattgcaataaaaataata

SEQ ID NO: 858055 - DNA, 75 bp, synthetic construct
  source 1..75: mol_type = other DNA
acatctcctaacatgactcgtgaatggttgaataaaatcaatgttaaccaattccgaatgattaaggacgacaag

SEQ ID NO: 858056 - DNA, 75 bp, synthetic construct
  source 1..75: mol_type = other DNA
gcaagcttgtatttcgggggcaaaataaagaatcagttttgtctttttctgaaggggtcaactcgatttgcggtg

SEQ ID NO: 858057 - DNA, 75 bp, synthetic construct
  source 1..75: mol_type = other DNA
attcgaaacgtacaaaaaaacttttgaaaaatacggtggtagtgtaaacatgcatccggatgttgtttcatactt

SEQ ID NO: 858058 - DNA, 75 bp, synthetic construct
  source 1..75: mol_type = other DNA
ccacgcagcggtctggacagtgaaaccgagaaaatggtgcaggcgtatccacgtattctgtatatctcctgcaat

SEQ ID NO: 858059 - DNA, 75 bp, synthetic construct
  source 1..75: mol_type = other DNA
gtcagcttatttccgctaataccgacgttgaatcgctggaaacgcacgcccgacaggcgggtatgcgaacgcttt

SEQ ID NO: 858060 - DNA, 75 bp, synthetic construct
  source 1..75: mol_type = other DNA
gttctacccataacaccggtcatacgccagcttatttccgctaataccgacgttgaatcgctggaaacgcacgcc

SEQ ID NO: 858061 - DNA, 75 bp, synthetic construct
  source 1..75: mol_type = other DNA
ggcggtgaaaaggtggtattacggttgttacagcaggtggaccaggcgctggatatcaacacgctggggatgcaa

SEQ ID NO: 858062 - DNA, 75 bp, synthetic construct
  source 1..75: mol_type = other DNA
gtctcggccttggggttgttcgtccggcgcaaaccgccgtacttggaggaacattctggcaacaggtcgtgaatt

SEQ ID NO: 858063 - DNA, 75 bp, synthetic construct
  source 1..75: mol_type = other DNA
acagacaaaatccgggcataccggacacgtgtgcaggctgtttttcccggctacttctttctgaaagtgaacctg

SEQ ID NO: 858064 - DNA, 75 bp, synthetic construct
  source 1..75: mol_type = other DNA
atgaatattccacagctcacggccctgtgcctgcgttatcagggagtcttgctggatgccagcgaagaagtggtt

SEQ ID NO: 858065 - DNA, 75 bp, synthetic construct
  source 1..75: mol_type = other DNA
aaagtagtaccaaagcgacgactcagggactgagcttccgcaatctggcgagacttgctctggttcaggaagatg

SEQ ID NO: 858066 - DNA, 75 bp, synthetic construct
  source 1..75: mol_type = other DNA
ccagattgctttcgcaaccataggcatggataacccggcgcaggcgatcaggaatgcccgtgagaatatcaaaaa

SEQ ID NO: 858067 - DNA, 75 bp, synthetic construct
  source 1..75: mol_type = other DNA
cgaccgaccgactgaacaatcagtggtacattaaccaaagccggacgttaagcccgacggagagagaaatattgc

SEQ ID NO: 858068 - DNA, 75 bp, synthetic construct
  source 1..75: mol_type = other DNA
tggggaatagggcgggtaaagcaaatcaaggatggtttgatattcctaacggttggacagccgacgctttcggga

SEQ ID NO: 858069 - DNA, 75 bp, synthetic construct
  source 1..75: mol_type = other DNA
tacattatttaggaacatatcgaaacggttacgtcgcgaataaaatttttcctgatgagcagagacgtgatcgtt

SEQ ID NO: 858070 - DNA, 75 bp, synthetic construct
  source 1..75: mol_type = other DNA
gctggtttctggcaagcggaaaagatgagtacatggaagacaatggttcagcggtcattctcaatctggttgggg

SEQ ID NO: 858071 - DNA, 75 bp, synthetic construct
  source 1..75: mol_type = other DNA
aacaggggacaaatacggtttcacaggtgaacatcatgagtcagtatatgatcggcagttctggctcgaaaattt

SEQ ID NO: 858072 - DNA, 75 bp, synthetic construct
  source 1..75: mol_type = other DNA
tcaaccagttgatgacggcgatgattgcgggtgtgcgtaataatcccgttctgcgccacaagttgttccagattg

SEQ ID NO: 858073 - DNA, 75 bp, synthetic construct
  source 1..75: mol_type = other DNA
agagttatcagtgcgaaaccatttttgtcgacccaccgcgcagcggtctggacagtgaaaccgagaaaatggtgc

SEQ ID NO: 858074 - DNA, 75 bp, synthetic construct
  source 1..75: mol_type = other DNA
cgtcacagttcccgatcaccttcgcggaaatcctgccgactgcatggcaatcatcatgcaagccatgcaatgggg

SEQ ID NO: 858075 - DNA, 75 bp, synthetic construct
  source 1..75: mol_type = other DNA
ttggtggcgaaaaattccagaaatgcttctttaataatagtaaagataaagaattggttaattacgttaaaaatt

SEQ ID NO: 858076 - DNA, 75 bp, synthetic construct
  source 1..75: mol_type = other DNA
tctgttgtggttacgctggcccggttgtattcctgctgtcccgacgttcagaaggcgctggcggacatcattgtc

SEQ ID NO: 858077 - DNA, 75 bp, synthetic construct
  source 1..75: mol_type = other DNA
aaaaagctggatgatgagtggtgtcagcaggcggaagccctgcgcgatgcactgcgcgcgcagaatctgaatgtg

SEQ ID NO: 858078 - DNA, 75 bp, synthetic construct
  source 1..75: mol_type = other DNA
cccggcgggatcttgtttgcccgcctgttaagcccggctacggaatcttcgcaggtttcctttaataacctctct

SEQ ID NO: 858079 - DNA, 75 bp, synthetic construct
  source 1..75: mol_type = other DNA
gtcgctacggcgcaatctcacaaaccgacatattcagcttattgccattggcggtgccaattggacaggggtgtt

SEQ ID NO: 858080 - DNA, 75 bp, synthetic construct
  source 1..75: mol_type = other DNA
tatggggtccggcaaaacgattagccttttaactccattccgatccgtatcattatgttctacgtcttcgcgctg

SEQ ID NO: 858081 - DNA, 75 bp, synthetic construct
  source 1..75: mol_type = other DNA
gcgtgcgcatggagttcgtcaaagaagggctgaagttcaccggcgaggactcaccgatggccaatctgatgctgt

SEQ ID NO: 858082 - DNA, 75 bp, synthetic construct
  source 1..75: mol_type = other DNA
cacgaactgaagatagaaaatttgcattttcatgacctccgtcatgaggctatcagccgatttttcgaacttggt

SEQ ID NO: 858083 - DNA, 75 bp, synthetic construct
  source 1..75: mol_type = other DNA
acactggcacaagccgcccagcgaggagagcgcgtccctactcctggcgaacttcctacaaacattgatgaacgg

SEQ ID NO: 858084 - DNA, 75 bp, synthetic construct
  source 1..75: mol_type = other DNA
ccgcgcaggcgggcattttcaggtctgcagaatattcgtggacgttaccatcaatggatgaacgagctgcctgag

SEQ ID NO: 858085 - DNA, 75 bp, synthetic construct
  source 1..75: mol_type = other DNA
ggtgagctacaaaattgggaagaatgcttgctggcttcacaagcggtcagccggggagatgaacccacgccgatg

SEQ ID NO: 858086 - DNA, 75 bp, synthetic construct
  source 1..75: mol_type = other DNA
attttaagtgcggcaattgccacgcgcactgagcggcgcagtggtctggcggcattgtttagttcgcgggaataa

SEQ ID NO: 858087 - DNA, 75 bp, synthetic construct
  source 1..75: mol_type = other DNA
gagttcgaccatgcggcgttgattttaccgagccaacgcacgccggtagtaacacgagagctggtttacaccgcg

SEQ ID NO: 858088 - DNA, 75 bp, synthetic construct
  source 1..75: mol_type = other DNA
aatcgcctgcgcaacttaccccaattaaccgttgcgaatctcaacggtcataccatcggcggtggtattgaactt

SEQ ID NO: 858089 - DNA, 75 bp, synthetic construct
  source 1..75: mol_type = other DNA
acctgcctggtcggtttcattatttacgcagtccaacttgccggtgtaccgttaaatattgaattgacacatatc

SEQ ID NO: 858090 - DNA, 75 bp, synthetic construct
  source 1..75: mol_type = other DNA
tatgatcaccgaagatattgatattagctggaagctgcagttgaatcagtggacgattttttacgagccacgggc

SEQ ID NO: 858091 - DNA, 75 bp, synthetic construct
  source 1..75: mol_type = other DNA
cataaaaaaggtcatctgcaggagttttatcgcgtcaatgtgattaaacgtcaccctatggccgatcgctatatg

SEQ ID NO: 858092 - DNA, 75 bp, synthetic construct
  source 1..75: mol_type = other DNA
aatctggtgtgaacaaacccgtctggccgcactggtcgatcctggcggcgatgcggaaaaaatcaaacaggaagt

SEQ ID NO: 858093 - DNA, 75 bp, synthetic construct
  source 1..75: mol_type = other DNA
gtagggttcgctattgttacgctggtagtctgtatgctggcagcgtgggaatggggacagcttagcggttttacc

SEQ ID NO: 858094 - DNA, 75 bp, synthetic construct
  source 1..75: mol_type = other DNA
ctatgacgagaatcattacagtggcgcgatatggctgctctatgtcatgatcctggtctggggcgctgactctgg

SEQ ID NO: 858095 - DNA, 75 bp, synthetic construct
  source 1..75: mol_type = other DNA
tccagaaatcgcccagcttggtttacgggcgctggcagcagcaacgctttccaacctgatgagtgcgactattgc

SEQ ID NO: 858096 - DNA, 75 bp, synthetic construct
  source 1..75: mol_type = other DNA
acagcggcggtgtatcagaaagttgtgatactggaagataaactgccggaaaaacctgtcacgggtaagaaccgg

SEQ ID NO: 858097 - DNA, 75 bp, synthetic construct
  source 1..75: mol_type = other DNA
gattggtccacaagggctgaccggcaacagttcagtgatgggcgcatcgtcgcggcacgctgctggttcatgccg

SEQ ID NO: 858098 - DNA, 75 bp, synthetic construct
  source 1..75: mol_type = other DNA
tatcagccgatttttcgaacttggtacattgaatgtcattgaagttgccgctatttcaggccatcgctccctgaa

SEQ ID NO: 858099 - DNA, 75 bp, synthetic construct
  source 1..75: mol_type = other DNA
ctggaaacagcaatgcgacaaggtgaaatcttgtcattgcgttgggaacacgtcgatctgcaacatggggtagct

SEQ ID NO: 858100 - DNA, 75 bp, synthetic construct
  source 1..75: mol_type = other DNA
gacaccggcgaaatcatgtttttcgttaaagtcggttcccgtttcccgctgcttggcgagctgcaaagcattctt

SEQ ID NO: 858101 - DNA, 75 bp, synthetic construct
  source 1..75: mol_type = other DNA
tcgatgcccgacgcaagcaaaccagcaaaatcgctccctattttgttccctacccggcaacggtcgagaacagaa

SEQ ID NO: 858102 - DNA, 75 bp, synthetic construct
  source 1..75: mol_type = other DNA
aagttgccgctatttcaggccaccgctccctgaacatgttaaaacggtacacgcatctccgggcatatcagctgg

SEQ ID NO: 858103 - DNA, 75 bp, synthetic construct
  source 1..75: mol_type = other DNA
ggtgcagaaacgggctgtttgtcgtgacactgcacgatttcgaccttgaaacccgtgcagaaacccgggaactgg

SEQ ID NO: 858104 - DNA, 75 bp, synthetic construct
  source 1..75: mol_type = other DNA
cctttacaaaagaacaatatcctgttctggccagagcctacccgaccctccgtcttcccgatttacgcggtgagt

SEQ ID NO: 858105 - DNA, 75 bp, synthetic construct
  source 1..75: mol_type = other DNA
tttaacgaactgaggaatatctccccggcagccttcaggaaaaaaacattatcagatgattgcttaaaaaagaac

SEQ ID NO: 858106 - DNA, 75 bp, synthetic construct
  source 1..75: mol_type = other DNA
tcaactgtcagaaaatatctcgattctgtaagagctgaactgggaggtgtctcgttggcagggatcagaacactg

SEQ ID NO: 858107 - DNA, 75 bp, synthetic construct
  source 1..75: mol_type = other DNA
ctctcgcggagagtttgttgaatggattagcgaccaaaatgatccgaaatgggttaaggggattgaaacccgcga

SEQ ID NO: 858108 - DNA, 75 bp, synthetic construct
  source 1..75: mol_type = other DNA
cacagcgtgtaacagaagaaggaaaaaaggatgatgaagaaaaacctcaaccatctgacgcaatggcagatgagc

SEQ ID NO: 858109 - DNA, 75 bp, synthetic construct
  source 1..75: mol_type = other DNA
catatccatctggatgaaaactgattatctggatcagggattactgacaaaagagtgggcgaagggaaattatgt

SEQ ID NO: 858110 - DNA, 75 bp, synthetic construct
  source 1..75: mol_type = other DNA
gccttgaacctggtgaaaaaagtatggtgcgcctttccagcacaccggaaataaataaactccctcaggatagag

SEQ ID NO: 858111 - DNA, 75 bp, synthetic construct
  source 1..75: mol_type = other DNA
ttgctcggctttgaggatattcctgttgaggaagcggctgccgaggcgcgaaagcatcagagcgtacaaccgacc

SEQ ID NO: 858112 - DNA, 75 bp, synthetic construct
  source 1..75: mol_type = other DNA
gccagaatccattaaagcaaagcccaacgcagtatggcaggaccagctggtgctgaacaaaaccagcggaggcta

SEQ ID NO: 858113 - DNA, 75 bp, synthetic construct
  source 1..75: mol_type = other DNA
acagacatggacaggtcgtggacgtatgccgttagctctgaaagcattgatcgatggcggtaaggagctggaaag

SEQ ID NO: 858114 - DNA, 75 bp, synthetic construct
  source 1..75: mol_type = other DNA
aagagcgatgagaacgcacagccttttttacatgcgctaattgcgcagacggataaaacggtgcctgcgcaataa

SEQ ID NO: 858115 - DNA, 75 bp, synthetic construct
  source 1..75: mol_type = other DNA
gcaacgtatcaggacacctttaatgaagaaaacctggatgaatatcaggaaaaaaatccggagaaacaggaaagc

SEQ ID NO: 858116 - DNA, 75 bp, synthetic construct
  source 1..75: mol_type = other DNA
gcatttgcagagagaccagattttacgctggccgcagaggcgctgcgccttctgactcgtcaggacaatgcgcga

SEQ ID NO: 858117 - DNA, 75 bp, synthetic construct
  source 1..75: mol_type = other DNA
gccatgcgtctggttgcgatgtttccggcgcgcagtgggctcagcgttgaggttcttcaactgcgcaatcgcggg

SEQ ID NO: 858118 - DNA, 75 bp, synthetic construct
  source 1..75: mol_type = other DNA
gcaacactgcgtctgcgtatgcaacgtgccggtgtttctacagcggcctaccgtatcgccactattgatggattt

SEQ ID NO: 858119 - DNA, 75 bp, synthetic construct
  source 1..75: mol_type = other DNA
gcagtcggctgctgccggaggctgcacatttgcagacgccacggtaaacgagcgcgaacgcaatcgccacgagag

SEQ ID NO: 858120 - DNA, 75 bp, synthetic construct
  source 1..75: mol_type = other DNA
gccatgcgtcttgtggcgatgtttccggcgcggagtgggctcaatgttgaggtccttcaactacgcaatcgcaga

SEQ ID NO: 858121 - DNA, 75 bp, synthetic construct
  source 1..75: mol_type = other DNA
atacggggaccaggccggtacttatcctcacgcacaccaacgcgggtgtgacaacactgcgtctgcgtatgcaac

SEQ ID NO: 858122 - DNA, 75 bp, synthetic construct
  source 1..75: mol_type = other DNA
atgcagaccattcgttttttacctgaccgtctcaacagtgagcccgtggtgtttcgcggattcaccacccatgag

SEQ ID NO: 858123 - DNA, 75 bp, synthetic construct
  source 1..75: mol_type = other DNA
ttgcaacagtgccataaccagaccgttcagctggatattacggcctttttaaagaccgtaaagaaaaataagcac

SEQ ID NO: 858124 - DNA, 75 bp, synthetic construct
  source 1..75: mol_type = other DNA
cggtgcgtgaactgctgggtataaccgcagccgacgaacgcctggtatatgacacgattatccgctccctgagga

SEQ ID NO: 858125 - DNA, 75 bp, synthetic construct
  source 1..75: mol_type = other DNA
attattgacggactcaattatcctaaccatgaagcaattgatttttatcaccgctataaggacgatattaaatta

SEQ ID NO: 858126 - DNA, 75 bp, synthetic construct
  source 1..75: mol_type = other DNA
tatggggcggtgcggtagccgcgcatcagttggaaggtggctggaatgaaggaggaaaaggcatcagcatcgctg

SEQ ID NO: 858127 - DNA, 75 bp, synthetic construct
  source 1..75: mol_type = other DNA
agcaacctccagttcagataccaaaaaatgcagatattctttgcagcacaaaactggccgcattaatagcacgcc

SEQ ID NO: 858128 - DNA, 75 bp, synthetic construct
  source 1..75: mol_type = other DNA
actggctgatgtgcagattaacatcaggggaaatgtttatatccccccatgcaccattaataacgggcagaatat

SEQ ID NO: 858129 - DNA, 75 bp, synthetic construct
  source 1..75: mol_type = other DNA
tcaaaacactacaggtaatgctgcgaccgccacgaaacttcaggcagccagaacgattaacggtgtgtcatttga

SEQ ID NO: 858130 - DNA, 75 bp, synthetic construct
  source 1..75: mol_type = other DNA
aacagcaccagtgaaaagctggcggcaacgccaaaggcagttaaaactgttaaagatagttcagttcaaaaaact

SEQ ID NO: 858131 - DNA, 75 bp, synthetic construct
  source 1..75: mol_type = other DNA
cagatctcatgtttcagtgatctgcagtattatattaagttaatactggatgattcatgtcgagataagattatt

SEQ ID NO: 858132 - DNA, 75 bp, synthetic construct
  source 1..75: mol_type = other DNA
caagagaaatgcgaaatgtttatcatgatagccaagatgctgctattacaagaataaaatatgatattcagattc

SEQ ID NO: 858133 - DNA, 75 bp, synthetic construct
  source 1..75: mol_type = other DNA
aaaacaatatgcgtaatgtttatcatgacagtcaagatgtgggtataaccagaataaaatatgatgtacagattc

SEQ ID NO: 858134 - DNA, 75 bp, synthetic construct
  source 1..75: mol_type = other DNA
cggttcaggaaacggttaccggttgacaactggtctggatgcagcgaattcaacgttcacctttacttctgtgcc

SEQ ID NO: 858135 - DNA, 75 bp, synthetic construct
  source 1..75: mol_type = other DNA
gggaatcaccgtgtttattcaaatatgaccgctaatggcgacagaacaattgagtttgcccgtctgttttcccgt

SEQ ID NO: 858136 - DNA, 75 bp, synthetic construct
  source 1..75: mol_type = other DNA
gaaaacgagcgggaattattacaacagattgcacaaaaaccaggtgcgcttcgtatcctgaatcactcgctgcgc

SEQ ID NO: 858137 - DNA, 75 bp, synthetic construct
  source 1..75: mol_type = other DNA
cccgccatcacatgccgggaccattaccgtgtatgaagattctcaacccggtacgctgaatgattttctcggtgc

SEQ ID NO: 858138 - DNA, 75 bp, synthetic construct
  source 1..75: mol_type = other DNA
aggggaaatgtttatatccccccatgcaccattaataacgggcagaatattgttgttgattttgggaatattaat

SEQ ID NO: 858139 - DNA, 75 bp, synthetic construct
  source 1..75: mol_type = other DNA
tgtgctgtgcaattaccgccagcgcattaatttccaccggggtaaatgccgcttcctggaaagatgcgctctcca

SEQ ID NO: 858140 - DNA, 75 bp, synthetic construct
  source 1..75: mol_type = other DNA
tgtagagttagtattatcgcaggaaaagtatgccgtaagcaggcctaaacaggataacggttctttccatccggc

SEQ ID NO: 858141 - DNA, 75 bp, synthetic construct
  source 1..75: mol_type = other DNA
atcgtgacttcatcggtcgtgaagccctggaagtgcagcgtgaacatggcacagaaaaactggttggtctggtga

SEQ ID NO: 858142 - DNA, 75 bp, synthetic construct
  source 1..75: mol_type = other DNA
aattccgcgaagatctcttctaccgacttaatgttatcccgataactctgccaccgctgcgtgaacgtcaggaag

SEQ ID NO: 858143 - DNA, 75 bp, synthetic construct
  source 1..75: mol_type = other DNA
ccacttctgtcttcctttattaatgaagatgccattcacccatggttatattatatggcattgtaccagtttaca

SEQ ID NO: 858144 - DNA, 75 bp, synthetic construct
  source 1..75: mol_type = other DNA
gtttcgcttgatgaataaacgagttagtttgcttgcagatctcgacgccttagctgacgataataatttagtcaa

SEQ ID NO: 858145 - DNA, 75 bp, synthetic construct
  source 1..75: mol_type = other DNA
aagaacacttcccggatcgctattttctcgagctgatccgcaccggcaggccggatgaagaaagctatctgcacg

SEQ ID NO: 858146 - DNA, 75 bp, synthetic construct
  source 1..75: mol_type = other DNA
tgaagctctggaagtgcagcgtgagcatggcacagaaaaactggttggtctggtgatgaccgaaaaaggcgtgct

SEQ ID NO: 858147 - DNA, 75 bp, synthetic construct
  source 1..75: mol_type = other DNA
agaataaaatatgatattcagatccttaccgatgaggaaaaagagaataccacagactttgaatacttacctctg

SEQ ID NO: 858148 - DNA, 75 bp, synthetic construct
  source 1..75: mol_type = other DNA
ccacttctatcttcatttattaaggaagatgcagttcacccatggttgtattatatagcattatgtcagtttgca

SEQ ID NO: 858149 - DNA, 75 bp, synthetic construct
  source 1..75: mol_type = other DNA
ggggaaatatcgacatttaaaaattctgtattgttagataccagaattgttgatttgacatacaatcattttgag

SEQ ID NO: 858150 - DNA, 75 bp, synthetic construct
  source 1..75: mol_type = other DNA
agaataaaatatgatattcagatcattacagatgaggaaaaagagaataccacagactttgaatacttacctctg

SEQ ID NO: 858151 - DNA, 75 bp, synthetic construct
  source 1..75: mol_type = other DNA
ttaattccggtcataaaaatgtatccagtgctaatgataaacgaggctctgcccgatgggtaagttcagatgatg

SEQ ID NO: 858152 - DNA, 75 bp, synthetic construct
  source 1..75: mol_type = other DNA
tgacagtcaggatgctggtattacaagaataaaatatgatattcagattgttacagatgaggaaaaagagaatag

SEQ ID NO: 858153 - DNA, 75 bp, synthetic construct
  source 1..75: mol_type = other DNA
aagccaggtggatacgggcacgactgtgacgttggccacttatcgttattcaacgaaggatttctattccttcgg

SEQ ID NO: 858154 - DNA, 75 bp, synthetic construct
  source 1..75: mol_type = other DNA
gatcgtcatcccgctgatgattatcccgatgctcggttccaataccgtgcagggtgatgctgccaacttactgat

SEQ ID NO: 858155 - DNA, 75 bp, synthetic construct
  source 1..75: mol_type = other DNA
cattttactggcaggtacggcactggttggcggcgtacagcctgccgatccgatcaccgttgacgcgatgatccc

SEQ ID NO: 858156 - DNA, 75 bp, synthetic construct
  source 1..75: mol_type = other DNA
atagctgccgataaacagatccgcgctaaagcgacaatagcagagaaggcagagattaaacgccagcaagctttc

SEQ ID NO: 858157 - DNA, 75 bp, synthetic construct
  source 1..75: mol_type = other DNA
cagtgtgacggataatggtgccattgtggttaatgccagcggtgtgtccggtatcggcaccagtgcgggcggacg

SEQ ID NO: 858158 - DNA, 75 bp, synthetic construct
  source 1..75: mol_type = other DNA
aaaaccggattgacctgcgtactgacggtctgccggacgatatcgtactggcagagacgtcagcacgtactgtgc

SEQ ID NO: 858159 - DNA, 75 bp, synthetic construct
  source 1..75: mol_type = other DNA
atctggatcatcggggaggactggactcgatattacgtacctggccgacgttatgggtcagaagccctttaaatg

SEQ ID NO: 858160 - DNA, 75 bp, synthetic construct
  source 1..75: mol_type = other DNA
ccagtggtgtgtgtggctggaggcattatgatgtgctggccgctgtggcaaaaaccacagcccgacgagtggcag

SEQ ID NO: 858161 - DNA, 75 bp, synthetic construct
  source 1..75: mol_type = other DNA
gcgtaatttgtgggatttttccactgctggtattaccgcaactacccgggacgttagccactgcagttcttacaa

SEQ ID NO: 858162 - DNA, 75 bp, synthetic construct
  source 1..75: mol_type = other DNA
attaacgtcttcgtcagcagcaaagagttgaaatttaccggcggatcggtacaggtattccacggcatggcggcg

SEQ ID NO: 858163 - DNA, 75 bp, synthetic construct
  source 1..75: mol_type = other DNA
ccgccgttattcatcatgctggcttatctgaatttacgcgccaaattagatcacctgccacgcgatttccgtatg

SEQ ID NO: 858164 - DNA, 75 bp, synthetic construct
  source 1..75: mol_type = other DNA
tattgtcatcttcctcggctttgcgtggtggaaatatagtaaatatataaagggactcacagctgaagagcgcca

SEQ ID NO: 858165 - DNA, 75 bp, synthetic construct
  source 1..75: mol_type = other DNA
atggatttaaacatctcaaccttaacaaacaaggttgtatttaaagttgattttgcatcattacagaaagcaagg

SEQ ID NO: 858166 - DNA, 75 bp, synthetic construct
  source 1..75: mol_type = other DNA
taaaattcaacaatcaattaatgccttgcataaacatggcatggtttctggcgaccctcatcgtggtaacttcat

SEQ ID NO: 858167 - DNA, 75 bp, synthetic construct
  source 1..75: mol_type = other DNA
gcatattaagtgcggcaattgccacgcgcaccgagcggcgcagtggtctggcggcgttgtttagttcacggggat

SEQ ID NO: 858168 - DNA, 75 bp, synthetic construct
  source 1..75: mol_type = other DNA
actctggacaatgccttcaacaagcttgccatgaatggcaaaggggtgccgctttctggcagaactgtcagtctt

SEQ ID NO: 858169 - DNA, 75 bp, synthetic construct
  source 1..75: mol_type = other DNA
aggtgcggaatcgccctggggcggcgcacaactgacgtttatcgcccgccgcgatgttacgccacagccaccaca

SEQ ID NO: 858170 - DNA, 75 bp, synthetic construct
  source 1..75: mol_type = other DNA
gtcaccattcctgctaacgcaaatgccagtgctgcggcgaaggtggttgccaacttcctgctctcacccaatgcg

SEQ ID NO: 858171 - DNA, 75 bp, synthetic construct
  source 1..75: mol_type = other DNA
ggcggagactctgcccaactggcgctatgtcgacacacagctgccggtgcgggaagatttttcagtgcctacaga

SEQ ID NO: 858172 - DNA, 75 bp, synthetic construct
  source 1..75: mol_type = other DNA
catggaatcaaaccgtcgcatcagggcagagattaagcagatcatgattaattcctccccacaacactcaagctg

SEQ ID NO: 858173 - DNA, 75 bp, synthetic construct
  source 1..75: mol_type = other DNA
gcagatttctgtctggattaaaactcaatcgtcgttcaaattttccgacgatgaagcagtatcgcaggggatgcg

SEQ ID NO: 858174 - DNA, 75 bp, synthetic construct
  source 1..75: mol_type = other DNA
aaaatgcattattgcacgcgacatcatttgcaaacgtcgttactcacgggtaattgagaaagcgtatgtcgcaaa

SEQ ID NO: 858175 - DNA, 75 bp, synthetic construct
  source 1..75: mol_type = other DNA
ccgatacaatagcttcaatgcccgtgccggagaactaaacgctgaacgtctgtcccccagagcagcgatgtctgt

SEQ ID NO: 858176 - DNA, 75 bp, synthetic construct
  source 1..75: mol_type = other DNA
tcatttgtacattaatcatacttccggtggggttacaggcagcgacaagtcattcttctatggctaaagatacaa

SEQ ID NO: 858177 - DNA, 75 bp, synthetic construct
  source 1..75: mol_type = other DNA
aagtacgacagtgctttatttgagttagagcaaataaattgtgatgagagcaatggtatcaatcagctacttgat

SEQ ID NO: 858178 - DNA, 75 bp, synthetic construct
  source 1..75: mol_type = other DNA
ggctggcaatggtgatagccagaaacggcaaagcgattctctatgacacaggactggcctggcctggcctgaagg

SEQ ID NO: 858179 - DNA, 75 bp, synthetic construct
  source 1..75: mol_type = other DNA
atggcaaccaacaatcgtaaagccaagatgcttatttcccgtgtatacagccgttgctatcccagccagtggttg

SEQ ID NO: 858180 - DNA, 75 bp, synthetic construct
  source 1..75: mol_type = other DNA
atgaaaaaccgtaaagctaagatgcttatctcccgtgtatacagattttgctaccccagccagtggttgagagtt

SEQ ID NO: 858181 - DNA, 75 bp, synthetic construct
  source 1..75: mol_type = other DNA
atgttctcgatataatggaagacatacaaaagcagcaaccatcgcatttctacccttggatttctgatggtaaga

SEQ ID NO: 858182 - DNA, 75 bp, synthetic construct
  source 1..75: mol_type = other DNA
acctcctttaaagaagaagatccgcacgacgatgtatcaacatggtcaattgagtgcgaaagcgctggcaaggtc

SEQ ID NO: 858183 - DNA, 75 bp, synthetic construct
  source 1..75: mol_type = other DNA
gctgacgccaccgccgataaatcagccgattacacgaaagaatcaatggttacttacaaatccgtttctttctcc

SEQ ID NO: 858184 - DNA, 75 bp, synthetic construct
  source 1..75: mol_type = other DNA
tgaaacattacgggatgatggattgtggtttttgcaaaaagcccagcgcggcgcaaaaccgctggaaaaaccact

SEQ ID NO: 858185 - DNA, 75 bp, synthetic construct
  source 1..75: mol_type = other DNA
attaaaaacaaaagacaaattggattcatttaaagcagttagagatgagttacatttttttctgtcacaacaggg

SEQ ID NO: 858186 - DNA, 75 bp, synthetic construct
  source 1..75: mol_type = other DNA
ggtttgctctatacctcggtacatcaggttattgaactacctgcgcccgcgcagccgatttctgtcacgatggtt

SEQ ID NO: 858187 - DNA, 75 bp, synthetic construct
  source 1..75: mol_type = other DNA
gatatgatcaccgaagatattgatattagctggaagctgcagttgaatcagtggacgattttttacgagccacgg

SEQ ID NO: 858188 - DNA, 75 bp, synthetic construct
  source 1..75: mol_type = other DNA
atgaaaaaccgtaaagctaagatgcttatctcccgtgtatacagactttgctatcccagccagtggttgagagtt

SEQ ID NO: 858189 - DNA, 75 bp, synthetic construct
  source 1..75: mol_type = other DNA
tatattctggaattgccagagagggagtcaaatataagcgcagcgcggcgcaaaaccgctggaaaaaccacttac

SEQ ID NO: 858190 - DNA, 75 bp, synthetic construct
  source 1..75: mol_type = other DNA
ttatttcccgtgtatacagacgttgctatcccagccagtggttgagagttagcaatcgccgtgtggtgttgtact

SEQ ID NO: 858191 - DNA, 75 bp, synthetic construct
  source 1..75: mol_type = other DNA
caaattcagttttacccaggatggttcgccattcccggtaaaagagcctgaagctttatatattcatggtactgc

SEQ ID NO: 858192 - DNA, 75 bp, synthetic construct
  source 1..75: mol_type = other DNA
tgatagccagcgttatgccattgcccagcatcagccgctcaccggccgctttctgcaggcaagtgtcattgaacc

SEQ ID NO: 858193 - DNA, 75 bp, synthetic construct
  source 1..75: mol_type = other DNA
tgcctggtagtgatgacaaaggaaataaccattcctgcgtggttaagattgatgatggaacatatagcattcttt

SEQ ID NO: 858194 - DNA, 75 bp, synthetic construct
  source 1..75: mol_type = other DNA
ttatgatgtgctggccgctatggcaaaaaccccggcctgatgaatggcaggtgtacatgcttgatgttgggcaag

SEQ ID NO: 858195 - DNA, 75 bp, synthetic construct
  source 1..75: mol_type = other DNA
tacttttctggggattaaagagtttgccagaagggtggatcaacattgctgaacgttggcaatggctatcatttt

SEQ ID NO: 858196 - DNA, 75 bp, synthetic construct
  source 1..75: mol_type = other DNA
gttaatcctggagcaagggttatggtttcttgccgaccggtctttggctttacttttctggggattaaagagttt

SEQ ID NO: 858197 - DNA, 75 bp, synthetic construct
  source 1..75: mol_type = other DNA
tcaggtacctcaccatggcagtaatacctcatcatcgttgccattaattcagcgagtgaatggaaaagtggcact

SEQ ID NO: 858198 - DNA, 75 bp, synthetic construct
  source 1..75: mol_type = other DNA
ccggaaaattctcgctctcacgccacggttatcactcgcgaaaacggcgtcttttgtggtaaacgctgggttgaa

SEQ ID NO: 858199 - DNA, 75 bp, synthetic construct
  source 1..75: mol_type = other DNA
aaaggagaaacacctgtattgcatggtggagggatcaccggaagtcggttcggaaacggctgggttgatattgct

SEQ ID NO: 858200 - DNA, 75 bp, synthetic construct
  source 1..75: mol_type = other DNA
ttaattgttgcggcagtgggtaatgatggcgcagatatacgaaaactgagtgctcagcagagaatatggccagcg

SEQ ID NO: 858201 - DNA, 75 bp, synthetic construct
  source 1..75: mol_type = other DNA
atgaacattacgattattcctgctatggaaaaagaccagaagaatgagaatacattacagctggcaattattagc

SEQ ID NO: 858202 - DNA, 75 bp, synthetic construct
  source 1..75: mol_type = other DNA
tggacgagtcggaatcgcagaccgataccaggatcttgccattctatggaactgcctcggtgaattttctccttc

SEQ ID NO: 858203 - DNA, 75 bp, synthetic construct
  source 1..75: mol_type = other DNA
atgcgccagtagaagtcgaagtagagaatctggaagaacttgatgaggccctgaaagccggagccgatatcatca

SEQ ID NO: 858204 - DNA, 75 bp, synthetic construct
  source 1..75: mol_type = other DNA
ctatcgcagggttattagtagtatcgccactgatgagcaaaatgaaagtttctttcaaactgcagcgtttctcga

SEQ ID NO: 858205 - DNA, 75 bp, synthetic construct
  source 1..75: mol_type = other DNA
ggcgacgccctccccgtttccgcgttgccgccagacggcacctggccgatgggtactacacgatgggaaaaacgc

SEQ ID NO: 858206 - DNA, 75 bp, synthetic construct
  source 1..75: mol_type = other DNA
gcgcgattgccaaaagctacagcagcaaaggccaggatctggtggagcgcaactggcaggcactggcgctggcgc

SEQ ID NO: 858207 - DNA, 75 bp, synthetic construct
  source 1..75: mol_type = other DNA
cgcccttatctggtgcgtattaatcgtgtgctgcacgttgttgatattcacactcctgacccggaatcgtctgtg

SEQ ID NO: 858208 - DNA, 75 bp, synthetic construct
  source 1..75: mol_type = other DNA
atgtttatgtggcgcagatttctctcggcgcgcagttgaaccagacggtaaaagcaattcaggaagcggaagcct

SEQ ID NO: 858209 - DNA, 75 bp, synthetic construct
  source 1..75: mol_type = other DNA
tttgaagataacgccgaatttggcctgggcttccgcctgacggtcgatcagcatcgtgtccgcgtattgcgtctg

SEQ ID NO: 858210 - DNA, 75 bp, synthetic construct
  source 1..75: mol_type = other DNA
gcagtttatcgacaaatatcagatggcagaacgtctgaaacccggcggcattttcctgcttaacaccccgtacag

SEQ ID NO: 858211 - DNA, 75 bp, synthetic construct
  source 1..75: mol_type = other DNA
ggcaataaaacctgcgaagtggctctggaactcaaccaggcgcgcggtgccgtctgggtcggtgatgtggtctgc

SEQ ID NO: 858212 - DNA, 75 bp, synthetic construct
  source 1..75: mol_type = other DNA
gcaattagctttcggttagcacagctaaaagatgcctggcgagcgctgcacagtaccgaggcacgcctgaagaaa

SEQ ID NO: 858213 - DNA, 75 bp, synthetic construct
  source 1..75: mol_type = other DNA
atgacctggatcacaaaccgattttttagctggtgcgaaatcggcatcaaaaccatgattcttttactgttgttg

SEQ ID NO: 858214 - DNA, 75 bp, synthetic construct
  source 1..75: mol_type = other DNA
gtgacctgtacaaccgcgtttcagcaatccagcagatggaaaccaacgtgggcctggataagtatggaaatgtgg

SEQ ID NO: 858215 - DNA, 75 bp, synthetic construct
  source 1..75: mol_type = other DNA
ctcgctgtaatcatcggtttaattggcgctggcggtaagctctcgcaaaatcggctttcggggctgattttcgaa

SEQ ID NO: 858216 - DNA, 75 bp, synthetic construct
  source 1..75: mol_type = other DNA
agatcacaatgaagggctgtttggccgaagctgaatataaaaaatggaatggtgtcggaaaaccatcagcggatg

SEQ ID NO: 858217 - DNA, 75 bp, synthetic construct
  source 1..75: mol_type = other DNA
ctctcaacatcgtttacgtcatcgcagggtttgctgctgatgatcccgacgctgtacaaactggcaggcgaactg

SEQ ID NO: 858218 - DNA, 75 bp, synthetic construct
  source 1..75: mol_type = other DNA
acatgaaattctttgctgaacgtgtggacaaagatgctgttagccgcctggaacgcttcattgaagcagatttcg

SEQ ID NO: 858219 - DNA, 75 bp, synthetic construct
  source 1..75: mol_type = other DNA
caggctgtcatcaataattctctgcccaattacaatgaagacgtcctgcgtctgaccaccggttgctcggtcatt

SEQ ID NO: 858220 - DNA, 75 bp, synthetic construct
  source 1..75: mol_type = other DNA
accgttgcagcaatggacgttctggctccgggtatcggtgagatcattggtggttcccagcgtgaagagcgtctg

SEQ ID NO: 858221 - DNA, 75 bp, synthetic construct
  source 1..75: mol_type = other DNA
aaagcgccggttgttgtgaaaaactatccgaaagatattaaagcgttctacatgcgccttaacgaagacggtaaa

SEQ ID NO: 858222 - DNA, 75 bp, synthetic construct
  source 1..75: mol_type = other DNA
tcagggcaaagtggatttcgacaaagacttctttggtaaagagtctttcctgaccgtatctggccagttgaacgg

SEQ ID NO: 858223 - DNA, 75 bp, synthetic construct
  source 1..75: mol_type = other DNA
acgctacctggcagaagagcactttaaagcaccggtagtggtgaaaaactatccaaaagacattaaagcgttcta

SEQ ID NO: 858224 - DNA, 75 bp, synthetic construct
  source 1..75: mol_type = other DNA
atgtttatgtggcgcagatttctctcggtgcgcaactgaaccagacagtgaaagcgattcaggaagcggaagcgt

SEQ ID NO: 858225 - DNA, 75 bp, synthetic construct
  source 1..75: mol_type = other DNA
agcaactaaaggatatcgctgaagctcatgaactgctgcgcgacgctgatgcgctggtggaaaaatcaatatggc

SEQ ID NO: 858226 - DNA, 75 bp, synthetic construct
  source 1..75: mol_type = other DNA
agttggcgtgctgaaagttcgcctgtaccgtcccttctccgccaaacacttgctgcaagctctgccgggatccgt

SEQ ID NO: 858227 - DNA, 75 bp, synthetic construct
  source 1..75: mol_type = other DNA
aacatcttgccgggctgcggaacaacgaccaactgctgctgatgctggtcatgtctttcctgctgattaacgtct

SEQ ID NO: 858228 - DNA, 75 bp, synthetic construct
  source 1..75: mol_type = other DNA
ccgcttttgcaaactcaataatcctatgatgtcacgcattgctaccgacctgcgtcagcgtcatgtacagcctta

SEQ ID NO: 858229 - DNA, 75 bp, synthetic construct
  source 1..75: mol_type = other DNA
gcagccggttaatccgcacagcgccaatcgaccgcctgtggtttccgatgccgctcctgatttcgtgaaaaccgt

SEQ ID NO: 858230 - DNA, 75 bp, synthetic construct
  source 1..75: mol_type = other DNA
tggagttattgattaatgccggacaggcgcgctctgatgcgatggaagcgatacgatgtgcaacggtaaaaaact

SEQ ID NO: 858231 - DNA, 75 bp, synthetic construct
  source 1..75: mol_type = other DNA
gctcctcccggcagtaccacgacattaggcctttttgcctgggcggttgcattcatcgtctttactgcatttttt

SEQ ID NO: 858232 - DNA, 75 bp, synthetic construct
  source 1..75: mol_type = other DNA
tatattgtttttctcaccgcgtttgacgaatacgctattaaagcctttgaagaacatgcctttgattatctgctg

SEQ ID NO: 858233 - DNA, 75 bp, synthetic construct
  source 1..75: mol_type = other DNA
atgattaaggtattaattgtcgatgatgaaccgcttgcaagagagaacctgcgcatatttttgcaggagcaaagt

SEQ ID NO: 858234 - DNA, 75 bp, synthetic construct
  source 1..75: mol_type = other DNA
catgtccataccgttttctgcataaaacgcattcgctatatgggaagtacgccgctgggtattcagacatcatgg

SEQ ID NO: 858235 - DNA, 75 bp, synthetic construct
  source 1..75: mol_type = other DNA
cagaaaaaatctcgaacttgatatccatgtccataccgttttctgcataaaacgcattcgctatatgggaagtac

SEQ ID NO: 858236 - DNA, 75 bp, synthetic construct
  source 1..75: mol_type = other DNA
cgctgctggccgttgctgttcaggcaccggcggcgaccactgtctacaccgatagccatcaccccccatcgaacg

SEQ ID NO: 858237 - DNA, 75 bp, synthetic construct
  source 1..75: mol_type = other DNA
cagctgggcagaagctatcagtctgttgcgcaacaaccgtgtggtgatcctctccgccggtactggtaatccatt

SEQ ID NO: 858238 - DNA, 75 bp, synthetic construct
  source 1..75: mol_type = other DNA
tctccgccggtacgggcaacccattctttaccaccgactctgctgcttgtctgcgtggtattgaaattgaagccg

SEQ ID NO: 858239 - DNA, 75 bp, synthetic construct
  source 1..75: mol_type = other DNA
tggcggcagcacaaccgctggtatttgatgcagaactggacaccgtgcgtgggcgtcttggtagcgtaaaaggcg

SEQ ID NO: 858240 - DNA, 75 bp, synthetic construct
  source 1..75: mol_type = other DNA
cgtcagtatgcgcacccgtcgtcacgtgacgatagtggagagcacgctgatgacgacggggtgcgcacagcaggc

SEQ ID NO: 858241 - DNA, 75 bp, synthetic construct
  source 1..75: mol_type = other DNA
tggcaacagccagcgacccggaagcggccggtatgcgcacccgccgtcacgtcacgatagtggagagtacgctga

SEQ ID NO: 858242 - DNA, 75 bp, synthetic construct
  source 1..75: mol_type = other DNA
ttgtcgcgttagatgataccggacatgtcatcaactccggctatcagacctgtgctgaatacgacactgatccac

SEQ ID NO: 858243 - DNA, 75 bp, synthetic construct
  source 1..75: mol_type = other DNA
ataacgccgcctctgttctcgctggcctggacaggctgtcgaagatggatgtgctggtgggcataccagaatcca

SEQ ID NO: 858244 - DNA, 75 bp, synthetic construct
  source 1..75: mol_type = other DNA
taatctgttgggttttatgcgtcaacgtcacctcagcgcaagagctggtgattgctacaacgctttcttcggaag

SEQ ID NO: 858245 - DNA, 75 bp, synthetic construct
  source 1..75: mol_type = other DNA
gtattgagttcatcccccatgttgctacagcgattacaaagtaaaaacctgctccagccatttaataatcagata

SEQ ID NO: 858246 - DNA, 75 bp, synthetic construct
  source 1..75: mol_type = other DNA
atgaacggaaagataaatttgagtcctatgcccttactcttaaatcgttattaaccacgttaattcgcaatgaaa

SEQ ID NO: 858247 - DNA, 75 bp, synthetic construct
  source 1..75: mol_type = other DNA
catttgcagaaattggagattacattaaccaaccggttagaacatattcgtcgggaatgcaagtcaggctggcat

SEQ ID NO: 858248 - DNA, 75 bp, synthetic construct
  source 1..75: mol_type = other DNA
atatgtctgggcaactgttggggttatcgtcagagaaaataactgaactgatgccgcaaattgaagagtttgctg

SEQ ID NO: 858249 - DNA, 75 bp, synthetic construct
  source 1..75: mol_type = other DNA
cgagcaaagtcccggacagttccgcgacgtgccgtttggcgaaggctgcgtcgatttcgttggcatcttcaaaac

SEQ ID NO: 858250 - DNA, 75 bp, synthetic construct
  source 1..75: mol_type = other DNA
cgcgaccgtggagattgacggcgaaaccgttactctgccgccaaggccatttctggacatgggtattgaggattc

SEQ ID NO: 858251 - DNA, 75 bp, synthetic construct
  source 1..75: mol_type = other DNA
tagacggtgagaccgttaccctgccgccaaggccatttctggacatgggcattgaggattcccgggataaaacga

SEQ ID NO: 858252 - DNA, 75 bp, synthetic construct
  source 1..75: mol_type = other DNA
ccgagcgtttaaagctggccgctcagtctgcgcttgaaggtaaggcagatgtggcgtcgatgcatcttgaagccg

SEQ ID NO: 858253 - DNA, 75 bp, synthetic construct
  source 1..75: mol_type = other DNA
aaaaacattttaaccggagcagactttaaacaaccaagaatgaaaagcttgctcgaaaagctttgggatattttg

SEQ ID NO: 858254 - DNA, 75 bp, synthetic construct
  source 1..75: mol_type = other DNA
aaataaaaaatatcatcaattcgatcagcgcgatcaaaaaaatctaagtgcaataataaaggattgggcacaaga

SEQ ID NO: 858255 - DNA, 75 bp, synthetic construct
  source 1..75: mol_type = other DNA
gaaacatcaatttaatcaagttaatcaattgtcgctttctaagatattaattagcaggcaggatctcgacataaa

SEQ ID NO: 858256 - DNA, 75 bp, synthetic construct
  source 1..75: mol_type = other DNA
tttttattcagagtctgaatgtactggataatcgccggcgtgatcgaatcatgcttaagtatttcgtttcaaaag

SEQ ID NO: 858257 - DNA, 75 bp, synthetic construct
  source 1..75: mol_type = other DNA
cgcattatccctgacaatgcgtaatgtgatgactgatctccgcctgttcctgtcagcttatatggtgaggtatct

SEQ ID NO: 858258 - DNA, 75 bp, synthetic construct
  source 1..75: mol_type = other DNA
attttttaaacttcaccagaggtttttatggagaggtttatgatgctctggatgagcgaaatctgggggcgtttg

SEQ ID NO: 858259 - DNA, 75 bp, synthetic construct
  source 1..75: mol_type = other DNA
tttatgccggagggcagagtgctgctgcgccatcttaagcaacagcagtttgtggacaattcatcttattatcat

SEQ ID NO: 858260 - DNA, 75 bp, synthetic construct
  source 1..75: mol_type = other DNA
tcattgatgcagaacttaaagacgcaggactggttcgttacggaacaacctttatgccggagggcagagtgctgc

SEQ ID NO: 858261 - DNA, 75 bp, synthetic construct
  source 1..75: mol_type = other DNA
tgacaagcattctgcagggaatgccgggaacggcgcatcaactgatgcgtgtgctttcagatgttctgctgaagt

SEQ ID NO: 858262 - DNA, 75 bp, synthetic construct
  source 1..75: mol_type = other DNA
gggctcgcttagccttggaacagggaagtgcaagtgtagatgagcaaaattatcttgaacaagcgctggcaattg

SEQ ID NO: 858263 - DNA, 75 bp, synthetic construct
  source 1..75: mol_type = other DNA
tttggtggtcgtgccgcaggcgttaaaaggtcagtggaatcaggagttgatcgggcgctttgcgttaggtgaagt

SEQ ID NO: 858264 - DNA, 75 bp, synthetic construct
  source 1..75: mol_type = other DNA
ccaaaaaggcactggtaaaagggaccgccagcgaagaagagttcaattttcttgagcagattattgaaacgtccc

SEQ ID NO: 858265 - DNA, 75 bp, synthetic construct
  source 1..75: mol_type = other DNA
caaagtgtcagcaaaaaaatgattactgcaatcagtgaagggattttttcattttctgataaaaaaaatattgtt

SEQ ID NO: 858266 - DNA, 75 bp, synthetic construct
  source 1..75: mol_type = other DNA
ctgcaatcagtgaagggattttctcattttctgataaaaaagatattgtcgatactctgaaatctctgatgaaaa

SEQ ID NO: 858267 - DNA, 75 bp, synthetic construct
  source 1..75: mol_type = other DNA
ctggttcgcttaggcctggctaccggactgcacattgtggcctgcctgccgttcgcagcgttaattgctctcagg

SEQ ID NO: 858268 - DNA, 75 bp, synthetic construct
  source 1..75: mol_type = other DNA
ggggacggcgcatcaactgatgcgcgtgctttcagacgttctgctgaagtatgagccacgtattaagcgcgtcga

SEQ ID NO: 858269 - DNA, 75 bp, synthetic construct
  source 1..75: mol_type = other DNA
gggtcgtggggcgtaatgccgatcttctccgacagaatgcgctttaaaacctggtatcacgctgcgccttccttt

SEQ ID NO: 858270 - DNA, 75 bp, synthetic construct
  source 1..75: mol_type = other DNA
gtgggggcaacaatgagcagggtaaccgcgattatctccgttctggttatctgcatcatcgtctgcctgtcatgg

SEQ ID NO: 858271 - DNA, 75 bp, synthetic construct
  source 1..75: mol_type = other DNA
agcattaccgtgtggggggtcattattccggtcgtcggtctgtgcattattggctggttctggtttagcccgacg

SEQ ID NO: 858272 - DNA, 75 bp, synthetic construct
  source 1..75: mol_type = other DNA
ctggttcgctgggaacggacgcacacaccagacccggaaaagcatgaactttatcaggattcacgcgataagtgg

SEQ ID NO: 858273 - DNA, 75 bp, synthetic construct
  source 1..75: mol_type = other DNA
tccccagattactttggctggcgcaccatcgttccgatatttaccgtcaggcatcaaccatcaccatgatcagcg

SEQ ID NO: 858274 - DNA, 75 bp, synthetic construct
  source 1..75: mol_type = other DNA
cagcgactggctggcctatatgctcagcggcgaactggcggtggatccctctaacgctggcaccacgggacttct

SEQ ID NO: 858275 - DNA, 75 bp, synthetic construct
  source 1..75: mol_type = other DNA
tttctgtaggacaagaaaactcagaaccagatactgagggtaactgcccaccaccagctgaagttgtgtattccc

SEQ ID NO: 858276 - DNA, 75 bp, synthetic construct
  source 1..75: mol_type = other DNA
ggttcgttacggaacaacatttatgccggagggcagggtgttgctgcgccatcttaagcaacagcagtttgtgga

SEQ ID NO: 858277 - DNA, 75 bp, synthetic construct
  source 1..75: mol_type = other DNA
tgtatgagatcctgtttgggaattttaccggagggctggatctgcatcaggttagcgagcagaaccagacgatcc

SEQ ID NO: 858278 - DNA, 75 bp, synthetic construct
  source 1..75: mol_type = other DNA
aagcgaaagttgcaaactttgttgcttttgttggcgcgatgtatagcttttatgcgctgtactcatccggagaag

SEQ ID NO: 858279 - DNA, 75 bp, synthetic construct
  source 1..75: mol_type = other DNA
gtcattatggcgctgatggtgatgtcctgctgcggttcgctacttggctggcagttcaccattgcccaggtgttt

SEQ ID NO: 858280 - DNA, 75 bp, synthetic construct
  source 1..75: mol_type = other DNA
tgcatttaacatgcctactttgctggccgcatcagaccgggcgaaagtggacattgaacgaattatcaataacct

SEQ ID NO: 858281 - DNA, 75 bp, synthetic construct
  source 1..75: mol_type = other DNA
cttttttctacccactgcgcgagaagtttgtaagtgcatggatcaaacagcgcgccgcctgtcggtcaatgtcgt

SEQ ID NO: 858282 - DNA, 75 bp, synthetic construct
  source 1..75: mol_type = other DNA
cggcggacgcgtcaggcatctgacaccatcgattacagcgtcggctttactgatatggcgcgtctgggcgaccag

SEQ ID NO: 858283 - DNA, 75 bp, synthetic construct
  source 1..75: mol_type = other DNA
tcgtaacccgcgtctgtttgatgtcacgatggcgctgtgtgtggagatgctgatctccggcaaactggcgaaaga

SEQ ID NO: 858284 - DNA, 75 bp, synthetic construct
  source 1..75: mol_type = other DNA
agtctatgctgataccgaaggttttgtcagtgaaatggatacccgcgcgctggggatggcagtggttgcaatggg

SEQ ID NO: 858285 - DNA, 75 bp, synthetic construct
  source 1..75: mol_type = other DNA
aggggatgcgtgaccgtgcaaaaggcgaatggcggatcgaagaagttgtgggtgaacgttcagaaacgcgccagc

SEQ ID NO: 858286 - DNA, 75 bp, synthetic construct
  source 1..75: mol_type = other DNA
cttactaaaagaagaacagtgcctgtaccgttttgccagccgtctaatcagtggcgcaaacagcgatgaattgga

SEQ ID NO: 858287 - DNA, 75 bp, synthetic construct
  source 1..75: mol_type = other DNA
gagcgatgaagaaattcgcttctttatcaacggcattcgcgacaacactatctccgaagggcagattgccgccct

SEQ ID NO: 858288 - DNA, 75 bp, synthetic construct
  source 1..75: mol_type = other DNA
cagaccctcgtccctcaattccacatgatgaggtaatggctgaaatggagaatcttattgctcaaattgctgtaa

SEQ ID NO: 858289 - DNA, 75 bp, synthetic construct
  source 1..75: mol_type = other DNA
gagtgttctgttaatctttactacccgggaaccacggttaattgtgataaccaacggccaggttgaaagcagtat

SEQ ID NO: 858290 - DNA, 75 bp, synthetic construct
  source 1..75: mol_type = other DNA
ccccccggcagcaccaacacattaggttttatcgcctgggctgcaacgtttgtcttattttcctcggtcttttac

SEQ ID NO: 858291 - DNA, 75 bp, synthetic construct
  source 1..75: mol_type = other DNA
ttccgatgatctccggtcgtggcctcggtcatactggcggtacgctcgacaaactggaatcaatccctggcttcg

SEQ ID NO: 858292 - DNA, 75 bp, synthetic construct
  source 1..75: mol_type = other DNA
tatcgtaacccgcgtctgtttgatgtcacgatggcgctgtgcgtggagatgctgatctccggcaaactggcgaaa

SEQ ID NO: 858293 - DNA, 75 bp, synthetic construct
  source 1..75: mol_type = other DNA
ctgatccacgtcctgctattccacatgatgaagttgagcgcagaatggcagaacgctttgccaaaattcgcaagg

SEQ ID NO: 858294 - DNA, 75 bp, synthetic construct
  source 1..75: mol_type = other DNA
gatcaattcaggttatgtcacctcggtagaaagcaaagttgaacctgtccgcatgaaaacggcggagccaatctt

SEQ ID NO: 858295 - DNA, 75 bp, synthetic construct
  source 1..75: mol_type = other DNA
cgacgtctattacgaagaccacgatgaaggcacccggcaacgttttgctgaagggctggcgtgggcggtcgaaca

SEQ ID NO: 858296 - DNA, 75 bp, synthetic construct
  source 1..75: mol_type = other DNA
gccgggacgaggcagtgcgcgaacgggcgcgggaaatcatgagtaaagcgattcgcctggcgcgcgatctcggca

SEQ ID NO: 858297 - DNA, 75 bp, synthetic construct
  source 1..75: mol_type = other DNA
tgacgtctattacgaagaccacgacgaaggcacccggcaacgttttgctgaagggctggcgtgggcggtcgaaca

SEQ ID NO: 858298 - DNA, 75 bp, synthetic construct
  source 1..75: mol_type = other DNA
tgccgatgccagccgtctgcgtacctggattgagaccggtaaagtaatgcctgttccggcagcagcgttgagcta

SEQ ID NO: 858299 - DNA, 75 bp, synthetic construct
  source 1..75: mol_type = other DNA
aaccgcgcggcggcaagccttgcgcaccattatcccggtggttacaaagcctttattaaggcaatgaatgcgaaa

SEQ ID NO: 858300 - DNA, 75 bp, synthetic construct
  source 1..75: mol_type = other DNA
atcaatggctgatctggcatggttacgtgaacactttggttcactggaaaacctgaaaggtaaaaaaatcgccat

SEQ ID NO: 858301 - DNA, 75 bp, synthetic construct
  source 1..75: mol_type = other DNA
accgggcgggggcgcaatgcgcgatcactgccagctatcaggcgacgccggcgggcttcgccgcgcgaggtctgg

SEQ ID NO: 858302 - DNA, 75 bp, synthetic construct
  source 1..75: mol_type = other DNA
agatccgcttcgccaatggcagttactttgcgaactggacggtactttaattaaccgactcatattcacaatcag

SEQ ID NO: 858303 - DNA, 75 bp, synthetic construct
  source 1..75: mol_type = other DNA
tttaaccagctcttcaacttccgtggccgcagtttctccgacctgtttactcagattcgtcaggcgctacatgaa

SEQ ID NO: 858304 - DNA, 75 bp, synthetic construct
  source 1..75: mol_type = other DNA
caattagttgcagctaatcataatgggcgctgggataaccaatttagccaattcgtttaccatgtgaccatgaac

SEQ ID NO: 858305 - DNA, 75 bp, synthetic construct
  source 1..75: mol_type = other DNA
tgtgactgccaagatctctttggaagagataaaaacaaacttttaatcgaatgtaatactaaaatatccatggcg

SEQ ID NO: 858306 - DNA, 75 bp, synthetic construct
  source 1..75: mol_type = other DNA
tggcagcagtttgcccgacagagagctgagcactgccagcggcgctgccggggacggagggtaatgaaaaaacag

SEQ ID NO: 858307 - DNA, 75 bp, synthetic construct
  source 1..75: mol_type = other DNA
tacactaccgatgaaacgctactggcgagccaattgctggcgttttgtgaaggtatgctgtcacgctttgtccgc

SEQ ID NO: 858308 - DNA, 75 bp, synthetic construct
  source 1..75: mol_type = other DNA
agtatcgtgaatatgaacaattctctgtggtgcattactggaaactcaacaacaggaatgctgaacgcctggaat

SEQ ID NO: 858309 - DNA, 75 bp, synthetic construct
  source 1..75: mol_type = other DNA
acggacagcaatgcaagcagtcacaccttcagtggtaaaaccaaatccgtggggggagggctgtacgcctcagcg

SEQ ID NO: 858310 - DNA, 75 bp, synthetic construct
  source 1..75: mol_type = other DNA
gatggggcgtgcggcgaaggcaacgattggtgacctggtctacaaggtgctgacggataacccgaaactgtccga

SEQ ID NO: 858311 - DNA, 75 bp, synthetic construct
  source 1..75: mol_type = other DNA
tggcaatattctgctggatgtgtcgaacaaggggctgatccagggctgggaggaatcagaagaaaccttccagaa

SEQ ID NO: 858312 - DNA, 75 bp, synthetic construct
  source 1..75: mol_type = other DNA
aggtatgctgtcacgctttgtccgcagcgaatttaaataccgcccgacggatgattttgacgcccgctggccgct

SEQ ID NO: 858313 - DNA, 75 bp, synthetic construct
  source 1..75: mol_type = other DNA
atatttccatttacgacaagcagggcaatctggtcggtaaacttgataaagccccgatggctgatttcagtagtg

SEQ ID NO: 858314 - DNA, 75 bp, synthetic construct
  source 1..75: mol_type = other DNA
tcggaagaggcctgggtggagccacagatggagctggtttacggttctgtgtcaggaaaatcttttagctgggaa

SEQ ID NO: 858315 - DNA, 75 bp, synthetic construct
  source 1..75: mol_type = other DNA
caccaaaaggaactgcagtagatgtctttaaagctacgactcggagtattggcttcagtgatgtaacaccggtta

SEQ ID NO: 858316 - DNA, 75 bp, synthetic construct
  source 1..75: mol_type = other DNA
ggcgagttttgcgtctcttggaacaaaagactacagctctcattcctggtatgctggtgcagaggtcgggtatcg

SEQ ID NO: 858317 - DNA, 75 bp, synthetic construct
  source 1..75: mol_type = other DNA
cataaaactggcgaaggtaccctgacagtaaacgggaccggtgtgaatgcaggcggactcaaggtgggggacggt

SEQ ID NO: 858318 - DNA, 75 bp, synthetic construct
  source 1..75: mol_type = other DNA
cgccttgggggggggatgcagtacgtcaaagacaaaaatggtaatcgcacccaagtgtataccaatggcggattt

SEQ ID NO: 858319 - DNA, 75 bp, synthetic construct
  source 1..75: mol_type = other DNA
atgaagctgaccatcattcgtttagaacactttagcgaccaggaccggattgatctgcaaaagatctggccggag

SEQ ID NO: 858320 - DNA, 75 bp, synthetic construct
  source 1..75: mol_type = other DNA
gcccggcagaatgctgtaaacaaaatctggatgctcgaaggttacttgctgaagcagaagttaagcgagcaataa

SEQ ID NO: 858321 - DNA, 75 bp, synthetic construct
  source 1..75: mol_type = other DNA
gccgatctggtttatgccattctgacgtctaacccgaaaatctccacagataatgtaagtctgttcgataaagcg

SEQ ID NO: 858322 - DNA, 75 bp, synthetic construct
  source 1..75: mol_type = other DNA
cagtcaaaacgtacagaggaatttaaaaagatgccggaatccattcgaaatatgattactccgccacgcaacagt

SEQ ID NO: 858323 - DNA, 75 bp, synthetic construct
  source 1..75: mol_type = other DNA
tgccgatgccgaaggaaatccactgccgcaaggggaagttggacgcctgatgacgcgcgggccgtacaccttccg

SEQ ID NO: 858324 - DNA, 75 bp, synthetic construct
  source 1..75: mol_type = other DNA
ggcactgtcgttctggctgccgaccccagcgccacgctttgcttcccattgattgaaaaacatcaggtcaacgtt

SEQ ID NO: 858325 - DNA, 75 bp, synthetic construct
  source 1..75: mol_type = other DNA
aggaagcctattaaaggtcgtagtgtacctactgtaaatagctatatgacaattatctccgggatgttccgtttt

SEQ ID NO: 858326 - DNA, 75 bp, synthetic construct
  source 1..75: mol_type = other DNA
gccgataacggcctgcgcaacacgcgtggcaccatcgcgatggcgcgtaccgctgacaaagacagcgccaccagc

SEQ ID NO: 858327 - DNA, 75 bp, synthetic construct
  source 1..75: mol_type = other DNA
cgtgtatgtggatggcgttgccgcctcgatggcatccctgattgcgatggccggtgacacggtcattatgccgga

SEQ ID NO: 858328 - DNA, 75 bp, synthetic construct
  source 1..75: mol_type = other DNA
cgctgggtgttcgcggagcggcagaaatatccatctatgaagaaattggcggcttcggtattaccgcgaagcagt

SEQ ID NO: 858329 - DNA, 75 bp, synthetic construct
  source 1..75: mol_type = other DNA
atgaacggcagcgagtgccttgaactgggttttgccgaccaggtgacaccatcccttcaggctatggcctgtatt

SEQ ID NO: 858330 - DNA, 75 bp, synthetic construct
  source 1..75: mol_type = other DNA
ctgacaagatttcccaggtcccaacccatgatgttggcccgtaccagaatgtgccgtcaaaaccggtagttatcc

SEQ ID NO: 858331 - DNA, 75 bp, synthetic construct
  source 1..75: mol_type = other DNA
ggctttatgattcagggcggcggtttcaccgagcagatgcagcagaaaaaaccgaatccgccgatcaaaaatgag

SEQ ID NO: 858332 - DNA, 75 bp, synthetic construct
  source 1..75: mol_type = other DNA
ctgacggaaactcaacgatcggaacgctgaagagtgcggggggacgagttgaactgggaggcgggaaagactttg

SEQ ID NO: 858333 - DNA, 75 bp, synthetic construct
  source 1..75: mol_type = other DNA
gtacggcaatgtgctggcaagcggcgtcggcgtggggacgctgaccctgttacagagcgacagcctcgacagtta

SEQ ID NO: 858334 - DNA, 75 bp, synthetic construct
  source 1..75: mol_type = other DNA
cgcaaactggtgaataaaaacttccgccagtcgctgttcgccgcgcaagacgcacaaagcatcctgacgctgctg

SEQ ID NO: 858335 - DNA, 75 bp, synthetic construct
  source 1..75: mol_type = other DNA
atttgtcgctgattcaggatgaagagtttgcggggaatatccgtcgtctgatggcagaacaacatcagggactgg

SEQ ID NO: 858336 - DNA, 75 bp, synthetic construct
  source 1..75: mol_type = other DNA
tcggcaccgctctggaagcgccaggcgcgtttgccaacggcgcggaaggtgttgggctgttccgtactgaaatgc

SEQ ID NO: 858337 - DNA, 75 bp, synthetic construct
  source 1..75: mol_type = other DNA
gccagtcattgtttgccgcgcaagatgcgcaaagcatcctgacgctgctggaaacggaattaacctctgacgtta

SEQ ID NO: 858338 - DNA, 75 bp, synthetic construct
  source 1..75: mol_type = other DNA
cctgcagtgcttgacgcccagtgcggcgtgctggcgattaacccgaatgacgcggtgagcggttattatcaggtc

SEQ ID NO: 858339 - DNA, 75 bp, synthetic construct
  source 1..75: mol_type = other DNA
cattacagatttcaggttaaaaaaatgtgttgatgatcttgggcgtccttttgatacggtgccgccggggttact

SEQ ID NO: 858340 - DNA, 75 bp, synthetic construct
  source 1..75: mol_type = other DNA
ttatcgaacgtctctgatgcgaggtcaggactggataaagcggagtggtttgctattgacagcagcggtgtccgc

SEQ ID NO: 858341 - DNA, 75 bp, synthetic construct
  source 1..75: mol_type = other DNA
atcatctttgaaggaaaaccagctgacggatcgcttgtcaaaggcctggaaaacttggtgatcaccctgagcgat

SEQ ID NO: 858342 - DNA, 75 bp, synthetic construct
  source 1..75: mol_type = other DNA
ctcggtacatcaggttattgaactacctgcgcccgcgcagccgatttctgtcacgatggttgcgccagcggatct

SEQ ID NO: 858343 - DNA, 75 bp, synthetic construct
  source 1..75: mol_type = other DNA
ggtggtagagccagaaccggaacctgagccgatccctgaaccgccaaaagaagcaccggtggtcattgaaaagcc

SEQ ID NO: 858344 - DNA, 75 bp, synthetic construct
  source 1..75: mol_type = other DNA
caatatcaaaagcatgacaattttagtttccagttgtttgagtatgacaccgataatattgaaaaaaacattgag

SEQ ID NO: 858345 - DNA, 75 bp, synthetic construct
  source 1..75: mol_type = other DNA
tgagcggcctgccgctggatgcgattgcccgttatgccgggcaacctgcagtgcttgacgcccagtgcggcgtgc

SEQ ID NO: 858346 - DNA, 75 bp, synthetic construct
  source 1..75: mol_type = other DNA
tattacgggtgagcagagtacggtaaatatgaacaatgctctgtggtactctgacggaaactcaacgatcggaac

SEQ ID NO: 858347 - DNA, 75 bp, synthetic construct
  source 1..75: mol_type = other DNA
acagaaacaggagtattactcccctgtgatttctacaacggaagggattaacctcggagataaggccagcctttc

SEQ ID NO: 858348 - DNA, 75 bp, synthetic construct
  source 1..75: mol_type = other DNA
atctcacccatcagcttggttttgatgataaccatgccatcagcctgttcagcgcatatgcttctctggtttacg

SEQ ID NO: 858349 - DNA, 75 bp, synthetic construct
  source 1..75: mol_type = other DNA
gccttatatgtatcacggccagctaaacggcaatatggatgtgaatattctgcagctctccggtaaggatatact

SEQ ID NO: 858350 - DNA, 75 bp, synthetic construct
  source 1..75: mol_type = other DNA
aaagcgagctcatattcaccgtttttctccgatctgaacaacagcagtgtctggcagaatgtcggaaaagaccgc

SEQ ID NO: 858351 - DNA, 75 bp, synthetic construct
  source 1..75: mol_type = other DNA
gagctggagaaatcagcgttcgggaaatataacgtggataatgcgataaacgccaacttccgctattctttctga

SEQ ID NO: 858352 - DNA, 75 bp, synthetic construct
  source 1..75: mol_type = other DNA
actggcgcaacattacggcgtgccggtttttggcccggaaaaagaagatgagttctggctgcaaggcttgcctgc

SEQ ID NO: 858353 - DNA, 75 bp, synthetic construct
  source 1..75: mol_type = other DNA
ctacctgaaagggttgtgtgcgcacaaaaaatatgttatggttatagcgtctataattgtatgcttactgctgaa

SEQ ID NO: 858354 - DNA, 75 bp, synthetic construct
  source 1..75: mol_type = other DNA
tatatggatcgcgacagcgcgccggacgagcaggagcaatttgaagcctaccagcaggtgctactggcggcgggc

SEQ ID NO: 858355 - DNA, 75 bp, synthetic construct
  source 1..75: mol_type = other DNA
tttatcggatgaaagagttagagagattttggcagaaattgaaagcgataaactctcaagtagtttagaatcgaa

SEQ ID NO: 858356 - DNA, 75 bp, synthetic construct
  source 1..75: mol_type = other DNA
accaatatcacctaaaatagatgaaaacgtccaattgcccctagatataacgctacagcgccttcttgctatact

SEQ ID NO: 858357 - DNA, 75 bp, synthetic construct
  source 1..75: mol_type = other DNA
cacgcccggtagaaacaatgaaaatgagaattgattatacgattgaagatggccgtatctggctattagatatcg

SEQ ID NO: 858358 - DNA, 75 bp, synthetic construct
  source 1..75: mol_type = other DNA
gcctgatggtgttggcccactacacagcggtgatgaactgatcatcactttcggtagtcattcgttgacaactcg

SEQ ID NO: 858359 - DNA, 75 bp, synthetic construct
  source 1..75: mol_type = other DNA
gacgcgggcgaccgctaccaggtgaaacgcatcaccgtgaaaccgggcgaaggcttgtcggtacagatgcatcat

SEQ ID NO: 858360 - DNA, 75 bp, synthetic construct
  source 1..75: mol_type = other DNA
aatcacaaaactgaaaacagctatgtgtacgccgaatctggcctggtcaccaccgtcggggtgaaagatctggta

SEQ ID NO: 858361 - DNA, 75 bp, synthetic construct
  source 1..75: mol_type = other DNA
gcctgatggtgtcggcccgctatacagtggcgatgaactgactgttactttcgatggtcattctttgacaactcg

SEQ ID NO: 858362 - DNA, 75 bp, synthetic construct
  source 1..75: mol_type = other DNA
ggagtgaagtgcctgaagagcccgtgttgttcattaaacctgaaacggcactgtgcgatctgcgccagccattgg

SEQ ID NO: 858363 - DNA, 75 bp, synthetic construct
  source 1..75: mol_type = other DNA
ttatatgagcaagttttttaccctcaaggccggtgacgttgtgctgacaggcacgcctgatggcgtcggcccgtt

SEQ ID NO: 858364 - DNA, 75 bp, synthetic construct
  source 1..75: mol_type = other DNA
attacgctgtaatggaaaaaacaaaagacgcaattgttattccaatggatgctggctggagtgatgtcggttcat

SEQ ID NO: 858365 - DNA, 75 bp, synthetic construct
  source 1..75: mol_type = other DNA
atacgaaaaagtcgattgtcgttccattaaatgtaggttggagtgatgttggctcttggtcaagtttatgggaaa

SEQ ID NO: 858366 - DNA, 75 bp, synthetic construct
  source 1..75: mol_type = other DNA
aaccagcgcagcgagtacaagcgccaccgtgagatttaccgtccctggggccgctgcgacgtggtggtccagacc

SEQ ID NO: 858367 - DNA, 75 bp, synthetic construct
  source 1..75: mol_type = other DNA
ttcgacgtcgcgcagtttgtcgaaaaacccaatctcgataccgcacaggcctatgtcgccagcggtgaatattac

SEQ ID NO: 858368 - DNA, 75 bp, synthetic construct
  source 1..75: mol_type = other DNA
caacgcggtgcaggacgtgaaaaaggtggtcgagaagattaaggccgacggccgccacgaacaccacatccaccg

SEQ ID NO: 858369 - DNA, 75 bp, synthetic construct
  source 1..75: mol_type = other DNA
tcgtgatggccggtggctcgggtagccgactgtggccgctgtccagagtgctgtaccccaaacagttcctgtgcc

SEQ ID NO: 858370 - DNA, 75 bp, synthetic construct
  source 1..75: mol_type = other DNA
cctgcctctgtatcgccagcaacaggtctttgcccgttcagatgtcgggcttcccgtcagttcgatggctgacat

SEQ ID NO: 858371 - DNA, 75 bp, synthetic construct
  source 1..75: mol_type = other DNA
gatgttgatgataccgtttatgagcaggcatacaggaacaccggtgaggatgctttcggtattctggaacgtatc

SEQ ID NO: 858372 - DNA, 75 bp, synthetic construct
  source 1..75: mol_type = other DNA
ttgagcttgcggatgttggtcgggtgattctgattatgtcctcagatgcaaaaacacacgttgatggtggaatgg

SEQ ID NO: 858373 - DNA, 75 bp, synthetic construct
  source 1..75: mol_type = other DNA
aggcatacaggaacaccagtgaggatgctttcggtattctggaacgtatcaggcttctgaagtgtttttacctgt

SEQ ID NO: 858374 - DNA, 75 bp, synthetic construct
  source 1..75: mol_type = other DNA
agcgtaaaaggcgttaattacgatacggcgatgtggagttcggcaattaacagccgcaacaacgtgaacactgat

SEQ ID NO: 858375 - DNA, 75 bp, synthetic construct
  source 1..75: mol_type = other DNA
agaactggacaccgtgcgtgggcgtcttggtagcgtaaaaggcgttaattacgatacggcgatgtggagttcggc

SEQ ID NO: 858376 - DNA, 75 bp, synthetic construct
  source 1..75: mol_type = other DNA
gggaaaccgcggctcatgatgttcgtgaggatacatccggtgcgttaacgcgcatcagagttctgacctgcctcc

SEQ ID NO: 858377 - DNA, 75 bp, synthetic construct
  source 1..75: mol_type = other DNA
atccgcatcctggaagagcagataaagctcgcacgccagcagcgttttggtaaaaaatgcgaatcgctggccggg

SEQ ID NO: 858378 - DNA, 75 bp, synthetic construct
  source 1..75: mol_type = other DNA
ggcggtgtatcgtgccgacgactacgtacatgaaaaaccctggcaggggattggcgtgggggctgcggttgggct

SEQ ID NO: 858379 - DNA, 75 bp, synthetic construct
  source 1..75: mol_type = other DNA
gtccacgaaaaaccctggcagggaattggcgttggcgcggctgttggactggtattaggactattgctggcacgc

SEQ ID NO: 858380 - DNA, 75 bp, synthetic construct
  source 1..75: mol_type = other DNA
cgggcgttacctgattgccgaagcggatgagagcgacgcatcgttcctgcatctgcaaccgatggtggcgattgt

SEQ ID NO: 858381 - DNA, 75 bp, synthetic construct
  source 1..75: mol_type = other DNA
gtgtagaagattatcagcagattggcccgcaggggcactttacgctgctgcgccaggacaaagagccgatgcgcg

SEQ ID NO: 858382 - DNA, 75 bp, synthetic construct
  source 1..75: mol_type = other DNA
attaattatatcctgaaccggcgcgatgaactgagctgcttcctgagtgacggagccgtgcccctggacaacaat

SEQ ID NO: 858383 - DNA, 75 bp, synthetic construct
  source 1..75: mol_type = other DNA
gcggtaccggcagtcgtctctggccgatgtctcgcgagctttacccgaaacagttcctccgcctgttcgggcaga

SEQ ID NO: 858384 - DNA, 75 bp, synthetic construct
  source 1..75: mol_type = other DNA
ggggattcagcgataagcgggtgcagatcctcgatcgcgacaactggattgtgatgctggatctgaccgtcgatg

SEQ ID NO: 858385 - DNA, 75 bp, synthetic construct
  source 1..75: mol_type = other DNA
ggagttaccgcgaagcagtttgtcagcgaactgaatgccctgggtgatatcacccacattaatctccatatcaat

SEQ ID NO: 858386 - DNA, 75 bp, synthetic construct
  source 1..75: mol_type = other DNA
ggctgcctgtgaaggtgcattgctggtggtcgacgccgggcagggcgtggaagcgcaaaccctggcaaactgcta

SEQ ID NO: 858387 - DNA, 75 bp, synthetic construct
  source 1..75: mol_type = other DNA
gttcggactggcgctggactgctacagcagtacaccacagcggctggaagcagcctccccggcagccgggaaggg

SEQ ID NO: 858388 - DNA, 75 bp, synthetic construct
  source 1..75: mol_type = other DNA
gctgcgtattgtctgcggcgtgcttgcctttttccttatgtttgcctgtgccggctggatgctggcacccagcaa

SEQ ID NO: 858389 - DNA, 75 bp, synthetic construct
  source 1..75: mol_type = other DNA
acgccgtcctgccgggcgtattttgagaaagaggccgcttaccgtactacgctcggggagctgaaagggcgttcc

SEQ ID NO: 858390 - DNA, 75 bp, synthetic construct
  source 1..75: mol_type = other DNA
tgatctacgccgcactggtgagcatggaagatgagctgatgggcgaaaaaagctgtgcttatctggtggtaaaag

SEQ ID NO: 858391 - DNA, 75 bp, synthetic construct
  source 1..75: mol_type = other DNA
ggaacggtcgttctggcagccgatcccagcgctacgctctgttttccactgattgcaaaacaccaggttaacgtt

SEQ ID NO: 858392 - DNA, 75 bp, synthetic construct
  source 1..75: mol_type = other DNA
ccagtgccacgctctgcttcccattgattgcaaaacatcaggtcaacgttactgcgctggtgccgccggcggtaa

SEQ ID NO: 858393 - DNA, 75 bp, synthetic construct
  source 1..75: mol_type = other DNA
cgtggcggaagagattgaagatattgtcggtatcgacgccaccgatgctgtacgttgttccgcgaaaaccggcgt

SEQ ID NO: 858394 - DNA, 75 bp, synthetic construct
  source 1..75: mol_type = other DNA
tatgtgcgattaaagatatccacggcgctccagtaggcgataccttaacgctggcgcgtaatccggcagaaaagg

SEQ ID NO: 858395 - DNA, 75 bp, synthetic construct
  source 1..75: mol_type = other DNA
tgttgcagagcactcctccattcgcgtggtgcaactgctgaacgatagcggcgaacataacttgcaggatgcgat

SEQ ID NO: 858396 - DNA, 75 bp, synthetic construct
  source 1..75: mol_type = other DNA
ccgacggcatcgaagatgataactgggaagagcaggcggcaaaccgtctgaccgacgcgatgcaaggtctggacg

SEQ ID NO: 858397 - DNA, 75 bp, synthetic construct
  source 1..75: mol_type = other DNA
ggcagctatttcttgtgcaaatatggaccttgctgattctgaccctgttattcttgttttagcagcagatcatgt

SEQ ID NO: 858398 - DNA, 75 bp, synthetic construct
  source 1..75: mol_type = other DNA
cacgctggtgatagcccagcggctggtacgcaaactttgcccgcattgtcgcctgcagcaaggggaacccatcca

SEQ ID NO: 858399 - DNA, 75 bp, synthetic construct
  source 1..75: mol_type = other DNA
ttatggccgcacggccttatttgaagttctgcccataacacctgtcatacgccagctcatttccgctaataccga

SEQ ID NO: 858400 - DNA, 75 bp, synthetic construct
  source 1..75: mol_type = other DNA
gagaagccggatcgcgagcgcgccggggtctacctcgcctccggggagtactactggaacagcggcatgtttatg

SEQ ID NO: 858401 - DNA, 75 bp, synthetic construct
  source 1..75: mol_type = other DNA
caagcactgtttggaaaaccctggaaaaatcacactcgaattaatcgagatacgttcaggaagttatcttgctga

SEQ ID NO: 858402 - DNA, 75 bp, synthetic construct
  source 1..75: mol_type = other DNA
aacgcatcaccgttaatccgggtgaagggctttctgtacaaatgcatcatcaccgtgcagaatattgggtagtgg

SEQ ID NO: 858403 - DNA, 75 bp, synthetic construct
  source 1..75: mol_type = other DNA
ccgctgccccattggcaggcacccggttgtgtacattgctaccacggtttttatggtcgtaccgccttgtttgaa

SEQ ID NO: 858404 - DNA, 75 bp, synthetic construct
  source 1..75: mol_type = other DNA
caagcagcgtctgggctggtttaaccaggatgaagtcgaaatggtggcccgtgaactgggcgtaaccagcaaaga

SEQ ID NO: 858405 - DNA, 75 bp, synthetic construct
  source 1..75: mol_type = other DNA
tctgcgtaactggcgtatcgtcaaagttgcgaccaccaaagcgcagcgcaaactgttctttaacctgcgtaaaac

SEQ ID NO: 858406 - DNA, 75 bp, synthetic construct
  source 1..75: mol_type = other DNA
ccgctgccccgctggcaagcacccggttgtgaacattgctacctcggtttttatagtcgcacggccttgtttgaa

SEQ ID NO: 858407 - DNA, 75 bp, synthetic construct
  source 1..75: mol_type = other DNA
gtgccctgcaaacgctgaataccgctgatattaatatttgtagcgtcgaagatccggttgagatccccatcgccg

SEQ ID NO: 858408 - DNA, 75 bp, synthetic construct
  source 1..75: mol_type = other DNA
ccgcaggacgggcaattcactgtcgaactggcagggaacgccgtctcatttcgtattgcgaccttgccatgtcgg

SEQ ID NO: 858409 - DNA, 75 bp, synthetic construct
  source 1..75: mol_type = other DNA
ggtagcgggatcgtcggtaggttgttttgggattttcaggggaagagcatttctctgccgcaagtaaaagcatac

SEQ ID NO: 858410 - DNA, 75 bp, synthetic construct
  source 1..75: mol_type = other DNA
gaattctttttaggtttaaactcgttgtaaacccagaaaatttcgagttttttgtttctttgccttacacgacaa

SEQ ID NO: 858411 - DNA, 75 bp, synthetic construct
  source 1..75: mol_type = other DNA
gggcgcagccagggattcggcgccatgtcgcttgccgacatggcggaagtcgtgctgcagcaggcaccagataac

SEQ ID NO: 858412 - DNA, 75 bp, synthetic construct
  source 1..75: mol_type = other DNA
ggaacgtctggtgcgtcagacgctctttcgtgccagccacctgtttatgaaggcatataacgaaatactggaact

SEQ ID NO: 858413 - DNA, 75 bp, synthetic construct
  source 1..75: mol_type = other DNA
atgcggcttattgattattttccagaatcatcaatctcagttatacattcagcaaaagactggcaggaagctatc

SEQ ID NO: 858414 - DNA, 75 bp, synthetic construct
  source 1..75: mol_type = other DNA
aatttctcgatggcatcactgttagcaaaaaactatatcagcgagaattacattcaggctattaaagattccacc

SEQ ID NO: 858415 - DNA, 75 bp, synthetic construct
  source 1..75: mol_type = other DNA
gatatgagtacaaagagcgtttcccgcagatgatccggtatcgggttaaagagtgggaaaaagttgccggtgtgc

SEQ ID NO: 858416 - DNA, 75 bp, synthetic construct
  source 1..75: mol_type = other DNA
cgcctgacacgtcagacgctgtatcgcgccaatcgcctgttcatggaggcatataccgaaattctggaactggat

SEQ ID NO: 858417 - DNA, 75 bp, synthetic construct
  source 1..75: mol_type = other DNA
tcttttgatgaactacgcgtaaaactgccaagtagcgttgcgagtacctttggcctcgatgagctagccgcacaa

SEQ ID NO: 858418 - DNA, 75 bp, synthetic construct
  source 1..75: mol_type = other DNA
aaatcatatatcttcgccaaagcggctcatgcgccgtttatttctcatccggatgagttttgtcacctgctggtg

SEQ ID NO: 858419 - DNA, 75 bp, synthetic construct
  source 1..75: mol_type = other DNA
cttaatggtgggctggaaattctgaaaacggtcgatctccgtcagccgttgcaaagcgtacaaatgccgtttttg

SEQ ID NO: 858420 - DNA, 75 bp, synthetic construct
  source 1..75: mol_type = other DNA
gctgctgcacggatggggactgaatgccgaagtgtggcgttgcattgacgaggaacttagctcgcattttacgct

SEQ ID NO: 858421 - DNA, 75 bp, synthetic construct
  source 1..75: mol_type = other DNA
tcaccgacaaggatggcgaaaaatacggtcgcgcaaacaaactttctggtctggataaggcgctggctgccgggg

SEQ ID NO: 858422 - DNA, 75 bp, synthetic construct
  source 1..75: mol_type = other DNA
atttgcgccgccattccggacgaacaggcaataaaggaagaaggtgcagtcgctgtagccactgccattgaagcc

SEQ ID NO: 858423 - DNA, 75 bp, synthetic construct
  source 1..75: mol_type = other DNA
tcatcacaatctcacatccaccagcagagcggggattcatctgatgatcgacattgaaaccatgggaaaaaatcc

SEQ ID NO: 858424 - DNA, 75 bp, synthetic construct
  source 1..75: mol_type = other DNA
gcactgaacaaatatatcagcgaatacctgacgacaaagggcgtgtttgaacatgaagaaacagaccagagctct

SEQ ID NO: 858425 - DNA, 75 bp, synthetic construct
  source 1..75: mol_type = other DNA
atgagtaaggtctttatttgcgctgctattcctgatgaacaggccataaaagaagatagcgctgttgcggtggcc

SEQ ID NO: 858426 - DNA, 75 bp, synthetic construct
  source 1..75: mol_type = other DNA
ttacgccgttcatacgaacggcaggggatcccctgcccctggcactaccacaacgatcgcgatgtacgcacaatc

SEQ ID NO: 858427 - DNA, 75 bp, synthetic construct
  source 1..75: mol_type = other DNA
gatcgacattcacaaagatcccgtggcactgaacaaatacatcaccgaatacctggcgacaaaatgcgtgtttga

SEQ ID NO: 858428 - DNA, 75 bp, synthetic construct
  source 1..75: mol_type = other DNA
caattgcgggaatttatcgacgaaaactccggtgaattttttgttcaggtctggggaaatggagccaacttcgac

SEQ ID NO: 858429 - DNA, 75 bp, synthetic construct
  source 1..75: mol_type = other DNA
tgggcgacgcaacataccaggaaacattcgatgacaagaaccaggttgaagttcaggaagacgcttcggagaaaa

SEQ ID NO: 858430 - DNA, 75 bp, synthetic construct
  source 1..75: mol_type = other DNA
atatcagccagcctgacgccgataagttgcttgctgcatcacgtggtgaatttattgaagggattagcgacccga

SEQ ID NO: 858431 - DNA, 75 bp, synthetic construct
  source 1..75: mol_type = other DNA
gatgcactgctgcaattacgggaatttatcgacgaaaactccggtgaattttttgttcaggtctggggtaacggt

SEQ ID NO: 858432 - DNA, 75 bp, synthetic construct
  source 1..75: mol_type = other DNA
gactggaagcgtatctcggcatcaatgcgcaaacagcctgatgcccttcgctacgaccgccagactatttttggc

SEQ ID NO: 858433 - DNA, 75 bp, synthetic construct
  source 1..75: mol_type = other DNA
aaacattgacggtaccatccatcgctgggctaaaaatgaggttatcgacaaggatcgcgaagactggaagcgtat

SEQ ID NO: 858434 - DNA, 75 bp, synthetic construct
  source 1..75: mol_type = other DNA
tcccgccagcaaatttcgctggaattcatgccgttcccgagatcgaagacaagatttcacaactggttgtcagtc

SEQ ID NO: 858435 - DNA, 75 bp, synthetic construct
  source 1..75: mol_type = other DNA
atatccggatctgcaaatcatcggcggcaacgtggcaacggctgcgggcgctcgcgctctggcagaagccggttg

SEQ ID NO: 858436 - DNA, 75 bp, synthetic construct
  source 1..75: mol_type = other DNA
atcgctgctggtgcaagcgcggtgatggtaggttccatgctggcgggtactgaagaatcccctggtgaaatcgag

SEQ ID NO: 858437 - DNA, 75 bp, synthetic construct
  source 1..75: mol_type = other DNA
gaaccgccgctggaaggtggagctcgcgcggcaattatcaacgcgctccatctcactgaagacgatattttgcca

SEQ ID NO: 858438 - DNA, 75 bp, synthetic construct
  source 1..75: mol_type = other DNA
gcggcattgacccacgtgaaatcctcgacgtccaggcacgtattgtgatgagcgatgctgaacgtaccgacgatg

SEQ ID NO: 858439 - DNA, 75 bp, synthetic construct
  source 1..75: mol_type = other DNA
ttcattaaaagtgcaaggattgctgggacgtcgatgcccaacgccaatgttatcaggctactggaagaacgatcc

SEQ ID NO: 858440 - DNA, 75 bp, synthetic construct
  source 1..75: mol_type = other DNA
ttttgcaggctatccggttgtgaccgaagaaaacgaactggtcggcatcatcaccggtcgtgacgtgcgttttgt

SEQ ID NO: 858441 - DNA, 75 bp, synthetic construct
  source 1..75: mol_type = other DNA
ccctgttcaaaccccgctttaaacatcctgaaacctcgacgctagtccgccgctttagtcacggcgcacaaccgc

SEQ ID NO: 858442 - DNA, 75 bp, synthetic construct
  source 1..75: mol_type = other DNA
acagttaggagtgatggatcacggctatttagcgaccaccgaaggtctgccgcagataatcgccgaactcactca

SEQ ID NO: 858443 - DNA, 75 bp, synthetic construct
  source 1..75: mol_type = other DNA
ggtttttgcccgaactgccgtcgcggttttcctatctcttgtactggcgaaggaaaagcggcttacggctggcag

SEQ ID NO: 858444 - DNA, 75 bp, synthetic construct
  source 1..75: mol_type = other DNA
ggcttgccaattcaggtggcaaccacaggacactcaaaagtgatgatcccactgaaaccggaagtggatatcgac

SEQ ID NO: 858445 - DNA, 75 bp, synthetic construct
  source 1..75: mol_type = other DNA
cccgccgataatcttagcgaagcgcaaatgcagcttatcgcccgcgaattaggtcattcggaaactgcttttctg

SEQ ID NO: 858446 - DNA, 75 bp, synthetic construct
  source 1..75: mol_type = other DNA
gtaaattattagagatcccatttaacccggtgtatcggaattttgacaaaggtcttcaggaaatcaccggctgga

SEQ ID NO: 858447 - DNA, 75 bp, synthetic construct
  source 1..75: mol_type = other DNA
ggcgattagtgattacgcgccgaatggtttgcaggtggaaggcaaagagacagtgcaaaaaattgttaccggtgt

SEQ ID NO: 858448 - DNA, 75 bp, synthetic construct
  source 1..75: mol_type = other DNA
caaatccgccatattctggcccgtcacgaacaaggagcgggatttatcgcccaggggatggcgcgcaccgacgga

SEQ ID NO: 858449 - DNA, 75 bp, synthetic construct
  source 1..75: mol_type = other DNA
caaatccgccatattctggctcgtcacgaacaaggcgcgggatttatcgcccaggggatggcgcgtaccgacggc

SEQ ID NO: 858450 - DNA, 75 bp, synthetic construct
  source 1..75: mol_type = other DNA
cgcgcccgcctttagcgaagaaagcattcgtgaagctgcggcaatgatcaacgccgccaaacgcccggtgcttta

SEQ ID NO: 858451 - DNA, 75 bp, synthetic construct
  source 1..75: mol_type = other DNA
accgcgcagagctgggtaaagtgaagcaaccgcatgtggcgatacaggcggatgtcgatgacgtgctggcgcaac

SEQ ID NO: 858452 - DNA, 75 bp, synthetic construct
  source 1..75: mol_type = other DNA
agaaagcgcagctgcctaccaccatgactttaatggcgctgggcatgttgccaaaagcgcatccgctgtcgctgg

SEQ ID NO: 858453 - DNA, 75 bp, synthetic construct
  source 1..75: mol_type = other DNA
gttcgtgacgctgcggcaatgattaacgccgccaaacgcccggtgctttatctggggggcggtgtcattaacgcg

SEQ ID NO: 858454 - DNA, 75 bp, synthetic construct
  source 1..75: mol_type = other DNA
gcttgattgatatcttaaatagattggagattgattgtgatagttatatagaggcatatgcagatgcctttgtta

SEQ ID NO: 858455 - DNA, 75 bp, synthetic construct
  source 1..75: mol_type = other DNA
tttccttatttatggccccttcctcgggaggggctttcccgtttcagcgtcccgctgaaatcgtcggcttacctc

SEQ ID NO: 858456 - DNA, 75 bp, synthetic construct
  source 1..75: mol_type = other DNA
gtatcttcatcatgaccctttccttatttaaggccccttcctcgggaggggctttcccgtttcagcgtcccgctg

SEQ ID NO: 858457 - DNA, 75 bp, synthetic construct
  source 1..75: mol_type = other DNA
cagcaccaactatattttgcaggaggcggatctgctgattgtactcggtgcgcgttttgatgaccgggcgattgg

SEQ ID NO: 858458 - DNA, 75 bp, synthetic construct
  source 1..75: mol_type = other DNA
aaaggcgctggcgcaagcgatgcatcaggccggtaaaccgcttggttttatgtgtattgccccggcgatgctgcc

SEQ ID NO: 858459 - DNA, 75 bp, synthetic construct
  source 1..75: mol_type = other DNA
gcgttgattatgcttcatttaaggagtcaatcaaaaatatacatgcattcgactatatgttagatgataaagatg

SEQ ID NO: 858460 - DNA, 75 bp, synthetic construct
  source 1..75: mol_type = other DNA
cagcggctggcaagagaactcgggcgtttcactggaacaactggtggaaacctatctgcccgtcggcctgaaaca

SEQ ID NO: 858461 - DNA, 75 bp, synthetic construct
  source 1..75: mol_type = other DNA
tctctttatatgaagaagtgtgcgccagatatccgcaggtggcatttcagtcctccggcggcattggcgacatta

SEQ ID NO: 858462 - DNA, 75 bp, synthetic construct
  source 1..75: mol_type = other DNA
attcagatcgaaggcagtaaaagccatgatgaacatattgttcccatcgcctcccgactgcggccctatctggag

SEQ ID NO: 858463 - DNA, 75 bp, synthetic construct
  source 1..75: mol_type = other DNA
aaaaatcacataaattctgggcggtggagcagcaaggcaacgaattgcatattagttggggtaaagtcggcacca

SEQ ID NO: 858464 - DNA, 75 bp, synthetic construct
  source 1..75: mol_type = other DNA
ttattaccgtctccgaagtggaatcgacaggataaccgcgcaggttaactacctgcaggagtgcatcaggacgca

SEQ ID NO: 858465 - DNA, 75 bp, synthetic construct
  source 1..75: mol_type = other DNA
tatgcggggtgatactcccgaggtacttcatttcgatatctcttcccgcgtgatggctgccattgaagaagagcc

SEQ ID NO: 858466 - DNA, 75 bp, synthetic construct
  source 1..75: mol_type = other DNA
tcgcctgggcgtacagacccgtgatgcccgcggtaacatgcgtgacatggctgctatctttacgggcgttgggca

SEQ ID NO: 858467 - DNA, 75 bp, synthetic construct
  source 1..75: mol_type = other DNA
ctcataccgtaaaaggcgcaaatattcagtcagatattccaggtgctgagccggaacaatatgcacaggctacga

SEQ ID NO: 858468 - DNA, 75 bp, synthetic construct
  source 1..75: mol_type = other DNA
ggcttaaattgtgggcgctttacgcgggttatattgttagtgacagagaaaatattgccgatagcgcaaaatctt

SEQ ID NO: 858469 - DNA, 75 bp, synthetic construct
  source 1..75: mol_type = other DNA
ataaatgcaaattcatccattttggatttttttgtattaggtgtcatcctttattactttgaatacagaagacaa

SEQ ID NO: 858470 - DNA, 75 bp, synthetic construct
  source 1..75: mol_type = other DNA
ccggacggggaataaacagcgtggagaaaattgtctctacttgggcgcctgcgtctgataataacaacacaactg

SEQ ID NO: 858471 - DNA, 75 bp, synthetic construct
  source 1..75: mol_type = other DNA
ggttaaaaggctggatggcttatgctgcttatttgtactccgatcgcgaaaatattggtgccagtgcgaagtcat

SEQ ID NO: 858472 - DNA, 75 bp, synthetic construct
  source 1..75: mol_type = other DNA
gcggaactgaagcttatcgctgagaaaacgaaaaaaggctatgtggaagacgcttcggcaaacgtgcatatcccc

SEQ ID NO: 858473 - DNA, 75 bp, synthetic construct
  source 1..75: mol_type = other DNA
gattatttcatcctcagagaacggttgatgacaatgcagaagcagctggaaggggcacagctatacattcgtgag

SEQ ID NO: 858474 - DNA, 75 bp, synthetic construct
  source 1..75: mol_type = other DNA
tcctcagagaacggttgatgacaatgcagaagcagctggaaggggcgcaggaatatatccgcactcagtgcacta

SEQ ID NO: 858475 - DNA, 75 bp, synthetic construct
  source 1..75: mol_type = other DNA
ggataatgcaaccggcccccaactggcagacaccgctgaacgggattatttcactctcagagaacggttgatgct

SEQ ID NO: 858476 - DNA, 75 bp, synthetic construct
  source 1..75: mol_type = other DNA
atatgttgccggagctgtttgtcgctccaccgtgggtaataaataagaaaaagaatgtaatacccgtatttgatt

SEQ ID NO: 858477 - DNA, 75 bp, synthetic construct
  source 1..75: mol_type = other DNA
taccgcgataacgccatcacctacaaagcgcagcgcgataaaaaagccagagagctggagctggcaaacgccacc

SEQ ID NO: 858478 - DNA, 75 bp, synthetic construct
  source 1..75: mol_type = other DNA
taccgtctccgaagtggaatcgacaggataaccgcgcaggttaactacctgcaggaatacatcaggacgcaatgc

SEQ ID NO: 858479 - DNA, 75 bp, synthetic construct
  source 1..75: mol_type = other DNA
ccaggaattacagagttaatcagtcatactgacatatccagattcagtgaaatcgcgcaatatcaggcatcacag

SEQ ID NO: 858480 - DNA, 75 bp, synthetic construct
  source 1..75: mol_type = other DNA
acgacaccgcacgtaaattaaccccgcttatccgtgcctggccgggggaatcccagcataaacgagcagtttccg

SEQ ID NO: 858481 - DNA, 75 bp, synthetic construct
  source 1..75: mol_type = other DNA
atgatcgctacggtaaacaatcctcccccactttctccgtgctcgacaacatcaccgctagcgagctgattaacg

SEQ ID NO: 858482 - DNA, 75 bp, synthetic construct
  source 1..75: mol_type = other DNA
ccgctctggttatctgcatcgtcgtctgcctgtcatggggtgttaatcattaccgtgataacgccatcgcctaca

SEQ ID NO: 858483 - DNA, 75 bp, synthetic construct
  source 1..75: mol_type = other DNA
acctacaaagcgcagcgcgataaaaaagtcagtgagctgaaactggcaaacgccaccattactgacatgcaggtg

SEQ ID NO: 858484 - DNA, 75 bp, synthetic construct
  source 1..75: mol_type = other DNA
tatcattagagaaatcttcacccgcgaatcactggctgaatttggctgggatctgtataccgcctggacagaagc

SEQ ID NO: 858485 - DNA, 75 bp, synthetic construct
  source 1..75: mol_type = other DNA
ggttctgtcctcgccggtacaactgcaaatgtcatcaaaatggggctggctgttgaaggggctgcgctgtccgtg

SEQ ID NO: 858486 - DNA, 75 bp, synthetic construct
  source 1..75: mol_type = other DNA
caacgttcctcagtcagtacagcgtcaaacaccgtcccgacgggcttatcagcctgccggacggcaggctgatcg

SEQ ID NO: 858487 - DNA, 75 bp, synthetic construct
  source 1..75: mol_type = other DNA
ccgttggtgccgtggggcgaactgaccatgcctgtgccgggactggagctggcttcctggattgaagcgcgtctg

SEQ ID NO: 858488 - DNA, 75 bp, synthetic construct
  source 1..75: mol_type = other DNA
cgcgcgttgagcgagtggctgaatgaaaataccgatcttgatgtgacctttattgatattcctaatcctgcataa

SEQ ID NO: 858489 - DNA, 75 bp, synthetic construct
  source 1..75: mol_type = other DNA
accatcttgataatcaggccgccagacttattctggagaagaaaggcacttcgggatggattaacggcgaccggg

SEQ ID NO: 858490 - DNA, 75 bp, synthetic construct
  source 1..75: mol_type = other DNA
cttgcaaaaacggagcgaatggggttaatccagaagcatgtgcttgaatcacggacaattaagatttcattgtgg

SEQ ID NO: 858491 - DNA, 75 bp, synthetic construct
  source 1..75: mol_type = other DNA
atggcgagccacctgctggctatcagcgataaaaaatggcggtacgcgttttacgtcgccccggacgaggcgaaa

SEQ ID NO: 858492 - DNA, 75 bp, synthetic construct
  source 1..75: mol_type = other DNA
aaccgggctgggccatccgaaacagatcctcgatctattaaccgcaccagtctatgaaccctggatcgacttgcg

SEQ ID NO: 858493 - DNA, 75 bp, synthetic construct
  source 1..75: mol_type = other DNA
ttacccgccagcgccgcccattcacatcagcataccgtgaaaaaagggttagccgcgttaagcctgccagagcat

SEQ ID NO: 858494 - DNA, 75 bp, synthetic construct
  source 1..75: mol_type = other DNA
ataatgtcagtgctggcagatgggatgctggtggctggtgttgtggttgttgttttcccgttgctgaaaaagaaa

SEQ ID NO: 858495 - DNA, 75 bp, synthetic construct
  source 1..75: mol_type = other DNA
caccgccagccaggcgctgctcgatgaagctgtgcgtcttgaggctgatgcggtgatcgtgcatcacggctactt

SEQ ID NO: 858496 - DNA, 75 bp, synthetic construct
  source 1..75: mol_type = other DNA
caaagttttatcgatagcgccgcgcgttttggcgtggatgcttttattactggcgaagtttctgaacagaccatt

SEQ ID NO: 858497 - DNA, 75 bp, synthetic construct
  source 1..75: mol_type = other DNA
ctggtggcagcaaaatggtggcgatcggcaattaattcacagcgagcatgggaaaattgacggtcatcttctgga

SEQ ID NO: 858498 - DNA, 75 bp, synthetic construct
  source 1..75: mol_type = other DNA
tacgccgcatggtatcgcaaaaatcagaacgattttttaggtcatattgaagataaaactgtcaacaaaaccatc

SEQ ID NO: 858499 - DNA, 75 bp, synthetic construct
  source 1..75: mol_type = other DNA
ctgactgaaatggtggtgctaaaaccggcgttgaatcagtttgggcgctgggatgcggaagatcatcgtaagcga

SEQ ID NO: 858500 - DNA, 75 bp, synthetic construct
  source 1..75: mol_type = other DNA
ctggcgcgaccgctggcgcggctgaaagcgatggacaataacggcttgctgcgacgaacgctggcggcgtggttt

SEQ ID NO: 858501 - DNA, 75 bp, synthetic construct
  source 1..75: mol_type = other DNA
ctggagtatcggcttaatcgtatctcggaactgaccaggctggatttgggcaattttgatgacagactgttgctg

SEQ ID NO: 858502 - DNA, 75 bp, synthetic construct
  source 1..75: mol_type = other DNA
gactggattaaagagcactggggattcgatccccgcagtgtgggccggacggtacgcggctggtttggtgatgat

SEQ ID NO: 858503 - DNA, 75 bp, synthetic construct
  source 1..75: mol_type = other DNA
agcaatggctacttattaaatccgggccagcctataaatataggggatagggtttggattgggtcacgtgtgatg

SEQ ID NO: 858504 - DNA, 75 bp, synthetic construct
  source 1..75: mol_type = other DNA
cgtaaaacgatatatagatcatgcaactggatatgatatttatgggaaagattccattgggattgaaaaaataaa

SEQ ID NO: 858505 - DNA, 75 bp, synthetic construct
  source 1..75: mol_type = other DNA
tccgtaaagcgcgaaccattaagggacgcacacctctcaccaaaaccgaagatgacgctatcgcctttcctgaaa

SEQ ID NO: 858506 - DNA, 75 bp, synthetic construct
  source 1..75: mol_type = other DNA
tgccagccatcagcgggaagtgtctggccggattatccatcttcatgcctggcacgtaccggacttccacggtac

SEQ ID NO: 858507 - DNA, 75 bp, synthetic construct
  source 1..75: mol_type = other DNA
cattgcaacatccactagcccctgctgatattccgctacttcaggcgtttatggctttacgcgccgccagaccaa

SEQ ID NO: 858508 - DNA, 75 bp, synthetic construct
  source 1..75: mol_type = other DNA
acctcaatcagccgcgagtggtggctattgtcgaggtcgacagcggtcagcttggcgtagatagcgcaatggcgg

SEQ ID NO: 858509 - DNA, 75 bp, synthetic construct
  source 1..75: mol_type = other DNA
tgaagagaatacgccagcgttaactgaatggtcacagcgcctgggcattgatcttaaccaaccgcgcgtggtggc

SEQ ID NO: 858510 - DNA, 75 bp, synthetic construct
  source 1..75: mol_type = other DNA
atctcaatcaaccgcgagtggtggctattgttgaggtcgatagcggtcaacttggcgtggacagcgcaatggcgg

SEQ ID NO: 858511 - DNA, 75 bp, synthetic construct
  source 1..75: mol_type = other DNA
tagcgctgcacctaaaactgccggtaccgccccaactgcaggaaactattcaggagtagtatctcttgtaatgac

SEQ ID NO: 858512 - DNA, 75 bp, synthetic construct
  source 1..75: mol_type = other DNA
gctgtagatttaacttatctacctggtgcaaaaacttttgaaaattacagtgttctaacccagatttacacaaat

SEQ ID NO: 858513 - DNA, 75 bp, synthetic construct
  source 1..75: mol_type = other DNA
cgcataccgcggtggtctggttgattgcctttggcgggatggtgatcagtaagcgctttactgctcaatcagcag

SEQ ID NO: 858514 - DNA, 75 bp, synthetic construct
  source 1..75: mol_type = other DNA
cttgcaaaccttgaagaaagtaaccatggctgggtaaatgacccaacctcggcaatcaatctacagctgaatgaa

SEQ ID NO: 858515 - DNA, 75 bp, synthetic construct
  source 1..75: mol_type = other DNA
tatcttcttcccaagatttagtgattggtgcgactacagcacaagcaccaacggcgggaaattatagtggggtcg

SEQ ID NO: 858516 - DNA, 75 bp, synthetic construct
  source 1..75: mol_type = other DNA
ctgtaaataattttgaagctcacaccatcaacaccgttgttcatacaaatgactcagataaaggtgttgttgtga

SEQ ID NO: 858517 - DNA, 75 bp, synthetic construct
  source 1..75: mol_type = other DNA
atgaataaaaatattgccgtgacgggcaaaggtgacgctcgtctagtgaaaaaattctgtgatattcgtgatctg

SEQ ID NO: 858518 - DNA, 75 bp, synthetic construct
  source 1..75: mol_type = other DNA
acgtgaactggaggaagaagaaaaaaggctgatacgtgaatatcagcctgagttttactttggtgagcgtattca

SEQ ID NO: 858519 - DNA, 75 bp, synthetic construct
  source 1..75: mol_type = other DNA
gagctggaggaagaagaaaaaaggctgatacgtgaatatcagcctgagttttactttggcaaccgcattcagtga

SEQ ID NO: 858520 - DNA, 75 bp, synthetic construct
  source 1..75: mol_type = other DNA
tctggtgcgtattaatagtgtgtctcacactgctgatattcacttacctgacacggaaatcgctctgcgaaatcc

SEQ ID NO: 858521 - DNA, 75 bp, synthetic construct
  source 1..75: mol_type = other DNA
caaattaacgttgccgcctggggcgaccgttgaccatatgctgatggaaagcgacgatcagaaactgctgatggc

SEQ ID NO: 858522 - DNA, 75 bp, synthetic construct
  source 1..75: mol_type = other DNA
cgtattaacctcaatatgatcggtctggatgggcgtccggcggtgaaaaatctgcgggaaatcctctctgaatgg

SEQ ID NO: 858523 - DNA, 75 bp, synthetic construct
  source 1..75: mol_type = other DNA
tgaagacaataagctcattgagcagatcgacgaatatctggatgacacctttatgggcactgttgcaaatagtcg

SEQ ID NO: 858524 - DNA, 75 bp, synthetic construct
  source 1..75: mol_type = other DNA
ggactacggcgggctggagatgtttaaagtcgaatgtaattccatccaatccctctgccaaagctctcctgctaa

SEQ ID NO: 858525 - DNA, 75 bp, synthetic construct
  source 1..75: mol_type = other DNA
gatccttatttagctcaatcgtggattgaggacgccagcggtaaaaaaacgcgcgattacatatcaacgctcccc

SEQ ID NO: 858526 - DNA, 75 bp, synthetic construct
  source 1..75: mol_type = other DNA
agtaaaaaactgccctatctggcccaaacatggatagaagatacgaaaggcaataaatctcgtgactttattgtt

SEQ ID NO: 858527 - DNA, 75 bp, synthetic construct
  source 1..75: mol_type = other DNA
gacacctacggcatctctatccccatcaccaaacacaactatctggtcagacatatcgaagaactccctcaggtc

SEQ ID NO: 858528 - DNA, 75 bp, synthetic construct
  source 1..75: mol_type = other DNA
gcgtgcagagtggcaccagttggtggcggatttgcagcgcgaattcccgtgtccaatcccgaaagcgtgcgatcc

SEQ ID NO: 858529 - DNA, 75 bp, synthetic construct
  source 1..75: mol_type = other DNA
gcgaaaatcattcatgtcgatatcgaccgtgcagagctgggcaaaatcaagcaaccgcacgtagcgattcaggcg

SEQ ID NO: 858530 - DNA, 75 bp, synthetic construct
  source 1..75: mol_type = other DNA
aaaagctgctgaaggtaattcagcccttatatcaaaaactaagagactccttagtcgagttgatggttttagagc

SEQ ID NO: 858531 - DNA, 75 bp, synthetic construct
  source 1..75: mol_type = other DNA
aaaccacaaacaaaaaaaagcccccctcagcagattgatgcctttcgtaaggaatatggggaaattctagaagaa

SEQ ID NO: 858532 - DNA, 75 bp, synthetic construct
  source 1..75: mol_type = other DNA
atggatgaatactcaccaaaaagacatgatattgcacagcttaaatttctctgcgaaaccctgtatcatgactgt

SEQ ID NO: 858533 - DNA, 75 bp, synthetic construct
  source 1..75: mol_type = other DNA
attgccgatgtatatctggcttgccggaaggttgggatattccttaataccgcacaacaaaatccatctgcataa

SEQ ID NO: 858534 - DNA, 75 bp, synthetic construct
  source 1..75: mol_type = other DNA
gcgattacgccgcatacatggctattgaagacacgatagagaagattgaatcaggtaaatcattaagcgattttg

SEQ ID NO: 858535 - DNA, 75 bp, synthetic construct
  source 1..75: mol_type = other DNA
aaaagctgctgatggaaatacgcctctcatctcaaaagcgaagagacttctgagccgagttgatgggtttagagc

SEQ ID NO: 858536 - DNA, 75 bp, synthetic construct
  source 1..75: mol_type = other DNA
attcgatgacattcaggtgcgcatagtgagtatcaacggcgagccgtggtttgttggcgctgatgtgtgtgccgc

SEQ ID NO: 858537 - DNA, 75 bp, synthetic construct
  source 1..75: mol_type = other DNA
gtttacttctgcgatcctcagagtccttggcagcggggaacaaatgagaacacaaatgggctaattcggcagtac

SEQ ID NO: 858538 - DNA, 75 bp, synthetic construct
  source 1..75: mol_type = other DNA
ggttgctgctcagctaaacaacagaccgagaaagacactgaagttcaaaacaccgaaagagataattgaaagggg

SEQ ID NO: 858539 - DNA, 75 bp, synthetic construct
  source 1..75: mol_type = other DNA
gtttaccagaagtcatgaagaaaactggatttggtaaagcgtggatctatcgtcttatcagccaaaatcggttcc

SEQ ID NO: 858540 - DNA, 75 bp, synthetic construct
  source 1..75: mol_type = other DNA
ggcaggaaatccatccggggcagaattatttcgaatacggatacgattcccgttatgcagccttcatggaagaaa

SEQ ID NO: 858541 - DNA, 75 bp, synthetic construct
  source 1..75: mol_type = other DNA
ttgttttgaatgtggcttcaacaacaggacttgttggaagtatgaaagatttggcgctcgcagcgagaaagctgg

SEQ ID NO: 858542 - DNA, 75 bp, synthetic construct
  source 1..75: mol_type = other DNA
ggccatcaaaccgatcacttctacggtggtgacgaaagcgataaaatttatggccgtggcggtagcgatctgcta

SEQ ID NO: 858543 - DNA, 75 bp, synthetic construct
  source 1..75: mol_type = other DNA
atgaagaatcaagcaacccgcctcatacgcttaccagaagttctcgaacgaactggctacggaaaagcctggatc

SEQ ID NO: 858544 - DNA, 75 bp, synthetic construct
  source 1..75: mol_type = other DNA
gatggtcaggctgttacatcttctttggctgttgctgacttcttctctaaacgtcatgacgatgttctgaaaaag

SEQ ID NO: 858545 - DNA, 75 bp, synthetic construct
  source 1..75: mol_type = other DNA
aattgaaaagcaaactgcattattggctggtatttgcaccagtttatttctggttgctcctgtggaatatcattt

SEQ ID NO: 858546 - DNA, 75 bp, synthetic construct
  source 1..75: mol_type = other DNA
ggcctcccctgaatttttcccctttttggccgcagccttggactgattttgtcggcccgattagtgcacagctct

SEQ ID NO: 858547 - DNA, 75 bp, synthetic construct
  source 1..75: mol_type = other DNA
caccagcgaaattggcgtttccggtggtggaagttatccattgcatacggaggctgccatcatggctactgtccc

SEQ ID NO: 858548 - DNA, 75 bp, synthetic construct
  source 1..75: mol_type = other DNA
gacgttctaccttctggacaatgacaccaccgtcgatggcttaagcgccgttgagcagctggtgtgtgaaattgc

SEQ ID NO: 858549 - DNA, 75 bp, synthetic construct
  source 1..75: mol_type = other DNA
acgttcaccagtgctatggtcacagatagaggctgttaacggacgaccgggcgactatgacgtaaaacgtggcgt

SEQ ID NO: 858550 - DNA, 75 bp, synthetic construct
  source 1..75: mol_type = other DNA
gctggcaggtggagcgccgtggcgatgatctgcaatttctgtgggtcaatcaggcggttgcgattggcgataatc

SEQ ID NO: 858551 - DNA, 75 bp, synthetic construct
  source 1..75: mol_type = other DNA
tctgatgtgggggctaccgtgtgtgaatttttccgtgcgccaccgccacaaaatggtcgctcttttctttcctcc

SEQ ID NO: 858552 - DNA, 75 bp, synthetic construct
  source 1..75: mol_type = other DNA
tttatggtgtcgcgctgggatacttctcgatggtggggatcgtcagcgtgctaatgtcctggctacccaagtatc

SEQ ID NO: 858553 - DNA, 75 bp, synthetic construct
  source 1..75: mol_type = other DNA
caggtacaggtcggtcgggtcattacatttggcggcctgttaaccgacagtcaacgcattctcgatgccgcagaa

SEQ ID NO: 858554 - DNA, 75 bp, synthetic construct
  source 1..75: mol_type = other DNA
ccttatggcgtgagctggcaaaacctggtggatagccagcggattatggatatcaccctcgacgaatttaacacc

SEQ ID NO: 858555 - DNA, 75 bp, synthetic construct
  source 1..75: mol_type = other DNA
ctggggctaatcaacgcattgggttatgcgcctggcgatatgcagccgtcagactccgcaacctggggcgtggca

SEQ ID NO: 858556 - DNA, 75 bp, synthetic construct
  source 1..75: mol_type = other DNA
tgaatgtaatcaagacaggacactctggctcaatagctggtaatcctgctcatgcactggatgataagactatga

SEQ ID NO: 858557 - DNA, 75 bp, synthetic construct
  source 1..75: mol_type = other DNA
ttactattcagatggcgcatttaacgccgcactgccttatgtattcgccaaccaaccccacaacaacattgtacg

SEQ ID NO: 858558 - DNA, 75 bp, synthetic construct
  source 1..75: mol_type = other DNA
tagtgattgaagatgcctctgatatgctactggctatcaccctggcgggacgtatgttgatgttcccggtaagtg

SEQ ID NO: 858559 - DNA, 75 bp, synthetic construct
  source 1..75: mol_type = other DNA
gataagatattcacagatataataaacagaattagtattaccagaagcgatattgatgatatattggaaggtgtt

SEQ ID NO: 858560 - DNA, 75 bp, synthetic construct
  source 1..75: mol_type = other DNA
atacatgctaacagcaaagattgttgatattttgatcgagacgtggtgctctaatagaggaatagatctttatat

SEQ ID NO: 858561 - DNA, 75 bp, synthetic construct
  source 1..75: mol_type = other DNA
tgcgcaatgcaggaatattagattatttggatcaacagggtaaacagggagctccccttaatgcgattactgagc

SEQ ID NO: 858562 - DNA, 75 bp, synthetic construct
  source 1..75: mol_type = other DNA
accgttttacgatcgcagcggcggcggcttaacactttctggcggtgaaccgtttatgcagccggaaatggcgac

SEQ ID NO: 858563 - DNA, 75 bp, synthetic construct
  source 1..75: mol_type = other DNA
ccgcgtaccgctgattcagggctttaatgccgacgaaacctctgtaaaagccattaccgattttgccgccgacga

SEQ ID NO: 858564 - DNA, 75 bp, synthetic construct
  source 1..75: mol_type = other DNA
cgacccatgatggccccggtatccgcacggtcgtatttcttaaaggctgttcgctgggctgccgctggtgtcaga

SEQ ID NO: 858565 - DNA, 75 bp, synthetic construct
  source 1..75: mol_type = other DNA
gttgatgcgcctggctcttgtattgtttactataattatagaggtaaattttcgtgcctgtattactcagagggg

SEQ ID NO: 858566 - DNA, 75 bp, synthetic construct
  source 1..75: mol_type = other DNA
caacggcctgtgcgctggtcgccattatcggaaatgcacacgattttaaaatgagcgacaactggcaacttggct

SEQ ID NO: 858567 - DNA, 75 bp, synthetic construct
  source 1..75: mol_type = other DNA
accgttttacgatcgcagcggcggcggtttaacgctttctggcggggagccgtttatgcagccggaaatggcggc

SEQ ID NO: 858568 - DNA, 75 bp, synthetic construct
  source 1..75: mol_type = other DNA
ggtcagactattgaggcaacttttaatcaggctgtaactaccagcactcagtggagcgctccgctgaacgtagca

SEQ ID NO: 858569 - DNA, 75 bp, synthetic construct
  source 1..75: mol_type = other DNA
ggtagcgacatcaatggatttagtaatgtattaagggatctgactgaaggtggaaccaaactgactattactgta

SEQ ID NO: 858570 - DNA, 75 bp, synthetic construct
  source 1..75: mol_type = other DNA
tgagttatttcagcaggtaaaacttatctatcctgcgttgcaggattatgcacacggtacgaaaagatattatga

SEQ ID NO: 858571 - DNA, 75 bp, synthetic construct
  source 1..75: mol_type = other DNA
accagcaactcacgcagtggacacaaaaagttgatgttgccctgaataactggcgggagaaaaaacaacgtttgc

SEQ ID NO: 858572 - DNA, 75 bp, synthetic construct
  source 1..75: mol_type = other DNA
tctgcgcgatagttttcgccagtgggtgttcagcgaagttcgcgaaactggcgatcccggtcgttcaggtaacgc

SEQ ID NO: 858573 - DNA, 75 bp, synthetic construct
  source 1..75: mol_type = other DNA
tacgtttaccagaaagccgcttgctgacaaacgttaactttacggtggataaaggtgacattgtcacgttaatgg

SEQ ID NO: 858574 - DNA, 75 bp, synthetic construct
  source 1..75: mol_type = other DNA
cttatcaccaaaaatgctacaaagatagtcatgttaactggtgtaagaacacaggagatgcgatttgctacgtgg

SEQ ID NO: 858575 - DNA, 75 bp, synthetic construct
  source 1..75: mol_type = other DNA
tttctctggcgatattgcgaaagctatcgctgctggtgcaagcgcggtgatggtaggttccatgctggcaggtac

SEQ ID NO: 858576 - DNA, 75 bp, synthetic construct
  source 1..75: mol_type = other DNA
tcatgcccagtatctcgatggtcgccgtgaaatgatgcagtggtacgcagattatattgattcgctttataagca

SEQ ID NO: 858577 - DNA, 75 bp, synthetic construct
  source 1..75: mol_type = other DNA
tctcaaaagaaagtgtatcacaagtaattgagtcactcggttacaaaggacgtgctaccggtcacggttttagac

SEQ ID NO: 858578 - DNA, 75 bp, synthetic construct
  source 1..75: mol_type = other DNA
gttaggagtgatggatcacggctatttagcgaccaccgaaggtctgccgcagatcatcgccgaactcactcacgg

SEQ ID NO: 858579 - DNA, 75 bp, synthetic construct
  source 1..75: mol_type = other DNA
cataccctgttgagtgattttaagtgccagcaacaggtgccggaaatgtatcttgacgttctggcgagtcgtttg

SEQ ID NO: 858580 - DNA, 75 bp, synthetic construct
  source 1..75: mol_type = other DNA
cctggttctatttgtaccacccgtatcgtcactggcgtaggtgttccgcagatcaccgccgttgctgacgcagta

SEQ ID NO: 858581 - DNA, 75 bp, synthetic construct
  source 1..75: mol_type = other DNA
aaaacatcatcctctggtctttatcggtaggaacgatcctcgcaagccaattagtaaggaaagcattaaccaatt

SEQ ID NO: 858582 - DNA, 75 bp, synthetic construct
  source 1..75: mol_type = other DNA
gtgccgctctctgagcaggtcattgcgctatttaagcaacttgaaccaatctcaaaacatcatcctctggtcttt

SEQ ID NO: 858583 - DNA, 75 bp, synthetic construct
  source 1..75: mol_type = other DNA
ggcagtatcatcactaaaaatgcgaccaagattgtgatgcttacaggtgtaagaacacaggaaatgcgctttgcc

SEQ ID NO: 858584 - DNA, 75 bp, synthetic construct
  source 1..75: mol_type = other DNA
gagcactagagaaaacacgcaaggtgcgtcaaagatgcggtgaggtttatcgctatgcaatcataactggccgtg

SEQ ID NO: 858585 - DNA, 75 bp, synthetic construct
  source 1..75: mol_type = other DNA
ggtaggaacgatccaaataaacctatgagtgaagcgagtataaatcaggtcatcaaacgtattggctatggtgga

SEQ ID NO: 858586 - DNA, 75 bp, synthetic construct
  source 1..75: mol_type = other DNA
caaaaaaagaagaaaaaatcgcgcagcaaatgagtttgaaaaatacgttcgaggccattgctcgcgaatggcatc

SEQ ID NO: 858587 - DNA, 75 bp, synthetic construct
  source 1..75: mol_type = other DNA
caaagtttggttcgctatctacagatgagttatatcagcagataaaagctgtctatccttcgttgccaagttatg

SEQ ID NO: 858588 - DNA, 75 bp, synthetic construct
  source 1..75: mol_type = other DNA
tttaatcctgagcgtgcgacgttttatcgcgataaaccggacgcccgcgctctggcctggtatctccctgattcc

SEQ ID NO: 858589 - DNA, 75 bp, synthetic construct
  source 1..75: mol_type = other DNA
cggagttaacgaaaaaagatatcaatcgcgtcgcatggcgttccatgctgttacaggcttctttcaactacgaac

SEQ ID NO: 858590 - DNA, 75 bp, synthetic construct
  source 1..75: mol_type = other DNA
gtgacgtttgttattggcattatcctcgcgatggagcgttctaagcaggacgttaacagtattcagagcaccaaa

SEQ ID NO: 858591 - DNA, 75 bp, synthetic construct
  source 1..75: mol_type = other DNA
tgcaggcgtcattttttcggtgaagtccgggaaaggatttctgtgtcagtgtgtgatttacgatccgcaccctta

SEQ ID NO: 858592 - DNA, 75 bp, synthetic construct
  source 1..75: mol_type = other DNA
ccggttgatggcgcaaaaccgaacgccgcaagcagatgctttttttctggattttgccatcaatgatgacggcga

SEQ ID NO: 858593 - DNA, 75 bp, synthetic construct
  source 1..75: mol_type = other DNA
ccgggaatttgagcgaagctcgtattaagcgcatgatccaacaaggtttggagggggatgaaaaggctgatgtta

SEQ ID NO: 858594 - DNA, 75 bp, synthetic construct
  source 1..75: mol_type = other DNA
gactccatcccgctgatttgcatcactggtcaggttcccgcctcgatgatcggcaccgacgccttccaggaagtc

SEQ ID NO: 858595 - DNA, 75 bp, synthetic construct
  source 1..75: mol_type = other DNA
ctttcccgtgatgtcgtgggctgcaaagggggagcatacgttgtcgcaggggtatgtctggcttcatgtgtccgg

SEQ ID NO: 858596 - DNA, 75 bp, synthetic construct
  source 1..75: mol_type = other DNA
agaaagcgcagctgcctaccaccatgactttaatggcgctgggtatgctgccaaaagcgcatccgctgtcgctgg

SEQ ID NO: 858597 - DNA, 75 bp, synthetic construct
  source 1..75: mol_type = other DNA
gtgacgtttgttatcggcattatccttgcgatggagcgttctaagcaggacgttaacagtattcagagcaccaaa

SEQ ID NO: 858598 - DNA, 75 bp, synthetic construct
  source 1..75: mol_type = other DNA
ccctgaccatgttctggctggtacgccgcggctggagtccgctgcgcctgattgcggttaccgtggttctcggca

SEQ ID NO: 858599 - DNA, 75 bp, synthetic construct
  source 1..75: mol_type = other DNA
caatcgttgggatgacggtaatcggcgcgctggtggcaacctatgttcgtttaagcaccacgctggaaatcacgg

SEQ ID NO: 858600 - DNA, 75 bp, synthetic construct
  source 1..75: mol_type = other DNA
gtgctcagcacggcaacccattttaatgatgagcaacaaaccctggtatttcctggcggagaatgtctgcacaaa

SEQ ID NO: 858601 - DNA, 75 bp, synthetic construct
  source 1..75: mol_type = other DNA
aatgcacatattctggatcatggctggaatgcaactgagttctcatggttccgatacggacagtataacgaaacg

SEQ ID NO: 858602 - DNA, 75 bp, synthetic construct
  source 1..75: mol_type = other DNA
gtgcggcaattctcaacgcattgcatcttaccgaagacaatattctgctggatttgccgatccaggtggcaacca

SEQ ID NO: 858603 - DNA, 75 bp, synthetic construct
  source 1..75: mol_type = other DNA
ggaaaacatcgtgtgactatcgaaaagcaaaatgatgattatcgtatttcgctggaacaaggtacgccaggcttt

SEQ ID NO: 858604 - DNA, 75 bp, synthetic construct
  source 1..75: mol_type = other DNA
atgcattaacggatctaaccgaaaatagaaccaaactgaccattactgtaaatggcgataaaccgattctgctgg

SEQ ID NO: 858605 - DNA, 75 bp, synthetic construct
  source 1..75: mol_type = other DNA
agactggcgactggaagggcacaagcacaatgttcaactggagtaaaaactcgttccctgctggctttgccaagc

SEQ ID NO: 858606 - DNA, 75 bp, synthetic construct
  source 1..75: mol_type = other DNA
aaagacaaagccccggcgcttggaaagccaaatccggcggttaacccattcccatacaatcctgattatgcatat

SEQ ID NO: 858607 - DNA, 75 bp, synthetic construct
  source 1..75: mol_type = other DNA
aagtacgtctgctgaaaaataccgctgcgggcgtcattttttcggtgaagtccgggaaaggatttctgcgtcaat

SEQ ID NO: 858608 - DNA, 75 bp, synthetic construct
  source 1..75: mol_type = other DNA
cgattcgttatcagccatccggcatacgccatttatcgccccctcaccttccggttgatggcgcaaaaccgaacg

SEQ ID NO: 858609 - DNA, 75 bp, synthetic construct
  source 1..75: mol_type = other DNA
ttccagtaatccggcaaccgttgccgtctgggatcctgaatatggctatttcagtgatactgccccctgttttct

SEQ ID NO: 858610 - DNA, 75 bp, synthetic construct
  source 1..75: mol_type = other DNA
tctcactgaagacgatattttgccaggcttgccaatccaggtggcaaccacaggacactcaaaagtgatgattcc

SEQ ID NO: 858611 - DNA, 75 bp, synthetic construct
  source 1..75: mol_type = other DNA
acggtggctgcgcactatgtacgttcaaaggtattaggtttgggaaattgcacggtatggcaaacgtcgctggca

SEQ ID NO: 858612 - DNA, 75 bp, synthetic construct
  source 1..75: mol_type = other DNA
tgcggaatttgtctacagcggttttgcggaggatgaacagggagccgcccggtttttgtctgctctcgaaaactg

SEQ ID NO: 858613 - DNA, 75 bp, synthetic construct
  source 1..75: mol_type = other DNA
cctgcgggtcaacgccacctgtgtgtccgccacagacaaaaacaccagaaccgccagcgtggataatgcagcccg

SEQ ID NO: 858614 - DNA, 75 bp, synthetic construct
  source 1..75: mol_type = other DNA
gcaactttatccacagctcgatttatggaaaactgcaaaacccttccttgaatcgtggattaaagatcaggttgg

SEQ ID NO: 858615 - DNA, 75 bp, synthetic construct
  source 1..75: mol_type = other DNA
aaaacggcaccaacatgaaattgctggcggaacgcggcgtgcaggtgttttttactcaggtcttccgtgacagtt

SEQ ID NO: 858616 - DNA, 75 bp, synthetic construct
  source 1..75: mol_type = other DNA
gctgaaatcgaatggcaaagaggtggtgattaaagtcattcgcccggatattttgccggtcataaaagcggatct

SEQ ID NO: 858617 - DNA, 75 bp, synthetic construct
  source 1..75: mol_type = other DNA
tatttattggggattggggcgacgttagtgttaagtggcacattcttgctggtcagccgacctgaatgggggatg

SEQ ID NO: 858618 - DNA, 75 bp, synthetic construct
  source 1..75: mol_type = other DNA
gtgattaaagtcatccgcccggatattttgccggtcattaaagcagacctgaaacttatctaccgtctggctcgc

SEQ ID NO: 858619 - DNA, 75 bp, synthetic construct
  source 1..75: mol_type = other DNA
ccagctttatccgcagctcgatttatggaaaacggcgaagcctttcctggagtcgtggattaaagatcaggtcgg

SEQ ID NO: 858620 - DNA, 75 bp, synthetic construct
  source 1..75: mol_type = other DNA
ggtgatctcgacttcctcgacggtcaggctaaaaccacggtacccgctatcgactttgcatcgactactgttaac

SEQ ID NO: 858621 - DNA, 75 bp, synthetic construct
  source 1..75: mol_type = other DNA
atgctatgctggtagcggttaatgatttctctgaggctcattaccgttcacacgcaaaccgtgttgaagtggatc

SEQ ID NO: 858622 - DNA, 75 bp, synthetic construct
  source 1..75: mol_type = other DNA
acttatttccagtaaactgtcagtgaatcaaatcgcaatacgttgcggttatgccagcacaccgtattttatcag

SEQ ID NO: 858623 - DNA, 75 bp, synthetic construct
  source 1..75: mol_type = other DNA
gcagatttaaatacctgggttgataatgctgcggcgtacaaagatgtaattgcacgttcacttgcggctgctcaa

SEQ ID NO: 858624 - DNA, 75 bp, synthetic construct
  source 1..75: mol_type = other DNA
atgcgcctgctccctcttgttgccgcagcgacagcggcatttcttgtcgttgcctgtagttcacctacgccgccg

SEQ ID NO: 858625 - DNA, 75 bp, synthetic construct
  source 1..75: mol_type = other DNA
ggtgtaattatctttgctgctggcactgctgctgatggtttgtcatctaacccgctgatcagtgacatggtgaaa

SEQ ID NO: 858626 - DNA, 75 bp, synthetic construct
  source 1..75: mol_type = other DNA
attgaaatcgaatggcaaagaggtggtgattaaagttatccgcccggatattttgccggtgattaaagcggatct

SEQ ID NO: 858627 - DNA, 75 bp, synthetic construct
  source 1..75: mol_type = other DNA
gcgcgatgttgtgtgcagcaaacgtccaggaagcgcaagactttgctctcatttcgcacattgcgacgctgaaaa

SEQ ID NO: 858628 - DNA, 75 bp, synthetic construct
  source 1..75: mol_type = other DNA
cagtgaagttatcgccatctaccctattacccccagttccacgatggcagaacaggctgatgcatgggccggaaa

SEQ ID NO: 858629 - DNA, 75 bp, synthetic construct
  source 1..75: mol_type = other DNA
atgaattgtactattttaatgaaaataatctctgtaaaggagattacaaaagattcgcctttgtggtcgcactac

SEQ ID NO: 858630 - DNA, 75 bp, synthetic construct
  source 1..75: mol_type = other DNA
catgtcgaagaagagaaaatcaattacgatttcttcctcaacctgccagaaatcgatcgtagcaaactggaacgt

SEQ ID NO: 858631 - DNA, 75 bp, synthetic construct
  source 1..75: mol_type = other DNA
atgaattgctgacccgtggcgaaaaagtcggcgtgctgaaagttcgcctgtaccgtcccttctccgccaaacact

SEQ ID NO: 858632 - DNA, 75 bp, synthetic construct
  source 1..75: mol_type = other DNA
caaaggccaggatctggtggaacgcaactggcaggctctggcgctggcacgtgaatccgtagaagaagttccact

SEQ ID NO: 858633 - DNA, 75 bp, synthetic construct
  source 1..75: mol_type = other DNA
gaggggtatgccatagaaggggccacaccgctatttagcgatgtggatgagttatacagtttgctggaagaggcg

SEQ ID NO: 858634 - DNA, 75 bp, synthetic construct
  source 1..75: mol_type = other DNA
catatctgacgagctacctatgctggttaatcaacgggttgcaatgctctcacctcaaaatattcgtggcgaact

SEQ ID NO: 858635 - DNA, 75 bp, synthetic construct
  source 1..75: mol_type = other DNA
ctggcggaacgcggcgtgcaggtgttcttcactcaggtctttcgcgacagctttttccatgccgatatgcaccct

SEQ ID NO: 858636 - DNA, 75 bp, synthetic construct
  source 1..75: mol_type = other DNA
taacttcgatatgggcgcgggtattatgttaaccaatacctacacctttcagcgagaagatgaactcaaacatgg

SEQ ID NO: 858637 - DNA, 75 bp, synthetic construct
  source 1..75: mol_type = other DNA
tactggaactttaaaataacagaaaaattttcctatacatttgaaccacattacttcatacgcgtaaatgacttt

SEQ ID NO: 858638 - DNA, 75 bp, synthetic construct
  source 1..75: mol_type = other DNA
ccggagatagggattgactggccggcgctgagcgactgcgcgctgtcgctgtcggagaaagatctgcaggcacat

SEQ ID NO: 858639 - DNA, 75 bp, synthetic construct
  source 1..75: mol_type = other DNA
ttacaggatgcactcgaaaaatacgagcgggataaacgtgcgcgcgcccgtgccagcatgatgcatgacggttaa

SEQ ID NO: 858640 - DNA, 75 bp, synthetic construct
  source 1..75: mol_type = other DNA
tcaaaaccgctggatgccacatcaaaatctgcaacgtttgatttcaaagcctcttacgttcgtgaagatgcaagc

SEQ ID NO: 858641 - DNA, 75 bp, synthetic construct
  source 1..75: mol_type = other DNA
actaaagcactggacgcgaccactaaatctgtaacctatgattttaaagcatcctatgttcgtgctgtaaatgac

SEQ ID NO: 858642 - DNA, 75 bp, synthetic construct
  source 1..75: mol_type = other DNA
atcctatgttcgtgctgaaacaagcacagcaccaactgctggttatgttaaaaccaacactgcatataccattac

SEQ ID NO: 858643 - DNA, 75 bp, synthetic construct
  source 1..75: mol_type = other DNA
gactggcgcactcgctgacctgaaacagtgggtaatggataccgtagagcctgagcttgaagctgaatttcgtaa

SEQ ID NO: 858644 - DNA, 75 bp, synthetic construct
  source 1..75: mol_type = other DNA
aatacgaagcctgcaagcgggctgcgtctgacaatggagactttgaatcatggttacacggacagaccaactact

SEQ ID NO: 858645 - DNA, 75 bp, synthetic construct
  source 1..75: mol_type = other DNA
cgtactgaatgacaccgtaggtgctaaagctaaacctttcagcatcaccgttgactgcagcaatgcaaacccgaa

SEQ ID NO: 858646 - DNA, 75 bp, synthetic construct
  source 1..75: mol_type = other DNA
aaaattgacggttttcgcaaaaccagcgctcaactggccgtaaccggccagtcgctggagaaggcaaagcgcgag

SEQ ID NO: 858647 - DNA, 75 bp, synthetic construct
  source 1..75: mol_type = other DNA
gtgatgggcgggattggccttgtcgcatggccggtggtgatggggattaatgccatcattgcggcggctggcgtg

SEQ ID NO: 858648 - DNA, 75 bp, synthetic construct
  source 1..75: mol_type = other DNA
atgtaattctcgaaaagctcggccttgttaaaaaggaatcgagcagtattgatacggaaacggcaaaaacgccgc

SEQ ID NO: 858649 - DNA, 75 bp, synthetic construct
  source 1..75: mol_type = other DNA
actgcgcagcggtattgactgggtactggaaaaactcggtgttatcaacaaagagtcagacacacttgaccagac

SEQ ID NO: 858650 - DNA, 75 bp, synthetic construct
  source 1..75: mol_type = other DNA
acactgccgttgggcgcacatgccatactcaataacgataaaagaggcacacggatgacaataagcggtcatcct

SEQ ID NO: 858651 - DNA, 75 bp, synthetic construct
  source 1..75: mol_type = other DNA
gtccgcttatgaggcggtggggactgacctgtttgaccagcaggaaggcgcactgcgtaagctcacgcagacggc

SEQ ID NO: 858652 - DNA, 75 bp, synthetic construct
  source 1..75: mol_type = other DNA
aagatggttcgtggtatcccgtcgttgcctttcgaccgacgccagattacacgctaattttcaattcgagtatcg

SEQ ID NO: 858653 - DNA, 75 bp, synthetic construct
  source 1..75: mol_type = other DNA
aatgaatttgctcagaaagaggctgacaaattcagggatgcgctgattgaaacactgaaaaccatgtatggtaag

SEQ ID NO: 858654 - DNA, 75 bp, synthetic construct
  source 1..75: mol_type = other DNA
aaaacggggataagacagatatggcttgccgagcagtcgctaaaaagcgttggggaataccggacagcatgtcat

SEQ ID NO: 858655 - DNA, 75 bp, synthetic construct
  source 1..75: mol_type = other DNA
atgcgtttcgttcttttctgtccctcaggaattgtaccagcgcagttcgcagctctatcaaccggttctgtcggc

SEQ ID NO: 858656 - DNA, 75 bp, synthetic construct
  source 1..75: mol_type = other DNA
gccgaagcccttgccacacagtttaaaaataccgaacgaccgacccgtgctcaggcgaaagtgctggaatccgca

SEQ ID NO: 858657 - DNA, 75 bp, synthetic construct
  source 1..75: mol_type = other DNA
gcgcgagctgaacggtcacgcatcccgtattgagggatttcgcaagaccagtgcacagcttgccgtgactggtca

SEQ ID NO: 858658 - DNA, 75 bp, synthetic construct
  source 1..75: mol_type = other DNA
gtgatattgctgtgcaaatgggaaccccgaccgattgcgtctatcttggcgtaaatgctctgatgcgcccgcgcc

SEQ ID NO: 858659 - DNA, 75 bp, synthetic construct
  source 1..75: mol_type = other DNA
tacgcctcaaagagtggttcaaagacaggactttgccgcctaaagagaaaagttacttatctcagttaatgagtg

SEQ ID NO: 858660 - DNA, 75 bp, synthetic construct
  source 1..75: mol_type = other DNA
atgggcgttatttttatcgccgtcggtggtaatgactccaacttattgatagtgttttatgttcagataatgccc

SEQ ID NO: 858661 - DNA, 75 bp, synthetic construct
  source 1..75: mol_type = other DNA
ttttaaatgggggtttatcggcattatgggcgttatttttatcgccgtcggtggtgatgctgccaacttactgat

SEQ ID NO: 858662 - DNA, 75 bp, synthetic construct
  source 1..75: mol_type = other DNA
tgcaaaccggggctgttgctgaaattccgcctgccagaccgctgacgcccggtgcacgtctggagcgccgtgaac

SEQ ID NO: 858663 - DNA, 75 bp, synthetic construct
  source 1..75: mol_type = other DNA
ggcgatgccttccgcacggctggaggcacagcgtagtggtgtcgaacttgctgacgttgcggggagcgggagaaa

SEQ ID NO: 858664 - DNA, 75 bp, synthetic construct
  source 1..75: mol_type = other DNA
taccggaatctgtcacggaaggcacgctgacaacctggtgtaaacaagaaggcgagcacgtaaaacgcgatgatg

SEQ ID NO: 858665 - DNA, 75 bp, synthetic construct
  source 1..75: mol_type = other DNA
gcccagttcgcatattatctggccggctttccctggtatgaggggaatatcctgtttgcctttgcagtggcggca

SEQ ID NO: 858666 - DNA, 75 bp, synthetic construct
  source 1..75: mol_type = other DNA
atcgatgttactcaccgatctccttcacggtaatacgcacctggttgcagtcgttgctggtctggtcacccggac

SEQ ID NO: 858667 - DNA, 75 bp, synthetic construct
  source 1..75: mol_type = other DNA
gtgcagggaaatcattaccccgtttctggtccggggattttttcccggtgttctatgcctgtcatcttgctgtgc

SEQ ID NO: 858668 - DNA, 75 bp, synthetic construct
  source 1..75: mol_type = other DNA
ggatgtttctggccgggcggggcgcgtttccgctgtttgcgctggtctggggactgaatctgtcccgtcatgcga

SEQ ID NO: 858669 - DNA, 75 bp, synthetic construct
  source 1..75: mol_type = other DNA
gctgtaccgggcggaagacagaacggaacgtctggcgctggttgcatgcctgctggccgtgattccggcacttaa

SEQ ID NO: 858670 - DNA, 75 bp, synthetic construct
  source 1..75: mol_type = other DNA
aggatcgccgaccttaaccattctgaatgtgattggtgacggtgctttcttcttcctgccgctgatggtcgcggc

SEQ ID NO: 858671 - DNA, 75 bp, synthetic construct
  source 1..75: mol_type = other DNA
tttgcgccagaagcgattgatgcactggtacaacgactagagtgtgacgtaattctcattgaggcagatggctcg

SEQ ID NO: 858672 - DNA, 75 bp, synthetic construct
  source 1..75: mol_type = other DNA
tggtgcaacgaccagagtgtgacgtaattctcattgaggcagatggctcgcgtggaatgccgttaaaagcgcctg

SEQ ID NO: 858673 - DNA, 75 bp, synthetic construct
  source 1..75: mol_type = other DNA
agagcggaacgtctggcgctgttggcctgcctgctggctgttattccggcacttaaccttgccgccagtgatgca

SEQ ID NO: 858674 - DNA, 75 bp, synthetic construct
  source 1..75: mol_type = other DNA
acgctgaatgagctggagcaccgctaccgctttgattcagacgttctggctgaacgcctgacgcggcagacactc

SEQ ID NO: 858675 - DNA, 75 bp, synthetic construct
  source 1..75: mol_type = other DNA
gtgtgcaggaaaatcattaccccgtttctggcccggagattttttcccgacgttctatgcctgtcatctggctgt

SEQ ID NO: 858676 - DNA, 75 bp, synthetic construct
  source 1..75: mol_type = other DNA
cagttcgcgtattatctggcaggctttccgtggtatgaggggaatatcctgtttgcctttgcagtggcggcacag

SEQ ID NO: 858677 - DNA, 75 bp, synthetic construct
  source 1..75: mol_type = other DNA
cggtgctgaccgttggtctggtgtcgtgtacagggaaatcattaccccgtttctggcccggagattttttcccga

SEQ ID NO: 858678 - DNA, 75 bp, synthetic construct
  source 1..75: mol_type = other DNA
gtgctggcatggtgtgaaacgcgcagcctgtggcgttctgtgggagccatgttgcttcttgccgtgtggttacct

SEQ ID NO: 858679 - DNA, 75 bp, synthetic construct
  source 1..75: mol_type = other DNA
agtggcggcacaggtgctgacgtggtgtgaaacgcgcagtgggtggcgtacagcagcggccattcttctgatggc

SEQ ID NO: 858680 - DNA, 75 bp, synthetic construct
  source 1..75: mol_type = other DNA
ccaccggctgtaccgggcggaagacagaacggaacgtctggcgctggttgcatgcctgctggctgttattccggc

SEQ ID NO: 858681 - DNA, 75 bp, synthetic construct
  source 1..75: mol_type = other DNA
agattgcgcaaaagccaggtgcacttcgtatcctgaaccactcgctgcgccttgctgccatgactgcccacggca

SEQ ID NO: 858682 - DNA, 75 bp, synthetic construct
  source 1..75: mol_type = other DNA
caggacaggccgcttcgtcggctcagtcagcgtcctccagcgcaggaacggcatcaacaaaggccactgaagcgg

SEQ ID NO: 858683 - DNA, 75 bp, synthetic construct
  source 1..75: mol_type = other DNA
ctgacgtggtgtgagacgcgcagcctgtggcgtacagcagcggccatactcctgatggcattgtggggacctttg

SEQ ID NO: 858684 - DNA, 75 bp, synthetic construct
  source 1..75: mol_type = other DNA
catgcctgctggccgtgattccggcgcttaaccttgctaccagtgatgcggcggctgtagccggccttgtgatga

SEQ ID NO: 858685 - DNA, 75 bp, synthetic construct
  source 1..75: mol_type = other DNA
ctttccgctttttgccctggtgtgggggctgaatctgtcccgccatgcgcatatccggcagtcggccattaaccg

SEQ ID NO: 858686 - DNA, 75 bp, synthetic construct
  source 1..75: mol_type = other DNA
cgcaggagattagccggagtgaatacacgaattacacctgtgagcgggatttacaggtgtgggggctgaatctgt

SEQ ID NO: 858687 - DNA, 75 bp, synthetic construct
  source 1..75: mol_type = other DNA
cggtggcactggtgctgatggtgctggaccatgcaaaccgcattctgcatctggaccagacgtggatgtttctgg

SEQ ID NO: 858688 - DNA, 75 bp, synthetic construct
  source 1..75: mol_type = other DNA
atccacaaagaacagttgcaaaaaatgatcgcccgtaaaggtgagctgtctttttacgatattttcaccctggct

SEQ ID NO: 858689 - DNA, 75 bp, synthetic construct
  source 1..75: mol_type = other DNA
gcggctgtagctggtcttgtgatgacggtgctgaccgttggtctggtgtcgcgtgcaggaaaatcattaccccgt

SEQ ID NO: 858690 - DNA, 75 bp, synthetic construct
  source 1..75: mol_type = other DNA
agagcggaacgtctggcgctgttggcctgcctgctggcagttattccggctcttaaccttgccgccagtgatgca

SEQ ID NO: 858691 - DNA, 75 bp, synthetic construct
  source 1..75: mol_type = other DNA
aagagcaaaaagaagacaccaactatctggatggcattcagggtttgctgaaaaccaaagatggtcagcaactca

SEQ ID NO: 858692 - DNA, 75 bp, synthetic construct
  source 1..75: mol_type = other DNA
attaatttccaccggggtgcatgctgcgtcctggaaagatgcgctctccagcgccgccagcgaacttggcaacca

SEQ ID NO: 858693 - DNA, 75 bp, synthetic construct
  source 1..75: mol_type = other DNA
ctaacacggtaaaaaccagctcacctttttctcccagcaacagtcctgccagtgcaacaactatttttaaggtaa

SEQ ID NO: 858694 - DNA, 75 bp, synthetic construct
  source 1..75: mol_type = other DNA
cgccgccatgcttcagtccggaaactttcgggaaaataagaattcgtcaaccaataattttcgggaaatcgcgga

SEQ ID NO: 858695 - DNA, 75 bp, synthetic construct
  source 1..75: mol_type = other DNA
tagtgccggaagaagcaactccggaaaacgtagaaatgctctctggctatgtttccacgtacaaattaaccgata

SEQ ID NO: 858696 - DNA, 75 bp, synthetic construct
  source 1..75: mol_type = other DNA
tgtgcagtgcaattgtcaccaccgcattcatttccgccgggacacatgccgcttcctggaaagatgcgctttcca

SEQ ID NO: 858697 - DNA, 75 bp, synthetic construct
  source 1..75: mol_type = other DNA
ctgcgcacatttacttttgacaatggcgatatcgccgtgcaaatgggaaccccgacggactgcgtctatcttggc

SEQ ID NO: 858698 - DNA, 75 bp, synthetic construct
  source 1..75: mol_type = other DNA
ctgcagcggtcacctgttccattttgcgcgcactgtgtaaagaaccgctgcgtaccgggcggattctcaatatca

SEQ ID NO: 858699 - DNA, 75 bp, synthetic construct
  source 1..75: mol_type = other DNA
atgatggtgcagcacctgaaaagacggccattaagccgctatcttaaagattttaaacacagccagactcattgc

SEQ ID NO: 858700 - DNA, 75 bp, synthetic construct
  source 1..75: mol_type = other DNA
atgacggtgatggcgaagacctgtatctcaaagaggtaacccactggatgcctctaccagaaccgcctcgattaa

SEQ ID NO: 858701 - DNA, 75 bp, synthetic construct
  source 1..75: mol_type = other DNA
atgaatatattcagaagtgaagcaatagaacatcataatgacactgaatatggtgacattattttaccaacatca

SEQ ID NO: 858702 - DNA, 75 bp, synthetic construct
  source 1..75: mol_type = other DNA
aggcattaaaatatcatagtgataccgagtgcggtgatattgtcatacctgcgtcattcagtatggccgtatgtg

SEQ ID NO: 858703 - DNA, 75 bp, synthetic construct
  source 1..75: mol_type = other DNA
cagcgccagtagtaccggaagaaaaaccaatgcctaaccctcttggcatgtacgcggttgatgctgttgctgcta

SEQ ID NO: 858704 - DNA, 75 bp, synthetic construct
  source 1..75: mol_type = other DNA
gccctggcgtgcgcagtcacaacccgctgcgacggctgtattgcttttcacgccgacgccgctgtgaaagccggt

SEQ ID NO: 858705 - DNA, 75 bp, synthetic construct
  source 1..75: mol_type = other DNA
aaagcaagctctgcatcttcaaaggctattgatgcggcttctgaggctgcgaataaagcactggttaaggcaacg

SEQ ID NO: 858706 - DNA, 75 bp, synthetic construct
  source 1..75: mol_type = other DNA
ctcagaaacaggatattaagcgcgctccctggaatgggagggcgaaactctttgcaggaaagaatatcggagtgt

SEQ ID NO: 858707 - DNA, 75 bp, synthetic construct
  source 1..75: mol_type = other DNA
agagcggaacgtctggcgctgttggcctgcctgctggcagttattccggcacttaaccttgcctccagtgatgca

SEQ ID NO: 858708 - DNA, 75 bp, synthetic construct
  source 1..75: mol_type = other DNA
aatttagagaactacaaacaggatgttcgcagagcgcaggatgatatctctagccgtctacgtgatatgacaacg

SEQ ID NO: 858709 - DNA, 75 bp, synthetic construct
  source 1..75: mol_type = other DNA
tgaaggtacgaaaacattgccaacaacgatatctgaatctgtcaagtccaatcatgatatcaatgagcagcgtgc

SEQ ID NO: 858710 - DNA, 75 bp, synthetic construct
  source 1..75: mol_type = other DNA
aaatggctgcactacgcaagcaggcgcgtcagctcggcgacaataccgccgcctcagcggatgatgcggctggtg

SEQ ID NO: 858711 - DNA, 75 bp, synthetic construct
  source 1..75: mol_type = other DNA
gtaagctcacgcagacggccacaaagtatgtgttaaaactcgacggctggatccagaaaaacaaatcactggcgt

SEQ ID NO: 858712 - DNA, 75 bp, synthetic construct
  source 1..75: mol_type = other DNA
gccactgaaaccggtgtttgactggctgggcgaaaagttacaggccgcgtggcagtggtttaaaaacctgattgc

SEQ ID NO: 858713 - DNA, 75 bp, synthetic construct
  source 1..75: mol_type = other DNA
cgttaccattaacaaatatgccagtcagttggcagcagaacctatagcgcctaatgacgttcgagagcaaacagc

SEQ ID NO: 858714 - DNA, 75 bp, synthetic construct
  source 1..75: mol_type = other DNA
tgaacgatatggagcatcgctgtcgctttgattccgatgtgcttgttgaacgcctgacacgccagacgctgtatc

SEQ ID NO: 858715 - DNA, 75 bp, synthetic construct
  source 1..75: mol_type = other DNA
catcaacaaagagtcagacacacttgaccagaccgccgccagaactcatgccgccacgtatggcaccggtggcgc

SEQ ID NO: 858716 - DNA, 75 bp, synthetic construct
  source 1..75: mol_type = other DNA
gattatttcatcctcagagaacggctgatgacaatgcagaagcaactggaaggagcacaggaatatatccgtacc

SEQ ID NO: 858717 - DNA, 75 bp, synthetic construct
  source 1..75: mol_type = other DNA
ggctatttccgatatcaccccggagataacaaaaacaatgacccgcacttaccttgtcacccgtttccagcaaat

SEQ ID NO: 858718 - DNA, 75 bp, synthetic construct
  source 1..75: mol_type = other DNA
atgaaccgcgtactgtgtgtggtcatcattgccctgctggtggcctgtggtgcgcttagtctggggctgaatcat

SEQ ID NO: 858719 - DNA, 75 bp, synthetic construct
  source 1..75: mol_type = other DNA
atcaggtgccggatctgcaatatatcgtcagtcgtagtgcccgttttatggggcttgagatgagtgatgacggcg

SEQ ID NO: 858720 - DNA, 75 bp, synthetic construct
  source 1..75: mol_type = other DNA
aggtacgccacgtatcgccaaccgcctgctgcgtcgtgtgcgagatttcgccgaagtgaagcatgatggcaccat

SEQ ID NO: 858721 - DNA, 75 bp, synthetic construct
  source 1..75: mol_type = other DNA
ttgtatccggcaatggaagactaccaactggatatcatgattggtgaaggtccggcggcacgctccattaaaatt

SEQ ID NO: 858722 - DNA, 75 bp, synthetic construct
  source 1..75: mol_type = other DNA
cagcgggattatttcatcctcagggaacgaatcgcaaccagcgacaaaatgattcggggattgcaggcgtacatc

SEQ ID NO: 858723 - DNA, 75 bp, synthetic construct
  source 1..75: mol_type = other DNA
caatagaggaaatcgcccgggaatataatcaaccagatgtgttatccgcactggcaacattattcgatagcgatc

SEQ ID NO: 858724 - DNA, 75 bp, synthetic construct
  source 1..75: mol_type = other DNA
atgaaccgtgttctgtgtgtggtgatttattgtcctggcggttggctgtggtgcgctgtggctggcaacaaacat

SEQ ID NO: 858725 - DNA, 75 bp, synthetic construct
  source 1..75: mol_type = other DNA
attatttcatcctcagagaacggctgatggcaatgcagaagcaactggaaggagcacaggaatatatccgtaccc

SEQ ID NO: 858726 - DNA, 75 bp, synthetic construct
  source 1..75: mol_type = other DNA
atgttctggcgtacctggcgcggcgaacgcaactggctggagaatatgcacgagcatgatcatgagcatcatcac

SEQ ID NO: 858727 - DNA, 75 bp, synthetic construct
  source 1..75: mol_type = other DNA
gcgatgcggggctttttgcaataaatgcgtaccgcaacgcatgttttttacaccgaacctgcccctttggaatgg

SEQ ID NO: 858728 - DNA, 75 bp, synthetic construct
  source 1..75: mol_type = other DNA
cgtgtgcggcgcgtctctggcgctgatggacgcaggtgtgccgatcaaagctgctgttgcgggtatcgcaatggg

SEQ ID NO: 858729 - DNA, 75 bp, synthetic construct
  source 1..75: mol_type = other DNA
cgccgcacagcgcggcattcagcgccttaccgatgcggggcatcaggtcaataacgtcgaggttatcgcccgtcg

SEQ ID NO: 858730 - DNA, 75 bp, synthetic construct
  source 1..75: mol_type = other DNA
aatgaaactctgcgtgctgatgttaccgctggtcgtaagcgcctgcggatcaacgccacctgtccaggctccgtg

SEQ ID NO: 858731 - DNA, 75 bp, synthetic construct
  source 1..75: mol_type = other DNA
gtgagcagagtaaccgcgattatatccgctctgattatctgcatcatcatcagcctgtcatgggcggtcaatcat

SEQ ID NO: 858732 - DNA, 75 bp, synthetic construct
  source 1..75: mol_type = other DNA
cacactcgccaaaaaagccccctatttttccagcctgttaattggcttagtcggagtgtatataggcgtgcatgg

SEQ ID NO: 858733 - DNA, 75 bp, synthetic construct
  source 1..75: mol_type = other DNA
cggatttaacactctcgctaaacgcgccccctatttttccagtctgttgattggcttagttggtgtgtatatggg

SEQ ID NO: 858734 - DNA, 75 bp, synthetic construct
  source 1..75: mol_type = other DNA
gatcacgagcaccaccatcatgaccatgatcacgaacatcatcaccatcacggacatggcgagaatgtcgaatat

SEQ ID NO: 858735 - DNA, 75 bp, synthetic construct
  source 1..75: mol_type = other DNA
gcggcgtgctggcagtaatgccggatatggacaaattcccgtacaccgtacgtgttgtgtctgaaatcactgaat

SEQ ID NO: 858736 - DNA, 75 bp, synthetic construct
  source 1..75: mol_type = other DNA
tatcctgggcgtaatggaacaggcgatcaacgcgccgcgtggcgatatctctgagttcgctccgcgtatccatac

SEQ ID NO: 858737 - DNA, 75 bp, synthetic construct
  source 1..75: mol_type = other DNA
atgatggcggcgtttatcatcgccatcaaaggcaccattaaacaggcggtgatgctcggactggcagcaactatt

SEQ ID NO: 858738 - DNA, 75 bp, synthetic construct
  source 1..75: mol_type = other DNA
cgcgacaattactgatatgcagatacgccagcgtgatgtcgctgcacttgatgccagatactcgagggaattagc

SEQ ID NO: 858739 - DNA, 75 bp, synthetic construct
  source 1..75: mol_type = other DNA
ttattaccgtctccgatgtggaatcgacaagataaccgcgcaggttaactacgtgcaggattacatcaggacgca

SEQ ID NO: 858740 - DNA, 75 bp, synthetic construct
  source 1..75: mol_type = other DNA
ttattaccgtctccgatgtggaatcgacaagataaccgcgcaggttaactacttgcaggagtacatcaggacgca

SEQ ID NO: 858741 - DNA, 75 bp, synthetic construct
  source 1..75: mol_type = other DNA
ttattaccgtctccgaagtggaatcgacaagataaccgcgcaggttaactacgtgcaggagtacatcaggacgca

SEQ ID NO: 858742 - DNA, 75 bp, synthetic construct
  source 1..75: mol_type = other DNA
ttattaccgtctccgaggtggaatcgacaagataaccgcgcaggttaactacgtgcaggaatacatcaggacgca

SEQ ID NO: 858743 - DNA, 75 bp, synthetic construct
  source 1..75: mol_type = other DNA
ttattaccgtctccgaggtggaatcgacaagataaccgcgcaggttaactacttgcaggattacatcaggacgca

SEQ ID NO: 858744 - DNA, 75 bp, synthetic construct
  source 1..75: mol_type = other DNA
ttattaccgtctccgaggtggaatcgacaagataaccgcgcaggttaactacatgcaggagtacatcaggacgca

SEQ ID NO: 858745 - DNA, 75 bp, synthetic construct
  source 1..75: mol_type = other DNA
taacgctctacgctggcctggatattataaaagagaccttcacccgcgaatcactggctgaatttggctgggatc

SEQ ID NO: 858746 - DNA, 75 bp, synthetic construct
  source 1..75: mol_type = other DNA
agaccgcctggcaccggatttagggcttgatatcaacggctcgctgacactggatttcggctcacgccaattcac

SEQ ID NO: 858747 - DNA, 75 bp, synthetic construct
  source 1..75: mol_type = other DNA
atcattaccgcgataacgccatcacctacaaagcgcagcgacgataaaaaagccagagagctggaacaggcgaat

SEQ ID NO: 858748 - DNA, 75 bp, synthetic construct
  source 1..75: mol_type = other DNA
atgaagttgagctataagctggttatctctgctttcttcgttactgtcattggttctttcatctggtcagcaaat

SEQ ID NO: 858749 - DNA, 75 bp, synthetic construct
  source 1..75: mol_type = other DNA
gacttacagcagatgctgaactcaattattaccgtctccgaggtggaatcgacaggataaccgcgcaggttaact

SEQ ID NO: 858750 - DNA, 75 bp, synthetic construct
  source 1..75: mol_type = other DNA
caacgtgatgtagcagaactcgatgccagatacacaaaggagcttgctgatgctaacgcgactatcgaaagtctc

SEQ ID NO: 858751 - DNA, 75 bp, synthetic construct
  source 1..75: mol_type = other DNA
gattatttcaccctccgggaacgactggtaatgatgcaggcccaacttgaaggagctcagcaatacataaccgaa

SEQ ID NO: 858752 - DNA, 75 bp, synthetic construct
  source 1..75: mol_type = other DNA
ggaaggagcacaggaatatatccgcacccagtgcataactaagttttgctatgaatatgtcaccgtattaatgca

SEQ ID NO: 858753 - DNA, 75 bp, synthetic construct
  source 1..75: mol_type = other DNA
ctgatgttgccgttggtcgtaagcgcctgcgcatcaacgccaactgtccaggctccttgcgtaaagcccccatca

SEQ ID NO: 858754 - DNA, 75 bp, synthetic construct
  source 1..75: mol_type = other DNA
ctgatgcgccgtatcgtcgctgtattccctcattaacagagaccgcagcccgacagggagactcctctgcgcgag

SEQ ID NO: 858755 - DNA, 75 bp, synthetic construct
  source 1..75: mol_type = other DNA
gagctgaaaatgaaactcttcgcgctgacgttgccgctggtcgtaagcgcctgcggatcaacgccacctgtccag

SEQ ID NO: 858756 - DNA, 75 bp, synthetic construct
  source 1..75: mol_type = other DNA
gtggccgcgtaacgccattacccaccgcttcacgctggaacaggcaggtgatgcctatgcgctgatggcgagcgg

SEQ ID NO: 858757 - DNA, 75 bp, synthetic construct
  source 1..75: mol_type = other DNA
tggcgcggatgttgcgctcgattgttccggtaatgccgcaggtcgcttactggcgttgcaatccactgctgactg

SEQ ID NO: 858758 - DNA, 75 bp, synthetic construct
  source 1..75: mol_type = other DNA
attacgaactgcttccccccttccaacagctcgatcgtggtagttatcgtcttgctgataatgaacggaataccc

SEQ ID NO: 858759 - DNA, 75 bp, synthetic construct
  source 1..75: mol_type = other DNA
cagcgctatctcacgctgaaacagcaggcgcgcggcgtctggtcgccggggctcgatccgctgaccacgctgggc

SEQ ID NO: 858760 - DNA, 75 bp, synthetic construct
  source 1..75: mol_type = other DNA
cgggactcgatccccttaccaccctcggcgtggaagccaacagcgacgccgaacgccagcgcttcgccgagctgc

SEQ ID NO: 858761 - DNA, 75 bp, synthetic construct
  source 1..75: mol_type = other DNA
ctggaaatgcggcatcgatgggcgctgccgggataggcatggcaacgaccggagcgcttgccggtgttgcactga

SEQ ID NO: 858762 - DNA, 75 bp, synthetic construct
  source 1..75: mol_type = other DNA
cacccacaggcaaagcatacgatgctctcaaagagctgggagttaaaacctcagacagcaaaggcaatacgcgcc

SEQ ID NO: 858763 - DNA, 75 bp, synthetic construct
  source 1..75: mol_type = other DNA
tgctgctgaaagctgtcgaccaggcgacccgaccctttaaagcgatccagacggcgagcaaatcgctgtctggcg

SEQ ID NO: 858764 - DNA, 75 bp, synthetic construct
  source 1..75: mol_type = other DNA
cagaaatctgccacctgtagaacgcagaaatatgcttgcagcttttcaaatgcgacttcaaaaactgactgaatt

SEQ ID NO: 858765 - DNA, 75 bp, synthetic construct
  source 1..75: mol_type = other DNA
acgctgccgttgggcgcacaagccatgcttaataacacccaggaaggcactcagttgacgattagcggtcatcct

SEQ ID NO: 858766 - DNA, 75 bp, synthetic construct
  source 1..75: mol_type = other DNA
cgattattctcggtagctttagcggcagcacgcccaatgattatgacgcaggttacaacctggagtcagtgtacg

SEQ ID NO: 858767 - DNA, 75 bp, synthetic construct
  source 1..75: mol_type = other DNA
atgttcaaagatgatgttctgcgctatttcaaaaaaaagcgactagtagctgaggctcttggaatttcacatgtg

SEQ ID NO: 858768 - DNA, 75 bp, synthetic construct
  source 1..75: mol_type = other DNA
ttcccaaacttcgcgcaatggaactggatgaaattactaacggtgaattgaaatacaacccagaactttacaaga

SEQ ID NO: 858769 - DNA, 75 bp, synthetic construct
  source 1..75: mol_type = other DNA
ggcgctaaagctaaaccattcagcattactattgactgcagcaaagctaacccggctccgggtactactgcaaaa

SEQ ID NO: 858770 - DNA, 75 bp, synthetic construct
  source 1..75: mol_type = other DNA
aatctatcaaatcaccgtgccgggcaatggtatgccgggagatcggttgggtaatgatttgcaggatgcattaga

SEQ ID NO: 858771 - DNA, 75 bp, synthetic construct
  source 1..75: mol_type = other DNA
cagctccgcgacgccgttgacaaacttgaccgtgaaaagcgcgcgcgtcagcgatccaacatgagactcgactga

SEQ ID NO: 858772 - DNA, 75 bp, synthetic construct
  source 1..75: mol_type = other DNA
cactgcgtaagctgacgcagacggccacgcagtatgtgctcagactcgacggctggatccagaaaaataaggggc

SEQ ID NO: 858773 - DNA, 75 bp, synthetic construct
  source 1..75: mol_type = other DNA
accgccgccgattttgacgggatgagcgatgcgctgacctatgccgcgccggtggcgaaaaatgccggggtaagt

SEQ ID NO: 858774 - DNA, 75 bp, synthetic construct
  source 1..75: mol_type = other DNA
cgctatttaccatcctgaaagaaatgcaggccagttttaagcgcaacaatcttggtacctcacaaaaggccgagt

SEQ ID NO: 858775 - DNA, 75 bp, synthetic construct
  source 1..75: mol_type = other DNA
ctcggaactggtcagaaagctgaatatgtgaaaactatattcggcgaggaggccatgaagtctgcaagtgtgctg

SEQ ID NO: 858776 - DNA, 75 bp, synthetic construct
  source 1..75: mol_type = other DNA
tattactgaaagcggtcgaccaggcgacccgaccgcttaaatccatccagaccgcgagtaaaaccctctcgggtg

SEQ ID NO: 858777 - DNA, 75 bp, synthetic construct
  source 1..75: mol_type = other DNA
ttgcgccggtgggggaactgttcacgccacttaagccggtgtttgactggctgggcgaaaagttacaggccgcgt

SEQ ID NO: 858778 - DNA, 75 bp, synthetic construct
  source 1..75: mol_type = other DNA
acgataaggtcgctcatatcggggatgttctctccatgacgatgaacaaaaccgccgccgattttgacggcatga

SEQ ID NO: 858779 - DNA, 75 bp, synthetic construct
  source 1..75: mol_type = other DNA
gatgcactcaaagagcttggcgtgaaaacctcagacagtaaggggaatacccgaccagtatttaccattctgaaa

SEQ ID NO: 858780 - DNA, 75 bp, synthetic construct
  source 1..75: mol_type = other DNA
tcagatagcaaaggcaatacgcgtccgatattttccatcctgaaggaaatgcagcgcagttttgagaaaaacaat

SEQ ID NO: 858781 - DNA, 75 bp, synthetic construct
  source 1..75: mol_type = other DNA
cgtatcgacggattccgaatagccagcgcacagcttgccgtgaccggccacgcacttgataaagcgaaacaggaa

SEQ ID NO: 858782 - DNA, 75 bp, synthetic construct
  source 1..75: mol_type = other DNA
tccactgacaccaatctttgacgggctcggtgagaagctgcgcggtgtctggcagtggtttaaagacctgattgc

SEQ ID NO: 858783 - DNA, 75 bp, synthetic construct
  source 1..75: mol_type = other DNA
gcagatggtaagcactcggtagaagacttccttttcatgtttttgcagctttgtgttgctcaaacaaaggtcgct

SEQ ID NO: 858784 - DNA, 75 bp, synthetic construct
  source 1..75: mol_type = other DNA
gatgcgagagctgaaaatgaaactcttcgcgctgacgttgccgctggtcaccgcagcctgcggatcaacgccacc

SEQ ID NO: 858785 - DNA, 75 bp, synthetic construct
  source 1..75: mol_type = other DNA
cggaattatttcaccctcagagagcgactgatgacgatgcagaagcaactggaaggggtacaggaatacatcagg

SEQ ID NO: 858786 - DNA, 75 bp, synthetic construct
  source 1..75: mol_type = other DNA
gcgtgctgatgttgccgctggtcgtaagcgcctgcggatcaacgccacctgctccggtaccgtgcgtgaagcccc

SEQ ID NO: 858787 - DNA, 75 bp, synthetic construct
  source 1..75: mol_type = other DNA
ttattaccgtctcagaagtggaatagacaggataaccgcgcaggttaactacctgcaggaatacatcaggacgca

SEQ ID NO: 858788 - DNA, 75 bp, synthetic construct
  source 1..75: mol_type = other DNA
gattatttcaccctcagagaacgaatcgacacagtgacgaagcaggttggttatctgcaggaatatgtgaaaaga

SEQ ID NO: 858789 - DNA, 75 bp, synthetic construct
  source 1..75: mol_type = other DNA
caggtggaaggggcacaggactatatccgcactcagtgtactaagcaggctttttattatccggaggatgtatga

SEQ ID NO: 858790 - DNA, 75 bp, synthetic construct
  source 1..75: mol_type = other DNA
gggattatttcatcctcagagaacggttgatgacaatgcagaagcagctggaaggggcgcaggaatatatccgca

SEQ ID NO: 858791 - DNA, 75 bp, synthetic construct
  source 1..75: mol_type = other DNA
ctcacctacaaagcgcagcgagataaaaaagtcagagagctggagctggcaaacgcaaccattactgatatgcag

SEQ ID NO: 858792 - DNA, 75 bp, synthetic construct
  source 1..75: mol_type = other DNA
atctgacagcagatccctgtctgaacatttataccggtgcttattatctggctatagcctttaaaaaatggggag

SEQ ID NO: 858793 - DNA, 75 bp, synthetic construct
  source 1..75: mol_type = other DNA
ggtggggctttgatgttaaggagcaggcatatgaaaattatcaggccgggcaggattcagtattaacgggcattg

SEQ ID NO: 858794 - DNA, 75 bp, synthetic construct
  source 1..75: mol_type = other DNA
ccccgacaccgccgaaaggcgttaccgtggtaaataactttgatgccaaacgctatctgggaacctggtatgaaa

SEQ ID NO: 858795 - DNA, 75 bp, synthetic construct
  source 1..75: mol_type = other DNA
gttttcttcagtaacagccagggcaccctgaataacgatatgtccgtaagccaggcggcaagcggcgtcgctatt

SEQ ID NO: 858796 - DNA, 75 bp, synthetic construct
  source 1..75: mol_type = other DNA
ttagatttctcaggtttggtcagtgacaatacctgcgccctgcacgtcaacggtggcgcgcaggacggtcaaatt

SEQ ID NO: 858797 - DNA, 75 bp, synthetic construct
  source 1..75: mol_type = other DNA
tgccaatctgagcatgggttccgtgttcttcagcaacagtcagggcactctgaacaacgatctctccattagcca

SEQ ID NO: 858798 - DNA, 75 bp, synthetic construct
  source 1..75: mol_type = other DNA
gtagagaacgaagacggctctcatgttcctgtttcgcaaccaatcatcattaacgctgctggatatccggtatat

SEQ ID NO: 858799 - DNA, 75 bp, synthetic construct
  source 1..75: mol_type = other DNA
acaaggttattgaataaaatcaatagattatcaggttactttatccgtgatttaattcaacgaaccaacttatca

SEQ ID NO: 858800 - DNA, 75 bp, synthetic construct
  source 1..75: mol_type = other DNA
ttatgaccacctaaatttttggagtactacacccagagagttattgataaaatatatcaatcaaatgtcattcat

SEQ ID NO: 858801 - DNA, 75 bp, synthetic construct
  source 1..75: mol_type = other DNA
taacaataccgggaaacgagaagccattatttctggtagtggcggaagaataatcgattacgcaaatataggttt

SEQ ID NO: 858802 - DNA, 75 bp, synthetic construct
  source 1..75: mol_type = other DNA
acgttgtcaaaacccattgttctggtgggagatgcagacctggttcacaacggattcgttataaaatcaagtaat

SEQ ID NO: 858803 - DNA, 75 bp, synthetic construct
  source 1..75: mol_type = other DNA
taatacgttttcgtcatatttatgggtggatgatacaagtaatgttactatttctggaaatacagtttcatcaag

SEQ ID NO: 858804 - DNA, 75 bp, synthetic construct
  source 1..75: mol_type = other DNA
ggcgaggaaccgcccctgagtggcaaatgaaacgggaaatgctttctcctgcgtataccaccagatcgagtaggc

SEQ ID NO: 858805 - DNA, 75 bp, synthetic construct
  source 1..75: mol_type = other DNA
ttactcagcctgcaaccggtcgaggagatttggggggtgggaaaccgaatagcgaagaagctgaaggtcatgggg

SEQ ID NO: 858806 - DNA, 75 bp, synthetic construct
  source 1..75: mol_type = other DNA
atgggcgtcccctggttccaactgaagacggcacaattcccggagccggtcatcacgttctcgagcaattacgaa

SEQ ID NO: 858807 - DNA, 75 bp, synthetic construct
  source 1..75: mol_type = other DNA
aaaggcaggctgcatgctgaacgattttacgccaaccggagtttcacagttgaatctgtttgatgatactctgcc

SEQ ID NO: 858808 - DNA, 75 bp, synthetic construct
  source 1..75: mol_type = other DNA
gaatttcaacgttgtgctggagagaacggtccgggaactcaacggagaaagctgtatttcgcttgaagaagctcc

SEQ ID NO: 858809 - DNA, 75 bp, synthetic construct
  source 1..75: mol_type = other DNA
atgggggtgccgtggtttcaactgaagacggcggaattctctgagcagatcatcgtgttctcaagcaattacgag

SEQ ID NO: 858810 - DNA, 75 bp, synthetic construct
  source 1..75: mol_type = other DNA
gaaaagctgcgtaaagagcgccagtattgccggcatatttccgtattcatcaaaacgtctccgttcgccgttaaa

SEQ ID NO: 858811 - DNA, 75 bp, synthetic construct
  source 1..75: mol_type = other DNA
catgtgaaatcaggtaccggactgacgatcggtgtcggaatcggaccgacaaagactctggcaaaggcctgtcag

SEQ ID NO: 858812 - DNA, 75 bp, synthetic construct
  source 1..75: mol_type = other DNA
agttctgcaggcatattgctgtatttgtgaaaacgtcaccgttcgcggtgaacgaaccgtattacgggaatgtgg

SEQ ID NO: 858813 - DNA, 75 bp, synthetic construct
  source 1..75: mol_type = other DNA
gcaatgccgctgtggaaaagcttccattgcccacacaggacagccgggacattattgccgcagcatgcagagcgt

SEQ ID NO: 858814 - DNA, 75 bp, synthetic construct
  source 1..75: mol_type = other DNA
gtggtttgcggggcgaggaaccgcccctgaatggcaaatgaaacgggaaatgctttctcctgcgtataccaccag

SEQ ID NO: 858815 - DNA, 75 bp, synthetic construct
  source 1..75: mol_type = other DNA
cgtcaggaacgggactggcctgactatcggtgtcggaatggggccaaccaaaacgctggcaaagtcagcacagtg

SEQ ID NO: 858816 - DNA, 75 bp, synthetic construct
  source 1..75: mol_type = other DNA
ctggacttgggaaagtgtggtttgcgggacgaggcatagctcctgagtggcaaatgaagcgcgaaatgttgtcac

SEQ ID NO: 858817 - DNA, 75 bp, synthetic construct
  source 1..75: mol_type = other DNA
tcggtaattcagcaggtagtgtgtcgcattctgagcgtgatgtgctttatcatggtggcgatggcggcagtagtg

SEQ ID NO: 858818 - DNA, 75 bp, synthetic construct
  source 1..75: mol_type = other DNA
gagcttggcaaaaacacccgtgttggcatcgactatgagcgttcatttggcggtaaatacaatatcgataatgag

SEQ ID NO: 858819 - DNA, 75 bp, synthetic construct
  source 1..75: mol_type = other DNA
tactggcgctgggtattagcacagcttgctacggcgaaacatatcctgcgcccattggtccgtcgcaatcggatt

SEQ ID NO: 858820 - DNA, 75 bp, synthetic construct
  source 1..75: mol_type = other DNA
tggcaaatacagcctctactgtgcggttatcgttaagaaagttgacgcgaaaactcgcggcaaagtcggcattaa

SEQ ID NO: 858821 - DNA, 75 bp, synthetic construct
  source 1..75: mol_type = other DNA
cggtgctgctctctttccgtattaatgataatcaggtgatcgaaggggcagaaagccgctacttcgacaaagtgc

SEQ ID NO: 858822 - DNA, 75 bp, synthetic construct
  source 1..75: mol_type = other DNA
gcccattaagtggtcgtatttttcaaggaacattaaacactgaaaaaggaatgtgggtgggaaagaaagaagatg

SEQ ID NO: 858823 - DNA, 75 bp, synthetic construct
  source 1..75: mol_type = other DNA
tccatccaccattattatcagcttttgtaaggtctctttctgatttattaattaataggaatgcagtatctataa

SEQ ID NO: 858824 - DNA, 75 bp, synthetic construct
  source 1..75: mol_type = other DNA
caccattggtttgaccgggactccgggtattgtcatcatgcccgttaagggggcaacagaagataatacgacggt

SEQ ID NO: 858825 - DNA, 75 bp, synthetic construct
  source 1..75: mol_type = other DNA
ccggatattcttatccagatgagtgagtcgttacagcaggaacaacaggaaaaacaggcccggggattaaaaacg

SEQ ID NO: 858826 - DNA, 75 bp, synthetic construct
  source 1..75: mol_type = other DNA
atgatgctggcctccaaatggtcggagaggttgaaggctgtatcagcgctcttttcaccaagcttgatgagtgtc

SEQ ID NO: 858827 - DNA, 75 bp, synthetic construct
  source 1..75: mol_type = other DNA
gcgcagaaaaaggtcgatgccgccagcgtacagctggatgacaaacagcgcaccatcatcatgcagtggtttatg

SEQ ID NO: 858828 - DNA, 75 bp, synthetic construct
  source 1..75: mol_type = other DNA
atgccaaaattacgcctgatcggattaactttactcgcacttagcgcgactgccgtctcacacgctgaagaaacg

SEQ ID NO: 858829 - DNA, 75 bp, synthetic construct
  source 1..75: mol_type = other DNA
aaaaagcatcacggaaaacaaatataaatcagcctcgcttgctgaaatatcagcgacatctcccgtcgctgataa

SEQ ID NO: 858830 - DNA, 75 bp, synthetic construct
  source 1..75: mol_type = other DNA
atgccgcaggcaataaaacgagcaggggggatttaccgggattcccaggcagataatccctatgccgatgaagct

SEQ ID NO: 858831 - DNA, 75 bp, synthetic construct
  source 1..75: mol_type = other DNA
aagaagtgcgggccggtgcattgcagtcctcgctgttcattctgttacatacccattatgcaatccgcctgtggg

SEQ ID NO: 858832 - DNA, 75 bp, synthetic construct
  source 1..75: mol_type = other DNA
tccgaaaggaaaattatatgtgagggattcagagaaaattgaagaaggggtcagtacaactgagtttgttgtggg

SEQ ID NO: 858833 - DNA, 75 bp, synthetic construct
  source 1..75: mol_type = other DNA
agcagcgcgtggaagaagatctccagcgccacatccacaacgcccgcgccaaagtgccgggcgtttcccgtgttc

SEQ ID NO: 858834 - DNA, 75 bp, synthetic construct
  source 1..75: mol_type = other DNA
gcagcctgcgtaaactgcgcctgacacgagttggagctgaatggcacgctctggaaaaacgagcgctggcagaag

SEQ ID NO: 858835 - DNA, 75 bp, synthetic construct
  source 1..75: mol_type = other DNA
atggctgatgcaatggatctcgtacagcagcgagttgaagaagaacgccaacgtcatatccgtgctgcccgtgcc

SEQ ID NO: 858836 - DNA, 75 bp, synthetic construct
  source 1..75: mol_type = other DNA
accagacgaaaaacgtcaaaaaatcactatccataacccgcatagccacccggggaattattaacatttttgttc

SEQ ID NO: 858837 - DNA, 75 bp, synthetic construct
  source 1..75: mol_type = other DNA
tctttgtgcttccagagcactgattgttacataccgcctctggcagttgcatgaacgaaaagtcagcgaacccga

SEQ ID NO: 858838 - DNA, 75 bp, synthetic construct
  source 1..75: mol_type = other DNA
atggcaaataacgccggaccgttgactcttctgaactgcgataacgtgcggcataacggcgagcgtttccatgat

SEQ ID NO: 858839 - DNA, 75 bp, synthetic construct
  source 1..75: mol_type = other DNA
agtaaaggtgaaaaagcagaagtttgggcactgtcaacaaaatatgatcccaacaacgtctatgctgctgtgatg

SEQ ID NO: 858840 - DNA, 75 bp, synthetic construct
  source 1..75: mol_type = other DNA
agagtgatgattatttcatggaggagggcaggcatgagggtttaaatgatacttcaggacatgtgtgtcataatt

SEQ ID NO: 858841 - DNA, 75 bp, synthetic construct
  source 1..75: mol_type = other DNA
gcaactctgcctctcgtgggaagaagctctgcaggccagccatatgtcagtagacgatctggatcgccgtttccg

SEQ ID NO: 858842 - DNA, 75 bp, synthetic construct
  source 1..75: mol_type = other DNA
tttgcattgaatgtgatgcgccaattccgccagcacgccgccgcgccattccaggagtgcagctttgcattacct

SEQ ID NO: 858843 - DNA, 75 bp, synthetic construct
  source 1..75: mol_type = other DNA
gcgccacatccgtgctgcccgtgccaaaacaccgggcgtgtctcgcgtgctttgcattgagtgtgaagtgccaat

SEQ ID NO: 858844 - DNA, 75 bp, synthetic construct
  source 1..75: mol_type = other DNA
atttgcgccttgtgacaaatatatccggggagcgggagttggtggaaggctatatacccaccgatgaaataagca

SEQ ID NO: 858845 - DNA, 75 bp, synthetic construct
  source 1..75: mol_type = other DNA
tctgacacctgctgtacaggccatagggttcgactattacaatgatcacggtgttatgtcttacggtaaaggtta

SEQ ID NO: 858846 - DNA, 75 bp, synthetic construct
  source 1..75: mol_type = other DNA
cgtaaaagtcgacagcgacggcgcgggctaccacattctttgggggttaaccaacgaagccgtccccacttccga

SEQ ID NO: 858847 - DNA, 75 bp, synthetic construct
  source 1..75: mol_type = other DNA
aaatgattcagttgtgggggagtagcagtgagcaccattcaaacagggatcacagagcaggttattgcgtggctc

SEQ ID NO: 858848 - DNA, 75 bp, synthetic construct
  source 1..75: mol_type = other DNA
acaatgacaaggctgttcttgccgatgatttactgcaccgcgacagctttatcttgcgcccgggcgaggagaaaa

SEQ ID NO: 858849 - DNA, 75 bp, synthetic construct
  source 1..75: mol_type = other DNA
gcgccatattcgtgctgcccgtgccaaaacaccgggcgtgtctcgcgtgctttgcattgaatgtgaagtgccaat

SEQ ID NO: 858850 - DNA, 75 bp, synthetic construct
  source 1..75: mol_type = other DNA
atggccgacgcaatggatttagcacaactgcgcgagcaggaaggccgcgaacgccacataagcaacgcgcgcagc

SEQ ID NO: 858851 - DNA, 75 bp, synthetic construct
  source 1..75: mol_type = other DNA
atggctgatgcaatggatctcgtacagcagcgcgttgaagaagaacgccagcgccatatccgtgcagcccgtgcc

SEQ ID NO: 858852 - DNA, 75 bp, synthetic construct
  source 1..75: mol_type = other DNA
aagcataaaaaatgaggaataccactgggtgacagacggccgcgttattctctggcgtggcaaaatcgttagcaa

SEQ ID NO: 858853 - DNA, 75 bp, synthetic construct
  source 1..75: mol_type = other DNA
cagagacattattattccgttgacggatgaatcatgccgtaacgcagccgcagaggtgcaaactttgaagccctg

SEQ ID NO: 858854 - DNA, 75 bp, synthetic construct
  source 1..75: mol_type = other DNA
tcgccttgcagcgaatgcagactcatttgagataattcgctggatacctcattcactgctggtttttcgcgacaa

SEQ ID NO: 858855 - DNA, 75 bp, synthetic construct
  source 1..75: mol_type = other DNA
atgaccggtaaacccggtcagtcatccgtcgtttatttacgtgaggcacatcagcgctccgtcagtgactggata

SEQ ID NO: 858856 - DNA, 75 bp, synthetic construct
  source 1..75: mol_type = other DNA
ccagcagctttacggacatatggactggagcaggaaaatactgactgtcacgacctctgcgaccccaccggtcga

SEQ ID NO: 858857 - DNA, 75 bp, synthetic construct
  source 1..75: mol_type = other DNA
atgcactatcgcaatgtggtttgtttgttggcttgttcgttgattttatcatcggcatggggatgtcggcttgat

SEQ ID NO: 858858 - DNA, 75 bp, synthetic construct
  source 1..75: mol_type = other DNA
gtgaaatcactctataccgctgaaggtgtaatggataaacattcgctgtggcagcgttatatcccgctggtgcgt

SEQ ID NO: 858859 - DNA, 75 bp, synthetic construct
  source 1..75: mol_type = other DNA
ttgggcgttgcgttgtcctgagaaaatgcattgaagaaaatctttgcgctctgcgaaaaataaaatcggaaattg

SEQ ID NO: 858860 - DNA, 75 bp, synthetic construct
  source 1..75: mol_type = other DNA
tccacctacagcgacaacctgctgatgctgactttaggtcgcggtggtccggtggtctggttgagtgaagccgat

SEQ ID NO: 858861 - DNA, 75 bp, synthetic construct
  source 1..75: mol_type = other DNA
tgtttagtcggttatatgaaacagacaatgcatctattggaaatatgccgaaggatatgcagggtttttatctga

SEQ ID NO: 858862 - DNA, 75 bp, synthetic construct
  source 1..75: mol_type = other DNA
catgtctgctgatgcggctatcgagcaggcgcagaaccttacgtacaaccagaccgatgctcttaaagctcaatt

SEQ ID NO: 858863 - DNA, 75 bp, synthetic construct
  source 1..75: mol_type = other DNA
atggcaatattaggtttaggcacggatatcgtggagatcgctcgcatagaagcggtgatcgcccgatccggtgag

SEQ ID NO: 858864 - DNA, 75 bp, synthetic construct
  source 1..75: mol_type = other DNA
gcgcccttatgaaaagaccaatctttcgctaccgcagattaactacaagcgtctgcgtctgttaccgaatttgct

SEQ ID NO: 858865 - DNA, 75 bp, synthetic construct
  source 1..75: mol_type = other DNA
atgcactatcgcaatgtggtttgtttattgtcttgttcgttgtttttatcgtcggcatggggatgtcggcttgat

SEQ ID NO: 858866 - DNA, 75 bp, synthetic construct
  source 1..75: mol_type = other DNA
ccaattctgctgtcagtaatatggctcactggcttcgctgggatccgtctgcggatgaccagacgccggaagcag

SEQ ID NO: 858867 - DNA, 75 bp, synthetic construct
  source 1..75: mol_type = other DNA
gcagccgtgactgggtgccgcgcagcgtgcgacgcaatgcgcgtgaagtggcacaggcaatagggcaactggagc

SEQ ID NO: 858868 - DNA, 75 bp, synthetic construct
  source 1..75: mol_type = other DNA
cacaccaatggtacgtctggaaaatttcatcaatgatgcctgtgaggggattaaaaaatacaattttacccgcgg

SEQ ID NO: 858869 - DNA, 75 bp, synthetic construct
  source 1..75: mol_type = other DNA
acaacaggcactggagaaatttaatggcgataaaacagcagcggcgaattatttaggtatcagccggacgacgtt

SEQ ID NO: 858870 - DNA, 75 bp, synthetic construct
  source 1..75: mol_type = other DNA
actcacgatgccacccgcaacgccctgcgtactcgttacgtgctgggcgatatgctcggtcaatcaccacagatg

SEQ ID NO: 858871 - DNA, 75 bp, synthetic construct
  source 1..75: mol_type = other DNA
gcagccgtaagatgacggaaatcgcgcaaaagctgaaggaaagtaacgagccgatactctatctggcagaacgat

SEQ ID NO: 858872 - DNA, 75 bp, synthetic construct
  source 1..75: mol_type = other DNA
agaacatatagatcgtatcagtcgtttaccgctcgatagtgcgctggcgttaataaactctataaaagagcgggg

SEQ ID NO: 858873 - DNA, 75 bp, synthetic construct
  source 1..75: mol_type = other DNA
ccctgcttctggccagcgggaccggcatggcgaatgaccatacggagaaccgtcagtttattcatgaacagctgc

SEQ ID NO: 858874 - DNA, 75 bp, synthetic construct
  source 1..75: mol_type = other DNA
caggcgcagcttgatgatattcctccggcgcctgcgttgccgctgcgctgcttgcctcaggaggttgaaacaccg

SEQ ID NO: 858875 - DNA, 75 bp, synthetic construct
  source 1..75: mol_type = other DNA
atgtcccgctggtgcgtcacgaagcattgcgcctgcaggttcctgcccgcgagcgtggaacttgacgatctgcta

SEQ ID NO: 858876 - DNA, 75 bp, synthetic construct
  source 1..75: mol_type = other DNA
cacgaagcattgcgcctgcaggttcgactgcccgcgagtgtagaacttgacgatctgctacaggcaggcggcatt

SEQ ID NO: 858877 - DNA, 75 bp, synthetic construct
  source 1..75: mol_type = other DNA
acctacatccgcaagaaactggccagcgaacgctgcgacgccatcattgccgctggctctaacggtgcgtacctg

SEQ ID NO: 858878 - DNA, 75 bp, synthetic construct
  source 1..75: mol_type = other DNA
ttgagtatgtcgggcttgagcagagccaggagatgctgctgagcgcccggcagaggctcgccccctggcctggcg

SEQ ID NO: 858879 - DNA, 75 bp, synthetic construct
  source 1..75: mol_type = other DNA
ggacatgatttaacgttatcgcaaattcttcgcggtgcccgtaacgaactgtcgttactgaacgacgcgcagtgg

SEQ ID NO: 858880 - DNA, 75 bp, synthetic construct
  source 1..75: mol_type = other DNA
aatgatgacatcatcatctttaagacggaggaagagtgccgcaagacaccaggtattgggcaaactttgaagccc

SEQ ID NO: 858881 - DNA, 75 bp, synthetic construct
  source 1..75: mol_type = other DNA
aaattggcctcgccagggtggtagcgctggaaaacaacaatgatacgcataaatggacgatcgcagaatgtaagg

SEQ ID NO: 858882 - DNA, 75 bp, synthetic construct
  source 1..75: mol_type = other DNA
atgcaaaaccctaaaaaacccataagacgccgttgcaaatgctgcggcgttttttttgagcctaaatatcacaat

SEQ ID NO: 858883 - DNA, 75 bp, synthetic construct
  source 1..75: mol_type = other DNA
tgaagagatcctcaaacgcaaggcgatcgttgaagacgcaggcctggtatggtctgtcgtagaaagcgtgccaat

SEQ ID NO: 858884 - DNA, 75 bp, synthetic construct
  source 1..75: mol_type = other DNA
cgcactgcgccagatatttgacgccgaagatgtcccgttgcaacaggcggcggaactcccgccctcctatattaa

SEQ ID NO: 858885 - DNA, 75 bp, synthetic construct
  source 1..75: mol_type = other DNA
attgtgtttaaagatggctccaacggacataaatcgctgtttatgggttatgcgacccgaaagcattttatgaag

SEQ ID NO: 858886 - DNA, 75 bp, synthetic construct
  source 1..75: mol_type = other DNA
ccggaagcggaagcagttaaatccgcgtagctattggttaaagcaggcacaagcggtatttaatgcctatatccg

SEQ ID NO: 858887 - DNA, 75 bp, synthetic construct
  source 1..75: mol_type = other DNA
gcgaaaactttgccgtcttcctgaaggcgattattccggttgccgaagaagttggcgtgcgtatggctgttcacc

SEQ ID NO: 858888 - DNA, 75 bp, synthetic construct
  source 1..75: mol_type = other DNA
gaaggcttccgcgttgtgccaccagcggcggtacgtcagggtgcgtttattgcccgtaacaccgtgctgatgccg

SEQ ID NO: 858889 - DNA, 75 bp, synthetic construct
  source 1..75: mol_type = other DNA
tggcaaatacagcctctactgtgcagttatcgttaagaaagttgacgcgaaaactcgcggcaaagttggtattaa

SEQ ID NO: 858890 - DNA, 75 bp, synthetic construct
  source 1..75: mol_type = other DNA
ttttatggcatcaagccaggcatttcgtgagtatctgaaaaaacttccccctgataacacaatagccaggcattt

SEQ ID NO: 858891 - DNA, 75 bp, synthetic construct
  source 1..75: mol_type = other DNA
acaaacttatcttatccattccgctggcgctgtgtcttgctggctgtaccagcaatgccaaaattgaacacctgg

SEQ ID NO: 858892 - DNA, 75 bp, synthetic construct
  source 1..75: mol_type = other DNA
ggttggttattatgatgatcttaatagaaaagcctcattttttgccaatgacagtgtcgtaattaatctttgggc

SEQ ID NO: 858893 - DNA, 75 bp, synthetic construct
  source 1..75: mol_type = other DNA
caaagtcaccggtaatgaaaaccgtgaacaggacggaattccatcattgcactcaatgattcaggggctgtttca

SEQ ID NO: 858894 - DNA, 75 bp, synthetic construct
  source 1..75: mol_type = other DNA
gtcattgatcaggttcgtttggcaaggaatgaagatatatcccggcaatgtgacaactttacgctgttagaaaaa

SEQ ID NO: 858895 - DNA, 75 bp, synthetic construct
  source 1..75: mol_type = other DNA
ggctaccatattctctgggggttaaccaacgaagccgttccaacttctgaacttccggctcacttcctttcccac

SEQ ID NO: 858896 - DNA, 75 bp, synthetic construct
  source 1..75: mol_type = other DNA
cggtctttactcgccaactgtgggaaggcagcaccgagtgtctggtggtattcccggatggcgttggcattttgc

SEQ ID NO: 858897 - DNA, 75 bp, synthetic construct
  source 1..75: mol_type = other DNA
aggacaagctgtacaccatcaaaaaaacggaatttggcgaaaataggctagatatcgtcacactggataatcctg

SEQ ID NO: 858898 - DNA, 75 bp, synthetic construct
  source 1..75: mol_type = other DNA
cctcgatccagaacaatttcatcctcttagtgagaccgtcgcgcagtatcaggacaaactgtataccattatgca

SEQ ID NO: 858899 - DNA, 75 bp, synthetic construct
  source 1..75: mol_type = other DNA
gatcagctttatcgcacaccctccccctgcccagcgaaaacatacgtcagagaaaagaatgtccgtgaaattcat

SEQ ID NO: 858900 - DNA, 75 bp, synthetic construct
  source 1..75: mol_type = other DNA
gacttcaagaaagtgaaccagttgcaagggattaacttcacccgccgcttccaggcgattatagatcgttataat

SEQ ID NO: 858901 - DNA, 75 bp, synthetic construct
  source 1..75: mol_type = other DNA
ccgaccattgttttgatcaccgaccgcaccgatctggacgatcagctttctgcgcaaatgtgcaacgccaaaaat

SEQ ID NO: 858902 - DNA, 75 bp, synthetic construct
  source 1..75: mol_type = other DNA
cgatatttttgacgaagattatctggcgcgaattaacaagatcaaacttccggcaacgaagatccagctattaca

SEQ ID NO: 858903 - DNA, 75 bp, synthetic construct
  source 1..75: mol_type = other DNA
tcgatccagccgccaatttaggcgtcgtaaaaatcgacagcgacggcgcgggctaccatattctctgggggctaa

SEQ ID NO: 858904 - DNA, 75 bp, synthetic construct
  source 1..75: mol_type = other DNA
tggggctgggggcgtttccggcaacgcatcgccaggcactgggcatgttgggaatgcacggtacctacgaagcca

SEQ ID NO: 858905 - DNA, 75 bp, synthetic construct
  source 1..75: mol_type = other DNA
gtcactggcaaaagagatgaaaagcgtggttgacaacacatcgaaatatcctgactggagtaaacgcgatgatat

SEQ ID NO: 858906 - DNA, 75 bp, synthetic construct
  source 1..75: mol_type = other DNA
tgatgtccgctaatgaacctcaatttgaccttactgcaaccctagtacctgacgagcagcgtctcgatttctggc

SEQ ID NO: 858907 - DNA, 75 bp, synthetic construct
  source 1..75: mol_type = other DNA
ttaccccggctaatgagccgcaactcacccttactgtcgccgacgtccccgatgcgctgcgtattcatttctggc

SEQ ID NO: 858908 - DNA, 75 bp, synthetic construct
  source 1..75: mol_type = other DNA
tagcatgaacggcaatggcgcggaaatgagcgtggaagccgcaggtatcgcggtctgcatgattgaatacagcca

SEQ ID NO: 858909 - DNA, 75 bp, synthetic construct
  source 1..75: mol_type = other DNA
ttcgcctggatggaccgcttctgtgatgagtactgcgggggtatctggtccttttacacgctcagcaatggcggc

SEQ ID NO: 858910 - DNA, 75 bp, synthetic construct
  source 1..75: mol_type = other DNA
ctgaggtgacagagccattcatcctcgcggccactgtcgtaccggatgaagagcgccttcgtttctggcctcagc

SEQ ID NO: 858911 - DNA, 75 bp, synthetic construct
  source 1..75: mol_type = other DNA
caacggcggcgcttttatggctcccgagtcagatcacgatgagaagtggacattgttcaacagcatgaacggcaa

SEQ ID NO: 858912 - DNA, 75 bp, synthetic construct
  source 1..75: mol_type = other DNA
atccactgaaccctatcgaaaagatggaccctctagggttatctgcatgggatgatgcaaaatcaggtgcatgtt

SEQ ID NO: 858913 - DNA, 75 bp, synthetic construct
  source 1..75: mol_type = other DNA
tcagccaccggacctgacgggctggaaattcgccgcaaatatgatgagtacggacgtctgattcagaaaatagtc

SEQ ID NO: 858914 - DNA, 75 bp, synthetic construct
  source 1..75: mol_type = other DNA
atcactcaggatccgattgggctgaaggggggatggaatttttatcagtatccgttgaatccagttacgaataca

SEQ ID NO: 858915 - DNA, 75 bp, synthetic construct
  source 1..75: mol_type = other DNA
gcgcactattaccgtctgcgggactacgccctgcagcatccagaagcccacgccattctgcgcatcattgactga

SEQ ID NO: 858916 - DNA, 75 bp, synthetic construct
  source 1..75: mol_type = other DNA
agtgtctgtagccgcagatcgcgtaaaagcaggcgaaagcacaaccgtgacgcttattgcaaaagatgcacatgg

SEQ ID NO: 858917 - DNA, 75 bp, synthetic construct
  source 1..75: mol_type = other DNA
gccatgactgaacactattaccggctgcgggattactctctgcagcacccagaatccagcgccattctgcgcatt

SEQ ID NO: 858918 - DNA, 75 bp, synthetic construct
  source 1..75: mol_type = other DNA
gtcgctgttcaacacgatgaacggcaacggcggtgaactcagtgccgaagcagcaggaattgccgtctgtctgat

SEQ ID NO: 858919 - DNA, 75 bp, synthetic construct
  source 1..75: mol_type = other DNA
ccgtctgagcgatgttgacacgactcccgtcgttgttaacggcgttgttttcgcgctggcctataatggtaacct

SEQ ID NO: 858920 - DNA, 75 bp, synthetic construct
  source 1..75: mol_type = other DNA
ccagaccgaaccggttgccgctgatggcaaactgctgatccaggcaaaagacgggactgtgtactccattacacg

SEQ ID NO: 858921 - DNA, 75 bp, synthetic construct
  source 1..75: mol_type = other DNA
tgaataccagcgatggtactgtggcatggcaaactaaagtcgcgggtgaagcactttcgcgcccggtggtcagcg

SEQ ID NO: 858922 - DNA, 75 bp, synthetic construct
  source 1..75: mol_type = other DNA
agcgaatctggatatccgcatcccgtatgccacggacccggcgggcaaccgcctgcccgacccggagctgcaccc

SEQ ID NO: 858923 - DNA, 75 bp, synthetic construct
  source 1..75: mol_type = other DNA
tcccgtttgccgacatttttcagcagggaaaccgctggcttaactggctggagaaacaaccggaaggttcagtgc

SEQ ID NO: 858924 - DNA, 75 bp, synthetic construct
  source 1..75: mol_type = other DNA
gttcggtgaatgatttcatcgtcgacggcaatcgcatctatctggtcgatcaaaatgaccgggtgatggcgttga

SEQ ID NO: 858925 - DNA, 75 bp, synthetic construct
  source 1..75: mol_type = other DNA
tgataattttgacgatgccgttgagtgctgcgcagaccttaatattcccttctttgtggatgcgggaaacaaaaa

SEQ ID NO: 858926 - DNA, 75 bp, synthetic construct
  source 1..75: mol_type = other DNA
gacaattcctgccggtatcaacgccgacggcatgtattgccctgaatgcggtacggttcactggccggatggcgt

SEQ ID NO: 858927 - DNA, 75 bp, synthetic construct
  source 1..75: mol_type = other DNA
cgtttaaacctgccggaaacattgtaacgcgggctcttaggtctgctaaatcacagacacagccaacattaggtg

SEQ ID NO: 858928 - DNA, 75 bp, synthetic construct
  source 1..75: mol_type = other DNA
ccgtttgagcgatgttgatactacgccggttgtggtgaacggtgttgttttcgcgctggcctataatggtaacct

SEQ ID NO: 858929 - DNA, 75 bp, synthetic construct
  source 1..75: mol_type = other DNA
cgcttcgcaggcgcatgtcgtttcgttttcaatcgtgctctggcacgtcagaatgagaatcatgaggccggtaat

SEQ ID NO: 858930 - DNA, 75 bp, synthetic construct
  source 1..75: mol_type = other DNA
ggcttctggctggaaaaaatcgccggatgttgaggattatcaggaacgtccggcgaatggctgggatatccgtgc

SEQ ID NO: 858931 - DNA, 75 bp, synthetic construct
  source 1..75: mol_type = other DNA
atgaatacacaaaatcatcaggttgcggagcattccgcaattactgcctcggtggtccctgacgagctacgcatc

SEQ ID NO: 858932 - DNA, 75 bp, synthetic construct
  source 1..75: mol_type = other DNA
gcattccaggcacagacggatgctcaggttgcagcggcaaatgttgtgaaaatcctcgcatctgccgatagccag

SEQ ID NO: 858933 - DNA, 75 bp, synthetic construct
  source 1..75: mol_type = other DNA
gacggaagcgggcgtcacgtcagtggttggcctgctgggcaccgactctatctctcgccacccggaatccctgct

SEQ ID NO: 858934 - DNA, 75 bp, synthetic construct
  source 1..75: mol_type = other DNA
acacgtccatttgattggtggtggcggcgaagcaggtccgacgacacgcacaccggaagtggcgttaagtcgtct

SEQ ID NO: 858935 - DNA, 75 bp, synthetic construct
  source 1..75: mol_type = other DNA
ctcatttgttgataatcaggagcgaatcgaaggccacgcagcaaaagcgatggatgcacagcgtcttgagaacct

SEQ ID NO: 858936 - DNA, 75 bp, synthetic construct
  source 1..75: mol_type = other DNA
aagttcgcatagagaaggtgaagctcacggcatggcgcaaccctgttagcggagaaacggcaatctatgatgaag

SEQ ID NO: 858937 - DNA, 75 bp, synthetic construct
  source 1..75: mol_type = other DNA
gcaaattccgcgctgactatcaggaaacatccggtggcgaagcgtgtgataacgcatttgatgatgctgtaacgg

SEQ ID NO: 858938 - DNA, 75 bp, synthetic construct
  source 1..75: mol_type = other DNA
cggacgggcgggagacgaaattttactataacgacgggaaccaggtgacggcggtggtgtacccggacgggctgg

SEQ ID NO: 858939 - DNA, 75 bp, synthetic construct
  source 1..75: mol_type = other DNA
gccgcagtgagtcaatgtggctggtgcgcggtggtaaggcagcgcagccggacggccacacgctggcgcggctgt

SEQ ID NO: 858940 - DNA, 75 bp, synthetic construct
  source 1..75: mol_type = other DNA
atcagccgttaccgccgctatgacaaccgtggccggttaacctcggtgaaagacgcacagggccatgaaacgcgg

SEQ ID NO: 858941 - DNA, 75 bp, synthetic construct
  source 1..75: mol_type = other DNA
atcgctgccgctgaggcctgcattgccgaactgaatcttaacgctgtacgtggcctgattgttagcggcgacgct

SEQ ID NO: 858942 - DNA, 75 bp, synthetic construct
  source 1..75: mol_type = other DNA
tgcacatcaatatgctgcatgagcgcactcacgctctgtcaaaccgttactgtgccgctgttttcagctacctgg

SEQ ID NO: 858943 - DNA, 75 bp, synthetic construct
  source 1..75: mol_type = other DNA
tcatccgctgttttcagctatctggcggatgatctgcgtgagcttcagcagctcttccagcagcaaaacaaaccc

SEQ ID NO: 858944 - DNA, 75 bp, synthetic construct
  source 1..75: mol_type = other DNA
agaatcgcatcagcgttaaattcaggccgaaggacgataaggcatcggaagcgttagccgaaaagatgaacggca

SEQ ID NO: 858945 - DNA, 75 bp, synthetic construct
  source 1..75: mol_type = other DNA
gtttctgcaaacggacgtggtggttgtcgctattattctttacgccctgctcggcaaacttgctgacgtcagcgc

SEQ ID NO: 858946 - DNA, 75 bp, synthetic construct
  source 1..75: mol_type = other DNA
cgtccggtctaccgccgcgccggaatcgcctttacgcgtggcgaaaacaccgtggaagtcaccgaagaacaactg

SEQ ID NO: 858947 - DNA, 75 bp, synthetic construct
  source 1..75: mol_type = other DNA
cctaccgcctcgctggacgccaaaaacagcgccgcggtggtgggactgattcgcgaagccaaaacccgtggcgca

SEQ ID NO: 858948 - DNA, 75 bp, synthetic construct
  source 1..75: mol_type = other DNA
cgtctgtgcgctgattacagcggcggcgcctggagcttttacacactcagcaacggcggcgcatttatggctccg

SEQ ID NO: 858949 - DNA, 75 bp, synthetic construct
  source 1..75: mol_type = other DNA
tggcgcagaactcaccagtgaagcagcaggaatagtcgcctgtctgatgacatacagtcaccacgcctgtcgcac

SEQ ID NO: 858950 - DNA, 75 bp, synthetic construct
  source 1..75: mol_type = other DNA
cacctggcacggcatccgtaatatcgatcgcggtctggtggaaatggcgcgtagctatggattatccggcatacc

SEQ ID NO: 858951 - DNA, 75 bp, synthetic construct
  source 1..75: mol_type = other DNA
atgtccgatcgcgtggcggttttcaataatggacgtattgagcaggttgattcaccgcgcgatctctatatgcgt

SEQ ID NO: 858952 - DNA, 75 bp, synthetic construct
  source 1..75: mol_type = other DNA
acgattcaggcggtgcaatatcagggggcagccacacgttttgaactgaaacttagcggtggagaaaaactgctg

SEQ ID NO: 858953 - DNA, 75 bp, synthetic construct
  source 1..75: mol_type = other DNA
gattggcaatatgccgatggcggcggcattcaccctggtgccgattattctcatcgcactgtacctggcgttcgt

SEQ ID NO: 858954 - DNA, 75 bp, synthetic construct
  source 1..75: mol_type = other DNA
ctaccccattctgctgctcgacgaacctaccgcctcgctggacgccaaaaacagcgccgccgtagtcgaactgat

SEQ ID NO: 858955 - DNA, 75 bp, synthetic construct
  source 1..75: mol_type = other DNA
tttaaaagggaagtttaaagaggtaaggccgcgttattctgtattgcctgatatattcacacctataaatttagg

SEQ ID NO: 858956 - DNA, 75 bp, synthetic construct
  source 1..75: mol_type = other DNA
atggcaaaccgcaaacaacagcgcgcatacgctgcgcgtcgtcacatccagactgaaatcaaccgtagacttttc

SEQ ID NO: 858957 - DNA, 75 bp, synthetic construct
  source 1..75: mol_type = other DNA
gggcaagctctccctgcttcagggggatgttaatgccattatctcgcccgctaagccagttgatggcaatgataa

SEQ ID NO: 858958 - DNA, 75 bp, synthetic construct
  source 1..75: mol_type = other DNA
gaaacgaaaatcgccgcccatcttgcgggcgttggcattggtttttgtgccaaaatcgctttgccagtcaatgat

SEQ ID NO: 858959 - DNA, 75 bp, synthetic construct
  source 1..75: mol_type = other DNA
tctgggattcgctattatacgaaggtttttcgctggctatcggcgtcacgggaactgaggcgctggcaaatacct

SEQ ID NO: 858960 - DNA, 75 bp, synthetic construct
  source 1..75: mol_type = other DNA
ttaatcctaaaacaggcaagccgccagtggatagcaatggaaaacccattggaccttttgataccagtgaaacac

SEQ ID NO: 858961 - DNA, 75 bp, synthetic construct
  source 1..75: mol_type = other DNA
aaccgttctttatcaagggcgaagggcgaaccggggaaaaggtgggtgatgttatctcccgcgcgttgcaaaagg

SEQ ID NO: 858962 - DNA, 75 bp, synthetic construct
  source 1..75: mol_type = other DNA
taaatcactgtacgaaaagtgttactcagcgacctatccgcaattgctggccaccgtcgaacgcctggaacgtta

SEQ ID NO: 858963 - DNA, 75 bp, synthetic construct
  source 1..75: mol_type = other DNA
gagttacgggggatacagagatctcccgtatcacccgtcgcatgatggacatgcaaacagtgatgggcgtggatg

SEQ ID NO: 858964 - DNA, 75 bp, synthetic construct
  source 1..75: mol_type = other DNA
ccattgaggcggcaatcaggcgaactcaacagtataacgaagagctcgagcggcagcgtctggcgcttgcgcggg

SEQ ID NO: 858965 - DNA, 75 bp, synthetic construct
  source 1..75: mol_type = other DNA
aaataaaaatcgcctttgcaaatataaaaaacaaaggcatcaaggccaccatcagccaattattatcggatgagc

SEQ ID NO: 858966 - DNA, 75 bp, synthetic construct
  source 1..75: mol_type = other DNA
ctgggtgctggagaagcttggggtgcttcccggagaggcagcacgcgtgaaacagaaactggattcggctgttaa

SEQ ID NO: 858967 - DNA, 75 bp, synthetic construct
  source 1..75: mol_type = other DNA
cttgttaccgtcggtatggtgttaatccccctggtaaaactgcgtcttggtctgagtctgataagagctctgcct

SEQ ID NO: 858968 - DNA, 75 bp, synthetic construct
  source 1..75: mol_type = other DNA
cggtgctgaggcgatgagtctgctggctgatatggctggtcaggggaaatttgcactggataaaaccggggatgc

SEQ ID NO: 858969 - DNA, 75 bp, synthetic construct
  source 1..75: mol_type = other DNA
ccggaaccgtggaatggaacctacgaagatattggttcgctggccatggtcctccgtagtgcttcaattgcaatg

SEQ ID NO: 858970 - DNA, 75 bp, synthetic construct
  source 1..75: mol_type = other DNA
agatattctggcactcgcaaggcaggtttctgccttaagttcatacacttacagtactaaaatgtttatgaaaaa

SEQ ID NO: 858971 - DNA, 75 bp, synthetic construct
  source 1..75: mol_type = other DNA
atgttaagtattattttgacagggcatggcgggtttgccagtggcatggaaaaagcaatgaagcaaatcctcggc

SEQ ID NO: 858972 - DNA, 75 bp, synthetic construct
  source 1..75: mol_type = other DNA
tgacaatttttctgaagtagatttttctacacactacgtagtgcatggatatgaaattcaaattaatccgcagca

SEQ ID NO: 858973 - DNA, 75 bp, synthetic construct
  source 1..75: mol_type = other DNA
tgattgcgccaactttgcgtgaatgttaccagcgcggcgtccgtccaaatgctaccgctatgttaccggcattgt

SEQ ID NO: 858974 - DNA, 75 bp, synthetic construct
  source 1..75: mol_type = other DNA
tctgggtgacaatggcattgatcttgaaacttaccgtgatgtggtgctcaggcgttttaccaacccgcatattca

SEQ ID NO: 858975 - DNA, 75 bp, synthetic construct
  source 1..75: mol_type = other DNA
taaaagtagacactcagatcaccagtgaaggtggaaaacatttttcgggaaatgcaggaggattatcatctccag

SEQ ID NO: 858976 - DNA, 75 bp, synthetic construct
  source 1..75: mol_type = other DNA
taataagtcacagcagggagagattattaatggagaagtactggcagcctatgggaactggattggaactcatca

SEQ ID NO: 858977 - DNA, 75 bp, synthetic construct
  source 1..75: mol_type = other DNA
gtagtgaattcaggaacgatgctcacaatatacggtttgcctatcgacatgctgaagcaaagcgtgagtttgcag

SEQ ID NO: 858978 - DNA, 75 bp, synthetic construct
  source 1..75: mol_type = other DNA
aatacgaatttacgataacgcgtcagcaaaatggggagagcccaaaacaattcatgcccatgaactaatcgggca

SEQ ID NO: 858979 - DNA, 75 bp, synthetic construct
  source 1..75: mol_type = other DNA
ttcgacatgaaagccctcggtgaagacagctaccgcgatctcagcggcattggcattcccgtcgctaaaaaatgc

SEQ ID NO: 858980 - DNA, 75 bp, synthetic construct
  source 1..75: mol_type = other DNA
ggccccataatggcctggaagcggaaggatgtgctaaaggttgagagcacctctgaatttcagcagtggatggca

SEQ ID NO: 858981 - DNA, 75 bp, synthetic construct
  source 1..75: mol_type = other DNA
ccaccacggtgatacacgattaattcgccatgcttatggtgaaggtgaaaagtatgttccgttggtacttcgcgc

SEQ ID NO: 858982 - DNA, 75 bp, synthetic construct
  source 1..75: mol_type = other DNA
tccaatgaatgaacaatttcaggcgctaataaaggaacaacaagacgcatggcaacaggcgctcgcattactgca

SEQ ID NO: 858983 - DNA, 75 bp, synthetic construct
  source 1..75: mol_type = other DNA
gaatacgatgctgccggacgggtcatccgcctgaccagtgaaaacggcagccacaccaccttccgttacgatgta

SEQ ID NO: 858984 - DNA, 75 bp, synthetic construct
  source 1..75: mol_type = other DNA
ggcaggcgctgccggaagatctgcgcgtaagtccgcatcgttatctggcgacgaacagtccgcaggggccgtggt

SEQ ID NO: 858985 - DNA, 75 bp, synthetic construct
  source 1..75: mol_type = other DNA
ggcaggcgctgccggaagaactgcgcttaagtccgcatcgttatctggcgacgaacagtccgcaggggccgtggt

SEQ ID NO: 858986 - DNA, 75 bp, synthetic construct
  source 1..75: mol_type = other DNA
aacgaagtaaatcgacgcctcgatattctgtttgaccaggtatcagagacagatatgagcgcgttttcctcggag

SEQ ID NO: 858987 - DNA, 75 bp, synthetic construct
  source 1..75: mol_type = other DNA
acgctctccgccagcggcgaattgtggcagcatctggcgatcagctcctggcgggcgctgattggcttttcaatt

SEQ ID NO: 858988 - DNA, 75 bp, synthetic construct
  source 1..75: mol_type = other DNA
ccctgggtttatctatgtgggaggatgcaaaatcgggggcatgtactaatggtctttgcggcacactatccgcta

SEQ ID NO: 858989 - DNA, 75 bp, synthetic construct
  source 1..75: mol_type = other DNA
gacggcgaccggctgaccacaatacagaacgacagaacccgcatccagacgatttatcagccggggagcttcacg

SEQ ID NO: 858990 - DNA, 75 bp, synthetic construct
  source 1..75: mol_type = other DNA
aattggataacatatgggccatctgggcaccccatttctaatatgcaaggtacgccagaaaaacccagtgatata

SEQ ID NO: 858991 - DNA, 75 bp, synthetic construct
  source 1..75: mol_type = other DNA
aggctgaccggcgttcacaccaccgcagcgaatctggatatccgcatcccgtatgccacggacccggcaggtaac

SEQ ID NO: 858992 - DNA, 75 bp, synthetic construct
  source 1..75: mol_type = other DNA
ggcaggcgctgccggaagaacttcgcgtaagtccgcatcgttatctggcgacgaacagtccgcaggggccgtggt

SEQ ID NO: 858993 - DNA, 75 bp, synthetic construct
  source 1..75: mol_type = other DNA
accgttacgacagcgacgggcgggtgacagagcagcttaacccggcgggcttaagctacacctactgttatgagc

SEQ ID NO: 858994 - DNA, 75 bp, synthetic construct
  source 1..75: mol_type = other DNA
agcgactccggcaggctgaccggcgtccacaccaccacctcaaatctggatatccgcatcccgtatgccacggac

SEQ ID NO: 858995 - DNA, 75 bp, synthetic construct
  source 1..75: mol_type = other DNA
ttctgaagaaagagaagatagtcattgaagtgaagaaaactcgccgttttctaggggcaaataaaattggagagg

SEQ ID NO: 858996 - DNA, 75 bp, synthetic construct
  source 1..75: mol_type = other DNA
caagttcgatttcttgaaacgcggcttatgtatctaaaaaagctgaaagccttagctcatcccacgaaaaagtga

SEQ ID NO: 858997 - DNA, 75 bp, synthetic construct
  source 1..75: mol_type = other DNA
tgaaaaagctgaccagtcgctatgacaacctcttccagtgctccttcccctactctatgggctggcacggcgcgc

SEQ ID NO: 858998 - DNA, 75 bp, synthetic construct
  source 1..75: mol_type = other DNA
tactctatgggctggcacggcgcgccatttaatggcgaagagaatcaacactggcagctgcacgcgcacttttat

SEQ ID NO: 858999 - DNA, 75 bp, synthetic construct
  source 1..75: mol_type = other DNA
ccggcgcttatcatgtcccttcccgcaccattacaggttccgtggaaaaagacgtggcgattatcgatcgtgtga

SEQ ID NO: 859000 - DNA, 75 bp, synthetic construct
  source 1..75: mol_type = other DNA
atgattgattattccgcagccggttttaccctgttgcagggagcgcatttgtatgcgccggaggatcggggtatt

SEQ ID NO: 859001 - DNA, 75 bp, synthetic construct
  source 1..75: mol_type = other DNA
ggacggtcacgtcattctctggcgagggaaaatcgtgagtaatcctcccggtacgccaatggtcgatgttgccag

SEQ ID NO: 859002 - DNA, 75 bp, synthetic construct
  source 1..75: mol_type = other DNA
ataaacatgctggtgattttggtattagtgatacaaaaaagaatcgtgaaactcttactaaattcagggatgcta

SEQ ID NO: 859003 - DNA, 75 bp, synthetic construct
  source 1..75: mol_type = other DNA
agtgatatcgtgccggggcgaaatctggaggcgatgttttcgctgagtgctcagatgttggctggacagggcgtg

SEQ ID NO: 859004 - DNA, 75 bp, synthetic construct
  source 1..75: mol_type = other DNA
acaggtaattatgttgaggctggttatacgatgtccagtaataatcatgatgtcattgttcgttttcctgaaggc

SEQ ID NO: 859005 - DNA, 75 bp, synthetic construct
  source 1..75: mol_type = other DNA
acagaaatcaccaatgctggtggattatgttcagcgcgagctggcagacggtagccgtaccgttgtcgaaaccga

SEQ ID NO: 859006 - DNA, 75 bp, synthetic construct
  source 1..75: mol_type = other DNA
gtagtcgtaccgttgtcgaaaccgagcactggttagccatagtgccctactgggctgcctggccgttcgaaacgc

SEQ ID NO: 859007 - DNA, 75 bp, synthetic construct
  source 1..75: mol_type = other DNA
ttctggctttctgcgcagcgaactggcgattaaaacctggatcaaactggcgaatgaagctggctgtgctcaact

SEQ ID NO: 859008 - DNA, 75 bp, synthetic construct
  source 1..75: mol_type = other DNA
ggccattcattaggtcaatacatccgcagtcgtaaaatgacggaaatcgcgcaaaagctgaaagaaagtaacgag

SEQ ID NO: 859009 - DNA, 75 bp, synthetic construct
  source 1..75: mol_type = other DNA
cgttccgatcgccaatgggcgcagcgttttcgcacagaaccgttaacggcggtatttgccgactggtatcaacag

SEQ ID NO: 859010 - DNA, 75 bp, synthetic construct
  source 1..75: mol_type = other DNA
aaatgattttggctatgcgggatttggtggagcatgtcctcccaaaggagataaaccccatcattaccagtttaa

SEQ ID NO: 859011 - DNA, 75 bp, synthetic construct
  source 1..75: mol_type = other DNA
ctaacatgttgttgagcgctacaaaaacgatgtcacttggtgcgaataaaaactcaataagaattctttatggaa

SEQ ID NO: 859012 - DNA, 75 bp, synthetic construct
  source 1..75: mol_type = other DNA
gcgcagcaacaataatggcgcaacgcttgccgccatgccggggggggggtctcccccccccccccccaccccgcg

SEQ ID NO: 859013 - DNA, 75 bp, synthetic construct
  source 1..75: mol_type = other DNA
atgatcctgcacgcgcaggcaaaacacggcaaaccaggtttaccctggctggtgtttttgcacggtttttccggc

SEQ ID NO: 859014 - DNA, 75 bp, synthetic construct
  source 1..75: mol_type = other DNA
gtgacagcaaattccgcgccctggcggcggaactggctgccgactgccatgtcattcctcgcgccggacataacg

SEQ ID NO: 859015 - DNA, 75 bp, synthetic construct
  source 1..75: mol_type = other DNA
ctgctgaagcagtgaaggatgttctgcgctctgaagaagtcaggagcgcactgaaacagcaacttcgtcagaatc

SEQ ID NO: 859016 - DNA, 75 bp, synthetic construct
  source 1..75: mol_type = other DNA
atgtcagaaattacatccctggtcactgctgaggcagtgaaggaagtcctgcgctctgaagaagtccggagcgca

SEQ ID NO: 859017 - DNA, 75 bp, synthetic construct
  source 1..75: mol_type = other DNA
gtgaagcgccttatgaacaatgtgccgtgccagcttgatctacaggacgtacaggccatttaccaaacactgttt

SEQ ID NO: 859018 - DNA, 75 bp, synthetic construct
  source 1..75: mol_type = other DNA
ctgcaatagtacggtattcccaggaggagttaggtaatgactccaacttattgatagtgttttatgttcagataa

SEQ ID NO: 859019 - DNA, 75 bp, synthetic construct
  source 1..75: mol_type = other DNA
tggtgcaggcagattgataaaagggccgctgagaaaatcagcgccagtcagtcagccggaagcaaacccgaagag

SEQ ID NO: 859020 - DNA, 75 bp, synthetic construct
  source 1..75: mol_type = other DNA
ccggaaggtatcgcgggtgaggggagtgcttcagatggcggtgaccccacacctgacagcgacatgatgatgtaa

SEQ ID NO: 859021 - DNA, 75 bp, synthetic construct
  source 1..75: mol_type = other DNA
ggtactcgcttggcggacgggtggcgatgatggcggcttgccaggggctggcggggctttgtggggttgttgtcg

SEQ ID NO: 859022 - DNA, 75 bp, synthetic construct
  source 1..75: mol_type = other DNA
ttctgttcgtctgtaaataaacacgactcagagagtgtggcaaagaaaattgcagaaacgacagcgcaaaacatc

SEQ ID NO: 859023 - DNA, 75 bp, synthetic construct
  source 1..75: mol_type = other DNA
ccagacccgcgattctgtaaaccagaaccagcatgaatcggaacggaactaccaaaaagcggaacaaaacagccc

SEQ ID NO: 859024 - DNA, 75 bp, synthetic construct
  source 1..75: mol_type = other DNA
gaacggtcatcacgttatcacatccaccagcaggacgtgtgaccatctaatgatcgaccttgaaaccatgggaaa

SEQ ID NO: 859025 - DNA, 75 bp, synthetic construct
  source 1..75: mol_type = other DNA
tcccgccgagtaatgagcaaataaaccaggtgattgaagaaataagccggaaatacgcacgtaagccacttactc

SEQ ID NO: 859026 - DNA, 75 bp, synthetic construct
  source 1..75: mol_type = other DNA
aaatccaggaaattgcagcacatgcacttcaccaacgtctgaatgaagttgaattagaatctgcaacgaagaaag

SEQ ID NO: 859027 - DNA, 75 bp, synthetic construct
  source 1..75: mol_type = other DNA
agaattcaccaggcattacttaaaaatctggaaacggaagtatttgatggcaataccaacggctccttcgtggtg

SEQ ID NO: 859028 - DNA, 75 bp, synthetic construct
  source 1..75: mol_type = other DNA
aaaattgatgatgcgtcatacagtgaagcactggaagctgaaagagagtgccgggctgaaatataccgcgagcaa

SEQ ID NO: 859029 - DNA, 75 bp, synthetic construct
  source 1..75: mol_type = other DNA
aacagtaacatctttgcctgttgatgccgggcggcgtgatggtacaaaacttcccgccggggctgttcaggggcg

SEQ ID NO: 859030 - DNA, 75 bp, synthetic construct
  source 1..75: mol_type = other DNA
atggatttgatgatgtcaccggcttactgcgtaaaactctgattagttacaacatccttaacttctggctggtgg

SEQ ID NO: 859031 - DNA, 75 bp, synthetic construct
  source 1..75: mol_type = other DNA
aaggcactgaccatcctcataaggaggacactggtggtgatcagtatcacgccagcgataataaaactggcgagg

SEQ ID NO: 859032 - DNA, 75 bp, synthetic construct
  source 1..75: mol_type = other DNA
cgttgtgaatgaccttccaccggaaggcgtgtttgataccgaattctgcaatcgatatgaaaaaggcggggaaga

SEQ ID NO: 859033 - DNA, 75 bp, synthetic construct
  source 1..75: mol_type = other DNA
tgcggtcgctcctctgccccgatgccgcagcgtgtaactgaaaaagaaaaacatgatgaagaaaaaccgcaacca

SEQ ID NO: 859034 - DNA, 75 bp, synthetic construct
  source 1..75: mol_type = other DNA
atgtcatggcaacgtctgcgaaaaaacgcaaaccgggtttgttgtcacgttgtttgtctgttgttaataaaacca

SEQ ID NO: 859035 - DNA, 75 bp, synthetic construct
  source 1..75: mol_type = other DNA
gtgggaaccggttttgaaagaggtgaaagatgccggtattcccgtctttttgctcgatcgttccatcgatgtgaa

SEQ ID NO: 859036 - DNA, 75 bp, synthetic construct
  source 1..75: mol_type = other DNA
ctgcagtctcggcagccatgtcgtctatggcgttggccgcgcctttaaccgtaggattttcacaggtcgggtctg

SEQ ID NO: 859037 - DNA, 75 bp, synthetic construct
  source 1..75: mol_type = other DNA
aaaaagacggcaccatgcctgaaaagctgacgctgaccaagtccaccctttacctgcctgataccgcaaaagaag

SEQ ID NO: 859038 - DNA, 75 bp, synthetic construct
  source 1..75: mol_type = other DNA
aaacgtggtatcacgctaaaaattgccgatggtcagcaaaagcaggaaaaccagattaaagcggtacgttccttc

SEQ ID NO: 859039 - DNA, 75 bp, synthetic construct
  source 1..75: mol_type = other DNA
atgtggaaacgcttacttgtagtctctgcagtctctgcagtctcggcagccatgtcgtctatggcgttggccgct

SEQ ID NO: 859040 - DNA, 75 bp, synthetic construct
  source 1..75: mol_type = other DNA
acctacatccgcaagaaactggccagcgaacgctgcgacgctatcatcgccgctggctctaacggcgcgtatctg

SEQ ID NO: 859041 - DNA, 75 bp, synthetic construct
  source 1..75: mol_type = other DNA
atggcacatccaccacggctgaacgacgacaaacccgttttttggacggtatcagtgacgcgcttgttcgaactg

SEQ ID NO: 859042 - DNA, 75 bp, synthetic construct
  source 1..75: mol_type = other DNA
gagcgattgctgaatcattgctggaagcggagctgtttggctatgaggaaggggcgtttaccggctcgcgacgcg

SEQ ID NO: 859043 - DNA, 75 bp, synthetic construct
  source 1..75: mol_type = other DNA
aacgtggttgagttgcagggcaccgttggggccagcgtcgccattgaccgggtgatgcttccaattagtagaaca

SEQ ID NO: 859044 - DNA, 75 bp, synthetic construct
  source 1..75: mol_type = other DNA
agcagagctgtttggctatgaggaaggggcgtttaccggctcgcgacgcggaggtcgcgccgggctgttcgaaat

SEQ ID NO: 859045 - DNA, 75 bp, synthetic construct
  source 1..75: mol_type = other DNA
aatggtaataaaacagcagcggcgaattatttaggcgtcagccggacgacgttctggcggcggctgaaaaattaa

SEQ ID NO: 859046 - DNA, 75 bp, synthetic construct
  source 1..75: mol_type = other DNA
atgccagtgacatttgaagaagtccagcaacataaaaagcttcatggttttgatgatctggaaaccacgacagca

SEQ ID NO: 859047 - DNA, 75 bp, synthetic construct
  source 1..75: mol_type = other DNA
acgatcactggagcgttaccggacgctgcgcctttaccgacggttgcgaaggctggaaaacgggctgccagaaat

SEQ ID NO: 859048 - DNA, 75 bp, synthetic construct
  source 1..75: mol_type = other DNA
ggcgcaccggcagctccggagccggaaggcatcgcgggtgaggggagtgcttcagatggcgtcgtgactcagcct

SEQ ID NO: 859049 - DNA, 75 bp, synthetic construct
  source 1..75: mol_type = other DNA
gttttgttaagcaacgctccaccactcgcggagatttctcctccggtagtcatctcgtcactttgcattttcaac

SEQ ID NO: 859050 - DNA, 75 bp, synthetic construct
  source 1..75: mol_type = other DNA
gcgctctgaagaagtccggagcgcactgaaacagcaacttcggcagaaccttgaggcgcgtcttgatgcagaagt

SEQ ID NO: 859051 - DNA, 75 bp, synthetic construct
  source 1..75: mol_type = other DNA
cgcgatctgttcggcaatttcaatgagttatatcgcaccattactcgcacaccgggcccggtggttctgcatttt

SEQ ID NO: 859052 - DNA, 75 bp, synthetic construct
  source 1..75: mol_type = other DNA
cggtgcgcgaaacccagggcaagccgaaaatcgcggtggtggcgcatgacctgcgttacgacggcaagactaacc

SEQ ID NO: 859053 - DNA, 75 bp, synthetic construct
  source 1..75: mol_type = other DNA
tctgtaacgggatctctgaaccgtgtctgatagcaggaaatatcagtgaattactggcagatgttacgatcacgt

SEQ ID NO: 859054 - DNA, 75 bp, synthetic construct
  source 1..75: mol_type = other DNA
ggtgcggaaaaacctggatcagcgcagcaaaagcggcagaggccctgatacataaggatgtcgacaggattatcg

SEQ ID NO: 859055 - DNA, 75 bp, synthetic construct
  source 1..75: mol_type = other DNA
acggtgatatcacgcaatgcgatttgcctcgcggcgtgcgctccggattaagtgacgcgctggaacgtttcgaag

SEQ ID NO: 859056 - DNA, 75 bp, synthetic construct
  source 1..75: mol_type = other DNA
cgcgctgccaacggcgcgtgtgatgaatacaaacaactcaaggtgctctccatgggaagacaaaaagtagtgatc

SEQ ID NO: 859057 - DNA, 75 bp, synthetic construct
  source 1..75: mol_type = other DNA
cgtcggcagacgaacttatgaatgccaacaggcggtatggcctcaggcataccacctggctgaaagactttatca

SEQ ID NO: 859058 - DNA, 75 bp, synthetic construct
  source 1..75: mol_type = other DNA
atgagacccgatttgaatattttacccggagattccggctgcagcgtatggttctataacggcatatctcaaccg

SEQ ID NO: 859059 - DNA, 75 bp, synthetic construct
  source 1..75: mol_type = other DNA
ttaagcgagattcgtacctgctgtgagacactgttacagacggcgcagaacaccatcagtcgcgactttacgctg

SEQ ID NO: 859060 - DNA, 75 bp, synthetic construct
  source 1..75: mol_type = other DNA
ggcaaaatggtgaaaatactgtgggccgatcgttacgggttatgcctgttcgccaaacgcctggaacggggccgc

SEQ ID NO: 859061 - DNA, 75 bp, synthetic construct
  source 1..75: mol_type = other DNA
ggcagtcagggtaaactgctgtggtccaccggtgacgggctgtgcctcctgaccaaacggctggagcgtgggcgc

SEQ ID NO: 859062 - DNA, 75 bp, synthetic construct
  source 1..75: mol_type = other DNA
tttcgtgcgcacgggttaaacgtcgcttgtgaacaattgcggcaaaatatccatcaggtcgaagaaagtttgcag

SEQ ID NO: 859063 - DNA, 75 bp, synthetic construct
  source 1..75: mol_type = other DNA
ccctgacctccgccaaccactttctgcgtcaacagcaagatgcggtgaatgcgcagttagccgcgttgtttcagg

SEQ ID NO: 859064 - DNA, 75 bp, synthetic construct
  source 1..75: mol_type = other DNA
cgggttaaacgtcgcttgtgaacaattgcggcaaaatatccatcaggtcgaagaaagtttgcagctattgcaact

SEQ ID NO: 859065 - DNA, 75 bp, synthetic construct
  source 1..75: mol_type = other DNA
gcaaagtgttccttacgcaggcgcagctggcgatgctgctggaagatatcgactggcgacagcccaagcggctgc

SEQ ID NO: 859066 - DNA, 75 bp, synthetic construct
  source 1..75: mol_type = other DNA
caaagaagtgaaagtggaaatcgacgtgctgtctgataaacccaaccaaactcactatcgcgcgctgttagtcca

SEQ ID NO: 859067 - DNA, 75 bp, synthetic construct
  source 1..75: mol_type = other DNA
tggaacagcccgccttaccgaccatgaaatattcacgcttcgtggaatataagattgatgagaagaaaggtactg

SEQ ID NO: 859068 - DNA, 75 bp, synthetic construct
  source 1..75: mol_type = other DNA
ttcgtctggccggtcacccgtgacggcaaggtgcaccttactccggctcagttatccatgcttcttgaaggtatc

SEQ ID NO: 859069 - DNA, 75 bp, synthetic construct
  source 1..75: mol_type = other DNA
atgacacctcttattgataaattacatatgaaaataacaatacccctctgttttatatcgttaattctgtcactt

SEQ ID NO: 859070 - DNA, 75 bp, synthetic construct
  source 1..75: mol_type = other DNA
atgataacgctgccgaccggtaccagaatctggatcatcgcaggtgtcaccgatatgcgttgtggcttcaacggc

SEQ ID NO: 859071 - DNA, 75 bp, synthetic construct
  source 1..75: mol_type = other DNA
gtatgtgctcgtcaataagttcgatcagcaggatcgtaacagtgacgatgctgaacaggtgcgggcgctgatttc

SEQ ID NO: 859072 - DNA, 75 bp, synthetic construct
  source 1..75: mol_type = other DNA
aaacgatggccagggaacagcctttacccttgaagaaggcacatctgttgcaactaaagatgcagataaaagtgt

SEQ ID NO: 859073 - DNA, 75 bp, synthetic construct
  source 1..75: mol_type = other DNA
gaattcagcgatatggcggaagtggagtcgacgctggaacaactggcgaatcgcgaagatggtccttttgtggtg

SEQ ID NO: 859074 - DNA, 75 bp, synthetic construct
  source 1..75: mol_type = other DNA
aaaacccatctggcaatagcgatgggctatgaagcatttaaaattttttatgatataagtaaaatttctttggag

SEQ ID NO: 859075 - DNA, 75 bp, synthetic construct
  source 1..75: mol_type = other DNA
ggtttaccagcggttctgtaacggacactttgaaccgccccggaaatcctggagactaaactccctgagaaagag

SEQ ID NO: 859076 - DNA, 75 bp, synthetic construct
  source 1..75: mol_type = other DNA
tgcgtgaaccaattcagagcggaaccatcgatacatcgagtcaggcgatggacgagctcgtaaagcgtctttcag

SEQ ID NO: 859077 - DNA, 75 bp, synthetic construct
  source 1..75: mol_type = other DNA
atatattcaatggcggaatacaggcgaacaacagtaccgtgaatatctcctcagacagtgccgttctggggaact

SEQ ID NO: 859078 - DNA, 75 bp, synthetic construct
  source 1..75: mol_type = other DNA
gtatctggctggttgccggtatcaccgatatgcgaaatggctttaacggcctggcatcaaaagttcagaacgtcc

SEQ ID NO: 859079 - DNA, 75 bp, synthetic construct
  source 1..75: mol_type = other DNA
gattcatggctggatttatacggactctcagttgttacgcgatgatattcaaactcttttcatggcagaacagta

SEQ ID NO: 859080 - DNA, 75 bp, synthetic construct
  source 1..75: mol_type = other DNA
atgagttaagtcaggaggctgaacgcctgttacagctttctcgccaacagttgcagttactggaaaaaatgcctc

SEQ ID NO: 859081 - DNA, 75 bp, synthetic construct
  source 1..75: mol_type = other DNA
ggtgaccagataaaagtgttgtgggctgacagtgacggactgtgcctctttaccagacgcctggagcggggccgc

SEQ ID NO: 859082 - DNA, 75 bp, synthetic construct
  source 1..75: mol_type = other DNA
gtatctggctggttgcaggtatcaccgatatgcgaaatggctttaacggcctggcctcaaaagttcagaacgtcc

SEQ ID NO: 859083 - DNA, 75 bp, synthetic construct
  source 1..75: mol_type = other DNA
cctgtttatcttccgcggacgccggggtgaccagataaaagtgctgtgggctgacaataacggactgtgcctctt

SEQ ID NO: 859084 - DNA, 75 bp, synthetic construct
  source 1..75: mol_type = other DNA
tatcgcctgtaacgaaaatggcttatgtgaaaactcggatttcgacttcacctacacccaacataccgcatggat

SEQ ID NO: 859085 - DNA, 75 bp, synthetic construct
  source 1..75: mol_type = other DNA
tgcaactggtgcagttaagcaaaccggaaatcgcgcaggcgatatttggtaccacgctggctgagttcagccagc

SEQ ID NO: 859086 - DNA, 75 bp, synthetic construct
  source 1..75: mol_type = other DNA
atctggcgcatcttgccggcgggcaggggtacccgtatgtggtccccctgctggatggcaggccgtcggtggcgc

SEQ ID NO: 859087 - DNA, 75 bp, synthetic construct
  source 1..75: mol_type = other DNA
tcaccgatatgcgaaatggctttaacggcctggcatcaaaagttcagaacgtcctgaaggatgacccgttctccg

SEQ ID NO: 859088 - DNA, 75 bp, synthetic construct
  source 1..75: mol_type = other DNA
ggtgtacccgtatgtggtccccctgctggatggcaggccgtcggtggcgcttccgtgggtggttttcagcctgat

SEQ ID NO: 859089 - DNA, 75 bp, synthetic construct
  source 1..75: mol_type = other DNA
ctggtggcgggtaaacgccagttgttccgcgagatgctggcgctgggctgtcagtttatttcccccagccagcat

SEQ ID NO: 859090 - DNA, 75 bp, synthetic construct
  source 1..75: mol_type = other DNA
agttgtatcgttccataacccgcacttcggggccggtagtcctgcattttcatgtgttgcacagctattggttga

SEQ ID NO: 859091 - DNA, 75 bp, synthetic construct
  source 1..75: mol_type = other DNA
cagatggggatcgcctggggcaacctgctgctggcgctgatgaaaggttttcgtgatgccgccggtaatgccctg

SEQ ID NO: 859092 - DNA, 75 bp, synthetic construct
  source 1..75: mol_type = other DNA
tttccgccagttgattaccgtgctcggcgtgcttgctggggcgggcatctttaacggcgtaaccaaatacgttgc

SEQ ID NO: 859093 - DNA, 75 bp, synthetic construct
  source 1..75: mol_type = other DNA
ggcggcgcagtatagctgggatgaagtggggatctggcaaggggtgagcagtatttccgatgcctacctgcaatt

SEQ ID NO: 859094 - DNA, 75 bp, synthetic construct
  source 1..75: mol_type = other DNA
cgcacggcgcgctgggcgcggcacaggcatatatggcaacctatatcgtctatttttctctttgttgtggcgtgt

SEQ ID NO: 859095 - DNA, 75 bp, synthetic construct
  source 1..75: mol_type = other DNA
ggcgtgcttgccggggcgggcatttttaacggcgtaaccaaatacgttgcccagtatcatgataatccgcagcag

SEQ ID NO: 859096 - DNA, 75 bp, synthetic construct
  source 1..75: mol_type = other DNA
ggcctatatggcaacttatatcgtctatttttctctttgttgtggcgtgtttttactctggcgtaggcgggcatg

SEQ ID NO: 859097 - DNA, 75 bp, synthetic construct
  source 1..75: mol_type = other DNA
cagtcgcaagttaggtgacaaacgaactatcgctgcgctgactctggcagcgttcttcctcggtattcccgtctt

SEQ ID NO: 859098 - DNA, 75 bp, synthetic construct
  source 1..75: mol_type = other DNA
tggtagccggagctgtggcgataactctgggtttgtcagcaccgggggtgatggcagcaggttttaaacccgcac

SEQ ID NO: 859099 - DNA, 75 bp, synthetic construct
  source 1..75: mol_type = other DNA
caggcggagtcatcgatcgggacaccattaagtggtggctgaaacagtcacgggaagcacaatcagccattctga

SEQ ID NO: 859100 - DNA, 75 bp, synthetic construct
  source 1..75: mol_type = other DNA
gcaaaagaaatcgtcctgaaaaaagaaagtccgttcagggaatggtccgcagcacttcgcgcaacccctggtatc

SEQ ID NO: 859101 - DNA, 75 bp, synthetic construct
  source 1..75: mol_type = other DNA
ttccagcaaagggacgctcaccatttttgataacggcgatggtcgacatctggaacaacctgccttaccaaccat

SEQ ID NO: 859102 - DNA, 75 bp, synthetic construct
  source 1..75: mol_type = other DNA
gatgacggcgtacacgtcaccaccattcgtgaccatatcctcgaagtcgataaatctggtcgcgttgtcgatgta

SEQ ID NO: 859103 - DNA, 75 bp, synthetic construct
  source 1..75: mol_type = other DNA
tggtagccggagctgtggcgataactctgggtttgtcagcatcaggggtgatggcagcaggttttaaacctgcac

SEQ ID NO: 859104 - DNA, 75 bp, synthetic construct
  source 1..75: mol_type = other DNA
aattgcgggaatttatcgacgaaaactccggtgaattttttgttcaggtctggggaaatggagccaacttcgaca

SEQ ID NO: 859105 - DNA, 75 bp, synthetic construct
  source 1..75: mol_type = other DNA
actgacaaagttttccctaatcctggcaattcaagcctggggccgatgactgcttttttcgaagcatacctagac

SEQ ID NO: 859106 - DNA, 75 bp, synthetic construct
  source 1..75: mol_type = other DNA
gaacggtcatcataatctcacatccaccagcagagcggggattcatctgatgatcgaccttgaaaccatgggaaa

SEQ ID NO: 859107 - DNA, 75 bp, synthetic construct
  source 1..75: mol_type = other DNA
aattgcggtgaacggtcatcacgttatcacatccaccagcagagtgtggtaccacctgatgatcgaccttgaaac

SEQ ID NO: 859108 - DNA, 75 bp, synthetic construct
  source 1..75: mol_type = other DNA
ggaaactctcgctgctgcacgacatacaccggaaaaagatatcctggaagaagttaaccgcgaactggctgctga

SEQ ID NO: 859109 - DNA, 75 bp, synthetic construct
  source 1..75: mol_type = other DNA
tttcgaagcatacctgggcgctgactacaccgatcgcggtctgcttacaaaagagtggatgaaaggaaatcgtgt

SEQ ID NO: 859110 - DNA, 75 bp, synthetic construct
  source 1..75: mol_type = other DNA
tatttgaagcgatcgatcaattgcttgccgaaccattatcgatccgcgatctggtgatcacccgcgcattggctg

SEQ ID NO: 859111 - DNA, 75 bp, synthetic construct
  source 1..75: mol_type = other DNA
gcatcagtttccgcgcggagcgtcaccggggacgttcttgcacagtttgtttgaggatctggattttacccagcc

SEQ ID NO: 859112 - DNA, 75 bp, synthetic construct
  source 1..75: mol_type = other DNA
atccgcgactggctgcaggccgggcagcgcggagacgcgttgttgatgaatggcgatgacgcgcgtccggtgcgt

SEQ ID NO: 859113 - DNA, 75 bp, synthetic construct
  source 1..75: mol_type = other DNA
atgctaattaatcagcaacaaagagatgaattagaattagccttgtcttgttgtaccgatcatgaatatcgtttg

SEQ ID NO: 859114 - DNA, 75 bp, synthetic construct
  source 1..75: mol_type = other DNA
aagtacgggattaaggttgagttctttatgagtattgacgatggagaactttttcctataaaatctaagtcctct

SEQ ID NO: 859115 - DNA, 75 bp, synthetic construct
  source 1..75: mol_type = other DNA
ctgcagaactgaatgcgaggacgctacaacgattgcccggcgataactggcgtgtcaccagctactccggtttgc

SEQ ID NO: 859116 - DNA, 75 bp, synthetic construct
  source 1..75: mol_type = other DNA
gcccgacagtaacgcctccagccagcaaatgcgcctcgaaagtgacaaacatctggtgcagattgtcacgattca

SEQ ID NO: 859117 - DNA, 75 bp, synthetic construct
  source 1..75: mol_type = other DNA
gtaccgttggcctgggaacatctccgagttcaaaaatcgaatggagaaggtatttattaactgcaatcgacttgt

SEQ ID NO: 859118 - DNA, 75 bp, synthetic construct
  source 1..75: mol_type = other DNA
gccatcgtttgatccccgtacgctttcgcctgattacatgtaccagtagttctttacgtgagtacgtgcaacaag

SEQ ID NO: 859119 - DNA, 75 bp, synthetic construct
  source 1..75: mol_type = other DNA
acaacccgacccaacgccgggttgattgccctgatggatgagatgtttgccggtatgaccctggaggaggcgtaa

SEQ ID NO: 859120 - DNA, 75 bp, synthetic construct
  source 1..75: mol_type = other DNA
ccgccgctggagttcatgcaggtgtgcggcatgttgaaaggttttatcgacctggtgttccgtcatgaagggcgt

SEQ ID NO: 859121 - DNA, 75 bp, synthetic construct
  source 1..75: mol_type = other DNA
gcaaaaaggggaaccattagatgcggcaggccttcgcgcctgtattgaagcgttatgcgatgaggatattgcctg

SEQ ID NO: 859122 - DNA, 75 bp, synthetic construct
  source 1..75: mol_type = other DNA
cagcaggacatcgacttgccggatatggctgtgggtatttatgactgggcgctaattgttgaccatcaaaaacag

SEQ ID NO: 859123 - DNA, 75 bp, synthetic construct
  source 1..75: mol_type = other DNA
atgtttattcttatcgctggcgttaacgtacgtaatgaatattttgttaatcgcatcgctgggatcgctggttac

SEQ ID NO: 859124 - DNA, 75 bp, synthetic construct
  source 1..75: mol_type = other DNA
gcagacgtgaatgacgctgatatctttttaatgttgaaagcgtttgtagaaataggatttgaaatcagtttacac

SEQ ID NO: 859125 - DNA, 75 bp, synthetic construct
  source 1..75: mol_type = other DNA
ccagagcggtttattctttgtgataatagtgaaatccagacccgcccgattaaaggcacgctaccacgcctgccc

SEQ ID NO: 859126 - DNA, 75 bp, synthetic construct
  source 1..75: mol_type = other DNA
ttacgttaatgagaactcgtctgttcactgccgtagttggcgatattctcgatacgctggggtatatgcatcagt

SEQ ID NO: 859127 - DNA, 75 bp, synthetic construct
  source 1..75: mol_type = other DNA
atgaagaccttacctttaaagatgatgagggaaataccgggaagtgcaggacgcttgcttaaacaggtccgtgat

SEQ ID NO: 859128 - DNA, 75 bp, synthetic construct
  source 1..75: mol_type = other DNA
atcgtgcttagacaaggtattgggtggttttatttatgccagtgcagcagtgcgcacagatttgttaatagatga

SEQ ID NO: 859129 - DNA, 75 bp, synthetic construct
  source 1..75: mol_type = other DNA
ttttcatgcgacctattctggcgatgaatggcaggcattccttcagcttaatcaggccaaccgcgcgccatttag

SEQ ID NO: 859130 - DNA, 75 bp, synthetic construct
  source 1..75: mol_type = other DNA
ggaaagccagcaattctcgccgcaggaagatttcacgctcacttccgactggcaatccaatatgacccgcgagca

SEQ ID NO: 859131 - DNA, 75 bp, synthetic construct
  source 1..75: mol_type = other DNA
ggaattgtcgccgatagccaggaagaagcggaatatcaggaaacttttgataaagttaataagatcctacgtcaa

SEQ ID NO: 859132 - DNA, 75 bp, synthetic construct
  source 1..75: mol_type = other DNA
actggcgaactcgccaaaagatcgcgctgaaaacctgatgattgttgatttaatgcgtaatgatattggtcgcgt

SEQ ID NO: 859133 - DNA, 75 bp, synthetic construct
  source 1..75: mol_type = other DNA
gcgattttaagcctctcgccagaacgttttattctttgtgctgatggtgagatccagacccgtccgattaaaggc

SEQ ID NO: 859134 - DNA, 75 bp, synthetic construct
  source 1..75: mol_type = other DNA
gcatagtcggtttgatattgtggtggcagaccccgtttgcaccttaacaactcacggtaatgaaaccgtggtgtg

SEQ ID NO: 859135 - DNA, 75 bp, synthetic construct
  source 1..75: mol_type = other DNA
ccgtggcgaatttattgaacttatggttacccttcgcccgttaagcgatggttcgtttttgctttttcttcatcc

SEQ ID NO: 859136 - DNA, 75 bp, synthetic construct
  source 1..75: mol_type = other DNA
cgtattgctaaacaaccaacgtcaggcaaccactaccccaccgacattaacgctgattaccgatgacagccactg

SEQ ID NO: 859137 - DNA, 75 bp, synthetic construct
  source 1..75: mol_type = other DNA
cgtattactcaataatcaacgtcaggctaccaccacgccgccaacattgacgctgattaccgatgacagccactg

SEQ ID NO: 859138 - DNA, 75 bp, synthetic construct
  source 1..75: mol_type = other DNA
tatttatgcgctgggcgattgcgcggaaattaacggtcaggtattgccgttcctgcagccgattcaacttagcgc

SEQ ID NO: 859139 - DNA, 75 bp, synthetic construct
  source 1..75: mol_type = other DNA
agccgcagcgagtcactctggctggtgcgcggcggcgtggcgaaactggatgaaggtcaccggctggccgcactc

SEQ ID NO: 859140 - DNA, 75 bp, synthetic construct
  source 1..75: mol_type = other DNA
actgtttgtgtccagcacgggggaacagtttacaggttttaacctggataatacgggtgacttccagtatgcgca

SEQ ID NO: 859141 - DNA, 75 bp, synthetic construct
  source 1..75: mol_type = other DNA
acattctcgaatatgccaggcagcagaggcgctttggtcagcattgcaaaattccgccaggagatatggttgaaa

SEQ ID NO: 859142 - DNA, 75 bp, synthetic construct
  source 1..75: mol_type = other DNA
tgttgtcttgtttgttgtcttgttcgttgtttttatcgtcggcatggggatgtcggctttccgcgcctgaacata

SEQ ID NO: 859143 - DNA, 75 bp, synthetic construct
  source 1..75: mol_type = other DNA
atgcactatcgcaatgtggtttgtttgttgtcttgttcattgtttttatcgtcggcatggggatgtcggcttgat

SEQ ID NO: 859144 - DNA, 75 bp, synthetic construct
  source 1..75: mol_type = other DNA
gcaacggatgtttaaaaaagagaccggtcattcattaggtcaatatattcgcagccgtaagatgacggaaatcgc

SEQ ID NO: 859145 - DNA, 75 bp, synthetic construct
  source 1..75: mol_type = other DNA
ccgccgacagcatggacgagtacaacaaaccagacctcagtcatgtgatcagtcaggggcaacgtgccgacgatt

SEQ ID NO: 859146 - DNA, 75 bp, synthetic construct
  source 1..75: mol_type = other DNA
atgactgacagtgaactgatgcagttaagtgaacaggttgggcaggcgctgaaagcccgtggcgcaaccgtaaca

SEQ ID NO: 859147 - DNA, 75 bp, synthetic construct
  source 1..75: mol_type = other DNA
gcaaaaccctccaggcacaccgccagtcgatatctcgtcatttcaggcatggggtgattttgccgcagataagta

SEQ ID NO: 859148 - DNA, 75 bp, synthetic construct
  source 1..75: mol_type = other DNA
ggcagggcatcggcgttttactataaccaccacagccagttaacgtcagccaccgggcctgacgggctggaaatg

SEQ ID NO: 859149 - DNA, 75 bp, synthetic construct
  source 1..75: mol_type = other DNA
atgaaaacctggatatttatctgtatgtccatagcaatgttgctatggtttttaagtacgctaagacgtaaaccc

SEQ ID NO: 859150 - DNA, 75 bp, synthetic construct
  source 1..75: mol_type = other DNA
tgtctgacgaaaaactagctcaggaaggtctgttccagttcccgaccgtaattggcggcgtggtgctggcggtta

SEQ ID NO: 859151 - DNA, 75 bp, synthetic construct
  source 1..75: mol_type = other DNA
ttactccgcgattggtcgtctgaaaggtctggctgaagttcgcggcgtcgaaatggcgatccagcgcgctttctt

SEQ ID NO: 859152 - DNA, 75 bp, synthetic construct
  source 1..75: mol_type = other DNA
gatgaacttcttaacacgccactggcccaattgatgcccgaaaacttgcctcaaaccggaacctgcgtccggtaa

SEQ ID NO: 859153 - DNA, 75 bp, synthetic construct
  source 1..75: mol_type = other DNA
gtagaaaatcaggactttttgattatttcccaaaatcgggaaataatcgatagaggcataccagctaaagactac

SEQ ID NO: 859154 - DNA, 75 bp, synthetic construct
  source 1..75: mol_type = other DNA
cagaaattgagcgcggggctgttaccgcacatccgcgcgaccgtaaagttgccgatgattgttatgaagcgcacg

SEQ ID NO: 859155 - DNA, 75 bp, synthetic construct
  source 1..75: mol_type = other DNA
cggacgatccgccgcgcccgatcctcggcctgccgcgtatcgtttccaccattgaagatatgcagtggatggttg

SEQ ID NO: 859156 - DNA, 75 bp, synthetic construct
  source 1..75: mol_type = other DNA
ctgaacagcctgctgtctgaccgcgattacacctggaacgacaacggcgaactcatccgcatcagcagcccgcgc

SEQ ID NO: 859157 - DNA, 75 bp, synthetic construct
  source 1..75: mol_type = other DNA
gcgaccatcgcggcctgccgctggcgctcatcagcacggaaggggcaacagcgtggtgcgcagaatatgatgaat

SEQ ID NO: 859158 - DNA, 75 bp, synthetic construct
  source 1..75: mol_type = other DNA
aaagatatcgacaaagccaaactgcgcgaaaactttgctgtcttcctgaaagcgattattccggttgccgaagaa

SEQ ID NO: 859159 - DNA, 75 bp, synthetic construct
  source 1..75: mol_type = other DNA
ggcgtgcgtgctgacaacgatctggttgatatgatcaagcagtttggtccacgcatttacttcacccatctgcgc

SEQ ID NO: 859160 - DNA, 75 bp, synthetic construct
  source 1..75: mol_type = other DNA
tccaccatgcgtgaagataacccgaaaaccttccacgaagcggcgcacctgaacggtgacgttgatatgtacgaa

SEQ ID NO: 859161 - DNA, 75 bp, synthetic construct
  source 1..75: mol_type = other DNA
tgagcgcatcagattaatgaatgggtatacttaccgtctcaagtctaatggtatgccttatgctggcgttattgc

SEQ ID NO: 859162 - DNA, 75 bp, synthetic construct
  source 1..75: mol_type = other DNA
gctgggcgttcagcattgacgatgttgcaaagcaagctcaatccttagccggaaaaggctatgaggcgcctaaaa

SEQ ID NO: 859163 - DNA, 75 bp, synthetic construct
  source 1..75: mol_type = other DNA
ccgcgcgcgacaggtgcttacaaattcgtagttatgccagggcgtgacacggttgtggatgtgcagtcgaaaatc

SEQ ID NO: 859164 - DNA, 75 bp, synthetic construct
  source 1..75: mol_type = other DNA
acacagtagattattctggtgttactggcttgcttgttcaggtagccagagagtcagacgacagaataacagcac

SEQ ID NO: 859165 - DNA, 75 bp, synthetic construct
  source 1..75: mol_type = other DNA
tacggtcagaaacaaaccgataatacctatgcgttcgctgttaatggtgcatgtcatgccaccgcctttaaccag

SEQ ID NO: 859166 - DNA, 75 bp, synthetic construct
  source 1..75: mol_type = other DNA
cggcttcaacgtcagctatgtgctggatgttctgaacgcgctgaaatgcgaaaacgtgcgcatgatgctgaccga

SEQ ID NO: 859167 - DNA, 75 bp, synthetic construct
  source 1..75: mol_type = other DNA
tttacaggccccccttgccgcacattacggcgcggagtttgcggtacaggttatgccatgtctttcgcagattgg

SEQ ID NO: 859168 - DNA, 75 bp, synthetic construct
  source 1..75: mol_type = other DNA
aactatccgcaggtcatcaaacatacgccgcggatgaccgcgatggcgaacattgccctgtttcgtctgtttaat

SEQ ID NO: 859169 - DNA, 75 bp, synthetic construct
  source 1..75: mol_type = other DNA
tgatagcacaataaatcttgtcgatgaacataatcagtacgccgtggctgcggggttgggggtgatctgtatcct

SEQ ID NO: 859170 - DNA, 75 bp, synthetic construct
  source 1..75: mol_type = other DNA
gctgcacagggcatggcgcaggccactgacctggcatccgccggtaaggccgatgtggaggcaaccttcggtgaa

SEQ ID NO: 859171 - DNA, 75 bp, synthetic construct
  source 1..75: mol_type = other DNA
ttgactcgctgccggaaagctcagagcaggaagacgacatgctggacaaagcctggggactggagccggaaagcc

SEQ ID NO: 859172 - DNA, 75 bp, synthetic construct
  source 1..75: mol_type = other DNA
gactccacgatgatgtactacttcatgatcgccgaagtgttcctggtctttatgctctatctgcgtaaccacaac

SEQ ID NO: 859173 - DNA, 75 bp, synthetic construct
  source 1..75: mol_type = other DNA
aatggcgcgactacacgtaaaagatggcgaaaagggtatttggtgggactttagtaatctttacggcggaacatt

SEQ ID NO: 859174 - DNA, 75 bp, synthetic construct
  source 1..75: mol_type = other DNA
aggcgttcagcgatgcgctggatatgacgcgcatgtcgttacgccataacactcacgatgccacccgcaacgccc

SEQ ID NO: 859175 - DNA, 75 bp, synthetic construct
  source 1..75: mol_type = other DNA
ccatgaatatcggcatggtgcataacttcaaattcctcaaagggttacttgatacacctgaaggacgccacggcc

SEQ ID NO: 859176 - DNA, 75 bp, synthetic construct
  source 1..75: mol_type = other DNA
agttgaagctggacgaaccgttaaagatgtctgccgggaggccagtatctctgaagccacctactacatctatgg

SEQ ID NO: 859177 - DNA, 75 bp, synthetic construct
  source 1..75: mol_type = other DNA
ttttgattaaaccgagcggctttgatgtgttacaggcactggcaaaagccggaaaactcacctcatcgattggcg

SEQ ID NO: 859178 - DNA, 75 bp, synthetic construct
  source 1..75: mol_type = other DNA
catccgtttgttgccgtcaactgcggggcgattgccgaatcgctgctggaagcagagctgtttggctatgaggaa

SEQ ID NO: 859179 - DNA, 75 bp, synthetic construct
  source 1..75: mol_type = other DNA
gttgattgagggggaaacggggacgggcaaagagctggcggcccaggcgattcatcgggaatattttgcccgcca

SEQ ID NO: 859180 - DNA, 75 bp, synthetic construct
  source 1..75: mol_type = other DNA
atggctacatcgacagtaattcctgatgacatcaaaacgctaaaatccgatgttagtaaactaaaaaacgatcaa

SEQ ID NO: 859181 - DNA, 75 bp, synthetic construct
  source 1..75: mol_type = other DNA
ttagtgatctttacggaggaactttaatttttccaggcagtgatggttaccttaagatggggaactgtctcatgt

SEQ ID NO: 859182 - DNA, 75 bp, synthetic construct
  source 1..75: mol_type = other DNA
tagacagcaaagatgaaatcgttggtgactggtctgcttcatggtatcagcaggtattgccaactagcggagcta

SEQ ID NO: 859183 - DNA, 75 bp, synthetic construct
  source 1..75: mol_type = other DNA
acaggaagccttagaagcaattccagagtccgtaggctctacgataaaatatagggacggtggtagcggatctga

SEQ ID NO: 859184 - DNA, 75 bp, synthetic construct
  source 1..75: mol_type = other DNA
tgtagatggtggggcttttatattcttcggtcaaaaacaaacagatgacacatatgcatttgctgttaatggtgc

SEQ ID NO: 859185 - DNA, 75 bp, synthetic construct
  source 1..75: mol_type = other DNA
acattacagatcaaatatgctaatcatgggtcaaccatgacattaaacacacagggaaccgctcacgctggcgta

SEQ ID NO: 859186 - DNA, 75 bp, synthetic construct
  source 1..75: mol_type = other DNA
ggatcacggtagaaagcaccattgagttattaagtattgaaagtatcaagcgttgtgtcgccgcgaacattggcg

SEQ ID NO: 859187 - DNA, 75 bp, synthetic construct
  source 1..75: mol_type = other DNA
ttgatgtatcacctgctggtgttgttgcaggatcaggatctggatttaacgacggtaattgagaacctgcgtaaa

SEQ ID NO: 859188 - DNA, 75 bp, synthetic construct
  source 1..75: mol_type = other DNA
tggcagcaacggtacatgaccgctttgagctgaccaacgaggcatctgatttgatgtatcacctgctggtgttgt

SEQ ID NO: 859189 - DNA, 75 bp, synthetic construct
  source 1..75: mol_type = other DNA
acacgctactggtactggcgaatcctatcggaccaacctgccacaaaggcaccagcagctgcttcggcgacaccg

SEQ ID NO: 859190 - DNA, 75 bp, synthetic construct
  source 1..75: mol_type = other DNA
aaatctgccgacccggaaacctcctataccgccaaactgtatgccagcggcaccaaacgcattgcgcagaaagtg

SEQ ID NO: 859191 - DNA, 75 bp, synthetic construct
  source 1..75: mol_type = other DNA
catcggcccgacctgccacaaaggcaccagcagctgcttcggcgacaccgctcaccagtggctgttcctgtatca

SEQ ID NO: 859192 - DNA, 75 bp, synthetic construct
  source 1..75: mol_type = other DNA
ttgatgtatcacctgctggtgctgttgcaggatcaggggctggatttaacgacggtaattgagaacctgcgtaaa

SEQ ID NO: 859193 - DNA, 75 bp, synthetic construct
  source 1..75: mol_type = other DNA
gggggcggatcccgtttatcttttatttggtgtcaatgtttgtgggtggctggagcgcaaacgctcaccgctcga

SEQ ID NO: 859194 - DNA, 75 bp, synthetic construct
  source 1..75: mol_type = other DNA
ctgcctgctttggcggacttggggcatcacatatcaacgactctggtttctggatcgtgacccgatacctgggat

SEQ ID NO: 859195 - DNA, 75 bp, synthetic construct
  source 1..75: mol_type = other DNA
atgccgctttggctcagcattgtcacccgggcaacgggattgccggataagcggtatttaaatgatccggtgatc

SEQ ID NO: 859196 - DNA, 75 bp, synthetic construct
  source 1..75: mol_type = other DNA
agcgactgtggaccaaaggcgaaacgtcgggcaatttcctcaacgtagtaaatattgcgccggactgcgacaacg

SEQ ID NO: 859197 - DNA, 75 bp, synthetic construct
  source 1..75: mol_type = other DNA
gcggtatccggcgaagtgttaatgctgggctatatgaacccggaagccttagacaaaaccatcgaaagcggcaaa

SEQ ID NO: 859198 - DNA, 75 bp, synthetic construct
  source 1..75: mol_type = other DNA
tatcggcccaacctgccacaaaggcaccagtagttgttttggcgatgccgctcaccagtggctgttcctgtatca

SEQ ID NO: 859199 - DNA, 75 bp, synthetic construct
  source 1..75: mol_type = other DNA
tatcggaccaacctgccataaaggcaccagcagctgcttcggcgacaccgctcaccagtggctgttcctgtatca

SEQ ID NO: 859200 - DNA, 75 bp, synthetic construct
  source 1..75: mol_type = other DNA
cattttactggcaggtacggcgctggttggcggcgtacagcctgctgacgccatcaccgttgacgcgatgatccc

SEQ ID NO: 859201 - DNA, 75 bp, synthetic construct
  source 1..75: mol_type = other DNA
gttgcgttggttaagcgtcccacaacgattaaccatgcttgaagagctgatgcagtgggaggggagtcattctga

SEQ ID NO: 859202 - DNA, 75 bp, synthetic construct
  source 1..75: mol_type = other DNA
ttaccgcgacagcgaagttgtgctggttgcgttggttaagcgtcccacaacgattaaccatgcttgaaggactga

SEQ ID NO: 859203 - DNA, 75 bp, synthetic construct
  source 1..75: mol_type = other DNA
aacgttgctctcttaccgaatgccgcaggtgttgcagcgttttcggcaacgcgcaccaaaagtgcgtttatcgtt

SEQ ID NO: 859204 - DNA, 75 bp, synthetic construct
  source 1..75: mol_type = other DNA
attggtcgccggatgtgccttacccgtgagggaaaaaagctattgccgcatatctatgaattaacccgagtgatg

SEQ ID NO: 859205 - DNA, 75 bp, synthetic construct
  source 1..75: mol_type = other DNA
tgcagcgttttcggcaacgcgcaccaaaagtgcgtttatcgttgcagtcgctgaactgttacgtgatccgtgatg

SEQ ID NO: 859206 - DNA, 75 bp, synthetic construct
  source 1..75: mol_type = other DNA
acgggagaacggcatcctgatagcgtccggtggacgtaaaaatgtgccgttccagcagtacatcaacgcggggta

SEQ ID NO: 859207 - DNA, 75 bp, synthetic construct
  source 1..75: mol_type = other DNA
actggaacaactgctcgccgaacgcaaatctgccgacccggaaacctcttacacagccaaactgtatgccagcgg

SEQ ID NO: 859208 - DNA, 75 bp, synthetic construct
  source 1..75: mol_type = other DNA
gtcaccttcttctcgcgaactaaacaacggctgtggaccaaaggcgaaacgtctggcaattttctcaatgtggtg

SEQ ID NO: 859209 - DNA, 75 bp, synthetic construct
  source 1..75: mol_type = other DNA
cgataacaaaaaccattcatttttcagtggaagccttggaaaatggatattcgaaattcgaaggtttaaaaataa

SEQ ID NO: 859210 - DNA, 75 bp, synthetic construct
  source 1..75: mol_type = other DNA
ttacaacctgctattccgaagagcctcccagaagctctccgtttggctgctgacctggcagagcaaaagcaacgg

SEQ ID NO: 859211 - DNA, 75 bp, synthetic construct
  source 1..75: mol_type = other DNA
agccagttataaagctattacttttgacgctgttccggcaactaaggtttcacgttctgccgatgttacatcgta

SEQ ID NO: 859212 - DNA, 75 bp, synthetic construct
  source 1..75: mol_type = other DNA
tgatgcattacgcgctgtcacaactggcagcagtgccggatcttactctctatggcccacagaacagacttggcg

SEQ ID NO: 859213 - DNA, 75 bp, synthetic construct
  source 1..75: mol_type = other DNA
agaggtgaatggtctgcctctggcttatctcgacagtgccgccagcgcccagaaaccgggtcaggtgattgacgc

SEQ ID NO: 859214 - DNA, 75 bp, synthetic construct
  source 1..75: mol_type = other DNA
cgtgatgttacatcccgcctgagtgcggactacttaatccatgatttgcagacgggtcacttcgtgacagtactg

SEQ ID NO: 859215 - DNA, 75 bp, synthetic construct
  source 1..75: mol_type = other DNA
cccatcacaatgttaatgcatggtaatgtcatcccagcactggcagcggcaaaagtgaacttagtgaataatgaa

SEQ ID NO: 859216 - DNA, 75 bp, synthetic construct
  source 1..75: mol_type = other DNA
aggaaaccatcactcatcatttcttcgtttcgggaattggacaagagaaaactgttgatgcagccaaaatttgtg

SEQ ID NO: 859217 - DNA, 75 bp, synthetic construct
  source 1..75: mol_type = other DNA
ggtgattcctcttaaccctgacggtacgctacaactggagaggctatccaatctgttcgatgagaaaactcgcct

SEQ ID NO: 859218 - DNA, 75 bp, synthetic construct
  source 1..75: mol_type = other DNA
acagaagggtgcacaggcgttagagcggggaattgcgattctgcaatatctggaaaaaagtgggggaagttcgtc

SEQ ID NO: 859219 - DNA, 75 bp, synthetic construct
  source 1..75: mol_type = other DNA
atggtgatacgcaaaacggtgtgcagggattgtagtaacgcaattactcataatacggaatgctgcccgagctgc

SEQ ID NO: 859220 - DNA, 75 bp, synthetic construct
  source 1..75: mol_type = other DNA
tccgattacaacacgttgctgaccatcgcctcagaaatgattctggtgccctatttcctggtcggcgcgttcttg

SEQ ID NO: 859221 - DNA, 75 bp, synthetic construct
  source 1..75: mol_type = other DNA
tggatattcagcagttgttgactgccgcaatggatccgcaggagtttgcccgcttcagtcaggtctggcaggaaa

SEQ ID NO: 859222 - DNA, 75 bp, synthetic construct
  source 1..75: mol_type = other DNA
atgatctggcgctgtgacaacgatctggatattcagcagttgttgacggccgcaatggatccgcaggagtttgca

SEQ ID NO: 859223 - DNA, 75 bp, synthetic construct
  source 1..75: mol_type = other DNA
actgatgatcctgccagtctgggtacggaaatgctgacattcagcgccagcgcagcccataacccgctggcaaac

SEQ ID NO: 859224 - DNA, 75 bp, synthetic construct
  source 1..75: mol_type = other DNA
tcattctctacgacattagatgttgcccctgcagagtatggaaagttttcttttggtgagggccagtttactttt

SEQ ID NO: 859225 - DNA, 75 bp, synthetic construct
  source 1..75: mol_type = other DNA
gtcgtggggtgatcgtcgaaggcgtggagacagaggaggagtggagcgatgttcagaattcacctgccttcgccg

SEQ ID NO: 859226 - DNA, 75 bp, synthetic construct
  source 1..75: mol_type = other DNA
gcggcgaaagctcgtggcgtcaagaaaaactctgatgtcggcggttggcattactcaccggctggtgaagaacgt

SEQ ID NO: 859227 - DNA, 75 bp, synthetic construct
  source 1..75: mol_type = other DNA
accatcgaaacggcaacagcggacagcgcaggtaatgaacgcttcctcctgaaactgacccagacgacttcgctc

SEQ ID NO: 859228 - DNA, 75 bp, synthetic construct
  source 1..75: mol_type = other DNA
ctgacatttcgtcggcgatctcccgtctggggcataccgatacgctggtggtgtgtgatgcgggtttacccatcc

SEQ ID NO: 859229 - DNA, 75 bp, synthetic construct
  source 1..75: mol_type = other DNA
cgctttgatgttagcgttgaggccgagctagggcgtcttggcggccaggaggacgatctgctggtggatgaaaaa

SEQ ID NO: 859230 - DNA, 75 bp, synthetic construct
  source 1..75: mol_type = other DNA
atttatcacccgttttccggatattgcccttactggcaagggacgtgactgggggtatgctggttggttatctga

SEQ ID NO: 859231 - DNA, 75 bp, synthetic construct
  source 1..75: mol_type = other DNA
acatgaaacagaaaattactgattacctggacgaaatctacggtggaacatttaccgcaactcatttacagaaac

SEQ ID NO: 859232 - DNA, 75 bp, synthetic construct
  source 1..75: mol_type = other DNA
acctggatattgaaggcaaagtcgaagatattgttctgcaattatcaccaatgaacaaagtaacggcaaaagttt

SEQ ID NO: 859233 - DNA, 75 bp, synthetic construct
  source 1..75: mol_type = other DNA
aaaactgacccagacgacttcgctcggcgtggtaacgaccctggagacacacactgtgtctttggcggaagaagc

SEQ ID NO: 859234 - DNA, 75 bp, synthetic construct
  source 1..75: mol_type = other DNA
gaaagatgacatgggccgcttgtgttatctgcctacggctctggaagcccgttctaaatatctgcgcgcggttgt

SEQ ID NO: 859235 - DNA, 75 bp, synthetic construct
  source 1..75: mol_type = other DNA
cgtttcgggaattggacaagagaaaactgttgatgcagccaaaatttgtggcggtgcagaaaatgttgttaaaac

SEQ ID NO: 859236 - DNA, 75 bp, synthetic construct
  source 1..75: mol_type = other DNA
atgagcatgcctcctgcgatagctaatacgtttttgtttcatatgatgagtccgtcaaaagagattcaactggca

SEQ ID NO: 859237 - DNA, 75 bp, synthetic construct
  source 1..75: mol_type = other DNA
aatgcatgacgccttattggattacatggacaaaattcgcgatccgttccgcagttaccaatggagcctgcgtcc

SEQ ID NO: 859238 - DNA, 75 bp, synthetic construct
  source 1..75: mol_type = other DNA
ggagctacataaatagcggcaggctttcagattttcagatatgtggccgcgttaatgagcaggctaaagagctta

SEQ ID NO: 859239 - DNA, 75 bp, synthetic construct
  source 1..75: mol_type = other DNA
aacaggaataaccgagattttaggttatgacggtttaacagaagtagctataaaccaacctggaagaatctggtt

SEQ ID NO: 859240 - DNA, 75 bp, synthetic construct
  source 1..75: mol_type = other DNA
aaccgcacagctgaacctgaagaaagtgctgggcttcattaccgacgcgggtggccgtacttcccacacctctat

SEQ ID NO: 859241 - DNA, 75 bp, synthetic construct
  source 1..75: mol_type = other DNA
gtggccgtacttcccacacttctattatggcgcgttctctggagctgccggccatcgtgggtactggtagcgtca

SEQ ID NO: 859242 - DNA, 75 bp, synthetic construct
  source 1..75: mol_type = other DNA
aatgtgttcgccagaagagatgccacacgacgtggtgacaatgaacagccgggttaaattccgcaatcttagcga

SEQ ID NO: 859243 - DNA, 75 bp, synthetic construct
  source 1..75: mol_type = other DNA
gcgcctcgccggcacgccgatcggtccaaacgacacggcgatcgccgggcacgccatcgccaccggggcaatact

SEQ ID NO: 859244 - DNA, 75 bp, synthetic construct
  source 1..75: mol_type = other DNA
atgaaacggtgtgcccgcgttgcggtacgaaaggatacgttcggcgcagaaatagcctgcaatggacgctggcgc

SEQ ID NO: 859245 - DNA, 75 bp, synthetic construct
  source 1..75: mol_type = other DNA
agcagcctgaagcagtgcttaagaatctggagcaggcggtgctgcgcggtcaccgtatcgtggtctcggccatca

SEQ ID NO: 859246 - DNA, 75 bp, synthetic construct
  source 1..75: mol_type = other DNA
atgtcattcttttctacgttaaaaacagctttgtctttgaaggagaaacttgctgctactggtgttcttgttctg

SEQ ID NO: 859247 - DNA, 75 bp, synthetic construct
  source 1..75: mol_type = other DNA
gatataataattaatgaaggttacaggggttttggagtagggagcgttcttttaacaaaagcgatagaatcagca

SEQ ID NO: 859248 - DNA, 75 bp, synthetic construct
  source 1..75: mol_type = other DNA
gcgcctcgccggcacaccgatcggtccgaacgacacggcgatcgccgggcacgccatcgccaccggggcaatact

SEQ ID NO: 859249 - DNA, 75 bp, synthetic construct
  source 1..75: mol_type = other DNA
gccacggtacagcaggctgacggcacatggcgcgaggtgggcgccaagcaaatcaccatcggcgcccgcgtccgg

SEQ ID NO: 859250 - DNA, 75 bp, synthetic construct
  source 1..75: mol_type = other DNA
atgacaaatcaaaccattcaactcgcaatcagtattacaggtagtcaaaaacgactggcagatctatgcggtgta

SEQ ID NO: 859251 - DNA, 75 bp, synthetic construct
  source 1..75: mol_type = other DNA
tgcaacgtgttcctgctacggaatcgcagggtcgtattcatacttctgcttgttaccgttgcggtaatgccagaa

SEQ ID NO: 859252 - DNA, 75 bp, synthetic construct
  source 1..75: mol_type = other DNA
ggcaattcgtattactcacttgccgaccgggattgttgttgaatgtcaggacgaacgttcacaacataaaaacaa

SEQ ID NO: 859253 - DNA, 75 bp, synthetic construct
  source 1..75: mol_type = other DNA
tccggtgggtgccgcactgctgggacttcgcgttggcgataccattcactgggaacttccgggcggcaccgcaac

SEQ ID NO: 859254 - DNA, 75 bp, synthetic construct
  source 1..75: mol_type = other DNA
tccggtaggtgccgcactgctggggctgcgcgttggcgattccattcactgggaacttccgggcggcgttgcaac

SEQ ID NO: 859255 - DNA, 75 bp, synthetic construct
  source 1..75: mol_type = other DNA
gggaacttccgggcggcaccgcaacccaccttgaagtgctggaactcgaataccagcctgaagccgctggcgact

SEQ ID NO: 859256 - DNA, 75 bp, synthetic construct
  source 1..75: mol_type = other DNA
tatatgtgaggcaatcagtagtcgctggagtaatggtgttgtcgaaggtcatgtaaatcgcctgaagatgctgaa

SEQ ID NO: 859257 - DNA, 75 bp, synthetic construct
  source 1..75: mol_type = other DNA
cgccattgatacagtcggtagccacacactctgcaatgcctgcgccggggtccgatatggcagtattgttgcagc

SEQ ID NO: 859258 - DNA, 75 bp, synthetic construct
  source 1..75: mol_type = other DNA
tctccatccgccgcccctgtgaccacgccgaccaactggtggccgctgggcatctccttggtcactgcatcggcg

SEQ ID NO: 859259 - DNA, 75 bp, synthetic construct
  source 1..75: mol_type = other DNA
gccagcgagggtgaacatggtggttataaagagatcatcgccaaaattagcggtgatggtgtatatggtcgtctg

SEQ ID NO: 859260 - DNA, 75 bp, synthetic construct
  source 1..75: mol_type = other DNA
cctacaacttcccgcaggggcgcgtcactgaccaccgtatcaacctgacgctctaccgtctggatgaagtgatgg

SEQ ID NO: 859261 - DNA, 75 bp, synthetic construct
  source 1..75: mol_type = other DNA
ctgccaaaagatcctgatgacgaacgtaacgccttcctcgaagtccgagccggaaccggcggcgacgaagcggcg

SEQ ID NO: 859262 - DNA, 75 bp, synthetic construct
  source 1..75: mol_type = other DNA
tggttgccatgccgcaagggctggacgcgcgtaaagcaatgattatcggtactgccggttttaccgccatgctgt

SEQ ID NO: 859263 - DNA, 75 bp, synthetic construct
  source 1..75: mol_type = other DNA
caccgactatttgcaacagtgcctcgtggaagtcgctgcggaggccgacgccatggtgacggtgttcggcattct

SEQ ID NO: 859264 - DNA, 75 bp, synthetic construct
  source 1..75: mol_type = other DNA
accgtatcagagctggcgtcaaaggcggcaaagcaattgagtacaacgctaacaccttacctgccgaagcgaaag

SEQ ID NO: 859265 - DNA, 75 bp, synthetic construct
  source 1..75: mol_type = other DNA
aacttcacgcgatcggcaatggcgctgactacgtccgcacccacgcgcctggagatctgcgggcaaatggtggtc

SEQ ID NO: 859266 - DNA, 75 bp, synthetic construct
  source 1..75: mol_type = other DNA
tctcggaaaccctcgcgaaatttcgcagtcgcgacggcactgttgcaaagttagcgatgaggcagccttttgtct

SEQ ID NO: 859267 - DNA, 75 bp, synthetic construct
  source 1..75: mol_type = other DNA
ggcggggggttttctctgccaaccacggtcatgccatttattctgcgtaatgtccgtttgcaaggggtggattca

SEQ ID NO: 859268 - DNA, 75 bp, synthetic construct
  source 1..75: mol_type = other DNA
aatgcatgggtttatctggtttacctggttcattaatgggggttcacaaaagagctcagagagaaggatggctca

SEQ ID NO: 859269 - DNA, 75 bp, synthetic construct
  source 1..75: mol_type = other DNA
cggattcagcaactggacgaggcaatggttgttgcctgccgtgaaggtgaacatgcactgatgcatctgataccg

SEQ ID NO: 859270 - DNA, 75 bp, synthetic construct
  source 1..75: mol_type = other DNA
gaatcgccagggaaaacgcgtgccaatcagcattgagcagcatgtctttaaataccacatcaccattcaatactt

SEQ ID NO: 859271 - DNA, 75 bp, synthetic construct
  source 1..75: mol_type = other DNA
ggggccaaatccgcaggcaaaacctgataactatggcgaccgcgctgttgatgcagagctgtttctgaaaaccct

SEQ ID NO: 859272 - DNA, 75 bp, synthetic construct
  source 1..75: mol_type = other DNA
cggggtaagaggagtagcctatgagtttcatatctcatctttaccaaaggaaacgcaagctgcgttgttgcttag

SEQ ID NO: 859273 - DNA, 75 bp, synthetic construct
  source 1..75: mol_type = other DNA
ggcggtgaacgtttcacgcaaaggcgagtttacgcttaaagttggcggctcccttaaaggcgcgaaaaacgttta

SEQ ID NO: 859274 - DNA, 75 bp, synthetic construct
  source 1..75: mol_type = other DNA
aagatgcgcgaatgcaatggtcaggcgacgcagcaatctctgaaaggtgatgatcgcaataagtttatgagcacc

SEQ ID NO: 859275 - DNA, 75 bp, synthetic construct
  source 1..75: mol_type = other DNA
gctgaaaggcgatccgatggtgcttcccaacggggccacactgtatttcctcggaaccaatgcccgcacggccca

SEQ ID NO: 859276 - DNA, 75 bp, synthetic construct
  source 1..75: mol_type = other DNA
tgagcgccaccagtggcgcggtatggacttccgcgcccaggcggacgccatcaaaaaactgaccgaacagtacaa

SEQ ID NO: 859277 - DNA, 75 bp, synthetic construct
  source 1..75: mol_type = other DNA
gaaactatcaacggtcaggcattccgcctgattgatgaaatccgccgtcatggcatgaaagtggggctgattctt

SEQ ID NO: 859278 - DNA, 75 bp, synthetic construct
  source 1..75: mol_type = other DNA
agggccgcgccgtcagccggaaaagaatgttttcaccgatgaacagattgagaagctggaagaaatcttccattc

SEQ ID NO: 859279 - DNA, 75 bp, synthetic construct
  source 1..75: mol_type = other DNA
gtgcataaggccgtggagctggttggcactgagcagcagaacctgagtgcgcgcaccgaaaaatccctgtctgaa

SEQ ID NO: 859280 - DNA, 75 bp, synthetic construct
  source 1..75: mol_type = other DNA
gacttccgcgcccaggctgacgccatcaaaaaactgactgaacagtacaacgtgacctacatcggtatcgactcg

SEQ ID NO: 859281 - DNA, 75 bp, synthetic construct
  source 1..75: mol_type = other DNA
tttcgccgctgaacactggatcgatgttcgtgttccagagcagtatcagcaagagcacgttcagggagccatcaa

SEQ ID NO: 859282 - DNA, 75 bp, synthetic construct
  source 1..75: mol_type = other DNA
aggtccaggcttttgggggctttttgactgcaatggtcatccccaatattggtgcttttattgcctggggtttta

SEQ ID NO: 859283 - DNA, 75 bp, synthetic construct
  source 1..75: mol_type = other DNA
tgccggtgttacggtaggtaccagcccgccatcagctgcgccagcgtacttttgccactgccgttgtcaccaaag

SEQ ID NO: 859284 - DNA, 75 bp, synthetic construct
  source 1..75: mol_type = other DNA
aagcctacgacattatcagtcaccgtcgtctggagtttgacgccggacacaccgacatagcgcagtcatttatgg

SEQ ID NO: 859285 - DNA, 75 bp, synthetic construct
  source 1..75: mol_type = other DNA
tcggcaccaatgcccgcacggcccagagttatcacggcaacctgtatctggatgaatatttctggataccgaaat

SEQ ID NO: 859286 - DNA, 75 bp, synthetic construct
  source 1..75: mol_type = other DNA
aggcctacgacattatcagccaccgccgcctggagtttgacgccgggcacaccgacattgcgcagtcatttatgg

SEQ ID NO: 859287 - DNA, 75 bp, synthetic construct
  source 1..75: mol_type = other DNA
acggtatgccagccagcgatatcatcgcgccgaatctggtcgagctggaaattctttgtgaatatccagtacata

SEQ ID NO: 859288 - DNA, 75 bp, synthetic construct
  source 1..75: mol_type = other DNA
tgcagccgggagactggatgatatgtccgttggtgtggcgctgttgctgtgcgacaacatcggcgaagcgcgcgt

SEQ ID NO: 859289 - DNA, 75 bp, synthetic construct
  source 1..75: mol_type = other DNA
tataagctcgatatcaacgagtttcgcggcaaccgcagcctgcaaattatcatcgacaatatctggccaatttag

SEQ ID NO: 859290 - DNA, 75 bp, synthetic construct
  source 1..75: mol_type = other DNA
tggcagacgtggtgccgctggacgctaataaccgtattctgacctggcaggggatgagccgcatccgcgccggga

SEQ ID NO: 859291 - DNA, 75 bp, synthetic construct
  source 1..75: mol_type = other DNA
gccgtgaagtcgatgaaacggcagacttgcccgctgaattgcctcccttgctgcgccgtttatatgccagccggg

SEQ ID NO: 859292 - DNA, 75 bp, synthetic construct
  source 1..75: mol_type = other DNA
tcgttgggcattccggttattgttaccgatcatcatttgcctggcgaaactttacctgcggcggaagccattatt

SEQ ID NO: 859293 - DNA, 75 bp, synthetic construct
  source 1..75: mol_type = other DNA
gaagaggataaattcgaactctttcaacaacggtttggcgaactggttactgagtggctggacccttcgctattg

SEQ ID NO: 859294 - DNA, 75 bp, synthetic construct
  source 1..75: mol_type = other DNA
ccaggatgtggatctttatgccccacaatcaatatataaatcaattttgctgagattgtccagtagtaaagagta

SEQ ID NO: 859295 - DNA, 75 bp, synthetic construct
  source 1..75: mol_type = other DNA
aagccaaaaaagaatttattaccttccaggatgtggatctttatgccccacaatcaatatataaatcaattttgc

SEQ ID NO: 859296 - DNA, 75 bp, synthetic construct
  source 1..75: mol_type = other DNA
aggaactggcgcaatataatttatggctggattatctggatgcactggaactggttgattcctccagtgcgccag

SEQ ID NO: 859297 - DNA, 75 bp, synthetic construct
  source 1..75: mol_type = other DNA
accttttcttggtgaatgtgtatatgctaaagacacggaattcaaagatgaaaatgtgtttttggattttattaa

SEQ ID NO: 859298 - DNA, 75 bp, synthetic construct
  source 1..75: mol_type = other DNA
tgaaattaatatttctcgtagaaaagaaccatttaaaataaactcagtctattttgattattatcgttctggaat

SEQ ID NO: 859299 - DNA, 75 bp, synthetic construct
  source 1..75: mol_type = other DNA
atggcttgattatctggacgcactggaactggttgatccctccagtgctccagatattgaatggcctacgcctcc

SEQ ID NO: 859300 - DNA, 75 bp, synthetic construct
  source 1..75: mol_type = other DNA
cgctgcgagagaaaatcagcgcgctggatgaaaaattattagcattactggcagagcggcgcgaactggccgtcg

SEQ ID NO: 859301 - DNA, 75 bp, synthetic construct
  source 1..75: mol_type = other DNA
cagtaaacaatggcccggtaaagccgctattgatcgtctgaaagacgaggaactggcgcaatataatttgtggct

SEQ ID NO: 859302 - DNA, 75 bp, synthetic construct
  source 1..75: mol_type = other DNA
acttaaggatgattacattaatgcaaattcatggccagatgatgctctggctgtcagtgatgatgtttataatga

SEQ ID NO: 859303 - DNA, 75 bp, synthetic construct
  source 1..75: mol_type = other DNA
tcttggtattgtgcgtcaggtgaaagcggctaacccacaggcgaaatatttttgtgatccggtaatggggcatcc

SEQ ID NO: 859304 - DNA, 75 bp, synthetic construct
  source 1..75: mol_type = other DNA
cgctggtagattttggtatgcgtcagccggtcggtgttggtgatgtgacgagcggtttactgttggtgaaactgt

SEQ ID NO: 859305 - DNA, 75 bp, synthetic construct
  source 1..75: mol_type = other DNA
gcgcgaactcattgcgcaagggccacaaaatgtgttggttaaacacctggcgcgagctggctacagccgtgaccg

SEQ ID NO: 859306 - DNA, 75 bp, synthetic construct
  source 1..75: mol_type = other DNA
catcaatacccatcagtggcctggcaaagctgctattggtcgtctgaaaggtgacgagctggaacaatataattt

SEQ ID NO: 859307 - DNA, 75 bp, synthetic construct
  source 1..75: mol_type = other DNA
ctttggtttcagaagccaatacttacatcaatacccatcagtggcctggcaaagctgctattggtcgtctgaaag

SEQ ID NO: 859308 - DNA, 75 bp, synthetic construct
  source 1..75: mol_type = other DNA
atgaactcagtattcttttcacccggaagtaaaagtttttatctacaagaattgtttccagaatatgaggatgcg

SEQ ID NO: 859309 - DNA, 75 bp, synthetic construct
  source 1..75: mol_type = other DNA
gctgaaggacctggaacaagcgcgtgaactgggctataccgtagataaagaagagcatgttgtaggcctgaattg

SEQ ID NO: 859310 - DNA, 75 bp, synthetic construct
  source 1..75: mol_type = other DNA
ggagttgatgagcatcattctgcaaaccggtttgcagcagtttacgccaactacgcttgtggatatgcccacctt

SEQ ID NO: 859311 - DNA, 75 bp, synthetic construct
  source 1..75: mol_type = other DNA
cgctgctttatccgctggcggaagaggagttgatgagcatcattctgcaaaccggtttgcagcagtttacgccaa

SEQ ID NO: 859312 - DNA, 75 bp, synthetic construct
  source 1..75: mol_type = other DNA
atggaagttaagaccaaagaagactggctgtatcagtttcgccgttgttcatcccgggagacactagaaaaagtg

SEQ ID NO: 859313 - DNA, 75 bp, synthetic construct
  source 1..75: mol_type = other DNA
atttcccacacacgttataaacttacccctgtggagctggaatccttcaactctgcggtcgatcaccggctggca

SEQ ID NO: 859314 - DNA, 75 bp, synthetic construct
  source 1..75: mol_type = other DNA
aggtctgggatgaacagcaaaccgaattttcagccactgcgggtcagacctgcggaacggatggctgcagcattt

SEQ ID NO: 859315 - DNA, 75 bp, synthetic construct
  source 1..75: mol_type = other DNA
tgcttctgcacggactatgccgttgctggaaccgttacgtcaggcggcggagaaactggctcaggtgcaggcaga

SEQ ID NO: 859316 - DNA, 75 bp, synthetic construct
  source 1..75: mol_type = other DNA
gtaccgtttcagcaatgcatgtttaccctggtcatttaaccgactgcccgtggtgtacactggataatcaaggcg

SEQ ID NO: 859317 - DNA, 75 bp, synthetic construct
  source 1..75: mol_type = other DNA
atgaaatcaaccttgtataccgctactggcgagtgcgttacgccagaccgtgaactgggcaaaggtggcgaaggt

SEQ ID NO: 859318 - DNA, 75 bp, synthetic construct
  source 1..75: mol_type = other DNA
acattcgcggtcgctatgagtgctatacagacgttggaccatccttccagagcatgaaggaacagaatcgcgcag

SEQ ID NO: 859319 - DNA, 75 bp, synthetic construct
  source 1..75: mol_type = other DNA
ctgatgctgcaatacttcacgctgcttgacggtaaaggcgtcgagatgatgcgagagtacgcgaacaagcaactg

SEQ ID NO: 859320 - DNA, 75 bp, synthetic construct
  source 1..75: mol_type = other DNA
atgagcacatgtacggtggcgatgacgcctatccgtactatctcatcaatcgcactgatgaaaacggagctgatc

SEQ ID NO: 859321 - DNA, 75 bp, synthetic construct
  source 1..75: mol_type = other DNA
ccattgatatctggtcagatttagtctgcccgtggtgctggattgctaaaaaacgatttgaacaggggctgaaca

SEQ ID NO: 859322 - DNA, 75 bp, synthetic construct
  source 1..75: mol_type = other DNA
aggtatgggatgagcagcaaactgagttttcagccactgcgggtcagacctgcggaaccgaaggctgcagcattt

SEQ ID NO: 859323 - DNA, 75 bp, synthetic construct
  source 1..75: mol_type = other DNA
acggcgctaatcctgatgctgccgatgtgctgatggggatgtatcgtactgatatgcgccataacacggcaaaaa

SEQ ID NO: 859324 - DNA, 75 bp, synthetic construct
  source 1..75: mol_type = other DNA
actcctttcagattaacgccaatggcacactgcatttatgcgaagtcggcgtgtcgcattttacgccgccagagc

SEQ ID NO: 859325 - DNA, 75 bp, synthetic construct
  source 1..75: mol_type = other DNA
gaaccgcgttatattattttggttcctgtgctggcggctatctggattattggcagcctgacaagcaaagcgtac

SEQ ID NO: 859326 - DNA, 75 bp, synthetic construct
  source 1..75: mol_type = other DNA
cgccgccagagctgcaaaccttgccatcatttgtcggctttgaacgcacagaaaatcacgataattttggccttg

SEQ ID NO: 859327 - DNA, 75 bp, synthetic construct
  source 1..75: mol_type = other DNA
tcggttttatgatgccgaaggtttcaggtaaagaaccgattcatatgatctatagcccggcacatcgtcgtcaga

SEQ ID NO: 859328 - DNA, 75 bp, synthetic construct
  source 1..75: mol_type = other DNA
gatactgtcttttgggtggtgaaaccgcaaattgggcgtgaaggtattagcggcctgggtacgctgctctctggg

SEQ ID NO: 859329 - DNA, 75 bp, synthetic construct
  source 1..75: mol_type = other DNA
cacccgccttaaaacaggacaaacttgcctttatggctgcgacagctgacgcgcagttgttgaattatgtcgcct

SEQ ID NO: 859330 - DNA, 75 bp, synthetic construct
  source 1..75: mol_type = other DNA
tggtgggcggcatccttattccggtgtaccgcttatctctgatgcgggtaatgcactggagacggatattgccca

SEQ ID NO: 859331 - DNA, 75 bp, synthetic construct
  source 1..75: mol_type = other DNA
tgatttttcacgtcttgtttggtgggcggcatccttattctggtgtgccgcttatctctgatgcgggtaatgcgc

SEQ ID NO: 859332 - DNA, 75 bp, synthetic construct
  source 1..75: mol_type = other DNA
gctatctggattattggcagcctgacaagcaaagcgtacaaagcagaagtccagcgacgaagagaggcttttaat

SEQ ID NO: 859333 - DNA, 75 bp, synthetic construct
  source 1..75: mol_type = other DNA
caacaggtgaattgaccactcttggccgtgaactgggcaaaggtggtgaaggcgcggtttatgatatcgaggagt

SEQ ID NO: 859334 - DNA, 75 bp, synthetic construct
  source 1..75: mol_type = other DNA
gccagatccagcaggtgggtgggctggaaggttttatcaccaaacgaacgatgcttgaaaaaatgaaggacgagc

SEQ ID NO: 859335 - DNA, 75 bp, synthetic construct
  source 1..75: mol_type = other DNA
tctctacgccaacagttaaagaaatgtaccgtttcagcaatgcatgtttaccccgctcatttgactgactgcccg

SEQ ID NO: 859336 - DNA, 75 bp, synthetic construct
  source 1..75: mol_type = other DNA
cctgcgcgtaaagcggcgttacggtcttttggtattgaaacagccgcggatgttacccgtcgtggggttaagcaa

SEQ ID NO: 859337 - DNA, 75 bp, synthetic construct
  source 1..75: mol_type = other DNA
tgccgattggtccgatctcctacatggaaaaccctgaagtgccgcaagccaacgcttacatgcttgaggcagcca

SEQ ID NO: 859338 - DNA, 75 bp, synthetic construct
  source 1..75: mol_type = other DNA
atgaacaacagattacgttttgaagtgaacgataaccaggggcgtttcgtatttccggatacctggtttggccca

SEQ ID NO: 859339 - DNA, 75 bp, synthetic construct
  source 1..75: mol_type = other DNA
ttgcagcagtttgttgaggaactcaacgatccgcgtgtgtcgtatacgcataattccaccaactccggggcctgc

SEQ ID NO: 859340 - DNA, 75 bp, synthetic construct
  source 1..75: mol_type = other DNA
tttttaaaactgatatcattgattctgattatataaaagggtattttaatgtttttaaaagacatggttatataa

SEQ ID NO: 859341 - DNA, 75 bp, synthetic construct
  source 1..75: mol_type = other DNA
cgcctttaacgaactggtgaataagctgagtcatgaagacagccgacaggactaccgccagcgtgcaacaggcgg

SEQ ID NO: 859342 - DNA, 75 bp, synthetic construct
  source 1..75: mol_type = other DNA
ctacaaacacttacatcgcggaaatgctgtgcggaaattggcatccatttccacttgctgtgcggcataacttct

SEQ ID NO: 859343 - DNA, 75 bp, synthetic construct
  source 1..75: mol_type = other DNA
cattcagatgaattctcaccttgctggtatgaactcggtcttcttcattttcttaatggggaactggtaaaagct

SEQ ID NO: 859344 - DNA, 75 bp, synthetic construct
  source 1..75: mol_type = other DNA
cactcgttaccacaaagcctcagaattttccttggtatgatgaggaaaaaagaattaaatattcaaatgctttat

SEQ ID NO: 859345 - DNA, 75 bp, synthetic construct
  source 1..75: mol_type = other DNA
tctggtcgtcagcatactcacgacgcgccacgcacccgcacacaagacgcgatcgacgttaagttacgcgcttaa

SEQ ID NO: 859346 - DNA, 75 bp, synthetic construct
  source 1..75: mol_type = other DNA
atgagcacacgcaagaaaaaaacggcggtctctgacgaggccgtgattgaggctatccgtgatgcgcttgaggac

SEQ ID NO: 859347 - DNA, 75 bp, synthetic construct
  source 1..75: mol_type = other DNA
gcttgttaactgaaggacagttaaatcaaaataaaaaggaaatgtcagataaattattcagacctacaacgaatt

SEQ ID NO: 859348 - DNA, 75 bp, synthetic construct
  source 1..75: mol_type = other DNA
tgagacgaagcagcatgacggttctggtcaacgtaattatggttgcagtcgtggggcagggcgtcttctggatgg

SEQ ID NO: 859349 - DNA, 75 bp, synthetic construct
  source 1..75: mol_type = other DNA
caggaagaacgcctgtctgagctggagacagccctgcaggcacagctgaccgcctttaacgaactggtggacaag

SEQ ID NO: 859350 - DNA, 75 bp, synthetic construct
  source 1..75: mol_type = other DNA
cctctatgcggcaatcctggcaaatgcacatttacggcgtcatcaggatgccatcatgctcattgaaaaaatact

SEQ ID NO: 859351 - DNA, 75 bp, synthetic construct
  source 1..75: mol_type = other DNA
tgtcagaagagaacggcgttactggtctgtatggcggcgacaacgcaggtatcgttgttgaaaacattggtactg

SEQ ID NO: 859352 - DNA, 75 bp, synthetic construct
  source 1..75: mol_type = other DNA
catcaccgaatcaaccatgatcggtcacaacccgcggagtggggctgggcgtagggctcaccatcactccgcaag

SEQ ID NO: 859353 - DNA, 75 bp, synthetic construct
  source 1..75: mol_type = other DNA
tccacttgctgtgcggcataacttctccggctctctggatacggcagaagattactatgcaacatactcaccatt

SEQ ID NO: 859354 - DNA, 75 bp, synthetic construct
  source 1..75: mol_type = other DNA
caatatcgcggacaattcgatgttgttcgcccggtggtcaggaaactggtcgcagagatgcgccgtaaccctatc

SEQ ID NO: 859355 - DNA, 75 bp, synthetic construct
  source 1..75: mol_type = other DNA
ctttaaacggtttgaacaaagtggcgtgacagttaaaggctgtattcttaatggtgttattaagaaagctagcag

SEQ ID NO: 859356 - DNA, 75 bp, synthetic construct
  source 1..75: mol_type = other DNA
tccaccactaacaacaaagccttcgacggcattccacgcctgatgcacgcagatcagaagatcgacattgcaggt

SEQ ID NO: 859357 - DNA, 75 bp, synthetic construct
  source 1..75: mol_type = other DNA
agttgctgattgtgctggggacctcttcttccgaatcggcgctgccgcgtatgctcgacaaaatggagaaactcg

SEQ ID NO: 859358 - DNA, 75 bp, synthetic construct
  source 1..75: mol_type = other DNA
catgcgtctggcgcctattggtgcgttcggggcaatggcgtttaccatcggtaaatacggcgtcggcacactggt

SEQ ID NO: 859359 - DNA, 75 bp, synthetic construct
  source 1..75: mol_type = other DNA
caggcggtccggatactgctgaagattattatgccacataccacccgttatgggggcaatatccggaagcattgc

SEQ ID NO: 859360 - DNA, 75 bp, synthetic construct
  source 1..75: mol_type = other DNA
tgtttgtaaactggctctgtaaccattccgctgtgctgcatgaacgggcagaaatcatgaaatgcgccgaaatgc

SEQ ID NO: 859361 - DNA, 75 bp, synthetic construct
  source 1..75: mol_type = other DNA
tgaacgataaccaggggtggttcgtattcccggacgcctggttcggcccgttgctggatgagtttgacgaactgc

SEQ ID NO: 859362 - DNA, 75 bp, synthetic construct
  source 1..75: mol_type = other DNA
aacgttatcgaaagtttctcgcaggtcatcttcggcatcatcaatatgatcatgcgtctggcacccatcggtgcg

SEQ ID NO: 859363 - DNA, 75 bp, synthetic construct
  source 1..75: mol_type = other DNA
aagaagatattaccgatccgcagatgtatgcgctgcgcaaccatcagttatcgactgaacaaattcatgcgttgt

SEQ ID NO: 859364 - DNA, 75 bp, synthetic construct
  source 1..75: mol_type = other DNA
gtttacggcctgccgggaaattggtgccggaatgaatcaggttaaccgtattgtggaaaccatcatccagatact

SEQ ID NO: 859365 - DNA, 75 bp, synthetic construct
  source 1..75: mol_type = other DNA
cgtctgctggagatgacgcgctttttcaccctgtttgataaaaagaccgggaagattgtcgcccgctatcagcag

SEQ ID NO: 859366 - DNA, 75 bp, synthetic construct
  source 1..75: mol_type = other DNA
tgattgaacatgaactgtgcgacgatccctatgctcaggaggcattctcaaaactcctgcgtatggttattgaag

SEQ ID NO: 859367 - DNA, 75 bp, synthetic construct
  source 1..75: mol_type = other DNA
tcctcagcaaggcgctgattcttcatgacagcctgaagcggtgtcgtatcgtggtggtgacggaccgtatcgatc

SEQ ID NO: 859368 - DNA, 75 bp, synthetic construct
  source 1..75: mol_type = other DNA
tggtctgagcgatgcgcaaaaggctgacctcaagcgtaagtatgctcgtaaaggtgaggtttacagtgcagatga

SEQ ID NO: 859369 - DNA, 75 bp, synthetic construct
  source 1..75: mol_type = other DNA
acgaagggatatcccagagtatccgcaaccagctcaacgatgaaatcccgcagctgtttgcttacagccagatat

SEQ ID NO: 859370 - DNA, 75 bp, synthetic construct
  source 1..75: mol_type = other DNA
ccggttcttcgtgaggagttgtcgaagcgttcctttatggcgggtggcaaaacctgccagttatcggaaaaagca

SEQ ID NO: 859371 - DNA, 75 bp, synthetic construct
  source 1..75: mol_type = other DNA
cggcgctgttcgccaaaaaagagcagtccgatgacgcccgattctctgatgtgcataaggccgtggagctggtcg

SEQ ID NO: 859372 - DNA, 75 bp, synthetic construct
  source 1..75: mol_type = other DNA
agactcctgcgtatggcaatcgaagaggctgaaaaactgttcgaccatccacttaagcagtacctcttattccgt

SEQ ID NO: 859373 - DNA, 75 bp, synthetic construct
  source 1..75: mol_type = other DNA
tctacggtatcgccgtcacggagtttgtcgatggcaagaaggtgaaccccaccattgcgctgattgactgggaac

SEQ ID NO: 859374 - DNA, 75 bp, synthetic construct
  source 1..75: mol_type = other DNA
tacggaacaagaccgaaacctctataaagaaaccgtaaaacagatgtccagcctgcgccagtgggcgatgcaggt

SEQ ID NO: 859375 - DNA, 75 bp, synthetic construct
  source 1..75: mol_type = other DNA
gccgcatctgtataaccagctgtgggccatatttgccggtgttaaaaacaaaaatgatactgagcagttacgtgc

SEQ ID NO: 859376 - DNA, 75 bp, synthetic construct
  source 1..75: mol_type = other DNA
attgccgggcacgccatcgccgccggggcgatactggtgacgaataatacaagagaatttgagcgggtgcctgac

SEQ ID NO: 859377 - DNA, 75 bp, synthetic construct
  source 1..75: mol_type = other DNA
gccaccggcccgaaggcctccccgcgccacgtccagctggtcgacgcgttctgcgcccgcctcgatgccatcctg

SEQ ID NO: 859378 - DNA, 75 bp, synthetic construct
  source 1..75: mol_type = other DNA
atgccattgccgccggcgcggtgctggtgacgaacaatgtgagagagtttgagcgggtacctgacctgaagctgg

SEQ ID NO: 859379 - DNA, 75 bp, synthetic construct
  source 1..75: mol_type = other DNA
gtgctacgcggccaccgtatagtggtctcggccatcacctactctgaaatgcgcttcggggctaccggcccaaag

SEQ ID NO: 859380 - DNA, 75 bp, synthetic construct
  source 1..75: mol_type = other DNA
gtgctgcgcggtcaccgtatcgtggtctcggccatcacctactccgagatgcgcttcggcgccaccggtccaaag

SEQ ID NO: 859381 - DNA, 75 bp, synthetic construct
  source 1..75: mol_type = other DNA
gccatattcagctggtcgacgcgttctgcgcgcgcctcgatgccatcctgccctgggaccgggctgcggtggacg

SEQ ID NO: 859382 - DNA, 75 bp, synthetic construct
  source 1..75: mol_type = other DNA
catgcagttcgaccgcggctacctgtcgccgtacttcatcaacaacccgcagtcgatgcaggccgagctggagga

SEQ ID NO: 859383 - DNA, 75 bp, synthetic construct
  source 1..75: mol_type = other DNA
caaccagttcaacgatgaaatcccgcagctgtttgtctacagccagttattactttcgattaacggtcatgacgg

SEQ ID NO: 859384 - DNA, 75 bp, synthetic construct
  source 1..75: mol_type = other DNA
actgatgaccctgctagtctgggcactgaaatgctgacattcagcgccagtgcagctcataacccgctggcaaac

SEQ ID NO: 859385 - DNA, 75 bp, synthetic construct
  source 1..75: mol_type = other DNA
gaccgacgatgcgcgcttctctgatgtgcataaagccgtagagctggtcgctactgagcagcagctcctgagcga

SEQ ID NO: 859386 - DNA, 75 bp, synthetic construct
  source 1..75: mol_type = other DNA
gcctcaccacgtcacgtccaactggtcgatgaattctgcccccgcctcgatgccatcctgccctgggatcgcgcc

SEQ ID NO: 859387 - DNA, 75 bp, synthetic construct
  source 1..75: mol_type = other DNA
tatcagcattacccactccttatgaccaatcccagcaaatcgatatggagagtcttcgaaaactgatccgtttta

SEQ ID NO: 859388 - DNA, 75 bp, synthetic construct
  source 1..75: mol_type = other DNA
aaaatcgacagcaagaagccgcagccgagcacgactgaaatcgtgctgacagcaccggaatatagcgctacttat

SEQ ID NO: 859389 - DNA, 75 bp, synthetic construct
  source 1..75: mol_type = other DNA
cagagttaatgaatggtggttcagtggtggctgacaacaccattgttgctcaaggaaaccagttgattgaaggaa

SEQ ID NO: 859390 - DNA, 75 bp, synthetic construct
  source 1..75: mol_type = other DNA
ctttctctccgaaaatcgccccttttctatacgatctgaaaaatgaatttacgcaaatgaatgtgtttgcaatgg

SEQ ID NO: 859391 - DNA, 75 bp, synthetic construct
  source 1..75: mol_type = other DNA
cacctccggcgggaaatacgggagcgttacggacaaggccaccggcgctgaaaaagaccaggtcctgaaggatat

SEQ ID NO: 859392 - DNA, 75 bp, synthetic construct
  source 1..75: mol_type = other DNA
aggaacggcgcatgccgggctgcaggacgatatgaattcgttcttcaacgatatgagttatgccagcaacaccac

SEQ ID NO: 859393 - DNA, 75 bp, synthetic construct
  source 1..75: mol_type = other DNA
cgttctatgcccgcacaggaaacaaaaatatccagctgatatccatcagcctgccgtccatcaacgccggatgtg

SEQ ID NO: 859394 - DNA, 75 bp, synthetic construct
  source 1..75: mol_type = other DNA
gtgctgttccgtggctatcgggtaggttcggttgaaaccagcaccttcgatacgcaaaaacgcaatatcagctat

SEQ ID NO: 859395 - DNA, 75 bp, synthetic construct
  source 1..75: mol_type = other DNA
cggtatggaaaaattgctgcataaagataccgtcttttgggtggtgaaaccgcagattggtcgagaagggattag

SEQ ID NO: 859396 - DNA, 75 bp, synthetic construct
  source 1..75: mol_type = other DNA
attcgttttgtatgatgatcagaagggcattcaggattcactgtataccgatcacattgattatctgatgttctt

SEQ ID NO: 859397 - DNA, 75 bp, synthetic construct
  source 1..75: mol_type = other DNA
gttatcagattatcccgaccgttagcggcggcctggcgcaaatccagcaacgactgatggaagcgttggataaga

SEQ ID NO: 859398 - DNA, 75 bp, synthetic construct
  source 1..75: mol_type = other DNA
tttcgttttgtatgatgatcagaagagcattcaggattcgctgtacaccgatcacattgattatctgatgttctt

SEQ ID NO: 859399 - DNA, 75 bp, synthetic construct
  source 1..75: mol_type = other DNA
gttgatctcacgtcagcgggaatgcgcgtggagatgggttcgttgacaacgctactcagcggcggtgtcagcttt

SEQ ID NO: 859400 - DNA, 75 bp, synthetic construct
  source 1..75: mol_type = other DNA
attatggcgtttgtgaagcagacgatggccaacgcggccgggtattttttcgacctcgcgctggaaactaccgtg

SEQ ID NO: 859401 - DNA, 75 bp, synthetic construct
  source 1..75: mol_type = other DNA
ggccaaaggtacccgcttcctgtggcagtacagcgacaaatggatgactgagtcccggcaggaaaagctgatgtg

SEQ ID NO: 859402 - DNA, 75 bp, synthetic construct
  source 1..75: mol_type = other DNA
aaatgccgcgaaaacgataggaaaaaggctgtacgggatcctgaatgcgatgcgacacagtgtctcaaacggaaa

SEQ ID NO: 859403 - DNA, 75 bp, synthetic construct
  source 1..75: mol_type = other DNA
tggcaaaggatatctggaacaggccatggagcgaggaaagacggagtgactggcagagatggttggcgctggcgg

SEQ ID NO: 859404 - DNA, 75 bp, synthetic construct
  source 1..75: mol_type = other DNA
attggacctttcccaactggtatcatgtcagaatgaggactcgacaggccaaaactatgattatctgaaaatatt

SEQ ID NO: 859405 - DNA, 75 bp, synthetic construct
  source 1..75: mol_type = other DNA
atgcgtaaatattatcccctctttaagaaaagcacagccctcaggggctgtgttttattcacacttataatggca

SEQ ID NO: 859406 - DNA, 75 bp, synthetic construct
  source 1..75: mol_type = other DNA
ctacagccctcaggggctgtattttattcacacttataatggcatattcccagccatcgtttgcactgttgtgca

SEQ ID NO: 859407 - DNA, 75 bp, synthetic construct
  source 1..75: mol_type = other DNA
ggacggtgagggtggtatgccgggagtggagcgtcacagataacgccaggtacagtgatttcagttgcacgatag

SEQ ID NO: 859408 - DNA, 75 bp, synthetic construct
  source 1..75: mol_type = other DNA
cagcaaatccgctttatccgccagcaggtctcctcaaaaatgagcgatcgcgtgctcggtaactatcagttcagc

SEQ ID NO: 859409 - DNA, 75 bp, synthetic construct
  source 1..75: mol_type = other DNA
gagagagagaagcagttcatcaacagcacctccattcccatcctgtcctggatagtggatcagtcatccctgagt

SEQ ID NO: 859410 - DNA, 75 bp, synthetic construct
  source 1..75: mol_type = other DNA
aagttgaccttccgtcctatcccggagggccggtaacagtccctcttactgtacgttgcgaccagccacagtcgg

SEQ ID NO: 859411 - DNA, 75 bp, synthetic construct
  source 1..75: mol_type = other DNA
taacagaaaaatcagagtggtgtgtcgaacgtggtcagcgacagaacatatcacctatacagatttttcgtgtca

SEQ ID NO: 859412 - DNA, 75 bp, synthetic construct
  source 1..75: mol_type = other DNA
gtggcatggtggttaccgtgcctttttgtggcgaccaccgaaacataaccggacggtgagggtggtgtgccggga

SEQ ID NO: 859413 - DNA, 75 bp, synthetic construct
  source 1..75: mol_type = other DNA
gaagggaaagatttcaaagagattgacctgctggcacgccagtctgagcgccacgcacggatcggcaagtttaac

SEQ ID NO: 859414 - DNA, 75 bp, synthetic construct
  source 1..75: mol_type = other DNA
gatattctgatcctgacgctgctcgttatccagtgcgcgctgggtctgctgaccatcccgttctccgcccagcat

SEQ ID NO: 859415 - DNA, 75 bp, synthetic construct
  source 1..75: mol_type = other DNA
tcgcgtttggtgcacatctggagtgtcccggtggagtatctgacacgtaagtatcagctggtgcgcgctcgccac

SEQ ID NO: 859416 - DNA, 75 bp, synthetic construct
  source 1..75: mol_type = other DNA
cattttagcggcggggcacgccgttcttgcctgtggagagatggtgcagtcaggccgcccgttgaagcaggaacc

SEQ ID NO: 859417 - DNA, 75 bp, synthetic construct
  source 1..75: mol_type = other DNA
cgtgctgtggtcatacagcgaaagaaaatcgcctgtcacaaagtcaattcagatgccaggtatgtggatatacag

SEQ ID NO: 859418 - DNA, 75 bp, synthetic construct
  source 1..75: mol_type = other DNA
tacagcgaaagaaaatcgcctgtcacaaagtaaattcagatgccaggtatgtggatatacagcgaacgccgatgt

SEQ ID NO: 859419 - DNA, 75 bp, synthetic construct
  source 1..75: mol_type = other DNA
aactttctggtggtcagcgccagcgggttgctatcgccagagcactggtgaacgaaccgcgtgtgttgttgctgg

SEQ ID NO: 859420 - DNA, 75 bp, synthetic construct
  source 1..75: mol_type = other DNA
agactgccctgctggcacagcagaccgcctttaacgaactggtggacaagctgagccaagaagacagccgccagg

SEQ ID NO: 859421 - DNA, 75 bp, synthetic construct
  source 1..75: mol_type = other DNA
gtcaggtcacgggtgttgtgaaaaatgtcactgtcagccagtcctgcggtaagtggtacatcagtattcagacag

SEQ ID NO: 859422 - DNA, 75 bp, synthetic construct
  source 1..75: mol_type = other DNA
ttcaattttatcagatatctacatgcaagaattcgacataataataaaagaaatgaatgaggtttttttatataa

SEQ ID NO: 859423 - DNA, 75 bp, synthetic construct
  source 1..75: mol_type = other DNA
agtcctgcggtaagtggtacatcagtattcagacagaaagtgaagtatcaactccggatcacccttcagcatcaa

SEQ ID NO: 859424 - DNA, 75 bp, synthetic construct
  source 1..75: mol_type = other DNA
tggtcatacagcgaaagaaaatcgcctgtcacaaagtcaaattcagatgccaggtatgtggatatacagcgaacg

SEQ ID NO: 859425 - DNA, 75 bp, synthetic construct
  source 1..75: mol_type = other DNA
gtccctgtttgcccgtgtcacggcgctgtttaccaaaaaagagcagtccgatgacgcccggttctctgatgtgca

SEQ ID NO: 859426 - DNA, 75 bp, synthetic construct
  source 1..75: mol_type = other DNA
cagcttgcgtacaagcagctctggcgtggcggtcaggtgcttgctgttccgccagcgtatacaagccagcgttgc

SEQ ID NO: 859427 - DNA, 75 bp, synthetic construct
  source 1..75: mol_type = other DNA
aaaccgcaataaaatgctgaaggctcaggggattaacgagacgttgtttatggcattgattacgctggagtctca

SEQ ID NO: 859428 - DNA, 75 bp, synthetic construct
  source 1..75: mol_type = other DNA
ctcgagcaaatcacccgcaaattgctctcccgtctcgaccagatggaacaagacggtgtggttctcgaagcgatg

SEQ ID NO: 859429 - DNA, 75 bp, synthetic construct
  source 1..75: mol_type = other DNA
atcgccgttgcctgcatctgcaattaacggaaaaaggtcatgagtttttgcgcgaggttctaccaccgcagcata

SEQ ID NO: 859430 - DNA, 75 bp, synthetic construct
  source 1..75: mol_type = other DNA
ggattacggtgatttcagcgttacgttgcagcactccaaagtcagcgattctgtactggcaagcgagattcaggg

SEQ ID NO: 859431 - DNA, 75 bp, synthetic construct
  source 1..75: mol_type = other DNA
tggtgagccgaaaagcgtgcaggcaacggcgagtttgctggcaaacggcgttgacgcccacggcgtggtggtgat

SEQ ID NO: 859432 - DNA, 75 bp, synthetic construct
  source 1..75: mol_type = other DNA
gcggtcagtcgcattaccgccaaactgctgaccgagatccgccgccagacaggggtcgtttttccggctgatagc

SEQ ID NO: 859433 - DNA, 75 bp, synthetic construct
  source 1..75: mol_type = other DNA
aatgcgcaccggccactggcattaaccgatgatcttgatgcggaatttacctggcgtgagccccggcgggtttca

SEQ ID NO: 859434 - DNA, 75 bp, synthetic construct
  source 1..75: mol_type = other DNA
tgactttccgtaaagagctggaaaaaattctgcgtgacccggcactgagccagacgctgcgtgatgaattgcgtg

SEQ ID NO: 859435 - DNA, 75 bp, synthetic construct
  source 1..75: mol_type = other DNA
cagcgaacgccgatgtaaatggcgctcgtaacattttagcggtggggcacgccgttcttgcctgtggagagatgg

SEQ ID NO: 859436 - DNA, 75 bp, synthetic construct
  source 1..75: mol_type = other DNA
gttccatactcgcccgctggaagaagaagcggacaccagtaactacgcgctgatcccaacagcagaagttcctct

SEQ ID NO: 859437 - DNA, 75 bp, synthetic construct
  source 1..75: mol_type = other DNA
aaactatgtcccgtatctggttaaccaggacacgctgtacggtactggtcagttgccgaaatttgctggtgacct

SEQ ID NO: 859438 - DNA, 75 bp, synthetic construct
  source 1..75: mol_type = other DNA
tacgagaacgctaccgcgattttagccccacgctggcacgggaaaaactagaggaagttcacggtctgatcttgg

SEQ ID NO: 859439 - DNA, 75 bp, synthetic construct
  source 1..75: mol_type = other DNA
agtaggaaaaatagaaatttatacatattcaggaaatcttatttttgaacagtataaaacacctcagattgttta

SEQ ID NO: 859440 - DNA, 75 bp, synthetic construct
  source 1..75: mol_type = other DNA
ctatcgtcagcaacgtgattcggtcgacctgaacctggaggctaaagccgttcttgagcagattgttaatgttga

SEQ ID NO: 859441 - DNA, 75 bp, synthetic construct
  source 1..75: mol_type = other DNA
gtggatgccgtaggttcagcctctcaggtgacccagaacagcggtggcgcaattgttaccaataccagtgctgtc

SEQ ID NO: 859442 - DNA, 75 bp, synthetic construct
  source 1..75: mol_type = other DNA
ctgttgaccctgttgaccctgttgaccccgttgaccccgttgaccccgttgaccccgttgttccggtacgtcacc

SEQ ID NO: 859443 - DNA, 75 bp, synthetic construct
  source 1..75: mol_type = other DNA
agggacgttgtatttctttaataacagtaacgctacttttgcaaatatcctcacgggtacggggaacctgattca

SEQ ID NO: 859444 - DNA, 75 bp, synthetic construct
  source 1..75: mol_type = other DNA
tgagctcaacaaagtgatccagcattttggcaaaggaggctttgatgtgattactcgcggtcaggtgccacctaa

SEQ ID NO: 859445 - DNA, 75 bp, synthetic construct
  source 1..75: mol_type = other DNA
gcagccagtgaaaccgaaaaaagcgttgaacgtggtgcttggttttattcttgtgtcaacgacggatgaaaagtg

SEQ ID NO: 859446 - DNA, 75 bp, synthetic construct
  source 1..75: mol_type = other DNA
tgaaagagttaggtgaaatcacccgttcgatgaaggtgttgggctgttacccaagcgagaatgtggtgcctgtcg

SEQ ID NO: 859447 - DNA, 75 bp, synthetic construct
  source 1..75: mol_type = other DNA
acccgtctggaatcacgcccgattcacggtaatccatgggaagagatgttttatctggatattcaggccaatctt

SEQ ID NO: 859448 - DNA, 75 bp, synthetic construct
  source 1..75: mol_type = other DNA
gtggttgtgccaaatttgctgatatttttaatcaggtggaaacaggtcaggccgactatgccgtcgtaccgattg

SEQ ID NO: 859449 - DNA, 75 bp, synthetic construct
  source 1..75: mol_type = other DNA
tacagactgtttttgatggcggaagtgttaatggcacgatcattgatggtggggagcagcacatttccagtgggg

SEQ ID NO: 859450 - DNA, 75 bp, synthetic construct
  source 1..75: mol_type = other DNA
atgagtattgccgcaggtggtagtggaacgggaataattcaaaataatggtggcgcaatcagagcgaacacatcg

SEQ ID NO: 859451 - DNA, 75 bp, synthetic construct
  source 1..75: mol_type = other DNA
gcgtattgaagcgaatcagcgacaaaacttcacccgatttgtggtgttggcacgtaaagccattaacgtgtctga

SEQ ID NO: 859452 - DNA, 75 bp, synthetic construct
  source 1..75: mol_type = other DNA
ggagcggtttttttgtggttatctctattgccgccgggatttcggccttgctattactgccctttttgaatgctc

SEQ ID NO: 859453 - DNA, 75 bp, synthetic construct
  source 1..75: mol_type = other DNA
atctggtcacggcgaatacggcagtgacaatgtttgaactgggcggatttatcggtgcgctggtagcgggttggg

SEQ ID NO: 859454 - DNA, 75 bp, synthetic construct
  source 1..75: mol_type = other DNA
ggtaacgtggttcaaaataaaggaaacctgtatttcctcaacaacagtgcggcgacctttgcaggtgccctgacg

SEQ ID NO: 859455 - DNA, 75 bp, synthetic construct
  source 1..75: mol_type = other DNA
acggtaaacggcgggtctcagtatatctacagcggcggtagtgcaactgacaccacgctcaactccggtggctat

SEQ ID NO: 859456 - DNA, 75 bp, synthetic construct
  source 1..75: mol_type = other DNA
aaattaaactgcatgaaaaactatctaaaaacgacattctgaatgtcttagcagaacatatgacgatgcttgagg

SEQ ID NO: 859457 - DNA, 75 bp, synthetic construct
  source 1..75: mol_type = other DNA
gctttagcattgccggtggcagtgccgttaatatgctgctggagaatggtggatacctgagtgttaatagtggtc

SEQ ID NO: 859458 - DNA, 75 bp, synthetic construct
  source 1..75: mol_type = other DNA
gacgatgtttgaactgggcggatttatcggtgcgctggtagcgggttggggctcggacaaactgtttaacggcaa

SEQ ID NO: 859459 - DNA, 75 bp, synthetic construct
  source 1..75: mol_type = other DNA
acgtgctggtttacgtggttcgtgcagcgattaacgactggggcaacttgtacatgtccgagacgctgggcgtcg

SEQ ID NO: 859460 - DNA, 75 bp, synthetic construct
  source 1..75: mol_type = other DNA
ctggcgtgctaagtcgtagcgatatcggcctgttagcaaccctgttttacatcacctacggcttgtcgaagtttg

SEQ ID NO: 859461 - DNA, 75 bp, synthetic construct
  source 1..75: mol_type = other DNA
atcggtgcgctggtagcgggttggggctcggacaaactctttaacggcaaccgcgggccgatgaatttaattttc

SEQ ID NO: 859462 - DNA, 75 bp, synthetic construct
  source 1..75: mol_type = other DNA
gttaaccgcctggtattctcgtaccgagcgcggcggttggtgggcattatggaatacggcgcataacgtgggagg

SEQ ID NO: 859463 - DNA, 75 bp, synthetic construct
  source 1..75: mol_type = other DNA
tggcgactggcggcacgatacgctggaaatgactcagcaacaagaaggggcaggattgacgcgtaaggaaatcct

SEQ ID NO: 859464 - DNA, 75 bp, synthetic construct
  source 1..75: mol_type = other DNA
atgttgccgtttctgaaagcgccagctgacgcgccgttgattagcgataaacatgaaattgatgcccgctatcgc

SEQ ID NO: 859465 - DNA, 75 bp, synthetic construct
  source 1..75: mol_type = other DNA
atagccgtcaggtcacgggagttgtgaaaaatgtcactgtcagccagtcctgcggtaagtggtacatcagtattc

SEQ ID NO: 859466 - DNA, 75 bp, synthetic construct
  source 1..75: mol_type = other DNA
caggtgcttgctgttccgccagcgtagacaagccagcgttgcgcgtcctgtggtcatacagcgaaagaaaatcgc

SEQ ID NO: 859467 - DNA, 75 bp, synthetic construct
  source 1..75: mol_type = other DNA
caggtgcttgctgttccgccagcgtatacaagccagcgttgcgcgtactgtggtcatacagcgaaagataatcgc

SEQ ID NO: 859468 - DNA, 75 bp, synthetic construct
  source 1..75: mol_type = other DNA
ccatccgcccccgccggcgtgaacctctgtgggccgtcaccgacgaaaccatgcggaactggctgaagcaggccg

SEQ ID NO: 859469 - DNA, 75 bp, synthetic construct
  source 1..75: mol_type = other DNA
gcgtgcgatgaggtttgaaaatgcaaatggagacgatattttgctttatcctggagttgcagtcataccacgagc

SEQ ID NO: 859470 - DNA, 75 bp, synthetic construct
  source 1..75: mol_type = other DNA
ccctcacagccattgcaacagtcactgaaagaccttgagcgggcttacaaaaacttcttccggaagcgggctgct

SEQ ID NO: 859471 - DNA, 75 bp, synthetic construct
  source 1..75: mol_type = other DNA
ttggtacgattggtgtgatcgtcggcgctgaaatcccgatgttccttggctcgatgattatggggccgctcggtg

SEQ ID NO: 859472 - DNA, 75 bp, synthetic construct
  source 1..75: mol_type = other DNA
cacttcctcggtgggatccacgaactgtatttcccatatgtgctgatgaagccgctgaccattattgccatgatt

SEQ ID NO: 859473 - DNA, 75 bp, synthetic construct
  source 1..75: mol_type = other DNA
gcgtgaaacgtgtgacggataaaccactgatattgattaataactatattggcgatccaaaactcgacactttat

SEQ ID NO: 859474 - DNA, 75 bp, synthetic construct
  source 1..75: mol_type = other DNA
caggtgcttgctgttccgccagcgtaaacaagccagcgttgcgcgttctgtggtcatacagcgaaagataatcgc

SEQ ID NO: 859475 - DNA, 75 bp, synthetic construct
  source 1..75: mol_type = other DNA
agcgtcctcttctggtatatgcccgaccagcgacatcacatgctgttcaccactatgtggaacactggtattcgt

SEQ ID NO: 859476 - DNA, 75 bp, synthetic construct
  source 1..75: mol_type = other DNA
atgcatgttcacctggtctttgtcaccagataccgacgtcagatttttgaccatgacgcgacagaaaaactacgc

SEQ ID NO: 859477 - DNA, 75 bp, synthetic construct
  source 1..75: mol_type = other DNA
ccgtcagtcatgttgccagaacgctctgcagtacccgctcatccattggtcgctggattaactggttcacgctgt

SEQ ID NO: 859478 - DNA, 75 bp, synthetic construct
  source 1..75: mol_type = other DNA
gctggatatggctgccacgctggcagtgcctttcacaggtgacgggcgggatgccgcggagatccttcgttccct

SEQ ID NO: 859479 - DNA, 75 bp, synthetic construct
  source 1..75: mol_type = other DNA
tggccacctccacgggggccacaccggcctacctgctggccccggaagtgagtgcccttctcttctatatgccgg

SEQ ID NO: 859480 - DNA, 75 bp, synthetic construct
  source 1..75: mol_type = other DNA
ccgtcacttccggctggtactgaccacgcaggcgctgcgggcagaagaggcccggcagaaggccacttccggcgg

SEQ ID NO: 859481 - DNA, 75 bp, synthetic construct
  source 1..75: mol_type = other DNA
gagttatatggatatcaaagatattttatgcctaaaggtcctttcactggattcccatttgaatttcaagaggta

SEQ ID NO: 859482 - DNA, 75 bp, synthetic construct
  source 1..75: mol_type = other DNA
tcaccacccggccccggccccggcgccgtgcaccgttatgggctgtgacggatgaaacgatgcggaactggctga

SEQ ID NO: 859483 - DNA, 75 bp, synthetic construct
  source 1..75: mol_type = other DNA
attcaccagaacgcctcaccctgttgccgatcgcaccaggggttgattttgcgaccgcggtggcactccgccgga

SEQ ID NO: 859484 - DNA, 75 bp, synthetic construct
  source 1..75: mol_type = other DNA
ggcagcaattgatgtggtaagcactcaccagggatacgctaagcgctacggttttatttatgtcgatcgcggcga

SEQ ID NO: 859485 - DNA, 75 bp, synthetic construct
  source 1..75: mol_type = other DNA
aaaatgacgtgatttctaaggtctatcttcacctcgtccagcattgggacgttcaggagtttcttgaagtattcg

SEQ ID NO: 859486 - DNA, 75 bp, synthetic construct
  source 1..75: mol_type = other DNA
aagtactacttcacatgcgatagcgagaatgacgtgatttctaaggtctatcttcacctcgtccagcattgggac

SEQ ID NO: 859487 - DNA, 75 bp, synthetic construct
  source 1..75: mol_type = other DNA
ggcaggcgctgccggaagagcttcgcctgagtccgcatcgttatctggcgacgaacagtccgcaggggccgtggt

SEQ ID NO: 859488 - DNA, 75 bp, synthetic construct
  source 1..75: mol_type = other DNA
tgcgatggagagtcaggcaaacactgtctataaactggctcaagccagaaacatcgatgacaaagcagtgatgga

SEQ ID NO: 859489 - DNA, 75 bp, synthetic construct
  source 1..75: mol_type = other DNA
aagtttgaaatcaataaggtagcaactgaacttaaccgcatcattgcagaataccgcaataacagaatcaccgtt

SEQ ID NO: 859490 - DNA, 75 bp, synthetic construct
  source 1..75: mol_type = other DNA
ataaaccgctgatattgattaataactatattggtgatccaaagctcgacacgttatttaatcaattaaccgccg

SEQ ID NO: 859491 - DNA, 75 bp, synthetic construct
  source 1..75: mol_type = other DNA
ggtgttaatggtagtttcctgccttgtcacgcttgaactaacgggtatcacggtgtcgctaaatagtgcaccgct

SEQ ID NO: 859492 - DNA, 75 bp, synthetic construct
  source 1..75: mol_type = other DNA
gacgcacgcaaaaagcgccggtggcttactggaacaagcgtcacgtagagccgatgcccggcagcattatttatg

SEQ ID NO: 859493 - DNA, 75 bp, synthetic construct
  source 1..75: mol_type = other DNA
atgattaaacaaactattgtcgcattgattttgagtgtgggagcgtcatcggtcttcgcggcaggaaccgtcaag

SEQ ID NO: 859494 - DNA, 75 bp, synthetic construct
  source 1..75: mol_type = other DNA
tgttgcgtgtgcatgaagggctaaataatttacgcttgtcgaatgcgccgcaggtggtgttacggattagcgttg

SEQ ID NO: 859495 - DNA, 75 bp, synthetic construct
  source 1..75: mol_type = other DNA
cgctggtttcgcatccgccgccgggctggtggtggctggtgttggtcggctgggcgttcgtctggccgcatttag

SEQ ID NO: 859496 - DNA, 75 bp, synthetic construct
  source 1..75: mol_type = other DNA
tgttacgggtacatgaagggttaaatacattacgtttaccaaatacgccgcaggtaatgttgcggataagtgtcg

SEQ ID NO: 859497 - DNA, 75 bp, synthetic construct
  source 1..75: mol_type = other DNA
aggcgctgccgaaagtcggcaaactgcggaaagtttttttcaactattgccagtattcctcgcggtatcaacgtt

SEQ ID NO: 859498 - DNA, 75 bp, synthetic construct
  source 1..75: mol_type = other DNA
atctggacggcgagaatcccaacacctttaatccggcgttctccaacggctcgattatggatatcggcttttact

SEQ ID NO: 859499 - DNA, 75 bp, synthetic construct
  source 1..75: mol_type = other DNA
aggcgctgccgaaagtcggcaaactgcgtaaagtctttttcaactattgccagtattcctcgcggtatcagcgtt

SEQ ID NO: 859500 - DNA, 75 bp, synthetic construct
  source 1..75: mol_type = other DNA
tggcctcgcggactccgtctggagtgagatgcctgatgcccttaacgccgacattcttcagactctgacgcagcg

SEQ ID NO: 859501 - DNA, 75 bp, synthetic construct
  source 1..75: mol_type = other DNA
gcaactacacgctgtgggtcgggccaccaccgtccacggtcacgctgttcgggcttatcagccgtcctggcaatc

SEQ ID NO: 859502 - DNA, 75 bp, synthetic construct
  source 1..75: mol_type = other DNA
acctggacggtgagaatcccaacacctttaatccggcattctctaacggttcaattatggatatcggcttttact

SEQ ID NO: 859503 - DNA, 75 bp, synthetic construct
  source 1..75: mol_type = other DNA
cgggtggaccaaatgatacgtcagtgggagagatctcagtaaaaaccggaaataacaccagaaatggtggaaaaa

SEQ ID NO: 859504 - DNA, 75 bp, synthetic construct
  source 1..75: mol_type = other DNA
caggaagaacgtctgtctgagctggagactgccctgcaggcacagcagaccgcctttaacgaactggtgaataag

SEQ ID NO: 859505 - DNA, 75 bp, synthetic construct
  source 1..75: mol_type = other DNA
ctgaccattaccgccgggcaaaggccgaagagacggaagcagcagaaaaatttgtcacctttatggagcaggcgg

SEQ ID NO: 859506 - DNA, 75 bp, synthetic construct
  source 1..75: mol_type = other DNA
atggtgcataacgtcaccgtgggtaaagccgacctccctggcacgctgcaagcgagccagaaaaagctggatgaa

SEQ ID NO: 859507 - DNA, 75 bp, synthetic construct
  source 1..75: mol_type = other DNA
aaaattgtcggcccgatgattacctatttattgcccgtgatgattggttctaccggtggtcatctggtcggcggt

SEQ ID NO: 859508 - DNA, 75 bp, synthetic construct
  source 1..75: mol_type = other DNA
cctttgtctgctgggttttgaagtgatcggcccggcggtgttaattgccaatactttcgtcaaagagtgtatcga

SEQ ID NO: 859509 - DNA, 75 bp, synthetic construct
  source 1..75: mol_type = other DNA
ggttttgagatggttatcaataacttctcattaggtatcgcggggatgctcctttgtctgctgggttttgaagtg

SEQ ID NO: 859510 - DNA, 75 bp, synthetic construct
  source 1..75: mol_type = other DNA
tcggtttcgtggtgccaaccgagaaaaactctgcggtctacggcatgttgacctcgctgaccattaccgccgggc

SEQ ID NO: 859511 - DNA, 75 bp, synthetic construct
  source 1..75: mol_type = other DNA
aggcgctgggtgaactaccgaatcagctaatcggtgaactgccaaatattcaggtctttggcgcagtaggggata

SEQ ID NO: 859512 - DNA, 75 bp, synthetic construct
  source 1..75: mol_type = other DNA
gtgcgttactttatcgtgaccaccactatgaaatagactttgcggatctcgaagataagtttaaaatggcttgtt

SEQ ID NO: 859513 - DNA, 75 bp, synthetic construct
  source 1..75: mol_type = other DNA
aatattcaggtctttggcgcagtaggggataaaaactttacccgcatgggtgatgtgacgggttctggcgtggtg

SEQ ID NO: 859514 - DNA, 75 bp, synthetic construct
  source 1..75: mol_type = other DNA
gcccgttttgaaaaagaaaacccaggtatcaccgttaaacaagtgcccgtggaagaagacgcttataacaccaaa

SEQ ID NO: 859515 - DNA, 75 bp, synthetic construct
  source 1..75: mol_type = other DNA
tggtatcgcaaagatgtgctggcaaaagcggggcttgaggagccgaaaaactggcaacagctgctggacgttgca

SEQ ID NO: 859516 - DNA, 75 bp, synthetic construct
  source 1..75: mol_type = other DNA
gaccgactttcatgcactggcgctgcgcccgtttggctggcgcgaggtttggatcggttatgacccggcaaaagg

SEQ ID NO: 859517 - DNA, 75 bp, synthetic construct
  source 1..75: mol_type = other DNA
aggcccgcgccgtcaaccggaaaaaaatgtcttcaccgatgaacagattgagaagctggaagaaattttccattc

SEQ ID NO: 859518 - DNA, 75 bp, synthetic construct
  source 1..75: mol_type = other DNA
ggtgcttcccaacggggccacactgtatttcctcggcaccaatgcccgcactgcccagagttatcacggcaacct

SEQ ID NO: 859519 - DNA, 75 bp, synthetic construct
  source 1..75: mol_type = other DNA
ctgcgggccgactggttccggcaaaagtaccctgttgtcgctcattcagcgtcatttcgacgtcagcgaggggga

SEQ ID NO: 859520 - DNA, 75 bp, synthetic construct
  source 1..75: mol_type = other DNA
tcgccagtcggcgttatttgccgcggatgccgaagataccggcaaaaaaaacatgcgggtggcgcgtattgatgc

SEQ ID NO: 859521 - DNA, 75 bp, synthetic construct
  source 1..75: mol_type = other DNA
ggaacgcggttgcctcgtcgtagccaatcatcccacgctgatcgattacgtgctgctggcatcagtcatgccaga

SEQ ID NO: 859522 - DNA, 75 bp, synthetic construct
  source 1..75: mol_type = other DNA
agctcaccaccgccgcgcgttactgccagctcatcatgaaggagcagaaagaagggaaagacttcaaagagattg

SEQ ID NO: 859523 - DNA, 75 bp, synthetic construct
  source 1..75: mol_type = other DNA
tggtgggaagccggaaaaaccaatcgcatccgtaacctgctgaagtctcgccagatcggcgcgaccttctatttt

SEQ ID NO: 859524 - DNA, 75 bp, synthetic construct
  source 1..75: mol_type = other DNA
tgccaggtggtaagttccgcattcttgagcgtcaccagtggcgcggaatggacttccgcgcccaggctgacgcca

SEQ ID NO: 859525 - DNA, 75 bp, synthetic construct
  source 1..75: mol_type = other DNA
tggacatcgacctgtcccacagcaatcttgcccccggcctgctgtgcgcagacgggcagtaccgccagatagtca

SEQ ID NO: 859526 - DNA, 75 bp, synthetic construct
  source 1..75: mol_type = other DNA
cgtgacctatatcggcatcgactcaaccggcgttggtcacggggtttacgagaacgtgaaagtgttttttcctgc

SEQ ID NO: 859527 - DNA, 75 bp, synthetic construct
  source 1..75: mol_type = other DNA
acctgctggcgcgccagtcagagcgccatgcccggattggcaaatttaacgacggcggcaacgaggccgacctta

SEQ ID NO: 859528 - DNA, 75 bp, synthetic construct
  source 1..75: mol_type = other DNA
tattcgctttcatgatattcctctgacgcagttgcaactcgatagctggcgtagccgcctggcggtggtcagcca

SEQ ID NO: 859529 - DNA, 75 bp, synthetic construct
  source 1..75: mol_type = other DNA
atgagaaaaagctggactataaaagaagattgtaagctgcttaccttggtacgtcagcacttctcctcgttgatc

SEQ ID NO: 859530 - DNA, 75 bp, synthetic construct
  source 1..75: mol_type = other DNA
caacttaccgactggcgcctcgtcagcgaggcgaaggtgtgcgttttgagtccgtaggtttcgacttgctgattg

SEQ ID NO: 859531 - DNA, 75 bp, synthetic construct
  source 1..75: mol_type = other DNA
actgcgcatggctctggacattaacccaatgttactaaccctgttgggtgtggaaaagttgctgactaaaggaaa

SEQ ID NO: 859532 - DNA, 75 bp, synthetic construct
  source 1..75: mol_type = other DNA
tcaccaaccggcactttaagcgctgggtaaagaatggtggccaggacaactccagcagccagaatacgcctttgg

SEQ ID NO: 859533 - DNA, 75 bp, synthetic construct
  source 1..75: mol_type = other DNA
ccgtgcccgggtatctcaactttaccacgtgcatgaacgtgatggtgctgaggttatattcaactctgatggcac

SEQ ID NO: 859534 - DNA, 75 bp, synthetic construct
  source 1..75: mol_type = other DNA
ctgccgccctggaggcgatcccactaaacagctgtttcgctgtctgataaacaatgattcagcgctatacgatta

SEQ ID NO: 859535 - DNA, 75 bp, synthetic construct
  source 1..75: mol_type = other DNA
gtggaacgcggcagcgcggcgtacagccgtattcgaacgatgctggcggaagcgccggtcgtcaaagatggtagc

SEQ ID NO: 859536 - DNA, 75 bp, synthetic construct
  source 1..75: mol_type = other DNA
tccatcggcatggcgaatttgttggcaataggtggcggtagctggatggtggtgcagggtagcttaacgctgggc

SEQ ID NO: 859537 - DNA, 75 bp, synthetic construct
  source 1..75: mol_type = other DNA
gatgccggtgatggcgatcattattaaacgtaacggcgacgctttacatgagcgctttaagctggcgcaggcggc

SEQ ID NO: 859538 - DNA, 75 bp, synthetic construct
  source 1..75: mol_type = other DNA
tctgaacgtcgcctacagccagaatcccaataatctgatgtggcaggataacgtggatcacacaatccattacct

SEQ ID NO: 859539 - DNA, 75 bp, synthetic construct
  source 1..75: mol_type = other DNA
tattgcctttcgaagtttgccagtaccgcccgtcggtgctattaatgactacaaataagttcgacacatcaactt

SEQ ID NO: 859540 - DNA, 75 bp, synthetic construct
  source 1..75: mol_type = other DNA
tgcactgggggtgtcattatttgtatcacaggggagtctaagtccggccccatatgatccggtctatgcaccgtc

SEQ ID NO: 859541 - DNA, 75 bp, synthetic construct
  source 1..75: mol_type = other DNA
ttcaggagctacgcaaagtggcttccggtatggctattcacaagaaatggcggcagacctatttttccacaccat

SEQ ID NO: 859542 - DNA, 75 bp, synthetic construct
  source 1..75: mol_type = other DNA
ggatcggttatgacccggcgaaaggtacgcagaatggcgacagcgccggatgcgtggtggtggctccgccaaccg

SEQ ID NO: 859543 - DNA, 75 bp, synthetic construct
  source 1..75: mol_type = other DNA
cctttccgccagtaaggcacaggcccacgtctttaagcagtacatcatcgacttcgccaaagaagtggaggtgga

SEQ ID NO: 859544 - DNA, 75 bp, synthetic construct
  source 1..75: mol_type = other DNA
accgacattgcgcagtcctttatggcaatccgtcgtgccaccaccgccagtggcaaccgcccgacctatgaagcc

SEQ ID NO: 859545 - DNA, 75 bp, synthetic construct
  source 1..75: mol_type = other DNA
atagataatgatgagttaaaacacgaaatttccctttttgcgaaagcaaatattgatggaatcattaccacaaac

SEQ ID NO: 859546 - DNA, 75 bp, synthetic construct
  source 1..75: mol_type = other DNA
gaccgattttcaggctctggcgctgcgcccgtttggctggcgcgaggtctggatcggatacgacccggcgaaagg

SEQ ID NO: 859547 - DNA, 75 bp, synthetic construct
  source 1..75: mol_type = other DNA
acttcgccaaagaagtggaggtggagctgaaaggcgatccgatagtgcttcctaacggggccacgctgtacttcc

SEQ ID NO: 859548 - DNA, 75 bp, synthetic construct
  source 1..75: mol_type = other DNA
gctgacccagctcatcatcaaaccgcagaaaaccggcggtgatttcaaggaaattgacctgctgggacgccagat

SEQ ID NO: 859549 - DNA, 75 bp, synthetic construct
  source 1..75: mol_type = other DNA
ttttccgtgccgcagattgccgccatgttgcagatgaaacgcccgacagtgcagagctggaaacagcgcgacggc

SEQ ID NO: 859550 - DNA, 75 bp, synthetic construct
  source 1..75: mol_type = other DNA
aataccagaacctgctgatgtgcgagtttgtggacgacctcgcgtccgtgttcccgctcagcgaactgcaggcgt

SEQ ID NO: 859551 - DNA, 75 bp, synthetic construct
  source 1..75: mol_type = other DNA
gaagggaaagatttcaaagagattgatctgctggcgcgccagtcggaacgccacgcgcggatcggcaagtttaac

SEQ ID NO: 859552 - DNA, 75 bp, synthetic construct
  source 1..75: mol_type = other DNA
gatgaatatttctggataccgaaattccaagagctgcgcaaagtggcttccggtatggctattcacaaaaaatgg

SEQ ID NO: 859553 - DNA, 75 bp, synthetic construct
  source 1..75: mol_type = other DNA
tccagctcgtgcgctcgttctatcccgccgcgcgcgacatccgctatacccaatattcaccagcacgccccgata

SEQ ID NO: 859554 - DNA, 75 bp, synthetic construct
  source 1..75: mol_type = other DNA
ccagcacatttatttcgaatgataaaagatgagctttatgagttagtcttaactgatgatccgaaaggaaaatta

SEQ ID NO: 859555 - DNA, 75 bp, synthetic construct
  source 1..75: mol_type = other DNA
agttcgaagcggacgatggtgaggttatccctgagtacaccgggctgattgcctattccgagtcactggaacacg

SEQ ID NO: 859556 - DNA, 75 bp, synthetic construct
  source 1..75: mol_type = other DNA
caatatgtcgttgagcaggtagaaaaggccgtcgctggaattagtaatccgaagattgcttgtctgggcctggcg

SEQ ID NO: 859557 - DNA, 75 bp, synthetic construct
  source 1..75: mol_type = other DNA
ctagtgaaggaactattgatttcggtggcggcgcattaaagagaacatttccgataagcttccgggccctagtga

SEQ ID NO: 859558 - DNA, 75 bp, synthetic construct
  source 1..75: mol_type = other DNA
cctttccgccagtaaggcacaggctcacgtctttaagcagtacatcatcgacttcgctaaagaagtggaggtgga

SEQ ID NO: 859559 - DNA, 75 bp, synthetic construct
  source 1..75: mol_type = other DNA
accgacatagcacagtcctttatggcaatccgtcgtgccaccaccgccagcggcaaccgcccgacctatgaagcc

SEQ ID NO: 859560 - DNA, 75 bp, synthetic construct
  source 1..75: mol_type = other DNA
cgattaacagccaacacaggtggcggattatctataatattaatgtatgcatacataccagcattaatccttatt

SEQ ID NO: 859561 - DNA, 75 bp, synthetic construct
  source 1..75: mol_type = other DNA
cccagttgtgtcgtcaggaagaggaagagttatctttccggcagcgtgaagtgacaaatgcggaagttgcatgga

SEQ ID NO: 859562 - DNA, 75 bp, synthetic construct
  source 1..75: mol_type = other DNA
tattgaaatatattcactgaataagctgcgagctaaaggtgaaaagctgtattcacttacggggttaacagtacc

SEQ ID NO: 859563 - DNA, 75 bp, synthetic construct
  source 1..75: mol_type = other DNA
aataaaatggggcatgctgaacgagcggatgctgaacggtgttaccatctggctgtttcccggctgaatgaacaa

SEQ ID NO: 859564 - DNA, 75 bp, synthetic construct
  source 1..75: mol_type = other DNA
atgttctttaaaaatcaggatttatttcaggctccggcaatacgcatttatgtgttctgtcagtcatccggctgg

SEQ ID NO: 859565 - DNA, 75 bp, synthetic construct
  source 1..75: mol_type = other DNA
atacgcatttatgtgttctgtcagtcatccggctggcaggtaatgagaacgcaggaacagaaggaggaaaacacc

SEQ ID NO: 859566 - DNA, 75 bp, synthetic construct
  source 1..75: mol_type = other DNA
ggctgtttcccggttgaatgaacaacatagtcgattgagcacgatcaagcttttgccgggagtactggccgatga

SEQ ID NO: 859567 - DNA, 75 bp, synthetic construct
  source 1..75: mol_type = other DNA
atgtcatgggaggggatttttggcccttccgtgacagtgcctgcagcattgcaggcactgaattctaattcgcaa

SEQ ID NO: 859568 - DNA, 75 bp, synthetic construct
  source 1..75: mol_type = other DNA
actgaattctaattcgcaactcactcttcttttagtcggtaatcccgacgccatcacgccattacttgctaaagc

SEQ ID NO: 859569 - DNA, 75 bp, synthetic construct
  source 1..75: mol_type = other DNA
gagcggtggtggcagcttcggggataaatttcagggtaacatgccgggtggcatgatatccgccggaggtcacag

SEQ ID NO: 859570 - DNA, 75 bp, synthetic construct
  source 1..75: mol_type = other DNA
agtgggcagacatacccaactggatggtgcggtgattgcctccactgccacaccggataaaaaccacctggatac

SEQ ID NO: 859571 - DNA, 75 bp, synthetic construct
  source 1..75: mol_type = other DNA
caggaaatgtcacgttaaagacgatggaaggtgttgtcaggatgttcctttctctgctgaaatctcagggtgaag

SEQ ID NO: 859572 - DNA, 75 bp, synthetic construct
  source 1..75: mol_type = other DNA
gtcgattgtgacagcacaatgttggtgcaatttgccattatgggctcagttctggctgaagaggtggtggaaatt

SEQ ID NO: 859573 - DNA, 75 bp, synthetic construct
  source 1..75: mol_type = other DNA
tttacgtgctggcggtgtatgaagacgtgacgctgcctgccggggttgaaagcgggctggttaccgtcacggcga

SEQ ID NO: 859574 - DNA, 75 bp, synthetic construct
  source 1..75: mol_type = other DNA
tcgactggaacgtaaagacgcgacgccagcgcgtggcgcggtaacatttattaaaaacagtgcggcggatagcgt

SEQ ID NO: 859575 - DNA, 75 bp, synthetic construct
  source 1..75: mol_type = other DNA
gaaaacatggccgtatagccgtttcagcatgtccagactgggcgaagagatccaccaggtatttccacaggtgga

SEQ ID NO: 859576 - DNA, 75 bp, synthetic construct
  source 1..75: mol_type = other DNA
ctggatggtgcggtgattgcctccactgccacaccggataaaaaccacctggataccggaacgctggggttcagt

SEQ ID NO: 859577 - DNA, 75 bp, synthetic construct
  source 1..75: mol_type = other DNA
gaattatcactctgacgctatttaccgcagcatgattgccagcgtgctgggcctgagcgttgatcgcatttactt

SEQ ID NO: 859578 - DNA, 75 bp, synthetic construct
  source 1..75: mol_type = other DNA
cccgttgcggtggccgggattgccagcgcggtcaatgaggacgaatggctgattacgccgggagccaacgaggaa

SEQ ID NO: 859579 - DNA, 75 bp, synthetic construct
  source 1..75: mol_type = other DNA
aaaaaatctgtggcgtcaatattatcgactggcgagaaatgcgtgtccgcgccgccatgatgttattacgcgtgg

SEQ ID NO: 859580 - DNA, 75 bp, synthetic construct
  source 1..75: mol_type = other DNA
accgggtcagatacccgtatcagcggtggtgccggctcaggttattcactgacccagagcggcatggaaaccggc

SEQ ID NO: 859581 - DNA, 75 bp, synthetic construct
  source 1..75: mol_type = other DNA
tgccggtacctgggaatacggcctgagcaaggaaaataccaactggtatctgaaggttgatactccgccgactaa

SEQ ID NO: 859582 - DNA, 75 bp, synthetic construct
  source 1..75: mol_type = other DNA
ccactaagaaaggcaaacgtaagcctaaagcaaaagaagcgcttgtaccgcgtgtgatgagctttaaacgagggt

SEQ ID NO: 859583 - DNA, 75 bp, synthetic construct
  source 1..75: mol_type = other DNA
gcgtattgaagcaaatcagcgacaaaacttcacccgatttgtggtgttggcgcgtaaagccattaacgtgtctga

SEQ ID NO: 859584 - DNA, 75 bp, synthetic construct
  source 1..75: mol_type = other DNA
ctccaccgaccaacccggatgcagataacccggatgcaggtaacccggatgcaggtaacccggatgcaggtaacc

SEQ ID NO: 859585 - DNA, 75 bp, synthetic construct
  source 1..75: mol_type = other DNA
cctgacgctggataacgggaccatcctgacggggaacgtggcgggagacagcaccggtgccggtgatatggcggt

SEQ ID NO: 859586 - DNA, 75 bp, synthetic construct
  source 1..75: mol_type = other DNA
acgatgagttacagtatctaatgattgctgcattaggtatacgtcagaaaaatattataaagaggattgaagaac

SEQ ID NO: 859587 - DNA, 75 bp, synthetic construct
  source 1..75: mol_type = other DNA
ctacatcgacatgggcgacgacgacattaaggccaacatctgataaccaggtatcacttggaaggtccgttaacc

SEQ ID NO: 859588 - DNA, 75 bp, synthetic construct
  source 1..75: mol_type = other DNA
ataaaccattcttcctctactacggcactcgtggctgccacttcgataactacccaaatgcgaaatatgcgggta

SEQ ID NO: 859589 - DNA, 75 bp, synthetic construct
  source 1..75: mol_type = other DNA
aatgacggctactacgtggacggtgtgctgaaatacaaccgctttaataatgagctgcgaacctggatgagtgac

SEQ ID NO: 859590 - DNA, 75 bp, synthetic construct
  source 1..75: mol_type = other DNA
cgataaaggcaatttcagtattgctggcggcagtgcagttaatatgctgctggagaatggcggctctctcagtgt

SEQ ID NO: 859591 - DNA, 75 bp, synthetic construct
  source 1..75: mol_type = other DNA
ggcattagagcaggcagagcagccgaaggaagaagaaaaaccagcgaagaaaggcaaacgtaagcagaaagcaaa

SEQ ID NO: 859592 - DNA, 75 bp, synthetic construct
  source 1..75: mol_type = other DNA
tcggggtaagactacgaaagcccgctccccgcaaggactgacgccagatagtttctgtccatggctgcttttcgc

SEQ ID NO: 859593 - DNA, 75 bp, synthetic construct
  source 1..75: mol_type = other DNA
cactgttcatgcctcagacaatgtgaacactcctgaaaaccgccagttcctgaagcagcaggaaaatttaagcag

SEQ ID NO: 859594 - DNA, 75 bp, synthetic construct
  source 1..75: mol_type = other DNA
gttcccgctttgtggtaatgaaagggcagattgctcgcatgcaccgcgcactgtcgcagtttatgctggatctgc

SEQ ID NO: 859595 - DNA, 75 bp, synthetic construct
  source 1..75: mol_type = other DNA
taagcctcgtacttgcgatggcatcggggcaggcacttgctgacctgccaattgttttagtggatgaagctcgtc

SEQ ID NO: 859596 - DNA, 75 bp, synthetic construct
  source 1..75: mol_type = other DNA
cgctacacctcgcagctcgatttgctgccttttggtcagttatccattgaagaacaagaaaatccacagcactgg

SEQ ID NO: 859597 - DNA, 75 bp, synthetic construct
  source 1..75: mol_type = other DNA
cgtgatgaagcgatggctgaatgcctggcggctaagcaaccagtcggtgaatatcgcagtgatgcgctggcggct

SEQ ID NO: 859598 - DNA, 75 bp, synthetic construct
  source 1..75: mol_type = other DNA
ttgctccggcttacagcaactaaaagccagcgggcgttaccagtggattttaatcgacttaccgcgtgatgcctc

SEQ ID NO: 859599 - DNA, 75 bp, synthetic construct
  source 1..75: mol_type = other DNA
cgtgaagtctggtgttcgcaagggtattccaacataccgcattaacgatatgccgtttggttgcagtaacagcct

SEQ ID NO: 859600 - DNA, 75 bp, synthetic construct
  source 1..75: mol_type = other DNA
tggggaagagcgtatttatgctgcacaaacggcaattagtgttatagcagacgtgatcaccgcctgggagctgga

SEQ ID NO: 859601 - DNA, 75 bp, synthetic construct
  source 1..75: mol_type = other DNA
cgcacgttatctctgtcgcgggacgtatttacaacgcggtactcagccttgagcgccggaacaagcccaaagaat

SEQ ID NO: 859602 - DNA, 75 bp, synthetic construct
  source 1..75: mol_type = other DNA
cgtttccttcccctgatggttttgcttcaggcatgacaatggcgggatattttattcatgtggccgttacaaatg

SEQ ID NO: 859603 - DNA, 75 bp, synthetic construct
  source 1..75: mol_type = other DNA
cgtctggtatcgttttatttccggctcgctgcatcgttttgatggtctgccgttgggagctctaccggtcggtaa

SEQ ID NO: 859604 - DNA, 75 bp, synthetic construct
  source 1..75: mol_type = other DNA
gaggctaaacctaaatacgctattgttattgcgtatcctcaggaagataaacgtttaaaggttcgtcgtgcagaa

SEQ ID NO: 859605 - DNA, 75 bp, synthetic construct
  source 1..75: mol_type = other DNA
caccctggcaatcgttaaagtggatgccaactgtcatattcggctgcatcagcaggtactacctgctggcgcgca

SEQ ID NO: 859606 - DNA, 75 bp, synthetic construct
  source 1..75: mol_type = other DNA
gcgacgcgctggggctggaacagcaggctgctgcgagtattaccggttttgatgcgttgctcgccagcaccagaa

SEQ ID NO: 859607 - DNA, 75 bp, synthetic construct
  source 1..75: mol_type = other DNA
tacagtgccagtgaaatggttaaggcgatcgccgatcgttttgtcgttgaaacgccgtccgctgcggccacgccg

SEQ ID NO: 859608 - DNA, 75 bp, synthetic construct
  source 1..75: mol_type = other DNA
atgatgcacttaaagaacataaaagcgggtaatgctaaaacactggaacagtatgagttaacaaagagacatggt

SEQ ID NO: 859609 - DNA, 75 bp, synthetic construct
  source 1..75: mol_type = other DNA
ccgatgacctacaacgcgccttttgtggtatccgaaactaaagctgataccgagtatttccggatgatgacgctg

SEQ ID NO: 859610 - DNA, 75 bp, synthetic construct
  source 1..75: mol_type = other DNA
atggaaataagcgctcgtaactcatccaccaaaattattgccattattattctgtcactcacggctctggtcttt

SEQ ID NO: 859611 - DNA, 75 bp, synthetic construct
  source 1..75: mol_type = other DNA
gtctgctaataacgggattattcaccaccagttctttgccactccagggaaagattacgaaagcccgctccccgc

SEQ ID NO: 859612 - DNA, 75 bp, synthetic construct
  source 1..75: mol_type = other DNA
ggacgccagaatttcttttcgatccacgtaaggggctctacagctatgaagcgctccagtcgcgtctggcagaaa

SEQ ID NO: 859613 - DNA, 75 bp, synthetic construct
  source 1..75: mol_type = other DNA
tggcgattgaagaggaccggcccagcgatatggatgacaccactacggaggaaagcgatgacgacgacggactgg

SEQ ID NO: 859614 - DNA, 75 bp, synthetic construct
  source 1..75: mol_type = other DNA
atgaaaaatctgtctacgcgaaataagccggatggaaacgcattattaagcgtggttgaacgttttataacggaa

SEQ ID NO: 859615 - DNA, 75 bp, synthetic construct
  source 1..75: mol_type = other DNA
aaacaagccggatggtaatgcgttacttagcgttgttgaaagattcgttacggaggcaagaaaggaagcggacac

SEQ ID NO: 859616 - DNA, 75 bp, synthetic construct
  source 1..75: mol_type = other DNA
ctgcagcaaaaccatcggagatgcttactttcgaactccccgcaataccataaaaggttttctggatatgctggc

SEQ ID NO: 859617 - DNA, 75 bp, synthetic construct
  source 1..75: mol_type = other DNA
catcttgccagcctcactcctgaggaactgtatattttactgaaaaaccttcgtcatgtttatgctggtggagat

SEQ ID NO: 859618 - DNA, 75 bp, synthetic construct
  source 1..75: mol_type = other DNA
gatgagcttgtaaagcgtctttcagccatcagaaagccccgtgacgaggttaaacctgtacggttaggggaaatc

SEQ ID NO: 859619 - DNA, 75 bp, synthetic construct
  source 1..75: mol_type = other DNA
tctcacgagctaaccggcaaagacggcggcgcaatccagattgaaacatcaccaatgagcactttattcggaaaa

SEQ ID NO: 859620 - DNA, 75 bp, synthetic construct
  source 1..75: mol_type = other DNA
cgcattgctgagcttaaagccgagcgaaacgaagaggtaggtatagatgccgcttatgttcttcgtagattggtt

SEQ ID NO: 859621 - DNA, 75 bp, synthetic construct
  source 1..75: mol_type = other DNA
gaagagttacttgaagagaaactgaaggagcttggtaatggcaggcgctccaatcagcttgaatcgaaacgctca

SEQ ID NO: 859622 - DNA, 75 bp, synthetic construct
  source 1..75: mol_type = other DNA
aggtgaagagagcaacggcaacccgctgatctactttgcggttgcaacggttctggaactggtgtttggtattct

SEQ ID NO: 859623 - DNA, 75 bp, synthetic construct
  source 1..75: mol_type = other DNA
caaaacatgagcccggatgaagccgaggcagtaatcgctcacgaaattagccacattgccaatggtgatatggtt

SEQ ID NO: 859624 - DNA, 75 bp, synthetic construct
  source 1..75: mol_type = other DNA
cggttttggtggttccttcgtttcgcttctgatgtccaaatggatggcattacgatctgttggcggggaagtgat

SEQ ID NO: 859625 - DNA, 75 bp, synthetic construct
  source 1..75: mol_type = other DNA
aaacctgcaccgcagagtctggtttatctacgatgagcttccttcactgaacaaactgccggagctgccgggcgt

SEQ ID NO: 859626 - DNA, 75 bp, synthetic construct
  source 1..75: mol_type = other DNA
caggccggacaggcagaatcgcttaacaatccggtactggctgcagcggtgactcaggtggcagtggctgcgatg

SEQ ID NO: 859627 - DNA, 75 bp, synthetic construct
  source 1..75: mol_type = other DNA
tccgggcacgtggcgatatggccattatttacgataaaggctgctcgctcattaaaaagcatttcagtgaacagg

SEQ ID NO: 859628 - DNA, 75 bp, synthetic construct
  source 1..75: mol_type = other DNA
tattttgcggatatgaaaaccaagattgagattgcagaggagcttggcgtttcccgctttaaagttgccagattg

SEQ ID NO: 859629 - DNA, 75 bp, synthetic construct
  source 1..75: mol_type = other DNA
tgaccgtcagggtacacccccatatgctccgccatgcctgtggctttgcccttgctgaacgcggcaacgacaccc

SEQ ID NO: 859630 - DNA, 75 bp, synthetic construct
  source 1..75: mol_type = other DNA
acaatccggtactgactgcagctgtgactcagggggcagcggctgcggtgacgggtgggacgggtgagagcaacc

SEQ ID NO: 859631 - DNA, 75 bp, synthetic construct
  source 1..75: mol_type = other DNA
gtgctggaactggtatttggtattctggcgagcattattaccatgtggttctcgcgtcatcgtgaattccacgcc

SEQ ID NO: 859632 - DNA, 75 bp, synthetic construct
  source 1..75: mol_type = other DNA
ctcaggctctggcagaacgaaaggcgtatatcgcggcgtcttccggtaacaacctcttctggcgctggcgttgaa

SEQ ID NO: 859633 - DNA, 75 bp, synthetic construct
  source 1..75: mol_type = other DNA
gcaaggactaatcgtagcgtgcagcttaccgcggcaggaaaacagttccttgctgacagccggcaaatcctgtct

SEQ ID NO: 859634 - DNA, 75 bp, synthetic construct
  source 1..75: mol_type = other DNA
gaactggcgaaagaaccctttgtcttttttgatccgcacgtcgggacagggctgtatgacgatattctcgggctg

SEQ ID NO: 859635 - DNA, 75 bp, synthetic construct
  source 1..75: mol_type = other DNA
ataaataaagaaaaaaaaaatacaaaaaaaaagaaaaaaaaaaaaagcaaaattaatacaaaaaaaaaaaataaa

SEQ ID NO: 859636 - DNA, 75 bp, synthetic construct
  source 1..75: mol_type = other DNA
agaacgaagggcgtatatcgcggcgtcttccggtaacaacctcttctggcgctggcgttgaattattacctgttg

SEQ ID NO: 859637 - DNA, 75 bp, synthetic construct
  source 1..75: mol_type = other DNA
actcagaccagagtcagtgccagctcctgcagggtggagttccgtaacggtaaaatgacgctggaaaatccttca

SEQ ID NO: 859638 - DNA, 75 bp, synthetic construct
  source 1..75: mol_type = other DNA
gattttcgcagtatttggtagccagggcgtcaaacagccggatgggactgagctgtatctggcgaatgcgtcctg

SEQ ID NO: 859639 - DNA, 75 bp, synthetic construct
  source 1..75: mol_type = other DNA
cgatcgagaaagacgagatgaaccgggtgttcatcttcggtaaggttattgggagcatgccccagacgtacagga

SEQ ID NO: 859640 - DNA, 75 bp, synthetic construct
  source 1..75: mol_type = other DNA
tcgctcagtgagttgttcatgactcacccgccgctggataaacgaattgaagctctgcgtacgggtgaatacctg

SEQ ID NO: 859641 - DNA, 75 bp, synthetic construct
  source 1..75: mol_type = other DNA
ctgtgaatttcctgatgtccatttgcagacgcgtgagatgaatactcgcgagcaaatagaccctcttaccgaagg

SEQ ID NO: 859642 - DNA, 75 bp, synthetic construct
  source 1..75: mol_type = other DNA
caatgataatgttattttcaaatggctcaggctcaggctctggcagaacgaagggcgtgtttcgcggcgtcttcc

SEQ ID NO: 859643 - DNA, 75 bp, synthetic construct
  source 1..75: mol_type = other DNA
atgagactgaaatccctgttactggtgatgctgatacctgtactggtacaggccgcagaccagaacacgaccggg

SEQ ID NO: 859644 - DNA, 75 bp, synthetic construct
  source 1..75: mol_type = other DNA
tcgccgcgtgcgaccgtgacccgcgagctgggcgatgccctgaatctgcagtcagccctgtatcatttcgatatg

SEQ ID NO: 859645 - DNA, 75 bp, synthetic construct
  source 1..75: mol_type = other DNA
atggcgactcactttgcccgaggaacgttaacggaaggacatctgatatctgttcgcctaccctcgcagtgtcat

SEQ ID NO: 859646 - DNA, 75 bp, synthetic construct
  source 1..75: mol_type = other DNA
tgttcgtctcccctcccagtgtcatcaagaagcccgaaacattccccttcatcgtcaaagccgttttctggcgtc

SEQ ID NO: 859647 - DNA, 75 bp, synthetic construct
  source 1..75: mol_type = other DNA
aaccccgcagatcattttcaaataagtttaaacttcaaatggttaaactggcttcacaaccaggagcctctgttg

SEQ ID NO: 859648 - DNA, 75 bp, synthetic construct
  source 1..75: mol_type = other DNA
gtttcaggcggctcactggctgcattgacttcacccttaacctcaacaactcccgtcgccgaaaacgtagaataa

SEQ ID NO: 859649 - DNA, 75 bp, synthetic construct
  source 1..75: mol_type = other DNA
tttgtcgatgccctccgtgcaacagctgcgcaaatgaccatgcatgagttacaggatacccgcgagaacttcgtg

SEQ ID NO: 859650 - DNA, 75 bp, synthetic construct
  source 1..75: mol_type = other DNA
taaagagatcgaacagcagcaggtcaccgaaatcgctaaccagacgaaatcgatcgctattgccgccaaatcgga

SEQ ID NO: 859651 - DNA, 75 bp, synthetic construct
  source 1..75: mol_type = other DNA
tttcttttcttcgtgctggtgtgtctctcagggatatcgggctttcgttgccggcctcaggtactgtcaacgcag

SEQ ID NO: 859652 - DNA, 75 bp, synthetic construct
  source 1..75: mol_type = other DNA
ggcaaatgaactgcgcttaatgagagggcagatagaaatatacaataacatcgaggcaaagcaggggtataagat

SEQ ID NO: 859653 - DNA, 75 bp, synthetic construct
  source 1..75: mol_type = other DNA
gtagtgaactcagttatgaccagtgccaggggtttttgaatgaattaattcctcacggtgttgccgatcttttct

SEQ ID NO: 859654 - DNA, 75 bp, synthetic construct
  source 1..75: mol_type = other DNA
ataatctaaaagattatatggcaacgaaaccaaaaggtgatttgctctttgatatctctgagcgtgaagcaggta

SEQ ID NO: 859655 - DNA, 75 bp, synthetic construct
  source 1..75: mol_type = other DNA
gttaagcgtcagcaatccagccagctagcaagttctcagcaacaacagattgcagagcttgaaaaacagagtaaa

SEQ ID NO: 859656 - DNA, 75 bp, synthetic construct
  source 1..75: mol_type = other DNA
gctcgtaaagaagatatgcaactgagtgctcatattaacccagagacatttgatgttgagttaattgatgagaag

SEQ ID NO: 859657 - DNA, 75 bp, synthetic construct
  source 1..75: mol_type = other DNA
tgcaaacacgggtaatgtgggggcggaaacctggcggaacaagcattatcagccgctctctcttaccgcacgcag

SEQ ID NO: 859658 - DNA, 75 bp, synthetic construct
  source 1..75: mol_type = other DNA
gtatggctggcgtgaaaaaactgcagccgaacctgcgcactacgccgtttgttcttgatccatttgctattcgcc

SEQ ID NO: 859659 - DNA, 75 bp, synthetic construct
  source 1..75: mol_type = other DNA
cggtgaactatctgttcaaaacgcctggcggctccctgtatcacagcggcgactcccactactctaactattatg

SEQ ID NO: 859660 - DNA, 75 bp, synthetic construct
  source 1..75: mol_type = other DNA
agatcgacgcggtactggcgactcacgatcacaacgatcatatcgacgtcaacgtcgctgctgctgtgatgcaga

SEQ ID NO: 859661 - DNA, 75 bp, synthetic construct
  source 1..75: mol_type = other DNA
gccggtgcgctggccgcacttaacgaagcaaaagacgcacacacggccagcatgggtaaactcagcgacattgag

SEQ ID NO: 859662 - DNA, 75 bp, synthetic construct
  source 1..75: mol_type = other DNA
gcatggctggcgtgaaaaaactgcagccgaacctgcgtaccaccccgtttgttcttgatccgtttgcgattcgcc

SEQ ID NO: 859663 - DNA, 75 bp, synthetic construct
  source 1..75: mol_type = other DNA
gaaaacccacgcggtattaccgacaaaatgaccagtgctgatatcctgcgtatgggcgaagcgctgaatgcgaaa

SEQ ID NO: 859664 - DNA, 75 bp, synthetic construct
  source 1..75: mol_type = other DNA
gtggggacagttcggcctgaccgttgcggttggcgccgtcctcctggtcgtcggcatctggctgctcaccgaagc

SEQ ID NO: 859665 - DNA, 75 bp, synthetic construct
  source 1..75: mol_type = other DNA
tcgccacatttaacgccctcgccgacctgccgacgatggaagatccctcgcgcggtcagggcaagggcattatgg

SEQ ID NO: 859666 - DNA, 75 bp, synthetic construct
  source 1..75: mol_type = other DNA
gcgcaatggcgggcgtcggtgcggttctgctggtaatcatcatctggttgctcaaccaggcctcggacatcctgt

SEQ ID NO: 859667 - DNA, 75 bp, synthetic construct
  source 1..75: mol_type = other DNA
cccggagtggggtagctggctgaatgaagaaattgaacaggagcaggtcgcaccaggcacattcgcgatgtggtg

SEQ ID NO: 859668 - DNA, 75 bp, synthetic construct
  source 1..75: mol_type = other DNA
caaacaaagtcacggtaacccgttaatgaaacagggtcaccagatgcagcgcatggctggcgtgaaaaaactgca

SEQ ID NO: 859669 - DNA, 75 bp, synthetic construct
  source 1..75: mol_type = other DNA
cacagtggcgattcccactactctaactattatgcgaagcacggtaacgaacatcagatcgatgtggcgttagga

SEQ ID NO: 859670 - DNA, 75 bp, synthetic construct
  source 1..75: mol_type = other DNA
acctcttcgacttcctccctaaccttgcaccggaagctaaacaggtcgttgccgccagcctggttaatcccgttg

SEQ ID NO: 859671 - DNA, 75 bp, synthetic construct
  source 1..75: mol_type = other DNA
gttaccatcggcagaacgggttcaggattgggtttgtgaagttgtcctcccagccctgatggagacaggaactta

SEQ ID NO: 859672 - DNA, 75 bp, synthetic construct
  source 1..75: mol_type = other DNA
agtgcgaaatctcacagggtaatatcgttgggctggatgcagctttctatcagggtaagcctgtgtttctggctg

SEQ ID NO: 859673 - DNA, 75 bp, synthetic construct
  source 1..75: mol_type = other DNA
atggttatcatcaatcctatctttatgtctaaattaagcaagatttttcctgaaataagtaaacaaaaaatagag

SEQ ID NO: 859674 - DNA, 75 bp, synthetic construct
  source 1..75: mol_type = other DNA
tgtctaaattaagcaagatctttcctgaaataagtgatcaaaaaatagaaattttgacattttttgtttacggga

SEQ ID NO: 859675 - DNA, 75 bp, synthetic construct
  source 1..75: mol_type = other DNA
gtttactcgcgcagacgattaacggtattcgtagttatgtcggtccatttggcaaaagcgatcgcgcgttaatat

SEQ ID NO: 859676 - DNA, 75 bp, synthetic construct
  source 1..75: mol_type = other DNA
atgattttatctgctttgttgatcgctgcgagtttcatcgacattgagcatcaatggttacccgacgtatttact

SEQ ID NO: 859677 - DNA, 75 bp, synthetic construct
  source 1..75: mol_type = other DNA
aagtacagtgcctttcggcccctttctgagtctgggaggaatggtgacgttatatacaggcattgatgtaatgct

SEQ ID NO: 859678 - DNA, 75 bp, synthetic construct
  source 1..75: mol_type = other DNA
tggccacggaattccgtggccaaattgtccgcctctgggcgcttcagtatcccggaactcaatccgaagctgctg

SEQ ID NO: 859679 - DNA, 75 bp, synthetic construct
  source 1..75: mol_type = other DNA
gatgtctttactcagggcgtattgtggacggggctgattgcggcatgggctcagcagagtccgttaacgctacaa

SEQ ID NO: 859680 - DNA, 75 bp, synthetic construct
  source 1..75: mol_type = other DNA
ctggatagccggaatagttctgcgtaaagaagcattaggcatgggcgatgtattactcttcgccgctttaggtgg

SEQ ID NO: 859681 - DNA, 75 bp, synthetic construct
  source 1..75: mol_type = other DNA
ctggcgtatcacgctggtattcaccgtgtttatgatggcgttgatggtcgtaccgctgagtgtggttaacccgcg

SEQ ID NO: 859682 - DNA, 75 bp, synthetic construct
  source 1..75: mol_type = other DNA
tatgcttaaaactgtctacacggtaaggctcgatctctataaccaccttcgttttagttatgaagagtgccctta

SEQ ID NO: 859683 - DNA, 75 bp, synthetic construct
  source 1..75: mol_type = other DNA
tgctgttcctgaccttaccgactgacgggcagggcggaagcttcatggcgttcttcgcggtcttcctggcgctgt

SEQ ID NO: 859684 - DNA, 75 bp, synthetic construct
  source 1..75: mol_type = other DNA
aaagtatttttgattttctatatcgcctgcgtggtgattacctgggcggtatatggtcggcattctaaaaaataa

SEQ ID NO: 859685 - DNA, 75 bp, synthetic construct
  source 1..75: mol_type = other DNA
tgctggcgcgaacttcgcatccagtatggcaaacatcagcttcttctttccgaaacagaagcagggtggcgcgct

SEQ ID NO: 859686 - DNA, 75 bp, synthetic construct
  source 1..75: mol_type = other DNA
gatggccgatagtcggcgtattattcaggttcatgtcaaaatcccggatgactcaccccagccaaagctggatga

SEQ ID NO: 859687 - DNA, 75 bp, synthetic construct
  source 1..75: mol_type = other DNA
tcatcatctctctgctgtgcggctttgctggcgcgaacttcgcatccagtatggcaaacatcagcttcttctttc

SEQ ID NO: 859688 - DNA, 75 bp, synthetic construct
  source 1..75: mol_type = other DNA
tgctgttcctgaccttaccgactgacggacagggcggaagcttcatggcgttcttcgcagtcttcctggcgctgt

SEQ ID NO: 859689 - DNA, 75 bp, synthetic construct
  source 1..75: mol_type = other DNA
ctgaaaatgctcggagaaaaaggtgtaagccatattcagataatgtgccccggatttgctgcggattgtctggaa

SEQ ID NO: 859690 - DNA, 75 bp, synthetic construct
  source 1..75: mol_type = other DNA
agcaggcgctggcacaacgtttaccggagacgcccgtagcgctgggcatgagctacggctcgccatcactggaaa

SEQ ID NO: 859691 - DNA, 75 bp, synthetic construct
  source 1..75: mol_type = other DNA
gcgccgtcgatgaactcctggcagagcatgtagatcatattgtggtgctgccgctttatccgcaattctcctgtt

SEQ ID NO: 859692 - DNA, 75 bp, synthetic construct
  source 1..75: mol_type = other DNA
ccagccgcaacctgtggatttccgttccctgtctgctgctggcgttttgcgtatggatgttgttcagtgctgttg

SEQ ID NO: 859693 - DNA, 75 bp, synthetic construct
  source 1..75: mol_type = other DNA
cgcgtgtggcgaagctgtacgcctcggtctggatggaaggtggctcgccgctgatggtttacagccgccagcaac

SEQ ID NO: 859694 - DNA, 75 bp, synthetic construct
  source 1..75: mol_type = other DNA
ttaacattgatgctcagcatcggctggaagcccgaaagtaaccaggactggtgtggtatgtcggcgctgatattc

SEQ ID NO: 859695 - DNA, 75 bp, synthetic construct
  source 1..75: mol_type = other DNA
gcccgtttatctggggacgaagccgcattatcagcaatgacagtgaaagggaatactttcgcctatgagtcattg

SEQ ID NO: 859696 - DNA, 75 bp, synthetic construct
  source 1..75: mol_type = other DNA
tgctgtcggaccagtattgtggacttgcggcatggaggtgtgtatacgaccgctcctgtagatactcaagagggg

SEQ ID NO: 859697 - DNA, 75 bp, synthetic construct
  source 1..75: mol_type = other DNA
ctgtatcgcggtctgaccaggttgccacttctgccaggcaaagggggccagggaaaaagcctttctctgccggaa

SEQ ID NO: 859698 - DNA, 75 bp, synthetic construct
  source 1..75: mol_type = other DNA
ggaaatggcggtttttacatgtcctcatggggtcataatttacatattgaaaatattggtttcagaaacgctgac

SEQ ID NO: 859699 - DNA, 75 bp, synthetic construct
  source 1..75: mol_type = other DNA
gactttccagaagggaagatgaccattgttattactcttgatgaagaactggtatccatgcaggaattaaccgta

SEQ ID NO: 859700 - DNA, 75 bp, synthetic construct
  source 1..75: mol_type = other DNA
cgttatctgcaatgacgataaagggtaattcgtttacctacgagtcaattgcggttttacaacaactgaaaaggg

SEQ ID NO: 859701 - DNA, 75 bp, synthetic construct
  source 1..75: mol_type = other DNA
agccgctgcctatatgaacaagattatcgagaaagagatcatgcgcgcaccggagcagtacctctggatccaccg

SEQ ID NO: 859702 - DNA, 75 bp, synthetic construct
  source 1..75: mol_type = other DNA
acgaaaagccgataacagcggataccgtttgtatatcaccccagaaatggaaggctacccgactgatgaaggtca

SEQ ID NO: 859703 - DNA, 75 bp, synthetic construct
  source 1..75: mol_type = other DNA
gcattgtcggtgcactgaagaaaggtgaagcggtatggtttgctcccgatcaggattatggtcgtaaaggcagct

SEQ ID NO: 859704 - DNA, 75 bp, synthetic construct
  source 1..75: mol_type = other DNA
gcgtatcggcacaatggcgcgaccattcctgaaacgtcgtgaatctatcgcccgtaaaaacctggaactttgttt

SEQ ID NO: 859705 - DNA, 75 bp, synthetic construct
  source 1..75: mol_type = other DNA
gagaagatcattgccgaaaactttcgctcgcttggtatggcgctggttgaaaccggaatggcgtggttctggccc

SEQ ID NO: 859706 - DNA, 75 bp, synthetic construct
  source 1..75: mol_type = other DNA
atgatcggcagaaataatctgcgcggtattgtcggtgcgctgaagaaaggtgaagcggtatggtttgctcccgat

SEQ ID NO: 859707 - DNA, 75 bp, synthetic construct
  source 1..75: mol_type = other DNA
attggtcgccggatcaacatcaccgatgtcgctatccaggacttaagttttgatctcgatgcgccaagggacagt

SEQ ID NO: 859708 - DNA, 75 bp, synthetic construct
  source 1..75: mol_type = other DNA
ccgtatgttcgctgttgcggctgatgagcagggtaaaggcattggcaagagtatgcttgcctcaatcatcgaagc

SEQ ID NO: 859709 - DNA, 75 bp, synthetic construct
  source 1..75: mol_type = other DNA
agcgacccggcggacggtgtggtagtaaacctgaataccgcttatatggatgccaataacgagaaggatttcacc

SEQ ID NO: 859710 - DNA, 75 bp, synthetic construct
  source 1..75: mol_type = other DNA
gtatttgttgaatgtgctattgaaacgggcgcagatatcggatggttagtgacaggggagcttgcaaaagcaaac

SEQ ID NO: 859711 - DNA, 75 bp, synthetic construct
  source 1..75: mol_type = other DNA
cccgtacccggagcggcattactctcatggtcttctaatccagctgaaactccgttgtgggcggctcagacggcg

SEQ ID NO: 859712 - DNA, 75 bp, synthetic construct
  source 1..75: mol_type = other DNA
gtgttgaaaaaactcatgcaaattaacatggctggttttgtcagattcgtgagtgaaacgactaacggggattga

SEQ ID NO: 859713 - DNA, 75 bp, synthetic construct
  source 1..75: mol_type = other DNA
acctttcttataaaccagatgtaattatagtttgggaaactccagcctattacttagaagagttatttccagagg

SEQ ID NO: 859714 - DNA, 75 bp, synthetic construct
  source 1..75: mol_type = other DNA
agtaggcgcatcttggcttgttgattgttctaactcaaagatcggtaatggtcgttggcttattggcattgatgg

SEQ ID NO: 859715 - DNA, 75 bp, synthetic construct
  source 1..75: mol_type = other DNA
agttggcgcatcttggcttgttgattgttctaactcaaagataggaaatggtcgttggcttattggcattgatgg

SEQ ID NO: 859716 - DNA, 75 bp, synthetic construct
  source 1..75: mol_type = other DNA
ctgccgcattggaacgtgtcctttctgcatacggctttaagcagcaaaaggaactagccgaaaggcttggcatac

SEQ ID NO: 859717 - DNA, 75 bp, synthetic construct
  source 1..75: mol_type = other DNA
tgatgccgattttcaatgctcagtttctgaggttaagtgtattggcatggtgctggtaagcctgacgaaatctag

SEQ ID NO: 859718 - DNA, 75 bp, synthetic construct
  source 1..75: mol_type = other DNA
agacccctcgatgataccctctgattcagatgaattgatttttgtcgaaggtgtgggctcctcttggcttgtcga

SEQ ID NO: 859719 - DNA, 75 bp, synthetic construct
  source 1..75: mol_type = other DNA
acctgacccatcaatgattcctgctaactctgatgatttggtttttgtagatggcgttagctcatcttggcttgt

SEQ ID NO: 859720 - DNA, 75 bp, synthetic construct
  source 1..75: mol_type = other DNA
tgccctgggttgcgaactgggagcaggagcttaaccgtcgcctgtttacccgtacagaacgggctgccgggtatt

SEQ ID NO: 859721 - DNA, 75 bp, synthetic construct
  source 1..75: mol_type = other DNA
cgtcgcgcagatttgctggtttctgctggcggaagcgcgttacctgcccgcccggctgatacaatcttcacctcc

SEQ ID NO: 859722 - DNA, 75 bp, synthetic construct
  source 1..75: mol_type = other DNA
atttcgaagaggtttacgcctgcctgcatgatttcgcccgtggttacgagtttcagccagaaaaagaagactatt

SEQ ID NO: 859723 - DNA, 75 bp, synthetic construct
  source 1..75: mol_type = other DNA
cagtttggtactaactggtcattctattccaactatgtgggcgatatattcggcgcgccgctggcgatggaagca

SEQ ID NO: 859724 - DNA, 75 bp, synthetic construct
  source 1..75: mol_type = other DNA
atcatgatcgtagggctttacaccctgttcttaatcgccgaagtctacctgatgcagaaatatgcccgtctgggg

SEQ ID NO: 859725 - DNA, 75 bp, synthetic construct
  source 1..75: mol_type = other DNA
gcaatcgtgagccgcatgtgttgcaggcattccgggaactggaagtgacctgggctacggcatgttgctctcccg

SEQ ID NO: 859726 - DNA, 75 bp, synthetic construct
  source 1..75: mol_type = other DNA
cagacgctctctagggcattgggagggcgatttagtctcaggtacaaaaaactctcatatagattcgtttttctg

SEQ ID NO: 859727 - DNA, 75 bp, synthetic construct
  source 1..75: mol_type = other DNA
cctggttgactgctctgtggtgcattcgtccgggaaatggaaaggcgtgcggcttgaacaggtggcggctgatgt

SEQ ID NO: 859728 - DNA, 75 bp, synthetic construct
  source 1..75: mol_type = other DNA
ttgaacctgccatcagaacgctggttgccaccctgaatgctcacggttacagaacatatgcatcctgtcagggac

SEQ ID NO: 859729 - DNA, 75 bp, synthetic construct
  source 1..75: mol_type = other DNA
tggtaagcgtgaatgctgctaacccggcaggagattttaagcccccaaaaaacgatgagggaaaaaccaatgaat

SEQ ID NO: 859730 - DNA, 75 bp, synthetic construct
  source 1..75: mol_type = other DNA
cgctgttgacaatcaactttattgtcgtcaccaaaggggccgagcgtatttccgaggtttctgcccgctttacct

SEQ ID NO: 859731 - DNA, 75 bp, synthetic construct
  source 1..75: mol_type = other DNA
gaaaagcctgccggatattcacagccgcgccaacaatcctaccagcaggatgatgcgttttgcccaactctctac

SEQ ID NO: 859732 - DNA, 75 bp, synthetic construct
  source 1..75: mol_type = other DNA
tgttccttatcgccgaagtctacctgatgcagaaatatgctcgcctggggccgagtgcgatgcagagtgaacaac

SEQ ID NO: 859733 - DNA, 75 bp, synthetic construct
  source 1..75: mol_type = other DNA
atggaacagaaaatattatccgcagaaccccgcagaaccccgcagaaccccgcagaaccccgcagaacattttca

SEQ ID NO: 859734 - DNA, 75 bp, synthetic construct
  source 1..75: mol_type = other DNA
atggaacagaaaatattatccgcagaaccctgcagaacattatccgcagaaccctgcagaacattttcaaatgag

SEQ ID NO: 859735 - DNA, 75 bp, synthetic construct
  source 1..75: mol_type = other DNA
cgtcttccggtaacgacctcttctgacactggcgttgaattattacctgtagaaataacgccggatgagcagaaa

SEQ ID NO: 859736 - DNA, 75 bp, synthetic construct
  source 1..75: mol_type = other DNA
agcggcgaaaaaatgcgcaaagccccgatcctgtttcactacaccaatcttgccgaagggatgacagagcggcga

SEQ ID NO: 859737 - DNA, 75 bp, synthetic construct
  source 1..75: mol_type = other DNA
tggatttcattagtgctatggatatatcagcaccaacccccagctctatgaatgaaagtacggcgaagggaatat

SEQ ID NO: 859738 - DNA, 75 bp, synthetic construct
  source 1..75: mol_type = other DNA
tgacacgcccactggtcatgcctgccccggaaaaggttccggatgtcagcgaaccggtaaccgctccggataact

SEQ ID NO: 859739 - DNA, 75 bp, synthetic construct
  source 1..75: mol_type = other DNA
gctgacgatgatggctggactatatgcacggtccgggatatccgtagttgttacgccagtctccagggacagtgt

SEQ ID NO: 859740 - DNA, 75 bp, synthetic construct
  source 1..75: mol_type = other DNA
ttcaacctcctgtcggaaatcaaagatcctatcgaattaaacatgatgcttaaacgagttataaaagaaatcacg

SEQ ID NO: 859741 - DNA, 75 bp, synthetic construct
  source 1..75: mol_type = other DNA
catgaatgtggtggtgctcttgtcagaaaatttcatgttgcttctggaaaaacataccaatatcacgtctgtgct

SEQ ID NO: 859742 - DNA, 75 bp, synthetic construct
  source 1..75: mol_type = other DNA
cggatgagcagaaagaacctgtggcggccattgcgccgtctttatccacttccactcagaccagagtcagtgcca

SEQ ID NO: 859743 - DNA, 75 bp, synthetic construct
  source 1..75: mol_type = other DNA
cgtgcagggaaagcgagtaaagacccggaaaagcgtaaagccagtgcatggctgttcaacccgcagcaaccagtg

SEQ ID NO: 859744 - DNA, 75 bp, synthetic construct
  source 1..75: mol_type = other DNA
atccgtgaggttgtcagtatgaaccctggtcgtgtctgcatgctggatcatgatggggtagtggcaacgggcgcg

SEQ ID NO: 859745 - DNA, 75 bp, synthetic construct
  source 1..75: mol_type = other DNA
atgagtttacctgcaggctattaccggattgacccggacatccgtgcactggtggccgcgatgaacgttcacgga

SEQ ID NO: 859746 - DNA, 75 bp, synthetic construct
  source 1..75: mol_type = other DNA
cgcggtgaaaaacgtcattgcgattggtgcggggatgtctgacggtatcggttttggggcgaatgcgcgaacggc

SEQ ID NO: 859747 - DNA, 75 bp, synthetic construct
  source 1..75: mol_type = other DNA
gcgtctgttacaggacgtagcgcgcgaggcgttaggcgatcaaattccactggcggttatctctggcccgacttt

SEQ ID NO: 859748 - DNA, 75 bp, synthetic construct
  source 1..75: mol_type = other DNA
gtgccgatcctgccacctttatgggcatggcgggctgggcgatctggtgcttacctgtaccgacaaccagtcgcg

SEQ ID NO: 859749 - DNA, 75 bp, synthetic construct
  source 1..75: mol_type = other DNA
gttctaattcatttgctagttatttacaagcaaaagaaagatttacaccaatggtaatcattcagtcgtttgctg

SEQ ID NO: 859750 - DNA, 75 bp, synthetic construct
  source 1..75: mol_type = other DNA
tcttatttggtaattccaatgtcattgcatgcatttctttagggctttcggttataactgtaaatgttttttcaa

SEQ ID NO: 859751 - DNA, 75 bp, synthetic construct
  source 1..75: mol_type = other DNA
atattgcgctttagcaattgcatttcttttttttgcattaatctttctgattgcgaatgttaacggggggaagga

SEQ ID NO: 859752 - DNA, 75 bp, synthetic construct
  source 1..75: mol_type = other DNA
cagccgcaaaagcgttaaccacgctgatgcacgcgctgattgatattgaatgcacggcagagcttgcgcagaaca

SEQ ID NO: 859753 - DNA, 75 bp, synthetic construct
  source 1..75: mol_type = other DNA
gcatcaccgttaagcaagtgcccgtggaagaagatgcctataacactaaggaaggtgcgaacaagttcctgatat

SEQ ID NO: 859754 - DNA, 75 bp, synthetic construct
  source 1..75: mol_type = other DNA
aatagccgcaatcgaatgtgctcaaatgccaaacctgaaagaacttaaacaaatgatgaattcagattcagcgac

SEQ ID NO: 859755 - DNA, 75 bp, synthetic construct
  source 1..75: mol_type = other DNA
gtcttcgaatgctcgacgtgagagttcttggtatgtatccgttcgccagtgcggattctactaatgttgctgtta

SEQ ID NO: 859756 - DNA, 75 bp, synthetic construct
  source 1..75: mol_type = other DNA
agaaaatccccggttaagctccatggattgaggatgctagatgtcagggtgcttgggatgtatccattcgccagc

SEQ ID NO: 859757 - DNA, 75 bp, synthetic construct
  source 1..75: mol_type = other DNA
gaacgcggatccgtatgttgcgcatatccacatcattaagctggataccatcacggcgcatcacctcagcaacaa

SEQ ID NO: 859758 - DNA, 75 bp, synthetic construct
  source 1..75: mol_type = other DNA
gcttggctcatggaaagaacgtagtgacctggagcgtgagctgaacacctggattcgccagtatgttgctgacca

SEQ ID NO: 859759 - DNA, 75 bp, synthetic construct
  source 1..75: mol_type = other DNA
gtggaatatctggtcgtcgatgtcgctggcgaaacccgcgagttgcgcctggataaaattaccagctttagccat

SEQ ID NO: 859760 - DNA, 75 bp, synthetic construct
  source 1..75: mol_type = other DNA
gaaaaggaaactgacccggacaagtttaaaaaagcgatagtcatcgtggagtacctgggcgagcagggccgtctt

SEQ ID NO: 859761 - DNA, 75 bp, synthetic construct
  source 1..75: mol_type = other DNA
cgctgcaggcgtaactaagtcgcagattgcaaaaacgctggggaaatcacctgcctttgtcacgcaacacgccgc

SEQ ID NO: 859762 - DNA, 75 bp, synthetic construct
  source 1..75: mol_type = other DNA
gcttcagcccgaagccccttattactggtataaccggtactgtcgtcactcgttatgtgctgatttcaggacact

SEQ ID NO: 859763 - DNA, 75 bp, synthetic construct
  source 1..75: mol_type = other DNA
gcttcagccggaaggtccgcattgctggtatcaccggtactgtcgtcgttcactgcgtgcagacttcaggacgct

SEQ ID NO: 859764 - DNA, 75 bp, synthetic construct
  source 1..75: mol_type = other DNA
aaactggctgcccgctttgattatgtgtttgttgatacgccaggaatgaaatctccggccttcgttaaggcactg

SEQ ID NO: 859765 - DNA, 75 bp, synthetic construct
  source 1..75: mol_type = other DNA
taaggttgtaccagcctttgaacaggttttgccatttacagaatggcaaggggctggacgtttgatgtattatct

SEQ ID NO: 859766 - DNA, 75 bp, synthetic construct
  source 1..75: mol_type = other DNA
cgattctgtttcactacaccaatcttgccgaggggatgacagagcagagactggaaacggatgtttatgtgccgt

SEQ ID NO: 859767 - DNA, 75 bp, synthetic construct
  source 1..75: mol_type = other DNA
cgcatctgtgatgaataataatcatctcgatttctgttttattcaggccggaaaacgttacctgattgcccctga

SEQ ID NO: 859768 - DNA, 75 bp, synthetic construct
  source 1..75: mol_type = other DNA
aggagctggctgacaccatcaaagcgcggggtgtaaaaatgccaatttccgtgcgtgaaaacccggagcaggcgg

SEQ ID NO: 859769 - DNA, 75 bp, synthetic construct
  source 1..75: mol_type = other DNA
tataaatgctcaaatggcgatatttaaaaatatcgctataattataatgggggggtttttatgtggattgtttcg

SEQ ID NO: 859770 - DNA, 75 bp, synthetic construct
  source 1..75: mol_type = other DNA
tcttggtgaagctttgcatttatctggatatgtttttccgtctaaggcgttagttatggatattagatcttatgc

SEQ ID NO: 859771 - DNA, 75 bp, synthetic construct
  source 1..75: mol_type = other DNA
ttatcaatagcctgctgttgctgaacagcggcaccacaacagcggtagataatctgcactttaccggcaatttaa

SEQ ID NO: 859772 - DNA, 75 bp, synthetic construct
  source 1..75: mol_type = other DNA
aacagaagatagtgaacagcccggttttctggcctttgacgcctcgtcttctgcctccggcgctgggattggtat

SEQ ID NO: 859773 - DNA, 75 bp, synthetic construct
  source 1..75: mol_type = other DNA
atgaagaaaaagcgtacgttgttttttattagtagcctgatgttgctgggcagtggaaccacaatagcaggagat

SEQ ID NO: 859774 - DNA, 75 bp, synthetic construct
  source 1..75: mol_type = other DNA
agtcacgctcacgggggtagaagacagcgaacaacccggttttctggcactggatacgtcatcaaccgctcaggg

SEQ ID NO: 859775 - DNA, 75 bp, synthetic construct
  source 1..75: mol_type = other DNA
cgctcccgctgaatcagggaaataacagcctaaattttaatacctggttacaggcaatggatttgcccctatatt

SEQ ID NO: 859776 - DNA, 75 bp, synthetic construct
  source 1..75: mol_type = other DNA
caatatcactggtttaggcattcagctcaaacaggcagggcagagttttacgatcaatacgccacttatggtgaa

SEQ ID NO: 859777 - DNA, 75 bp, synthetic construct
  source 1..75: mol_type = other DNA
catgagttacaggatacacgcgaaaacttcgttcagggggtgcaaaataccgttgcagaagacttgtcgaaaaac

SEQ ID NO: 859778 - DNA, 75 bp, synthetic construct
  source 1..75: mol_type = other DNA
ttgaagctgaacgtgaagttcgcattaaagagatcgaacagcagcaggtcaccgaaatcgctaaccagacgaaat

SEQ ID NO: 859779 - DNA, 75 bp, synthetic construct
  source 1..75: mol_type = other DNA
tgctcaatgaaattggcgtttcaggcggctcactggcggcattgacttcacccttaacctcaacaactcccgtcg

SEQ ID NO: 859780 - DNA, 75 bp, synthetic construct
  source 1..75: mol_type = other DNA
ccgggtgccggtggtctttaagctgaaagactgcaaaggcccggcgaattaccaggtcaaagtcaccctgaccgg

SEQ ID NO: 859781 - DNA, 75 bp, synthetic construct
  source 1..75: mol_type = other DNA
tagcctcaattttaatgcgtggttacaggcgaaaagcggtcgtgacgtaacttcaggtgagttcagcgccagcct

SEQ ID NO: 859782 - DNA, 75 bp, synthetic construct
  source 1..75: mol_type = other DNA
tttgacgccgaaggtttaaccaagctgacgcaggaaacagaacgccgtcgccgcgagcgtaacgaagttgaacag

SEQ ID NO: 859783 - DNA, 75 bp, synthetic construct
  source 1..75: mol_type = other DNA
cactctcaacttcaatgcctggttacagacaaaaagtgggcgggatgtgacgcccggtgatttcagcgccacggc

SEQ ID NO: 859784 - DNA, 75 bp, synthetic construct
  source 1..75: mol_type = other DNA
tccggatgataaaaaaataagcaaaataaaggaatcaattgccagctaccgcaacgttggccttttgctcctcaa

SEQ ID NO: 859785 - DNA, 75 bp, synthetic construct
  source 1..75: mol_type = other DNA
gcggctatacgccatttgaagccgatgtcacgccgtatgttattgccgggaaaagtgtacgtatcaccgtttgtg

SEQ ID NO: 859786 - DNA, 75 bp, synthetic construct
  source 1..75: mol_type = other DNA
cggtacagaagacagtgaacagcccggttttctggcgctggatgtatcttcggcggcgcaaggtgtcggaattgg

SEQ ID NO: 859787 - DNA, 75 bp, synthetic construct
  source 1..75: mol_type = other DNA
tgaggccgcagtagaactgacctttacctacaaccaaaacggccatgagactgaattcaccgtcacgcgaagctg

SEQ ID NO: 859788 - DNA, 75 bp, synthetic construct
  source 1..75: mol_type = other DNA
ataattttcgagtatttaacggtactcacacaattgaccttgctccaagaaagcgtccgcatgaagtaaatcctc

SEQ ID NO: 859789 - DNA, 75 bp, synthetic construct
  source 1..75: mol_type = other DNA
cagtaatgccattaaaaatatcacctcggaaaatcttgatgcgcgtctggaaccctcacgtgtgcccattgagct

SEQ ID NO: 859790 - DNA, 75 bp, synthetic construct
  source 1..75: mol_type = other DNA
ggtcaggttgtcgacatgcttaatggtgcagtaccgaaagcgccgttcgacagctggctgaacgaatctctttaa

SEQ ID NO: 859791 - DNA, 75 bp, synthetic construct
  source 1..75: mol_type = other DNA
ccgtcagcaaccgggatttgatggtatctgggcagtccgcgcatctgccggttgtgtttaagctgaaagactgca

SEQ ID NO: 859792 - DNA, 75 bp, synthetic construct
  source 1..75: mol_type = other DNA
tatcaacggtaacaatgacattaacttcagggcctggatccaggcgaaaagcggtcgggatgtgacgatcggtga

SEQ ID NO: 859793 - DNA, 75 bp, synthetic construct
  source 1..75: mol_type = other DNA
agtatgaggttcgggtgacgctcaccggcacagaagacagcgaacagcccggttttctggcgctggatgtatctt

SEQ ID NO: 859794 - DNA, 75 bp, synthetic construct
  source 1..75: mol_type = other DNA
caacgccctgcgttataccccagagggacaggcaatcaccgtctcaataagagagcaggagagcttttttgacct

SEQ ID NO: 859795 - DNA, 75 bp, synthetic construct
  source 1..75: mol_type = other DNA
cgatcatgattttcaaaaacggtcaggttgtcgacatgcttaatggcgcagtaccgaaagcgccgttcgatagct

SEQ ID NO: 859796 - DNA, 75 bp, synthetic construct
  source 1..75: mol_type = other DNA
atggatgatatcgttaattctgtgccctcctggatgtttaccgcgattatcgccgtatgcattctgtttattatt

SEQ ID NO: 859797 - DNA, 75 bp, synthetic construct
  source 1..75: mol_type = other DNA
agtatcacgtaagcacatggacggatggacgccggtattcaacagcggtcagctgatgttcgatgatatcgacct

SEQ ID NO: 859798 - DNA, 75 bp, synthetic construct
  source 1..75: mol_type = other DNA
cgggtggtcgccgattcgttgggaaattttttgcccgtgagccctaccagcgcgacggcggaccagcctcagggc

SEQ ID NO: 859799 - DNA, 75 bp, synthetic construct
  source 1..75: mol_type = other DNA
atcgacaccgtgaaattcgatcagctgaaaccggtgtttgaaaccctgcttccgcgtatcgctgaggaactgtct

SEQ ID NO: 859800 - DNA, 75 bp, synthetic construct
  source 1..75: mol_type = other DNA
gacgaaggtgttcgatcagggcgcgctgatgttcgacgatatcgacctgttcacgatgctgcagctggtggcgcg

SEQ ID NO: 859801 - DNA, 75 bp, synthetic construct
  source 1..75: mol_type = other DNA
ggtatcgcggcgtcatatggatggatgggttccggtatttacccggggcgaactgatgtttgatgatattgacct

SEQ ID NO: 859802 - DNA, 75 bp, synthetic construct
  source 1..75: mol_type = other DNA
cgggtggtcgccgattcgctaggaaattttttgcaaggacaccctaccaaagagacgcccatcccgccagcggaa

SEQ ID NO: 859803 - DNA, 75 bp, synthetic construct
  source 1..75: mol_type = other DNA
atggaattcgaaatcaaaggcgtgaaatatcgcgcggcaaaactcagcgtttttgaccagctgaaagtgacccgc

SEQ ID NO: 859804 - DNA, 75 bp, synthetic construct
  source 1..75: mol_type = other DNA
cgattattcatccctgtcttgcggtggtgtcgcggcgtcatatggacggatgggttccggtatttacccagggtg

SEQ ID NO: 859805 - DNA, 75 bp, synthetic construct
  source 1..75: mol_type = other DNA
ttttgaccagctgaaagtgacccgtaaacttcttccggtgctggcgggaatgatgtcagatttcgggagcattcg

SEQ ID NO: 859806 - DNA, 75 bp, synthetic construct
  source 1..75: mol_type = other DNA
ggtgtcgcggcgtcatatggacggatgggttccggtatttacccagggcgaactgatgtttgatgatattgactt

SEQ ID NO: 859807 - DNA, 75 bp, synthetic construct
  source 1..75: mol_type = other DNA
ggtggtcgcggattctctgggaaattttttgcaaggacttcctaccggcgagacgaataccctgccagtggaata

SEQ ID NO: 859808 - DNA, 75 bp, synthetic construct
  source 1..75: mol_type = other DNA
tgggtgccggtatttaccaagggcgaactgatgtttgatgatattgacctgttggtcatgcttcatctggtggcg

SEQ ID NO: 859809 - DNA, 75 bp, synthetic construct
  source 1..75: mol_type = other DNA
attgtgccgtctttatccacttccactcagaccagagtcagtgccagttcctgcaaggtggagttccgtcacggt

SEQ ID NO: 859810 - DNA, 75 bp, synthetic construct
  source 1..75: mol_type = other DNA
cgctagtatttatggactgctgaccggaactgattacggcgttgtatttggcgcatttgcaggggctgtattcta

SEQ ID NO: 859811 - DNA, 75 bp, synthetic construct
  source 1..75: mol_type = other DNA
ttttcgcatgatgcgttattccattgcggcaatgcaaaaccatcttgatgcgggctataaagagctggatttgcc

SEQ ID NO: 859812 - DNA, 75 bp, synthetic construct
  source 1..75: mol_type = other DNA
gcgcgctgtttgcgcgttatccgccgcttacaggaatctacaggattacgtattcagtctacgtttcttggggcg

SEQ ID NO: 859813 - DNA, 75 bp, synthetic construct
  source 1..75: mol_type = other DNA
cgggcggcgtaaaggttgccgatgttattgaaagtcaggctccggacaaactggtttatgagccgggtaatccgc

SEQ ID NO: 859814 - DNA, 75 bp, synthetic construct
  source 1..75: mol_type = other DNA
ggttctctgccaaaaatcgacgtaaaaagcgtcttatcctggctagcgtgattggtgctgcgattgcgttgtctg

SEQ ID NO: 859815 - DNA, 75 bp, synthetic construct
  source 1..75: mol_type = other DNA
ctggcgaacttgaccggatacagtgataaacctctggatgctattggtgccgtaatcgtctctgctttagccgtt

SEQ ID NO: 859816 - DNA, 75 bp, synthetic construct
  source 1..75: mol_type = other DNA
atttatactaatgctgaagaattagtcggtaagccattccgcgatcttggggaagtcagtggtgattcttgccag

SEQ ID NO: 859817 - DNA, 75 bp, synthetic construct
  source 1..75: mol_type = other DNA
gtcaccagcggtacgccaggctgctatcgtcaggctgtatgtatcggttctgcgcttaacattacggcgaaatga

SEQ ID NO: 859818 - DNA, 75 bp, synthetic construct
  source 1..75: mol_type = other DNA
tagcactcatgctgagcggctgttccatgttaagcagatcccctgtcgaacccgttcaaagcaccgcaccccagc

SEQ ID NO: 859819 - DNA, 75 bp, synthetic construct
  source 1..75: mol_type = other DNA
tcagtacgctggaaataaaatccggttatggcttgacgctggaagatgaagcgcgctgtttgcgcgttatccgcc

SEQ ID NO: 859820 - DNA, 75 bp, synthetic construct
  source 1..75: mol_type = other DNA
ttactgtcacgcccccggcgcactgtgacagtgtctggcgcggcgccacgctggtcaccatgcaggatggccgtt

SEQ ID NO: 859821 - DNA, 75 bp, synthetic construct
  source 1..75: mol_type = other DNA
gatctggtctatggttacctgccaatgggctggagcgtagaacaatggcgtgctgcacagcaggatccacaacag

SEQ ID NO: 859822 - DNA, 75 bp, synthetic construct
  source 1..75: mol_type = other DNA
agtcgatcaccgactggtatgcacaaaaagaacgcggcacggcgctggggatttttaactcatctaccgttatcg

SEQ ID NO: 859823 - DNA, 75 bp, synthetic construct
  source 1..75: mol_type = other DNA
ataagataaaaaaatctcaccttatgttgatgcgcgagagatataaaaaattcaataaagaatacgaaatcgcaa

SEQ ID NO: 859824 - DNA, 75 bp, synthetic construct
  source 1..75: mol_type = other DNA
agcgtaaaatgtcaattggattaatatctgttcttgatgtagagatgagatataatatattacaaaaaatcaggt

SEQ ID NO: 859825 - DNA, 75 bp, synthetic construct
  source 1..75: mol_type = other DNA
atggggcataattgggggcattgctggttcgattgtaaatgtgcccccaatatgtccagaaataccctcaacaaa

SEQ ID NO: 859826 - DNA, 75 bp, synthetic construct
  source 1..75: mol_type = other DNA
tatcggtctgattaatctcggtcatatgctggaagcgcgcgcacgtcagcgttcttctaaggcgctggagaaatt

SEQ ID NO: 859827 - DNA, 75 bp, synthetic construct
  source 1..75: mol_type = other DNA
tgttgccattgaaaccgcggcgattaccctgatgcgccatagcctgatgggtgttgcggatgcgctcgctatttc

SEQ ID NO: 859828 - DNA, 75 bp, synthetic construct
  source 1..75: mol_type = other DNA
aatttgttctcggaaattattaactataagataaaaaaatctcacctgatgttgatgctcgagagatataggaag

SEQ ID NO: 859829 - DNA, 75 bp, synthetic construct
  source 1..75: mol_type = other DNA
taagttttcgggtaaatggcggaagtttaaaaatggtggagggctttaccagttgtctccatcattaaatcaaga

SEQ ID NO: 859830 - DNA, 75 bp, synthetic construct
  source 1..75: mol_type = other DNA
cgttttacgccgcatccagcaagttacaacaaacaacctttaaccatgctttttgatgtttttcagcaatacccc

SEQ ID NO: 859831 - DNA, 75 bp, synthetic construct
  source 1..75: mol_type = other DNA
atccagcggtgatgcccatcctggcaaccgttggaggattgatcatcggcagttttttgaatgtggtgatttggc

SEQ ID NO: 859832 - DNA, 75 bp, synthetic construct
  source 1..75: mol_type = other DNA
gatggtgcagtggtgggctgattatttggaacagaataaactaaaaatgataacaccttttgattatggaaaaag

SEQ ID NO: 859833 - DNA, 75 bp, synthetic construct
  source 1..75: mol_type = other DNA
acgacactaaaactgaagtttgcggacatggttttagaacgatggctcgtggtgcgttgggagagtcggggctct

SEQ ID NO: 859834 - DNA, 75 bp, synthetic construct
  source 1..75: mol_type = other DNA
ctggcgaggttggtccgggtttctatcaagttatttcgcttgatcatgaacaagcaggcagaaccattgccccct

SEQ ID NO: 859835 - DNA, 75 bp, synthetic construct
  source 1..75: mol_type = other DNA
ataccacgctatcaaggattattcgtatggtgcgccaggcccagagcagcaagccagaaatcggtcagctggcgg

SEQ ID NO: 859836 - DNA, 75 bp, synthetic construct
  source 1..75: mol_type = other DNA
caccgccattgggtttaacgccctgtccacggccagaagtgcactggctcttggcagtgaatcatctgcaacctc

SEQ ID NO: 859837 - DNA, 75 bp, synthetic construct
  source 1..75: mol_type = other DNA
gctgcaggagacctgtctgtgtccctgggctcaataagctctgccaacgggacggctgctaatgcactgggagcc

SEQ ID NO: 859838 - DNA, 75 bp, synthetic construct
  source 1..75: mol_type = other DNA
agcggaaaaggtaatagcggaaatgtaacgctgtcatccaaagataataacttgatactgtctggtggtaataat

SEQ ID NO: 859839 - DNA, 75 bp, synthetic construct
  source 1..75: mol_type = other DNA
ggcccggacagcggtagcctggcaaagcaagttgtggtctggtgtgatggacgtaagccggaagcataccaatgg

SEQ ID NO: 859840 - DNA, 75 bp, synthetic construct
  source 1..75: mol_type = other DNA
atgagtaaaaattaccgcagtgatgcgcttgcatccgtacatgaaatgatggaatcgcttcatgatatcggcgca

SEQ ID NO: 859841 - DNA, 75 bp, synthetic construct
  source 1..75: mol_type = other DNA
gcgaccctttctccggatacgttcagtgaactgaccactgccgacggaagcaaccgtaccacgacaggtaccgta

SEQ ID NO: 859842 - DNA, 75 bp, synthetic construct
  source 1..75: mol_type = other DNA
tcaattaaaagagtgtaaaactatagattttcagacgctgttaaccgaaagtaataaatcaaagattaaatcaat

SEQ ID NO: 859843 - DNA, 75 bp, synthetic construct
  source 1..75: mol_type = other DNA
aggtctaataacttaaaaacaatgctacctgatgtttctataggattagggcagtatataaataataacaagagg

SEQ ID NO: 859844 - DNA, 75 bp, synthetic construct
  source 1..75: mol_type = other DNA
aggttgtcgcagtgaaaacgtttgctgatgttgatgaagcgcaggcattgcgtctggcggcggcactggagcaag

SEQ ID NO: 859845 - DNA, 75 bp, synthetic construct
  source 1..75: mol_type = other DNA
taatactctggctgttggtgaacagtccacagcaaataaaaacgatgctattgctgttggttctaaggcaaatgc

SEQ ID NO: 859846 - DNA, 75 bp, synthetic construct
  source 1..75: mol_type = other DNA
ggtgaaagcgccattgcaataggtgtgtcccgaatctccgataacggtaagatgataatgaaactgaatgcaggt

SEQ ID NO: 859847 - DNA, 75 bp, synthetic construct
  source 1..75: mol_type = other DNA
ctcgcctgctgcgggtggaaagtctgcgtcagcaaccattgctgttaatgcaggcaaaggtggattaacagatgc

SEQ ID NO: 859848 - DNA, 75 bp, synthetic construct
  source 1..75: mol_type = other DNA
atggaaagccgcgattacttgcgttggcagatacctgtaggccggataaggcgttttacgccgcatccggcaagt

SEQ ID NO: 859849 - DNA, 75 bp, synthetic construct
  source 1..75: mol_type = other DNA
tgaatgtggcgttatgtacggttatcgtgctgacgctctttttttatcgtcgtcgtgattccagacataaaccgc

SEQ ID NO: 859850 - DNA, 75 bp, synthetic construct
  source 1..75: mol_type = other DNA
gagctgggaactgccatcgaatggggcggggactggcggacgcttaaagacggcccacattttcaattgaagcga

SEQ ID NO: 859851 - DNA, 75 bp, synthetic construct
  source 1..75: mol_type = other DNA
aggttgatttcggtattacggaaggcctgcgcagtaagtatcgccagaaacagctggttgcagaagggaaaagcc

SEQ ID NO: 859852 - DNA, 75 bp, synthetic construct
  source 1..75: mol_type = other DNA
gcggcattagtttacgggctttactacaatttattcctcgacttcgaacagacccatcatattgttcgcggcagc

SEQ ID NO: 859853 - DNA, 75 bp, synthetic construct
  source 1..75: mol_type = other DNA
gttgaaagtgttgatctggcaggcactttctctacttaccctaatcctcatatcaattttgtgcaggctttcgca

SEQ ID NO: 859854 - DNA, 75 bp, synthetic construct
  source 1..75: mol_type = other DNA
atgagtcaaacatcaaccttgaaaggccagtgcattgctgaattcctcggtaccgggttgttgatttttttcggt

SEQ ID NO: 859855 - DNA, 75 bp, synthetic construct
  source 1..75: mol_type = other DNA
agcctgacggcccggacggatattaacagtaccggcgggctgctgcaggctacggacagcctgctggcgatggcc

SEQ ID NO: 859856 - DNA, 75 bp, synthetic construct
  source 1..75: mol_type = other DNA
gggataaaatgcacagtaactacgacagtgtgcaggagcagacagggatttttgccggcaggggcgggtttgatg

SEQ ID NO: 859857 - DNA, 75 bp, synthetic construct
  source 1..75: mol_type = other DNA
acaacagctggcaggagatacaccgctgaaagaggttcggccggggatctatactgcaaaactggagaacggtac

SEQ ID NO: 859858 - DNA, 75 bp, synthetic construct
  source 1..75: mol_type = other DNA
taatgttgtccgcttgccgccatttcatcatcactgattggcgtggcgttttttgccagcactcccgctttgcgt

SEQ ID NO: 859859 - DNA, 75 bp, synthetic construct
  source 1..75: mol_type = other DNA
ccaagattattggccgtttttcgccatttttaatgtccgctattggtcattaatgttgtccgcttgccgccattt

SEQ ID NO: 859860 - DNA, 75 bp, synthetic construct
  source 1..75: mol_type = other DNA
atgattgccggggcatggtatctggggcctgctgcttcggtcggtaaaatggtcagtggtggagtcgtcgcggag

SEQ ID NO: 859861 - DNA, 75 bp, synthetic construct
  source 1..75: mol_type = other DNA
ggcatttaagcaagcagcagcagaatatggagaaaacatcgaatggggaggagactggaaaaaactaaaagacgg

SEQ ID NO: 859862 - DNA, 75 bp, synthetic construct
  source 1..75: mol_type = other DNA
gggtacaaagggttggagaatcgattatttaggcgaggagcatgctgttacatttgaagatcagttgtttataca

SEQ ID NO: 859863 - DNA, 75 bp, synthetic construct
  source 1..75: mol_type = other DNA
cgccgcaggggttgagcatcccggcggggacgatgatacttgtggacccgcacgcgccagctattgacggcaaac

SEQ ID NO: 859864 - DNA, 75 bp, synthetic construct
  source 1..75: mol_type = other DNA
caaaagacatcgagcggcttaaattcatcgacgccatagacaacggagataaaccaggtgatgcatggtgtgatt

SEQ ID NO: 859865 - DNA, 75 bp, synthetic construct
  source 1..75: mol_type = other DNA
gacgcagttaccggcgtcctggtgggatttatcactttttactccctgcgctggatagccggaataattctgcgt

SEQ ID NO: 859866 - DNA, 75 bp, synthetic construct
  source 1..75: mol_type = other DNA
tatcactttttactccctgcgctggatagccggaatagttctgcgtaaagaagcattaggcatgggcgatgtatt

SEQ ID NO: 859867 - DNA, 75 bp, synthetic construct
  source 1..75: mol_type = other DNA
tgtgacctatatatggacaggcaaacgctgggcatacctcgctgttgttctcgacctgttcgcaagaaaaccagt

SEQ ID NO: 859868 - DNA, 75 bp, synthetic construct
  source 1..75: mol_type = other DNA
gtactggcgtggcgtggctctattcaatgagcgtcaacctgtggccgcagtggttcccgatggaagcgcgacatc

SEQ ID NO: 859869 - DNA, 75 bp, synthetic construct
  source 1..75: mol_type = other DNA
cgttaccgggactgccagtgcagaacagctgatcgaaaccatcaaacaagcgggttatgacgcatctgtaagcca

SEQ ID NO: 859870 - DNA, 75 bp, synthetic construct
  source 1..75: mol_type = other DNA
tgaacagccgccacctgacaggtgatgcggtggatgttgttgcttacatgggcagccaggtgtcatggaactggc

SEQ ID NO: 859871 - DNA, 75 bp, synthetic construct
  source 1..75: mol_type = other DNA
gggcagtgcctccccacaagatttagtgcaggcagtggaaaaagcgggctacggcgcggaagcgattgaagatga

SEQ ID NO: 859872 - DNA, 75 bp, synthetic construct
  source 1..75: mol_type = other DNA
gggacgctgaccgaagggaagccgcaggttgtcgcagtaaaaacatttgctgatgttgatgaagcgcaggcattg

SEQ ID NO: 859873 - DNA, 75 bp, synthetic construct
  source 1..75: mol_type = other DNA
caactgccgcaggtcaacagcttccgtacattgcgtgggctgggcgtgagcggtgaagcagaaggtcatgcgtta

SEQ ID NO: 859874 - DNA, 75 bp, synthetic construct
  source 1..75: mol_type = other DNA
gccgggcctaaaggcgctgcgcaacgtctggggctgaaacgcacgactctgctgtcacgaatgaagcgactggga

SEQ ID NO: 859875 - DNA, 75 bp, synthetic construct
  source 1..75: mol_type = other DNA
gcggcgaccttgccgaaacattcaaatcagagcgggacacaacaaagaaccagatccgtgttgctttgcctggca

SEQ ID NO: 859876 - DNA, 75 bp, synthetic construct
  source 1..75: mol_type = other DNA
cagatccgtgtcgccttgcctggcattattcagtcattcgaccctgacgcggttacggcggttgtgcagcctgct

SEQ ID NO: 859877 - DNA, 75 bp, synthetic construct
  source 1..75: mol_type = other DNA
tcattcagtcgttcgatcctgacgctgtaacctgcacagtagaagtggcgcttcgcggtattgttggcgacggct

SEQ ID NO: 859878 - DNA, 75 bp, synthetic construct
  source 1..75: mol_type = other DNA
cgcagcctgattcgctttctggaagagggtgacaaagccaaaatcacactgcgtttccgtggtcgtgagatggcg

SEQ ID NO: 859879 - DNA, 75 bp, synthetic construct
  source 1..75: mol_type = other DNA
ccgccggtttgtcgtataatggattatggcaaattcctctatgaaaagagcaagtcttctaaggaacagaagaaa

SEQ ID NO: 859880 - DNA, 75 bp, synthetic construct
  source 1..75: mol_type = other DNA
caactggcaggggatcgttgagtctctgaccttgcccaaatttacccggaagtttgagaagtatcgcgccggcgg

SEQ ID NO: 859881 - DNA, 75 bp, synthetic construct
  source 1..75: mol_type = other DNA
cgaactgctgttattcaagcagatgggagctgccacggtggacggtatccagttgcgttttaccggctctattca

SEQ ID NO: 859882 - DNA, 75 bp, synthetic construct
  source 1..75: mol_type = other DNA
ccagcgcgacgataccggcgaaacggtggccgtcgaagtggtcatgcgtggccgtcagaaagaaatcgacaccgg

SEQ ID NO: 859883 - DNA, 75 bp, synthetic construct
  source 1..75: mol_type = other DNA
ggtgacggcggttgtgcagcctgctattcgttcggttgaaaccgacaacgacggcaaccgcgtaaccaaaaatta

SEQ ID NO: 859884 - DNA, 75 bp, synthetic construct
  source 1..75: mol_type = other DNA
ctggggcttgatgacagtgctctggacacagaattttccattggtggtactgaactgctgctgtttaagcagatg

SEQ ID NO: 859885 - DNA, 75 bp, synthetic construct
  source 1..75: mol_type = other DNA
ctgacgctgccgaaattcacccgcaaatatgagaagtatcgcggcggtggaatgccgggtgcagtggatgtggat

SEQ ID NO: 859886 - DNA, 75 bp, synthetic construct
  source 1..75: mol_type = other DNA
tatagccggtaccgcgccgggagggttcaacctgaacggcctgaaaattctgtctgacggccgcctgcagctggt

SEQ ID NO: 859887 - DNA, 75 bp, synthetic construct
  source 1..75: mol_type = other DNA
gacaccgagcgtttccgcgcgattggcaaccctgtttcaaccattgttgccgaactgctggatttcttcctcgaa

SEQ ID NO: 859888 - DNA, 75 bp, synthetic construct
  source 1..75: mol_type = other DNA
gccggaaccggcgtttgcgccgcaaaattgcacggcggtggagctgatggcgaaaacgctgcgcgaaagtgctga

SEQ ID NO: 859889 - DNA, 75 bp, synthetic construct
  source 1..75: mol_type = other DNA
ctacgcggtattgttggcgacggctccaccgaattaaaaccgctggtggatgtgccggttatcttcccgcgcggt

SEQ ID NO: 859890 - DNA, 75 bp, synthetic construct
  source 1..75: mol_type = other DNA
gcgacccaggtcatgatgacgctatcgcaatagttctcgccctcgcctcaccagagcttgatgtcaaagcaatta

SEQ ID NO: 859891 - DNA, 75 bp, synthetic construct
  source 1..75: mol_type = other DNA
ataaaccgaatgccactgtaatggtcgatgttgatcgtcagggctttgttgatttactggctgatcgtctgaaat

SEQ ID NO: 859892 - DNA, 75 bp, synthetic construct
  source 1..75: mol_type = other DNA
ggtgaaaccgttaatgcgtgagttgattatcgccgacaacgtgcacggcgaaagtggactggacggcccggcatt

SEQ ID NO: 859893 - DNA, 75 bp, synthetic construct
  source 1..75: mol_type = other DNA
caagaagtcaatccgacgccgccgcctgatccagacccgactccagatcctgatcccacgccggatcccgaccca

SEQ ID NO: 859894 - DNA, 75 bp, synthetic construct
  source 1..75: mol_type = other DNA
aacagcgcctcgggatatgaccattcggcgacggcagcggcggggggctttatgtatatcggtcatagtgtggct

SEQ ID NO: 859895 - DNA, 75 bp, synthetic construct
  source 1..75: mol_type = other DNA
tcggcagtaaagagcaggcagacgcacagctggcgcaggcgatcatgtctgcaatgcgcgtagccatgcctggca

SEQ ID NO: 859896 - DNA, 75 bp, synthetic construct
  source 1..75: mol_type = other DNA
tcggcggtgagcagcagaccgcgcaggccattgccgattcggtgtcgacccagatgcgcgtagcgatgcccggca

SEQ ID NO: 859897 - DNA, 75 bp, synthetic construct
  source 1..75: mol_type = other DNA
aaccatgcgagcgtgtcacaatcgcagggtgatgatcttcagacgcggctgggggtacacagcgaatggcgtacc

SEQ ID NO: 859898 - DNA, 75 bp, synthetic construct
  source 1..75: mol_type = other DNA
cgctggaagccgggtatcagtggttaccggggcatggtgtggtgattgaaccgcaggcgcaggtgatttatcagg

SEQ ID NO: 859899 - DNA, 75 bp, synthetic construct
  source 1..75: mol_type = other DNA
accaaatcagtattgctcccgggaaaatgttttccacctcggacacctggaaacgctttttccgcttcaacaccg

SEQ ID NO: 859900 - DNA, 75 bp, synthetic construct
  source 1..75: mol_type = other DNA
cgatgctgaaaatagcattgccctggggagttattctcgcattgatgggggggattctgctaattctgtcgcaat

SEQ ID NO: 859901 - DNA, 75 bp, synthetic construct
  source 1..75: mol_type = other DNA
gataactctgtaacagtcaaaggcagcggtaatatagatgttactgtagacaaaaatggaatgacgattgacgga

SEQ ID NO: 859902 - DNA, 75 bp, synthetic construct
  source 1..75: mol_type = other DNA
tacctattcggggtttgctggaaacaatccatcctcagttctatctgtcggacatttaggtcatgagcgacaaat

SEQ ID NO: 859903 - DNA, 75 bp, synthetic construct
  source 1..75: mol_type = other DNA
gaaactttatctcttgcaattggtgcggtcagtaaagcaactggtatgggggctaacgcgctgggtgctacagcc

SEQ ID NO: 859904 - DNA, 75 bp, synthetic construct
  source 1..75: mol_type = other DNA
atattgatgttatggtagatcaaaatggaatgacgattgatggtgcacctctagaacaagcaattagaaataatg

SEQ ID NO: 859905 - DNA, 75 bp, synthetic construct
  source 1..75: mol_type = other DNA
gtgcaacagtttcttccagtgacaaaagtgtgtctattggttctggttccgttgataaattggctacaccagtag

SEQ ID NO: 859906 - DNA, 75 bp, synthetic construct
  source 1..75: mol_type = other DNA
aaggcagcaactccggtttccggcgctaccattaagttaaagaatggcgggactattgaatacaagggctttgcc

SEQ ID NO: 859907 - DNA, 75 bp, synthetic construct
  source 1..75: mol_type = other DNA
atttctgtcaggctggctctgcgtattcctctactcgcaaatatttgcatatgtacacgctggacggagtgtatc

SEQ ID NO: 859908 - DNA, 75 bp, synthetic construct
  source 1..75: mol_type = other DNA
aaaaaaggtgtctatgtggtggtggatgcaggtgatagacaggtaagcctggcgaatgacaatccatatctgggc

SEQ ID NO: 859909 - DNA, 75 bp, synthetic construct
  source 1..75: mol_type = other DNA
ggagatgacggactttaaaacaggtgaagcaattgctattgggccaaaagctaaagcaacgaaagaacagtcaat

SEQ ID NO: 859910 - DNA, 75 bp, synthetic construct
  source 1..75: mol_type = other DNA
agcattgagatcggaacaactaaaaatgtaactatagttgattctggtaataaaattaattttgaccatctatct

SEQ ID NO: 859911 - DNA, 75 bp, synthetic construct
  source 1..75: mol_type = other DNA
ctgacggtcagactcgctgataacattcgtctggcagatgacggcagtgtttctgtcggtggaacccggatggat

SEQ ID NO: 859912 - DNA, 75 bp, synthetic construct
  source 1..75: mol_type = other DNA
ctttctgaagaaattgagatgtctggagttggcccaataaaaacccaagtggtaggagataaacttgagataact

SEQ ID NO: 859913 - DNA, 75 bp, synthetic construct
  source 1..75: mol_type = other DNA
cgcctggcaacggaagaacaatgggacgaactcatcgccagcgaaatggcgtatgtgaatgcggtgcaggagatc

SEQ ID NO: 859914 - DNA, 75 bp, synthetic construct
  source 1..75: mol_type = other DNA
gcgcctgtttatgcaggacaacaatcagcaaggcaaaggcgtctctttgtcaaaagcgatcaacattattgagaa

SEQ ID NO: 859915 - DNA, 75 bp, synthetic construct
  source 1..75: mol_type = other DNA
atgatctctccagaaacgctgcaatccgccatcgctaacgtctctgtctggcgtcagggtgacgtatgcgcgccg

SEQ ID NO: 859916 - DNA, 75 bp, synthetic construct
  source 1..75: mol_type = other DNA
ccctggtgacgaaagaccacggctcgctgggcgtgtgggataaagaccggatccccgcaggggttgaagtgacaa

SEQ ID NO: 859917 - DNA, 75 bp, synthetic construct
  source 1..75: mol_type = other DNA
aatggtccgggacgttattgatgcggcctgcaagccagccctggaaaaactggaagaaatatccgggcggctggc

SEQ ID NO: 859918 - DNA, 75 bp, synthetic construct
  source 1..75: mol_type = other DNA
caggaaggaaaaggcgtctctttgtcaaaagcgatcagcattattgataacgggctgaggatcggtcttgacgaa

SEQ ID NO: 859919 - DNA, 75 bp, synthetic construct
  source 1..75: mol_type = other DNA
tagaggaaatagattctgtagagtcaggtaaaggtgataactcttacaaacatctcaccaatccaaatgtaacta

SEQ ID NO: 859920 - DNA, 75 bp, synthetic construct
  source 1..75: mol_type = other DNA
aattcgtaagtgaactttttttagaaaatgggcagtttattctagttggcttaactggaagaactggttctggtt

SEQ ID NO: 859921 - DNA, 75 bp, synthetic construct
  source 1..75: mol_type = other DNA
tggtgccatcaaaattcaaggaggagatggctccgcgataacgaaaaatcttggcgatgatatcgaaatcacagg

SEQ ID NO: 859922 - DNA, 75 bp, synthetic construct
  source 1..75: mol_type = other DNA
agttctggattagccgcgcggtgagagttaacgatcgtctggaaattcatgatgttattgggccagacgaatata

SEQ ID NO: 859923 - DNA, 75 bp, synthetic construct
  source 1..75: mol_type = other DNA
agaaattcagcccgacggcgttttgccgcaggatgattcgtttatggctaagccggcgattaatctggcgaaata

SEQ ID NO: 859924 - DNA, 75 bp, synthetic construct
  source 1..75: mol_type = other DNA
attctatcatctaataaatctatcagtaaagagcatttagatattgtattaacttttggtgtattctcagataat

SEQ ID NO: 859925 - DNA, 75 bp, synthetic construct
  source 1..75: mol_type = other DNA
ggtctctgatgatggtctgattcagtccggtggtgacatgacgctggatgtacaggacggggtgctcagtaaccg

SEQ ID NO: 859926 - DNA, 75 bp, synthetic construct
  source 1..75: mol_type = other DNA
atgcagcaattggtatcagcgtaaactcagctgctcagcttgctggaaaagatcctttcagttatgtggatgcga

SEQ ID NO: 859927 - DNA, 75 bp, synthetic construct
  source 1..75: mol_type = other DNA
ctctggcacagggtaagaatgctctggctggggccgcaggcgcagccaccggcgaggtggtgggaatgatagcca

SEQ ID NO: 859928 - DNA, 75 bp, synthetic construct
  source 1..75: mol_type = other DNA
ttcctactctaaaaactttggcctgtacaacgagcgtgttggcgcttgtactctggttgctgctgacagtgaaac

SEQ ID NO: 859929 - DNA, 75 bp, synthetic construct
  source 1..75: mol_type = other DNA
gtatgcagtggcttctggtcgtgtgaacgtggccgggatgacgccagataacatggctccgctgtgcgaagcgat

SEQ ID NO: 859930 - DNA, 75 bp, synthetic construct
  source 1..75: mol_type = other DNA
atatgctgttgcttctggtcgcgtaaacgtggccgggatgacaccagataacatggcgccgctgtgcgaagcgat

SEQ ID NO: 859931 - DNA, 75 bp, synthetic construct
  source 1..75: mol_type = other DNA
gttcagataaacgctggagcgctggtgaaccgggcgtttatgtgggtaacgattccagtaactcactgaaaaagc

SEQ ID NO: 859932 - DNA, 75 bp, synthetic construct
  source 1..75: mol_type = other DNA
gctgatgagctccggaggtgtgggattcagcgtgggcagccagagtctgaaagtcacggacaccgcaacagacac

SEQ ID NO: 859933 - DNA, 75 bp, synthetic construct
  source 1..75: mol_type = other DNA
tatttagcgatggtgctaatattaagtcccaatctggaactgctctcggggcatacgcaggtggatatgtgggag

SEQ ID NO: 859934 - DNA, 75 bp, synthetic construct
  source 1..75: mol_type = other DNA
aaaatgcacagtaactacgacagtgtacaggagcagacggggatttttgccggcaggggcgggtttgatgtcacc

SEQ ID NO: 859935 - DNA, 75 bp, synthetic construct
  source 1..75: mol_type = other DNA
atattacggattcagggacatccacgtattactaccgtataaaaaagaagggaacggataagcaggggaagaaaa

SEQ ID NO: 859936 - DNA, 75 bp, synthetic construct
  source 1..75: mol_type = other DNA
agggtaagggcagtgaaaaaggcaacggtaccacccatacagaaaccacggtggatgcgggaaaacagctgacca

SEQ ID NO: 859937 - DNA, 75 bp, synthetic construct
  source 1..75: mol_type = other DNA
gcccccgctgaaattcagtgccttttcgaggagtcggcgctggtgatcattgattatcagcaggctattgaaaat

SEQ ID NO: 859938 - DNA, 75 bp, synthetic construct
  source 1..75: mol_type = other DNA
ttgtggcacccgctatccgcgaagcctgcggagttaatgcgactttcatcgcggacggggggccacagtttgctc

SEQ ID NO: 859939 - DNA, 75 bp, synthetic construct
  source 1..75: mol_type = other DNA
ctccattaggttggattaaactcccatttgcactagcacaaaatgtacgagagtttcgattagaacgaggtgagt

SEQ ID NO: 859940 - DNA, 75 bp, synthetic construct
  source 1..75: mol_type = other DNA
tggccactaacggtatgcgtaccagtcaccacatcgccaataccattatcgaacatcgccatgatgaagcctggc

SEQ ID NO: 859941 - DNA, 75 bp, synthetic construct
  source 1..75: mol_type = other DNA
caagagcaaggacaattgatcatctagggcgtgagcaaatagctgattgtccaaccgcaatttccgagctttgga

SEQ ID NO: 859942 - DNA, 75 bp, synthetic construct
  source 1..75: mol_type = other DNA
cgatccacacgtaggcgtttctctgatggccgatgccgtactgtcggtgatggccactaacggtatgcgcaccag

SEQ ID NO: 859943 - DNA, 75 bp, synthetic construct
  source 1..75: mol_type = other DNA
ggcgtttccctgatggccgatgccgtactgtcggtgatggccactaacggtatgcgtaccagtcaccacatcgcc

SEQ ID NO: 859944 - DNA, 75 bp, synthetic construct
  source 1..75: mol_type = other DNA
ggttgtcaccctgccactgagcgagtatttcgacacaaacgcacagccggacatggccaacatcaaccgcaaaaa

SEQ ID NO: 859945 - DNA, 75 bp, synthetic construct
  source 1..75: mol_type = other DNA
cgatccacacgtaggcgtttccctgatggccgatgccgtactgtcggtgatggccactaacggtatgcgtaccag

SEQ ID NO: 859946 - DNA, 75 bp, synthetic construct
  source 1..75: mol_type = other DNA
ctgccactgagcgaatatttcgacacaaacgcacagccggacatggccaacatcaaccgcaaaaaagcaaacgtc

SEQ ID NO: 859947 - DNA, 75 bp, synthetic construct
  source 1..75: mol_type = other DNA
ccaccaacatcaagctggcatggactgagaatggcgaacgccgcaacgccatcagcccgaacagcttcaagtcgg

SEQ ID NO: 859948 - DNA, 75 bp, synthetic construct
  source 1..75: mol_type = other DNA
atggccggtgccgtgctgtcggtgatggccgctaacggtatgcgtaccagtcaccacatcgccaataccattatc

SEQ ID NO: 859949 - DNA, 75 bp, synthetic construct
  source 1..75: mol_type = other DNA
ctggtgctattgctatgaccttggtttctttcggtgtaaatgctgcagcaccgtcagctaatcaaggtgaagggc

SEQ ID NO: 859950 - DNA, 75 bp, synthetic construct
  source 1..75: mol_type = other DNA
gaaaaattctgtccggtgccggcatgacgattgtggcagacaaactgcttaatgataagagtcaggttgttgcag

SEQ ID NO: 859951 - DNA, 75 bp, synthetic construct
  source 1..75: mol_type = other DNA
cgctgaataacgacaacggactgatttcagctgctgccggaacgggcaggataaaaacacagcaggctgtcagca

SEQ ID NO: 859952 - DNA, 75 bp, synthetic construct
  source 1..75: mol_type = other DNA
gagcgccggtacctttgctgcccggactgccgggcagttcagcaataatggcgccacgataaatgccggcacact

SEQ ID NO: 859953 - DNA, 75 bp, synthetic construct
  source 1..75: mol_type = other DNA
aaccctgatactgaagcaatggcaaaggctcaaagcattatgaatacctgggggtatcataagtctaatgcaagt

SEQ ID NO: 859954 - DNA, 75 bp, synthetic construct
  source 1..75: mol_type = other DNA
cgtcacacggtgtttaatttcagcagaattgcggactattacgctcatgcccccgctgaaattcagtgccttttc

SEQ ID NO: 859955 - DNA, 75 bp, synthetic construct
  source 1..75: mol_type = other DNA
aatgcccgcagattgcatcattatttctcccttttcccggctttaattccctgtaccagcgtactggtagtaacc

SEQ ID NO: 859956 - DNA, 75 bp, synthetic construct
  source 1..75: mol_type = other DNA
accgcaataccggcctcgctatccgtgacagtgagcatatcagccagagcatgcgcgacattctgctgacgccgg

SEQ ID NO: 859957 - DNA, 75 bp, synthetic construct
  source 1..75: mol_type = other DNA
ggcccggacggatattaacagtaccggcgggctgctgcaggccacggacagcctgctggcgatggccggacggga

SEQ ID NO: 859958 - DNA, 75 bp, synthetic construct
  source 1..75: mol_type = other DNA
caggtgaatattcagacgccttctgccggcggggtgtcacataacacatacagccagttcgacgtcggtaaccag

SEQ ID NO: 859959 - DNA, 75 bp, synthetic construct
  source 1..75: mol_type = other DNA
aatctggcgttggttatcgcggcctgtgtgacgttcaccggggcgctgtgttacttctttattgtcaaagatcgc

SEQ ID NO: 859960 - DNA, 75 bp, synthetic construct
  source 1..75: mol_type = other DNA
gggaatatcaccatccgggatacgaagagccagaaacaggatgtggcagacctgaaccgtgacgcagcacatgca

SEQ ID NO: 859961 - DNA, 75 bp, synthetic construct
  source 1..75: mol_type = other DNA
ctccggtctgacgcttgccctgtccggcacagtgggcagcgccctgaacacgacggtggagaccgtacaggcggc

SEQ ID NO: 859962 - DNA, 75 bp, synthetic construct
  source 1..75: mol_type = other DNA
aagcaaccgtgaaacacacctgaaacaggagaaaaaatccgggctgatgagctccggaggtgtgggattcagcgt

SEQ ID NO: 859963 - DNA, 75 bp, synthetic construct
  source 1..75: mol_type = other DNA
aaaactatgcaacatcatctgctggcgcacatacccactcactgtccggcactgctgcaagcgcaggtgcacacg

SEQ ID NO: 859964 - DNA, 75 bp, synthetic construct
  source 1..75: mol_type = other DNA
gcaggtaataacctcagtattcaggccaccggctccggcgtgaagggcgtggatggtgacctgacgatacagggc

SEQ ID NO: 859965 - DNA, 75 bp, synthetic construct
  source 1..75: mol_type = other DNA
catcaggaggttcagcaacaacgatttgatgaactgagtaaaatatatgataaaagtcacccggtcggagagtta

SEQ ID NO: 859966 - DNA, 75 bp, synthetic construct
  source 1..75: mol_type = other DNA
aaaacaaacagccgaatctgggcaaagacgtagcgagcgctacggataaggataaagctgagcttggtggtgcag

SEQ ID NO: 859967 - DNA, 75 bp, synthetic construct
  source 1..75: mol_type = other DNA
aaagagggaacatctgatattattggtaatattgggggaacaattactggtgaagctatcgggaatgtaacaaaa

SEQ ID NO: 859968 - DNA, 75 bp, synthetic construct
  source 1..75: mol_type = other DNA
gagccaacctggtagtgaaaatcagtcatgggattataaaggtagcgcatcttcattcatgacagggatgcttgc

SEQ ID NO: 859969 - DNA, 75 bp, synthetic construct
  source 1..75: mol_type = other DNA
gacggacgtattgaaaacagtggcagtatcagtgcgaaaacggatgtgcatctggcgacaacccgggagctgcat

SEQ ID NO: 859970 - DNA, 75 bp, synthetic construct
  source 1..75: mol_type = other DNA
ctaattttgtttatgatgctatcggaggtgttggtagtgagtttattaacggattcacgaaagaagcattaaata

SEQ ID NO: 859971 - DNA, 75 bp, synthetic construct
  source 1..75: mol_type = other DNA
gcattacgccagcctgatggcggttattcgtgaaaaggaagaaacactgaaacaacgcgtgattcgtgcgctggc

SEQ ID NO: 859972 - DNA, 75 bp, synthetic construct
  source 1..75: mol_type = other DNA
atgaacagccgcaggaagaagacgataattcttcccctgttgttcaaattaagtacctggctattgataaagaac

SEQ ID NO: 859973 - DNA, 75 bp, synthetic construct
  source 1..75: mol_type = other DNA
caggtgcagccaccggtgaagtggttgggataatagccacacagatgtacggtaagccggtgagtgaactgagcg

SEQ ID NO: 859974 - DNA, 75 bp, synthetic construct
  source 1..75: mol_type = other DNA
tggatgtgtccagccttggcggaatgtatgccggaaaaattcgccttgtcggtacggaaacgggggtgggtgttc

SEQ ID NO: 859975 - DNA, 75 bp, synthetic construct
  source 1..75: mol_type = other DNA
tccagatgcaaatgggaaaaatcacatcacggctgtaaaaggtgatgctaaaatacctgtcgataagattgagct

SEQ ID NO: 859976 - DNA, 75 bp, synthetic construct
  source 1..75: mol_type = other DNA
tggtaaatttaatttgtagttttttatttatattctttctgtcctcggcttttgtttcttttgggtgttatgcta

SEQ ID NO: 859977 - DNA, 75 bp, synthetic construct
  source 1..75: mol_type = other DNA
gaaagaccgggggagtttcaagaagctgagtgactattcccggatcatgcaccggtttgcggaaagactggctaa

SEQ ID NO: 859978 - DNA, 75 bp, synthetic construct
  source 1..75: mol_type = other DNA
ttcataccacaaattttcattataaatatcatgctcaagacagttgcttacgtgataacgcggcggaatttcttc

SEQ ID NO: 859979 - DNA, 75 bp, synthetic construct
  source 1..75: mol_type = other DNA
gaaattcttcagcgcgtggaagcaaaagataaaggtgtggcagctgttgttaaactgtcacgttatctcggtctg

SEQ ID NO: 859980 - DNA, 75 bp, synthetic construct
  source 1..75: mol_type = other DNA
tttgttttttgctattagtgggcgacgattatctaaagtaacaatggtgcgcctttggttgataattaaaattat

SEQ ID NO: 859981 - DNA, 75 bp, synthetic construct
  source 1..75: mol_type = other DNA
atgaatattcaggcaataaaagaaatggtaaatttaatttgtagttttttatttatattctttctgtcctcggct

SEQ ID NO: 859982 - DNA, 75 bp, synthetic construct
  source 1..75: mol_type = other DNA
ctgactcgctgggaaggtaaatccgctaccgttgggcaacttatgggaatgcgatacaaaggctgggagtcaggc

SEQ ID NO: 859983 - DNA, 75 bp, synthetic construct
  source 1..75: mol_type = other DNA
tttcctcgtcagcaaacaactcgataactggtattttggaattaaacacgttactggaagacggaacatctttat

SEQ ID NO: 859984 - DNA, 75 bp, synthetic construct
  source 1..75: mol_type = other DNA
tatgttcccgctaaatcaggatactttcattgagtattccggtaataccgctaacgatatttatgctgatggccg

SEQ ID NO: 859985 - DNA, 75 bp, synthetic construct
  source 1..75: mol_type = other DNA
ttcgagtgtaccgtgacaataaatccgtcacttttgccgaacttgatgtgtttgatttgagtgaggcgttaagcg

SEQ ID NO: 859986 - DNA, 75 bp, synthetic construct
  source 1..75: mol_type = other DNA
agctgcatcatatatcgcaacgggcgaaatcccgccccttacgtgataacgcggcggaatttcttcaggtggtcg

SEQ ID NO: 859987 - DNA, 75 bp, synthetic construct
  source 1..75: mol_type = other DNA
ggtgagtaccggctggtccttaagttttcacccggttttaaccactacaatgttgatagcaaagcgctaatgagc

SEQ ID NO: 859988 - DNA, 75 bp, synthetic construct
  source 1..75: mol_type = other DNA
agaaaatggcaggtcagatgggtaacgaacgtgtaaccgttcagagccttgacgtaatacgcgttgacgctgagc

SEQ ID NO: 859989 - DNA, 75 bp, synthetic construct
  source 1..75: mol_type = other DNA
aaagaatccgacccgggaaaaattctgtccggtgccggcatgacgattgtggcagacaaactgcttaatgataag

SEQ ID NO: 859990 - DNA, 75 bp, synthetic construct
  source 1..75: mol_type = other DNA
gaaatatacgcgtcttcaggcgaacaccctgacgaattccggtaccgggcgaatctacggcgatgctgttggtgt

SEQ ID NO: 859991 - DNA, 75 bp, synthetic construct
  source 1..75: mol_type = other DNA
gcgacgccgggcagaaccattttgaacgtaccagtatcgacagtgtggccggcgtgtatgtgcagaacgaccagg

SEQ ID NO: 859992 - DNA, 75 bp, synthetic construct
  source 1..75: mol_type = other DNA
tacaggatatacaaaggagtttggtgctaaagctggggcttcgattggtattgattttggcccatatgatttcgg

SEQ ID NO: 859993 - DNA, 75 bp, synthetic construct
  source 1..75: mol_type = other DNA
acccgtaccgtggaggaaacccgggtaaaagactccgacccggggaaaatactgtccggtgccggcatgacggtt

SEQ ID NO: 859994 - DNA, 75 bp, synthetic construct
  source 1..75: mol_type = other DNA
agtgccggtacgctttccgcccggactgccgggcagttcagcaataatgacggcacgataaatgccgacacactg

SEQ ID NO: 859995 - DNA, 75 bp, synthetic construct
  source 1..75: mol_type = other DNA
ttcattgatgatttcggcattgatgcagaatgttacgtacttgatgataatgataaaacggttgtagttagtaaa

SEQ ID NO: 859996 - DNA, 75 bp, synthetic construct
  source 1..75: mol_type = other DNA
cgtttgtatggtatagacaaaccagttagagggcgaccatgggcgtttaaatatcttacgatagatcacatttat

SEQ ID NO: 859997 - DNA, 75 bp, synthetic construct
  source 1..75: mol_type = other DNA
agggctggatcggttgtgaatacaaacctcgtggcctcaccgaagaagggcttggctggtttgacgcctggcgct

SEQ ID NO: 859998 - DNA, 75 bp, synthetic construct
  source 1..75: mol_type = other DNA
cggttgagaataatttacttggcggtagtgaagatgctcaggctgcgtggatacgccagcatggtatcgacatgg

SEQ ID NO: 859999 - DNA, 75 bp, synthetic construct
  source 1..75: mol_type = other DNA
gcatggtggccgggaacccgtggctggcgaagggagaggccagaatcattcttaatgaagtgaacagtcgcaatc

SEQ ID NO: 860000 - DNA, 75 bp, synthetic construct
  source 1..75: mol_type = other DNA
ttgttgcaggtggtctgctggatatgcaggccggtgatgtggaaaacgtcagtgtcagcggagagcgccatgtta

SEQ ID NO: 860001 - DNA, 75 bp, synthetic construct
  source 1..75: mol_type = other DNA
gtactgccagcagaagaagcggaagaactggcacgaattgcactggcatcactggatgcgcgaacagattcgcca

SEQ ID NO: 860002 - DNA, 75 bp, synthetic construct
  source 1..75: mol_type = other DNA
gctgcacggtcagaccggttatgaagaggttgaagttaacaaccgtgggcgtgttatccgccagttaaaagaagt

SEQ ID NO: 860003 - DNA, 75 bp, synthetic construct
  source 1..75: mol_type = other DNA
tcaagctggtgcctatcgcccccagccgcggcattatatacgaccgtaacggcatccctctggcactcaatcgca

SEQ ID NO: 860004 - DNA, 75 bp, synthetic construct
  source 1..75: mol_type = other DNA
gtcacaagatcgctggaagaatctgcggataccttcttctatcaggtggcctacgatatggggatcgatcgcctc

SEQ ID NO: 860005 - DNA, 75 bp, synthetic construct
  source 1..75: mol_type = other DNA
gcctttgcgccatacaacaatccgcaagtggctgtcgccatgattctggagaacggcggcgcgggtccggcggtt

SEQ ID NO: 860006 - DNA, 75 bp, synthetic construct
  source 1..75: mol_type = other DNA
tgaaaactaacctgaccgaagtacaggtggcgcgctttgccgtcaatcagtaccgttttcccggtgtggaagtta

SEQ ID NO: 860007 - DNA, 75 bp, synthetic construct
  source 1..75: mol_type = other DNA
ataaagatgtcgaacgcctgaataatgacggcaaactggccaactatgccgcgacgcatgacattggtaagttgg

SEQ ID NO: 860008 - DNA, 75 bp, synthetic construct
  source 1..75: mol_type = other DNA
gccaatgcgcaaaccgttcttgaggtactgcgcagtggttccgcttacgacagagttaccgcactggcggcacga

SEQ ID NO: 860009 - DNA, 75 bp, synthetic construct
  source 1..75: mol_type = other DNA
acctacgccccatatattaccgcattagaaagcttaagagaggaaattgatttagaaggcctcgcgatctcttca

SEQ ID NO: 860010 - DNA, 75 bp, synthetic construct
  source 1..75: mol_type = other DNA
ggcaatacacctgtggcaactttagttgatgatgggcatggcatgtcgttagatgacattatcaataagtggctt

SEQ ID NO: 860011 - DNA, 75 bp, synthetic construct
  source 1..75: mol_type = other DNA
ggttctgacaggtaccatttctgtcaatctagcggccggtaaaaatgaaggtattgccggcttcgagaaagtgga

SEQ ID NO: 860012 - DNA, 75 bp, synthetic construct
  source 1..75: mol_type = other DNA
gtggatgtcacctttgaagatgaaaaaggtggtaagcacaccgtgacgctggagaaaggggataacggctggaca

SEQ ID NO: 860013 - DNA, 75 bp, synthetic construct
  source 1..75: mol_type = other DNA
ccagtgcgtttgtcgccgcggcctgtgggctgaaagtggcgaaacacggcaaccgtagcgtctccagtaaatctg

SEQ ID NO: 860014 - DNA, 75 bp, synthetic construct
  source 1..75: mol_type = other DNA
actctgtttgaccccggctggtggcagttaccgggatcggaaaagcgctatcgcgactggaaaaaatggggtcac

SEQ ID NO: 860015 - DNA, 75 bp, synthetic construct
  source 1..75: mol_type = other DNA
gtgatgatattgttgttctgacaaaagactatgactccacctcctccggtaatcagggctatattaacggcgggg

SEQ ID NO: 860016 - DNA, 75 bp, synthetic construct
  source 1..75: mol_type = other DNA
attatctggtttattggatcttggtagtggtacaaaagatatatctaatatgcctaaggaatatctttctgttta

SEQ ID NO: 860017 - DNA, 75 bp, synthetic construct
  source 1..75: mol_type = other DNA
aaatattcactatcatcttctatcgccgaaaaaggggactttgggtataccattggcgcgaatagtggtgaaaat

SEQ ID NO: 860018 - DNA, 75 bp, synthetic construct
  source 1..75: mol_type = other DNA
ttacggtgaaatgctggttggttcacgacggatatcccaggacatcagcacccgtgatgagggcggtgacgggaa

SEQ ID NO: 860019 - DNA, 75 bp, synthetic construct
  source 1..75: mol_type = other DNA
ggcaatgatactgttaccatcacagatggtgcatataacacgactatttcactgggggcgggagatgatgtattt

SEQ ID NO: 860020 - DNA, 75 bp, synthetic construct
  source 1..75: mol_type = other DNA
aaaggggataacggctggacatccagtgatccgacgctgatcccggacagcactggcgataaagcgaccattccg

SEQ ID NO: 860021 - DNA, 75 bp, synthetic construct
  source 1..75: mol_type = other DNA
ggaaggcagtgataccctggttctgacaggtaccatttctgtcaatctagcggccggtaaaaatgaaggtattgc

SEQ ID NO: 860022 - DNA, 75 bp, synthetic construct
  source 1..75: mol_type = other DNA
tgaagataaggatgattccactggactggtttatacggtttctctgaatcatgtcactacaacagatgtaacagt

SEQ ID NO: 860023 - DNA, 75 bp, synthetic construct
  source 1..75: mol_type = other DNA
acaaataccgtgggtacaaccacacgaaccgccggtaggcgatatccattctggttactgggaactggcaaaaga

SEQ ID NO: 860024 - DNA, 75 bp, synthetic construct
  source 1..75: mol_type = other DNA
ctatgggggacggcaatgatactgttaccatcacagatggtgcatataacacgactatttcactgggggcgggag

SEQ ID NO: 860025 - DNA, 75 bp, synthetic construct
  source 1..75: mol_type = other DNA
ctaatggtcattcgtggtaacatgctggctaatacaagagtatacactggtgagggtaacgatacttttactatg

SEQ ID NO: 860026 - DNA, 75 bp, synthetic construct
  source 1..75: mol_type = other DNA
accagagtggtaaagaaacaacatcgtatagtaatgttgctaactcacaggataatgggccagacggaacaaaaa

SEQ ID NO: 860027 - DNA, 75 bp, synthetic construct
  source 1..75: mol_type = other DNA
ctccgggcactgattgaaacccgcgcgccactgaacagcccggcactgaccggaacgccgtccacgccaacacca

SEQ ID NO: 860028 - DNA, 75 bp, synthetic construct
  source 1..75: mol_type = other DNA
cagccggaagcgcacaacagactgcgcaggatgtggcggcaaccgtaaccgcccgtaatgatgcggagcgttttg

SEQ ID NO: 860029 - DNA, 75 bp, synthetic construct
  source 1..75: mol_type = other DNA
tgtattacaacgaaagcgggaatctgacactgacggacctgacagggcgggcgaagtcgcttcttggtctgggaa

SEQ ID NO: 860030 - DNA, 75 bp, synthetic construct
  source 1..75: mol_type = other DNA
gtcgccacttgtgtgacggacaataacggtgcttatgtgattgaggctgagccggggtattacgaggttgcgctt

SEQ ID NO: 860031 - DNA, 75 bp, synthetic construct
  source 1..75: mol_type = other DNA
gaacgagctggcagcggcgctgggcaatgacccggagtttgcgacgacaatcacgaacgcactggcaggtaaaca

SEQ ID NO: 860032 - DNA, 75 bp, synthetic construct
  source 1..75: mol_type = other DNA
gcggactcttccacactactggcaggcaccacaaaatttaacggcatcattgatgtgatgtggtcgccttttgat

SEQ ID NO: 860033 - DNA, 75 bp, synthetic construct
  source 1..75: mol_type = other DNA
ttgccgacgtggtgacaggaaactgtggcgagtactgttttaaggcgcagaccggaaaatattgcgtatatctga

SEQ ID NO: 860034 - DNA, 75 bp, synthetic construct
  source 1..75: mol_type = other DNA
ccgggacggtattacaccttttccacgcaaacggaagaaacaaccgggataacagaaattatctggctggataat

SEQ ID NO: 860035 - DNA, 75 bp, synthetic construct
  source 1..75: mol_type = other DNA
tgaacgcgctggcaggtaaacaaccgctcagtgatgtattaacgacaatcagcaatctggaagaacgggcggata

SEQ ID NO: 860036 - DNA, 75 bp, synthetic construct
  source 1..75: mol_type = other DNA
attgaggctgagccggggtattacgaggttgcgcttcaccgtaacggctggcagccaacccgtgtcggggatatt

SEQ ID NO: 860037 - DNA, 75 bp, synthetic construct
  source 1..75: mol_type = other DNA
gctgccacaccaaaggctgtcaaaaccgtcatggacgagatgaaaacaaaagcgccgctggacagcccggcattc

SEQ ID NO: 860038 - DNA, 75 bp, synthetic construct
  source 1..75: mol_type = other DNA
agaaagcggtcgataaactcgatgaagctgcaacactgaccggcgaagtaaaggccagcgcagaagcggcagcaa

SEQ ID NO: 860039 - DNA, 75 bp, synthetic construct
  source 1..75: mol_type = other DNA
gagtggaaacaactggaatgcaacagtaagccccattatttacgacggcgattcgctggcgttcctgctgtcccg

SEQ ID NO: 860040 - DNA, 75 bp, synthetic construct
  source 1..75: mol_type = other DNA
gtagtgatacagacaacgacagtgaagaactggcagccacaccaaaggctgtcaaaaccgtcatggacgagacga

SEQ ID NO: 860041 - DNA, 75 bp, synthetic construct
  source 1..75: mol_type = other DNA
ggaagccatgccggggcgttatgcggtcagtattgcggactcttccacgctgctggctggcacaacgaaatttaa

SEQ ID NO: 860042 - DNA, 75 bp, synthetic construct
  source 1..75: mol_type = other DNA
cgtcatggacgagacgaaaacaaaagcgccactggacagcccggcgttcaccggcacgccaaccacaccaacccc

SEQ ID NO: 860043 - DNA, 75 bp, synthetic construct
  source 1..75: mol_type = other DNA
tggttggctcatcgccggaagttctggacaccctgaacgagctggcagcggcgctgggcaatgacccgaactttg

SEQ ID NO: 860044 - DNA, 75 bp, synthetic construct
  source 1..75: mol_type = other DNA
gaactgtcggcaaatgcggcgctggggcacaaaaacagtgccgccgaatacgcccgacaggctaaagccagccag

SEQ ID NO: 860045 - DNA, 75 bp, synthetic construct
  source 1..75: mol_type = other DNA
aaactgcttgctgcgctggttggctcatcgccggaagttctggacaccctgaacgagctggcagcggcgctgggc

SEQ ID NO: 860046 - DNA, 75 bp, synthetic construct
  source 1..75: mol_type = other DNA
aagcggcagcaaaaagcgagcagagcgcgaaacagcacagggacgaggcgcaacggatagttgatgacctgaagg

SEQ ID NO: 860047 - DNA, 75 bp, synthetic construct
  source 1..75: mol_type = other DNA
atctgccacacaggatgccgcccgggcagaacaggcggtcaaagatgccgataagatagtccagaaagcggtcga

SEQ ID NO: 860048 - DNA, 75 bp, synthetic construct
  source 1..75: mol_type = other DNA
attattttttacggtattaacggtcatatttattacaatcgctactggactaccggagatggttatctggttggc

SEQ ID NO: 860049 - DNA, 75 bp, synthetic construct
  source 1..75: mol_type = other DNA
gaatgcttcagttagcgattcagggacatacggatccacaccgcaagtgtcaattggtagtgccagtacatacaa

SEQ ID NO: 860050 - DNA, 75 bp, synthetic construct
  source 1..75: mol_type = other DNA
agagttcagaacgcgttcagcattactggcgtgggcaaaaacagcgaagccggggaggtatcattgttttggtga

SEQ ID NO: 860051 - DNA, 75 bp, synthetic construct
  source 1..75: mol_type = other DNA
ttaacggtcatatttattacaatcgctactggacttccggagatggctatctggttggctgggagaacgtaaaat

SEQ ID NO: 860052 - DNA, 75 bp, synthetic construct
  source 1..75: mol_type = other DNA
cttatttcagcagtattagggttgattttgggacgctggattgttgcatttattagttggaaactttgttcgcgc

SEQ ID NO: 860053 - DNA, 75 bp, synthetic construct
  source 1..75: mol_type = other DNA
cggagatttacctgaccgaacaacaggcgctggcggagcgttttaacgatgtgccgctgtggatccgtccgcaaa

SEQ ID NO: 860054 - DNA, 75 bp, synthetic construct
  source 1..75: mol_type = other DNA
atcgaacgggtacagcttttcgacatgttcccccacaccgcgcattacgaagtgctgacactgctggtaaaaatg

SEQ ID NO: 860055 - DNA, 75 bp, synthetic construct
  source 1..75: mol_type = other DNA
ctaaaaccgtttattgcccgtgcggggctaaccccgtataacgtggcgcgcaagcgtggcgaactgaaatacatc

SEQ ID NO: 860056 - DNA, 75 bp, synthetic construct
  source 1..75: mol_type = other DNA
aaacggctggagcgcggccgcttcgcctggccgtcagcccgggatggcaaagtgttcctcacaccggcacagctg

SEQ ID NO: 860057 - DNA, 75 bp, synthetic construct
  source 1..75: mol_type = other DNA
ttcgcctggccctcagcccgcgatggcaaagtgttcctgacgccggcgcaactggcgatgctgatggaaggtatc

SEQ ID NO: 860058 - DNA, 75 bp, synthetic construct
  source 1..75: mol_type = other DNA
gaaaaacggctgttgtcggcggcatcatgctgcccggactgtggcgattcactgcgctggctgggtgaagatact

SEQ ID NO: 860059 - DNA, 75 bp, synthetic construct
  source 1..75: mol_type = other DNA
tttccggggccgcagcggcagtcaggttaaactgctgtggtccaccggtgacggactgtgcctcctgaccaaacg

SEQ ID NO: 860060 - DNA, 75 bp, synthetic construct
  source 1..75: mol_type = other DNA
cgctgaaagacgatcccatgtccggccatgttttcattttccggggccgcagcggcagtcaggttaaactgctgt

SEQ ID NO: 860061 - DNA, 75 bp, synthetic construct
  source 1..75: mol_type = other DNA
cagctggcgatgctgctggaaggtatcgactggcgacagcccaagcggttgctgacctccctgaccatgctgtaa

SEQ ID NO: 860062 - DNA, 75 bp, synthetic construct
  source 1..75: mol_type = other DNA
gctgaactgggcttaacgcgtttgcaatttcaggcgctggactccactcagtttgccactgctcagggggaggtg

SEQ ID NO: 860063 - DNA, 75 bp, synthetic construct
  source 1..75: mol_type = other DNA
cgcgattgggtgcagcaactaccggtaaaccatatgtgggatctgttttgcggtgttggcggttttggtttgcat

SEQ ID NO: 860064 - DNA, 75 bp, synthetic construct
  source 1..75: mol_type = other DNA
ggcagtcaggttaaacttctgtggtccaccggcgacgggctgtgcctgctgaccaaacggctggagcgcgggcgc

SEQ ID NO: 860065 - DNA, 75 bp, synthetic construct
  source 1..75: mol_type = other DNA
ggcagtcaggtaaagctcctctggtccaccggtgacggactgtgcctcctgaccaaacggctggagcgtgggcgc

SEQ ID NO: 860066 - DNA, 75 bp, synthetic construct
  source 1..75: mol_type = other DNA
ttctgcgacgaacatggtcgggtacgggtgaagtttcactgggaccgttatcacgggatgacggaggagagttcg

SEQ ID NO: 860067 - DNA, 75 bp, synthetic construct
  source 1..75: mol_type = other DNA
gttaaagagcagagcaccgtaatggctttcaacggagccggaattcgtgataccgccagaacactgaaggtcggc

SEQ ID NO: 860068 - DNA, 75 bp, synthetic construct
  source 1..75: mol_type = other DNA
cccgttgccagtccgttcaggtttaccgtcacgggcagaacccaaaaggacatgatcgattccgttgccgtgact

SEQ ID NO: 860069 - DNA, 75 bp, synthetic construct
  source 1..75: mol_type = other DNA
gacgcaacgggcagataatcttctgtacttcaatacagacgggaatgcctcactgtctctgctgtcagagaaggg

SEQ ID NO: 860070 - DNA, 75 bp, synthetic construct
  source 1..75: mol_type = other DNA
gctggaatgcaacatcaagccttattgtgtatgacggcaactccctggcatatctgatgtcctcaaccgccggta

SEQ ID NO: 860071 - DNA, 75 bp, synthetic construct
  source 1..75: mol_type = other DNA
ttgaaatgcaggaggaacggcgtgacgaatggattgcggaaaattatccggatgctgaggaaggaactcctgaat

SEQ ID NO: 860072 - DNA, 75 bp, synthetic construct
  source 1..75: mol_type = other DNA
aaagagctgataactgaaatggcctttaatggtgccggggttcgcgataccgccaggacactgaaaattggtagt

SEQ ID NO: 860073 - DNA, 75 bp, synthetic construct
  source 1..75: mol_type = other DNA
cacataacggcgcagggggccgtgataccgccaggacactgaaaatcggcatcaataccgtcatacggacattaa

SEQ ID NO: 860074 - DNA, 75 bp, synthetic construct
  source 1..75: mol_type = other DNA
taactgactacattgcttcgcgaaggcaacccaaaatcgatgcctttgaaaaagaagcagcaaagaggctagagc

SEQ ID NO: 860075 - DNA, 75 bp, synthetic construct
  source 1..75: mol_type = other DNA
gttcaagaccaaatcactgaaatgcctttcaacggtgccggggttcgctatactgcccgtacgctgaaaatcggc

SEQ ID NO: 860076 - DNA, 75 bp, synthetic construct
  source 1..75: mol_type = other DNA
ttgaccactacagttcacggagattcgttactcgccagcttaaaacgtggcgattatcaatcattaaatgccttt

SEQ ID NO: 860077 - DNA, 75 bp, synthetic construct
  source 1..75: mol_type = other DNA
cgttcaacggagcaggtgtccgcgatacctcaaggacactcaaaattggaataaataccgtcatccgggtgatgc

SEQ ID NO: 860078 - DNA, 75 bp, synthetic construct
  source 1..75: mol_type = other DNA
ttgcattggtggcatgtatttcgcgttcaacctagccgaaatgacggaatatgttccggcgaagaaagtcaaaaa

SEQ ID NO: 860079 - DNA, 75 bp, synthetic construct
  source 1..75: mol_type = other DNA
cctgcgtggtcgtatacgttcagccttgccgacttcgttggcgacaaggggcgcgggctggaagtagtcgagggt

SEQ ID NO: 860080 - DNA, 75 bp, synthetic construct
  source 1..75: mol_type = other DNA
ttcttcccgatttggccgaaactgtccggacatgcattcctgctgacacaaaaagaagtggacgccgaactggct

SEQ ID NO: 860081 - DNA, 75 bp, synthetic construct
  source 1..75: mol_type = other DNA
aaagcagaagggtcaggcaacagaacgtttgagtttggctcgtcagttcttgtcggtggatacggctattgagcg

SEQ ID NO: 860082 - DNA, 75 bp, synthetic construct
  source 1..75: mol_type = other DNA
ggaagagctgtatcaccttgtctggcgtgagcctgcggagcgaatcacttccctctatagcatcagtaaagaaca

SEQ ID NO: 860083 - DNA, 75 bp, synthetic construct
  source 1..75: mol_type = other DNA
aacgaaaaagaagctactcgatctgaatgtttcagaaacgggattcaacagtgctatcgattttctgagtcggtt

SEQ ID NO: 860084 - DNA, 75 bp, synthetic construct
  source 1..75: mol_type = other DNA
cctgtatgttgtactgggtgttttggcgctgggcattctcgcaagcgtcatgttcccgggcaaacctgaatctga

SEQ ID NO: 860085 - DNA, 75 bp, synthetic construct
  source 1..75: mol_type = other DNA
ccggtgattggcgatattgatagcggtatttatgtcaaagcagatcttcccgaggcatatcggcaatatttactg

SEQ ID NO: 860086 - DNA, 75 bp, synthetic construct
  source 1..75: mol_type = other DNA
gacgcggtacatagcgcgggattacgcgtgctggaggtgatgcgctatacccagcagcatggtagcgatgaattg

SEQ ID NO: 860087 - DNA, 75 bp, synthetic construct
  source 1..75: mol_type = other DNA
gattttctcatggttctcagttccggaccgttaccgtcaccgggttctgtactgggggatcattggcgctatcgt

SEQ ID NO: 860088 - DNA, 75 bp, synthetic construct
  source 1..75: mol_type = other DNA
tatgcgctggagaaagtactgtcggtcgacaacctgtttgtcatgatggccatcttttcctggttcgctgttccg

SEQ ID NO: 860089 - DNA, 75 bp, synthetic construct
  source 1..75: mol_type = other DNA
aaattgaatgaccttcatgctgggatgcagtggatcccattggtaccagaacagacaatattttgccttactccg

SEQ ID NO: 860090 - DNA, 75 bp, synthetic construct
  source 1..75: mol_type = other DNA
gttcctgacccgtatcggttttaactcaaaagcggttatcaccggcgacgtcacacagatcgacctgccgcgtaa

SEQ ID NO: 860091 - DNA, 75 bp, synthetic construct
  source 1..75: mol_type = other DNA
gttcctgactcgtatcggttttaactcaaaagcagttattaccggcgatgtcacgcagatcgacttaccgcgtaa

SEQ ID NO: 860092 - DNA, 75 bp, synthetic construct
  source 1..75: mol_type = other DNA
gcgattaaagaagcgcgcgtgctggaacaaagtgcggagagcgtgccggagtatggcaaagcggtcaatatcaag

SEQ ID NO: 860093 - DNA, 75 bp, synthetic construct
  source 1..75: mol_type = other DNA
acactaccatcgaacagatgaagatgttcctaacccgtatcggttttaactcaaaagcggttatcaccggcgacg

SEQ ID NO: 860094 - DNA, 75 bp, synthetic construct
  source 1..75: mol_type = other DNA
cctgcgtaatctcgacctgattatgggttgcgaacgccgggtcgtttacgatttcgtcaacgtcattcagggcga

SEQ ID NO: 860095 - DNA, 75 bp, synthetic construct
  source 1..75: mol_type = other DNA
ccggtcattctcgacattaacgccgatgcgggtaaagcctacgcagataccgtagaacgtctgttgggagaagaa

SEQ ID NO: 860096 - DNA, 75 bp, synthetic construct
  source 1..75: mol_type = other DNA
gtacggcaaagcggtcaatatcaagaccaaacgcggggtcattaaaccacgcacaccgaaccaggcgcagtacat

SEQ ID NO: 860097 - DNA, 75 bp, synthetic construct
  source 1..75: mol_type = other DNA
accttctcgccactgctggagtttctctcgttgtgttgccaacgccaaagggatgtcgggcaagtggtgctacct

SEQ ID NO: 860098 - DNA, 75 bp, synthetic construct
  source 1..75: mol_type = other DNA
tgattggctcgaatcattgcctgtacgtgatatgatggagtttggttggatccccaaaactacaactcgggaaag

SEQ ID NO: 860099 - DNA, 75 bp, synthetic construct
  source 1..75: mol_type = other DNA
agactctccaacttcaccggaacactgaaagcgggaactgtcatccagtttgagaaccacaagaaaatctacacg

SEQ ID NO: 860100 - DNA, 75 bp, synthetic construct
  source 1..75: mol_type = other DNA
tgaaatgctgggctttgagaaagtcgagaaactgattgagcgcaacgttattgaagtcgcgccgctggcctatat

SEQ ID NO: 860101 - DNA, 75 bp, synthetic construct
  source 1..75: mol_type = other DNA
tggaactccgctatctcagtgtataccgactgtatgggtttgacgcctcagggttgtgcgcaggccgctgaacgg

SEQ ID NO: 860102 - DNA, 75 bp, synthetic construct
  source 1..75: mol_type = other DNA
cagttgctgatggcggtcgttaccgtcgcggcgctggtggcttccgcaatggggatcgcctcgctgatgaccagc

SEQ ID NO: 860103 - DNA, 75 bp, synthetic construct
  source 1..75: mol_type = other DNA
ttcctccgtttgcttggtggaatgaccgtctccgctgcaactgatctgatgcgaccgatgatgcagcatggcctg

SEQ ID NO: 860104 - DNA, 75 bp, synthetic construct
  source 1..75: mol_type = other DNA
actgtctggggtatgcgcaaaaacgaagcactggtacgtttcctggaagcggaagattttgatgcggcgattatc

SEQ ID NO: 860105 - DNA, 75 bp, synthetic construct
  source 1..75: mol_type = other DNA
tcaaagaaagaaccagattacaaatctactttggtaaaaacaaattagatttgagtcaaataaagactatatttc

SEQ ID NO: 860106 - DNA, 75 bp, synthetic construct
  source 1..75: mol_type = other DNA
agaaatcaaaattggcctgggtgatgtggtgcaggggtcacaactgggcggagttaatctttcgtgcacaatatc

SEQ ID NO: 860107 - DNA, 75 bp, synthetic construct
  source 1..75: mol_type = other DNA
agtgggccgcgatgatggtgttgaagttcgtcatatcgttggcgcgattgctaacgaaggcgacatcagcagccg

SEQ ID NO: 860108 - DNA, 75 bp, synthetic construct
  source 1..75: mol_type = other DNA
agtgtattccacatctgctgaatggccgcgacgttctgggtatggcccagacggggagcggaaaaactgcagcat

SEQ ID NO: 860109 - DNA, 75 bp, synthetic construct
  source 1..75: mol_type = other DNA
agatggtcgtctggacatcctgattgcgaccgacgttgcagcccgtggcctggatgttgagcgtatcagcctggt

SEQ ID NO: 860110 - DNA, 75 bp, synthetic construct
  source 1..75: mol_type = other DNA
acaccggggcgttatgcggtcagtattgcggactcttccacgctgctgaaggggaccacgaaatttaacggtatc

SEQ ID NO: 860111 - DNA, 75 bp, synthetic construct
  source 1..75: mol_type = other DNA
cggtaccacgcaatttaacggcattattgatgtgatgtggtcaccgtacgccaacagtgaatccgacacagtccg

SEQ ID NO: 860112 - DNA, 75 bp, synthetic construct
  source 1..75: mol_type = other DNA
cagacagtcaccccggggcggtatgcggtcagtattgcggactcctccacgctgctggtgggcaccacgaaattt

SEQ ID NO: 860113 - DNA, 75 bp, synthetic construct
  source 1..75: mol_type = other DNA
accacgccaacaccaccagatgatgcagcaggtaatgaaatagccaatgcggagtttgtccgcaaactgcttgcc

SEQ ID NO: 860114 - DNA, 75 bp, synthetic construct
  source 1..75: mol_type = other DNA
gctgaaagaggccatcccggggcgttatgcggtcagcattgcggactcttccacactactggcaggcaccacaaa

SEQ ID NO: 860115 - DNA, 75 bp, synthetic construct
  source 1..75: mol_type = other DNA
tggggttggctcctacaattccgcaccgagtgtaggagctacagggtacactttcccggggcgttatatggcgct

SEQ ID NO: 860116 - DNA, 75 bp, synthetic construct
  source 1..75: mol_type = other DNA
tatacgctggcggtaagaagtggcaaggcctggttaaccgccgtgatattgaatatgccgtttgcgaatggggtg

SEQ ID NO: 860117 - DNA, 75 bp, synthetic construct
  source 1..75: mol_type = other DNA
tttcgcgcaccctgcgtttaatggtgcttgatgagacactttgcattgatacaaataaacatggccttaattttt

SEQ ID NO: 860118 - DNA, 75 bp, synthetic construct
  source 1..75: mol_type = other DNA
gcacaacgtcgcgatcgtgtggcggcgttatttagtgactacagcgtcaaaaagcgtatgcgtgacattagcgcg

SEQ ID NO: 860119 - DNA, 75 bp, synthetic construct
  source 1..75: mol_type = other DNA
ccatcgcggaagccgtgcgcaaacgcaacgatctgctgtttattgttgttaccgatatgcaaagtcttcgctact

SEQ ID NO: 860120 - DNA, 75 bp, synthetic construct
  source 1..75: mol_type = other DNA
accggaaaaataacggcctgttaccggataaaccagtatttgagatcgaaaaacttaacggtgaaacggggttag

SEQ ID NO: 860121 - DNA, 75 bp, synthetic construct
  source 1..75: mol_type = other DNA
ggtattgttgagcgtgtgtatacatattttggaccgcgccgccgcttgctggggtatcgaattaaatatttgtat

SEQ ID NO: 860122 - DNA, 75 bp, synthetic construct
  source 1..75: mol_type = other DNA
gccggaaaaataaaggtctactaccggataaaccagtatttgaaatcgaaaaacttaacagtgaaacggggttgg

SEQ ID NO: 860123 - DNA, 75 bp, synthetic construct
  source 1..75: mol_type = other DNA
ctgttcccttagtggataaccaacaggcagctcaggagcgtctggaaacccccgagggacgtcgcgagttttgga

SEQ ID NO: 860124 - DNA, 75 bp, synthetic construct
  source 1..75: mol_type = other DNA
ttggcgatgtcttttttccggaggcgacacccgtcatggcattactttccagctttgccgcctattctgttgggt

SEQ ID NO: 860125 - DNA, 75 bp, synthetic construct
  source 1..75: mol_type = other DNA
gaattattggtagaacctatggccctatgcttgaaatacttaaggctgagtcagctgaatatgataagcaacatg

SEQ ID NO: 860126 - DNA, 75 bp, synthetic construct
  source 1..75: mol_type = other DNA
ccataaccagcttaaaaaatacccaaaggggtttaagatttattacaaagatcaaagaaaacgagagaaaactta

SEQ ID NO: 860127 - DNA, 75 bp, synthetic construct
  source 1..75: mol_type = other DNA
ttaatcggcaacatactttatcaaggctattcaattctcttatattacaaactgataaagattttgagtggataa

SEQ ID NO: 860128 - DNA, 75 bp, synthetic construct
  source 1..75: mol_type = other DNA
ttctttcgttggttttgttctcaattgcattgagtggttgtggtgaggacatcaagaccgttgattggtggcgaa

SEQ ID NO: 860129 - DNA, 75 bp, synthetic construct
  source 1..75: mol_type = other DNA
tttttttattatgggaataataaaatatcaaataacactgatgtctcttctttttttgatttaataaaactcgaa

SEQ ID NO: 860130 - DNA, 75 bp, synthetic construct
  source 1..75: mol_type = other DNA
aagcccgcgtgattggttgtttattagaaaaacaggtgacgacgccggagcagtaccctctctccgtgaatggcg

SEQ ID NO: 860131 - DNA, 75 bp, synthetic construct
  source 1..75: mol_type = other DNA
aaacgacggcgccatactggttgtggatcggtcactgactgcggagcacggctcaatcgtcgttgcgctggttga

SEQ ID NO: 860132 - DNA, 75 bp, synthetic construct
  source 1..75: mol_type = other DNA
gttctctggggatatttcaatcgtctggaccgactggatattttctttgatgtgatgaatattaaaagcatcttg

SEQ ID NO: 860133 - DNA, 75 bp, synthetic construct
  source 1..75: mol_type = other DNA
gtattggtttgttgtgcaactattctatcattgattatgatcatttttattttttttataacatctttttttata

SEQ ID NO: 860134 - DNA, 75 bp, synthetic construct
  source 1..75: mol_type = other DNA
aatatttctttgctaaacagtgtgcgtggtgggcgcgtctggctgttgccgtcaatgccgcctgcctgggggccg

SEQ ID NO: 860135 - DNA, 75 bp, synthetic construct
  source 1..75: mol_type = other DNA
atgacaacgagcaaaggcaaatgggacgggctgcgcgatgcctcgtttcgcggcgtccccttctttctggtggat

SEQ ID NO: 860136 - DNA, 75 bp, synthetic construct
  source 1..75: mol_type = other DNA
cggcgtccccttctttctggtggatacggaaggcaccggtggccgtcgtgccattccccgtgcgtatccccggcg

SEQ ID NO: 860137 - DNA, 75 bp, synthetic construct
  source 1..75: mol_type = other DNA
gttctggctgatctggattttaatgtccaccatcactcgcggtatcgacggtatgtcgctggcgctgttcaccga

SEQ ID NO: 860138 - DNA, 75 bp, synthetic construct
  source 1..75: mol_type = other DNA
tggcgatattctgaaaaaagagacaacgataacctcgtttttaaatatgccgacgttatcattgagccgaaccga

SEQ ID NO: 860139 - DNA, 75 bp, synthetic construct
  source 1..75: mol_type = other DNA
attacgctgaaagcgtcggtgtccgggattatgaccggtatcctgctggcgattgcccgtattgccggtgaaacc

SEQ ID NO: 860140 - DNA, 75 bp, synthetic construct
  source 1..75: mol_type = other DNA
ggggccgttcccggtcaacagcagattaacgcaaagctgccaggtaaaaacttccaggatgatttaaacgccctt

SEQ ID NO: 860141 - DNA, 75 bp, synthetic construct
  source 1..75: mol_type = other DNA
ccaggcttatgaacttgctcatctggaaaatcgtgaagaaatcaactggttgttatcacggattgagagcagcaa

SEQ ID NO: 860142 - DNA, 75 bp, synthetic construct
  source 1..75: mol_type = other DNA
cagattggttgctctgaacgaacggtcagacgttacctcaagaaccgccagccagaaaaacccgccacaaaatgg

SEQ ID NO: 860143 - DNA, 75 bp, synthetic construct
  source 1..75: mol_type = other DNA
aggttatggctccggttgatcctgaaatggcatctgccctgcatcaggaaatccggagtcatggcgtggatctgc

SEQ ID NO: 860144 - DNA, 75 bp, synthetic construct
  source 1..75: mol_type = other DNA
cttttttataacctctttttttatacccgtagttattcctcaggatataaataatcttcctgcttacaataagat

SEQ ID NO: 860145 - DNA, 75 bp, synthetic construct
  source 1..75: mol_type = other DNA
ggtgcaaagttaactttgcggttaatacgctggggttctcccgccgcttccatgtcttcgccgcaccaaaaacag

SEQ ID NO: 860146 - DNA, 75 bp, synthetic construct
  source 1..75: mol_type = other DNA
cccatcacggcgatagcgtccattcttcatcgcgtttccggtgtgatcacgtttgttgcagtgggcatcctgctg

SEQ ID NO: 860147 - DNA, 75 bp, synthetic construct
  source 1..75: mol_type = other DNA
tttattttctggatattaattccgctggctacaaagagtcttatgaccaactgacgtttcggttaagttattttg

SEQ ID NO: 860148 - DNA, 75 bp, synthetic construct
  source 1..75: mol_type = other DNA
gctggtgaatttactgaataaagacccggcacaactgtttgccgagtttgaaggtaaacagactatcggtaatgg

SEQ ID NO: 860149 - DNA, 75 bp, synthetic construct
  source 1..75: mol_type = other DNA
ggtgtcgaggaagtggtcatcggtatggcacatcggggaaggcttaatgtgctggtgaatttactgaataaagac

SEQ ID NO: 860150 - DNA, 75 bp, synthetic construct
  source 1..75: mol_type = other DNA
aaacctgcaattcactcttttagcgctaactggtatgggttgaccaaccctcactggagcgccccggtatctacg

SEQ ID NO: 860151 - DNA, 75 bp, synthetic construct
  source 1..75: mol_type = other DNA
ctccaggcttatggattcaaagtttataacctgagtggtggttttcttacttggcagtcagttatggagacactt

SEQ ID NO: 860152 - DNA, 75 bp, synthetic construct
  source 1..75: mol_type = other DNA
caacgtgggctggatgacgatgtggcgattgtccgcgtggaacaactctacccgtttccagcggcagagcttaat

SEQ ID NO: 860153 - DNA, 75 bp, synthetic construct
  source 1..75: mol_type = other DNA
ctgccggttcgttacatgtagcgctggcgtataacccctcacatttagagattgtgaatccggtggtgctgggcc

SEQ ID NO: 860154 - DNA, 75 bp, synthetic construct
  source 1..75: mol_type = other DNA
aaacagcggtctttggctggcggcgcgcagtgctaagtccgctcaccgtgagcaacaagtcaaaaataaagcgtg

SEQ ID NO: 860155 - DNA, 75 bp, synthetic construct
  source 1..75: mol_type = other DNA
gcgacagccgggtttttatcgacaaaaacgacggtagcggtacgacctttacgctggaagaaggcacatcagagg

SEQ ID NO: 860156 - DNA, 75 bp, synthetic construct
  source 1..75: mol_type = other DNA
tcggaaaatgaaatccggaagattgcggcggatggtgatagtggtaacaaccgcgcggatgaatctggctccgct

SEQ ID NO: 860157 - DNA, 75 bp, synthetic construct
  source 1..75: mol_type = other DNA
tgattacaaacttaatggtgcaatgcccatttatggcgaggccggtgacagcggttcgcctttatttgcttttga

SEQ ID NO: 860158 - DNA, 75 bp, synthetic construct
  source 1..75: mol_type = other DNA
aggcagaaaaagtctccggaaatatgacgctgaaggcaggtatctggcggaatatcacgctgaacgatatgccgg

SEQ ID NO: 860159 - DNA, 75 bp, synthetic construct
  source 1..75: mol_type = other DNA
tgaaaaataacgccggtctggcagactcacaggtacaaccggtatcggaaaatgaaatccggaaaattgctgagg

SEQ ID NO: 860160 - DNA, 75 bp, synthetic construct
  source 1..75: mol_type = other DNA
atgggagtcagcacaacagacaacaccagtgaccggattgatattctggataaggcaacaggcggacataacaca

SEQ ID NO: 860161 - DNA, 75 bp, synthetic construct
  source 1..75: mol_type = other DNA
cacctgaactggtttccgctgaacccgattttgaggcgctgaacaatgggaagaccaagaaaaaacaaaaaagat

SEQ ID NO: 860162 - DNA, 75 bp, synthetic construct
  source 1..75: mol_type = other DNA
cagttaagactgcacggcatcccatttgtaatcggccctaaaaacgaacccatagttctccgcagggatattcca

SEQ ID NO: 860163 - DNA, 75 bp, synthetic construct
  source 1..75: mol_type = other DNA
ttatcggtggcctgctgattggtggattaactccaaccgccagcgacgttctggcaacgctggagccggaagcgt

SEQ ID NO: 860164 - DNA, 75 bp, synthetic construct
  source 1..75: mol_type = other DNA
tttcgtttggtatcaacggaaagctgactgagaaactgtcagtgcaggcaaaagtaaacagcagttttgatggtt

SEQ ID NO: 860165 - DNA, 75 bp, synthetic construct
  source 1..75: mol_type = other DNA
atgaaatatcaacttactgcactggaagcccgcgtgattggctgcttgctggaaaaacaggtgacaacgccggag

SEQ ID NO: 860166 - DNA, 75 bp, synthetic construct
  source 1..75: mol_type = other DNA
tcagttttggcaatggtcaaaatatatataatattgtagacagaaacaatcacagtggactcgattttcatgcgc

SEQ ID NO: 860167 - DNA, 75 bp, synthetic construct
  source 1..75: mol_type = other DNA
caccccagctccggctatgagatgtttgccgcactctgcgcgcgccttgggcggccgcctaaggcgctattcacc

SEQ ID NO: 860168 - DNA, 75 bp, synthetic construct
  source 1..75: mol_type = other DNA
ctgcgtggctttggcggcaaaactgagttctgggatcacaaccttgagtcgttcaccttgatggcggggctggcg

SEQ ID NO: 860169 - DNA, 75 bp, synthetic construct
  source 1..75: mol_type = other DNA
cccgctcattacgggacaaccgcagtcataccattggtctcgtcgttcctgaaatcactaactacggatttgcag

SEQ ID NO: 860170 - DNA, 75 bp, synthetic construct
  source 1..75: mol_type = other DNA
tgtatgattcactttcggtaagaatcgacacaatacaacaggataatcgccaacttgcttttcactgctttgaac

SEQ ID NO: 860171 - DNA, 75 bp, synthetic construct
  source 1..75: mol_type = other DNA
ttgcaatcacaacaggcattctctccggtatctggggatgggtggctgtttcccctgggcttactaagctgggcg

SEQ ID NO: 860172 - DNA, 75 bp, synthetic construct
  source 1..75: mol_type = other DNA
aaatagaatgggtgccaaccgatggctacgcaggcaaagacgaagcccggcagcaaatcagctgttatattctga

SEQ ID NO: 860173 - DNA, 75 bp, synthetic construct
  source 1..75: mol_type = other DNA
ccattacaacggtgggttgacgccggaagaatcagagaacagataccgtttttactgtaaaaccgtggccaatat

SEQ ID NO: 860174 - DNA, 75 bp, synthetic construct
  source 1..75: mol_type = other DNA
agttctggtttttaggcggtcaggcgcgtctgtcgccctcccgcgatcgtctgaccgggttcacgcagggtttgg

SEQ ID NO: 860175 - DNA, 75 bp, synthetic construct
  source 1..75: mol_type = other DNA
aagatatagccgaacaggctggcgtctccaaagcgaccgccagcttggtactgaatggtcgtggcaaggagctgc

SEQ ID NO: 860176 - DNA, 75 bp, synthetic construct
  source 1..75: mol_type = other DNA
ctcaaaagcgaccgccagcctagtactgaacggtcgtggtaaggagctgcgtgtggcgcaggaaacgcgtgagcg

SEQ ID NO: 860177 - DNA, 75 bp, synthetic construct
  source 1..75: mol_type = other DNA
aaggaaaaaccatcaagatcactcttgaccagcctgcaggtgcggatgctatcaagtggaaagcttctctgccag

SEQ ID NO: 860178 - DNA, 75 bp, synthetic construct
  source 1..75: mol_type = other DNA
ggatcactcttgacaaccctgcaggcaccgatgaaatcgtttggaaggcatctctgccggttactgttacctaca

SEQ ID NO: 860179 - DNA, 75 bp, synthetic construct
  source 1..75: mol_type = other DNA
aaactggtagctgaccgtttcaatgctgcagggtatctgttccacggacagctgaaagacaatctgaatgtggat

SEQ ID NO: 860180 - DNA, 75 bp, synthetic construct
  source 1..75: mol_type = other DNA
gagtaaatatgccaccccggacacctaaagcttgccgtgttcgcggctgccgctctacaacaacagacccatcag

SEQ ID NO: 860181 - DNA, 75 bp, synthetic construct
  source 1..75: mol_type = other DNA
gccgcgttcgcggctgccgccataccaccactgactcgtcaggctattgcgaaagccacaaaagcgaaggctgga

SEQ ID NO: 860182 - DNA, 75 bp, synthetic construct
  source 1..75: mol_type = other DNA
gaaagccacaaaagcgaaggctggacgcaatataagccaggtcagtcccgtcaccagcgcggttatggttcgaag

SEQ ID NO: 860183 - DNA, 75 bp, synthetic construct
  source 1..75: mol_type = other DNA
atgccatcacgaatcccccgcgcatgccgtaaacgtggatgtgcaggtacaaccacagacagttctggttactgc

SEQ ID NO: 860184 - DNA, 75 bp, synthetic construct
  source 1..75: mol_type = other DNA
gttgtgtctgcgtgccggtgtggtgagcgaggcgaaaaccgtcgaccacatcatcccgaaagcgcatggcggaac

SEQ ID NO: 860185 - DNA, 75 bp, synthetic construct
  source 1..75: mol_type = other DNA
agatgccgacagtaatctgcagagcctgtgctggccgtgtcataaggcgaagacggcccgtgaacggctgaggtg

SEQ ID NO: 860186 - DNA, 75 bp, synthetic construct
  source 1..75: mol_type = other DNA
aatattaaacgtaagatcaaaacgcataataaacaggttatctaccatgtcgtccgactgacggataatgtgact

SEQ ID NO: 860187 - DNA, 75 bp, synthetic construct
  source 1..75: mol_type = other DNA
ggtatttttgtcaacatgcgcggtaatgactccaacttattgatagtgttttatgttcagataatgcccgatgac

SEQ ID NO: 860188 - DNA, 75 bp, synthetic construct
  source 1..75: mol_type = other DNA
agcaatacaagccaggacaatcccgtcatcagcgcggttatggttcgaaatgggatgttatccgtgaacgtgtgc

SEQ ID NO: 860189 - DNA, 75 bp, synthetic construct
  source 1..75: mol_type = other DNA
gttatgtctgcgtgctggtgtggtgcgtgaggcgaaaaccgttgaccacatcatccctaaagcgcgtggcggcac

SEQ ID NO: 860190 - DNA, 75 bp, synthetic construct
  source 1..75: mol_type = other DNA
atgccatcacgaatcccccgcgcatgccgtaagcgaggctgcgcaggcacaacaacagacagttcgggttactgc

SEQ ID NO: 860191 - DNA, 75 bp, synthetic construct
  source 1..75: mol_type = other DNA
agacgcagacagcaacctgcagagtctgtgctgcccctgccataaagcgaaaacagcgcgcgaacgaatcaggtg

SEQ ID NO: 860192 - DNA, 75 bp, synthetic construct
  source 1..75: mol_type = other DNA
tgggatgccatacgtgcgcgcatactgaagcgtgataatcatctgtgtcagaactgcctgcgcaatgggatagcc

SEQ ID NO: 860193 - DNA, 75 bp, synthetic construct
  source 1..75: mol_type = other DNA
gccattacgccgcagcagcaacgcgcgctggcccaacgttttggcgaactgcatattcaccctgtttaccctcat

SEQ ID NO: 860194 - DNA, 75 bp, synthetic construct
  source 1..75: mol_type = other DNA
cgtatgaggcgctctccgcgccgttccggacgctgctgagcgggctgcgggcggagcacgacttcaaaaagtcgt

SEQ ID NO: 860195 - DNA, 75 bp, synthetic construct
  source 1..75: mol_type = other DNA
gtggctgatgcccatatcgttctgacaaatctggccagtcaaattggccgcgaagagccaaataagatcacctta

SEQ ID NO: 860196 - DNA, 75 bp, synthetic construct
  source 1..75: mol_type = other DNA
ttcgcccatatcactaaaccggagtttcaggtgcgctggcgctggcaaccaaatgatattgcgatttgggataac

SEQ ID NO: 860197 - DNA, 75 bp, synthetic construct
  source 1..75: mol_type = other DNA
tttgcccatatcaccaaaccggagtttcaggtgcgctggcgctggcaaccaaatgatattgcgatttgggataac

SEQ ID NO: 860198 - DNA, 75 bp, synthetic construct
  source 1..75: mol_type = other DNA
aggttaactccccctttctgagaggaaaaaaattaacgcagaatcttcttctcagccaaatccagcgcaaagtag

SEQ ID NO: 860199 - DNA, 75 bp, synthetic construct
  source 1..75: mol_type = other DNA
gcctatccgcctcaacttgcaggtagaagatgaaacccgtactcaggaacgtctgcgccgcggcgaagtggtcgg

SEQ ID NO: 860200 - DNA, 75 bp, synthetic construct
  source 1..75: mol_type = other DNA
ggcgatcgaatattacaatgaaaaccatccgcatagtgcgttttgttatctctctccgcgagaatatcgacatca

SEQ ID NO: 860201 - DNA, 75 bp, synthetic construct
  source 1..75: mol_type = other DNA
atggataccttactttttgcaagcctgatggggctgtattactggtttgcccggttgcgccttggctataccttc

SEQ ID NO: 860202 - DNA, 75 bp, synthetic construct
  source 1..75: mol_type = other DNA
actgccactacgacaggcggtgaagcgacagacaatggtactgcggggagcgagggtatggcggaagcgcagcct

SEQ ID NO: 860203 - DNA, 75 bp, synthetic construct
  source 1..75: mol_type = other DNA
atgccatatcgttaactcatcagaagcgttcgtgcagctcgctcgtcagggaacgacctgctgtatgattccgca

SEQ ID NO: 860204 - DNA, 75 bp, synthetic construct
  source 1..75: mol_type = other DNA
tcggtgcgctcgactatctgttcgtcagctcaaaaccctttgccgaaaaatatttccctaacggcgtaacgcgtt

SEQ ID NO: 860205 - DNA, 75 bp, synthetic construct
  source 1..75: mol_type = other DNA
caccactgacccgtcaggttattgcgaaagccacaaaagcgaaggctggaagcaatacaagccaggacagtcccg

SEQ ID NO: 860206 - DNA, 75 bp, synthetic construct
  source 1..75: mol_type = other DNA
tgtcatatgcagaccgtctttctgaaagatctggtcagtgctgttgcacctacaaatccctacagttttgttaac

SEQ ID NO: 860207 - DNA, 75 bp, synthetic construct
  source 1..75: mol_type = other DNA
taccaccgttttgaagttctgagaaaaccaagaaatatccgtctgctacccagccgctcggtaacaactctggaa

SEQ ID NO: 860208 - DNA, 75 bp, synthetic construct
  source 1..75: mol_type = other DNA
agagcattgccgggatgtcctggctcgttctgctgatcttcgcgtgctggggcgggcttgtccgttacctgattg

SEQ ID NO: 860209 - DNA, 75 bp, synthetic construct
  source 1..75: mol_type = other DNA
atgaaaaaaagtgtcgattttattggtgtcgggacagggccatttaatctcagcattgctgcgttgtcacatcag

SEQ ID NO: 860210 - DNA, 75 bp, synthetic construct
  source 1..75: mol_type = other DNA
tgatatgagaaatggcttcaacggcctggctgcgaaagtacagacggcgctgaaagacgatcccatgtccggcca

SEQ ID NO: 860211 - DNA, 75 bp, synthetic construct
  source 1..75: mol_type = other DNA
accgatgtgaacggagattcactgcttgccagcctgaagcgtggtgattatcaggcattaagtacgtttgcagag

SEQ ID NO: 860212 - DNA, 75 bp, synthetic construct
  source 1..75: mol_type = other DNA
gttatacgggcggacgttccatgctgcgttactacatccagcccaaacgtaaatcgctcgccacgggaatatctg

SEQ ID NO: 860213 - DNA, 75 bp, synthetic construct
  source 1..75: mol_type = other DNA
ttcgcttcgaaactcagcctggataccagctccagcacgactggagcgaagttggggtggaggttgcgtattacc

SEQ ID NO: 860214 - DNA, 75 bp, synthetic construct
  source 1..75: mol_type = other DNA
tggactatatcgacatgcgtctggctgagaattgtcaacgacggatgaaaagtgatccactatatcaggggcttc

SEQ ID NO: 860215 - DNA, 75 bp, synthetic construct
  source 1..75: mol_type = other DNA
atgcacgaaaaagagagccttgccggagcgttctggctcgttttgctgatcatcgcaggttggggcggtctggtc

SEQ ID NO: 860216 - DNA, 75 bp, synthetic construct
  source 1..75: mol_type = other DNA
caacaaaattaaaagcgggtgataacactctgcattataactcatgggttaaaaaggccacaaatggcaccctga

SEQ ID NO: 860217 - DNA, 75 bp, synthetic construct
  source 1..75: mol_type = other DNA
ttcgcgtcgaaactcagcctggataccagctccagcacgactggggcgaagttgaggtggaggttgccgggcaac

SEQ ID NO: 860218 - DNA, 75 bp, synthetic construct
  source 1..75: mol_type = other DNA
ttaaagaactccagcgtctgctcggcaaaaaaacgatggaaaatgaactccttaaagaagccgttgaatatgggc

SEQ ID NO: 860219 - DNA, 75 bp, synthetic construct
  source 1..75: mol_type = other DNA
gccgcgttcgcggctgccgtaataccacgacagacccgtcaggctactgcgaaagccacaaaagcgaaggctgga

SEQ ID NO: 860220 - DNA, 75 bp, synthetic construct
  source 1..75: mol_type = other DNA
gttatgtctgcgtgctggtgtggtacgtgaggcgaagaccgttgaccacatcatccctaaagcgcgtggcggcac

SEQ ID NO: 860221 - DNA, 75 bp, synthetic construct
  source 1..75: mol_type = other DNA
atgccccctcgaactccaaaatcctgccgcgttcgcggctgccgtaataccacgacagacccgtcaggctactgc

SEQ ID NO: 860222 - DNA, 75 bp, synthetic construct
  source 1..75: mol_type = other DNA
tgctctggagcggcaggaacttgaagcacgctacctgccacgtaactggttaacggatgcggcgaaacgtgccgg

SEQ ID NO: 860223 - DNA, 75 bp, synthetic construct
  source 1..75: mol_type = other DNA
atgcctccacgaatcccaaaagcctgccgtgttcgcggttgccgccataccacgactgacccgtcaggctattgc

SEQ ID NO: 860224 - DNA, 75 bp, synthetic construct
  source 1..75: mol_type = other DNA
gcgcggttatggttcgaaatgggatgttatccgtgaacgtgtgctcaagcgtgacaaaggcctgtgtcagttgtg

SEQ ID NO: 860225 - DNA, 75 bp, synthetic construct
  source 1..75: mol_type = other DNA
aaaaatgtcggtgtcgttctcttttccattcaggacccggccaatatattcaatgttattagttcagcgggaaat

SEQ ID NO: 860226 - DNA, 75 bp, synthetic construct
  source 1..75: mol_type = other DNA
gaaaatgaactcctcaaagaagccgttgaatatggacgggcaaaaaagtggatagcgcacgcgcccttattgccc

SEQ ID NO: 860227 - DNA, 75 bp, synthetic construct
  source 1..75: mol_type = other DNA
aagatcgcaattgttcagcagagctttgaaccggggatgacggtctccctcgttgcccggcaacatggtgtagca

SEQ ID NO: 860228 - DNA, 75 bp, synthetic construct
  source 1..75: mol_type = other DNA
agatgccgacagcaatctgcagagtctgtgctggccgtgccacaaggcgaagacggcccgtgaacggctaaagtg

SEQ ID NO: 860229 - DNA, 75 bp, synthetic construct
  source 1..75: mol_type = other DNA
atgtatcttaaaataagagatagacttggatatacgtctaactctagttctaattttgagatgactggaactttg

SEQ ID NO: 860230 - DNA, 75 bp, synthetic construct
  source 1..75: mol_type = other DNA
ggtgtcgttcctgcctcagaactggctgccgatataaaacaaataaaagagttacagcgcttgctgggtaaaaaa

SEQ ID NO: 860231 - DNA, 75 bp, synthetic construct
  source 1..75: mol_type = other DNA
gcgtgatcccggaagatcaatcagtattgcgcgcctctaaccagggtgaaccggtaattctcgacatcaacgccg

SEQ ID NO: 860232 - DNA, 75 bp, synthetic construct
  source 1..75: mol_type = other DNA
gtccaggggaatatgctgcaggccggggcctttaactacaccctcaaccgggacagtgatgagagctggtatctg

SEQ ID NO: 860233 - DNA, 75 bp, synthetic construct
  source 1..75: mol_type = other DNA
gccaggataacgccggttatgtgaagttcgggcatggcagtgcacaacatgtgcgtgccggtttccgtctgggca

SEQ ID NO: 860234 - DNA, 75 bp, synthetic construct
  source 1..75: mol_type = other DNA
ccgacacggttgtgaatactggcgcggaaggaggaccggatgcggaaaatggtgataccgggcagaccgtctacg

SEQ ID NO: 860235 - DNA, 75 bp, synthetic construct
  source 1..75: mol_type = other DNA
cgtgacaccctgcgcgacagtacaaaacacggtgtgagtgaactgcctgtgaactggtgggtacagccttctgtt

SEQ ID NO: 860236 - DNA, 75 bp, synthetic construct
  source 1..75: mol_type = other DNA
acagccttccgttatccgcaccttcagctcccggggagatatgcgtgtggggacctccactgcaggcagcgggat

SEQ ID NO: 860237 - DNA, 75 bp, synthetic construct
  source 1..75: mol_type = other DNA
ggtacacggagaggcacataatacccggctggagggaggaaaccagtatgtgcacaaatacggacttgcgctgaa

SEQ ID NO: 860238 - DNA, 75 bp, synthetic construct
  source 1..75: mol_type = other DNA
ggtgggtacagccttctgttatccgcaccttcagctcccggggtgacatgagcatgggtacagccgcagccggca

SEQ ID NO: 860239 - DNA, 75 bp, synthetic construct
  source 1..75: mol_type = other DNA
atcaccctgggcgttcaggccggttatgcccacagcgtcagcggcagcagcgctgaaggttataacggtcaggcc

SEQ ID NO: 860240 - DNA, 75 bp, synthetic construct
  source 1..75: mol_type = other DNA
ctggagccacaactgcagtacacctggcaggggctctccctggatgacggccaggataacgccggttatgtgaag

SEQ ID NO: 860241 - DNA, 75 bp, synthetic construct
  source 1..75: mol_type = other DNA
tcagggccggaggcggacagagccttcaggggcaggcagtgaacaccactctgaacggcggtgagcagtgggtac

SEQ ID NO: 860242 - DNA, 75 bp, synthetic construct
  source 1..75: mol_type = other DNA
gatgtactggagggccattcagcgcagaaaacactggtggatgacggcggtaccctggcagtgtctgccggtggt

SEQ ID NO: 860243 - DNA, 75 bp, synthetic construct
  source 1..75: mol_type = other DNA
gttaacgcaggagagattcgctttgataatcagacgacaccggatgccgcactgagccgtgctgttgcaaaaggc

SEQ ID NO: 860244 - DNA, 75 bp, synthetic construct
  source 1..75: mol_type = other DNA
agtatcactgacaacctgatgctggagccacaactgcagtacacctggcagggactctccctggatgacggccag

SEQ ID NO: 860245 - DNA, 75 bp, synthetic construct
  source 1..75: mol_type = other DNA
ccttcgcttcactgatgttctctgccggttcagctatcgccgccgattataaaattgacaaagaaggccagcacg

SEQ ID NO: 860246 - DNA, 75 bp, synthetic construct
  source 1..75: mol_type = other DNA
cgtgtccgggaaaatatcaccctgggcgttcaggccggttatgcccacagcgtcagcggcagcagcgctgaaggt

SEQ ID NO: 860247 - DNA, 75 bp, synthetic construct
  source 1..75: mol_type = other DNA
aggcaaactgcaggttgatgccggtggggttgctgttgatgttacccagcatcagggaggggcactggttaccag

SEQ ID NO: 860248 - DNA, 75 bp, synthetic construct
  source 1..75: mol_type = other DNA
gggaaaaggcagttcattcacgctgaacgccggtgatacggccacggataccacggtaaatggcggactgttcac

SEQ ID NO: 860249 - DNA, 75 bp, synthetic construct
  source 1..75: mol_type = other DNA
agccttctgttatccgcaccttcagttcccggggtgacatgagcatggggacagccgccgccggcagtaacatga

SEQ ID NO: 860250 - DNA, 75 bp, synthetic construct
  source 1..75: mol_type = other DNA
tcaggccggttatgcccacagcatcaacggcagcagcgctgaaggttataacagtcaggccacactgaatgtgac

SEQ ID NO: 860251 - DNA, 75 bp, synthetic construct
  source 1..75: mol_type = other DNA
taacatgacgttctcaccgtcccagaatggcacgtcactggacctgcaggccggactggaagcccgtgtccggga

SEQ ID NO: 860252 - DNA, 75 bp, synthetic construct
  source 1..75: mol_type = other DNA
tgaaaatggtcgtcagattgtggctgctgaaggaacagcaataccactgtggtttatgccggcggcgaccagact

SEQ ID NO: 860253 - DNA, 75 bp, synthetic construct
  source 1..75: mol_type = other DNA
gacaacctgatgctggagccacaactgcagtatacctggcagggactttccctggatgacggccaggataacgcc

SEQ ID NO: 860254 - DNA, 75 bp, synthetic construct
  source 1..75: mol_type = other DNA
gcggtaccctggcagtgtctgccggcggtaaggcgacaggtgtcaccatgacatccggtggtgccctgattgcag

SEQ ID NO: 860255 - DNA, 75 bp, synthetic construct
  source 1..75: mol_type = other DNA
gcagtgaaaatgcttatcgtgctgaagtccccctgtatgcctccatgctgacacaggcaatggactatgaccgga

SEQ ID NO: 860256 - DNA, 75 bp, synthetic construct
  source 1..75: mol_type = other DNA
ggcacctcatcccgtgacaccctgcgcgacagtgcaaaacacagtgtgagtgaactgccggtgaactggtgggta

SEQ ID NO: 860257 - DNA, 75 bp, synthetic construct
  source 1..75: mol_type = other DNA
cggaacggtgattaaccagtctggctaccagaccattaaacatggcgggcaggcaaccggaaccatcgtcaacac

SEQ ID NO: 860258 - DNA, 75 bp, synthetic construct
  source 1..75: mol_type = other DNA
gagcttaaccggggcgcaactgttgctgccctcaacggaatctctgacctggccgcggttatcggccttctggca

SEQ ID NO: 860259 - DNA, 75 bp, synthetic construct
  source 1..75: mol_type = other DNA
atctggatggcgtgatcaccgacaccgcacatctgcacttccaggcatggcagcagattgccgccgaaatcggca

SEQ ID NO: 860260 - DNA, 75 bp, synthetic construct
  source 1..75: mol_type = other DNA
ctccctgaatgcgccgacgattttagcagcgctggagctgcgcgagtttttcaccttctgcgcggacgcttccca

SEQ ID NO: 860261 - DNA, 75 bp, synthetic construct
  source 1..75: mol_type = other DNA
ctgtacatggtcacgcactggataccacgctgaatggggggtaccagtatgtgcacaacggcggtacggcgtctg

SEQ ID NO: 860262 - DNA, 75 bp, synthetic construct
  source 1..75: mol_type = other DNA
ggctcactggaaaccggtctgcccttcagtatcactgacaacctgatgctggagccacggctgcagtacacctgg

SEQ ID NO: 860263 - DNA, 75 bp, synthetic construct
  source 1..75: mol_type = other DNA
aaagcgtcatcgggcaataacgacttccgcgcacggggccggggctggctgggctcactggaaaccggtctgccc

SEQ ID NO: 860264 - DNA, 75 bp, synthetic construct
  source 1..75: mol_type = other DNA
cgataacgccacggttcagtcggtggtggatgacctcagccatgccggacagattcatttcacctccgcccgcac

SEQ ID NO: 860265 - DNA, 75 bp, synthetic construct
  source 1..75: mol_type = other DNA
tatcggcaatgggaaaagccagcgcggagaaactgttcgcgatggcagaacatttactggcgcatggtcagccga

SEQ ID NO: 860266 - DNA, 75 bp, synthetic construct
  source 1..75: mol_type = other DNA
cgctgttctacccggcattcgctctttgctggcagatctccgcgcacagcagatcccggttgggctggcttctgt

SEQ ID NO: 860267 - DNA, 75 bp, synthetic construct
  source 1..75: mol_type = other DNA
tcagcattgatgcgcagtttaacgaatccctaaaagggatcagccgcgatgagtctctgcggcgcattctgcaac

SEQ ID NO: 860268 - DNA, 75 bp, synthetic construct
  source 1..75: mol_type = other DNA
tgcacaaatacggacttgcgctgaacacggtaattaacgaggggggctggcaggttgttaaggcaggaggtactg

SEQ ID NO: 860269 - DNA, 75 bp, synthetic construct
  source 1..75: mol_type = other DNA
gggcgttcaggccggttatgcccacagtgtcagcggcagcagcgctgaaggttataacggtcaggccacgctgaa

SEQ ID NO: 860270 - DNA, 75 bp, synthetic construct
  source 1..75: mol_type = other DNA
tcccggggtgatatgcgtgtggggacctccactgcaggcagcgggatgacgttctctccgtcccggaatggcacg

SEQ ID NO: 860271 - DNA, 75 bp, synthetic construct
  source 1..75: mol_type = other DNA
cggcgggggacagagcctgaacgggctggcggtgaacaccacgctgaataacagaggcgagcagtgggttcatga

SEQ ID NO: 860272 - DNA, 75 bp, synthetic construct
  source 1..75: mol_type = other DNA
ggtaccgccactaccgtatccatgggaaatggcggggtactgctggccgattccggggccgctgtcagtggtacc

SEQ ID NO: 860273 - DNA, 75 bp, synthetic construct
  source 1..75: mol_type = other DNA
ggaggctctctcaccggtaacggcagcgtggaaaaatcaggaagtggcacactcactgtcagcaacaccacactc

SEQ ID NO: 860274 - DNA, 75 bp, synthetic construct
  source 1..75: mol_type = other DNA
ctgttatccgcactttcagctcccggggtgacatgagcatgggtacagccgccgccggcagtaacatgacgttct

SEQ ID NO: 860275 - DNA, 75 bp, synthetic construct
  source 1..75: mol_type = other DNA
gacagccgccgccggcagtaacatgacgttctcaccgtcccggaatggcacgtcactggacctgcaggccggact

SEQ ID NO: 860276 - DNA, 75 bp, synthetic construct
  source 1..75: mol_type = other DNA
ggcacctcatcccgtgacaccctgcgcgacagtgcaaaacaccgtgtgcgtgaactgccggtgaactggtgggta

SEQ ID NO: 860277 - DNA, 75 bp, synthetic construct
  source 1..75: mol_type = other DNA
cagtaacatgacgttctcaccgtcccggaatggcacgtcactggacctgcaggccggactggaagcccgtgtccg

SEQ ID NO: 860278 - DNA, 75 bp, synthetic construct
  source 1..75: mol_type = other DNA
cggatttcaccaccgttaaccagaaaggcaaactgcaggtgaacgctggtggtacagccacgaatgtcaccctga

SEQ ID NO: 860279 - DNA, 75 bp, synthetic construct
  source 1..75: mol_type = other DNA
cacatcactggacctgcaggccggactggaagcccgtgtccgggaaaatatcaccctgggcgttcaggccggtta

SEQ ID NO: 860280 - DNA, 75 bp, synthetic construct
  source 1..75: mol_type = other DNA
tgccaccacggaggaaggggcctttgtccaggggaacaggctgcaggccggtgcctttaactactccctcaaccg

SEQ ID NO: 860281 - DNA, 75 bp, synthetic construct
  source 1..75: mol_type = other DNA
cgtatggaaatacaggctaaccggggatgtggcctgcactacgagatttatgagtcccgtctgctgggtatggct

SEQ ID NO: 860282 - DNA, 75 bp, synthetic construct
  source 1..75: mol_type = other DNA
aaaccgccaccagagaatcttccgaaagatgggtgaaaagcacggccctgcggactgatggctttgtacgcaata

SEQ ID NO: 860283 - DNA, 75 bp, synthetic construct
  source 1..75: mol_type = other DNA
gaatattgattctcttcccgaaaatgtgattgtgattgctgcgactaaccatgagaatcttttagatccagcaat

SEQ ID NO: 860284 - DNA, 75 bp, synthetic construct
  source 1..75: mol_type = other DNA
acaacaccggatgccgcgctgagccgtgctgttgcaaaaagtaactccccggtaacgttccataaactgaccacc

SEQ ID NO: 860285 - DNA, 75 bp, synthetic construct
  source 1..75: mol_type = other DNA
gataacgccggttatgtgaagttcgggcatggcagtgcacaacatgtgcgtgccggtttccgtctgggcagccac

SEQ ID NO: 860286 - DNA, 75 bp, synthetic construct
  source 1..75: mol_type = other DNA
gctgataccggacagtttgttcgcggagatgccgtacgtaccaccatcaataaaaatggtcgtcagattgtggta

SEQ ID NO: 860287 - DNA, 75 bp, synthetic construct
  source 1..75: mol_type = other DNA
gaactgccggtgaactggtgggtacagccttctgttatccgcaccttcagctcccggggggacatgagcatgggt

SEQ ID NO: 860288 - DNA, 75 bp, synthetic construct
  source 1..75: mol_type = other DNA
ccgtatccatgggaaatggcggcgtactgctggccgattccggggccgctgtcagtggtacccggagcgacggaa

SEQ ID NO: 860289 - DNA, 75 bp, synthetic construct
  source 1..75: mol_type = other DNA
aaaaggcagttcattcacgctgaacgccggtgatacggccacggataccacggtaaatggcggactgttcaccgc

SEQ ID NO: 860290 - DNA, 75 bp, synthetic construct
  source 1..75: mol_type = other DNA
gtgcacaacggcggtacggcgtctggcactgttgttaacagtgacggctggcagattatcaaggaaggtggtctg

SEQ ID NO: 860291 - DNA, 75 bp, synthetic construct
  source 1..75: mol_type = other DNA
gtggcaaccgacacggttgtgaataccggcgcggaagggggaccggatgcggaaaatggtgataccgggcagacc

SEQ ID NO: 860292 - DNA, 75 bp, synthetic construct
  source 1..75: mol_type = other DNA
atgcaggcggcagtgcatccggaacggtgattaaccgggatggttaccagaccattaaacatggcggactggcaa

SEQ ID NO: 860293 - DNA, 75 bp, synthetic construct
  source 1..75: mol_type = other DNA
ttcgacttggttcacagcgatattatggcgtgaataactggcaaacatggaatttccagtgcccgtcaggtcatg

SEQ ID NO: 860294 - DNA, 75 bp, synthetic construct
  source 1..75: mol_type = other DNA
caacaaaaatggccggcaggttatctggtcttcggggatggcacgggacaccctcatttacgccggtggtgacca

SEQ ID NO: 860295 - DNA, 75 bp, synthetic construct
  source 1..75: mol_type = other DNA
ttcgtgacggcggaggacagagtctgtatgggctggcggtgaacaccacactgaataacagaggtgaacagtggg

SEQ ID NO: 860296 - DNA, 75 bp, synthetic construct
  source 1..75: mol_type = other DNA
aacgccccgtcatggaatatgatgcatcccatctcggcaatatggttaaccgactggaagaagcattccccccgg

SEQ ID NO: 860297 - DNA, 75 bp, synthetic construct
  source 1..75: mol_type = other DNA
tgataaacatcaacgcgatattgcacaatatatgtgtgagcatcattattccttggtattgtgggacctatcatc

SEQ ID NO: 860298 - DNA, 75 bp, synthetic construct
  source 1..75: mol_type = other DNA
gccaggagtatatgacagcaccggattacttaatctaaaagaattgcctgggcatttaggtatttttgggcggcg

SEQ ID NO: 860299 - DNA, 75 bp, synthetic construct
  source 1..75: mol_type = other DNA
cctggtgaacgccggcaacagtggtaagcgtgcagcaagaaccgtattgacggggatgtgttattcagtcggcag

SEQ ID NO: 860300 - DNA, 75 bp, synthetic construct
  source 1..75: mol_type = other DNA
tcaccctgggcgttcaggctggttatggccacagcgtcagcggcagcagcgctgaaggctataacggtcaggcca

SEQ ID NO: 860301 - DNA, 75 bp, synthetic construct
  source 1..75: mol_type = other DNA
aaatcaggaagtggcacactcactgtcagcaacaccacactcacccagaaagccgtcaacctgaatgaaggcacg

SEQ ID NO: 860302 - DNA, 75 bp, synthetic construct
  source 1..75: mol_type = other DNA
aaaaggtattactggtgcattatggcgacggacctcggttggatttactaattttgcatgggtgaatacatccgg

SEQ ID NO: 860303 - DNA, 75 bp, synthetic construct
  source 1..75: mol_type = other DNA
catcccgtgcccccctgcgtgacagtgcaaaacacagtgtgcgtgaactgccggtgaactggtgggtacagcctt

SEQ ID NO: 860304 - DNA, 75 bp, synthetic construct
  source 1..75: mol_type = other DNA
gcggtgtggcggttgcactgtctcttgccgcggtcacgtcactcccggtgctgtctgctgacatcgttgtgcacc

SEQ ID NO: 860305 - DNA, 75 bp, synthetic construct
  source 1..75: mol_type = other DNA
tcaccctgggcgttcaggcgggttatgtccacagcgtcagcggcagcagcgctgaaggctataacggtcaggcca

SEQ ID NO: 860306 - DNA, 75 bp, synthetic construct
  source 1..75: mol_type = other DNA
ccggtgtggcggttgctctgtctcttgctgctgtcatgtcagtcccggcactggctgctgacatcgttgtacgcc

SEQ ID NO: 860307 - DNA, 75 bp, synthetic construct
  source 1..75: mol_type = other DNA
tcaaggaaggtggtctggcggatttcaccatcgttaaccagaaaggcaaactgcaggtgaacgccggtggtatag

SEQ ID NO: 860308 - DNA, 75 bp, synthetic construct
  source 1..75: mol_type = other DNA
gcacaacatgtgcgtgccggcttccgtctgggcagccacaacgatatgacctttggcgaaggcacctcatcccgt

SEQ ID NO: 860309 - DNA, 75 bp, synthetic construct
  source 1..75: mol_type = other DNA
ggcaaccggcaaaacctggcttgcgtttacaaatgtcggaaacagtaacctcggggtggcaaccaccggacaggg

SEQ ID NO: 860310 - DNA, 75 bp, synthetic construct
  source 1..75: mol_type = other DNA
cgggagaaaccgtgaacggcggaacactggcaaatcatgacaaccagattgtcttcggtacgaccaacggaatga

SEQ ID NO: 860311 - DNA, 75 bp, synthetic construct
  source 1..75: mol_type = other DNA
agtgaactgccggtgaactggtgggtacagccttctgttatccgcaccttcagctcccggggagatatgcgtgtg

SEQ ID NO: 860312 - DNA, 75 bp, synthetic construct
  source 1..75: mol_type = other DNA
actgtcagcaacaccacactcacccagaaagccgtcaacctgaatgaaggcacgctgacgctgaacgacagtacc

SEQ ID NO: 860313 - DNA, 75 bp, synthetic construct
  source 1..75: mol_type = other DNA
aacatgtgcgtgccggtttccgtctgggcagccacaacgatatgacctttggtgaaggcacctcatcccgtgaca

SEQ ID NO: 860314 - DNA, 75 bp, synthetic construct
  source 1..75: mol_type = other DNA
gggtatccgggttgtggatgcacagaatggtgccaccacagaagaaggtgcgtttgccctgagccgcccgcttca

SEQ ID NO: 860315 - DNA, 75 bp, synthetic construct
  source 1..75: mol_type = other DNA
gcctgtgggctgacatgtggcacagggaacccgccacagatgaaagcgtcatcggcaataacgacttccgcgcac

SEQ ID NO: 860316 - DNA, 75 bp, synthetic construct
  source 1..75: mol_type = other DNA
cgtggagccacgccggaaagcagcggcagctatggcttcgtccgtctggagggtgacctgctcagaacagaggtt

SEQ ID NO: 860317 - DNA, 75 bp, synthetic construct
  source 1..75: mol_type = other DNA
atggcacgtcactggacctgcaggccggactggaagcccgtgtccgggaaaatatctccctgggcgttcaggccg

SEQ ID NO: 860318 - DNA, 75 bp, synthetic construct
  source 1..75: mol_type = other DNA
cgttaattaccgcgttgggaaatctgatagaaaacgcgctggaggcattagggcaagaacccggtggtgaaatca

SEQ ID NO: 860319 - DNA, 75 bp, synthetic construct
  source 1..75: mol_type = other DNA
aaagtgaaaaacctgaacgggcagaatggcaccatcagcctgcgtgtacgcccggatatggcacagaacaatgct

SEQ ID NO: 860320 - DNA, 75 bp, synthetic construct
  source 1..75: mol_type = other DNA
tcaccctgggcgttcaggccggttatgcccacagcgtcagcggcagcagcgctgaaggttataacagtcaggcca

SEQ ID NO: 860321 - DNA, 75 bp, synthetic construct
  source 1..75: mol_type = other DNA
gagtcgcccgcttcaggccggcgcctttaactacaccctgaaccgtgacagcgatgaagactggtacctgcgcag

SEQ ID NO: 860322 - DNA, 75 bp, synthetic construct
  source 1..75: mol_type = other DNA
agggtatccgggttgtggatgcacagaatggcgccaccacagaagaaggtgcgtttgccctgagtcgcccgcttc

SEQ ID NO: 860323 - DNA, 75 bp, synthetic construct
  source 1..75: mol_type = other DNA
tatgacctttggtgaaggcacctcatcccgtgacaccctgcgcgacagtgcaaaacacagtgtgagtgaactgcc

SEQ ID NO: 860324 - DNA, 75 bp, synthetic construct
  source 1..75: mol_type = other DNA
aatcgcaggatgacgaaaagttatcgacacttagtcaggcatggtcgcaggtagttgatgtctcggaagtgttac

SEQ ID NO: 860325 - DNA, 75 bp, synthetic construct
  source 1..75: mol_type = other DNA
ggagttaagccgcgtaacgcagcagatcaatgacagtcgctggagcattatctggtcaattttattcggtgtgct

SEQ ID NO: 860326 - DNA, 75 bp, synthetic construct
  source 1..75: mol_type = other DNA
cgctgattaccacgttgggaaatctgatagaaaacgcgctggaggcattagggccggaacccggaggcgaaatta

SEQ ID NO: 860327 - DNA, 75 bp, synthetic construct
  source 1..75: mol_type = other DNA
tgagtgaactgcctgtgaactggtgggtacagccttctgttatccgcaccttcagctcccggggagacttgagca

SEQ ID NO: 860328 - DNA, 75 bp, synthetic construct
  source 1..75: mol_type = other DNA
aaggtgccagcatggtactgaatggtgatgtggtcagtaccggcgatattgttaacgcaggggagatttactttg

SEQ ID NO: 860329 - DNA, 75 bp, synthetic construct
  source 1..75: mol_type = other DNA
tgagcgccatcctgcacttccccctgcctgggacaccgtggctgatgcggccgcgtggtgcatcgcgcaagcaga

SEQ ID NO: 860330 - DNA, 75 bp, synthetic construct
  source 1..75: mol_type = other DNA
cgggcgctttcgtggttgcctccgaactggcccgcgcacggggtaaacgtggcggtgtggcggttgcactgtctc

SEQ ID NO: 860331 - DNA, 75 bp, synthetic construct
  source 1..75: mol_type = other DNA
tagaaggcatatctggctacgataaaatcgttgtcaaatataataactggatcaccaaggacaatggcgagtttg

SEQ ID NO: 860332 - DNA, 75 bp, synthetic construct
  source 1..75: mol_type = other DNA
ttattgtggcgttcctctggataaccatcacttccgcgctggacaaagagtggatgattgatggacgcgggatta

SEQ ID NO: 860333 - DNA, 75 bp, synthetic construct
  source 1..75: mol_type = other DNA
tacggcggcaaccgtcaccggcagcaaccgtctgggcaatttcacggtggaaaacggtaaggctgacggcgttgt

SEQ ID NO: 860334 - DNA, 75 bp, synthetic construct
  source 1..75: mol_type = other DNA
agtggcagaacacagctcagtaaaggtgccagcatggtactgaatggcgatgtggtcagtaccggcgatattgtt

SEQ ID NO: 860335 - DNA, 75 bp, synthetic construct
  source 1..75: mol_type = other DNA
tgctgtgccagccccatgacaatgtccgtcaactggaggcgatgactggacttcagcgtgaatcgttacagggat

SEQ ID NO: 860336 - DNA, 75 bp, synthetic construct
  source 1..75: mol_type = other DNA
atgtttgtcttgtgctgcatctggttcattgtggcgttcctctggataaccattacctccgcgctggacaaagag

SEQ ID NO: 860337 - DNA, 75 bp, synthetic construct
  source 1..75: mol_type = other DNA
gtcgtcaaacccggcgcagtggcaacagacaccgttgtgaataccggcgcggaaggaggaccggatgcagaaaat

SEQ ID NO: 860338 - DNA, 75 bp, synthetic construct
  source 1..75: mol_type = other DNA
gtgcaaaacacagtgtgcgtgaactgccggtgaactggtgggtacagccttccgttatccgcaccttcagctccc

SEQ ID NO: 860339 - DNA, 75 bp, synthetic construct
  source 1..75: mol_type = other DNA
catctcggtcacgataacaacggcgatattgcccgtggggccacgccggaaagcagcggcagctatggcttcgtc

SEQ ID NO: 860340 - DNA, 75 bp, synthetic construct
  source 1..75: mol_type = other DNA
acaaaccgcctgggagcattctccgttgtggcgggtaaggctgataatgtcgtactggaaaatggcggacgtctg

SEQ ID NO: 860341 - DNA, 75 bp, synthetic construct
  source 1..75: mol_type = other DNA
gcgtttacaaatgtcggaaacagtaacctcggggtggcaacctccggacagggtatccgggttgtggatgcacag

SEQ ID NO: 860342 - DNA, 75 bp, synthetic construct
  source 1..75: mol_type = other DNA
actggaaaatcatgacaaccagattgtcctcggtacggccaacggaatgaccatcagtaccgggctggaactggg

SEQ ID NO: 860343 - DNA, 75 bp, synthetic construct
  source 1..75: mol_type = other DNA
gattttggtcagatctccaaagcacacctggaggctaacggtatttctgtgaagaaagatcttgatattaagttg

SEQ ID NO: 860344 - DNA, 75 bp, synthetic construct
  source 1..75: mol_type = other DNA
tttctgagtttgaaaccattgaacaagaaaacagttacaacgaatggctgcgtgcgaaagtagcaacgagccttg

SEQ ID NO: 860345 - DNA, 75 bp, synthetic construct
  source 1..75: mol_type = other DNA
tttcagaatttgagacagttgagcaagaaaatagttacaacgaatggctgcgggccaaagtagcagcaagcctcg

SEQ ID NO: 860346 - DNA, 75 bp, synthetic construct
  source 1..75: mol_type = other DNA
ccggggcctttaactacaccctcaaccgggacagtgatgagagctggtatctgcgcagtgaaaatgcttatcgtg

SEQ ID NO: 860347 - DNA, 75 bp, synthetic construct
  source 1..75: mol_type = other DNA
gcacatcactggacctgcaggccggactggaagcccgtgtccgggaaaatatcaccctgggcgttcaggccggtt

SEQ ID NO: 860348 - DNA, 75 bp, synthetic construct
  source 1..75: mol_type = other DNA
gtggtgccctgattgcagacagtggtgccactgttgaggggaccaatgccagcggtaagttcagtattgatggta

SEQ ID NO: 860349 - DNA, 75 bp, synthetic construct
  source 1..75: mol_type = other DNA
acacagtgtgcgtgaactgccggtgaactggtgggtacagccttctgttatccgcaccttcagctcccggggaga

SEQ ID NO: 860350 - DNA, 75 bp, synthetic construct
  source 1..75: mol_type = other DNA
gctatgcgccggatatgaatcatgtcacagctgcacagtaccaggcggcgatgcgtggcgcgatacctcaggttg

SEQ ID NO: 860351 - DNA, 75 bp, synthetic construct
  source 1..75: mol_type = other DNA
aagtgttcgtgtaatatctaaaagtaacgaagttcaatacataaaagcgacagtattccgcatcgataacccatc

SEQ ID NO: 860352 - DNA, 75 bp, synthetic construct
  source 1..75: mol_type = other DNA
ctctattgccaacaaatggctaaagttctggcagagcaggtcgatgaatctgttacggcaggcatgaatactttt

SEQ ID NO: 860353 - DNA, 75 bp, synthetic construct
  source 1..75: mol_type = other DNA
catcaggtcgaagaaagtttgcagctattgcaactcaatcaggcgcaggtgagcggcgagattaaacatgaaatc

SEQ ID NO: 860354 - DNA, 75 bp, synthetic construct
  source 1..75: mol_type = other DNA
atgagtccactccggtatcagaaatggctacgtctcaatgaagtcaggcgacagatgctgaatgaacattacgat

SEQ ID NO: 860355 - DNA, 75 bp, synthetic construct
  source 1..75: mol_type = other DNA
ttcaagagaactgttaatagaatggctggatattcaacaagctcaagggcgtattgctgttaaaaacacgggtaa

SEQ ID NO: 860356 - DNA, 75 bp, synthetic construct
  source 1..75: mol_type = other DNA
atgctcagatttcgggtgtttttcccgatattgtacgtactggtagtgaagttcacttttgccgttgtccagata

SEQ ID NO: 860357 - DNA, 75 bp, synthetic construct
  source 1..75: mol_type = other DNA
tgggcccttcttgaaaagttttatgataacaacgcttattattctaaacgtacaaaacaattagagaagaaaatt

SEQ ID NO: 860358 - DNA, 75 bp, synthetic construct
  source 1..75: mol_type = other DNA
ctctataagacaaatttgaaagacgcgcagagagatctgaaaacaacaccggttgacatcgatggtgttagtcta

SEQ ID NO: 860359 - DNA, 75 bp, synthetic construct
  source 1..75: mol_type = other DNA
gcgatgaaaggcgcactgaagaatgcctctgccagtattgttggcgctaacggttcaaaatctggtacgtgtgat

SEQ ID NO: 860360 - DNA, 75 bp, synthetic construct
  source 1..75: mol_type = other DNA
tcagtctcctgacgaagcttcacctcagccaaaggtttcgcacgcccccaaaaaaacggctgtccgtattcgcgg

SEQ ID NO: 860361 - DNA, 75 bp, synthetic construct
  source 1..75: mol_type = other DNA
tttataactggtctgattatatcgccccggacacggtggccaactttgaaaaagaaaccggtattaaagtcgtct

SEQ ID NO: 860362 - DNA, 75 bp, synthetic construct
  source 1..75: mol_type = other DNA
acgtttacaggagggggcctccatcgacatatctctgtgaagagcgagccagaaaagacagatgtatggcgattc

SEQ ID NO: 860363 - DNA, 75 bp, synthetic construct
  source 1..75: mol_type = other DNA
tcccaacgactggaagcacaagtccaaccgttcctttccagattacgttaagtgaatgtagcaaagggacaacag

SEQ ID NO: 860364 - DNA, 75 bp, synthetic construct
  source 1..75: mol_type = other DNA
gttgtcgagttttacgacgaccagagcggctatgagcgcggactgacgctgccgcttcgccatccttcagggctg

SEQ ID NO: 860365 - DNA, 75 bp, synthetic construct
  source 1..75: mol_type = other DNA
tcatcaccggctttaaacatctctcctcgtcacgggacgaagcccgttacgaagtgcgccttgaaccccgtatgg

SEQ ID NO: 860366 - DNA, 75 bp, synthetic construct
  source 1..75: mol_type = other DNA
gtgcaggcacccctgcgcaccctgtacggggtcattaccggctttaagcatctctcatcgtcacaggacgaagcc

SEQ ID NO: 860367 - DNA, 75 bp, synthetic construct
  source 1..75: mol_type = other DNA
gtaccccgttccgctacgacattcagtttaccagtaccgataaagccatcacgccggagttggtgctgatgcagg

SEQ ID NO: 860368 - DNA, 75 bp, synthetic construct
  source 1..75: mol_type = other DNA
ccgatgcccggctgaaaattgaggttatcgagttttacgacgaccagagcggctatgagcgcggactgacgctgc

SEQ ID NO: 860369 - DNA, 75 bp, synthetic construct
  source 1..75: mol_type = other DNA
atggacatacttgtttttgaccactcgtaccacaaactcaaaatccgcggcctgcaaagtccggtggatgtgctg

SEQ ID NO: 860370 - DNA, 75 bp, synthetic construct
  source 1..75: mol_type = other DNA
cgttacctgaatgaacaggccattcttaaaggccagagcaccagttcactgctgatgccggggctggaaatcagg

SEQ ID NO: 860371 - DNA, 75 bp, synthetic construct
  source 1..75: mol_type = other DNA
aacgttggcgcttattgtcggtgctgttgtcggtgctgttgtcggcgtcattgcgggtgtactttgcgcccgtta

SEQ ID NO: 860372 - DNA, 75 bp, synthetic construct
  source 1..75: mol_type = other DNA
cagacggtgccgcaaatcgtcgaaaaaatcctgcgcgagcggcaccagatgcgcggtcaggacttcgtgtttaac

SEQ ID NO: 860373 - DNA, 75 bp, synthetic construct
  source 1..75: mol_type = other DNA
agaatttcccatcctttcagccgtggactcatccgatttttgtcttgaatgcctgctgaatgccatcaaaaacga

SEQ ID NO: 860374 - DNA, 75 bp, synthetic construct
  source 1..75: mol_type = other DNA
atgaacgtacagttcttcgaccacgcacaccacaagctcaaaattcgcggcctgaaaagcccggcggatgtgctg

SEQ ID NO: 860375 - DNA, 75 bp, synthetic construct
  source 1..75: mol_type = other DNA
gtatggcgctgctggcccgcagccgccagaatgccatttaccagaaccagacggtgccgcaaatcgtcgaaaaaa

SEQ ID NO: 860376 - DNA, 75 bp, synthetic construct
  source 1..75: mol_type = other DNA
tttgtccaggggaatatgctgcaggccggtgcctttaactactccctcaaccgggacagtgatgagagctggtat

SEQ ID NO: 860377 - DNA, 75 bp, synthetic construct
  source 1..75: mol_type = other DNA
gtggatgacctcagccatgccggacagattcatttcacctccgcccgcacagggaagttcgttccggcaaccctg

SEQ ID NO: 860378 - DNA, 75 bp, synthetic construct
  source 1..75: mol_type = other DNA
gatgtgctgagcggacacacagccactaatacccgcgtggatgatggcggaacgctggatgtccgcaacggtggt

SEQ ID NO: 860379 - DNA, 75 bp, synthetic construct
  source 1..75: mol_type = other DNA
ccatcagaccggtgtaaacggtgaaaataacagcgtccgtctcagcattcagggcggtcatctcggtcacgataa

SEQ ID NO: 860380 - DNA, 75 bp, synthetic construct
  source 1..75: mol_type = other DNA
ggcaaataccactgtggtttatgccggcggcgaccagactgtacatggtcacgcactggataccacgctgaatgg

SEQ ID NO: 860381 - DNA, 75 bp, synthetic construct
  source 1..75: mol_type = other DNA
aaccgtgacagcgatgaagactggtacctgcgcagtgaacatgcgtatcgttctgaagtccccctgtatgcctcc

SEQ ID NO: 860382 - DNA, 75 bp, synthetic construct
  source 1..75: mol_type = other DNA
aaccgtgacagcgatgaagactggtacctgcgcagtgaacatgcttatcgttctgaagtcccccggtatgcctcc

SEQ ID NO: 860383 - DNA, 75 bp, synthetic construct
  source 1..75: mol_type = other DNA
aaccgtgacagcgatgaagactggtacctgcgcagtgaatatgcatatcgttctgaagtcccccagtatgcctcc

SEQ ID NO: 860384 - DNA, 75 bp, synthetic construct
  source 1..75: mol_type = other DNA
tactgcggcaacggttcttggcagcaaccgtctgggcaatttcgcggtggaaaacggtaaggctgacggcgttgt

SEQ ID NO: 860385 - DNA, 75 bp, synthetic construct
  source 1..75: mol_type = other DNA
aaccgtgacagcgatgaagactggtacctgcgcagtgaagatgcctatcgttctgaagtccccctgtatgcctcc

SEQ ID NO: 860386 - DNA, 75 bp, synthetic construct
  source 1..75: mol_type = other DNA
aaccgtgacagcgatgaagactggtacctgcgcagtgaagatgcttatcgttctgaagtccccccgtatgcctcc

SEQ ID NO: 860387 - DNA, 75 bp, synthetic construct
  source 1..75: mol_type = other DNA
ataatcagacgacaccggatgccgcgctgagccgtgctgttgcaaaaagtaactccctggtaacgttccataaac

SEQ ID NO: 860388 - DNA, 75 bp, synthetic construct
  source 1..75: mol_type = other DNA
taccattattaaccagaaaggcaaactgcaggttgatgccggtggggttgctgttgatgttacccagcatcaggg

SEQ ID NO: 860389 - DNA, 75 bp, synthetic construct
  source 1..75: mol_type = other DNA
cggcggtctccagtttgtaggtgccgggggaaaggctacagacacaataatcaatgaaggaggcggacaaagtct

SEQ ID NO: 860390 - DNA, 75 bp, synthetic construct
  source 1..75: mol_type = other DNA
gttctcaccgtcccggaatggcacgtcactggacctgcaggccggactggaagcccgtgtccgggaaaatatcac

SEQ ID NO: 860391 - DNA, 75 bp, synthetic construct
  source 1..75: mol_type = other DNA
tccgcttgatttgcaaaatcgggcgcgagcacggcagattcaggcctggctacgcagcgatctgatgcccatccg

SEQ ID NO: 860392 - DNA, 75 bp, synthetic construct
  source 1..75: mol_type = other DNA
tccgcttgatttagaaaatcgtgcgcgtgcacgacagattcaggcctggctgcgcagcgatctgatgcccatccg

SEQ ID NO: 860393 - DNA, 75 bp, synthetic construct
  source 1..75: mol_type = other DNA
tactgcagcaactgttcttggcagcaaccgtctggggaatttcacggtggaaaacggtaaggctgacggtgttgt

SEQ ID NO: 860394 - DNA, 75 bp, synthetic construct
  source 1..75: mol_type = other DNA
taaaaatggtcgtcagattgtggctgttgaaggaacggcaaataccactgtggtttatgccggcggcgaccagac

SEQ ID NO: 860395 - DNA, 75 bp, synthetic construct
  source 1..75: mol_type = other DNA
ttcagctcccggggggacatgagcatgggtacagccgcagccggcagtaacatgacgttctcaccgtcccggaat

SEQ ID NO: 860396 - DNA, 75 bp, synthetic construct
  source 1..75: mol_type = other DNA
cgatgtggtcagtaccggcgatattgttaacgcaggggagattcgctttgataatcagacgacaccggatgccgc

SEQ ID NO: 860397 - DNA, 75 bp, synthetic construct
  source 1..75: mol_type = other DNA
ctaatacccgcgtggatgatggcggaacgctggatgtccgcaacggtggtaccgccaccaccgtatccatgggaa

SEQ ID NO: 860398 - DNA, 75 bp, synthetic construct
  source 1..75: mol_type = other DNA
aacgctggatgtccgcaacggtggtgccgccaccaccgtatccatggggaatggcggtgtactgctggccgattc

SEQ ID NO: 860399 - DNA, 75 bp, synthetic construct
  source 1..75: mol_type = other DNA
attgattttggccagatttcgaaaagccatttagaggctggcgggatttctgttcagaaaaatgtagatatcaaa

SEQ ID NO: 860400 - DNA, 75 bp, synthetic construct
  source 1..75: mol_type = other DNA
cactgttgtgaacagtgacggctggcagattgtcaaaaacgggggcgtggccgggaataccattattaaccagaa

SEQ ID NO: 860401 - DNA, 75 bp, synthetic construct
  source 1..75: mol_type = other DNA
tctggaatccggcggtcgtctggatatactggagagccattcagcacagaataccctggtggatgacggcggtat

SEQ ID NO: 860402 - DNA, 75 bp, synthetic construct
  source 1..75: mol_type = other DNA
atcaccctgggcgttcaggccggttatgcccacagcatcaacggcagcagcgctgaaggttatagcagtcaggcc

SEQ ID NO: 860403 - DNA, 75 bp, synthetic construct
  source 1..75: mol_type = other DNA
aatggtgccaccacagaagaaggtgcgtttgccctgagtcgcccgcttcaggccggcgcctttaactacaccctg

SEQ ID NO: 860404 - DNA, 75 bp, synthetic construct
  source 1..75: mol_type = other DNA
ttcagtctgttcggcgcatccgttggttattgaagcggcgctggctttcgatctcaacagcacacgcaaagtgct

SEQ ID NO: 860405 - DNA, 75 bp, synthetic construct
  source 1..75: mol_type = other DNA
acaatcagacaacaccggatgccgtactgagccgtgctgttgcaaaaggcgactccccggtaacgttccataaac

SEQ ID NO: 860406 - DNA, 75 bp, synthetic construct
  source 1..75: mol_type = other DNA
tcagccattcttcgcctgccagacccgtgtgcgcgacccgggccgccggggatacacaaaacacatgctgcgtct

SEQ ID NO: 860407 - DNA, 75 bp, synthetic construct
  source 1..75: mol_type = other DNA
agccacaacgatatgacctttggcgaaggcacctcatcccgtgcccccctgcgtgacagtgcaaaacacagtgtg

SEQ ID NO: 860408 - DNA, 75 bp, synthetic construct
  source 1..75: mol_type = other DNA
tcacagaatggcacatcactggacctgcaggccggactggaagcccgtgtccgggaaaatatcaccctgggcgtt

SEQ ID NO: 860409 - DNA, 75 bp, synthetic construct
  source 1..75: mol_type = other DNA
acgaggggggctggcaggttgttaaggcaggtggtactgccggcaacaccaccataaatcagaacggcgagctga

SEQ ID NO: 860410 - DNA, 75 bp, synthetic construct
  source 1..75: mol_type = other DNA
ctgaccagctggtgattaatggtggtcaggcaaccggcaaaacctggcttgcgtttacaaatgtcggaaacagta

SEQ ID NO: 860411 - DNA, 75 bp, synthetic construct
  source 1..75: mol_type = other DNA
taacgccacggttcagtcggtggtggatgacctcagccatgccggacagattcatttcacctccacccgcacagg

SEQ ID NO: 860412 - DNA, 75 bp, synthetic construct
  source 1..75: mol_type = other DNA
agttcgggcatggcagtgcacaacatgtgcgtgccggcttccgtctgggcagccacaacgatatgacctttggta

SEQ ID NO: 860413 - DNA, 75 bp, synthetic construct
  source 1..75: mol_type = other DNA
ggcatgattagtcagtatcttcccaaacaatttgaacgcattcagtccggggaattatcagcaataccgcatcag

SEQ ID NO: 860414 - DNA, 75 bp, synthetic construct
  source 1..75: mol_type = other DNA
cgcagtgaagaacgttatcgtgctgaagtccccctgtacgcctccatgctgacacaggcaatggactatgaccgg

SEQ ID NO: 860415 - DNA, 75 bp, synthetic construct
  source 1..75: mol_type = other DNA
tggtgggtacagccttctgttatccgcactttcagctcccggggtgacatgagcatgggtacagccgcagccggc

SEQ ID NO: 860416 - DNA, 75 bp, synthetic construct
  source 1..75: mol_type = other DNA
ctttctgatctctatctgcaaatattgcagtacattgaaatgaataatactacactaacggatatcattattaat

SEQ ID NO: 860417 - DNA, 75 bp, synthetic construct
  source 1..75: mol_type = other DNA
ctggcccgctcacggggaaaacgcgccggtgtggcggttgcgctgtctcttgctgctgttacgtcagtcccggca

SEQ ID NO: 860418 - DNA, 75 bp, synthetic construct
  source 1..75: mol_type = other DNA
cggaacgctggatgtccgcaacggtggtaccgccactaccgtatccatgggaaatggcggggtactgctggccga

SEQ ID NO: 860419 - DNA, 75 bp, synthetic construct
  source 1..75: mol_type = other DNA
tcagggacgggcagtgaacaccacgctgaatggtggcgaacagtggatgcatgagggggcgatagccacaggaac

SEQ ID NO: 860420 - DNA, 75 bp, synthetic construct
  source 1..75: mol_type = other DNA
gttcagtaaaattcatcttgatgcgtcaatgtcctgcgctgacgattccataccgttagcgccagaaacggttgc

SEQ ID NO: 860421 - DNA, 75 bp, synthetic construct
  source 1..75: mol_type = other DNA
cgaatggtttatgaagcacattctaccgattaccagacccgggcggcttattgggaattagtccgcgatcacttt

SEQ ID NO: 860422 - DNA, 75 bp, synthetic construct
  source 1..75: mol_type = other DNA
cggggaattatcggcaataccgtatcagttgattatggataaaatttatgatgttttgcgtgcctatcgctacgg

SEQ ID NO: 860423 - DNA, 75 bp, synthetic construct
  source 1..75: mol_type = other DNA
ggcggactgttcactgccagagggggctcgctggcgggcaccaccacgctgaataacggtgccacgcttaccctt

SEQ ID NO: 860424 - DNA, 75 bp, synthetic construct
  source 1..75: mol_type = other DNA
tccggaatctgccgatcagtccattgattttggccagatttccaaagctcatctggctgctgatggtatttcagt

SEQ ID NO: 860425 - DNA, 75 bp, synthetic construct
  source 1..75: mol_type = other DNA
ccgattaccagacccggacggcttattgggaattagtccgcgatcactttgcaattttgaaagtcgggccagcat

SEQ ID NO: 860426 - DNA, 75 bp, synthetic construct
  source 1..75: mol_type = other DNA
taatggaaccataaaaaatgtgtcaacatctataacaacagattgttactatgctcctgtgggaacaacgcaatc

SEQ ID NO: 860427 - DNA, 75 bp, synthetic construct
  source 1..75: mol_type = other DNA
tgtttctcaatgcggatatcaaaccgggtattgatattgtgttaaatgcggtcaatcttgcgcaggcggtgcaag

SEQ ID NO: 860428 - DNA, 75 bp, synthetic construct
  source 1..75: mol_type = other DNA
atggatgaatgcgatccgcgtctggcgaattgccatattgaagtagcatgtgacgttgataacccgctggtaggg

SEQ ID NO: 860429 - DNA, 75 bp, synthetic construct
  source 1..75: mol_type = other DNA
atggcctatcgttccgcaccgctctatgaagatgttatctggcgaacgcatctccagccacaggatgctgggctt

SEQ ID NO: 860430 - DNA, 75 bp, synthetic construct
  source 1..75: mol_type = other DNA
gagtgtctcttttaaggatataaaggtatttgagtacgagttaagcttcagtaatcaggccggtaatcaagtaaa

SEQ ID NO: 860431 - DNA, 75 bp, synthetic construct
  source 1..75: mol_type = other DNA
atgataaaagtgaataatatttttgttttactattttgcctattgttatcgaaaacaacaatggctgaagtggtg

SEQ ID NO: 860432 - DNA, 75 bp, synthetic construct
  source 1..75: mol_type = other DNA
tgcggatcctgcgactggtttccagctagtcaaatgcctcgatggccgaatgttgcgtatagctgatctggtgga

SEQ ID NO: 860433 - DNA, 75 bp, synthetic construct
  source 1..75: mol_type = other DNA
ggctcttttcttgaaagtagcgacaaggtgcttgtttgcacacacgcaacctttcgcttcgcggtcgatgcctat

SEQ ID NO: 860434 - DNA, 75 bp, synthetic construct
  source 1..75: mol_type = other DNA
ttcttgcctgtggtattggtggggctctggccggacattttatcgtgaatctgttcacctggtatctctttggtt

SEQ ID NO: 860435 - DNA, 75 bp, synthetic construct
  source 1..75: mol_type = other DNA
cagtggctcctacgtcgatgacatcctcaatgtactcgatcctgacaagaagaccattatccatattcccaacgt

SEQ ID NO: 860436 - DNA, 75 bp, synthetic construct
  source 1..75: mol_type = other DNA
tgatcgcggtcgatgaattccaccatgtgtcagctaacccggataataagcttggtcagcagctggggcagttta

SEQ ID NO: 860437 - DNA, 75 bp, synthetic construct
  source 1..75: mol_type = other DNA
ctgagcttgatgctgaagatcaggaggctgtacgtcagcatgctatcgccgcccttaacctcacgcagcaggcca

SEQ ID NO: 860438 - DNA, 75 bp, synthetic construct
  source 1..75: mol_type = other DNA
cgttttgctcatgctgctgctgcgattgccgtgacgcggacaggcgcacaaccttctgtaccatggcgggaagag

SEQ ID NO: 860439 - DNA, 75 bp, synthetic construct
  source 1..75: mol_type = other DNA
ggagagattaacggcaaacttatctggagcaataccggttatttgatcaactggtatctgactgagatgaaacag

SEQ ID NO: 860440 - DNA, 75 bp, synthetic construct
  source 1..75: mol_type = other DNA
tgatccgcgaaaacaaaccgctgatctcactgtgggcgcaatggtatatcggcctgatggtaccaccattaatgc

SEQ ID NO: 860441 - DNA, 75 bp, synthetic construct
  source 1..75: mol_type = other DNA
gtttatccgcctggatgaacccgccccacttaacgccatgacgctggcgcaatggtcatcaccgaatgcgctaag

SEQ ID NO: 860442 - DNA, 75 bp, synthetic construct
  source 1..75: mol_type = other DNA
tgatccgcgagaacaagccgctgatctcactgtgggcacaatggtatatcggcctgatggtgccaccattaatgc

SEQ ID NO: 860443 - DNA, 75 bp, synthetic construct
  source 1..75: mol_type = other DNA
ccgcttaacgccatgacgctggcgcaatggtcatcaccgaatgcgctaagttctctactggcggtctattccgat

SEQ ID NO: 860444 - DNA, 75 bp, synthetic construct
  source 1..75: mol_type = other DNA
atgaagatgttatctggcgaacgcatctccagccgcaggatgctgggcttgcacaagccgtacgtgcgacgatcg

SEQ ID NO: 860445 - DNA, 75 bp, synthetic construct
  source 1..75: mol_type = other DNA
ggtgatatgattatttcgccttatcaggtatgggataatggtacatttacctgttttcgttttccgacaaatgcg

SEQ ID NO: 860446 - DNA, 75 bp, synthetic construct
  source 1..75: mol_type = other DNA
cgaatcgacaggcgtagcgctgatttttgttaatgccgaaggtgagaacgttatcggcattcatgccggggctaa

SEQ ID NO: 860447 - DNA, 75 bp, synthetic construct
  source 1..75: mol_type = other DNA
gctgggcgtagcggtgcgaatatcgcgtttattgcctgcactggcgatgacagcattggcgagagcgttcgccag

SEQ ID NO: 860448 - DNA, 75 bp, synthetic construct
  source 1..75: mol_type = other DNA
agtgggggcaggcgagatttggtgggtctggtggtgaagatgccggatatcttaacgattttccttttgcctttc

SEQ ID NO: 860449 - DNA, 75 bp, synthetic construct
  source 1..75: mol_type = other DNA
ttttcataaacgttggtttgggagaagcggcaaaacgggatgtgggcacaggggaaaatcagataccggacatgg

SEQ ID NO: 860450 - DNA, 75 bp, synthetic construct
  source 1..75: mol_type = other DNA
ggtttgggagaagcggcaaaacggaatgtgggcacaggggaaaatcagataccggacatggtttcatttagtggg

SEQ ID NO: 860451 - DNA, 75 bp, synthetic construct
  source 1..75: mol_type = other DNA
acctgctccccgcctggtcaacgaatggcctggcaattgccggtaatattctacccgctttaggcttcgcaataa

SEQ ID NO: 860452 - DNA, 75 bp, synthetic construct
  source 1..75: mol_type = other DNA
taatggcgcgtggagaaacaccacctgccgaattacttaacccggtaccaggcgcacatctggaacgcggcgaac

SEQ ID NO: 860453 - DNA, 75 bp, synthetic construct
  source 1..75: mol_type = other DNA
gcaaaaaacacatttactgatgcacagggggctatccgggtaattatcgatagcaaagataagatcccggatgag

SEQ ID NO: 860454 - DNA, 75 bp, synthetic construct
  source 1..75: mol_type = other DNA
ccagagatgatcgccgacacgcttgaaggcatggaaggagaactgggagacaaactggacgccatgatggtcatc

SEQ ID NO: 860455 - DNA, 75 bp, synthetic construct
  source 1..75: mol_type = other DNA
aaatcgatgtgatgcgtgatccgatggctgcactgcaattacttcgttcttttaagggcaaatctcatttttcta

SEQ ID NO: 860456 - DNA, 75 bp, synthetic construct
  source 1..75: mol_type = other DNA
agatcgcagaactgaaagctgcactgaaagaaaaagaccagatcatcgaagcacagaaagctgagattgaagaac

SEQ ID NO: 860457 - DNA, 75 bp, synthetic construct
  source 1..75: mol_type = other DNA
caaatcaccttcggtcgtcgtaaagaagttactggaaaagctaaactgaacttcaccaaatccggcaatacttac

SEQ ID NO: 860458 - DNA, 75 bp, synthetic construct
  source 1..75: mol_type = other DNA
tataaaactcacgataaaaattatgcccgcaggctgaccgccatgctgatgctgcaccggagcgctcgcgtcagt

SEQ ID NO: 860459 - DNA, 75 bp, synthetic construct
  source 1..75: mol_type = other DNA
tacatcatccataaaagtcgggaaacacagcgctggctgaaagaaaatccgaagttcagagtgatttatcagcca

SEQ ID NO: 860460 - DNA, 75 bp, synthetic construct
  source 1..75: mol_type = other DNA
tgaagatgaagtgtatatctatcttaatcccaaaaccggtgcggactggcaacttcgcagacagcaaaaacatgt

SEQ ID NO: 860461 - DNA, 75 bp, synthetic construct
  source 1..75: mol_type = other DNA
acgtgaactgataaaacactctcccggcgattttggctaccagcgttcacgctggagtacagaactgctggcgat

SEQ ID NO: 860462 - DNA, 75 bp, synthetic construct
  source 1..75: mol_type = other DNA
tgttgcgcccgttcatccgtcgggcgctggattaactggttcacgcagtcgggtgttgaaggactgaaatcatta

SEQ ID NO: 860463 - DNA, 75 bp, synthetic construct
  source 1..75: mol_type = other DNA
ttatttatcagtctgttgaaacatctgaaattgacataccgacgggataaacctatcacgctcatagtggacaac

SEQ ID NO: 860464 - DNA, 75 bp, synthetic construct
  source 1..75: mol_type = other DNA
acacgttataaaggtttaaacgagagagctgatgaacttatccaggcactcatcgataagattggagaagagtaa

SEQ ID NO: 860465 - DNA, 75 bp, synthetic construct
  source 1..75: mol_type = other DNA
attgaaaccgaagcgaaaaaacgtggctggtgggggaaagttgaaacccgtggctccgttggtgcgggtaacgcg

SEQ ID NO: 860466 - DNA, 75 bp, synthetic construct
  source 1..75: mol_type = other DNA
ttcccgcgcagtcgcgcatcctgagctattcctgagtgaagccaaaggccatgcgaagccttacactgcgccggt

SEQ ID NO: 860467 - DNA, 75 bp, synthetic construct
  source 1..75: mol_type = other DNA
caggtaaagcccaaacggcaagctctgaagctaagaaagagagtgcaggcgcgtatcgtcacctgttgacgggcg

SEQ ID NO: 860468 - DNA, 75 bp, synthetic construct
  source 1..75: mol_type = other DNA
tgggctatcgattgtccagcgaatcgccaaattgcatgacatgaatgttgaatttgggaatgcggaacaaggtgg

SEQ ID NO: 860469 - DNA, 75 bp, synthetic construct
  source 1..75: mol_type = other DNA
accggttctggcttcattggtggtattattgcgggcttcctggctggttacattgcgaagttaatcagtacgcaa

SEQ ID NO: 860470 - DNA, 75 bp, synthetic construct
  source 1..75: mol_type = other DNA
cgctgcgacagcaccagttgccgccagcggtccgaaacgcgtagttgcggtgactgcttgcccgactggcgtagc

SEQ ID NO: 860471 - DNA, 75 bp, synthetic construct
  source 1..75: mol_type = other DNA
ggacacctgcccatcgacaacaaccctgccgagcgggcgagccaccttctcatgtacatatgaccaaagcgtcgc

SEQ ID NO: 860472 - DNA, 75 bp, synthetic construct
  source 1..75: mol_type = other DNA
ttaaggtatgtggatgattttatagtgttttgcaacaatgaagcaaatgctgaacttatcactaaaaccattaac

SEQ ID NO: 860473 - DNA, 75 bp, synthetic construct
  source 1..75: mol_type = other DNA
ttgagatatgtagatgattttattgttttttgtaatggtgagtcaagtgccgaagttattacaaaaataattaat

SEQ ID NO: 860474 - DNA, 75 bp, synthetic construct
  source 1..75: mol_type = other DNA
ctaatctcggtcaggcacgcgcctatatggcgaagaccctgctgggcgcggcggcgcgaaaagcaaaacaggaaa

SEQ ID NO: 860475 - DNA, 75 bp, synthetic construct
  source 1..75: mol_type = other DNA
caccgcgccgcgaacgcaagccacgtccgaccacgccacgcgcaaagaaggcgctgaacgtaaacctcgtgcgca

SEQ ID NO: 860476 - DNA, 75 bp, synthetic construct
  source 1..75: mol_type = other DNA
acggcaacccatgcggtgagctggacgagcaacatgtagagcatgctcgcaagcagcttgaagaagcgaaagcgc

SEQ ID NO: 860477 - DNA, 75 bp, synthetic construct
  source 1..75: mol_type = other DNA
ggcacgtaaaatcactcggctcggattttattggccggatacgaggcaataaacaactacatctggcaagaaaag

SEQ ID NO: 860478 - DNA, 75 bp, synthetic construct
  source 1..75: mol_type = other DNA
attgttgatgagtccaagcctgttaaagaaaaaattgcgcgaagaaggtacgtcatattcacagttgcttactga

SEQ ID NO: 860479 - DNA, 75 bp, synthetic construct
  source 1..75: mol_type = other DNA
gatttttcaggagataacgcgactgtcgcagaataaacatctccgttatagtgagattctgcgtaaaagagcatt

SEQ ID NO: 860480 - DNA, 75 bp, synthetic construct
  source 1..75: mol_type = other DNA
aaggaaaagaatttacgctcagtgacgatattgttaacggcaaggggcaattacttattggtgatacattctggc

SEQ ID NO: 860481 - DNA, 75 bp, synthetic construct
  source 1..75: mol_type = other DNA
tgtcatcgccgttgactggagtggatatccatctcaggagcatcatgtgctccgcgccagcctgctctgcgatag

SEQ ID NO: 860482 - DNA, 75 bp, synthetic construct
  source 1..75: mol_type = other DNA
cggatgcagggttccagaatgcctggtttcggcacataaaatcactcggctgggattttattggccggatacgag

SEQ ID NO: 860483 - DNA, 75 bp, synthetic construct
  source 1..75: mol_type = other DNA
ggggcgtacttgcaattattggttttttcttgggttttacattgtcttttagtcgatttgggatagttgcaggtt

SEQ ID NO: 860484 - DNA, 75 bp, synthetic construct
  source 1..75: mol_type = other DNA
gtgtcgatgcggtgtacattgtggcaacgccagccgaaatcgccttcatcaaaccgatgatcgccatgcgcaacg

SEQ ID NO: 860485 - DNA, 75 bp, synthetic construct
  source 1..75: mol_type = other DNA
aatcgcttttatcaaaccgatgatcgccatgcgtaacggtagccagagcggtgcaacgctgtacgccagctcccg

SEQ ID NO: 860486 - DNA, 75 bp, synthetic construct
  source 1..75: mol_type = other DNA
agatcaccaataaacagggccacaagtggtctgtggacgagagtgaatatcagatgatggggcagtctgacaaca

SEQ ID NO: 860487 - DNA, 75 bp, synthetic construct
  source 1..75: mol_type = other DNA
tcattgcgtacgcaagacataaatatattctcaccatggctgatggtgaatatcgctattttaatggcggtgatt

SEQ ID NO: 860488 - DNA, 75 bp, synthetic construct
  source 1..75: mol_type = other DNA
tcatacattgagaaaaaacgcaccgggaaaatatctaaaattatcaccagtggtggttctttctggaaagataac

SEQ ID NO: 860489 - DNA, 75 bp, synthetic construct
  source 1..75: mol_type = other DNA
atggaagtgggacagtgccaaaaagaaactcaaagcgcctctgaaagtaaagtaaatgatacggataataaaaat

SEQ ID NO: 860490 - DNA, 75 bp, synthetic construct
  source 1..75: mol_type = other DNA
ccgaagttgcacagctttctgatgatgatccgcaggcgctgaaaaaagcctttgtgcaattacactcggggattg

SEQ ID NO: 860491 - DNA, 75 bp, synthetic construct
  source 1..75: mol_type = other DNA
cagcgtggtggacgtcacgctgaatgccgaaaatttcatcgtgagggataacggccccggtgtgacgccagaggc

SEQ ID NO: 860492 - DNA, 75 bp, synthetic construct
  source 1..75: mol_type = other DNA
ccacgacggcagaatggtccttaacgatggcgataacggagaagatattccttatagctatcaacgggaaggttt

SEQ ID NO: 860493 - DNA, 75 bp, synthetic construct
  source 1..75: mol_type = other DNA
atgttgtggcaacgccggaagccctgcggacgaagagtgtggtacccggtgattatgaagcaacagccacgtttg

SEQ ID NO: 860494 - DNA, 75 bp, synthetic construct
  source 1..75: mol_type = other DNA
ttcagaaagtgtttatcgcgctacacggtcgcggcggtgaagatggtacgctgcagggcatgctcgagctgatgg

SEQ ID NO: 860495 - DNA, 75 bp, synthetic construct
  source 1..75: mol_type = other DNA
gtattgacgcgtatcctgtcgacccgaaagaagttgacgtgacacaacttaagtcgatgggctttcagaaagtgt

SEQ ID NO: 860496 - DNA, 75 bp, synthetic construct
  source 1..75: mol_type = other DNA
ccgatggtctatgccgctgcgttctccggcttctatgtcgcgatgatcctcgtgctggcgtctttgttcttccgt

SEQ ID NO: 860497 - DNA, 75 bp, synthetic construct
  source 1..75: mol_type = other DNA
atggctaaaaaatccattgttgagtcaacgcaatggatccgcgacaatgaaattattagtgctttcttcttgacg

SEQ ID NO: 860498 - DNA, 75 bp, synthetic construct
  source 1..75: mol_type = other DNA
aaatttctggatgagttactcgaagagttttgtgaaaaagaaggtgaggataaatacctgtttaaaaaggtacca

SEQ ID NO: 860499 - DNA, 75 bp, synthetic construct
  source 1..75: mol_type = other DNA
gtgaaaacagagttacataaaaagctatggacgattcagcaaacgctgaacgcgccgaaaaatcagcgtaataat

SEQ ID NO: 860500 - DNA, 75 bp, synthetic construct
  source 1..75: mol_type = other DNA
cccatgaacagcagcaaaaagccgttgagcgtatacaggaactcatggcgcaggggatgagcagtggccaggcga

SEQ ID NO: 860501 - DNA, 75 bp, synthetic construct
  source 1..75: mol_type = other DNA
ttatctggtggctgctggttggcattctgctgattggttttgcagttactgatggcttcgacatgggggtgggca

SEQ ID NO: 860502 - DNA, 75 bp, synthetic construct
  source 1..75: mol_type = other DNA
cgttctgcaacaaaaatttggttccaccagcgaattacgcgcgggtgttaacggcggttctggtatcgctttaac

SEQ ID NO: 860503 - DNA, 75 bp, synthetic construct
  source 1..75: mol_type = other DNA
ccgacactgacagaaaagttggaaaacacattctggcgtcctgaatacagcgattaccatcgcatttctctttaa

SEQ ID NO: 860504 - DNA, 75 bp, synthetic construct
  source 1..75: mol_type = other DNA
acacgagtcacccggaatatgtttctggcatctgcccgggcactggcatcatttgaatgtaaagacacaggactg

SEQ ID NO: 860505 - DNA, 75 bp, synthetic construct
  source 1..75: mol_type = other DNA
ctggaacggtttattgttgctgtggaaaaacgctggcccggcgtgttgctgcagtttgaagattttgcactgaaa

SEQ ID NO: 860506 - DNA, 75 bp, synthetic construct
  source 1..75: mol_type = other DNA
aaggttggcaggcacgcgcgccgtttgacgctatcattgttacggcggcaccgccggaaattccaactgcgctaa

SEQ ID NO: 860507 - DNA, 75 bp, synthetic construct
  source 1..75: mol_type = other DNA
atggcaccagaacctgatcgaatccgcagctgaagcttctgaagagctgatggaaaaatatctgggtggtgaaga

SEQ ID NO: 860508 - DNA, 75 bp, synthetic construct
  source 1..75: mol_type = other DNA
gttaaataaaggtacggcattttcagtatctgagcggggtgagttcaatctgaatgggttgctcccgaacaaaat

SEQ ID NO: 860509 - DNA, 75 bp, synthetic construct
  source 1..75: mol_type = other DNA
gggtttgctggcaaatatggcgggcaaagggcagttctatcgtgccgatctggatcgtaacggcattcaggatct

SEQ ID NO: 860510 - DNA, 75 bp, synthetic construct
  source 1..75: mol_type = other DNA
gcgtgtgcgcgagttgatgcgtctggagcagaccgtttctgcgctacgcctgaatgatgcgattaaagccggtat

SEQ ID NO: 860511 - DNA, 75 bp, synthetic construct
  source 1..75: mol_type = other DNA
tatcgatgaactgtggcgggatatgcgctggtctgtggcgcgtattcaggacaagccgcgctgtattgtcgggca

SEQ ID NO: 860512 - DNA, 75 bp, synthetic construct
  source 1..75: mol_type = other DNA
gccagatgcgtgagattgtgaccagcgcgcagaaggccacacgcaaggcgcggcgtgacgcggatcgccgccagc

SEQ ID NO: 860513 - DNA, 75 bp, synthetic construct
  source 1..75: mol_type = other DNA
tgaaccctggggattctacaccgcaagcaaaactggcgtagatgatttgctggatttgcaaggcaatggtcacac

SEQ ID NO: 860514 - DNA, 75 bp, synthetic construct
  source 1..75: mol_type = other DNA
tggtcgtccctgtgtctttgaaccctggggattctacaccgcaagcaaaactggcgtagatgatttgctggattt

SEQ ID NO: 860515 - DNA, 75 bp, synthetic construct
  source 1..75: mol_type = other DNA
atgacagctataaaaggaaagcggaaaccgcaacgcaatgtactctaccttcctacagaagttcgtgttgaagtt

SEQ ID NO: 860516 - DNA, 75 bp, synthetic construct
  source 1..75: mol_type = other DNA
ccggaagacgaagcgcgcgatgcagcgcgtcatattcgtgaccagggtaaacaagcgccgctggtgctgatccca

SEQ ID NO: 860517 - DNA, 75 bp, synthetic construct
  source 1..75: mol_type = other DNA
aacgggcgatctgttaactctgagatttacaagcgagtgatggacagcctgaagagagaggggataacggtatga

SEQ ID NO: 860518 - DNA, 75 bp, synthetic construct
  source 1..75: mol_type = other DNA
gaacgccctgaagaccatgcgtaaacagccgcaactgcaggggaaattgctggcgaaaggttcatgggattatca

SEQ ID NO: 860519 - DNA, 75 bp, synthetic construct
  source 1..75: mol_type = other DNA
ccgcagcggtaagcgcacccgcgaatccatccgcagagctgaaaatctacgatacatcatcacaaccacttagcc

SEQ ID NO: 860520 - DNA, 75 bp, synthetic construct
  source 1..75: mol_type = other DNA
ccaatgcgtttgcgcaagagtggcagaagctgggcggcggcaccgttttgcaacaaaaatttggttccaccagcg

SEQ ID NO: 860521 - DNA, 75 bp, synthetic construct
  source 1..75: mol_type = other DNA
gtgtcgatgcggtgtacattgtggcaacgccgggtgaaatcgcttttatcaaaccgatgatcgccatgcgtaacg

SEQ ID NO: 860522 - DNA, 75 bp, synthetic construct
  source 1..75: mol_type = other DNA
agccgcggaatacgccatctggttttcaccggtatcgctaccaacgtctgcgtcgaatcgacgctacgcgacggc

SEQ ID NO: 860523 - DNA, 75 bp, synthetic construct
  source 1..75: mol_type = other DNA
gatcatctggtttcaaaatggctgggatgaacagtatgtcgaggctggcggccccggctcaccgaattttcataa

SEQ ID NO: 860524 - DNA, 75 bp, synthetic construct
  source 1..75: mol_type = other DNA
gcgacggcctgttggtgcgccgtacctgctgccaacgttatcgcttgccggatgtacagcaatgcggcgactgta

SEQ ID NO: 860525 - DNA, 75 bp, synthetic construct
  source 1..75: mol_type = other DNA
cataaatcgaacgccctgaaaaccatgcgtaagcagccgcagctgcaggggaaattgctggcgaaaggctcctgg

SEQ ID NO: 860526 - DNA, 75 bp, synthetic construct
  source 1..75: mol_type = other DNA
tcaccggcatcgctaccaacgtctgcgtcgaatcgacgctacgcgacggctttttttctggagtatttcggcgtg

SEQ ID NO: 860527 - DNA, 75 bp, synthetic construct
  source 1..75: mol_type = other DNA
gcgttgttcaatatcgaaaccttttttggctgggtcagcgacgtcgaaacgttctgcgacgcgctttcgcccacg

SEQ ID NO: 860528 - DNA, 75 bp, synthetic construct
  source 1..75: mol_type = other DNA
agccctgaatgtgatgggtgtgccactggacaaaaacggctggcctgacgtcgaccataacggcgaaacccgtct

SEQ ID NO: 860529 - DNA, 75 bp, synthetic construct
  source 1..75: mol_type = other DNA
catatttgcgatcaccagtgccaatacaactgtacccgcctggattacgacagtgcgctgaatatccgcgaactg

SEQ ID NO: 860530 - DNA, 75 bp, synthetic construct
  source 1..75: mol_type = other DNA
ctttgataacagcagcaacccaggcttcctggtggaagattgtcgggtacgcgtacgtctgaataaccaaagctg

SEQ ID NO: 860531 - DNA, 75 bp, synthetic construct
  source 1..75: mol_type = other DNA
aaagacagactgatttacttgaggctgcaggcaacgtattaaaacaacgctggttttaccgtccgtgggatcatc

SEQ ID NO: 860532 - DNA, 75 bp, synthetic construct
  source 1..75: mol_type = other DNA
tccaccatgcacggctgccctccgcatgaaatcgaagccatttgccgctacatgctggaagaaaaagagctgaac

SEQ ID NO: 860533 - DNA, 75 bp, synthetic construct
  source 1..75: mol_type = other DNA
cagtgcgctgaatatccgcgaactgaaaaaagtcgccctggaaaaaggctggaatgagtataaacaacgttggca

SEQ ID NO: 860534 - DNA, 75 bp, synthetic construct
  source 1..75: mol_type = other DNA
accaaaagcggtcaaggctgcatacgacctggcagccggcaaggcgccagccagccacactcacccgtggagtca

SEQ ID NO: 860535 - DNA, 75 bp, synthetic construct
  source 1..75: mol_type = other DNA
accaaaagcggtcaaggctgcatacgacctcgcagccggcaaggcgccaggcagccacactcacccgtggagtca

SEQ ID NO: 860536 - DNA, 75 bp, synthetic construct
  source 1..75: mol_type = other DNA
accaaaagcggtcaaggctgcatacgaccttgcagccggcaaggcgcctgacagccacactcacccgtggagtca

SEQ ID NO: 860537 - DNA, 75 bp, synthetic construct
  source 1..75: mol_type = other DNA
tgcccatttcttattccggtggtgccagtcagctgactatccgcgatatttttgatacaggtattcgccctatta

SEQ ID NO: 860538 - DNA, 75 bp, synthetic construct
  source 1..75: mol_type = other DNA
cgttgaacgactgagcaagctggcagcagatgcattaaccatggaatacactcaaaaacactggaagccagaaga

SEQ ID NO: 860539 - DNA, 75 bp, synthetic construct
  source 1..75: mol_type = other DNA
taagaagattgtcgataatcaggggaataatatggggataactatcccttcatctatccctgaaggttcaattgt

SEQ ID NO: 860540 - DNA, 75 bp, synthetic construct
  source 1..75: mol_type = other DNA
gaaggcagttgaagtttatgggcgacattctgacgtggtgatgtctctggaaagacagactgatttacttgaggc

SEQ ID NO: 860541 - DNA, 75 bp, synthetic construct
  source 1..75: mol_type = other DNA
agctccgcattactggtttatatgtcgccgctggtgggattattcctcatcgcttcactatttcagctactcttt

SEQ ID NO: 860542 - DNA, 75 bp, synthetic construct
  source 1..75: mol_type = other DNA
gtgcgattctcggtggcgttggtggattcctgattgcacgtggcggctctcgaaagtttgctgcccggtctgaat

SEQ ID NO: 860543 - DNA, 75 bp, synthetic construct
  source 1..75: mol_type = other DNA
ccggccgttgataaaggtatccaggaacagctgaaagcaggtccgctggcaggctacccggtagtagacatgggt

SEQ ID NO: 860544 - DNA, 75 bp, synthetic construct
  source 1..75: mol_type = other DNA
ctcaccgcaacgcaaaacggttacggtaaacgtaccgcagtggcggaatacccaaccaagtcgcgtgcgacgaaa

SEQ ID NO: 860545 - DNA, 75 bp, synthetic construct
  source 1..75: mol_type = other DNA
atgtcggtcattgttggccgtgcgctgccggatgtccgagatggcctgaagccggtacaccgtcgcgtactttac

SEQ ID NO: 860546 - DNA, 75 bp, synthetic construct
  source 1..75: mol_type = other DNA
caccggtcaacattgaggaagagctgaaaagctcctatctggattatgcgatgtcggtcattgttggccgtgcgc

SEQ ID NO: 860547 - DNA, 75 bp, synthetic construct
  source 1..75: mol_type = other DNA
ccgggcagggtagccaatatcagcgcatgggccatcagctctatcaggtttggccggcctacgccgatgccttcg

SEQ ID NO: 860548 - DNA, 75 bp, synthetic construct
  source 1..75: mol_type = other DNA
ttttctgcgctaagccaagcctttgcgggcgcgtcacaaaagcagtactgtgcgctggggtcggtaaaaaccaat

SEQ ID NO: 860549 - DNA, 75 bp, synthetic construct
  source 1..75: mol_type = other DNA
atggcagagaatgattttggtatagctatcattgggatggcggggcgtttccctaaagccgatacggtacaggcg

SEQ ID NO: 860550 - DNA, 75 bp, synthetic construct
  source 1..75: mol_type = other DNA
ccttcttccgtgtttactccggtgtggttaactctggtgataccgtactgaactccgtgaaagctgcacgtgagc

SEQ ID NO: 860551 - DNA, 75 bp, synthetic construct
  source 1..75: mol_type = other DNA
ctggaacgacgctgaccagggcgtaaccttcgaatacgaagatatcccggcagacatggttgaactggctaacga

SEQ ID NO: 860552 - DNA, 75 bp, synthetic construct
  source 1..75: mol_type = other DNA
ccacgagcgcgaagggctacccttaacgccgctggcgaactgtgtggcggatacgcaaggcggcattggctatct

SEQ ID NO: 860553 - DNA, 75 bp, synthetic construct
  source 1..75: mol_type = other DNA
accaaaagcggtcaaggctgcatacgacctagcagccggcaaggcgcctgtcagccacactcacccgtggagtca

SEQ ID NO: 860554 - DNA, 75 bp, synthetic construct
  source 1..75: mol_type = other DNA
ttgagagacttgttgttacacttttattaaaaatgggttatgggtggcacgagtctgaggcaggcaaggttgttg

SEQ ID NO: 860555 - DNA, 75 bp, synthetic construct
  source 1..75: mol_type = other DNA
cgtaagggaactaaagattacggccatgattattttcctgatcccaagactgaagatattaaggggttgggagag

SEQ ID NO: 860556 - DNA, 75 bp, synthetic construct
  source 1..75: mol_type = other DNA
agacccctactccggcacaggtaaaacagcgtctggaggaagaaaagcgtcgccagcaggcatgggacgctgctc

SEQ ID NO: 860557 - DNA, 75 bp, synthetic construct
  source 1..75: mol_type = other DNA
atgagccagaaaacagccaaccacgaaaaccgggtgcgtgaatgcaacgacattctggacacccatttaaaagat

SEQ ID NO: 860558 - DNA, 75 bp, synthetic construct
  source 1..75: mol_type = other DNA
atttagatatccgcggggttgatttgcaaggcgtcaaactggacagctaccaggcatcgttgctcctggaacgtc

SEQ ID NO: 860559 - DNA, 75 bp, synthetic construct
  source 1..75: mol_type = other DNA
ggtttggaaaaaatatatatccaagctaaaagatataatagtaaaaaggtaccacctagcgaaattagagagttt

SEQ ID NO: 860560 - DNA, 75 bp, synthetic construct
  source 1..75: mol_type = other DNA
tcgaattgttcattaaaaaaccgcttgaaaacggccttactcgtggggaacaaatggaactggcacgtattgctc

SEQ ID NO: 860561 - DNA, 75 bp, synthetic construct
  source 1..75: mol_type = other DNA
gatggcaggatttatcgtgatggtttttcccctcgcccagtttgtcgccatgtttaactggagcaacatggggaa

SEQ ID NO: 860562 - DNA, 75 bp, synthetic construct
  source 1..75: mol_type = other DNA
accggatcgctggagtaccagtacaacgtgaccggaaaatggtggggcgcggtgtttgtcgatagcggcgaagcg

SEQ ID NO: 860563 - DNA, 75 bp, synthetic construct
  source 1..75: mol_type = other DNA
tcattgcatggtctacgggcgttgatgccaaaacggcaattggtcttggcctgccgtttagtttgttaatgcagt

SEQ ID NO: 860564 - DNA, 75 bp, synthetic construct
  source 1..75: mol_type = other DNA
attatggcgggtctgatgaccactgtcattgcatggtctacgggcgttgatgccaaaacggcaattggtcttggc

SEQ ID NO: 860565 - DNA, 75 bp, synthetic construct
  source 1..75: mol_type = other DNA
tcgaattgttcattaaaaaaccgcttgaaaacgggcttactcgtggcgaacaaatggaactggcacgtattgctc

SEQ ID NO: 860566 - DNA, 75 bp, synthetic construct
  source 1..75: mol_type = other DNA
ctgtcgcttatgcaattaacacacgtaaattccaggaagaagtttttgttttcgtcgaagcgccggatcgggaaa

SEQ ID NO: 860567 - DNA, 75 bp, synthetic construct
  source 1..75: mol_type = other DNA
gagagcgtacacaaaatgatatccgtacccaccccctccggcgaacgggatgaacagatcccgcacgagcatttc

SEQ ID NO: 860568 - DNA, 75 bp, synthetic construct
  source 1..75: mol_type = other DNA
cgacgagttttataagcgtctggtaaacagcgtaccggggctgtcggacgtcacttccagcttcgcgatggaaca

SEQ ID NO: 860569 - DNA, 75 bp, synthetic construct
  source 1..75: mol_type = other DNA
gatagcaatattgtctggctagaaaacgacgaaagtattgttactaataagtatctctggcacttctataaaatc

SEQ ID NO: 860570 - DNA, 75 bp, synthetic construct
  source 1..75: mol_type = other DNA
cgtgccggacgctgtactggaaaaactgactgttccgcagcttcagcaaatcttcaccttcgctatggaagtgat

SEQ ID NO: 860571 - DNA, 75 bp, synthetic construct
  source 1..75: mol_type = other DNA
atgaccaaattactcgatctcgattccattctgcctccgaagaaaagcatcaaatttggcggtcaggaatatccc

SEQ ID NO: 860572 - DNA, 75 bp, synthetic construct
  source 1..75: mol_type = other DNA
tattcaaaataagattttgaatgatattttaaaaatgccgccaaatgttaatgttaggacttttggaattaaaag

SEQ ID NO: 860573 - DNA, 75 bp, synthetic construct
  source 1..75: mol_type = other DNA
accatcttacgtggtgatgtgatttacgacatcgaacagggcttccctgttgcgccgaaaggtcaatttatcctt

SEQ ID NO: 860574 - DNA, 75 bp, synthetic construct
  source 1..75: mol_type = other DNA
cagcaaaaaggccgtatcgccccaggaaaagatgccgacttcgtcttcattcagccgaatagcagctatgttctt

SEQ ID NO: 860575 - DNA, 75 bp, synthetic construct
  source 1..75: mol_type = other DNA
gatacggagcctttgattcttatcgcgtcaccacacctaaggaaagtgctggagtgtgcgctgcaggaggtgccg

SEQ ID NO: 860576 - DNA, 75 bp, synthetic construct
  source 1..75: mol_type = other DNA
gaaagctttgggggaaattggtgaagttcgtatgtgtaaacgaatcctaaaatcacaaacatcttctgagggaga

SEQ ID NO: 860577 - DNA, 75 bp, synthetic construct
  source 1..75: mol_type = other DNA
tcccctgcccggataatccggaaaaatcccttgccatccagtctgaaattgtgcaaattctggataaatttactg

SEQ ID NO: 860578 - DNA, 75 bp, synthetic construct
  source 1..75: mol_type = other DNA
tgaatcacttttattaaaagtagtcgaattactcaaggaaagtaactcccaatataaagaagagaaacaagtcat

SEQ ID NO: 860579 - DNA, 75 bp, synthetic construct
  source 1..75: mol_type = other DNA
gggcaccaaaaacgcgggcgcggattttggcgtcagcatggcagagcagtttgccatactgggcaccctgtcacg

SEQ ID NO: 860580 - DNA, 75 bp, synthetic construct
  source 1..75: mol_type = other DNA
tcaatctgacagaccagcttacccgcccgctgcggcaggttcaggaatccgtgacgggattcgccgaacgctcgc

SEQ ID NO: 860581 - DNA, 75 bp, synthetic construct
  source 1..75: mol_type = other DNA
cttgcaatgcaagcgcaaaccagcaatgagagcagaagtgtatgaaacgacaataactcagtccgcctggcgccg

SEQ ID NO: 860582 - DNA, 75 bp, synthetic construct
  source 1..75: mol_type = other DNA
gggatggctggcgctggtgtttattgccacgacagggatgagcggttggctgaagtggcaaactgatggcatgaa

SEQ ID NO: 860583 - DNA, 75 bp, synthetic construct
  source 1..75: mol_type = other DNA
tctcttttaaacagaagcgcctttggggatggctggcgctagtgtttattgccacgctggggatgagcggctggc

SEQ ID NO: 860584 - DNA, 75 bp, synthetic construct
  source 1..75: mol_type = other DNA
gaaagattacagcagtaactttacctataattgtagagtggctagaaaaaaataatgtaccttatgatgaaattt

SEQ ID NO: 860585 - DNA, 75 bp, synthetic construct
  source 1..75: mol_type = other DNA
ccgcgctgggctcggctctcatttggcgatcgtcaggtaagagtgaacgctttgctggattgctggaaagcaata

SEQ ID NO: 860586 - DNA, 75 bp, synthetic construct
  source 1..75: mol_type = other DNA
ccctgaaaacgtccgacaatacgccgctggctgtactgtatgccagccagttacgcaagaaggacggttctatcg

SEQ ID NO: 860587 - DNA, 75 bp, synthetic construct
  source 1..75: mol_type = other DNA
aaggtggtgcggcagtaattatcattcctgccagtatgatagaaaataccggatgggaagatggaaccttattgg

SEQ ID NO: 860588 - DNA, 75 bp, synthetic construct
  source 1..75: mol_type = other DNA
tgctgaatgggcattatacctttcagaacagtaatgaacttattgacctggatacattggtagccggtttaaaac

SEQ ID NO: 860589 - DNA, 75 bp, synthetic construct
  source 1..75: mol_type = other DNA
aggcttacgtaccgggttatcgcctgaaacagcgcgtgcagtttgaagttatcccgaaggataaaccggttaatt

SEQ ID NO: 860590 - DNA, 75 bp, synthetic construct
  source 1..75: mol_type = other DNA
agtgctggatgaacctactcagggcgtggatgtgaatggtcaggttgcgctgtacgaccttattgaccaactgcg

SEQ ID NO: 860591 - DNA, 75 bp, synthetic construct
  source 1..75: mol_type = other DNA
acctgccattaaggcgctgatccaacaaggctttgtggtgattggcgcgggcggcggcggaattcctgtggtgcg

SEQ ID NO: 860592 - DNA, 75 bp, synthetic construct
  source 1..75: mol_type = other DNA
ttgccaaaaatcatcgccagcctggcgttcctggaacagggcggcaaagaagtgattatcaccacgccggaatgc

SEQ ID NO: 860593 - DNA, 75 bp, synthetic construct
  source 1..75: mol_type = other DNA
caggcgctggatcgggtggatattgccaccatgacccgctatatgcaggaagggcatttcccgcctggcagcatg

SEQ ID NO: 860594 - DNA, 75 bp, synthetic construct
  source 1..75: mol_type = other DNA
gctttttgacccgcgacgacgccagtttcgtcaaaatggtctttacgctggataactacacgcgtctgctcgatc

SEQ ID NO: 860595 - DNA, 75 bp, synthetic construct
  source 1..75: mol_type = other DNA
caggcgctggatcgggtggatattgccaccatgactcgctatatgcaggaaggacatttcccgcccggcagcatg

SEQ ID NO: 860596 - DNA, 75 bp, synthetic construct
  source 1..75: mol_type = other DNA
tcaccactggcgtggaaaaagtgtgtattcactttggcaaaccgcagcagcaggcgctggatcgcgtagatattg

SEQ ID NO: 860597 - DNA, 75 bp, synthetic construct
  source 1..75: mol_type = other DNA
tgaacatcctaaaaagggagatctcattttctatcctaattcccaagaagatggtgaacctgaaaacatcctgaa

SEQ ID NO: 860598 - DNA, 75 bp, synthetic construct
  source 1..75: mol_type = other DNA
gagatctcattttctatcctaattcccaagaagatggtgaacctgaaaacatcctgaaaatcgtcaaagaatggc

SEQ ID NO: 860599 - DNA, 75 bp, synthetic construct
  source 1..75: mol_type = other DNA
gcaactagcaaagataaatccctaaaagggaaaaaattagaaaaatatctcgataccttagtggatcatttcatt

SEQ ID NO: 860600 - DNA, 75 bp, synthetic construct
  source 1..75: mol_type = other DNA
ttccgattacgacattgtgctgacccacggcaacgggccgcaggtcgggctggatttacgccgcgcggagattgc

SEQ ID NO: 860601 - DNA, 75 bp, synthetic construct
  source 1..75: mol_type = other DNA
gcgtggacgcggttatcgacaaagatctctctaccgcgctactggctcgcgaaattcacgccgacattctggtga

SEQ ID NO: 860602 - DNA, 75 bp, synthetic construct
  source 1..75: mol_type = other DNA
aggagctagaaatgtactgggattcattagtagatcattttattgaaattacacagcatccgtcagggagcgatc

SEQ ID NO: 860603 - DNA, 75 bp, synthetic construct
  source 1..75: mol_type = other DNA
gacgacagcctgcaacaccggcacttctcagatgaactggttgagatggacaggaagatcgatgtgctcgcaaaa

SEQ ID NO: 860604 - DNA, 75 bp, synthetic construct
  source 1..75: mol_type = other DNA
cttcccttgtttgctgttgcagctgatgattgcgcactctcagatccgatgctgatcgtacaggcgtataccgtt

SEQ ID NO: 860605 - DNA, 75 bp, synthetic construct
  source 1..75: mol_type = other DNA
gcgatggctgaagcgggtattccgcgcggtaccggaatgggcatgggttacggcggctgcggtggtggcggtcat

SEQ ID NO: 860606 - DNA, 75 bp, synthetic construct
  source 1..75: mol_type = other DNA
cgaacaacaaactgcgtggcaaaaaatccataatgacttttacgctcaaagcagcgcgctgcaacaacagctaat

SEQ ID NO: 860607 - DNA, 75 bp, synthetic construct
  source 1..75: mol_type = other DNA
agtctggtaacatattaaacaaacgaatattagagcgagcgcaagaaaattataaggttgcgcacgctaaatatg

SEQ ID NO: 860608 - DNA, 75 bp, synthetic construct
  source 1..75: mol_type = other DNA
tgatcctgactcattttggttttggcaaaactatgtgaaggtcgcttatcagcgcgggacgtcacaagaacatgc

SEQ ID NO: 860609 - DNA, 75 bp, synthetic construct
  source 1..75: mol_type = other DNA
aggtgcagatggcgatgaacggcggcatcttaaatttgacggtttttgatataaaatatagaaagaaggaggttt

SEQ ID NO: 860610 - DNA, 75 bp, synthetic construct
  source 1..75: mol_type = other DNA
aagtgaaacgcgatgcggtcggtgaagttgtgctcaacaacctctactcccagacccagttgcaggtttctttcg

SEQ ID NO: 860611 - DNA, 75 bp, synthetic construct
  source 1..75: mol_type = other DNA
aggcgtgaaagtcttcatggcgaccgctaacggtaccgtgaagaaaacggtcctgaccgaattcaaccgcctgcg

SEQ ID NO: 860612 - DNA, 75 bp, synthetic construct
  source 1..75: mol_type = other DNA
gaagatcatgaacctgaaagacatcatcgctgcgtttgttcgtcaccgccgcgaagtggtgacccgtcgtaccat

SEQ ID NO: 860613 - DNA, 75 bp, synthetic construct
  source 1..75: mol_type = other DNA
agagataaaggaatcattaaagcagacgaccagagaggccgaagttgcgacaggtataattagaaaaacaatgga

SEQ ID NO: 860614 - DNA, 75 bp, synthetic construct
  source 1..75: mol_type = other DNA
atggctattttctttgcgcgagtctggttaggaaagaatgaagaaactagttacaacatacttaatgctagcttt

SEQ ID NO: 860615 - DNA, 75 bp, synthetic construct
  source 1..75: mol_type = other DNA
tgctgaaccggttgacgaggaagatctggataccatcgatggcagtgccgcggaaggggacgatgaaatcgctcc

SEQ ID NO: 860616 - DNA, 75 bp, synthetic construct
  source 1..75: mol_type = other DNA
cgtacccgtgtatttgaagagatgcgcgggctgacggcacagatcaagaaggatatggcccgccgattaaccgaa

SEQ ID NO: 860617 - DNA, 75 bp, synthetic construct
  source 1..75: mol_type = other DNA
gagcacgtccagcggtggcggaattactaacgctcaattcacttatattaatcatggtgatgcttacgctcctgg

SEQ ID NO: 860618 - DNA, 75 bp, synthetic construct
  source 1..75: mol_type = other DNA
ggctgtggaactattcatcttgcaggttgcgttattgaggttatggggaataaaggtgccatgaccatccgtgta

SEQ ID NO: 860619 - DNA, 75 bp, synthetic construct
  source 1..75: mol_type = other DNA
ggaaggtgaaatcgatttggcgttaccggtgactaatgctggtgaaagcaatgcggaagtggcacaagagactga

SEQ ID NO: 860620 - DNA, 75 bp, synthetic construct
  source 1..75: mol_type = other DNA
agatggacaggaagatcgatgtgctcgcaaaaatggagatccccttcctgcagcaacccgtccatgcccaactcg

SEQ ID NO: 860621 - DNA, 75 bp, synthetic construct
  source 1..75: mol_type = other DNA
tgggccaaaggtgtttttgccaagcagcagcggctgtcgcaacggccactcgacgagtggcccgcggcgacactt

SEQ ID NO: 860622 - DNA, 75 bp, synthetic construct
  source 1..75: mol_type = other DNA
ttttggtccggttacatgtgcgctctggggagcacctgttcagccagcagactttaatgcagtggagagaggagc

SEQ ID NO: 860623 - DNA, 75 bp, synthetic construct
  source 1..75: mol_type = other DNA
ctggcagcgataccatatacgagtgatgaccgcgaacgtgcccggcagatgtttgaatataggcagcgcagggtt

SEQ ID NO: 860624 - DNA, 75 bp, synthetic construct
  source 1..75: mol_type = other DNA
tcaagcgttttaaagcctgcctgaagaaagtagccgatccatatatcgccatactggacagaatacaatataccc

SEQ ID NO: 860625 - DNA, 75 bp, synthetic construct
  source 1..75: mol_type = other DNA
tactcaagcgcctaccctgatgtatctgccgtgttatccagtacaacttaccgaacacgccttgctctggtccgt

SEQ ID NO: 860626 - DNA, 75 bp, synthetic construct
  source 1..75: mol_type = other DNA
gctggctggacgcggtgcaggtgctgagctgatgcaaacggcgctaaactgggcgtatgctcgcggtaaaacaac

SEQ ID NO: 860627 - DNA, 75 bp, synthetic construct
  source 1..75: mol_type = other DNA
gcggctccggtgccgttctgtggcggcgtcatcgtgtggccgtcagtcaaaagaggttgtcggcctggcggcctc

SEQ ID NO: 860628 - DNA, 75 bp, synthetic construct
  source 1..75: mol_type = other DNA
aaaaaagcaaggaaaaactctaggggaattacaggaaagacgtttaaggttaggtgataacgatacgacagcctc

SEQ ID NO: 860629 - DNA, 75 bp, synthetic construct
  source 1..75: mol_type = other DNA
tgatgctctccggcgtgaaacaagaacatctcgacctgcatacccttaaccagccgttgattgcggatgtccgcg

SEQ ID NO: 860630 - DNA, 75 bp, synthetic construct
  source 1..75: mol_type = other DNA
tcagaaataattattcgacaacttcttaatggagtcaattatataaggcacggcggggatgttcagggatatgaa

SEQ ID NO: 860631 - DNA, 75 bp, synthetic construct
  source 1..75: mol_type = other DNA
aacgggccgccaaatttattcagctgttgccgcacaccaagggtgagtgggcatttaagaggatgcccatcacgc

SEQ ID NO: 860632 - DNA, 75 bp, synthetic construct
  source 1..75: mol_type = other DNA
atgaagccgtccgttatcctctacaaagccttacctgatgatttactgcaacgcctgcaagagcatttcaccgtt

SEQ ID NO: 860633 - DNA, 75 bp, synthetic construct
  source 1..75: mol_type = other DNA
ctgtcaaggagcaggcggaaaacaaaatcgatggtgcggttgcactgattatggcgatcggtcgggcaatgctca

SEQ ID NO: 860634 - DNA, 75 bp, synthetic construct
  source 1..75: mol_type = other DNA
cactgattatggcgatcggtcgggcaatgctcaaagaacccgacgatttcctctcatctcttgatccggacgatg

SEQ ID NO: 860635 - DNA, 75 bp, synthetic construct
  source 1..75: mol_type = other DNA
gtgcagaggtggattatcgctacatcctcgaagaggccaaagcggcgaacaaaatcagcccggtcagcgagtcac

SEQ ID NO: 860636 - DNA, 75 bp, synthetic construct
  source 1..75: mol_type = other DNA
acatggggtatccgtgtgcaataatgcctgcaatggttggcgtatataattacagacgaacagattatgacaggc

SEQ ID NO: 860637 - DNA, 75 bp, synthetic construct
  source 1..75: mol_type = other DNA
tatggtgttaccgcattctggttatggtattgccatgtataataaaaacggagagatgatttatcatggcgagat

SEQ ID NO: 860638 - DNA, 75 bp, synthetic construct
  source 1..75: mol_type = other DNA
gtgaaatggtatatcacggtgagatgatgcctcttgatgcagagattatcactattacaaatcctcaatttacca

SEQ ID NO: 860639 - DNA, 75 bp, synthetic construct
  source 1..75: mol_type = other DNA
ctgaaattattaccaggtcaatggcaagacattaatttgacgctaaaaggtgtctcgcccaacaacctcaaatat

SEQ ID NO: 860640 - DNA, 75 bp, synthetic construct
  source 1..75: mol_type = other DNA
tagaacactttgaaaaacaacaaactaccatcataaacagtaccaaaacgctcgctggtgtggtgaaggcagtta

SEQ ID NO: 860641 - DNA, 75 bp, synthetic construct
  source 1..75: mol_type = other DNA
taatattgcaaacaccactaaagtgctggcaggtgtagtaaaggcggtcaaagacaaacaggacgaatttgtctt

SEQ ID NO: 860642 - DNA, 75 bp, synthetic construct
  source 1..75: mol_type = other DNA
agaactacaccaacacgtccgacccgatgaaagagctggaagcggcaattgaatcggggcgctttcatcatgatg

SEQ ID NO: 860643 - DNA, 75 bp, synthetic construct
  source 1..75: mol_type = other DNA
atgcagcctggcgactggcgcagttcacgcaccacaaaaaaggggatgccggtaaaaaatcggcaaaaggtgacg

SEQ ID NO: 860644 - DNA, 75 bp, synthetic construct
  source 1..75: mol_type = other DNA
tccggtattgattacatggaggacggccttcctgatcctgtgaaagccatgggtcggatcctggtggaaaacatc

SEQ ID NO: 860645 - DNA, 75 bp, synthetic construct
  source 1..75: mol_type = other DNA
tgggtgctggcgctttggggcgtggtgcagtggctggcgttaagtgcgctgaaccagtggctggcacctgagcgc

SEQ ID NO: 860646 - DNA, 75 bp, synthetic construct
  source 1..75: mol_type = other DNA
caagaaggcaagccagaaagtagtttactgaaacaagaagaagaacataacaataaaattgtgctacttgaaaaa

SEQ ID NO: 860647 - DNA, 75 bp, synthetic construct
  source 1..75: mol_type = other DNA
gtgctgtcactgtttcagttctctgcgcattaacgggatgtgactacattgaagaaggcaagccagaaagtagtt

SEQ ID NO: 860648 - DNA, 75 bp, synthetic construct
  source 1..75: mol_type = other DNA
tccggagatgccaccgcccgcggtgatgtctcatggtattgaatatatggaggatggtcttcccgatccggtgaa

SEQ ID NO: 860649 - DNA, 75 bp, synthetic construct
  source 1..75: mol_type = other DNA
aatttctttgaggaaagtggaattccattgcctaagattattgttaatccggttaaaaataatgatagcgcaata

SEQ ID NO: 860650 - DNA, 75 bp, synthetic construct
  source 1..75: mol_type = other DNA
tggtggatgaatatcacgagcacgccaccgatgcgctttataccacaatgcttaccgggatgggggcgcgacgtc

SEQ ID NO: 860651 - DNA, 75 bp, synthetic construct
  source 1..75: mol_type = other DNA
ggcagccgtgcattctggcctttgacctggcgcgtaaactggatatgaacagcatggcgcgactttatacccgcg

SEQ ID NO: 860652 - DNA, 75 bp, synthetic construct
  source 1..75: mol_type = other DNA
atcccacgctgaaaaccatttctgaacgttaccagtcatttgtgaaacagggggtattgatacctactgaagggg

SEQ ID NO: 860653 - DNA, 75 bp, synthetic construct
  source 1..75: mol_type = other DNA
tctggcctcgaaagtagacctgaatgccgtagtgccagtgttcaggagagaggttgctggtataacccattttta

SEQ ID NO: 860654 - DNA, 75 bp, synthetic construct
  source 1..75: mol_type = other DNA
tattatccgtcggtgatgcactggttgcccagatccctgcacttattatttcggtcaccgcaggggtggttgtta

SEQ ID NO: 860655 - DNA, 75 bp, synthetic construct
  source 1..75: mol_type = other DNA
tgcgctgacatttattgaacggaatgaaaatgttgtgttgctagggccaagtggagtgggtaaaacacatcttgc

SEQ ID NO: 860656 - DNA, 75 bp, synthetic construct
  source 1..75: mol_type = other DNA
tgccattgacggtgccagcgtgcaggtgcaggacgtgctgcaaaccggcggggcggtgaaacgctatgaaccgca

SEQ ID NO: 860657 - DNA, 75 bp, synthetic construct
  source 1..75: mol_type = other DNA
tttcattagagcttttagagcttttacatctcctgaatctgatttttcgaaaaattatttcttatcaaaagatgt

SEQ ID NO: 860658 - DNA, 75 bp, synthetic construct
  source 1..75: mol_type = other DNA
acagtggcttgacgatgatcgcctatttattgataccgaaaccacggggttgggtgatgatgcagaaatagtaga

SEQ ID NO: 860659 - DNA, 75 bp, synthetic construct
  source 1..75: mol_type = other DNA
cacaaacaaccgcacatcatgaacaagaaggtattaacaagaatataaataatacccccctaccccccaatgggg

SEQ ID NO: 860660 - DNA, 75 bp, synthetic construct
  source 1..75: mol_type = other DNA
ccttgttggtagaaaaaataaagcaatttcaaaaaagccaccacttgaaaactgacggtgttgttggcttttcaa

SEQ ID NO: 860661 - DNA, 75 bp, synthetic construct
  source 1..75: mol_type = other DNA
tttcctggttgtgtgagaaacgtcaaacctggcgtctgtgctatttgttgggtgaggctggaagtggaaaaacct

SEQ ID NO: 860662 - DNA, 75 bp, synthetic construct
  source 1..75: mol_type = other DNA
gacgttatcagaataccggacaggtatgtgcagcggcaaaacgctttatcatcgaagagggaattgcttcggcat

SEQ ID NO: 860663 - DNA, 75 bp, synthetic construct
  source 1..75: mol_type = other DNA
gtgtatatggctggctgaatgctgacaacgatggtgtcagtcagatgattaaagattcacgtattgcggcggtca

SEQ ID NO: 860664 - DNA, 75 bp, synthetic construct
  source 1..75: mol_type = other DNA
gacgaaacacgggccagacagatggcggcacatctggaatgcggtggcgtgtttatcaatggttattgtgccagt

SEQ ID NO: 860665 - DNA, 75 bp, synthetic construct
  source 1..75: mol_type = other DNA
tatgctatctggtcaggagtcggtattgtcctgattagcttactgtcatggggatttttcggccaacggctggac

SEQ ID NO: 860666 - DNA, 75 bp, synthetic construct
  source 1..75: mol_type = other DNA
accagcattcaggttgtgattgatggggaaaaatgggtcgcaggcgtcgaacctgatcgcttgcaaggttgggag

SEQ ID NO: 860667 - DNA, 75 bp, synthetic construct
  source 1..75: mol_type = other DNA
atattggttactccaacctgaaaatggcaatggggtataaaggtgaggaagctcgcacagtcgtcatgccggtgg

SEQ ID NO: 860668 - DNA, 75 bp, synthetic construct
  source 1..75: mol_type = other DNA
ggacggtttcagagcgtatgtcagggcgtttgtgcatcaggccaagccgttttacttcggagacaacgacacggg

SEQ ID NO: 860669 - DNA, 75 bp, synthetic construct
  source 1..75: mol_type = other DNA
tgaagtatctgaaattgtctatcaatatggacaatattcagttcgacactcttcaacctgctgactctcagcaga

SEQ ID NO: 860670 - DNA, 75 bp, synthetic construct
  source 1..75: mol_type = other DNA
ctgaaattattaccaggtcaatggcaagacattaatctgacgctgaaaggcgtatctcccaataatctgaaatac

SEQ ID NO: 860671 - DNA, 75 bp, synthetic construct
  source 1..75: mol_type = other DNA
cgctaacggaagaaacccatcacctgtttggcgctgaacaattcgccaaaatgaaaccctctgccatcttcatta

SEQ ID NO: 860672 - DNA, 75 bp, synthetic construct
  source 1..75: mol_type = other DNA
tttcctgaatgtcactcaggaagaactgctggatgatttcgaatttgcacctgaaatcacgcagtctgcgtatta

SEQ ID NO: 860673 - DNA, 75 bp, synthetic construct
  source 1..75: mol_type = other DNA
gcccgaaccagcaggcagatggatgccattattcatgccccggagtttcaggaactggaatccctgctgcgctcg

SEQ ID NO: 860674 - DNA, 75 bp, synthetic construct
  source 1..75: mol_type = other DNA
cgcaaacgccgcctgaagaaaatcatcccgcaactgaaaacgccaaacgtggacggtttcagagcgtatgtcagg

SEQ ID NO: 860675 - DNA, 75 bp, synthetic construct
  source 1..75: mol_type = other DNA
tcgcttgtgtttttctattaatctcgtggggagttatttttatcctgcaagtagcagatatattctcaattattt

SEQ ID NO: 860676 - DNA, 75 bp, synthetic construct
  source 1..75: mol_type = other DNA
taaaaacatacagagatgatgcacgattagtgcaggaattaggtgacagatattatcctgtaaataagcacgtta

SEQ ID NO: 860677 - DNA, 75 bp, synthetic construct
  source 1..75: mol_type = other DNA
attaaatgaatggatatcgaatagagtgcaggaattaggtgacagatattatcctgtaaataagcacgttaaaat

SEQ ID NO: 860678 - DNA, 75 bp, synthetic construct
  source 1..75: mol_type = other DNA
gtaatcaacatatcaatgattatattggaaaatatcgcgacaccattaagtatattcacgaccagaccctgcacc

SEQ ID NO: 860679 - DNA, 75 bp, synthetic construct
  source 1..75: mol_type = other DNA
acgaatttacccataaactctgtgcccgctgggaagaaatagcttgtcgggcacaaagtgacaaaacacgagtat

SEQ ID NO: 860680 - DNA, 75 bp, synthetic construct
  source 1..75: mol_type = other DNA
gcgcaaagcgacaaaacacgagtgtgcctgctgcgtaccggcgtagtactggcttcggatggcggtatcctcggt

SEQ ID NO: 860681 - DNA, 75 bp, synthetic construct
  source 1..75: mol_type = other DNA
cttgccgatcaacgcaatctcaacggcgtggatgtggtggtcaacctggctggtgaacccattgctgataaacgc

SEQ ID NO: 860682 - DNA, 75 bp, synthetic construct
  source 1..75: mol_type = other DNA
cacgctttaacaatccggcatatgacaaagttctggcccaggcatcgacggaaaataccgttaaagcgcgtaatg

SEQ ID NO: 860683 - DNA, 75 bp, synthetic construct
  source 1..75: mol_type = other DNA
ctcccaggtgacactatggcaagagcttgccgatcaaagcaacctcaacggcgttgatgcggtgatcaatctggc

SEQ ID NO: 860684 - DNA, 75 bp, synthetic construct
  source 1..75: mol_type = other DNA
cggacaacgtgcgctgccaaaaaggctggaagaagcggggttcgcttttcgctggtacgatttagacgaagcgct

SEQ ID NO: 860685 - DNA, 75 bp, synthetic construct
  source 1..75: mol_type = other DNA
tggataccttgccaccgcgtacggtgctggatatcaatcaacttgttgatgccgttagcctgcgcgatctatcac

SEQ ID NO: 860686 - DNA, 75 bp, synthetic construct
  source 1..75: mol_type = other DNA
ccaaatctactgccgccatgcgagcaaccgtcgctttccctgctcaatcatgcccgcctgtggggcaatgtgaat

SEQ ID NO: 860687 - DNA, 75 bp, synthetic construct
  source 1..75: mol_type = other DNA
gcgatgcccattgtgcgaggaggaaagctgggagctggcaatgtcaaactgaaacgcggacggctggataccttg

SEQ ID NO: 860688 - DNA, 75 bp, synthetic construct
  source 1..75: mol_type = other DNA
ataataaatagatcaggcgagagatcgacaggtgttacattaaatggtatccccggtgtcttttctctttatggt

SEQ ID NO: 860689 - DNA, 75 bp, synthetic construct
  source 1..75: mol_type = other DNA
tttcatcagaacaaaatgcagaatggtttatcgatgcaggtctaaccaatgataattatgtattgcaagcaatta

SEQ ID NO: 860690 - DNA, 75 bp, synthetic construct
  source 1..75: mol_type = other DNA
agccattgctgtcgatgaccagcaattcccgcctgtggggcaatgtgaatgtgctggcgcgctgcggcaacgaca

SEQ ID NO: 860691 - DNA, 75 bp, synthetic construct
  source 1..75: mol_type = other DNA
gacaatctgaaatcaattgcagatgttcttcaggaacattatcttcgacacccactggctcctgatgcagatatg

SEQ ID NO: 860692 - DNA, 75 bp, synthetic construct
  source 1..75: mol_type = other DNA
acgttgggtatcgtgggtgagtctggttccggtaagtcgcaaaccgcgtttgctttaatggggctgctggccgcg

SEQ ID NO: 860693 - DNA, 75 bp, synthetic construct
  source 1..75: mol_type = other DNA
taccgcttgcacagcaacaggctaacgcactgctgaacgtgaaggatttgcgagtgacatttagtaccccggacg

SEQ ID NO: 860694 - DNA, 75 bp, synthetic construct
  source 1..75: mol_type = other DNA
tttgcctgaacgtgagctcaacaaactgcgggctgaacaaatctcaatgatttttcaggatccgatgacctcgtt

SEQ ID NO: 860695 - DNA, 75 bp, synthetic construct
  source 1..75: mol_type = other DNA
attctgctgagttaaaactcacagtagtaaaagaagtcgtggatgacggtttttctgttcgtgaagtaacggtaa

SEQ ID NO: 860696 - DNA, 75 bp, synthetic construct
  source 1..75: mol_type = other DNA
gatggcatcagcatgacctttgccgactggcgctttaacctgcgctcttccaacaccgaaccggtggtgcgcctg

SEQ ID NO: 860697 - DNA, 75 bp, synthetic construct
  source 1..75: mol_type = other DNA
tgtcttttatcaacccgttcatccttattctatcggtttgctcaacgcggtgccgcgtctcgatgcggaaggtga

SEQ ID NO: 860698 - DNA, 75 bp, synthetic construct
  source 1..75: mol_type = other DNA
cgacgggtgaacgcaacacctggacgctgctgccgcgtgagcgcgtgttgtgtattgccgatgatgagcaggatg

SEQ ID NO: 860699 - DNA, 75 bp, synthetic construct
  source 1..75: mol_type = other DNA
tcaatatcgttggttcacaaaagaaactgggcgatgcctgcgaagtttcacagcaggccgtctataagtggcttc

SEQ ID NO: 860700 - DNA, 75 bp, synthetic construct
  source 1..75: mol_type = other DNA
gggtgtagctcaggatgaaaagggcggatataccgtaccagaaacattcctggcgaaagttgttgagaagatgaa

SEQ ID NO: 860701 - DNA, 75 bp, synthetic construct
  source 1..75: mol_type = other DNA
gtttgaagagtcagtgcggatgctcgatgcggtaaaaatgccggaagcgcgtaaacgcatgaagatgttcccgca

SEQ ID NO: 860702 - DNA, 75 bp, synthetic construct
  source 1..75: mol_type = other DNA
gggtggagaaaataatattagtacaaggcaatggcggcccaaaaaatcctgataagttgataactcccgagattt

SEQ ID NO: 860703 - DNA, 75 bp, synthetic construct
  source 1..75: mol_type = other DNA
gacatactaaaaggatcaaacctgcttattttgttcaatgtgctactcctacagtaaaacatcccagtcagtttg

SEQ ID NO: 860704 - DNA, 75 bp, synthetic construct
  source 1..75: mol_type = other DNA
ggttcgtgtttctattcgtacagcacccaatctactaccgccgtgcgagcagccattgctttcgatgagcaataa

SEQ ID NO: 860705 - DNA, 75 bp, synthetic construct
  source 1..75: mol_type = other DNA
cagccagaagaacgggaactgtcgctttatgcctcccacggagtggctgtgctgcaacatggagcactctggcta

SEQ ID NO: 860706 - DNA, 75 bp, synthetic construct
  source 1..75: mol_type = other DNA
atcaatctctccccacacaatcagcaacaaatatgttttgcaggaaaacgcgcaagcggttgagattcagttgca

SEQ ID NO: 860707 - DNA, 75 bp, synthetic construct
  source 1..75: mol_type = other DNA
taacgatgaactgttcgggatcatctataccgttgacgaaggtgacgactggaccgacccgcaggtgctggaaaa

SEQ ID NO: 860708 - DNA, 75 bp, synthetic construct
  source 1..75: mol_type = other DNA
cgaaaaaagcggctaaccgttttgcggtgccaccaccaccccgactggtggtgaataatgataatgagggcaacg

SEQ ID NO: 860709 - DNA, 75 bp, synthetic construct
  source 1..75: mol_type = other DNA
gcgtaatcagaactatttaatgactgcctacgggcgaaatgtaggccggataagacgtttaccgcatccggcagt

SEQ ID NO: 860710 - DNA, 75 bp, synthetic construct
  source 1..75: mol_type = other DNA
aatcgcgactgatacattgccagccgcgtaatcagaactatttaatgaccgcctacgggcgaaatgtaggccgga

SEQ ID NO: 860711 - DNA, 75 bp, synthetic construct
  source 1..75: mol_type = other DNA
ctggtattgaatatatggaggatggtcttcccgatccggtgaaagcgatggggcgtcttctggtggagaacatta

SEQ ID NO: 860712 - DNA, 75 bp, synthetic construct
  source 1..75: mol_type = other DNA
gaacacaaaatcgctcataaggtgttcgccatgaacaaacctctgctgatttttcatgcgactgaagatgatacc

SEQ ID NO: 860713 - DNA, 75 bp, synthetic construct
  source 1..75: mol_type = other DNA
tcaactactggggggaaagactaacgataaattgagaacttacgccagtcagttacaatttggttggggcgaaaa

SEQ ID NO: 860714 - DNA, 75 bp, synthetic construct
  source 1..75: mol_type = other DNA
gacctgaaccccgtcaccatcattcagaactacaccaacatgtccgatccgatgaaagagctggaagcggcgatt

SEQ ID NO: 860715 - DNA, 75 bp, synthetic construct
  source 1..75: mol_type = other DNA
ggcggaaaaaagtaagtcgtttcgttaccgcttcgacaaggacctggctgaacgggccgcgaaatttattcagct

SEQ ID NO: 860716 - DNA, 75 bp, synthetic construct
  source 1..75: mol_type = other DNA
ggcttagaatttacgtcgatgatcaggccaggcgtctggtggtcgagcgtcgctatccggaatattcgctggaag

SEQ ID NO: 860717 - DNA, 75 bp, synthetic construct
  source 1..75: mol_type = other DNA
tccggaacctgcaggcccgctacggggccagcgagtggcaggtctgttttgcgctgcgggtcagccacagttcgt

SEQ ID NO: 860718 - DNA, 75 bp, synthetic construct
  source 1..75: mol_type = other DNA
gtaatccctcaaaactttcatccgcaagagtttgttagctggacgccaaactggtttattgccagagattggggc

SEQ ID NO: 860719 - DNA, 75 bp, synthetic construct
  source 1..75: mol_type = other DNA
ttgaacaaccagacaatgacttttacccctgaacaattacgcaaacaggcgcaggaaatgttgcgacaggcggaa

SEQ ID NO: 860720 - DNA, 75 bp, synthetic construct
  source 1..75: mol_type = other DNA
aggatacgctccgcaagcagcttactccggcgctgcgtgatctgctgctggcaaaacaccgcacacaaaaggcgg

SEQ ID NO: 860721 - DNA, 75 bp, synthetic construct
  source 1..75: mol_type = other DNA
acagaatgcgcgggtgcgcatggtatcgggacaggtggtcagcggcgttgttgatgcagatgggaatattcttat

SEQ ID NO: 860722 - DNA, 75 bp, synthetic construct
  source 1..75: mol_type = other DNA
agctggaagctggcaatgtcaaactgaaacgcggacggctggacaccttgccaccgcgtacggtgctggatatca

SEQ ID NO: 860723 - DNA, 75 bp, synthetic construct
  source 1..75: mol_type = other DNA
gattttatcggtcatcaaggtttaacttttgattatagcaatgggtatttagtttcttcggctggtgatgcattt

SEQ ID NO: 860724 - DNA, 75 bp, synthetic construct
  source 1..75: mol_type = other DNA
atttgattgcggaacacatcatcgagctggcgcacagcctggggttaaaaacgatcgctgaaggcgtcgaaactg

SEQ ID NO: 860725 - DNA, 75 bp, synthetic construct
  source 1..75: mol_type = other DNA
ctcagggattgtatccaaatcatgtctggggcatggattttgtctctgacgccttatttgacgggcgccggctac

SEQ ID NO: 860726 - DNA, 75 bp, synthetic construct
  source 1..75: mol_type = other DNA
ataatcacaagcgtgtttaccggctttaccgcgagcagggattatcgctgcggctgaaacgcccccgccgcaata

SEQ ID NO: 860727 - DNA, 75 bp, synthetic construct
  source 1..75: mol_type = other DNA
ccggaaatcagggacaggtgatgaacccggcagagtttattcctctggcggaaaaagaaggaatgattgaacagg

SEQ ID NO: 860728 - DNA, 75 bp, synthetic construct
  source 1..75: mol_type = other DNA
gtaccgctctcccaaacgaaaattacagcgcgcactcggaaaacggcaactctgtctttattaccaacccattat

SEQ ID NO: 860729 - DNA, 75 bp, synthetic construct
  source 1..75: mol_type = other DNA
aggagcaggttaactggctgcgcaaacgcggcgtgcgctattgccagggatggttctttgcgaaggcgatgccgc

SEQ ID NO: 860730 - DNA, 75 bp, synthetic construct
  source 1..75: mol_type = other DNA
gcattactatggatgcctttctgcgtgatttcggcgtggaatttgccagtcgttaccaggggcttcgccatgatt

SEQ ID NO: 860731 - DNA, 75 bp, synthetic construct
  source 1..75: mol_type = other DNA
cgtatggtcaatacaagtaatccttcttcatattacacttttaaaaccgttagcgaatcttctgtaacagataca

SEQ ID NO: 860732 - DNA, 75 bp, synthetic construct
  source 1..75: mol_type = other DNA
agatatggggggggtaaaatgtatgggctagctagagcaggggttcggagcctaaatgtaagtatccaaattccc

SEQ ID NO: 860733 - DNA, 75 bp, synthetic construct
  source 1..75: mol_type = other DNA
aaactgattgattatcatgtcgccagcggtacttcggcgatcgtttctgttggcaccactggcgagtccgctacc

SEQ ID NO: 860734 - DNA, 75 bp, synthetic construct
  source 1..75: mol_type = other DNA
caagagccaattttccccatttgcgaagcaggagaaaacgataacgaagagccttatgtcagttttagtgttgcg

SEQ ID NO: 860735 - DNA, 75 bp, synthetic construct
  source 1..75: mol_type = other DNA
ttgtgcaatgagtttccgcgagtggctatcggtagttgtggcgactatgacgtaaagcgcccaactcttgcggta

SEQ ID NO: 860736 - DNA, 75 bp, synthetic construct
  source 1..75: mol_type = other DNA
aagcctgaaattcttcagttgctgaactctgtaaaagaacacattgcagagctggaccaggagattgctgttttc

SEQ ID NO: 860737 - DNA, 75 bp, synthetic construct
  source 1..75: mol_type = other DNA
agcgttaaatatcaaattaacactccgggaatacgcagatcatcaaaaagcaatggacgcgctggaagaaggtga

SEQ ID NO: 860738 - DNA, 75 bp, synthetic construct
  source 1..75: mol_type = other DNA
ggcagacactgttgcctgtcataaccggggcgtaatacttgaaggtgttgaaaatgaagcgttgttccgtattgc

SEQ ID NO: 860739 - DNA, 75 bp, synthetic construct
  source 1..75: mol_type = other DNA
gtgtaattgttctaactcaacatgatctgattaaatatagaaaaataaactctaactgcaaactgtttgataatc

SEQ ID NO: 860740 - DNA, 75 bp, synthetic construct
  source 1..75: mol_type = other DNA
acattgctgcaactaatcctctgataattacctttccggcgctggtcactacccttcacgattcaatgcgaccgc

SEQ ID NO: 860741 - DNA, 75 bp, synthetic construct
  source 1..75: mol_type = other DNA
caaaagcaacaattatctcttttacaaatttatatcaggcattagcatccgtttctaccggacataatgattact

SEQ ID NO: 860742 - DNA, 75 bp, synthetic construct
  source 1..75: mol_type = other DNA
gcaggagaaaacgataacgaagagccttatgtcagttttagtgttgcgccagatactgactcttatgagatgcca

SEQ ID NO: 860743 - DNA, 75 bp, synthetic construct
  source 1..75: mol_type = other DNA
gtggtgccattaaataccgtatatcaatcacagttcacatctttgtataaagaaatacagggaggtaaaattgac

SEQ ID NO: 860744 - DNA, 75 bp, synthetic construct
  source 1..75: mol_type = other DNA
tgccaatacaaaccccaatacttataacggtgcgacagcaagcttcggagctcgtttgtttgttgcttttgtcgc

SEQ ID NO: 860745 - DNA, 75 bp, synthetic construct
  source 1..75: mol_type = other DNA
gattgtgcctctgggtcgttgggttattcttgacgtcgttcgccaggtggcaaaatggcgagataaaggcatcaa

SEQ ID NO: 860746 - DNA, 75 bp, synthetic construct
  source 1..75: mol_type = other DNA
acttccgactcggaaattctgcttaatatcttcgccagcgaactggacaacttccgccactacccgctggaagcc

SEQ ID NO: 860747 - DNA, 75 bp, synthetic construct
  source 1..75: mol_type = other DNA
gggagaagcctctctgtcgacgctgagtcaaccggaattttatgatccagaaattgtcttctttgcagacaaact

SEQ ID NO: 860748 - DNA, 75 bp, synthetic construct
  source 1..75: mol_type = other DNA
gctatataaagacagtgatgtaactgccatcagctatggtgaagactcccctgtgaaaggaaatggcagtcaatg

SEQ ID NO: 860749 - DNA, 75 bp, synthetic construct
  source 1..75: mol_type = other DNA
cggagtggtttatctcgatttagacaattttaaaaaagtgaacgatgcctacgggcatttgtttggcgaccagct

SEQ ID NO: 860750 - DNA, 75 bp, synthetic construct
  source 1..75: mol_type = other DNA
tcaataagcgtgaatgggccgggaatgcgtctgcatggcatgacacacctgcggtagcccgcgatttatcgcacg

SEQ ID NO: 860751 - DNA, 75 bp, synthetic construct
  source 1..75: mol_type = other DNA
aatacagaaacgaatacgaacgtaacgaagaatcccctgtcaaagttgatgatattcaatcattaacctgtaccg

SEQ ID NO: 860752 - DNA, 75 bp, synthetic construct
  source 1..75: mol_type = other DNA
ggactaattcccccactggactttatttcctatgcggaagagtccggtctgattgtgcctctgggtcgttgggtt

SEQ ID NO: 860753 - DNA, 75 bp, synthetic construct
  source 1..75: mol_type = other DNA
attctcgacgtcgtgcgccaggtagcaaaatggcgagataaaggcattaatcttcgggttgcggtgaatgtctca

SEQ ID NO: 860754 - DNA, 75 bp, synthetic construct
  source 1..75: mol_type = other DNA
catcgcggattttgacccgcctgcgccaaccctttcgcatcggtttaatcgaagtttataccggctgttcaattg

SEQ ID NO: 860755 - DNA, 75 bp, synthetic construct
  source 1..75: mol_type = other DNA
tcgagtagataagtgtgttgaaaattttgtattcgtgtcaagggacacgctttcattatttctcccgatgctcaa

SEQ ID NO: 860756 - DNA, 75 bp, synthetic construct
  source 1..75: mol_type = other DNA
gaaaactgcaagaatgcaaacgaagctcactggcaaatacaacagttgaatgctccgaccgtcgatttaaattca

SEQ ID NO: 860757 - DNA, 75 bp, synthetic construct
  source 1..75: mol_type = other DNA
tgatccagcgttatattgatgcggaaatggctgtgctggatggaaaatccgtcacctttaatggtcagcagatga

SEQ ID NO: 860758 - DNA, 75 bp, synthetic construct
  source 1..75: mol_type = other DNA
tgcaacaggaatcctggtttgttggcaccagcaactatgatctggcgcgccgcctttccctgacgccaatgggaa

SEQ ID NO: 860759 - DNA, 75 bp, synthetic construct
  source 1..75: mol_type = other DNA
aaatggctatcaaaatatatttgtttaccataaaactcccgaatggtcttcacttactttggtgtcaatattagc

SEQ ID NO: 860760 - DNA, 75 bp, synthetic construct
  source 1..75: mol_type = other DNA
gaaagatgttcattccatggcctgattatgaagatggtaaaagtaaagatttgactaaaggaattgataaactgc

SEQ ID NO: 860761 - DNA, 75 bp, synthetic construct
  source 1..75: mol_type = other DNA
aatgtttattcaatccatttccccggatgttaagtgtgaacgtggaatggttgtttttaaatacaaaaaaggcga

SEQ ID NO: 860762 - DNA, 75 bp, synthetic construct
  source 1..75: mol_type = other DNA
ccgaaggacgcgagttgatcattctcgcctatgtgctgggtaccgatctcgatacgccatcgttagaacaacaaa

SEQ ID NO: 860763 - DNA, 75 bp, synthetic construct
  source 1..75: mol_type = other DNA
aagccggtggtggtctgcttcctcggtcgtggcgaaacgccagtggatgagcaggggctacagtttgcccgcggc

SEQ ID NO: 860764 - DNA, 75 bp, synthetic construct
  source 1..75: mol_type = other DNA
gttttccgataacgtctcagttgaagatgaactggcgctcaaacaactggcccacgaaaaagggctgctgatgat

SEQ ID NO: 860765 - DNA, 75 bp, synthetic construct
  source 1..75: mol_type = other DNA
gctggaacgcgcgcgcggctgccgtaaaccggtagtggtctgcttcctcggtcgtggcgaaacgcctgtggatga

SEQ ID NO: 860766 - DNA, 75 bp, synthetic construct
  source 1..75: mol_type = other DNA
ctgcgcctgcggtggcccgcaaagtgctggaacgcgcacgcgcctgccgcaagccggtggtggtctgcttcctcg

SEQ ID NO: 860767 - DNA, 75 bp, synthetic construct
  source 1..75: mol_type = other DNA
atcaacggcgcggcgctctgctttggtaacgccgtgcgtcgcggcaacatcggcattgttggcgcatccggcacc

SEQ ID NO: 860768 - DNA, 75 bp, synthetic construct
  source 1..75: mol_type = other DNA
ggggtactgacctggggattatttactgagatgctggataaaggtcagagcgtatttattaacaatgctaatctg

SEQ ID NO: 860769 - DNA, 75 bp, synthetic construct
  source 1..75: mol_type = other DNA
cgtcacgctggacagtcaggagcctgccacgggcaagcgctcgcatctggatagtgttttcgactttgcctgcgg

SEQ ID NO: 860770 - DNA, 75 bp, synthetic construct
  source 1..75: mol_type = other DNA
tctaccgatagcgacactcttggcgatgcctatgagtacctgatcggccagtttgcagcaggttcgggcaaaaag

SEQ ID NO: 860771 - DNA, 75 bp, synthetic construct
  source 1..75: mol_type = other DNA
ggttgttgccaatccgccattcagctatcgctgggaaccttcagaaacattagctgatgatgtgcgctttaaaaa

SEQ ID NO: 860772 - DNA, 75 bp, synthetic construct
  source 1..75: mol_type = other DNA
tgtttttcaggaagttgcgcaactatcgcagaataagaatcttcgctatgcagaaatgctacgtaaaagagcatt

SEQ ID NO: 860773 - DNA, 75 bp, synthetic construct
  source 1..75: mol_type = other DNA
cacgtaaagcgtatacggaggatgagatcacattagtgattgagtgggctttaacgcaatggcgtagccgtggcg

SEQ ID NO: 860774 - DNA, 75 bp, synthetic construct
  source 1..75: mol_type = other DNA
gtagaactactgacagaaacaaaaacacgtaaagcgtatacggaggatgagatcacattagtgattgagtgggct

SEQ ID NO: 860775 - DNA, 75 bp, synthetic construct
  source 1..75: mol_type = other DNA
tgaatgccatatcaactgggcctgggttgaaggcttccgccgggcacgggatgaaggctgcgaagaggcttatcg

SEQ ID NO: 860776 - DNA, 75 bp, synthetic construct
  source 1..75: mol_type = other DNA
aacgcgattttttcgccgcttgccgtgcccttcacaaggatgaaaccgatccggaactgatgtttcaggattatg

SEQ ID NO: 860777 - DNA, 75 bp, synthetic construct
  source 1..75: mol_type = other DNA
tgcaattctggttttggttcacacccattgtttatgtactgaattcattacctgcatgggcaaaaaatctgatga

SEQ ID NO: 860778 - DNA, 75 bp, synthetic construct
  source 1..75: mol_type = other DNA
tgcttatctttattcggtccagtaagctgcattttgctcgctggtcagaaatcgattttgaaacgtcaatgtgga

SEQ ID NO: 860779 - DNA, 75 bp, synthetic construct
  source 1..75: mol_type = other DNA
atgtccttacttgtaaaacctggcggttcaaagtattggcgatttcgtttccgttttggcggtaaacaacatttg

SEQ ID NO: 860780 - DNA, 75 bp, synthetic construct
  source 1..75: mol_type = other DNA
ttttcctgccggtcaccggaaagagcacaaaggaagtcgccgccggctccgctttacccggccatgcggggcatg

SEQ ID NO: 860781 - DNA, 75 bp, synthetic construct
  source 1..75: mol_type = other DNA
aaactgaaagaagcgataataaatggcagtttacaaaataatgatatctgtttactggccgaacgctggtctgcc

SEQ ID NO: 860782 - DNA, 75 bp, synthetic construct
  source 1..75: mol_type = other DNA
gatattattaccacaacattaacaccactgatgcttcaacggctgaaacataatatcaacgcatgggttaatgaa

SEQ ID NO: 860783 - DNA, 75 bp, synthetic construct
  source 1..75: mol_type = other DNA
ttgccagaccgctggcatggacttcgacagcacccaggcgcactccgcgctgtacgacaccgaacgcactgcggt

SEQ ID NO: 860784 - DNA, 75 bp, synthetic construct
  source 1..75: mol_type = other DNA
caaaataatgatatctgtttactggccgaacgctggtctgtcagtcatgaacatatcaaaagcgcactgctgtct

SEQ ID NO: 860785 - DNA, 75 bp, synthetic construct
  source 1..75: mol_type = other DNA
aaggccagaaaaataaactatgttctgggggcggtcagcattgccagtttctgcatcacgctgttccaggcctgt

SEQ ID NO: 860786 - DNA, 75 bp, synthetic construct
  source 1..75: mol_type = other DNA
ccttgcgccacctcttgggcgcgccgaacgtcaacagtttcaacggctattggtctggctggttgctaatgtcta

SEQ ID NO: 860787 - DNA, 75 bp, synthetic construct
  source 1..75: mol_type = other DNA
ctgcgagctgaacaaatctcaatgatttttcaggacccaatgacttcgttgaatccctatatgcgcgtcggtgag

SEQ ID NO: 860788 - DNA, 75 bp, synthetic construct
  source 1..75: mol_type = other DNA
aactaccgtaaaacactgcaaccgcaagctgacgcctctttctacatcagccgtgaagatctgcacgccgtgctg

SEQ ID NO: 860789 - DNA, 75 bp, synthetic construct
  source 1..75: mol_type = other DNA
gcgctgttcgccttaagtttacccatgcagggattgtggtggctgggcaagcgttctgtaacgccattaccccct

SEQ ID NO: 860790 - DNA, 75 bp, synthetic construct
  source 1..75: mol_type = other DNA
atgtcaacgccggataatcgttctgttaatttttttagcttgtttcgccggggacagcattactcaaagacgtgg

SEQ ID NO: 860791 - DNA, 75 bp, synthetic construct
  source 1..75: mol_type = other DNA
acggtctttgaaaaccgctttatgcatgtgccagagctgagccgtatgggcgcgcacgccgaaatcgaaagcaat

SEQ ID NO: 860792 - DNA, 75 bp, synthetic construct
  source 1..75: mol_type = other DNA
gctgttttgtgaaatcgtcaaccgctggaaacggctgggaggttggccgctgcctgccgccgaagccgaagaggt

SEQ ID NO: 860793 - DNA, 75 bp, synthetic construct
  source 1..75: mol_type = other DNA
ccctacgcaatggtaaaaagcgtaaagacgcaatgacctgggcggcggagtgtatgggttttccgctggccactg

SEQ ID NO: 860794 - DNA, 75 bp, synthetic construct
  source 1..75: mol_type = other DNA
ggcggcggaatgcatgggattcccgctggccacagaatttaatgcccagttgttcacagcctaccgcgctaaaag

SEQ ID NO: 860795 - DNA, 75 bp, synthetic construct
  source 1..75: mol_type = other DNA
gacttcaaaagtaatactgtatgtaaaaacagtattagtgaggatgttgcgcaggtgaaggatgtattccgtatt

SEQ ID NO: 860796 - DNA, 75 bp, synthetic construct
  source 1..75: mol_type = other DNA
gcgtatatggctggctaaatgctgacaacgatggtgtcagtcagatgattaaagatccacgtattgcggcagtca

SEQ ID NO: 860797 - DNA, 75 bp, synthetic construct
  source 1..75: mol_type = other DNA
tgagctgcatcatcaggtggagaaaaccctggcgcagggtgcgcgtttgttactgggcggggaaaagatggctgg

SEQ ID NO: 860798 - DNA, 75 bp, synthetic construct
  source 1..75: mol_type = other DNA
tgagaatcacacgcttcaaaaggtagatagtgcgccgtggttaggtgaagggaaagataaacgaacattaatcga

SEQ ID NO: 860799 - DNA, 75 bp, synthetic construct
  source 1..75: mol_type = other DNA
gactgttatctttgcactatgcgcacatgggggcctgggcatgaatggtttcaggataatgccacgaatatcagt

SEQ ID NO: 860800 - DNA, 75 bp, synthetic construct
  source 1..75: mol_type = other DNA
ctttcgccgattaccctgagcgttgggctcctgacgcacctgaacagttaaagaagaatgttattgaatatcgta

SEQ ID NO: 860801 - DNA, 75 bp, synthetic construct
  source 1..75: mol_type = other DNA
aaaatcatcatgatcgagactggcctgacctacaaacaggtcagacagctttaccaggatctggagagggacgga

SEQ ID NO: 860802 - DNA, 75 bp, synthetic construct
  source 1..75: mol_type = other DNA
atgaacataggaaaccgagtcagacaacttcgccaagcgaagaacatgaaaatcgccgatctcgctgaagcgata

SEQ ID NO: 860803 - DNA, 75 bp, synthetic construct
  source 1..75: mol_type = other DNA
accgcgaatggggaattaccagcgaaaacgaacaccggtttatggtctttggaaaggtcttaatcagtcagtcac

SEQ ID NO: 860804 - DNA, 75 bp, synthetic construct
  source 1..75: mol_type = other DNA
acaggtgattgccgccaacccgggtgaccaggtcgcgaagaatctgcaagcgaataactttgaacagctgggcta

SEQ ID NO: 860805 - DNA, 75 bp, synthetic construct
  source 1..75: mol_type = other DNA
acgcctgtggctcaggcactcgccgccgaagggcaaactaacgcggatgacacgctggttgtcgaagcatcaacg

SEQ ID NO: 860806 - DNA, 75 bp, synthetic construct
  source 1..75: mol_type = other DNA
gatcatggcagtcgtttttgcgtttgcctgcgcaggtttacttatctctttcatcctgccgcaaaaatggaccag

SEQ ID NO: 860807 - DNA, 75 bp, synthetic construct
  source 1..75: mol_type = other DNA
gatcctttccgcgctgatcggcgggatggtggcttgtggtagcgtgttattgcgctatgcgatggcatccagaaa

SEQ ID NO: 860808 - DNA, 75 bp, synthetic construct
  source 1..75: mol_type = other DNA
aaaatgaaagcggttgatgacaatgccagtaagaaaaaagatgaaccgtcactgtatacctcctggacgctaagt

SEQ ID NO: 860809 - DNA, 75 bp, synthetic construct
  source 1..75: mol_type = other DNA
tcttgttgagcagttaacaaaagcaggtaatgactccaacttattgatagtgttttatgttcagataatgcccga

SEQ ID NO: 860810 - DNA, 75 bp, synthetic construct
  source 1..75: mol_type = other DNA
tcctctggcgtcgcccagtaataatgaaattgatttacttaatctaattgaagttttatggcgggccaaaaaaac

SEQ ID NO: 860811 - DNA, 75 bp, synthetic construct
  source 1..75: mol_type = other DNA
cgattatatctctgctctggtggtgaaagagtcgatagaaaatgagcgcaatagactggagcttaaaacccagtt

SEQ ID NO: 860812 - DNA, 75 bp, synthetic construct
  source 1..75: mol_type = other DNA
cgacaaaatttccgtttacagcgcgcgtgtgaatatgggcaccaagctgggcgagaaaattgctcgcgaatggga

SEQ ID NO: 860813 - DNA, 75 bp, synthetic construct
  source 1..75: mol_type = other DNA
atccgccagatcatcggtgctgatgggcttatcttccaggatctaaacgatctgatcgaagccgttcgcgctgaa

SEQ ID NO: 860814 - DNA, 75 bp, synthetic construct
  source 1..75: mol_type = other DNA
gcgccgtaagtctgttcgtcgtaaactgaacgccaaccgcgctgagttccgcgataaaaacgttctgctggtcga

SEQ ID NO: 860815 - DNA, 75 bp, synthetic construct
  source 1..75: mol_type = other DNA
aaacctttaccaaactccgcgttcttgatctcgatgttaatatcgaccgtggcggtgcatttaacctgtttatca

SEQ ID NO: 860816 - DNA, 75 bp, synthetic construct
  source 1..75: mol_type = other DNA
taggacccaccgagattctcgcacgtcgtgtcgctcaagaactgggatggagtgttcccgacttcaaaggatatg

SEQ ID NO: 860817 - DNA, 75 bp, synthetic construct
  source 1..75: mol_type = other DNA
gatgccgtaagctatggcattcataatgagaaggtacacattggttgcattaaatacagaaacgaatacgagctt

SEQ ID NO: 860818 - DNA, 75 bp, synthetic construct
  source 1..75: mol_type = other DNA
cgaaaatcgacgaactggatttgcatcgcgctattgtcgcattgagcgaaaaaatgaaagcggttgatgacaatg

SEQ ID NO: 860819 - DNA, 75 bp, synthetic construct
  source 1..75: mol_type = other DNA
atgcctgatgctgatgctggcgttgttttgtgtggtgttgatgtggtgactggcggaaatataagacaacaaaaa

SEQ ID NO: 860820 - DNA, 75 bp, synthetic construct
  source 1..75: mol_type = other DNA
agagaatgttggcgtgagagatttcaggatgctactgatgaccgggctagacagggagatacataaaatagagga

SEQ ID NO: 860821 - DNA, 75 bp, synthetic construct
  source 1..75: mol_type = other DNA
tgtgggggtgagagatttcaaaatgttactgatgaccgggctggacaaggtggttcataaaatggagaaaccgca

SEQ ID NO: 860822 - DNA, 75 bp, synthetic construct
  source 1..75: mol_type = other DNA
gaagtgattaaagggccgtccggcaccgactacgggcgcagcgcaccgactacgggcgcagcgcaccgacaggct

SEQ ID NO: 860823 - DNA, 75 bp, synthetic construct
  source 1..75: mol_type = other DNA
atgtctggtgctgacgctgatgatatgtgtggtgctgatatggtgagagtcagaaacaggaagcaaaaaattctt

SEQ ID NO: 860824 - DNA, 75 bp, synthetic construct
  source 1..75: mol_type = other DNA
tggggtattcctgtgtccgggagggctgggatttggttattgtggctctgagtgcagagcctgttgcgggctggg

SEQ ID NO: 860825 - DNA, 75 bp, synthetic construct
  source 1..75: mol_type = other DNA
tgtacgacaccgaacgcactgctgtgctgttttgtgaaatcgtcaaccgctggaaacgtctgggaggctggccac

SEQ ID NO: 860826 - DNA, 75 bp, synthetic construct
  source 1..75: mol_type = other DNA
actgctgcactggccgggctggcactcggacaaaccgtattgtcaaaggcttgccagacagctggcatggacttc

SEQ ID NO: 860827 - DNA, 75 bp, synthetic construct
  source 1..75: mol_type = other DNA
ttatcctgttgtgatcgatgttgaaacagccggatttaacgccaaaaccgatgcgctgcttgagattgccgccat

SEQ ID NO: 860828 - DNA, 75 bp, synthetic construct
  source 1..75: mol_type = other DNA
gtgctcctgacaggaacctgctggtatgagatgacagggctgtggcacctgttgtccgcacagggatacaacgtt

SEQ ID NO: 860829 - DNA, 75 bp, synthetic construct
  source 1..75: mol_type = other DNA
gttcgctggtggtattactggcactctacccgtgggtggaagtgaaatctaacagtagtccgtttgtgatgattt

SEQ ID NO: 860830 - DNA, 75 bp, synthetic construct
  source 1..75: mol_type = other DNA
ctgctgatgtgcacgatggatgatatgcgcttgtcagcgattctgctgccggtgtggattgtattcctgtttgtg

SEQ ID NO: 860831 - DNA, 75 bp, synthetic construct
  source 1..75: mol_type = other DNA
aaggcggcatatgacctggctaatggcaaatacaccgcacaggacgctaccactgcgcaaaaagggatagttcag

SEQ ID NO: 860832 - DNA, 75 bp, synthetic construct
  source 1..75: mol_type = other DNA
tgccaggattgatggcgggctggcacttggcacgaataacgcgttgggtgggaactctattgttcttggtgataa

SEQ ID NO: 860833 - DNA, 75 bp, synthetic construct
  source 1..75: mol_type = other DNA
cgccgtgctgaagaaaacctgtatatcattcctacacgagaaaatgagggtgaaaatggagatattgggccatta

SEQ ID NO: 860834 - DNA, 75 bp, synthetic construct
  source 1..75: mol_type = other DNA
acaaatctccgcctgatagaacgctctcaagctgtattcattgatgacgcgcaacgtgccgtatttaacgcatag

SEQ ID NO: 860835 - DNA, 75 bp, synthetic construct
  source 1..75: mol_type = other DNA
tggcgataccttgtccggtgggcttacttttgaaaacaactcaattcttgcctggattcgaaatactgactgggc

SEQ ID NO: 860836 - DNA, 75 bp, synthetic construct
  source 1..75: mol_type = other DNA
ttggcatctacatgattaataattcaaggacagccaatggcaccgatggtcaggcgtacatggataataacggaa

SEQ ID NO: 860837 - DNA, 75 bp, synthetic construct
  source 1..75: mol_type = other DNA
tttgaaaacgactcaatccttgcctggattcgaaatactgactgggcgaagattggatttaaaaatgatgccgat

SEQ ID NO: 860838 - DNA, 75 bp, synthetic construct
  source 1..75: mol_type = other DNA
ttgctactgcggcagacaggtttccgtattttacggggaatgatgttgccagcctggcgaccctgacaaaagtcg

SEQ ID NO: 860839 - DNA, 75 bp, synthetic construct
  source 1..75: mol_type = other DNA
caataggattgtatacaaataagggaacgttgtttgctgtatactcgcaagaacaagcaataataaataaagcat

SEQ ID NO: 860840 - DNA, 75 bp, synthetic construct
  source 1..75: mol_type = other DNA
caatccttgcctggattcgaaatactgactgggcgaagattggatttaaaaatgatgccgatggtgacactgatt

SEQ ID NO: 860841 - DNA, 75 bp, synthetic construct
  source 1..75: mol_type = other DNA
attaatggcagtcttggagttggtacaacgaatgcgttaggtggtagctcaattgttcttggtgataatgatacc

SEQ ID NO: 860842 - DNA, 75 bp, synthetic construct
  source 1..75: mol_type = other DNA
taagaatcattggtgaagtagatggcgatgatgaagccatcttcaggccgatacaaaagtacatcaatggcacat

SEQ ID NO: 860843 - DNA, 75 bp, synthetic construct
  source 1..75: mol_type = other DNA
ctgtgtggccgccattttcagcttggttcatgagtcaaaagatcgtctgcagaaagcgcaggaggcttacagtga

SEQ ID NO: 860844 - DNA, 75 bp, synthetic construct
  source 1..75: mol_type = other DNA
aagccagatggttaaccgtatcgcaaaattgcgtaaaaatcctcccgatacacttccgtggaaaactgttcgaga

SEQ ID NO: 860845 - DNA, 75 bp, synthetic construct
  source 1..75: mol_type = other DNA
gtgctggtggcttggctatgggttgcgaaattgctggttttgagcatcttgcagtcgttgaatgggataaatggg

SEQ ID NO: 860846 - DNA, 75 bp, synthetic construct
  source 1..75: mol_type = other DNA
gattcaaacccattaggaaacaaaatacatgcagtccaaaaaataaaattgtacagtaaaccaccgtacggtgct

SEQ ID NO: 860847 - DNA, 75 bp, synthetic construct
  source 1..75: mol_type = other DNA
aaccattcccccctcttcacaacaagagcaaaaaagtgatgaagagacaaaaaaaaacgcgatgaagttaataaa

SEQ ID NO: 860848 - DNA, 75 bp, synthetic construct
  source 1..75: mol_type = other DNA
attgtggtttcggcttttaccggggttattggtgggctcatcagcattgaaggtggcctgagtatttacatgata

SEQ ID NO: 860849 - DNA, 75 bp, synthetic construct
  source 1..75: mol_type = other DNA
atgcggatatggctgacgcgcaaaaaaccagaaaccacaccatccgatggcaaaccgagcgccacggagggatgg

SEQ ID NO: 860850 - DNA, 75 bp, synthetic construct
  source 1..75: mol_type = other DNA
atgaaaatcaccccgactatgccaggcaatcgcccgacagccacaacggcaggctccagccagccgcgtaaaagc

SEQ ID NO: 860851 - DNA, 75 bp, synthetic construct
  source 1..75: mol_type = other DNA
ccgggacacaatgtactccgaagttctaactcttattgcaggtttcgaatcaggtattgcacatgaattaaaaca

SEQ ID NO: 860852 - DNA, 75 bp, synthetic construct
  source 1..75: mol_type = other DNA
gatgaatgcgtcgaagggaataattggaagtatgcaaggtttaccaaccttgtgtatcaaagtattttccacgaa

SEQ ID NO: 860853 - DNA, 75 bp, synthetic construct
  source 1..75: mol_type = other DNA
gtaaggaagaagatgaacgcagtggaagtatttgcctgccaaacgtagctctttacgcggcaggctacaggaaat

SEQ ID NO: 860854 - DNA, 75 bp, synthetic construct
  source 1..75: mol_type = other DNA
ggcgatgctggcctctggcagtctacaagtggacaccgaacagttagccagcgacatgctgagttttttccagaa

SEQ ID NO: 860855 - DNA, 75 bp, synthetic construct
  source 1..75: mol_type = other DNA
ggcgatgctggcctccggcagcctgcaagtaaacaccgaacagttatccagcgacatgctgagctttttccagaa

SEQ ID NO: 860856 - DNA, 75 bp, synthetic construct
  source 1..75: mol_type = other DNA
ctacgcccctttacgcttaatctcagaactggtcgcataactatggggcatggtctggatgttacaggagatata

SEQ ID NO: 860857 - DNA, 75 bp, synthetic construct
  source 1..75: mol_type = other DNA
tggaaatggaggcgacggtcagtccggaaatatcggcgtcagcggtgaaggcggaacatcgcactggggtggcgg

SEQ ID NO: 860858 - DNA, 75 bp, synthetic construct
  source 1..75: mol_type = other DNA
gccagcctggcaaccctgacaaaagtcgggcgggatattcttgcgaaatcgaccgttgccgccgttatcgaatac

SEQ ID NO: 860859 - DNA, 75 bp, synthetic construct
  source 1..75: mol_type = other DNA
atgagtaccacaacacgtaaatttaaaaccgttatcaccgatacgggtgccaaaaaattagcgcaggcagccgcg

SEQ ID NO: 860860 - DNA, 75 bp, synthetic construct
  source 1..75: mol_type = other DNA
ataagcaatttggcatctacatgattaataactcaaggacagccaatggcaccgatggtcaggcatacatggata

SEQ ID NO: 860861 - DNA, 75 bp, synthetic construct
  source 1..75: mol_type = other DNA
ggcgggaatagcgtattcgcatcgttaattgctcctggtggcgaaggtggcgggaaagtgggtgttacaaacaca

SEQ ID NO: 860862 - DNA, 75 bp, synthetic construct
  source 1..75: mol_type = other DNA
taaaacaagcaaacaggaggttattcgttatcttggtttgggagatacaagcggatacgtgggacgccggctgag

SEQ ID NO: 860863 - DNA, 75 bp, synthetic construct
  source 1..75: mol_type = other DNA
aacgccgaaagcagtaaaggcagcatatgaccttgctaacgcaaaatataccgctcaggacgcaacgacggcacg

SEQ ID NO: 860864 - DNA, 75 bp, synthetic construct
  source 1..75: mol_type = other DNA
gcaaaaggctttgttcaacttagcagcgccactaacagcacgtctgaaacgcttgcggcaacgccaaaggctgtt

SEQ ID NO: 860865 - DNA, 75 bp, synthetic construct
  source 1..75: mol_type = other DNA
tgacaaaagtcgggcgagatattcttgcgaaatcgaccgttgccgccgttatcgaatatctcggtttacaggaaa

SEQ ID NO: 860866 - DNA, 75 bp, synthetic construct
  source 1..75: mol_type = other DNA
cacggcgatttaatcgcggtgggcaatactgccgaaagttacaagccaaccgttgccgaagggtccggacgtgca

SEQ ID NO: 860867 - DNA, 75 bp, synthetic construct
  source 1..75: mol_type = other DNA
ggtgggcttacttttgaaaacgactcaatccttgcctggattagaaatactgactgggcaaagattggttttaaa

SEQ ID NO: 860868 - DNA, 75 bp, synthetic construct
  source 1..75: mol_type = other DNA
taaatatggggcatggtctggatgttacaggagatataacaactaacgcatgggtgtacgcaaaccgccttgcaa

SEQ ID NO: 860869 - DNA, 75 bp, synthetic construct
  source 1..75: mol_type = other DNA
agcaatttggcatctacatgattaataactcaaggacagccaatggcaccgatggtcaggcgtacatggataata

SEQ ID NO: 860870 - DNA, 75 bp, synthetic construct
  source 1..75: mol_type = other DNA
aacgccgaaagcggttaaggccgcatatgaccttgctaacgggaaatataccgcacaggacgccaccaccgcgcg

SEQ ID NO: 860871 - DNA, 75 bp, synthetic construct
  source 1..75: mol_type = other DNA
cagataactcggtaatatttgctgttaacggtcagatgcaacccagcaactggggaaattttgattcccgctatg

SEQ ID NO: 860872 - DNA, 75 bp, synthetic construct
  source 1..75: mol_type = other DNA
cagatcgcaaacacggctttcgttatggccgcgattgccgcccttgtagactcgtcgcctgacgcactgaatacg

SEQ ID NO: 860873 - DNA, 75 bp, synthetic construct
  source 1..75: mol_type = other DNA
gcgccactaacagcacatctgaaacgctggctgcgacgccaaaagctgttaaggcggtaatggatgaaacgaaca

SEQ ID NO: 860874 - DNA, 75 bp, synthetic construct
  source 1..75: mol_type = other DNA
ggcttgctactgcggcagacaagtttccgtattttacggggaatgatgtcgccagcctggcaaccctgacaaaag

SEQ ID NO: 860875 - DNA, 75 bp, synthetic construct
  source 1..75: mol_type = other DNA
ccaaatggcatcatttttcaatggtgttgggggaatactgatgccagtggctgggcacctgccccgtttcctgtt

SEQ ID NO: 860876 - DNA, 75 bp, synthetic construct
  source 1..75: mol_type = other DNA
aaaccgttatcaccgatacgggtgcaaaaaaattagcgcaggcagccgcgccagatggtaagcctgttcgcctga

SEQ ID NO: 860877 - DNA, 75 bp, synthetic construct
  source 1..75: mol_type = other DNA
gattccgttcccggcgttaataccaaagggaatcaggacacctctggtaatgcggctacagcgaccaaattgcag

SEQ ID NO: 860878 - DNA, 75 bp, synthetic construct
  source 1..75: mol_type = other DNA
acgctggacacgttgaaagaaatagccgcagccattaacaatgatccgaatttcagtaccaccattaacaatgcg

SEQ ID NO: 860879 - DNA, 75 bp, synthetic construct
  source 1..75: mol_type = other DNA
aacaactccacaaagaatgcaacgtttaatttatggggtgcttcaacccgtccagtagttgcagagttaggcgat

SEQ ID NO: 860880 - DNA, 75 bp, synthetic construct
  source 1..75: mol_type = other DNA
atggagacggtattctggatgtttatgctaatagtcagcgtgtattccgctttcagaatggagtggctattgctt

SEQ ID NO: 860881 - DNA, 75 bp, synthetic construct
  source 1..75: mol_type = other DNA
atctcaacgatgattcacgctttggtcatgttgatatggtcaatgcgatccgatcgccaggatcggtgctcaaac

SEQ ID NO: 860882 - DNA, 75 bp, synthetic construct
  source 1..75: mol_type = other DNA
aatcgaaaaaattgacattattattaccgatgatgctgtgtcagaggtggataaactggcattgcagaagacgcg

SEQ ID NO: 860883 - DNA, 75 bp, synthetic construct
  source 1..75: mol_type = other DNA
atgaacatgcgtaatattaatattattactgcacgctctgtaccggataaaagcgtatcagatgattttatacat

SEQ ID NO: 860884 - DNA, 75 bp, synthetic construct
  source 1..75: mol_type = other DNA
tgggccttgggctgctggcgctcgccccgctggcattcgcccagggcggagatattgcgctgcttaacgtggtga

SEQ ID NO: 860885 - DNA, 75 bp, synthetic construct
  source 1..75: mol_type = other DNA
cgagtacgactggctgagctcagacgccgctgtggatgaggtcctgctcatcaacgaatacacctttaccgaagc

SEQ ID NO: 860886 - DNA, 75 bp, synthetic construct
  source 1..75: mol_type = other DNA
cagcggtagctggtatctgatcgcgttacagaagggaaaactgcaggtctttcctctggcagatatcaaatcagt

SEQ ID NO: 860887 - DNA, 75 bp, synthetic construct
  source 1..75: mol_type = other DNA
attaatgccgatttaatgtttgtcggtgctgatggtattgatgcggttaatggtattacgacctttaatgaaggt

SEQ ID NO: 860888 - DNA, 75 bp, synthetic construct
  source 1..75: mol_type = other DNA
tgccgaagatgctgtcattgatatgtatggacgcggtagcattggcatgttagccatcgataactcaacggcgga

SEQ ID NO: 860889 - DNA, 75 bp, synthetic construct
  source 1..75: mol_type = other DNA
acgatcagtggtgatctgcaactaggatatgcaagccttatccagttaaaaaataaagcagctattgagattggc

SEQ ID NO: 860890 - DNA, 75 bp, synthetic construct
  source 1..75: mol_type = other DNA
gacagcaccatcagcaacggcggcaccggcacacagattaacggtgatgacgccacggcaaacaacaacggcaaa

SEQ ID NO: 860891 - DNA, 75 bp, synthetic construct
  source 1..75: mol_type = other DNA
taatgaaggttattcgattagcggtgctatggtcaccgcagcaaataaagtggttgcggtactggactcaacgaa

SEQ ID NO: 860892 - DNA, 75 bp, synthetic construct
  source 1..75: mol_type = other DNA
cttgatggcggcaccggaacccgcattacgggtgatgatgcgacggccaacaacagtggcaataccaccgttgat

SEQ ID NO: 860893 - DNA, 75 bp, synthetic construct
  source 1..75: mol_type = other DNA
aacgagtacgactggctgacctcagacgccgctgtggatgaggccctgctcatcaacgaatacaccttcaccgaa

SEQ ID NO: 860894 - DNA, 75 bp, synthetic construct
  source 1..75: mol_type = other DNA
gccgatacgactgttgtgattaatgatgttttcaaaggtgaaaatatttccggggctgagaatatttcttcttcc

SEQ ID NO: 860895 - DNA, 75 bp, synthetic construct
  source 1..75: mol_type = other DNA
atgctgcaccggaagttgcaaacggtctggccttcaacgtggtagcgaaaggcgacccgcgtgctgaactgggaa

SEQ ID NO: 860896 - DNA, 75 bp, synthetic construct
  source 1..75: mol_type = other DNA
ggtcagggttcgaccggaactgaaatcgcgggtaacaacgcggtggtgaaccaggacggcgagctggatgtgagc

SEQ ID NO: 860897 - DNA, 75 bp, synthetic construct
  source 1..75: mol_type = other DNA
acaaagccatcgtcaacaacgacggtgacagcacgatccttgatggcggcaccggaacccgcattacgggtgatg

SEQ ID NO: 860898 - DNA, 75 bp, synthetic construct
  source 1..75: mol_type = other DNA
tggctaaacggttgaagtcagagggatcgctgactgaacgggaaaaagtgcactttatgcagaatatccaacagc

SEQ ID NO: 860899 - DNA, 75 bp, synthetic construct
  source 1..75: mol_type = other DNA
aggctgaaatgctggataaactcatcttatcagctgatcgtctgtttatgcagaaaacagcaggggattattccc

SEQ ID NO: 860900 - DNA, 75 bp, synthetic construct
  source 1..75: mol_type = other DNA
cactgctattaacgataaaactggcgtgattaatattaatgtcgataccggccaggcgttttataacgacggtac

SEQ ID NO: 860901 - DNA, 75 bp, synthetic construct
  source 1..75: mol_type = other DNA
gtagccaggagaatatttctgggcttaccgtgtctggcgatggtaacaccgtcaatttgaatggcggcattcagt

SEQ ID NO: 860902 - DNA, 75 bp, synthetic construct
  source 1..75: mol_type = other DNA
aatggttcagataccgcaggcgataatggtgtgacaggcggttacagccagttcttcggtctgaaacaccagatg

SEQ ID NO: 860903 - DNA, 75 bp, synthetic construct
  source 1..75: mol_type = other DNA
gatcgcaggtaataacgccaccgttactcaggaaggtgaactcacggttagcagcggcggccgcggtatcgacat

SEQ ID NO: 860904 - DNA, 75 bp, synthetic construct
  source 1..75: mol_type = other DNA
tgaatggaatgaagatggaaggatctggatcctggatttctgttgtaaaccaggctttggtcgaaaagttattga

SEQ ID NO: 860905 - DNA, 75 bp, synthetic construct
  source 1..75: mol_type = other DNA
cgacgctgcgtactgacctcccttccagcacggctatagattacggtgttggtatggccaccggaacgaatagtg

SEQ ID NO: 860906 - DNA, 75 bp, synthetic construct
  source 1..75: mol_type = other DNA
cgaataatgccgggaaaatcacgctggatacgctttgggtcgatcaaaacgacaccacgacgctgcgtactgacc

SEQ ID NO: 860907 - DNA, 75 bp, synthetic construct
  source 1..75: mol_type = other DNA
ccatcggtattcagatcgacggcgacaaggccatcgtcaataacgaaggcgacagcaccatcagcaacggcggca

SEQ ID NO: 860908 - DNA, 75 bp, synthetic construct
  source 1..75: mol_type = other DNA
tgctggcactgcgtaaaaccatcgacctgagcgaaagccagacgatgagtctggagtacggtatcgcgcgcctcg

SEQ ID NO: 860909 - DNA, 75 bp, synthetic construct
  source 1..75: mol_type = other DNA
attccactggcacggaaatcaacggtaataacgggaaagtgattcaggacggcgatctggatgtcagcggcggcg

SEQ ID NO: 860910 - DNA, 75 bp, synthetic construct
  source 1..75: mol_type = other DNA
ccactacggttagcctaacgccgggaagtgatgcagttgatggcggcatgaataatctcaacggttacgtggtgg

SEQ ID NO: 860911 - DNA, 75 bp, synthetic construct
  source 1..75: mol_type = other DNA
gaataacactgttgcccttgaaggggtgagcgcagatggcgcaacgaagtggcaatacaatcacaacggtgagct

SEQ ID NO: 860912 - DNA, 75 bp, synthetic construct
  source 1..75: mol_type = other DNA
cgccacggcgaataacacgggcaaaaccaccgttgacggcaaagattccaccggcacggaaatcaacggcaataa

SEQ ID NO: 860913 - DNA, 75 bp, synthetic construct
  source 1..75: mol_type = other DNA
ttataatgaagccggctcaacgcttataaatagcggcaatgctattgcgggaggggaaaatgccatcgttaatat

SEQ ID NO: 860914 - DNA, 75 bp, synthetic construct
  source 1..75: mol_type = other DNA
gcctcatctacatataaaaattattcatactcttatccgtcatcttctcttcatagttcaatccctaaatcctct

SEQ ID NO: 860915 - DNA, 75 bp, synthetic construct
  source 1..75: mol_type = other DNA
acactggacagtatcccccaaggagaacgtagccgacttaaccgggccgcactgactgcaggtctggccttatac

SEQ ID NO: 860916 - DNA, 75 bp, synthetic construct
  source 1..75: mol_type = other DNA
gccgaagttctcaggagaaccccgctgacccggcggcgtgtttgccgttgttccgtgtcagtggtggcgcattat

SEQ ID NO: 860917 - DNA, 75 bp, synthetic construct
  source 1..75: mol_type = other DNA
tgcgataataaatgcgtcttccggttcccaggtcatcaatgaaggggatgtcgatgtagcgaatattaaatttat

SEQ ID NO: 860918 - DNA, 75 bp, synthetic construct
  source 1..75: mol_type = other DNA
aggcaaataccttaaccaacggagaggatattgcctccgcacgtaagggaagcggctccactcctcttattaagg

SEQ ID NO: 860919 - DNA, 75 bp, synthetic construct
  source 1..75: mol_type = other DNA
ccggaaaaaaaagggaacagcagggagaaggtgtattacctctccgtctcatttatcccccggcagcatcagaag

SEQ ID NO: 860920 - DNA, 75 bp, synthetic construct
  source 1..75: mol_type = other DNA
tatatctgaatggtgactcaacgatcagtggtgatctgcagctaggatatgcaagccttatccagttaaaaaata

SEQ ID NO: 860921 - DNA, 75 bp, synthetic construct
  source 1..75: mol_type = other DNA
gattcgcgtcgttggagatgatggtctgatttctctggctggccgtgtggatgtaggggattattcaaccggtct

SEQ ID NO: 860922 - DNA, 75 bp, synthetic construct
  source 1..75: mol_type = other DNA
ttacaggcggctacagccagttctttggcctgaagcatcagatgtcctttgacaacggtatgagctggaataacg

SEQ ID NO: 860923 - DNA, 75 bp, synthetic construct
  source 1..75: mol_type = other DNA
tgcaaggcagcaacctgaccgatgcgcaagcgatcacttcgacatctgttgtctggcaggcgacaggcagtaccg

SEQ ID NO: 860924 - DNA, 75 bp, synthetic construct
  source 1..75: mol_type = other DNA
ttcatgggcgtttggtggttccactaaagcgattgtgaataatgggataatcaacctgttgtgtaatattggttg

SEQ ID NO: 860925 - DNA, 75 bp, synthetic construct
  source 1..75: mol_type = other DNA
agcgaaacggcggtggacagcatcgttgggctgaagctggactacgcaggcaaagacggctggagtgcgaacgcc

SEQ ID NO: 860926 - DNA, 75 bp, synthetic construct
  source 1..75: mol_type = other DNA
cgggcaggcgttctataacgatggcagcgggactattgttaattacgggaccatctgtacttttggtatttgcca

SEQ ID NO: 860927 - DNA, 75 bp, synthetic construct
  source 1..75: mol_type = other DNA
acggcggcgtagttgataacgcaggtacaattaacaacattgatgttaacggcggcacgctgaataacgacggta

SEQ ID NO: 860928 - DNA, 75 bp, synthetic construct
  source 1..75: mol_type = other DNA
cgtgaccggtggttacagccagttctttggcctgcaatatcagatgtcctttgagaatggcgtgaactggaataa

SEQ ID NO: 860929 - DNA, 75 bp, synthetic construct
  source 1..75: mol_type = other DNA
tctgtcgttgccagcgccagtaacgcagcagcgaccgacgcgttcttctggaacatgggcgaaggcgagattaat

SEQ ID NO: 860930 - DNA, 75 bp, synthetic construct
  source 1..75: mol_type = other DNA
aggtacaaccgttgcgggttctgttatcaacaactccggcactatcaacactgttgaacaatgggccagtacgtt

SEQ ID NO: 860931 - DNA, 75 bp, synthetic construct
  source 1..75: mol_type = other DNA
aaatatcctgtccggcaaatattcacatattaaataaagaacagcttgagaatttaccggcagaatgtagagatc

SEQ ID NO: 860932 - DNA, 75 bp, synthetic construct
  source 1..75: mol_type = other DNA
gtcgcgacagatggcagtgtgaatgatgtggcgaaggcgctggacgcgggctacaccaacaacgagctgtacacc

SEQ ID NO: 860933 - DNA, 75 bp, synthetic construct
  source 1..75: mol_type = other DNA
tctggagtacctgtcgcagctgccgcaaagcgaagccgtggaaggtttgaaagatatcgcgccgattctggcatt

SEQ ID NO: 860934 - DNA, 75 bp, synthetic construct
  source 1..75: mol_type = other DNA
cctcccggaagttcagcccggtcagctaccgcgcacacggcctgcctgtgtcagaaaatctgttggagcaggatt

SEQ ID NO: 860935 - DNA, 75 bp, synthetic construct
  source 1..75: mol_type = other DNA
atgctagatagcactcgcgaaaaaattaggcagaaatacactcaggctgaaataggtcgttatatgggggtcgct

SEQ ID NO: 860936 - DNA, 75 bp, synthetic construct
  source 1..75: mol_type = other DNA
attatatcgaatgtgattacattcgttggcggcggcacagttggtgtggcggtctcattcaggaacaatttgaaa

SEQ ID NO: 860937 - DNA, 75 bp, synthetic construct
  source 1..75: mol_type = other DNA
attatatcgaatgtgattacattcgatggcggcggcacagttggtgtggcggtctcagtcaggaacaatttgaaa

SEQ ID NO: 860938 - DNA, 75 bp, synthetic construct
  source 1..75: mol_type = other DNA
aatctgcgtggaagtatgagcgcaaaaggttgctgctacgataatgcctgcgtggaaagcttctttcattcgctg

SEQ ID NO: 860939 - DNA, 75 bp, synthetic construct
  source 1..75: mol_type = other DNA
gccctgatatttatcccaacccaaccgacggcttgcctgctgagtttcaggctaacacacagcaagtggcgggag

SEQ ID NO: 860940 - DNA, 75 bp, synthetic construct
  source 1..75: mol_type = other DNA
tttcattcgctgaaagtggaatgtatccatggagaacactttatcagccgggaaataatgcgggcaacggtgttt

SEQ ID NO: 860941 - DNA, 75 bp, synthetic construct
  source 1..75: mol_type = other DNA
tatatcgaatgtgattacaatcgctggcgacggcacagttggtgtggcggtctcagtccggaacaatttgaaaac

SEQ ID NO: 860942 - DNA, 75 bp, synthetic construct
  source 1..75: mol_type = other DNA
aacatcaggctgagttcagcatcaaagcaatgtgccgcgtgctccgggtggcccgcagcggctggtatacgtggt

SEQ ID NO: 860943 - DNA, 75 bp, synthetic construct
  source 1..75: mol_type = other DNA
taatgcctgcgtggaaagcttctttcattcgctgaaagtggaatgtatccatggagaacactttatcagccggga

SEQ ID NO: 860944 - DNA, 75 bp, synthetic construct
  source 1..75: mol_type = other DNA
ggctggtcaatgtcgccacgcatgacggcgcaactggcctgcgatgccctgcagatggcgctgtggcggcgtaag

SEQ ID NO: 860945 - DNA, 75 bp, synthetic construct
  source 1..75: mol_type = other DNA
attatatcgaatgtgattacattcgttggcggcggcacagttggtgtggcggtctcagtctggaacaatttgaaa

SEQ ID NO: 860946 - DNA, 75 bp, synthetic construct
  source 1..75: mol_type = other DNA
ttgcgctattgcaacccacgctgcacgaccccatcccgccgcatctgattgaaagcctgaccgttgatacccttc

SEQ ID NO: 860947 - DNA, 75 bp, synthetic construct
  source 1..75: mol_type = other DNA
cgacgatccagcgctacgactggcgctctgcgggcggcttcacgcggctcttgcgctactgcaacccacactaca

SEQ ID NO: 860948 - DNA, 75 bp, synthetic construct
  source 1..75: mol_type = other DNA
tgcagatggcgctgtggcggcgtaagaggccccggaacgttatcgttcacacggaccgtggaggccagtactgtt

SEQ ID NO: 860949 - DNA, 75 bp, synthetic construct
  source 1..75: mol_type = other DNA
cgagcaagcgcgtaagctagtcgcagatggagttagtccgacacaggcccgtcagttagataaaatccgcaaggt

SEQ ID NO: 860950 - DNA, 75 bp, synthetic construct
  source 1..75: mol_type = other DNA
acagcacctttttccgggcagggataatccgaaaggtccaatgacatcgcactccctgcgccagctacttaaaag

SEQ ID NO: 860951 - DNA, 75 bp, synthetic construct
  source 1..75: mol_type = other DNA
catttcatcagtttttgagttggcagtcgcgacgcttagagctgatagcgatcccgtatggcctgtgcgcaaggc

SEQ ID NO: 860952 - DNA, 75 bp, synthetic construct
  source 1..75: mol_type = other DNA
attatatcgaatgtgattacattcggtggcggcggcacagttggtgtggcggtctcattctggaacaatttgaaa

SEQ ID NO: 860953 - DNA, 75 bp, synthetic construct
  source 1..75: mol_type = other DNA
attatatcgaatgtgattacattcggtggcggcggcacagttggtgtggcggtctcaatcaggaacaatttgaaa

SEQ ID NO: 860954 - DNA, 75 bp, synthetic construct
  source 1..75: mol_type = other DNA
attatatcgaatgtgattacattcgctggcggcggcacagttggtgtggcggtctcagtccggaacaatttgaaa

SEQ ID NO: 860955 - DNA, 75 bp, synthetic construct
  source 1..75: mol_type = other DNA
agcttctttcattcgctgaaagtggaatgtatccatggagaacactttatcagccgggaaataatgcgggcaacg

SEQ ID NO: 860956 - DNA, 75 bp, synthetic construct
  source 1..75: mol_type = other DNA
attatatcgaatgtgattacattcggtggcggcggcacagttggtgtggcggtctcagtcgggaacaatttgaaa

SEQ ID NO: 860957 - DNA, 75 bp, synthetic construct
  source 1..75: mol_type = other DNA
attatatcgaatgtgattacattcggtggcggcggcacagttggtgtggcggtctcactccggaacaatttgaaa

SEQ ID NO: 860958 - DNA, 75 bp, synthetic construct
  source 1..75: mol_type = other DNA
acttgcgtaccgatgagggctggttgtatctcgcagtagtcatcgacctgtggtcacgcgccgttaatggctggt

SEQ ID NO: 860959 - DNA, 75 bp, synthetic construct
  source 1..75: mol_type = other DNA
aacgtgctgtcaggctgaatatggcaacagatgaggaacgtacacgactggaagcctgggaacgctacagcgttc

SEQ ID NO: 860960 - DNA, 75 bp, synthetic construct
  source 1..75: mol_type = other DNA
cacagatcccgtgctgcctgtctttcagaacgaagccagacaacaaaaacgtgggctctggtcagatgctgatcc

SEQ ID NO: 860961 - DNA, 75 bp, synthetic construct
  source 1..75: mol_type = other DNA
ccggttcccccctggatatggagacaccgtaaataaagcgatggcaatcttatcattcatctcttctcagcggga

SEQ ID NO: 860962 - DNA, 75 bp, synthetic construct
  source 1..75: mol_type = other DNA
gaagcatgggaacgctacagtgttctggtcagccgtgtggatacggcagatcccgaatggccacaaaagcctgaa

SEQ ID NO: 860963 - DNA, 75 bp, synthetic construct
  source 1..75: mol_type = other DNA
ctcctcgtgctcattcctgctggcgcgctggctgggacgtgatttactgctgaaatacgttggccatagccatac

SEQ ID NO: 860964 - DNA, 75 bp, synthetic construct
  source 1..75: mol_type = other DNA
gaaatggatgtttaaggatggtgccgtgattaagcggatttatacggcagacgaacagcaacaacaggcagaatc

SEQ ID NO: 860965 - DNA, 75 bp, synthetic construct
  source 1..75: mol_type = other DNA
gaagcctgggaacgctacagcgttctggtcagccgtgtggatacagcaaagcccgaatggccacaaaagcctgag

SEQ ID NO: 860966 - DNA, 75 bp, synthetic construct
  source 1..75: mol_type = other DNA
aaagtggctgtttaaggacggagctgtggttaaacggatttatacggcagacgagcagcaacagcaggccgaatt

SEQ ID NO: 860967 - DNA, 75 bp, synthetic construct
  source 1..75: mol_type = other DNA
ctgcagggagaagctcgacagcagaaacgtggtctgtgggcagacagcgctcctgttccgccctgggtatggcgc

SEQ ID NO: 860968 - DNA, 75 bp, synthetic construct
  source 1..75: mol_type = other DNA
gaggcatgggaacgctacagcgttctggtcagtcgtgtggatcctgcaaatcctgaatggccggaactaccacaa

SEQ ID NO: 860969 - DNA, 75 bp, synthetic construct
  source 1..75: mol_type = other DNA
acagagtggatgctctttgcgcagaaagtcgaatctacagacacttccagcttgccagtaacgtttcccgaacaa

SEQ ID NO: 860970 - DNA, 75 bp, synthetic construct
  source 1..75: mol_type = other DNA
taaatggatgtttaaggatggtgccgtgattaagcggatttatacggcagacgaacagcagcaactggcagaatc

SEQ ID NO: 860971 - DNA, 75 bp, synthetic construct
  source 1..75: mol_type = other DNA
acacgataaagattgtttacgacgagaataatataattgtcggcatcaccagagatgcttcaacgcttaaccctg

SEQ ID NO: 860972 - DNA, 75 bp, synthetic construct
  source 1..75: mol_type = other DNA
ccggaaaagcgccccataattttagaggcgcagagtgtgtggataacctacaaaggaaaactgccgggaagaatt

SEQ ID NO: 860973 - DNA, 75 bp, synthetic construct
  source 1..75: mol_type = other DNA
aatatatctgaagccgttgagataactatcatttttttattagggatgctaataattctgtctttttatctttgt

SEQ ID NO: 860974 - DNA, 75 bp, synthetic construct
  source 1..75: mol_type = other DNA
attgtttacgatgaacataatattattgttgccataactaaagatgcctccacgcttaaccctgaaggttttaac

SEQ ID NO: 860975 - DNA, 75 bp, synthetic construct
  source 1..75: mol_type = other DNA
accgacggtttacctgttggatgtaaggttaacacatcaaatgcgccggagttgattcatgaaaatcaagcatga

SEQ ID NO: 860976 - DNA, 75 bp, synthetic construct
  source 1..75: mol_type = other DNA
aagcagtaaaagctgcgggaaaatctttatctgaagtagcccgtcactttggttttaagtccactcaatccgtcg

SEQ ID NO: 860977 - DNA, 75 bp, synthetic construct
  source 1..75: mol_type = other DNA
ggagcatcagacaggtcttcctggatgttgctgctgggttatgtgaagaggatgagctgttgccggaaaagtgcc

SEQ ID NO: 860978 - DNA, 75 bp, synthetic construct
  source 1..75: mol_type = other DNA
aacgcgctgtcaggctgaacatggcgacggatgaggagcgcgcacgactggagtcatgggaacgctacagcgttc

SEQ ID NO: 860979 - DNA, 75 bp, synthetic construct
  source 1..75: mol_type = other DNA
attgtttacgatgcaaataatattattgtcgccatcactaaagatgcctccacgcttaaccctgaaggttttagt

SEQ ID NO: 860980 - DNA, 75 bp, synthetic construct
  source 1..75: mol_type = other DNA
aacggatttatacggctgacgaacagcaacaacaggccgaatcacaaaaggccgcattgctttccgaagctgaat

SEQ ID NO: 860981 - DNA, 75 bp, synthetic construct
  source 1..75: mol_type = other DNA
acaaaaggccgcattactttccgaagcggaaagcgttattcagccactggaacgcgctgtcaggctgaatatggc

SEQ ID NO: 860982 - DNA, 75 bp, synthetic construct
  source 1..75: mol_type = other DNA
tcggcctgggagcgttacagcgtcctgctcagccgggtggattcagcgaacccggaatggccacaaaagccagag

SEQ ID NO: 860983 - DNA, 75 bp, synthetic construct
  source 1..75: mol_type = other DNA
gtgaggaaacgcgagtattcgtcagaggaagtcaacagacagacagagcaacgcaaggccacgctgctcagtgaa

SEQ ID NO: 860984 - DNA, 75 bp, synthetic construct
  source 1..75: mol_type = other DNA
atggtcgtgatgctcaggtacctttacagttgattggtgtgcgtgatggcgtaattatcaaacgtctgccaggag

SEQ ID NO: 860985 - DNA, 75 bp, synthetic construct
  source 1..75: mol_type = other DNA
tatgcagataatgcagacggtacgccagttgtaccagcaggccataatagtggtaatggatgggtcgcgatcggt

SEQ ID NO: 860986 - DNA, 75 bp, synthetic construct
  source 1..75: mol_type = other DNA
gtcaccgctggcaacctgactgccggcagcactgacgccgttaacggctcccagctcaaaaccaccaacgacaac

SEQ ID NO: 860987 - DNA, 75 bp, synthetic construct
  source 1..75: mol_type = other DNA
atgaacaaaatatttaaagttatctggaatccggcgacgggcagctatagcgttgccagcgaaacggcgaaaagt

SEQ ID NO: 860988 - DNA, 75 bp, synthetic construct
  source 1..75: mol_type = other DNA
ctaacgtcaccgctggcgacctttcagccaccagcaccgacgccgttaacggttctcagctgaaaaccactaacg

SEQ ID NO: 860989 - DNA, 75 bp, synthetic construct
  source 1..75: mol_type = other DNA
ggaatccagcgacgggcagttacaccgttgccagcgaaacggctaagagtcgtgggaaaaagagcgggcgcagta

SEQ ID NO: 860990 - DNA, 75 bp, synthetic construct
  source 1..75: mol_type = other DNA
gtgaatgtagcaaaccgcacatcgccaacggtccggtacatgataaaattttcacaaaagggggctacgggattg

SEQ ID NO: 860991 - DNA, 75 bp, synthetic construct
  source 1..75: mol_type = other DNA
cgcacgtaacactcgtattctggaacgccagccgcgcgtgataagccatgaacagcagatgcgctttagtcagta

SEQ ID NO: 860992 - DNA, 75 bp, synthetic construct
  source 1..75: mol_type = other DNA
ctctctgataccagcaccgacgccgtcaacggttctcagctgaaagcgaccaaggacgatgtggcggcaaacacc

SEQ ID NO: 860993 - DNA, 75 bp, synthetic construct
  source 1..75: mol_type = other DNA
ttcgatggccctgggtaatgcaagtcaggcatctggcgaatccagtattgcattaggtagcaccagtgaggccag

SEQ ID NO: 860994 - DNA, 75 bp, synthetic construct
  source 1..75: mol_type = other DNA
atgcccacttctcatgaaattgcactgcaacaacgttgccagcaaattgtcaccagtccggtgcttagcccggaa

SEQ ID NO: 860995 - DNA, 75 bp, synthetic construct
  source 1..75: mol_type = other DNA
ccgatcacccatctgcaaaccgtcgctccacatcatgcatattactactccgggatcagcgacattctgacgctc

SEQ ID NO: 860996 - DNA, 75 bp, synthetic construct
  source 1..75: mol_type = other DNA
tgctctgggcaatcaaagtcaggcagtagcggctggcgcaattgccatcggtcaagggaataaagctgacggcgc

SEQ ID NO: 860997 - DNA, 75 bp, synthetic construct
  source 1..75: mol_type = other DNA
atggatattaacgcgggcactatcgctaccggcgaagaaaccattgaagaagtgggctggaagttgtttcacttt

SEQ ID NO: 860998 - DNA, 75 bp, synthetic construct
  source 1..75: mol_type = other DNA
cattacatcagtcatcaacgtcgagttcaatgtcagatgcaggtatcgagtctcttgtaaaaacatcgagcgttc

SEQ ID NO: 860999 - DNA, 75 bp, synthetic construct
  source 1..75: mol_type = other DNA
atgattatcgtaatcggtggtgataaaggcggtacaggtaaatcacatctggcaaccaacttaactgtttgcctc

SEQ ID NO: 861000 - DNA, 75 bp, synthetic construct
  source 1..75: mol_type = other DNA
gcattgaggtcagatacagcccggtaacggcatttaccggtggaagcgccaaaaactcactgaataaagatattg

SEQ ID NO: 861001 - DNA, 75 bp, synthetic construct
  source 1..75: mol_type = other DNA
agagattaaagtcgccatcaataccctcatgcaaccaccggtaagacccatgtttggcaataccagtcctgagcc

SEQ ID NO: 861002 - DNA, 75 bp, synthetic construct
  source 1..75: mol_type = other DNA
ccaccggcgaagaaaccattgaagaggtgggctggaagttgttccactttattctcgacgtcgccagcgggaaga

SEQ ID NO: 861003 - DNA, 75 bp, synthetic construct
  source 1..75: mol_type = other DNA
tgctctgggcacgggttccacagcggtggaagataatactgtttcagtaggtaacgacacgctacagcgtaaagt

SEQ ID NO: 861004 - DNA, 75 bp, synthetic construct
  source 1..75: mol_type = other DNA
atgaacaaaatttttaaagttatctggaatccagcgacgggcagttacagcgttgccagcgaaacggcaaaaagc

SEQ ID NO: 861005 - DNA, 75 bp, synthetic construct
  source 1..75: mol_type = other DNA
cgcgcacggtactgatgccaccagcaaaatcaccaacgtcaaagacggtgacctgacggctggcagcactgacgc

SEQ ID NO: 861006 - DNA, 75 bp, synthetic construct
  source 1..75: mol_type = other DNA
ttggtgaataaagttagtgaaaacacaaaacagcgcaatttattttccaaaaaaatgactttgtgcataagtttg

SEQ ID NO: 861007 - DNA, 75 bp, synthetic construct
  source 1..75: mol_type = other DNA
aaaatgacattgcaatctattatttgtttcgtcagatgagtttgtgcatattaatatttctggcattggtgaata

SEQ ID NO: 861008 - DNA, 75 bp, synthetic construct
  source 1..75: mol_type = other DNA
atggttcacagctttatgatatcagtaagtcagtcgcagaccgtctgggcggcggtgcctccgtgagtactgcag

SEQ ID NO: 861009 - DNA, 75 bp, synthetic construct
  source 1..75: mol_type = other DNA
ggtaaatacagccttgcattaggaaacgcaagtcaggcatctggcgaatccagtattgcattcggtaacacaagt

SEQ ID NO: 861010 - DNA, 75 bp, synthetic construct
  source 1..75: mol_type = other DNA
accactaacgatgccgtggcagccaacaccaccaatatcgccacgaacaccgacggctggcagcaccgacgcggt

SEQ ID NO: 861011 - DNA, 75 bp, synthetic construct
  source 1..75: mol_type = other DNA
ttcggctaccagtaaagacgccattaacggctctcagctgaaaaccaccaacgataacgtagcgaccaacaccac

SEQ ID NO: 861012 - DNA, 75 bp, synthetic construct
  source 1..75: mol_type = other DNA
gcaaatgctattgcgatcggtacaggaagttctgcggttggatcaaacagtcttgcattgggaagttcatcttct

SEQ ID NO: 861013 - DNA, 75 bp, synthetic construct
  source 1..75: mol_type = other DNA
gatgctctgtcaggaatcgacaataataccctacaatggaataaaaccgcgggggcattcagtgccaatcacggt

SEQ ID NO: 861014 - DNA, 75 bp, synthetic construct
  source 1..75: mol_type = other DNA
cggttacccggaacagtccgactggtcaggcaatgacaaccgatgcggaagccgcagtcagcgaagccctgcgcg

SEQ ID NO: 861015 - DNA, 75 bp, synthetic construct
  source 1..75: mol_type = other DNA
cggtgacctgacagctggcagcactgacgccgttaacggctcccagctcaaaaccaccaacgacaacgtgacgac

SEQ ID NO: 861016 - DNA, 75 bp, synthetic construct
  source 1..75: mol_type = other DNA
acgagttgtttctgcaaaggtgcctgccggtgttcagcgatatctgcgtgttaactactccgtcgcaactggccc

SEQ ID NO: 861017 - DNA, 75 bp, synthetic construct
  source 1..75: mol_type = other DNA
ggacctgctggcgcagtacgagcagcacggcttgcagttaaacagccgcgaattaccggaccatctgccgctgta

SEQ ID NO: 861018 - DNA, 75 bp, synthetic construct
  source 1..75: mol_type = other DNA
gattccggcaaacaaaacacagcacaaacaggcattgaatccgcagcaaatcgggaggctattaagttgttttga

SEQ ID NO: 861019 - DNA, 75 bp, synthetic construct
  source 1..75: mol_type = other DNA
aaggttctgttgccctgggatatacagcagcggctgctggcgcaagtgctcttgccttggggcaaaatgcgcaag

SEQ ID NO: 861020 - DNA, 75 bp, synthetic construct
  source 1..75: mol_type = other DNA
gcctggctggataccggcactcacgacagcctgattgaggccagcacttttgtgcagacagtagaaaaacgccag

SEQ ID NO: 861021 - DNA, 75 bp, synthetic construct
  source 1..75: mol_type = other DNA
acagccgccgcggcaagcggtgatgcaactgtaaacatccagttgcagacgagtgagaataacagctcatggacc

SEQ ID NO: 861022 - DNA, 75 bp, synthetic construct
  source 1..75: mol_type = other DNA
tttcagccaccagttccgacgccgttaacggttcgcagttgtataatctgaaacaagatgccttgctatgggatg

SEQ ID NO: 861023 - DNA, 75 bp, synthetic construct
  source 1..75: mol_type = other DNA
gtaccgtgttgagcatgaagatattgcaaaacgcactctgcgtaatgcctgcctgcgtttcctcgcttttggtga

SEQ ID NO: 861024 - DNA, 75 bp, synthetic construct
  source 1..75: mol_type = other DNA
gaaaatgcgtgcggcgctggaacaattgaaagggttggataatctctctggcgatctttacgagaagatcaccaa

SEQ ID NO: 861025 - DNA, 75 bp, synthetic construct
  source 1..75: mol_type = other DNA
attctgcaagccaccagcccggcagcaaatgtactggagacagtgcgtggtttgttgcaacatcgttcatttacc

SEQ ID NO: 861026 - DNA, 75 bp, synthetic construct
  source 1..75: mol_type = other DNA
cacacggcaccgacgtcaccagcaaaatcaccaatgtcaccgctggcgaactctctgataccagcaccgacgccg

SEQ ID NO: 861027 - DNA, 75 bp, synthetic construct
  source 1..75: mol_type = other DNA
aaagacgactacaatccggaaaccgagcagtacaccctgaccatcagccagcgcacgccagctacgccggatcag

SEQ ID NO: 861028 - DNA, 75 bp, synthetic construct
  source 1..75: mol_type = other DNA
tgctgaacgtcacccaggcggaacagacctttgtctttgataatgtctacttccagccggtgcctgcgctgctgt

SEQ ID NO: 861029 - DNA, 75 bp, synthetic construct
  source 1..75: mol_type = other DNA
actaacaccaccaatatcaccaacctgactgacgctgttaacggtctcggtgacgactccctgctgtggaacaaa

SEQ ID NO: 861030 - DNA, 75 bp, synthetic construct
  source 1..75: mol_type = other DNA
gctgctggatagcgctggcagctgcgccttttctccttttttttgccgcgtggggagcagataaactctggcctc

SEQ ID NO: 861031 - DNA, 75 bp, synthetic construct
  source 1..75: mol_type = other DNA
taccattgcatgaagtcaatcccgcacgcgtagtcgtggcgcaggatggtacgccactctggcgtttcgccgatg

SEQ ID NO: 861032 - DNA, 75 bp, synthetic construct
  source 1..75: mol_type = other DNA
atgagcaacccgaaccgtattcgttcgttgattggtgcgtttgcgggcagcaacccggcagcgttccatgccgaa

SEQ ID NO: 861033 - DNA, 75 bp, synthetic construct
  source 1..75: mol_type = other DNA
gatggcagtggttatcagttcctggtggaaatgctcaccgacctcaacagccgtaacccgcaggtggcttcgcgt

SEQ ID NO: 861034 - DNA, 75 bp, synthetic construct
  source 1..75: mol_type = other DNA
ggccattaacggttcacaactttatggactaagtgactcagtcgcagcccgactcgggggtggtgctggcgtaaa

SEQ ID NO: 861035 - DNA, 75 bp, synthetic construct
  source 1..75: mol_type = other DNA
gcggcacagcgggcgtggttaacggcgatcgtgcaatcctgaataaccgcggtgatgcagtgatcactaacggcg

SEQ ID NO: 861036 - DNA, 75 bp, synthetic construct
  source 1..75: mol_type = other DNA
gtgaatgagaaaggattttctttaattgaaagtgtgatagtaataatgctttcaactgttattgttatggggata

SEQ ID NO: 861037 - DNA, 75 bp, synthetic construct
  source 1..75: mol_type = other DNA
gccattgagcaaatatgaacagttaaaaaaagatgaatcgaatggaaaagcaacatatcatttctataaaaaagt

SEQ ID NO: 861038 - DNA, 75 bp, synthetic construct
  source 1..75: mol_type = other DNA
gagaacagcgtctatctatggatatccctctggtaataatatagtctctgtcctgggtgagtggacggtgccatt

SEQ ID NO: 861039 - DNA, 75 bp, synthetic construct
  source 1..75: mol_type = other DNA
ttttaaacaaagatgacaccctatgctttttccccgtaggccattctgtagaaggtaattacaaaattcactttg

SEQ ID NO: 861040 - DNA, 75 bp, synthetic construct
  source 1..75: mol_type = other DNA
caaacgcgcggaacttgccgagcgtgaatgggcgcgaaaaaaaaaaaaaaaactccccgccaccctgccccccct

SEQ ID NO: 861041 - DNA, 75 bp, synthetic construct
  source 1..75: mol_type = other DNA
tcaatggcaacaagtcagcctcaatgcattggttgaagaaactctggtactggtacaaaccgccggcgtacaagc

SEQ ID NO: 861042 - DNA, 75 bp, synthetic construct
  source 1..75: mol_type = other DNA
ctggattgtctgcaacgtcgcggtttaatggtcagttttggtaactcatcaggcgcggtgacgggtgtgaactta

SEQ ID NO: 861043 - DNA, 75 bp, synthetic construct
  source 1..75: mol_type = other DNA
aggcaaagatacctgggaacggtcgctggattgtctgcaacgtcgcggtttaatggtcagttttggtaactcatc

SEQ ID NO: 861044 - DNA, 75 bp, synthetic construct
  source 1..75: mol_type = other DNA
ggcggcgtgggcttaattgcctgccagtgggcaaaagccttaggagcaaaacttattggcactgtgggcagcgcg

SEQ ID NO: 861045 - DNA, 75 bp, synthetic construct
  source 1..75: mol_type = other DNA
acaaaaacatgtccacctatgttgactacaaaatcaacctgctggacgacaaccagttcactcgtgacgctggca

SEQ ID NO: 861046 - DNA, 75 bp, synthetic construct
  source 1..75: mol_type = other DNA
acagttcctgttccacgcagcggctggcggcgttggcttgattgcctgccagtgggcaaaagccctgggcgcgaa

SEQ ID NO: 861047 - DNA, 75 bp, synthetic construct
  source 1..75: mol_type = other DNA
gcgtagtctatgcacagtcggcattaggcgcttacagctctttgcataacgtcaatgccgataaagcggcgattc

SEQ ID NO: 861048 - DNA, 75 bp, synthetic construct
  source 1..75: mol_type = other DNA
gcggagtccaatttgaagttatgagccgggcagacattgagaaagttcgtgcactgagcaaagccggtagcagtg

SEQ ID NO: 861049 - DNA, 75 bp, synthetic construct
  source 1..75: mol_type = other DNA
caaccgatgagtggcaggctgccgccaacaaagtgtttcagggggaagaagataagaagtttgccttcttttcca

SEQ ID NO: 861050 - DNA, 75 bp, synthetic construct
  source 1..75: mol_type = other DNA
attttcctgatcaccgatggcactccaaccgatgagtggcaggctgccgccaacaaagtgtttcaggggaagaag

SEQ ID NO: 861051 - DNA, 75 bp, synthetic construct
  source 1..75: mol_type = other DNA
accaaagccctggatatggttgaagagaggaaacgtgagtaccgcgcaaatggtatttcgtattatcgcccgtgg

SEQ ID NO: 861052 - DNA, 75 bp, synthetic construct
  source 1..75: mol_type = other DNA
ttcatacgcgctcgacacctttctggaataaacaaacggcgccagccggaatattcgaacgtcatcttgataaag

SEQ ID NO: 861053 - DNA, 75 bp, synthetic construct
  source 1..75: mol_type = other DNA
accacgttgcccctgcattttgctgctggatgtttctggttcgatgaacggtagacccattaatgaacttaacgc

SEQ ID NO: 861054 - DNA, 75 bp, synthetic construct
  source 1..75: mol_type = other DNA
ctacgttcggtttcccgctccacgccgggaacggaagttgtactggaagcgccaaaaggctggacgtcagtgtga

SEQ ID NO: 861055 - DNA, 75 bp, synthetic construct
  source 1..75: mol_type = other DNA
gcgctcttccctctggcaaatcctggagtgatagcgcagcttagccactggcagctcgcatgtttaattttttgc

SEQ ID NO: 861056 - DNA, 75 bp, synthetic construct
  source 1..75: mol_type = other DNA
atttatcctgaaggagaaaatgcgtagcacccaggttgtgggggcattgatgcttttgagtgggctggtgatgtt

SEQ ID NO: 861057 - DNA, 75 bp, synthetic construct
  source 1..75: mol_type = other DNA
ctttaacaccagtctgatcgagatatttacaaaacttaccgattacacctggggtgttatttttggggtcggtgc

SEQ ID NO: 861058 - DNA, 75 bp, synthetic construct
  source 1..75: mol_type = other DNA
gttcggcccggtgcatgtggaacaaccctttaccagcgccgctaactttttcccgcccatcctgtttgcccaggg

SEQ ID NO: 861059 - DNA, 75 bp, synthetic construct
  source 1..75: mol_type = other DNA
cgtcaatatttgccgggatgattgaggaagatgtagggctgaagattcgctacatcgctattcagattcttactg

SEQ ID NO: 861060 - DNA, 75 bp, synthetic construct
  source 1..75: mol_type = other DNA
atgagcgcaaatgcggagactcaaaacccgcagcaaccggtaaagaagagcggcaaacgtaagagtctgctcctc

SEQ ID NO: 861061 - DNA, 75 bp, synthetic construct
  source 1..75: mol_type = other DNA
ggcggcgttggcttgattgcctgccagtgggcaaaagccctgggcgcgaaacttatcggcaccgtaggaaccgcg

SEQ ID NO: 861062 - DNA, 75 bp, synthetic construct
  source 1..75: mol_type = other DNA
gaagacggcttcggtgaaactctgctatcccgtgagaaagctaaacgtcacgaagcctggatcacgctggaaaaa

SEQ ID NO: 861063 - DNA, 75 bp, synthetic construct
  source 1..75: mol_type = other DNA
ttttccggcaacaagcaggaatctcagcgctgaagcaggaattagaggtaaaaacgccctaccgggccatgaatc

SEQ ID NO: 861064 - DNA, 75 bp, synthetic construct
  source 1..75: mol_type = other DNA
gatcgataccgttcagacggcaggtgcctgcttttccggcaacaagcaggaatctcagcgctgaagcaggaatta

SEQ ID NO: 861065 - DNA, 75 bp, synthetic construct
  source 1..75: mol_type = other DNA
ttttttgcgttgaatttgtcattttgtgccgtgatgcttaaaccgcacagaataaattgtcgcgatttcaccttt

SEQ ID NO: 861066 - DNA, 75 bp, synthetic construct
  source 1..75: mol_type = other DNA
atgactgaatcttttgctcaactctttgaagagtccttaaaagaaatcgaaccccgcccgggttctatcgttcgt

SEQ ID NO: 861067 - DNA, 75 bp, synthetic construct
  source 1..75: mol_type = other DNA
ggtagctatcgctaaacgttatccggaaggtactaaactgactggtcgcgtgaccaacctgactgactacggctg

SEQ ID NO: 861068 - DNA, 75 bp, synthetic construct
  source 1..75: mol_type = other DNA
ctcccgcacatggattatgaggtggcaggcacaccggcacagcgcaaggtgtggcaggacaaaatagaccagcag

SEQ ID NO: 861069 - DNA, 75 bp, synthetic construct
  source 1..75: mol_type = other DNA
caggaaaacggcaatgattccggcgcatggcgcgccgcctttcgtgccggtggtgctgtcattaccgacgagctg

SEQ ID NO: 861070 - DNA, 75 bp, synthetic construct
  source 1..75: mol_type = other DNA
caccgcaggcgatactgcaactctggctgctgccagaacgcacagcgatgaaaacaacaaaagaacactgatcag

SEQ ID NO: 861071 - DNA, 75 bp, synthetic construct
  source 1..75: mol_type = other DNA
acagagattctaatttcaactcttgtttacttattttacctaaaggaatttcctgagtgtagaataaaaataaga

SEQ ID NO: 861072 - DNA, 75 bp, synthetic construct
  source 1..75: mol_type = other DNA
gagcctgtgcctttggatttctgcgttcaattttcaaggaaaacattatcattccctgtgtgataacatctttgt

SEQ ID NO: 861073 - DNA, 75 bp, synthetic construct
  source 1..75: mol_type = other DNA
agaaaattaaacagatgcaaatcagcctcaccggcgagccggttctccggctgaccggactgtcagcggcaacac

SEQ ID NO: 861074 - DNA, 75 bp, synthetic construct
  source 1..75: mol_type = other DNA
tggttgcggtccagacataccctggtgcagctactttttaaagcattgacctacaatcagtggcttctggtgggt

SEQ ID NO: 861075 - DNA, 75 bp, synthetic construct
  source 1..75: mol_type = other DNA
tggcacttgccgttgttgcgattctcgcactgctggtaagcagcgaccgcaaaaaattcgtatccgttatgttat

SEQ ID NO: 861076 - DNA, 75 bp, synthetic construct
  source 1..75: mol_type = other DNA
gaaaaagacaaagcagacattaagactgcggcgttgattggcgtagattacctggctgtctccttcccacgctgc

SEQ ID NO: 861077 - DNA, 75 bp, synthetic construct
  source 1..75: mol_type = other DNA
cgccgacggcgagcagttgggtaaaaacgttggggatgatctgaacgaaggcaagccaacactgccgctgctaca

SEQ ID NO: 861078 - DNA, 75 bp, synthetic construct
  source 1..75: mol_type = other DNA
gggcgcgaaacttatcggcaccgtaggaaccgcgcaaaaagcgcagagcgcgctaaaagcgggcgcgtggcaggt

SEQ ID NO: 861079 - DNA, 75 bp, synthetic construct
  source 1..75: mol_type = other DNA
gtttaacgcgttacctgctaatgagttacaggatgcatggttagatgccattcgtaaggagttaaataaggcgga

SEQ ID NO: 861080 - DNA, 75 bp, synthetic construct
  source 1..75: mol_type = other DNA
atgaaaataaaaaaattgatgatggttgcactggtcagttccactctgaccctttcagggtgcgatgagcacagc

SEQ ID NO: 861081 - DNA, 75 bp, synthetic construct
  source 1..75: mol_type = other DNA
tctggaacctgttctggaagcaatgaacgcttgtggttctctcgaatggacgcgtcagcgtgccgaggaagaagc

SEQ ID NO: 861082 - DNA, 75 bp, synthetic construct
  source 1..75: mol_type = other DNA
aacagcttgggctgtctcaaagacaacttgctgttcagttagggtggatacaaagccgactggcaaattacgaag

SEQ ID NO: 861083 - DNA, 75 bp, synthetic construct
  source 1..75: mol_type = other DNA
atgggggctctcccaaatagaaagtatgcagttgtcagccgctcaggatcggtagctactaacgatgatgtggtt

SEQ ID NO: 861084 - DNA, 75 bp, synthetic construct
  source 1..75: mol_type = other DNA
gctgcatttggtaatgctgccagcgtactggttggtgattttatttatacccgcgctttccagatgatgaccagc

SEQ ID NO: 861085 - DNA, 75 bp, synthetic construct
  source 1..75: mol_type = other DNA
ttctggcaggttgttcgccggaggaggagaaaggcctgcaagattatgggcgttatctcggcaccgctttccagt

SEQ ID NO: 861086 - DNA, 75 bp, synthetic construct
  source 1..75: mol_type = other DNA
agataaagctattgaagcattacaggtactcccggacactccgtggcgagaagcattaatcggcctcgcgcacat

SEQ ID NO: 861087 - DNA, 75 bp, synthetic construct
  source 1..75: mol_type = other DNA
accgatatttacggcgatgatgtgaaatacaccggtaaagtggttggtctggatatgggcacaggtagcgcgttc

SEQ ID NO: 861088 - DNA, 75 bp, synthetic construct
  source 1..75: mol_type = other DNA
ggatgacaattctacgcgatggtatgctgtctgcaataaaagcacatgaaggtattgatacgatagagcgcgccg

SEQ ID NO: 861089 - DNA, 75 bp, synthetic construct
  source 1..75: mol_type = other DNA
catgaggatgtcgcccgcgctgttgaagctgcaggcggtgaagtgtgcatgacgcgcgccgatcatcagtcaggt

SEQ ID NO: 861090 - DNA, 75 bp, synthetic construct
  source 1..75: mol_type = other DNA
aggctccgacattaagccagaaagattctctgttatccgtcaatccgctaaccgtggctgcagataaaaaatcga

SEQ ID NO: 861091 - DNA, 75 bp, synthetic construct
  source 1..75: mol_type = other DNA
cagtgaaggttttataggggcgtactacacacttaatgatgacaactttgaagcgggtaaaaccgttagtgatta

SEQ ID NO: 861092 - DNA, 75 bp, synthetic construct
  source 1..75: mol_type = other DNA
attcctatgctgaacggtgttcatcaagcaaacttaagcatatcactggatcttgtccgctcaataaaagacatg

SEQ ID NO: 861093 - DNA, 75 bp, synthetic construct
  source 1..75: mol_type = other DNA
tctctgcggcgttaaaaataatcgccacggggatcgccttaccccctgataaaatcacctctcaacaactggatg

SEQ ID NO: 861094 - DNA, 75 bp, synthetic construct
  source 1..75: mol_type = other DNA
tttttatgctgctggcgctgcttggagtaccactaagtgtctttctggcagtttccatcgcgcattacagttggc

SEQ ID NO: 861095 - DNA, 75 bp, synthetic construct
  source 1..75: mol_type = other DNA
ttaaaagcgaaaaaatacatttgcgtataactccctctcagaaagaaacttggagagccttagctgaagctcaag

SEQ ID NO: 861096 - DNA, 75 bp, synthetic construct
  source 1..75: mol_type = other DNA
ggtaagccgatgatcgttcatgttcttgaacgcgcccgcgaatcaggagccgatcgcatcattgtcgcaaccgat

SEQ ID NO: 861097 - DNA, 75 bp, synthetic construct
  source 1..75: mol_type = other DNA
taggggggatgagcgacgggcagcgttggggaatgattctttggtgttctgtgacgttgtcactgctctatttta

SEQ ID NO: 861098 - DNA, 75 bp, synthetic construct
  source 1..75: mol_type = other DNA
tgccgtacaggcattaccctgtagcgcaattcatattcttaaagccgctgccatgcccgcaggcgttgccgggtt

SEQ ID NO: 861099 - DNA, 75 bp, synthetic construct
  source 1..75: mol_type = other DNA
acggctgggatttacgcgcggaaggctggttaccagcctggccacaactgggtggaaaactggtctatgaacaat

SEQ ID NO: 861100 - DNA, 75 bp, synthetic construct
  source 1..75: mol_type = other DNA
ctcttacggtcatagtttgacgaccagcgtcagtgtttcatcgccggaacagacactcgatttcagctataaaat

SEQ ID NO: 861101 - DNA, 75 bp, synthetic construct
  source 1..75: mol_type = other DNA
acggacgtggggccacgagttaaggcgacgtggaaaaaaccatggatgaactcgtacggtcatagcctgaccacc

SEQ ID NO: 861102 - DNA, 75 bp, synthetic construct
  source 1..75: mol_type = other DNA
aggaaaagatattattcggctcataattaataatgcaaaaatacttgggcttacatctttgtatttaaatgttca

SEQ ID NO: 861103 - DNA, 75 bp, synthetic construct
  source 1..75: mol_type = other DNA
gctttctacgattgaaagtgatgaagtgacgccagaccgtcgctttcgcgcacgcgtcgatgatgccatccgcga

SEQ ID NO: 861104 - DNA, 75 bp, synthetic construct
  source 1..75: mol_type = other DNA
caacgtggaaaaaaccatggatgaactcgtacggtcatagcctgaccaccagtaccagtatttccgcgccggaac

SEQ ID NO: 861105 - DNA, 75 bp, synthetic construct
  source 1..75: mol_type = other DNA
cctgaaaggggcctcgaagctgataaccggatcgctggaataccagtacaacgtgaccggaaaatggtggggcgc

SEQ ID NO: 861106 - DNA, 75 bp, synthetic construct
  source 1..75: mol_type = other DNA
cgcgacggcacaaaatgtggtacacgctaaaccccagatgacagtttcatctcctccccctcttacagaaaataa

SEQ ID NO: 861107 - DNA, 75 bp, synthetic construct
  source 1..75: mol_type = other DNA
aatatctggctagctgccaatgcgctctgtcatgctaaaaatgatggatataatcttcctggcatcacacatttg

SEQ ID NO: 861108 - DNA, 75 bp, synthetic construct
  source 1..75: mol_type = other DNA
gagtacaccgtgactgtcactggcggaaaagagggaacagcgaccctcattcccatgctgaacggggttcatcag

SEQ ID NO: 861109 - DNA, 75 bp, synthetic construct
  source 1..75: mol_type = other DNA
gggttgatagcagcaccatcacttcacgagtagaagatgattatggattcccggttgaaggtgtcgacgttagtt

SEQ ID NO: 861110 - DNA, 75 bp, synthetic construct
  source 1..75: mol_type = other DNA
tggttaccgcttcactaacaccccggaaaccgataatacgtggccgatagacgttaccgctgaggatgtaaaagg

SEQ ID NO: 861111 - DNA, 75 bp, synthetic construct
  source 1..75: mol_type = other DNA
tcaaccggttgcttatcaaaaagaggaattggtaaaagccgttactgtcgaaaacagcaaacctggcgccacgat

SEQ ID NO: 861112 - DNA, 75 bp, synthetic construct
  source 1..75: mol_type = other DNA
gagattttgctctgtggtgctctgacgctgacttttgcatccgctcttgagtatgtcggatggcctaaatcgctt

SEQ ID NO: 861113 - DNA, 75 bp, synthetic construct
  source 1..75: mol_type = other DNA
aaatgcacgctatcgcccgccagatggggattgataatttaatggcgcggttaccgggcgagctttccggcggtc

SEQ ID NO: 861114 - DNA, 75 bp, synthetic construct
  source 1..75: mol_type = other DNA
taaccgtccgccgattgcagcgaatcagatgaccaacggtacggaagaaaaccgctcgccggaagcgctttccaa

SEQ ID NO: 861115 - DNA, 75 bp, synthetic construct
  source 1..75: mol_type = other DNA
ctgccgctacccgtaaacgcgatcagatcctcaaagatattcaggacaaaacccgcgccagcgtggcaaacgtgc

SEQ ID NO: 861116 - DNA, 75 bp, synthetic construct
  source 1..75: mol_type = other DNA
ccgacaacatgcgcagtcggatgctcacaatgggcgattcggtggtgaaaatctctctcgcctcgctggtgggat

SEQ ID NO: 861117 - DNA, 75 bp, synthetic construct
  source 1..75: mol_type = other DNA
tggcgttcgtggtactgcctatcgcctggcagcagggcatctacttaatccgcgatatgccggggatgctcaata

SEQ ID NO: 861118 - DNA, 75 bp, synthetic construct
  source 1..75: mol_type = other DNA
acgcaacatcacagcagcgaatggtattgccgctttgtcacggtggttaccgaaatgccagaagtgctggggttc

SEQ ID NO: 861119 - DNA, 75 bp, synthetic construct
  source 1..75: mol_type = other DNA
atcacaccagaaccggaagccgtcagcgaaccgtggatcgccacgccggaggaggatcgcaaaaacgtcgacctg

SEQ ID NO: 861120 - DNA, 75 bp, synthetic construct
  source 1..75: mol_type = other DNA
tgtggtcagcgatgagccgcaaaacagcgcctcggtggtggtgcgcctgcactacggcgcgaagctgaatatgga

SEQ ID NO: 861121 - DNA, 75 bp, synthetic construct
  source 1..75: mol_type = other DNA
gttgaagcgtttaaactcggttacgaagtgaccgatccggaagagttggaagtggaagatggcgatatcgtaatt

SEQ ID NO: 861122 - DNA, 75 bp, synthetic construct
  source 1..75: mol_type = other DNA
gtgtccggcagtattccggggctacaggccagcaaagtcagcgtcgtcgatcaggcgggaaatctgctgaccgac

SEQ ID NO: 861123 - DNA, 75 bp, synthetic construct
  source 1..75: mol_type = other DNA
tggcgcttaacgaagagagctcgtttgtggtcagcgatgagccgcaaaacagcgcctcggtggtggtgcgcctgc

SEQ ID NO: 861124 - DNA, 75 bp, synthetic construct
  source 1..75: mol_type = other DNA
ccaggtgaacgccatcgtgcatctggtttccggcagtattccggggctgcacgccagcaaagtcagcgtcgtcga

SEQ ID NO: 861125 - DNA, 75 bp, synthetic construct
  source 1..75: mol_type = other DNA
tggggtgtattcttcgccattcctctggcgacactaattaaagcggtgattcatgcctggcccgatggccaaatc

SEQ ID NO: 861126 - DNA, 75 bp, synthetic construct
  source 1..75: mol_type = other DNA
cggaagatcgcatgtcgcgcggtttggtgatggcgcaatctattgaagacaacatcattagcactgtttttcaca

SEQ ID NO: 861127 - DNA, 75 bp, synthetic construct
  source 1..75: mol_type = other DNA
cgagtacttctttagcgccccggaattatttgccccgcgcttcccgttgttgtggcagcgtttttgccaatttta

SEQ ID NO: 861128 - DNA, 75 bp, synthetic construct
  source 1..75: mol_type = other DNA
gtaaggtgttcctcaacattggggacaaattcctgctggatgctaacctgggtaaaggtgaaggcgataaagaaa

SEQ ID NO: 861129 - DNA, 75 bp, synthetic construct
  source 1..75: mol_type = other DNA
tggcggtggtgggggctggaaacgaaaaactcttgagattttgctttgtggcgccctgacgctgacctttgcatc

SEQ ID NO: 861130 - DNA, 75 bp, synthetic construct
  source 1..75: mol_type = other DNA
ctttttgctcctcgtttcccctctctgtggcaacgtttctgccaattttatcagcaggaaccgctgcaaagactg

SEQ ID NO: 861131 - DNA, 75 bp, synthetic construct
  source 1..75: mol_type = other DNA
atgcctcataacccaaatacctggctggacttggtccagagctggtggcgtggagacacaccgctgggtgcagtg

SEQ ID NO: 861132 - DNA, 75 bp, synthetic construct
  source 1..75: mol_type = other DNA
tgccgaacgttttttacagcaaaaacggcttgttcctttacagggctttgaactggattcattaagaagctgccg

SEQ ID NO: 861133 - DNA, 75 bp, synthetic construct
  source 1..75: mol_type = other DNA
tatcaacaagatcctttgcagagactgcatcacgctaatgatacagactcgttttcggcgacgaatgttcattaa

SEQ ID NO: 861134 - DNA, 75 bp, synthetic construct
  source 1..75: mol_type = other DNA
gcctgctgacgtcgtgcctggtgacatcctgctgctggacgatggtcgcgtccagttaaaagtactggaagttca

SEQ ID NO: 861135 - DNA, 75 bp, synthetic construct
  source 1..75: mol_type = other DNA
acgttagatctgtttggtcgtaatcagagtttgtcacgggcagcgcgagaaacctggcttgccagtgaatttaca

SEQ ID NO: 861136 - DNA, 75 bp, synthetic construct
  source 1..75: mol_type = other DNA
aacctggcttgccagtgaatttacagcccagaacacccgtttaacgctgattgctgaaatcagcaccgcctggct

SEQ ID NO: 861137 - DNA, 75 bp, synthetic construct
  source 1..75: mol_type = other DNA
ttcttcgtgcaatcttgcgcccgtaaaagcaatcatgcagcatcatttcagaattaccacgccaccattgacggc

SEQ ID NO: 861138 - DNA, 75 bp, synthetic construct
  source 1..75: mol_type = other DNA
tttgtcattagcgatgagcgcgattatgccatttatgtgatttcactgaccccaaactcggaagtaaaaatcctc

SEQ ID NO: 861139 - DNA, 75 bp, synthetic construct
  source 1..75: mol_type = other DNA
tggatgagctggtggattgtgtggcggagctggaaaccaaagttggaaagtttgaaaagctggtgcaggaggtac

SEQ ID NO: 861140 - DNA, 75 bp, synthetic construct
  source 1..75: mol_type = other DNA
caccttggaatggccgcgcttggtccgattgattacttcaatgttcaggacaagatggctggtcgtgaaattgac

SEQ ID NO: 861141 - DNA, 75 bp, synthetic construct
  source 1..75: mol_type = other DNA
tcctgctgctggcggggagaatgttgtgcaactggcagatggtagaacggtaacggttggtaggaagcttcacgg

SEQ ID NO: 861142 - DNA, 75 bp, synthetic construct
  source 1..75: mol_type = other DNA
aaggtgatctggcgaaagcccaggctgcagccaatatcgcgcaattgacggtgaatcgttatcagaaactgctcg

SEQ ID NO: 861143 - DNA, 75 bp, synthetic construct
  source 1..75: mol_type = other DNA
tacgttgtatgcaaccgcagatgacaggcctgcggatgatcctgatgggcttgtgatatctgatgatgtgaagct

SEQ ID NO: 861144 - DNA, 75 bp, synthetic construct
  source 1..75: mol_type = other DNA
aaagaaattgaaggtgtaacgaataatatctcctcgctgacctggtcggcacagagcaataccctgtttagtact

SEQ ID NO: 861145 - DNA, 75 bp, synthetic construct
  source 1..75: mol_type = other DNA
aacgtatcagcattattattctttttgccattgtcgcagtgtgtgttttcttcgtgcaatcttgcgcgcgcaaaa

SEQ ID NO: 861146 - DNA, 75 bp, synthetic construct
  source 1..75: mol_type = other DNA
atgattatacatcattacatccatggagtgataaagattcactcgaaattatactcaatattattaatcgcaatg

SEQ ID NO: 861147 - DNA, 75 bp, synthetic construct
  source 1..75: mol_type = other DNA
gagagtctgaaagataaatactctactttatatatttttggtttttgtaaagcctcaagatacctaactccaagt

SEQ ID NO: 861148 - DNA, 75 bp, synthetic construct
  source 1..75: mol_type = other DNA
tgattcatcaggaacattaattggtgtaactgataaagctggcttaatagatagtaacggtaaattccccaatat

SEQ ID NO: 861149 - DNA, 75 bp, synthetic construct
  source 1..75: mol_type = other DNA
agaagttttgcttgttgaaggaaaaacagagacaaacgtcctatatgcactttataaaaaaattaacggacatga

SEQ ID NO: 861150 - DNA, 75 bp, synthetic construct
  source 1..75: mol_type = other DNA
cgtcattgcaaaaacaggcgctgaaaaaagcacgccgcaaagcgcatacatccgtagcgaatatcaaccgcaaaa

SEQ ID NO: 861151 - DNA, 75 bp, synthetic construct
  source 1..75: mol_type = other DNA
aacagctattgccatttacaccgttgctggtggtgatagcgcaatgctggaagcggtacgtaaaaaagtggttcg

SEQ ID NO: 861152 - DNA, 75 bp, synthetic construct
  source 1..75: mol_type = other DNA
gctcattgaggagtgccgcggagaatgcccgccccgtgtcaggaaaaattatattctccagtgtggcccgggccg

SEQ ID NO: 861153 - DNA, 75 bp, synthetic construct
  source 1..75: mol_type = other DNA
aaggaaaaaccatgtatgttctgcttccccagatagccagtttaaagttgtctgatgtctctggtatttttacct

SEQ ID NO: 861154 - DNA, 75 bp, synthetic construct
  source 1..75: mol_type = other DNA
tgaggagtgccgcggagaatgcccgccccgtgtcaggaaaaattatattctccagtgtggcccgggccggttcag

SEQ ID NO: 861155 - DNA, 75 bp, synthetic construct
  source 1..75: mol_type = other DNA
aaagctttcctttgagagagaaggtaaaacaacctatgtcctgctttccagagtaaacaatatcacgttctctga

SEQ ID NO: 861156 - DNA, 75 bp, synthetic construct
  source 1..75: mol_type = other DNA
aatccccaaccaattgcggttttgaaggattggcttattctcgccaggatcacactttctggttttttaaagaga

SEQ ID NO: 861157 - DNA, 75 bp, synthetic construct
  source 1..75: mol_type = other DNA
taccaaagattatgaccttggtgagttggcgcaaaaacataagcaggctgcaaatgagatctggttaatccgaga

SEQ ID NO: 861158 - DNA, 75 bp, synthetic construct
  source 1..75: mol_type = other DNA
caattagcaactttcgttcttgtaagtcaacatcggctattttgcgccccttcactgctttagttggttataata

SEQ ID NO: 861159 - DNA, 75 bp, synthetic construct
  source 1..75: mol_type = other DNA
tgcatttttcgcctgaagcgcaaaaaatatttattgagcactataatgttctggagcaggatttatccccttccg

SEQ ID NO: 861160 - DNA, 75 bp, synthetic construct
  source 1..75: mol_type = other DNA
gcgtggcgatgccaccgtactggtagttggcgcggatgacaaagtggaaacccgtccgatcgttgcaagccaggc

SEQ ID NO: 861161 - DNA, 75 bp, synthetic construct
  source 1..75: mol_type = other DNA
ataatgttctggagcaggatttgtctccttccggacccttaagccagtttcggggacatgtttcaaaaaaaacag

SEQ ID NO: 861162 - DNA, 75 bp, synthetic construct
  source 1..75: mol_type = other DNA
tggcctttcacacaacatcaagcaggcggaagggatagcgatggatgccagtggcaacatctatatcgttggcga

SEQ ID NO: 861163 - DNA, 75 bp, synthetic construct
  source 1..75: mol_type = other DNA
cgctgaatcacatagtttctttgctggaatggcggcaaggggtgatgactcgcaggcaaaaaatgtctccggagg

SEQ ID NO: 861164 - DNA, 75 bp, synthetic construct
  source 1..75: mol_type = other DNA
taggaaccttctcgctgatttcggtggctgatggcgggaatgtcgtatttgatgaaagcgctgtcaccgatattc

SEQ ID NO: 861165 - DNA, 75 bp, synthetic construct
  source 1..75: mol_type = other DNA
tggtgaataccggtgaaatgacggtgaccgaagatggccactcactcgtcaacggaagtttcctgttcttcaatg

SEQ ID NO: 861166 - DNA, 75 bp, synthetic construct
  source 1..75: mol_type = other DNA
actcctgacgatggcggcaatactcctgacgatggcggcaacacaccggacgatggcggcaatacccctgacgat

SEQ ID NO: 861167 - DNA, 75 bp, synthetic construct
  source 1..75: mol_type = other DNA
gagcatgaacagcggcagcgaaacggcgatggacagcatcgtcgggctgaaactggactacgcaggcaaagacgg

SEQ ID NO: 861168 - DNA, 75 bp, synthetic construct
  source 1..75: mol_type = other DNA
cgcgcgtgttaagcaaccgcttcagcatgctggcggatgcagcgccgaagatgggcaacggtctggcgttcaacg

SEQ ID NO: 861169 - DNA, 75 bp, synthetic construct
  source 1..75: mol_type = other DNA
acgctggcgttattaatgttcagggcgataatgcagtgggcatcagtggcggcacaaccagctatgttgtccagt

SEQ ID NO: 861170 - DNA, 75 bp, synthetic construct
  source 1..75: mol_type = other DNA
ttaatgtgacgtccagtatgggggaccaaccgtccacctcaccccagtcgttaaccggcgttaccatcgaggggg

SEQ ID NO: 861171 - DNA, 75 bp, synthetic construct
  source 1..75: mol_type = other DNA
tgatgggcggcgggatgttggccggttcaacggataccggcaacggtgatgcaaaagcggtgaataccggtacca

SEQ ID NO: 861172 - DNA, 75 bp, synthetic construct
  source 1..75: mol_type = other DNA
tcggtggctgatggcgggaatgtcgtatttgatgaaaatgcgataaccgagatccagagttcagtgagaaatact

SEQ ID NO: 861173 - DNA, 75 bp, synthetic construct
  source 1..75: mol_type = other DNA
tgcatttagcaacacaaacaaaacggctgataccgacgtgaagcagcagtacctggagttccgcagcgaaggggc

SEQ ID NO: 861174 - DNA, 75 bp, synthetic construct
  source 1..75: mol_type = other DNA
tcagtgagtgacgtggcgaaggcacttgatgcgggttataccaacaacgagctgtacaccagtctgaacgtgggc

SEQ ID NO: 861175 - DNA, 75 bp, synthetic construct
  source 1..75: mol_type = other DNA
tatgcgggactgaaactgcgtcacacgctggaaggcggttatcaggagcgtaatgccggagactttaacctgagc

SEQ ID NO: 861176 - DNA, 75 bp, synthetic construct
  source 1..75: mol_type = other DNA
atcgctcggttattgactataaaccaaaggttaaagatattactgcaataagtagatgggatgctttatttcctg

SEQ ID NO: 861177 - DNA, 75 bp, synthetic construct
  source 1..75: mol_type = other DNA
cgtgaagtcagaaagcttcttaatcaggtcttgcgtggtcgtgatgctgacggtatcgcatttcctgtcagtaac

SEQ ID NO: 861178 - DNA, 75 bp, synthetic construct
  source 1..75: mol_type = other DNA
gaagtgattttgatggcggactcatcaaagtttggccgtaaaagccccaacgtagttgcagtcttgaaagcgtcg

SEQ ID NO: 861179 - DNA, 75 bp, synthetic construct
  source 1..75: mol_type = other DNA
gttcggaaataacccggcagaaacccggatgagcggcggtggtgtcacttactacgtcgagcaagcccgcgaacg

SEQ ID NO: 861180 - DNA, 75 bp, synthetic construct
  source 1..75: mol_type = other DNA
actacgtcgagcaagcccgcgcagctgccgggcgtgaagatgaatggctgcccattcgccctggcaccgatggcg

SEQ ID NO: 861181 - DNA, 75 bp, synthetic construct
  source 1..75: mol_type = other DNA
gttcggaaataacccggcagaaacacggatgagcggcggtggtgtcacttactacgtcgagcaagcccgcgcagc

SEQ ID NO: 861182 - DNA, 75 bp, synthetic construct
  source 1..75: mol_type = other DNA
cagtatctggaattccgtagtgaaggggcaaaaacctttgagctgcgtgaagggctgaacgtcactccatatgcc

SEQ ID NO: 861183 - DNA, 75 bp, synthetic construct
  source 1..75: mol_type = other DNA
gctcgatagcttacggcgacgtcaacaaaaccgctgatgctaatgtgaaacagcagtatctggaattccgtagtg

SEQ ID NO: 861184 - DNA, 75 bp, synthetic construct
  source 1..75: mol_type = other DNA
ttctaaccagcgcaaaatagttaccgaaggtgataaatccagcgtggtaaataacccaaccggcagaaaacgtcc

SEQ ID NO: 861185 - DNA, 75 bp, synthetic construct
  source 1..75: mol_type = other DNA
ctgactccatcggtattcagatagacggcgacaaggcggtcgtgaacaacgacggtgacaacgccatcagcaacg

SEQ ID NO: 861186 - DNA, 75 bp, synthetic construct
  source 1..75: mol_type = other DNA
acaacagcggcaataccaccgttgatggtcagggttcgaccggtactgaaatcgcgggtaacaacgcggtggtga

SEQ ID NO: 861187 - DNA, 75 bp, synthetic construct
  source 1..75: mol_type = other DNA
ccaaagcgtggctttataaccaggataaggccaacctgacaattaacggagagctatccatcgggcaagggctgg

SEQ ID NO: 861188 - DNA, 75 bp, synthetic construct
  source 1..75: mol_type = other DNA
gcatggaaggcaagcgcgtggtggtgcttggcggcggcgataccgcgatggactgtgtgcggacttccgtgcgtc

SEQ ID NO: 861189 - DNA, 75 bp, synthetic construct
  source 1..75: mol_type = other DNA
ctggaatttaccccggcaatgcgtgttggttgcctgatgtacatcgctttcctgtacgagaaccgggaagcggtt

SEQ ID NO: 861190 - DNA, 75 bp, synthetic construct
  source 1..75: mol_type = other DNA
accggcacggaaatcgcgggtaataacgctgtagtgaatcaggacggtacgctggacgtcagcggcggcggtcac

SEQ ID NO: 861191 - DNA, 75 bp, synthetic construct
  source 1..75: mol_type = other DNA
acagttcctgcagacactggaaaaagacggtggcgtgtacagttctgccgaggctgcagacgttcttggccgcag

SEQ ID NO: 861192 - DNA, 75 bp, synthetic construct
  source 1..75: mol_type = other DNA
gtatttacgggtagggaatgggccgcggttatctctcatgtgcttccggttaatgacgtcatggcagtttcagaa

SEQ ID NO: 861193 - DNA, 75 bp, synthetic construct
  source 1..75: mol_type = other DNA
gaccgtctgtgcgaaggttcctgcaccctgaacgatgagttcggcgcagtgaccatcggcaacattgagcgttat

SEQ ID NO: 861194 - DNA, 75 bp, synthetic construct
  source 1..75: mol_type = other DNA
aaactgcgtcacacactggaaggtggctatcaggaacgcaatgcgggtgactttaacctgagcatgaacagcggc

SEQ ID NO: 861195 - DNA, 75 bp, synthetic construct
  source 1..75: mol_type = other DNA
gtgaatcaggacggcttactggatgtgagcggcggcggtcacggcattgatatcactggtgatagcgccactgta

SEQ ID NO: 861196 - DNA, 75 bp, synthetic construct
  source 1..75: mol_type = other DNA
ccggattccatcggtattctgatcgacggcgacaaagccatcgtcaacaacgacggtgacaacgccatcagtaac

SEQ ID NO: 861197 - DNA, 75 bp, synthetic construct
  source 1..75: mol_type = other DNA
caggtacggaaatcgcgggtaataacgctgtagtgaatcaggacggcacgctggatgtcagcggcggtgctcacg

SEQ ID NO: 861198 - DNA, 75 bp, synthetic construct
  source 1..75: mol_type = other DNA
ggatctggtcccttggcgatacgagtagtggtagtaatgccagcatgctggaaattaataataatgccgtgttca

SEQ ID NO: 861199 - DNA, 75 bp, synthetic construct
  source 1..75: mol_type = other DNA
caacattggtaacgacgccagaggatattctgttggtatgggcgttgggacagatgctggcagtgtaccgaggaa

SEQ ID NO: 861200 - DNA, 75 bp, synthetic construct
  source 1..75: mol_type = other DNA
ctgcccgcgcggtgctggagaaagaaggttttcgttaccgcaactatatcgacatcttcgacggcgggccaacgc

SEQ ID NO: 861201 - DNA, 75 bp, synthetic construct
  source 1..75: mol_type = other DNA
aaggcaccctgatgcccctttctctttagggggacagtttatttttgagattagttatcgtggtaaaactctggt

SEQ ID NO: 861202 - DNA, 75 bp, synthetic construct
  source 1..75: mol_type = other DNA
actcaacaccttgtgtaaaaaaaagtcgtggccgcccaaaagtgttcgacagggacgccgcacttgataaggcca

SEQ ID NO: 861203 - DNA, 75 bp, synthetic construct
  source 1..75: mol_type = other DNA
cgcgtggtgctggtgcgtagcgatccggctaccgagcgtttgattttaaccgccgcacaactggacgctctcaag

SEQ ID NO: 861204 - DNA, 75 bp, synthetic construct
  source 1..75: mol_type = other DNA
aaagtcacccacagcaactttattgcccagaatgacggcatcatgaacatcagcggcaccggtgctgtggctatg

SEQ ID NO: 861205 - DNA, 75 bp, synthetic construct
  source 1..75: mol_type = other DNA
gcaaaatggcgattttctttatctttgccatgctgctcggggcagagttacaaattaccgggatgtttggtaata

SEQ ID NO: 861206 - DNA, 75 bp, synthetic construct
  source 1..75: mol_type = other DNA
cgatacgcatctggggaacgatcggatttattgttgcgatgtgggcggtgagtctggcggggtttgaattaagcc

SEQ ID NO: 861207 - DNA, 75 bp, synthetic construct
  source 1..75: mol_type = other DNA
ggctattcaccgttctggcaaagcctcggtaaacgcttcttttcgatggattttagccgcgccgattttctctgc

SEQ ID NO: 861208 - DNA, 75 bp, synthetic construct
  source 1..75: mol_type = other DNA
cggcaacccagcgtttgattttaaccgccgcacaactggacgctctcaagtgccacgccggggatcgcgttcgtc

SEQ ID NO: 861209 - DNA, 75 bp, synthetic construct
  source 1..75: mol_type = other DNA
atgatggtcatccgtcccgttgagcgctcagatgtctcggcgctgatgcagcttgccagcaaaacgggcggcggc

SEQ ID NO: 861210 - DNA, 75 bp, synthetic construct
  source 1..75: mol_type = other DNA
tggagtgtgacatcgaccgcgttcgcgccattcgcaaaagccggctggtggaagtggcagaagggcaacccgcac

SEQ ID NO: 861211 - DNA, 75 bp, synthetic construct
  source 1..75: mol_type = other DNA
atgatggtcatccgtcccgttgagcgttcagatatctcggcgctgatgcagcttgccagcaaaactggcggcggc

SEQ ID NO: 861212 - DNA, 75 bp, synthetic construct
  source 1..75: mol_type = other DNA
tcgacccggactggcgcaaagagggcaacggctatttgctgtcgaaatcgcgctttatgtttatggcggcttttc

SEQ ID NO: 861213 - DNA, 75 bp, synthetic construct
  source 1..75: mol_type = other DNA
agtacgacatgatggcgctgcgtaaatccatgacactgactgaatatcagaatctgagtctggaatacggtattg

SEQ ID NO: 861214 - DNA, 75 bp, synthetic construct
  source 1..75: mol_type = other DNA
cggcgctggggctaatgcgttctacgaaggtatcgacaacgaggggaatatggttcgcgttcctgctggctctat

SEQ ID NO: 861215 - DNA, 75 bp, synthetic construct
  source 1..75: mol_type = other DNA
gctggcgcacgccttgcggcctcgtctccagaagcaatgcaatcatggctgcaaaacaacgccaaggaactggcg

SEQ ID NO: 861216 - DNA, 75 bp, synthetic construct
  source 1..75: mol_type = other DNA
cgcgggcaggatttggcaatgcagcgagcgtcaacaagaggaaccgctgggaatgatgagcgtacagttcagtta

SEQ ID NO: 861217 - DNA, 75 bp, synthetic construct
  source 1..75: mol_type = other DNA
gctgcattccaaaaagaatatgcggcagccatccagtcaggtgatcggcagcaggtgcgagatctgatgaccaaa

SEQ ID NO: 861218 - DNA, 75 bp, synthetic construct
  source 1..75: mol_type = other DNA
gttggtaaatctcagcggcagcaatctcaacctacacaggtatcacagccagcagccggcagtaacttttcttca

SEQ ID NO: 861219 - DNA, 75 bp, synthetic construct
  source 1..75: mol_type = other DNA
aggaaactatacaacgctgcacagcgaatccaaggaaagatgcagaatcagggcattgcagcagccagagacatg

SEQ ID NO: 861220 - DNA, 75 bp, synthetic construct
  source 1..75: mol_type = other DNA
caggggtattttagtaattacttaagtacacgccagcgtaaagagttgagcgaggttatacttaacttgatccta

SEQ ID NO: 861221 - DNA, 75 bp, synthetic construct
  source 1..75: mol_type = other DNA
ttccgaaataaacaatatcacgttagctgagctgaatgtgtactacagccagaaccagataagatggcgtgatca

SEQ ID NO: 861222 - DNA, 75 bp, synthetic construct
  source 1..75: mol_type = other DNA
atgaagcccctgtaccagcaggagatgcagttatattccagatacaaaagtgaactggctgtctggaaaaacaag

SEQ ID NO: 861223 - DNA, 75 bp, synthetic construct
  source 1..75: mol_type = other DNA
aacgaggggaatatggttcgcgttcctgccagttcaatcgctgctcctgcaacatcgtctgcatcagcacaaaac

SEQ ID NO: 861224 - DNA, 75 bp, synthetic construct
  source 1..75: mol_type = other DNA
tcaatgacgccgtgaaagaaaatgctatcaggcagataagggagattaagcctgatagcaaaagcccgctgataa

SEQ ID NO: 861225 - DNA, 75 bp, synthetic construct
  source 1..75: mol_type = other DNA
gcgctgctaacagacgttagcgatcaggttaactggtacggcaagaagctgtcgccggaagactggaaggcggtg

SEQ ID NO: 861226 - DNA, 75 bp, synthetic construct
  source 1..75: mol_type = other DNA
gatgttcggcaaaaggctgacatagcccgcgctgacaggcaggccgccgctcagggtgcagttgatacgttcagc

SEQ ID NO: 861227 - DNA, 75 bp, synthetic construct
  source 1..75: mol_type = other DNA
aaagtggtactgccattaatgaacagtccggcgtaattaatatcaatgctgacaatgggcaggcgttttatagtg

SEQ ID NO: 861228 - DNA, 75 bp, synthetic construct
  source 1..75: mol_type = other DNA
tcaccagttgagcactcggaactgcctatggctatttctgcgctctggtcggtttatcgtgatgtgggggggtac

SEQ ID NO: 861229 - DNA, 75 bp, synthetic construct
  source 1..75: mol_type = other DNA
agctgcgtttgctgcccctgaagcagcaaacgggaccgaggcaacgacgggtactactggcaccacaacgaccac

SEQ ID NO: 861230 - DNA, 75 bp, synthetic construct
  source 1..75: mol_type = other DNA
gccacagtaaacaacaatggcaaaaccatcgttgatggtaaagattccactggcacggagatcgccggtaataac

SEQ ID NO: 861231 - DNA, 75 bp, synthetic construct
  source 1..75: mol_type = other DNA
cagaaagaaaccgacatcaataaccgtactgacggattactgatgaccgaacgccaggcacgcatcgcaggtgat

SEQ ID NO: 861232 - DNA, 75 bp, synthetic construct
  source 1..75: mol_type = other DNA
cagtggtaataacaacagtgtgacgttggcggcgaaagatctgaacgtgaccgggcagaaggcaacgggcgtcaa

SEQ ID NO: 861233 - DNA, 75 bp, synthetic construct
  source 1..75: mol_type = other DNA
catgattattgcggctatggatgtgtggaacgtccaacctgaagagaagctggagtttattgagaagatgaaaca

SEQ ID NO: 861234 - DNA, 75 bp, synthetic construct
  source 1..75: mol_type = other DNA
cttggcgatcaggacagaatcaaaattgcgcggaaaacacttaaagaatgggctgacctgcaactgattgataaa

SEQ ID NO: 861235 - DNA, 75 bp, synthetic construct
  source 1..75: mol_type = other DNA
gttgatcaccttgggatggctgctctcggtccgattgactacttcaatgttcaggacaagatggctggtcgccag

SEQ ID NO: 861236 - DNA, 75 bp, synthetic construct
  source 1..75: mol_type = other DNA
caccagcaatggtgacagggtcagggcaaaaatttacaagcgcggctctattcaattccaaggaaaataccttca

SEQ ID NO: 861237 - DNA, 75 bp, synthetic construct
  source 1..75: mol_type = other DNA
acaacatcaagccgaacgatgacggtgaaacgttcacccttaccctgagccgggaagatgttgatgcgtttcagg

SEQ ID NO: 861238 - DNA, 75 bp, synthetic construct
  source 1..75: mol_type = other DNA
gcgttcttcggaaaaatatgcggcgggcgggcgtagccgttttaatttaactgactatgactatttatttggtca

SEQ ID NO: 861239 - DNA, 75 bp, synthetic construct
  source 1..75: mol_type = other DNA
atgtctttacaggaagaggaactcgtatccagtcatgccgggcagcctgagcaggcatcgtcgctgcttgatcaa

SEQ ID NO: 861240 - DNA, 75 bp, synthetic construct
  source 1..75: mol_type = other DNA
cagaagttatttatgacatgaaaaaatttgtttatccgccttgttgtgattggccgggttttaatgatttccctt

SEQ ID NO: 861241 - DNA, 75 bp, synthetic construct
  source 1..75: mol_type = other DNA
cagatgaccacgaggcaggcatattctgccattgcccgcctgtttaacgatgagtggtggattcatcagcttaaa

SEQ ID NO: 861242 - DNA, 75 bp, synthetic construct
  source 1..75: mol_type = other DNA
gagcttgaggcgctggcgcgtggcgcgaccgtaaattataacgggaaaaaattcacgtatccggtcgctgatgag

SEQ ID NO: 861243 - DNA, 75 bp, synthetic construct
  source 1..75: mol_type = other DNA
gtttacggatgaggcgcaggcgcatctgtatggtcatgttgctggcgctgcacgtgctttcaatatttccccgct

SEQ ID NO: 861244 - DNA, 75 bp, synthetic construct
  source 1..75: mol_type = other DNA
ctcatcgcagcttttcataatgtatgaggaactctgcgatgcctgggtggatgcgcatggcgagaaagaatcgct

SEQ ID NO: 861245 - DNA, 75 bp, synthetic construct
  source 1..75: mol_type = other DNA
ctggttgatgacggtgttattgaatggaatgaccaggaggtcgtgagggcgctcaggggcgcattaaaacgaggt

SEQ ID NO: 861246 - DNA, 75 bp, synthetic construct
  source 1..75: mol_type = other DNA
ttgcctcttcgttactgccaaaaatatctaagcgcaccggcgacacgttcgtcggcgcttactcatggaatgccc

SEQ ID NO: 861247 - DNA, 75 bp, synthetic construct
  source 1..75: mol_type = other DNA
agagtatttcaatatttgatactgaaacttataaatctttcgaagatttttctacgcctgaccagaccaaagtca

SEQ ID NO: 861248 - DNA, 75 bp, synthetic construct
  source 1..75: mol_type = other DNA
ttaccttgctagttataagctcagttatcaatttttttggttatttttggcctaagttacatgtggacttttatt

SEQ ID NO: 861249 - DNA, 75 bp, synthetic construct
  source 1..75: mol_type = other DNA
cgtctgccggggatgaatgacaaggagctgaaaaagtttgctgcccgtatctcatcgcagcttttcatgatgtat

SEQ ID NO: 861250 - DNA, 75 bp, synthetic construct
  source 1..75: mol_type = other DNA
gcgaactgcgcaagctgccgcgcggcgtgagtatcgccagtgagtttgacgaccgggtcgaggctgtccgggctg

SEQ ID NO: 861251 - DNA, 75 bp, synthetic construct
  source 1..75: mol_type = other DNA
aaaagatgagtggtgggtcagccagctcaaggcgcagcggatgcgctggcgcgaggcgctgcttattgcggctgg

SEQ ID NO: 861252 - DNA, 75 bp, synthetic construct
  source 1..75: mol_type = other DNA
gacctgggcgaaaacaaaggtgtgaacctgccaggcgtttctattgccctgccggcactggctgaaaaagacaaa

SEQ ID NO: 861253 - DNA, 75 bp, synthetic construct
  source 1..75: mol_type = other DNA
taaatcagcgaatcgaagctatgttaaaatctgatggttttaataatgaagtggtcaacaaaaactggccaccga

SEQ ID NO: 861254 - DNA, 75 bp, synthetic construct
  source 1..75: mol_type = other DNA
gtattgagcgttacgccgcagcagagggtgatgtggggatgtttatcacgctgaccgcgccgtcaaagtatcacc

SEQ ID NO: 861255 - DNA, 75 bp, synthetic construct
  source 1..75: mol_type = other DNA
gaaacggaagcccgttaaaaccacatgaaattgcaccatcggccagactggcccggtcggaaagaatgcaaatta

SEQ ID NO: 861256 - DNA, 75 bp, synthetic construct
  source 1..75: mol_type = other DNA
tgatatattatcaggtggaagtatatctctgatcagcgtgtcagacgtcaagagaatcagtcaggcatttaacgg

SEQ ID NO: 861257 - DNA, 75 bp, synthetic construct
  source 1..75: mol_type = other DNA
aagaggcccggcgacagctggaggggttgcgtgacaacaagctgacgctggggctgcagtccactcaaaaagacg

SEQ ID NO: 861258 - DNA, 75 bp, synthetic construct
  source 1..75: mol_type = other DNA
tgccgctggcggagataccgaccgttctgcgggacattgccatcacgctggtccgttaccggctctacgcccgcc

SEQ ID NO: 861259 - DNA, 75 bp, synthetic construct
  source 1..75: mol_type = other DNA
gctcagaggcgcattaaaatacggcctgagaagaccaaaccgtcagcaaagaaacggaataccgttaaaaccgca

SEQ ID NO: 861260 - DNA, 75 bp, synthetic construct
  source 1..75: mol_type = other DNA
cgaccgtaaattatgacggggaaaaattcacgtatccggtcgctgatgagtggccgggattctcaacaaacatat

SEQ ID NO: 861261 - DNA, 75 bp, synthetic construct
  source 1..75: mol_type = other DNA
gaatggaatcttgccccagcgatgggagcttgaggcgctggcgcgtggggcaaccgtaaattatgacgggaaaca

SEQ ID NO: 861262 - DNA, 75 bp, synthetic construct
  source 1..75: mol_type = other DNA
tgacgaacacggtcagctgtatgtggcctcagaaatgaaagcgctggtgccagtttgccgcacgattaaagagtt

SEQ ID NO: 861263 - DNA, 75 bp, synthetic construct
  source 1..75: mol_type = other DNA
tatttccgcgatcaccaagaaatacgccgcccgtcgcgtggaagatcaggaacgctctgaagcctggtggccgca

SEQ ID NO: 861264 - DNA, 75 bp, synthetic construct
  source 1..75: mol_type = other DNA
tatttcggctatcaccaaaaaatacgccgcccgccgcgtggaagatcaggaacgttcagaagcctggtggccgca

SEQ ID NO: 861265 - DNA, 75 bp, synthetic construct
  source 1..75: mol_type = other DNA
gcggcgactgctgaacaccacaggtcaggacaccggtatcagcgtgccgtccgtcattcctgacagcgcatttgt

SEQ ID NO: 861266 - DNA, 75 bp, synthetic construct
  source 1..75: mol_type = other DNA
tggtgaaagcagccatgatgtgtgggaagagttcgaagtggggaaacttccttctatccagagaagaaagtcttt

SEQ ID NO: 861267 - DNA, 75 bp, synthetic construct
  source 1..75: mol_type = other DNA
gaagagttcgaatggggaaacttccttctatccagagaagaaagtcttttacttcacactattcagtctgaacga

SEQ ID NO: 861268 - DNA, 75 bp, synthetic construct
  source 1..75: mol_type = other DNA
atggtatcacaggaaattctcttaaatggttcttttgataagtggagtgacagggtgcattcagcttatgaaaat

SEQ ID NO: 861269 - DNA, 75 bp, synthetic construct
  source 1..75: mol_type = other DNA
actttacacgattcagtctgaacgattgagtacagattgctctttattcaaaagacaaccgtctattgaaagtgc

SEQ ID NO: 861270 - DNA, 75 bp, synthetic construct
  source 1..75: mol_type = other DNA
tttatcaccggatggctaataaatgtagccttaaaaccatttccatacctgaacttgattttataattgatagtg

SEQ ID NO: 861271 - DNA, 75 bp, synthetic construct
  source 1..75: mol_type = other DNA
atgtatatacatattgttcctaaactttatcatcttatggctaataaatgtagccttaaatctatttccatacct

SEQ ID NO: 861272 - DNA, 75 bp, synthetic construct
  source 1..75: mol_type = other DNA
tttttcatcgtatgtcgaataaatgcagcctgaaatccatttccatacctgaaattgattttttagttaatagcg

SEQ ID NO: 861273 - DNA, 75 bp, synthetic construct
  source 1..75: mol_type = other DNA
ttatatagaagatgatgaatttgatatggtgtcacaggaatttcttttaaacggtgcttttgataagtggagcga

SEQ ID NO: 861274 - DNA, 75 bp, synthetic construct
  source 1..75: mol_type = other DNA
attgcactgctgagacaacgacaacaccggattgaggaactgaaacgtgagagcgaggatttacgccgctgggct

SEQ ID NO: 861275 - DNA, 75 bp, synthetic construct
  source 1..75: mol_type = other DNA
cagtctgaacgattgaatacagattgttctttattcaaaagacaaccgtctattgaaagtgcattagttatataa

SEQ ID NO: 861276 - DNA, 75 bp, synthetic construct
  source 1..75: mol_type = other DNA
tttttcatcgaatggctaataaatgtagtcttaaatctatctccatacctgaatttaatttaactattgatgata

SEQ ID NO: 861277 - DNA, 75 bp, synthetic construct
  source 1..75: mol_type = other DNA
tcatatcaagagaagaaagcatcttgcttcacacgatccagtctgaacgattaaacaccgacttctctttattca

SEQ ID NO: 861278 - DNA, 75 bp, synthetic construct
  source 1..75: mol_type = other DNA
gcaagggcaggctattttcaccgccacgaccactgtcgcagcgacatatacactcacggcgaaagtggaacaggc

SEQ ID NO: 861279 - DNA, 75 bp, synthetic construct
  source 1..75: mol_type = other DNA
tccagcatacaaccttgatggccttcgtcactttgcagtaaaggatgagcgaccatcacttgtcagttatatcga

SEQ ID NO: 861280 - DNA, 75 bp, synthetic construct
  source 1..75: mol_type = other DNA
tggctgtacgtttcttaccctaagcagagaatgatgccttggggtgaccttaggtttcagcggaaatcccgattt

SEQ ID NO: 861281 - DNA, 75 bp, synthetic construct
  source 1..75: mol_type = other DNA
aagctgagtattgaagagcttaaagagtttagtggtatgtggactcgatttaagcgtaaggggttaggtgattca

SEQ ID NO: 861282 - DNA, 75 bp, synthetic construct
  source 1..75: mol_type = other DNA
acggctggaatgttcaaggaaggcacagagggcaccggagccgccggataatttcggagacctgaaaaaggcacg

SEQ ID NO: 861283 - DNA, 75 bp, synthetic construct
  source 1..75: mol_type = other DNA
acaattgatgaaattcagtccaccgagacactgatcgtcctgcagaacccgatcatgcgcactatcaagccatga

SEQ ID NO: 861284 - DNA, 75 bp, synthetic construct
  source 1..75: mol_type = other DNA
ccgcgctggcaaagctggaaagccttgatgaagtcactgaagcctattacaccaccggccactacagcatcttta

SEQ ID NO: 861285 - DNA, 75 bp, synthetic construct
  source 1..75: mol_type = other DNA
atgatcgttttagtaactggagcaacggcaggttttggtgaatgcattactcgtcgttttattcaacaagggcat

SEQ ID NO: 861286 - DNA, 75 bp, synthetic construct
  source 1..75: mol_type = other DNA
gccattctggatggtactgacgcagttatgctgtctggtgaatccgcaaaaggtaagtatccgctggaagctgtt

SEQ ID NO: 861287 - DNA, 75 bp, synthetic construct
  source 1..75: mol_type = other DNA
atgacgctcgcagaactgggcatggccttctggcatgatttagcggctccggtcattgctggcattcttgccagt

SEQ ID NO: 861288 - DNA, 75 bp, synthetic construct
  source 1..75: mol_type = other DNA
agatgatctatggttttaatggttcatcatcagattattttattaaatcattcgtgaaagattttactcctaaaa

SEQ ID NO: 861289 - DNA, 75 bp, synthetic construct
  source 1..75: mol_type = other DNA
actgaatttaaaaagacatccagaaattgagggcgatattgattgctctaaaattgttgttataggtagaaatag

SEQ ID NO: 861290 - DNA, 75 bp, synthetic construct
  source 1..75: mol_type = other DNA
acccgtgaggcagaattggaaaagataagactgcttaaacaggcccatactgccattgccacattgcaggatgct

SEQ ID NO: 861291 - DNA, 75 bp, synthetic construct
  source 1..75: mol_type = other DNA
atgacacagggctggcgggaggataaatgcccgtctgcccgcgccgggaaaacaccgcgcgtcggtggcgctgaa

SEQ ID NO: 861292 - DNA, 75 bp, synthetic construct
  source 1..75: mol_type = other DNA
atgacacagggctggcgggaggataaatgcccgtctgtccgcgccgggaaaataccgcgcgtcggtggcgctgaa

SEQ ID NO: 861293 - DNA, 75 bp, synthetic construct
  source 1..75: mol_type = other DNA
atgacacagggctggcgggaggataaatgcccgtctgtccgcgctgggaaaacaccgcgcgtcggtggcgctgaa

SEQ ID NO: 861294 - DNA, 75 bp, synthetic construct
  source 1..75: mol_type = other DNA
cggggaacacactggcttaacctgaaaatagatgcgatcaattcaggtattaagttaaccaggatggatttgctc

SEQ ID NO: 861295 - DNA, 75 bp, synthetic construct
  source 1..75: mol_type = other DNA
atgacacagggctggcgggaggataaatgcccgtctggccgcgcggggaaaacaccgcgcgtcggtggcgctgaa

SEQ ID NO: 861296 - DNA, 75 bp, synthetic construct
  source 1..75: mol_type = other DNA
atgacacagggctggcgggaggataaatgcccgtctggccgcgccgggaaaagaccgcgcgtcggtggcgctgaa

SEQ ID NO: 861297 - DNA, 75 bp, synthetic construct
  source 1..75: mol_type = other DNA
atgagtaacaaaatcgaaaaccccgtagttctcattcacaagcgtgagaaccacgactcctatgcagtgacgatc

SEQ ID NO: 861298 - DNA, 75 bp, synthetic construct
  source 1..75: mol_type = other DNA
caaaaaacgccgcaggatgtggtggatgttctggcaaaggcagcaaaagagacggctgaagagcctgcattccag

SEQ ID NO: 861299 - DNA, 75 bp, synthetic construct
  source 1..75: mol_type = other DNA
agacctgtcatttgcctgttactgatgatgttgttgttcctgctactgctactgctactgctactgctactgctc

SEQ ID NO: 861300 - DNA, 75 bp, synthetic construct
  source 1..75: mol_type = other DNA
atgacacagggctggcgggaggataaatgcccgtctgaccgcgccgggaaaaaaccgcgcgtcggtggcgctgaa

SEQ ID NO: 861301 - DNA, 75 bp, synthetic construct
  source 1..75: mol_type = other DNA
atgacacagggctggcgggaggataaatgcccgtctgaccgcgcagggaaaacaccgcgcgtcggtggcgctgaa

SEQ ID NO: 861302 - DNA, 75 bp, synthetic construct
  source 1..75: mol_type = other DNA
acgagcgcagggcgtggagatgtttgcagagtgcgcatacacacttgaacatcatgatcacgcagtagccttcgc

SEQ ID NO: 861303 - DNA, 75 bp, synthetic construct
  source 1..75: mol_type = other DNA
atggtttacaccggggacgggcgcgtggtgtgggtcggtaaggatgtgacaggcattgaaccccgtaacgccagt

SEQ ID NO: 861304 - DNA, 75 bp, synthetic construct
  source 1..75: mol_type = other DNA
cagttattgaaaatgcatgcgccgcaggcgaaagtgctggccgcgagtttcaaaaccccgcgtcaggcgctggac

SEQ ID NO: 861305 - DNA, 75 bp, synthetic construct
  source 1..75: mol_type = other DNA
atggaactgtatctggatacttcagacgttgctgcagtgaaggcgctggcgcgcgtttttccgctggcgggtgtg

SEQ ID NO: 861306 - DNA, 75 bp, synthetic construct
  source 1..75: mol_type = other DNA
aaaggtaatatggcgacactcgccagaatggatttgacgcctacagcatttagaattgtgatttatctcttctca

SEQ ID NO: 861307 - DNA, 75 bp, synthetic construct
  source 1..75: mol_type = other DNA
agacatcatccaaatgatcaatgacatgggcattcaggtgatggaagaagcgccggatgccgatgacctgatgct

SEQ ID NO: 861308 - DNA, 75 bp, synthetic construct
  source 1..75: mol_type = other DNA
gcagatgattagctatccggcggtcgatgccgccgtggcgaagtttgagcaggactggcagggggcgtttggccg

SEQ ID NO: 861309 - DNA, 75 bp, synthetic construct
  source 1..75: mol_type = other DNA
gaatgggaaaaagacctgctgctgggattaatcagtgacgaagacagggagaagctgaaagcgtaccgcatttac

SEQ ID NO: 861310 - DNA, 75 bp, synthetic construct
  source 1..75: mol_type = other DNA
ataccagctggcgcgacagcataaatttttattgtggctgttctccgatgatggtcaggaatggcacgaagccca

SEQ ID NO: 861311 - DNA, 75 bp, synthetic construct
  source 1..75: mol_type = other DNA
acaaaaacgttacgggagatgacattcagccaggttacagataaagcatcgtatgccgcgattgtatggccagaa

SEQ ID NO: 861312 - DNA, 75 bp, synthetic construct
  source 1..75: mol_type = other DNA
ctaaagaacaaaaagcaatcattgcagaagcattagatgttatgcccgaagatctggaagaaataaaagttaaag

SEQ ID NO: 861313 - DNA, 75 bp, synthetic construct
  source 1..75: mol_type = other DNA
gaaagcgtaccgcatttacgcgaaatcgctgcaggcgatggatttcagcaccatcactgataaatcctcatataa

SEQ ID NO: 861314 - DNA, 75 bp, synthetic construct
  source 1..75: mol_type = other DNA
gatttcagccccatcactgataaagcttcatataacgccattgaatggcccgtctctcctgaagcctcttcctga

SEQ ID NO: 861315 - DNA, 75 bp, synthetic construct
  source 1..75: mol_type = other DNA
gggcttctgttttttcatgcctgtcatttgtctgttactgatgatgttgttgttcctgctactgctactgctact

SEQ ID NO: 861316 - DNA, 75 bp, synthetic construct
  source 1..75: mol_type = other DNA
cgaccgtattcatacctcctatgaaaacgtgctcggtaaaaataacgttgatgtaatcaaaggctttgcccgctt

SEQ ID NO: 861317 - DNA, 75 bp, synthetic construct
  source 1..75: mol_type = other DNA
tggtgatacagctataaagtatttgcaaggagcccttatagagaatggtctgaatacatctttttatgccttaca

SEQ ID NO: 861318 - DNA, 75 bp, synthetic construct
  source 1..75: mol_type = other DNA
aaaaaagaactaacgttatggtctaggttggcatatgaaaatagtttttcatgtcctatatttatctttatagat

SEQ ID NO: 861319 - DNA, 75 bp, synthetic construct
  source 1..75: mol_type = other DNA
atatcgtcgtcgataaatatcaaaacaccaacgttgaaggtatttacgcggtgggcgataacacgggtgcagtgg

SEQ ID NO: 861320 - DNA, 75 bp, synthetic construct
  source 1..75: mol_type = other DNA
tgatctctgaaacgctggtcgaagtgatgaacgccgaaggcccgcagttgcacaccaacgccatcccgaaagcag

SEQ ID NO: 861321 - DNA, 75 bp, synthetic construct
  source 1..75: mol_type = other DNA
ggcgttaaaaccaacgaaaaaggttatatcgtcgtcgataaatatcaaaatactaacgttgaaggtatttacgcg

SEQ ID NO: 861322 - DNA, 75 bp, synthetic construct
  source 1..75: mol_type = other DNA
atgttaattcaatcactgttgataaatggatatatacaggaaaatctctttattctgcttacaataccaaacaag

SEQ ID NO: 861323 - DNA, 75 bp, synthetic construct
  source 1..75: mol_type = other DNA
taattaaagatggttattccgttgatattaaagatgcctgccgaattgttatcagaaaaggccgttatttacaaa

SEQ ID NO: 861324 - DNA, 75 bp, synthetic construct
  source 1..75: mol_type = other DNA
acgttcctgtttcgcaaccaatcatcattaacgctgctggttacccggtatataacggacagattgccaagttcg

SEQ ID NO: 861325 - DNA, 75 bp, synthetic construct
  source 1..75: mol_type = other DNA
ctgacgctgattaacccgacaccctattacctgacggtaacagagttgaatgccggaacccgggttcttgaaaat

SEQ ID NO: 861326 - DNA, 75 bp, synthetic construct
  source 1..75: mol_type = other DNA
caggcctggtcgctaaaggcatcaccattgagttgttctgtgcgcctgacgaaattccctctgcccgattaccga

SEQ ID NO: 861327 - DNA, 75 bp, synthetic construct
  source 1..75: mol_type = other DNA
tttttactgataactatccgcatggtgcttattctcttttaccgccatttattacacatggccagttttctgttc

SEQ ID NO: 861328 - DNA, 75 bp, synthetic construct
  source 1..75: mol_type = other DNA
actgttggtttaacggaaccgcaggcgcgcgagcagtacggcgacgatcaggtgaaagtgtataaatcctctttc

SEQ ID NO: 861329 - DNA, 75 bp, synthetic construct
  source 1..75: mol_type = other DNA
gtttcaatacctgaaacacttaccgatttaccgaaagatattgatgccatcatttttacactcggctctgatggt

SEQ ID NO: 861330 - DNA, 75 bp, synthetic construct
  source 1..75: mol_type = other DNA
cgaaactacgaaactacgaaactacgaaactacgaaactacgaaactacgaaactacgaaactacgaaactacga

SEQ ID NO: 861331 - DNA, 75 bp, synthetic construct
  source 1..75: mol_type = other DNA
tcttaggaagagattaaaagattactcacgggaattgatggtattcaaaggaagagctagccaacgcccaatctg

SEQ ID NO: 861332 - DNA, 75 bp, synthetic construct
  source 1..75: mol_type = other DNA
aggggccgcgctcacgcgccgcccctttcattacgcggacgttctgctgtgggcttctgtcttttcagacctgtc

SEQ ID NO: 861333 - DNA, 75 bp, synthetic construct
  source 1..75: mol_type = other DNA
ccattagtgatgacgcgacttgctgccttgctgccaggaacggaagtgaccaccactgatgctgtcggcattagc

SEQ ID NO: 861334 - DNA, 75 bp, synthetic construct
  source 1..75: mol_type = other DNA
atttgccagggacagcagcttacactttcgcagtttggtcaactggatactcaacttggtcgcctgtttgccgat

SEQ ID NO: 861335 - DNA, 75 bp, synthetic construct
  source 1..75: mol_type = other DNA
ccttttgctcacactgtttgcaaagatgcagcattttactttgctcctcatgatgttgaaaatattaggagtaca

SEQ ID NO: 861336 - DNA, 75 bp, synthetic construct
  source 1..75: mol_type = other DNA
aagccaaagaactgggcggcacctgcgtgaacgtcggctgcgtaccgaagaaagtgatgtggcacgcggcgcaaa

SEQ ID NO: 861337 - DNA, 75 bp, synthetic construct
  source 1..75: mol_type = other DNA
tccgagccacccggatattccgggcgtggaatacggtattgattctgatggtttctttgcccttcctgctttgcc

SEQ ID NO: 861338 - DNA, 75 bp, synthetic construct
  source 1..75: mol_type = other DNA
tgaacagacgccatcagccaggcttaccaaagcggagagggagcggataccaaaaattcgatttgatttggttca

SEQ ID NO: 861339 - DNA, 75 bp, synthetic construct
  source 1..75: mol_type = other DNA
ttagtcaatgtgctccgttgtatgaagtttgtgatggattattcatgccaacacttttagaatgctttagtgctt

SEQ ID NO: 861340 - DNA, 75 bp, synthetic construct
  source 1..75: mol_type = other DNA
aattaaagaattagtaacagtattgccaccttattataagtttattttaacagtttcaagtgattttttgcagct

SEQ ID NO: 861341 - DNA, 75 bp, synthetic construct
  source 1..75: mol_type = other DNA
agattgttgatgaaatctgcgattttgtggtgaatcaacaggctgttttcctgggcggtcactacatccttcagg

SEQ ID NO: 861342 - DNA, 75 bp, synthetic construct
  source 1..75: mol_type = other DNA
agattgttgatgaaatctgcgattttgtggcgaatcagcaggcggtgcgtattaccgtgaaggagatcggtgagt

SEQ ID NO: 861343 - DNA, 75 bp, synthetic construct
  source 1..75: mol_type = other DNA
caagatataaagacgtttaaagcacatcttcacatggaaaatgagagaagagacgcctggaaaaaagttgagcac

SEQ ID NO: 861344 - DNA, 75 bp, synthetic construct
  source 1..75: mol_type = other DNA
ccgtctctattgaccgccgtctgacctggggcgaaacctgggaaggcgcgctggacgaaatccgcgccctgcctg

SEQ ID NO: 861345 - DNA, 75 bp, synthetic construct
  source 1..75: mol_type = other DNA
atgaatatcagcacggaaacccgcgaaattctgcgtaattacaaagctgtgattaatgcgcggcgtcgtgaaatg

SEQ ID NO: 861346 - DNA, 75 bp, synthetic construct
  source 1..75: mol_type = other DNA
agattgttgatgaaatctgtgattttgtggcgaatcagcaggcggttttcctgggcggttactacatccttcagg

SEQ ID NO: 861347 - DNA, 75 bp, synthetic construct
  source 1..75: mol_type = other DNA
ccgtcagcggcgatgcaaaaacgttttgctgaagcggatgcgtattatcattcggcgccaccgtcacggttgcag

SEQ ID NO: 861348 - DNA, 75 bp, synthetic construct
  source 1..75: mol_type = other DNA
acctggatgatcctctgcctggccggagcggtggctgtcggcttctttggtattgcttactttaatgatcatccg

SEQ ID NO: 861349 - DNA, 75 bp, synthetic construct
  source 1..75: mol_type = other DNA
ctgtttgaaagcaccttcggcatgagctacgaaacggctctgtgggcaggtgcggcggcgaccatcctttatacc

SEQ ID NO: 861350 - DNA, 75 bp, synthetic construct
  source 1..75: mol_type = other DNA
acgccggacgaagccgaagccgatatccgcaagcgcgtggaaaacaaagaagtggtcattggttttggtcatccg

SEQ ID NO: 861351 - DNA, 75 bp, synthetic construct
  source 1..75: mol_type = other DNA
acaccatgttccagattgcgctggactatgacaaaggcgtcgatattcacctgcacgaaaccacgccggcaggcg

SEQ ID NO: 861352 - DNA, 75 bp, synthetic construct
  source 1..75: mol_type = other DNA
gtcactggctgggcggcgcacattatcgaacaacgtcaggacaacaaaattatccgtccttccgccaattacgtt

SEQ ID NO: 861353 - DNA, 75 bp, synthetic construct
  source 1..75: mol_type = other DNA
ttctatgtacaactacgaccgtccgtcctggactggcctggtttacccaaccgaatgctacttcccgacctggaa

SEQ ID NO: 861354 - DNA, 75 bp, synthetic construct
  source 1..75: mol_type = other DNA
gatgaacgctgaaggcccgcagttgcacaccaacgccatcccgaaagcggtagtgaaaaatgccgatggtagcct

SEQ ID NO: 861355 - DNA, 75 bp, synthetic construct
  source 1..75: mol_type = other DNA
caccaacgttgaaggtatttacgcggtgggcgataacacgggtgcagtggaactgacaccggtggctgttgcagc

SEQ ID NO: 861356 - DNA, 75 bp, synthetic construct
  source 1..75: mol_type = other DNA
cccgtgaccgcggccaggcgatggtggatctgctggcgcagtacgagcagcacggcttgcagttaaacagccgcg

SEQ ID NO: 861357 - DNA, 75 bp, synthetic construct
  source 1..75: mol_type = other DNA
ttccgatggcgccggcatccggctctgagctggcccgccgtttgcagttacggcattacccggtgctgatcaccg

SEQ ID NO: 861358 - DNA, 75 bp, synthetic construct
  source 1..75: mol_type = other DNA
tgtggcccctgctgctgtgcgcggctcaggctggcgcggaactcagggttattgcggaccttggaggcagtgatg

SEQ ID NO: 861359 - DNA, 75 bp, synthetic construct
  source 1..75: mol_type = other DNA
atctcggttttagccatctggaaattattaacgattttaccgctgtatcgatggcgatcccgatgctgaaaaaag

SEQ ID NO: 861360 - DNA, 75 bp, synthetic construct
  source 1..75: mol_type = other DNA
ggctgtttggtaaagcgcctgtcgttgataagtggaccttctcgactaatggcgtatccatcatgggtcgccacg

SEQ ID NO: 861361 - DNA, 75 bp, synthetic construct
  source 1..75: mol_type = other DNA
ccaaacgaaaaaacctggaaatctcacctggtgacctgtgccgcgatgtacgctgcaatcccgttaagctggctg

SEQ ID NO: 861362 - DNA, 75 bp, synthetic construct
  source 1..75: mol_type = other DNA
tatctaatgtacaaaactgatcaggtccgtgaatccctcggtcattccaacttccgcgtcattgttggtaagtaa

SEQ ID NO: 861363 - DNA, 75 bp, synthetic construct
  source 1..75: mol_type = other DNA
atgcattagtcggtgatgtgggcggcaccaacgcacgtcttgctctgtgtgatattgccagtggtgaaatctcgc

SEQ ID NO: 861364 - DNA, 75 bp, synthetic construct
  source 1..75: mol_type = other DNA
cctgatgattttcgccctgatcctgacgccggtgattgtgattatcagcgtcggcggctttggcgattcgctgga

SEQ ID NO: 861365 - DNA, 75 bp, synthetic construct
  source 1..75: mol_type = other DNA
cgttgttgatgacctcccaccagaaggcgtatttgatacggaattctgcaaccgatacgaaaaaggcggggagga

SEQ ID NO: 861366 - DNA, 75 bp, synthetic construct
  source 1..75: mol_type = other DNA
gagtggcaccacttgactggcgcggctggtgcgttcgtcggtggcctgataaccgcgttatcacaatcactgccc

SEQ ID NO: 861367 - DNA, 75 bp, synthetic construct
  source 1..75: mol_type = other DNA
ccgggtgttaatgattttatgatagatgtaccggcgttattgatcccttctgccggtcatggagatggcagtgat

SEQ ID NO: 861368 - DNA, 75 bp, synthetic construct
  source 1..75: mol_type = other DNA
atgattcagtcaacacgtatttccatggggttattctttaaatattttttatcgttaacgaaaattgatcctggt

SEQ ID NO: 861369 - DNA, 75 bp, synthetic construct
  source 1..75: mol_type = other DNA
ccgcattggtgcgcaatggcgacgaagtgatttgttttgtcccagctatgacagttacgcccccgccatcgcact

SEQ ID NO: 861370 - DNA, 75 bp, synthetic construct
  source 1..75: mol_type = other DNA
cggctggcgtaccacgttgcccagggggcaaaccaatacgcgcccatgaccggcgtgcaggccttgcgcgaggcg

SEQ ID NO: 861371 - DNA, 75 bp, synthetic construct
  source 1..75: mol_type = other DNA
ccgcccactatgatcaggtaaccacctggcctcgggacgagttacaggcagatattgtccatattggttttggcg

SEQ ID NO: 861372 - DNA, 75 bp, synthetic construct
  source 1..75: mol_type = other DNA
agcttccgtaatgaagagatggggcgttatcacaaccctgagttcactatgctggagtggtatcgaccgcactat

SEQ ID NO: 861373 - DNA, 75 bp, synthetic construct
  source 1..75: mol_type = other DNA
aaaacgcgcggcgattatggcggagatccgccgtttctttgccgatcgtggagtgctggaggtggagacgccttg

SEQ ID NO: 861374 - DNA, 75 bp, synthetic construct
  source 1..75: mol_type = other DNA
acgacgaagagcgcgtgcgcgaaacggcgttgcgccttacatcccggcggccttttgccgggatgccaggagcgc

SEQ ID NO: 861375 - DNA, 75 bp, synthetic construct
  source 1..75: mol_type = other DNA
ccttcaatggattccattcaacttacggttttacgcaagggtgcgcgctacgacatttccatcgcgctgcgctaa

SEQ ID NO: 861376 - DNA, 75 bp, synthetic construct
  source 1..75: mol_type = other DNA
gatctacaaaccccggatgcgcctcagtcggctattggcttgatcgtctgtgctttgcaacaacgtaaagatgcc

SEQ ID NO: 861377 - DNA, 75 bp, synthetic construct
  source 1..75: mol_type = other DNA
ccaatatttataatcggcgctactttttcaacagcgtagagtcattattgtcgcgacctgttgttaaggacttct

SEQ ID NO: 861378 - DNA, 75 bp, synthetic construct
  source 1..75: mol_type = other DNA
tgatcatcggtgcgctgacggttatcgtctggaagcagttcggctggctgggactgtacgaaattattccgggct

SEQ ID NO: 861379 - DNA, 75 bp, synthetic construct
  source 1..75: mol_type = other DNA
tggcgatcaaccaaaaactttgacgactatattctgggcggccgcagccttgggccattcgtgactgcattatcg

SEQ ID NO: 861380 - DNA, 75 bp, synthetic construct
  source 1..75: mol_type = other DNA
agtgatcaaacaaaagagcatcgaaaacgttgatatgctcaaaggtctgaactttgttgccattatctcgctgat

SEQ ID NO: 861381 - DNA, 75 bp, synthetic construct
  source 1..75: mol_type = other DNA
actctgagcgcgtgtttatcgaactggcacaaatattgtttaacccgtggattgccgggattctgttgtcggcga

SEQ ID NO: 861382 - DNA, 75 bp, synthetic construct
  source 1..75: mol_type = other DNA
tggcgatcaaccaaaaacttcgacgactatattcttggcggtcgcagccttgggccattcgtgacggcattatcg

SEQ ID NO: 861383 - DNA, 75 bp, synthetic construct
  source 1..75: mol_type = other DNA
catgatattgattgggttcatcgcctggcgatcaaccaaaaacttcgacgactatattcttggcggtcgcagcct

SEQ ID NO: 861384 - DNA, 75 bp, synthetic construct
  source 1..75: mol_type = other DNA
aatcggtactgttgccagcctatgcgcagaaaaccggaaaaaccaccgatgaaattgccgccatgctggcggatg

SEQ ID NO: 861385 - DNA, 75 bp, synthetic construct
  source 1..75: mol_type = other DNA
gacgccagccgttaaggcaatggcatgtattcagtcaaaacgtacagaggaatttaaaaagatgccggaatccat

SEQ ID NO: 861386 - DNA, 75 bp, synthetic construct
  source 1..75: mol_type = other DNA
tccctgcaccggcggtaacagaaccatcaccggtaccggcagtgtctgatgaggcgaccattcgcgcccgcgtta

SEQ ID NO: 861387 - DNA, 75 bp, synthetic construct
  source 1..75: mol_type = other DNA
atgggaaaaataaaatattggctaatagtaggatttattatactttttgcgattttttacattgctattagtgac

SEQ ID NO: 861388 - DNA, 75 bp, synthetic construct
  source 1..75: mol_type = other DNA
tggaattctgcatgccaatgctaatggtgtagagcaggactatcagcaggcaaaagactggtatgagaaagcagc

SEQ ID NO: 861389 - DNA, 75 bp, synthetic construct
  source 1..75: mol_type = other DNA
tcaggtgcgggaaggggcagagtacaagtacatcaccacctcagatcgtaaggagactattgcactggcgaccta

SEQ ID NO: 861390 - DNA, 75 bp, synthetic construct
  source 1..75: mol_type = other DNA
tcaggatgcggatgcattgagtgagggtattaatgcgtctccccgttatccgaaaaactggaagacatccggcga

SEQ ID NO: 861391 - DNA, 75 bp, synthetic construct
  source 1..75: mol_type = other DNA
attattgtctgactttgctttgttttattcatggtttccgggcgagtgaaatttgtcgattgaggatttcggata

SEQ ID NO: 861392 - DNA, 75 bp, synthetic construct
  source 1..75: mol_type = other DNA
cttacccctaacgcgcaagatgttcttgccacgctcgatcctgaagtcttcaccattccactatataaacgagcg

SEQ ID NO: 861393 - DNA, 75 bp, synthetic construct
  source 1..75: mol_type = other DNA
gagtttaacgcctccacctttaccagccgggtgattgcgggcaccggctctgatatgtattccgccattattggc

SEQ ID NO: 861394 - DNA, 75 bp, synthetic construct
  source 1..75: mol_type = other DNA
tcgaagccttgtattatccctccagtgcagagaaaatcggccagttttctctgcctgcagtccgcatgccgtatc

SEQ ID NO: 861395 - DNA, 75 bp, synthetic construct
  source 1..75: mol_type = other DNA
cgactacttcaggattatctgggtcatcgaaatattcagcatactgtcagatacacagccagtaatgctgctcgt

SEQ ID NO: 861396 - DNA, 75 bp, synthetic construct
  source 1..75: mol_type = other DNA
aaaggtcggcctgcaactggattgtcgggaactgcccgattatctaccgctgtatctggagtatttaagcgtact

SEQ ID NO: 861397 - DNA, 75 bp, synthetic construct
  source 1..75: mol_type = other DNA
atgcgtgatatttatcttgaaacaatagaccgcgcatttcttgcactttctcacagtgaaaatatgttggaaata

SEQ ID NO: 861398 - DNA, 75 bp, synthetic construct
  source 1..75: mol_type = other DNA
attccggttctgttgcgcgatgcggtacaggaatatacggatgttttaagcaagcgcatggaatgcggtgtcaat

SEQ ID NO: 861399 - DNA, 75 bp, synthetic construct
  source 1..75: mol_type = other DNA
cttactcctaacgcgcaagatgttctcgccacacttgatcctgaagtgttcacgatcccgctttataaacgtgcg

SEQ ID NO: 861400 - DNA, 75 bp, synthetic construct
  source 1..75: mol_type = other DNA
ggcccgcgcagcgtctgcatgtattcagtctatgaatcatcgcacaagtcgatttaaccaacgaaacaaccagaa

SEQ ID NO: 861401 - DNA, 75 bp, synthetic construct
  source 1..75: mol_type = other DNA
ttcgctggtgctgtacgccgaacacgagtttaacgcctccacctttaccagtcgggtgattgcgggcactggctc

SEQ ID NO: 861402 - DNA, 75 bp, synthetic construct
  source 1..75: mol_type = other DNA
tgtgaggattcgtcttgtgaatattgatgcaccggaaaagaaacagccttttggacgctggtcaatgaatcaact

SEQ ID NO: 861403 - DNA, 75 bp, synthetic construct
  source 1..75: mol_type = other DNA
ccaacggcgatctgaacgcagtgctggaagtcacggaggccgcctgggcggtctgtgcagacaaggtgaacatga

SEQ ID NO: 861404 - DNA, 75 bp, synthetic construct
  source 1..75: mol_type = other DNA
atggtttctggtgcactggtaccgagcggcactactacaccgcatctgttcacgtcctgtaatattgcttttgtg

SEQ ID NO: 861405 - DNA, 75 bp, synthetic construct
  source 1..75: mol_type = other DNA
atgaaccggttgctgctggttatgctggcgttattactggcggcgctgggttggcagacgtggcggctggctgat

SEQ ID NO: 861406 - DNA, 75 bp, synthetic construct
  source 1..75: mol_type = other DNA
cttatcagcctgtccattctgactgaaaccaataaccgggagcaggcgcggctctatgccgaagcagaacagacc

SEQ ID NO: 861407 - DNA, 75 bp, synthetic construct
  source 1..75: mol_type = other DNA
gccagccagaccatcagcacgcaggcagacgagcttcggagcaaaagccaggcactggcaaagagtaacagccag

SEQ ID NO: 861408 - DNA, 75 bp, synthetic construct
  source 1..75: mol_type = other DNA
atccgcgttcttgatggtgatacgctggaaatattacaggacaaaaagcctgtcagggtccgtctggctaatatt

SEQ ID NO: 861409 - DNA, 75 bp, synthetic construct
  source 1..75: mol_type = other DNA
cggaggtgcagcttaccgtgaatggctgtccgaaaataacacagtgccgcctgcaaaagtcgtcagccaggacta

SEQ ID NO: 861410 - DNA, 75 bp, synthetic construct
  source 1..75: mol_type = other DNA
cgtgcgtaccgtgctggaagccttaccggcggcgtcgcacccgatggatgtcatgcgcacaggcgtttccgcact

SEQ ID NO: 861411 - DNA, 75 bp, synthetic construct
  source 1..75: mol_type = other DNA
agcgcactgctgagacaacgacaacgccggatggaggaactgaaacgtgagaacgagtatttacgccgctgggct

SEQ ID NO: 861412 - DNA, 75 bp, synthetic construct
  source 1..75: mol_type = other DNA
tccggctgcgggaacgtccgacactcaccggaggtgcagcttaccgtcagtggttgtccgcgagtgacgccgtgt

SEQ ID NO: 861413 - DNA, 75 bp, synthetic construct
  source 1..75: mol_type = other DNA
gaaggacctggtggccggaaagcccgtaaccgtgcaatacgcgcagacagacaggtatggccgtattctcggccg

SEQ ID NO: 861414 - DNA, 75 bp, synthetic construct
  source 1..75: mol_type = other DNA
atcaagaattgccacggcattaataacgcttcttgagcctgtaataaatgagttgcaggaaatagagacattaca

SEQ ID NO: 861415 - DNA, 75 bp, synthetic construct
  source 1..75: mol_type = other DNA
tgcaccaggcgctggacctgctcgaagagcgggaagcggaactgctggtctggggggatacggatggcgcattta

SEQ ID NO: 861416 - DNA, 75 bp, synthetic construct
  source 1..75: mol_type = other DNA
tggtcaaaacttatacgttgcaaaaccaccgctggcttctcagcgtctggaaacaccgaaaaacagccataagct

SEQ ID NO: 861417 - DNA, 75 bp, synthetic construct
  source 1..75: mol_type = other DNA
ccggtgcacagacggcctatctactgcgacgctggatgcaacttgcgcgcagccaccctcattttgttgggcttt

SEQ ID NO: 861418 - DNA, 75 bp, synthetic construct
  source 1..75: mol_type = other DNA
ctgatggaaaacgcggcgaagcaatttagcaacattggggcgacgaccccggtcgttccatttcgtattttgctg

SEQ ID NO: 861419 - DNA, 75 bp, synthetic construct
  source 1..75: mol_type = other DNA
acgcaataaaaccaagcaacaggcgcatgtgaacttcagatgggtcgagcatggcgagcctgtcggggttggcgt

SEQ ID NO: 861420 - DNA, 75 bp, synthetic construct
  source 1..75: mol_type = other DNA
tcgcgcttcctgatgggggccatacttggcgcgatggcaaccttcgatttcggtggtccggtaaataaaacaatg

SEQ ID NO: 861421 - DNA, 75 bp, synthetic construct
  source 1..75: mol_type = other DNA
tggcgccagaaagcgctgaccgaaaccggctgcgatcactatggtccgcacagcctgacggttgaacgtattgaa

SEQ ID NO: 861422 - DNA, 75 bp, synthetic construct
  source 1..75: mol_type = other DNA
caacgcgtgccttttatcccctgtccgtcctggggatgctgctgttttgcgcggccggcggcagtcaggcggcat

SEQ ID NO: 861423 - DNA, 75 bp, synthetic construct
  source 1..75: mol_type = other DNA
taggaaggccgtttacgtttaataaacgacctgaacatttgccatgtgatatgagaccattgtggcgttgcagtt

SEQ ID NO: 861424 - DNA, 75 bp, synthetic construct
  source 1..75: mol_type = other DNA
atgttgggtggtttcctggtgggctacaccattttgctacttaaacgctatatccgcctgccgcagtcgatgcag

SEQ ID NO: 861425 - DNA, 75 bp, synthetic construct
  source 1..75: mol_type = other DNA
cttattgtggccgccgggatatgtattgcgttggggcaagttcttggcggtacagatgttggtgaaaaaacagga

SEQ ID NO: 861426 - DNA, 75 bp, synthetic construct
  source 1..75: mol_type = other DNA
actggacacccgtcggggttctaactcagagctggaaactgccgtgaaagacctgggtatggctgtttcatacaa

SEQ ID NO: 861427 - DNA, 75 bp, synthetic construct
  source 1..75: mol_type = other DNA
aagctggcagtcaactgcgtgattaatccactgactgccatctggaattgcccgaacggtgaattacgtcatcat

SEQ ID NO: 861428 - DNA, 75 bp, synthetic construct
  source 1..75: mol_type = other DNA
atggtattacgcatattggcccggcacggcaacaggatggcgattacagttatctggcggatattttgcaaaccg

SEQ ID NO: 861429 - DNA, 75 bp, synthetic construct
  source 1..75: mol_type = other DNA
tcacagtgaaaatatgatggaaatattgcgcatatggcttgaaacacttggcgacaatgaacgcgacaaacaaaa

SEQ ID NO: 861430 - DNA, 75 bp, synthetic construct
  source 1..75: mol_type = other DNA
gttcgtagcgagaaatggaaaaccggaaaatgtaatacatgcaggttttgcgagcaaggaaagcggattacatcc

SEQ ID NO: 861431 - DNA, 75 bp, synthetic construct
  source 1..75: mol_type = other DNA
cggcgcgattgacgtttacaccgcatgggaagagatgggtaaagtacgcgacgctctggaagcggcaggtctgaa

SEQ ID NO: 861432 - DNA, 75 bp, synthetic construct
  source 1..75: mol_type = other DNA
gattgatatggatagctattcgatggcgctggcagcacacaacagcggcggcaaagtgttcgtacaggtccgcga

SEQ ID NO: 861433 - DNA, 75 bp, synthetic construct
  source 1..75: mol_type = other DNA
cagaaagcagacaccatacgtatgatgctcccgttctttcagcagttccgggatatgggggtgaaagacaaagca

SEQ ID NO: 861434 - DNA, 75 bp, synthetic construct
  source 1..75: mol_type = other DNA
tcaccggaaaaaatgaagctactggctgacacgatttctgcggtttatctcgatggctacgagggaagacagtaa

SEQ ID NO: 861435 - DNA, 75 bp, synthetic construct
  source 1..75: mol_type = other DNA
tgaccccgctcaatgaacgccagtattaccagctattccttaacctgctggaagcacaggggtatgcggtcgtac

SEQ ID NO: 861436 - DNA, 75 bp, synthetic construct
  source 1..75: mol_type = other DNA
aaacgactccagctcgaacgtgctctccacgccgagcatcaccacgctggacaaccaggaagccttcttcatggt

SEQ ID NO: 861437 - DNA, 75 bp, synthetic construct
  source 1..75: mol_type = other DNA
gcaaagtgttcgtacaggtgcgcgatgtactggaagcaggcgccattgaacctcgcaaggtcaagctgccgggga

SEQ ID NO: 861438 - DNA, 75 bp, synthetic construct
  source 1..75: mol_type = other DNA
taccaaagatgctcgtaccgctctttgagagcggtacaattgtgttttgtagagactttccagaatggcaacgcc

SEQ ID NO: 861439 - DNA, 75 bp, synthetic construct
  source 1..75: mol_type = other DNA
gcactgcgtcataccggcccggttgccacgatcattgaatgggacagcaatattcccgcattttcagtactgatg

SEQ ID NO: 861440 - DNA, 75 bp, synthetic construct
  source 1..75: mol_type = other DNA
ctgagcatgtgggggaaatacatctggctggtcacacccaatctctggacagtatgggggcaccattgctgatag

SEQ ID NO: 861441 - DNA, 75 bp, synthetic construct
  source 1..75: mol_type = other DNA
agaaaaattttttcactcactccggagcacaacaacctttgctggcagaaaatacacaaacagcgatatgccttc

SEQ ID NO: 861442 - DNA, 75 bp, synthetic construct
  source 1..75: mol_type = other DNA
ccgcactcacaacggctggcgggagacacccgtcagcgatgagacgttacgggagatttatgccctgatgaaatg

SEQ ID NO: 861443 - DNA, 75 bp, synthetic construct
  source 1..75: mol_type = other DNA
gttcagggagatgggggtgaaagacaaagcagccggagtatcagcagaaacggcacagcaacgcataaaagaatt

SEQ ID NO: 861444 - DNA, 75 bp, synthetic construct
  source 1..75: mol_type = other DNA
tcacgcattctgatcaagctggcttcgacctgggaaggaattcgcgcggcagaagagctggaaaaagaaggtatt

SEQ ID NO: 861445 - DNA, 75 bp, synthetic construct
  source 1..75: mol_type = other DNA
gcaacaacagaacgcgaagcccgcgcccagttgccgtacgcccatctgattttcgccgcccgtattcgtcaggag

SEQ ID NO: 861446 - DNA, 75 bp, synthetic construct
  source 1..75: mol_type = other DNA
acccgcattatggcggggcgtaacgggggagcctttgcgctcgctggttcctacagtgccagtctgctaaccctg

SEQ ID NO: 861447 - DNA, 75 bp, synthetic construct
  source 1..75: mol_type = other DNA
ttttgtcgcccgtattcgccaggggggggagtcatgcataaaataccctttgatgttcttgttcattctgaaaac

SEQ ID NO: 861448 - DNA, 75 bp, synthetic construct
  source 1..75: mol_type = other DNA
aatgtctcagcatgtacatgcagttgataatctgaccttcagaggaaaactgattattcctgcctgtactgtaag

SEQ ID NO: 861449 - DNA, 75 bp, synthetic construct
  source 1..75: mol_type = other DNA
ttccggtaatgctgggtgcagtgttgatgtctcagtatgcacatgcagctgataatctgacttttcggggaaaac

SEQ ID NO: 861450 - DNA, 75 bp, synthetic construct
  source 1..75: mol_type = other DNA
aacaaaggacggtgacggtgagttttcatgtgagcgttacgatcatgatttcggcggttgggtagaaagcgaatg

SEQ ID NO: 861451 - DNA, 75 bp, synthetic construct
  source 1..75: mol_type = other DNA
catcatatctccaattcaacttggagaagacatatcaaatataaaagattttttccaaaaaaactcattccgtgt

SEQ ID NO: 861452 - DNA, 75 bp, synthetic construct
  source 1..75: mol_type = other DNA
ttactatttttcctgctttgggattagggttatagataaaacagaggtatctgatttctttagaaaacttaacga

SEQ ID NO: 861453 - DNA, 75 bp, synthetic construct
  source 1..75: mol_type = other DNA
aaaaagagccagtcagttgcttaactgatcggcattacagccttgagctgccgtttttttattctgttagttgtg

SEQ ID NO: 861454 - DNA, 75 bp, synthetic construct
  source 1..75: mol_type = other DNA
gggagcctttgcgctcgctggtttcccaatttgccagtctgtcaaccctgttacgtctcgccaccatgtttgaca

SEQ ID NO: 861455 - DNA, 75 bp, synthetic construct
  source 1..75: mol_type = other DNA
gcgtagtagcgagactccttaaaattcatctgggagcctttcacatggctgtattcgcacgcccttattttgtct

SEQ ID NO: 861456 - DNA, 75 bp, synthetic construct
  source 1..75: mol_type = other DNA
gtgtgcagtctatcacgcccggcctgccaattccaaagtatccatccaaggtgaaaatatatcatgttcatggtt

SEQ ID NO: 861457 - DNA, 75 bp, synthetic construct
  source 1..75: mol_type = other DNA
gtgtgcctgaatcgtggggcgtccgtctggccggtattcaatgaaaatcgaacgctgtgtgtaaatacactgagc

SEQ ID NO: 861458 - DNA, 75 bp, synthetic construct
  source 1..75: mol_type = other DNA
tctgtcgctttgcaggccatctttcgcacttctacagggtcgcccaacatgcggttctttgcagccagcttgtgc

SEQ ID NO: 861459 - DNA, 75 bp, synthetic construct
  source 1..75: mol_type = other DNA
tctgtcgctttgcaggccatctttcgcacttctacagggtcgcccaacatgcggtactttgcagccagctagtgc

SEQ ID NO: 861460 - DNA, 75 bp, synthetic construct
  source 1..75: mol_type = other DNA
gatggaagaaaaaatagacgccgtaatccgtgagaaatacgggttacccccggttatgagcacgcccgtgaaata

SEQ ID NO: 861461 - DNA, 75 bp, synthetic construct
  source 1..75: mol_type = other DNA
tctgtcgctttgccggccatctttcgcacttctacagggtcgcccaacatgcggtcctttgcagccagctagtgc

SEQ ID NO: 861462 - DNA, 75 bp, synthetic construct
  source 1..75: mol_type = other DNA
tctgtcgctttgcaggccatctttcgcacttctacagggtcgcccaacatgcggtgctttgcagccagctggtgc

SEQ ID NO: 861463 - DNA, 75 bp, synthetic construct
  source 1..75: mol_type = other DNA
tctgtcgctttgcaggccatctttcgcacttctacagggtcgcccaacatgcggtcctttgcagccagctcgtgc

SEQ ID NO: 861464 - DNA, 75 bp, synthetic construct
  source 1..75: mol_type = other DNA
aatgctacgtgacgtttgtgcaccgaaattgcaacaacttggcaatatcgtcgacgaaatgatggctaaacgccg

SEQ ID NO: 861465 - DNA, 75 bp, synthetic construct
  source 1..75: mol_type = other DNA
gccactcacacggtctggtgagcatcattgagccagtcgtccgcccaccgcgtcgtggcgataaattcgatcgcg

SEQ ID NO: 861466 - DNA, 75 bp, synthetic construct
  source 1..75: mol_type = other DNA
aaagttattccactgtcaccaggccatgcctacgggatgtttatggaacgttttaacgagttgtcaacgacggat

SEQ ID NO: 861467 - DNA, 75 bp, synthetic construct
  source 1..75: mol_type = other DNA
ctggggcacccgctccagtagccgatagcgttttaactgatttcaaagttaacgctgcaaaggccctctcgcctt

SEQ ID NO: 861468 - DNA, 75 bp, synthetic construct
  source 1..75: mol_type = other DNA
atcggtcgtcggtttaccagacaacgagctgatgctgcgtgacgtttgcgcaccgaaattacaacaacttggcga

SEQ ID NO: 861469 - DNA, 75 bp, synthetic construct
  source 1..75: mol_type = other DNA
tcacacggtctggtgagcatcattgagccagtcgttcgtccgccgcgtcgtggcgataaattcgatcgcgaacaa

SEQ ID NO: 861470 - DNA, 75 bp, synthetic construct
  source 1..75: mol_type = other DNA
tctgtcgctttgcgggccatctttcgcacttctacagggtcgcccaacatgcggtgctttgcagccagctagtgc

SEQ ID NO: 861471 - DNA, 75 bp, synthetic construct
  source 1..75: mol_type = other DNA
gcaggaagccctcggacaactgggcggagatggacgccgcgagctgactgagcgttatactgctatctgtcagca

SEQ ID NO: 861472 - DNA, 75 bp, synthetic construct
  source 1..75: mol_type = other DNA
atgcgctggcaacagcggtccaggcgggggtagctaaactgctaaatctgatcgaaaaagagatgaaagaggcaa

SEQ ID NO: 861473 - DNA, 75 bp, synthetic construct
  source 1..75: mol_type = other DNA
tgatgggattgtggtttctaaccacggtggccgccagctggacggtgtactctcttccgctcgtgcactgcctgc

SEQ ID NO: 861474 - DNA, 75 bp, synthetic construct
  source 1..75: mol_type = other DNA
atgaacgaagccgttagccctggtgcgcttagcaccctgtttaccgacgcccgaactcacaacggctggcgggag

SEQ ID NO: 861475 - DNA, 75 bp, synthetic construct
  source 1..75: mol_type = other DNA
tttcggggatatcacaacgggcttaaaaaatctcgctaaagagctggactgcgtggttttacttctgacgcaact

SEQ ID NO: 861476 - DNA, 75 bp, synthetic construct
  source 1..75: mol_type = other DNA
gtttggcgatacggtatacgataatctgatctttccctggcagatccgtaaccagcagcctgacccagccatttt

SEQ ID NO: 861477 - DNA, 75 bp, synthetic construct
  source 1..75: mol_type = other DNA
cgctgcgccgcaacgtggaagatttgtcagaagtggcactgcgccagcgtattctgaaaaacatgtctgacttaa

SEQ ID NO: 861478 - DNA, 75 bp, synthetic construct
  source 1..75: mol_type = other DNA
gatctggtcgatgtgctgaaacaggtcagcggcacacttacttccgccaaagaagaagcagaaggcactaccggt

SEQ ID NO: 861479 - DNA, 75 bp, synthetic construct
  source 1..75: mol_type = other DNA
aacgccgcgatctcgggcttgatgatggctctttctggcctgtactggaaggtatcccggcaacagagatgttca

SEQ ID NO: 861480 - DNA, 75 bp, synthetic construct
  source 1..75: mol_type = other DNA
acactggttttcaccgtggatatgccgacgccaggcgcacgttatcgtgacgcacactccggtatgagcggcccg

SEQ ID NO: 861481 - DNA, 75 bp, synthetic construct
  source 1..75: mol_type = other DNA
atcgcgccgcagcacaacgcattctgccgccgttcctgttccactatatggacggcggcgcatattctgaataca

SEQ ID NO: 861482 - DNA, 75 bp, synthetic construct
  source 1..75: mol_type = other DNA
tattgcagatgccgtgaaaggtgatatcgccattctggcagatagcgggattcgtaacgggctggacgttgtgcg

SEQ ID NO: 861483 - DNA, 75 bp, synthetic construct
  source 1..75: mol_type = other DNA
aactgttgtttctgaaagccggtagtgcgatgacggccagcggcaaacccgtcccgcaaatgacgctgacccgca

SEQ ID NO: 861484 - DNA, 75 bp, synthetic construct
  source 1..75: mol_type = other DNA
ggaaagtcgagttacccctgcgcggggcagtgctgacgttgtggcttggctggcagggttcggcgctgctgaata

SEQ ID NO: 861485 - DNA, 75 bp, synthetic construct
  source 1..75: mol_type = other DNA
ggcatcgctgacgctgtggctgggctggcagggctccgcactggtcaacaaggggagtttcacggtcgatgaaat

SEQ ID NO: 861486 - DNA, 75 bp, synthetic construct
  source 1..75: mol_type = other DNA
atgctggatatgctgaatatgaatgcgggtggcgtactgacgcccgattttatgctgatgctcgatagcaaagat

SEQ ID NO: 861487 - DNA, 75 bp, synthetic construct
  source 1..75: mol_type = other DNA
gacattgagctcgacgataccgacggcaaagtcgagttacctctgcgcggggcggtgctgacgctgtggcttggc

SEQ ID NO: 861488 - DNA, 75 bp, synthetic construct
  source 1..75: mol_type = other DNA
cagtgtcgctgattcactgaaaaaaatcccggtaccgcatatcgaccagtcgcaggagtccgacgcggtgtttct

SEQ ID NO: 861489 - DNA, 75 bp, synthetic construct
  source 1..75: mol_type = other DNA
gagtctgcaatatcaggcgaacatgacctcactgaatggcattcgctttggctttaactgctcgatgctccgtgc

SEQ ID NO: 861490 - DNA, 75 bp, synthetic construct
  source 1..75: mol_type = other DNA
ctgcgcatgttggcggtattaatggggtcctcagttacctgtggtttggcttatccctggctgaaaatgtggatg

SEQ ID NO: 861491 - DNA, 75 bp, synthetic construct
  source 1..75: mol_type = other DNA
ctggcgcattacagaaaaaccagaacggtgcagatattccgaataaagataaattcatacaaaacacaggggcct

SEQ ID NO: 861492 - DNA, 75 bp, synthetic construct
  source 1..75: mol_type = other DNA
ctgaccatccggggacgtagtgcagattttcgcggctcgctaaactcgcggcgcgagcagtcatggcacgacacc

SEQ ID NO: 861493 - DNA, 75 bp, synthetic construct
  source 1..75: mol_type = other DNA
tggcgctgttctgccgcacgtaaaactgcgtgacgtggtgattggtatgggtgcctgcaccgactccaaagttaa

SEQ ID NO: 861494 - DNA, 75 bp, synthetic construct
  source 1..75: mol_type = other DNA
tggtgcgtaacgcggtagacgcggctaaagcactgggcgttgatgctcgtgttggtaacctgttctccgctgacc

SEQ ID NO: 861495 - DNA, 75 bp, synthetic construct
  source 1..75: mol_type = other DNA
tgccgtactgacgctttacctcgggtggaaaggctttgcgttgattggtaagggaagttttaccgtcgatgaggt

SEQ ID NO: 861496 - DNA, 75 bp, synthetic construct
  source 1..75: mol_type = other DNA
gacagtttactggtgttggtcggcgtattgattgcgaaaggcgcgatgggctatccgcaaacgattctgctgctg

SEQ ID NO: 861497 - DNA, 75 bp, synthetic construct
  source 1..75: mol_type = other DNA
cctgacaactctgggttacatgctcggcaaaacgccggtatttttaaagtacgaggaccagctgatgtcatgcct

SEQ ID NO: 861498 - DNA, 75 bp, synthetic construct
  source 1..75: mol_type = other DNA
gggccacactgacgcccgattttatgctgacactggaaagcaaagatatcaccggcaatatcagcgaccggctga

SEQ ID NO: 861499 - DNA, 75 bp, synthetic construct
  source 1..75: mol_type = other DNA
ttcctcgccgtaaacagccgtttcaatgcttccggtgatggtgtggcgcaactgggccgctcgctggatgttgat

SEQ ID NO: 861500 - DNA, 75 bp, synthetic construct
  source 1..75: mol_type = other DNA
gatgcctggtgagtatcagggaacggtatatgtccctgccgctccgggtggaattactctgtacggtacaggtga

SEQ ID NO: 861501 - DNA, 75 bp, synthetic construct
  source 1..75: mol_type = other DNA
cgccgggctgtcagggcttaataacgcacgttttcagttcttcaactggatgagcggccttctgtgggtgttaat

SEQ ID NO: 861502 - DNA, 75 bp, synthetic construct
  source 1..75: mol_type = other DNA
catcggtgcatttcgtcaccgatgaactggacggcggaccggttgttttacaggcaaaagtcccggtatttgcag

SEQ ID NO: 861503 - DNA, 75 bp, synthetic construct
  source 1..75: mol_type = other DNA
atgcagctatggcagctgagcaggcagcagcaccgcagcaggagaatgtataacgtgaacaatttaatgatcgac

SEQ ID NO: 861504 - DNA, 75 bp, synthetic construct
  source 1..75: mol_type = other DNA
gtgaatttcagttctgaactgcttaacaaaggtaacaaaactcccgcattcagcatcagtattgaggggaaggat

SEQ ID NO: 861505 - DNA, 75 bp, synthetic construct
  source 1..75: mol_type = other DNA
ctgagcggaacaagttaacggccagcgtcactgattctcttgcggggatccagattccgcatatcgaccagtctc

SEQ ID NO: 861506 - DNA, 75 bp, synthetic construct
  source 1..75: mol_type = other DNA
attaaaggcaccgtacgggcagttttcagcaataaggccgacgcgttcggccttgaacgcgcccgccaggcgggt

SEQ ID NO: 861507 - DNA, 75 bp, synthetic construct
  source 1..75: mol_type = other DNA
ctgaaaatgcacgaaaacgccgcgtggctggatggtcaacgtctgccgccgcagggctacgctgccgacgagtaa

SEQ ID NO: 861508 - DNA, 75 bp, synthetic construct
  source 1..75: mol_type = other DNA
tccgggaaaagataccttcaccaaaaatattggtgcctgccgcgcatatagcgcatggctgaatattggtggcga

SEQ ID NO: 861509 - DNA, 75 bp, synthetic construct
  source 1..75: mol_type = other DNA
ctgtcatatggcagaagggcggtcgcacttatcctgaacttgactgcttcggcatagtgaacgaggtacgaaaag

SEQ ID NO: 861510 - DNA, 75 bp, synthetic construct
  source 1..75: mol_type = other DNA
ggctcatggctggcctgacgcgatgtgaaccggccccgggcgcgggtatcgcctgttattccggctctgtggtga

SEQ ID NO: 861511 - DNA, 75 bp, synthetic construct
  source 1..75: mol_type = other DNA
ggctgattgctggcctgactcgatgtgaaccgaccccgggcgcaggtatcgcctgttattccggctctgttgtta

SEQ ID NO: 861512 - DNA, 75 bp, synthetic construct
  source 1..75: mol_type = other DNA
gaattactaacgctcaattcacctatattaatcatggtgatgcttatgctcctggctggcgacgagactacaaca

SEQ ID NO: 861513 - DNA, 75 bp, synthetic construct
  source 1..75: mol_type = other DNA
ctgttgtgtggcagaagggggggcgcgtttaccctgatcttgactgttttggcatcgtcaatgaagtacggaaag

SEQ ID NO: 861514 - DNA, 75 bp, synthetic construct
  source 1..75: mol_type = other DNA
tgcaatccaggctctaacgtaacgtttcttccgttagcgcggtttaagcggcgatttgtcaaagtggagttctgg

SEQ ID NO: 861515 - DNA, 75 bp, synthetic construct
  source 1..75: mol_type = other DNA
atgcaggaaaatagtcttttgctccaactgcaaaatgttggatatcaggcgggcgatacgaagattctaaataac

SEQ ID NO: 861516 - DNA, 75 bp, synthetic construct
  source 1..75: mol_type = other DNA
aatcatgcggataaagtgattacactgcaaccgcatgccggagaaatgcaggaagcacgctatgaactcgcataa

SEQ ID NO: 861517 - DNA, 75 bp, synthetic construct
  source 1..75: mol_type = other DNA
atggcagagaacgaaccgctgcaccccgccgttaaccctgatctctatgtgaaccttgacgaacagcgtgaagga

SEQ ID NO: 861518 - DNA, 75 bp, synthetic construct
  source 1..75: mol_type = other DNA
tttgatatcgatctcggtaacgagatgtgcaaacggatgcaggtgaaatgtacctgggttgccagtgactttgac

SEQ ID NO: 861519 - DNA, 75 bp, synthetic construct
  source 1..75: mol_type = other DNA
attgcttctgaatcaagcttttatcgtgtactgaaatcagccaaccagttgaagaaacgatcccgtgaatgtcag

SEQ ID NO: 861520 - DNA, 75 bp, synthetic construct
  source 1..75: mol_type = other DNA
ccaacaagcgccagtatattgccgtgatgcctggtgagtatcagggaacggtgtatgtccctgccgctccgggtg

SEQ ID NO: 861521 - DNA, 75 bp, synthetic construct
  source 1..75: mol_type = other DNA
gggcgctgacagggaacgccgacaccgcgacgaaattaaaaacagccataaacattaatggcgtcagattcgatg

SEQ ID NO: 861522 - DNA, 75 bp, synthetic construct
  source 1..75: mol_type = other DNA
cggctaacacatggagtgcgcgccagactttcaacggcgggatcaccggggcgctgacagggaacgccgataccg

SEQ ID NO: 861523 - DNA, 75 bp, synthetic construct
  source 1..75: mol_type = other DNA
ttcagcgcgtgatggttatggctttgaagctaactggtcagagttttacaccacaacccgcaaaccctctgcggg

SEQ ID NO: 861524 - DNA, 75 bp, synthetic construct
  source 1..75: mol_type = other DNA
tgggtaataaaggtgccatgaccatccgtgtaacaacaccaagcacttccaccggaggtggcaccactaatgcgc

SEQ ID NO: 861525 - DNA, 75 bp, synthetic construct
  source 1..75: mol_type = other DNA
taaaattgccggggcatcagcacagcgtacagcacgtgaaaatctggatatctgggatgccagcctgaacaaaaa

SEQ ID NO: 861526 - DNA, 75 bp, synthetic construct
  source 1..75: mol_type = other DNA
caatcagagcactaccggcaatgcagctacagccacaaaactgcaaacagcacgcaccattaatggggtttcatt

SEQ ID NO: 861527 - DNA, 75 bp, synthetic construct
  source 1..75: mol_type = other DNA
ctcaattaactcaaataaggacgaacttattgatacaactcaggcaaggccggtgcagtattgtatcaatggtac

SEQ ID NO: 861528 - DNA, 75 bp, synthetic construct
  source 1..75: mol_type = other DNA
accgtgatgaattaattgatacaactcaggcaaggccaattcagtattgcattaatggaacgtggtataacgcgg

SEQ ID NO: 861529 - DNA, 75 bp, synthetic construct
  source 1..75: mol_type = other DNA
aatatttgtcttgcaggtgctgtggtggaagttattggcactcgcggcgcaatgaccatacgcgttactacgccg

SEQ ID NO: 861530 - DNA, 75 bp, synthetic construct
  source 1..75: mol_type = other DNA
tcaggttcgatggttctggtgacattaatatcaatactctggtatcgcgcggtcgcgtaacggccttggaggcga

SEQ ID NO: 861531 - DNA, 75 bp, synthetic construct
  source 1..75: mol_type = other DNA
agcggcgtttatgatgcagatatcagtggcgcatcgacattaatcctccactttaatatgaatgcggggagttgc

SEQ ID NO: 861532 - DNA, 75 bp, synthetic construct
  source 1..75: mol_type = other DNA
atggtgatgcttatgctcctggctggcgaagagactacaacacgaaaaaccagcagcctgcatttgctttagggc

SEQ ID NO: 861533 - DNA, 75 bp, synthetic construct
  source 1..75: mol_type = other DNA
tatctgccttgccggagccgtgattgaggttatgggaacccgcggcgcaatgaccatacgcgttaccacgccgag

SEQ ID NO: 861534 - DNA, 75 bp, synthetic construct
  source 1..75: mol_type = other DNA
cttgtcgatgatggggttattgcatgggatgaccccgaagttgtgacggtgctcaggagtgcattaaaacacggc

SEQ ID NO: 861535 - DNA, 75 bp, synthetic construct
  source 1..75: mol_type = other DNA
ggaaatcgcgctatcagccagactgaccaaagcagagcgggagcagataccgcacatccgttatgacttagcaca

SEQ ID NO: 861536 - DNA, 75 bp, synthetic construct
  source 1..75: mol_type = other DNA
cttgttgatgatggggttgtcgtatggggtgatcctgaagccatgagggtgctcagggatgtgctaaaacatgac

SEQ ID NO: 861537 - DNA, 75 bp, synthetic construct
  source 1..75: mol_type = other DNA
gagattgagacgctggcgcgtggcgcgaccgtaaattatggcgggaaaggattcacgtatccggtcgctgatgag

SEQ ID NO: 861538 - DNA, 75 bp, synthetic construct
  source 1..75: mol_type = other DNA
ttaatagatgaagggattctaagttggaccgagccaggcattatgaaggtacttagagacttattgagtaatgaa

SEQ ID NO: 861539 - DNA, 75 bp, synthetic construct
  source 1..75: mol_type = other DNA
cgagcaagcgctatcagccagaatgagtaaatatgaaagagatcgtataaagaaaattcgattagatttaatgca

SEQ ID NO: 861540 - DNA, 75 bp, synthetic construct
  source 1..75: mol_type = other DNA
aggtctcctaaacacgattatcggtgtgcgcgaggcatacaaccaggatttggaaattctgggcattgtgatcaa

SEQ ID NO: 861541 - DNA, 75 bp, synthetic construct
  source 1..75: mol_type = other DNA
ttctgaaacgtggcgctcggccaactaccagttaactgataaagggaaattattgctacagcaattagtagaatc

SEQ ID NO: 861542 - DNA, 75 bp, synthetic construct
  source 1..75: mol_type = other DNA
atgattatttccgcagccagcgattatcgcgccgcagcgcaacgcattctgccgccgttcctgttccactatatt

SEQ ID NO: 861543 - DNA, 75 bp, synthetic construct
  source 1..75: mol_type = other DNA
cattgctgatgagtttgacgaacgcgtcgaggctgcacgcgctgccgcagacagtggtgattttgcgttgtatat

SEQ ID NO: 861544 - DNA, 75 bp, synthetic construct
  source 1..75: mol_type = other DNA
cacggcctgagaagaccaaaccgtcagcaaagaaacggaagcccgttaaaaccgcatgaaatagcgccatcggcc

SEQ ID NO: 861545 - DNA, 75 bp, synthetic construct
  source 1..75: mol_type = other DNA
gagcttgaggcgctggcgcgtggggcaaccgtaaattatgacgggaaaaaattcacgtatccggtcgctgatgag

SEQ ID NO: 861546 - DNA, 75 bp, synthetic construct
  source 1..75: mol_type = other DNA
tcccacaccttctgagcacgccgcagcagtgcttaatctggtagatgacggtgttatcgaatggagtgacccgga

SEQ ID NO: 861547 - DNA, 75 bp, synthetic construct
  source 1..75: mol_type = other DNA
tttatcccgttgctgatagccatcccgctggtgatgggcttaagcatcctgctgctgaaaaaacaggagggatga

SEQ ID NO: 861548 - DNA, 75 bp, synthetic construct
  source 1..75: mol_type = other DNA
gtatcaacctgaaaacgcagagattgccatcgaagcgcgcgatctgaccatgcgttttggttcctttgttgccgt

SEQ ID NO: 861549 - DNA, 75 bp, synthetic construct
  source 1..75: mol_type = other DNA
gttcgaacggctgcggtaaatccaccaccatgaaaatgctcaccgggctgctgcctgccagcgaaggtgaagcgt

SEQ ID NO: 861550 - DNA, 75 bp, synthetic construct
  source 1..75: mol_type = other DNA
gacgagcaacaatttcgtgactggctgtcagttcacttatctacttttgcaactgagaaaggccatttttgcccg

SEQ ID NO: 861551 - DNA, 75 bp, synthetic construct
  source 1..75: mol_type = other DNA
gagggatatgttctggcagttgatggtcgatctctcgcgccaggacaaagtgaccattttcatctccacccactt

SEQ ID NO: 861552 - DNA, 75 bp, synthetic construct
  source 1..75: mol_type = other DNA
atgcgcgacccgaagcatcgccgcgacgtctgcccgcgcatcgcctggatgccgcagggactgggcaaaaacctc

SEQ ID NO: 861553 - DNA, 75 bp, synthetic construct
  source 1..75: mol_type = other DNA
tcgacggagcgatgcccagtcgtgccgaaacggtaaaaggttacgtgcaggcaatgcaccagagctggctacagg

SEQ ID NO: 861554 - DNA, 75 bp, synthetic construct
  source 1..75: mol_type = other DNA
cgttgatcccggcgacacagttttccgggatgatcgatccggtagcttcgctggaaggtcctggacgttggatcg

SEQ ID NO: 861555 - DNA, 75 bp, synthetic construct
  source 1..75: mol_type = other DNA
gccgcaggggctgggcaaaaatctctaccacaccttatcggtgtatgaaaatgtcgattttttcgctcgcttgtt

SEQ ID NO: 861556 - DNA, 75 bp, synthetic construct
  source 1..75: mol_type = other DNA
tgtggcaactttttatcccgctgctgatagccataccgctggtgatgggcttaagcatcctgctgctgaaaaaac

SEQ ID NO: 861557 - DNA, 75 bp, synthetic construct
  source 1..75: mol_type = other DNA
gtacatcgcgctggggatgctgaactttttcctgctctgcggcctgtcggtgtttgtgtttggcgtaccgcataa

SEQ ID NO: 861558 - DNA, 75 bp, synthetic construct
  source 1..75: mol_type = other DNA
gccagtctggaagagacatttatcgcctgtttgcaggaggcggcagggcagagcaacgaagccgaagcaccgcct

SEQ ID NO: 861559 - DNA, 75 bp, synthetic construct
  source 1..75: mol_type = other DNA
ggacgactatatggggtttataagcaataacttcgacccctccattgcatggcacgatttggagtggatacgcga

SEQ ID NO: 861560 - DNA, 75 bp, synthetic construct
  source 1..75: mol_type = other DNA
gatcaggaaagcgtgtggatgcccggaagctacatcgtgtagtgacaggtgatacccgcgtattcctcaagccgg

SEQ ID NO: 861561 - DNA, 75 bp, synthetic construct
  source 1..75: mol_type = other DNA
tattcctcaagccggaagccaagaaacgccctaatacggcggttcacatcctggttgatatgagctcctcgatgg

SEQ ID NO: 861562 - DNA, 75 bp, synthetic construct
  source 1..75: mol_type = other DNA
cctccgtattcgagcgcgtgtttcctcaaggggttgttgttcggctgaacgctttgctgcgtaaggctgtgaaca

SEQ ID NO: 861563 - DNA, 75 bp, synthetic construct
  source 1..75: mol_type = other DNA
cggcagtgatccggtcaccgagtttgcccaggttctggagaatgccggactggttctgaaagaactgccggtcat

SEQ ID NO: 861564 - DNA, 75 bp, synthetic construct
  source 1..75: mol_type = other DNA
tctgaccgtcgatgaaagcgatctttctgtgcatctggtaggacgaaaaatcaataaacgggaatgggctggcaa

SEQ ID NO: 861565 - DNA, 75 bp, synthetic construct
  source 1..75: mol_type = other DNA
cattgtcattgacgatgcggcagctctgcaacgcacactgtttaagctgatggagcggtcactgactgcttttgc

SEQ ID NO: 861566 - DNA, 75 bp, synthetic construct
  source 1..75: mol_type = other DNA
atgagcaggagaagaatcactcgcaaacatcaccgcacacacctgaattcctcagcaacgctaagggcacttatt

SEQ ID NO: 861567 - DNA, 75 bp, synthetic construct
  source 1..75: mol_type = other DNA
actgacggttccgtggcttatctgttcagcaaaaaaggtgtgatctccttcgagaaaggtgacgaagacaccatt

SEQ ID NO: 861568 - DNA, 75 bp, synthetic construct
  source 1..75: mol_type = other DNA
gcgtctgatcgatatgctggaagattgcgacgacgtgcaggaagtttaccataacggtgaaatctctgatgaggt

SEQ ID NO: 861569 - DNA, 75 bp, synthetic construct
  source 1..75: mol_type = other DNA
cacatggatgctgtctgggggtatttggcccatgaagcagcccatgtccggtttacggactttggtgttgagcgc

SEQ ID NO: 861570 - DNA, 75 bp, synthetic construct
  source 1..75: mol_type = other DNA
tacgcgaactggcgactgacctgcaacgaatggcaacacatcaaaaattactggcgtttcgcgcaatgctctcac

SEQ ID NO: 861571 - DNA, 75 bp, synthetic construct
  source 1..75: mol_type = other DNA
gaaacaccggaagcaatacagcaagagctgctgcaacgcattgacaaggtttttgatttttttctgaaccagtaa

SEQ ID NO: 861572 - DNA, 75 bp, synthetic construct
  source 1..75: mol_type = other DNA
catgggcagcgctgacgactggagcgcatttgcggaagacctcaatgctgatgctccggggaatgccactgttca

SEQ ID NO: 861573 - DNA, 75 bp, synthetic construct
  source 1..75: mol_type = other DNA
accaccagcaatacagcggtggcggcaaacctcagagcagcgccaataacgaacctccaatggactttgaagacg

SEQ ID NO: 861574 - DNA, 75 bp, synthetic construct
  source 1..75: mol_type = other DNA
tgaagcacgagctgcaatctgtattgatgatactttatcgatcagcgatgcactctctgaattgagtcatttcat

SEQ ID NO: 861575 - DNA, 75 bp, synthetic construct
  source 1..75: mol_type = other DNA
gcgaagatttgctccaacgcggacctgatctacggcgcgaagaaaatgccggtaatcaaaaaggccaataccacc

SEQ ID NO: 861576 - DNA, 75 bp, synthetic construct
  source 1..75: mol_type = other DNA
ctgttacttgttataaccacaagtggagacgtagcatcgtttacagaaggtaaatcaagatcagaaaagtatgca

SEQ ID NO: 861577 - DNA, 75 bp, synthetic construct
  source 1..75: mol_type = other DNA
cgataccagtcgtaacaagcgggtctgcgatcgtattaaagccattcttctggcttctgaaggctggagttcagt

SEQ ID NO: 861578 - DNA, 75 bp, synthetic construct
  source 1..75: mol_type = other DNA
agagaaacaaaggcaattcattgaatattataaggaactgaaaacaactgtgggtgatgagccgattctttttat

SEQ ID NO: 861579 - DNA, 75 bp, synthetic construct
  source 1..75: mol_type = other DNA
cgagggctacgccactgccgcctccctgcacgaagccacaggccttccggtactgatgacggtggatgcgggcaa

SEQ ID NO: 861580 - DNA, 75 bp, synthetic construct
  source 1..75: mol_type = other DNA
ggaagtgttcaaaagaataagattttcattagccggagcgatattgctattgaaaagggggatctgcttatacgc

SEQ ID NO: 861581 - DNA, 75 bp, synthetic construct
  source 1..75: mol_type = other DNA
gaaaatcacgtaccgtcgaacctcccgttattcaggagaacacgcttacggaggccgaaactgcgacagaggccg

SEQ ID NO: 861582 - DNA, 75 bp, synthetic construct
  source 1..75: mol_type = other DNA
aacacggacgatggaaatcatcgtcgactatgacctgaaggtcacgatgaaagatcccgtgcagcgaaatgcgct

SEQ ID NO: 861583 - DNA, 75 bp, synthetic construct
  source 1..75: mol_type = other DNA
aacgaaaaaatcatacccgcgtccgcacggatatcgacaaactggtccgcagtctccggaccagagagcagtctg

SEQ ID NO: 861584 - DNA, 75 bp, synthetic construct
  source 1..75: mol_type = other DNA
ataatgcgcgtatggttccgggcaaacctgtcactggccgtctggaggcatccggacggggcaccgatccggaaa

SEQ ID NO: 861585 - DNA, 75 bp, synthetic construct
  source 1..75: mol_type = other DNA
tccgcgctattgacggcaatctggcgaaagtcgacgtctgcggcattcagcgcgatgtcgatttaacgttggtcg

SEQ ID NO: 861586 - DNA, 75 bp, synthetic construct
  source 1..75: mol_type = other DNA
gaagcagtatttaaatatgcgctgtatgagccgggtttgctggagccggaaggcgtcagcaaagtgttcttcacc

SEQ ID NO: 861587 - DNA, 75 bp, synthetic construct
  source 1..75: mol_type = other DNA
tagatggtacgttactttcccccgaccatacgttgtccccttacgccaaagaaacgctgaaattgctcactgcgc

SEQ ID NO: 861588 - DNA, 75 bp, synthetic construct
  source 1..75: mol_type = other DNA
gctggtcgacagtcttgtcctgccgaatattcatcccagcctcctttctgcaatcagcggactgaaccatgttga

SEQ ID NO: 861589 - DNA, 75 bp, synthetic construct
  source 1..75: mol_type = other DNA
atgtcgaaagcggtaggtattttagaacttagcagtatcgcgaaggggatggaaatcggtgattccatgctgaaa

SEQ ID NO: 861590 - DNA, 75 bp, synthetic construct
  source 1..75: mol_type = other DNA
agtacattcgcacccaggcggaaatgttcaccggctttgatggattttggatgaacccggccatagcagcagtgg

SEQ ID NO: 861591 - DNA, 75 bp, synthetic construct
  source 1..75: mol_type = other DNA
ctactccatcacccagattgaccacgtggcggtgatgactcgcggcgggccggataacgccaccaccgtgctgct

SEQ ID NO: 861592 - DNA, 75 bp, synthetic construct
  source 1..75: mol_type = other DNA
tgaatgagacgatggccgagcgctatcacacgctgcgggactttaccgaaacgctcccgccagagtcacagagcc

SEQ ID NO: 861593 - DNA, 75 bp, synthetic construct
  source 1..75: mol_type = other DNA
tctctgtggatggcgattacagcggaaaatattcaccagctggatgggccaagaaagccatatcggcttatgagc

SEQ ID NO: 861594 - DNA, 75 bp, synthetic construct
  source 1..75: mol_type = other DNA
aactcacctgtatcgccagagggatggaaactggcgatgccatgttgaaaagtgcgaatgtcagtctactggtca

SEQ ID NO: 861595 - DNA, 75 bp, synthetic construct
  source 1..75: mol_type = other DNA
aatggtcccattccgcgcaatggtaaacgctaccggctggggtctcctgagatatgggtggctgagtccatccgc

SEQ ID NO: 861596 - DNA, 75 bp, synthetic construct
  source 1..75: mol_type = other DNA
gcgaaatatccgcgcgtcattggtcatgaattctttggcgtcattgatgcggtgggtgacggcgtggaaagcgcc

SEQ ID NO: 861597 - DNA, 75 bp, synthetic construct
  source 1..75: mol_type = other DNA
ggtgctgtgcaacaggccatcaatagcggcatttcccttgcagctgaaatgcgggtcgacagtctggtcctgccg

SEQ ID NO: 861598 - DNA, 75 bp, synthetic construct
  source 1..75: mol_type = other DNA
atgaacgaagccattagcccaggtgcgcttagcaccttgttcaccgatgcccgcactcacaacggctggcgggag

SEQ ID NO: 861599 - DNA, 75 bp, synthetic construct
  source 1..75: mol_type = other DNA
aacgttattccactggctccgagccatgcctacgggatgtttatggagcgctttaacgaattatcggagttacgc

SEQ ID NO: 861600 - DNA, 75 bp, synthetic construct
  source 1..75: mol_type = other DNA
gatatcgcggtttccctttcaaatatctgccgctttgcaggacacctttcacacttctatagcgtcgcccaacat

SEQ ID NO: 861601 - DNA, 75 bp, synthetic construct
  source 1..75: mol_type = other DNA
ggtgtctgaagccgtacgctgcggcgtgtttgattatctgatcaagccaatcgcttatgagcgactggggcagac

SEQ ID NO: 861602 - DNA, 75 bp, synthetic construct
  source 1..75: mol_type = other DNA
aatgcatgatgcaacagaagcatattgccaggacatccccgcaccactgaaacgccttcttcctgactataaacg

SEQ ID NO: 861603 - DNA, 75 bp, synthetic construct
  source 1..75: mol_type = other DNA
aacgtgattccactggcaccgggtcatgtctacgggatgtttatggaacgttttaacgatttatcggagttacgc

SEQ ID NO: 861604 - DNA, 75 bp, synthetic construct
  source 1..75: mol_type = other DNA
accgcaaacctatcttggcggttacgacctgaccatcagcggtcaacatcgccgtctaagttctaacgacgctat

SEQ ID NO: 861605 - DNA, 75 bp, synthetic construct
  source 1..75: mol_type = other DNA
atgctcaaacgcattattgccgggcactttacctggtcgcccaaaatgcaggcgctggtaaaaaataacacgatt

SEQ ID NO: 861606 - DNA, 75 bp, synthetic construct
  source 1..75: mol_type = other DNA
gtgatggtgaacgcaccgaagaaggtatgcgcgccaacattcgcgtggctgtgcagtacatcgaagcgtggatct

SEQ ID NO: 861607 - DNA, 75 bp, synthetic construct
  source 1..75: mol_type = other DNA
cgctgcgcgaaggcgtgccttatcaaagtttatggctgagcgtcgagcaaggcgtacataacggcatgatgcttg

SEQ ID NO: 861608 - DNA, 75 bp, synthetic construct
  source 1..75: mol_type = other DNA
atggcaatctcattggccccggcggcttcctcgaaattgcacaaaacgcccgtaaagtggtgttttgcggtacgt

SEQ ID NO: 861609 - DNA, 75 bp, synthetic construct
  source 1..75: mol_type = other DNA
cgcatacgcacagcaaagcagtcaggaagtgctgtatatcaccgaacgtgcggtattccagttaacggcagaagg

SEQ ID NO: 861610 - DNA, 75 bp, synthetic construct
  source 1..75: mol_type = other DNA
gcaaattcatcacgataaggttcgcactgtcgtggcgattgacccacaggcaacaaatagcgacgaaagcgatga

SEQ ID NO: 861611 - DNA, 75 bp, synthetic construct
  source 1..75: mol_type = other DNA
ataaaactactcacggtggttccgttctgaccgcttctgaaacgatgaagttcggtgggatcggtgttgcacgta

SEQ ID NO: 861612 - DNA, 75 bp, synthetic construct
  source 1..75: mol_type = other DNA
gttgaaaaaaacgtgttgtatgagccccgcattattctgatacaacattctgaaaatagaggtgcaggtttttcg

SEQ ID NO: 861613 - DNA, 75 bp, synthetic construct
  source 1..75: mol_type = other DNA
atgacaaacatgatctcatatcagggacttgttcgcaccttccctaacgtaaccggacatggtcaaccgactgaa

SEQ ID NO: 861614 - DNA, 75 bp, synthetic construct
  source 1..75: mol_type = other DNA
gatgatatccgtattaaacggctgatggaaatagagtgtatgggtccaccacatattgcaatttttattctcttt

SEQ ID NO: 861615 - DNA, 75 bp, synthetic construct
  source 1..75: mol_type = other DNA
gagcagtggaatgaccgcttcatccgtttgttgtgcgaactgtcagaggaaatgcagatgctagatgaatgcata

SEQ ID NO: 861616 - DNA, 75 bp, synthetic construct
  source 1..75: mol_type = other DNA
attttcacaatgggccttttacaggaaatatttaaagtttggtctgtttaaatctctttattatttctcccacta

SEQ ID NO: 861617 - DNA, 75 bp, synthetic construct
  source 1..75: mol_type = other DNA
gctcagtatgttgtaacgcgtgacactatcaaagaaaaaggccgcagccacgccgccgcccaggaagagatcctg

SEQ ID NO: 861618 - DNA, 75 bp, synthetic construct
  source 1..75: mol_type = other DNA
ctgaccgcgcgtgaagcgaaagttctgcgtatgcgtttcggtatcgatatgaataccgatcacacgctggaagaa

SEQ ID NO: 861619 - DNA, 75 bp, synthetic construct
  source 1..75: mol_type = other DNA
cgcggcaattgcgatgaacaagccgtggtcggaaaaactgcacgatgtctctgaagaagtgcatcgcgccctgca

SEQ ID NO: 861620 - DNA, 75 bp, synthetic construct
  source 1..75: mol_type = other DNA
attaaccctgacaaactaattacccatacgtttaatttccagcatgttgctgatgccataaatttatttgaacag

SEQ ID NO: 861621 - DNA, 75 bp, synthetic construct
  source 1..75: mol_type = other DNA
tagtttctattattatgccttgctataatgcagagcaatatattaaagaatctattaattctgtaataaatcaaa

SEQ ID NO: 861622 - DNA, 75 bp, synthetic construct
  source 1..75: mol_type = other DNA
ccggggctaatcttgctcgataactatcttcctgacggtagagggattaatttactgcatgaactggtgcaggcg

SEQ ID NO: 861623 - DNA, 75 bp, synthetic construct
  source 1..75: mol_type = other DNA
aaagcgaaagagagcggggcagactgggcgattaataacagccagacaccgcttggcgagattttcgctgaaaaa

SEQ ID NO: 861624 - DNA, 75 bp, synthetic construct
  source 1..75: mol_type = other DNA
cctctgatgagtcggacgaaaccgggatcgtggcatgttccgcatatggtggcggcaagtatgctcaatactcag

SEQ ID NO: 861625 - DNA, 75 bp, synthetic construct
  source 1..75: mol_type = other DNA
atgttgtcgcttaaagaaaggattatccaatccaaatgcgaaagcgatggcctgttcttcaaccgttatttctac

SEQ ID NO: 861626 - DNA, 75 bp, synthetic construct
  source 1..75: mol_type = other DNA
atgaacatcaatgccgttattcagccggcaggctttgtgctgcctgtcagtctgcaactgtacgaactgctgatg

SEQ ID NO: 861627 - DNA, 75 bp, synthetic construct
  source 1..75: mol_type = other DNA
acagcctcgatgcggattacagcgggaagtattcaccaaacggttgggccaccaaagccattgaagcctatgagc

SEQ ID NO: 861628 - DNA, 75 bp, synthetic construct
  source 1..75: mol_type = other DNA
gggttccgtgctgggtacatggaatcaggatttaacggcgcgttaatcatagacgacccattgaaacccgctgac

SEQ ID NO: 861629 - DNA, 75 bp, synthetic construct
  source 1..75: mol_type = other DNA
aaacaagcgaacggaacgaagatgttaatctcaggccatcatttagccatccgtgatgcactgcaacgcgttatt

SEQ ID NO: 861630 - DNA, 75 bp, synthetic construct
  source 1..75: mol_type = other DNA
taaaccaataaatgtaggttggaacagaaagcgtaaatttaatttcaaggatgtttctaattttctcgaactgct

SEQ ID NO: 861631 - DNA, 75 bp, synthetic construct
  source 1..75: mol_type = other DNA
aggaaatgagaacgatctattcttctcaagggtaggtcgctggaacgcagaagcgcgctgggcttcttataaaaa

SEQ ID NO: 861632 - DNA, 75 bp, synthetic construct
  source 1..75: mol_type = other DNA
atggcaactattcaggaatcattcagcaaactatgcactaatctggacttcatcgaggtctacaacgaccagaca

SEQ ID NO: 861633 - DNA, 75 bp, synthetic construct
  source 1..75: mol_type = other DNA
gggacgtggtagtggtcgcgtctgtttctgccatctatggtctgggcgatcccgattcatatctgaagatgatgc

SEQ ID NO: 861634 - DNA, 75 bp, synthetic construct
  source 1..75: mol_type = other DNA
cagaacattgccaaaaccaaagcgaagggcagaggaaaatcgcgcccgattgttgagccggataatgtgccgatg

SEQ ID NO: 861635 - DNA, 75 bp, synthetic construct
  source 1..75: mol_type = other DNA
gctggttgctggaaagaataatgtcgccggaatattatcggcgtcgttttgagggctggcaggagtttgtcgagc

SEQ ID NO: 861636 - DNA, 75 bp, synthetic construct
  source 1..75: mol_type = other DNA
aaccgctattgccgaagccgttcacccgcgtgtgggtgaagactgacaccgggcgacaggtggcggcctatctca

SEQ ID NO: 861637 - DNA, 75 bp, synthetic construct
  source 1..75: mol_type = other DNA
cattcgcttgtcagtcgatcccggcgaccgtgagcgaggcaccgtatattctcgatggactactgatgaacgagg

SEQ ID NO: 861638 - DNA, 75 bp, synthetic construct
  source 1..75: mol_type = other DNA
tactggcagctctcacgccttgcccgctggcatgttgaaagcgaagccatgaaccaggcattggcaattgtggtg

SEQ ID NO: 861639 - DNA, 75 bp, synthetic construct
  source 1..75: mol_type = other DNA
atcgtgctggtgcgccagccaagacgcttaccaaaatggatgttgccggtgctggacgccgttggtctggcggtg

SEQ ID NO: 861640 - DNA, 75 bp, synthetic construct
  source 1..75: mol_type = other DNA
cagaaacatatgaagctgatgtaattaaaaagtatcagtatttaaaaaaatgctcattttcagcagcgattaaag

SEQ ID NO: 861641 - DNA, 75 bp, synthetic construct
  source 1..75: mol_type = other DNA
atgtggaatgatctaacgctaccaaaaccactaatgccgaagccgtttacccgcgtatgggtgaagactgacaca

SEQ ID NO: 861642 - DNA, 75 bp, synthetic construct
  source 1..75: mol_type = other DNA
tgagattaaagatcagaaccagttctgaagcgatctttgattttatcaaaaacaccccttattctgatgctattg

SEQ ID NO: 861643 - DNA, 75 bp, synthetic construct
  source 1..75: mol_type = other DNA
tttatctcagggagtggtgtccgttctgtctggctgcgccacaatcttgaaaacttcaaaaagcgtctgaaagca

SEQ ID NO: 861644 - DNA, 75 bp, synthetic construct
  source 1..75: mol_type = other DNA
cttaaagctttcatgagggtcgttcgagaaaattttggcgtaaaggtgtttggtatttcaaaagtgaaggtatca

SEQ ID NO: 861645 - DNA, 75 bp, synthetic construct
  source 1..75: mol_type = other DNA
cgcgacagccctgcgggaagtcggtcgcgtcgagcgcaccctgttcatgatcgactggattctggatgccgaact

SEQ ID NO: 861646 - DNA, 75 bp, synthetic construct
  source 1..75: mol_type = other DNA
atggcggatgcgacaaacacccacaccttctgggaattgatccgcattggacggtggcatgtcgagggcgaagcc

SEQ ID NO: 861647 - DNA, 75 bp, synthetic construct
  source 1..75: mol_type = other DNA
gttgcgaactggcctgatattttccgttgtgccgcgacgatgaccgctggcaaaatcaggcccagccaactcctg

SEQ ID NO: 861648 - DNA, 75 bp, synthetic construct
  source 1..75: mol_type = other DNA
acgcctcgatccggttcgagtgatgattgaaaactacgaacctggtaagggaagaatcaccatcacctgctacgg

SEQ ID NO: 861649 - DNA, 75 bp, synthetic construct
  source 1..75: mol_type = other DNA
catatgaggaaaggcaatatgggcaaaatggacaagatgaaaaaggatgatatgggtaaaaaagacagcatgaac

SEQ ID NO: 861650 - DNA, 75 bp, synthetic construct
  source 1..75: mol_type = other DNA
acagaataaccgtttctgcttataatgaaaaaaagcctggctgctatggccaatgtcttttaatacaggatgacg

SEQ ID NO: 861651 - DNA, 75 bp, synthetic construct
  source 1..75: mol_type = other DNA
ctgtcaatcgcttctcaggttggccatctaatgatcctctaaaaacagataaagaatcaatgacatcacccgtga

SEQ ID NO: 861652 - DNA, 75 bp, synthetic construct
  source 1..75: mol_type = other DNA
cgggtgatgcgatggtgcagattctacttaacagcctgtcaccttctcaaaaacagatggcacttgatttactga

SEQ ID NO: 861653 - DNA, 75 bp, synthetic construct
  source 1..75: mol_type = other DNA
atggaacgaacaagttacagcaaactatcacagcgcgatgtcgatcgcgctgaaacagatttactcatcaacctg

SEQ ID NO: 861654 - DNA, 75 bp, synthetic construct
  source 1..75: mol_type = other DNA
atggataaagagaaaatggagaaaggacacatgagcaaaacggacgggatgaaaaatgaccatatgggtaaaaaa

SEQ ID NO: 861655 - DNA, 75 bp, synthetic construct
  source 1..75: mol_type = other DNA
gctttgctcaaaacaaaaaagatacagccggtgatttacgttttttcatgtttgggatactattaattttaatat

SEQ ID NO: 861656 - DNA, 75 bp, synthetic construct
  source 1..75: mol_type = other DNA
tgttatcacatttatagcaggcgaagccaatttcgaaattataaaagttattgctgcattatcaaccccaattat

SEQ ID NO: 861657 - DNA, 75 bp, synthetic construct
  source 1..75: mol_type = other DNA
acggtaccaaacccgaaataccagtatctggaacgcattgtgaacgcggtacgtgaagggctgaaagagttagac

SEQ ID NO: 861658 - DNA, 75 bp, synthetic construct
  source 1..75: mol_type = other DNA
ggcatcagacatcagtccgattagcagggcttttaagtatgcgcttgatgaaatcacaaagaaaaaatccccggt

SEQ ID NO: 861659 - DNA, 75 bp, synthetic construct
  source 1..75: mol_type = other DNA
gatttactcatcaacctgtcaacgcttacccagcgcggtctggcaaagatgattggctgtcatgaatcgaagata

SEQ ID NO: 861660 - DNA, 75 bp, synthetic construct
  source 1..75: mol_type = other DNA
gcttcggtcttgtgtgctttcggaatggcatcagacatcagtccgattagcagggcttttaagtatgcgcttgat

SEQ ID NO: 861661 - DNA, 75 bp, synthetic construct
  source 1..75: mol_type = other DNA
tagtgcgcatcattgatggcgttcagcatataagaaggctaggactttacatcaaagcattcagaagaggttatt

SEQ ID NO: 861662 - DNA, 75 bp, synthetic construct
  source 1..75: mol_type = other DNA
gaagagatattttcgacaacaccgcctttacctggtagaaaaaaatataaaggaatgatagggctggcgttgagc

SEQ ID NO: 861663 - DNA, 75 bp, synthetic construct
  source 1..75: mol_type = other DNA
gaagagatatcttcgacaacaccgtatgtacctgttagaaaaaaacataaaggactgatggggttagcgttggcc

SEQ ID NO: 861664 - DNA, 75 bp, synthetic construct
  source 1..75: mol_type = other DNA
aacaccattgctatctacaccacccatcgcattctggttgaaatattcagcttaactctgcttgcgcaaatgaac

SEQ ID NO: 861665 - DNA, 75 bp, synthetic construct
  source 1..75: mol_type = other DNA
gcgtattctcccggcgctggggattcaggtgctgaaaaaccgtcatcagccctgtccggtctgtggcgggagtga

SEQ ID NO: 861666 - DNA, 75 bp, synthetic construct
  source 1..75: mol_type = other DNA
tcttatttccgctggttttatgttccgtctcgcaatcgcaatggttggcattggctccgcatcatatctggtatc

SEQ ID NO: 861667 - DNA, 75 bp, synthetic construct
  source 1..75: mol_type = other DNA
gttatcgcgtgtataccggcgaaaaaattgatgtctactttaacactacgatgtgtcagcattcaggcaattgtg

SEQ ID NO: 861668 - DNA, 75 bp, synthetic construct
  source 1..75: mol_type = other DNA
gttatcgctgttataccggcgaaaagatcgatgtctatttcaacactgcgatatgtcagcattctggcaattgcg

SEQ ID NO: 861669 - DNA, 75 bp, synthetic construct
  source 1..75: mol_type = other DNA
acgcggtcgaacacagccattatttgcggatttatatgggacatctgcgacaaaaactggagcaggatcccgccc

SEQ ID NO: 861670 - DNA, 75 bp, synthetic construct
  source 1..75: mol_type = other DNA
gtcgttcatggcaaatccagcatcaccgactgcatgatcatctgttcgggtacgtccagccgtcatgttatgtcc

SEQ ID NO: 861671 - DNA, 75 bp, synthetic construct
  source 1..75: mol_type = other DNA
tgctggccgtgctgctcaacaacgccggaaaagtgctcacccagcgccagttactcaatcaggtgtggggaccaa

SEQ ID NO: 861672 - DNA, 75 bp, synthetic construct
  source 1..75: mol_type = other DNA
ctcgatctcggcctgcccgatggtgatgggattgagtttatccgcgacctgcgccagtggagcgcggtgccggtg

SEQ ID NO: 861673 - DNA, 75 bp, synthetic construct
  source 1..75: mol_type = other DNA
ctgattattccgcagcaggatgccccggcacggcgtctgattggctttcgtaacggagtactcgataccgccacg

SEQ ID NO: 861674 - DNA, 75 bp, synthetic construct
  source 1..75: mol_type = other DNA
ccgcaatttgccttattacagtcttggcgcatggtttggctcaacgttgatgacctacgttaaagaggtgccgct

SEQ ID NO: 861675 - DNA, 75 bp, synthetic construct
  source 1..75: mol_type = other DNA
cctggttgttgaacgtgtcgctactactgtcgctggtgtcgattgtggtgattatgaagctgttttatcagttcg

SEQ ID NO: 861676 - DNA, 75 bp, synthetic construct
  source 1..75: mol_type = other DNA
gctgtgataacggagaaaaactgcgagtcacgttcgcgctggactgctgtgaccgtgaggcactgtactgggcgg

SEQ ID NO: 861677 - DNA, 75 bp, synthetic construct
  source 1..75: mol_type = other DNA
acgccagagatgcttaacggggttaaacagcgtcacgactggtttgttgagcgtctaaattccattaatcaccac

SEQ ID NO: 861678 - DNA, 75 bp, synthetic construct
  source 1..75: mol_type = other DNA
aaattaaagcactacggaatatcggtcgtaatggttgtatttattttaatggaacccccggtgaaattattccgt

SEQ ID NO: 861679 - DNA, 75 bp, synthetic construct
  source 1..75: mol_type = other DNA
gtggcggttaatttcgttcccacgccgtggtggggaatgaacagtgtgatccgcaatttgccttattacagcctt

SEQ ID NO: 861680 - DNA, 75 bp, synthetic construct
  source 1..75: mol_type = other DNA
caggactttgcccgggatgtggccgggctgtttcagcgtctgcgcgcgccgttctcctccgggaaggtggcctcc

SEQ ID NO: 861681 - DNA, 75 bp, synthetic construct
  source 1..75: mol_type = other DNA
cagaccgtgacctcagcggtgacggccagaaaaaagccgccgcagccgcagatgcgtgtgaaggtgttgttgccc

SEQ ID NO: 861682 - DNA, 75 bp, synthetic construct
  source 1..75: mol_type = other DNA
tgtcgattttaccccaccggtagagggggaaacgctggaaacccacgccccggagttctggcgctggctcgaccg

SEQ ID NO: 861683 - DNA, 75 bp, synthetic construct
  source 1..75: mol_type = other DNA
ctgacggataatggttcatgctaccgggctaatgaaacacggcagtttgcccggatgttggggcttgaaccgaag

SEQ ID NO: 861684 - DNA, 75 bp, synthetic construct
  source 1..75: mol_type = other DNA
cggcgcgccgtctgattggctttcgcaacggggtactcgatactcaaagcggcgtattcagcccgcaccacaaat

SEQ ID NO: 861685 - DNA, 75 bp, synthetic construct
  source 1..75: mol_type = other DNA
ccgctttcgctttgacgataaagaggggcgcgggacgtggtactgcaatcagtgcggcgcgggtgacgggcttaa

SEQ ID NO: 861686 - DNA, 75 bp, synthetic construct
  source 1..75: mol_type = other DNA
gtcacgagaaaacaccggatggcagcttacgccacccacgactgaaatggccgcgttgcttacgcgatacagaag

SEQ ID NO: 861687 - DNA, 75 bp, synthetic construct
  source 1..75: mol_type = other DNA
ccggaatggcgggcacaggctaaatccaaagagtatgcaaagacaggtatgaagctgaaagagcgcctggctatg

SEQ ID NO: 861688 - DNA, 75 bp, synthetic construct
  source 1..75: mol_type = other DNA
gtcactcgatcaccttaaaccggccatgctggagcgaggcagactctccgggttcaagcacatcttcttcgatgg

SEQ ID NO: 861689 - DNA, 75 bp, synthetic construct
  source 1..75: mol_type = other DNA
tgccaacctggcggtaatggcgtcgatgattgctttagccagccgtggcaacattttccgcaccgttctggcggc

SEQ ID NO: 861690 - DNA, 75 bp, synthetic construct
  source 1..75: mol_type = other DNA
cgtaattgccggatacgatttcaaaaaagtcttgctgcttggcatcagcattggcggtgtgatgttcatcctgcc

SEQ ID NO: 861691 - DNA, 75 bp, synthetic construct
  source 1..75: mol_type = other DNA
ccctgaccgtgacgatctctatatcggcctggtactgtatggcattttccgaatgacgcggagcacggtttatgc

SEQ ID NO: 861692 - DNA, 75 bp, synthetic construct
  source 1..75: mol_type = other DNA
ctgggcggtaatgcgccgctgtggtggggaattgcacttctggtactcggcatgatcaccgcgttcgtcggcggt

SEQ ID NO: 861693 - DNA, 75 bp, synthetic construct
  source 1..75: mol_type = other DNA
tgcctgctggctggtctggcaacgttacggcacgctggatctgcgcctgctggatatgcgcgtacaacaactgcc

SEQ ID NO: 861694 - DNA, 75 bp, synthetic construct
  source 1..75: mol_type = other DNA
cctctacaacattgactggcatcgccacgcgcaggtgaagtgcaacggcttgcagatcaatatgttgatggctgc

SEQ ID NO: 861695 - DNA, 75 bp, synthetic construct
  source 1..75: mol_type = other DNA
gacaaaaatttgaccttcagaattcgtgggttaaataatattcatgtccttgactgctttgttaatgttgatctg

SEQ ID NO: 861696 - DNA, 75 bp, synthetic construct
  source 1..75: mol_type = other DNA
tcctatatttttggcgtaacatacaatggagttgattatgattcgactgcccctaatgctatcgcagcaccagaa

SEQ ID NO: 861697 - DNA, 75 bp, synthetic construct
  source 1..75: mol_type = other DNA
attcggcattacaactgacagaagccgcacggcctgtgttgcgcggcgaatcctctttacaacttgccgtgccgc

SEQ ID NO: 861698 - DNA, 75 bp, synthetic construct
  source 1..75: mol_type = other DNA
tctcactggcaacgctcaccggttgggggcttatctggctgatgctgcgtgaacgccacctcggcggaacgatta

SEQ ID NO: 861699 - DNA, 75 bp, synthetic construct
  source 1..75: mol_type = other DNA
gctgggcattttcctgcgcgatttaacggcgctggatccgctcgatgcccaggcccagtacagcgaactgttcga

SEQ ID NO: 861700 - DNA, 75 bp, synthetic construct
  source 1..75: mol_type = other DNA
attaaagaatcatggcgtcagcataatctggcctttcaccatgaccgtcatttgctgaatatcagcagttttagc

SEQ ID NO: 861701 - DNA, 75 bp, synthetic construct
  source 1..75: mol_type = other DNA
tcggtgatgagtatcgacggctttaaccttgcggcaatcgaggatgttcccctgacggctgtgcatgtgccacgc

SEQ ID NO: 861702 - DNA, 75 bp, synthetic construct
  source 1..75: mol_type = other DNA
acttccggcagacggaacgcaggtgtctttcccgtatgccggagaatggctgaccgaagacgaaatcagggccgt

SEQ ID NO: 861703 - DNA, 75 bp, synthetic construct
  source 1..75: mol_type = other DNA
cgcgccgcagcttccggaggacggaacacagatagcgttcccctgggccggggaatggctgacggagccggagat

SEQ ID NO: 861704 - DNA, 75 bp, synthetic construct
  source 1..75: mol_type = other DNA
cgccaccacaaatccaggtttgaataaaaactatccgaaaggcaccgggtgttgtaatgacgcagaaatattcga

SEQ ID NO: 861705 - DNA, 75 bp, synthetic construct
  source 1..75: mol_type = other DNA
agagagtcaacagctcattgaatcagcattgcaaacacttcatgtgatgaatttaaataacctggaaacaaatct

SEQ ID NO: 861706 - DNA, 75 bp, synthetic construct
  source 1..75: mol_type = other DNA
ggggcttatctggctgatgctgcgcgaacgccacctcggtggaacgattattcttgccgatgcgcatatccgcta

SEQ ID NO: 861707 - DNA, 75 bp, synthetic construct
  source 1..75: mol_type = other DNA
atgaaaaagaaaaatactggcgttaatgccagcggccccgctcgtcctgaatttatgaacggcgatatttaccgc

SEQ ID NO: 861708 - DNA, 75 bp, synthetic construct
  source 1..75: mol_type = other DNA
atggcgagtaagcaactctggcgctggcatggcataaccggcgacggcaatgcgcaagatgggatgcgatgggca

SEQ ID NO: 861709 - DNA, 75 bp, synthetic construct
  source 1..75: mol_type = other DNA
gttgtaatgacgcagaaatattcgacaaagccggtattgctgtactttcggtggaagcgactaactggaatcttg

SEQ ID NO: 861710 - DNA, 75 bp, synthetic construct
  source 1..75: mol_type = other DNA
gacgatttgcgctatacccaacaactggccgcgaaactggcccaacaggggatttgcgttatctctggtggtgcg

SEQ ID NO: 861711 - DNA, 75 bp, synthetic construct
  source 1..75: mol_type = other DNA
ggtgccgcaggcacatgctaacgcctctgcgccagctgccgcgttgttttctacggtagtcatgaaaattggcct

SEQ ID NO: 861712 - DNA, 75 bp, synthetic construct
  source 1..75: mol_type = other DNA
tcgccgtccgggtaccgaaacgcgattcctgaatgtccaactgctgcagatcagcatggatgcgccgaaaatcat

SEQ ID NO: 861713 - DNA, 75 bp, synthetic construct
  source 1..75: mol_type = other DNA
atgacacacatgatctttcgccatggcaacatgaagaagtggaaaggcgttggctacgattttgaaattgtgaaa

SEQ ID NO: 861714 - DNA, 75 bp, synthetic construct
  source 1..75: mol_type = other DNA
gctacaagtccctgtgtgagaacatgggcggggtgtatctggacggtgaaaccctgcgttttaacccgtttgcga

SEQ ID NO: 861715 - DNA, 75 bp, synthetic construct
  source 1..75: mol_type = other DNA
tgatgttgaattgacagagagttgtctgattgagaatgatgaactggcactgtctgttattcaacaatttagcca

SEQ ID NO: 861716 - DNA, 75 bp, synthetic construct
  source 1..75: mol_type = other DNA
aaagtgactaacgacggtattctggatgtaggtaacactgcggcgaatgctctgcaggttgatactctgaacctg

SEQ ID NO: 861717 - DNA, 75 bp, synthetic construct
  source 1..75: mol_type = other DNA
actggaatgctgatgatgtagcattagcgattattgcacatccaaatgctgacaacgcgatgcagacgactgcaa

SEQ ID NO: 861718 - DNA, 75 bp, synthetic construct
  source 1..75: mol_type = other DNA
tgggatacttccaagtctaactacggttacggtattgttgctatgaactctgatggtcacctgactatcaatggt

SEQ ID NO: 861719 - DNA, 75 bp, synthetic construct
  source 1..75: mol_type = other DNA
tgctcagattgccctttccaccattggtcgtgtgaatcagcggtttgggatgggttatgtggtggaagtgattcg

SEQ ID NO: 861720 - DNA, 75 bp, synthetic construct
  source 1..75: mol_type = other DNA
ttgccggattacggtctgccggatctcagtctgatccatcagggtatggttgcgggtattcatggcctgatgcgt

SEQ ID NO: 861721 - DNA, 75 bp, synthetic construct
  source 1..75: mol_type = other DNA
gtggcggataaccccctgacaccggcaggtctgctggcccctacctaccgtaaccagctggcgtttatcgatatt

SEQ ID NO: 861722 - DNA, 75 bp, synthetic construct
  source 1..75: mol_type = other DNA
ccgtcgtgtggctgagcgcggcacggagccaaaaaatacgaattctcccgagtggtgggcgtggcgctggtccgc

SEQ ID NO: 861723 - DNA, 75 bp, synthetic construct
  source 1..75: mol_type = other DNA
tccgcaactggagcttgcgccacagcgagagaaagaactggagctgatccgcgagcataccaccatcgttaagca

SEQ ID NO: 861724 - DNA, 75 bp, synthetic construct
  source 1..75: mol_type = other DNA
tctggctggataccaacttgcgtaaagcactagaaaacgatcagttggttattcactatcaaccgaaaatcacct

SEQ ID NO: 861725 - DNA, 75 bp, synthetic construct
  source 1..75: mol_type = other DNA
gaccccagaacacctcgcaaatataagcaagatccacttatcaaaagagcattaaatgaacacgaaagagggata

SEQ ID NO: 861726 - DNA, 75 bp, synthetic construct
  source 1..75: mol_type = other DNA
gtatgtcgtcaatggtaaatacctaatctacaccaagagcattaaatccatcgacgctatggcagaccttatccg

SEQ ID NO: 861727 - DNA, 75 bp, synthetic construct
  source 1..75: mol_type = other DNA
agctctggcggtttcatttaccgcatctgcattcaccgaaggcacggattatatggttctggaaaaaccgattcc

SEQ ID NO: 861728 - DNA, 75 bp, synthetic construct
  source 1..75: mol_type = other DNA
tccagcgtctgctggcttaccacaccctggaaaatatcggcattatcctgctggggctgggcgctggcgtaacgg

SEQ ID NO: 861729 - DNA, 75 bp, synthetic construct
  source 1..75: mol_type = other DNA
agatcccgctgcctttatcaaaactggtctggatgcagcaggtatgagtttggcggattttgaagctgcactgaa

SEQ ID NO: 861730 - DNA, 75 bp, synthetic construct
  source 1..75: mol_type = other DNA
gtgggcataagagaactaaacctcaccaaagaacagcacgattggctgaatggatggcttgaactgtggggagca

SEQ ID NO: 861731 - DNA, 75 bp, synthetic construct
  source 1..75: mol_type = other DNA
ttcgtccaggacagtggattgctatctacggtcttggcggtctgggtaacctcgccctgcaatacgcgaagaatg

SEQ ID NO: 861732 - DNA, 75 bp, synthetic construct
  source 1..75: mol_type = other DNA
aataaaaaactaacaacagagctatctgttaatataatttatgcggctctaatcagatctttaccaagtgaacaa

SEQ ID NO: 861733 - DNA, 75 bp, synthetic construct
  source 1..75: mol_type = other DNA
gttggcagtcacctgaacgtgggttgattccaccgttggacttcatttcctacgccgaagagtcagggctaattg

SEQ ID NO: 861734 - DNA, 75 bp, synthetic construct
  source 1..75: mol_type = other DNA
agccagactgcctacatctactcttctgctcacttcgcgaacaacgtctttgttgacggtagcttgagctactct

SEQ ID NO: 861735 - DNA, 75 bp, synthetic construct
  source 1..75: mol_type = other DNA
gaacattactctgaacaacggtagtaagtgggttggctcagcaaacatgagtgctgaagtaattgctccggcaga

SEQ ID NO: 861736 - DNA, 75 bp, synthetic construct
  source 1..75: mol_type = other DNA
ggcagcctgagttcacagataaaacactctccaggaaacccggggcggttcataccgttaatagttcagtaattg

SEQ ID NO: 861737 - DNA, 75 bp, synthetic construct
  source 1..75: mol_type = other DNA
tgctggccggggaggataacgccacgtcggccaccatcgagacgctggaatccccgcgtgaacgtgccgcgttaa

SEQ ID NO: 861738 - DNA, 75 bp, synthetic construct
  source 1..75: mol_type = other DNA
cagggaatgcagactaacctcaccttaaaagaagagagtaatgcagactggctacccaagtgcgatgagccaaca

SEQ ID NO: 861739 - DNA, 75 bp, synthetic construct
  source 1..75: mol_type = other DNA
ctgacaatgtttggcaaagggctaccagttatgctgaaggaatacgggctaaattatgagaagcggcgaactaat

SEQ ID NO: 861740 - DNA, 75 bp, synthetic construct
  source 1..75: mol_type = other DNA
ggatgtggccgggctgtttcagcgtctgcgcgcgccgttctcctccgggaaggtggcctccgtggtggacaccct

SEQ ID NO: 861741 - DNA, 75 bp, synthetic construct
  source 1..75: mol_type = other DNA
cgcagatgcgtgtgaaggtgttgttgccctgccgccggtcttcggtgactggaatgatgccttcacgcagtacgg

SEQ ID NO: 861742 - DNA, 75 bp, synthetic construct
  source 1..75: mol_type = other DNA
cggcgcgccgtctgattggctttcgcaatggggtactcgatacccaaagtggcctgttcagcccgcacagtaaat

SEQ ID NO: 861743 - DNA, 75 bp, synthetic construct
  source 1..75: mol_type = other DNA
cacggcgcttaccattcatcatctgacaggagaagccgtcatggtggcattttcgtcggtcaactttctttcttt

SEQ ID NO: 861744 - DNA, 75 bp, synthetic construct
  source 1..75: mol_type = other DNA
atgagtcaattaaacaacgtctgggtctttagcgataatcctgaacgttatgccgaactgtttggcggtgcgcag

SEQ ID NO: 861745 - DNA, 75 bp, synthetic construct
  source 1..75: mol_type = other DNA
gttgaagttagcggccgtctgggcggcgcagaaatcgcacgtaccgaatggtaccgcgaaggtcgcgtaccgctg

SEQ ID NO: 861746 - DNA, 75 bp, synthetic construct
  source 1..75: mol_type = other DNA
acgttaaccgccgataccgatagcgggaaagatgcagcggcagcacttgccgcgcgactgctgcaagcctcgcgt

SEQ ID NO: 861747 - DNA, 75 bp, synthetic construct
  source 1..75: mol_type = other DNA
tcccggcggttatcctggctgtgaacaataatccgatgcgtttcactgatcgtagtggtggagtttcacgccgaa

SEQ ID NO: 861748 - DNA, 75 bp, synthetic construct
  source 1..75: mol_type = other DNA
gtatgcagatggagagctggtaaatctgcagttgataaacgctgatgggggaaaatgcttccttaaaggtggtca

SEQ ID NO: 861749 - DNA, 75 bp, synthetic construct
  source 1..75: mol_type = other DNA
ggatgcggtctccgttgacccgaaatacaaggatgcgtactccacccatattccggcggtgattctggccgtgaa

SEQ ID NO: 861750 - DNA, 75 bp, synthetic construct
  source 1..75: mol_type = other DNA
cgaacttctggcgctggctcgaccgtgcggccggtaaaaatccacaaaaacgcgacgtgattctggctgcgctgt

SEQ ID NO: 861751 - DNA, 75 bp, synthetic construct
  source 1..75: mol_type = other DNA
ggtcaaaggggcatgtcatatcatcgaagggaaaaaacaggccggaaaacgcctgtggattgcagagggttatgc

SEQ ID NO: 861752 - DNA, 75 bp, synthetic construct
  source 1..75: mol_type = other DNA
gattgcgccggaagagcgtgacccgaagctgaaagataaaattgcccgtgaactggccgtcatcgtgcgccagct

SEQ ID NO: 861753 - DNA, 75 bp, synthetic construct
  source 1..75: mol_type = other DNA
ggtaaaaggggcatgccatatcatcgaggggcagaaacaggcgggaaaacgtctgtggatagcggagggctatgc

SEQ ID NO: 861754 - DNA, 75 bp, synthetic construct
  source 1..75: mol_type = other DNA
gggtgataatgcacttcccggaacagattgccccggaagagcgtgacccgacgctgaaagataaaatcgcccggg

SEQ ID NO: 861755 - DNA, 75 bp, synthetic construct
  source 1..75: mol_type = other DNA
tgctcccgcagaccagtgggatgtttatggggaatgccagcatcatcccgcgtaattatcgtaaatatctctatc

SEQ ID NO: 861756 - DNA, 75 bp, synthetic construct
  source 1..75: mol_type = other DNA
atgaagccggtatatggaaaatcattccgccgtcagactttgcgcgcgacgtggccgggctgttccagcgtctgc

SEQ ID NO: 861757 - DNA, 75 bp, synthetic construct
  source 1..75: mol_type = other DNA
ccttttatccgcatctgaccacttttcagcatccgttatcggaagtcctgagcaaatgctggatctatttcaatc

SEQ ID NO: 861758 - DNA, 75 bp, synthetic construct
  source 1..75: mol_type = other DNA
atgaaacaaaaagagctatggattaaccagatcaaagggttatgtatttgtctggtagtaatttatcactcggtc

SEQ ID NO: 861759 - DNA, 75 bp, synthetic construct
  source 1..75: mol_type = other DNA
gcgaacggccagctcctgtcccgctatgaggccgggatatggaaaatcattccgccatcggattttgcccgcgac

SEQ ID NO: 861760 - DNA, 75 bp, synthetic construct
  source 1..75: mol_type = other DNA
ccatgatgctgaaagagtacggcctgaattatgaaaagcggcacacaaagcaggggatgcagaccaacctgtcgc

SEQ ID NO: 861761 - DNA, 75 bp, synthetic construct
  source 1..75: mol_type = other DNA
cagggcttaaggccatcaccggcggcgatgcggtctcggttgacccgaaataccagaacccctattccacgcata

SEQ ID NO: 861762 - DNA, 75 bp, synthetic construct
  source 1..75: mol_type = other DNA
tgaagcgtgctgtacagaacgcaatgcgtctgggcgctaaaggtattaaagttgaagttagcggccgtctgggcg

SEQ ID NO: 861763 - DNA, 75 bp, synthetic construct
  source 1..75: mol_type = other DNA
cgcattctggtagaaatattcagcttaagcctgattccgcaaatgaacgcggtacgctggtcgccgcaagtcgaa

SEQ ID NO: 861764 - DNA, 75 bp, synthetic construct
  source 1..75: mol_type = other DNA
actgcatggcaaagatgttccggtgcgtgaagccctcgccggacagggcccagcgcaggcgtcggcacctgtttc

SEQ ID NO: 861765 - DNA, 75 bp, synthetic construct
  source 1..75: mol_type = other DNA
tatcatgctgattgtgcagggctgctttggcttgctcaaccgtattgcgccgccgctgaaccttttttctcttgg

SEQ ID NO: 861766 - DNA, 75 bp, synthetic construct
  source 1..75: mol_type = other DNA
cgatcctgctgttttttgccatggacgggcatctgctgctggtaagcgtgttgtacaagggcttcacctactggc

SEQ ID NO: 861767 - DNA, 75 bp, synthetic construct
  source 1..75: mol_type = other DNA
tgagcatggcggtgatgaacgacccaagcagcggcgcatcgactaccgtgctggcggagttgatcaacgtctacg

SEQ ID NO: 861768 - DNA, 75 bp, synthetic construct
  source 1..75: mol_type = other DNA
tttccagtcatgccgggcagactgatcaggcatcgtcgctgcttgatcaaatcatggctcagacccgtattcagc

SEQ ID NO: 861769 - DNA, 75 bp, synthetic construct
  source 1..75: mol_type = other DNA
atgtcatcatccatgcgcctgcctttcagcaggtcgagtcgttctggcgctcactgaaaaccatggtggatcgcg

SEQ ID NO: 861770 - DNA, 75 bp, synthetic construct
  source 1..75: mol_type = other DNA
gagcgtgcggccccattttaaatttatgggggcaaactttgagctttccctggttggccggttagacagggagta

SEQ ID NO: 861771 - DNA, 75 bp, synthetic construct
  source 1..75: mol_type = other DNA
gtgaacgtgctgaaaagtctggcgcgtaaaaatgggtcttcaactgaagagaaggaagacgacctggatctggat

SEQ ID NO: 861772 - DNA, 75 bp, synthetic construct
  source 1..75: mol_type = other DNA
tgggttacatcgcggcagtggctgtcggggcggttgtgacggcagtctgcgtgaacgtgctgaaaagtctggcgc

SEQ ID NO: 861773 - DNA, 75 bp, synthetic construct
  source 1..75: mol_type = other DNA
accatggtggatcgcgttgacttccgtgaaaatatcaagatcaacgtgcttcatgtcaccaagcaggagcttctg

SEQ ID NO: 861774 - DNA, 75 bp, synthetic construct
  source 1..75: mol_type = other DNA
cgcctggcggggattggcgaactgatcacttttgaggtgaaagatgtcgcgcaactgaccaatccgctaccaaaa

SEQ ID NO: 861775 - DNA, 75 bp, synthetic construct
  source 1..75: mol_type = other DNA
gtcagatgagcaaaggcaaagatttcctcaacctgttctcctataccggtagcgccaccgtgcatgcgggattag

SEQ ID NO: 861776 - DNA, 75 bp, synthetic construct
  source 1..75: mol_type = other DNA
cttgaagtcactgaatacaacgctcacttatgggtgaatctgacggattacctcgatactggtctgttcctcgat

SEQ ID NO: 861777 - DNA, 75 bp, synthetic construct
  source 1..75: mol_type = other DNA
gctctcgacttaagcggtgacggtttacatctgcgtggctatcgcgatcgtgcgggtattgcgccaatcaaagaa

SEQ ID NO: 861778 - DNA, 75 bp, synthetic construct
  source 1..75: mol_type = other DNA
tgctacgtgatgaaacccaggaagatccacgcgaaagccaggcagcgaagcttgatcttaactatgtctcgctgg

SEQ ID NO: 861779 - DNA, 75 bp, synthetic construct
  source 1..75: mol_type = other DNA
cgaactggatttcgccctgctggaaattaaccctctggtgttgcgggaaacgggcgaatttatgtgtgcagacgc

SEQ ID NO: 861780 - DNA, 75 bp, synthetic construct
  source 1..75: mol_type = other DNA
cagcgatttagacctctatctcggcgttcaggcgatcaactggacagagatgtttaatcctggcgcgaccttcgc

SEQ ID NO: 861781 - DNA, 75 bp, synthetic construct
  source 1..75: mol_type = other DNA
ctgctaagctgcttgcagctgcgtgcagacaaacagtacaaggcgaaaaacggcccgctggactgcgtacagaaa

SEQ ID NO: 861782 - DNA, 75 bp, synthetic construct
  source 1..75: mol_type = other DNA
ggtacgttgctgattgaagcggcgatgctagcgaccgatcgcgcaccaggcttgcaccgtgggcgttggggcttt

SEQ ID NO: 861783 - DNA, 75 bp, synthetic construct
  source 1..75: mol_type = other DNA
cacaggactttgcccgggatgtggccgggctgtttcagcgtctgcgcgcgccgttctcctccgggaaggtggcct

SEQ ID NO: 861784 - DNA, 75 bp, synthetic construct
  source 1..75: mol_type = other DNA
ttattgaaatgcctctggttaagaaggcgtttttcttcttttttaataaagaatttgacagccatgatttagctc

SEQ ID NO: 861785 - DNA, 75 bp, synthetic construct
  source 1..75: mol_type = other DNA
ctgcatcatatggtggttgcaatacatgggctttaagttgcaattaatggatttacggacccgctttctcaggta

SEQ ID NO: 861786 - DNA, 75 bp, synthetic construct
  source 1..75: mol_type = other DNA
catgcgtatctatgagcattacggcgaggcgctcgcggtcgatgccaacggccagcttctgtcccgttatgaaaa

SEQ ID NO: 861787 - DNA, 75 bp, synthetic construct
  source 1..75: mol_type = other DNA
agtgcggcgcgggtgacggccttaaactggttgagagggtattcgatgtatctgcctcagaggccgcccaaaagg

SEQ ID NO: 861788 - DNA, 75 bp, synthetic construct
  source 1..75: mol_type = other DNA
cggcggcgtgtcacgccggcgggtgattattcacttcccggaacagatagccccgcaggagcgcgacccgcagct

SEQ ID NO: 861789 - DNA, 75 bp, synthetic construct
  source 1..75: mol_type = other DNA
tgatcaccatcggcgtctttgtgttgggttatctctactgtctgacccagtttcccggttttgcttccacaagag

SEQ ID NO: 861790 - DNA, 75 bp, synthetic construct
  source 1..75: mol_type = other DNA
gtggtggttatcggtattttcctcgcgcatcgtacccgttttggtaatcaggtatacgccattggcggcaacgca

SEQ ID NO: 861791 - DNA, 75 bp, synthetic construct
  source 1..75: mol_type = other DNA
actggtactggcgatgggctgtgcattcggcgcatttatggggcttttgatcgacgcgctgaagatcccggcatt

SEQ ID NO: 861792 - DNA, 75 bp, synthetic construct
  source 1..75: mol_type = other DNA
aaagcattctcaaaagaaagttatggattgtattattgctgaccataatgctgatatatgtgtgttatgcgggag

SEQ ID NO: 861793 - DNA, 75 bp, synthetic construct
  source 1..75: mol_type = other DNA
gtcaactcattacattaaagccactgtaccagcatgcagagtgtgcaattctgatttgctgggagtgtttgagta

SEQ ID NO: 861794 - DNA, 75 bp, synthetic construct
  source 1..75: mol_type = other DNA
ggctcgactttgctgaagaccaagcactgcgtcgcaagcaggtatttttacaggactgggccgataagcttgacc

SEQ ID NO: 861795 - DNA, 75 bp, synthetic construct
  source 1..75: mol_type = other DNA
tcggcacagcggtatttgccatctccggcgttttgttagccggaaaattgcgtatggacccttttggtgttctgg

SEQ ID NO: 861796 - DNA, 75 bp, synthetic construct
  source 1..75: mol_type = other DNA
ccctgtcagcgtccaccacggcaggtggtctgaccgtgagcgccacgccgatggcgaacggcgaaatggacccgg

SEQ ID NO: 861797 - DNA, 75 bp, synthetic construct
  source 1..75: mol_type = other DNA
aaacgggaaagatgcaaaccgtctcgactgcgtggttccggcggatgtggttaacggcctgcatgtgtttgccgg

SEQ ID NO: 861798 - DNA, 75 bp, synthetic construct
  source 1..75: mol_type = other DNA
agagcgacaaaatcgccgcgctggatgctggagcggatgattacctgagtaagccgtttggcattggtgaattgc

SEQ ID NO: 861799 - DNA, 75 bp, synthetic construct
  source 1..75: mol_type = other DNA
caaaaactggagcaagacccggcccggcctcgccattttattactgaaactgggattggttatcggtttatgctt

SEQ ID NO: 861800 - DNA, 75 bp, synthetic construct
  source 1..75: mol_type = other DNA
aaacgtcagcaatgcgatggaacagcgcggcgcaatcggtgtgggtgggtggcgcaagtcgctttccaccggcat

SEQ ID NO: 861801 - DNA, 75 bp, synthetic construct
  source 1..75: mol_type = other DNA
tgtgcattttgagtttaatacccggctggccgttaacacgctgccgggtaatgaacagcgtgttctggtgattgg

SEQ ID NO: 861802 - DNA, 75 bp, synthetic construct
  source 1..75: mol_type = other DNA
tggcggggcgtacggggccgacttcggtcgggccgggttctttggttgccggtactgcgaaccccgtacgtctcg

SEQ ID NO: 861803 - DNA, 75 bp, synthetic construct
  source 1..75: mol_type = other DNA
aacaaagaggccacaccatggcaaaccgcaaacagcaccgcactatcgcggagcgtcgtcacatccagactgaaa

SEQ ID NO: 861804 - DNA, 75 bp, synthetic construct
  source 1..75: mol_type = other DNA
aaaagaattgccggttatttgcaggctatgcaggacaatgcacgggcggtgaatcaaacacagcagcgtgatgct

SEQ ID NO: 861805 - DNA, 75 bp, synthetic construct
  source 1..75: mol_type = other DNA
ccggcacggatcgtgtttatccgcactgcagaaggaaaagaacgtctgcgcccgtcaccgcgatcgtcgcctggg

SEQ ID NO: 861806 - DNA, 75 bp, synthetic construct
  source 1..75: mol_type = other DNA
cccggcgctttccagcggcaatctgcaaaaaaaccctgaccgcgcccgtcaccgcgatcgtcgcctgggacagtg

SEQ ID NO: 861807 - DNA, 75 bp, synthetic construct
  source 1..75: mol_type = other DNA
gagctgagcgcattattgccggggctctggataccacaccagaagcattatggccggaaaggtatgcccttaaaa

SEQ ID NO: 861808 - DNA, 75 bp, synthetic construct
  source 1..75: mol_type = other DNA
tgatcaccatcggcgtttttgtgttgggctatctctactgcctgacgcagtttcccggttttgcttctacgcgag

SEQ ID NO: 861809 - DNA, 75 bp, synthetic construct
  source 1..75: mol_type = other DNA
cctgtccggtgtgcggcggctctgaccgctttcgctttgacgataaagaggggcgcgggacgtggtactgcaatc

SEQ ID NO: 861810 - DNA, 75 bp, synthetic construct
  source 1..75: mol_type = other DNA
agaccgttttagatttgatgaccgggaggggcggggaacgtggttctgtaaccagtgcggggcgggtgatggcct

SEQ ID NO: 861811 - DNA, 75 bp, synthetic construct
  source 1..75: mol_type = other DNA
tcccgcctgtgtttggtgactggaacgatgcattcacgcaaaacggcgaagaagccacccggcatgcaattcatg

SEQ ID NO: 861812 - DNA, 75 bp, synthetic construct
  source 1..75: mol_type = other DNA
gtggatatcagtgaagcagctgacaggatacatggactgacacatggtctgtctgtagttaattccgaagtcagg

SEQ ID NO: 861813 - DNA, 75 bp, synthetic construct
  source 1..75: mol_type = other DNA
cgcgcgactgctgcaagcctcgcgtgaatctgccggaaacacttatcttacacataaaggtttcccggagcatat

SEQ ID NO: 861814 - DNA, 75 bp, synthetic construct
  source 1..75: mol_type = other DNA
acaaggcgatgcgggtgcatgagcattacggcgaagcgctggctgtggacgcgaacggccagcttctgtcccgct

SEQ ID NO: 861815 - DNA, 75 bp, synthetic construct
  source 1..75: mol_type = other DNA
taatggctataaaaacaccctgagtcttacgatgtttggcaaagggttgccagtcatgctgaaggagtacgggct

SEQ ID NO: 861816 - DNA, 75 bp, synthetic construct
  source 1..75: mol_type = other DNA
gggtgatcctgcatttcccggagcagattgccccggaggaacgcgacccgcagcttaagaataaaatcgcccgtg

SEQ ID NO: 861817 - DNA, 75 bp, synthetic construct
  source 1..75: mol_type = other DNA
gcgaacggccagctcctgtcccgctatgaggccgggatatggaaaatcattccgccgtcagattttgcccgtgat

SEQ ID NO: 861818 - DNA, 75 bp, synthetic construct
  source 1..75: mol_type = other DNA
ggcgagcattgcctgcagtgagtacccaacgcaccagataattattgctgctgaccgcgatctcaacggtgcggg

SEQ ID NO: 861819 - DNA, 75 bp, synthetic construct
  source 1..75: mol_type = other DNA
atgtcaggaatgaaagttagccaggcagagaaagcagctcgtggtcactggtcaagaattttacctgcactgggt

SEQ ID NO: 861820 - DNA, 75 bp, synthetic construct
  source 1..75: mol_type = other DNA
accagtgcggggcaggtgatggcctggcgcttgtaagtaaagtactggatgtaggcattagtgaagcggcagaca

SEQ ID NO: 861821 - DNA, 75 bp, synthetic construct
  source 1..75: mol_type = other DNA
gcgactgctgcaagcctcacgtgaatctgccggaaacacttatcttacacataaaggtttcccggagcatatttg

SEQ ID NO: 861822 - DNA, 75 bp, synthetic construct
  source 1..75: mol_type = other DNA
cgggataatatccagaatacgctctttgccatcgctcgctttaccgcccgcttgttccgccaggaatgccatcgg

SEQ ID NO: 861823 - DNA, 75 bp, synthetic construct
  source 1..75: mol_type = other DNA
ggactgattcagacttacataaactttgatggcacgctgagctcatggtggacgaaaatcgccatcggtattttg

SEQ ID NO: 861824 - DNA, 75 bp, synthetic construct
  source 1..75: mol_type = other DNA
gcggccgcttaagtgcgatggggctgctgatgctggcggtggtagttatcggcatattcctcgcgcatcgtaccc

SEQ ID NO: 861825 - DNA, 75 bp, synthetic construct
  source 1..75: mol_type = other DNA
ggtatgacctttgtgatcctctccggcgggatcgatctttccgtcggttcggtgatcgcttttaccggcgtgttt

SEQ ID NO: 861826 - DNA, 75 bp, synthetic construct
  source 1..75: mol_type = other DNA
caccggactggcgacactggcggggattgtcttctctatttacacccaggccggatacgcgctggcaggcgtagg

SEQ ID NO: 861827 - DNA, 75 bp, synthetic construct
  source 1..75: mol_type = other DNA
gttttggtaatcaggtatacgccattggcggcaacgcaacgtcggcgaacctgatggggatttccactcgcagca

SEQ ID NO: 861828 - DNA, 75 bp, synthetic construct
  source 1..75: mol_type = other DNA
ctttttagtccgcactgtaaagagaactggctgcgtaccctgtgtgaagtcgatttcacgccaccggtaaagggg

SEQ ID NO: 861829 - DNA, 75 bp, synthetic construct
  source 1..75: mol_type = other DNA
tttcgacacaatgagtgaagcagaattcacagcgatgagtgtcagcgaaaaagctcagagggttcgggagcatta

SEQ ID NO: 861830 - DNA, 75 bp, synthetic construct
  source 1..75: mol_type = other DNA
cagcttatcagtggcaatggtagcaagtgttttcttaaaggaggtcaggttaaggaggcctatcatctgatagaa

SEQ ID NO: 861831 - DNA, 75 bp, synthetic construct
  source 1..75: mol_type = other DNA
tttttgcgcggcgtcagctatctcgtttcggaagagtcgattccgataaaccatcccatttatgacacgctctca

SEQ ID NO: 861832 - DNA, 75 bp, synthetic construct
  source 1..75: mol_type = other DNA
tggctgtgattgttcgccagctcatgcagcgtttcagcgatccgatgagcgccagaacattgcttcagtcgcagc

SEQ ID NO: 861833 - DNA, 75 bp, synthetic construct
  source 1..75: mol_type = other DNA
ggggaaacgcttgaaactcatgccccggcattctggcgatggctggacagggccgccgggcacgagccagcaaaa

SEQ ID NO: 861834 - DNA, 75 bp, synthetic construct
  source 1..75: mol_type = other DNA
gaaaatctgcccgtggtgctcgatgccattctgaaccgtggcgctcgtttttcgtcggtggaaatgtatctggtc

SEQ ID NO: 861835 - DNA, 75 bp, synthetic construct
  source 1..75: mol_type = other DNA
acagccagacattacccgttaaccccactgctctatacgctgattttctttcacgccatcatcctgatggtcgga

SEQ ID NO: 861836 - DNA, 75 bp, synthetic construct
  source 1..75: mol_type = other DNA
cctcgctcgctttcattgccgtcagctacggcgctttgacttgatcaccagagcgccggaagcgattacccctta

SEQ ID NO: 861837 - DNA, 75 bp, synthetic construct
  source 1..75: mol_type = other DNA
tgtgacgctggattatccgcaaccgatagtcgagcacaaagaagcgagagtacaaacgttggcagcgtatgaggc

SEQ ID NO: 861838 - DNA, 75 bp, synthetic construct
  source 1..75: mol_type = other DNA
ccctggcgtttaataatttaccgcgaccacaccgcgtgatgttggggtcgcttaccgttcttactttggccgtcg

SEQ ID NO: 861839 - DNA, 75 bp, synthetic construct
  source 1..75: mol_type = other DNA
tattaatgtcacgtgaaatgcttgatggcaaacgtgagcaaagccagttactgggcgtacgtttgcgttctgaag

SEQ ID NO: 861840 - DNA, 75 bp, synthetic construct
  source 1..75: mol_type = other DNA
tgttgccagcgccagaaacgccggtttaaccagcgccgaagtgagcgcagtgattaaagccatgcagtggcaaat

SEQ ID NO: 861841 - DNA, 75 bp, synthetic construct
  source 1..75: mol_type = other DNA
cggttatgtcccgggtatgaatgctgacagtgtgcaggcagttatagaccatacgcaggctatccgcgctcagag

SEQ ID NO: 861842 - DNA, 75 bp, synthetic construct
  source 1..75: mol_type = other DNA
atggctttcattccaccaaccatcgacgacgttagacattgctctaacgctttatctgtagaccccgccgaaacc

SEQ ID NO: 861843 - DNA, 75 bp, synthetic construct
  source 1..75: mol_type = other DNA
gtcttcaagtatgtgcgcaaaaatcatgtcaaaaccaccgtgcactggaaacgacactggcaacgggcgcggatg

SEQ ID NO: 861844 - DNA, 75 bp, synthetic construct
  source 1..75: mol_type = other DNA
aacccgacaacccagggcgagaaatttgatcatgagggcgagtttatccgccagtggctaccggaactgcgcgat

SEQ ID NO: 861845 - DNA, 75 bp, synthetic construct
  source 1..75: mol_type = other DNA
agtgggccgcttcaaccggaaccgatgcagcgccgtattttcgtattttcaacccgacaacccagggcgagaaat

SEQ ID NO: 861846 - DNA, 75 bp, synthetic construct
  source 1..75: mol_type = other DNA
tcgtcagtctttcgacactgcacatttcccggtggaagaaaaagcggcgattgcgcaattacgccttttttgcca

SEQ ID NO: 861847 - DNA, 75 bp, synthetic construct
  source 1..75: mol_type = other DNA
acgattgagctggaacagaacgaaatccgttcacttttacctgaggccagtgagccgattgatcaggccgcacaa

SEQ ID NO: 861848 - DNA, 75 bp, synthetic construct
  source 1..75: mol_type = other DNA
agtttgagccgctgaacaccgaatgtgtcgaccgctccctgcggctgatgctgcatccggaccggattgagcaga

SEQ ID NO: 861849 - DNA, 75 bp, synthetic construct
  source 1..75: mol_type = other DNA
tcaatgccattacccgtgccttctacgagcgggcggcgctgacacagttcgccaacaagaaaggatacccactga

SEQ ID NO: 861850 - DNA, 75 bp, synthetic construct
  source 1..75: mol_type = other DNA
tttgcgggacaaaatcccccgcaaaattccgctgacgttcaccctcgtggggtcaccgtgtgtccgcccgatgct

SEQ ID NO: 861851 - DNA, 75 bp, synthetic construct
  source 1..75: mol_type = other DNA
ccgctgtgctccatttcctgcccgtttgtgatgacgctggcgctggaagtggaagatcaggccggtacccagcga

SEQ ID NO: 861852 - DNA, 75 bp, synthetic construct
  source 1..75: mol_type = other DNA
ggtaagtcattcctgatgcagggcatcattcggcaggtgctggacagcggtggccgggcctgggtgtttgatatg

SEQ ID NO: 861853 - DNA, 75 bp, synthetic construct
  source 1..75: mol_type = other DNA
tctgccggcagggcctgcccataccgtcttaccgcaatcagctctcctttctgaacctgttcgaccgtaatgcgg

SEQ ID NO: 861854 - DNA, 75 bp, synthetic construct
  source 1..75: mol_type = other DNA
gttcatcgccgtggcaaggatttatcgatctgatgctccgctttcttgggcttttcaaagaagggcaattttctt

SEQ ID NO: 861855 - DNA, 75 bp, synthetic construct
  source 1..75: mol_type = other DNA
caatgaagatcatactttggtcgttgctggtgcgggtaccggaaaaacgtcgacattaattggtaaagcagggta

SEQ ID NO: 861856 - DNA, 75 bp, synthetic construct
  source 1..75: mol_type = other DNA
ttgcccatcggtgatattaaaaatgttaaaataaataaaaaatggttgtactctgagattgttattggtttggag

SEQ ID NO: 861857 - DNA, 75 bp, synthetic construct
  source 1..75: mol_type = other DNA
tgcgaagtttgtgccgtcggtgaaaaagcaggctgcggagtggggcgggctgcgggaatccctcagtaccaacca

SEQ ID NO: 861858 - DNA, 75 bp, synthetic construct
  source 1..75: mol_type = other DNA
ttcatgctggaaaaaaatcccgagaaaccgtatgccctgtggcagatgggggacaatatcagcaacgtcacggac

SEQ ID NO: 861859 - DNA, 75 bp, synthetic construct
  source 1..75: mol_type = other DNA
cgtaacgggctgtcgatgtatatgccggagtttatgcagctgcgtaattacctctccgtctttccgttcatgatg

SEQ ID NO: 861860 - DNA, 75 bp, synthetic construct
  source 1..75: mol_type = other DNA
ggctttgattcgtgtagcggacgaacattcccggtcgcttatgaccgatcgagaggctcgtctggctattcgtgc

SEQ ID NO: 861861 - DNA, 75 bp, synthetic construct
  source 1..75: mol_type = other DNA
acgtcgtattttcttgtggcgtgcatccactcaaccagaatgatccctacgatgtagaagatttacgtcgtctgg

SEQ ID NO: 861862 - DNA, 75 bp, synthetic construct
  source 1..75: mol_type = other DNA
gcgcgaagaaaaagtgacggattgcggtggcgtactacactgttttacagaggacaaagaaacggcgggcaaatt

SEQ ID NO: 861863 - DNA, 75 bp, synthetic construct
  source 1..75: mol_type = other DNA
atcacgcaggctacggaacgctgacagacatcgaccatctgaaccagtcaatcacggatattatcctgacaccgg

SEQ ID NO: 861864 - DNA, 75 bp, synthetic construct
  source 1..75: mol_type = other DNA
gagccggacagcatcttccgcgttcgtgacgatgcgaatacgctgcatatcgagccgctaccttattcgctggaa

SEQ ID NO: 861865 - DNA, 75 bp, synthetic construct
  source 1..75: mol_type = other DNA
ttatcccacaggcgaccaatctccaggcgctgggcggtatcagctttaagaaaggctgttataccggacaagaga

SEQ ID NO: 861866 - DNA, 75 bp, synthetic construct
  source 1..75: mol_type = other DNA
tattcacaggcaccggaggtggtgcgctatgaccgttacctgctggtcagcacagagccgcaggctgtacagcgt

SEQ ID NO: 861867 - DNA, 75 bp, synthetic construct
  source 1..75: mol_type = other DNA
tgtcagaagccgtggcaaacctgcgtggattggggcgttatcgcggattgaagagacgctggcgggcgaagcggg

SEQ ID NO: 861868 - DNA, 75 bp, synthetic construct
  source 1..75: mol_type = other DNA
aacgttgcttctctcacgttgtcgggtgaatcctggcgcttattgagcagtgtctttctgcacagcagtgtttct

SEQ ID NO: 861869 - DNA, 75 bp, synthetic construct
  source 1..75: mol_type = other DNA
atgaccattaaaaatgtaatttgcgatatcgacggcgtgctgatgcacgataacgtcgccgtaccgggtgcagcg

SEQ ID NO: 861870 - DNA, 75 bp, synthetic construct
  source 1..75: mol_type = other DNA
gtgacaacccgctacacaggaatgaacccggacggaacgggaaacctgaatgatatggagcacctgaaacagtca

SEQ ID NO: 861871 - DNA, 75 bp, synthetic construct
  source 1..75: mol_type = other DNA
tgtgaaggatttgatgacagcgtgatcctgccgccgggggcggtgatgactggcaatcatgagatgtacaaagtc

SEQ ID NO: 861872 - DNA, 75 bp, synthetic construct
  source 1..75: mol_type = other DNA
aacccgacaacccagggcgagaaatttgaccgcgaaggcgagtttatccgccagtggctaccggaactgcgcgat

SEQ ID NO: 861873 - DNA, 75 bp, synthetic construct
  source 1..75: mol_type = other DNA
ttatcccacaggcgaccaacctccaggcgctgggcggtatcagctttaagaaaggctgctataccggacaagaga

SEQ ID NO: 861874 - DNA, 75 bp, synthetic construct
  source 1..75: mol_type = other DNA
tgaataaacagccccatgcggatgtaaaaacgttcgataaaaaagatgtgcaattaatcagccagcaaaactggt

SEQ ID NO: 861875 - DNA, 75 bp, synthetic construct
  source 1..75: mol_type = other DNA
ttggtgatccgtttagcgcgtcttgcggataaaaggaaagatgtgagatctgtatcaatgtttttgaaacgcggc

SEQ ID NO: 861876 - DNA, 75 bp, synthetic construct
  source 1..75: mol_type = other DNA
tgaagcgtcaggaagaagttgcgaaagcgatctacgaccgccgggtaaacagcattgagcaggcgctcaaaatcg

SEQ ID NO: 861877 - DNA, 75 bp, synthetic construct
  source 1..75: mol_type = other DNA
ctacaagagtatctgccagaaattatcagccgagatgcgctgactgatgaacgtgaacgtaacttggtcaatgca

SEQ ID NO: 861878 - DNA, 75 bp, synthetic construct
  source 1..75: mol_type = other DNA
ccggcagcgattttttgaactttttcctcacccgttgatcttctcttatatttcattttcttcgggtctgttatg

SEQ ID NO: 861879 - DNA, 75 bp, synthetic construct
  source 1..75: mol_type = other DNA
aatcctgtgcagaaaaaagggggatggtttgagttaaacacagcaattgaacagatcaaagcaggtgattattaa

SEQ ID NO: 861880 - DNA, 75 bp, synthetic construct
  source 1..75: mol_type = other DNA
aaatattttaataccgctgttaaattagttcaaaaagtagatttatgtaaactggatgacaataagacatttgcc

SEQ ID NO: 861881 - DNA, 75 bp, synthetic construct
  source 1..75: mol_type = other DNA
attggaatggtgagcagttcagagtgtccgagcctctttggcaacttgacgatttcctcaaaaaatttctggagt

SEQ ID NO: 861882 - DNA, 75 bp, synthetic construct
  source 1..75: mol_type = other DNA
atgaaacgtaacacctctcacaacgtattttcaccacgcaggcttgctactgttctttccctgctgctccttgcg

SEQ ID NO: 861883 - DNA, 75 bp, synthetic construct
  source 1..75: mol_type = other DNA
ttgcctgattcagaaatgtttctgcttgggcgccctatgctgcaggcgcggttagaaaatttacaggccgtcggc

SEQ ID NO: 861884 - DNA, 75 bp, synthetic construct
  source 1..75: mol_type = other DNA
acaggccgtcggtccggcctttgatctcgactatgatcagaatcgggccatgttaaacaccctgaatgttggtcc

SEQ ID NO: 861885 - DNA, 75 bp, synthetic construct
  source 1..75: mol_type = other DNA
agttagttcaaaaagtagatttatgtaaactggatgacaataagacattcgccatttcgttagctggagactgtc

SEQ ID NO: 861886 - DNA, 75 bp, synthetic construct
  source 1..75: mol_type = other DNA
cgcttattcgtcatgacctaactatgccgcgagaaccacagtcggctatcggcttgcttgttgaggcattgcgtg

SEQ ID NO: 861887 - DNA, 75 bp, synthetic construct
  source 1..75: mol_type = other DNA
tttggcagcgcagagttggtggatgcgctcaatgctcaacattgcttatttacggtagtcgaaaaatcggcctca

SEQ ID NO: 861888 - DNA, 75 bp, synthetic construct
  source 1..75: mol_type = other DNA
gatcgcaggtggggctgaatgcgctgaccgccacactttatccaacacaaagtcgcgccacgggcgtgagctggt

SEQ ID NO: 861889 - DNA, 75 bp, synthetic construct
  source 1..75: mol_type = other DNA
cgaaatgcgctcgcttacctggcctactccgataaagtggttgacggttcacctaaaaatgcgatcagcgccgta

SEQ ID NO: 861890 - DNA, 75 bp, synthetic construct
  source 1..75: mol_type = other DNA
gcggctggctatctggaaccattcgagtttggtggagagcacaagctcaatagccaggctcttttgaaccccaag

SEQ ID NO: 861891 - DNA, 75 bp, synthetic construct
  source 1..75: mol_type = other DNA
gaagcacatccgtatcatcagtgtgacgactgcggcggccatccatccagtcatcggttcgtctgagaatgacgt

SEQ ID NO: 861892 - DNA, 75 bp, synthetic construct
  source 1..75: mol_type = other DNA
tcatacagatgaagtattcacaccaattgaggcaagccagatactgagttttaccgaaatgtttgagcctgttca

SEQ ID NO: 861893 - DNA, 75 bp, synthetic construct
  source 1..75: mol_type = other DNA
ttaccgaaatgtttttagtctacgccttcactctgcctgcaatggtggaagccagacgtgaacaaaaaagctcag

SEQ ID NO: 861894 - DNA, 75 bp, synthetic construct
  source 1..75: mol_type = other DNA
attaacaaccgtcaggatatcgttatcaacgtgacgatccattaccccgccgataaagcgcgtaccagcgaagat

SEQ ID NO: 861895 - DNA, 75 bp, synthetic construct
  source 1..75: mol_type = other DNA
gtgcgtctttttatttggtgcgttaagtcttgcctctgctttttcaccagatctgcaaacactggtaatcctgcg

SEQ ID NO: 861896 - DNA, 75 bp, synthetic construct
  source 1..75: mol_type = other DNA
cgtcagttacccattacgttgatgctttgggtggtgttctttatgagcctgctgattatttacctgctctcaagc

SEQ ID NO: 861897 - DNA, 75 bp, synthetic construct
  source 1..75: mol_type = other DNA
acacatctacgtgggacttgacgcttgacggaaatggcaatctggcgatcgcagaagaatcatattctgttgctc

SEQ ID NO: 861898 - DNA, 75 bp, synthetic construct
  source 1..75: mol_type = other DNA
cgaagtggtctggtacgcaccggatcatgattacggcccgcgctcaagcgttttcgtcccgttatttgccgttga

SEQ ID NO: 861899 - DNA, 75 bp, synthetic construct
  source 1..75: mol_type = other DNA
acgaagagcgcgtgcgcgaaacggcgttgccccttacatcccggcggccttttgccgggatgccaggagcgcagg

SEQ ID NO: 861900 - DNA, 75 bp, synthetic construct
  source 1..75: mol_type = other DNA
ttaaacaggtgtatggcaccggacacaacaacgggcaggcacccgccgcaacgacgtgaagcgcggtttgcgaaa

SEQ ID NO: 861901 - DNA, 75 bp, synthetic construct
  source 1..75: mol_type = other DNA
atcccggcggccttttgccgggatgccaggagcgcaggccacggcgcgacagaggcggcgcgaccggaacggtcg

SEQ ID NO: 861902 - DNA, 75 bp, synthetic construct
  source 1..75: mol_type = other DNA
gtatcgaccgcattatgatatgtaccggttgatgaatgaggttgatgatcttctgcagcaggtgttggattgtcc

SEQ ID NO: 861903 - DNA, 75 bp, synthetic construct
  source 1..75: mol_type = other DNA
cgagcgcatccattcctaacttattaaaacgcgcggcgattatggcggagatccgtcgtttctttgccgatcgtg

SEQ ID NO: 861904 - DNA, 75 bp, synthetic construct
  source 1..75: mol_type = other DNA
cccgcttcccttccggcaggcgtcagcctgccaggggttttcgcgcgggctgacaggcggcctccaccgcctgcc

SEQ ID NO: 861905 - DNA, 75 bp, synthetic construct
  source 1..75: mol_type = other DNA
tcgaacaacgtcaggacaacaaaattatccgtccttccgccaattatgttggcccggaagacagacaatttgtcg

SEQ ID NO: 861906 - DNA, 75 bp, synthetic construct
  source 1..75: mol_type = other DNA
cgccggtactgggttatcaggaactggcccatgacatggcatcgcgtctcatgaagacggagctgaatgtggcgc

SEQ ID NO: 861907 - DNA, 75 bp, synthetic construct
  source 1..75: mol_type = other DNA
atgctggatcgcaaagatttaaaaggaataatcaaagcactaaagaaaggcgaaatggtctggtatgcgccggat

SEQ ID NO: 861908 - DNA, 75 bp, synthetic construct
  source 1..75: mol_type = other DNA
ttgaacaacgtcaggacaacaaaattatccgtccttccgcgaattacgttggaccggaagaccgtcagtttgttg

SEQ ID NO: 861909 - DNA, 75 bp, synthetic construct
  source 1..75: mol_type = other DNA
ctctatcggcggtcacttcctgcatctgctgcacggcgaaaagccgtcgcaaagctgggaaaaggcgatgcatat

SEQ ID NO: 861910 - DNA, 75 bp, synthetic construct
  source 1..75: mol_type = other DNA
gttactggctgggcggcgcacattatcgaacaacgtcaggacaacaaaattatccgtccttccgccaattatgtt

SEQ ID NO: 861911 - DNA, 75 bp, synthetic construct
  source 1..75: mol_type = other DNA
cggtggcaattgagatccctcccaattttggccgcgatatcgcgcgtggtacgcctgtggaactcggtgtctgga

SEQ ID NO: 861912 - DNA, 75 bp, synthetic construct
  source 1..75: mol_type = other DNA
aagtcttattactaacattgaaacgataagttcgacacaacttacgcaacagacacaatcaatacttaatcagat

SEQ ID NO: 861913 - DNA, 75 bp, synthetic construct
  source 1..75: mol_type = other DNA
ctggatattatccaggtggcatttggcgttaagtctattattcactccggctttaaacccggcgttggcttttac

SEQ ID NO: 861914 - DNA, 75 bp, synthetic construct
  source 1..75: mol_type = other DNA
ggtgaaagagccgattccggttatcccaacctgtcactatatgatgggcggtattccgaccaaagtgaccggtca

SEQ ID NO: 861915 - DNA, 75 bp, synthetic construct
  source 1..75: mol_type = other DNA
ctggctattgccctgcagaaagatctgcaacctcgtgaaagcaaaacgctggccctcacttcgcgcgaagcttaa

SEQ ID NO: 861916 - DNA, 75 bp, synthetic construct
  source 1..75: mol_type = other DNA
gaatgtggtgatttttgacaccccactgatgcgcggtgagcagaaaattgaacaggtcacgctgaccaaaccgaa

SEQ ID NO: 861917 - DNA, 75 bp, synthetic construct
  source 1..75: mol_type = other DNA
tggctcagcttacgaaacaggggcatgtttatatcatttcgaatattggttcgtttggtgagaatgtctttaaaa

SEQ ID NO: 861918 - DNA, 75 bp, synthetic construct
  source 1..75: mol_type = other DNA
aagaattggggccaatgtacagttcattcttaccggggagtcatcaggtataactttatcacgtgatgaaatgga

SEQ ID NO: 861919 - DNA, 75 bp, synthetic construct
  source 1..75: mol_type = other DNA
gagcgttcgcggttatcactcaagcaggctgaagtagcagccctttgtggcgtttcaagagaaatgtgggggaaa

SEQ ID NO: 861920 - DNA, 75 bp, synthetic construct
  source 1..75: mol_type = other DNA
gtatctctccgaccgtcagcaacacaaggtctgtctgatcgatgaggcctggaagctgctgtcgaaagacaacaa

SEQ ID NO: 861921 - DNA, 75 bp, synthetic construct
  source 1..75: mol_type = other DNA
atgaaattgccagtcagagaatttgatgcagttgtgattggtgccggcggcgcaggtatgcgcgcggcgctgcaa

SEQ ID NO: 861922 - DNA, 75 bp, synthetic construct
  source 1..75: mol_type = other DNA
gtattccgaccaaagtgaccggtcaggcgctgactgtgaatgagaaaggcgaagatgtggttgttccggggctgt

SEQ ID NO: 861923 - DNA, 75 bp, synthetic construct
  source 1..75: mol_type = other DNA
aagaattggggccaacgtacagttcattcttactggggaatcatcaggtataactttatcacgtgatgaaatgga

SEQ ID NO: 861924 - DNA, 75 bp, synthetic construct
  source 1..75: mol_type = other DNA
ttggctatatgctggcgcagagtttgagcgcacagccgcagatgccgcccgtgacgacggtgctgacgcgcattg

SEQ ID NO: 861925 - DNA, 75 bp, synthetic construct
  source 1..75: mol_type = other DNA
tctgtttagctacagccgccgcgaagcgctggaactgcgacgcgatccggtacgttcgacgctggcgctgatggg

SEQ ID NO: 861926 - DNA, 75 bp, synthetic construct
  source 1..75: mol_type = other DNA
taacccaacattattacattgtgttatgtcagctttagaacatgaaaaaaataaagcatttacttacccggatga

SEQ ID NO: 861927 - DNA, 75 bp, synthetic construct
  source 1..75: mol_type = other DNA
gttagctcatggcctcctgcagctcctgatggcctgctcttatgagaacatagatgatatgacactcactatgga

SEQ ID NO: 861928 - DNA, 75 bp, synthetic construct
  source 1..75: mol_type = other DNA
tcgacggtgcgatgccgagccgcgccgaaacggtaaaaggctacgtgcaggccatgcaccagagctggctacagg

SEQ ID NO: 861929 - DNA, 75 bp, synthetic construct
  source 1..75: mol_type = other DNA
ggaactggttgagaaacgcggagccgccagtctggaagaggcatttatcgcctatttgcaggaagcggcagggca

SEQ ID NO: 861930 - DNA, 75 bp, synthetic construct
  source 1..75: mol_type = other DNA
gttcgaacggctgtggtaaatccaccaccatgaaaatgcttaccggattgctgcccgccagcgaaggtgaggcgt

SEQ ID NO: 861931 - DNA, 75 bp, synthetic construct
  source 1..75: mol_type = other DNA
ttatcggctggcgattgttcacggcaacggaccacaggtggggctgttggcgttacagaatctggcgtggaaaga

SEQ ID NO: 861932 - DNA, 75 bp, synthetic construct
  source 1..75: mol_type = other DNA
tggcgtggaaagaggtagaaccgtatccgctggatgtgctggtggcagaaagtcaggggatgattggctatatgc

SEQ ID NO: 861933 - DNA, 75 bp, synthetic construct
  source 1..75: mol_type = other DNA
tgtcagaagccgtggtaaacccgcgtggattggggcgttatcgcgaattgaagagacgctggcgggcgaagcggg

SEQ ID NO: 861934 - DNA, 75 bp, synthetic construct
  source 1..75: mol_type = other DNA
tgatggatacggcgctgaaaggcgggaccgaaaatgatggtactggcgtggtgtatttcgcttatgagtcaacgt

SEQ ID NO: 861935 - DNA, 75 bp, synthetic construct
  source 1..75: mol_type = other DNA
ttccatttggactccagcgagaatcaggactctttttagatattacagaggtcagccggggtattgactgtaact

SEQ ID NO: 861936 - DNA, 75 bp, synthetic construct
  source 1..75: mol_type = other DNA
agcggaagcaggaccacttctacaacgcctttccgacagcaccctgaagctgccggacaacttaccccagagcat

SEQ ID NO: 861937 - DNA, 75 bp, synthetic construct
  source 1..75: mol_type = other DNA
gctcaaccagttcaattacggctatcggcagatgaaagagtcaggttatttgtggccagtggtcgatgcgcgggt

SEQ ID NO: 861938 - DNA, 75 bp, synthetic construct
  source 1..75: mol_type = other DNA
cgggcgtaaaccgttctatgttggtaaaccgagtccgtggatcatccgcgcagcattaaacaaaatgcaggcgca

SEQ ID NO: 861939 - DNA, 75 bp, synthetic construct
  source 1..75: mol_type = other DNA
gcggcttcccgattagcgccatgctgactacggcagaaattgcttctgcgtttcatccgggttctcacggttcaa

SEQ ID NO: 861940 - DNA, 75 bp, synthetic construct
  source 1..75: mol_type = other DNA
cgaagggcgtcaggaaccgtgtgggaactgcgatatctgcctcgatccgccgaaacaatacgatggttcaaccga

SEQ ID NO: 861941 - DNA, 75 bp, synthetic construct
  source 1..75: mol_type = other DNA
ccatgaacattgggtgagcgtgatccgccagctgattcacctcggcctggtgacgcaaaatattgcccagcattc

SEQ ID NO: 861942 - DNA, 75 bp, synthetic construct
  source 1..75: mol_type = other DNA
tgtggccagtggtcgatgcgcgggtgaaatatcgccacgccctcacctttgagcaacgcatccgcgtgcgtgcgc

SEQ ID NO: 861943 - DNA, 75 bp, synthetic construct
  source 1..75: mol_type = other DNA
tgaatcctgattttgtgattgttggcgaaacgcgttcctacaactgggacatgatgcataaagcggcgtatttcg

SEQ ID NO: 861944 - DNA, 75 bp, synthetic construct
  source 1..75: mol_type = other DNA
gaaaatctgcccgtggtgctcgatgccatcgtgaaccggggagcacgtttttcgtcggtggaaatgtacctggtc

SEQ ID NO: 861945 - DNA, 75 bp, synthetic construct
  source 1..75: mol_type = other DNA
aaagggccaacggcagatcaacgtgtccgtctggcattaagcatgacgattgatcgtcgtctgatggcagaaaaa

SEQ ID NO: 861946 - DNA, 75 bp, synthetic construct
  source 1..75: mol_type = other DNA
tgagccgattcagggcgaggggggcgtgacggcggcgacgccagcgtttttgcagggcttgcgcgaactgtgcga

SEQ ID NO: 861947 - DNA, 75 bp, synthetic construct
  source 1..75: mol_type = other DNA
cacgtgcgactttcgatgaagtgatcctgccgatttatgcaccggcggagtttattccagtaaaaggtcagggca

SEQ ID NO: 861948 - DNA, 75 bp, synthetic construct
  source 1..75: mol_type = other DNA
gccatcctgcgctggtgaacgcgttaaaaacccagggcgaaactctgtggcatatcagtaacgttttcaccaatg

SEQ ID NO: 861949 - DNA, 75 bp, synthetic construct
  source 1..75: mol_type = other DNA
atcaaattcctgcgttgttattgaacggcctgaccgttgttgtttcaccactgatttcgttgatgaaagaccagg

SEQ ID NO: 861950 - DNA, 75 bp, synthetic construct
  source 1..75: mol_type = other DNA
gcgtgccttccggttccagcggcgaagccgtgaaaatctttgtggtgaagaaagatccatcgctcactgacgagt

SEQ ID NO: 861951 - DNA, 75 bp, synthetic construct
  source 1..75: mol_type = other DNA
ttaatgatgcctaacttattgcagtatccggtggcgctgttcggtattctccgtgccggaatgatcgttgtaaac

SEQ ID NO: 861952 - DNA, 75 bp, synthetic construct
  source 1..75: mol_type = other DNA
gattttacggcgctgagctcggcggcggttaattttttcgcaccctcggggtcgaatgcaccggcaccggagaac

SEQ ID NO: 861953 - DNA, 75 bp, synthetic construct
  source 1..75: mol_type = other DNA
cgttgctgaacaataaagagttccagcagctggatttctccagtctgcatctttccgcaggcggtgggatgccag

SEQ ID NO: 861954 - DNA, 75 bp, synthetic construct
  source 1..75: mol_type = other DNA
tgaagatgtggtcatgcagcacccaggtgtacaggaagtggcggctgttggcgtaccttccggttccagcggtga

SEQ ID NO: 861955 - DNA, 75 bp, synthetic construct
  source 1..75: mol_type = other DNA
gtcaatccgttatataccccgcgcgagcttgagcatcagctcaacgacagcggcgcatctgcgattgtcatcgtg

SEQ ID NO: 861956 - DNA, 75 bp, synthetic construct
  source 1..75: mol_type = other DNA
gtgaatgtggcgcaggcggatgtgttgaatctggagtccggagctaaacaggttttacaagaaacctttggctac

SEQ ID NO: 861957 - DNA, 75 bp, synthetic construct
  source 1..75: mol_type = other DNA
atcgcaaactgttcgccaaattacgcaaactgcgtaaatccattgctgatgaaagtaatgtcccgccgtatgtgg

SEQ ID NO: 861958 - DNA, 75 bp, synthetic construct
  source 1..75: mol_type = other DNA
tggtcaactgcgccagcgtttcccgatgctgccatttatggcgctgacagccaccgccgacgacaccacgcgaca

SEQ ID NO: 861959 - DNA, 75 bp, synthetic construct
  source 1..75: mol_type = other DNA
atattgtttgggccttatttaaccgaagatccgcagaaactgtttgcgatttatgccagtgactggtttaaacaa

SEQ ID NO: 861960 - DNA, 75 bp, synthetic construct
  source 1..75: mol_type = other DNA
cgcccctttcaaagaaaaagccttaaaagtctatcaacaattcccggaatggacccctggtttgtatgacactat

SEQ ID NO: 861961 - DNA, 75 bp, synthetic construct
  source 1..75: mol_type = other DNA
aggaacaacgcggtaagtcggggattatttactgtaatagtcgtgcgaaagtagaagacaccgctgcgcgcctgc

SEQ ID NO: 861962 - DNA, 75 bp, synthetic construct
  source 1..75: mol_type = other DNA
aatccagcttgataaaccattgccgtggtttgtgaatttaaccgctaactttgccttcttcccggtgcaaaaagc

SEQ ID NO: 861963 - DNA, 75 bp, synthetic construct
  source 1..75: mol_type = other DNA
gggcagggctggccggaagagacggatgttgaccagcgtaacccgaagtatccgggctggatcagcatttacgtg

SEQ ID NO: 861964 - DNA, 75 bp, synthetic construct
  source 1..75: mol_type = other DNA
atgaacaaaacgctgaatgcactggtttatcgccacgcccgtaacctgctgctggcgcagggctggccggaagag

SEQ ID NO: 861965 - DNA, 75 bp, synthetic construct
  source 1..75: mol_type = other DNA
tgtgctgcgtataccggatgaaccgtcccgtcgctggtttgaccgggatattctgcgggaggttgttctggaggc

SEQ ID NO: 861966 - DNA, 75 bp, synthetic construct
  source 1..75: mol_type = other DNA
gctgaccacaaccggtcagacgttgctgacccgccagacgcgccgctttcgcctggttgtgaaggaaagcgatca

SEQ ID NO: 861967 - DNA, 75 bp, synthetic construct
  source 1..75: mol_type = other DNA
cacaaccgcagcctcagcagaatgggcagccacagagtgctgacgcgacgaaaaaaagtggcgcgaaaacgaaag

SEQ ID NO: 861968 - DNA, 75 bp, synthetic construct
  source 1..75: mol_type = other DNA
tgaccgaagacgaaatcagggcagttcttgatgcggtgcacgatgcggtacgcagtgtcagttgccgggtggcag

SEQ ID NO: 861969 - DNA, 75 bp, synthetic construct
  source 1..75: mol_type = other DNA
aaagtaatgccaatgtttacccgtatccaaaaagataatggatgggatcacctaaatgatttacgtgaaaaattt

SEQ ID NO: 861970 - DNA, 75 bp, synthetic construct
  source 1..75: mol_type = other DNA
atgaacaaaacgctgaatgcactggtttgtcaccacgcccgtaacctgctgctggcgcagggctggccggaagag

SEQ ID NO: 861971 - DNA, 75 bp, synthetic construct
  source 1..75: mol_type = other DNA
gcaaatattgttcaactgcttcctttgctttgtaccggtgacgtacccgcagagctgcaaagagccatgacaaaa

SEQ ID NO: 861972 - DNA, 75 bp, synthetic construct
  source 1..75: mol_type = other DNA
tgcagtgtcagttgccgggtggcagaagatgcgcggcgtatccgggcggcgctgaccacaaccggtcagacgttg

SEQ ID NO: 861973 - DNA, 75 bp, synthetic construct
  source 1..75: mol_type = other DNA
gcggtacgcagtgtcagttgccgggtggcagaagatgcgcggcgtatccgggcggcgctgaccacaaccggtcag

SEQ ID NO: 861974 - DNA, 75 bp, synthetic construct
  source 1..75: mol_type = other DNA
aaaggtgcacagcagccagatggggctcttagccttgatgctacgctaaaatcaccagatgtgcagaagtacata

SEQ ID NO: 861975 - DNA, 75 bp, synthetic construct
  source 1..75: mol_type = other DNA
tttttctgcggtggaaatgtatctggtcagcgattgtattgagcatatcctgttcagtgggctggcctgggatgt

SEQ ID NO: 861976 - DNA, 75 bp, synthetic construct
  source 1..75: mol_type = other DNA
tgacgcttttgtataacacttcagaaaaccatcaaaaaattgcgattgctgtagcatcgatgtggaaaaagaacc

SEQ ID NO: 861977 - DNA, 75 bp, synthetic construct
  source 1..75: mol_type = other DNA
ttgccgcgctggcgggaatcaacaacgcacaggcgattattgatggtaaagctacgcctgaccagcttggcgtca

SEQ ID NO: 861978 - DNA, 75 bp, synthetic construct
  source 1..75: mol_type = other DNA
ccgctggtttgacagggatattctgcgggaggtggtcctggaggcacgggatgaaatccgcagcatggcggatgc

SEQ ID NO: 861979 - DNA, 75 bp, synthetic construct
  source 1..75: mol_type = other DNA
gaaaattgccattgccgtggcgtcgatgtggaaaaagaatcttggcgtagatgtcaaactgcaaaatcaggagtg

SEQ ID NO: 861980 - DNA, 75 bp, synthetic construct
  source 1..75: mol_type = other DNA
ccgcggttgatgcccgtactttgaaaatccagcttgataaaccgttgccgtggtttgtgaatttaacagccaatt

SEQ ID NO: 861981 - DNA, 75 bp, synthetic construct
  source 1..75: mol_type = other DNA
aattttgatgttatccgcgcctcgtgggtgggggattataatgaaccctccactttcctgacattattaacgtca

SEQ ID NO: 861982 - DNA, 75 bp, synthetic construct
  source 1..75: mol_type = other DNA
ctgacccgccagacgcgccgctttcgcctggtggtgaaggaaagcgatcacccctgctggctcgatgaatacgac

SEQ ID NO: 861983 - DNA, 75 bp, synthetic construct
  source 1..75: mol_type = other DNA
cccctgctggcttgatgaagatgacgaaaatctgcccgtggtgctcgatgccatcctgaaccggggagcacgttt

SEQ ID NO: 861984 - DNA, 75 bp, synthetic construct
  source 1..75: mol_type = other DNA
atgaacaaaacgctgaatgcactgatttgtcgccacgcccgtaacctgctgctggcgcagggctggccggaagag

SEQ ID NO: 861985 - DNA, 75 bp, synthetic construct
  source 1..75: mol_type = other DNA
ctgcgggaggttgttctggaggcacgggatgaaatccgcagcatggcggatgcactggcgaaaatccggaaatga

SEQ ID NO: 861986 - DNA, 75 bp, synthetic construct
  source 1..75: mol_type = other DNA
tggtttgaccgtggtgttctgcgggaggtggtccgggaagcccgggccgaaatccgcagcatggcggatgccctg

SEQ ID NO: 861987 - DNA, 75 bp, synthetic construct
  source 1..75: mol_type = other DNA
ccccgccgctggtttgaccgtggtgttctgcgggaggtggtccgggaagcccggaccgaaatccgcagcatggcg

SEQ ID NO: 861988 - DNA, 75 bp, synthetic construct
  source 1..75: mol_type = other DNA
gcccttaccttaatcttcacattgttaagcggtatctatatctaccgccacatgccgcaggaagataaatcctaa

SEQ ID NO: 861989 - DNA, 75 bp, synthetic construct
  source 1..75: mol_type = other DNA
ataatatatctttaataagctacgtatataataaagattttgttgaaagaaattttagtcaagataaaattaaag

SEQ ID NO: 861990 - DNA, 75 bp, synthetic construct
  source 1..75: mol_type = other DNA
atggagtgttgtggtgtatgtcataccgatcttcatgttaagaatggcgattttggtgacaaaaccggcgtaatt

SEQ ID NO: 861991 - DNA, 75 bp, synthetic construct
  source 1..75: mol_type = other DNA
cgcgttttatggcggcagattctcaccacagcattgtccatgcgcgtcgtattagtatgacctggatgatcctct

SEQ ID NO: 861992 - DNA, 75 bp, synthetic construct
  source 1..75: mol_type = other DNA
ataacgtgtttagttgtactcgccaagtgcgctattccatggtaaatcccctacaagaaatcgacatggtattgt

SEQ ID NO: 861993 - DNA, 75 bp, synthetic construct
  source 1..75: mol_type = other DNA
cggacgtaaaccgttctatgttggtaagccgagtccgtggatcatccgcgcagcattaaacaaaatgcaggcgca

SEQ ID NO: 861994 - DNA, 75 bp, synthetic construct
  source 1..75: mol_type = other DNA
ccggatacagcgttgatggcgggatggctgaagaatgcatcgtggtcgccgattacgcggtaaaagtgccagatg

SEQ ID NO: 861995 - DNA, 75 bp, synthetic construct
  source 1..75: mol_type = other DNA
ccgaagccttccagtttgccgccgaaggcaaagtggtgccgaaagtcgccctgcgtccgttagcggacatcaaca

SEQ ID NO: 861996 - DNA, 75 bp, synthetic construct
  source 1..75: mol_type = other DNA
tccggaagccctgcaatctcgcgccgaattgcgtcaaaaagtacgtaatagtgcagattttaaaccgcttccggc

SEQ ID NO: 861997 - DNA, 75 bp, synthetic construct
  source 1..75: mol_type = other DNA
cggtctgccgccggagtctatgagcctggatatcccacggctggtgctggatggcattgaagtggtcggttcgct

SEQ ID NO: 861998 - DNA, 75 bp, synthetic construct
  source 1..75: mol_type = other DNA
cgccgccaaaattgtgcaggagaaaaccggtggtgcacacgctgcggtggtgacagcggtagctaaagctgcgtt

SEQ ID NO: 861999 - DNA, 75 bp, synthetic construct
  source 1..75: mol_type = other DNA
tgctgccaaaattgtgcaagagaaaaccggtggcgctcatgccgcggtggtgacggcggtagcaaaagccgcatt

SEQ ID NO: 862000 - DNA, 75 bp, synthetic construct
  source 1..75: mol_type = other DNA
tgaggctgtggatgtattccgcctgaagaaacaatcgttacctgtggatcaacgaggggcaggcaactcggttag

SEQ ID NO: 862001 - DNA, 75 bp, synthetic construct
  source 1..75: mol_type = other DNA
gacctttatggttttgcgtcggatagtgattcgacctctgcagcatgctgcgcaacgcattgaacaaattgccag

SEQ ID NO: 862002 - DNA, 75 bp, synthetic construct
  source 1..75: mol_type = other DNA
cctctggcaggccgatcgcgatcagcgtgatgttactgcggagattgagattcggaccgggttagcgaacagttc

SEQ ID NO: 862003 - DNA, 75 bp, synthetic construct
  source 1..75: mol_type = other DNA
tgtctttctgcacaacagtgtttctcatttgctgatgaatatgtttgcactcctggtggtggggggagtggtgga

SEQ ID NO: 862004 - DNA, 75 bp, synthetic construct
  source 1..75: mol_type = other DNA
acgcttgccacattggcggcctgattgcggggggcgcgttgggttggctgagtgcgcgtttagttgggcaaaatc

SEQ ID NO: 862005 - DNA, 75 bp, synthetic construct
  source 1..75: mol_type = other DNA
aacgttgcttctctcacgttgtcggatgaatcctggcgcttattgagcagtgtttttctgcacagtagtttttcc

SEQ ID NO: 862006 - DNA, 75 bp, synthetic construct
  source 1..75: mol_type = other DNA
tcctgccacctggcgcggtgatgaccggtaaccatgagatgtacaaagtctttacgctatttaaaaatgcctggc

SEQ ID NO: 862007 - DNA, 75 bp, synthetic construct
  source 1..75: mol_type = other DNA
ccgtcgcgctggctaaaaccactgcaccggcaatggtactgttcttcaaaggtgcattgtgtaactggctggttt

SEQ ID NO: 862008 - DNA, 75 bp, synthetic construct
  source 1..75: mol_type = other DNA
cgccttaacgctggtcattatcgccggttctgaactgttcaccggacacaccatgttcctcacctttggggtgaa

SEQ ID NO: 862009 - DNA, 75 bp, synthetic construct
  source 1..75: mol_type = other DNA
gcgtacattgagaaaatggcccccagcacacgcggtgaactgctggcgcaatattacggcaacgtatgcctgaaa

SEQ ID NO: 862010 - DNA, 75 bp, synthetic construct
  source 1..75: mol_type = other DNA
cgtgaagctggattatccgcaaccgattgttgatcacaaagaagcgagagtacgaacgttggcagcgtatgaggc

SEQ ID NO: 862011 - DNA, 75 bp, synthetic construct
  source 1..75: mol_type = other DNA
tggaccgatcgcgtccagtggcagagtaaccccgcgcatttaaaggcctggcaggaaggcaagaccggctatccg

SEQ ID NO: 862012 - DNA, 75 bp, synthetic construct
  source 1..75: mol_type = other DNA
tctgtttcccacagtttgccgatgaagaaagtttgcggcaatggttggcgcaacggcaaatcaacgccgataaac

SEQ ID NO: 862013 - DNA, 75 bp, synthetic construct
  source 1..75: mol_type = other DNA
cgcgttgaacattactgcacacgactaaaagccggtggccttaacccaaccgccacaatgtcgatccagtcaatt

SEQ ID NO: 862014 - DNA, 75 bp, synthetic construct
  source 1..75: mol_type = other DNA
ttgatgatgttggttgctgcaatttgaaaattcagtatgacatttatcacatgcagcggatggaaggtgaattaa

SEQ ID NO: 862015 - DNA, 75 bp, synthetic construct
  source 1..75: mol_type = other DNA
atcagtccaccaccaacgcccacattaacactggcgacggtgtcggcatggctatccgtgcaggcgtaccggtac

SEQ ID NO: 862016 - DNA, 75 bp, synthetic construct
  source 1..75: mol_type = other DNA
tcaccgtcagtggccattctcgactctgacgacggaatggggcattcggcattaattagcgccactgagcacgct

SEQ ID NO: 862017 - DNA, 75 bp, synthetic construct
  source 1..75: mol_type = other DNA
aaaatttaaaatcactggtgcaccacaaattacataccgccgggctggatgccgacactgcacaacaggtgacag

SEQ ID NO: 862018 - DNA, 75 bp, synthetic construct
  source 1..75: mol_type = other DNA
ggagtaggacgcagactgacggaaaagctgaatgcgctgggtattaacacagcactgcagctggcgcaggctaac

SEQ ID NO: 862019 - DNA, 75 bp, synthetic construct
  source 1..75: mol_type = other DNA
catcactgaaagccgccgggataacggttttttcccccaacttttccatcgctcagaacatggcgatcagccgca

SEQ ID NO: 862020 - DNA, 75 bp, synthetic construct
  source 1..75: mol_type = other DNA
gcgtgccgggatgatcgtcgtaaacgttaacccgttgtataccccacgcgaacttgagcatcagctcaacgacag

SEQ ID NO: 862021 - DNA, 75 bp, synthetic construct
  source 1..75: mol_type = other DNA
gtgacggcgctgccgctgtatcacatctttgcactaaccattaactgcctgctgtttattgagctgggcgggcag

SEQ ID NO: 862022 - DNA, 75 bp, synthetic construct
  source 1..75: mol_type = other DNA
agaataatcgtttttggctgattgatttttcaaacagttacgagcattattattcaattgacaaagatagcaaat

SEQ ID NO: 862023 - DNA, 75 bp, synthetic construct
  source 1..75: mol_type = other DNA
cgctggttgtctttttcgcgttttacaagatttatgacatctatgcggctactgcggcgctcatcgtcgccacgg

SEQ ID NO: 862024 - DNA, 75 bp, synthetic construct
  source 1..75: mol_type = other DNA
cattcgataaaccagaatatcaccgaactctccgggggaaatcagcagaaagtcctgatctccaaatggctgtgc

SEQ ID NO: 862025 - DNA, 75 bp, synthetic construct
  source 1..75: mol_type = other DNA
ggttggttgctatcgtaatgacgcaaaccgatacctgcgtggctccccatggcggcgccgagcgctttttgggta

SEQ ID NO: 862026 - DNA, 75 bp, synthetic construct
  source 1..75: mol_type = other DNA
ttggctggctggcggtagtgctgggtacgctgggcgtggtattaccggtattaccgacgacgccgtttatcctgc

SEQ ID NO: 862027 - DNA, 75 bp, synthetic construct
  source 1..75: mol_type = other DNA
tgccagcatcaggtggatcagagtgaaatcatgatcacccgtgatgcgcagcaacatcgcggcgacgcgccggac

SEQ ID NO: 862028 - DNA, 75 bp, synthetic construct
  source 1..75: mol_type = other DNA
tggcgtagaaactgatgcttccgtcgtgtttgacgagcagtgccggaatcaaaacctgctctggccacgaggcta

SEQ ID NO: 862029 - DNA, 75 bp, synthetic construct
  source 1..75: mol_type = other DNA
ctctgtccgctacaaaacggatgtattgccaccgccaacaatagctggtcgctttatccgggcaaaaaaccgaaa

SEQ ID NO: 862030 - DNA, 75 bp, synthetic construct
  source 1..75: mol_type = other DNA
tgacgcaactgaccgcgtttcgtcatactttcagccatttccatttagatattgtgcctatgtggcttcccgtgt

SEQ ID NO: 862031 - DNA, 75 bp, synthetic construct
  source 1..75: mol_type = other DNA
ctgtaccgctcatggtttggcagctatctacgtttctggcagaaacatcatgcgatgccgcgcggcgcaaaacca

SEQ ID NO: 862032 - DNA, 75 bp, synthetic construct
  source 1..75: mol_type = other DNA
ggcgctaatgagctggtaacgggcatatttatgtttattgctccggcttgtggtttgatgatccgttttatggtg

SEQ ID NO: 862033 - DNA, 75 bp, synthetic construct
  source 1..75: mol_type = other DNA
atgatttatttatggatgtttctcgccctgtgtattgtctgcgtaagcggctacatcggtcaggtactgaacgtg

SEQ ID NO: 862034 - DNA, 75 bp, synthetic construct
  source 1..75: mol_type = other DNA
ctatggcgaaaatggtcacggagctgcatgccgttaaaccggctcctggtgtcgaaaaagtgttagcgccgaacg

SEQ ID NO: 862035 - DNA, 75 bp, synthetic construct
  source 1..75: mol_type = other DNA
gcgaaggtgctaacttcacgtgcggatatccgtaaattgacggataaaagcaacgctcagttacagtgggctctg

SEQ ID NO: 862036 - DNA, 75 bp, synthetic construct
  source 1..75: mol_type = other DNA
tcgcgtcaggtactggcggatacactggcggcaggtgtgcagcaaacgttgagtatgcaccttccggatgtcgat

SEQ ID NO: 862037 - DNA, 75 bp, synthetic construct
  source 1..75: mol_type = other DNA
aagcgcgctccaactaatgatgaatgtgataaaaccctgctggggttgctggatactgccatgctgctacaggtt

SEQ ID NO: 862038 - DNA, 75 bp, synthetic construct
  source 1..75: mol_type = other DNA
gagcaaagggagtggcgcagtcagtccctgtttactcaacggatgcgtgaaatggaagctgttctgcaggaggcg

SEQ ID NO: 862039 - DNA, 75 bp, synthetic construct
  source 1..75: mol_type = other DNA
ttttgatgttgcaaaactactactaactgaaatcaacggtgattcattactcgccagcttaaaacgtggcgatta

SEQ ID NO: 862040 - DNA, 75 bp, synthetic construct
  source 1..75: mol_type = other DNA
aactttggctggacccgtggcgaagcctctcagatgagactttcaaacaggagcgtgagaaaaacgactggcaag

SEQ ID NO: 862041 - DNA, 75 bp, synthetic construct
  source 1..75: mol_type = other DNA
acccttactctgtcatgtcctggctttatcccgaccgtggtgattttattgcagtggttggcagaatgcaggata

SEQ ID NO: 862042 - DNA, 75 bp, synthetic construct
  source 1..75: mol_type = other DNA
ggaaaaacaggtgacgacgccggagcaatacccgctctccgtgaatagcgtagtcacggcctgtaatcagaaaac

SEQ ID NO: 862043 - DNA, 75 bp, synthetic construct
  source 1..75: mol_type = other DNA
caatttttccaatgttgttcgcggctcttttcatgcctgctatctcggttattcgattgggcaaaaatggcaggg

SEQ ID NO: 862044 - DNA, 75 bp, synthetic construct
  source 1..75: mol_type = other DNA
gtatcgttgtgggccgcgctgaagccttcgccgccaaaaaaggtccggcgctttcggcactggacggcttttcaa

SEQ ID NO: 862045 - DNA, 75 bp, synthetic construct
  source 1..75: mol_type = other DNA
caaacggaacgtcgtaatcattgggaagagctggagcagctttttgatgaacacattgaaaaagattgggatttg

SEQ ID NO: 862046 - DNA, 75 bp, synthetic construct
  source 1..75: mol_type = other DNA
tatcacctttgttgctacagtgaaatacgctctgatcttcgtggtcttggttatcacattgagcacgttgagaat

SEQ ID NO: 862047 - DNA, 75 bp, synthetic construct
  source 1..75: mol_type = other DNA
gcgtgcgcacagcttaaacgctggatttatgctggcggtaagcagtggcaagggttaattaaccgccgtgatgtt

SEQ ID NO: 862048 - DNA, 75 bp, synthetic construct
  source 1..75: mol_type = other DNA
tatacgctggcggtaagaagtggcaagggttagttaaccgccgcgatgttgaatatgccgtttgcgaatggggtg

SEQ ID NO: 862049 - DNA, 75 bp, synthetic construct
  source 1..75: mol_type = other DNA
ggcgatcgctattgcggcggtgatgattaagccattagagggcgttgagtacgatccgtatcgtgatgttgtcgg

SEQ ID NO: 862050 - DNA, 75 bp, synthetic construct
  source 1..75: mol_type = other DNA
cctgtttattctattaacgcaccgggatttattcccggtatcgatttctccgaccatctcaattactggcagcaa

SEQ ID NO: 862051 - DNA, 75 bp, synthetic construct
  source 1..75: mol_type = other DNA
agacgtggaagcgacctttggtcaggactccacgatgatgtactacttcatgatcgccgaagtgttcctggtctt

SEQ ID NO: 862052 - DNA, 75 bp, synthetic construct
  source 1..75: mol_type = other DNA
tcagagtgaaggactgcgtaacaagactgataccgtggatgccgcatgctggcagagttctgtcgtcagaagcgc

SEQ ID NO: 862053 - DNA, 75 bp, synthetic construct
  source 1..75: mol_type = other DNA
atgcaaaaagaagacttatttatccgaaatatacattctcgtaatcaggacaggatatcggtagccctgatatat

SEQ ID NO: 862054 - DNA, 75 bp, synthetic construct
  source 1..75: mol_type = other DNA
acgcttcggtgcagatgccttagtgctggcgctggatgtccgcattgacgagcaaggcaataaacaggtggctgt

SEQ ID NO: 862055 - DNA, 75 bp, synthetic construct
  source 1..75: mol_type = other DNA
tggcgcgagagtgaaaaactgcgtcgttataaaaaggaggcccggttgccagttgcgaaaacgctgagcgaatac

SEQ ID NO: 862056 - DNA, 75 bp, synthetic construct
  source 1..75: mol_type = other DNA
ggatgggcggttgtgtgggagccattcactggtgcttagcatagaaacgaatgcaaatcgctgccgtgaattgct

SEQ ID NO: 862057 - DNA, 75 bp, synthetic construct
  source 1..75: mol_type = other DNA
actgtgcatccacgtagtgccgacaatattgataatctgaataggtccgcagagtatataaaagaggtctttgtc

SEQ ID NO: 862058 - DNA, 75 bp, synthetic construct
  source 1..75: mol_type = other DNA
atattgataatctgaaaaggtccgcagagtatataaaagaggtctttatcagtagcggtgccagagttaccgcgc

SEQ ID NO: 862059 - DNA, 75 bp, synthetic construct
  source 1..75: mol_type = other DNA
agcgcggtacatgcagcttcgcttgagcgtccagtgagattaatgatagcgctggagatgattggctattacgac

SEQ ID NO: 862060 - DNA, 75 bp, synthetic construct
  source 1..75: mol_type = other DNA
aaaatatatactcaaaaaaccaggacagaatatctgtagccctggtatatgacacgttatcaaaagaggcccaca

SEQ ID NO: 862061 - DNA, 75 bp, synthetic construct
  source 1..75: mol_type = other DNA
gtggcccctacaaaaacattgttgctgattatggtcctgccgatggaccgctgattattattggtgcgcactatg

SEQ ID NO: 862062 - DNA, 75 bp, synthetic construct
  source 1..75: mol_type = other DNA
ataccacttgcccggtgataccgcagacagattgaattatcagaaaatggctcaggtagtggatggagttacaac

SEQ ID NO: 862063 - DNA, 75 bp, synthetic construct
  source 1..75: mol_type = other DNA
cgtttctgcgcattcacgcgatgaaattttacaacatgaccgcagcccccgaatctctggtccgggtaggacagg

SEQ ID NO: 862064 - DNA, 75 bp, synthetic construct
  source 1..75: mol_type = other DNA
gcatgtatgccagctgtgagcaggcatttaggccagatctggcaaaccgagcagtggccgttttatccaacaatg

SEQ ID NO: 862065 - DNA, 75 bp, synthetic construct
  source 1..75: mol_type = other DNA
aatatgccatgcgccgtgaaatgttgtccccggcctacaccacgcagtggaaggatattcccgcggcgtttatgc

SEQ ID NO: 862066 - DNA, 75 bp, synthetic construct
  source 1..75: mol_type = other DNA
gtgatacctactccgcttacatcaagtgcaaacttgaggtggccgcaggtaatggccttgagttccaggatgctc

SEQ ID NO: 862067 - DNA, 75 bp, synthetic construct
  source 1..75: mol_type = other DNA
actgacactttcgctatgctcgacgccttccgcgccaatgaaaatggcgctgcgccactgccgttgacggcaaac

SEQ ID NO: 862068 - DNA, 75 bp, synthetic construct
  source 1..75: mol_type = other DNA
ccactaccgttgacggcaaacagcgactgtaacggctactggcggcggctggcaggactggagctgcaagcctaa

SEQ ID NO: 862069 - DNA, 75 bp, synthetic construct
  source 1..75: mol_type = other DNA
gatggcataaaccggcgtggcaagagccagctgttttttgcaggccagggcatcgataactcctttgccatgcgc

SEQ ID NO: 862070 - DNA, 75 bp, synthetic construct
  source 1..75: mol_type = other DNA
gttggttgagtaaaaaagatgttctgacattaggagaacatttagccaaaaactcttatggacaatatttaatcg

SEQ ID NO: 862071 - DNA, 75 bp, synthetic construct
  source 1..75: mol_type = other DNA
aggtgaaaaatttatcggtcaagactctgtatgtttagttcttggggataatatattttttgggcagggatttac

SEQ ID NO: 862072 - DNA, 75 bp, synthetic construct
  source 1..75: mol_type = other DNA
gctatcaggtaagagatccaggacggtttggagttgtagagtttgactcagattatagggtattaagtattgaag

SEQ ID NO: 862073 - DNA, 75 bp, synthetic construct
  source 1..75: mol_type = other DNA
ataataacaacaccagaggatcaacatggtttcaaaagtctacttggtgatggttcgtcgctagggataaatttg

SEQ ID NO: 862074 - DNA, 75 bp, synthetic construct
  source 1..75: mol_type = other DNA
atgaaaggaattattttagctggtggttctggaacaaggctttatccaattacaatgggagtttcaaagcagcta

SEQ ID NO: 862075 - DNA, 75 bp, synthetic construct
  source 1..75: mol_type = other DNA
attattacaacgccagaagatcagcaggggttcataagattacttggggacggaacccaatttggtattaatctt

SEQ ID NO: 862076 - DNA, 75 bp, synthetic construct
  source 1..75: mol_type = other DNA
aggaaaatcagcaagtgtttgtgctcaacggcattcagaccatgagcggctatgtttacaacctcggtaacgagc

SEQ ID NO: 862077 - DNA, 75 bp, synthetic construct
  source 1..75: mol_type = other DNA
acctcagtccggaaggatcttgatattaagctgatgaattgtgattttactgcaggtaaaaacacaatcaaggta

SEQ ID NO: 862078 - DNA, 75 bp, synthetic construct
  source 1..75: mol_type = other DNA
accacggttcggtgcacaacggcctgctccaaccgccggccgcgcgctgggccgaggccgtggcgcgtgtcggcg

SEQ ID NO: 862079 - DNA, 75 bp, synthetic construct
  source 1..75: mol_type = other DNA
cgccgaccgtgagttccgtagcgatctctattaccgcctgaacgtattcccgattcacctgccgccactacgcga

SEQ ID NO: 862080 - DNA, 75 bp, synthetic construct
  source 1..75: mol_type = other DNA
gctgcgtaacgagcacactgatgggcgccgccaggaaagcgcttctttcgttatcgtcgccaaccaggcgccagg

SEQ ID NO: 862081 - DNA, 75 bp, synthetic construct
  source 1..75: mol_type = other DNA
gattttggccagatttccaaagctcatctgggggctaatggtatttcggtgaaaaaggatctggatattaaactg

SEQ ID NO: 862082 - DNA, 75 bp, synthetic construct
  source 1..75: mol_type = other DNA
gttaaaaaagctactggtggcaccctgaaagaaggcgattttaccgctgttgctaacttcaatctggcctacgag

SEQ ID NO: 862083 - DNA, 75 bp, synthetic construct
  source 1..75: mol_type = other DNA
cgtgttatcagtggttgtctttaccctttctaatctccttgtatcctccggcgcgcatctgatctaccgggtgtt

SEQ ID NO: 862084 - DNA, 75 bp, synthetic construct
  source 1..75: mol_type = other DNA
gtcaaagcaaaggataagatattaaaccttcttaattggtttagcggaggtccagatattagtgtttacacggta

SEQ ID NO: 862085 - DNA, 75 bp, synthetic construct
  source 1..75: mol_type = other DNA
ttggtgaagcggtatgcagcaagcgtcgggcaaccaaagttggcgactggctggagatggcaaaatcgctcgccg

SEQ ID NO: 862086 - DNA, 75 bp, synthetic construct
  source 1..75: mol_type = other DNA
gagttacagccgaagttgctgcgtgtattgcaggaacaggagtttgaacgtctcggcagcaacaaaatcattcag

SEQ ID NO: 862087 - DNA, 75 bp, synthetic construct
  source 1..75: mol_type = other DNA
tcaaaattgcccgtcgtctggggcgcaatatcgacagcattcctgccgagacgctgcgcaccttgagcaacatgg

SEQ ID NO: 862088 - DNA, 75 bp, synthetic construct
  source 1..75: mol_type = other DNA
gattgctggaaagcgatctatttggtcatgagcgcggggcttttaccggtgccagcgctcagcgcattggtcgtt

SEQ ID NO: 862089 - DNA, 75 bp, synthetic construct
  source 1..75: mol_type = other DNA
agactgctctgcaggagcagcaaaccgcctttaacgaactggtgaataagctgagtcaagaagacagccgccagg

SEQ ID NO: 862090 - DNA, 75 bp, synthetic construct
  source 1..75: mol_type = other DNA
gagactgccctgcaggcacagcaaaccgcctttaacgaactggtggacaagctgagtcatgaagacagccgctag

SEQ ID NO: 862091 - DNA, 75 bp, synthetic construct
  source 1..75: mol_type = other DNA
aagaacgcctgtctgagatggagactgccctgcaggcacaacaagccgcctttaacgaactggtggataagctga

SEQ ID NO: 862092 - DNA, 75 bp, synthetic construct
  source 1..75: mol_type = other DNA
gtgcataaggccgtggagctggttgccactgagcagcaaaacctgagtgcgcgcaccgaaaaatccctgtctgaa

SEQ ID NO: 862093 - DNA, 75 bp, synthetic construct
  source 1..75: mol_type = other DNA
acgcaccgaaaaatccctgtctcagcaggaagaacgtctgtctgagctggagactgccctgcaggcacagcagac

SEQ ID NO: 862094 - DNA, 75 bp, synthetic construct
  source 1..75: mol_type = other DNA
actgatgatcccgccagtctgggtacggaaatgctgacattcagcggcagtgcagcccataacccgctggcaaac

SEQ ID NO: 862095 - DNA, 75 bp, synthetic construct
  source 1..75: mol_type = other DNA
gttcttgtatgccaacgactacgtttgccagggcgaagtttattcccaaccggcaagcctgccgctgtatcccaa

SEQ ID NO: 862096 - DNA, 75 bp, synthetic construct
  source 1..75: mol_type = other DNA
acggtgaaatgcagatcacctcgtcaccgaaaaaattctccgggtacttccacttttaccgcaagcacaaagaca

SEQ ID NO: 862097 - DNA, 75 bp, synthetic construct
  source 1..75: mol_type = other DNA
tacatgccggacagcacttttaaccgttacggcaaggtagcggcgctggttgcagaggaaatcagtgatggcccg

SEQ ID NO: 862098 - DNA, 75 bp, synthetic construct
  source 1..75: mol_type = other DNA
agactgccctgcaggcacagcaaaccgtctttaacgaactggtggacaagctgagtcatgaagacagccgccagg

SEQ ID NO: 862099 - DNA, 75 bp, synthetic construct
  source 1..75: mol_type = other DNA
cgcctgtgtaatgactactggaataagcgcctcgttaaccgtaagtatgaccgcctgattatcacaaagggatat

SEQ ID NO: 862100 - DNA, 75 bp, synthetic construct
  source 1..75: mol_type = other DNA
agccgaccagtctgccgctctatccgaagtccgtatattcgcgccgcaggttttataaacgcaacatcattggta

SEQ ID NO: 862101 - DNA, 75 bp, synthetic construct
  source 1..75: mol_type = other DNA
tgccaccattatggataccgatttagattcagcggtgatttctcgttttttcgaatccctgaaagcaaaaattca

SEQ ID NO: 862102 - DNA, 75 bp, synthetic construct
  source 1..75: mol_type = other DNA
gactgccggaacgtatgagatcacggcatcggcggggaatagccagccttcggatacgcagactataacgtttgt

SEQ ID NO: 862103 - DNA, 75 bp, synthetic construct
  source 1..75: mol_type = other DNA
tcacggtgaaattcaacgcggatgccagcaccggtcaggcaaacctgcaggtagacaccgccgttcaaaaagtag

SEQ ID NO: 862104 - DNA, 75 bp, synthetic construct
  source 1..75: mol_type = other DNA
ggtatgagcgccgatcgcacggcgttaacgcttgacggtcagagccgtattcaaatgcttgctaacggtaatgag

SEQ ID NO: 862105 - DNA, 75 bp, synthetic construct
  source 1..75: mol_type = other DNA
aaagcggacattgagttgatagcaaccgttgctggggaacacagtatcacggcctcagtgaataatgctcagaag

SEQ ID NO: 862106 - DNA, 75 bp, synthetic construct
  source 1..75: mol_type = other DNA
tgagggctatttacctgcctggccgcagcttggcgcaagcctgatgtatgaacagtattatggcgatgaagtcgg

SEQ ID NO: 862107 - DNA, 75 bp, synthetic construct
  source 1..75: mol_type = other DNA
gttctacggcatcgggctggacaaataatggtgatgggacgtggactgcgcaaattactctcggctctacggcgg

SEQ ID NO: 862108 - DNA, 75 bp, synthetic construct
  source 1..75: mol_type = other DNA
tgaagtgaagacaatcacacatccgcactttggcgataaaccggtaaaggtatacgcgataaaggtgaatatcga

SEQ ID NO: 862109 - DNA, 75 bp, synthetic construct
  source 1..75: mol_type = other DNA
ccgcctgattatcacaaagggatatccgaagcgcgaagacttcagtcgcagaattgacgtcccgtataacggata

SEQ ID NO: 862110 - DNA, 75 bp, synthetic construct
  source 1..75: mol_type = other DNA
ttccgatgatacgcctttgtcgggtggatgttctgataccaggaaggcttcagacaaaaagccgggtgaagccgc

SEQ ID NO: 862111 - DNA, 75 bp, synthetic construct
  source 1..75: mol_type = other DNA
ctaaattcgtcgcggatgataaaaacgcggtgctcgccgcatctccagaacgtgtagattctctggtggcggacg

SEQ ID NO: 862112 - DNA, 75 bp, synthetic construct
  source 1..75: mol_type = other DNA
gctcttcaacggccagcctgcagccaccgaagccgcgcagctgactgttattgccggagagatgtcatcagcgaa

SEQ ID NO: 862113 - DNA, 75 bp, synthetic construct
  source 1..75: mol_type = other DNA
tgaacgtattgaaggtaagggtggtcagacactttccctggggcttgtggtcagcaaagcaactcacggactgaa

SEQ ID NO: 862114 - DNA, 75 bp, synthetic construct
  source 1..75: mol_type = other DNA
gtattggggtggaaggtgccaccactgacggacgcgaaatccagcgtgactggctgattcagatggctgccagct

SEQ ID NO: 862115 - DNA, 75 bp, synthetic construct
  source 1..75: mol_type = other DNA
ggcagaccggctgatccatcacggatatatgttcgaactgaaaggtgaaagctacaggaaaaagacagcgaaggc

SEQ ID NO: 862116 - DNA, 75 bp, synthetic construct
  source 1..75: mol_type = other DNA
ccagcgggttggggaaaagccatctggcggcagcgatcgtggatggcgtagtaggccagggctaccgggcccggt

SEQ ID NO: 862117 - DNA, 75 bp, synthetic construct
  source 1..75: mol_type = other DNA
cgctatgaacgtgggagcctggtgataaccagtaaccatccgttcagcatgtggggcagcatcttcgtggatgag

SEQ ID NO: 862118 - DNA, 75 bp, synthetic construct
  source 1..75: mol_type = other DNA
tgcatcggtattaggggaaatagccgccgattttgcgcaaggcataaatagcgattttgatttgacgccattcag

SEQ ID NO: 862119 - DNA, 75 bp, synthetic construct
  source 1..75: mol_type = other DNA
tgctgcctgtacggcgcggcctgcacttatgataattcgccggatgacgattttattattgataccctgccaggt

SEQ ID NO: 862120 - DNA, 75 bp, synthetic construct
  source 1..75: mol_type = other DNA
ggcgaaaaaagcgatcgtctgcgcgggaacctgggtaaaagacctgctgccagaactgcctgtccagccagtacg

SEQ ID NO: 862121 - DNA, 75 bp, synthetic construct
  source 1..75: mol_type = other DNA
gacggcacgctggcgggatctaacgtctctttatatgaagaagtgtgtgccagatatccgcaagtggcgtttcag

SEQ ID NO: 862122 - DNA, 75 bp, synthetic construct
  source 1..75: mol_type = other DNA
ttgacggcacggttgttcgtcttcatcagggtgattacggccagcagcgcgactacggtaacgatccgctgcccc

SEQ ID NO: 862123 - DNA, 75 bp, synthetic construct
  source 1..75: mol_type = other DNA
tgccgaagtgttgcatctggtggatctgaccggggcaaaagatccggcaaaacgtcaaatcccgctgattaaaac

SEQ ID NO: 862124 - DNA, 75 bp, synthetic construct
  source 1..75: mol_type = other DNA
ccgaagcgcgaagacttcagtcgcagaattgacgtcccgtataacggatatgaaataaaaacaatcacacatcca

SEQ ID NO: 862125 - DNA, 75 bp, synthetic construct
  source 1..75: mol_type = other DNA
atgactcgtcatggcgcactcacactcatactggtgtcgcttctggttctgcgtagcgcgtggcgactgttgaaa

SEQ ID NO: 862126 - DNA, 75 bp, synthetic construct
  source 1..75: mol_type = other DNA
aacgtcaaatcccactgattaaaaccctggtcgctggggttaacgtccctgtacaggttggcggcggcgtgcgta

SEQ ID NO: 862127 - DNA, 75 bp, synthetic construct
  source 1..75: mol_type = other DNA
tccaactggcgaaggaagcgggctgtgcgcagctgttcaactgcccggtcaccgcaattcgtcatgacgatgatg

SEQ ID NO: 862128 - DNA, 75 bp, synthetic construct
  source 1..75: mol_type = other DNA
tgctgaagaaattacggaaggtccgctggcaggcaagatggcattgtatgccgacgttgaaccaacggagtccct

SEQ ID NO: 862129 - DNA, 75 bp, synthetic construct
  source 1..75: mol_type = other DNA
ctaccgagcagcagaacctgagtacgcgcaccgaaaaatccctgtctgaacaggaagaacgcctgtctgagctgg

SEQ ID NO: 862130 - DNA, 75 bp, synthetic construct
  source 1..75: mol_type = other DNA
gcgcaccgaaaaatccctgtctgaacaggaagaacgcctgtctgagctggagactgctctgcaggagcagcaaac

SEQ ID NO: 862131 - DNA, 75 bp, synthetic construct
  source 1..75: mol_type = other DNA
gcgaaccgaaaaatctctgtctgagcaggaagaacgcctgtctgaactggagtctgctctgcagaagcagcaaac

SEQ ID NO: 862132 - DNA, 75 bp, synthetic construct
  source 1..75: mol_type = other DNA
actgatgatcccgccagtctgggcactgaaatgctgacattcagcgccagtgcggcccataacccgctggcaaac

SEQ ID NO: 862133 - DNA, 75 bp, synthetic construct
  source 1..75: mol_type = other DNA
ttgccgcgctgggtttatgtgaaaggtgtgtttaatcaggggctggataaccgccgtgcgcgggagatggcctgg

SEQ ID NO: 862134 - DNA, 75 bp, synthetic construct
  source 1..75: mol_type = other DNA
acgatccggccagtctcggcaccgaaatgctctccttctgcgccagcgcgcagagcaacccgctggcggcgcgta

SEQ ID NO: 862135 - DNA, 75 bp, synthetic construct
  source 1..75: mol_type = other DNA
atgatactttggtctatgaaaaaagaaaccgatatccggcgtggaaagcattgtgttttcctgatgcatgttcac

SEQ ID NO: 862136 - DNA, 75 bp, synthetic construct
  source 1..75: mol_type = other DNA
ggtcttaactggaatttaaatgcctgtaatcgtttcacaggtcaaatgatactttggtctatgaaaaaagaaacc

SEQ ID NO: 862137 - DNA, 75 bp, synthetic construct
  source 1..75: mol_type = other DNA
aaggtgaatacttcgatgccataattcgtggagagaaaacggaagagtatcgcctgtgcaatgactactggaata

SEQ ID NO: 862138 - DNA, 75 bp, synthetic construct
  source 1..75: mol_type = other DNA
tgaccagccttcgaatgcgcagtctgtaacgtttgtggccgataagactacggcgaccatctccagtattgaggt

SEQ ID NO: 862139 - DNA, 75 bp, synthetic construct
  source 1..75: mol_type = other DNA
tcagctgggcacattacaacaaacgctgaagtttgttgccggtccgcttgatgcagcacattcgtccatcaccct

SEQ ID NO: 862140 - DNA, 75 bp, synthetic construct
  source 1..75: mol_type = other DNA
gcttgacgtaatgaaagaggcccacaccgatccgcagcgagagcatatagcccgacggcgggaaatatgccttgc

SEQ ID NO: 862141 - DNA, 75 bp, synthetic construct
  source 1..75: mol_type = other DNA
gcgcagcttcctcggcaacggcggcaggaaattccgcgaaggcggcaaaaacgtccgagacgaacgccaggtctt

SEQ ID NO: 862142 - DNA, 75 bp, synthetic construct
  source 1..75: mol_type = other DNA
tgaggttgatggagatgactggatggtgtcacgaccactacaaaaatacatttctggtaactggtataacgttga

SEQ ID NO: 862143 - DNA, 75 bp, synthetic construct
  source 1..75: mol_type = other DNA
gagacgctggagaagagagtacgtttacagggaaaatgccagctagcagaattaccttctgccggggtgagttag

SEQ ID NO: 862144 - DNA, 75 bp, synthetic construct
  source 1..75: mol_type = other DNA
ttacgcattggagaggaagaggaaaacagtgagagtcgttatatttccacactatatccatccaatgtatattac

SEQ ID NO: 862145 - DNA, 75 bp, synthetic construct
  source 1..75: mol_type = other DNA
acgcggctgacaaagtcctggatgacatgggaatcaaaatcaccactgatgattaccggacatggacgatgaaga

SEQ ID NO: 862146 - DNA, 75 bp, synthetic construct
  source 1..75: mol_type = other DNA
acgtggcgattaaaaaaaaaaaacccggggggggggggggggggagggggagcacccggcggtgcttcccgctca

SEQ ID NO: 862147 - DNA, 75 bp, synthetic construct
  source 1..75: mol_type = other DNA
ttctggggattggtcaaagttttgccggaacgggatcaacgctgtggggcgttggcgtggttggttcgttgcata

SEQ ID NO: 862148 - DNA, 75 bp, synthetic construct
  source 1..75: mol_type = other DNA
tgatcctcatgcctgaacccgttgccgaacctgcgctaaacggattgcgccttaacctacgcattgtctccatcg

SEQ ID NO: 862149 - DNA, 75 bp, synthetic construct
  source 1..75: mol_type = other DNA
gcactgaatacgctgaacgagctggctgcggcgttgggcaacgacccgaattttgcgaccaccatgactagcgcg

SEQ ID NO: 862150 - DNA, 75 bp, synthetic construct
  source 1..75: mol_type = other DNA
gaataatgccaccgcgccttttgttcagacgcagtttgcctggaatcccactcctggtggtcattacgtgccgat

SEQ ID NO: 862151 - DNA, 75 bp, synthetic construct
  source 1..75: mol_type = other DNA
cctccacttcaatatgaatgcggggagttgccctgctgtacagttccgcgtgaattacaggaacggcggtatttt

SEQ ID NO: 862152 - DNA, 75 bp, synthetic construct
  source 1..75: mol_type = other DNA
ttgcaacagtgccagcgtccgcaactggaagcgctgataagcttcgcccgcaccggcgacaccgtggtggtgcat

SEQ ID NO: 862153 - DNA, 75 bp, synthetic construct
  source 1..75: mol_type = other DNA
ttcctgtggaggaagcggctgccgaggcgcgaaaacatcagggcgcacaaccgaccgtcgccaaagaagtgagtc

SEQ ID NO: 862154 - DNA, 75 bp, synthetic construct
  source 1..75: mol_type = other DNA
gaacatgtcgaatttgccctgattccggtcaccgcggtgaaatacacctacacagtgatcccggcgctggtgatg

SEQ ID NO: 862155 - DNA, 75 bp, synthetic construct
  source 1..75: mol_type = other DNA
ctgcttaccaggcgcatttcgcccaggggatcaccataataaaatgctgaggcctggcctttgcgtagtgcacgc

SEQ ID NO: 862156 - DNA, 75 bp, synthetic construct
  source 1..75: mol_type = other DNA
gcgacaaccagtgccaggtgattatcggcaatacggtttcgcaggcctttcaggaagtcgtcagcttgttacctg

SEQ ID NO: 862157 - DNA, 75 bp, synthetic construct
  source 1..75: mol_type = other DNA
tttaaaaccaatatgtcgctggcgattgccatcgcgggtgtgctggtacatccgagttttattgaactgatggcg

SEQ ID NO: 862158 - DNA, 75 bp, synthetic construct
  source 1..75: mol_type = other DNA
acgctacgtcgcattggtgcggggatcctcgatgcgctgatcggcaccatgtcaccgctgatcccggcgattatc

SEQ ID NO: 862159 - DNA, 75 bp, synthetic construct
  source 1..75: mol_type = other DNA
gaaaacccgcgtacgttcttccggcatgaacttcgccttcaatctgtttttcatcaagctggcctgggcctccag

SEQ ID NO: 862160 - DNA, 75 bp, synthetic construct
  source 1..75: mol_type = other DNA
ataggctacggcctgggtgacgcaggcggcaccgtaataacttgcctgatcatgaactttctcacctttttctac

SEQ ID NO: 862161 - DNA, 75 bp, synthetic construct
  source 1..75: mol_type = other DNA
accgtactgcgcgctgatcaacaccatgaccacccgccacaatgaagtgatctcctgccagtcctggcgattcgt

SEQ ID NO: 862162 - DNA, 75 bp, synthetic construct
  source 1..75: mol_type = other DNA
cagcgcgagggaatcgtgctggccaagcagcgcggtgcctaccggggacgaaagaaatcgctgaacagcgaacaa

SEQ ID NO: 862163 - DNA, 75 bp, synthetic construct
  source 1..75: mol_type = other DNA
cactgcgccacaacgcggtggaaatttttgacgaagtgaacaccggcaaaaataccggcagcggcgtaccgtggg

SEQ ID NO: 862164 - DNA, 75 bp, synthetic construct
  source 1..75: mol_type = other DNA
cgcggctatcaactgggcgtcggcgtattgtgcgccattgccgtggtgatgttcctgtgctgttttttctgggtt

SEQ ID NO: 862165 - DNA, 75 bp, synthetic construct
  source 1..75: mol_type = other DNA
tgccggatttggcgttatcgccacctttatcacattgttttatgacgctaaaggctgggacggtgcggcttttgc

SEQ ID NO: 862166 - DNA, 75 bp, synthetic construct
  source 1..75: mol_type = other DNA
tatcatacatggcgtgaattagcggatgcctttgagctggacattcatgactttagcgtctcggaagtgaaccgc

SEQ ID NO: 862167 - DNA, 75 bp, synthetic construct
  source 1..75: mol_type = other DNA
ggcattttctcgattctctccctggcgaatttaattatggtgtggaagtccgccatccacagtttttcgccaaag

SEQ ID NO: 862168 - DNA, 75 bp, synthetic construct
  source 1..75: mol_type = other DNA
ccggatcggcgttcacaaagctgtagctactgagtggggacggtcaactaattataaagctcttggattatggga

SEQ ID NO: 862169 - DNA, 75 bp, synthetic construct
  source 1..75: mol_type = other DNA
gttgtgttctgtttactgcctctatgacctcgtttcttgggcaaccgctggttaccggctacagtgcagcaaaat

SEQ ID NO: 862170 - DNA, 75 bp, synthetic construct
  source 1..75: mol_type = other DNA
cgtcatcagttcaagggctgccctgcgatcactgaattttatttcggggctgtccggatcaaagtcccgcatcct

SEQ ID NO: 862171 - DNA, 75 bp, synthetic construct
  source 1..75: mol_type = other DNA
cgttggctccgcgcattggacaatactggctgcaactgcctgccacattcggcccacgggagctgcctgcgcttt

SEQ ID NO: 862172 - DNA, 75 bp, synthetic construct
  source 1..75: mol_type = other DNA
tcgagagaagaattgcttaaaagaaattcttttccatcagtgaatcaaaacaaatatctgaatgcgatgttgcgg

SEQ ID NO: 862173 - DNA, 75 bp, synthetic construct
  source 1..75: mol_type = other DNA
ttaatttggttagcggtgattatgatattcttgatcccatcaaggtaaaagcatctgattatggtgctccaacta

SEQ ID NO: 862174 - DNA, 75 bp, synthetic construct
  source 1..75: mol_type = other DNA
gtaccgctgcaatggctgtgctcgaagatgaccaggacgtgattcgcacaatgcctttcccgattggctgctact

SEQ ID NO: 862175 - DNA, 75 bp, synthetic construct
  source 1..75: mol_type = other DNA
tcgagagaggaattacttaagcgagagagtttcggttctgttaatgacaacaaatatctgaatgcgatgttgcgc

SEQ ID NO: 862176 - DNA, 75 bp, synthetic construct
  source 1..75: mol_type = other DNA
ggcaaggggaaggcccgacatgtcagaccgaaggcacgctgtggggaggcaatcttgcgatgctgatttcactga

SEQ ID NO: 862177 - DNA, 75 bp, synthetic construct
  source 1..75: mol_type = other DNA
gcacatgccattctgaataacacccaggaaggcactcagttgacgattagcggtcatcctgttcttaaaatgtaa

SEQ ID NO: 862178 - DNA, 75 bp, synthetic construct
  source 1..75: mol_type = other DNA
gccagaagatattggctgggcagccgtttatctggcatcagatgcggcagcgtttgtcagtggccaggtgctggt

SEQ ID NO: 862179 - DNA, 75 bp, synthetic construct
  source 1..75: mol_type = other DNA
gctgacgctgtttagctgtgcatttgtcggtacgcggctgttattccctaacggtattaatcgtattggcggctt

SEQ ID NO: 862180 - DNA, 75 bp, synthetic construct
  source 1..75: mol_type = other DNA
atgaaacactgttgtaaaaatgtggtgatcctcatgcccgaacccgtagccgaacccgcgctaaacggattgcgc

SEQ ID NO: 862181 - DNA, 75 bp, synthetic construct
  source 1..75: mol_type = other DNA
ttgaggttgactccagcaaccgcgcaacaacgaaagatggcgttaaagttaaaaccgcaaagctggttcttaacg

SEQ ID NO: 862182 - DNA, 75 bp, synthetic construct
  source 1..75: mol_type = other DNA
tggatggcgaaaatcggcgtcttgctggctggcgctgggttttcgctggtgtttccggcactgggcgtggtggcc

SEQ ID NO: 862183 - DNA, 75 bp, synthetic construct
  source 1..75: mol_type = other DNA
gccaccttgctgagccgtcctcatgccggacgttacgccgatttgctgggacccaaaaagattgtcgtcttcggt

SEQ ID NO: 862184 - DNA, 75 bp, synthetic construct
  source 1..75: mol_type = other DNA
gttgagataatcggcctgctactggttggcgtggcgactatgccgtggatggcgaaaatcggcgtcttactggcg

SEQ ID NO: 862185 - DNA, 75 bp, synthetic construct
  source 1..75: mol_type = other DNA
gtaatcaggtccgtgaagaaattgaatctctggtaacagaaaggaggcaagagggggtgacggaaaacgatgcta

SEQ ID NO: 862186 - DNA, 75 bp, synthetic construct
  source 1..75: mol_type = other DNA
atggatacatcaggtttcgatattcagtttgataatcatattcctgaaaatggttaccgtattgaaggttattta

SEQ ID NO: 862187 - DNA, 75 bp, synthetic construct
  source 1..75: mol_type = other DNA
caaaaccgcacatcaccgaagagtcattgctgattataatcttgataagcacgttaatcggattgatgcttgtag

SEQ ID NO: 862188 - DNA, 75 bp, synthetic construct
  source 1..75: mol_type = other DNA
attttaggcaatgacgacaccgcgcgtaaattaaccccgcttatccgcgcctggcctggggaatcccagcataaa

SEQ ID NO: 862189 - DNA, 75 bp, synthetic construct
  source 1..75: mol_type = other DNA
tattttgccgcaacggaactggcacctgccgtcgcccgcgccttcaacaaactcaaaacattacgacaagacgcc

SEQ ID NO: 862190 - DNA, 75 bp, synthetic construct
  source 1..75: mol_type = other DNA
atgtcaacgcgccttgtgagttttgttgcacaaggtgctttcatattttttttcttaaatactgtgaaattacaa

SEQ ID NO: 862191 - DNA, 75 bp, synthetic construct
  source 1..75: mol_type = other DNA
gcctatgacctggtggttccttcaacctattacgttgataaaatgcgtaaagaagggatgatccagaagatcgac

SEQ ID NO: 862192 - DNA, 75 bp, synthetic construct
  source 1..75: mol_type = other DNA
ttatccaacaccaaacctcgccgcacgtaaactgttaagcccggaagtggcgaacgacaagaccctctacccgga

SEQ ID NO: 862193 - DNA, 75 bp, synthetic construct
  source 1..75: mol_type = other DNA
gtatatggaaggcgaagttaacctcggtatgatctggaatggttctgctttcgtcgcacgtcaggcaggcacgcc

SEQ ID NO: 862194 - DNA, 75 bp, synthetic construct
  source 1..75: mol_type = other DNA
gacggtcaaaacgctgccgggcgtgtttagccgcgacggtctggatgtcggcagtcagttgctgctctcgacgct

SEQ ID NO: 862195 - DNA, 75 bp, synthetic construct
  source 1..75: mol_type = other DNA
atgaactatgccggacacgaaaaacttcgcgccgatgtggcggaggtggccaacaccatgtgtgaccttcgggcc

SEQ ID NO: 862196 - DNA, 75 bp, synthetic construct
  source 1..75: mol_type = other DNA
cgatgcccgtgaagtgttccagatggcgctgcgcaaactgggctactccggtaacaccaccgatccgaaagagat

SEQ ID NO: 862197 - DNA, 75 bp, synthetic construct
  source 1..75: mol_type = other DNA
ggcggcacagcttacccaaatgggcgtagcagcatgcgtatcgcttgcagttatcgttggcgtccagcactataa

SEQ ID NO: 862198 - DNA, 75 bp, synthetic construct
  source 1..75: mol_type = other DNA
ataatggtcaacagcagcaggtacaggagcagcgtcgtcgcattaatgcaatgttgcaggattacgaactgcaac

SEQ ID NO: 862199 - DNA, 75 bp, synthetic construct
  source 1..75: mol_type = other DNA
aatggcagaaaatgccattctggcagaaagtacgtccgtgggcggcacagcttacccaaatgggcgtagcagcat

SEQ ID NO: 862200 - DNA, 75 bp, synthetic construct
  source 1..75: mol_type = other DNA
tgacccgcaccggctttgtcatcgaccacatccactactacgccgatgcgctcaagccgtggattgcgcggcgtg

SEQ ID NO: 862201 - DNA, 75 bp, synthetic construct
  source 1..75: mol_type = other DNA
gtcgctttgattccgatgtgcttgttgaacgcctggcacgccagacgctgtatcgcgccaatcgcctgttcatgg

SEQ ID NO: 862202 - DNA, 75 bp, synthetic construct
  source 1..75: mol_type = other DNA
gggtaaagccagtccggtaagtctgggagtgccttctgaagcgactacgaacaatggtcaacagcagcaggtaca

SEQ ID NO: 862203 - DNA, 75 bp, synthetic construct
  source 1..75: mol_type = other DNA
cgctgattcgcggcgcggtgcgtcatcttaacagcggcggcgagctgcgaattgtagcgaacgccttcctgcctt

SEQ ID NO: 862204 - DNA, 75 bp, synthetic construct
  source 1..75: mol_type = other DNA
attattacaactccagaagatcaacaagggttcataagattacttggggatggatgccaatttggtataaatatt

SEQ ID NO: 862205 - DNA, 75 bp, synthetic construct
  source 1..75: mol_type = other DNA
ccggaggagattgcatggcgaaatggctggttaaaccatgatgaattacaggcaaaaggtgaatttttgaaaaaa

SEQ ID NO: 862206 - DNA, 75 bp, synthetic construct
  source 1..75: mol_type = other DNA
tatgataataacgtagttaacattgccaaaacaattaaaccttcagagcgcggcgagttagagattaccagtata

SEQ ID NO: 862207 - DNA, 75 bp, synthetic construct
  source 1..75: mol_type = other DNA
gttctggaacaaggctttatccaattacaatggggatttcaaagcaattattgcctgtttatgacaagccaatga

SEQ ID NO: 862208 - DNA, 75 bp, synthetic construct
  source 1..75: mol_type = other DNA
aggggaagagtttattggcaatgattcagtatgcttagttctcggcgataacatcttctttggacagagctttag

SEQ ID NO: 862209 - DNA, 75 bp, synthetic construct
  source 1..75: mol_type = other DNA
ttgggctgtcacgggattatatttttatgacaataacgtaaccgatattgcaaagagtattaaaccatctaaacg

SEQ ID NO: 862210 - DNA, 75 bp, synthetic construct
  source 1..75: mol_type = other DNA
tggcttccatgaagttatcgcgcaaaccgggcgcttcaaggtgtatcgcgccattatgacccgccaggcgaagaa

SEQ ID NO: 862211 - DNA, 75 bp, synthetic construct
  source 1..75: mol_type = other DNA
caaaccagcctggatgcggcgcaaacgctaattcgcggcgcggtgcgtcatctgaacagcggcggcgagttgcga

SEQ ID NO: 862212 - DNA, 75 bp, synthetic construct
  source 1..75: mol_type = other DNA
ggccgaagaacaaaccggaagcccagttccagttgatgaatttactttctctgctgccggtgggcacggatattt

SEQ ID NO: 862213 - DNA, 75 bp, synthetic construct
  source 1..75: mol_type = other DNA
acacatgatagcctgattgaagcgggcggttttgttgaaactgtgcaaaaacgtcaaggaatgatggtagcatgt

SEQ ID NO: 862214 - DNA, 75 bp, synthetic construct
  source 1..75: mol_type = other DNA
gcatgggaaaaggcacatggcatacgcctctacgttgccgccaaccagcttttcgatttcgccatcgagcgcgga

SEQ ID NO: 862215 - DNA, 75 bp, synthetic construct
  source 1..75: mol_type = other DNA
atgtctgcatttaccccggcaagtgaagtcttgctgcgtcacagtgatgatttcgaacaaaaccgtattcttttt

SEQ ID NO: 862216 - DNA, 75 bp, synthetic construct
  source 1..75: mol_type = other DNA
actatgttgagctttccacgcgacattaccgcctacgctgggctggagatcatcaaagacaccttcacccgcgat

SEQ ID NO: 862217 - DNA, 75 bp, synthetic construct
  source 1..75: mol_type = other DNA
atatcaccaatctggcgatacagcggacagactcaattaccagaaaatggcgcaggtaattgatggcgttattag

SEQ ID NO: 862218 - DNA, 75 bp, synthetic construct
  source 1..75: mol_type = other DNA
cattattcattgatttaggcgcgcagaaacgtcccactgtgatttctgttgttggtgctggggggaaaaccagct

SEQ ID NO: 862219 - DNA, 75 bp, synthetic construct
  source 1..75: mol_type = other DNA
tgccaacgtctcactggcccgtggttttctgtcgtgatcccgccatgcttcctcatgcgtcttttatatccccca

SEQ ID NO: 862220 - DNA, 75 bp, synthetic construct
  source 1..75: mol_type = other DNA
ataacgtcgaggttattgcccgtcgttgtgagcgttttgcgggtacggaaacggagcgtctggaagatctcaatt

SEQ ID NO: 862221 - DNA, 75 bp, synthetic construct
  source 1..75: mol_type = other DNA
ttgcgatgctgatttcactgatcggtacaccgtggatgccaaaaattgagaacggtattctggtgctggaagata

SEQ ID NO: 862222 - DNA, 75 bp, synthetic construct
  source 1..75: mol_type = other DNA
atgaaaacgaccaattaatctatacgcctggtgcagatgataacgccagcggcgtcgcaggattactggaactgg

SEQ ID NO: 862223 - DNA, 75 bp, synthetic construct
  source 1..75: mol_type = other DNA
ggaagccggtgttgaacgcgtggtcgtcggatcgacggcggtaaaatccccggacatcgtcaaaggctggtttac

SEQ ID NO: 862224 - DNA, 75 bp, synthetic construct
  source 1..75: mol_type = other DNA
tgaacgcctgacgcggcagacactctttcgtattaactcgctgtttatggcggcgtacaacgaaattcttgagct

SEQ ID NO: 862225 - DNA, 75 bp, synthetic construct
  source 1..75: mol_type = other DNA
cattcagagttctcaaaaaccataaatacaattctttctggtagaatatggttttcttcacaattaactagccaa

SEQ ID NO: 862226 - DNA, 75 bp, synthetic construct
  source 1..75: mol_type = other DNA
gaactactcaaaccactgcaacaccacgacgtagaggcaatctggctgggcgatatacaagagtatcctgcaatc

SEQ ID NO: 862227 - DNA, 75 bp, synthetic construct
  source 1..75: mol_type = other DNA
gtgcagggatttacgccagaagcgattgatgcactggtgcaacgaccagagtgtgacgtaattctcattgaggca

SEQ ID NO: 862228 - DNA, 75 bp, synthetic construct
  source 1..75: mol_type = other DNA
tgcttttttggctggcagaactgctccaggctagcggcaggcgtgtgttaatcacgacgacgacacatatgttta

SEQ ID NO: 862229 - DNA, 75 bp, synthetic construct
  source 1..75: mol_type = other DNA
cgcaaaagaaaactgggcatttacctcgctggggattttaggcaatgacgacaccgcgcgtaaattaaccccgct

SEQ ID NO: 862230 - DNA, 75 bp, synthetic construct
  source 1..75: mol_type = other DNA
actttgctggcaatacatgaagatgcacagtggcgcaacgcgcttgtcaaactggttaccgtcacgccagagttg

SEQ ID NO: 862231 - DNA, 75 bp, synthetic construct
  source 1..75: mol_type = other DNA
tgctccctgaacgcccggatattgccaatgctatggctctacgttacgcagaccaaaacgttccggcgatgacct

SEQ ID NO: 862232 - DNA, 75 bp, synthetic construct
  source 1..75: mol_type = other DNA
cgctactgatccctgaacgaccggatatcgccaatgccatggcgctacgttatgcagatcaaaacgttccggcga

SEQ ID NO: 862233 - DNA, 75 bp, synthetic construct
  source 1..75: mol_type = other DNA
tgctccctgaacgcccggatattgccaatgctatggcgctacattatgcagaccaaaacgttccggcgataacct

SEQ ID NO: 862234 - DNA, 75 bp, synthetic construct
  source 1..75: mol_type = other DNA
aaaaatcacataaattctggatggtggagccgcatggcaacgagctgcatatcagttggggcaaagttggcacca

SEQ ID NO: 862235 - DNA, 75 bp, synthetic construct
  source 1..75: mol_type = other DNA
ggcaatgttgctggcgaataatggaattcggggtgtaagccagatccttcttgagtttacggaagagcattctga

SEQ ID NO: 862236 - DNA, 75 bp, synthetic construct
  source 1..75: mol_type = other DNA
tcaactgacgcagttatcctcttcaaacagttgaaaaaagatgttcgtgctatcgccaaccagcaaattacccgt

SEQ ID NO: 862237 - DNA, 75 bp, synthetic construct
  source 1..75: mol_type = other DNA
agctggaatctatctgcgctttgttacttaccgggacaacaggcgatttcatttctcaaccaaataatcattgag

SEQ ID NO: 862238 - DNA, 75 bp, synthetic construct
  source 1..75: mol_type = other DNA
ggcaactgacgcggttaatctcttcaaacagttgaaaaaagatgtacgcgccatagccagccagcagattgatcg

SEQ ID NO: 862239 - DNA, 75 bp, synthetic construct
  source 1..75: mol_type = other DNA
gcacggcaaccttttgcggcgttactgctccctgaacgcccggatattgccaatgctatggcgctacgttatgca

SEQ ID NO: 862240 - DNA, 75 bp, synthetic construct
  source 1..75: mol_type = other DNA
caccttatggcgcagaccacggcttaaaagtaacaacctgcctctgccagatgacgctatgcgccacctcggcac

SEQ ID NO: 862241 - DNA, 75 bp, synthetic construct
  source 1..75: mol_type = other DNA
atatcaggcatcacagcaaaccttatttaccgatctgccactaattgaaaaagaaagctgggagacatctttcat

SEQ ID NO: 862242 - DNA, 75 bp, synthetic construct
  source 1..75: mol_type = other DNA
ctgatgtgcaatcgctggtggcggatgggaaatcgactgcgaagctggaggttaccctgttctcggcaaataacc

SEQ ID NO: 862243 - DNA, 75 bp, synthetic construct
  source 1..75: mol_type = other DNA
tgcatccataaaagggattaacactgatgaggatactaataaagtagttgaggcgatttctgctatttctggcat

SEQ ID NO: 862244 - DNA, 75 bp, synthetic construct
  source 1..75: mol_type = other DNA
gcaactccagcaactctaccaatttctccttgtcgccatcaatcgcatcaggtgcatgtgaagaggctgggaaaa

SEQ ID NO: 862245 - DNA, 75 bp, synthetic construct
  source 1..75: mol_type = other DNA
gtccagagcgtctcctcatgcatatcatatgctacattaaacatgggtacaataatggcggcaaagactaaagtt

SEQ ID NO: 862246 - DNA, 75 bp, synthetic construct
  source 1..75: mol_type = other DNA
ttgtattaatcctgaatctcatttttctgatgggacgccatgcactgagagatcccctcataattttcccaaagc

SEQ ID NO: 862247 - DNA, 75 bp, synthetic construct
  source 1..75: mol_type = other DNA
ctgaaagccagatccttgaattgcttgcagaaatgatgcgtgagaaaacggtgttaatggtcacccatagacttc

SEQ ID NO: 862248 - DNA, 75 bp, synthetic construct
  source 1..75: mol_type = other DNA
aacggatcaaaaaccggaagtcaccttccctgatacccaaactcgtgttgccgatcgcgtttcgctgacgttacg

SEQ ID NO: 862249 - DNA, 75 bp, synthetic construct
  source 1..75: mol_type = other DNA
ttactggcattccgacaacaatggtaggcaatacaaaaatgttaaccaccccatcaggacaatgggttgaatttt

SEQ ID NO: 862250 - DNA, 75 bp, synthetic construct
  source 1..75: mol_type = other DNA
aatatattcaccagaatatccgatgtcctcactgccttacgaagcgcagaatcaaaggccaacaaaaaatccaat

SEQ ID NO: 862251 - DNA, 75 bp, synthetic construct
  source 1..75: mol_type = other DNA
tccacggaccggtactctctccacggccagccaggtacggaaattgcgccgtgtcgtcgaaaagcagaaaacttg

SEQ ID NO: 862252 - DNA, 75 bp, synthetic construct
  source 1..75: mol_type = other DNA
gtcgccatcagacgcatcaaatgcatgtgaaagcgctgggaaaaataaaaaaggtaataacataaaggtaagata

SEQ ID NO: 862253 - DNA, 75 bp, synthetic construct
  source 1..75: mol_type = other DNA
aggcgatttctgctatttctggcatttcgacaacaacaggaccaggtggtgcaaaggtgtttaccaccccatcag

SEQ ID NO: 862254 - DNA, 75 bp, synthetic construct
  source 1..75: mol_type = other DNA
taccaatttctccttgtcgccatcagtcgcatcaactctgtgtaaaaacgctgagaatcaggtaggtggtaataa

SEQ ID NO: 862255 - DNA, 75 bp, synthetic construct
  source 1..75: mol_type = other DNA
caattactttcccactcctccagagattgggcgcttgatgtcactcattattggctcacagtcctcggcaaactt

SEQ ID NO: 862256 - DNA, 75 bp, synthetic construct
  source 1..75: mol_type = other DNA
ctgaactgaaagagaagggcgactttcagggggcgatggcaatcatggccaaggttcagcagattggatcgaacg

SEQ ID NO: 862257 - DNA, 75 bp, synthetic construct
  source 1..75: mol_type = other DNA
atgaccgaactttgccatacaggacgcgggctgtccgaagagtttgatgaagatttccagaacagactgacggca

SEQ ID NO: 862258 - DNA, 75 bp, synthetic construct
  source 1..75: mol_type = other DNA
gtctgtctgagaccgaaatgtccaggctggtggaacgtcgcgatgacgtccatcgcaaactggcagagctgggtg

SEQ ID NO: 862259 - DNA, 75 bp, synthetic construct
  source 1..75: mol_type = other DNA
taactggcagtcacacattggtcgtagcccgtctttgtttgttaatgccgccacctgggggctgctgtttaccgg

SEQ ID NO: 862260 - DNA, 75 bp, synthetic construct
  source 1..75: mol_type = other DNA
atgggaaccaccaccatgggggttaagctggacgacgcgacgcgtgagcgtattaagtctgccgcgacacgtatc

SEQ ID NO: 862261 - DNA, 75 bp, synthetic construct
  source 1..75: mol_type = other DNA
catcagcaaatcagcccggatctagccaacagccagcgagatgcacttgctgcctggctggaagagtatcccgat

SEQ ID NO: 862262 - DNA, 75 bp, synthetic construct
  source 1..75: mol_type = other DNA
atgacgcagttcggtgtggataaagcgacggctgaaagctacgttgaaacctatgacgggatgaagactgtagcg

SEQ ID NO: 862263 - DNA, 75 bp, synthetic construct
  source 1..75: mol_type = other DNA
gtcagatggtcaatctcctcgatatcaccagtgttgatgcacagaatcagcagcaggtgaaagacgccatgatta

SEQ ID NO: 862264 - DNA, 75 bp, synthetic construct
  source 1..75: mol_type = other DNA
cagatcagagaacgcattgaaaacatcaggaaagcaggcccactggctgaaatggctaagcaggttgagacgtcg

SEQ ID NO: 862265 - DNA, 75 bp, synthetic construct
  source 1..75: mol_type = other DNA
atgttcaacaagaattaggggccgattttggttcgattcctccaagctttcttcctttagctaataaacgattat

SEQ ID NO: 862266 - DNA, 75 bp, synthetic construct
  source 1..75: mol_type = other DNA
ttgatgatgttttttttgttcgcggtgaggtcaaatattcctctgatgttccggttgtaaatttttttaccgact

SEQ ID NO: 862267 - DNA, 75 bp, synthetic construct
  source 1..75: mol_type = other DNA
taaaaatccggcagagcgtgaaaaggcacagcagaaatatgatgcattgcttgaaaaagatattgccagtgataa

SEQ ID NO: 862268 - DNA, 75 bp, synthetic construct
  source 1..75: mol_type = other DNA
tctttaaaaaaaaagagtatgacgaagagttttaccagcttgatgcgttaatagaaaaacatactcagtccattg

SEQ ID NO: 862269 - DNA, 75 bp, synthetic construct
  source 1..75: mol_type = other DNA
tcccgtggccatcagataccgttccgtctggttatgccctgatgcaggggcagacttttgacaaatctgcttacc

SEQ ID NO: 862270 - DNA, 75 bp, synthetic construct
  source 1..75: mol_type = other DNA
gtgcagcctcctcggcaacagcggcaggaaattccgcgaaggcggcaaaaacgtccgagacgaacgccaggtctt

SEQ ID NO: 862271 - DNA, 75 bp, synthetic construct
  source 1..75: mol_type = other DNA
cgaataacaccggggcgcatacccatagtgttagcggtacggctgcttcagccggtgcacatacccattcgatga

SEQ ID NO: 862272 - DNA, 75 bp, synthetic construct
  source 1..75: mol_type = other DNA
gtctgcttcaaaagatgaggcgaccagacaagcgtcagcagcgaatggcagcgccacgacagcagcgacgaaggc

SEQ ID NO: 862273 - DNA, 75 bp, synthetic construct
  source 1..75: mol_type = other DNA
gtctgcttcaaaagatgaggcgaccagacaagcgtcagcagcgaatggcagagccacgacggcaccgacgaaggc

SEQ ID NO: 862274 - DNA, 75 bp, synthetic construct
  source 1..75: mol_type = other DNA
gtctgcttcaaaagatgaggcgaccagacaagcgtcagcagcgaatggcagagccacgaccgcagcgacgaaggc

SEQ ID NO: 862275 - DNA, 75 bp, synthetic construct
  source 1..75: mol_type = other DNA
cgtttgctattgataacgcaaccggcgaactggttattggaaccaaactgtccgcaagtctgaacggtaatgcat

SEQ ID NO: 862276 - DNA, 75 bp, synthetic construct
  source 1..75: mol_type = other DNA
atcacacatccgcactttggcgataaaccggtaacggtgttcgctcttatggtaaataacagcactgaatgtcaa

SEQ ID NO: 862277 - DNA, 75 bp, synthetic construct
  source 1..75: mol_type = other DNA
gatggttccaaagatattactttaaccgccgcgcatgtggctgcttttgccagaaggatttctggaagagcattt

SEQ ID NO: 862278 - DNA, 75 bp, synthetic construct
  source 1..75: mol_type = other DNA
ttacggcactaaatccacgaataacaccggggcgcatacgcacagtctgagtggctctacggggtctgccggtgt

SEQ ID NO: 862279 - DNA, 75 bp, synthetic construct
  source 1..75: mol_type = other DNA
acggtaaatcaggcttctggcgcattacagaaaaaccagaacggcgcagatattccgggaaaagataccttcacc

SEQ ID NO: 862280 - DNA, 75 bp, synthetic construct
  source 1..75: mol_type = other DNA
aaatccacgaataacactggtgcgcatacccatagtttaagtggcagcacgaatgcagctggtaatcacagccat

SEQ ID NO: 862281 - DNA, 75 bp, synthetic construct
  source 1..75: mol_type = other DNA
gtctgcttcaaaagatgaggcgaccagacaagcgtcagcagcgaatggcagcgccacgactgcatcgacgaaggc

SEQ ID NO: 862282 - DNA, 75 bp, synthetic construct
  source 1..75: mol_type = other DNA
caaacatttcgcaccattctaaccgtatccagcactgccagcgtggcgcttaccgtggataacaccatggtgatg

SEQ ID NO: 862283 - DNA, 75 bp, synthetic construct
  source 1..75: mol_type = other DNA
caaaaagtgctgccgctgcagagtcctcaaaaagcgcggcagctaccagtgccgctgcggcgaaaacgtcagaaa

SEQ ID NO: 862284 - DNA, 75 bp, synthetic construct
  source 1..75: mol_type = other DNA
aacagcacttccgagtcactggcggcaacgccaaaagccgttaaggccgcgtatgagctggctaacgggaaatac

SEQ ID NO: 862285 - DNA, 75 bp, synthetic construct
  source 1..75: mol_type = other DNA
ttgtcggttttgccatgagtgccggtccgctgatttgggtactgtgctccgaaattcagccgctgaaaggccgcg

SEQ ID NO: 862286 - DNA, 75 bp, synthetic construct
  source 1..75: mol_type = other DNA
gtcgtgccgtcgcctggtaaaggcgctgaataaattggggagcaagacaacgctagatggcttgttcccgccgga

SEQ ID NO: 862287 - DNA, 75 bp, synthetic construct
  source 1..75: mol_type = other DNA
cggcagaatccgcggcaacgcgcgccgagacagcggcaaaacgggcagaggatattgcatccgctgtggcgcttg

SEQ ID NO: 862288 - DNA, 75 bp, synthetic construct
  source 1..75: mol_type = other DNA
gtctgcttcaaaagatgaggcgaccagacaagcgtcagcagcgaatggcagggccacgaccgcaacgacgaaggc

SEQ ID NO: 862289 - DNA, 75 bp, synthetic construct
  source 1..75: mol_type = other DNA
gtctgcttcaaaagatgaggcgaccagacaagcgtcagcagcgaatggcagggccacgacagcaccgacgaaggc

SEQ ID NO: 862290 - DNA, 75 bp, synthetic construct
  source 1..75: mol_type = other DNA
gtctgcttcaaaagatgaggcgaccagacaagcgtcagcagcgaatggcagcgccacgacggcaacgacgaaggc

SEQ ID NO: 862291 - DNA, 75 bp, synthetic construct
  source 1..75: mol_type = other DNA
tgctgcggaatccgcggcaacgcgcgccgagacagcagcaaaacgggcagaggatattgcatccgccgtggcgct

SEQ ID NO: 862292 - DNA, 75 bp, synthetic construct
  source 1..75: mol_type = other DNA
tgcagctgaatccgcggcaacgcgcgccgagacagcagcaaaacgggcagaggatattgcatccgccgtggcgct

SEQ ID NO: 862293 - DNA, 75 bp, synthetic construct
  source 1..75: mol_type = other DNA
ttccgcagaatccgcggcaacgcgcgccgagacagcagcaaaacgggcagaggatattgcatccgccgtggcgct

SEQ ID NO: 862294 - DNA, 75 bp, synthetic construct
  source 1..75: mol_type = other DNA
cgaaagcgtcagaagctgccacctcagcccgggatgcgtcggcttcaaaagaggcggcaaaatcatcagaaacga

SEQ ID NO: 862295 - DNA, 75 bp, synthetic construct
  source 1..75: mol_type = other DNA
atcacacatccgcactttggcgataaaccggtaaaggtgttcgctcttatggtaaataccagcactgaatgtcaa

SEQ ID NO: 862296 - DNA, 75 bp, synthetic construct
  source 1..75: mol_type = other DNA
ctggacaatcaagggcaaacccgccagtgggcgtgctgtattatcacaggaacaggacgggattaaatcgcatac

SEQ ID NO: 862297 - DNA, 75 bp, synthetic construct
  source 1..75: mol_type = other DNA
ctcgccgttgacagtaaaacacatgaaatcatctgcgctgacctgtcgctgaacaagggggcacctcagaaaacg

SEQ ID NO: 862298 - DNA, 75 bp, synthetic construct
  source 1..75: mol_type = other DNA
ctcacagaaaaatcagggcagcatcggcagacggcgcttacgacacccaactctgtcacgatgaactgcggcgta

SEQ ID NO: 862299 - DNA, 75 bp, synthetic construct
  source 1..75: mol_type = other DNA
gcgtctgcttcaaaagatgaggcgaccagacaggcgtcagcagcgaagggcagcgccacgacggcatccacgaag

SEQ ID NO: 862300 - DNA, 75 bp, synthetic construct
  source 1..75: mol_type = other DNA
gtatcagtcccgactgaaaggcggcgtgctggcagatggtctggtttctgttatcgcctccgctgtcggttcatt

SEQ ID NO: 862301 - DNA, 75 bp, synthetic construct
  source 1..75: mol_type = other DNA
gagcgccagtagcgcagcttcctcggcaacggcggcaggaaattccgcgaaggcggcaaaaacgtccgagacgaa

SEQ ID NO: 862302 - DNA, 75 bp, synthetic construct
  source 1..75: mol_type = other DNA
atccggcaaacccaccggaaaatcaggtcagccgccgccgatggcgcttacgatacccggctctgtcacgatgaa

SEQ ID NO: 862303 - DNA, 75 bp, synthetic construct
  source 1..75: mol_type = other DNA
gccacttctttaggtttagggcttggcgtctcctacgatcccgaaattttaaaatattgccagcctctatttatg

SEQ ID NO: 862304 - DNA, 75 bp, synthetic construct
  source 1..75: mol_type = other DNA
gctgttgcgaatcagcggctgaccgggagtaatgcgcggtggaaatggacaacagtgacctgcccccagagttag

SEQ ID NO: 862305 - DNA, 75 bp, synthetic construct
  source 1..75: mol_type = other DNA
ttgattttcagaaatcatttattaatgaaggagggttaaatgaaaaaaaactcgttataatttcagtaatgatat

SEQ ID NO: 862306 - DNA, 75 bp, synthetic construct
  source 1..75: mol_type = other DNA
gtctgatggatatttaagtgagtctgtatcaaaaaaatccactgattttgcttatgcagctggtgttattattaa

SEQ ID NO: 862307 - DNA, 75 bp, synthetic construct
  source 1..75: mol_type = other DNA
tatatatctgtgcttggattaaatagtttgcaagattttaaagacaaggtgttgagtgtaacttatttagagaat

SEQ ID NO: 862308 - DNA, 75 bp, synthetic construct
  source 1..75: mol_type = other DNA
gtaacaaggcggttgcggcgaatgcaagtttctttaaacaatactatgcttctcgtgaaaacttccttgttaatt

SEQ ID NO: 862309 - DNA, 75 bp, synthetic construct
  source 1..75: mol_type = other DNA
tacaagatttactcgatgatatagcaacgaaacagcagcaaatggatcggaataattatgcgaacatcagtaata

SEQ ID NO: 862310 - DNA, 75 bp, synthetic construct
  source 1..75: mol_type = other DNA
gacgaaacagcagcaaatgaaatggcagacctttgccaccattagtgataacttttattactataataaatcaca

SEQ ID NO: 862311 - DNA, 75 bp, synthetic construct
  source 1..75: mol_type = other DNA
cccgaaaaggagcaggttactggcccggtgagtacgcagaccgcaaccgtgccgttgctaatcagcggctgagcg

SEQ ID NO: 862312 - DNA, 75 bp, synthetic construct
  source 1..75: mol_type = other DNA
ttgcatctggcagttgacagcaacacacatgaaatcatctgtgcagacctgtcgctgaacaatgtgacggactca

SEQ ID NO: 862313 - DNA, 75 bp, synthetic construct
  source 1..75: mol_type = other DNA
taaaatgattaatgagggttggtgtgctattgatgcagatatctatcaatcaaagttccaattcaacttgctcga

SEQ ID NO: 862314 - DNA, 75 bp, synthetic construct
  source 1..75: mol_type = other DNA
tatgtatttggttatataaatttaatgagtttcctcaaaacacatccttcgaaagtataatctccacttttacac

SEQ ID NO: 862315 - DNA, 75 bp, synthetic construct
  source 1..75: mol_type = other DNA
gctgttcgggggttcactgacgctgcgtgactacgatggtcaggttgcggaggctatggggtcgtttgcgggaga

SEQ ID NO: 862316 - DNA, 75 bp, synthetic construct
  source 1..75: mol_type = other DNA
caatttttcatttgttacggtcatgattgcgctgggcagcagcatgaaaagcgacggttttcacgaagagttaat

SEQ ID NO: 862317 - DNA, 75 bp, synthetic construct
  source 1..75: mol_type = other DNA
acgcggtatctacgaaggcccggggatctcaattaagctctccgccctacacccgcgttacagccgcgcgcagta

SEQ ID NO: 862318 - DNA, 75 bp, synthetic construct
  source 1..75: mol_type = other DNA
caggatgcgctgactcagctcgccgccgtgctggcggtgggcagccaggtgctgtggccggatgacgcgctgcat

SEQ ID NO: 862319 - DNA, 75 bp, synthetic construct
  source 1..75: mol_type = other DNA
atgatttcgctaacgaaacccatcgtccattagggcctgtggtatgtatcagcccgtggaacttcccgctggcga

SEQ ID NO: 862320 - DNA, 75 bp, synthetic construct
  source 1..75: mol_type = other DNA
ccgcagagaacgccatcactttacaggtcggcgagcatgaactgacgtttatcccgacggtgaaagactacaacg

SEQ ID NO: 862321 - DNA, 75 bp, synthetic construct
  source 1..75: mol_type = other DNA
attggtctgtttagcgcgatttttgggatgcgaagccagagtggttttggtggtgtgtctgtacaagtatttatc

SEQ ID NO: 862322 - DNA, 75 bp, synthetic construct
  source 1..75: mol_type = other DNA
ccaggaccgacgggtgaacgtaatacctggacgctgctgccgcgtgagcgcgtgctgtgtattgcggatgatgaa

SEQ ID NO: 862323 - DNA, 75 bp, synthetic construct
  source 1..75: mol_type = other DNA
actggcggcaggtaacagcgtactggcaaaaccggcagaacaaacgccgctgattgccgcgcaagggatcgccat

SEQ ID NO: 862324 - DNA, 75 bp, synthetic construct
  source 1..75: mol_type = other DNA
ccggagctacctgcgctgctttctggcgctgccaatgagagcgatgaagcaccgactccggcagaggaaccacac

SEQ ID NO: 862325 - DNA, 75 bp, synthetic construct
  source 1..75: mol_type = other DNA
atgatttcgctaacgaaacccaccgtccattagggcctgtggtgtgtatcagtccgtggaacttcccgctggcga

SEQ ID NO: 862326 - DNA, 75 bp, synthetic construct
  source 1..75: mol_type = other DNA
caaccgtttgatgcggtgatcttccacggtgattcggatcagcttcgtgcactgtgtgaagcggttgccgcgcgt

SEQ ID NO: 862327 - DNA, 75 bp, synthetic construct
  source 1..75: mol_type = other DNA
cgtcagttagtgaaggcattgccatcggcagtcagcgaacgtattcaactggcgaaagcggaaaatataaccgct

SEQ ID NO: 862328 - DNA, 75 bp, synthetic construct
  source 1..75: mol_type = other DNA
cgcttccggttatggtctgacgctcggcgtccatacgcgtattgatgaaaccattgcccaggtcactggctcggc

SEQ ID NO: 862329 - DNA, 75 bp, synthetic construct
  source 1..75: mol_type = other DNA
tacctgcgccgcatcgtgattaaagagcaccgcgatctgctgaaccagttgctggaaaaaccgggaatgccggcc

SEQ ID NO: 862330 - DNA, 75 bp, synthetic construct
  source 1..75: mol_type = other DNA
aagtcggattcgcgtcataactatcatgagatgatttcgaagtttaagcaggaaataaaggagtcgttgcaggag

SEQ ID NO: 862331 - DNA, 75 bp, synthetic construct
  source 1..75: mol_type = other DNA
atatgtcaagtgtctgttccgaattgctggagacaggattacgcgttgtacagcaattaaaaaagcgtgaacagg

SEQ ID NO: 862332 - DNA, 75 bp, synthetic construct
  source 1..75: mol_type = other DNA
ctgacctgtttcgtcttcatccggactggatattgtcaatgccaggatattcccagccaaccggaagatatcagt

SEQ ID NO: 862333 - DNA, 75 bp, synthetic construct
  source 1..75: mol_type = other DNA
gcgcagcctagcggcctttcaccgcgaagtcactcaggtgtgcaaggctcaaaaactgcgagtgccggcgcgcaa

SEQ ID NO: 862334 - DNA, 75 bp, synthetic construct
  source 1..75: mol_type = other DNA
gagaaacaggcccaggctacacagcctattgtgattaaagcgggcgaacgcccggataacagtgcaattattgca

SEQ ID NO: 862335 - DNA, 75 bp, synthetic construct
  source 1..75: mol_type = other DNA
tttacgattccgatcaagagattgagaaacggaccggagctgatgtgggctgggttttcgatttagaaggcgaag

SEQ ID NO: 862336 - DNA, 75 bp, synthetic construct
  source 1..75: mol_type = other DNA
ttctgacctgtttcgtcttcatccggactggatattgtcaatgccaggatattctcagccaaccggaagatatca

SEQ ID NO: 862337 - DNA, 75 bp, synthetic construct
  source 1..75: mol_type = other DNA
agttgcttacgcagcaagcgctgagtatgtcatcagggttaagaattggaattttgggatgcttgaatagcaaaa

SEQ ID NO: 862338 - DNA, 75 bp, synthetic construct
  source 1..75: mol_type = other DNA
actgcctgcaatatgctgaatgccggaatggaccgtcagacggtgctgcagatgacggggctttcaaatgaccag

SEQ ID NO: 862339 - DNA, 75 bp, synthetic construct
  source 1..75: mol_type = other DNA
ccacatgttgagtttgagtcctgtgcttccggtggggggcgtattgacttcgaagtcctgaaacgcacacaccgg

SEQ ID NO: 862340 - DNA, 75 bp, synthetic construct
  source 1..75: mol_type = other DNA
tctttttatgatcagccagcttgcaatgccggattacaccttaccaggcatacttcgttttcccggactggcggc

SEQ ID NO: 862341 - DNA, 75 bp, synthetic construct
  source 1..75: mol_type = other DNA
atcgttgctgccatgcaactttccggcagcacagcatcgcttttcgtggtctgactgcattgtttggtcatatgg

SEQ ID NO: 862342 - DNA, 75 bp, synthetic construct
  source 1..75: mol_type = other DNA
actatacactaagcgcagttgaaacaacttatggcacatatattgctgcacaagccataactaaaggagcaggaa

SEQ ID NO: 862343 - DNA, 75 bp, synthetic construct
  source 1..75: mol_type = other DNA
ctgtgcgggctggccctgttctggttcggcttcattggtatccgcaaggtcatcagcgcggctcaggccggacgt

SEQ ID NO: 862344 - DNA, 75 bp, synthetic construct
  source 1..75: mol_type = other DNA
attaataaaatattctccgctaccgcgccagccattaactttttcctgttatgggtttttgttattggctttcag

SEQ ID NO: 862345 - DNA, 75 bp, synthetic construct
  source 1..75: mol_type = other DNA
actctcagccgattgaagttaatgcgcctttgaacattaacggcaacgttaatagctcagacaagatggtcatgg

SEQ ID NO: 862346 - DNA, 75 bp, synthetic construct
  source 1..75: mol_type = other DNA
cgccagtcaatagccgatgatatgtacagtggtttttctgctgcaatgactcttttcgggcaggaaaacactaaa

SEQ ID NO: 862347 - DNA, 75 bp, synthetic construct
  source 1..75: mol_type = other DNA
gcatcctgctggcgtttctggggattgtgcccacggccagcggctggtcactctcgcagctcattttcctctggg

SEQ ID NO: 862348 - DNA, 75 bp, synthetic construct
  source 1..75: mol_type = other DNA
aaatgctgatcaacgcctacgcctttggtctgtatcaatcgttaggaatttttattccgctgattgtcactaact

SEQ ID NO: 862349 - DNA, 75 bp, synthetic construct
  source 1..75: mol_type = other DNA
gaaagaatgaaaaagcgccgtactgaagcagctgccgaacgtgcattgccaaacggtgaaacagggaatgtctga

SEQ ID NO: 862350 - DNA, 75 bp, synthetic construct
  source 1..75: mol_type = other DNA
acttgcgactacgctggtactgacgctgaccaacctgaccatttcgacgctgcgtcactggacgccagccgagat

SEQ ID NO: 862351 - DNA, 75 bp, synthetic construct
  source 1..75: mol_type = other DNA
gtcaccaatccactgtcaaccagcgcccccactctgatcggaagcatgttcggggcgttcaacagtatcatcgcc

SEQ ID NO: 862352 - DNA, 75 bp, synthetic construct
  source 1..75: mol_type = other DNA
cagcttcttcaatggtctgagcgaccaggatgtcagcggtatttatactgcccagaaaaacgcgctcagcacgat

SEQ ID NO: 862353 - DNA, 75 bp, synthetic construct
  source 1..75: mol_type = other DNA
gttgccactggaacgattctaaataaactatttgctgttgcattaacgaatatccaggctgattcgctgactggg

SEQ ID NO: 862354 - DNA, 75 bp, synthetic construct
  source 1..75: mol_type = other DNA
ttcggggcatcagggacaggtattcagcaccggacgcgatgtcgtcggcacactgagtgtcgttgcaggttttct

SEQ ID NO: 862355 - DNA, 75 bp, synthetic construct
  source 1..75: mol_type = other DNA
agttgctggatggggttgaggttgagtggttgactgccgctgagattttcaacattaaaaatggctatacgccat

SEQ ID NO: 862356 - DNA, 75 bp, synthetic construct
  source 1..75: mol_type = other DNA
cattatctaatcatgtacccacatcaggtaaattaacggagtttatacctaacgatatactgattgggaatatcc

SEQ ID NO: 862357 - DNA, 75 bp, synthetic construct
  source 1..75: mol_type = other DNA
ttattatccctatcccctgtccggaaaatcccaaaaaatcccttgctatccagtctgaaatcgttcggattctgg

SEQ ID NO: 862358 - DNA, 75 bp, synthetic construct
  source 1..75: mol_type = other DNA
gccatgcaatttatttctgagcgtgtcggtcaactggagtctgtttcattgattggtcgctttcgcgttcttgac

SEQ ID NO: 862359 - DNA, 75 bp, synthetic construct
  source 1..75: mol_type = other DNA
caagaattagtttcgaactacttgatgaaaagaattcttatgacctttgtcaaatattaagcccaaaaagacctt

SEQ ID NO: 862360 - DNA, 75 bp, synthetic construct
  source 1..75: mol_type = other DNA
ttcttttttgcctctgtagccattatagcaataggtactatattaaactttttattcggtgctgcactgaccaat

SEQ ID NO: 862361 - DNA, 75 bp, synthetic construct
  source 1..75: mol_type = other DNA
cagaccgctgctgatggtgttcggattcttttttgcatcggtcgccatcgtggccggcggcacaatcctgaatgc

SEQ ID NO: 862362 - DNA, 75 bp, synthetic construct
  source 1..75: mol_type = other DNA
gatggtgcaaatgctggaacggttttctaccgtacagggaaattctccatcacgaatgtttgtgggctaatcaaa

SEQ ID NO: 862363 - DNA, 75 bp, synthetic construct
  source 1..75: mol_type = other DNA
gtatgctgtaggtgcaggacaacctttgattactggtggctttttaaagaacttgatggttccattaccctcatt

SEQ ID NO: 862364 - DNA, 75 bp, synthetic construct
  source 1..75: mol_type = other DNA
ttactatcccaatcccctgcccggaaaatccggaaaaatcccttgccatccagtcagaaattgttcggattctgg

SEQ ID NO: 862365 - DNA, 75 bp, synthetic construct
  source 1..75: mol_type = other DNA
caactaaacccactgataaaaatgaaaaatatcggtgattacactatgggcattactgaaagcatctgggcgggt

SEQ ID NO: 862366 - DNA, 75 bp, synthetic construct
  source 1..75: mol_type = other DNA
aggcttatctgcctgaccatgtaattaattttctgggcggacgtgacggcgttaatatgctggggaatatggttt

SEQ ID NO: 862367 - DNA, 75 bp, synthetic construct
  source 1..75: mol_type = other DNA
ggcgaagcaggggatactgaattcctgaaggaagtaaaaggagcttaccaggcacagttgcaaaactcaccatat

SEQ ID NO: 862368 - DNA, 75 bp, synthetic construct
  source 1..75: mol_type = other DNA
cgacatcatccgatgctcgcccttcttccgatgacacgcctttacctggtggatgttctgatacccggaaggatt

SEQ ID NO: 862369 - DNA, 75 bp, synthetic construct
  source 1..75: mol_type = other DNA
tggatgttctgataccaggaaggcttcagacaaaaagccgggtggagccgctgttctctggctcaagcgtggtga

SEQ ID NO: 862370 - DNA, 75 bp, synthetic construct
  source 1..75: mol_type = other DNA
tggatgttctgataccaggaaggcttcagacaaaaagccgggtgcagccgctgtgctctggttcaagcgtggtga

SEQ ID NO: 862371 - DNA, 75 bp, synthetic construct
  source 1..75: mol_type = other DNA
ggatgttctgataccaggaaggcttctgacaaaaagccgggtgaagccgctgtgctctggatcaagcgtggtgat

SEQ ID NO: 862372 - DNA, 75 bp, synthetic construct
  source 1..75: mol_type = other DNA
caaccatcggcgcgatttctccgttcgttggtctgtttggtacggtctggggcatcatgaacagctttattggta

SEQ ID NO: 862373 - DNA, 75 bp, synthetic construct
  source 1..75: mol_type = other DNA
gtgggtaataatttaatgcagacggacctttccgtctggggtatgtatcagcacgccgatattgtcgttaagtgc

SEQ ID NO: 862374 - DNA, 75 bp, synthetic construct
  source 1..75: mol_type = other DNA
catcagcaaataaggccagcacagccagcgcagtcgcagctttggttcctgattctgttcttgatgaattaaaca

SEQ ID NO: 862375 - DNA, 75 bp, synthetic construct
  source 1..75: mol_type = other DNA
cggttgcctacgataacaaaggcaatgcctcaaaacgcgtgcagacagaggtggtcattaccggagcaggtatga

SEQ ID NO: 862376 - DNA, 75 bp, synthetic construct
  source 1..75: mol_type = other DNA
gcgaccttcagcaggaagctggacagagcaaagtaatggggtctacgtggcgaccttaacgctgggatcggctgc

SEQ ID NO: 862377 - DNA, 75 bp, synthetic construct
  source 1..75: mol_type = other DNA
acagagccagttatctcgtgaagtatgagacgaagcagcatgacggttccgggcaacgtaattatggttgcagtc

SEQ ID NO: 862378 - DNA, 75 bp, synthetic construct
  source 1..75: mol_type = other DNA
gcaaggcgatggcctggtccatttttccaggaggacgcctttccgtaaaccaacatcgtctgatgctcgcccttc

SEQ ID NO: 862379 - DNA, 75 bp, synthetic construct
  source 1..75: mol_type = other DNA
tcctggcaaggcgatggcctggtccatttttccaggaggacgcctttccgtaaaccaacatcgtctgatgctcgc

SEQ ID NO: 862380 - DNA, 75 bp, synthetic construct
  source 1..75: mol_type = other DNA
aactctcacaactgcggcccatttcagtactctgatttatgcgaggacatcattgaggtaactcaactgattaag

SEQ ID NO: 862381 - DNA, 75 bp, synthetic construct
  source 1..75: mol_type = other DNA
ggcagtcgttgcgccgggtatcgcagaagctctgttagcaacggcaatcggcctcgtggcagcgattccggcggt

SEQ ID NO: 862382 - DNA, 75 bp, synthetic construct
  source 1..75: mol_type = other DNA
agtacacggagaagctcgtctctctgtactttgtcgttaaatttaattcgaccgtgcgcttccggttgtggcaat

SEQ ID NO: 862383 - DNA, 75 bp, synthetic construct
  source 1..75: mol_type = other DNA
tcacttaaaaacccgaaactggtactcagcctgtttgtcaccacgttaatcatccaggtggcgacgggctcaatt

SEQ ID NO: 862384 - DNA, 75 bp, synthetic construct
  source 1..75: mol_type = other DNA
gtccagataaactctgtgacgggcgtgttcagcatggcgggatttttgatgatttatgcccgagcctgtaccacg

SEQ ID NO: 862385 - DNA, 75 bp, synthetic construct
  source 1..75: mol_type = other DNA
gcagtccgcgctggcccattttttcaatcccttcattgaaacggaatatcagggggttctgacggcacagcgctc

SEQ ID NO: 862386 - DNA, 75 bp, synthetic construct
  source 1..75: mol_type = other DNA
gtgatgattgggctgattctggcctccgtagtcacctgggcaatcttcttcagcaagagcgttgagttcttcaac

SEQ ID NO: 862387 - DNA, 75 bp, synthetic construct
  source 1..75: mol_type = other DNA
aaaatggattgctgatgtcggtttcggtggaaagacattgactgcgccgattcgtttagtggcggatatcgcaca

SEQ ID NO: 862388 - DNA, 75 bp, synthetic construct
  source 1..75: mol_type = other DNA
cttgatgatcaatctctggaagagaaactggtgactgcccggcgcggtggttactgttttgagcagaatggcgtt

SEQ ID NO: 862389 - DNA, 75 bp, synthetic construct
  source 1..75: mol_type = other DNA
tggaagaagccctgaaagagcttagaagaatggctttcgcccgacgcactaactctcacaactgcggcccatttc

SEQ ID NO: 862390 - DNA, 75 bp, synthetic construct
  source 1..75: mol_type = other DNA
gtcaccacgttaatcatccaggtggcaacgggctcaattgccccccattctgacgctgtatgtccgcgaactggc

SEQ ID NO: 862391 - DNA, 75 bp, synthetic construct
  source 1..75: mol_type = other DNA
ccaatggctggcggtttgctcgccgatagctacggcttacgtccggtattctttattaccgccagtgtgctcata

SEQ ID NO: 862392 - DNA, 75 bp, synthetic construct
  source 1..75: mol_type = other DNA
cccttcgcctcaatgcaattaactggagtttacgcgatgtagtagcccgctgccgtgactatgcagtcagcccat

SEQ ID NO: 862393 - DNA, 75 bp, synthetic construct
  source 1..75: mol_type = other DNA
cacaccttcataaagcaggtattccatttctggctcttggtcgggtaccatctggtctgccctgtgcgtggtttg

SEQ ID NO: 862394 - DNA, 75 bp, synthetic construct
  source 1..75: mol_type = other DNA
atttacgttgcaatcggaaattatgcgactggtgtaaatattcaatgggattataccagtaatgccagcgtgact

SEQ ID NO: 862395 - DNA, 75 bp, synthetic construct
  source 1..75: mol_type = other DNA
tcatagtgtcagcggcacagctgcatctgcaggtgctcacgcacatactgtcggtattggtgctcatacgcactc

SEQ ID NO: 862396 - DNA, 75 bp, synthetic construct
  source 1..75: mol_type = other DNA
tttgagcaaaatatctcagcactggcgttggccgctcaggtgatccccgggcatatcatccatatcacctctacg

SEQ ID NO: 862397 - DNA, 75 bp, synthetic construct
  source 1..75: mol_type = other DNA
ttatttaaaaaccctttctgaaagcgattcctgtaatgactacaccgatattatcagtcattacctggggaagaa

SEQ ID NO: 862398 - DNA, 75 bp, synthetic construct
  source 1..75: mol_type = other DNA
ttctcccacacggcgagcaggatatcaggccgtgatggagttaatgtcactaccgataccaccaacagctattat

SEQ ID NO: 862399 - DNA, 75 bp, synthetic construct
  source 1..75: mol_type = other DNA
cagggcggataagcccagtgctggcgcgggaagagatatttacgcatgggtacagggaggattgctcgatttcag

SEQ ID NO: 862400 - DNA, 75 bp, synthetic construct
  source 1..75: mol_type = other DNA
acttggtattatatttttaattattttattcttactgtatttcggcatatggtttaaatcaaataatctttcgga

SEQ ID NO: 862401 - DNA, 75 bp, synthetic construct
  source 1..75: mol_type = other DNA
atggcgaaagttaattttttcgataagcgtatacttaaaaaattttcagactacacatcaactattagtaccata

SEQ ID NO: 862402 - DNA, 75 bp, synthetic construct
  source 1..75: mol_type = other DNA
agagatggccgtcgatttaaccccagtgtttttaaagatacttatcaatatggttatacaagctcaggtcaaaat

SEQ ID NO: 862403 - DNA, 75 bp, synthetic construct
  source 1..75: mol_type = other DNA
tacaacaggctattgccaaagagctggagctgactgctgcagcggacattttactctgggatgattattttgcgc

SEQ ID NO: 862404 - DNA, 75 bp, synthetic construct
  source 1..75: mol_type = other DNA
ggaactgaccgcgtcagcagaaattttactctgggatgactactttgcccctggctacggcgtgccaaatgacga

SEQ ID NO: 862405 - DNA, 75 bp, synthetic construct
  source 1..75: mol_type = other DNA
tttatcgtcattacattgacgatttgggtttcgtttcgtgtatcggtgctggtgttctttcagttgggaagcccg

SEQ ID NO: 862406 - DNA, 75 bp, synthetic construct
  source 1..75: mol_type = other DNA
gcgggcatgaagacgtgggtcgccatgtggcgctggacaaactgttaggccgccggtcacaagaaggggaaagct

SEQ ID NO: 862407 - DNA, 75 bp, synthetic construct
  source 1..75: mol_type = other DNA
cgttgacgaacattgatcgcgtagcgcacacctttactctggagaatggaagcggcaagagtattacgttggatt

SEQ ID NO: 862408 - DNA, 75 bp, synthetic construct
  source 1..75: mol_type = other DNA
ttttggcgctcctgtgatcgggtttattgcaggtcgtaagtttctaaagtcactcatcaattcgaaggagaagta

SEQ ID NO: 862409 - DNA, 75 bp, synthetic construct
  source 1..75: mol_type = other DNA
ggactaatcaggttggtatcagtggctcattaaccagtggcacctcccaatgggtaggtaaatcatcttcagaag

SEQ ID NO: 862410 - DNA, 75 bp, synthetic construct
  source 1..75: mol_type = other DNA
caaaagtcggcgatgtgtggcgtagagattttgtttgcggtgtctgccgcgaccacgcttgctgtagaagtggct

SEQ ID NO: 862411 - DNA, 75 bp, synthetic construct
  source 1..75: mol_type = other DNA
gtgaaaaaaacacagcaaaaagaaatcgaaaatgtgacaaatatcacagggatgcgtcaaattgagttatggcgg

SEQ ID NO: 862412 - DNA, 75 bp, synthetic construct
  source 1..75: mol_type = other DNA
tgaaaaacctgcagaccattgcaacaaaaatgaagcagtacaagttccagggcagatataccggcacggattata

SEQ ID NO: 862413 - DNA, 75 bp, synthetic construct
  source 1..75: mol_type = other DNA
gatgatcccgcactggaatttcgccaatataaccgccttcccgcaagcctccgtctttttccgcgatgtcctgct

SEQ ID NO: 862414 - DNA, 75 bp, synthetic construct
  source 1..75: mol_type = other DNA
tagccatgaagaagccgtttctgcctttgagcaaaatatctcggcactggcactggcggcacaggtgatccctgg

SEQ ID NO: 862415 - DNA, 75 bp, synthetic construct
  source 1..75: mol_type = other DNA
tagccacaggcctttcagtggctctcatctacggtttactggttccgtcgctgatttctaccaagagtgatttag

SEQ ID NO: 862416 - DNA, 75 bp, synthetic construct
  source 1..75: mol_type = other DNA
ccgtcatgcttggagttattgttggttttggcgctccagtaatcggtcttattggtggtcgtaagtttattaact

SEQ ID NO: 862417 - DNA, 75 bp, synthetic construct
  source 1..75: mol_type = other DNA
ggtaataaggcgaaaaatgcctggggtggtgcggtaaccatcaaagtcagttcagataaatactcctacgttatt

SEQ ID NO: 862418 - DNA, 75 bp, synthetic construct
  source 1..75: mol_type = other DNA
ggttgaaatcaaataatcttacggaagttaatttagatgtagagggaagtattgttactgtaaaagctggggatc

SEQ ID NO: 862419 - DNA, 75 bp, synthetic construct
  source 1..75: mol_type = other DNA
cgctgctgcgtggcgataatgaacagcagctggcggagcgcgtcaggttacacctttgcgcacaacgtccggagg

SEQ ID NO: 862420 - DNA, 75 bp, synthetic construct
  source 1..75: mol_type = other DNA
attgtacgttaagctcattttttatcatttctggtttttttggaaacgtaatattctgggcactgttgcaaatag

SEQ ID NO: 862421 - DNA, 75 bp, synthetic construct
  source 1..75: mol_type = other DNA
aatcagcattctcctttgctgatgcaattgcatgcggcaggtatacggaccggtgatgcagagcgaatactgtcc

SEQ ID NO: 862422 - DNA, 75 bp, synthetic construct
  source 1..75: mol_type = other DNA
gatgccaataacaatttgttgaaagatagcgaagtgacgctgaccgccagcccggcttcgttaaacctggaaccg

SEQ ID NO: 862423 - DNA, 75 bp, synthetic construct
  source 1..75: mol_type = other DNA
gctgtttggtaaagataaacgccagaaagatccacatgcgattaccgctgaagtgaattacacgccagtgcctct

SEQ ID NO: 862424 - DNA, 75 bp, synthetic construct
  source 1..75: mol_type = other DNA
gcagtcagccagatagcgatgcgacacgtaattttattaccggaatggccaccgctaaagctaaccaggaaattc

SEQ ID NO: 862425 - DNA, 75 bp, synthetic construct
  source 1..75: mol_type = other DNA
atgaaaatttctgatattgaaaaaaacatatataaaggactagctgaatttatttcacaaaaaatcagagatgaa

SEQ ID NO: 862426 - DNA, 75 bp, synthetic construct
  source 1..75: mol_type = other DNA
aggttgccgacgtgatccatacatgtgcccggcgggggtatggactgacgggattggtaatacacacggggtaac

SEQ ID NO: 862427 - DNA, 75 bp, synthetic construct
  source 1..75: mol_type = other DNA
gtgccttctaaagggatcgagtcagtcggtattggctgtgaatgggtgtttgtcctggagcgtaaaaaattcgct

SEQ ID NO: 862428 - DNA, 75 bp, synthetic construct
  source 1..75: mol_type = other DNA
tgaaatcaagacaatcacacatccccacttcggcgataaaccggtaaaggtgttcgcgataaaggtgaatatcgg

SEQ ID NO: 862429 - DNA, 75 bp, synthetic construct
  source 1..75: mol_type = other DNA
aatggggtgttgaagacgaggagttggcggaactggctaagcaagtagccagaatgctgacaaaagaaaaagccc

SEQ ID NO: 862430 - DNA, 75 bp, synthetic construct
  source 1..75: mol_type = other DNA
aatggctgagctgactaagcggcttgccaattacctgacaaaagaaaaagccccgaagaacggcgaattcttcga

SEQ ID NO: 862431 - DNA, 75 bp, synthetic construct
  source 1..75: mol_type = other DNA
tggatgagtttgataaaggagaatgtgtaactctagcatcaaaaaatgcaacaaagattagtctactcaatagag

SEQ ID NO: 862432 - DNA, 75 bp, synthetic construct
  source 1..75: mol_type = other DNA
tcgtgttgttatcgctggcggtggcgggtctgtttctggtgaaacacaaaaatgccagcctgcgcgcttcgctgg

SEQ ID NO: 862433 - DNA, 75 bp, synthetic construct
  source 1..75: mol_type = other DNA
atgtcaaagctgatgattgcactggtcgtgttgttatcgctggcggtgacgggtctgtttctggcgaagcataaa

SEQ ID NO: 862434 - DNA, 75 bp, synthetic construct
  source 1..75: mol_type = other DNA
tcgtgttgttatcgctggcggtgtccggtctgtttctggtgaaacacaaaaatgccagcctgcgcgcctcgctgg

SEQ ID NO: 862435 - DNA, 75 bp, synthetic construct
  source 1..75: mol_type = other DNA
agcgcgagaaaaccatcacgaggttactcaatgaaaacgaagattttcgccgctggtacggtgctgacctgcctg

SEQ ID NO: 862436 - DNA, 75 bp, synthetic construct
  source 1..75: mol_type = other DNA
tcgtgttgttatcgctggcggtgacgggtctgtttctggcgaagcataaaaacgccagcctgcgcacctcactgg

SEQ ID NO: 862437 - DNA, 75 bp, synthetic construct
  source 1..75: mol_type = other DNA
ttgtgttgttatcgctggcggtggcggggctgtttctggtgaaacataaaaatgccagcctgcgcgcctcgctgg

SEQ ID NO: 862438 - DNA, 75 bp, synthetic construct
  source 1..75: mol_type = other DNA
atgtcaaagctgatgattgtgctggtcgtgttgttatcactggcggtggccggtctgtttctggtgaaacatgaa

SEQ ID NO: 862439 - DNA, 75 bp, synthetic construct
  source 1..75: mol_type = other DNA
atgtcaaagctgatgattgtgctggtcgtgttgttatcgctggcggtggctggtctgtttctggcgaaacatgaa

SEQ ID NO: 862440 - DNA, 75 bp, synthetic construct
  source 1..75: mol_type = other DNA
tgaaatcaagacaatcacacatccgcacttcggcgataaaccggtaaaggtgttcgcgataaaggtgaatatcaa

SEQ ID NO: 862441 - DNA, 75 bp, synthetic construct
  source 1..75: mol_type = other DNA
atgctgtgcgccggttgcaccagcgccccgcctgcactgacgccagtgattgtcgccaacgcctgcccgaaagtg

SEQ ID NO: 862442 - DNA, 75 bp, synthetic construct
  source 1..75: mol_type = other DNA
ccggcctgcaccgacgccagtgattgtccacaacgcctgcccgaaagtgagtctttgcccgatgccgggcagtga

SEQ ID NO: 862443 - DNA, 75 bp, synthetic construct
  source 1..75: mol_type = other DNA
atgtcaaagctgatgattgtgctggtcgtgttgttatcgctggcggtggccggtctgtttctggtgaagcatgaa

SEQ ID NO: 862444 - DNA, 75 bp, synthetic construct
  source 1..75: mol_type = other DNA
cacccgggctctgacgttcctgtcagagctgggactgattacctaccagacggaatatgacccgcttatcgggtg

SEQ ID NO: 862445 - DNA, 75 bp, synthetic construct
  source 1..75: mol_type = other DNA
tcgccgtttccgtcttgctcatgtgatgtttggcccggagattatcgaagtcgcaaccttccgtggacaccacga

SEQ ID NO: 862446 - DNA, 75 bp, synthetic construct
  source 1..75: mol_type = other DNA
acctataaactgctgtgtgaataccatctgttccagccgctgttcccgaccattacccgctactttacggaaaat

SEQ ID NO: 862447 - DNA, 75 bp, synthetic construct
  source 1..75: mol_type = other DNA
tgcgcgccgcagtcgtgtggaatgggaaaacagacagcgcaagaagcagggactggatgcactgggtatggatga

SEQ ID NO: 862448 - DNA, 75 bp, synthetic construct
  source 1..75: mol_type = other DNA
gcgggcagggaacgtcaggatatcgtcaccctggtgaaacggcagctgacgcgtgaaatcgcggaagggcgcttc

SEQ ID NO: 862449 - DNA, 75 bp, synthetic construct
  source 1..75: mol_type = other DNA
tgtgtttccactatgacccgctggccaaccgcgtgcagtgctccatcaccacgctggccattgagtgcggactgg

SEQ ID NO: 862450 - DNA, 75 bp, synthetic construct
  source 1..75: mol_type = other DNA
tcgctggcccgtcgattgtcagggatgctctccgttgggctgcattttgatcaccgtatcatcaatgatccaaat

SEQ ID NO: 862451 - DNA, 75 bp, synthetic construct
  source 1..75: mol_type = other DNA
cgctggcgtctggccggtggacaacgccccgtacaacccacttatcttccggtgccggaagccctggattttatc

SEQ ID NO: 862452 - DNA, 75 bp, synthetic construct
  source 1..75: mol_type = other DNA
cagaagaccctacacctcatcgacttgaaaaagcgcgggaggaggggcagatcccgcgttcccgtgaactgacct

SEQ ID NO: 862453 - DNA, 75 bp, synthetic construct
  source 1..75: mol_type = other DNA
acctataagctgctgtgtgaatatcatctgttccagccgctgttcccgaccattacccgctacttcacggaaaat

SEQ ID NO: 862454 - DNA, 75 bp, synthetic construct
  source 1..75: mol_type = other DNA
ggaacgttgaagttctgcgaaaaactgatggaaaaggcggtgggcttcacctcccgttttgatttcgccattcat

SEQ ID NO: 862455 - DNA, 75 bp, synthetic construct
  source 1..75: mol_type = other DNA
ctggcgacagagtccggtgcaggaaaactctccatcacccgtgccacccgggccctgacgttcctgtcagagctg

SEQ ID NO: 862456 - DNA, 75 bp, synthetic construct
  source 1..75: mol_type = other DNA
tccttcaaaaatactattcacaggttaaaaatccgaatccggtgttcacaccccgtgaaggtgccggaacgctga

SEQ ID NO: 862457 - DNA, 75 bp, synthetic construct
  source 1..75: mol_type = other DNA
gaagcgtgcccgtgcgcgccgtgatgcggaccggacccgtcaggacattgtcaccctggtgaaacggcagctgac

SEQ ID NO: 862458 - DNA, 75 bp, synthetic construct
  source 1..75: mol_type = other DNA
ctccatcaccacgctggccattgagtgcggtctggcgacagagtctgaggccgggaagctctccatcacccgcgc

SEQ ID NO: 862459 - DNA, 75 bp, synthetic construct
  source 1..75: mol_type = other DNA
atgctaaccgtgagcgggaatgaacaggtaaccatagccaggaacattagcggcgtaattcttaagctgagtggc

SEQ ID NO: 862460 - DNA, 75 bp, synthetic construct
  source 1..75: mol_type = other DNA
gcggacagggaacgtcaggatattgtcaccctggtgaaacggcagctgacgcgtgaaatctcggaagggcgcttc

SEQ ID NO: 862461 - DNA, 75 bp, synthetic construct
  source 1..75: mol_type = other DNA
cggaatatgacccgcttatcgggtgctacattccgaccgacatcatgttcacaccggctctgtttgctgcccttg

SEQ ID NO: 862462 - DNA, 75 bp, synthetic construct
  source 1..75: mol_type = other DNA
tgatggaaaaggcggtgggcttcacctcccgttttgatttcgctattcatgtggcgcatgcccgttcgcgtggtc

SEQ ID NO: 862463 - DNA, 75 bp, synthetic construct
  source 1..75: mol_type = other DNA
cgcacgccgcagccgtgtggaatgggaaaacagacagcgcaaaagcaggggctggataccctgggtatggatgaa

SEQ ID NO: 862464 - DNA, 75 bp, synthetic construct
  source 1..75: mol_type = other DNA
actgatagcgaaagcctggcgttttgtgcgtgagcgtttccgcagttaccagacagagcttaagtcccgtggaat

SEQ ID NO: 862465 - DNA, 75 bp, synthetic construct
  source 1..75: mol_type = other DNA
gaaaacagacagcgcaaaaagcaggggctggataccctggctatggatgagctgatagcgaaagcctggcgtttt

SEQ ID NO: 862466 - DNA, 75 bp, synthetic construct
  source 1..75: mol_type = other DNA
caagcgtgcccgtgcgcgtcgcgatgcggacaggcagcgtcaggatatcgtcaccctggtgaaacggcagctgac

SEQ ID NO: 862467 - DNA, 75 bp, synthetic construct
  source 1..75: mol_type = other DNA
caggaaaactctccatcacccgtgccacccgggctctgacgttcctgtcagagctggggctgattagctaccaga

SEQ ID NO: 862468 - DNA, 75 bp, synthetic construct
  source 1..75: mol_type = other DNA
caggaaaactctccatcacccgtgccacccgtgcactgacgttcctgtcagagctggggctgattagctaccaga

SEQ ID NO: 862469 - DNA, 75 bp, synthetic construct
  source 1..75: mol_type = other DNA
tgtcattccgatggtgggatttgacgtcttttttcaaattttcagccacctgaaaaagctgcgtatgtcacggca

SEQ ID NO: 862470 - DNA, 75 bp, synthetic construct
  source 1..75: mol_type = other DNA
ggcaggatccgctgccgctgccgacctacaatccgaccgagcaggacattatcaatctgaaattcgctattgcgg

SEQ ID NO: 862471 - DNA, 75 bp, synthetic construct
  source 1..75: mol_type = other DNA
gaagcggtagacgcaccggaaattatcccggatccgttcgatccgtcgaagaaacgtaaaccgacgatgctggtg

SEQ ID NO: 862472 - DNA, 75 bp, synthetic construct
  source 1..75: mol_type = other DNA
gaatgggagaatcagcagcgtaagaagcagaacctgaagccgctggagatggacgagctgatagcgaaggcctgg

SEQ ID NO: 862473 - DNA, 75 bp, synthetic construct
  source 1..75: mol_type = other DNA
cacccgagccctgacgttccttgcagagctgggactgattacctaccagacggaatatgatccgcttatcgggtg

SEQ ID NO: 862474 - DNA, 75 bp, synthetic construct
  source 1..75: mol_type = other DNA
tcaaatatgagtgggtacagactcgtagtccggcaggtgccatccagtttgaagcagtcgatgcaccggaaatta

SEQ ID NO: 862475 - DNA, 75 bp, synthetic construct
  source 1..75: mol_type = other DNA
gatgtgaacgccgcagccgttcgtgctctgcctgttctggagaaaatccagaaagagtctggtaaagcctcgctg

SEQ ID NO: 862476 - DNA, 75 bp, synthetic construct
  source 1..75: mol_type = other DNA
aaattaaagagtgtgctggttttcctgaaactggtatcgagcgcggtactgtagaagttaaatccttctcttctc

SEQ ID NO: 862477 - DNA, 75 bp, synthetic construct
  source 1..75: mol_type = other DNA
actgatcttcaacaaacgtattaccgccaggtaaagaacccgaatccggtgtttacaccccgtgaaggtgccgga

SEQ ID NO: 862478 - DNA, 75 bp, synthetic construct
  source 1..75: mol_type = other DNA
tcataaagcctggatttatggttatttgtcaccttccaggctgaacaatacccacgcagtgaagcgtcgtatcac

SEQ ID NO: 862479 - DNA, 75 bp, synthetic construct
  source 1..75: mol_type = other DNA
tcaggatatcgtcaccctggtgaaacggcagctgactcgtgaaatctcggaagggcgcttcactgctaatggtga

SEQ ID NO: 862480 - DNA, 75 bp, synthetic construct
  source 1..75: mol_type = other DNA
cagccgtgtggaatgggaaaacctgcagcgaaaaaaacagcaactgaaaccgctggagatggacgaactgatcgc

SEQ ID NO: 862481 - DNA, 75 bp, synthetic construct
  source 1..75: mol_type = other DNA
atgtgtttccactacgatccgctggccaatcgcgtgcagcgctcgattaccaatatggccatcgaatgtggactg

SEQ ID NO: 862482 - DNA, 75 bp, synthetic construct
  source 1..75: mol_type = other DNA
cggaatatgacccgcttattggttgcaacattcctaccgatatcacgttcacaccggcgctgtttgccgctctcg

SEQ ID NO: 862483 - DNA, 75 bp, synthetic construct
  source 1..75: mol_type = other DNA
gtatcagccgtgaaatgcaggatgcctttgccgcgcggtcacacgcccgcgcctgggccgccacgcagtcgggcg

SEQ ID NO: 862484 - DNA, 75 bp, synthetic construct
  source 1..75: mol_type = other DNA
caattcgcaccccgatgagccgttcgaagggcggtgcttttcgtaacgtgcgtgcagaagatctctccgctcatt

SEQ ID NO: 862485 - DNA, 75 bp, synthetic construct
  source 1..75: mol_type = other DNA
gacccatcgattatgggttacggcccggttccggcctcgaagctggcgctgaaaaaagcggggctttctgccagc

SEQ ID NO: 862486 - DNA, 75 bp, synthetic construct
  source 1..75: mol_type = other DNA
cactgttgccgctgattagcggtgtggtactggtggcgctcatttcgccggtcatgctgggggggctggtattta

SEQ ID NO: 862487 - DNA, 75 bp, synthetic construct
  source 1..75: mol_type = other DNA
ctggcttttatctctggcatcactggccgcagatgatgcgcttaatggcgcagtcacccattactgcaatggcta

SEQ ID NO: 862488 - DNA, 75 bp, synthetic construct
  source 1..75: mol_type = other DNA
attccaatggtgggatttgacgtctttttccaaattttcagccaccttaaaaagctgcgcatgtcacggcaggat

SEQ ID NO: 862489 - DNA, 75 bp, synthetic construct
  source 1..75: mol_type = other DNA
catctttgataatgcgataactgactgttattcatggagtatcagcaaagacggttattttatctttggcggtgc

SEQ ID NO: 862490 - DNA, 75 bp, synthetic construct
  source 1..75: mol_type = other DNA
caacaagccttgtggcggtctgctggcaccggacgcgcagcgttcttttattcgcgatggactaacactccctgt

SEQ ID NO: 862491 - DNA, 75 bp, synthetic construct
  source 1..75: mol_type = other DNA
tatatcaatattaatcgccatgctttcgacttgtggatgaaatcgctgatccccgccagcgttgaggtttaccac

SEQ ID NO: 862492 - DNA, 75 bp, synthetic construct
  source 1..75: mol_type = other DNA
agcggcgggcatgatgggcttaacggcagaaatgctggcgcgtatgcacggtatcagccgtgaaatgcaggatgc

SEQ ID NO: 862493 - DNA, 75 bp, synthetic construct
  source 1..75: mol_type = other DNA
atggaacatttcgacgtggcgattattggcctcggcccggcagggtcggcattggcgcgaaagttagccggcaaa

SEQ ID NO: 862494 - DNA, 75 bp, synthetic construct
  source 1..75: mol_type = other DNA
aggattttgtctgcggtaaggacaacgcctttctgattggtgaagcggcgggatttatcagcgccagttcgctgg

SEQ ID NO: 862495 - DNA, 75 bp, synthetic construct
  source 1..75: mol_type = other DNA
cgcgcctggtgcgtggctggacccaccttgaaagacagaaaggcgggatcggtttgcgtggtccgggtgaaaccc

SEQ ID NO: 862496 - DNA, 75 bp, synthetic construct
  source 1..75: mol_type = other DNA
tttaacgaaatgcaaccgatcgtggaccgtcaggctgctaaaggtctgatcccaaaaacaaagctgcacgtcata

SEQ ID NO: 862497 - DNA, 75 bp, synthetic construct
  source 1..75: mol_type = other DNA
cgcaaccaataactcagcttattggtacaatctctcagatgaagttagtaaccaaattctgactgagtggaacaa

SEQ ID NO: 862498 - DNA, 75 bp, synthetic construct
  source 1..75: mol_type = other DNA
ggcataaatcgctgtttatcggctatgccgacccgaaagcgttatttgaagcgctaaaacaggcgggagggacgc

SEQ ID NO: 862499 - DNA, 75 bp, synthetic construct
  source 1..75: mol_type = other DNA
cgtctctaacggtgcaggtgtggggcttattgctgctgtattgctggggcaagggcaattacctgagtgggcgct

SEQ ID NO: 862500 - DNA, 75 bp, synthetic construct
  source 1..75: mol_type = other DNA
ggtgcgccggtgtttatctggttattgttaaaagcaggacgttagccgcaaaaagacggtctatgattaaaagct

SEQ ID NO: 862501 - DNA, 75 bp, synthetic construct
  source 1..75: mol_type = other DNA
ggctaccgttcgccacaggttcagaaaccgtaatggcagaatggggctggcgtgtgccgttttttattggcgtgt

SEQ ID NO: 862502 - DNA, 75 bp, synthetic construct
  source 1..75: mol_type = other DNA
ttgctggatagtttgacggctccggcgtggtatctggggggaggcacgttgctgtcgatgctggcgttgttgtac

SEQ ID NO: 862503 - DNA, 75 bp, synthetic construct
  source 1..75: mol_type = other DNA
tggcgtgagcttttttatgcgcccgctcggtgggattattgttggcgcctgggccgatcgcttcgggcgcaaacc

SEQ ID NO: 862504 - DNA, 75 bp, synthetic construct
  source 1..75: mol_type = other DNA
atgaaaaaggttctgtttgccttatctgcgcttgcgctgacctctacttccgtattcgcagctgatgcgggcgac

SEQ ID NO: 862505 - DNA, 75 bp, synthetic construct
  source 1..75: mol_type = other DNA
gacggttctctactttaccgccaactatgttgctactcagattcctgtttcgaccggttacggcaatgcgcaggt

SEQ ID NO: 862506 - DNA, 75 bp, synthetic construct
  source 1..75: mol_type = other DNA
ggctgccgttcgccacaggttcagaaaccgtaatggcggagtggggctggcgtgtaccgttttttattggtgtgc

SEQ ID NO: 862507 - DNA, 75 bp, synthetic construct
  source 1..75: mol_type = other DNA
acgaagaattcattcgtcagatgaaagaaatgctcaatcagcacaaagaacaggagaaagatgatgattctgact

SEQ ID NO: 862508 - DNA, 75 bp, synthetic construct
  source 1..75: mol_type = other DNA
actcgcgctggcggttgtgacggtcgcaggcatgctcgctgcaccttgggtgatcatggtgaccgcgccaggctt

SEQ ID NO: 862509 - DNA, 75 bp, synthetic construct
  source 1..75: mol_type = other DNA
tctcttatgtctcgggcctgctgacgctggcactggcggttgtgaccgttgccgggatgctcgccgcaccgtggg

SEQ ID NO: 862510 - DNA, 75 bp, synthetic construct
  source 1..75: mol_type = other DNA
caatatcagcatgattggctttgcgctgtttgccgcaccgtactttaatccaccggtgctggcgctggcgtgggc

SEQ ID NO: 862511 - DNA, 75 bp, synthetic construct
  source 1..75: mol_type = other DNA
cagcatgattggtttcgcgctgtttgccgcaccgtactttaacccaccggtgctggcgctggcgtgggctgttac

SEQ ID NO: 862512 - DNA, 75 bp, synthetic construct
  source 1..75: mol_type = other DNA
tagttgtcgcgggaattgcggcgtactttgccgcgctggcggtgctgggctttaaagtcaaagagtttgcccgtc

SEQ ID NO: 862513 - DNA, 75 bp, synthetic construct
  source 1..75: mol_type = other DNA
attctgaatacctggaaccgtttctcgattccggcatttgctccgacgttacttaacatcagcatgattggtttt

SEQ ID NO: 862514 - DNA, 75 bp, synthetic construct
  source 1..75: mol_type = other DNA
gatggaagccttctcaggccgatatcagagctgtgttgactgaactcggtgcttcgcaatctgctgaaaaaatgc

SEQ ID NO: 862515 - DNA, 75 bp, synthetic construct
  source 1..75: mol_type = other DNA
ctgccgcagcggaacagaaaattcccggtaactgttatccggtcgataaagttattcacatggataataacgaaa

SEQ ID NO: 862516 - DNA, 75 bp, synthetic construct
  source 1..75: mol_type = other DNA
acgaactggatgatgtcagcccgggcggttatcgctggactcaggcggtgctggtggtgctaatgaccttaccgc

SEQ ID NO: 862517 - DNA, 75 bp, synthetic construct
  source 1..75: mol_type = other DNA
tcccggctggggtgtctttaccaataaagaactgcagggtggtggcccgctgatcgacatcggcattcatatgct

SEQ ID NO: 862518 - DNA, 75 bp, synthetic construct
  source 1..75: mol_type = other DNA
tgggacccggcaacctacagcgtcgaagattcgctgtttggcaccattgaatttcataacggcggcattctgtgg

SEQ ID NO: 862519 - DNA, 75 bp, synthetic construct
  source 1..75: mol_type = other DNA
atctggaactggtggctgtctgtgacagccgcctttcccaggcgcaggcgttggcagagaaatacgggaacgcat

SEQ ID NO: 862520 - DNA, 75 bp, synthetic construct
  source 1..75: mol_type = other DNA
cgggcattgggcttcgcgctggtttatagcattggtgtggcaatttttggtggttttgcacaatatttcgccacg

SEQ ID NO: 862521 - DNA, 75 bp, synthetic construct
  source 1..75: mol_type = other DNA
cagttctgttcaaaatttgtttttgatatttataaagaagcgctatgtattccggtgggtgaaatagagacgttt

SEQ ID NO: 862522 - DNA, 75 bp, synthetic construct
  source 1..75: mol_type = other DNA
gctattacgtatattcgtatctatttcaatggaatgacaacgtgaatattaattaccctgctgaatatgaaattg

SEQ ID NO: 862523 - DNA, 75 bp, synthetic construct
  source 1..75: mol_type = other DNA
taccagacggaatatgacccgcttatcgggtgctacattccgaccgatatcacgttcacaccggcactgtttgct

SEQ ID NO: 862524 - DNA, 75 bp, synthetic construct
  source 1..75: mol_type = other DNA
ctgcaggggctgtgtttccactatgacccgctggccaaccgcgtccagtgttccatcaccacgctggccattgag

SEQ ID NO: 862525 - DNA, 75 bp, synthetic construct
  source 1..75: mol_type = other DNA
acccgctggccaaccgcgtgcagtgctccattaccacgctggccattgagtgcggactggcgacggagtctgagg

SEQ ID NO: 862526 - DNA, 75 bp, synthetic construct
  source 1..75: mol_type = other DNA
gcgaaatcgaccgtcgcgtgaaggaacgcatgataatgtcgcggaacaacaactacacacggctggccactgcct

SEQ ID NO: 862527 - DNA, 75 bp, synthetic construct
  source 1..75: mol_type = other DNA
ggcgcgggcctgcgtgccaccgggatcgacttcgacgtgcgtaaggcgcgtccttattctggctatgaaaacttc

SEQ ID NO: 862528 - DNA, 75 bp, synthetic construct
  source 1..75: mol_type = other DNA
ctctccatcacccgggccacccgggccctgacgttcctgtcagagctgggactgattacctaccagacggaatat

SEQ ID NO: 862529 - DNA, 75 bp, synthetic construct
  source 1..75: mol_type = other DNA
gagctggggttgattacctaccagacggaatatgacccacttattggctgcaacattccgaccgacatcacactc

SEQ ID NO: 862530 - DNA, 75 bp, synthetic construct
  source 1..75: mol_type = other DNA
aatgctgaaagtggaagaactgcgccagagtctgcgcattcttgagcagtgcctcaacaacatgccggaaggccc

SEQ ID NO: 862531 - DNA, 75 bp, synthetic construct
  source 1..75: mol_type = other DNA
gtgtttctgactgctacacccgcgtaatgctgaaagtggaagaactgcgccagagtctgcgcattcttgagcagt

SEQ ID NO: 862532 - DNA, 75 bp, synthetic construct
  source 1..75: mol_type = other DNA
atgatgccgcaaacctggaaaggtcacccgctgcgtaaagattacccggcgcgcgctaccgaattctcgccgttt

SEQ ID NO: 862533 - DNA, 75 bp, synthetic construct
  source 1..75: mol_type = other DNA
gtgcgtgagcgtttccgcagttaccagacagagcttaagtcccgtggaataaaacgtgcccgtgcgcgtcgtgat

SEQ ID NO: 862534 - DNA, 75 bp, synthetic construct
  source 1..75: mol_type = other DNA
catcaggtgtaatattcgttaccgcagggattataactgtaatagcagaaagcattggtgttattaaggtctcag

SEQ ID NO: 862535 - DNA, 75 bp, synthetic construct
  source 1..75: mol_type = other DNA
aatctacggagtgggattatcgacgctctatcggtattttccggtagatagtcagaggaaggatgaagcggtagg

SEQ ID NO: 862536 - DNA, 75 bp, synthetic construct
  source 1..75: mol_type = other DNA
cgaaacaagtctgatgaaagccagaatgacactaccgtaggctcgccacagtgtgagctgcatcttaaatcaggt

SEQ ID NO: 862537 - DNA, 75 bp, synthetic construct
  source 1..75: mol_type = other DNA
ggtgcgctgctggtggggatgttgtgcgattcggtcgggcgtaaaaagctgattttaatctcccgtgtgatggtg

SEQ ID NO: 862538 - DNA, 75 bp, synthetic construct
  source 1..75: mol_type = other DNA
gcggcgaagtatctggcaatgcctcaacactattctcatgcagcgatgttactggcgggggtaattacgtttgtg

SEQ ID NO: 862539 - DNA, 75 bp, synthetic construct
  source 1..75: mol_type = other DNA
acggacgtactaccgggcgttgtaaacgtgataaaggcgcatgggaaaatccgcctgttaacgtcgatgcgaaat

SEQ ID NO: 862540 - DNA, 75 bp, synthetic construct
  source 1..75: mol_type = other DNA
tattaatgtctttacctggacttatttctgctgcggaaataacaaagcagatagaactcacgctaaaagttaatg

SEQ ID NO: 862541 - DNA, 75 bp, synthetic construct
  source 1..75: mol_type = other DNA
atgacacaacaggactggcatcccgctgatattatcgccgcactgaaaaagcggggaacgtcactggcggcacgg

SEQ ID NO: 862542 - DNA, 75 bp, synthetic construct
  source 1..75: mol_type = other DNA
atatttccgaagaggcggtggcctccgcacgccgcagtcgcgtggaatgggaaaacaggcagcgcaaaaagcagg

SEQ ID NO: 862543 - DNA, 75 bp, synthetic construct
  source 1..75: mol_type = other DNA
cccgtggaataaaacgtgcccgtgcgcgtcgtgatgcgaacagggaacgtcaggatatcgtcaccctggtgaaac

SEQ ID NO: 862544 - DNA, 75 bp, synthetic construct
  source 1..75: mol_type = other DNA
gttaccagacagagcttaagtcccacggcatgaaacgtgcccgtgcgcgccgcgatgcaggcagaacccgccagg

SEQ ID NO: 862545 - DNA, 75 bp, synthetic construct
  source 1..75: mol_type = other DNA
attcagatacctaaagaaaaaattgaatattattcaactttggttcttgatgcgtgtcaagaactatcggaaaaa

SEQ ID NO: 862546 - DNA, 75 bp, synthetic construct
  source 1..75: mol_type = other DNA
gccttgcgtaacctacatcggtgctgacggtgcgggtcattacgtgaaaatggtccacaacggtatcgaatacgg

SEQ ID NO: 862547 - DNA, 75 bp, synthetic construct
  source 1..75: mol_type = other DNA
ccagagctccctggatctcggtgagccgctgtccctgatcaccgagtccgtattcgcgcgctatatctcctcttt

SEQ ID NO: 862548 - DNA, 75 bp, synthetic construct
  source 1..75: mol_type = other DNA
taaaggcgatatcatcattgatggtggtaataccttcttccaggataccattcgtcgtaaccgcgagctttctgc

SEQ ID NO: 862549 - DNA, 75 bp, synthetic construct
  source 1..75: mol_type = other DNA
tgcttctgatgaatacaactgggatctgaactacggagagatcgccaagattttccgcgcgggctgcatcattcg

SEQ ID NO: 862550 - DNA, 75 bp, synthetic construct
  source 1..75: mol_type = other DNA
tcggtatggcagtgatggggcggaaccttgcgctgaacatcgaaaggcgtggttataccgtatccgttttcaacc

SEQ ID NO: 862551 - DNA, 75 bp, synthetic construct
  source 1..75: mol_type = other DNA
gatgtgatcctcgacgaagcggcgaacaaaggcaccggtaaatggactagccagagctctctggacctgggcgaa

SEQ ID NO: 862552 - DNA, 75 bp, synthetic construct
  source 1..75: mol_type = other DNA
attccaatggtgggatttgacgtctttttccaaatcttcagccacctgaaaaagctgcgaatgtcacggcaggat

SEQ ID NO: 862553 - DNA, 75 bp, synthetic construct
  source 1..75: mol_type = other DNA
caaaagcggttaaagctgcatacgatctagcagccggaaaggcaccatccaatcatatacatccctggaatcaga

SEQ ID NO: 862554 - DNA, 75 bp, synthetic construct
  source 1..75: mol_type = other DNA
ttttctttacctgtagccatcactacccaaaatcaccacaagaatattctctttcgtttataaaacaattaccag

SEQ ID NO: 862555 - DNA, 75 bp, synthetic construct
  source 1..75: mol_type = other DNA
gtcaaatcctgaccgataacggtgcgccgactaccgatttgcgtatggtgcttggtggcgaagcgatggcatcca

SEQ ID NO: 862556 - DNA, 75 bp, synthetic construct
  source 1..75: mol_type = other DNA
gtcaaatcctgaccgataacggtgcaccgactaccgatttgcgtatggtgctgggtggtgaagcgatggcatcca

SEQ ID NO: 862557 - DNA, 75 bp, synthetic construct
  source 1..75: mol_type = other DNA
tgccggatgcggcgtgaacgccttatccggcctacaaattcttccaaattcaatatattgcagaaattatgtaga

SEQ ID NO: 862558 - DNA, 75 bp, synthetic construct
  source 1..75: mol_type = other DNA
ggtaacactttcttccaggacaccattcgtcgtaaccgtgagctttctgctgaaggttttaacttcattggtacg

SEQ ID NO: 862559 - DNA, 75 bp, synthetic construct
  source 1..75: mol_type = other DNA
ctgctcccttattacacagtgcaagagtttgttgaatccctcgaaacaccacgtcgtatccttttgatggtaaag

SEQ ID NO: 862560 - DNA, 75 bp, synthetic construct
  source 1..75: mol_type = other DNA
cgtgattactttggtgcgcacacctataagcgtactgataaagaaggtgtattccataccgagtggttggaataa

SEQ ID NO: 862561 - DNA, 75 bp, synthetic construct
  source 1..75: mol_type = other DNA
cagcaggcgctgcgtgatgtagtggcgtatgccgtacagaatggtattccggtaccgactttctctgctgcaatt

SEQ ID NO: 862562 - DNA, 75 bp, synthetic construct
  source 1..75: mol_type = other DNA
tgcgcggaaaacagtctgtattgtttaaagtgaatgaatccggcactgaacagctactgcgtgagggcgtgttgg

SEQ ID NO: 862563 - DNA, 75 bp, synthetic construct
  source 1..75: mol_type = other DNA
gatctttctgatgcggctctggctcgtcagattctggaggataacggggcaccgacaaccgatttacagatggta

SEQ ID NO: 862564 - DNA, 75 bp, synthetic construct
  source 1..75: mol_type = other DNA
aaaaggtgacatcatcattgatggcggtaatactttcttccaagatactattcgccgtaaccgggaactatctgc

SEQ ID NO: 862565 - DNA, 75 bp, synthetic construct
  source 1..75: mol_type = other DNA
acaaaggtaccggaaagtggaccagtcagagctcactggatctcggcgagcctctgtctctgatcactgagtccg

SEQ ID NO: 862566 - DNA, 75 bp, synthetic construct
  source 1..75: mol_type = other DNA
tattcgcgcgttatatctcttctttgaaagatcagcgtgttgcagcctctaaagtgctttccggcccgaaagcgg

SEQ ID NO: 862567 - DNA, 75 bp, synthetic construct
  source 1..75: mol_type = other DNA
ctcttaaagggccttccatcatgcctggtgggcagaaagacgcctatgagttagttgctccgattctgaagcaga

SEQ ID NO: 862568 - DNA, 75 bp, synthetic construct
  source 1..75: mol_type = other DNA
cgtgactattttggtgcgcatacttataagcgtattgataaagaaggtgtgttccatactgaatggctggattaa

SEQ ID NO: 862569 - DNA, 75 bp, synthetic construct
  source 1..75: mol_type = other DNA
ggatgaagaaggtaaatacctcgttgatgttattcttgatgaagctgcaaacaaaggtaccggcaagtggaccag

SEQ ID NO: 862570 - DNA, 75 bp, synthetic construct
  source 1..75: mol_type = other DNA
tatttgctcgctatatttcttcgcttaaagaccagcgtgtagccgcgtcgaaagtgctgagtggtccgcaggccc

SEQ ID NO: 862571 - DNA, 75 bp, synthetic construct
  source 1..75: mol_type = other DNA
tttttattgtaatgtttgtcacaccaattgcattaatattatttgtatttgattatggttacaaaaaatcaccac

SEQ ID NO: 862572 - DNA, 75 bp, synthetic construct
  source 1..75: mol_type = other DNA
catccgcacaatgagaatgctggcagcgatccgcatcgcgattgcagtgatgaaactggcgaagtcgcagatccc

SEQ ID NO: 862573 - DNA, 75 bp, synthetic construct
  source 1..75: mol_type = other DNA
caggagaatgcccaggaaaccgaagaactgacgggagggcaggaagaaaacacactggcaggcgctcacggggat

SEQ ID NO: 862574 - DNA, 75 bp, synthetic construct
  source 1..75: mol_type = other DNA
aacgaccagaaagcggaacaaaacagccaaaatgcgttacaaaacgagccagaaacgaaacagcctgagccagta

SEQ ID NO: 862575 - DNA, 75 bp, synthetic construct
  source 1..75: mol_type = other DNA
caaatcttcgtgagtcatgggatattattggatttgatcctcgaggcgtcggacagtccactccgacaataaact

SEQ ID NO: 862576 - DNA, 75 bp, synthetic construct
  source 1..75: mol_type = other DNA
cagtgttctctatcacgaaaaaacatcagccctatgaatttaagaatttcatttcagcctggctggataccgaac

SEQ ID NO: 862577 - DNA, 75 bp, synthetic construct
  source 1..75: mol_type = other DNA
ttgctcgggctgaagaactaccggctgttactgcccctggctgtttcccacaaaaccagcctgctcgacccgctg

SEQ ID NO: 862578 - DNA, 75 bp, synthetic construct
  source 1..75: mol_type = other DNA
gtgttcagcgaacgccaggtcgatgtactgggcgaatgggcaggcgatgctgactgcaccgttatcgcctacgcc

SEQ ID NO: 862579 - DNA, 75 bp, synthetic construct
  source 1..75: mol_type = other DNA
acgagccgtttgaaacgccgctgggaactaacccgctgcatccaaacgttatctcgaacccggctgcacgtatct

SEQ ID NO: 862580 - DNA, 75 bp, synthetic construct
  source 1..75: mol_type = other DNA
acgagccgtttgaaacgccgctgggaactaacccgctgcatccaaacgttatctcgaatccggcggcgcgtatct

SEQ ID NO: 862581 - DNA, 75 bp, synthetic construct
  source 1..75: mol_type = other DNA
aagcaatgggacaggatacaactgaatatcgccaggacacacaatcgctggatactcaggcacagataaatccgg

SEQ ID NO: 862582 - DNA, 75 bp, synthetic construct
  source 1..75: mol_type = other DNA
aacacggcagcgaaaaaccggtaacgcacgtttcacgcgacggactccaggcattacacattgctcgggctgaag

SEQ ID NO: 862583 - DNA, 75 bp, synthetic construct
  source 1..75: mol_type = other DNA
atggagatacaggaacgtatagtatccattctcgataaattcgacaccctgacaaactccatcactgaaggtctt

SEQ ID NO: 862584 - DNA, 75 bp, synthetic construct
  source 1..75: mol_type = other DNA
gtgcggtcggtaactacaacgcccacatcgccgcttacccggaagttgactggcatcagttcagcgaagagttcg

SEQ ID NO: 862585 - DNA, 75 bp, synthetic construct
  source 1..75: mol_type = other DNA
aatatggtttaaaaaaattctaatagctttaaatagctacctaaaagtttcagatctattatctattgctgcagc

SEQ ID NO: 862586 - DNA, 75 bp, synthetic construct
  source 1..75: mol_type = other DNA
attattacttctgccggtacaggtgcgggtatggactgctgtctgtatctggtcagggagttgtacgggagcaat

SEQ ID NO: 862587 - DNA, 75 bp, synthetic construct
  source 1..75: mol_type = other DNA
ttgctctcctgttaactatgctatattaagtaaatgtatatccaaagatgatttcgaaaccctcacaaagctgat

SEQ ID NO: 862588 - DNA, 75 bp, synthetic construct
  source 1..75: mol_type = other DNA
acagctcctaacttctctcacaaatattcccgtaaactggttggtcgtggctctgttcctgatatcgacttgact

SEQ ID NO: 862589 - DNA, 75 bp, synthetic construct
  source 1..75: mol_type = other DNA
tggggttatatcgcccttaaccacttcaaacagaaaaccatcgccggtgagattggttcttccaccatgccgcat

SEQ ID NO: 862590 - DNA, 75 bp, synthetic construct
  source 1..75: mol_type = other DNA
ctggcgttgccagaagaagagaaagcccgcctgaaagcgatgacgccggctaactatattggtcgagctatcacc

SEQ ID NO: 862591 - DNA, 75 bp, synthetic construct
  source 1..75: mol_type = other DNA
tcacctcgctgggtattcagtggaacccgtacaccacccagatcgaaccgcacgactacattgccgaattgtttg

SEQ ID NO: 862592 - DNA, 75 bp, synthetic construct
  source 1..75: mol_type = other DNA
gccaaagtatcccccgaacacttcgaaataatcaggaatattgaccctgaatcacgacaattacttgttgttaaa

SEQ ID NO: 862593 - DNA, 75 bp, synthetic construct
  source 1..75: mol_type = other DNA
actccgtgagactgaaaagcaggtgttaaccatgcgtgaaaatctcagggccagactgactcagaaagggatcac

SEQ ID NO: 862594 - DNA, 75 bp, synthetic construct
  source 1..75: mol_type = other DNA
gaaaaagaagttctggcaatgcgtgagagtcttcgcgctcgttttgatgataaagctaccctgcaggaggcttaa

SEQ ID NO: 862595 - DNA, 75 bp, synthetic construct
  source 1..75: mol_type = other DNA
tcatgcgcgtggtcgatatcatgctggcgctgccaagtctactgctggcactggtgctggtggcgattttcggcc

SEQ ID NO: 862596 - DNA, 75 bp, synthetic construct
  source 1..75: mol_type = other DNA
atcctgctgacggtgctggcatttaacctgatgggtgacggtctgcgtgacgcgctcgatcccaaactgaagcag

SEQ ID NO: 862597 - DNA, 75 bp, synthetic construct
  source 1..75: mol_type = other DNA
atgctctccgacgtgttgcagttcgcgcaaagcgcctggtgggtcgtgaccttcccgggtctggcgatcctgctg

SEQ ID NO: 862598 - DNA, 75 bp, synthetic construct
  source 1..75: mol_type = other DNA
cagttctgtctgccctgaaagacaatatttctgagagggtgagctggtttgacggtcgcccggtttttattgatg

SEQ ID NO: 862599 - DNA, 75 bp, synthetic construct
  source 1..75: mol_type = other DNA
tggggcaccatgctctccgacgtgttgcagttcgcgcaaagcgcttggtgggtcgtgaccttccctggtctggcg

SEQ ID NO: 862600 - DNA, 75 bp, synthetic construct
  source 1..75: mol_type = other DNA
tggggcaccatgctctccgacgtgttgcagtttgcgcaaagcgcctggtgggtcgtgaccttccctggtctggcg

SEQ ID NO: 862601 - DNA, 75 bp, synthetic construct
  source 1..75: mol_type = other DNA
attaaaaccccttttgatttgttaaaacaccttgcggtctggcaactgcaagtgtcaaacaagaaatcaaaaggg

SEQ ID NO: 862602 - DNA, 75 bp, synthetic construct
  source 1..75: mol_type = other DNA
ttgtcgatgaattcgcctggatactggaagataccgccgactttatcgccggacgcgccgttgccgcgatgaccc

SEQ ID NO: 862603 - DNA, 75 bp, synthetic construct
  source 1..75: mol_type = other DNA
ggaagataccgctgactttatcgccggacgcgccatcgcagcgatgtcccgctaccgccaacagctattgccgcc

SEQ ID NO: 862604 - DNA, 75 bp, synthetic construct
  source 1..75: mol_type = other DNA
tggggcaccatgctctccgacgtgttgcagttcgcgcaaagcgcctggtgggtcgtgaccttccccggtctggcg

SEQ ID NO: 862605 - DNA, 75 bp, synthetic construct
  source 1..75: mol_type = other DNA
atgattctgaaaacgggtggcaatggctgcccgtttttattgtgcacagaaaacccccagctaggctgggggttc

SEQ ID NO: 862606 - DNA, 75 bp, synthetic construct
  source 1..75: mol_type = other DNA
atgaaacaccgggaaatacgggcggcagttctgtctgccctgaaggcaaatattactgagcaggtgacctggttt

SEQ ID NO: 862607 - DNA, 75 bp, synthetic construct
  source 1..75: mol_type = other DNA
gcctgatgcgcattattccgcattctcttgcagcagcgatgctggccgggattttattacgctttggtttacagg

SEQ ID NO: 862608 - DNA, 75 bp, synthetic construct
  source 1..75: mol_type = other DNA
tgtctttaaacccgttctccccacttatattacccctgatttttcgtttgctcacagcctgagcgttgcactccc

SEQ ID NO: 862609 - DNA, 75 bp, synthetic construct
  source 1..75: mol_type = other DNA
tggcaaccaaggccgttgcgccgcgctatgcggtaattgccgcgatgattattgggatcgtgatcgttatcgcgc

SEQ ID NO: 862610 - DNA, 75 bp, synthetic construct
  source 1..75: mol_type = other DNA
agattatcagttgtaatttgtgtcttgacccggcatgtcagcggcaaaaaggtgagccccgctcactttgcctgc

SEQ ID NO: 862611 - DNA, 75 bp, synthetic construct
  source 1..75: mol_type = other DNA
acaccagcaacaaccgtcacctcagagattatcagttgtaatttgtgtcttgacccggcatgtcagcggcaaaaa

SEQ ID NO: 862612 - DNA, 75 bp, synthetic construct
  source 1..75: mol_type = other DNA
tctgcgttttggggattaattgccggaggcgtttgttacgtggtgttgaatttaatcgctgacagaaaccgataa

SEQ ID NO: 862613 - DNA, 75 bp, synthetic construct
  source 1..75: mol_type = other DNA
ggttcccggcctcagtgcgttactgctgaagatgaatcttcaggggtatgactaccgccgggatgatgagtttat

SEQ ID NO: 862614 - DNA, 75 bp, synthetic construct
  source 1..75: mol_type = other DNA
aggcgctggcagcaagctttgccgatactgatgtttatttcataacaaaagtaggtacagatcactttagtgatt

SEQ ID NO: 862615 - DNA, 75 bp, synthetic construct
  source 1..75: mol_type = other DNA
ggctcagtgcattactgctgaagatgaatcttcaggggtatgactaccgccgggatgatgagtttatgatgtggg

SEQ ID NO: 862616 - DNA, 75 bp, synthetic construct
  source 1..75: mol_type = other DNA
aatctctggctggatgacggcgctggggctggcaatgggcgtcagtacgctggctctgacattatggtatcgcgt

SEQ ID NO: 862617 - DNA, 75 bp, synthetic construct
  source 1..75: mol_type = other DNA
ttactggtggtttggtaagtctgttctatcacgctgataccactaacaccgatcttgctgatgaagcatacgaag

SEQ ID NO: 862618 - DNA, 75 bp, synthetic construct
  source 1..75: mol_type = other DNA
gtgaaacacagagaaattcgggcggcaatattgtctgccctgaagggaaatatcgctgaccgggtgacctggttt

SEQ ID NO: 862619 - DNA, 75 bp, synthetic construct
  source 1..75: mol_type = other DNA
cgtggtgaccaactgcacctacgacggcgtgtgttataacgccaaagacgcgcaggatctgctggaaaaaacctc

SEQ ID NO: 862620 - DNA, 75 bp, synthetic construct
  source 1..75: mol_type = other DNA
ggcggcgtgctgccggaaatgtctgcggcgattgccggacaggccagcgaggccgctgatgatggcggaatgacg

SEQ ID NO: 862621 - DNA, 75 bp, synthetic construct
  source 1..75: mol_type = other DNA
agaaaccggagatgatcgtcgtttctgaatgctactggaccgcagctgctaaacacgcagatatcgtattaccga

SEQ ID NO: 862622 - DNA, 75 bp, synthetic construct
  source 1..75: mol_type = other DNA
ttttaggttcgattccgtgggagcgtaaaaccgtcacgccagccagtttgtggcatcatccggggttgacgttaa

SEQ ID NO: 862623 - DNA, 75 bp, synthetic construct
  source 1..75: mol_type = other DNA
gagcagtaccgatgagcaagggctggaatacttccatcagctgaaaaaatctggcaaaccagtgattgccattga

SEQ ID NO: 862624 - DNA, 75 bp, synthetic construct
  source 1..75: mol_type = other DNA
gcgctgatgttaggcatcgcgcatacactgatgacacaaggtaagcacgataaagccttccttgagaaatacacc

SEQ ID NO: 862625 - DNA, 75 bp, synthetic construct
  source 1..75: mol_type = other DNA
cctgtgccggtaactctgcgctggtgtatatcgaaaaatatacgggcaatgcgccgaagttaacggcgtttgatc

SEQ ID NO: 862626 - DNA, 75 bp, synthetic construct
  source 1..75: mol_type = other DNA
cgttgaacgcttccggttcgatggtgactgaccagaacccaaacagcccgtttttccaggaagccaataaaaagc

SEQ ID NO: 862627 - DNA, 75 bp, synthetic construct
  source 1..75: mol_type = other DNA
ttccaggaggtgtgggagcgcatgaaggtgaacgagaagattaaaaatctgttttttctctctcgttgctacggt

SEQ ID NO: 862628 - DNA, 75 bp, synthetic construct
  source 1..75: mol_type = other DNA
ggtgtacgccagcagattgaacctgtgatggattatttcgaacgcctggtgcagtacatcgcctggaacgaggaa

SEQ ID NO: 862629 - DNA, 75 bp, synthetic construct
  source 1..75: mol_type = other DNA
ctaaatccatggctcagcttacgaaacaggggcatgtttatatcatttcgaatattggttcgtttggtgaggatg

SEQ ID NO: 862630 - DNA, 75 bp, synthetic construct
  source 1..75: mol_type = other DNA
gaagactctgctggctggtgtaacgattaataactggcaaagcaaatatgaccagcttcgtaaggaaagagaggc

SEQ ID NO: 862631 - DNA, 75 bp, synthetic construct
  source 1..75: mol_type = other DNA
aggcagagcttaagcgtcagatgcgtgaagaaaaagagcgtcaggatgaacttgaccggcgccagcgggaagcgg

SEQ ID NO: 862632 - DNA, 75 bp, synthetic construct
  source 1..75: mol_type = other DNA
gtaccgccgacgagaagcagttgcagcttctgaccgcacatccggcacaccgtttacacagtcagcttaactatg

SEQ ID NO: 862633 - DNA, 75 bp, synthetic construct
  source 1..75: mol_type = other DNA
gtcaggcgatggcgcggctgtataaagagttcaccgctgacggtagctggttcttcaaaccgtggaacaaagaag

SEQ ID NO: 862634 - DNA, 75 bp, synthetic construct
  source 1..75: mol_type = other DNA
tatgggcgtaacccgtgggaaatgggggactctggttaacaccctttgctccttcaaacgccactatgacgccaa

SEQ ID NO: 862635 - DNA, 75 bp, synthetic construct
  source 1..75: mol_type = other DNA
ctgacgaagtactgcgggctaaaaaaagtgagttcaatcttaagcgtggagtttggaatcaaggcaagagaaaca

SEQ ID NO: 862636 - DNA, 75 bp, synthetic construct
  source 1..75: mol_type = other DNA
atgatgaaagtattaattgttgaaagcgagtttctacatcaggacacctgggtcggtagcgccgttgagcgtctg

SEQ ID NO: 862637 - DNA, 75 bp, synthetic construct
  source 1..75: mol_type = other DNA
gcgagtttctgcatcaggacacctgggtcggtagcgccgtagagcgtctggcggatgccttaagacagcaaaatg

SEQ ID NO: 862638 - DNA, 75 bp, synthetic construct
  source 1..75: mol_type = other DNA
tccttcaaacgccactatgacgccaacacaccgctggcgcaggtgatgccggaacttgttgaacaatatcctgac

SEQ ID NO: 862639 - DNA, 75 bp, synthetic construct
  source 1..75: mol_type = other DNA
ctctttgcttattaattttattgtcgataatggtagccaatcagagaaggtctatgttcaggaaaaaaagaagta

SEQ ID NO: 862640 - DNA, 75 bp, synthetic construct
  source 1..75: mol_type = other DNA
cggcgattgccggacaggccagcgaggccgctgatgatggcggaatgacggcgatccctgtcgcccgtattgtcg

SEQ ID NO: 862641 - DNA, 75 bp, synthetic construct
  source 1..75: mol_type = other DNA
cgaaggtaaagatgaaatggcgtggctgaaatttttctatgatgccgctcagaaaggtgcccgtgcgcaacgcgt

SEQ ID NO: 862642 - DNA, 75 bp, synthetic construct
  source 1..75: mol_type = other DNA
gttaccattaagcccgctaatgcgcaaatgtgttgaggagctgatcaaatacggaaaaggcagccagtggcttgt

SEQ ID NO: 862643 - DNA, 75 bp, synthetic construct
  source 1..75: mol_type = other DNA
cgcttaacagagtagccggtggcgcgaagcccacgccgcgcgagcgcaaactgaccgacgcagaggtctgggtct

SEQ ID NO: 862644 - DNA, 75 bp, synthetic construct
  source 1..75: mol_type = other DNA
atctgggatcatccagaaacacgttttgaagagttctggtcagcggagcatctggcttcggcgctggaatctgca

SEQ ID NO: 862645 - DNA, 75 bp, synthetic construct
  source 1..75: mol_type = other DNA
gtaaatttaccgcctttgatgcgctgatgacccagcgggcgttaattgcctactcggtgggtttgattggcctga

SEQ ID NO: 862646 - DNA, 75 bp, synthetic construct
  source 1..75: mol_type = other DNA
cagcctatgacgccgttcatgatgtccggagagaactctggaaagccctgcttggatggatgccggatccgcagg

SEQ ID NO: 862647 - DNA, 75 bp, synthetic construct
  source 1..75: mol_type = other DNA
tgctggcactgattcgccagaaacacccgaatattcccattggccttctgatgtatgccaacctggtgtttaaca

SEQ ID NO: 862648 - DNA, 75 bp, synthetic construct
  source 1..75: mol_type = other DNA
ggcattcccttctctgacccgctggccgatggtccaaccattcaaaacgccacattgcgtgcttttgcggcgggt

SEQ ID NO: 862649 - DNA, 75 bp, synthetic construct
  source 1..75: mol_type = other DNA
ttttgacggcacttccaaaatacaaaagccataaaacagttcgcgcctcaaaaatcaaagatatcgaaattatcg

SEQ ID NO: 862650 - DNA, 75 bp, synthetic construct
  source 1..75: mol_type = other DNA
ttccggtggtgtactccgatgatatcgtgctgcaacgcatgagttgtatgaattgtagcgacggagacgtggtgg

SEQ ID NO: 862651 - DNA, 75 bp, synthetic construct
  source 1..75: mol_type = other DNA
tgatgtggattacatcgatcctggtactggcccggatggtgacattgagcaccatctggaaatgcgtttccctca

SEQ ID NO: 862652 - DNA, 75 bp, synthetic construct
  source 1..75: mol_type = other DNA
cactgcgtgcccgctgcccgtattttgaaaaccgggttgcaggcgcggcccagttcaaaaatctgccggaggtcg

SEQ ID NO: 862653 - DNA, 75 bp, synthetic construct
  source 1..75: mol_type = other DNA
ttttattctcttttaaaatatattccacgggcgtcattagtgcgagcgccttgtggggtcttttgctgttataca

SEQ ID NO: 862654 - DNA, 75 bp, synthetic construct
  source 1..75: mol_type = other DNA
atggaagtgaagcgagaggaaaagattgcccgggaaacgcagttaaacaacacctatcaaagatattgcccttga

SEQ ID NO: 862655 - DNA, 75 bp, synthetic construct
  source 1..75: mol_type = other DNA
gcaacatattaatcagccagagaaaatgctggcagagctgaaaacgtttgttcgcccgatgaaagacgccacgcg

SEQ ID NO: 862656 - DNA, 75 bp, synthetic construct
  source 1..75: mol_type = other DNA
tgaaaattatcgatacgctaattgaagccggtgctgacgcgctggagttaggtatccccttctccgacccactgg

SEQ ID NO: 862657 - DNA, 75 bp, synthetic construct
  source 1..75: mol_type = other DNA
atgaaactgacgcctgttattgctgcactgcgtgcccgctgcccgtattttgaaaaccgggtggcaggcgcggcc

SEQ ID NO: 862658 - DNA, 75 bp, synthetic construct
  source 1..75: mol_type = other DNA
tggctatatcacattaatggacccccaaggcgtaacggttcgtgttgatgcagcgtttttgcaaaaacaccgacc

SEQ ID NO: 862659 - DNA, 75 bp, synthetic construct
  source 1..75: mol_type = other DNA
atggtggggcgtacaggggcatcgcaagatgcgccggtaagggtagccgccggtaacgccaactctgtacgtctc

SEQ ID NO: 862660 - DNA, 75 bp, synthetic construct
  source 1..75: mol_type = other DNA
cgggacgttacactgttcaggcaccttataaagcgggtgccgggattggcgtcctggagaaggctaccgcgtaca

SEQ ID NO: 862661 - DNA, 75 bp, synthetic construct
  source 1..75: mol_type = other DNA
aaccagcgtttccctgacaaagaaaacaagccgggcgaagtgattctggaagtgcgtaacctgacgtcgctgcgc

SEQ ID NO: 862662 - DNA, 75 bp, synthetic construct
  source 1..75: mol_type = other DNA
gtacgaccgtgttggtgatgctgtttttggggccgcacttgttgactccagacttaatggttctgacaaggaggc

SEQ ID NO: 862663 - DNA, 75 bp, synthetic construct
  source 1..75: mol_type = other DNA
agcttgtatgactatattaatgatgcttcggcgctggcctgcctcataaatttgtcgctgaatccttcagaggta

SEQ ID NO: 862664 - DNA, 75 bp, synthetic construct
  source 1..75: mol_type = other DNA
tcccacctgtcggtaatccacaaggtctggctgcagcagctttatcccatgttggcaaaagccgaatccccgctg

SEQ ID NO: 862665 - DNA, 75 bp, synthetic construct
  source 1..75: mol_type = other DNA
atgatccggaatattttcaaactgtttaccaatcgccaccagcatattgattctgcaattccgggacgttacact

SEQ ID NO: 862666 - DNA, 75 bp, synthetic construct
  source 1..75: mol_type = other DNA
atgacgatgttctgaaaaagatccgcattttggattgttctccagagttttgtgcccgcaattttgcggagacat

SEQ ID NO: 862667 - DNA, 75 bp, synthetic construct
  source 1..75: mol_type = other DNA
cgcctccgaaaatggggtatcgctcagcattgaaggtcacaatggggtgacattcattacagccagggacgtaac

SEQ ID NO: 862668 - DNA, 75 bp, synthetic construct
  source 1..75: mol_type = other DNA
cagtggatcgctaccgaaccgctggcagggctaacgatggacaagatcatcgccatgatggttgggcgttctctt

SEQ ID NO: 862669 - DNA, 75 bp, synthetic construct
  source 1..75: mol_type = other DNA
cagccgtcgattcgcgatgtctcgtttgatctgcataaaggggagatcctcggtattgccgggctggtgggggcg

SEQ ID NO: 862670 - DNA, 75 bp, synthetic construct
  source 1..75: mol_type = other DNA
tattacaacgttcggtgatggataacatgtggctggggcgatatcccaccaaaggcatgtttgtcgatcaggaca

SEQ ID NO: 862671 - DNA, 75 bp, synthetic construct
  source 1..75: mol_type = other DNA
aaaccgcaaagccaaaagaaaaaacctacaaaatggccgatggcggcggtttgtatcttgaggtttcggccaagg

SEQ ID NO: 862672 - DNA, 75 bp, synthetic construct
  source 1..75: mol_type = other DNA
atggaaaaaatatttcaaggtgattttttttgtatattttgtatatatagtttaaccattttttttcatgttgtg

SEQ ID NO: 862673 - DNA, 75 bp, synthetic construct
  source 1..75: mol_type = other DNA
aaccatttttttccatgttgtgaggctgttgataaatatcatgtacgaggttcttaccttactgcaacccataac

SEQ ID NO: 862674 - DNA, 75 bp, synthetic construct
  source 1..75: mol_type = other DNA
caactatgcagccagcgagatagaggaaggattctgggacgatgaagatgatgagaagcacatcaagacgtacac

SEQ ID NO: 862675 - DNA, 75 bp, synthetic construct
  source 1..75: mol_type = other DNA
ctccgtgacatccggagatgccggtgcgtatacctgtgaggtttctgattcagcaagcccgattaataaggtgac

SEQ ID NO: 862676 - DNA, 75 bp, synthetic construct
  source 1..75: mol_type = other DNA
tggcggttgaggctgcgggtggtgtgccgccttattcttatgcctggaaaaaaggtggttctcctgtttccggac

SEQ ID NO: 862677 - DNA, 75 bp, synthetic construct
  source 1..75: mol_type = other DNA
cgttttctctccgaaatggaaaatgagctcgataataataagaaaagggaaattatacgtgaatatgtgaacaac

SEQ ID NO: 862678 - DNA, 75 bp, synthetic construct
  source 1..75: mol_type = other DNA
cggggattcagccatcgcactggcgctggcgtatttcgccagccgtgaaattaacaaagggccggtgaaggcaag

SEQ ID NO: 862679 - DNA, 75 bp, synthetic construct
  source 1..75: mol_type = other DNA
ccgggccgggcgtcaggggggcagcgtacatcgcattacttttcaggaggctgtgtcccaagggctgttccaccg

SEQ ID NO: 862680 - DNA, 75 bp, synthetic construct
  source 1..75: mol_type = other DNA
cgccatgcagcgctacggctccagccgggttcagcaggtgatgccaaccgaaggctggtaccgggagcatatgcc

SEQ ID NO: 862681 - DNA, 75 bp, synthetic construct
  source 1..75: mol_type = other DNA
tctgataacgtcctgaccgccgcctcatccgccgccgctggtggtatgaacgtctattacatcgcctacaaccag

SEQ ID NO: 862682 - DNA, 75 bp, synthetic construct
  source 1..75: mol_type = other DNA
aactgaataaaggcccggtgacggtgaactcccgccgccgtcgccagtccgcccgattactggagaactataact

SEQ ID NO: 862683 - DNA, 75 bp, synthetic construct
  source 1..75: mol_type = other DNA
aacagcaggagcaaatcgcctggtacctgatggatggcctgccaaacctgatgggcgcggcgcttgatgcacgtg

SEQ ID NO: 862684 - DNA, 75 bp, synthetic construct
  source 1..75: mol_type = other DNA
tgacgacagagccgctgaaagtgaaggtcgatttaaacagcacgctgcaggtttctgccggagcgaaactcgaaa

SEQ ID NO: 862685 - DNA, 75 bp, synthetic construct
  source 1..75: mol_type = other DNA
aatcgatcgattctgcattaaaaactatacaaggtggtttgatgttagaggaattacaagtcggtggtgttgaaa

SEQ ID NO: 862686 - DNA, 75 bp, synthetic construct
  source 1..75: mol_type = other DNA
ggcgacttcgatcgctgcttcctgttcgatgacgaggcgtcgtttatcgaggggtattacattgtcggcctgctg

SEQ ID NO: 862687 - DNA, 75 bp, synthetic construct
  source 1..75: mol_type = other DNA
catcgaggtgacagcgagccacaatcctatgaactacaacggcatgaagctggtgcgcgagaatgcgaagcccat

SEQ ID NO: 862688 - DNA, 75 bp, synthetic construct
  source 1..75: mol_type = other DNA
taagaacgaaagtgcgagctttcaactacacggcccgcgtgcctatttgcaatcgattcacggtcagtttcatgc

SEQ ID NO: 862689 - DNA, 75 bp, synthetic construct
  source 1..75: mol_type = other DNA
tgtgccgacattaaaggggacaaaattcagcaagcgtaacagaccaaatgagatcgacgcatccagagagcttgt

SEQ ID NO: 862690 - DNA, 75 bp, synthetic construct
  source 1..75: mol_type = other DNA
gcgtattgatgaggcgctggaatttgcgaatgctgccgttacaggaacaggtagcagtatgaaagcatcacctga

SEQ ID NO: 862691 - DNA, 75 bp, synthetic construct
  source 1..75: mol_type = other DNA
tataagatctatgaaacgacggtgccgccagggcttttgccattgacgatcttagcccgtcaggttatggcagcg

SEQ ID NO: 862692 - DNA, 75 bp, synthetic construct
  source 1..75: mol_type = other DNA
atacctcggcgctggatgctcctcccgttctgttgccttaccagcagcgctgggtggcagacacctctccgctta

SEQ ID NO: 862693 - DNA, 75 bp, synthetic construct
  source 1..75: mol_type = other DNA
ggaaaatcagagcctggagggtaaagttggcggcataaaatcactaaaaattatgtgcctatgtctccttgtaaa

SEQ ID NO: 862694 - DNA, 75 bp, synthetic construct
  source 1..75: mol_type = other DNA
gaaaaaaatcccggcgcgaagatcatccatgatccgcgtctctcctggaacactattgatgtggtgactgctgca

SEQ ID NO: 862695 - DNA, 75 bp, synthetic construct
  source 1..75: mol_type = other DNA
ccgttgaggcgattaatcgcgtcgaacagcattttagccgcgaggcgctggcggtggatcgcaccgatggcatca

SEQ ID NO: 862696 - DNA, 75 bp, synthetic construct
  source 1..75: mol_type = other DNA
caaggaagacgccatctacggtggcgaaatgagcgcccaccactatttccgtgatttcgcttactgcgacagcgg

SEQ ID NO: 862697 - DNA, 75 bp, synthetic construct
  source 1..75: mol_type = other DNA
aggaattcggtctggataacgtcagctcatcggtgcaggggatgtggcaaaacggcacgtatgaaacgtggatcg

SEQ ID NO: 862698 - DNA, 75 bp, synthetic construct
  source 1..75: mol_type = other DNA
ctccacgctgggaagttaacggcgaggacgtttacgcctcatcctgccctggcatgctggctctcggtcaggtca

SEQ ID NO: 862699 - DNA, 75 bp, synthetic construct
  source 1..75: mol_type = other DNA
atggcggaaaccgaaaaagagcgtctgctgaagcagctcgcacagctgaagaatgagcgcacatcgttcgagtcg

SEQ ID NO: 862700 - DNA, 75 bp, synthetic construct
  source 1..75: mol_type = other DNA
cgtagacacctgcattcgccagttctccatgaccgtgcgccagatggtgcaggaattcggtctggataacgtcag

SEQ ID NO: 862701 - DNA, 75 bp, synthetic construct
  source 1..75: mol_type = other DNA
ctcagcgagacgcaaaccactgacccgagcgcattaaccgctatcgctaatgcagcaggagcaccgcagcaatga

SEQ ID NO: 862702 - DNA, 75 bp, synthetic construct
  source 1..75: mol_type = other DNA
ccactggctcaatggctcagcgcattctgtccagcggcatgatgtcaggcatcaccagtccggcacgaccgtggt

SEQ ID NO: 862703 - DNA, 75 bp, synthetic construct
  source 1..75: mol_type = other DNA
aaaaattatccgggcaggctgctgacaagatgcaggctggcgtgatcctgctggactttatgcgccgggaattaa

SEQ ID NO: 862704 - DNA, 75 bp, synthetic construct
  source 1..75: mol_type = other DNA
tatatctatccctctctgcaggacgattacgagacggtacaggtctacaactcccctcaggtaaacgatgactat

SEQ ID NO: 862705 - DNA, 75 bp, synthetic construct
  source 1..75: mol_type = other DNA
tcagatgttgagcgggaaataaacccgttcggattcaccgtaacaagctggcagactgaccgcgaaatcagggga

SEQ ID NO: 862706 - DNA, 75 bp, synthetic construct
  source 1..75: mol_type = other DNA
aaggcaaagcagcggatgtcagttttaaactcccgggcgcccccttcacttcctggctgaccttgttgttcttgc

SEQ ID NO: 862707 - DNA, 75 bp, synthetic construct
  source 1..75: mol_type = other DNA
ccgataatggcggattcttcccgcacggtctgctgcctgctttggtgttgattcagggcgtagtgtttgcttttg

SEQ ID NO: 862708 - DNA, 75 bp, synthetic construct
  source 1..75: mol_type = other DNA
accatggtgcctaaagccattaacagtgtgatttggcgtattggcctgttttacgtcggctccgtggtgttgctg

SEQ ID NO: 862709 - DNA, 75 bp, synthetic construct
  source 1..75: mol_type = other DNA
gtctggcttgaagtcgtgcagcgccgcatgaacgaagtgttcaacaagtctaacctgtatcagtcactgcctgtc

SEQ ID NO: 862710 - DNA, 75 bp, synthetic construct
  source 1..75: mol_type = other DNA
ttctgcacagtctctggaaataaatcatggtgatctgtcgattaatagcgctaataatcattatgcggctcagac

SEQ ID NO: 862711 - DNA, 75 bp, synthetic construct
  source 1..75: mol_type = other DNA
ggacatgtttcaatatcggagaaaaaagaagtctggcatggtcatttggtggtgttaccctgaacgccagatttc

SEQ ID NO: 862712 - DNA, 75 bp, synthetic construct
  source 1..75: mol_type = other DNA
atttatattgattgtcggtatttgctttttttccatggagcattgtgttgatatgggcattctttgccagttcag

SEQ ID NO: 862713 - DNA, 75 bp, synthetic construct
  source 1..75: mol_type = other DNA
tcaacccgcgtggttcccgctttctgacttctgaggtcaaccgtaacgatcgacgcaatacacgcattattgatt

SEQ ID NO: 862714 - DNA, 75 bp, synthetic construct
  source 1..75: mol_type = other DNA
ccaccctcagaacacagagtgtttcgttacttcctggtggcgtcacatacgtagatcaactgactggacaggaag

SEQ ID NO: 862715 - DNA, 75 bp, synthetic construct
  source 1..75: mol_type = other DNA
gtgcctacaaatattcgttttttcctgttaagcaatacagctccggcatacagccatggtcagcaattttcggtt

SEQ ID NO: 862716 - DNA, 75 bp, synthetic construct
  source 1..75: mol_type = other DNA
tgtaaaagaaagactatgttatttccccgcgcctaattacgaatcattccagaatgaccctgagttatatttaga

SEQ ID NO: 862717 - DNA, 75 bp, synthetic construct
  source 1..75: mol_type = other DNA
gcagcgcagggggccaagactctcagcgaaacgcagaccagcgacccgagcgcattaactgctatcgctaatgca

SEQ ID NO: 862718 - DNA, 75 bp, synthetic construct
  source 1..75: mol_type = other DNA
atcggcctcaccagcctgtcgcagacagttggatttatcgggcaactggcgcagttcaaacctgaagcgctcgac

SEQ ID NO: 862719 - DNA, 75 bp, synthetic construct
  source 1..75: mol_type = other DNA
tgtcggcttctattttggcgtattgtcactggtagttgcagcggtcatttcgtggatagtctatttctggctcat

SEQ ID NO: 862720 - DNA, 75 bp, synthetic construct
  source 1..75: mol_type = other DNA
atgaaagttcttattggtaatataaatattgataattatcatatgttgtctgcattagctgggattgcgggattt

SEQ ID NO: 862721 - DNA, 75 bp, synthetic construct
  source 1..75: mol_type = other DNA
ccaggtaaaggtgcattaacaaaggactggaacgagtttaatctcgcctgtgacactgatactcccataactcca

SEQ ID NO: 862722 - DNA, 75 bp, synthetic construct
  source 1..75: mol_type = other DNA
tttgccgcacgctctgccatatctggcttctgcagttcctttgggcctggctaactacatttttgacctcgagaa

SEQ ID NO: 862723 - DNA, 75 bp, synthetic construct
  source 1..75: mol_type = other DNA
cgtacataaacgcctttgaccagatggagaaacagctttcaactccatcggtgctgagcgatgtagcacataatg

SEQ ID NO: 862724 - DNA, 75 bp, synthetic construct
  source 1..75: mol_type = other DNA
ggtttccgataacgccggttacgccaaccccgttcagttcaccaccagcgaaattggcgtttccggtggtgaagg

SEQ ID NO: 862725 - DNA, 75 bp, synthetic construct
  source 1..75: mol_type = other DNA
tattaatgatgcttcggcgctggcctgtctcataaatttgtcgctgaacccttcagaggtaagggggcgcaaatg

SEQ ID NO: 862726 - DNA, 75 bp, synthetic construct
  source 1..75: mol_type = other DNA
tcaggtgattcagttaaccccgcaagaagatgaatctaccctgaaagtagaactgttaatcggtcagacgctgga

SEQ ID NO: 862727 - DNA, 75 bp, synthetic construct
  source 1..75: mol_type = other DNA
accgtcagtcgatgtcgtaagcactgttggcgcaggggattccatggttggtggcctcatttatggcttgctgat

SEQ ID NO: 862728 - DNA, 75 bp, synthetic construct
  source 1..75: mol_type = other DNA
ggcgaagtgactgacttcaacttctctggttttgaagtgactcctgctgactgggaacgctttgttaatgattca

SEQ ID NO: 862729 - DNA, 75 bp, synthetic construct
  source 1..75: mol_type = other DNA
agcggtttttttgcgcacgtttcctcacatccaaattatggtggggcgtgcaggggaatcgaaagatgcgccggg

SEQ ID NO: 862730 - DNA, 75 bp, synthetic construct
  source 1..75: mol_type = other DNA
aatgcttaaggccgttgaatctccgctggctagcaaactgtacgaccgtgttggtgatgctgtttttggcgctgc

SEQ ID NO: 862731 - DNA, 75 bp, synthetic construct
  source 1..75: mol_type = other DNA
tgatataatggttaccgatgaacttttatcagctgatgaagctcgccatctggctaaagatatccagacagctaa

SEQ ID NO: 862732 - DNA, 75 bp, synthetic construct
  source 1..75: mol_type = other DNA
gacgccggttacgccaaccccgtccagttcaccaccagtgaaattggcgtttccggtggtggaagtttttcactg

SEQ ID NO: 862733 - DNA, 75 bp, synthetic construct
  source 1..75: mol_type = other DNA
aacgtcatgacgatgttctgaaaaagatccgcattttggattgttctccagagttttgtgcccgcaattttgcgg

SEQ ID NO: 862734 - DNA, 75 bp, synthetic construct
  source 1..75: mol_type = other DNA
ttatccattgcatacggaggctgccatcatggctacgatccctgccttagtacaacctgaactttgcattattgc

SEQ ID NO: 862735 - DNA, 75 bp, synthetic construct
  source 1..75: mol_type = other DNA
ggcgggaagctggaaaacaaaacgctggaaggctggggctatgatttgataaagtcagttccccggtttcgacga

SEQ ID NO: 862736 - DNA, 75 bp, synthetic construct
  source 1..75: mol_type = other DNA
acaggctgctgacaagatgcaggctggcgtgatcctgctggactttatgcgccgggaattaaatctgtctaactc

SEQ ID NO: 862737 - DNA, 75 bp, synthetic construct
  source 1..75: mol_type = other DNA
gtcagaaactccaggaggctgttggcttaccgaatctggcaccgcgctatgccattgatgctcctgctgacgcgc

SEQ ID NO: 862738 - DNA, 75 bp, synthetic construct
  source 1..75: mol_type = other DNA
tatgtctgcaaggaactggtgtatgcctatgcaatgtggattagcccgtcattccatctgaaggtgatccgtact

SEQ ID NO: 862739 - DNA, 75 bp, synthetic construct
  source 1..75: mol_type = other DNA
cacgtccgcgcaggccgtgacggcgcagtccctgcccctgccggcaccggcactcacggctgacgccgccctgtc

SEQ ID NO: 862740 - DNA, 75 bp, synthetic construct
  source 1..75: mol_type = other DNA
agttagcgtcattaatggcggaaataaccaggggacgtatgtctgcaaagaactggtgtatgcctatgcaatgtg

SEQ ID NO: 862741 - DNA, 75 bp, synthetic construct
  source 1..75: mol_type = other DNA
atcagtgcttggtgcctgtcagaaactccaggaggctgttggcttaccgaatctggcaccgcgctatgccattga

SEQ ID NO: 862742 - DNA, 75 bp, synthetic construct
  source 1..75: mol_type = other DNA
aaagacggggaaatggtcatgttgagcaaggaagaactggcgattctcgaagagctgcgcaaggcaaaggctcgc

SEQ ID NO: 862743 - DNA, 75 bp, synthetic construct
  source 1..75: mol_type = other DNA
ttgcgtttcttgctatgggtttcacgggtaaacgtgctgcccagttcaaagaggcatacatcaatgcctttaacc

SEQ ID NO: 862744 - DNA, 75 bp, synthetic construct
  source 1..75: mol_type = other DNA
tgatcatgagcaaaccagtaatgattgattctgataattctgggcgttatattgttctggcagcggcaaaatccg

SEQ ID NO: 862745 - DNA, 75 bp, synthetic construct
  source 1..75: mol_type = other DNA
gtgcactgctgaagcagtatggtatccgcctgacagctaatcaggcatatcaccagatggcgaagctggggatcg

SEQ ID NO: 862746 - DNA, 75 bp, synthetic construct
  source 1..75: mol_type = other DNA
gttgaacttgttcatgaattgaccaacacccagaatttgggtgttggcccggttagtgtgattcatgggggaaat

SEQ ID NO: 862747 - DNA, 75 bp, synthetic construct
  source 1..75: mol_type = other DNA
tcggcagacagttaaatactcaggcgtcaatggtcgagatgactgacaccgatagaagccaggtatttaccttaa

SEQ ID NO: 862748 - DNA, 75 bp, synthetic construct
  source 1..75: mol_type = other DNA
agagacaaaggcctggttggttctggatgtaacgcttccatattcatcaatggagaaacggcagcaaaattggaa

SEQ ID NO: 862749 - DNA, 75 bp, synthetic construct
  source 1..75: mol_type = other DNA
ccagtgcactatgcggatgccattcgttataatgctcgaatgcctctgcaaggttctttgctgccgttaacccgt

SEQ ID NO: 862750 - DNA, 75 bp, synthetic construct
  source 1..75: mol_type = other DNA
aatattgccagttattcctggcatgatagccagcgtggatataaaaacaggtcagaaaagtgtatttcagtacct

SEQ ID NO: 862751 - DNA, 75 bp, synthetic construct
  source 1..75: mol_type = other DNA
gcatccctgcagatttatatattgtttatgaaacacagcaggtgacgcccgtgatggttaagctgttggctgcat

SEQ ID NO: 862752 - DNA, 75 bp, synthetic construct
  source 1..75: mol_type = other DNA
tctgttctaaaactatcatgaaatactcgcttctccctctactaacgttaccagtgttgatgcttaccgcgtgcc

SEQ ID NO: 862753 - DNA, 75 bp, synthetic construct
  source 1..75: mol_type = other DNA
tattccgctatcaccagcagcttaaacagcagctcgacccttgcggcgtgtttaaccccggtcgcatgtacgcgg

SEQ ID NO: 862754 - DNA, 75 bp, synthetic construct
  source 1..75: mol_type = other DNA
ctgcagcaaccgaacagaaaattcccggcaactgttatccggtagataaagttatttatcaggataataacgaaa

SEQ ID NO: 862755 - DNA, 75 bp, synthetic construct
  source 1..75: mol_type = other DNA
tgaaagaatgcatggctgcagcagcagaacaaaaaattcccggtaactgttatccggtagataaaactactcaca

SEQ ID NO: 862756 - DNA, 75 bp, synthetic construct
  source 1..75: mol_type = other DNA
ctgccgcagcgaaacagaaaattcccggtgactgttatccggtcgataaagttattcaccaggataatatcgaaa

SEQ ID NO: 862757 - DNA, 75 bp, synthetic construct
  source 1..75: mol_type = other DNA
atcattaccggcactggaaaacatctgcgttttggtggcgaagtgatgaaaaacgttgccggatacgatctctca

SEQ ID NO: 862758 - DNA, 75 bp, synthetic construct
  source 1..75: mol_type = other DNA
cgcaacgctggcggtcatgcgacccgctttagtgccggagatggtggctttgccccgctatcggcttcctttatt

SEQ ID NO: 862759 - DNA, 75 bp, synthetic construct
  source 1..75: mol_type = other DNA
cccggcgtgctcggcgtggtacgtagtgacaaccagtgtcaggtgattatcggcaataccgtttcacaaaccttt

SEQ ID NO: 862760 - DNA, 75 bp, synthetic construct
  source 1..75: mol_type = other DNA
gtgaaggtaaagcagttgaaattgcggaagccgtaaaagcgacgggtgcttcggtcgttctttttgaccatgccc

SEQ ID NO: 862761 - DNA, 75 bp, synthetic construct
  source 1..75: mol_type = other DNA
acagcgcgttggggcaaattgtcggctgtgtgctggcgtttattgtcattcttttagtgcgggataaatcgcgtg

SEQ ID NO: 862762 - DNA, 75 bp, synthetic construct
  source 1..75: mol_type = other DNA
atttcagtcagtttctcgacagcgcattagggcaaatcgtcggctgtgtgctcgcgttcaccgttattttgctgg

SEQ ID NO: 862763 - DNA, 75 bp, synthetic construct
  source 1..75: mol_type = other DNA
gaatccgctaaaacagcccgaaccaatgacagaatatcaggtctgggaagatgactggataattgatgagtgttt

SEQ ID NO: 862764 - DNA, 75 bp, synthetic construct
  source 1..75: mol_type = other DNA
tcgctggtgggatataccaacgccggtaaatctacccttttcaatcgcatcaccgaagcgcgggtctatgcggca

SEQ ID NO: 862765 - DNA, 75 bp, synthetic construct
  source 1..75: mol_type = other DNA
atcgaccgcactggtcttattttagatattttcgcccaacgtgcacgtactcatgagggtaagttgcaggttgag

SEQ ID NO: 862766 - DNA, 75 bp, synthetic construct
  source 1..75: mol_type = other DNA
ccaatcgacgtttaaaagcgatcaatacgctatcgctgacgctgattacccaatcctgcgaaacttatcttattc

SEQ ID NO: 862767 - DNA, 75 bp, synthetic construct
  source 1..75: mol_type = other DNA
cggcacgccgcaaagcccgtatggcaaaagcaaactgatggttgaacagatcctcactgacttacaaaaagcgca

SEQ ID NO: 862768 - DNA, 75 bp, synthetic construct
  source 1..75: mol_type = other DNA
ctatttaccagcgtgcagttcttcgatccggcgaatccaatgagcatcgtctgggtgttcgcggtcatggcgctg

SEQ ID NO: 862769 - DNA, 75 bp, synthetic construct
  source 1..75: mol_type = other DNA
acgggacgctggcggcgttgccgttagggctgctctactttttggtgattatcccaaatacccaacagagtatgt

SEQ ID NO: 862770 - DNA, 75 bp, synthetic construct
  source 1..75: mol_type = other DNA
agaatacgcgccctgaactgattaccgatactttccgtgaattttttgacacgccagtagaaaccgcgcaggacg

SEQ ID NO: 862771 - DNA, 75 bp, synthetic construct
  source 1..75: mol_type = other DNA
tttgttggctttcactttcagctggaaacgccacgctgggcggtactgacagcggcgattgttgccgccggcccg

SEQ ID NO: 862772 - DNA, 75 bp, synthetic construct
  source 1..75: mol_type = other DNA
gacagccctgacgccggactcactaaaagacatcaccagaactatacgtttacaacaattctatccatgtattgg

SEQ ID NO: 862773 - DNA, 75 bp, synthetic construct
  source 1..75: mol_type = other DNA
accttactcagtcagacgactggatggaagccttctcaggccgatatcagagctgtgttgactgaactcggtgct

SEQ ID NO: 862774 - DNA, 75 bp, synthetic construct
  source 1..75: mol_type = other DNA
tgacattttttcttgtttccggagagccagttgatattgcagtcagtgttcacaggacaatgcaggagtgtgtga

SEQ ID NO: 862775 - DNA, 75 bp, synthetic construct
  source 1..75: mol_type = other DNA
atgaccagcggcaacatcgctgaccataacggcaacgtagtgtctggtgtattcgatatccacagcagcgattat

SEQ ID NO: 862776 - DNA, 75 bp, synthetic construct
  source 1..75: mol_type = other DNA
taattgctgctggtttgctggctggctgcggcgagaaaacgccaaaatgtagtagtgatgatgcaaaaaatctgg

SEQ ID NO: 862777 - DNA, 75 bp, synthetic construct
  source 1..75: mol_type = other DNA
gtgagtctggcaccggaaaatcaaccagcatgagaaatatcaatccagaggaagcaatacttataaaaccaatag

SEQ ID NO: 862778 - DNA, 75 bp, synthetic construct
  source 1..75: mol_type = other DNA
tgactgttttttttgtttctggtgaaccgattgagcttgttattgacatacatgactcaatggaagaatgcatga

SEQ ID NO: 862779 - DNA, 75 bp, synthetic construct
  source 1..75: mol_type = other DNA
tcggatcgtattggccgccgtccggtgatgctggcgggagtggtgtggtttatcgtcacctgtctggcaatatta

SEQ ID NO: 862780 - DNA, 75 bp, synthetic construct
  source 1..75: mol_type = other DNA
cgggcggtaagccggagctggcgcaggagccacatagacggtttgcggcacagtcgcgacgctgaccgcttgtgg

SEQ ID NO: 862781 - DNA, 75 bp, synthetic construct
  source 1..75: mol_type = other DNA
tttgcctcgtttcttgcttccggttcggtgtcttggatgtattacgccgaccgcttaatggagtttccgtccggt

SEQ ID NO: 862782 - DNA, 75 bp, synthetic construct
  source 1..75: mol_type = other DNA
ttgacggtagcaccaactccgacgcttggggcttcggtttgaaagccggttacgacttcaaactgggtgatgctg

SEQ ID NO: 862783 - DNA, 75 bp, synthetic construct
  source 1..75: mol_type = other DNA
ggtaactacaaagttcgtatcgacaacgcaactggtgctggttctatcgctgactacaacggcaacgagctgatc

SEQ ID NO: 862784 - DNA, 75 bp, synthetic construct
  source 1..75: mol_type = other DNA
accttgccaacggaattttgtggctgctgctgatgtttatctttttaaaagataaacaaacaggaaattcaaacg

SEQ ID NO: 862785 - DNA, 75 bp, synthetic construct
  source 1..75: mol_type = other DNA
tgcaaaattccctaccaatcacctatcggattcagaaaactgatgaaggtaaaggtcagtcctatataaacgtat

SEQ ID NO: 862786 - DNA, 75 bp, synthetic construct
  source 1..75: mol_type = other DNA
tccagaatgatatggcgcgttttgtcgccccggatggctacgctgaacgctttcagaccgcatcggtgccgccgg

SEQ ID NO: 862787 - DNA, 75 bp, synthetic construct
  source 1..75: mol_type = other DNA
aactggagcaacgaagtgtgcctggtatcgatggtggcgttgtcatgcttggcgtgcgtaccagcaaatgcgaag

SEQ ID NO: 862788 - DNA, 75 bp, synthetic construct
  source 1..75: mol_type = other DNA
acgaagcaatcagaaataacgctatagacgcaatactctcacttccgatcgacgacaagtcacctcacgaagtcc

SEQ ID NO: 862789 - DNA, 75 bp, synthetic construct
  source 1..75: mol_type = other DNA
atgcaaccgaatattctggtctttttcaccgatcaacagcgctgggacacggtgggctgccacaaccctgccatc

SEQ ID NO: 862790 - DNA, 75 bp, synthetic construct
  source 1..75: mol_type = other DNA
ggcatgtgccagaaccttgacgaaaacctcgggcgtattgtcgattacctgaaggccagcggcgaatacgacaac

SEQ ID NO: 862791 - DNA, 75 bp, synthetic construct
  source 1..75: mol_type = other DNA
gcgctggaacatacgtcgcacccttatggcggtcacttttttgataatgataaccagccggtgcatttcgatggc

SEQ ID NO: 862792 - DNA, 75 bp, synthetic construct
  source 1..75: mol_type = other DNA
cttaatcagatgcgcattgccgcagaacataacgatccttacgccgatctgtggatgctgcgtatggaagagaaa

SEQ ID NO: 862793 - DNA, 75 bp, synthetic construct
  source 1..75: mol_type = other DNA
gatgtgcgaatttcagtagaaaatgtcagaacaataagccatgaatcagggcttgatgtttatcagtgtgccgct

SEQ ID NO: 862794 - DNA, 75 bp, synthetic construct
  source 1..75: mol_type = other DNA
taatagcggctggtttgttggctggttgtggtgagaaaacgccgaaatgcagtagtgatgatgctaaaaatctag

SEQ ID NO: 862795 - DNA, 75 bp, synthetic construct
  source 1..75: mol_type = other DNA
cgaagcaatcagaaacaacgccatagacgcaatactctcacttccgatcgacgacaagtcacctcacgaagtcca

SEQ ID NO: 862796 - DNA, 75 bp, synthetic construct
  source 1..75: mol_type = other DNA
tcttaacgtcactgtctgggatcaccctgaactcaccacgcctgccggtcagtaccgcagctccagcgatgccgg

SEQ ID NO: 862797 - DNA, 75 bp, synthetic construct
  source 1..75: mol_type = other DNA
aacaggcgatcaccaacgtgcctctgaccattctcgacgccatcaacgccgcaggtggcctgaccgacaccgctg

SEQ ID NO: 862798 - DNA, 75 bp, synthetic construct
  source 1..75: mol_type = other DNA
aataacctcgcccaggcactgcgtgaaacgcggacacttaacgatctgattattgaaaacgctgccatgtcattg

SEQ ID NO: 862799 - DNA, 75 bp, synthetic construct
  source 1..75: mol_type = other DNA
ttcttctaagtgcacaaattacggggatgacggtaactattaagaccactgcttgtcataatggagggggattca

SEQ ID NO: 862800 - DNA, 75 bp, synthetic construct
  source 1..75: mol_type = other DNA
tccggcggctacagcatcaaacagaccgcgtttatggactcgatgaagtcggacatgggcggcgcggcaacggtt

SEQ ID NO: 862801 - DNA, 75 bp, synthetic construct
  source 1..75: mol_type = other DNA
ctatttcaatgaatatccgtggtgggtggctcactactatcaacgtcgtccggacaatgacggcatggcctggcg

SEQ ID NO: 862802 - DNA, 75 bp, synthetic construct
  source 1..75: mol_type = other DNA
tgcacgctattttgattatgaggcttttgcgcgcgatttgttcatggaactggattttgtcgacggacacgtttt

SEQ ID NO: 862803 - DNA, 75 bp, synthetic construct
  source 1..75: mol_type = other DNA
gaaaaagatcctgaatttatgtaccaggattatgaaaactttccttcgggaatggcttcagaatatggtttcaac

SEQ ID NO: 862804 - DNA, 75 bp, synthetic construct
  source 1..75: mol_type = other DNA
gctgatccagcgtgcggcgcgcaagattgacggtctgggcatcaagcatgttcagttaagcggtgaaggctggga

SEQ ID NO: 862805 - DNA, 75 bp, synthetic construct
  source 1..75: mol_type = other DNA
aaagagtacaacgctgcgcctccattgcagggatttggtatttccgccccggatcaggtaaaagcagcgattgat

SEQ ID NO: 862806 - DNA, 75 bp, synthetic construct
  source 1..75: mol_type = other DNA
cccagttgaaggagcgcaaagaaggcgcattcattcctttcgtcaccctcggtgatccgggcattgagcagtcgt

SEQ ID NO: 862807 - DNA, 75 bp, synthetic construct
  source 1..75: mol_type = other DNA
gatctgcgcgagcagggttatatggggctgcacactgttggacgcggatcagaacgttccccggtattgctggcg

SEQ ID NO: 862808 - DNA, 75 bp, synthetic construct
  source 1..75: mol_type = other DNA
taccgtaaagcgccggttgaacagtggtctgcgggcgctacgggacttggtgtgcgcacgattgctaatctgtta

SEQ ID NO: 862809 - DNA, 75 bp, synthetic construct
  source 1..75: mol_type = other DNA
tctctacccaacctgccgacgcgcgctggggagaaaaagcgacttacagcattaataatgatggcattaccctgc

SEQ ID NO: 862810 - DNA, 75 bp, synthetic construct
  source 1..75: mol_type = other DNA
cttctggcagcattccgaccgtggacaggtcgatggcattaatggtccggtggattttaatgtgtttaatggcac

SEQ ID NO: 862811 - DNA, 75 bp, synthetic construct
  source 1..75: mol_type = other DNA
aagacggtaaggctgtggctgaccagactacagacacgttcaataaagccggtgcgcagacggaggatactggcg

SEQ ID NO: 862812 - DNA, 75 bp, synthetic construct
  source 1..75: mol_type = other DNA
aacaggagaatatcaacggccttggatctccatccgagatttcaatgtcgggtaacttctttatgaatcctgcac

SEQ ID NO: 862813 - DNA, 75 bp, synthetic construct
  source 1..75: mol_type = other DNA
atttctcagtaataatgttagatattgacaatttcaaaagcatcaatgacaaatgggggcatcatatgggtgatc

SEQ ID NO: 862814 - DNA, 75 bp, synthetic construct
  source 1..75: mol_type = other DNA
acgacaagcacatcaagacctataccatcaagtttcccgactccggtttccgcgttgtcgcgctctccagtcgac

SEQ ID NO: 862815 - DNA, 75 bp, synthetic construct
  source 1..75: mol_type = other DNA
aagtcatagtaatggttaccagaataataaaaaaaatccatcaggaaagaggatatattagggcgcttaggcggt

SEQ ID NO: 862816 - DNA, 75 bp, synthetic construct
  source 1..75: mol_type = other DNA
aggagttcggtattatcattaaaggtaatactcaaaagctcttgctatcaattgcagagcgaatcagaaaaaaca

SEQ ID NO: 862817 - DNA, 75 bp, synthetic construct
  source 1..75: mol_type = other DNA
gaagaatggtcgcctgatggcgaacttgtcattaccggaatcgtggatggtaagcaggaatattcccgtattgag

SEQ ID NO: 862818 - DNA, 75 bp, synthetic construct
  source 1..75: mol_type = other DNA
ggcagcattccgaccgtgggcaggtagatggcattaatggttcggtggattttaatgtgtttaatggcacagagg

SEQ ID NO: 862819 - DNA, 75 bp, synthetic construct
  source 1..75: mol_type = other DNA
tcaatgaatatccgtggtgggtggctcactactatcaacgtcgcccggacaatgacggcatggcctggcgtttct

SEQ ID NO: 862820 - DNA, 75 bp, synthetic construct
  source 1..75: mol_type = other DNA
cagtccatctgaaatgttagtcaatgccgataaagcgttatatcaagccaaaagaaccggaaaaaacaaggtgat

SEQ ID NO: 862821 - DNA, 75 bp, synthetic construct
  source 1..75: mol_type = other DNA
ttttagttggtgtcgcgtctattccgtttaagtttgaactgtcacaactggtggaagtacgcatcagtgatgaat

SEQ ID NO: 862822 - DNA, 75 bp, synthetic construct
  source 1..75: mol_type = other DNA
tatttgccggtatgaaattaccggaaggtgcagttgaactgcagccgggtgaggtgttcgtaatgacagacatca

SEQ ID NO: 862823 - DNA, 75 bp, synthetic construct
  source 1..75: mol_type = other DNA
cacactgcgtgcctttgcggcgggtgtgaccccggcgcagtgctttgagatgctggcactgattcgtcaaaaaca

SEQ ID NO: 862824 - DNA, 75 bp, synthetic construct
  source 1..75: mol_type = other DNA
gttgtttaacggctacgacgccatcccgacttctgccgggattagccgggcaaccactcgcaccgttgtccactc

SEQ ID NO: 862825 - DNA, 75 bp, synthetic construct
  source 1..75: mol_type = other DNA
actgattgggtctccggggatgaggctgtcgaattacagtacatgctggaaatgtttttccgtgccgatatcgct

SEQ ID NO: 862826 - DNA, 75 bp, synthetic construct
  source 1..75: mol_type = other DNA
aatgacccactaatgccatgggatagtgggattgcagagaaacagttagccgcattatgggggattagtcagatg

SEQ ID NO: 862827 - DNA, 75 bp, synthetic construct
  source 1..75: mol_type = other DNA
ctggcttaatgcccacgaagaggggtatcacaaagcgatgggcaatcgccaggtacagatgatcgccattggcgg

SEQ ID NO: 862828 - DNA, 75 bp, synthetic construct
  source 1..75: mol_type = other DNA
acggggtgagtttattcgtggctgggatgacggacggggaattgattcagggcgtttcttgcttaatgcacaacc

SEQ ID NO: 862829 - DNA, 75 bp, synthetic construct
  source 1..75: mol_type = other DNA
gatgacggacggggaattgattcagggcgtttcttgcttaatgcacaaccacattcggttatggatcatactcac

SEQ ID NO: 862830 - DNA, 75 bp, synthetic construct
  source 1..75: mol_type = other DNA
tgctgttgtgcagcattctcggcagcacgacgctgatttccggctgtgccctggtacgtaaggattctgcacctc

SEQ ID NO: 862831 - DNA, 75 bp, synthetic construct
  source 1..75: mol_type = other DNA
atggaactcaattgcccaatctgccaaaactctctcgaacgtaacggcgagactgcccactgtgcaacttgcgac

SEQ ID NO: 862832 - DNA, 75 bp, synthetic construct
  source 1..75: mol_type = other DNA
tcccagattttggtcggcagcgtctcttgcctgtttattgaatacgtatcgtgacggttatatcagagataacca

SEQ ID NO: 862833 - DNA, 75 bp, synthetic construct
  source 1..75: mol_type = other DNA
atttaggatgctggttctcagtggggcctgctatgctcgatacaataaagggtaaggccttagttttgaaaatac

SEQ ID NO: 862834 - DNA, 75 bp, synthetic construct
  source 1..75: mol_type = other DNA
ttgtggtgctgaccgctgccctctccagcctgaattcaggtctgtactgcaccgggcgtattctgcgctcgatgg

SEQ ID NO: 862835 - DNA, 75 bp, synthetic construct
  source 1..75: mol_type = other DNA
aaccagtacggggaacgcgaacataaattcgcgctactgaacagcgatcagtttgattacatgtgccgcgttatc

SEQ ID NO: 862836 - DNA, 75 bp, synthetic construct
  source 1..75: mol_type = other DNA
tttttgggtgagaaggccgcttatgttgctggctggatgtacttcatcaactgggcgatgacggggattgttgat

SEQ ID NO: 862837 - DNA, 75 bp, synthetic construct
  source 1..75: mol_type = other DNA
tggctggcagcgcctgaaaggaatacctccctgccccacctgtttacgctgatggccggacagggagtgccagga

SEQ ID NO: 862838 - DNA, 75 bp, synthetic construct
  source 1..75: mol_type = other DNA
ttctttagaggagaaataagcgaattacacattttgtacccaagtcgctatcaaacagatgacgtaccaagtgca

SEQ ID NO: 862839 - DNA, 75 bp, synthetic construct
  source 1..75: mol_type = other DNA
gaaaatcgcatggcatgaccttattgcacgttgcaaccggggtacaggtagatcctgcaacgttgagccgcattg

SEQ ID NO: 862840 - DNA, 75 bp, synthetic construct
  source 1..75: mol_type = other DNA
gccgctcggtccacaaaatgcttttgtgatgaatcagggcattcgtcgtcagtaccacattatgattgccttact

SEQ ID NO: 862841 - DNA, 75 bp, synthetic construct
  source 1..75: mol_type = other DNA
gggcggagatagcccggcgtcgttgtcgcagcataaagacagtgtcatatcagaagtcgcagatataccggaagc

SEQ ID NO: 862842 - DNA, 75 bp, synthetic construct
  source 1..75: mol_type = other DNA
atctaccggactacagagtagaagttctcctgaccttaccggacgtactgacctcaacggagatgtcacttctgt

SEQ ID NO: 862843 - DNA, 75 bp, synthetic construct
  source 1..75: mol_type = other DNA
atggtcttatcaaacaacgtgaatattacgataatgaacgaattacagaacgtaataatatcggctttaatatta

SEQ ID NO: 862844 - DNA, 75 bp, synthetic construct
  source 1..75: mol_type = other DNA
taaactgcctggcgcgcccttcacttcctggctgacattactgtttttgctgagcgtcctggtgctgatggcgtt

SEQ ID NO: 862845 - DNA, 75 bp, synthetic construct
  source 1..75: mol_type = other DNA
tcgcgtcgctgggaatcatcgcttcatgggcgtttatcatcgtttgccagatgcgcctgcgtaaagcaattaaag

SEQ ID NO: 862846 - DNA, 75 bp, synthetic construct
  source 1..75: mol_type = other DNA
atgtcgaatgagaaaagaaaaaccattggcagacagttaaatacccaggcgtcaatggtcgagatgactgacacc

SEQ ID NO: 862847 - DNA, 75 bp, synthetic construct
  source 1..75: mol_type = other DNA
aaagttaccagggcgctgcaggcggcggccgtaccgcaagacttgatttctctgttcccggttcagtcggagcta

SEQ ID NO: 862848 - DNA, 75 bp, synthetic construct
  source 1..75: mol_type = other DNA
tcggctccagttcatgtatttaccctcaatactggccgaaaggcaaaatttactgagatcaaggttgatcatgac

SEQ ID NO: 862849 - DNA, 75 bp, synthetic construct
  source 1..75: mol_type = other DNA
tctcgtgaaaacttccttgttaatttctacgcgactaatccggattgtgctctgcgacctgattataccattgat

SEQ ID NO: 862850 - DNA, 75 bp, synthetic construct
  source 1..75: mol_type = other DNA
atgaatgtggccggtaccctgctgaacagtgcgctgatttatgcggggaataacctgaagctgtttacagaccgt

SEQ ID NO: 862851 - DNA, 75 bp, synthetic construct
  source 1..75: mol_type = other DNA
gcaacagcggacaatggattgcaaaaaatctgaccctgaaggcgaactcactgaccagtgcgggtgacatcaccg

SEQ ID NO: 862852 - DNA, 75 bp, synthetic construct
  source 1..75: mol_type = other DNA
agggtagtcacggacgctggctgacggcggacgacctctccctccggggcaaaacactgaataccgcagggacca

SEQ ID NO: 862853 - DNA, 75 bp, synthetic construct
  source 1..75: mol_type = other DNA
tacggcaaacagcgaaatcattaaccgttccggtaatattgaaaccacacgtggcgatatcaccatgaatacggc

SEQ ID NO: 862854 - DNA, 75 bp, synthetic construct
  source 1..75: mol_type = other DNA
agacagtcatggtcccgaaactgtatctgtcgccggaagatatcaccctgcataacggcagcgttatcagcggga

SEQ ID NO: 862855 - DNA, 75 bp, synthetic construct
  source 1..75: mol_type = other DNA
gaaggatgcttccggcggtgcaaacacagagattatcaatacctccgggaatattgagacgcatcagggcgatat

SEQ ID NO: 862856 - DNA, 75 bp, synthetic construct
  source 1..75: mol_type = other DNA
cccgtccacggacccggacagtccgtatctgattacggtgaacccgaaactggatggtctcggaaaggtggacag

SEQ ID NO: 862857 - DNA, 75 bp, synthetic construct
  source 1..75: mol_type = other DNA
agaaagcgctcggactgacctttggtgtgtcgctgaccgccgggcaggttgcacaactgaccagaagcatactgt

SEQ ID NO: 862858 - DNA, 75 bp, synthetic construct
  source 1..75: mol_type = other DNA
attgaacaaatcctcaagccagagaaaaactgggaaactgctcgaaacaaggcattggatcttgtaggtaattta

SEQ ID NO: 862859 - DNA, 75 bp, synthetic construct
  source 1..75: mol_type = other DNA
tgtcacactgaaactgattgctgcactcacgaattacggtaccctggccgcagggaaaaccctttccgtcacgtc

SEQ ID NO: 862860 - DNA, 75 bp, synthetic construct
  source 1..75: mol_type = other DNA
gagtttggtgtggcgctgacagctgaacagattgctcagcttgacggcagcatactgtggtgggagtcagccacc

SEQ ID NO: 862861 - DNA, 75 bp, synthetic construct
  source 1..75: mol_type = other DNA
ctgaataacagtggtgctgttcagggggcttccctgacgctcggcagtacaacgctcagcaacagaggctccctg

SEQ ID NO: 862862 - DNA, 75 bp, synthetic construct
  source 1..75: mol_type = other DNA
ggagtcagcctgtcgctcaccacccagaaatcgaaatcacaacaacattctgaaagtgacacagtatccggcagt

SEQ ID NO: 862863 - DNA, 75 bp, synthetic construct
  source 1..75: mol_type = other DNA
atgaagtggcgctattccctgcgctggaaactgccgcacaggccctgcccgggtccactggagctggtttccgtt

SEQ ID NO: 862864 - DNA, 75 bp, synthetic construct
  source 1..75: mol_type = other DNA
tggttactggagagggattttcatttaaatgcggcattaatgatataaaacctgttgcaaaagtacattgcgtta

SEQ ID NO: 862865 - DNA, 75 bp, synthetic construct
  source 1..75: mol_type = other DNA
ttcaggaagcggaagcgtatccgggaccatcgctgatcatcgcttatagcccatgtgaagagcatggttacgatc

SEQ ID NO: 862866 - DNA, 75 bp, synthetic construct
  source 1..75: mol_type = other DNA
gatggcgggattaaacagcaggcgattgtccagttattgctggaacacggtgccagcccgcatctgacggataaa

SEQ ID NO: 862867 - DNA, 75 bp, synthetic construct
  source 1..75: mol_type = other DNA
tgtgcagttattgctggaacacggtgccagcccgcatctgaccgataaatatggcaaaacgccactggaactggc

SEQ ID NO: 862868 - DNA, 75 bp, synthetic construct
  source 1..75: mol_type = other DNA
cctgcgatcgtcaggggaaaacggcaattacgctggcaagtttatatcagcaatatgcttgcgttcaggcattaa

SEQ ID NO: 862869 - DNA, 75 bp, synthetic construct
  source 1..75: mol_type = other DNA
ttattccgatgcagtacgtcccgtataacggtggcgcggtgtgggaaccatggtgggagagaaggcccgagcgta

SEQ ID NO: 862870 - DNA, 75 bp, synthetic construct
  source 1..75: mol_type = other DNA
aatgctggagaaccggttatctcaatgagatatattccttataacggaggtgctgtaaaggaaacatggtgggac

SEQ ID NO: 862871 - DNA, 75 bp, synthetic construct
  source 1..75: mol_type = other DNA
gcctcgaatccgaatatcggtaaagatctgaccgatgcggaaaaagtagaactgggcggttccggctcaggaacc

SEQ ID NO: 862872 - DNA, 75 bp, synthetic construct
  source 1..75: mol_type = other DNA
tccccatctggaaagaggaactctgtacccaatgtaaccactgcgttgccgcttgcccacactcagctattcgcg

SEQ ID NO: 862873 - DNA, 75 bp, synthetic construct
  source 1..75: mol_type = other DNA
cagcaaagcctttaaacataaatttggttatgcgccgtcagctgtgctgaagaatacggaccagcacccaacgga

SEQ ID NO: 862874 - DNA, 75 bp, synthetic construct
  source 1..75: mol_type = other DNA
ctgtggctaatgtcccggcaccttttcgcggtaatgccattgctctcattaccgcaggtcttatgtctctggcct

SEQ ID NO: 862875 - DNA, 75 bp, synthetic construct
  source 1..75: mol_type = other DNA
gtctgaagaccatgaccactgcgcagacgcagggcaacagtgtcagcgtggatgtgcagaacgcacagcttgacg

SEQ ID NO: 862876 - DNA, 75 bp, synthetic construct
  source 1..75: mol_type = other DNA
aactgtatctgtcgccggaagatatcaccctgcataacggcagcgttatcagcgggaacaacgtgcaacttgcgg

SEQ ID NO: 862877 - DNA, 75 bp, synthetic construct
  source 1..75: mol_type = other DNA
gattataaagtcagtcacagtggaatcagtctgagcggtggtggcagcttcggggataaatttcagggtaacatg

SEQ ID NO: 862878 - DNA, 75 bp, synthetic construct
  source 1..75: mol_type = other DNA
aggtcaacggcaacaggattatcgccgatgtgggccacgacctgctgataagcagccagcaggacaccagtaagt

SEQ ID NO: 862879 - DNA, 75 bp, synthetic construct
  source 1..75: mol_type = other DNA
cctcccgggataagatgaagagccgctttgactccgttgctgaacaaaccgggatgttttccggagatggcggct

SEQ ID NO: 862880 - DNA, 75 bp, synthetic construct
  source 1..75: mol_type = other DNA
tgttgtcgcaaccggcaaaaacaggggagataaccgcggagatattgtgattgcaggaagccagcttaaggccgg

SEQ ID NO: 862881 - DNA, 75 bp, synthetic construct
  source 1..75: mol_type = other DNA
gagtgatatcaccatcagtggttttaccggcacggcaggcagtctgacaatgaatgtggccggtaccctgctgaa

SEQ ID NO: 862882 - DNA, 75 bp, synthetic construct
  source 1..75: mol_type = other DNA
aaatcctagtaaagatttaccaaatggaaatatggcttctgctcatgctgaagttggtactattcaacaggcgtt

SEQ ID NO: 862883 - DNA, 75 bp, synthetic construct
  source 1..75: mol_type = other DNA
aggttatcagccagattagcggtcagatgagtaacatcgtcatgacgtatggcgaaactgaagcgatgaaagcag

SEQ ID NO: 862884 - DNA, 75 bp, synthetic construct
  source 1..75: mol_type = other DNA
taaaagtcacccggccggagagttaacggtggatgggcagactatcaggcagagttcggtaagtaaccgttatgg

SEQ ID NO: 862885 - DNA, 75 bp, synthetic construct
  source 1..75: mol_type = other DNA
cacactgaaactgattgctgccctcacgaatcatggtaccctggccgcagggaaaaccctttccgtcacgtcgca

SEQ ID NO: 862886 - DNA, 75 bp, synthetic construct
  source 1..75: mol_type = other DNA
tcgtactgggtactgccacggaaagtgattatcactacagtgaatcaggggaaacccgcaaccgtctcctcagcc

SEQ ID NO: 862887 - DNA, 75 bp, synthetic construct
  source 1..75: mol_type = other DNA
agcctgtatgtggatactgccgtggagacattgccgctatggctgacaaagcaggtttaaaatctcttactgttt

SEQ ID NO: 862888 - DNA, 75 bp, synthetic construct
  source 1..75: mol_type = other DNA
ctcactgaccagtgcgggcgacatcaccggagtggatgctctcacgctcacggtgaatcagacgctgcacaatca

SEQ ID NO: 862889 - DNA, 75 bp, synthetic construct
  source 1..75: mol_type = other DNA
ccgcaatgaatgcgggtaagtctacggcattgttgcaatcttcatacaattaccaggaacgcggcatgcgcactg

SEQ ID NO: 862890 - DNA, 75 bp, synthetic construct
  source 1..75: mol_type = other DNA
aactatctgtttttgtggccgcaaagcgagcatggtgttgcgactcgatcaggagggaagaccatataacgaagg

SEQ ID NO: 862891 - DNA, 75 bp, synthetic construct
  source 1..75: mol_type = other DNA
gagcgttacgtctcggtttgccgtaaacactataaagaagcgttagaagtcggttctttgacggctattcaagaa

SEQ ID NO: 862892 - DNA, 75 bp, synthetic construct
  source 1..75: mol_type = other DNA
ccggaaacagcaccgcatcagcagcagtgggagcacaaagcgggaagaatgctgttgataataactatctgagca

SEQ ID NO: 862893 - DNA, 75 bp, synthetic construct
  source 1..75: mol_type = other DNA
ggggagtgcccaggctatgtggttacttggtgccgggacaaatgccgggatgcagtatgcagatagtggtgaaat

SEQ ID NO: 862894 - DNA, 75 bp, synthetic construct
  source 1..75: mol_type = other DNA
aatcctactctgtggcagatgttcaaaatgtcatgcgtcgggttaccgcagacttcattatgatcgccgaaagta

SEQ ID NO: 862895 - DNA, 75 bp, synthetic construct
  source 1..75: mol_type = other DNA
gacaacctgaatgccggactgataaacgccggtggtgcactgaacctgaaggccatcggggatatcagcaatatc

SEQ ID NO: 862896 - DNA, 75 bp, synthetic construct
  source 1..75: mol_type = other DNA
ctttggtgtgtcgctgaccgccgggcaggttgcacaactgaccagaagcatactgtggtgggagtccgtcaccat

SEQ ID NO: 862897 - DNA, 75 bp, synthetic construct
  source 1..75: mol_type = other DNA
gttcgtacggaagccattcgcattgtggcattttcgttgaacggctgcatggcggcactggcgggaattgtgttt

SEQ ID NO: 862898 - DNA, 75 bp, synthetic construct
  source 1..75: mol_type = other DNA
cgcccggcagacaggacaacactgcagtagtcagaatcagagcaggaagaaaaagagaataatcacagggaaggt

SEQ ID NO: 862899 - DNA, 75 bp, synthetic construct
  source 1..75: mol_type = other DNA
gagtcgggcctgacgaccggatgccgccaggcagccgggagccgaaggtgcgcccggcagacaggacaacactgc

SEQ ID NO: 862900 - DNA, 75 bp, synthetic construct
  source 1..75: mol_type = other DNA
atcacctggcgaatatcacccctatccagcttggctttgaaaaagcggtgacctacatccgcaagaaactggcca

SEQ ID NO: 862901 - DNA, 75 bp, synthetic construct
  source 1..75: mol_type = other DNA
aaggtgcagatggtgagccgctgaacggtggtggtgggatagctaaaggcggtaaatctaaagatactcaaattt

SEQ ID NO: 862902 - DNA, 75 bp, synthetic construct
  source 1..75: mol_type = other DNA
aacaacattctgaaagtgacacagtatccggcagtacgctgaatgccgggaataatctgtctgttgtcgcaaccg

SEQ ID NO: 862903 - DNA, 75 bp, synthetic construct
  source 1..75: mol_type = other DNA
aacgccagtgaaaagctcacccacagcgggaaaagcagcgccccgtcgctcagcctcagtgcgccggaactgacc

SEQ ID NO: 862904 - DNA, 75 bp, synthetic construct
  source 1..75: mol_type = other DNA
gcaaaatggctgaattgttgaatgaggttcaccctgagtggtgctatgcaacatgccgcaatcgtatagatatgt

SEQ ID NO: 862905 - DNA, 75 bp, synthetic construct
  source 1..75: mol_type = other DNA
ggctgatgattgctgaatttatgctttataaaccaatgttcacggcacaaaaaaaactattgcaaagtgagcaat

SEQ ID NO: 862906 - DNA, 75 bp, synthetic construct
  source 1..75: mol_type = other DNA
tgatcaacggcaagcaaaaaagctggctggtgcattgtactgatgcagaggcgttatgcattgatcgggtgatta

SEQ ID NO: 862907 - DNA, 75 bp, synthetic construct
  source 1..75: mol_type = other DNA
gggcttccctgacgctcgacagtacaacgctcagcaacagtggctccctgctcagtggcagccgcctgactgtta

SEQ ID NO: 862908 - DNA, 75 bp, synthetic construct
  source 1..75: mol_type = other DNA
cagtctgacaatgaatgtggccggtaccctgctgaacagtgcgctgatttatgcggggaataacctgaagctgtt

SEQ ID NO: 862909 - DNA, 75 bp, synthetic construct
  source 1..75: mol_type = other DNA
ggccaaatgagctctatacctggaacatttggtggatttgttggttcattcgtatcagaaggtgcaagcagcgca

SEQ ID NO: 862910 - DNA, 75 bp, synthetic construct
  source 1..75: mol_type = other DNA
atgggtaatgatgagatcactactaattatctcagttcgttgcatgataagtacggttccggggctgcctcgaat

SEQ ID NO: 862911 - DNA, 75 bp, synthetic construct
  source 1..75: mol_type = other DNA
aataccgtttacctgatggtaggggtgttcgctataactctgatggctcattttcaggtttcctggatccaaaga

SEQ ID NO: 862912 - DNA, 75 bp, synthetic construct
  source 1..75: mol_type = other DNA
gaaggctcacgggaacagtgtgctgtacgtgatccaagtcgcgatggcacccggggaccggggcatgtgctgaat

SEQ ID NO: 862913 - DNA, 75 bp, synthetic construct
  source 1..75: mol_type = other DNA
aaaagcgaattgctaattggttggccgttgctgagtatgcgctatacattcccatgcgagaatcattcgctcaaa

SEQ ID NO: 862914 - DNA, 75 bp, synthetic construct
  source 1..75: mol_type = other DNA
tgcacgcaataaagtgctggaacgcatggcggcacaaggcgtgtggtcccgcgagcaggtaaaagaatcaagtga

SEQ ID NO: 862915 - DNA, 75 bp, synthetic construct
  source 1..75: mol_type = other DNA
gctgctggataacgctggcagctgcgccatttctcctttttcttgcagcgtggggagcagataaactctggcctc

SEQ ID NO: 862916 - DNA, 75 bp, synthetic construct
  source 1..75: mol_type = other DNA
gcgttatgtattgatcgagtcataagtgaggtgctggcagagcatccaggattgatttgcattctccggcaacgc

SEQ ID NO: 862917 - DNA, 75 bp, synthetic construct
  source 1..75: mol_type = other DNA
gccggttgtcggtcagtttggctttgccagcgccgtaccgttgttgaatcaggttaataacattttgctatcgcg

SEQ ID NO: 862918 - DNA, 75 bp, synthetic construct
  source 1..75: mol_type = other DNA
caaatgccgcaactggcaccgctgttttcgcgcatgatgctcggtaaaagcaaaagcgacaaaatcgttactacg

SEQ ID NO: 862919 - DNA, 75 bp, synthetic construct
  source 1..75: mol_type = other DNA
aggacgattgccaccgcgcagttcactggcgatgatcgtggttgatcataccgatatgcgtgttcgtggttgggt

SEQ ID NO: 862920 - DNA, 75 bp, synthetic construct
  source 1..75: mol_type = other DNA
gatgatcttccaggacccgatgaccagccttaacccgtgctacaccgtgggtttccagatcatggaagcgattaa

SEQ ID NO: 862921 - DNA, 75 bp, synthetic construct
  source 1..75: mol_type = other DNA
tatcggtgcatttcggcgacgaaagcgcaccgttccgcgccgtagatcgcatcagctacagcgtaaaacagggcg

SEQ ID NO: 862922 - DNA, 75 bp, synthetic construct
  source 1..75: mol_type = other DNA
tatgtggggcgggggatgactaagcgcaaaatggctgaattgctgaatgatgcacatccggaatggagtttaaga

SEQ ID NO: 862923 - DNA, 75 bp, synthetic construct
  source 1..75: mol_type = other DNA
ggtcgtatattggcggtggcaggtcaggaaatatgttcaatcagttgttggcctctaaaaagctgacaaaaacgg

SEQ ID NO: 862924 - DNA, 75 bp, synthetic construct
  source 1..75: mol_type = other DNA
tgcacacccagagtggtgttttagcacatgtgaaaagcgaattgctaattggttggctgttgctgagtatgcgct

SEQ ID NO: 862925 - DNA, 75 bp, synthetic construct
  source 1..75: mol_type = other DNA
ctggcgattatggggctgattgattatccgggccgcgtgatggcagaaaagctggagtttaacggccaggatttg

SEQ ID NO: 862926 - DNA, 75 bp, synthetic construct
  source 1..75: mol_type = other DNA
taatcaggaagtgaaggattacgtggctgaaggcaacagctacgacctgaactatctgaacagtaatacgtcgaa

SEQ ID NO: 862927 - DNA, 75 bp, synthetic construct
  source 1..75: mol_type = other DNA
ccatcgcggtgggtgaagtcttcaacagcatctgggactgcaaacagctgattgaagaacaacttatcgactata

SEQ ID NO: 862928 - DNA, 75 bp, synthetic construct
  source 1..75: mol_type = other DNA
gcatccaaaaaactgacgaaaacagccattaatgaagccctgcgcagaatgaaaaaagcgggaatagagaaagct

SEQ ID NO: 862929 - DNA, 75 bp, synthetic construct
  source 1..75: mol_type = other DNA
acatgcgaaaagcgaattgctaattggttggcagttgctgagtatgtcctatatatacccatgcgagaatcattt

SEQ ID NO: 862930 - DNA, 75 bp, synthetic construct
  source 1..75: mol_type = other DNA
tgatcgaaggaaagcaaaaaagctggctggcgcattgtacggatgcggaggcgttatgcattgatcgggtgatta

SEQ ID NO: 862931 - DNA, 75 bp, synthetic construct
  source 1..75: mol_type = other DNA
gcctctaaaaagctgacaaaaacggcaattaacgaggcgctccggaggatgaaaaaagcaggtctgaacaagtct

SEQ ID NO: 862932 - DNA, 75 bp, synthetic construct
  source 1..75: mol_type = other DNA
ggaaaactacgtatgtgggggcgctggtcgtatattggcggcggtaagacggggaatatgttcaaccagttgttg

SEQ ID NO: 862933 - DNA, 75 bp, synthetic construct
  source 1..75: mol_type = other DNA
atgaacagacacacactcacacgaatttcagaagaagcctttcacgagcttacccgaattaaacagacaactaac

SEQ ID NO: 862934 - DNA, 75 bp, synthetic construct
  source 1..75: mol_type = other DNA
atgaaaaacaaacacacattaacccgcatttcagaggaagcttttaacgagcttaccagaattaaacagacaact

SEQ ID NO: 862935 - DNA, 75 bp, synthetic construct
  source 1..75: mol_type = other DNA
accggctaaaccagaccttaattgcgtaacccgtttcggcggtgtcggcctgacgcctgcctgtgaaaaaggcca

SEQ ID NO: 862936 - DNA, 75 bp, synthetic construct
  source 1..75: mol_type = other DNA
atcacgccgggagaagcttccattattacctgtgacattgcgacaaaatccggtgcagtagaaattggctttctt

SEQ ID NO: 862937 - DNA, 75 bp, synthetic construct
  source 1..75: mol_type = other DNA
tttcagagaaagcttttagcgagcttaacagaattaaacaagcaactaacttaccccacaagacaattatgcaac

SEQ ID NO: 862938 - DNA, 75 bp, synthetic construct
  source 1..75: mol_type = other DNA
taaagctgagaataaactaccagttgatattgcccgtctattgagtctgaagattcacaagcttgctgcggaggt

SEQ ID NO: 862939 - DNA, 75 bp, synthetic construct
  source 1..75: mol_type = other DNA
ggttgaaaatggcagagtttatgctctatctgccgatgcgtgatgcattctcttccggggattcaaaaaccgtct

SEQ ID NO: 862940 - DNA, 75 bp, synthetic construct
  source 1..75: mol_type = other DNA
gccgcagcagcacaggcagtgctggcaggatgtcaatcggcagcgatactttgcctgaatcaggcagggatcctg

SEQ ID NO: 862941 - DNA, 75 bp, synthetic construct
  source 1..75: mol_type = other DNA
gaaaaatggcagaatgtttaaatcgtactcacccggaatggtgcttcagcacatgtgagaaacgtattgcaggtt

SEQ ID NO: 862942 - DNA, 75 bp, synthetic construct
  source 1..75: mol_type = other DNA
cgctcaggtgtaaacatctatgcgtggatgccggtattaagctgggatttagatcccacattaacgcgagtaaaa

SEQ ID NO: 862943 - DNA, 75 bp, synthetic construct
  source 1..75: mol_type = other DNA
atttcggccagccatgaggtcattcctggaagcagtcacggggtgatttcaccggttccggaaaataaccggtgg

SEQ ID NO: 862944 - DNA, 75 bp, synthetic construct
  source 1..75: mol_type = other DNA
aagtttgcagtgtttgcttctgatcctgaaaatcaggccatgctggtcagcggaggtttgctggtaaaagatata

SEQ ID NO: 862945 - DNA, 75 bp, synthetic construct
  source 1..75: mol_type = other DNA
agtgttgatgcacagaatcagcagcaggtgaaaaacgccatgattaactatttcatggtcaccaaaggggtggat

SEQ ID NO: 862946 - DNA, 75 bp, synthetic construct
  source 1..75: mol_type = other DNA
tcttcttctcgctgttagcgatggcgatttaccagaactattgcagcagagtggtaaaaaatccgcagtgggtgg

SEQ ID NO: 862947 - DNA, 75 bp, synthetic construct
  source 1..75: mol_type = other DNA
ggaaaactacgtatgtgggggcgctggtcgtacattggcggcggtaggtcagggaatatgttcaatcagttgctg

SEQ ID NO: 862948 - DNA, 75 bp, synthetic construct
  source 1..75: mol_type = other DNA
gaacttgaggcttttttgcggggtatgattaacggcaagcaaaagagctggctggcacattgtaccgattcagag

SEQ ID NO: 862949 - DNA, 75 bp, synthetic construct
  source 1..75: mol_type = other DNA
aaactgcacgaaatatttttgcacttccggtaatacaacctgaaagtgaagcctgtttgcacagaattatgctga

SEQ ID NO: 862950 - DNA, 75 bp, synthetic construct
  source 1..75: mol_type = other DNA
tcaggtttggcaaatgcgtcgcaattggattccattccgcgagtattaatcgccaataatccctcattaaaagag

SEQ ID NO: 862951 - DNA, 75 bp, synthetic construct
  source 1..75: mol_type = other DNA
gaaaaaagcgggaatagagaaagctgagctggaagcgtttttgcgagagatgatcaacggcaagcaaaagagctg

SEQ ID NO: 862952 - DNA, 75 bp, synthetic construct
  source 1..75: mol_type = other DNA
ggtcagcatagcggcggtaattttaaaaatgatccgcaacgcgcatctgaagcgggtaaaaaaggcggtcaacaa

SEQ ID NO: 862953 - DNA, 75 bp, synthetic construct
  source 1..75: mol_type = other DNA
atgatctgcaacccattatcgacagcctgcaagcgcagattgccgacaaagataagcagattgtcgataaagatc

SEQ ID NO: 862954 - DNA, 75 bp, synthetic construct
  source 1..75: mol_type = other DNA
atgctgccatcaggcagtgtgattgccggcagggatttcgttttattctgtttcttcccggggttcgggtttgaa

SEQ ID NO: 862955 - DNA, 75 bp, synthetic construct
  source 1..75: mol_type = other DNA
aagccatcgacgcaggcattaagcttatcatcaccatcactgagggcatcccgacgctggatatgctgaccgtga

SEQ ID NO: 862956 - DNA, 75 bp, synthetic construct
  source 1..75: mol_type = other DNA
catggcggcgcttggcatggtgattgtctttacctttttgctgttccaaaaaattcgtactgctgatagcgcccc

SEQ ID NO: 862957 - DNA, 75 bp, synthetic construct
  source 1..75: mol_type = other DNA
tctacgccattctgagttactccaccaactatctgaccgaaatgtatggcatgtcgctggtggcggcgagctaca

SEQ ID NO: 862958 - DNA, 75 bp, synthetic construct
  source 1..75: mol_type = other DNA
aagctatttccagcaatggccttggttgccgaaggtgtaatgtacgaacgtctggttgttccactgattcaccat

SEQ ID NO: 862959 - DNA, 75 bp, synthetic construct
  source 1..75: mol_type = other DNA
cacggcggcaatgcactcgcgcaacatcgaaaacatgaaccagatggcgaacgccattgataccagcattttcgt

SEQ ID NO: 862960 - DNA, 75 bp, synthetic construct
  source 1..75: mol_type = other DNA
caaccggtgttgctgaaaaatatcgacgagcgcggaaaaggcaccgtcagccgtgactgggttggtcgcgatgcg

SEQ ID NO: 862961 - DNA, 75 bp, synthetic construct
  source 1..75: mol_type = other DNA
cgtttgcacacttcacgttcaattagtctgtaaaaacgtcaaaaagagtgttttatcaacagaagaatggaggtc

SEQ ID NO: 862962 - DNA, 75 bp, synthetic construct
  source 1..75: mol_type = other DNA
ttcagcctctcggccacctcaccacacgcctcttacgagtgcttcgaagaacttgtttatcgctcatcgtcgctg

SEQ ID NO: 862963 - DNA, 75 bp, synthetic construct
  source 1..75: mol_type = other DNA
tgaaaaacaaagtggaagtgaacgatctggaaagtggtcgttatggcggagatttttatccactgacaggtcgtg

SEQ ID NO: 862964 - DNA, 75 bp, synthetic construct
  source 1..75: mol_type = other DNA
gtttcccgttccggtacactgacctatgaagcggttaaacagaccacggattacggtttcggtcagtctacctgt

SEQ ID NO: 862965 - DNA, 75 bp, synthetic construct
  source 1..75: mol_type = other DNA
ccttaggccgggccgtgaatccatgcaagtatttcataaccctcgagtgctggtggagccggaaccaaaaagcat

SEQ ID NO: 862966 - DNA, 75 bp, synthetic construct
  source 1..75: mol_type = other DNA
gaaagcgacatcgtaccgggagagcagaccgccaccatcatactgaagcagcgcacaaaaaatcttgcgccgctg

SEQ ID NO: 862967 - DNA, 75 bp, synthetic construct
  source 1..75: mol_type = other DNA
cctactgttcgccagccgctggcggaagataaatcactgctgccatttttcagcgatgagcgggtgattcgtgca

SEQ ID NO: 862968 - DNA, 75 bp, synthetic construct
  source 1..75: mol_type = other DNA
gtgctggcactgcgacaaccagctgcgtgaccagacctctgaatcactcgggcaacttgctcatcaaaacctgtc

SEQ ID NO: 862969 - DNA, 75 bp, synthetic construct
  source 1..75: mol_type = other DNA
atctatatacggacttttaaaagctttgcgccgggatttgaccaagcgtgaaagcctgagcatggcgacaattgc

SEQ ID NO: 862970 - DNA, 75 bp, synthetic construct
  source 1..75: mol_type = other DNA
tggtggagccggaaccaaaaagcatgcgcggtctgccgtccggagtcgttcctgccgttcgccagccgctggcgg

SEQ ID NO: 862971 - DNA, 75 bp, synthetic construct
  source 1..75: mol_type = other DNA
atagcctgggttattaccaccaacaatctgacaaattgcacaacggcgaaatggaagtacaggctgctttcggct

SEQ ID NO: 862972 - DNA, 75 bp, synthetic construct
  source 1..75: mol_type = other DNA
tacggtcatggttaatgcgggaatacggcgacgatacagcgcataatgtgtcaggcttgaatacctttatccgtt

SEQ ID NO: 862973 - DNA, 75 bp, synthetic construct
  source 1..75: mol_type = other DNA
ccgttctgcaaagactccattctggaagccatcgacgcaggtatcaaactgattatcaccatcactgaaggcatc

SEQ ID NO: 862974 - DNA, 75 bp, synthetic construct
  source 1..75: mol_type = other DNA
taacgcaataaatctaacgccggaattggtgacaccagataggccgctggtcatcgaaactcgttggcaatttac

SEQ ID NO: 862975 - DNA, 75 bp, synthetic construct
  source 1..75: mol_type = other DNA
cagaatcgttgcaggtgctttttgatgcggactggcaagaggaagcgggtagtgatgaactgccaactggaaatc

SEQ ID NO: 862976 - DNA, 75 bp, synthetic construct
  source 1..75: mol_type = other DNA
agggggctgatgagctggcaaatactgttcagcaggatgttgcagtggcgctgtttaattttctggaacatttcc

SEQ ID NO: 862977 - DNA, 75 bp, synthetic construct
  source 1..75: mol_type = other DNA
tggtgaaagcggtactgctgaaaatgcaaagcagtgacacgccgcccgccgccgttcatgagatgggcgttttcg

SEQ ID NO: 862978 - DNA, 75 bp, synthetic construct
  source 1..75: mol_type = other DNA
tcagaataaagcggtgagtgatactccactggatgacagggaaaaaggcttcatttccagcaccaccgtccccgt

SEQ ID NO: 862979 - DNA, 75 bp, synthetic construct
  source 1..75: mol_type = other DNA
ccttggcagagaaggttacgcaatatcgcgtatctgccgaagcgatctcttgtgaaacgttttatggacgacgtt

SEQ ID NO: 862980 - DNA, 75 bp, synthetic construct
  source 1..75: mol_type = other DNA
gcaacgattctgataaatgcctgaaagtggtggcagacacaccggtgactatcagccgggataatgcactgaagt

SEQ ID NO: 862981 - DNA, 75 bp, synthetic construct
  source 1..75: mol_type = other DNA
tgcgcaggttttagttccgacccggttaaatttatatccagagccggtactccaggtctcggcgcttcattttta

SEQ ID NO: 862982 - DNA, 75 bp, synthetic construct
  source 1..75: mol_type = other DNA
ttttcataaacgttggtttgggagaggcggcaaaaaggaatgtggggacagggacgaatcagatacctgatatgg

SEQ ID NO: 862983 - DNA, 75 bp, synthetic construct
  source 1..75: mol_type = other DNA
tctaccagctgacggactatatcggttacgacatcatgctccagtacattcaggaactgcttcagcaggcccggg

SEQ ID NO: 862984 - DNA, 75 bp, synthetic construct
  source 1..75: mol_type = other DNA
ggctaatcaccagggacttatccgggcactgatgtatggcggacaggccactatctttggctgtacatccacggg

SEQ ID NO: 862985 - DNA, 75 bp, synthetic construct
  source 1..75: mol_type = other DNA
tttaccagctgacggactatatcggctacgacatcctgctgcagtacattcaggaacttatccagcaggcccggg

SEQ ID NO: 862986 - DNA, 75 bp, synthetic construct
  source 1..75: mol_type = other DNA
ggccagcgcccctgcagctgctgaaccggaggaaaccgcgccggtggccagcgcccctgcagctgctgaaccgga

SEQ ID NO: 862987 - DNA, 75 bp, synthetic construct
  source 1..75: mol_type = other DNA
caatggataatgatgagcagcagactgaacaacatcgatattatcgcgctgaggtttatctcaaagaaggcggtc

SEQ ID NO: 862988 - DNA, 75 bp, synthetic construct
  source 1..75: mol_type = other DNA
ggaacgctgatttttgatgataaaggtgaaatccagtttatcgggccacaggctaatcaccaggggcttatccgg

SEQ ID NO: 862989 - DNA, 75 bp, synthetic construct
  source 1..75: mol_type = other DNA
tgggttatctgcgtcagcaggtatccacgcaactgatgagtcgttatgagcagaacctgaactatacatctgtat

SEQ ID NO: 862990 - DNA, 75 bp, synthetic construct
  source 1..75: mol_type = other DNA
aaaatgatccgctacgcgcatccgaagcaggtaaaaaaggcggtcaacaaagcggtggtaataaatcaggaaaat

SEQ ID NO: 862991 - DNA, 75 bp, synthetic construct
  source 1..75: mol_type = other DNA
tgctgaaaaatatcgacgagcgcggaaaaggtactgtcagccgtgactgggtaggtcgcgatgcggcgaaaatcg

SEQ ID NO: 862992 - DNA, 75 bp, synthetic construct
  source 1..75: mol_type = other DNA
tgaaactggaaggcggttgccaccacacggcggcaatgcactcgcgcaacatcgaaaacatgaaccagatggcga

SEQ ID NO: 862993 - DNA, 75 bp, synthetic construct
  source 1..75: mol_type = other DNA
gattcaccatatccagaaactgactgaaagagttgatgaacttgagtcagaattaaagttgttatcaacttcccg

SEQ ID NO: 862994 - DNA, 75 bp, synthetic construct
  source 1..75: mol_type = other DNA
tgctgaaaaatatcgacgagcgcggaaaaggcaccgtcagccgtgactgggtaggtcgcgatgcggcgaaaatcg

SEQ ID NO: 862995 - DNA, 75 bp, synthetic construct
  source 1..75: mol_type = other DNA
gccgttcatgagatgggcgttttcgcgtccctggatgacgccgttgcggcagccaaaattgcccagcaagggtta

SEQ ID NO: 862996 - DNA, 75 bp, synthetic construct
  source 1..75: mol_type = other DNA
gttggtcgcgacgcggcgaaaatcgcggcggcaatcggcctgaaggttccacaagaaacgcgcctgttgtttgtg

SEQ ID NO: 862997 - DNA, 75 bp, synthetic construct
  source 1..75: mol_type = other DNA
gtacaggtcgcaatgcgaaaatgacaggcgtgactggggtttctatggattgattgccgaggaagtgggagaaat

SEQ ID NO: 862998 - DNA, 75 bp, synthetic construct
  source 1..75: mol_type = other DNA
gtacaggtcgcaatgcgaaaatgacaggcgtgactggggattctatggattgattgccgaggaagttggagaaat

SEQ ID NO: 862999 - DNA, 75 bp, synthetic construct
  source 1..75: mol_type = other DNA
aattgatgatgaagaaattcgaagatcttaatttatctccattagttttagcccgaacgctggaagattttggca

SEQ ID NO: 863000 - DNA, 75 bp, synthetic construct
  source 1..75: mol_type = other DNA
tgcccctcagtttgttcactggcgaccagccaacgaagatgatgcaccggaaaccatttccagcaatggccttgt

SEQ ID NO: 863001 - DNA, 75 bp, synthetic construct
  source 1..75: mol_type = other DNA
gtacaggtcgcaatgcgaaaatgacaggcgtgactgggggttctacggattgattgccgaggaagtcggagaaat

SEQ ID NO: 863002 - DNA, 75 bp, synthetic construct
  source 1..75: mol_type = other DNA
gtacaggtcgcaatgcgaaaatgacaggcgtgactggggcttctaaggattgattgccgaggaagtaggagaaat

SEQ ID NO: 863003 - DNA, 75 bp, synthetic construct
  source 1..75: mol_type = other DNA
cgtcagggcgaccacgctggatggcgatggcctgttgcagagcgcctctgcactggcgcttgcaggcgacaccct

SEQ ID NO: 863004 - DNA, 75 bp, synthetic construct
  source 1..75: mol_type = other DNA
atgcagctgaaaatgtcacccttaccaccaccgatgataccacactgaaaggccgcagcattgccgggaaaacac

SEQ ID NO: 863005 - DNA, 75 bp, synthetic construct
  source 1..75: mol_type = other DNA
acagcggtaaaaccgtcaccatcaacagtggtcgggatacggtactgaacggtgctcaggtcaacggcaacagga

SEQ ID NO: 863006 - DNA, 75 bp, synthetic construct
  source 1..75: mol_type = other DNA
cgccagcggtggtgacaccaccgtcaccgcaggacgggatatcaccgctgttgcgtcatccgttactgcaaccgg

SEQ ID NO: 863007 - DNA, 75 bp, synthetic construct
  source 1..75: mol_type = other DNA
ggagaaagtaattaatcctaactggaaaaactgggaatggctcaatgttggtatggggatcagcaagcctctacc

SEQ ID NO: 863008 - DNA, 75 bp, synthetic construct
  source 1..75: mol_type = other DNA
ttggctctgaccctgagtggcgatgttattgccgccaccggcagcaaaattaccgccctgggcgatgcccgtctg

SEQ ID NO: 863009 - DNA, 75 bp, synthetic construct
  source 1..75: mol_type = other DNA
aaccacggtggatgcgggtaaaaatgtctccctcacaagcggacatgataccaccctgtcgggggctcaggtcag

SEQ ID NO: 863010 - DNA, 75 bp, synthetic construct
  source 1..75: mol_type = other DNA
gattgcgaaccgggatatcagcattaccggtgacagtgtggtggttgacccggggcatgaccgtcgtactgtgga

SEQ ID NO: 863011 - DNA, 75 bp, synthetic construct
  source 1..75: mol_type = other DNA
gcgcttgcaggcgacaccctctcacaggggcgtcacggacgctggctgacggcgggcgacctctccctccggggt

SEQ ID NO: 863012 - DNA, 75 bp, synthetic construct
  source 1..75: mol_type = other DNA
ataatgctctgcgtgagaaagatattgccagtgataaggaggttattgctgcctgcggtaatggtaatgcgggta

SEQ ID NO: 863013 - DNA, 75 bp, synthetic construct
  source 1..75: mol_type = other DNA
acctgatggctcacgcagtctggggagcacttgccgcacaactgggcggaaacaatgcggcttccggtgctgcgg

SEQ ID NO: 863014 - DNA, 75 bp, synthetic construct
  source 1..75: mol_type = other DNA
tcaggacaaaattaaaagcaattatgattctgtccgggaacagagtggtatctacgccggaaaagacgggtttga

SEQ ID NO: 863015 - DNA, 75 bp, synthetic construct
  source 1..75: mol_type = other DNA
caacagtggcaagattctttccggcggtgagctgacgttcaccacgccggactacagtggcagtggctggctaca

SEQ ID NO: 863016 - DNA, 75 bp, synthetic construct
  source 1..75: mol_type = other DNA
tgcacagaacgatattctgctggctgccgccgctgacacccgacagaccaccgggaagaacagcagcaaaggtgg

SEQ ID NO: 863017 - DNA, 75 bp, synthetic construct
  source 1..75: mol_type = other DNA
ccggtgttaaccacggactgcagcaacagagtgctgacccgaataatggtatcggcgtgagcatttcgctcaacc

SEQ ID NO: 863018 - DNA, 75 bp, synthetic construct
  source 1..75: mol_type = other DNA
gaatgcggggctgataagcgcgggcggtagcctggacctgagcgccatcggggatatcggcaatatcagctcagt

SEQ ID NO: 863019 - DNA, 75 bp, synthetic construct
  source 1..75: mol_type = other DNA
gcagtctggggagcgcttgctgcacaactgggtggaaacaatgcggcttccggtgctgcaggggcattcagcggt

SEQ ID NO: 863020 - DNA, 75 bp, synthetic construct
  source 1..75: mol_type = other DNA
agaagcaggatattgccgggctcagccgggacccggaaaatgccaacggcagcattgcaccgatatttgacaggg

SEQ ID NO: 863021 - DNA, 75 bp, synthetic construct
  source 1..75: mol_type = other DNA
ctcaaatgcaatagccggtgcggcgaacgcacttaccggtatgtccggcagcagtggacatgctgaaggtaccac

SEQ ID NO: 863022 - DNA, 75 bp, synthetic construct
  source 1..75: mol_type = other DNA
acagtcgtctgaaagccctgcaggccacaaagacagcgctgtctggtgtgcaggccggacaggctgcggcaatgg

SEQ ID NO: 863023 - DNA, 75 bp, synthetic construct
  source 1..75: mol_type = other DNA
ctgttactggaaaggaaattcctgggtttgtttatgattattggggaggggttgcttcagagttttcatctggat

SEQ ID NO: 863024 - DNA, 75 bp, synthetic construct
  source 1..75: mol_type = other DNA
tactgccggcgacagtgtgatgctgagtgcaggccgggatgtgagcagtcagggtgcaggtatcgcagcggaaga

SEQ ID NO: 863025 - DNA, 75 bp, synthetic construct
  source 1..75: mol_type = other DNA
cagttaatgcgtttatcattagctgccggtggttcttaccagacaggaaaggggatagcccaggtatctgatggt

SEQ ID NO: 863026 - DNA, 75 bp, synthetic construct
  source 1..75: mol_type = other DNA
agtgaccgttacgacagcagacagaacagcgtggccgcaggtggcagcttcacctttggctcgatgtccggcagc

SEQ ID NO: 863027 - DNA, 75 bp, synthetic construct
  source 1..75: mol_type = other DNA
gtaacagtctgaccaaccgtggcctgttccaggccgcacaactgaatgtcaacacgcagaccatcaccaacagcg

SEQ ID NO: 863028 - DNA, 75 bp, synthetic construct
  source 1..75: mol_type = other DNA
cgatgacgctgaatgtgacaaccgtggcgctggacggggaaaccagtgccggtgacaccctccgggttcaggcag

SEQ ID NO: 863029 - DNA, 75 bp, synthetic construct
  source 1..75: mol_type = other DNA
cgttttggccgcaaagaagagtgatcctacagccattgtgtatgctcgtgaatggggaggaacgccagcccctgt

SEQ ID NO: 863030 - DNA, 75 bp, synthetic construct
  source 1..75: mol_type = other DNA
tacctaagccaaaaccgatgatgacgggactggcgcatttgggacatttggtgatttatctcctgtttattgcgc

SEQ ID NO: 863031 - DNA, 75 bp, synthetic construct
  source 1..75: mol_type = other DNA
cgtagtacacgcagcattggcctgactgaagccggcagaatttactaccagggctgccgtcggatgctccatgaa

SEQ ID NO: 863032 - DNA, 75 bp, synthetic construct
  source 1..75: mol_type = other DNA
ggattaatcagcgcgaagacgctggaagtgaatggcgattcgctcagcaacggtggcgaaatcagtgctgttaac

SEQ ID NO: 863033 - DNA, 75 bp, synthetic construct
  source 1..75: mol_type = other DNA
tacacaccggttccaaggcaatgagaaataggcttggtctctgtgaaactggtgatgatatattattggtcgggc

SEQ ID NO: 863034 - DNA, 75 bp, synthetic construct
  source 1..75: mol_type = other DNA
gccaatgcaatgcttagagaacatcgttctctttgtgatgaatttgttgagagaaatatttcaagatgggcagag

SEQ ID NO: 863035 - DNA, 75 bp, synthetic construct
  source 1..75: mol_type = other DNA
ttaccagtatccattatggcgtcaccggtcgtccggtttatcgctaccgtattcaggcagagcattactcattac

SEQ ID NO: 863036 - DNA, 75 bp, synthetic construct
  source 1..75: mol_type = other DNA
taacgccgcagacgttacgcacgctgtgccagtggattgacgcgcatcaggactatgagttttcaaccgacgagc

SEQ ID NO: 863037 - DNA, 75 bp, synthetic construct
  source 1..75: mol_type = other DNA
atgatcgtaaacccagagaccaaagcaaaggttctccggtatgcgatgggcaaccctgggaatttatccatcaca

SEQ ID NO: 863038 - DNA, 75 bp, synthetic construct
  source 1..75: mol_type = other DNA
ttatgcgttatataccgaaaaagataagctgccgctgaaggtacaggtcgtgatcaactcgctgacggattattt

SEQ ID NO: 863039 - DNA, 75 bp, synthetic construct
  source 1..75: mol_type = other DNA
tggcgctgattctggcgttcttcagttaccgtcacggtctgcctttaactctgcgctccgcactctatcccatta

SEQ ID NO: 863040 - DNA, 75 bp, synthetic construct
  source 1..75: mol_type = other DNA
tcaccagtatccattatggcgtcacaggtcgtccggtttatcgttatcgtattcaggcagaacattactcactac

SEQ ID NO: 863041 - DNA, 75 bp, synthetic construct
  source 1..75: mol_type = other DNA
caccattcagggcaacggtaaaaccacgctcagcgcggcaacgcaggcccacaacagcggcaaaattctttccgg

SEQ ID NO: 863042 - DNA, 75 bp, synthetic construct
  source 1..75: mol_type = other DNA
gccggtaatgacctgaacatgaacgcgatacaggccggcgaacgtcgtcgctatggcgggtccgggtggtatgaa

SEQ ID NO: 863043 - DNA, 75 bp, synthetic construct
  source 1..75: mol_type = other DNA
agtcagcctgtcgctcaccacccagaaatcgaaatcacaacaacattctgaaagtgacacagtatccggcagtac

SEQ ID NO: 863044 - DNA, 75 bp, synthetic construct
  source 1..75: mol_type = other DNA
cctcgatcggattatcctttggcccgtatttcccgggattaataaattcaaatgataacgattattcgataaatg

SEQ ID NO: 863045 - DNA, 75 bp, synthetic construct
  source 1..75: mol_type = other DNA
accatttcagcggaacggataccggtccgctggctgctgtcagggcaacggactcactgtttatgggcgcagccg

SEQ ID NO: 863046 - DNA, 75 bp, synthetic construct
  source 1..75: mol_type = other DNA
aaccggaaaaagattaccgctttctgggggatgcggcttttgatacccggtatgtcagtaacgtcatactgaacc

SEQ ID NO: 863047 - DNA, 75 bp, synthetic construct
  source 1..75: mol_type = other DNA
aacacacagaggtttgataatcagcagaacggcacgctgtacagtgctgcagacctgacactggatataccggac

SEQ ID NO: 863048 - DNA, 75 bp, synthetic construct
  source 1..75: mol_type = other DNA
gagggcgatatcatactgagcagttccggaaaactggtcctgaagaacagccttgccggcggcaataccaccgta

SEQ ID NO: 863049 - DNA, 75 bp, synthetic construct
  source 1..75: mol_type = other DNA
aatccagggagcgatacggtaatggccctgctatcagcagaagatgcgaaagactatgctctggcattgctgacg

SEQ ID NO: 863050 - DNA, 75 bp, synthetic construct
  source 1..75: mol_type = other DNA
tatggtctcgctcagcggcgcgggccagctggttgcactcggtaacctgacgctgaagctcaccagtggtttgac

SEQ ID NO: 863051 - DNA, 75 bp, synthetic construct
  source 1..75: mol_type = other DNA
acaatcagggctggcaggaggggaccaccggaaaggaaacggtctggcggcttgcctccgactcactccccaaag

SEQ ID NO: 863052 - DNA, 75 bp, synthetic construct
  source 1..75: mol_type = other DNA
gcgataaccgcggagatattgtgattgcaggaagccagcttaaggccggtggtaacacaagcctggatgccgcga

SEQ ID NO: 863053 - DNA, 75 bp, synthetic construct
  source 1..75: mol_type = other DNA
cgctgatttatgcggggaataacctgaagctgtttacagaccgtctgcataaccagcatggtgatatcctggccg

SEQ ID NO: 863054 - DNA, 75 bp, synthetic construct
  source 1..75: mol_type = other DNA
gcgattattaaacgtttaccgggcgcagcggaagcgactttgccgttgcaatcaagtggaggggcaggtgaacgc

SEQ ID NO: 863055 - DNA, 75 bp, synthetic construct
  source 1..75: mol_type = other DNA
tttggtgatggtcacagacagaacatgccgtggtggggcggttttgatccgcgtgtgtggaatgtggccagtctg

SEQ ID NO: 863056 - DNA, 75 bp, synthetic construct
  source 1..75: mol_type = other DNA
ccgtggtggggcggttttgatccgcgtgcgtgggatgtggcaagcctgatggattttgctgtgccggtggtggcg

SEQ ID NO: 863057 - DNA, 75 bp, synthetic construct
  source 1..75: mol_type = other DNA
actgattggtctttttaccggaaactgggcttacggggcgatagccggttgtacgttcttcattgcgcgtgaaca

SEQ ID NO: 863058 - DNA, 75 bp, synthetic construct
  source 1..75: mol_type = other DNA
atgaatatgccgtggtggggcggttttgatccgcgcgcgtgggatgtggcaagcctgatggattttgctgtgccg

SEQ ID NO: 863059 - DNA, 75 bp, synthetic construct
  source 1..75: mol_type = other DNA
tccgtgcgtatggggtgttagaagccttatggattttgcgatgccggttgtagcatgtctgttaagtctggctgt

SEQ ID NO: 863060 - DNA, 75 bp, synthetic construct
  source 1..75: mol_type = other DNA
attacctaaagcatggaatatggctagcgtttgcgacttcgccgcacctgtattcctgtgctgtttgatttatat

SEQ ID NO: 863061 - DNA, 75 bp, synthetic construct
  source 1..75: mol_type = other DNA
gaaatgttcgggcatggcaagcgaatgaatatgcgtggtggggcggttttgatccgcgcgcgtgggatgtggcaa

SEQ ID NO: 863062 - DNA, 75 bp, synthetic construct
  source 1..75: mol_type = other DNA
gaactgggcttacggggcgatagccggttgtacgttcttcattgcgcgtgaacacacccaggcagaatatcgctg

SEQ ID NO: 863063 - DNA, 75 bp, synthetic construct
  source 1..75: mol_type = other DNA
gaatatgccagtatggttgacgatatcagagagaaagtgtctgttgagatggaccggtttttccaaaaaatgatg

SEQ ID NO: 863064 - DNA, 75 bp, synthetic construct
  source 1..75: mol_type = other DNA
ttccactggtattatttatcttttcatggccggtattgtctgcagatattcatggacgggttgttcgtgtactgg

SEQ ID NO: 863065 - DNA, 75 bp, synthetic construct
  source 1..75: mol_type = other DNA
tgatctacgcgcgtgggatgtagcaagcctgatggattttgctgtgccggtggtggcgtgtctgctgatctggct

SEQ ID NO: 863066 - DNA, 75 bp, synthetic construct
  source 1..75: mol_type = other DNA
atggatataagccccttacttcatgcgctttgtgctgtggctgcgcagatactggttggtctttttaccggaaac

SEQ ID NO: 863067 - DNA, 75 bp, synthetic construct
  source 1..75: mol_type = other DNA
actggttggtctttttaccggaaactgggcttacggagcgatagccggttgtacgttcttcattgcgcgtgaaca

SEQ ID NO: 863068 - DNA, 75 bp, synthetic construct
  source 1..75: mol_type = other DNA
ccgctgctgcccgtgtgcggatgagcctcgacacggtgccggaacagctgacccgtatccgttcacagctcgctt

SEQ ID NO: 863069 - DNA, 75 bp, synthetic construct
  source 1..75: mol_type = other DNA
ccaacctgctgaagcctgcgctggcgcggggtgaactgcgcaccattgctgccaccacctggtctgagtacaaac

SEQ ID NO: 863070 - DNA, 75 bp, synthetic construct
  source 1..75: mol_type = other DNA
gaaatctgtttttaaggatgtaaaagtatgggtattcactttttttaaaatggtcattattccgcttgtcattat

SEQ ID NO: 863071 - DNA, 75 bp, synthetic construct
  source 1..75: mol_type = other DNA
gaagccgttcgcaaacgcccttacagcgtggtgctgctcgacgaagtggaaaaggcgcaccgcgacgtaatgaac

SEQ ID NO: 863072 - DNA, 75 bp, synthetic construct
  source 1..75: mol_type = other DNA
aaagagggagaactcagcccggcactgcaaaacgtgctggataagtttaccctcgacgtcactgccaaagcccgc

SEQ ID NO: 863073 - DNA, 75 bp, synthetic construct
  source 1..75: mol_type = other DNA
ggtgggggaccccggtgtggggaaaacggctctggtggaagggctcgccctgcgtattgcggaaggtaacgtacc

SEQ ID NO: 863074 - DNA, 75 bp, synthetic construct
  source 1..75: mol_type = other DNA
caaacgcaatgcgacggttttcgtcttgatgcggtcaaacatattccggcgtggttttataaagagtggatcgaa

SEQ ID NO: 863075 - DNA, 75 bp, synthetic construct
  source 1..75: mol_type = other DNA
aacgacggcattaccgtggtcgtcacgctgcatcaggtggattacgccctgcgctactgcgaacgcatcgtcgcc

SEQ ID NO: 863076 - DNA, 75 bp, synthetic construct
  source 1..75: mol_type = other DNA
cgtctggcccgcgatatccgtaaaagccgcgcccataccggctacatcttccaacaattcaacctggtgaatcgc

SEQ ID NO: 863077 - DNA, 75 bp, synthetic construct
  source 1..75: mol_type = other DNA
ttttctttcttcttattggcgttggcgttatagctcgtaaagtgggagtcattacaccaggaaacactccccaac

SEQ ID NO: 863078 - DNA, 75 bp, synthetic construct
  source 1..75: mol_type = other DNA
gtcgcacgaagtcgataaactgcaaacatatattgatcaggtggaaggccaaaccatgctgtttgacgcgccgtt

SEQ ID NO: 863079 - DNA, 75 bp, synthetic construct
  source 1..75: mol_type = other DNA
atgcgtaatcccacgctgttgcaatgttttcactggtattacccggaaggcggcaagctctggcctgaactggcc

SEQ ID NO: 863080 - DNA, 75 bp, synthetic construct
  source 1..75: mol_type = other DNA
cgctttgtgccgtagcggtgcaggtactggctggtctttttaccggaaactgggcttacggagcgatagccggtt

SEQ ID NO: 863081 - DNA, 75 bp, synthetic construct
  source 1..75: mol_type = other DNA
ctgggttaatgctaactcggtgtgtgttaatgatgttacgcctgacgatgcaagtacctgggttgctaaactaga

SEQ ID NO: 863082 - DNA, 75 bp, synthetic construct
  source 1..75: mol_type = other DNA
tatgtctttaagtgctcttagtgaaggattaacgggcaacagatctcttatcgactgcatttcatctatcgttca

SEQ ID NO: 863083 - DNA, 75 bp, synthetic construct
  source 1..75: mol_type = other DNA
caacaagaattgatattgcgtggcaattatgcatctgctacagatcaattacgtgtttatatactcaaagaacat

SEQ ID NO: 863084 - DNA, 75 bp, synthetic construct
  source 1..75: mol_type = other DNA
cgaagatcctctgtgtaattgtcggcatttcattttcactaatgctggttgctctttttctttccatggactgga

SEQ ID NO: 863085 - DNA, 75 bp, synthetic construct
  source 1..75: mol_type = other DNA
atgtcactactattttagtggagtaaagcaaccgtctcatcttattttcttaaataatgataacagaaatccaga

SEQ ID NO: 863086 - DNA, 75 bp, synthetic construct
  source 1..75: mol_type = other DNA
tatattgatacgcaccatataacagcaaaagaacatgaaaaaataaaattacttataaatgaagttaataaagta

SEQ ID NO: 863087 - DNA, 75 bp, synthetic construct
  source 1..75: mol_type = other DNA
caaagtaacaaatccgggggcgcagttttatatatcaccaggaaaaccatcacatatttttggagagggaggatg

SEQ ID NO: 863088 - DNA, 75 bp, synthetic construct
  source 1..75: mol_type = other DNA
aaaaaagatttggcgacatatggagcgctgcttaataacaatgaaaatggattaaaacctaaagatattagagcg

SEQ ID NO: 863089 - DNA, 75 bp, synthetic construct
  source 1..75: mol_type = other DNA
ttaacgggcaacagatctcttatcgactgcatttcatctatcgttcataacaaactgcccagcgtatcagaaatc

SEQ ID NO: 863090 - DNA, 75 bp, synthetic construct
  source 1..75: mol_type = other DNA
ggaactttccacaaaaatagatgaaataatcatttcatctaaactagatgtattaaaattcgaaaaacatcatca

SEQ ID NO: 863091 - DNA, 75 bp, synthetic construct
  source 1..75: mol_type = other DNA
tcgatttgtataattatggcgttttctttaatggtaaaagaatagatgaaaaatttagtatatcaaagcttacat

SEQ ID NO: 863092 - DNA, 75 bp, synthetic construct
  source 1..75: mol_type = other DNA
aaatagcacatcaaacagttgagcaagttatagatttaataatcactccaaaggctacaggtaatccagttttat

SEQ ID NO: 863093 - DNA, 75 bp, synthetic construct
  source 1..75: mol_type = other DNA
tttttagtcattctggttgccattttcttttccaccgcttggcgagtcctgacgttatcgggactggtggggtga

SEQ ID NO: 863094 - DNA, 75 bp, synthetic construct
  source 1..75: mol_type = other DNA
cagcatttaatcaggcagagtttaataaacttcttcttgaatgtgttgtaaaaacgcagtcaacggtggcaaaga

SEQ ID NO: 863095 - DNA, 75 bp, synthetic construct
  source 1..75: mol_type = other DNA
tcttgaactgggtcttcgtgtatatgaggcccagatggagcgcaaagagtctgcatttaatcaggccgagtttaa

SEQ ID NO: 863096 - DNA, 75 bp, synthetic construct
  source 1..75: mol_type = other DNA
tgcgatagttgaacagcgtcgtcaggagggggcaagagataaagatataagtgtttcgggaacagcttcaatgct

SEQ ID NO: 863097 - DNA, 75 bp, synthetic construct
  source 1..75: mol_type = other DNA
gaaatgttcgggcatggcaagcgagaaggtaaaacatggaaatggaatcaaattgaccatgtaacgccgcgggat

SEQ ID NO: 863098 - DNA, 75 bp, synthetic construct
  source 1..75: mol_type = other DNA
cgaagatcctctgtgtaatcgtcggtatttcattttcactaatgctggttgctatttttcttttcctgccttgga

SEQ ID NO: 863099 - DNA, 75 bp, synthetic construct
  source 1..75: mol_type = other DNA
aatatggttgaagatatcagggagaaggtatcatctgagatggagcgattttttccaaaaaatgatgatgaataa

SEQ ID NO: 863100 - DNA, 75 bp, synthetic construct
  source 1..75: mol_type = other DNA
tttatcagaatcgagattagttcgagggtttgcaaacagggtatggccttcacatgtaccgacgataaaaaaggg

SEQ ID NO: 863101 - DNA, 75 bp, synthetic construct
  source 1..75: mol_type = other DNA
acgatgataatataaataaatctctcatattgagggagttatggataatggaatccagaagacaattaatttata

SEQ ID NO: 863102 - DNA, 75 bp, synthetic construct
  source 1..75: mol_type = other DNA
atttcatttttagtcatgctggttgccattttcttttccaccgcctggcgagtcctgacgttatcgggactggtg

SEQ ID NO: 863103 - DNA, 75 bp, synthetic construct
  source 1..75: mol_type = other DNA
aagtgttagtcagccaataaaaaaagacttcattcctgaaaaatattattctgaaaatagtcttttttctaatta

SEQ ID NO: 863104 - DNA, 75 bp, synthetic construct
  source 1..75: mol_type = other DNA
tttttctttaaggataatgttagtgaatttgactttggtaattatagagttgtttcttcccaagacatgtttata

SEQ ID NO: 863105 - DNA, 75 bp, synthetic construct
  source 1..75: mol_type = other DNA
atagcaatgcaagtggactaaaacctaaagatattagagcgacggaggatttcttaagaggctatagttcaggaa

SEQ ID NO: 863106 - DNA, 75 bp, synthetic construct
  source 1..75: mol_type = other DNA
cagttacaggcccttaaaggtgttagtcagctaaccgcaataaccctggttgctgaactgggtgatttttcacga

SEQ ID NO: 863107 - DNA, 75 bp, synthetic construct
  source 1..75: mol_type = other DNA
ctcgcctgttacctgagtggtctctgtgcaatctggtctgccagttacaggcccttaaaggtgttggtcagctaa

SEQ ID NO: 863108 - DNA, 75 bp, synthetic construct
  source 1..75: mol_type = other DNA
gaagatcgcatacagaaaattaatggtcatacggctgttatcacatttgatcccgatattgagatgtttcgcagt

SEQ ID NO: 863109 - DNA, 75 bp, synthetic construct
  source 1..75: mol_type = other DNA
tggagtacaaagacagcggtaagaaagatgcaaacggtcgtgcagtactggttaagcaggaagaggtgattaaca

SEQ ID NO: 863110 - DNA, 75 bp, synthetic construct
  source 1..75: mol_type = other DNA
gagacactcgaccgaaatgagctgcgtaaaaagttttccattcagcggctcaatgaaatggagatttatccggga

SEQ ID NO: 863111 - DNA, 75 bp, synthetic construct
  source 1..75: mol_type = other DNA
atggaaaagctgattagcgcgtatcgacgtatgctgcgacaagggaatcatgcgctgacggttattgttgggtga

SEQ ID NO: 863112 - DNA, 75 bp, synthetic construct
  source 1..75: mol_type = other DNA
ttatcgccgcatgggctggagtggcgagccaaccaccagcgagctgaaaaatccagaacgcaatatttcaatggg

SEQ ID NO: 863113 - DNA, 75 bp, synthetic construct
  source 1..75: mol_type = other DNA
cagttacaggctctaaaaggtgttggtcagctaattgcaataaccctggttgctgaactgggtgatttttcgcga

SEQ ID NO: 863114 - DNA, 75 bp, synthetic construct
  source 1..75: mol_type = other DNA
gcaattgtcgccaatgatgtacgtaaagccattggtgaagcaaaagatgatgatactgcagatatcctgaccgcc

SEQ ID NO: 863115 - DNA, 75 bp, synthetic construct
  source 1..75: mol_type = other DNA
ggtgcgctgctacggactttctcgtcagatcggaaaaaggcgatcagcaaaatcaacgatctggatgctgacgag

SEQ ID NO: 863116 - DNA, 75 bp, synthetic construct
  source 1..75: mol_type = other DNA
atgccgctatccgctttcacatcagaacgtatactcgacacctgcttattagcgggttgttcatcaaagcatgac

SEQ ID NO: 863117 - DNA, 75 bp, synthetic construct
  source 1..75: mol_type = other DNA
cgattatcgctatcgaatcgggtggtaatccgaacgcggtgagtaaatcgaatgccattggtttgatgcagttaa

SEQ ID NO: 863118 - DNA, 75 bp, synthetic construct
  source 1..75: mol_type = other DNA
ccagaaaacgttacaagaagaaaaaataactgctaagtctgtggcactggaagagggcgttattcttgcgcgctt

SEQ ID NO: 863119 - DNA, 75 bp, synthetic construct
  source 1..75: mol_type = other DNA
atatcagctaacaaagaattttgatgttatctggttatggtccgaagacggtaaaaactggtatgaggaagtgaa

SEQ ID NO: 863120 - DNA, 75 bp, synthetic construct
  source 1..75: mol_type = other DNA
ataccagctaactaaaaaagcgggcgtggtatggctcttttgcgaagatggcaaaaactggtatgaggaacaaaa

SEQ ID NO: 863121 - DNA, 75 bp, synthetic construct
  source 1..75: mol_type = other DNA
tgggtgacaaatacgtcgtggcgcttaaccttgccccggcaacgccgcgctggctggcagccattcatgctgagc

SEQ ID NO: 863122 - DNA, 75 bp, synthetic construct
  source 1..75: mol_type = other DNA
aacgcgctgtcaggctgaatatggcgacggatgaggagcgtacacgactggagtcatgggaacgctacagcgttc

SEQ ID NO: 863123 - DNA, 75 bp, synthetic construct
  source 1..75: mol_type = other DNA
atatcagctaacaaagaattttgatgttatctggttgtggtcagaagatgggaaaaactggtacgaggaattaaa

SEQ ID NO: 863124 - DNA, 75 bp, synthetic construct
  source 1..75: mol_type = other DNA
gtcgttgaggttccagatattacagccaaccgccgcgctgatgattcaggaaagtggatgtttaaggatggagct

SEQ ID NO: 863125 - DNA, 75 bp, synthetic construct
  source 1..75: mol_type = other DNA
ctttccgcgatgctaaagctcgtgatgaagccattgcgtatctgagcaagcgccatccggacctggtgattagta

SEQ ID NO: 863126 - DNA, 75 bp, synthetic construct
  source 1..75: mol_type = other DNA
tatgccaggtatcgcgggtatcgtcttaacccttgcggtggcggtcgatgcgaacgtactgatcaacgaacgtat

SEQ ID NO: 863127 - DNA, 75 bp, synthetic construct
  source 1..75: mol_type = other DNA
aacaacccgaacgaagcgcgtcagttgtcgctgctgctgcgtgccggtgcgttgattgcgccgattcagattgtt

SEQ ID NO: 863128 - DNA, 75 bp, synthetic construct
  source 1..75: mol_type = other DNA
cgaacgtactgatcaacgaacgtattaaagaagagttgagcaacggacgtactgttcagcaggcaattgatgaag

SEQ ID NO: 863129 - DNA, 75 bp, synthetic construct
  source 1..75: mol_type = other DNA
cctgcgcagcgacctgcgcgaaaagggcatcccgtataccaccgttcgtaaagaaaacaactacggcctgagcat

SEQ ID NO: 863130 - DNA, 75 bp, synthetic construct
  source 1..75: mol_type = other DNA
tggctggcagctattcatgctgagccgatgaagctcggcctcgacttgcgtggcggggttcacttcctgatggaa

SEQ ID NO: 863131 - DNA, 75 bp, synthetic construct
  source 1..75: mol_type = other DNA
ggaaacattctttcctgctatgaggctggcccctgtggttttgggctatatcatcaactcacagcgatgaatata

SEQ ID NO: 863132 - DNA, 75 bp, synthetic construct
  source 1..75: mol_type = other DNA
taaatacaccgaccgacagtctgtgctgcgagctggttctgccggccggaactctcaggctgaaaggtgaactga

SEQ ID NO: 863133 - DNA, 75 bp, synthetic construct
  source 1..75: mol_type = other DNA
gttctgccggccggaactctcaggcttaaaggtaaactgacgccggcgttattacagacacttatccgcgaaata

SEQ ID NO: 863134 - DNA, 75 bp, synthetic construct
  source 1..75: mol_type = other DNA
gtggcgcagatcgcccgtgaaaacggaatcaacgataacctgctcttcaactggcgccatcaataccggaaaggt

SEQ ID NO: 863135 - DNA, 75 bp, synthetic construct
  source 1..75: mol_type = other DNA
gaaatctctggttgcgggaaaaacggttactgtcacatattttcagcgagatcgttatggtcgtattctcgggca

SEQ ID NO: 863136 - DNA, 75 bp, synthetic construct
  source 1..75: mol_type = other DNA
aacttgatacgggagtgcctccacagtacctgtcgtacttactgaaaacaccgttatgtccgaagtcccggtggt

SEQ ID NO: 863137 - DNA, 75 bp, synthetic construct
  source 1..75: mol_type = other DNA
cactttcgttcgtctcttcgatccatacctgatcggctcacgtccgaccttttcccatctcgctcaccaccacat

SEQ ID NO: 863138 - DNA, 75 bp, synthetic construct
  source 1..75: mol_type = other DNA
tggatattgagcgggaagcaattgagcaggacagcgtgttttatcccgaagccagcccggagcggctggcggaac

SEQ ID NO: 863139 - DNA, 75 bp, synthetic construct
  source 1..75: mol_type = other DNA
ctgattgcctcgctggaaggcgacgacccgcaaatccgcagtcagcacctgctgatggcgctgacagaaaaaccg

SEQ ID NO: 863140 - DNA, 75 bp, synthetic construct
  source 1..75: mol_type = other DNA
ctcacttgcaggcacttattcgccagagtggtattttcggttacagcctttatattctgttatttgttattgcca

SEQ ID NO: 863141 - DNA, 75 bp, synthetic construct
  source 1..75: mol_type = other DNA
ccggaactctcaggcttaaaggtaaactgacgccggcgttattacagatacttatccgcgaaataaaagggagca

SEQ ID NO: 863142 - DNA, 75 bp, synthetic construct
  source 1..75: mol_type = other DNA
agctgacccgaatccgttcacagctcgcttccctcggtatggaaaaacaggcactgctggaagatattgccgttg

SEQ ID NO: 863143 - DNA, 75 bp, synthetic construct
  source 1..75: mol_type = other DNA
tacaggatgcagagcctgtgctgcctcagggagacaatgtgacctttatcgggcgccccgtcggtgcggatacgg

SEQ ID NO: 863144 - DNA, 75 bp, synthetic construct
  source 1..75: mol_type = other DNA
ttaagatgtaagatgagaagagcagatatggacagagactacctcgcatcagtttttgcggggagctggctttcg

SEQ ID NO: 863145 - DNA, 75 bp, synthetic construct
  source 1..75: mol_type = other DNA
tggacgtggtaatgaatgaagacgactgcaaaataagaaaaggaaatgcagcagaattattttcagggatacggc

SEQ ID NO: 863146 - DNA, 75 bp, synthetic construct
  source 1..75: mol_type = other DNA
gcctttgaggaaaaatttccgctgaaagaattaaataatccagagcatgacagttacgcaatgagtgaaaagagt

SEQ ID NO: 863147 - DNA, 75 bp, synthetic construct
  source 1..75: mol_type = other DNA
gcgggtaaactggcggccttttatgattccccgaccggattccgtcatggcccgaaatcactggtcgataacgaa

SEQ ID NO: 863148 - DNA, 75 bp, synthetic construct
  source 1..75: mol_type = other DNA
agcctcgaagatggcatagatggtttccttggattgacgtggaatcaggagttagccgccaccatcgaacgcctg

SEQ ID NO: 863149 - DNA, 75 bp, synthetic construct
  source 1..75: mol_type = other DNA
gtgaccttttcagaagagttagaggggcaactctttgcctcgatcatgcttgatatggaaaagctgattagcgcg

SEQ ID NO: 863150 - DNA, 75 bp, synthetic construct
  source 1..75: mol_type = other DNA
gaatcactggatcgaaatgactgcgtaaacagttttccattaagcgactcaatgaaatggagatttatccgggag

SEQ ID NO: 863151 - DNA, 75 bp, synthetic construct
  source 1..75: mol_type = other DNA
ccggataccccatcagccagcggcaccgttaaccgcgtggtgcaaggcgtaatcattcatccgtggcaggcataa

SEQ ID NO: 863152 - DNA, 75 bp, synthetic construct
  source 1..75: mol_type = other DNA
atacgccggataccccatcagccagtggcaccgtaaaccgcgtggtgcaaggcgtaactattcatccgtggcagg

SEQ ID NO: 863153 - DNA, 75 bp, synthetic construct
  source 1..75: mol_type = other DNA
agaagagatccgccatcagcctcgcgcatggatccgttcactcaccaacatcgacgcgctacgttccgcgctcaa

SEQ ID NO: 863154 - DNA, 75 bp, synthetic construct
  source 1..75: mol_type = other DNA
ccgccacaaccggtacatggactgaagaagagatccgccatcagcctcgcgcatggatccgttcactcaccaaca

SEQ ID NO: 863155 - DNA, 75 bp, synthetic construct
  source 1..75: mol_type = other DNA
aaagagaatctgcggatcatcctgaccggagccggaacctcggcatttatcggtgacatcatcgcgccgtggctc

SEQ ID NO: 863156 - DNA, 75 bp, synthetic construct
  source 1..75: mol_type = other DNA
gccacccttacacccgtcagtatgatcttgatctgctggctgaacttcgccgcgataaccaggcgatgcgcgtaa

SEQ ID NO: 863157 - DNA, 75 bp, synthetic construct
  source 1..75: mol_type = other DNA
atcctgcaagccaccagcccggcggcgaatgtgctggagacggtgcgtggcctgttgcagcatcgctcatttacc

SEQ ID NO: 863158 - DNA, 75 bp, synthetic construct
  source 1..75: mol_type = other DNA
gcatcgattatatcattaatactgctggggttttgataaaaaaacctattgatatgttaacaaatgaagaagttc

SEQ ID NO: 863159 - DNA, 75 bp, synthetic construct
  source 1..75: mol_type = other DNA
ctggaggtacaggttctcgtttcggaggcaccctaccaaaacaatttacaaaactagctggtaaagctgttatag

SEQ ID NO: 863160 - DNA, 75 bp, synthetic construct
  source 1..75: mol_type = other DNA
gcgcgtccgaaacgtgaaaaccagagtttgcttaacggaccacaggtcgataccagcaaagccggtgtggttgcc

SEQ ID NO: 863161 - DNA, 75 bp, synthetic construct
  source 1..75: mol_type = other DNA
tattatatttattggctatagcataagtgattcaaacattaagtccctgttaaaaactattttttcatatgtaaa

SEQ ID NO: 863162 - DNA, 75 bp, synthetic construct
  source 1..75: mol_type = other DNA
tactatgaccttaaagcagaatcaatggagaatggtgaatatagttatgaccttttggcaacaaggcttgagata

SEQ ID NO: 863163 - DNA, 75 bp, synthetic construct
  source 1..75: mol_type = other DNA
aaaaatcacataaattctgggcagttgagcaacaggataatgagcttcatattagctggggcaaaatcggtaccc

SEQ ID NO: 863164 - DNA, 75 bp, synthetic construct
  source 1..75: mol_type = other DNA
gatggtttattgccacaccaccgggcggacgattgatgaagtccttgaagactatgcaaagcaccagcagatggg

SEQ ID NO: 863165 - DNA, 75 bp, synthetic construct
  source 1..75: mol_type = other DNA
ttgttacttgccccgggcgtaatttcgttacgcttaaaataaccactgaaagcggactttgtggattaggagatg

SEQ ID NO: 863166 - DNA, 75 bp, synthetic construct
  source 1..75: mol_type = other DNA
atagtttcacaaccaaactatactgaactgacatggaattttgtgaaaaaaaatcaatggaataaggttacaaaa

SEQ ID NO: 863167 - DNA, 75 bp, synthetic construct
  source 1..75: mol_type = other DNA
gtaaaaaaagaaatggcccaggggcaaaagcagagccgctttatagcctggacctttatgaacgacgagcagcgc

SEQ ID NO: 863168 - DNA, 75 bp, synthetic construct
  source 1..75: mol_type = other DNA
cttcgcaaagcaggtgatgtggtttacctcgctggtatctcgtggcgaaaacttaccgcctttgtatcgtgcact

SEQ ID NO: 863169 - DNA, 75 bp, synthetic construct
  source 1..75: mol_type = other DNA
acaggtcagctcgtgatggttatgggtttgaattaggttggtcagatttctataccacgacacgaaaaccatcag

SEQ ID NO: 863170 - DNA, 75 bp, synthetic construct
  source 1..75: mol_type = other DNA
tcgccatgcaaattcttggcgatcaggaagtgatgttatggctggcctggccattcgatccgacgctgaaatttg

SEQ ID NO: 863171 - DNA, 75 bp, synthetic construct
  source 1..75: mol_type = other DNA
tttcgcttacggtggaattgaagctgttggcggtctggttgataaaacggaaaatcctgaaaagaattttgctaa

SEQ ID NO: 863172 - DNA, 75 bp, synthetic construct
  source 1..75: mol_type = other DNA
gttattaaatggtgggcatttcgcgcaggatattaatttccttgcatcaccgaatccaggttatcagtccggtct

SEQ ID NO: 863173 - DNA, 75 bp, synthetic construct
  source 1..75: mol_type = other DNA
cctcgttctgctgctgtatgtcatcaatatggttgtcgcagaagtattacaggcaaccggaaacatgctgctgcc

SEQ ID NO: 863174 - DNA, 75 bp, synthetic construct
  source 1..75: mol_type = other DNA
aaatttataatcaggaactcaccgaagttgctgagttaataacttcaccagaagcaataaaaataatctggcagt

SEQ ID NO: 863175 - DNA, 75 bp, synthetic construct
  source 1..75: mol_type = other DNA
atggggcggctaatgatatcagataaactcataacactggtgaagaacctctgtgtaattgtcggcatttcattt

SEQ ID NO: 863176 - DNA, 75 bp, synthetic construct
  source 1..75: mol_type = other DNA
gcatttgtcacctgaagcgtcattgtcgctgggcgtatggtttgcgcgtattaccggactttcgatgttcctcgc

SEQ ID NO: 863177 - DNA, 75 bp, synthetic construct
  source 1..75: mol_type = other DNA
ttaccgcagtgggcggtattgcagtaatgtgtcttaatttagtattactgttagtgagtattatcattttgttat

SEQ ID NO: 863178 - DNA, 75 bp, synthetic construct
  source 1..75: mol_type = other DNA
cgaccttagcgaatgggctgacatgcaattcctgttatgggatgcgcaacgtcgtgccggtatcagtgacgagca

SEQ ID NO: 863179 - DNA, 75 bp, synthetic construct
  source 1..75: mol_type = other DNA
atgattggcggccctgtcttcttctcgctgttagcgatggcgatttaccagaactattgcagtcgcatggcgaat

SEQ ID NO: 863180 - DNA, 75 bp, synthetic construct
  source 1..75: mol_type = other DNA
aataatagcgtcggaccgcgttttgcctttattggcacatttatgtggttttcctcttatattatctggatggtg

SEQ ID NO: 863181 - DNA, 75 bp, synthetic construct
  source 1..75: mol_type = other DNA
atgcctcactcggtaaaaaagatgagtctgattggactcatattgatgatctttacttccgtatttggatttgcc

SEQ ID NO: 863182 - DNA, 75 bp, synthetic construct
  source 1..75: mol_type = other DNA
aaatgaaatgcacaagatataaagtgcgtgaggatgttatggatcagatcgtccaggaaggcggtctgggtgatg

SEQ ID NO: 863183 - DNA, 75 bp, synthetic construct
  source 1..75: mol_type = other DNA
tattgataccactggcgctggagatacttttaatggtgcatttgtttatagcttaataaaaaacatgcccttaat

SEQ ID NO: 863184 - DNA, 75 bp, synthetic construct
  source 1..75: mol_type = other DNA
ggcactgacgaatatcccggctgcgtggtggtcatgtcgaacggggatgatggcgaaaaaaccattcatctggga

SEQ ID NO: 863185 - DNA, 75 bp, synthetic construct
  source 1..75: mol_type = other DNA
cagcatctgggactgcaagcaactgattgaagagcaacttatcgattatatccgcaccacgctgacccatgcagg

SEQ ID NO: 863186 - DNA, 75 bp, synthetic construct
  source 1..75: mol_type = other DNA
aggtgccacacggcggccgttcatcagatatcggtgtgttaatgcaaaacgtcggcaccgcttacgcggtgaaac

SEQ ID NO: 863187 - DNA, 75 bp, synthetic construct
  source 1..75: mol_type = other DNA
accacaggcgatttccatgctgcgcgcagtgctggcagactcccgcgatatcgctctacgggttattccaactaa

SEQ ID NO: 863188 - DNA, 75 bp, synthetic construct
  source 1..75: mol_type = other DNA
gttgctgatccacgtaaaactgccgttgaagcagctatcgcccgcgctcaggccaaaaaagccgcccagcaaaag

SEQ ID NO: 863189 - DNA, 75 bp, synthetic construct
  source 1..75: mol_type = other DNA
cgctggaaccctggttgcctgcatcagaacgccgcgctgtgcgcttgccaccagcctcgacaatttgcccaccgt

SEQ ID NO: 863190 - DNA, 75 bp, synthetic construct
  source 1..75: mol_type = other DNA
ctgacggtatctggcgttatcccgtgactatcgaagatgtttctccgcgttaccttgaagcactgatcaattacg

SEQ ID NO: 863191 - DNA, 75 bp, synthetic construct
  source 1..75: mol_type = other DNA
tttcgcggatgatgctcggtaaaagtaaaagcgacaaaatcgttactacactggatgcaggccttcagcggcgtc

SEQ ID NO: 863192 - DNA, 75 bp, synthetic construct
  source 1..75: mol_type = other DNA
gcggtcaaggccagtgtcatgatgcgtgatgagcgcatccagaaacggatcgccgaactgatggaagagcgcaac

SEQ ID NO: 863193 - DNA, 75 bp, synthetic construct
  source 1..75: mol_type = other DNA
cggtttcagaatggcccaaggtctggcggcagtacctgacagggttcgagcttgccgacatgttcgaaggtcgtg

SEQ ID NO: 863194 - DNA, 75 bp, synthetic construct
  source 1..75: mol_type = other DNA
acctcgaacttcttggtaagcatgtttctgttcaggcgtttaaagagcaaacatctacagaaataactggcgctg

SEQ ID NO: 863195 - DNA, 75 bp, synthetic construct
  source 1..75: mol_type = other DNA
aaagccgccgtcgaagctgctattgcccgtgccaaagcacgcaagctggaacagcaacaacaggctaatgcggaa

SEQ ID NO: 863196 - DNA, 75 bp, synthetic construct
  source 1..75: mol_type = other DNA
gaccagatggatgtcctggatatcttgaacgacgacggcgggatgaagccgatcgctgagtggcctaaggtatgg

SEQ ID NO: 863197 - DNA, 75 bp, synthetic construct
  source 1..75: mol_type = other DNA
tacgtaccggttcgcacggtccttctgatttatcgcccatttgccatgcggcggcgctgcattttgacctctggg

SEQ ID NO: 863198 - DNA, 75 bp, synthetic construct
  source 1..75: mol_type = other DNA
gctattgcccgcgccaaagcacgcaagctggaacagcaacaggccaatgcggagccagaacaacaggtcgatccg

SEQ ID NO: 863199 - DNA, 75 bp, synthetic construct
  source 1..75: mol_type = other DNA
aatagtggcgactgatgagcacattcttgcctcattagaaaaatatcacgagccatatgccatttttgatgatta

SEQ ID NO: 863200 - DNA, 75 bp, synthetic construct
  source 1..75: mol_type = other DNA
atgggtgagaatatcgatttccgcaatcatgccgtgacggaagagattaaatactgggcgcgctgggtgatggaa

SEQ ID NO: 863201 - DNA, 75 bp, synthetic construct
  source 1..75: mol_type = other DNA
ggtcgaaccgtggtttaaaccgctggcgtatgccttaattttgttgcgggaaaatggcgttccttcggtgttcta

SEQ ID NO: 863202 - DNA, 75 bp, synthetic construct
  source 1..75: mol_type = other DNA
ctggaacagcaacaggctaatgcggaaccagaacaacaggtcgatccgcgcaaagccgccgtcgaagccgctatt

SEQ ID NO: 863203 - DNA, 75 bp, synthetic construct
  source 1..75: mol_type = other DNA
gctattgcccgagccaaagcgcgcaaactggaacagcaacaggctaatgcggagccagaagaacaggttgatccg

SEQ ID NO: 863204 - DNA, 75 bp, synthetic construct
  source 1..75: mol_type = other DNA
gcagcaaactaacgacgcagcaaccgttgctgatccacgtaaaactgccgttgaagcagctatcgcccgcgccaa

SEQ ID NO: 863205 - DNA, 75 bp, synthetic construct
  source 1..75: mol_type = other DNA
agggcggcggcgataaaatcgaaaccttgattattaacgcagccgagtgcgaaccgtatattaccgctgatgacc

SEQ ID NO: 863206 - DNA, 75 bp, synthetic construct
  source 1..75: mol_type = other DNA
agcacgcaaactggaacaacagcaagccagcgcagaagcggaagaacagatcgacccgcgtaaagccgccgttga

SEQ ID NO: 863207 - DNA, 75 bp, synthetic construct
  source 1..75: mol_type = other DNA
ggaacgcgagaaggcagcacgtctggagcgacataaaagcgcagcggtacaacctgccgctaaagacaaagatgc

SEQ ID NO: 863208 - DNA, 75 bp, synthetic construct
  source 1..75: mol_type = other DNA
aaagcgcctttggcaagccctgcattaacgggagtccctactgcgcctacggctgcgcagggcacaaataatacg

SEQ ID NO: 863209 - DNA, 75 bp, synthetic construct
  source 1..75: mol_type = other DNA
gacagataacgccgtccaagaaggagcgattaatggtaaatttaccagtcaatacagaacggagttatctggggg

SEQ ID NO: 863210 - DNA, 75 bp, synthetic construct
  source 1..75: mol_type = other DNA
actgcattgacaagtgttggacgcgccattcttggtaagaccagtattcagagcgttcttgattaccttggttta

SEQ ID NO: 863211 - DNA, 75 bp, synthetic construct
  source 1..75: mol_type = other DNA
atgggctggtataacaaacgcccaagtctgtgggtggaaccgcgtaacaagtggggtaagggcaccatcggcctg

SEQ ID NO: 863212 - DNA, 75 bp, synthetic construct
  source 1..75: mol_type = other DNA
ctgctattactaaggaaatgatagatgtatccgaccgcatcgatctcacgataggcattgaaatttccgactctg

SEQ ID NO: 863213 - DNA, 75 bp, synthetic construct
  source 1..75: mol_type = other DNA
cagtcggtcgcgatattctggctaaaacaagcacactggccgttatccaataccttggtttaagagaactcggta

SEQ ID NO: 863214 - DNA, 75 bp, synthetic construct
  source 1..75: mol_type = other DNA
tggtttgacattcatgacgatcaacaagcaagaagcacattatttcaaagtcaatctaccagcagaatcaataat

SEQ ID NO: 863215 - DNA, 75 bp, synthetic construct
  source 1..75: mol_type = other DNA
ggtggtagccaagctcaatgatgttgcagaccaggtgattgcccagcgcaaggccgagggagacgatactgtaga

SEQ ID NO: 863216 - DNA, 75 bp, synthetic construct
  source 1..75: mol_type = other DNA
atgtacgacaacgcgcatcaacaagctaaacgctacgccgagattgccacgcaggcaattatgaattcactggga

SEQ ID NO: 863217 - DNA, 75 bp, synthetic construct
  source 1..75: mol_type = other DNA
atattgaccaaattgaatggaaattgattgaacttcccactaaaaactttttaactatcggggataatgctactt

SEQ ID NO: 863218 - DNA, 75 bp, synthetic construct
  source 1..75: mol_type = other DNA
ttttctcagaaagaaccatatttgaagctcctgaggctgaaagaatacttcgtgagcaatattctatcattgccc

SEQ ID NO: 863219 - DNA, 75 bp, synthetic construct
  source 1..75: mol_type = other DNA
ggctaaaacaagcacactggccgttatccaataccttggtttaagagaacttggcacaagcggtgaaaagatccc

SEQ ID NO: 863220 - DNA, 75 bp, synthetic construct
  source 1..75: mol_type = other DNA
cacctgaatgtgaattgcggtcgccataccgtggtgcagcacggtatcagaagtaagggaagtatattgccgtga

SEQ ID NO: 863221 - DNA, 75 bp, synthetic construct
  source 1..75: mol_type = other DNA
ctgtgaagtagcatgcgtggtttctcatcaggaaaatcaggattgcgcttcgctgactccggaaacttttttacc

SEQ ID NO: 863222 - DNA, 75 bp, synthetic construct
  source 1..75: mol_type = other DNA
ataaacgaaagagaagtttcagaatatgaatgccagttattatatttaatcaatccaatagatgtaatgaatgta

SEQ ID NO: 863223 - DNA, 75 bp, synthetic construct
  source 1..75: mol_type = other DNA
aagaacaacgaaaagttatatttaggagatatgaagatctctatgttaagctaatgcactattctgtttttacag

SEQ ID NO: 863224 - DNA, 75 bp, synthetic construct
  source 1..75: mol_type = other DNA
aaagccatcgtgctgtttaaagtggtgaccttcctgccaatcatctggattgccggtttattgattctgctgaaa

SEQ ID NO: 863225 - DNA, 75 bp, synthetic construct
  source 1..75: mol_type = other DNA
ctgcgccgtgttattccggcaatggggcctatcgacagcgcctcactgctggttgcctatattctcagctttatc

SEQ ID NO: 863226 - DNA, 75 bp, synthetic construct
  source 1..75: mol_type = other DNA
ggtaacgcagccaattatcgggccactgcgccgcgttattccggcaatgggacccattgacagcgcctcgctgct

SEQ ID NO: 863227 - DNA, 75 bp, synthetic construct
  source 1..75: mol_type = other DNA
ttggaaagcgattacgtctttatacctatgcaagtaaccactgatgcggtagcatcactatcatatattgatgga

SEQ ID NO: 863228 - DNA, 75 bp, synthetic construct
  source 1..75: mol_type = other DNA
atgatctcttacattcaagaaacagaattctttcaaaacattttatctgatgcaaaaaactatgctgagttaatc

SEQ ID NO: 863229 - DNA, 75 bp, synthetic construct
  source 1..75: mol_type = other DNA
atggcaaaagaacaagcgacagaaacacttgggcagagtgtggattacagattgcattcagcggtcatggccgca

SEQ ID NO: 863230 - DNA, 75 bp, synthetic construct
  source 1..75: mol_type = other DNA
caacccaatagatgtaatgaatatactgaacaaatacatatattactttcctaatgagaactcaccattttatac

SEQ ID NO: 863231 - DNA, 75 bp, synthetic construct
  source 1..75: mol_type = other DNA
ccattgtggtgatgacatgactcttaacactccttttattccgctgtctgagttgaaaacaaataatacggcatt

SEQ ID NO: 863232 - DNA, 75 bp, synthetic construct
  source 1..75: mol_type = other DNA
tgcaacagcattgaagtagaaaaattgataaatgaattagaaaaagaaggtaaaattattgtttctaattcttca

SEQ ID NO: 863233 - DNA, 75 bp, synthetic construct
  source 1..75: mol_type = other DNA
atcgccaatattagcaaatattgcatcagcttctctagacaaacagctcacccaatttgcaggaagaaaaaaaat

SEQ ID NO: 863234 - DNA, 75 bp, synthetic construct
  source 1..75: mol_type = other DNA
gatcgcattaaatacggcagccagcgattttgctcaaatgcagtcgctgtctggcgatgttcaccatgacacggt

SEQ ID NO: 863235 - DNA, 75 bp, synthetic construct
  source 1..75: mol_type = other DNA
aaggttattgatgccaaaaagctcatcatttctaacaacctggacggaagtataaatccgtcatttccggaggaa

SEQ ID NO: 863236 - DNA, 75 bp, synthetic construct
  source 1..75: mol_type = other DNA
atgaacagcccgacacacaaaaaacggagtccggctccggtttttgtgttgccatataaggccgatgtttgttac

SEQ ID NO: 863237 - DNA, 75 bp, synthetic construct
  source 1..75: mol_type = other DNA
ggacaacggcggcgcggtgttcccctcttacagcgaattacagatgcagctctctaaccgcccgcaggatgaaaa

SEQ ID NO: 863238 - DNA, 75 bp, synthetic construct
  source 1..75: mol_type = other DNA
cagcagtgctcagaacaatgcttttttttggcatggtcatttattttggttacagcttggctttccagaatactg

SEQ ID NO: 863239 - DNA, 75 bp, synthetic construct
  source 1..75: mol_type = other DNA
ctattgcagcgctacaggaagcaattaaccttgttcgtgaagcaaaagataacggtcaggcagtagaagaggtga

SEQ ID NO: 863240 - DNA, 75 bp, synthetic construct
  source 1..75: mol_type = other DNA
tgaaagatagattgttgaaatgtgcggtgtggtttgtaggtatgataagacgcgccagcgtcgcatcaggcattg

SEQ ID NO: 863241 - DNA, 75 bp, synthetic construct
  source 1..75: mol_type = other DNA
tccccggcagtattacggaagaaaacgcgaaaaaactgaaggggaactgggacagcggatatacgggcgaaaatg

SEQ ID NO: 863242 - DNA, 75 bp, synthetic construct
  source 1..75: mol_type = other DNA
aaagcgatgtctggctggcggatgagtcccaggccgagcgcgtacgggcggagctggcgcgttttctcgaaaacc

SEQ ID NO: 863243 - DNA, 75 bp, synthetic construct
  source 1..75: mol_type = other DNA
aaagccatcgtgctgtttaaagtggtgaccttcctgccaatcatttggattgccggtttactgattctgctgaaa

SEQ ID NO: 863244 - DNA, 75 bp, synthetic construct
  source 1..75: mol_type = other DNA
tcctttcatgcggtgttttcatgcatttcgctgatatcccaggatatcgccaaaatgcggctgcgcctgatgcag

SEQ ID NO: 863245 - DNA, 75 bp, synthetic construct
  source 1..75: mol_type = other DNA
gcagggagatactgcccgtctctgtcgtcgtcctaatgcacagcagaatcgcatccagttttttgaactgtggct

SEQ ID NO: 863246 - DNA, 75 bp, synthetic construct
  source 1..75: mol_type = other DNA
atcaaaaatatcgattccccaaaagatttacttaatgggcaaaaaaaaacggtcctcatcagagaaccgtattag

SEQ ID NO: 863247 - DNA, 75 bp, synthetic construct
  source 1..75: mol_type = other DNA
ctggcgctctcccgcgtgatggaacaggcgctgatggcccggcgcacgctgctggcaggaatgcgcgaacccaat

SEQ ID NO: 863248 - DNA, 75 bp, synthetic construct
  source 1..75: mol_type = other DNA
gaactcgatttccgccaggcgctgacgcgcaataccgccagtcagatcctgcaacgcaaacagcagcgcgaccag

SEQ ID NO: 863249 - DNA, 75 bp, synthetic construct
  source 1..75: mol_type = other DNA
ggtttttacattctgcactctccagaaccaacaagtccacctatggtaaccacgtcagaaacgttggccgattcc

SEQ ID NO: 863250 - DNA, 75 bp, synthetic construct
  source 1..75: mol_type = other DNA
ttttttgcacttgggatttgtatagcactgatgaacctgcataaattttcgactattcgtatcgctgaaaaaacc

SEQ ID NO: 863251 - DNA, 75 bp, synthetic construct
  source 1..75: mol_type = other DNA
tataaaagcagtgaagatccgaccttcaaaaaactggcggaagattacggcattgctgcattaaccaaagataac

SEQ ID NO: 863252 - DNA, 75 bp, synthetic construct
  source 1..75: mol_type = other DNA
gcgaagaccaaaggccaggctgtcggcgtagaagacgacaccgacaaacgggtggacgatctcagcaaatccacg

SEQ ID NO: 863253 - DNA, 75 bp, synthetic construct
  source 1..75: mol_type = other DNA
cgtcgttgactccgtggcggcactgacgccgaaagcggaaatcgaaggtgaaatcggcgactctcacatgggcct

SEQ ID NO: 863254 - DNA, 75 bp, synthetic construct
  source 1..75: mol_type = other DNA
gagttgctgctgagcaacccaaatgcaacgccagatttctctgttgatgacagcgaaggtgtagcagaaacgaac

SEQ ID NO: 863255 - DNA, 75 bp, synthetic construct
  source 1..75: mol_type = other DNA
aaggccatattaaaattgtggatatatcgatagtatgcaacttcaccgtcgataagtgtgagctaaatcctgctt

SEQ ID NO: 863256 - DNA, 75 bp, synthetic construct
  source 1..75: mol_type = other DNA
tacgaaacattcagatatgcatttagcttccccagaaacaaacatttcgcaaagaaaaacctccaacttgctaga

SEQ ID NO: 863257 - DNA, 75 bp, synthetic construct
  source 1..75: mol_type = other DNA
tgatcgagaaagcgggtgcatggtacagctataaaggcgagaagatcggccagggtaaagcaaatgcgacagcat

SEQ ID NO: 863258 - DNA, 75 bp, synthetic construct
  source 1..75: mol_type = other DNA
cacgttctggcgcggtagatgttatcgttgttgactccgttgcggcgctgacgccgaaagcagaaatcgaaggcg

SEQ ID NO: 863259 - DNA, 75 bp, synthetic construct
  source 1..75: mol_type = other DNA
tgattgctgccaatccgggagaccaggtggcgaaaaacctacaggccgataccttcgaacaattgggttatcagg

SEQ ID NO: 863260 - DNA, 75 bp, synthetic construct
  source 1..75: mol_type = other DNA
agctgccgcctgcacttgccaataactgggccagccgcggctattacggttctgtcagccacaacgcccgcgcgg

SEQ ID NO: 863261 - DNA, 75 bp, synthetic construct
  source 1..75: mol_type = other DNA
gaaaccgtcgccgatacgctgatggcgctggtgctgtgtacagcgcgtcggattgtggaagtggcggaacgcgta

SEQ ID NO: 863262 - DNA, 75 bp, synthetic construct
  source 1..75: mol_type = other DNA
agcagcgaatggtattgccgctttgtcacggtggttaccgaaatgccagaagtgctggggttctggcgcatggct

SEQ ID NO: 863263 - DNA, 75 bp, synthetic construct
  source 1..75: mol_type = other DNA
ggaaagcaaattagtcgatttctcggcattaaccgccgatctcgatatgtcacgctttcatctgatggatttcgg

SEQ ID NO: 863264 - DNA, 75 bp, synthetic construct
  source 1..75: mol_type = other DNA
cgctatcaggggctgcgtcatgactctggcgacccggtagaatggggcgaaaaagccatcgcgcattatgagaag

SEQ ID NO: 863265 - DNA, 75 bp, synthetic construct
  source 1..75: mol_type = other DNA
tgacctgtgttaaagaggtgccgttgcgccgccatctgctgatggcttctttgctggctgctctggcggtcggtg

SEQ ID NO: 863266 - DNA, 75 bp, synthetic construct
  source 1..75: mol_type = other DNA
aacaccattgccatctacaccacccatcgcattctggtagagatattcagcttaagtctgattccgcaaatgaac

SEQ ID NO: 863267 - DNA, 75 bp, synthetic construct
  source 1..75: mol_type = other DNA
ctatttgattcgccgctatatcgacagtgtgccgtggggaaattgtctcgataaacgcatctggagcatcttctg

SEQ ID NO: 863268 - DNA, 75 bp, synthetic construct
  source 1..75: mol_type = other DNA
cgctggcgcaacgtgcgcactttggcttcaacatgccaattctttataacgctcgtcgccatcataaagaagctg

SEQ ID NO: 863269 - DNA, 75 bp, synthetic construct
  source 1..75: mol_type = other DNA
cagaaaggggaaattcacgccgccgggctggatgtcttcgaacaagagccactgtccgtagattcgccgttgctc

SEQ ID NO: 863270 - DNA, 75 bp, synthetic construct
  source 1..75: mol_type = other DNA
gaaaccgtcgccgatacgctgatggcgctggtgttatctaccgctcgtcgggttgtggaggtagcagaacgcgta

SEQ ID NO: 863271 - DNA, 75 bp, synthetic construct
  source 1..75: mol_type = other DNA
aacagtgtaccggggctgtcggacgtcacttccagcttcgcgatggaatttttttgcgttgaatttgtcattttg

SEQ ID NO: 863272 - DNA, 75 bp, synthetic construct
  source 1..75: mol_type = other DNA
aaaccctgcagcaggatgaggtgcggaacatactgccggcagagaatgaggttatgcaggatgcagaaaatgcgg

SEQ ID NO: 863273 - DNA, 75 bp, synthetic construct
  source 1..75: mol_type = other DNA
tgaagcagcatgtgcaggtgtataccgatgataccggaaaatggctggcatccgtggcggccagtgaaagccgga

SEQ ID NO: 863274 - DNA, 75 bp, synthetic construct
  source 1..75: mol_type = other DNA
ttaatgcaggcatcgccggagtgacggcaatatcctccatcccctatgtggctgaaaattctttttcatacggga

SEQ ID NO: 863275 - DNA, 75 bp, synthetic construct
  source 1..75: mol_type = other DNA
acgactggctgagctcagacaccgctgtggatgaggtcctgctcatcaacgaatacacctttaccgaagccggtc

SEQ ID NO: 863276 - DNA, 75 bp, synthetic construct
  source 1..75: mol_type = other DNA
cacttcggcgataaaccggtaaaggtgttcgcgataaaagtaaaattaacacggagtaattatgtggcgcggtaa

SEQ ID NO: 863277 - DNA, 75 bp, synthetic construct
  source 1..75: mol_type = other DNA
tcagtcagggatatgtgaccacgcccggaaaaacggtgagtgaacagggcgttgttctggctgctgtctctgccc

SEQ ID NO: 863278 - DNA, 75 bp, synthetic construct
  source 1..75: mol_type = other DNA
caagaagcgaacaagcaaggtgattaccgctggtcggcagaactgctgaaacaggtgattgccgccaacccgggt

SEQ ID NO: 863279 - DNA, 75 bp, synthetic construct
  source 1..75: mol_type = other DNA
gaaagtgatatagccagcaatacactaaatcactggctacatcgcatacataaaacagatatcactgttctgtct

SEQ ID NO: 863280 - DNA, 75 bp, synthetic construct
  source 1..75: mol_type = other DNA
tcagaaataattattcgactacttctcaatggagccgattatataaggcacgacgggtatgttcagggatatgga

SEQ ID NO: 863281 - DNA, 75 bp, synthetic construct
  source 1..75: mol_type = other DNA
gccgcatcacaaatctggcacaggggaaagatgaccatgatgcggtaaatctgatgcagatgaccagtgctgtta

SEQ ID NO: 863282 - DNA, 75 bp, synthetic construct
  source 1..75: mol_type = other DNA
gatatagtaaatacagcgctattatttttcttgcagtggttattatatcaactattgtaacattatcgccaacct

SEQ ID NO: 863283 - DNA, 75 bp, synthetic construct
  source 1..75: mol_type = other DNA
taaggatttgcagtaaggggattttctatccaatgctgttacatgcgggaataaacggctttgttatattgttaa

SEQ ID NO: 863284 - DNA, 75 bp, synthetic construct
  source 1..75: mol_type = other DNA
atcaccttttacccgcatctgaccacttttcagcatccgttatcggaagtactgagtaaatgctggatctatttc

SEQ ID NO: 863285 - DNA, 75 bp, synthetic construct
  source 1..75: mol_type = other DNA
cccccgtggacactacaaagacaaaaacgctcgatttaggaaccgctttccactgccgggtacttgaaccggaag

SEQ ID NO: 863286 - DNA, 75 bp, synthetic construct
  source 1..75: mol_type = other DNA
tgacggaaactgatcacgagaaccccagcaaggaaactctcacagctgcccggcatacaccggaaaaagatatcc

SEQ ID NO: 863287 - DNA, 75 bp, synthetic construct
  source 1..75: mol_type = other DNA
aggcccagtacagcgaactgttcgaccgtggccgcgccacgtcgttgttgctgtttgaacatgtgcacggcgaat

SEQ ID NO: 863288 - DNA, 75 bp, synthetic construct
  source 1..75: mol_type = other DNA
tgatgggcgacgcaacaaaccaggaaacattcgatgaagagaatcaggttgaagctaaggaaaatgatccggagg

SEQ ID NO: 863289 - DNA, 75 bp, synthetic construct
  source 1..75: mol_type = other DNA
ccctcatcctctgcgcaggacaaaccagccagcactgacaataccaatgttaatggcgaagacatgacggagatt

SEQ ID NO: 863290 - DNA, 75 bp, synthetic construct
  source 1..75: mol_type = other DNA
aacgctcgatttaggaaccgctttccactgccgggtacttgaaccggaagaattcagtaaccgctttatcgtagc

SEQ ID NO: 863291 - DNA, 75 bp, synthetic construct
  source 1..75: mol_type = other DNA
ctcgcgcagtacgtaaatacttcccggatgccaccatcctggcactgaccaccaacgaaaaaacggctcatcagt

SEQ ID NO: 863292 - DNA, 75 bp, synthetic construct
  source 1..75: mol_type = other DNA
cgcacggcggcgaaaacatccacatcatctcgaaaatcgaaaaccaggaaggcctcaacaacttcgacgaaatcc

SEQ ID NO: 863293 - DNA, 75 bp, synthetic construct
  source 1..75: mol_type = other DNA
ggcgcacaaaggcgacgttgtagtaatggtttctggcgcacttgtcccgagcggcactaccaacactgcatctgt

SEQ ID NO: 863294 - DNA, 75 bp, synthetic construct
  source 1..75: mol_type = other DNA
gctaagtcgcgcagtgcttggtgaacacagcctagaagatggcatagatggcttcctgggattgacctggaatca

SEQ ID NO: 863295 - DNA, 75 bp, synthetic construct
  source 1..75: mol_type = other DNA
tatccgtgcacgtaaagtcgttattactgcgacccagatgctggattctatgatcaaaaacccgcgtcctacccg

SEQ ID NO: 863296 - DNA, 75 bp, synthetic construct
  source 1..75: mol_type = other DNA
gttatcttcgcccagaagatgatgatcgaaaaatgtatccgtgcacgtaaagtcgttatcactgcgacccagatg

SEQ ID NO: 863297 - DNA, 75 bp, synthetic construct
  source 1..75: mol_type = other DNA
gcttgctcaacacggcagcgaaaaaccggtaacgcacgtttcacgcgacgaactccagacattacatattgcacg

SEQ ID NO: 863298 - DNA, 75 bp, synthetic construct
  source 1..75: mol_type = other DNA
tcatttgtgtgcaatttatgataaacgcccacagatttgccgggttgaagaccagtatttactgaattatcagtc

SEQ ID NO: 863299 - DNA, 75 bp, synthetic construct
  source 1..75: mol_type = other DNA
cacatggaaaaatcaatggatggtcgacctccctcctgcccaggaacacaaagaatttttaattgaccctacagt

SEQ ID NO: 863300 - DNA, 75 bp, synthetic construct
  source 1..75: mol_type = other DNA
atgatgcataaagcagcctatttcgtcgctaacggtgcacgatttatcgcgaccaacccggatacccacggacgc

SEQ ID NO: 863301 - DNA, 75 bp, synthetic construct
  source 1..75: mol_type = other DNA
aggatatcgcgccgattctggcgttgctgtgtgcgcgcctgcaacagcgtgaaagccgctatgcagtgttgttcg

SEQ ID NO: 863302 - DNA, 75 bp, synthetic construct
  source 1..75: mol_type = other DNA
gtctccttgaatatccggatgctgccttatggcagcatcaacaagagatgtttgaggcgattgccgcgtcggaaa

SEQ ID NO: 863303 - DNA, 75 bp, synthetic construct
  source 1..75: mol_type = other DNA
tgacctgttggcgcagtacgagcagcacggcttgcagctaaatagccgtgaattgccggatcatctgccgctgta

SEQ ID NO: 863304 - DNA, 75 bp, synthetic construct
  source 1..75: mol_type = other DNA
atgcaaacacaaatcaaagttcgtggatatcatctcgacgtttaccagcacgtaaacaacgctcgctaccttgag

SEQ ID NO: 863305 - DNA, 75 bp, synthetic construct
  source 1..75: mol_type = other DNA
ggagccggaagggcaggtggtagcggatgcgcttattacgtttgtttgtattgatcttaaaacgcagaaagcatt

SEQ ID NO: 863306 - DNA, 75 bp, synthetic construct
  source 1..75: mol_type = other DNA
gcctgctcgacctgctggagattcgcgatcttcacagactggttcgtgatactgacaaagttttccctaatccag

SEQ ID NO: 863307 - DNA, 75 bp, synthetic construct
  source 1..75: mol_type = other DNA
caccaacccggacacccacgggcgcggtttttatcccgcctgtggcgcgttgtgtgcagggatcgagaaaatctc

SEQ ID NO: 863308 - DNA, 75 bp, synthetic construct
  source 1..75: mol_type = other DNA
aagcagcctatttcgtcgctaacggtgcacgctttatcgccaccaacccggacacccacgggcgcggtttttatc

SEQ ID NO: 863309 - DNA, 75 bp, synthetic construct
  source 1..75: mol_type = other DNA
actatcgtcgcccggcggtattaagcgacttgttaaccattacgagccagttacagcaattaaacggtaaaagcg

SEQ ID NO: 863310 - DNA, 75 bp, synthetic construct
  source 1..75: mol_type = other DNA
tcatggacgggttgttcgtgtactggacggtgataccatcgaggtcatggactcacggaaggcagtgcggatcag

SEQ ID NO: 863311 - DNA, 75 bp, synthetic construct
  source 1..75: mol_type = other DNA
gggctgcctgggtatatgagcagtacaacacagatcccgtgctgcctgtccttcagaacgaagccagacaacaaa

SEQ ID NO: 863312 - DNA, 75 bp, synthetic construct
  source 1..75: mol_type = other DNA
ctgcaacgggaagcgcaggaacaaaaacgcggtttgtgggccgatgcaaatccggttccaccgtgggaatggcga

SEQ ID NO: 863313 - DNA, 75 bp, synthetic construct
  source 1..75: mol_type = other DNA
ccagccggacggcaccattttctatccctatattggcaaagtgcaggtgaaagggcgcacgctggcggaaattcg

SEQ ID NO: 863314 - DNA, 75 bp, synthetic construct
  source 1..75: mol_type = other DNA
cacagatcccgtgctacctgtctttcagaacgaagccagacaacaaaaacgtgggctctggtcagatgctgatcc

SEQ ID NO: 863315 - DNA, 75 bp, synthetic construct
  source 1..75: mol_type = other DNA
gccggtggtcaacggacatgatgaaatcactggttgcaggaaaaacggttaccgtcacatattttcagcgagatc

SEQ ID NO: 863316 - DNA, 75 bp, synthetic construct
  source 1..75: mol_type = other DNA
gagtcgtgccgtgcttggtgaacacagcctcgaagatggtatagatggtttcctgggattgacatggaatcagga

SEQ ID NO: 863317 - DNA, 75 bp, synthetic construct
  source 1..75: mol_type = other DNA
tatggggtgtttttgactcaccgaaacactcttgttcggtcggggactggtcacaatggcaacagtatttcagat

SEQ ID NO: 863318 - DNA, 75 bp, synthetic construct
  source 1..75: mol_type = other DNA
cgacgacagtccgcagttgcagattgatatcgatcagcgtaaagctcaggcgctgggcgttgctatcgacgatat

SEQ ID NO: 863319 - DNA, 75 bp, synthetic construct
  source 1..75: mol_type = other DNA
tccccaatttcggtgtccaggagtacatgggttattccgaacaaatgctcgaagctgatgaatcccctaatgatt

SEQ ID NO: 863320 - DNA, 75 bp, synthetic construct
  source 1..75: mol_type = other DNA
tatttatcttttcatggccggtattgtgtgcagatattcatggatgggttgttcgtgtactggacggtgatacca

SEQ ID NO: 863321 - DNA, 75 bp, synthetic construct
  source 1..75: mol_type = other DNA
atgggaatgattggctattttgcagaaattgactcagaaaagattaaccaactgcttgagtctactgaaaaacct

SEQ ID NO: 863322 - DNA, 75 bp, synthetic construct
  source 1..75: mol_type = other DNA
tatcctcttcgtaccgcgtaacgatgatctcaaggtcttcgtgatgggcgaagtgaaaaaacagagcacgctcaa

SEQ ID NO: 863323 - DNA, 75 bp, synthetic construct
  source 1..75: mol_type = other DNA
cagtggccagaagagcagttgtggtcaacggaaaaatatctcgacttcatgccaaaactgttcgacgcagtgcgc

SEQ ID NO: 863324 - DNA, 75 bp, synthetic construct
  source 1..75: mol_type = other DNA
ttacgccgaagttatttgaagcggtgcgtaataagttcggttttaacgaacatctgttgcatgacatgcaccatc

SEQ ID NO: 863325 - DNA, 75 bp, synthetic construct
  source 1..75: mol_type = other DNA
ttctttcgatgagaaactggcggcgaaatatccgtatgacccggcgtatctccccgtcgcacgactggaagatgg

SEQ ID NO: 863326 - DNA, 75 bp, synthetic construct
  source 1..75: mol_type = other DNA
atggcctggcgaagggcaaaggcctggcgtatgaaccggcaaccaaaggcctgtggccagaagagcagttgtggt

SEQ ID NO: 863327 - DNA, 75 bp, synthetic construct
  source 1..75: mol_type = other DNA
tgttctggatggaagacccgacgcctgcagaaaaccaggaatgcttccgtctcattcgccaacatagcggaactg

SEQ ID NO: 863328 - DNA, 75 bp, synthetic construct
  source 1..75: mol_type = other DNA
tgccgaattttggcgtacaagaatacatgggctactcagaacaaatgctcgaagtgttcccgcacaactggagct

SEQ ID NO: 863329 - DNA, 75 bp, synthetic construct
  source 1..75: mol_type = other DNA
atgatgcaaccatcaatcaaacctgctgatgaacatgcagccggcgatatcatcgcgcgcatcggcagcctgaca

SEQ ID NO: 863330 - DNA, 75 bp, synthetic construct
  source 1..75: mol_type = other DNA
aacaggcgatcaccaacgtgccactgaccattctcgatgccatcaacgccgcaggtggcctgaccgacaccgctg

SEQ ID NO: 863331 - DNA, 75 bp, synthetic construct
  source 1..75: mol_type = other DNA
ataaactcataacgctggcgaagatcctctgtgtaatcgtcggcatttcatttttagtcatgctggttgccattt

SEQ ID NO: 863332 - DNA, 75 bp, synthetic construct
  source 1..75: mol_type = other DNA
ggggattaccggtatgcgccggattgccgattttgcttcgttgtatcaggtacgtactggctcacacggtccttc

SEQ ID NO: 863333 - DNA, 75 bp, synthetic construct
  source 1..75: mol_type = other DNA
gatgtatgggatctattaatttgtctcaaggaggcgcgtttagaggccattttagttaatgaaagcgatcctact

SEQ ID NO: 863334 - DNA, 75 bp, synthetic construct
  source 1..75: mol_type = other DNA
cggggttttttctctggcatcactggccgcagatgatgcgcttgatggccgagtctccgattaccgccatgggta

SEQ ID NO: 863335 - DNA, 75 bp, synthetic construct
  source 1..75: mol_type = other DNA
atgtttaaccgcaacgccgaacgctacgaaaaaggggtggcgaaaattctccaccgtagcctgcgctggattgtg

SEQ ID NO: 863336 - DNA, 75 bp, synthetic construct
  source 1..75: mol_type = other DNA
aggacgattgccaccgcgcagttcgttggcaatgatcgttgttgatcatactgatatgagtgtgcgcggctgggt

SEQ ID NO: 863337 - DNA, 75 bp, synthetic construct
  source 1..75: mol_type = other DNA
cattctcggtggcgcgcgcagcatggcaagatctcacttcgggaagagttatttccggtggcagcacgctcacta

SEQ ID NO: 863338 - DNA, 75 bp, synthetic construct
  source 1..75: mol_type = other DNA
tggcgcaggatgggacgccgctctggcgctttgccgatgcggacggcatctggcgttatccggtaacaatcgaag

SEQ ID NO: 863339 - DNA, 75 bp, synthetic construct
  source 1..75: mol_type = other DNA
tcttcaacgacgtctggaagaactggcgcaaaactggaaaggacgattgccaccgcgcagctcactggcgatgat

SEQ ID NO: 863340 - DNA, 75 bp, synthetic construct
  source 1..75: mol_type = other DNA
agaacgccgcgctgtgcgcttaccaccggcctcgacaatttgcccgccatacggtcacgatgcacaactcccgct

SEQ ID NO: 863341 - DNA, 75 bp, synthetic construct
  source 1..75: mol_type = other DNA
cgctgattgccctcaggcgcgacaagaaatgataaatgtctggccgctaccgctggaaccctggttgcccgcatc

SEQ ID NO: 863342 - DNA, 75 bp, synthetic construct
  source 1..75: mol_type = other DNA
tgggccttgggctgctggcgcttgcgccgctggcaatcgcccagggcggcgatattgcgctgcttaacgtggtca

SEQ ID NO: 863343 - DNA, 75 bp, synthetic construct
  source 1..75: mol_type = other DNA
gtgtgcggtaaatggatgattatccagttgcatgatctctgcattcacctgtttacccaggccgcgttgctggtt

SEQ ID NO: 863344 - DNA, 75 bp, synthetic construct
  source 1..75: mol_type = other DNA
aacgagtacgactggctgacctcagacgccgctgtggatgaggccctactcatcaacgaatacaccttcaccgaa

SEQ ID NO: 863345 - DNA, 75 bp, synthetic construct
  source 1..75: mol_type = other DNA
tcaatgcgatccgatcgccaggatcggtgctcaaaccgtttgtttatggtctggcgctggatgaaggcttgatcc

SEQ ID NO: 863346 - DNA, 75 bp, synthetic construct
  source 1..75: mol_type = other DNA
cttggttgaccaggtaaaccgagtattgcaacgaggttgtgaaatgcgtatctggggtagctggcccaaaacagc

SEQ ID NO: 863347 - DNA, 75 bp, synthetic construct
  source 1..75: mol_type = other DNA
gattggcattgcgctctccctcaccatgctggtgatgcgccctatctggctcaatatttacgaccacgcggtggt

SEQ ID NO: 863348 - DNA, 75 bp, synthetic construct
  source 1..75: mol_type = other DNA
cggaaggcatctggcgttatccggtaacaatcgaagatgtttctccacgttaccttgaagcgctgatcaattatg

SEQ ID NO: 863349 - DNA, 75 bp, synthetic construct
  source 1..75: mol_type = other DNA
atgatttaatcacaaatcctgtatttatgctgtctttttcagttttttgggtgtctacgggaacacttttaatca

SEQ ID NO: 863350 - DNA, 75 bp, synthetic construct
  source 1..75: mol_type = other DNA
atgcattcttcttttggtttgccatatcctgctggtcactggttttattctttacatgacttactcgacaatcct

SEQ ID NO: 863351 - DNA, 75 bp, synthetic construct
  source 1..75: mol_type = other DNA
acatctggggcgcgaaacggactggtcgttgctggcattaggcgttgcaggctggatgcgttacgtcagcggcgt

SEQ ID NO: 863352 - DNA, 75 bp, synthetic construct
  source 1..75: mol_type = other DNA
ctcggtaatgctggtcgtgccgctgggggttatcggcgcgctgctggcaacctggatgcgcgggctggaaaacga

SEQ ID NO: 863353 - DNA, 75 bp, synthetic construct
  source 1..75: mol_type = other DNA
gagtggacggcgatgtcgtatcaggagcggctttccggcgcgcaggctccggcgctgtacgccatttccttgctg

SEQ ID NO: 863354 - DNA, 75 bp, synthetic construct
  source 1..75: mol_type = other DNA
caggtcacgatgcgctgatggcagcacgtaaccagttgctggcgctggcggcggaaaacccggagctaacccgtg

SEQ ID NO: 863355 - DNA, 75 bp, synthetic construct
  source 1..75: mol_type = other DNA
gctgggcattttcctgcgcgatttaacggcgatggatccgctcgatgcccaggcgcagtacagcgaactgttcga

SEQ ID NO: 863356 - DNA, 75 bp, synthetic construct
  source 1..75: mol_type = other DNA
agtacgactggctgagctcagacgccgctgtggatgaggtcctgctcatcaacgaatacacctttaccgaagccg

SEQ ID NO: 863357 - DNA, 75 bp, synthetic construct
  source 1..75: mol_type = other DNA
cagatgacctcagacgccgctgtggatgaggccattctcatcaacgaatacaccttcaccgaaaccggtcagcgc

SEQ ID NO: 863358 - DNA, 75 bp, synthetic construct
  source 1..75: mol_type = other DNA
gacctgatatttatcctaacccaacagacggcttgcctgctgagtttcagactagcacacagccagcgacgggag

SEQ ID NO: 863359 - DNA, 75 bp, synthetic construct
  source 1..75: mol_type = other DNA
attcagcaatcactgctcatcagcgtcgctttgccggtgccgtcgcgccgcaatatctgaatatcaccaccggag

SEQ ID NO: 863360 - DNA, 75 bp, synthetic construct
  source 1..75: mol_type = other DNA
ggacctgctggcgcagtacgagcagcacggcttgcagttaaacagccgcgaattgccggaccatctgccgctgta

SEQ ID NO: 863361 - DNA, 75 bp, synthetic construct
  source 1..75: mol_type = other DNA
cctggtatcatctcgatcaccagttatggacgccacaaaatctgactataccggtgattacggggtcggttccgg

SEQ ID NO: 863362 - DNA, 75 bp, synthetic construct
  source 1..75: mol_type = other DNA
tgcgtttaaatgggctgtattctggctgggtggtattttgtgtgtcatcacctggtatcatctcgatcaccagtt

SEQ ID NO: 863363 - DNA, 75 bp, synthetic construct
  source 1..75: mol_type = other DNA
atgccgtggtatcgtcttctggttcctgatgcaaagcacactagcactgaggcaaccaatgatgatcagctgtga

SEQ ID NO: 863364 - DNA, 75 bp, synthetic construct
  source 1..75: mol_type = other DNA
tcagtcagcactggccgctgaatacagcgagaaaacgcagtatctgggcgtggtgaatggtcaggtgtcaggtaa

SEQ ID NO: 863365 - DNA, 75 bp, synthetic construct
  source 1..75: mol_type = other DNA
atgaaaaaaacaatgatagcagttgccctggccctgagtgcattcagtattcagcctacactggccgctgaatac

SEQ ID NO: 863366 - DNA, 75 bp, synthetic construct
  source 1..75: mol_type = other DNA
ccctggccctgagtgcactcagtattcagtcagtactggccgctgaatacagcgagaaaacgcagtatctgggcg

SEQ ID NO: 863367 - DNA, 75 bp, synthetic construct
  source 1..75: mol_type = other DNA
cgggagcattatcggcagctattgctgatattatggctgccctgaaaggaccgtttaaatttggtctttgggggg

SEQ ID NO: 863368 - DNA, 75 bp, synthetic construct
  source 1..75: mol_type = other DNA
ggtagcggcattcactggggtggtggttccggtcatggtaatggcggggggaatggtaattccggtggtggctcg

SEQ ID NO: 863369 - DNA, 75 bp, synthetic construct
  source 1..75: mol_type = other DNA
agatgttcttaccccagcacaggtaaaacaacgtcaggatgaggaaaaacgcctccagcaggaatggaatgacgc

SEQ ID NO: 863370 - DNA, 75 bp, synthetic construct
  source 1..75: mol_type = other DNA
ttacgtaatagtgacgcactggcgttacagcgcatcagtagcctgcagctggattacgcaacggtaaatccttat

SEQ ID NO: 863371 - DNA, 75 bp, synthetic construct
  source 1..75: mol_type = other DNA
attactgcgatggaaagcaggaagaagaaagaggataataaaagagatgctgaaggcaaactaaatgatgagtta

SEQ ID NO: 863372 - DNA, 75 bp, synthetic construct
  source 1..75: mol_type = other DNA
atgtttcagtgagtgatgttcttagccctgaccaggtaaaacaacgtcaggatgaagaaaatcgccgtcagcagg

SEQ ID NO: 863373 - DNA, 75 bp, synthetic construct
  source 1..75: mol_type = other DNA
tttgttaaatacgctgataataaatacatctctcaggcacaccaattgatatccgcacgtttacttgctatccgt

SEQ ID NO: 863374 - DNA, 75 bp, synthetic construct
  source 1..75: mol_type = other DNA
ttcatttttaacgctaaaggctcaagtatatatgaaggagttctgtagggattatatttcattatttaaagataa

SEQ ID NO: 863375 - DNA, 75 bp, synthetic construct
  source 1..75: mol_type = other DNA
ctggcttatacaaaacaccaaaaatagtaattatgaaaaaatacttttttcatcaagagattcgagagttatttt

SEQ ID NO: 863376 - DNA, 75 bp, synthetic construct
  source 1..75: mol_type = other DNA
gtacatataaactatgagcaaactaaatttgaaaaattacttggttatttaattaatgataatataagaaatatt

SEQ ID NO: 863377 - DNA, 75 bp, synthetic construct
  source 1..75: mol_type = other DNA
tgttactggcaggtctggtttatctggtgcgtattggcgcgctggactgggcgcccgcgcgttcacgccgcgagc

SEQ ID NO: 863378 - DNA, 75 bp, synthetic construct
  source 1..75: mol_type = other DNA
aagcgctgtatctgttcgcatggtcaacctctatccgcgaaagcggctgggtaggctttgtggaagctgcaattt

SEQ ID NO: 863379 - DNA, 75 bp, synthetic construct
  source 1..75: mol_type = other DNA
ctgtgttgcctgatgttgattggcggttggtttttaggcggtcgcgcgcgcgcgaggtcaaaaaacgtgccgttt

SEQ ID NO: 863380 - DNA, 75 bp, synthetic construct
  source 1..75: mol_type = other DNA
ctaatgaatatggactgattagcaacgtaacccattggatgccgctaccagaacctccgcaggagtcgcagagtg

SEQ ID NO: 863381 - DNA, 75 bp, synthetic construct
  source 1..75: mol_type = other DNA
ctttactccggtgtgctcctgtttattctgtatttttgtttttctgcactggctgacctgcagaaacctgatgaa

SEQ ID NO: 863382 - DNA, 75 bp, synthetic construct
  source 1..75: mol_type = other DNA
tttgattacagcgtttgtcatttccccggtaattatctggtcgtgggatacggtaaaagaaaccactgcaggtga

SEQ ID NO: 863383 - DNA, 75 bp, synthetic construct
  source 1..75: mol_type = other DNA
ttttatatttaaaatacataattaaaaatattgaaaataatgagtatattaagtatcttcctcaattaggaactg

SEQ ID NO: 863384 - DNA, 75 bp, synthetic construct
  source 1..75: mol_type = other DNA
tattagcaatgatatttcagcaaagctaaaagaacatctagttgattattttaggaataagctgggtaatttaaa

SEQ ID NO: 863385 - DNA, 75 bp, synthetic construct
  source 1..75: mol_type = other DNA
tctttgtcgatttagataaaggtgctgatgaaagaagttttgtggcaaagtttgatcttaatgccgactttcttg

SEQ ID NO: 863386 - DNA, 75 bp, synthetic construct
  source 1..75: mol_type = other DNA
cgaatgttcaggtcagtacacttccgctggaccaggcaactgtcagcgtgacgaaacgtgtgacagatgttgtga

SEQ ID NO: 863387 - DNA, 75 bp, synthetic construct
  source 1..75: mol_type = other DNA
atggtcagaaagtcgggaccaatgaaccgtcagaagacccggatattccggctatcgggtattatggttccggtg

SEQ ID NO: 863388 - DNA, 75 bp, synthetic construct
  source 1..75: mol_type = other DNA
gaacggacaggggcgtcagggtgtcggtgataagtcatggtgaccgccggcagcgttatgaacagctggccctgg

SEQ ID NO: 863389 - DNA, 75 bp, synthetic construct
  source 1..75: mol_type = other DNA
ggtgatgtcaccacacctgtggtggtgaagccgtcggatggagaaggcacagtaatcagcgccaccagcgacccg

SEQ ID NO: 863390 - DNA, 75 bp, synthetic construct
  source 1..75: mol_type = other DNA
tcatgggcgcgaagaggcattgtttcagaccgcctggcaggtgccattttgcagtacgccgggcggacattatcg

SEQ ID NO: 863391 - DNA, 75 bp, synthetic construct
  source 1..75: mol_type = other DNA
atttttggagggcgatgaaggtactttcagcgaatccaccggcgcaagcgagacctcggcacgctggggtgtaga

SEQ ID NO: 863392 - DNA, 75 bp, synthetic construct
  source 1..75: mol_type = other DNA
gcggacttgtcaaaggggcagtacggaaccgtggggcaggggctgcatatcgccaaaaaactgctgccgtttatt

SEQ ID NO: 863393 - DNA, 75 bp, synthetic construct
  source 1..75: mol_type = other DNA
aaacagcctggaaaatcgcccacgatgtgcctgcaagtaaagcagctgaattacttcagaaaggcggggaaattg

SEQ ID NO: 863394 - DNA, 75 bp, synthetic construct
  source 1..75: mol_type = other DNA
caatggaagtaattaatagcatgagtgcttatgtggaactcatgactgaagatatggcatcgactgagagtcagc

SEQ ID NO: 863395 - DNA, 75 bp, synthetic construct
  source 1..75: mol_type = other DNA
gctttaaatgcctttatagataagggtgattatctaaaaagcttatacgttaataaaacacgcacggcagctgaa

SEQ ID NO: 863396 - DNA, 75 bp, synthetic construct
  source 1..75: mol_type = other DNA
gcatgagacaggaaaaaccggagagcaggaacttacggtaacggtgctggtcagggagaaaacacagacagaagc

SEQ ID NO: 863397 - DNA, 75 bp, synthetic construct
  source 1..75: mol_type = other DNA
ccggtaatccgttcctgatgtcgtacttcactcagaccactgacggcagggtgaatctgatgcatcacaggaaag

SEQ ID NO: 863398 - DNA, 75 bp, synthetic construct
  source 1..75: mol_type = other DNA
ataccgatgcagaactgctcagtctgcagacgccggaagagcgggcacgccaggaggcagaaaaagcggtcaggg

SEQ ID NO: 863399 - DNA, 75 bp, synthetic construct
  source 1..75: mol_type = other DNA
gtgcgtttgaccataactggcatacggttgttttccgctttgcgggaaataacagcgaaagagtcgttccggtga

SEQ ID NO: 863400 - DNA, 75 bp, synthetic construct
  source 1..75: mol_type = other DNA
tacggaggataaaggccggactgccgttcctgcaggatttacctttggtggtggttcacatgaagcggtgatccg

SEQ ID NO: 863401 - DNA, 75 bp, synthetic construct
  source 1..75: mol_type = other DNA
ggcgctttgccaaagaacccttgcatgattttaacgcgcaccggccgctggcattagacgatgaccttgatgcag

SEQ ID NO: 863402 - DNA, 75 bp, synthetic construct
  source 1..75: mol_type = other DNA
gccgatagaagcattggtaatgagcgccggattacgcgcgcttgaacaacaggctgactgggtgttagtggaagg

SEQ ID NO: 863403 - DNA, 75 bp, synthetic construct
  source 1..75: mol_type = other DNA
cggtggttgatgcaaaacctaccgaacgtccgggtgtttttacggcatcaattccaggtgcacctgttctgaata

SEQ ID NO: 863404 - DNA, 75 bp, synthetic construct
  source 1..75: mol_type = other DNA
caaacagaaagaaaataaagaaaaggacgctaaagccaaattagataaggagagtaaacggaataagccagggaa

SEQ ID NO: 863405 - DNA, 75 bp, synthetic construct
  source 1..75: mol_type = other DNA
atcatttccaggtgttccttccctgactgtcagtactgtcaacgatgcgcctgtatcaacctcgcttcccgtcgg

SEQ ID NO: 863406 - DNA, 75 bp, synthetic construct
  source 1..75: mol_type = other DNA
ccggaaatcacgcagcacagtttggtgcgctggttgataaattccgtgcagacctgacggatatggcaggtcagt

SEQ ID NO: 863407 - DNA, 75 bp, synthetic construct
  source 1..75: mol_type = other DNA
ctgaatgtgatgtaccacaatgcgaaggtggcgacaaataacctgaaactgggaagctttggcgcatttgataac

SEQ ID NO: 863408 - DNA, 75 bp, synthetic construct
  source 1..75: mol_type = other DNA
ccaacggcgtcagcctggagagaatggaaggcggcattaatgtgcatcgcagtggatatgacctgacgttatcag

SEQ ID NO: 863409 - DNA, 75 bp, synthetic construct
  source 1..75: mol_type = other DNA
atgaatttggtgccggactcggaatcgaagaatgcttctatcatgttgatattattttattttgtttggtttggt

SEQ ID NO: 863410 - DNA, 75 bp, synthetic construct
  source 1..75: mol_type = other DNA
ttaacatcgatgaagaagtgcatcgtctgcgtgaaaaaagcgtagaactgacacgtaaaatcttcgccgatctcg

SEQ ID NO: 863411 - DNA, 75 bp, synthetic construct
  source 1..75: mol_type = other DNA
tgacggtggttcgtccacggatgcgggtaccggcacttccggaacgggaagtgctgacacacccggaacgacacc

SEQ ID NO: 863412 - DNA, 75 bp, synthetic construct
  source 1..75: mol_type = other DNA
ccgcgattttggtattacctgttcgaccactacgaactgggtgtcgaacatgattatcggcgcgaccttcctgac

SEQ ID NO: 863413 - DNA, 75 bp, synthetic construct
  source 1..75: mol_type = other DNA
aactgggtgtcgaatatgattatcggcgcgaccttcctgacactgcttgatagcattggcgctgccggtacgttc

SEQ ID NO: 863414 - DNA, 75 bp, synthetic construct
  source 1..75: mol_type = other DNA
cgcgccagtggtgtggatcctgtgctctgaaattcagccgctgaaatgccgcgatttcggtattacctgttcgac

SEQ ID NO: 863415 - DNA, 75 bp, synthetic construct
  source 1..75: mol_type = other DNA
acatcataatcctctgacccacatgcaactgcagaagcttacttatattgcacatggttactatttagcattaac

SEQ ID NO: 863416 - DNA, 75 bp, synthetic construct
  source 1..75: mol_type = other DNA
gcgcgatacgtcggaaaaagcgcgagaagaactcaacgaaattcgtgaaagcctgaagttaaaacagggcggttg

SEQ ID NO: 863417 - DNA, 75 bp, synthetic construct
  source 1..75: mol_type = other DNA
gatggcgggggctatcctctttgtgctcggttcgatagggtcggcttttgcgaccagcgttgaaatgctgattgc

SEQ ID NO: 863418 - DNA, 75 bp, synthetic construct
  source 1..75: mol_type = other DNA
gaacggcatttcccccccttacaccattgaagttggtcagaaactaaaactgggtggggcgaaaagtagcagtag

SEQ ID NO: 863419 - DNA, 75 bp, synthetic construct
  source 1..75: mol_type = other DNA
tgatattccgttacagttaaagggtatttctgtggatcagttaggctttgtacgtatccacgacattcaacctgt

SEQ ID NO: 863420 - DNA, 75 bp, synthetic construct
  source 1..75: mol_type = other DNA
tagcgcctgtgtgcagcaaagcgaagtgcgacagatgaaacacagcgtcagcacgctgaaccaggagatgacgca

SEQ ID NO: 863421 - DNA, 75 bp, synthetic construct
  source 1..75: mol_type = other DNA
ctgaacgttggggaaagcatctacgtaactgggactacatatcagaagtctacctgaatccagaaaaagaggctg

SEQ ID NO: 863422 - DNA, 75 bp, synthetic construct
  source 1..75: mol_type = other DNA
atggaaggtactgcacatcagcacaaggagaacactggcggcaatcagcatcatgccagcgatagtgaaactggc

SEQ ID NO: 863423 - DNA, 75 bp, synthetic construct
  source 1..75: mol_type = other DNA
aaactggcgaggcgtcagatcccttaattaaggcgaacggtcatcataatctcacatccaccagcagagcgggga

SEQ ID NO: 863424 - DNA, 75 bp, synthetic construct
  source 1..75: mol_type = other DNA
aagagcaatctgctgattaatatcggctatggcgatagcagcaaactttatgcgcgcctgccacgtctgtccttt

SEQ ID NO: 863425 - DNA, 75 bp, synthetic construct
  source 1..75: mol_type = other DNA
ttatcaatcgcttctctggttggtcatctaatgagcctctaaaaacagataaggatctaacgacattacccacca

SEQ ID NO: 863426 - DNA, 75 bp, synthetic construct
  source 1..75: mol_type = other DNA
gctttcttgaagagaacctgccggaacgtgcgcggatcccgtttaccagtgatatggatgaaatttcattactgc

SEQ ID NO: 863427 - DNA, 75 bp, synthetic construct
  source 1..75: mol_type = other DNA
tagatgatgcactgttacaattgcgggaatttatcgacgaaaactccggtgaattttttgttcatgtctggggaa

SEQ ID NO: 863428 - DNA, 75 bp, synthetic construct
  source 1..75: mol_type = other DNA
tgcccgcgaatccggaaaacatgcagcagaactactccagtgggcggtatggaatgaaaaatgttcatccagcaa

SEQ ID NO: 863429 - DNA, 75 bp, synthetic construct
  source 1..75: mol_type = other DNA
catcggtgcatttcgttaccgatgaactggacggtgggccggttattttacaggcaaaagtcccggtatttgccg

SEQ ID NO: 863430 - DNA, 75 bp, synthetic construct
  source 1..75: mol_type = other DNA
atttacccactggtaattagctggtttgccgatgggcgtctgaagatgcacgaaaacgccgcgtggctggatggt

SEQ ID NO: 863431 - DNA, 75 bp, synthetic construct
  source 1..75: mol_type = other DNA
ccgcagttggtttacctccagcccacaacttgccgaagaaacagcgtttcgcaacagttccatgcaggcggccta

SEQ ID NO: 863432 - DNA, 75 bp, synthetic construct
  source 1..75: mol_type = other DNA
gcaacagttccatgcaggcggcctatctgatcgtcgcctgccgtgcgctggggctggataccggcccgatgtcgg

SEQ ID NO: 863433 - DNA, 75 bp, synthetic construct
  source 1..75: mol_type = other DNA
aatcaatggggaaaaagccaaacgcgccgatcgtctcaattggtgccgtcttttttaaccctcaaacaggtgaac

SEQ ID NO: 863434 - DNA, 75 bp, synthetic construct
  source 1..75: mol_type = other DNA
cgttgaatatgggcaaattcagggaacaatagacaactttcaggaaatcaatgtgcagaatcaattgattaatgc

SEQ ID NO: 863435 - DNA, 75 bp, synthetic construct
  source 1..75: mol_type = other DNA
tgcgccaggcaagtaagttacgcgttgtttttgcgacggatgaagagctagcagcgcatgaatctcgtctcgatc

SEQ ID NO: 863436 - DNA, 75 bp, synthetic construct
  source 1..75: mol_type = other DNA
tgtttttgcgacagatgaagagcttgcagcacatgaagcccgtcttgatctggtgcagaagaagggcggaagctg

SEQ ID NO: 863437 - DNA, 75 bp, synthetic construct
  source 1..75: mol_type = other DNA
gaagtttatctggcgatgaccggtggtcaaacgtcgatggcttttgcgatggaaggagagacacagcagcaacaa

SEQ ID NO: 863438 - DNA, 75 bp, synthetic construct
  source 1..75: mol_type = other DNA
gtgacagatgcagcgttatctcctgaagaacagttgatcgaggatattgccggattcactcatgatcctcttggc

SEQ ID NO: 863439 - DNA, 75 bp, synthetic construct
  source 1..75: mol_type = other DNA
tacttgatgccaccggagaaggtgaaactatctggcctgccgaaaaaactctccctgatatcctgcatttacttt

SEQ ID NO: 863440 - DNA, 75 bp, synthetic construct
  source 1..75: mol_type = other DNA
cgccggactacacaacgagcgcaaacgcatcatcgtggtattcgatgaagcgtcgaacattgcggatctggtgtg

SEQ ID NO: 863441 - DNA, 75 bp, synthetic construct
  source 1..75: mol_type = other DNA
aacgattgtccagctaattgaagatgcagaaaacaaagaaaaatatgcgaataaaatgtcttctttgaagcagga

SEQ ID NO: 863442 - DNA, 75 bp, synthetic construct
  source 1..75: mol_type = other DNA
aattcatctcaaaaatggcggctgtaacggtgatcactatcatcattcgtcgctattttacgttcgagggtagga

SEQ ID NO: 863443 - DNA, 75 bp, synthetic construct
  source 1..75: mol_type = other DNA
acagcggcgatacaaaatgaagcagcaatggctttctccttgctacacaacgcaatggaaggatttaccggtagc

SEQ ID NO: 863444 - DNA, 75 bp, synthetic construct
  source 1..75: mol_type = other DNA
aaaaaacagttcaactatgggcagcagcaaagccagcagggtaaggctctcacagagtacgatccctatgcttga

SEQ ID NO: 863445 - DNA, 75 bp, synthetic construct
  source 1..75: mol_type = other DNA
agcgtcgcggtaaaacgctttctgaaacgattgttcagctgattgaagatgcggaaaacaaagagaaagtacgcg

SEQ ID NO: 863446 - DNA, 75 bp, synthetic construct
  source 1..75: mol_type = other DNA
gcggaaaacaaagagaaatatgcaaataaaatgtcttctttgaagcaggatttgcaggctttactcggaaaggaa

SEQ ID NO: 863447 - DNA, 75 bp, synthetic construct
  source 1..75: mol_type = other DNA
cagcaatgatccagggcacgacaagcggtggcgcgctgacgcaatcccctggtctgagcacaacactgaggcgtt

SEQ ID NO: 863448 - DNA, 75 bp, synthetic construct
  source 1..75: mol_type = other DNA
tggagatagacgaagctatcgaaacaactctgtggcgggctaacaatgtcaaactgttaacggtcgctcccttag

SEQ ID NO: 863449 - DNA, 75 bp, synthetic construct
  source 1..75: mol_type = other DNA
gatatccgtcccgtactcaatgattcctttgataaaacccgagaggttttggaacatatccagaactcaatgtcg

SEQ ID NO: 863450 - DNA, 75 bp, synthetic construct
  source 1..75: mol_type = other DNA
gagagatcgacaaggcagtacaccagatccaatcaacacagcggcaactggagcaatatctgattggaatgcgga

SEQ ID NO: 863451 - DNA, 75 bp, synthetic construct
  source 1..75: mol_type = other DNA
tgttgaatatgggcaaattcagggaacaatagacaactttcaggaaatcaatgtgcagaatcaattgattaacgc

SEQ ID NO: 863452 - DNA, 75 bp, synthetic construct
  source 1..75: mol_type = other DNA
agcgatgttgacatcccgttacagttaaacagcatttcacctgaacaattagactttgtacgcattcacgatatt

SEQ ID NO: 863453 - DNA, 75 bp, synthetic construct
  source 1..75: mol_type = other DNA
ctggccgccagtaggccaacgttgttggttatggccaacgacagggaaagttatcatgccgtattcgacagctga

SEQ ID NO: 863454 - DNA, 75 bp, synthetic construct
  source 1..75: mol_type = other DNA
tgaaaattggtggcgcactggatgaccaggaaacggctgacgacctgtcggcggctgagtacaaagtcagggtgg

SEQ ID NO: 863455 - DNA, 75 bp, synthetic construct
  source 1..75: mol_type = other DNA
tatggcgaagcgtatcgctgactttgaagaccagtatcaggctgacgcagtgttcatcgacttcggttacggaac

SEQ ID NO: 863456 - DNA, 75 bp, synthetic construct
  source 1..75: mol_type = other DNA
cgccgggctgcacaacgagcgtaagcgtatcatcgtggtattcgatgaagcgtccaacattgcagatctggtgtg

SEQ ID NO: 863457 - DNA, 75 bp, synthetic construct
  source 1..75: mol_type = other DNA
accgattgagccgaaggtaatgagcgccggattacgcgcgctggagcaacaggctgactgggtgttagtggaagg

SEQ ID NO: 863458 - DNA, 75 bp, synthetic construct
  source 1..75: mol_type = other DNA
ttacgcaatagtgacgcattggcgttacagcgcaacagcagccgacaactggattatgccatgataaatccttac

SEQ ID NO: 863459 - DNA, 75 bp, synthetic construct
  source 1..75: mol_type = other DNA
gtcgaaacgtatgaatataccaggacagcaaagccagcagggcaaggcgttgacagaatacgacccctatgcata

SEQ ID NO: 863460 - DNA, 75 bp, synthetic construct
  source 1..75: mol_type = other DNA
tttgatccgctgcgtggtcccgtaaaagatttcactcagacattaatggatgagcaaggtgaagtgacgaaacgt

SEQ ID NO: 863461 - DNA, 75 bp, synthetic construct
  source 1..75: mol_type = other DNA
ctgggcagcgtggatgttttcctgggtatagcgccaggcgctgaagttaatggggcgctgcggaaccaccagcag

SEQ ID NO: 863462 - DNA, 75 bp, synthetic construct
  source 1..75: mol_type = other DNA
gattttgtcgttgagcaaagtgatgatgaagtgttgctagtcagccgcacggttattgccccaccggtgtttgac

SEQ ID NO: 863463 - DNA, 75 bp, synthetic construct
  source 1..75: mol_type = other DNA
cgactttgccgttgagcaaagtgatgatgaagtgttgatcatcagccgcacggttattgccccaccggtgtttga

SEQ ID NO: 863464 - DNA, 75 bp, synthetic construct
  source 1..75: mol_type = other DNA
ctggcagcagaagagacgcgtcgcctgctgcgtgaagaattcgcgcaatttccagaggagaaaattgaggctgtt

SEQ ID NO: 863465 - DNA, 75 bp, synthetic construct
  source 1..75: mol_type = other DNA
ctggtggagtttatggctaagctcagtgccgaactggcgggcgagaatgaaggtgtggatcatacggtgattgat

SEQ ID NO: 863466 - DNA, 75 bp, synthetic construct
  source 1..75: mol_type = other DNA
agtaccagcgagcttgagggggcaggaaccggggctaaccgctttgctagccagtgaaacagaccaggctatttc

SEQ ID NO: 863467 - DNA, 75 bp, synthetic construct
  source 1..75: mol_type = other DNA
gacgctggaagacgatcgtttgagctgcaccgttcgcggctacaactttgcgatcaccttctcaaaaacgagtgg

SEQ ID NO: 863468 - DNA, 75 bp, synthetic construct
  source 1..75: mol_type = other DNA
aaataaactgtggtttaccacgcttgatgactacaccctgcacgtagacgtgcgcgccgaaggtgaaacgctcgc

SEQ ID NO: 863469 - DNA, 75 bp, synthetic construct
  source 1..75: mol_type = other DNA
caaccggtgcctatcaacgtattttcaccctcagcgacggctggcagggtaaacagacgctgattaaatttgacg

SEQ ID NO: 863470 - DNA, 75 bp, synthetic construct
  source 1..75: mol_type = other DNA
gcgcaaagcctggcgtcgtatgagttcggcgcagggttcttttccacaaatttgcacagcgagaataagcaatga

SEQ ID NO: 863471 - DNA, 75 bp, synthetic construct
  source 1..75: mol_type = other DNA
caacatcaactccgtgcgtaccgctcactacccgaacgatccgcgtttttacgaactgtgtgatatctacggcct

SEQ ID NO: 863472 - DNA, 75 bp, synthetic construct
  source 1..75: mol_type = other DNA
gacgctggaagacgatcgtttgagctgtactgttcgcggctacaactttgcgatcaccttctcaaaaacgagtgg

SEQ ID NO: 863473 - DNA, 75 bp, synthetic construct
  source 1..75: mol_type = other DNA
atggatttacaacactggcaggcacagtttgaaaactggtttaaaaaccatcaaacgcaccaggacgtggcccat

SEQ ID NO: 863474 - DNA, 75 bp, synthetic construct
  source 1..75: mol_type = other DNA
gctttatagtaggaaggtaaataaagtctattggcggtataagcatccagtaacaggaaaattccatgctttggg

SEQ ID NO: 863475 - DNA, 75 bp, synthetic construct
  source 1..75: mol_type = other DNA
ttcacaggctgaacgcggcgcacaggttaaagccaataccttgactatgaatttcagtaaagcaagagatttagc

SEQ ID NO: 863476 - DNA, 75 bp, synthetic construct
  source 1..75: mol_type = other DNA
tgccgtgactatgcagtcagcccataccttgtgcatttttttcgtaccacttcacaggctgaacgtgcgcgcagg

SEQ ID NO: 863477 - DNA, 75 bp, synthetic construct
  source 1..75: mol_type = other DNA
aggaattgactggggtgaaggttctcccgcaacatttcatgaacaaaggtctttatcagaacgtttgtataaaga

SEQ ID NO: 863478 - DNA, 75 bp, synthetic construct
  source 1..75: mol_type = other DNA
taattgatgtattcaaggaggcacaacactatggggaggtccctcctggctataatccagcattagcgaccaaac

SEQ ID NO: 863479 - DNA, 75 bp, synthetic construct
  source 1..75: mol_type = other DNA
gtatatctctgctggacagcctagaatggcccaggtcgtaaggtctgtattgatcgatgtgtttaaggaagcaca

SEQ ID NO: 863480 - DNA, 75 bp, synthetic construct
  source 1..75: mol_type = other DNA
gtcttcctgttgccatcggtaacgggcgcggatggcgatatggaaggcattccggtggcgctaatggaagcgatg

SEQ ID NO: 863481 - DNA, 75 bp, synthetic construct
  source 1..75: mol_type = other DNA
tcatgccgatgtctttatcgctcactttggtccggcaggggtaaccgcagcaaaactccgcgaactgggtgtcat

SEQ ID NO: 863482 - DNA, 75 bp, synthetic construct
  source 1..75: mol_type = other DNA
gcagaccggctggaagcattaggtgcgataggtctggcgcgcgtgtttgcagtttcaggttcattgggggtggcg

SEQ ID NO: 863483 - DNA, 75 bp, synthetic construct
  source 1..75: mol_type = other DNA
gtgagcaagattgactatcaggcactgcgtgaagcggcagagaaagccggtgaagataagtggcaggctaaaaaa

SEQ ID NO: 863484 - DNA, 75 bp, synthetic construct
  source 1..75: mol_type = other DNA
atgataccttcaaaacatttttcaataacactaacaaaaaacaaaatgaaacaccaaaaagttaatatagtcaaa

SEQ ID NO: 863485 - DNA, 75 bp, synthetic construct
  source 1..75: mol_type = other DNA
gcaaaaatatgcccgcttcacgccgacgccccaaccgcgtccgtcggcaaaaaacgccgactctgtgcgtactgc

SEQ ID NO: 863486 - DNA, 75 bp, synthetic construct
  source 1..75: mol_type = other DNA
agaaaatctgggatgtacagggatttgatgttcgcttcaaaacacccgatggtaaggacgtccggggtgataaaa

SEQ ID NO: 863487 - DNA, 75 bp, synthetic construct
  source 1..75: mol_type = other DNA
tggacgacgagcaactggcgaaagtgagcgcctttgccgatcgtaccatgacgctgcaggcaacgattcaggatg

SEQ ID NO: 863488 - DNA, 75 bp, synthetic construct
  source 1..75: mol_type = other DNA
ggaagcgtggctgcgtaacgatcacctgggcattgatttgtggattgagctggggctgccggatgagcgacggat

SEQ ID NO: 863489 - DNA, 75 bp, synthetic construct
  source 1..75: mol_type = other DNA
taccgatgtggtgtgtggtgggggtctgtgtggccgcaaccggtatggcatgtctggtgttcacactggtgatgt

SEQ ID NO: 863490 - DNA, 75 bp, synthetic construct
  source 1..75: mol_type = other DNA
ttctcgcccgcaggacttaaccgtcgaaccagtggtccttaaatccgataacgcctttgctgcctatggcctggc

SEQ ID NO: 863491 - DNA, 75 bp, synthetic construct
  source 1..75: mol_type = other DNA
gaaccggtggtccttaaatccgataacgccttcgctgcctatgggctggctggtaaatacgatgatgacggtttt

SEQ ID NO: 863492 - DNA, 75 bp, synthetic construct
  source 1..75: mol_type = other DNA
tggacgatgagcagctggcaaaagtaagcgccttcgctgaccggactatgacgctacaggcgacgattcaggatg

SEQ ID NO: 863493 - DNA, 75 bp, synthetic construct
  source 1..75: mol_type = other DNA
gtagcagtagcaggaacaacaacatcatcagtaacaggcaaatgacaggtctgaagcccacagcagaacgtccgc

SEQ ID NO: 863494 - DNA, 75 bp, synthetic construct
  source 1..75: mol_type = other DNA
cgacagcccgaaaccgcgccagcgggttcggcggagactggcaggggcgccagcagctgcctgtcggagtcgggc

SEQ ID NO: 863495 - DNA, 75 bp, synthetic construct
  source 1..75: mol_type = other DNA
ggcaaggcgcgacaaaaacttattcctttgatgaggtaattgtcgatagtaatagcaaaaaactggatatgcgct

SEQ ID NO: 863496 - DNA, 75 bp, synthetic construct
  source 1..75: mol_type = other DNA
aggtgatgtgaaacgtgtggcggattatatccgcagtcatgatgatccggcgaccggtcagcctgtcggtcagcc

SEQ ID NO: 863497 - DNA, 75 bp, synthetic construct
  source 1..75: mol_type = other DNA
agatttggaaactcatcaaatggttttttcagacggcgtaactgtgtttccttttttgactacagatgttatggg

SEQ ID NO: 863498 - DNA, 75 bp, synthetic construct
  source 1..75: mol_type = other DNA
tcgaagttggttgagatagcctcgcatacctggaattttcactacggcattgaggctaatcccactggcagcaaa

SEQ ID NO: 863499 - DNA, 75 bp, synthetic construct
  source 1..75: mol_type = other DNA
ttcgtgccgctggcagatggtgataccgcagacaaggtgaaggggatctacgtgcgcccttatccgaccacgtcg

SEQ ID NO: 863500 - DNA, 75 bp, synthetic construct
  source 1..75: mol_type = other DNA
gcgcgcaacctgatcctctcggccatttgcggcaataacgcacagccatttagcgccgatgtatttattgctcac

SEQ ID NO: 863501 - DNA, 75 bp, synthetic construct
  source 1..75: mol_type = other DNA
gaaggccatgctcgatgaagccgacgtgtttctgctgccgtccgttaccggcgccgatggcgacatggaaggcat

SEQ ID NO: 863502 - DNA, 75 bp, synthetic construct
  source 1..75: mol_type = other DNA
gtgctgccagacagcgatcgccgtggcatgaccgcttccggcatgattgtgattaacccgccgtggaagctggaa

SEQ ID NO: 863503 - DNA, 75 bp, synthetic construct
  source 1..75: mol_type = other DNA
ccttggactctcacgctacggtgatatcaagctgggcccagaccatgcgcagcctgatttcagctaccactcctg

SEQ ID NO: 863504 - DNA, 75 bp, synthetic construct
  source 1..75: mol_type = other DNA
agtgaccgaacgggcgatgcgcggagaactcgattttaccgccagcctgcgtagccgcgtggcgacgctgaaagg

SEQ ID NO: 863505 - DNA, 75 bp, synthetic construct
  source 1..75: mol_type = other DNA
cctgcgcacattgatcgaacagtatcaactggaagggtacgtggagatgccgggctttaagcccagccatgaggt

SEQ ID NO: 863506 - DNA, 75 bp, synthetic construct
  source 1..75: mol_type = other DNA
caatatgaagcgctacggccacgaagcgcgtaacctgatcctgtcggcaatttgtggcaataacgcccaaccctt

SEQ ID NO: 863507 - DNA, 75 bp, synthetic construct
  source 1..75: mol_type = other DNA
aactgtcgtactcgcgaatgctgaatttactggtgccggtgacgctaacggtaatgcagaaatctcctggaagat

SEQ ID NO: 863508 - DNA, 75 bp, synthetic construct
  source 1..75: mol_type = other DNA
gcaccatcaaaaaaggtgacccggtatacgttgttgtctccactgatgaatctattaaagtgccgctgggtggtt

SEQ ID NO: 863509 - DNA, 75 bp, synthetic construct
  source 1..75: mol_type = other DNA
cgagctgcacccgagcgattacccgttgctgcgttctgaatttcagaaagacaatcgtgcgcgcgtcgaaaaagc

SEQ ID NO: 863510 - DNA, 75 bp, synthetic construct
  source 1..75: mol_type = other DNA
ctgccgtggctgcacagcaaactggttccagctggcactgggcacgccaccgtaagctggatcgtgccggagtaa

SEQ ID NO: 863511 - DNA, 75 bp, synthetic construct
  source 1..75: mol_type = other DNA
gactccggcgacaccgctggagataatttctgtcgcacggttaaccgagaaaaaagggcttcatgtcgctattga

SEQ ID NO: 863512 - DNA, 75 bp, synthetic construct
  source 1..75: mol_type = other DNA
ggatgcgacgacggcacagaagggaattgtgcagttaagcagcgcaacggacagtgatgatgaaacgaaggcagc

SEQ ID NO: 863513 - DNA, 75 bp, synthetic construct
  source 1..75: mol_type = other DNA
gggccaaaaggcgataccggcgagcgggggccaaagggtgagcgtggtgagacaggaccacaggggcttcagggt

SEQ ID NO: 863514 - DNA, 75 bp, synthetic construct
  source 1..75: mol_type = other DNA
atgacagtcagaatatcgggtgtgctgaaggatggtacgggaaaaccagtaccgggatgcacgatagagctgaaa

SEQ ID NO: 863515 - DNA, 75 bp, synthetic construct
  source 1..75: mol_type = other DNA
atgacagtcagaatatcgggtgtgctgaaggaaggaacaggaaaaacggtaccgggatgcacgatagagctgaaa

SEQ ID NO: 863516 - DNA, 75 bp, synthetic construct
  source 1..75: mol_type = other DNA
ccaggtatgcgcactccggcttatcggcaaatcatcagcgcaatagacaatatgactcacagtgagcaggaaaaa

SEQ ID NO: 863517 - DNA, 75 bp, synthetic construct
  source 1..75: mol_type = other DNA
agatattacagacagggaagctttcatccgtgagcttggtgtgcccagagcatacgggcgtgacatttcaaccgg

SEQ ID NO: 863518 - DNA, 75 bp, synthetic construct
  source 1..75: mol_type = other DNA
gtgcagaggaagcgaagaaacgggcagagaatgcgcggggaccgaagggggataagggagacaccgggccacagg

SEQ ID NO: 863519 - DNA, 75 bp, synthetic construct
  source 1..75: mol_type = other DNA
tccctatcggtggattgaagaaaacttttgctgatcctgctggaccagaaccatctattgtactggggacaatcc

SEQ ID NO: 863520 - DNA, 75 bp, synthetic construct
  source 1..75: mol_type = other DNA
aaatgaccgaccgatacaatgatgatcgtggtaaagactggattatcgtagatatcaaaacagcatataaaatag

SEQ ID NO: 863521 - DNA, 75 bp, synthetic construct
  source 1..75: mol_type = other DNA
gccggagatacaacctacagggaatggtttttgcgtcagccttacaccagacaaaaacagattgtgggggaaatc

SEQ ID NO: 863522 - DNA, 75 bp, synthetic construct
  source 1..75: mol_type = other DNA
attgtgggggaaacccgggcaaagctgattcgggatggtggtatgtcgccagatgaattttacaccgataaaggc

SEQ ID NO: 863523 - DNA, 75 bp, synthetic construct
  source 1..75: mol_type = other DNA
cgcgaataatgatttgattaagggtaagcaatggttatcaacgcttgataatcgtactacgccacaatgtcgaat

SEQ ID NO: 863524 - DNA, 75 bp, synthetic construct
  source 1..75: mol_type = other DNA
acatgactcacagtgagcaggaaaaagttgcgcaatttttgtcacgcgaaggaattcgtaatttccttgctcgtc

SEQ ID NO: 863525 - DNA, 75 bp, synthetic construct
  source 1..75: mol_type = other DNA
cagcaaaagctggcgtgcgcattgggaaaacctcaatacgttcttcggttacccggctgatattcgcaaggcaat

SEQ ID NO: 863526 - DNA, 75 bp, synthetic construct
  source 1..75: mol_type = other DNA
ctggagggcagcttaccaatgacaattccgggcgatgtggagcaggcgatgaaaacgctgcaaacttttccgggt

SEQ ID NO: 863527 - DNA, 75 bp, synthetic construct
  source 1..75: mol_type = other DNA
cggtgcattgggcgaattaggcgcggcgcggcccggattgcgtttaccgggctgtgttgatgcttttgagcaggg

SEQ ID NO: 863528 - DNA, 75 bp, synthetic construct
  source 1..75: mol_type = other DNA
aggcctataagccttctgaactggttccgtatgatgctgcaaccttccagaagctccgcacaacaattcagcaga

SEQ ID NO: 863529 - DNA, 75 bp, synthetic construct
  source 1..75: mol_type = other DNA
caaacgaagaactggaaaacggcatacgctgggcaaccaacgataatgcagaaacgcccccaaaagaacgtatag

SEQ ID NO: 863530 - DNA, 75 bp, synthetic construct
  source 1..75: mol_type = other DNA
aaaaatggagtatgcctatccagaactggcggctggcaatgagccgttttattattgtgttcggtgaccgcctgc

SEQ ID NO: 863531 - DNA, 75 bp, synthetic construct
  source 1..75: mol_type = other DNA
tatctggcagcaggatgacctgcccgcagaattggagtcgtacatcaatgtggtaaaacacttcaaccgtagtgg

SEQ ID NO: 863532 - DNA, 75 bp, synthetic construct
  source 1..75: mol_type = other DNA
ctgccgtggctgcacagcaaactggttccggcaggcaccgggcacgccaccgtaagctggatcgtgccggagtaa

SEQ ID NO: 863533 - DNA, 75 bp, synthetic construct
  source 1..75: mol_type = other DNA
gtactgccagacagcgatcgccgtggcatgaccgcttccggcatgattgtgattaacccgccgtggaaactggaa

SEQ ID NO: 863534 - DNA, 75 bp, synthetic construct
  source 1..75: mol_type = other DNA
tgcaaacatttcctggaattgggcgctggacggcgaattatttcgccttgcgtggctggcaagcgaaagatgttt

SEQ ID NO: 863535 - DNA, 75 bp, synthetic construct
  source 1..75: mol_type = other DNA
gcctcggcgtggctaaacaaactgttaaccgttggatcagagaaaaaggctggaaaacggaaaaatttcccggcg

SEQ ID NO: 863536 - DNA, 75 bp, synthetic construct
  source 1..75: mol_type = other DNA
gcggagctggagccgtacatcaatgtggtaaaacacttcaaccgtagcggtcagttgcgttactaccccggttca

SEQ ID NO: 863537 - DNA, 75 bp, synthetic construct
  source 1..75: mol_type = other DNA
ccgccaaagattatcactgcccgaatggcaggcaatatttgaaagcgtaagcagacggcagccctatttaaaatg

SEQ ID NO: 863538 - DNA, 75 bp, synthetic construct
  source 1..75: mol_type = other DNA
tggtaaacgacccgaactcaaccggctcgggggcgaaaacaacgcctctaacaaccttaccaggcaacaagatca

SEQ ID NO: 863539 - DNA, 75 bp, synthetic construct
  source 1..75: mol_type = other DNA
acgaccctaccaggtaacaagatcaccttgtcagacctgatttcaggcggttcttgtcaacgacggatgaaaagt

SEQ ID NO: 863540 - DNA, 75 bp, synthetic construct
  source 1..75: mol_type = other DNA
tctccatgtcattcaggaaaaaaccgggagcaaaatcgcaatccctctttctctgcgccttaatgctataggttg

SEQ ID NO: 863541 - DNA, 75 bp, synthetic construct
  source 1..75: mol_type = other DNA
gggcgtggaaacccgaaattcaatatagagcacaaccgcgctcatgcggttttttcgtgtcatgagcatcgttac

SEQ ID NO: 863542 - DNA, 75 bp, synthetic construct
  source 1..75: mol_type = other DNA
ttaaaaataaaatggaatttgacgctaagaaatctcagtttgacaatctactaactatacatcatacacatcagg

SEQ ID NO: 863543 - DNA, 75 bp, synthetic construct
  source 1..75: mol_type = other DNA
caaaaaaacacaactacaaaatttattgattgcgcaccacactcatcaagaatgttggatattaaatgcaagacc

SEQ ID NO: 863544 - DNA, 75 bp, synthetic construct
  source 1..75: mol_type = other DNA
aaatattactctgagtgatgttatttcaaaatgtagagatgctgtggtgagtaaatatcttgttcattttcgcca

SEQ ID NO: 863545 - DNA, 75 bp, synthetic construct
  source 1..75: mol_type = other DNA
gctttatagtaggaaggtaaataaagtctattggcggtataagcatccagtaacagggaaatttcatgcgttggg

SEQ ID NO: 863546 - DNA, 75 bp, synthetic construct
  source 1..75: mol_type = other DNA
catacttagtacattttttccgtactacttcacaggccgaacgtggcgcgcaggttaaatccaatacattgacga

SEQ ID NO: 863547 - DNA, 75 bp, synthetic construct
  source 1..75: mol_type = other DNA
atgaaggtcggcttctttttactgaaatttccgctgtcgtcggaaaccttcgttcttaaccaaatcactgcgttt

SEQ ID NO: 863548 - DNA, 75 bp, synthetic construct
  source 1..75: mol_type = other DNA
gggcaacgcctcggggatatttgcaatatgaagttttcggatgtatgggatgatatgctgcatattgagcaggag

SEQ ID NO: 863549 - DNA, 75 bp, synthetic construct
  source 1..75: mol_type = other DNA
agatgctgttaaggcagagggtcataacaggatggctcaagttgtacgcatggtactaatagatgtttttaaaga

SEQ ID NO: 863550 - DNA, 75 bp, synthetic construct
  source 1..75: mol_type = other DNA
tgaattcaacataggggctgtcaccatgactactctcccaaccctctctcaacctgaaatcacgattatcaatgg

SEQ ID NO: 863551 - DNA, 75 bp, synthetic construct
  source 1..75: mol_type = other DNA
ggtatcaacaaaaaataaagcaactaattgaaagggaaccaataaatgacacaacaaaaagattaatattacgaa

SEQ ID NO: 863552 - DNA, 75 bp, synthetic construct
  source 1..75: mol_type = other DNA
tgctgataatcatcgtgatgcagaaaaatattgcgagaagtataaatccaaagctagaaaatgtggtgagtttta

SEQ ID NO: 863553 - DNA, 75 bp, synthetic construct
  source 1..75: mol_type = other DNA
cttacctacagggacccgggaaaattcatttttgctgtcgttctactgaaaccctgatcctcaagtcgtggcgcg

SEQ ID NO: 863554 - DNA, 75 bp, synthetic construct
  source 1..75: mol_type = other DNA
atgacgaaacatgccaggtttttcctcctgccctcctttatcctgttctccgctgctttaatcgcaggctgtaac

SEQ ID NO: 863555 - DNA, 75 bp, synthetic construct
  source 1..75: mol_type = other DNA
caggccgatgccgccgtgattgccgcaaaagccacggtcgaaagcgctcgcatcaatctcgcttataccaaagtg

SEQ ID NO: 863556 - DNA, 75 bp, synthetic construct
  source 1..75: mol_type = other DNA
cgggctgtttttcctaaccctcagcacacgctattgcctggcatgtttgtacgcgcgcgaattgacgaaggtgtg

SEQ ID NO: 863557 - DNA, 75 bp, synthetic construct
  source 1..75: mol_type = other DNA
gcacgcttaaccgagaaaaaaggcctgcatgtggcgatcgaagcctgccgtcagttgaaagagcagggcgtggca

SEQ ID NO: 863558 - DNA, 75 bp, synthetic construct
  source 1..75: mol_type = other DNA
ctttatcccatgttggcaaaagccgaatccccgctggctgtaagtctgtatgaccgcatcaacgacgcggcgcta

SEQ ID NO: 863559 - DNA, 75 bp, synthetic construct
  source 1..75: mol_type = other DNA
attgcatacggaggctgccatcatggctacagtcccaacttccccatacctgaaaatcgaagtcgtcaacggcaa

SEQ ID NO: 863560 - DNA, 75 bp, synthetic construct
  source 1..75: mol_type = other DNA
tgcatagcggaataccggaactggtggaggccgataaatccggctggctggtgcctgagaacgatgctcgcgcac

SEQ ID NO: 863561 - DNA, 75 bp, synthetic construct
  source 1..75: mol_type = other DNA
atatcagcaactgtttcgccgtggcgatctgatgttaccgataagcgatttgtgggccggaaggctgcaaaaaat

SEQ ID NO: 863562 - DNA, 75 bp, synthetic construct
  source 1..75: mol_type = other DNA
atgaaggtcggcttcttcttattgaaatttccgctgtcgtcggaaaccttcgttcttaaccaaatcactgcgttt

SEQ ID NO: 863563 - DNA, 75 bp, synthetic construct
  source 1..75: mol_type = other DNA
atcacacatccgcactttggcgataaaccggtaacggtgttcgctcttatggtaaatagcagcactgaatgtcaa

SEQ ID NO: 863564 - DNA, 75 bp, synthetic construct
  source 1..75: mol_type = other DNA
atcacacatccgcactttggcgataaaccggtaatggtgttcgctcttaaggtaaataacagcactgaatgtcaa

SEQ ID NO: 863565 - DNA, 75 bp, synthetic construct
  source 1..75: mol_type = other DNA
atcacacatccgcactttggcgataaaccggtaaaggtgttcgctcttaaggtaaatatcagcactgaatgtcaa

SEQ ID NO: 863566 - DNA, 75 bp, synthetic construct
  source 1..75: mol_type = other DNA
aatgctgcttcaactcgatattggttgggatgtttactgccgtgctaatgagcgagaagtttcagaactgccgat

SEQ ID NO: 863567 - DNA, 75 bp, synthetic construct
  source 1..75: mol_type = other DNA
gtggctaacctgcaacttgccgtcaaaggtgaatatttcgaccagatgaagtcaggcgagaaaacggaagagtat

SEQ ID NO: 863568 - DNA, 75 bp, synthetic construct
  source 1..75: mol_type = other DNA
atcacacatccgcactttggcgataaaccggtaagggtgttcgctcttatggtaaataccagcactgaatgtcaa

SEQ ID NO: 863569 - DNA, 75 bp, synthetic construct
  source 1..75: mol_type = other DNA
gtctgcagttacagccggtggccagtggtgcgccctttaccctgatgcagcagcgcagcgccatcgatgtggcgg

SEQ ID NO: 863570 - DNA, 75 bp, synthetic construct
  source 1..75: mol_type = other DNA
gttgttctggctgctgtctctgcccgtgacacgcaggcacagacgctgaacacactggccaccagtggtgaccgg

SEQ ID NO: 863571 - DNA, 75 bp, synthetic construct
  source 1..75: mol_type = other DNA
ggtacggtcaggaaagacggatttattgaagctgtttatgcgaaccagttagctctggggcagatacaactgaat

SEQ ID NO: 863572 - DNA, 75 bp, synthetic construct
  source 1..75: mol_type = other DNA
gaatagacgtcccgtataacggatatgaagtgaaaacaatcacacatccgcacttcggcgataagccggtaaagg

SEQ ID NO: 863573 - DNA, 75 bp, synthetic construct
  source 1..75: mol_type = other DNA
agaagccggagggtattctcagcgggagaaattgtcttcatccacttctgaccagcgtgaaggcgcgaccgtacc

SEQ ID NO: 863574 - DNA, 75 bp, synthetic construct
  source 1..75: mol_type = other DNA
ttgatgcgctttatgataacaaaattgcgctggggcagatttatcgtcatgcgctccgccgtcaggttgaggcga

SEQ ID NO: 863575 - DNA, 75 bp, synthetic construct
  source 1..75: mol_type = other DNA
ataacatcggcacgaaacagtgctaacacggcaaaacagcttgcagaagaattgaccggattaattttggataca

SEQ ID NO: 863576 - DNA, 75 bp, synthetic construct
  source 1..75: mol_type = other DNA
gcgcgttgagcggttgaacgatatcagcgaatgcgatgcaagggatgagggcgttccgcctgctggaagtttgct

SEQ ID NO: 863577 - DNA, 75 bp, synthetic construct
  source 1..75: mol_type = other DNA
gcatgatttttaacgatgagatggtccgggccatcctcgaaggaaggaaaacgcagacgcggcggataatgaaaa

SEQ ID NO: 863578 - DNA, 75 bp, synthetic construct
  source 1..75: mol_type = other DNA
ttgcccctttggtatcgtcggcgatcgaatttgggttcgtgaaacatgggcgatattaggcaatgaggatggttg

SEQ ID NO: 863579 - DNA, 75 bp, synthetic construct
  source 1..75: mol_type = other DNA
cgtgggggaatgtcgctgaatacgcccacatgctaaaaccgccgaaagacaggcaagaaattagctggctgacag

SEQ ID NO: 863580 - DNA, 75 bp, synthetic construct
  source 1..75: mol_type = other DNA
caatttccgggaatgaagaagatgccttactggtgaataaagccctggagctcgccagacataatgacgctcacc

SEQ ID NO: 863581 - DNA, 75 bp, synthetic construct
  source 1..75: mol_type = other DNA
ttatggcgaagaaagttggaacgctaatccctgggtttgggtaatcgagtttgagcgtattcagggggcaaccag

SEQ ID NO: 863582 - DNA, 75 bp, synthetic construct
  source 1..75: mol_type = other DNA
tgaaatcaagacaatcacacatccccacttcggcgataaaccggtaaaggtgtacgcgataaaggtgaatattga

SEQ ID NO: 863583 - DNA, 75 bp, synthetic construct
  source 1..75: mol_type = other DNA
cgcctgtgtaatgactactggaataagcgaattatgttcagggattatgaccgactgattatcacaaagggatat

SEQ ID NO: 863584 - DNA, 75 bp, synthetic construct
  source 1..75: mol_type = other DNA
ccgaagcgcgaagacttcagtcgcagaattgacgtcccgtataacggatatgaaataaaaacaatcacacatccg

SEQ ID NO: 863585 - DNA, 75 bp, synthetic construct
  source 1..75: mol_type = other DNA
gtggctaacctgcaacttgccgtcaaaggtgaatacttcaacgccatgattcgcggggagaaaacggaagagtat

SEQ ID NO: 863586 - DNA, 75 bp, synthetic construct
  source 1..75: mol_type = other DNA
ccggtatcgccgcgtcactggtgtggagtagcgttcattattggcggcattgtgatcctcgggagtacggtgtaa

SEQ ID NO: 863587 - DNA, 75 bp, synthetic construct
  source 1..75: mol_type = other DNA
tgtggcacgagccggtatcgctgcgtcactggtgtggggtggcgttcattattggcggcattgtgatcctcggga

SEQ ID NO: 863588 - DNA, 75 bp, synthetic construct
  source 1..75: mol_type = other DNA
tgcgctgtatggtgagaatcgtttactggaggcctggaacagggcagtaagtgaaacgctaaaagaagttgaatc

SEQ ID NO: 863589 - DNA, 75 bp, synthetic construct
  source 1..75: mol_type = other DNA
cacgcatgggcaatctatgccattgtggcactgatcctggcctttttcagttaccgtcacggtctgcctttaacg

SEQ ID NO: 863590 - DNA, 75 bp, synthetic construct
  source 1..75: mol_type = other DNA
atccagcctgccatgacgctggttcaggaggaactgaacaagcaggggacgataagccacattagtgatgcagtc

SEQ ID NO: 863591 - DNA, 75 bp, synthetic construct
  source 1..75: mol_type = other DNA
gacaaaccgggtcttggcatcgaattcgatgaaaagctggcggcgaaatatccctatgaacctgcttatctgcca

SEQ ID NO: 863592 - DNA, 75 bp, synthetic construct
  source 1..75: mol_type = other DNA
gacactcttatagaccttattgcttataacgcgcttaaggccgaacagatattagcgtatcgggaggaagagcta

SEQ ID NO: 863593 - DNA, 75 bp, synthetic construct
  source 1..75: mol_type = other DNA
aggacatgcggttgatattttcgctgttataggcacggtctttggcgttgcgacatcactgggttacggtgtttt

SEQ ID NO: 863594 - DNA, 75 bp, synthetic construct
  source 1..75: mol_type = other DNA
cacgcatgggcaatttatgccattgtggcgctgattctggcgttcttcagttaccgtcacggtctgcctttaact

SEQ ID NO: 863595 - DNA, 75 bp, synthetic construct
  source 1..75: mol_type = other DNA
cgaagaaaactttatcttgcgcgtgacgtggccgttatcaatgcagattcatcgatgcttgccgagattataaaa

SEQ ID NO: 863596 - DNA, 75 bp, synthetic construct
  source 1..75: mol_type = other DNA
cggaaaagagtatttcgtatgaccagacttccggtaaagctcaggtagcagcagccacagagaagcagggccgga

SEQ ID NO: 863597 - DNA, 75 bp, synthetic construct
  source 1..75: mol_type = other DNA
tgtatccgggtactgatacccttatcaacaacgctgggatcagggataaaaaacagcttgaagagtttgagcgcg

SEQ ID NO: 863598 - DNA, 75 bp, synthetic construct
  source 1..75: mol_type = other DNA
gccgattttgcttcgttgtatcaggtacgtactggctcacacggtccttccgatttgtcaccagtctgcatggct

SEQ ID NO: 863599 - DNA, 75 bp, synthetic construct
  source 1..75: mol_type = other DNA
tgcaccgagaattatacggggtggaggcgatttatttttagcatctgtagatgataaaataaaaagtataaatgt

SEQ ID NO: 863600 - DNA, 75 bp, synthetic construct
  source 1..75: mol_type = other DNA
ggcgaagggcaaaggactggcgtatgaaccagcaaccaaaggcctgtggccagaagagcagttgtggtcttcaga

SEQ ID NO: 863601 - DNA, 75 bp, synthetic construct
  source 1..75: mol_type = other DNA
tttaagcaatggtagcgacccgctcgacactcttatagaccttattgcttataacgcgctaaaagcggagcaaat

SEQ ID NO: 863602 - DNA, 75 bp, synthetic construct
  source 1..75: mol_type = other DNA
cgttttgtggccattcagggctatgccggtgtggggaaaaccacacagtttcgcagtgtcctggctgcgctggaa

SEQ ID NO: 863603 - DNA, 75 bp, synthetic construct
  source 1..75: mol_type = other DNA
ggtgttccggtcgatattttctcaacccgcagtcagcaaatccgggaagcggtcggggatgatgcatcggctaaa

SEQ ID NO: 863604 - DNA, 75 bp, synthetic construct
  source 1..75: mol_type = other DNA
gaattgatgtcccgtatgacggatatgaaatcaagacaatcacacatccccacttcggcgataaaccggtaaagg

SEQ ID NO: 863605 - DNA, 75 bp, synthetic construct
  source 1..75: mol_type = other DNA
cacgctgcttgaccaggcgttgcgtaacaatgtgcaggtggtgctgatggatggtggtggtcgtaagggcaccgg

SEQ ID NO: 863606 - DNA, 75 bp, synthetic construct
  source 1..75: mol_type = other DNA
tgttacttaacatgaccgaaaaggaggggcgctggtcgacgttatccagcgacaggcgtgggcgtaccggaacca

SEQ ID NO: 863607 - DNA, 75 bp, synthetic construct
  source 1..75: mol_type = other DNA
aacgccggacgtctgagcgttacaccattgaccgggtgacggcccgcagtcgcacactgacgctgacggatgaga

SEQ ID NO: 863608 - DNA, 75 bp, synthetic construct
  source 1..75: mol_type = other DNA
aatgcggttgtatttcaactcggcttgatttgagttttgacagatctgaagctattcgcgataagaggtatgacc

SEQ ID NO: 863609 - DNA, 75 bp, synthetic construct
  source 1..75: mol_type = other DNA
gacttgcagcggaaacaatagagcaaagaggtaaacaaaacggttacgacagaaaagaagaaaaatcagcgccaa

SEQ ID NO: 863610 - DNA, 75 bp, synthetic construct
  source 1..75: mol_type = other DNA
gcaggtgaatgccggtttgaaccacctattcggggtgcccattaatgaaacggtgcaggtcattctgatcgtggc

SEQ ID NO: 863611 - DNA, 75 bp, synthetic construct
  source 1..75: mol_type = other DNA
gtcgcacgactggaagatggcacattgtggaactggtaataacggttcgcttaattattttctgaatagtcatca

SEQ ID NO: 863612 - DNA, 75 bp, synthetic construct
  source 1..75: mol_type = other DNA
gatggtttattgccataccaccggtcacagtattgatgaagctctggatgattatgcccgtcatcaggagctggg

SEQ ID NO: 863613 - DNA, 75 bp, synthetic construct
  source 1..75: mol_type = other DNA
attaacggaacgtgaggaagaacaaagaaagaaacaggctgtttttgatctccctatcagcggagggataaaact

SEQ ID NO: 863614 - DNA, 75 bp, synthetic construct
  source 1..75: mol_type = other DNA
ggcggtaacggaggtggtggcggcgctaaaacgccaggcaccggcgctaatgctattcagcatcaggctcagaac

SEQ ID NO: 863615 - DNA, 75 bp, synthetic construct
  source 1..75: mol_type = other DNA
gatgcgttacagagttttaactccctggctgacagcagtctggcaaaagccaaatcggatgcacaggcggcgttt

SEQ ID NO: 863616 - DNA, 75 bp, synthetic construct
  source 1..75: mol_type = other DNA
tcgttttaatgcggtaatggatgcaaatcaaagcgaccaggtgaccgggcagattgacacaaccacacgggggca

SEQ ID NO: 863617 - DNA, 75 bp, synthetic construct
  source 1..75: mol_type = other DNA
tcggttccggtcagaaggcggatgcgttacagagttttaactctctggcagacagcagtctggcaaaagccaaat

SEQ ID NO: 863618 - DNA, 75 bp, synthetic construct
  source 1..75: mol_type = other DNA
gtgagcagcagtacgacaatattgctggcacgacaaatctggggtatcaaaaacagtttggcgaagcgcggaagg

SEQ ID NO: 863619 - DNA, 75 bp, synthetic construct
  source 1..75: mol_type = other DNA
tcggttcaggtcagaaggcggatgcgttacagagttttaactcgctggcagacagcagtctggcaaaagctaaat

SEQ ID NO: 863620 - DNA, 75 bp, synthetic construct
  source 1..75: mol_type = other DNA
acgcattccgtgagcgttaccccgagtttgacacggtaagtgacacgctgctgaatgcgtatttcgttgaggcaa

SEQ ID NO: 863621 - DNA, 75 bp, synthetic construct
  source 1..75: mol_type = other DNA
cgacggagaaatacctcgatttcatgccgaaattgtttgacgcggtacgtaacaagtttggttttaatgaacatt

SEQ ID NO: 863622 - DNA, 75 bp, synthetic construct
  source 1..75: mol_type = other DNA
gagcgggaacagcttctgttcctgctggttgcgcatctgtgcgcattgcgggggctgggaaacgggagagacggg

SEQ ID NO: 863623 - DNA, 75 bp, synthetic construct
  source 1..75: mol_type = other DNA
tcggttctggtcagaaggcggatgcgttacagagttttaactctctggcagacagcagtctggcaaaagctaaat

SEQ ID NO: 863624 - DNA, 75 bp, synthetic construct
  source 1..75: mol_type = other DNA
catacaacggcgctcaccgttctgaaacggtgcccaataaaactcagaataatgtaccagttgacgatattgtcg

SEQ ID NO: 863625 - DNA, 75 bp, synthetic construct
  source 1..75: mol_type = other DNA
ggcactgttctgtattcactttgccggaacatcctgctggggcttgatccacgtcgcagttgcttctcgcatgac

SEQ ID NO: 863626 - DNA, 75 bp, synthetic construct
  source 1..75: mol_type = other DNA
gccgggctacaggatgttgcggctctcggttccggtcagaaggcagatgcgttacagagttttaactccctggct

SEQ ID NO: 863627 - DNA, 75 bp, synthetic construct
  source 1..75: mol_type = other DNA
ggcataaatcactgtttatgggatatgccaccccgaaagcattttatgacgctctgaaacaggccggtggcacac

SEQ ID NO: 863628 - DNA, 75 bp, synthetic construct
  source 1..75: mol_type = other DNA
ggaaaaaaggactggctgcactctgcttactggctgttgccgggcttagcggctgcgatcaaaaagagaatgcgg

SEQ ID NO: 863629 - DNA, 75 bp, synthetic construct
  source 1..75: mol_type = other DNA
gctgtcttttccctgcgcgggcagacaggcatttatcctcccgccggccctgtgtcatcaggcacgcagacgaat

SEQ ID NO: 863630 - DNA, 75 bp, synthetic construct
  source 1..75: mol_type = other DNA
tgccacaccaaaagcattttatgaagccctgaaacaggcaggcgctacgccgggcgaaaacatgacaatggataa

SEQ ID NO: 863631 - DNA, 75 bp, synthetic construct
  source 1..75: mol_type = other DNA
gtgcaattcaaaggtaatgcgtcggttctcccggcagataacacgctggcaacggttacctttaaaatcgccgaa

SEQ ID NO: 863632 - DNA, 75 bp, synthetic construct
  source 1..75: mol_type = other DNA
taaagaaacgacccatgtggcgggcagcaaactggatatttcggtcaactggcaaggggcggcaaaagcgtattc

SEQ ID NO: 863633 - DNA, 75 bp, synthetic construct
  source 1..75: mol_type = other DNA
tttcaaagttcaatatattaagcgcaatggtgacaatacttctgattgctttattactctggcagggggtacaca

SEQ ID NO: 863634 - DNA, 75 bp, synthetic construct
  source 1..75: mol_type = other DNA
tagcggaggcggtgctaaaacacctggcaccggcgctaatgccattcagcatcaggctcagaactggagactgtg

SEQ ID NO: 863635 - DNA, 75 bp, synthetic construct
  source 1..75: mol_type = other DNA
gccgggctacaggatgttgctgctctcggttctggtcagaaggcggatgcgttacagagttttaactctctggca

SEQ ID NO: 863636 - DNA, 75 bp, synthetic construct
  source 1..75: mol_type = other DNA
cggagacggttgtggctgtctttgcccccggcgacaggggcttaaacgggtgtatggcaccggacacaacaacgg

SEQ ID NO: 863637 - DNA, 75 bp, synthetic construct
  source 1..75: mol_type = other DNA
cccatcagaacgtccgcgcaatgaaaggggcggcgcgtcagcgcggcccctttcagcgccaccggcgcgcggtct

SEQ ID NO: 863638 - DNA, 75 bp, synthetic construct
  source 1..75: mol_type = other DNA
atccctcgtccacaacccatgcccgacccgtcgccggatgaagagccgattaaattgtcgcatcgtgagcggaga

SEQ ID NO: 863639 - DNA, 75 bp, synthetic construct
  source 1..75: mol_type = other DNA
cgcattacatctataacgagatgaaagagctacagcgacagaaaaccatactggaaagtggtgctgggcttggtg

SEQ ID NO: 863640 - DNA, 75 bp, synthetic construct
  source 1..75: mol_type = other DNA
aggtgactgacgtgaatgacaaattactgccatgtttgcttgcgataatacttacaggatgtgaccgcccggagg

SEQ ID NO: 863641 - DNA, 75 bp, synthetic construct
  source 1..75: mol_type = other DNA
aagatttcactcagacgttaatgaatgagcaaggggaagtcacgaaacgtgtttcgggaaatttatcggaagagg

SEQ ID NO: 863642 - DNA, 75 bp, synthetic construct
  source 1..75: mol_type = other DNA
ggccagtttctctaatgaatttgattttgatccgctgcgtggaccggttaaagatttcactcagacgttaatgaa

SEQ ID NO: 863643 - DNA, 75 bp, synthetic construct
  source 1..75: mol_type = other DNA
gatgtatgggatctgttgatttgtctcaaggaggcgcgtttagaggccattttggtcaatgggagcgacccaaca

SEQ ID NO: 863644 - DNA, 75 bp, synthetic construct
  source 1..75: mol_type = other DNA
ctgatcatatacgctatcttagaccggagctatactcatgtaggactccaaaagaatttaatgcaaaacatttag

SEQ ID NO: 863645 - DNA, 75 bp, synthetic construct
  source 1..75: mol_type = other DNA
atgattgagaatcatctctactctctggtgactgatgtgaaatacaaattactgccatgcttactcgcgatattc

SEQ ID NO: 863646 - DNA, 75 bp, synthetic construct
  source 1..75: mol_type = other DNA
aattaccagagtggagagagctggtaagcaaatatagccatgactgggcattagcagcagaagagttgatgggtg

SEQ ID NO: 863647 - DNA, 75 bp, synthetic construct
  source 1..75: mol_type = other DNA
cgtgggagcatgtcgctgaatatgctcacatgctaaaaccgccgaaagacaggcacgaaattagctggctgacag

SEQ ID NO: 863648 - DNA, 75 bp, synthetic construct
  source 1..75: mol_type = other DNA
tatgtgtggcaatgttgggaggcattactgaaaaaacaaccttttatcattgagtattttaaggtcggtgatagc

SEQ ID NO: 863649 - DNA, 75 bp, synthetic construct
  source 1..75: mol_type = other DNA
atatgtttggttttataattatcgcatgcatgttgatactaagtaacggaatatattggagggatattatcagat

SEQ ID NO: 863650 - DNA, 75 bp, synthetic construct
  source 1..75: mol_type = other DNA
atgtttggttttataattatctcatgcatgttgatactaagtaacgaaatatactggagggatatcatcagatac

SEQ ID NO: 863651 - DNA, 75 bp, synthetic construct
  source 1..75: mol_type = other DNA
tcacgacgaactgccgggaacgaccttctccaaccctgaccagcgcggcgactacgattccgaaaacaaggccgc
